United States Patent Application Publication US 2019/0016770 A1 - sequence listing, part 5

SEQ ID NO: 51378 - protein, 43 aa, Artificial Sequence
  GFR-binding peptide
  MOD_RES (4)..(41)..(43): Xaa is C or S
  MOD_RES (20)..(21)..(22)..(23)..(24): Xaa is A or G
  MOD_RES (25)..(26)..(27)..(28): Xaa is A or G or is absent
SVKXQPSRVHHEPLPVVYYXXXXXXXXXEQLSNRLEEHLEXAX

SEQ ID NO: 51379 - protein, 32 aa, Artificial Sequence; identical to SEQ ID NO: 18713
  GFR-binding peptide

SEQ ID NO: 51380 - protein, 42 aa, Artificial Sequence; identical to SEQ ID NO: 13589
  GFR-binding peptide
  MOD_RES (6)..(7)..(40)..(42): Xaa is C or S
  MOD_RES (21)..(22)..(23)..(24)..(25): Xaa is A or G
  MOD_RES (26)..(27)..(28)..(29): Xaa is A or G or is absent

SEQ ID NO: 51381 - protein, 42 aa, Artificial Sequence; identical to SEQ ID NO: 18714
  GFR-binding peptide
  MOD_RES (5)..(42): Xaa is C or S

SEQ ID NO: 51382 - protein, 35 aa, Artificial Sequence; identical to SEQ ID NO: 18716
  GFR-binding peptide
  MOD_RES (1)..(1): Xaa is C or S
  MOD_RES (17)..(18)..(19)..(20)..(21): Xaa is A or G
  MOD_RES (22)..(23)..(24)..(25): Xaa is A or G or is absent

SEQ ID NO: 51383 - protein, 35 aa, Artificial Sequence; identical to SEQ ID NO: 13591
  GFR-binding peptide
  MOD_RES (1)..(2)..(34): Xaa is C or S

SEQ ID NO: 51384 - protein, 35 aa, Artificial Sequence
  GFR-binding peptide
  MOD_RES (16)..(17)..(18)..(19)..(20): Xaa is A or G
  MOD_RES (21)..(22)..(23)..(24): Xaa is A or G or is absent
RPTQVQLEPLTVLYYXXXXXXXXXEQLSNTLEDHL

SEQ ID NO: 51385 - protein, 42 aa, Artificial Sequence
  GFR-binding peptide
  MOD_RES (3)..(40)..(42): Xaa is C or S
  MOD_RES (19)..(20)..(21)..(22)..(23): Xaa is A or G
  MOD_RES (24)..(25)..(26)..(27): Xaa is A or G or is absent
VQXRPTQVQLEPLTVLYYXXXXXXXXXEQLSNTLEDHLAXKX

SEQ ID NO: 51386 - protein, 34 aa, Artificial Sequence
  GFR-binding peptide
  MOD_RES (1)..(2): Xaa is C or S
  MOD_RES (16)..(17)..(18)..(19)..(20): Xaa is A or G
  MOD_RES (21)..(22)..(23)..(24): Xaa is A or G or is absent
XXAPTKLRSVKVAKVXXXXXXXXXKEVQVNMVVR

SEQ ID NO: 51387 - protein, 35 aa, Artificial Sequence
  GFR-binding peptide
  MOD_RES (32)..(34): Xaa is C or S
VPTELRSVKMAKVDENEKVVKEVQVDMVVEGXGXR

SEQ ID NO: 51388 - protein, 33 aa, Artificial Sequence; identical to SEQ ID NO: 13594
  GFR-binding peptide
  MOD_RES (14)..(15)..(16)..(17)..(18): Xaa is A or G
  MOD_RES (19)..(20)..(21)..(22): Xaa is A or G or is absent

SEQ ID NO: 51389 - protein, 30 aa, Artificial Sequence
  GFR-binding peptide
VPQDLRPVQIRKIVGRTPKVKKATVMVVKS

SEQ ID NO: 51390 - protein, 38 aa, Artificial Sequence
  GFR-binding peptide
  MOD_RES (5)..(5): Xaa is C or S
  MOD_RES (19)..(20)..(21)..(22)..(23): Xaa is A or G
  MOD_RES (24)..(25)..(26)..(27): Xaa is A or G or is absent
EGLEXVPTEEEPLPMVYYXXXXXXXXXEQLSNFLQHNK

SEQ ID NO: 51391 - protein, 39 aa, Artificial Sequence; identical to SEQ ID NO: 13598
  GFR-binding peptide
  MOD_RES (3)..(37)..(39): Xaa is C or S
  MOD_RES (17)..(18)..(19)..(20)..(21): Xaa is A or G
  MOD_RES (22)..(23)..(24)..(25): Xaa is A or G or is absent

SEQ ID NO: 51392 - protein, 39 aa, Artificial Sequence
  GFR-binding peptide
  MOD_RES (7)..(7): Xaa is C or S
  MOD_RES (21)..(22)..(23)..(24)..(25): Xaa is A or G
  MOD_RES (26)..(27)..(28)..(29): Xaa is A or G or is absent
NDEGLEXVPTEEEPLPMVYYXXXXXXXXXEQLSNFLQHN

SEQ ID NO: 51393 - protein, 40 aa, Artificial Sequence
  GFR-binding peptide
  MOD_RES (6)..(38)..(40): Xaa is C or S
VTKPTXAPTKLRPVQVRKIDDSSNVIKKATVNMVVRSXGX

SEQ ID NO: 51394 - protein, 37 aa, Artificial Sequence; identical to SEQ ID NO: 13602
  GFR-binding peptide
  MOD_RES (5)..(6): Xaa is C or S

SEQ ID NO: 51395 - protein, 33 aa, Artificial Sequence
  GFR-binding peptide
  MOD_RES (1)..(2)..(33): Xaa is C or S
XXVSQDLRSVKIAKVIGKTPKIKEVQVMIVKSX

SEQ ID NO: 51396 - protein, 39 aa, Artificial Sequence; identical to SEQ ID NO: 18725
  GFR-binding peptide
  MOD_RES (2)..(39): Xaa is C or S

SEQ ID NO: 51397 - protein, 36 aa, Artificial Sequence; identical to SEQ ID NO: 13605
  GFR-binding peptide
  MOD_RES (3)..(4): Xaa is C or S
  MOD_RES (18)..(19)..(20)..(21)..(22): Xaa is A or G
  MOD_RES (23)..(24)..(25)..(26): Xaa is A or G or is absent

SEQ ID NO: 51398 - protein, 39 aa, Artificial Sequence
  GFR-binding peptide
  MOD_RES (6)..(7)..(38): Xaa is C or S
ASASPXXVSQDLRSVKIAKVIGKTPKIKEVQVMIVKSXK

SEQ ID NO: 51399 - protein, 38 aa, Artificial Sequence
  GFR-binding peptide
  MOD_RES (4)..(5): Xaa is C or S
  MOD_RES (19)..(20)..(21)..(22)..(23): Xaa is A or G
  MOD_RES (24)..(25)..(26)..(27): Xaa is A or G or is absent
PKPXXAPTKLSNITVQIMXXXXXXXXXIGEMSNMVVRS

SEQ ID NO: 51400 - protein, 41 aa, Artificial Sequence; identical to SEQ ID NO: 13607
  GFR-binding peptide
  MOD_RES (5)..(6)..(39)..(41): Xaa is C or S
  MOD_RES (20)..(21)..(22)..(23)..(24): Xaa is A or G
  MOD_RES (25)..(26)..(27)..(28): Xaa is A or G or is absent

SEQ ID NO: 51401 - protein, 40 aa, Artificial Sequence; identical to SEQ ID NO: 18728
  GFR-binding peptide
  MOD_RES (2)..(39): Xaa is C or S
  MOD_RES (18)..(19)..(20)..(21)..(22): Xaa is A or G
  MOD_RES (23)..(24)..(25)..(26): Xaa is A or G or is absent

SEQ ID NO: 51402 - protein, 39 aa, Artificial Sequence; identical to SEQ ID NO: 13609
  GFR-binding peptide
  MOD_RES (3)..(4)..(37)..(39): Xaa is C or S
  MOD_RES (18)..(19)..(20)..(21)..(22): Xaa is A or G
  MOD_RES (23)..(24)..(25)..(26): Xaa is A or G or is absent

SEQ ID NO: 51403 - protein, 37 aa, Artificial Sequence; identical to SEQ ID NO: 18730
  GFR-binding peptide
  MOD_RES (2)..(2): Xaa is C or S
  MOD_RES (18)..(19)..(20)..(21)..(22): Xaa is A or G
  MOD_RES (23)..(24)..(25)..(26): Xaa is A or G or is absent

SEQ ID NO: 51404 - protein, 39 aa, Artificial Sequence
  GFR-binding peptide
  MOD_RES (3)..(4)..(36)..(38): Xaa is C or S
KPXXAPTKLSNITVQIMDDSSNVIIGEMSNMVVRSXGXH

SEQ ID NO: 51405 - protein, 40 aa, Artificial Sequence
  GFR-binding peptide
  MOD_RES (5)..(6)..(40): Xaa is C or S
  MOD_RES (20)..(21)..(22)..(23)..(24): Xaa is A or G
  MOD_RES (25)..(26)..(27)..(28): Xaa is A or G or is absent
IPKAXXVPTELRSVKMAKVXXXXXXXXXKEVQVDMVVEGX

SEQ ID NO: 51406 - protein, 31 aa, Artificial Sequence
  GFR-binding peptide
  MOD_RES (1)..(1): Xaa is C or S
XAPTKLRSVKVAKVDDSSNVIKEVQVNMVVR

SEQ ID NO: 51407 - protein, 40 aa, Artificial Sequence
  GFR-binding peptide
  MOD_RES (3)..(4)..(38)..(40): Xaa is C or S
  MOD_RES (18)..(19)..(20)..(21)..(22): Xaa is A or G
  MOD_RES (23)..(24)..(25)..(26): Xaa is A or G or is absent
KAXXVPTELRSVKMAKVXXXXXXXXXKEVQVDMVVEGXGX

SEQ ID NO: 51408 - protein, 41 aa, Artificial Sequence
  GFR-binding peptide
  MOD_RES (5)..(6)..(40): Xaa is C or S
  MOD_RES (20)..(21)..(22)..(23)..(24): Xaa is A or G
  MOD_RES (25)..(26)..(27)..(28): Xaa is A or G or is absent
IPKAXXVPTELSNITMQIMXXXXXXXXXIGEMSDMVVEGXG

SEQ ID NO: 51409 - protein, 33 aa, Artificial Sequence
  GFR-binding peptide
  MOD_RES (1)..(33): Xaa is C or S
XAPTKLSNITVQIMDDSSNVIIGEMSNMVVRSX

SEQ ID NO: 51410 - protein, 36 aa, Artificial Sequence
  GFR-binding peptide
  MOD_RES (16)..(17)..(18)..(19)..(20): Xaa is A or G
  MOD_RES (21)..(22)..(23)..(24): Xaa is A or G or is absent
QPSRVHHEPLTVLYYXXXXXXXXXEQLSNRLEEHLE

SEQ ID NO: 51411 - protein, 37 aa, Artificial Sequence
  GFR-binding peptide
  MOD_RES (2)..(2): Xaa is C or S
  MOD_RES (18)..(19)..(20)..(21)..(22): Xaa is A or G
  MOD_RES (23)..(24)..(25)..(26): Xaa is A or G or is absent
QXRPTQVQLEPLTVLYYXXXXXXXXXEQLSNTLEDHL

SEQ ID NO: 51412 - protein, 37 aa, Artificial Sequence
  GFR-binding peptide
  MOD_RES (3)..(4): Xaa is C or S
  MOD_RES (18)..(19)..(20)..(21)..(22): Xaa is A or G
  MOD_RES (23)..(24)..(25)..(26): Xaa is A or G or is absent
KPXXAPTKLRPVQVRKIXXXXXXXXXKKATVNMVVRS

SEQ ID NO: 51413 - protein, 36 aa, Artificial Sequence
  GFR-binding peptide
  MOD_RES (2)..(3)..(35): Xaa is C or S
PXXAPTQLRPVQVRKIDDSSNVIKKATVNMVVRAXG

SEQ ID NO: 51414 - protein, 32 aa, Artificial Sequence
  GFR-binding peptide
  MOD_RES (32)..(32): Xaa is C or S
VPTELRSVKMAKVDENEKVVKEVQVDMVVEGX

SEQ ID NO: 51415 - protein, 36 aa, Artificial Sequence
  GFR-binding peptide
  MOD_RES (4)..(5): Xaa is C or S
PKAXXVPTELRSVKMAKVDEYDKVVKEVQVEMVVEG

SEQ ID NO: 51416 - protein, 35 aa, Artificial Sequence; identical to SEQ ID NO: 18739
  GFR-binding peptide
  MOD_RES (1)..(1): Xaa is C or S

SEQ ID NO: 51417 - protein, 40 aa, Artificial Sequence
  GFR-binding peptide
  MOD_RES (6)..(40): Xaa is C or S
  MOD_RES (20)..(21)..(22)..(23)..(24): Xaa is A or G
  MOD_RES (25)..(26)..(27)..(28): Xaa is A or G or is absent
VTKPTXAPTKLRSVKVAKVXXXXXXXXXKEVQVNMVVRSX

SEQ ID NO: 51418 - protein, 42 aa, Artificial Sequence
  GFR-binding peptide
  MOD_RES (6)..(40)..(42): Xaa is C or S
  MOD_RES (20)..(21)..(22)..(23)..(24): Xaa is A or G
  MOD_RES (25)..(26)..(27)..(28): Xaa is A or G or is absent
DEGLEXVPTEEEPLPMVYYXXXXXXXXXEQLSNFLQHNKXEX

SEQ ID NO: 51419 - protein, 42 aa, Artificial Sequence
  GFR-binding peptide
  MOD_RES (5)..(6)..(40)..(42): Xaa is C or S
  MOD_RES (20)..(21)..(22)..(23)..(24): Xaa is A or G
  MOD_RES (25)..(26)..(27)..(28): Xaa is A or G or is absent
VPKPXXAPTKLSNITVQIMXXXXXXXXXIGEMSNMVVRSXGX

SEQ ID NO: 51420 - protein, 33 aa, Artificial Sequence
  GFR-binding peptide
  MOD_RES (32)..(32): Xaa is C or S
VPTELSNITMQIMDEYDKVVIGEMSEMVVEGXG

SEQ ID NO: 51421 - protein, 38 aa, Artificial Sequence
  GFR-binding peptide
  MOD_RES (3)..(4)..(37): Xaa is C or S
  MOD_RES (18)..(19)..(20)..(21)..(22): Xaa is A or G
  MOD_RES (23)..(24)..(25)..(26): Xaa is A or G or is absent
SPXXVSQDLRPVQIRKIXXXXXXXXXKKATVMIVKSXK

SEQ ID NO: 51422 - protein, 43 aa, Artificial Sequence
  GFR-binding peptide
  MOD_RES (6)..(7)..(41)..(43): Xaa is C or S
  MOD_RES (21)..(22)..(23)..(24)..(25): Xaa is A or G
  MOD_RES (26)..(27)..(28)..(29): Xaa is A or G or is absent
KIPKAXXVPTELRSVKMAKVXXXXXXXXXKEVQVDMVVEGXGX

SEQ ID NO: 51423 - protein, 37 aa, Artificial Sequence
  GFR-binding peptide
  MOD_RES (2)..(3)..(37): Xaa is C or S
  MOD_RES (17)..(18)..(19)..(20)..(21): Xaa is A or G
  MOD_RES (22)..(23)..(24)..(25): Xaa is A or G or is absent
PXXAPTKLSNITVQIMXXXXXXXXXIGEMSNMVVRSX

SEQ ID NO: 51424 - protein, 33 aa, Artificial Sequence
  GFR-binding peptide
  MOD_RES (31)..(33): Xaa is C or S
VPQALRPVQIRKIVGRKPKVKKATVMIVRSXKX

SEQ ID NO: 51425 - protein, 36 aa, Artificial Sequence; identical to SEQ ID NO: 13614
  GFR-binding peptide
  MOD_RES (34)..(36): Xaa is C or S
  MOD_RES (14)..(15)..(16)..(17)..(18): Xaa is A or G
  MOD_RES (19)..(20)..(21)..(22): Xaa is A or G or is absent

SEQ ID NO: 51426 - protein, 41 aa, Artificial Sequence
  GFR-binding peptide
  MOD_RES (5)..(5): Xaa is C or S
SSVKXQPSRVHHEPLPVVYYEYVRKKPKLEQLSNRLEEHLE

SEQ ID NO: 51427 - protein, 40 aa, Artificial Sequence; identical to SEQ ID NO: 18744
  GFR-binding peptide
  MOD_RES (4)..(38)..(40): Xaa is C or S
  MOD_RES (18)..(19)..(20)..(21)..(22): Xaa is A or G
  MOD_RES (23)..(24)..(25)..(26): Xaa is A or G or is absent

SEQ ID NO: 51428 - protein, 43 aa, Artificial Sequence
  GFR-binding peptide
  MOD_RES (7)..(41)..(43): Xaa is C or S
  MOD_RES (21)..(22)..(23)..(24)..(25): Xaa is A or G
  MOD_RES (26)..(27)..(28)..(29): Xaa is A or G or is absent
HVTKPTXAPTKLRSVKVAKVXXXXXXXXXKEVQVNMVVRSXGX

SEQ ID NO: 51429 - protein, 38 aa, Artificial Sequence
  GFR-binding peptide
  MOD_RES (3)..(3): Xaa is C or S
  MOD_RES (19)..(20)..(21)..(22)..(23): Xaa is A or G
  MOD_RES (24)..(25)..(26)..(27): Xaa is A or G or is absent
VKXQPSRVHHEPLPVVYYXXXXXXXXXEQLSNRLEEHL

SEQ ID NO: 51430 - protein, 40 aa, Artificial Sequence
  GFR-binding peptide
  MOD_RES (4)..(38)..(40): Xaa is C or S
GLEXVPTEEEPLTMLYYRIKPHQGQHEQLSNFLQHNKXEX

SEQ ID NO: 51431 - protein, 38 aa, Artificial Sequence; identical to SEQ ID NO: 13615
  GFR-binding peptide
  MOD_RES (1)..(35)..(37): Xaa is C or S
  MOD_RES (15)..(16)..(17)..(18)..(19): Xaa is A or G
  MOD_RES (20)..(21)..(22)..(23): Xaa is A or G or is absent

SEQ ID NO: 51432 - protein, 34 aa, Artificial Sequence
  GFR-binding peptide
  MOD_RES (1)..(2): Xaa is C or S
  MOD_RES (16)..(17)..(18)..(19)..(20): Xaa is A or G
  MOD_RES (21)..(22)..(23)..(24): Xaa is A or G or is absent
XXVPTELSNITMQIMXXXXXXXXXIGEMSEMVVE

SEQ ID NO: 51433 - protein, 35 aa, Artificial Sequence; identical to SEQ ID NO: 13618
  GFR-binding peptide
  MOD_RES (32)..(34): Xaa is C or S

SEQ ID NO: 51434 - protein, 35 aa, Artificial Sequence
  GFR-binding peptide
  MOD_RES (1)..(2)..(33)..(35): Xaa is C or S
XXVPQALRSVKIAKVVGRKPKVKEVQVMIVRSXKX

SEQ ID NO: 51435 - protein, 38 aa, Artificial Sequence; identical to SEQ ID NO: 13621
  GFR-binding peptide
  MOD_RES (5)..(6): Xaa is C or S
  MOD_RES (20)..(21)..(22)..(23)..(24): Xaa is A or G
  MOD_RES (25)..(26)..(27)..(28): Xaa is A or G or is absent

SEQ ID NO: 51436 - protein, 38 aa, Artificial Sequence; identical to SEQ ID NO: 18751
  GFR-binding peptide
  MOD_RES (37)..(37): Xaa is C or S

SEQ ID NO: 51437 - protein, 38 aa, Artificial Sequence
  GFR-binding peptide
  MOD_RES (4)..(5)..(36)..(38): Xaa is C or S
ASPXXVSQDLSNITIQIMIGKTPKIIGEMSMIVKSXKX

SEQ ID NO: 51438 - protein, 31 aa, Artificial Sequence; identical to SEQ ID NO: 13622
  GFR-binding peptide

SEQ ID NO: 51439 - protein, 32 aa, Artificial Sequence; identical to SEQ ID NO: 13625
  GFR-binding peptide
  MOD_RES (32)..(32): Xaa is C or S

SEQ ID NO: 51440 - protein, 37 aa, Artificial Sequence; identical to SEQ ID NO: 18755
  GFR-binding peptide
  MOD_RES (3)..(3): Xaa is C or S

SEQ ID NO: 51441 - protein, 41 aa, Artificial Sequence; identical to SEQ ID NO: 13626
  GFR-binding peptide
  MOD_RES (3)..(4)..(38)..(40): Xaa is C or S
  MOD_RES (18)..(19)..(20)..(21)..(22): Xaa is A or G
  MOD_RES (23)..(24)..(25)..(26): Xaa is A or G or is absent

SEQ ID NO: 51442 - protein, 33 aa, Artificial Sequence; identical to SEQ ID NO: 38587
  GFR-binding peptide
  MOD_RES (33)..(33): Xaa is C or S
  MOD_RES (14)..(15)..(16)..(17)..(18): Xaa is A or G
  MOD_RES (19)..(20)..(21)..(22): Xaa is A or G or is absent

SEQ ID NO: 51443 - protein, 34 aa, Artificial Sequence
  GFR-binding peptide
  MOD_RES (33)..(33): Xaa is C or S
  MOD_RES (14)..(15)..(16)..(17)..(18): Xaa is A or G
  MOD_RES (19)..(20)..(21)..(22): Xaa is A or G or is absent
VPQALSNITIQIMXXXXXXXXXIGEMSMIVRSXK

SEQ ID NO: 51444 - protein, 37 aa, Artificial Sequence
  GFR-binding peptide
  MOD_RES (6)..(6): Xaa is C or S
VTKPTXAPTKLRPVQVRKIDDSSNVIKKATVNMVVRS

SEQ ID NO: 51445 - protein, 43 aa, Artificial Sequence; identical to SEQ ID NO: 18756
  GFR-binding peptide
  MOD_RES (5)..(42): Xaa is C or S
  MOD_RES (21)..(22)..(23)..(24)..(25): Xaa is A or G
  MOD_RES (26)..(27)..(28)..(29): Xaa is A or G or is absent

SEQ ID NO: 51446 - protein, 35 aa, Artificial Sequence; identical to SEQ ID NO: 13627
  GFR-binding peptide
  MOD_RES (4)..(5): Xaa is C or S

SEQ ID NO: 51447 - protein, 42 aa, Artificial Sequence; identical to SEQ ID NO: 18757
  GFR-binding peptide
  MOD_RES (6)..(40)..(42): Xaa is C or S

SEQ ID NO: 51448 - protein, 34 aa, Artificial Sequence
  GFR-binding peptide
  MOD_RES (2)..(3): Xaa is C or S
AXXVPTELRPVQMRKIDEYDKVVKKATVEMVVEG

SEQ ID NO: 51449 - protein, 42 aa, Artificial Sequence; identical to SEQ ID NO: 13629
  GFR-binding peptide
  MOD_RES (5)..(6)..(39)..(41): Xaa is C or S
  MOD_RES (20)..(21)..(22)..(23)..(24): Xaa is A or G
  MOD_RES (25)..(26)..(27)..(28): Xaa is A or G or is absent

SEQ ID NO: 51450 - protein, 35 aa, Artificial Sequence
  GFR-binding peptide
  MOD_RES (1)..(2): Xaa is C or S
  MOD_RES (16)..(17)..(18)..(19)..(20): Xaa is A or G
  MOD_RES (21)..(22)..(23)..(24): Xaa is A or G or is absent
XXAPTQLSNITVQIMXXXXXXXXXIGEMSNMVVRA

SEQ ID NO: 51451 - protein, 35 aa, Artificial Sequence; identical to SEQ ID NO: 18759
  GFR-binding peptide
  MOD_RES (15)..(16)..(17)..(18)..(19): Xaa is A or G
  MOD_RES (20)..(21)..(22)..(23): Xaa is A or G or is absent

SEQ ID NO: 51452 - protein, 35 aa, Artificial Sequence
  GFR-binding peptide
  MOD_RES (1)..(34): Xaa is C or S
  MOD_RES (15)..(16)..(17)..(18)..(19): Xaa is A or G
  MOD_RES (20)..(21)..(22)..(23): Xaa is A or G or is absent
XVPQALRSVKIAKVXXXXXXXXXKEVQVMIVRSXK

SEQ ID NO: 51453 - protein, 37 aa, Artificial Sequence
  GFR-binding peptide
  MOD_RES (2)..(36): Xaa is C or S
EXVPTEEEPLTMLYYRIKPHQGQHEQLSNFLQHNKXE

SEQ ID NO: 51454 - protein, 37 aa, Artificial Sequence; identical to SEQ ID NO: 13634
  GFR-binding peptide
  MOD_RES (1)..(2)..(36): Xaa is C or S
  MOD_RES (16)..(17)..(18)..(19)..(20): Xaa is A or G
  MOD_RES (21)..(22)..(23)..(24): Xaa is A or G or is absent

SEQ ID NO: 51455 - protein, 40 aa, Artificial Sequence
  GFR-binding peptide
  MOD_RES (2)..(3)..(37)..(39): Xaa is C or S
  MOD_RES (17)..(18)..(19)..(20)..(21): Xaa is A or G
  MOD_RES (22)..(23)..(24)..(25): Xaa is A or G or is absent
PXXAPTKLRPVQVRKIXXXXXXXXXKKATVNMVVRSXGXH

SEQ ID NO: 51456 - protein, 39 aa, Artificial Sequence; identical to SEQ ID NO: 13636
  GFR-binding peptide
  MOD_RES (2)..(36)..(38): Xaa is C or S
  MOD_RES (16)..(17)..(18)..(19)..(20): Xaa is A or G
  MOD_RES (21)..(22)..(23)..(24): Xaa is A or G or is absent

SEQ ID NO: 51457 - protein, 41 aa, Artificial Sequence
  GFR-binding peptide
  MOD_RES (3)..(40): Xaa is C or S
VQXRPTQVQLEPLTVLYYEIVRKKPIFEQLSNTLEDHLAXK

SEQ ID NO: 51458 - protein, 39 aa, Artificial Sequence
  GFR-binding peptide
  MOD_RES (4)..(5)..(37)..(39): Xaa is C or S
PKAXXVPTELRPVQMRKIDENEKVVKKATVDMVVEGXGX

SEQ ID NO: 51459 - protein, 37 aa, Artificial Sequence; identical to SEQ ID NO: 13639
  GFR-binding peptide
  MOD_RES (34)..(36): Xaa is C or S
  MOD_RES (14)..(15)..(16)..(17)..(18): Xaa is A or G
  MOD_RES (19)..(20)..(21)..(22): Xaa is A or G or is absent

SEQ ID NO: 51460 - protein, 35 aa, Artificial Sequence; identical to SEQ ID NO: 18767
  GFR-binding peptide
  MOD_RES (3)..(3): Xaa is C or S

SEQ ID NO: 51461 - protein, 40 aa, Artificial Sequence; identical to SEQ ID NO: 18768
  GFR-binding peptide
  MOD_RES (4)..(4): Xaa is C or S
  MOD_RES (20)..(21)..(22)..(23)..(24): Xaa is A or G
  MOD_RES (25)..(26)..(27)..(28): Xaa is A or G or is absent

SEQ ID NO: 51462 - protein, 38 aa, Artificial Sequence
  GFR-binding peptide
  MOD_RES (6)..(7)..(38): Xaa is C or S
ASASPXXVPQDLRPVQIRKIVGRTPKVKKATVMVVKSX

SEQ ID NO: 51463 - protein, 40 aa, Artificial Sequence
  GFR-binding peptide
  MOD_RES (2)..(3)..(37)..(39): Xaa is C or S
  MOD_RES (17)..(18)..(19)..(20)..(21): Xaa is A or G
  MOD_RES (22)..(23)..(24)..(25): Xaa is A or G or is absent
PXXAPTKLRSVKVAKVXXXXXXXXXKEVQVNMVVRSXGXH

SEQ ID NO: 51464 - protein, 40 aa, Artificial Sequence
  GFR-binding peptide
  MOD_RES (5)..(37)..(39): Xaa is C or S
TKPTXAPTKLRSVKVAKVDDSSNVIKEVQVNMVVRSXGXH

SEQ ID NO: 51465 - protein, 37 aa, Artificial Sequence
  GFR-binding peptide
  MOD_RES (4)..(5): Xaa is C or S
  MOD_RES (19)..(20)..(21)..(22)..(23): Xaa is A or G
  MOD_RES (24)..(25)..(26)..(27): Xaa is A or G or is absent
AAPXXVPQALSNITIQIMXXXXXXXXXIGEMSMIVRS

SEQ ID NO: 51466 - protein, 34 aa, Artificial Sequence
  GFR-binding peptide
  MOD_RES (4)..(4): Xaa is C or S
KPTXAPTKLSNITVQIMDDSSNVIIGEMSNMVVR

SEQ ID NO: 51467 - protein, 32 aa, Artificial Sequence; identical to SEQ ID NO: 13653
  GFR-binding peptide
  MOD_RES (1)..(1): Xaa is C or S

SEQ ID NO: 51468 - protein, 39 aa, Artificial Sequence; identical to SEQ ID NO: 13654
  GFR-binding peptide
  MOD_RES (4)..(5)..(37)..(39): Xaa is C or S

SEQ ID NO: 51469 - protein, 44 aa, Artificial Sequence
  GFR-binding peptide
  MOD_RES (5)..(42)..(44): Xaa is C or S
SSVKXQPSRVHHEPLTVLYYEYVRKKPKLEQLSNRLEEHLEXAX

SEQ ID NO: 51470 - protein, 40 aa, Artificial Sequence
  GFR-binding peptide
  MOD_RES (6)..(7)..(38)..(40): Xaa is C or S
ASASPXXVPQDLRPVQIRKIVGRTPKVKKATVMVVKSXKX

SEQ ID NO: 51471 - protein, 38 aa, Artificial Sequence
  GFR-binding peptide
  MOD_RES (4)..(4): Xaa is C or S
  MOD_RES (20)..(21)..(22)..(23)..(24): Xaa is A or G
  MOD_RES (25)..(26)..(27)..(28): Xaa is A or G or is absent
SVKXQPSRVHHEPLPVVYYXXXXXXXXXEQLSNRLEEH

SEQ ID NO: 51472 - protein, 38 aa, Artificial Sequence; identical to SEQ ID NO: 13657
  GFR-binding peptide
  MOD_RES (4)..(38): Xaa is C or S
  MOD_RES (18)..(19)..(20)..(21)..(22): Xaa is A or G
  MOD_RES (23)..(24)..(25)..(26): Xaa is A or G or is absent

SEQ ID NO: 51473 - protein, 36 aa, Artificial Sequence
  GFR-binding peptide
  MOD_RES (1)..(2)..(35): Xaa is C or S
  MOD_RES (16)..(17)..(18)..(19)..(20): Xaa is A or G
  MOD_RES (21)..(22)..(23)..(24): Xaa is A or G or is absent
XXVPQALRSVKIAKVXXXXXXXXXKEVQVMIVRSXK

SEQ ID NO: 51474 - protein, 39 aa, Artificial Sequence; identical to SEQ ID NO: 18783
  GFR-binding peptide
  MOD_RES (36)..(38): Xaa is C or S
  MOD_RES (15)..(16)..(17)..(18)..(19): Xaa is A or G
  MOD_RES (20)..(21)..(22)..(23): Xaa is A or G or is absent

SEQ ID NO: 51475 - protein, 40 aa, Artificial Sequence
  GFR-binding peptide
  MOD_RES (6)..(7)..(39): Xaa is C or S
KIPKAXXVPTELRSVKMAKVDENEKVVKEVQVDMVVEGXG

SEQ ID NO: 51476 - protein, 37 aa, Artificial Sequence
  GFR-binding peptide
  MOD_RES (1)..(35)..(37): Xaa is C or S
  MOD_RES (15)..(16)..(17)..(18)..(19): Xaa is A or G
  MOD_RES (20)..(21)..(22)..(23): Xaa is A or G or is absent
XAPTKLSNITVQIMXXXXXXXXXIGEMSNMVVRSXGX

SEQ ID NO: 51477 - protein, 39 aa, Artificial Sequence
  GFR-binding peptide
  MOD_RES (4)..(5)..(36)..(38): Xaa is C or S
ASPXXVPQDLRPVQIRKIVGRTPKVKKATVMVVKSXKXS

SEQ ID NO: 51478 - protein, 37 aa, Artificial Sequence
  GFR-binding peptide
  MOD_RES (2)..(34)..(36): Xaa is C or S
TXAPTKLRSVKVAKVDDSSNVIKEVQVNMVVRSXGXH

SEQ ID NO: 51479 - protein, 35 aa, Artificial Sequence
  GFR-binding peptide
  MOD_RES (4)..(5): Xaa is C or S
PKAXXVPTELSNITMQIMDENEKVVIGEMSDMVVE

SEQ ID NO: 51480 - protein, 34 aa, Artificial Sequence
  GFR-binding peptide
  MOD_RES (1)..(2): Xaa is C or S
  MOD_RES (16)..(17)..(18)..(19)..(20): Xaa is A or G
  MOD_RES (21)..(22)..(23)..(24): Xaa is A or G or is absent
XXVPQALSNITIQIMXXXXXXXXXIGEMSMIVRS

SEQ ID NO: 51481 - protein, 36 aa, Artificial Sequence; identical to SEQ ID NO: 18785
  GFR-binding peptide
  MOD_RES (3)..(3): Xaa is C or S
  MOD_RES (17)..(18)..(19)..(20)..(21): Xaa is A or G
  MOD_RES (22)..(23)..(24)..(25): Xaa is A or G or is absent

SEQ ID NO: 51482 - protein, 35 aa, Artificial Sequence
  GFR-binding peptide
  MOD_RES (1)..(32)..(34): Xaa is C or S
XVSQDLSNITIQIMIGKTPKIIGEMSMIVKSXKXS

SEQ ID NO: 51483 - protein, 38 aa, Artificial Sequence; identical to SEQ ID NO: 13666
  GFR-binding peptide
  MOD_RES (1)..(2)..(35)..(37): Xaa is C or S
  MOD_RES (16)..(17)..(18)..(19)..(20): Xaa is A or G
  MOD_RES (21)..(22)..(23)..(24): Xaa is A or G or is absent

SEQ ID NO: 51484 - protein, 41 aa, Artificial Sequence; identical to SEQ ID NO: 18789
  GFR-binding peptide
  MOD_RES (5)..(5): Xaa is C or S

SEQ ID NO: 51485 - protein, 39 aa, Artificial Sequence; identical to SEQ ID NO: 13667
  GFR-binding peptide
  MOD_RES (7)..(7): Xaa is C or S
  MOD_RES (21)..(22)..(23)..(24)..(25): Xaa is A or G
  MOD_RES (26)..(27)..(28)..(29): Xaa is A or G or is absent

SEQ ID NO: 51486 - protein, 37 aa, Artificial Sequence
  GFR-binding peptide
  MOD_RES (4)..(5)..(36): Xaa is C or S
ASPXXVSQDLSNITIQIMIGKTPKIIGEMSMIVKSXK

SEQ ID NO: 51487 - protein, 39 aa, Artificial Sequence; identical to SEQ ID NO: 13668
  GFR-binding peptide
  MOD_RES (3)..(4)..(37)..(39): Xaa is C or S
  MOD_RES (18)..(19)..(20)..(21)..(22): Xaa is A or G
  MOD_RES (23)..(24)..(25)..(26): Xaa is A or G or is absent

SEQ ID NO: 51488 - protein, 35 aa, Artificial Sequence; identical to SEQ ID NO: 18790
  GFR-binding peptide
  MOD_RES (34)..(34): Xaa is C or S

SEQ ID NO: 51489 - protein, 37 aa, Artificial Sequence
  GFR-binding peptide
  MOD_RES (5)..(5): Xaa is C or S
  MOD_RES (19)..(20)..(21)..(22)..(23): Xaa is A or G
  MOD_RES (24)..(25)..(26)..(27): Xaa is A or G or is absent
EGLEXVPTEEEPLTMLYYXXXXXXXXXEQLSNFLQHN

SEQ ID NO: 51490 - protein, 35 aa, Artificial Sequence; identical to SEQ ID NO: 13669
  GFR-binding peptide
  MOD_RES (2)..(3): Xaa is C or S
  MOD_RES (17)..(18)..(19)..(20)..(21): Xaa is A or G
  MOD_RES (22)..(23)..(24)..(25): Xaa is A or G or is absent

SEQ ID NO: 51491 - protein, 32 aa, Artificial Sequence
  GFR-binding peptide
  MOD_RES (1)..(1): Xaa is C or S
XAPTQLRPVQVRKIDDSSNVIKKATVNMVVRA

SEQ ID NO: 51492 - protein, 37 aa, Artificial Sequence; identical to SEQ ID NO: 13670
  GFR-binding peptide
  MOD_RES (3)..(4): Xaa is C or S
  MOD_RES (18)..(19)..(20)..(21)..(22): Xaa is A or G
  MOD_RES (23)..(24)..(25)..(26): Xaa is A or G or is absent

SEQ ID NO: 51493 - protein, 34 aa, Artificial Sequence; identical to SEQ ID NO: 13671
  GFR-binding peptide
  MOD_RES (4)..(4): Xaa is C or S

SEQ ID NO: 51494 - protein, 40 aa, Artificial Sequence
  GFR-binding peptide
  MOD_RES (1)..(38)..(40): Xaa is C or S
XQPSRVHHEPLPVVYYEYVRKKPKLEQLSNRLEEHLEXAX

SEQ ID NO: 51495 - protein, 36 aa, Artificial Sequence
  GFR-binding peptide
  MOD_RES (35)..(35): Xaa is C or S
TQVQLEPLTVLYYEIVRKKPIFEQLSNTLEDHLAXK

SEQ ID NO: 51496 - protein, 37 aa, Artificial Sequence
  GFR-binding peptide
  MOD_RES (1)..(1): Xaa is C or S
XQPSRVHHEPLPVVYYEYVRKKPKLEQLSNRLEEHLE

SEQ ID NO: 51497 - protein, 37 aa, Artificial Sequence; identical to SEQ ID NO: 18791
  GFR-binding peptide
  MOD_RES (2)..(36): Xaa is C or S
  MOD_RES (16)..(17)..(18)..(19)..(20): Xaa is A or G
  MOD_RES (21)..(22)..(23)..(24): Xaa is A or G or is absent

SEQ ID NO: 51498 - protein, 38 aa, Artificial Sequence; identical to SEQ ID NO: 18792
  GFR-binding peptide
  MOD_RES (2)..(2): Xaa is C or S
  MOD_RES (18)..(19)..(20)..(21)..(22): Xaa is A or G
  MOD_RES (23)..(24)..(25)..(26): Xaa is A or G or is absent

SEQ ID NO: 51499 - protein, 35 aa, Artificial Sequence
  GFR-binding peptide
  MOD_RES (2)..(3)..(35): Xaa is C or S
PXXAPTKLRPVQVRKIDDSSNVIKKATVNMVVRSX

SEQ ID NO: 51500 - protein, 42 aa, Artificial Sequence; identical to SEQ ID NO: 13676
  GFR-binding peptide
  MOD_RES (6)..(40)..(42): Xaa is C or S
  MOD_RES (20)..(21)..(22)..(23)..(24): Xaa is A or G
  MOD_RES (25)..(26)..(27)..(28): Xaa is A or G or is absent

SEQ ID NO: 51501 - protein, 38 aa, Artificial Sequence
  GFR-binding peptide
  MOD_RES (4)..(4): Xaa is C or S
  MOD_RES (20)..(21)..(22)..(23)..(24): Xaa is A or G
  MOD_RES (25)..(26)..(27)..(28): Xaa is A or G or is absent
NVQXRPTQVQLEPLPVVYYXXXXXXXXXEQLSNTLEDH

SEQ ID NO: 51502 - protein, 39 aa, Artificial Sequence; identical to SEQ ID NO: 13677
  GFR-binding peptide
  MOD_RES (2)..(3)..(36)..(38): Xaa is C or S
  MOD_RES (17)..(18)..(19)..(20)..(21): Xaa is A or G
  MOD_RES (22)..(23)..(24)..(25): Xaa is A or G or is absent

SEQ ID NO: 51503 - protein, 40 aa, Artificial Sequence
  GFR-binding peptide
  MOD_RES (5)..(5): Xaa is C or S
  MOD_RES (21)..(22)..(23)..(24)..(25): Xaa is A or G
  MOD_RES (26)..(27)..(28)..(29): Xaa is A or G or is absent
SSVKXQPSRVHHEPLTVLYYXXXXXXXXXEQLSNRLEEHL

SEQ ID NO: 51504 - protein, 31 aa, Artificial Sequence
  GFR-binding peptide
APTQLSNITVQIMDDSSNVIIGEMSNMVVRA

SEQ ID NO: 51505 - protein, 42 aa, Artificial Sequence
  GFR-binding peptide
  MOD_RES (5)..(39)..(41): Xaa is C or S
EGLEXVPTEEEPLPMVYYRIKPHQGQHEQLSNFLQHNKXEXR

SEQ ID NO: 51506 - protein, 40 aa, Artificial Sequence
  GFR-binding peptide
  MOD_RES (37)..(39): Xaa is C or S
  MOD_RES (16)..(17)..(18)..(19)..(20): Xaa is A or G
  MOD_RES (21)..(22)..(23)..(24): Xaa is A or G or is absent
QPSRVHHEPLTVLYYXXXXXXXXXEQLSNRLEEHLEXAXA

SEQ ID NO: 51507 - protein, 37 aa, Artificial Sequence; identical to SEQ ID NO: 13679
  GFR-binding peptide
  MOD_RES (1)..(34)..(36): Xaa is C or S
  MOD_RES (15)..(16)..(17)..(18)..(19): Xaa is A or G
  MOD_RES (20)..(21)..(22)..(23): Xaa is A or G or is absent

SEQ ID NO: 51508 - protein, 40 aa, Artificial Sequence
  GFR-binding peptide
  MOD_RES (6)..(7)..(40): Xaa is C or S
  MOD_RES (21)..(22)..(23)..(24)..(25): Xaa is A or G
  MOD_RES (26)..(27)..(28)..(29): Xaa is A or G or is absent
ASASPXXVSQDLRSVKIAKVXXXXXXXXXKEVQVMIVKSX

SEQ ID NO: 51509 - protein, 39 aa, Artificial Sequence; identical to SEQ ID NO: 13681
  GFR-binding peptide
  MOD_RES (4)..(5)..(39): Xaa is C or S
  MOD_RES (19)..(20)..(21)..(22)..(23): Xaa is A or G
  MOD_RES (24)..(25)..(26)..(27): Xaa is A or G or is absent

SEQ ID NO: 51510 - protein, 39 aa, Artificial Sequence
  GFR-binding peptide
  MOD_RES (1)..(2)..(36)..(38): Xaa is C or S
  MOD_RES (16)..(17)..(18)..(19)..(20): Xaa is A or G
  MOD_RES (21)..(22)..(23)..(24): Xaa is A or G or is absent
XXAPTQLSNITVQIMXXXXXXXXXIGEMSNMVVRAXGXH

SEQ ID NO: 51511 - protein, 36 aa, Artificial Sequence; identical to SEQ ID NO: 13682
  GFR-binding peptide
  MOD_RES (3)..(4): Xaa is C or S
  MOD_RES (18)..(19)..(20)..(21)..(22): Xaa is A or G
  MOD_RES (23)..(24)..(25)..(26): Xaa is A or G or is absent

SEQ ID NO: 51512 - protein, 38 aa, Artificial Sequence; identical to SEQ ID NO: 13683
  GFR-binding peptide
  MOD_RES (1)..(2)..(36)..(38): Xaa is C or S
  MOD_RES (16)..(17)..(18)..(19)..(20): Xaa is A or G
  MOD_RES (21)..(22)..(23)..(24): Xaa is A or G or is absent

SEQ ID NO: 51513 - protein, 41 aa, Artificial Sequence; identical to SEQ ID NO: 18797
  GFR-binding peptide
  MOD_RES (4)..(41): Xaa is C or S

SEQ ID NO: 51514 - protein, 40 aa, Artificial Sequence
  GFR-binding peptide
  MOD_RES (4)..(4): Xaa is C or S
  MOD_RES (20)..(21)..(22)..(23)..(24): Xaa is A or G
  MOD_RES (25)..(26)..(27)..(28): Xaa is A or G or is absent
SVKXQPSRVHHEPLPVVYYXXXXXXXXXEQLSNRLEEHLE

SEQ ID NO: 51515 - protein, 38 aa, Artificial Sequence; identical to SEQ ID NO: 18798
  GFR-binding peptide
  MOD_RES (6)..(6): Xaa is C or S
  MOD_RES (20)..(21)..(22)..(23)..(24): Xaa is A or G
  MOD_RES (25)..(26)..(27)..(28): Xaa is A or G or is absent

SEQ ID NO: 51516 - protein, 42 aa, Artificial Sequence
  GFR-binding peptide
  MOD_RES (5)..(42): Xaa is C or S
  MOD_RES (21)..(22)..(23)..(24)..(25): Xaa is A or G
  MOD_RES (26)..(27)..(28)..(29): Xaa is A or G or is absent
SSVKXQPSRVHHEPLTVLYYXXXXXXXXXEQLSNRLEEHLEX

SEQ ID NO: 51517 - protein, 34 aa, Artificial Sequence
  GFR-binding peptide
  MOD_RES (1)..(32)..(34): Xaa is C or S
XVSQDLSNITIQIMIGKTPKIIGEMSMIVKSXKX

SEQ ID NO: 51518 - protein, 39 aa, Artificial Sequence
  GFR-binding peptide
  MOD_RES (4)..(38): Xaa is C or S
  MOD_RES (18)..(19)..(20)..(21)..(22): Xaa is A or G
  MOD_RES (23)..(24)..(25)..(26): Xaa is A or G or is absent
GLEXVPTEEEPLPMVYYXXXXXXXXXEQLSNFLQHNKXE

SEQ ID NO: 51519 - protein, 35 aa, Artificial Sequence
  GFR-binding peptide
  MOD_RES (34)..(34): Xaa is C or S
  MOD_RES (14)..(15)..(16)..(17)..(18): Xaa is A or G
  MOD_RES (19)..(20)..(21)..(22): Xaa is A or G or is absent
VPTELSNITMQIMXXXXXXXXXIGEMSEMVVEGXG

SEQ ID NO: 51520 - protein, 36 aa, Artificial Sequence; identical to SEQ ID NO: 18800
  GFR-binding peptide
  MOD_RES (16)..(17)..(18)..(19)..(20): Xaa is A or G
  MOD_RES (21)..(22)..(23)..(24): Xaa is A or G or is absent

SEQ ID NO: 51521 - protein, 37 aa, Artificial Sequence; identical to SEQ ID NO: 13686
  GFR-binding peptide
  MOD_RES (4)..(5): Xaa is C or S
  MOD_RES (19)..(20)..(21)..(22)..(23): Xaa is A or G
  MOD_RES (24)..(25)..(26)..(27): Xaa is A or G or is absent

SEQ ID NO: 51522 - protein, 41 aa, Artificial Sequence; identical to SEQ ID NO: 13689
  GFR-binding peptide
  MOD_RES (6)..(7)..(40): Xaa is C or S
  MOD_RES (21)..(22)..(23)..(24)..(25): Xaa is A or G
  MOD_RES (26)..(27)..(28)..(29): Xaa is A or G or is absent

SEQ ID NO: 51523 - protein, 36 aa, Artificial Sequence; identical to SEQ ID NO: 18801
  GFR-binding peptide
  MOD_RES (2)..(36): Xaa is C or S

SEQ ID NO: 51524 - protein, 35 aa, Artificial Sequence; identical to SEQ ID NO: 13691
  GFR-binding peptide
  MOD_RES (1)..(2)..(33)..(35): Xaa is C or S

SEQ ID NO: 51525 - protein, 37 aa, Artificial Sequence; identical to SEQ ID NO: 18802
  GFR-binding peptide
  MOD_RES (1)..(1): Xaa is C or S

SEQ ID NO: 51526 - protein, 35 aa, Artificial Sequence
  GFR-binding peptide
  MOD_RES (2)..(3): Xaa is C or S
  MOD_RES (17)..(18)..(19)..(20)..(21): Xaa is A or G
  MOD_RES (22)..(23)..(24)..(25): Xaa is A or G or is absent
PXXVPQDLRPVQIRKIXXXXXXXXXKKATVMVVKS

SEQ ID NO: 51527 - protein, 38 aa, Artificial Sequence; identical to SEQ ID NO: 13692
  GFR-binding peptide
  MOD_RES (2)..(3)..(35)..(37): Xaa is C or S

SEQ ID NO: 51528 - protein, 40 aa, Artificial Sequence; identical to SEQ ID NO: 18803
  GFR-binding peptide
  MOD_RES (3)..(40): Xaa is C or S

SEQ ID NO: 51529 - protein, 34 aa, Artificial Sequence; identical to SEQ ID NO: 13694
  GFR-binding peptide
  MOD_RES (2)..(3): Xaa is C or S

SEQ ID NO: 51530 - protein, 39 aa, Artificial Sequence; identical to SEQ ID NO: 18806
  GFR-binding peptide
  MOD_RES (37)..(39): Xaa is C or S
  MOD_RES (16)..(17)..(18)..(19)..(20): Xaa is A or G
  MOD_RES (21)..(22)..(23)..(24): Xaa is A or G or is absent

SEQ ID NO: 51531 - protein, 40 aa, Artificial Sequence
  GFR-binding peptide
  MOD_RES (6)..(7)..(39): Xaa is C or S
YVPKPXXAPTKLSNITVQIMDDSSNVIIGEMSNMVVRSXG

SEQ ID NO: 51532 - protein, 33 aa, Artificial Sequence; identical to SEQ ID NO: 18807
  GFR-binding peptide
  MOD_RES (15)..(16)..(17)..(18)..(19): Xaa is A or G
  MOD_RES (20)..(21)..(22)..(23): Xaa is A or G or is absent

SEQ ID NO: 51533 - protein, 35 aa, Artificial Sequence; identical to SEQ ID NO: 18809
  GFR-binding peptide
  MOD_RES (2)..(2): Xaa is C or S

SEQ ID NO: 51534 - protein, 40 aa, Artificial Sequence
  GFR-binding peptide
  MOD_RES (6)..(7)..(38)..(40): Xaa is C or S
ASASPXXVSQDLRSVKIAKVIGKTPKIKEVQVMIVKSXKX

SEQ ID NO: 51535 - protein, 35 aa, Artificial Sequence
  GFR-binding peptide
  MOD_RES (1)..(2): Xaa is C or S
  MOD_RES (16)..(17)..(18)..(19)..(20): Xaa is A or G
  MOD_RES (21)..(22)..(23)..(24): Xaa is A or G or is absent
XXAPTKLSNITVQIMXXXXXXXXXIGEMSNMVVRS

SEQ ID NO: 51536 - protein, 41 aa, Artificial Sequence; identical to SEQ ID NO: 13700
  GFR-binding peptide
  MOD_RES (7)..(41): Xaa is C or S
  MOD_RES (21)..(22)..(23)..(24)..(25): Xaa is A or G
  MOD_RES (26)..(27)..(28)..(29): Xaa is A or G or is absent

SEQ ID NO: 51537 - protein, 35 aa, Artificial Sequence; identical to SEQ ID NO: 18812
  GFR-binding peptide

SEQ ID NO: 51538 - protein, 30 aa, Artificial Sequence; identical to SEQ ID NO: 13703
  GFR-binding peptide

SEQ ID NO: 51539 - protein, 40 aa, Artificial Sequence; identical to SEQ ID NO: 13704
  GFR-binding peptide
  MOD_RES (6)..(7): Xaa is C or S
  MOD_RES (21)..(22)..(23)..(24)..(25): Xaa is A or G
  MOD_RES (26)..(27)..(28)..(29): Xaa is A or G or is absent

SEQ ID NO: 51540 - protein, 34 aa, Artificial Sequence
  GFR-binding peptide
  MOD_RES (3)..(4): Xaa is C or S
APXXVPQALSNITIQIMVGRKPKVIGEMSMIVRS

SEQ ID NO: 51541 - protein, 39 aa, Artificial Sequence
  GFR-binding peptide
  MOD_RES (2)..(3)..(37)..(39): Xaa is C or S
  MOD_RES (17)..(18)..(19)..(20)..(21): Xaa is A or G
  MOD_RES (22)..(23)..(24)..(25): Xaa is A or G or is absent
PXXAPTKLSNITVQIMXXXXXXXXXIGEMSNMVVRSXGX

SEQ ID NO: 51542 - protein, 38 aa, Artificial Sequence; identical to SEQ ID NO: 18814
  GFR-binding peptide
  MOD_RES (3)..(3): Xaa is C or S
  MOD_RES (19)..(20)..(21)..(22)..(23): Xaa is A or G
  MOD_RES (24)..(25)..(26)..(27): Xaa is A or G or is absent

SEQ ID NO: 51543 - protein, 40 aa, Artificial Sequence
  GFR-binding peptide
  MOD_RES (5)..(6)..(40): Xaa is C or S
  MOD_RES (20)..(21)..(22)..(23)..(24): Xaa is A or G
  MOD_RES (25)..(26)..(27)..(28): Xaa is A or G or is absent
VPKPXXAPTKLSNITVQIMXXXXXXXXXIGEMSNMVVRSX

SEQ ID NO: 51544 - protein, 35 aa, Artificial Sequence
  GFR-binding peptide
  MOD_RES (2)..(3): Xaa is C or S
  MOD_RES (17)..(18)..(19)..(20)..(21): Xaa is A or G
  MOD_RES (22)..(23)..(24)..(25): Xaa is A or G or is absent
PXXVPQDLRSVKIAKVXXXXXXXXXKEVQVMVVKS

SEQ ID NO: 51545 - protein, 40 aa, Artificial Sequence; identical to SEQ ID NO: 18815
  GFR-binding peptide
  MOD_RES (37)..(39): Xaa is C or S
  MOD_RES (16)..(17)..(18)..(19)..(20): Xaa is A or G
  MOD_RES (21)..(22)..(23)..(24): Xaa is A or G or is absent

SEQ ID NO: 51546 - protein, 40 aa, Artificial Sequence; identical to SEQ ID NO: 38709
  GFR-binding peptide
  MOD_RES (3)..(4)..(37)..(39): Xaa is C or S
  MOD_RES (18)..(19)..(20)..(21)..(22): Xaa is A or G
  MOD_RES (23)..(24)..(25)..(26): Xaa is A or G or is absent

SEQ ID NO: 51547 - protein, 32 aa, Artificial Sequence; identical to SEQ ID NO: 13706
  GFR-binding peptide
  MOD_RES (14)..(15)..(16)..(17)..(18): Xaa is A or G
  MOD_RES (19)..(20)..(21)..(22): Xaa is A or G or is absent

SEQ ID NO: 51548 - protein, 42 aa, Artificial Sequence
  GFR-binding peptide
  MOD_RES (5)..(6)..(40)..(42): Xaa is C or S
  MOD_RES (20)..(21)..(22)..(23)..(24): Xaa is A or G
  MOD_RES (25)..(26)..(27)..(28): Xaa is A or G or is absent
VPKPXXAPTQLRPVQVRKIXXXXXXXXXKKATVNMVVRAXGX

SEQ ID NO: 51549 - protein, 32 aa, Artificial Sequence
  GFR-binding peptide
  MOD_RES (1)..(2): Xaa is C or S
XXAPTQLRPVQVRKIDDSSNVIKKATVNMVVR

SEQ ID NO: 51550 - protein, 42 aa, Artificial Sequence
  GFR-binding peptide
  MOD_RES (4)..(5)..(39)..(41): Xaa is C or S
  MOD_RES (19)..(20)..(21)..(22)..(23): Xaa is A or G
  MOD_RES (24)..(25)..(26)..(27): Xaa is A or G or is absent
PKPXXAPTQLRPVQVRKIXXXXXXXXXKKATVNMVVRAXGXH

SEQ ID NO: 51551 - protein, 37 aa, Artificial Sequence
  GFR-binding peptide
  MOD_RES (2)..(3)..(36): Xaa is C or S
  MOD_RES (17)..(18)..(19)..(20)..(21): Xaa is A or G
  MOD_RES (22)..(23)..(24)..(25): Xaa is A or G or is absent
PXXVSQDLSNITIQIMXXXXXXXXXIGEMSMIVKSXK

SEQ ID NO: 51552 - protein, 38 aa, Artificial Sequence; identical to SEQ ID NO: 13708
  GFR-binding peptide
  MOD_RES (2)..(3)..(35)..(37): Xaa is C or S

SEQ ID NO: 51553 - protein, 37 aa, Artificial Sequence; identical to SEQ ID NO: 13709
  GFR-binding peptide
  MOD_RES (1)..(35)..(37): Xaa is C or S
  MOD_RES (15)..(16)..(17)..(18)..(19): Xaa is A or G
  MOD_RES (20)..(21)..(22)..(23): Xaa is A or G or is absent

SEQ ID NO: 51554 - protein, 36 aa, Artificial Sequence; identical to SEQ ID NO: 38718
  GFR-binding peptide
  MOD_RES (2)..(3)..(36): Xaa is C or S
  MOD_RES (17)..(18)..(19)..(20)..(21): Xaa is A or G
  MOD_RES (22)..(23)..(24)..(25): Xaa is A or G or is absent

SEQ ID NO: 51555 - protein, 31 aa, Artificial Sequence; identical to SEQ ID NO: 13711
  GFR-binding peptide
  MOD_RES (1)..(1): Xaa is C or S

SEQ ID NO: 51556 - protein, 34 aa, Artificial Sequence
  GFR-binding peptide
  MOD_RES (1)..(2)..(33): Xaa is C or S
XXVPQALRPVQIRKIVGRKPKVKKATVMIVRSXK

SEQ ID NO: 51557 - protein, 38 aa, Artificial Sequence
  GFR-binding peptide
  MOD_RES (5)..(6): Xaa is C or S
  MOD_RES (20)..(21)..(22)..(23)..(24): Xaa is A or G
  MOD_RES (25)..(26)..(27)..(28): Xaa is A or G or is absent
SASPXXVPQDLSNITIQIMXXXXXXXXXIGEMSMVVKS

SEQ ID NO: 51558 - protein, 40 aa, Artificial Sequence
  GFR-binding peptide
  MOD_RES (3)..(4)..(38)..(40): Xaa is C or S
  MOD_RES (18)..(19)..(20)..(21)..(22): Xaa is A or G
  MOD_RES (23)..(24)..(25)..(26): Xaa is A or G or is absent
KAXXVPTELRPVQMRKIXXXXXXXXXKKATVDMVVEGXGX

SEQ ID NO: 51559 - protein, 35 aa, Artificial Sequence
  GFR-binding peptide
  MOD_RES (3)..(4)..(35): Xaa is C or S
APXXVPQALRSVKIAKVVGRKPKVKEVQVMIVRSX

SEQ ID NO: 51560 - protein, 36 aa, Artificial Sequence; identical to SEQ ID NO: 13715
  GFR-binding peptide
  MOD_RES (1)..(35): Xaa is C or S
  MOD_RES (15)..(16)..(17)..(18)..(19): Xaa is A or G
  MOD_RES (20)..(21)..(22)..(23): Xaa is A or G or is absent

SEQ ID NO: 51561 - protein, 32 aa, Artificial Sequence
  GFR-binding peptide
  MOD_RES (14)..(15)..(16)..(17)..(18): Xaa is A or G
  MOD_RES (19)..(20)..(21)..(22): Xaa is A or G or is absent
APTKLRPVQVRKIXXXXXXXXXKKATVNMVVR

SEQ ID NO: 51562 - protein, 38 aa, Artificial Sequence
  GFR-binding peptide
  MOD_RES (2)..(36)..(38): Xaa is C or S
  MOD_RES (16)..(17)..(18)..(19)..(20): Xaa is A or G
  MOD_RES (21)..(22)..(23)..(24): Xaa is A or G or is absent
TXAPTKLRPVQVRKIXXXXXXXXXKKATVNMVVRSXGX

SEQ ID NO: 51563 - protein, 38 aa, Artificial Sequence
  GFR-binding peptide
  MOD_RES (1)..(38): Xaa is C or S
XQPSRVHHEPLPVVYYEYVRKKPKLEQLSNRLEEHLEX

SEQ ID NO: 51564 - protein, 37 aa, Artificial Sequence
  GFR-binding peptide
  MOD_RES (34)..(36): Xaa is C or S
  MOD_RES (14)..(15)..(16)..(17)..(18): Xaa is A or G
  MOD_RES (19)..(20)..(21)..(22): Xaa is A or G or is absent
VPTEEEPLTMLYYXXXXXXXXXEQLSNFLQHNKXEXR

SEQ ID NO: 51565 - protein, 39 aa, Artificial Sequence
  GFR-binding peptide
  MOD_RES (5)..(6)..(37)..(39): Xaa is C or S
SASPXXVPQDLRSVKIAKVVGRTPKVKEVQVMVVKSXKX

SEQ ID NO: 51566 - protein, 38 aa, Artificial Sequence
  GFR-binding peptide
  MOD_RES (2)..(2): Xaa is C or S
  MOD_RES (18)..(19)..(20)..(21)..(22): Xaa is A or G
  MOD_RES (23)..(24)..(25)..(26): Xaa is A or G or is absent
KXQPSRVHHEPLPVVYYXXXXXXXXXEQLSNRLEEHLE

SEQ ID NO: 51567 - protein, 36 aa, Artificial Sequence; identical to SEQ ID NO: 13719
  GFR-binding peptide
  MOD_RES (4)..(5): Xaa is C or S

SEQ ID NO: 51568 - protein, 38 aa, Artificial Sequence; identical to SEQ ID NO: 18820
  GFR-binding peptide
  MOD_RES (5)..(5): Xaa is C or S

SEQ ID NO: 51569 - protein, 34 aa, Artificial Sequence
  GFR-binding peptide
  MOD_RES (4)..(4): Xaa is C or S
KPTXAPTKLRSVKVAKVDDSSNVIKEVQVNMVVR

SEQ ID NO: 51570 - protein, 37 aa, Artificial Sequence; identical to SEQ ID NO: 13720
  GFR-binding peptide
  MOD_RES (1)..(35)..(37): Xaa is C or S
  MOD_RES (15)..(16)..(17)..(18)..(19): Xaa is A or G
  MOD_RES (20)..(21)..(22)..(23): Xaa is A or G or is absent

SEQ ID NO: 51571 - protein, 39 aa, Artificial Sequence
  GFR-binding peptide
  MOD_RES (5)..(39): Xaa is C or S
EGLEXVPTEEEPLTMLYYRIKPHQGQHEQLSNFLQHNKX

SEQ ID NO: 51572 - protein, 31 aa, Artificial Sequence; identical to SEQ ID NO: 13722
  GFR-binding peptide
  MOD_RES (31)..(31): Xaa is C or S

SEQ ID NO: 51573 - protein, 32 aa, Artificial Sequence; identical to SEQ ID NO: 13723
  GFR-binding peptide
  MOD_RES (14)..(15)..(16)..(17)..(18): Xaa is A or G
  MOD_RES (19)..(20)..(21)..(22): Xaa is A or G or is absent

SEQ ID NO: 51574 - protein, 34 aa, Artificial Sequence; identical to SEQ ID NO: 13724
  GFR-binding peptide
  MOD_RES (32)..(34): Xaa is C or S

SEQ ID NO: 51575 - protein, 35 aa, Artificial Sequence; identical to SEQ ID NO: 18821
  GFR-binding peptide

SEQ ID NO: 51576 - protein, 38 aa, Artificial Sequence
  GFR-binding peptide
  MOD_RES (3)..(4)..(36)..(38): Xaa is C or S
KPXXAPTQLRSVKVAKVDDSSNVIKEVQVNMVVRAXGX

SEQ ID NO: 51577 - protein, 40 aa, Artificial Sequence; identical to SEQ ID NO: 13726
  GFR-binding peptide
  MOD_RES (6)..(7): Xaa is C or S
  MOD_RES (21)..(22)..(23)..(24)..(25): Xaa is A or G
  MOD_RES (26)..(27)..(28)..(29): Xaa is A or G or is absent

SEQ ID NO: 51578 - protein, 34 aa, Artificial Sequence; identical to SEQ ID NO: 13728
  GFR-binding peptide
  MOD_RES (1)..(1): Xaa is C or S
  MOD_RES (15)..(16)..(17)..(18)..(19): Xaa is A or G
  MOD_RES (20)..(21)..(22)..(23): Xaa is A or G or is absent

SEQ ID NO: 51579 - protein, 41 aa, Artificial Sequence
  GFR-binding peptide
  MOD_RES (2)..(39)..(41): Xaa is C or S
KXQPSRVHHEPLTVLYYEYVRKKPKLEQLSNRLEEHLEXAX

SEQ ID NO: 51580 - protein, 40 aa, Artificial Sequence
  GFR-binding peptide
  MOD_RES (6)..(38)..(40): Xaa is C or S
VTKPTXAPTKLRSVKVAKVDDSSNVIKEVQVNMVVRSXGX

SEQ ID NO: 51581 - protein, 36 aa, Artificial Sequence; identical to SEQ ID NO: 18822
  GFR-binding peptide
  MOD_RES (34)..(36): Xaa is C or S
  MOD_RES (14)..(15)..(16)..(17)..(18): Xaa is A or G
  MOD_RES (19)..(20)..(21)..(22): Xaa is A or G or is absent

SEQ ID NO: 51582 - protein, 38 aa, Artificial Sequence; identical to SEQ ID NO: 18823
  GFR-binding peptide
  MOD_RES (4)..(38): Xaa is C or S

SEQ ID NO: 51583 - protein, 36 aa, Artificial Sequence
  GFR-binding peptide
  MOD_RES (33)..(35): Xaa is C or S
  MOD_RES (14)..(15)..(16)..(17)..(18): Xaa is A or G
  MOD_RES (19)..(20)..(21)..(22): Xaa is A or G or is absent
VSQDLRSVKIAKVXXXXXXXXXKEVQVMIVKSXKXS

SEQ ID NO: 51584 - protein, 37 aa, Artificial Sequence
  GFR-binding peptide
  MOD_RES (3)..(4): Xaa is C or S
  MOD_RES (18)..(19)..(20)..(21)..(22): Xaa is A or G
  MOD_RES (23)..(24)..(25)..(26): Xaa is A or G or is absent
KAXXVPTELSNITMQIMXXXXXXXXXIGEMSDMVVEG

SEQ ID NO: 51585 - protein, 39 aa, Artificial Sequence; identical to SEQ ID NO: 13733
  GFR-binding peptide
  MOD_RES (5)..(6): Xaa is C or S
  MOD_RES (20)..(21)..(22)..(23)..(24): Xaa is A or G
  MOD_RES (25)..(26)..(27)..(28): Xaa is A or G or is absent

SEQ ID NO: 51586 - protein, 37 aa, Artificial Sequence
  GFR-binding peptide
  MOD_RES (3)..(4): Xaa is C or S
  MOD_RES (18)..(19)..(20)..(21)..(22): Xaa is A or G
  MOD_RES (23)..(24)..(25)..(26): Xaa is A or G or is absent
KAXXVPTELRSVKMAKVXXXXXXXXXKEVQVEMVVEG

SEQ ID NO: 51587 - protein, 33 aa, Artificial Sequence
  GFR-binding peptide
SRVHHEPLPVVYYEYVRKKPKLEQLSNRLEEHL

SEQ ID NO: 51588 - protein, 37 aa, Artificial Sequence; identical to SEQ ID NO: 18825
  GFR-binding peptide
  MOD_RES (37)..(37): Xaa is C or S
  MOD_RES (16)..(17)..(18)..(19)..(20): Xaa is A or G
  MOD_RES (21)..(22)..(23)..(24): Xaa is A or G or is absent

SEQ ID NO: 51589 - protein, 42 aa, Artificial Sequence
  GFR-binding peptide
  MOD_RES (6)..(7)..(41): Xaa is C or S
  MOD_RES (21)..(22)..(23)..(24)..(25): Xaa is A or G
  MOD_RES (26)..(27)..(28)..(29): Xaa is A or G or is absent
SIPKAXXVPTELRPVQMRKIXXXXXXXXXKKATVEMVVEGXG

SEQ ID NO: 51590 - protein, 38 aa, Artificial Sequence
  GFR-binding peptide
  MOD_RES (2)..(3)..(37): Xaa is C or S
  MOD_RES (17)..(18)..(19)..(20)..(21): Xaa is A or G
  MOD_RES (22)..(23)..(24)..(25): Xaa is A or G or is absent
AXXVPTELRPVQMRKIXXXXXXXXXKKATVEMVVEGXG

SEQ ID NO: 51591 - protein, 42 aa, Artificial Sequence
  GFR-binding peptide
  MOD_RES (4)..(5)..(39)..(41): Xaa is C or S
  MOD_RES (19)..(20)..(21)..(22)..(23): Xaa is A or G
  MOD_RES (24)..(25)..(26)..(27): Xaa is A or G or is absent
PKPXXAPTQLSNITVQIMXXXXXXXXXIGEMSNMVVRAXGXH

SEQ ID NO: 51592 - protein, 35 aa, Artificial Sequence
  GFR-binding peptide
  MOD_RES (4)..(5): Xaa is C or S
ASPXXVSQDLRPVQIRKIIGKTPKIKKATVMIVKS

SEQ ID NO: 51593 - protein, 42 aa, Artificial Sequence; identical to SEQ ID NO: 13737
  GFR-binding peptide
  MOD_RES (5)..(6)..(39)..(41): Xaa is C or S
  MOD_RES (20)..(21)..(22)..(23)..(24): Xaa is A or G
  MOD_RES (25)..(26)..(27)..(28): Xaa is A or G or is absent

SEQ ID NO: 51594 - protein, 37 aa, Artificial Sequence
  GFR-binding peptide
  MOD_RES (1)..(2)..(36): Xaa is C or S
  MOD_RES (16)..(17)..(18)..(19)..(20): Xaa is A or G
  MOD_RES (21)..(22)..(23)..(24): Xaa is A or G or is absent
XXAPTKLRSVKVAKVXXXXXXXXXKEVQVNMVVRSXG

SEQ ID NO: 51595 - protein, 33 aa, Artificial Sequence; identical to SEQ ID NO: 13739
  GFR-binding peptide
  MOD_RES (1)..(33): Xaa is C or S

SEQ ID NO: 51596 - protein, 37 aa, Artificial Sequence; identical to SEQ ID NO: 13742
  GFR-binding peptide
  MOD_RES (5)..(6): Xaa is C or S

SEQ ID NO: 51597 - protein, 32 aa, Artificial Sequence
  GFR-binding peptide
  MOD_RES (1)..(2): Xaa is C or S
XXVPQDLRSVKIAKVVGRTPKVKEVQVMVVKS

SEQ ID NO: 51598 - protein, 38 aa, Artificial Sequence; identical to SEQ ID NO: 13744
  GFR-binding peptide
  MOD_RES (1)..(2)..(35)..(37): Xaa is C or S
  MOD_RES (16)..(17)..(18)..(19)..(20): Xaa is A or G
  MOD_RES (21)..(22)..(23)..(24): Xaa is A or G or is absent

SEQ ID NO: 51599 - protein, 35 aa, Artificial Sequence
  GFR-binding peptide
  MOD_RES (32)..(34): Xaa is C or S
VPTELRPVQMRKIDEYDKVVKKATVEMVVEGXGXR

SEQ ID NO: 51600 - protein, 37 aa, Artificial Sequence; identical to SEQ ID NO: 13747
  GFR-binding peptide
  MOD_RES (3)..(4)..(35)..(37): Xaa is C or S

SEQ ID NO: 51601 - protein, 35 aa, Artificial Sequence; identical to SEQ ID NO: 13748
  GFR-binding peptide
  MOD_RES (3)..(4)..(35): Xaa is C or S

SEQ ID NO: 51602 - protein, 40 aa, Artificial Sequence; identical to SEQ ID NO: 18837
  GFR-binding peptide
  MOD_RES (2)..(39): Xaa is C or S
  MOD_RES (18)..(19)..(20)..(21)..(22): Xaa is A or G
  MOD_RES (23)..(24)..(25)..(26): Xaa is A or G or is absent

SEQ ID NO: 51603 - protein, 43 aa, Artificial Sequence; identical to SEQ ID NO: 18838
  GFR-binding peptide
  MOD_RES (5)..(42): Xaa is C or S

SEQ ID NO: 51604 - protein, 42 aa, Artificial Sequence
  GFR-binding peptide
  MOD_RES (6)..(7)..(40)..(42): Xaa is C or S
  MOD_RES (21)..(22)..(23)..(24)..(25): Xaa is A or G
  MOD_RES (26)..(27)..(28)..(29): Xaa is A or G or is absent
ASASPXXVPQDLRSVKIAKVXXXXXXXXXKEVQVMVVKSXKX

SEQ ID NO: 51605 - protein, 37 aa, Artificial Sequence
  GFR-binding peptide
  MOD_RES (34)..(36): Xaa is C or S
  MOD_RES (14)..(15)..(16)..(17)..(18): Xaa is A or G
  MOD_RES (19)..(20)..(21)..(22): Xaa is A or G or is absent
APTQLRPVQVRKIXXXXXXXXXKKATVNMVVRAXGXH

SEQ ID NO: 51606 - protein, 40 aa, Artificial Sequence; identical to SEQ ID NO: 13751
  GFR-binding peptide
  MOD_RES (2)..(3)..(37)..(39): Xaa is C or S
  MOD_RES (17)..(18)..(19)..(20)..(21): Xaa is A or G
  MOD_RES (22)..(23)..(24)..(25): Xaa is A or G or is absent

SEQ ID NO: 51607 - protein, 35 aa, Artificial Sequence; identical to SEQ ID NO: 18840
  GFR-binding peptide
  MOD_RES (35)..(35): Xaa is C or S
  MOD_RES (14)..(15)..(16)..(17)..(18): Xaa is A or G
  MOD_RES (19)..(20)..(21)..(22): Xaa is A or G or is absent

SEQ ID NO: 51608 - protein, 34 aa, Artificial Sequence
  GFR-binding peptide
  MOD_RES (32)..(34): Xaa is C or S
APTKLSNITVQIMDDSSNVIIGEMSNMVVRSXGX

SEQ ID NO: 51609 - protein, 39 aa, Artificial Sequence
  GFR-binding peptide
  MOD_RES (4)..(5)..(39): Xaa is C or S
  MOD_RES (19)..(20)..(21)..(22)..(23): Xaa is A or G
  MOD_RES (24)..(25)..(26)..(27): Xaa is A or G or is absent
PKPXXAPTQLRPVQVRKIXXXXXXXXXKKATVNMVVRAX

SEQ ID NO: 51610 - protein, 31 aa, Artificial Sequence
  GFR-binding peptide
  MOD_RES (31)..(31): Xaa is C or S
VPQALRSVKIAKVVGRKPKVKEVQVMIVRSX

SEQ ID NO: 51611 - protein, 37 aa, Artificial Sequence
  GFR-binding peptide
  MOD_RES (1)..(2)..(34)..(36): Xaa is C or S
XXVPTELRPVQMRKIDEYDKVVKKATVEMVVEGXGXR

SEQ ID NO: 51612 - protein, 32 aa, Artificial Sequence
  GFR-binding peptide
  MOD_RES (14)..(15)..(16)..(17)..(18): Xaa is A or G
  MOD_RES (19)..(20)..(21)..(22): Xaa is A or G or is absent
VSQDLRPVQIRKIXXXXXXXXXKKATVMIVKS

SEQ ID NO: 51613 - protein, 35 aa, Artificial Sequence
  GFR-binding peptide
  MOD_RES (2)..(34): Xaa is C or S
TXAPTKLRPVQVRKIDDSSNVIKKATVNMVVRSXG

SEQ ID NO: 51614 - protein, 35 aa, Artificial Sequence
  GFR-binding peptide
  MOD_RES (34)..(34): Xaa is C or S
  MOD_RES (14)..(15)..(16)..(17)..(18): Xaa is A or G
  MOD_RES (19)..(20)..(21)..(22): Xaa is A or G or is absent
VPTELRPVQMRKIXXXXXXXXXKKATVDMVVEGXG

SEQ ID NO: 51615 - protein, 36 aa, Artificial Sequence; identical to SEQ ID NO: 18845
  GFR-binding peptide
  MOD_RES (1)..(1): Xaa is C or S
  MOD_RES (17)..(18)..(19)..(20)..(21): Xaa is A or G
  MOD_RES (22)..(23)..(24)..(25): Xaa is A or G or is absent

SEQ ID NO: 51616 - protein, 36 aa, Artificial Sequence
  GFR-binding peptide
  MOD_RES (2)..(3): Xaa is C or S
  MOD_RES (17)..(18)..(19)..(20)..(21): Xaa is A or G
  MOD_RES (22)..(23)..(24)..(25): Xaa is A or G or is absent
AXXVPTELRPVQMRKIXXXXXXXXXKKATVDMVVEG

SEQ ID NO: 51617 - protein, 35 aa, Artificial Sequence; identical to SEQ ID NO: 13758
  GFR-binding peptide
  MOD_RES (2)..(3): Xaa is C or S
  MOD_RES (17)..(18)..(19)..(20)..(21): Xaa is A or G
  MOD_RES (22)..(23)..(24)..(25): Xaa is A or G or is absent

SEQ ID NO: 51618 - protein, 34 aa, Artificial Sequence; identical to SEQ ID NO: 13759
  GFR-binding peptide
  MOD_RES (1)..(2)..(34): Xaa is C or S

SEQ ID NO: 51619 - protein, 34 aa, Artificial Sequence; identical to SEQ ID NO: 13760
  GFR-binding peptide
  MOD_RES (1)..(34): Xaa is C or S
  MOD_RES (15)..(16)..(17)..(18)..(19): Xaa is A or G
  MOD_RES (20)..(21)..(22)..(23): Xaa is A or G or is absent

SEQ ID NO: 51620 - protein, 39 aa, Artificial Sequence
  GFR-binding peptide
  MOD_RES (5)..(6)..(39): Xaa is C or S
  MOD_RES (20)..(21)..(22)..(23)..(24): Xaa is A or G
  MOD_RES (25)..(26)..(27)..(28): Xaa is A or G or is absent
SAAPXXVPQALRSVKIAKVXXXXXXXXXKEVQVMIVRSX

SEQ ID NO: 51621 - protein, 34 aa, Artificial Sequence
  GFR-binding peptide
  MOD_RES (3)..(4): Xaa is C or S
SPXXVPQDLRSVKIAKVVGRTPKVKEVQVMVVKS

SEQ ID NO: 51622 - protein, 40 aa, Artificial Sequence
  GFR-binding peptide
  MOD_RES (5)..(39): Xaa is C or S
  MOD_RES (19)..(20)..(21)..(22)..(23): Xaa is A or G
  MOD_RES (24)..(25)..(26)..(27): Xaa is A or G or is absent
EGLEXVPTEEEPLTMLYYXXXXXXXXXEQLSNFLQHNKXE

SEQ ID NO: 51623 - protein, 38 aa, Artificial Sequence
  GFR-binding peptide
  MOD_RES (2)..(36)..(38): Xaa is C or S
  MOD_RES (16)..(17)..(18)..(19)..(20): Xaa is A or G
  MOD_RES (21)..(22)..(23)..(24): Xaa is A or G or is absent
EXVPTEEEPLTMLYYXXXXXXXXXEQLSNFLQHNKXEX

SEQ ID NO: 51624 - protein, 34 aa, Artificial Sequence; identical to SEQ ID NO: 13764
  GFR-binding peptide
  MOD_RES (3)..(3): Xaa is C or S

SEQ ID NO: 51625 - protein, 36 aa, Artificial Sequence
  GFR-binding peptide
  MOD_RES (3)..(4): Xaa is C or S
  MOD_RES (18)..(19)..(20)..(21)..(22): Xaa is A or G
  MOD_RES (23)..(24)..(25)..(26): Xaa is A or G or is absent
KPXXAPTKLSNITVQIMXXXXXXXXXIGEMSNMVVR

SEQ ID NO: 51626 - protein, 33 aa, Artificial Sequence
  GFR-binding peptide
  MOD_RES (14)..(15)..(16)..(17)..(18): Xaa is A or G
  MOD_RES (19)..(20)..(21)..(22): Xaa is A or G or is absent
VPTELRSVKMAKVXXXXXXXXXKEVQVEMVVEG

SEQ ID NO: 51627 - protein, 32 aa, Artificial Sequence
  GFR-binding peptide
  MOD_RES (14)..(15)..(16)..(17)..(18): Xaa is A or G
  MOD_RES (19)..(20)..(21)..(22): Xaa is A or G or is absent
VSQDLRSVKIAKVXXXXXXXXXKEVQVMIVKS

SEQ ID NO: 51628 - protein, 37 aa, Artificial Sequence; identical to SEQ ID NO: 13766
  GFR-binding peptide
  MOD_RES (3)..(4)..(37): Xaa is C or S
  MOD_RES (18)..(19)..(20)..(21)..(22): Xaa is A or G
  MOD_RES (23)..(24)..(25)..(26): Xaa is A or G or is absent

SEQ ID NO: 51629 - protein, 37 aa, Artificial Sequence
  GFR-binding peptide
  MOD_RES (36)..(36): Xaa is C or S
  MOD_RES (15)..(16)..(17)..(18)..(19): Xaa is A or G
  MOD_RES (20)..(21)..(22)..(23): Xaa is A or G or is absent
PSRVHHEPLTVLYYXXXXXXXXXEQLSNRLEEHLEXA

SEQ ID NO: 51630 - protein, 38 aa, Artificial Sequence
  GFR-binding peptide
  MOD_RES (6)..(6): Xaa is C or S
DEGLEXVPTEEEPLPMVYYRIKPHQGQHEQLSNFLQHN

SEQ ID NO: 51631 - protein, 34 aa, Artificial Sequence
  GFR-binding peptide
  MOD_RES (1)..(34): Xaa is C or S
  MOD_RES (15)..(16)..(17)..(18)..(19): Xaa is A or G
  MOD_RES (20)..(21)..(22)..(23): Xaa is A or G or is absent
XVPQDLSNITIQIMXXXXXXXXXIGEMSMVVKSX

SEQ ID NO: 51632 - protein, 39 aa, Artificial Sequence
  GFR-binding peptide
  MOD_RES (2)..(36)..(38): Xaa is C or S
EXVPTEEEPLTMLYYRIKPHQGQHEQLSNFLQHNKXEXR

SEQ ID NO: 51633 - protein, 38 aa, Artificial Sequence
  GFR-binding peptide
  MOD_RES (5)..(6)..(38): Xaa is C or S
IPKAXXVPTELRPVQMRKIDEYDKVVKKATVEMVVEGX

SEQ ID NO: 51634 - protein, 40 aa, Artificial Sequence
  GFR-binding peptide
  MOD_RES (5)..(6)..(38)..(40): Xaa is C or S
VPKPXXAPTQLRPVQVRKIDDSSNVIKKATVNMVVRAXGX

SEQ ID NO: 51635 - protein, 43 aa, Artificial Sequence; identical to SEQ ID NO: 18856
  GFR-binding peptide
  MOD_RES (6)..(40)..(42): Xaa is C or S
  MOD_RES (20)..(21)..(22)..(23)..(24): Xaa is A or G
  MOD_RES (25)..(26)..(27)..(28): Xaa is A or G or is absent

SEQ ID NO: 51636 - protein, 39 aa, Artificial Sequence; identical to SEQ ID NO: 13772
  GFR-binding peptide
  MOD_RES (5)..(6): Xaa is C or S
  MOD_RES (20)..(21)..(22)..(23)..(24): Xaa is A or G
  MOD_RES (25)..(26)..(27)..(28): Xaa is A or G or is absent

SEQ ID NO: 51637 - protein, 34 aa, Artificial Sequence
  GFR-binding peptide
  MOD_RES (14)..(15)..(16)..(17)..(18): Xaa is A or G
  MOD_RES (19)..(20)..(21)..(22): Xaa is A or G or is absent
SRVHHEPLPVVYYXXXXXXXXXEQLSNRLEEHLE

SEQ ID NO: 51638 - protein, 37 aa, Artificial Sequence
  GFR-binding peptide
  MOD_RES (3)..(4): Xaa is C or S
  MOD_RES (18)..(19)..(20)..(21)..(22): Xaa is A or G
  MOD_RES (23)..(24)..(25)..(26): Xaa is A or G or is absent
KPXXAPTQLRPVQVRKIXXXXXXXXXKKATVNMVVRA

SEQ ID NO: 51639 - protein, 33 aa, Artificial Sequence
  GFR-binding peptide
  MOD_RES (2)..(3): Xaa is C or S
PXXAPTQLSNITVQIMDDSSNVIIGEMSNMVVR

SEQ ID NO: 51640 - protein, 32 aa, Artificial Sequence
  GFR-binding peptide
  MOD_RES (14)..(15)..(16)..(17)..(18): Xaa is A or G
  MOD_RES (19)..(20)..(21)..(22): Xaa is A or G or is absent
VPTELRSVKMAKVXXXXXXXXXKEVQVDMVVE

SEQ ID NO: 51641 - protein, 38 aa, Artificial Sequence; identical to SEQ ID NO: 18859
  GFR-binding peptide
  MOD_RES (2)..(2): Xaa is C or S

SEQ ID NO: 51642 - protein, 38 aa, Artificial Sequence
  GFR-binding peptide
  MOD_RES (3)..(4)..(37): Xaa is C or S
  MOD_RES (18)..(19)..(20)..(21)..(22): Xaa is A or G
  MOD_RES (23)..(24)..(25)..(26): Xaa is A or G or is absent
APXXVPQALSNITIQIMXXXXXXXXXIGEMSMIVRSXK

SEQ ID NO: 51643 - protein, 39 aa, Artificial Sequence; identical to SEQ ID NO: 13779
  GFR-binding peptide
  MOD_RES (1)..(2)..(36)..(38): Xaa is C or S
  MOD_RES (16)..(17)..(18)..(19)..(20): Xaa is A or G
  MOD_RES (21)..(22)..(23)..(24): Xaa is A or G or is absent

SEQ ID NO: 51644 - protein, 35 aa, Artificial Sequence
  GFR-binding peptide
  MOD_RES (3)..(4): Xaa is C or S
KAXXVPTELSNITMQIMDENEKVVIGEMSDMVVEG

SEQ ID NO: 51645 - protein, 34 aa, Artificial Sequence; identical to SEQ ID NO: 13781
  GFR-binding peptide
  MOD_RES (1)..(2)..(34): Xaa is C or S

SEQ ID NO: 51646 - protein, 37 aa, Artificial Sequence; identical to SEQ ID NO: 18865
  GFR-binding peptide
  MOD_RES (3)..(3): Xaa is C or S
  MOD_RES (19)..(20)..(21)..(22)..(23): Xaa is A or G
  MOD_RES (24)..(25)..(26)..(27): Xaa is A or G or is absent

SEQ ID NO: 51647 - protein, 39 aa, Artificial Sequence
  GFR-binding peptide
  MOD_RES (3)..(4)..(38): Xaa is C or S
  MOD_RES (18)..(19)..(20)..(21)..(22): Xaa is A or G
  MOD_RES (23)..(24)..(25)..(26): Xaa is A or G or is absent
KPXXAPTQLSNITVQIMXXXXXXXXXIGEMSNMVVRAXG

SEQ ID NO: 51648 - protein, 30 aa, Artificial Sequence; identical to SEQ ID NO: 13783
  GFR-binding peptide

SEQ ID NO: 51649 - protein, 35 aa, Artificial Sequence
  GFR-binding peptide
  MOD_RES (2)..(3)..(34): Xaa is C or S
PXXVPQDLRSVKIAKVVGRTPKVKEVQVMVVKSXK

SEQ ID NO: 51650 - protein, 37 aa, Artificial Sequence; identical to SEQ ID NO: 18867
  GFR-binding peptide
  MOD_RES (3)..(3): Xaa is C or S
  MOD_RES (19)..(20)..(21)..(22)..(23): Xaa is A or G
  MOD_RES (24)..(25)..(26)..(27): Xaa is A or G or is absent

SEQ ID NO: 51651 - protein, 34 aa, Artificial Sequence
  GFR-binding peptide
  MOD_RES (1)..(1): Xaa is C or S
  MOD_RES (15)..(16)..(17)..(18)..(19): Xaa is A or G
  MOD_RES (20)..(21)..(22)..(23): Xaa is A or G or is absent
XVPTELSNITMQIMXXXXXXXXXIGEMSEMVVEG

SEQ ID NO: 51652 - protein, 36 aa, Artificial Sequence
  GFR-binding peptide
  MOD_RES (4)..(4): Xaa is C or S
GLEXVPTEEEPLTMLYYRIKPHQGQHEQLSNFLQHN

SEQ ID NO: 51653 - protein, 33 aa, Artificial Sequence; identical to SEQ ID NO: 18869
  GFR-binding peptide
  MOD_RES (1)..(1): Xaa is C or S
  MOD_RES (15)..(16)..(17)..(18)..(19): Xaa is A or G
  MOD_RES (20)..(21)..(22)..(23): Xaa is A or G or is absent

SEQ ID NO: 51654 - protein, 35 aa, Artificial Sequence
  GFR-binding peptide
  MOD_RES (2)..(3)..(34): Xaa is C or S
PXXVSQDLRSVKIAKVIGKTPKIKEVQVMIVKSXK

SEQ ID NO: 51655 - protein, 41 aa, Artificial Sequence; identical to SEQ ID NO: 18870
  GFR-binding peptide
  MOD_RES (3)..(40): Xaa is C or S

SEQ ID NO: 51656 - protein, 30 aa, Artificial Sequence
  GFR-binding peptide
VSQDLRSVKIAKVIGKTPKIKEVQVMIVKS

SEQ ID NO: 51657 - protein, 36 aa, Artificial Sequence; identical to SEQ ID NO: 18873
  GFR-binding peptide
  MOD_RES (16)..(17)..(18)..(19)..(20): Xaa is A or G
  MOD_RES (21)..(22)..(23)..(24): Xaa is A or G or is absent

SEQ ID NO: 51658 - protein, 42 aa, Artificial Sequence; identical to SEQ ID NO: 18875
  GFR-binding peptide
  MOD_RES (3)..(40)..(42): Xaa is C or S

SEQ ID NO: 51659 - protein, 40 aa, Artificial Sequence
  GFR-binding peptide
  MOD_RES (3)..(4)..(38)..(40): Xaa is C or S
  MOD_RES (18)..(19)..(20)..(21)..(22): Xaa is A or G
  MOD_RES (23)..(24)..(25)..(26): Xaa is A or G or is absent
KAXXVPTELRPVQMRKIXXXXXXXXXKKATVEMVVEGXGX

SEQ ID NO: 51660 - protein, 39 aa, Artificial Sequence; identical to SEQ ID NO: 13788
  GFR-binding peptide
  MOD_RES (5)..(6)..(38): Xaa is C or S

SEQ ID NO: 51661 - protein, 35 aa, Artificial Sequence
  GFR-binding peptide
  MOD_RES (34)..(34): Xaa is C or S
  MOD_RES (14)..(15)..(16)..(17)..(18): Xaa is A or G
  MOD_RES (19)..(20)..(21)..(22): Xaa is A or G or is absent
APTKLRPVQVRKIXXXXXXXXXKKATVNMVVRSXG

SEQ ID NO: 51662 - protein, 39 aa, Artificial Sequence; identical to SEQ ID NO: 18877
  GFR-binding peptide
  MOD_RES (6)..(6): Xaa is C or S
  MOD_RES (20)..(21)..(22)..(23)..(24): Xaa is A or G
  MOD_RES (25)..(26)..(27)..(28): Xaa is A or G or is absent

SEQ ID NO: 51663 - protein, 43 aa, Artificial Sequence
  GFR-binding peptide
  MOD_RES (6)..(7)..(41)..(43): Xaa is C or S
  MOD_RES (21)..(22)..(23)..(24)..(25): Xaa is A or G
  MOD_RES (26)..(27)..(28)..(29): Xaa is A or G or is absent
KIPKAXXVPTELRPVQMRKIXXXXXXXXXKKATVDMVVEGXGX

SEQ ID NO: 51664 - protein, 35 aa, Artificial Sequence; identical to SEQ ID NO: 13790
  GFR-binding peptide
  MOD_RES (1)..(2): Xaa is C or S
  MOD_RES (16)..(17)..(18)..(19)..(20): Xaa is A or G
  MOD_RES (21)..(22)..(23)..(24): Xaa is A or G or is absent

SEQ ID NO: 51665 - protein, 35 aa, Artificial Sequence; identical to SEQ ID NO: 13791
  GFR-binding peptide
  MOD_RES (4)..(5): Xaa is C or S

SEQ ID NO: 51666 - protein, 37 aa, Artificial Sequence
  GFR-binding peptide
  MOD_RES (6)..(7): Xaa is C or S
YVPKPXXAPTKLRSVKVAKVDDSSNVIKEVQVNMVVR

SEQ ID NO: 51667 - protein, 35 aa, Artificial Sequence; identical to SEQ ID NO: 13792
  GFR-binding peptide
  MOD_RES (2)..(3)..(35): Xaa is C or S

SEQ ID NO: 51668 - protein, 36 aa, Artificial Sequence; identical to SEQ ID NO: 13793
  GFR-binding peptide
  MOD_RES (2)..(3)..(35): Xaa is C or S

SEQ ID NO: 51669 - protein, 34 aa, Artificial Sequence
  GFR-binding peptide
  MOD_RES (1)..(32)..(34): Xaa is C or S
XVPQDLSNITIQIMVGRTPKVIGEMSMVVKSXKX

SEQ ID NO: 51670 - protein, 36 aa, Artificial Sequence; identical to SEQ ID NO: 13794
  GFR-binding peptide
  MOD_RES (2)..(3)..(35): Xaa is C or S

SEQ ID NO: 51671 - protein, 33 aa, Artificial Sequence
  GFR-binding peptide
  MOD_RES (1)..(2)..(33): Xaa is C or S
XXVSQDLSNITIQIMIGKTPKIIGEMSMIVKSX

SEQ ID NO: 51672 - protein, 39 aa, Artificial Sequence
  GFR-binding peptide
  MOD_RES (5)..(5): Xaa is C or S
  MOD_RES (21)..(22)..(23)..(24)..(25): Xaa is A or G
  MOD_RES (26)..(27)..(28)..(29): Xaa is A or G or is absent
RNVQXRPTQVQLEPLPVVYYXXXXXXXXXEQLSNTLEDH

SEQ ID NO: 51673 - protein, 37 aa, Artificial Sequence
  GFR-binding peptide
  MOD_RES (3)..(37): Xaa is C or S
  MOD_RES (17)..(18)..(19)..(20)..(21): Xaa is A or G
  MOD_RES (22)..(23)..(24)..(25): Xaa is A or G or is absent
PTXAPTKLRSVKVAKVXXXXXXXXXKEVQVNMVVRSX

SEQ ID NO: 51674 - protein, 35 aa, Artificial Sequence
  GFR-binding peptide
  MOD_RES (1)..(2)..(35): Xaa is C or S
  MOD_RES (16)..(17)..(18)..(19)..(20): Xaa is A or G
  MOD_RES (21)..(22)..(23)..(24): Xaa is A or G or is absent
XXVSQDLRSVKIAKVXXXXXXXXXKEVQVMIVKSX

SEQ ID NO: 51675 - protein, 40 aa, Artificial Sequence
  GFR-binding peptide
  MOD_RES (3)..(40): Xaa is C or S
VQXRPTQVQLEPLPVVYYEIVRKKPIFEQLSNTLEDHLAX

SEQ ID NO: 51676 - protein, 36 aa, Artificial Sequence
  GFR-binding peptide
  MOD_RES (3)..(4): Xaa is C or S
  MOD_RES (18)..(19)..(20)..(21)..(22): Xaa is A or G
  MOD_RES (23)..(24)..(25)..(26): Xaa is A or G or is absent
APXXVPQALSNITIQIMXXXXXXXXXIGEMSMIVRS

SEQ ID NO: 51677 - protein, 39 aa, Artificial Sequence; identical to SEQ ID NO: 13799
  GFR-binding peptide
  MOD_RES (4)..(5)..(37)..(39): Xaa is C or S

SEQ ID NO: 51678 - protein, 38 aa, Artificial Sequence
  GFR-binding peptide
  MOD_RES (3)..(4)..(37): Xaa is C or S
  MOD_RES (18)..(19)..(20)..(21)..(22): Xaa is A or G
  MOD_RES (23)..(24)..(25)..(26): Xaa is A or G or is absent
SPXXVPQDLRPVQIRKIXXXXXXXXXKKATVMVVKSXK

SEQ ID NO: 51679 - protein, 32 aa, Artificial Sequence; identical to SEQ ID NO: 13804
  GFR-binding peptide
  MOD_RES (32)..(32): Xaa is C or S

SEQ ID NO: 51680 - protein, 37 aa, Artificial Sequence
  GFR-binding peptide
  MOD_RES (4)..(5)..(36): Xaa is C or S
ASPXXVPQDLSNITIQIMVGRTPKVIGEMSMVVKSXK

SEQ ID NO: 51681 - protein, 38 aa, Artificial Sequence
  GFR-binding peptide
  MOD_RES (1)..(2)..(36)..(38): Xaa is C or S
  MOD_RES (16)..(17)..(18)..(19)..(20): Xaa is A or G
  MOD_RES (21)..(22)..(23)..(24): Xaa is A or G or is absent
XXAPTQLSNITVQIMXXXXXXXXXIGEMSNMVVRAXGX

SEQ ID NO: 51682 - protein, 39 aa, Artificial Sequence
  GFR-binding peptide
  MOD_RES (4)..(5)..(39): Xaa is C or S
  MOD_RES (19)..(20)..(21)..(22)..(23): Xaa is A or G
  MOD_RES (24)..(25)..(26)..(27): Xaa is A or G or is absent
PKPXXAPTQLRSVKVAKVXXXXXXXXXKEVQVNMVVRAX

SEQ ID NO: 51683 - protein, 41 aa, Artificial Sequence
  GFR-binding peptide
  MOD_RES (3)..(40): Xaa is C or S
VQXRPTQVQLEPLPVVYYEIVRKKPIFEQLSNTLEDHLAXK

SEQ ID NO: 51684 - protein, 42 aa, Artificial Sequence; identical to SEQ ID NO: 13809
  GFR-binding peptide
  MOD_RES (6)..(7)..(41): Xaa is C or S
  MOD_RES (21)..(22)..(23)..(24)..(25): Xaa is A or G
  MOD_RES (26)..(27)..(28)..(29): Xaa is A or G or is absent

SEQ ID NO: 51685 - protein, 40 aa, Artificial Sequence; identical to SEQ ID NO: 18892
  GFR-binding peptide
  MOD_RES (7)..(7): Xaa is C or S
  MOD_RES (21)..(22)..(23)..(24)..(25): Xaa is A or G
  MOD_RES (26)..(27)..(28)..(29): Xaa is A or G or is absent

SEQ ID NO: 51686 - protein, 36 aa, Artificial Sequence
  GFR-binding peptide
  MOD_RES (3)..(4): Xaa is C or S
  MOD_RES (18)..(19)..(20)..(21)..(22): Xaa is A or G
  MOD_RES (23)..(24)..(25)..(26): Xaa is A or G or is absent
KAXXVPTELSNITMQIMXXXXXXXXXIGEMSDMVVE

SEQ ID NO: 51687 - protein, 39 aa, Artificial Sequence
  GFR-binding peptide
  MOD_RES (6)..(7): Xaa is C or S
  MOD_RES (21)..(22)..(23)..(24)..(25): Xaa is A or G
  MOD_RES (26)..(27)..(28)..(29): Xaa is A or G or is absent
YVPKPXXAPTKLRSVKVAKVXXXXXXXXXKEVQVNMVVR

SEQ ID NO: 51688 - protein, 35 aa, Artificial Sequence
  GFR-binding peptide
  MOD_RES (35)..(35): Xaa is C or S
TQVQLEPLPVVYYEIVRKKPIFEQLSNTLEDHLAX

SEQ ID NO: 51689 - protein, 39 aa, Artificial Sequence
  GFR-binding peptide
  MOD_RES (5)..(6)..(38): Xaa is C or S
IPKAXXVPTELSNITMQIMDENEKVVIGEMSDMVVEGXG

SEQ ID NO: 51690 - protein, 37 aa, Artificial Sequence
  GFR-binding peptide
  MOD_RES (2)..(3)..(36): Xaa is C or S
  MOD_RES (17)..(18)..(19)..(20)..(21): Xaa is A or G
  MOD_RES (22)..(23)..(24)..(25): Xaa is A or G or is absent
PXXVPQDLRSVKIAKVXXXXXXXXXKEVQVMVVKSXK

SEQ ID NO: 51691 - protein, 40 aa, Artificial Sequence; identical to SEQ ID NO: 13810
  GFR-binding peptide
  MOD_RES (4)..(38)..(40): Xaa is C or S
  MOD_RES (18)..(19)..(20)..(21)..(22): Xaa is A or G
  MOD_RES (23)..(24)..(25)..(26): Xaa is A or G or is absent

SEQ ID NO: 51692 - protein, 43 aa, Artificial Sequence; identical to SEQ ID NO: 13811
  GFR-binding peptide
  MOD_RES (6)..(7)..(40)..(42): Xaa is C or S
  MOD_RES (21)..(22)..(23)..(24)..(25): Xaa is A or G
  MOD_RES (26)..(27)..(28)..(29): Xaa is A or G or is absent

SEQ ID NO: 51693 - protein, 40 aa, Artificial Sequence
  GFR-binding peptide
  MOD_RES (37)..(39): Xaa is C or S
RPTQVQLEPLPVVYYEIVRKKPIFEQLSNTLEDHLAXKXE

SEQ ID NO: 51694 - protein, 36 aa, Artificial Sequence; identical to SEQ ID NO: 13816
  GFR-binding peptide
  MOD_RES (33)..(35): Xaa is C or S
  MOD_RES (14)..(15)..(16)..(17)..(18): Xaa is A or G
  MOD_RES (19)..(20)..(21)..(22): Xaa is A or G or is absent

SEQ ID NO: 51695 - protein, 31 aa, Artificial Sequence; identical to SEQ ID NO: 13818
  GFR-binding peptide
  MOD_RES (1)..(1): Xaa is C or S

SEQ ID NO: 51696 - protein, 33 aa, Artificial Sequence
  GFR-binding peptide
  MOD_RES (1)..(2): Xaa is C or S
XXVPTELSNITMQIMDENEKVVIGEMSDMVVEG

SEQ ID NO: 51697 - protein, 39 aa, Artificial Sequence
  GFR-binding peptide
  MOD_RES (4)..(5)..(38): Xaa is C or S
  MOD_RES (19)..(20)..(21)..(22)..(23): Xaa is A or G
  MOD_RES (24)..(25)..(26)..(27): Xaa is A or G or is absent
AAPXXVPQALRPVQIRKIXXXXXXXXXKKATVMIVRSXK

SEQ ID NO: 51698 - protein, 34 aa, Artificial Sequence
  GFR-binding peptide
  MOD_RES (2)..(3)..(34): Xaa is C or S
PXXVPQDLRSVKIAKVVGRTPKVKEVQVMVVKSX

SEQ ID NO: 51699 - protein, 36 aa, Artificial Sequence
  GFR-binding peptide
  MOD_RES (1)..(2)..(36): Xaa is C or S
  MOD_RES (16)..(17)..(18)..(19)..(20): Xaa is A or G
  MOD_RES (21)..(22)..(23)..(24): Xaa is A or G or is absent
XXAPTQLSNITVQIMXXXXXXXXXIGEMSNMVVRAX

SEQ ID NO: 51700 - protein, 41 aa, Artificial Sequence; identical to SEQ ID NO: 13823
  GFR-binding peptide
  MOD_RES (6)..(38)..(40): Xaa is C or S

SEQ ID NO: 51701 - protein, 39 aa, Artificial Sequence
  GFR-binding peptide
  MOD_RES (4)..(4): Xaa is C or S
  MOD_RES (20)..(21)..(22)..(23)..(24): Xaa is A or G
  MOD_RES (25)..(26)..(27)..(28): Xaa is A or G or is absent
NVQXRPTQVQLEPLTVLYYXXXXXXXXXEQLSNTLEDHL

SEQ ID NO: 51702 - protein, 34 aa, Artificial Sequence; identical to SEQ ID NO: 18902
  GFR-binding peptide
  MOD_RES (14)..(15)..(16)..(17)..(18): Xaa is A or G
  MOD_RES (19)..(20)..(21)..(22): Xaa is A or G or is absent

SEQ ID NO: 51703 - protein, 39 aa, Artificial Sequence; identical to SEQ ID NO: 18903
  GFR-binding peptide
  MOD_RES (3)..(37)..(39): Xaa is C or S
  MOD_RES (17)..(18)..(19)..(20)..(21): Xaa is A or G
  MOD_RES (22)..(23)..(24)..(25): Xaa is A or G or is absent

SEQ ID NO: 51704 - protein, 39 aa, Artificial Sequence
  GFR-binding peptide
  MOD_RES (5)..(6): Xaa is C or S
  MOD_RES (20)..(21)..(22)..(23)..(24): Xaa is A or G
  MOD_RES (25)..(26)..(27)..(28): Xaa is A or G or is absent
IPKAXXVPTELRSVKMAKVXXXXXXXXXKEVQVDMVVEG

SEQ ID NO: 51705 - protein, 31 aa, Artificial Sequence
  GFR-binding peptide
  MOD_RES (1)..(1): Xaa is C or S
XAPTKLSNITVQIMDDSSNVIIGEMSNMVVR

SEQ ID NO: 51706 - protein, 35 aa, Artificial Sequence; identical to SEQ ID NO: 18906
  GFR-binding peptide
  MOD_RES (1)..(1): Xaa is C or S
  MOD_RES (17)..(18)..(19)..(20)..(21): Xaa is A or G
  MOD_RES (22)..(23)..(24)..(25): Xaa is A or G or is absent

SEQ ID NO: 51707 - protein, 37 aa, Artificial Sequence; identical to SEQ ID NO: 13827
  GFR-binding peptide
  MOD_RES (1)..(35)..(37): Xaa is C or S
  MOD_RES (15)..(16)..(17)..(18)..(19): Xaa is A or G
  MOD_RES (20)..(21)..(22)..(23): Xaa is A or G or is absent

SEQ ID NO: 51708 - protein, 35 aa, Artificial Sequence
  GFR-binding peptide
  MOD_RES (1)..(35): Xaa is C or S
  MOD_RES (15)..(16)..(17)..(18)..(19): Xaa is A or G
  MOD_RES (20)..(21)..(22)..(23): Xaa is A or G or is absent
XAPTQLSNITVQIMXXXXXXXXXIGEMSNMVVRAX

SEQ ID NO: 51709 - protein, 37 aa, Artificial Sequence
  GFR-binding peptide
  MOD_RES (37)..(37): Xaa is C or S
  MOD_RES (16)..(17)..(18)..(19)..(20): Xaa is A or G
  MOD_RES (21)..(22)..(23)..(24): Xaa is A or G or is absent
QPSRVHHEPLTVLYYXXXXXXXXXEQLSNRLEEHLEX

SEQ ID NO: 51710 - protein, 39 aa, Artificial Sequence
  GFR-binding peptide
  MOD_RES (2)..(3)..(37)..(39): Xaa is C or S
  MOD_RES (17)..(18)..(19)..(20)..(21): Xaa is A or G
  MOD_RES (22)..(23)..(24)..(25): Xaa is A or G or is absent
PXXAPTQLRPVQVRKIXXXXXXXXXKKATVNMVVRAXGX

SEQ ID NO: 51711 - protein, 40 aa, Artificial Sequence
  GFR-binding peptide
  MOD_RES (4)..(5)..(39): Xaa is C or S
  MOD_RES (19)..(20)..(21)..(22)..(23): Xaa is A or G
  MOD_RES (24)..(25)..(26)..(27): Xaa is A or G or is absent
PKAXXVPTELRPVQMRKIXXXXXXXXXKKATVDMVVEGXG

SEQ ID NO: 51712 - protein, 39 aa, Artificial Sequence
  GFR-binding peptide
  MOD_RES (1)..(2)..(36)..(38): Xaa is C or S
  MOD_RES (16)..(17)..(18)..(19)..(20): Xaa is A or G
  MOD_RES (21)..(22)..(23)..(24): Xaa is A or G or is absent
XXAPTQLRSVKVAKVXXXXXXXXXKEVQVNMVVRAXGXH

SEQ ID NO: 51713 - protein, 36 aa, Artificial Sequence; identical to SEQ ID NO: 18913
  GFR-binding peptide
  MOD_RES (2)..(2): Xaa is C or S
  MOD_RES (18)..(19)..(20)..(21)..(22): Xaa is A or G
  MOD_RES (23)..(24)..(25)..(26): Xaa is A or G or is absent

SEQ ID NO: 51714 - protein, 33 aa, Artificial Sequence
  GFR-binding peptide
  MOD_RES (1)..(1): Xaa is C or S
  MOD_RES (15)..(16)..(17)..(18)..(19): Xaa is A or G
  MOD_RES (20)..(21)..(22)..(23): Xaa is A or G or is absent
XVPQDLRSVKIAKVXXXXXXXXXKEVQVMVVKS

SEQ ID NO: 51715 - protein, 40 aa, Artificial Sequence
  GFR-binding peptide
  MOD_RES (6)..(7): Xaa is C or S
  MOD_RES (21)..(22)..(23)..(24)..(25): Xaa is A or G
  MOD_RES (26)..(27)..(28)..(29): Xaa is A or G or is absent
TVPKPXXAPTQLRSVKVAKVXXXXXXXXXKEVQVNMVVRA

SEQ ID NO: 51716 - protein, 39 aa, Artificial Sequence; identical to SEQ ID NO: 18916
  GFR-binding peptide
  MOD_RES (2)..(39): Xaa is C or S
  MOD_RES (18)..(19)..(20)..(21)..(22): Xaa is A or G
  MOD_RES (23)..(24)..(25)..(26): Xaa is A or G or is absent

SEQ ID NO: 51717 - protein, 33 aa, Artificial Sequence
  GFR-binding peptide
  MOD_RES (1)..(1): Xaa is C or S
  MOD_RES (15)..(16)..(17)..(18)..(19): Xaa is A or G
  MOD_RES (20)..(21)..(22)..(23): Xaa is A or G or is absent
XVPQALRPVQIRKIXXXXXXXXXKKATVMIVRS

SEQ ID NO: 51718 - protein, 39 aa, Artificial Sequence
  GFR-binding peptide
  MOD_RES (3)..(4)..(38): Xaa is C or S
  MOD_RES (18)..(19)..(20)..(21)..(22): Xaa is A or G
  MOD_RES (23)..(24)..(25)..(26): Xaa is A or G or is absent
KPXXAPTKLRSVKVAKVXXXXXXXXXKEVQVNMVVRSXG

SEQ ID NO: 51719 - protein, 37 aa, Artificial Sequence; identical to SEQ ID NO: 13831
  GFR-binding peptide
  MOD_RES (3)..(4): Xaa is C or S
  MOD_RES (18)..(19)..(20)..(21)..(22): Xaa is A or G
  MOD_RES (23)..(24)..(25)..(26): Xaa is A or G or is absent

SEQ ID NO: 51720 - protein, 36 aa, Artificial Sequence; identical to SEQ ID NO: 13832
  GFR-binding peptide
  MOD_RES (34)..(36): Xaa is C or S
  MOD_RES (14)..(15)..(16)..(17)..(18): Xaa is A or G
  MOD_RES (19)..(20)..(21)..(22): Xaa is A or G or is absent

SEQ ID NO: 51721 - protein, 39 aa, Artificial Sequence; identical to SEQ ID NO: 18922
  GFR-binding peptide
  MOD_RES (2)..(39): Xaa is C or S

SEQ ID NO: 51722 - protein, 40 aa, Artificial Sequence; identical to SEQ ID NO: 13836
  GFR-binding peptide
  MOD_RES (6)..(38)..(40): Xaa is C or S

SEQ ID NO: 51723 - protein, 39 aa, Artificial Sequence; identical to SEQ ID NO: 18924
  GFR-binding peptide
  MOD_RES (4)..(4): Xaa is C or S

SEQ ID NO: 51724 - protein, 38 aa, Artificial Sequence; identical to SEQ ID NO: 18925
  GFR-binding peptide
  MOD_RES (36)..(38): Xaa is C or S
  MOD_RES (15)..(16)..(17)..(18)..(19): Xaa is A or G
  MOD_RES (20)..(21)..(22)..(23): Xaa is A or G or is absent

SEQ ID NO: 51725 - protein, 42 aa, Artificial Sequence; identical to SEQ ID NO: 13838
  GFR-binding peptide
  MOD_RES (6)..(7)..(39)..(41): Xaa is C or S

SEQ ID NO: 51726 - protein, 37 aa, Artificial Sequence; identical to SEQ ID NO: 13839
  GFR-binding peptide
  MOD_RES (1)..(2)..(36): Xaa is C or S
  MOD_RES (16)..(17)..(18)..(19)..(20): Xaa is A or G
  MOD_RES (21)..(22)..(23)..(24): Xaa is A or G or is absent

SEQ ID NO: 51727 - protein, 36 aa, Artificial Sequence; identical to SEQ ID NO: 13841
  GFR-binding peptide
  MOD_RES (1)..(2)..(33)..(35): Xaa is C or S

SEQ ID NO: 51728 - protein, 35 aa, Artificial Sequence
  GFR-binding peptide
  MOD_RES (1)..(1): Xaa is C or S
XRPTQVQLEPLTVLYYEIVRKKPIFEQLSNTLEDH

SEQ ID NO: 51729 - protein, 39 aa, Artificial Sequence; identical to SEQ ID NO: 38933
  GFR-binding peptide
  MOD_RES (5)..(6)..(39): Xaa is C or S
  MOD_RES (20)..(21)..(22)..(23)..(24): Xaa is A or G
  MOD_RES (25)..(26)..(27)..(28): Xaa is A or G or is absent

SEQ ID NO: 51730 - protein, 42 aa, Artificial Sequence
  GFR-binding peptide
  MOD_RES (6)..(7)..(41): Xaa is C or S
  MOD_RES (21)..(22)..(23)..(24)..(25): Xaa is A or G
  MOD_RES (26)..(27)..(28)..(29): Xaa is A or G or is absent
YVPKPXXAPTKLRSVKVAKVXXXXXXXXXKEVQVNMVVRSXG

SEQ ID NO: 51731 - protein, 41 aa, Artificial Sequence; identical to SEQ ID NO: 18929
  GFR-binding peptide
  MOD_RES (5)..(39)..(41): Xaa is C or S
  MOD_RES (19)..(20)..(21)..(22)..(23): Xaa is A or G
  MOD_RES (24)..(25)..(26)..(27): Xaa is A or G or is absent

SEQ ID NO: 51732 - protein, 42 aa, Artificial Sequence; identical to SEQ ID NO: 18930
  GFR-binding peptide
  MOD_RES (4)..(41): Xaa is C or S

SEQ ID NO: 51733 - protein, 40 aa, Artificial Sequence
  GFR-binding peptide
  MOD_RES (3)..(4)..(37)..(39): Xaa is C or S
  MOD_RES (18)..(19)..(20)..(21)..(22): Xaa is A or G
  MOD_RES (23)..(24)..(25)..(26): Xaa is A or G or is absent
SPXXVPQDLRSVKIAKVXXXXXXXXXKEVQVMVVKSXKXS

SEQ ID NO: 51734 - protein, 43 aa, Artificial Sequence; identical to SEQ ID NO: 18931
  GFR-binding peptide
  MOD_RES (7)..(41)..(43): Xaa is C or S

SEQ ID NO: 51735 - protein, 33 aa, Artificial Sequence; identical to SEQ ID NO: 13843
  GFR-binding peptide
  MOD_RES (31)..(33): Xaa is C or S

SEQ ID NO: 51736 - protein, 38 aa, Artificial Sequence; identical to SEQ ID NO: 13844
  GFR-binding peptide
  MOD_RES (4)..(5): Xaa is C or S
  MOD_RES (19)..(20)..(21)..(22)..(23): Xaa is A or G
  MOD_RES (24)..(25)..(26)..(27): Xaa is A or G or is absent

SEQ ID NO: 51737 - protein, 40 aa, Artificial Sequence
  GFR-binding peptide
  MOD_RES (4)..(4): Xaa is C or S
NVQXRPTQVQLEPLPVVYYEIVRKKPIFEQLSNTLEDHLA

SEQ ID NO: 51738 - protein, 39 aa, Artificial Sequence; identical to SEQ ID NO: 13845
  GFR-binding peptide
  MOD_RES (1)..(2)..(36)..(38): Xaa is C or S
  MOD_RES (16)..(17)..(18)..(19)..(20): Xaa is A or G
  MOD_RES (21)..(22)..(23)..(24): Xaa is A or G or is absent

SEQ ID NO: 51739 - protein, 34 aa, Artificial Sequence; identical to SEQ ID NO: 18933
  GFR-binding peptide

SEQ ID NO: 51740 - protein, 33 aa, Artificial Sequence
  GFR-binding peptide
  MOD_RES (1)..(2)..(33): Xaa is C or S
XXVPQALRSVKIAKVVGRKPKVKEVQVMIVRSX

SEQ ID NO: 51741 - protein, 38 aa, Artificial Sequence
  GFR-binding peptide
  MOD_RES (3)..(4)..(35)..(37): Xaa is C or S
SPXXVPQDLSNITIQIMVGRTPKVIGEMSMVVKSXKXS

SEQ ID NO: 51742 - protein, 34 aa, Artificial Sequence
  GFR-binding peptide
  MOD_RES (34)..(34): Xaa is C or S
  MOD_RES (14)..(15)..(16)..(17)..(18): Xaa is A or G
  MOD_RES (19)..(20)..(21)..(22): Xaa is A or G or is absent
APTQLSNITVQIMXXXXXXXXXIGEMSNMVVRAX

SEQ ID NO: 51743 - protein, 39 aa, Artificial Sequence
  GFR-binding peptide
  MOD_RES (3)..(37)..(39): Xaa is C or S
  MOD_RES (17)..(18)..(19)..(20)..(21): Xaa is A or G
  MOD_RES (22)..(23)..(24)..(25): Xaa is A or G or is absent
PTXAPTKLSNITVQIMXXXXXXXXXIGEMSNMVVRSXGX

SEQ ID NO: 51744 - protein, 38 aa, Artificial Sequence
  GFR-binding peptide
  MOD_RES (5)..(6): Xaa is C or S
  MOD_RES (20)..(21)..(22)..(23)..(24): Xaa is A or G
  MOD_RES (25)..(26)..(27)..(28): Xaa is A or G or is absent
IPKAXXVPTELSNITMQIMXXXXXXXXXIGEMSEMVVE

SEQ ID NO: 51745 - protein, 39 aa, Artificial Sequence
  GFR-binding peptide
  MOD_RES (3)..(37)..(39): Xaa is C or S
LEXVPTEEEPLTMLYYRIKPHQGQHEQLSNFLQHNKXEX

SEQ ID NO: 51746 - protein, 38 aa, Artificial Sequence; identical to SEQ ID NO: 18939
  GFR-binding peptide
  MOD_RES (5)..(5): Xaa is C or S
  MOD_RES (19)..(20)..(21)..(22)..(23): Xaa is A or G
  MOD_RES (24)..(25)..(26)..(27): Xaa is A or G or is absent

SEQ ID NO: 51747 - protein, 32 aa, Artificial Sequence
  GFR-binding peptide
  MOD_RES (31)..(31): Xaa is C or S
VPQALSNITIQIMVGRKPKVIGEMSMIVRSXK

SEQ ID NO: 51748 - protein, 40 aa, Artificial Sequence
  GFR-binding peptide
  MOD_RES (1)..(38)..(40): Xaa is C or S
XQPSRVHHEPLTVLYYEYVRKKPKLEQLSNRLEEHLEXAX

SEQ ID NO: 51749 - protein, 37 aa, Artificial Sequence; identical to SEQ ID NO: 13858
  GFR-binding peptide
  MOD_RES (6)..(7): Xaa is C or S

SEQ ID NO: 51750 - protein, 38 aa, Artificial Sequence
  GFR-binding peptide
  MOD_RES (6)..(38): Xaa is C or S
VTKPTXAPTKLSNITVQIMDDSSNVIIGEMSNMVVRSX

SEQ ID NO: 51751 - protein, 43 aa, Artificial Sequence
  GFR-binding peptide
  MOD_RES (5)..(6)..(40)..(42): Xaa is C or S
  MOD_RES (20)..(21)..(22)..(23)..(24): Xaa is A or G
  MOD_RES (25)..(26)..(27)..(28): Xaa is A or G or is absent
VPKPXXAPTQLSNITVQIMXXXXXXXXXIGEMSNMVVRAXGXH

SEQ ID NO: 51752 - protein, 37 aa, Artificial Sequence
  GFR-binding peptide
  MOD_RES (4)..(4): Xaa is C or S
GLEXVPTEEEPLPMVYYRIKPHQGQHEQLSNFLQHNK

SEQ ID NO: 51753 - protein, 37 aa, Artificial Sequence; identical to SEQ ID NO: 13861
  GFR-binding peptide
  MOD_RES (1)..(2)..(34)..(36): Xaa is C or S

SEQ ID NO: 51754 - protein, 40 aa, Artificial Sequence
  GFR-binding peptide
  MOD_RES (5)..(6)..(38)..(40): Xaa is C or S
IPKAXXVPTELSNITMQIMDENEKVVIGEMSDMVVEGXGX

SEQ ID NO: 51755 - protein, 43 aa, Artificial Sequence
  GFR-binding peptide
  MOD_RES (6)..(7)..(41)..(43): Xaa is C or S
  MOD_RES (21)..(22)..(23)..(24)..(25): Xaa is A or G
  MOD_RES (26)..(27)..(28)..(29): Xaa is A or G or is absent
TVPKPXXAPTQLRPVQVRKIXXXXXXXXXKKATVNMVVRAXGX

SEQ ID NO: 51756 - protein, 32 aa, Artificial Sequence
  GFR-binding peptide
  MOD_RES (32)..(32): Xaa is C or S
APTQLRSVKVAKVDDSSNVIKEVQVNMVVRAX

SEQ ID NO: 51757 - protein, 38 aa, Artificial Sequence
  GFR-binding peptide
  MOD_RES (6)..(7): Xaa is C or S
KIPKAXXVPTELRSVKMAKVDENEKVVKEVQVDMVVEG

SEQ ID NO: 51758 - protein, 42 aa, Artificial Sequence; identical to SEQ ID NO: 18948
  GFR-binding peptide
  MOD_RES (6)..(40)..(42): Xaa is C or S

SEQ ID NO: 51759 - protein, 38 aa, Artificial Sequence; identical to SEQ ID NO: 13863
  GFR-binding peptide
  MOD_RES (5)..(6)..(38): Xaa is C or S

SEQ ID NO: 51760 - protein, 33 aa, Artificial Sequence; identical to SEQ ID NO: 13865
  GFR-binding peptide
  MOD_RES (2)..(3): Xaa is C or S

SEQ ID NO: 51761 - protein, 41 aa, Artificial Sequence
  GFR-binding peptide
  MOD_RES (7)..(41): Xaa is C or S
  MOD_RES (21)..(22)..(23)..(24)..(25): Xaa is A or G
  MOD_RES (26)..(27)..(28)..(29): Xaa is A or G or is absent
NDEGLEXVPTEEEPLPMVYYXXXXXXXXXEQLSNFLQHNKX

SEQ ID NO: 51762 - protein, 34 aa, Artificial Sequence
  GFR-binding peptide
  MOD_RES (1)..(2): Xaa is C or S
  MOD_RES (16)..(17)..(18)..(19)..(20): Xaa is A or G
  MOD_RES (21)..(22)..(23)..(24): Xaa is A or G or is absent
XXAPTQLRPVQVRKIXXXXXXXXXKKATVNMVVR

SEQ ID NO: 51763 - protein, 40 aa, Artificial Sequence
  GFR-binding peptide
  MOD_RES (7)..(39): Xaa is C or S
HVTKPTXAPTKLRSVKVAKVDDSSNVIKEVQVNMVVRSXG

SEQ ID NO: 51764 - protein, 33 aa, Artificial Sequence; identical to SEQ ID NO: 18950
  GFR-binding peptide
  MOD_RES (14)..(15)..(16)..(17)..(18): Xaa is A or G
  MOD_RES (19)..(20)..(21)..(22): Xaa is A or G or is absent

SEQ ID NO: 51765 - protein, 38 aa, Artificial Sequence; identical to SEQ ID NO: 13866
  GFR-binding peptide
  MOD_RES (4)..(5)..(38): Xaa is C or S
  MOD_RES (19)..(20)..(21)..(22)..(23): Xaa is A or G
  MOD_RES (24)..(25)..(26)..(27): Xaa is A or G or is absent

SEQ ID NO: 51766 - protein, 36 aa, Artificial Sequence
  GFR-binding peptide
  MOD_RES (1)..(2)..(34)..(36): Xaa is C or S
XXVPTELRSVKMAKVDEYDKVVKEVQVEMVVEGXGX

SEQ ID NO: 51767 - protein, 38 aa, Artificial Sequence; identical to SEQ ID NO: 13867
  GFR-binding peptide
  MOD_RES (4)..(5)..(36)..(38): Xaa is C or S

SEQ ID NO: 51768 - protein, 36 aa, Artificial Sequence; identical to SEQ ID NO: 13868
  GFR-binding peptide
  MOD_RES (3)..(4): Xaa is C or S
  MOD_RES (18)..(19)..(20)..(21)..(22): Xaa is A or G
  MOD_RES (23)..(24)..(25)..(26): Xaa is A or G or is absent

SEQ ID NO: 51769 - protein, 38 aa, Artificial Sequence
  GFR-binding peptide
  MOD_RES (6)..(7): Xaa is C or S
YVPKPXXAPTKLRPVQVRKIDDSSNVIKKATVNMVVRS

SEQ ID NO: 51770 - protein, 38 aa, Artificial Sequence
  GFR-binding peptide
  MOD_RES (3)..(35)..(37): Xaa is C or S
PTXAPTKLRSVKVAKVDDSSNVIKEVQVNMVVRSXGXH

SEQ ID NO: 51771 - protein, 34 aa, Artificial Sequence; identical to SEQ ID NO: 13871
  GFR-binding peptide
  MOD_RES (32)..(34): Xaa is C or S

SEQ ID NO: 51772 - protein, 33 aa, Artificial Sequence
  GFR-binding peptide
  MOD_RES (14)..(15)..(16)..(17)..(18): Xaa is A or G
  MOD_RES (19)..(20)..(21)..(22): Xaa is A or G or is absent
APTKLRSVKVAKVXXXXXXXXXKEVQVNMVVRS

SEQ ID NO: 51773 - protein, 36 aa, Artificial Sequence
  GFR-binding peptide
  MOD_RES (2)..(3)..(35): Xaa is C or S
PXXAPTKLRSVKVAKVDDSSNVIKEVQVNMVVRSXG

SEQ ID NO: 51774 - protein, 35 aa, Artificial Sequence; identical to SEQ ID NO: 18954
  GFR-binding peptide
  MOD_RES (3)..(3): Xaa is C or S

SEQ ID NO: 51775 - protein, 38 aa, Artificial Sequence
  GFR-binding peptide
  MOD_RES (4)..(4): Xaa is C or S
  MOD_RES (20)..(21)..(22)..(23)..(24): Xaa is A or G
  MOD_RES (25)..(26)..(27)..(28): Xaa is A or G or is absent
SVKXQPSRVHHEPLTVLYYXXXXXXXXXEQLSNRLEEH

SEQ ID NO: 51776 - protein, 39 aa, Artificial Sequence; identical to SEQ ID NO: 13874
  GFR-binding peptide
  MOD_RES (2)..(3)..(36)..(38): Xaa is C or S
  MOD_RES (17)..(18)..(19)..(20)..(21): Xaa is A or G
  MOD_RES (22)..(23)..(24)..(25): Xaa is A or G or is absent

SEQ ID NO: 51777 - protein, 39 aa, Artificial Sequence
  GFR-binding peptide
  MOD_RES (4)..(5)..(36)..(38): Xaa is C or S
AAPXXVPQALSNITIQIMVGRKPKVIGEMSMIVRSXKXS

SEQ ID NO: 51778 - protein, 36 aa, Artificial Sequence
  GFR-binding peptide
  MOD_RES (2)..(3)..(35): Xaa is C or S
AXXVPTELRSVKMAKVDEYDKVVKEVQVEMVVEGXG

SEQ ID NO: 51779 - protein, 40 aa, Artificial Sequence; identical to SEQ ID NO: 13875
  GFR-binding peptide
  MOD_RES (4)..(5)..(38)..(40): Xaa is C or S
  MOD_RES (19)..(20)..(21)..(22)..(23): Xaa is A or G
  MOD_RES (24)..(25)..(26)..(27): Xaa is A or G or is absent

SEQ ID NO: 51780 - protein, 36 aa, Artificial Sequence; identical to SEQ ID NO: 13876
  GFR-binding peptide
  MOD_RES (4)..(5)..(36): Xaa is C or S

SEQ ID NO: 51781 - protein, 38 aa, Artificial Sequence
  GFR-binding peptide
  MOD_RES (2)..(3)..(36)..(38): Xaa is C or S
  MOD_RES (17)..(18)..(19)..(20)..(21): Xaa is A or G
  MOD_RES (22)..(23)..(24)..(25): Xaa is A or G or is absent
PXXVPQDLRSVKIAKVXXXXXXXXXKEVQVMVVKSXKX

SEQ ID NO: 51782 - protein, 37 aa, Artificial Sequence; identical to SEQ ID NO: 18958
  GFR-binding peptide
  MOD_RES (36)..(36): Xaa is C or S
  MOD_RES (15)..(16)..(17)..(18)..(19): Xaa is A or G
  MOD_RES (20)..(21)..(22)..(23): Xaa is A or G or is absent

SEQ ID NO: 51783 - protein, 40 aa, Artificial Sequence; identical to SEQ ID NO: 13878
  GFR-binding peptide
  MOD_RES (5)..(6)..(38)..(40): Xaa is C or S

SEQ ID NO: 51784 - protein, 36 aa, Artificial Sequence
  GFR-binding peptide
  MOD_RES (16)..(17)..(18)..(19)..(20): Xaa is A or G
  MOD_RES (21)..(22)..(23)..(24): Xaa is A or G or is absent
RPTQVQLEPLTVLYYXXXXXXXXXEQLSNTLEDHLA

SEQ ID NO: 51785 - protein, 33 aa, Artificial Sequence; identical to SEQ ID NO: 18959
  GFR-binding peptide
  MOD_RES (15)..(16)..(17)..(18)..(19): Xaa is A or G
  MOD_RES (20)..(21)..(22)..(23): Xaa is A or G or is absent

SEQ ID NO: 51786 - protein, 40 aa, Artificial Sequence; identical to SEQ ID NO: 13881
  GFR-binding peptide
  MOD_RES (4)..(5)..(37)..(39): Xaa is C or S

SEQ ID NO: 51787 - protein, 36 aa, Artificial Sequence; identical to SEQ ID NO: 13882
  GFR-binding peptide
  MOD_RES (2)..(3): Xaa is C or S
  MOD_RES (17)..(18)..(19)..(20)..(21): Xaa is A or G
  MOD_RES (22)..(23)..(24)..(25): Xaa is A or G or is absent

SEQ ID NO: 51788 - protein, 39 aa, Artificial Sequence
  GFR-binding peptide
  MOD_RES (5)..(6)..(38): Xaa is C or S
VPKPXXAPTKLRPVQVRKIDDSSNVIKKATVNMVVRSXG

SEQ ID NO: 51789 - protein, 39 aa, Artificial Sequence
  GFR-binding peptide
  MOD_RES (6)..(7): Xaa is C or S
  MOD_RES (21)..(22)..(23)..(24)..(25): Xaa is A or G
  MOD_RES (26)..(27)..(28)..(29): Xaa is A or G or is absent
KIPKAXXVPTELRPVQMRKIXXXXXXXXXKKATVDMVVE

SEQ ID NO: 51790 - protein, 36 aa, Artificial Sequence
  GFR-binding peptide
  MOD_RES (1)..(35): Xaa is C or S
  MOD_RES (15)..(16)..(17)..(18)..(19): Xaa is A or G
  MOD_RES (20)..(21)..(22)..(23): Xaa is A or G or is absent
XVPTELSNITMQIMXXXXXXXXXIGEMSDMVVEGXG

SEQ ID NO: 51791 - protein, 35 aa, Artificial Sequence; identical to SEQ ID NO: 13886
  GFR-binding peptide
  MOD_RES (2)..(3): Xaa is C or S
  MOD_RES (17)..(18)..(19)..(20)..(21): Xaa is A or G
  MOD_RES (22)..(23)..(24)..(25): Xaa is A or G or is absent

SEQ ID NO: 51792 - protein, 43 aa, Artificial Sequence
  GFR-binding peptide
  MOD_RES (5)..(42): Xaa is C or S
RNVQXRPTQVQLEPLTVLYYEIVRKKPIFEQLSNTLEDHLAXK

SEQ ID NO: 51793 - protein, 36 aa, Artificial Sequence
  GFR-binding peptide
  MOD_RES (4)..(5)..(36): Xaa is C or S
AAPXXVPQALSNITIQIMVGRKPKVIGEMSMIVRSX

SEQ ID NO: 51794 - protein, 37 aa, Artificial Sequence
  GFR-binding peptide
  MOD_RES (1)..(2)..(34)..(36): Xaa is C or S
XXVPTELRSVKMAKVDENEKVVKEVQVDMVVEGXGXR

SEQ ID NO: 51795 - protein, 34 aa, Artificial Sequence
  GFR-binding peptide
  MOD_RES (3)..(4): Xaa is C or S
APXXVPQALRSVKIAKVVGRKPKVKEVQVMIVRS

SEQ ID NO: 51796 - protein, 35 aa, Artificial Sequence; identical to SEQ ID NO: 13891
  GFR-binding peptide
  MOD_RES (1)..(33)..(35): Xaa is C or S

SEQ ID NO: 51797 - protein, 33 aa, Artificial Sequence
  GFR-binding peptide
  MOD_RES (1)..(2)..(33): Xaa is C or S
XXVPQALSNITIQIMVGRKPKVIGEMSMIVRSX

SEQ ID NO: 51798 - protein, 39 aa, Artificial Sequence
  GFR-binding peptide
  MOD_RES (6)..(7): Xaa is C or S
  MOD_RES (21)..(22)..(23)..(24)..(25): Xaa is A or G
  MOD_RES (26)..(27)..(28)..(29): Xaa is A or G or is absent
ASAAPXXVPQALRPVQIRKIXXXXXXXXXKKATVMIVRS

SEQ ID NO: 51799 - protein, 38 aa, Artificial Sequence; identical to SEQ ID NO: 13892
  GFR-binding peptide
  MOD_RES (1)..(35)..(37): Xaa is C or S
  MOD_RES (15)..(16)..(17)..(18)..(19): Xaa is A or G
  MOD_RES (20)..(21)..(22)..(23): Xaa is A or G or is absent

SEQ ID NO: 51800 - protein, 37 aa, Artificial Sequence; identical to SEQ ID NO: 13893
  GFR-binding peptide
  MOD_RES (34)..(36): Xaa is C or S
  MOD_RES (14)..(15)..(16)..(17)..(18): Xaa is A or G
  MOD_RES (19)..(20)..(21)..(22): Xaa is A or G or is absent

SEQ ID NO: 51801 - protein, 36 aa, Artificial Sequence; identical to SEQ ID NO: 13895
  GFR-binding peptide
  MOD_RES (2)..(34)..(36): Xaa is C or S

SEQ ID NO: 51802 - protein, 39 aa, Artificial Sequence; identical to SEQ ID NO: 13898
  GFR-binding peptide
  MOD_RES (6)..(7): Xaa is C or S
  MOD_RES (21)..(22)..(23)..(24)..(25): Xaa is A or G
  MOD_RES (26)..(27)..(28)..(29): Xaa is A or G or is absent

SEQ ID NO: 51803 - protein, 33 aa, Artificial Sequence
  GFR-binding peptide
  MOD_RES (2)..(3): Xaa is C or S
AXXVPTELRPVQMRKIDENEKVVKKATVDMVVE

SEQ ID NO: 51804 - protein, 40 aa, Artificial Sequence
  GFR-binding peptide
  MOD_RES (3)..(4)..(38)..(40): Xaa is C or S
  MOD_RES (18)..(19)..(20)..(21)..(22): Xaa is A or G
  MOD_RES (23)..(24)..(25)..(26): Xaa is A or G or is absent
KPXXAPTQLSNITVQIMXXXXXXXXXIGEMSNMVVRAXGX

SEQ ID NO: 51805 - protein, 37 aa, Artificial Sequence; identical to SEQ ID NO: 18975
  GFR-binding peptide
  MOD_RES (5)..(5): Xaa is C or S
  MOD_RES (19)..(20)..(21)..(22)..(23): Xaa is A or G
  MOD_RES (24)..(25)..(26)..(27): Xaa is A or G or is absent

SEQ ID NO: 51806 - protein, 38 aa, Artificial Sequence; identical to SEQ ID NO: 13900
  GFR-binding peptide
  MOD_RES (5)..(6): Xaa is C or S
  MOD_RES (20)..(21)..(22)..(23)..(24): Xaa is A or G
  MOD_RES (25)..(26)..(27)..(28): Xaa is A or G or is absent

SEQ ID NO: 51807 - protein, 41 aa, Artificial Sequence; identical to SEQ ID NO: 39020
  GFR-binding peptide
  MOD_RES (4)..(5)..(38)..(40): Xaa is C or S
  MOD_RES (19)..(20)..(21)..(22)..(23): Xaa is A or G
  MOD_RES (24)..(25)..(26)..(27): Xaa is A or G or is absent

SEQ ID NO: 51808 - protein, 41 aa, Artificial Sequence
  GFR-binding peptide
  MOD_RES (6)..(7)..(39)..(41): Xaa is C or S
TVPKPXXAPTQLSNITVQIMDDSSNVIIGEMSNMVVRAXGX

SEQ ID NO: 51809 - protein, 37 aa, Artificial Sequence
  GFR-binding peptide
  MOD_RES (2)..(3)..(37): Xaa is C or S
  MOD_RES (17)..(18)..(19)..(20)..(21): Xaa is A or G
  MOD_RES (22)..(23)..(24)..(25): Xaa is A or G or is absent
PXXAPTKLRSVKVAKVXXXXXXXXXKEVQVNMVVRSX

SEQ ID NO: 51810 - protein, 45 aa, Artificial Sequence
  GFR-binding peptide
  MOD_RES (5)..(42)..(44): Xaa is C or S
RNVQXRPTQVQLEPLPVVYYEIVRKKPIFEQLSNTLEDHLAXKXE

SEQ ID NO: 51811 - protein, 36 aa, Artificial Sequence
  GFR-binding peptide
  MOD_RES (4)..(5)..(36): Xaa is C or S
AAPXXVPQALRSVKIAKVVGRKPKVKEVQVMIVRSX

SEQ ID NO: 51812 - protein, 39 aa, Artificial Sequence; identical to SEQ ID NO: 18978
  GFR-binding peptide
  MOD_RES (3)..(3): Xaa is C or S
  MOD_RES (19)..(20)..(21)..(22)..(23): Xaa is A or G
  MOD_RES (24)..(25)..(26)..(27): Xaa is A or G or is absent

SEQ ID NO: 51813 - protein, 34 aa, Artificial Sequence
  GFR-binding peptide
  MOD_RES (31)..(33): Xaa is C or S
VPQDLSNITIQIMVGRTPKVIGEMSMVVKSXKXS

SEQ ID NO: 51814 - protein, 37 aa, Artificial Sequence; identical to SEQ ID NO: 13903
  GFR-binding peptide
  MOD_RES (34)..(36): Xaa is C or S
  MOD_RES (14)..(15)..(16)..(17)..(18): Xaa is A or G
  MOD_RES (19)..(20)..(21)..(22): Xaa is A or G or is absent

SEQ ID NO: 51815 - protein, 33 aa, Artificial Sequence
  GFR-binding peptide
  MOD_RES (32)..(32): Xaa is C or S
APTKLRSVKVAKVDDSSNVIKEVQVNMVVRSXG

SEQ ID NO: 51816 - protein, 40 aa, Artificial Sequence; identical to SEQ ID NO: 13907
  GFR-binding peptide
  MOD_RES (4)..(5)..(38)..(40): Xaa is C or S
  MOD_RES (19)..(20)..(21)..(22)..(23): Xaa is A or G
  MOD_RES (24)..(25)..(26)..(27): Xaa is A or G or is absent

SEQ ID NO: 51817 - protein, 39 aa, Artificial Sequence
  GFR-binding peptide
  MOD_RES (3)..(4)..(36)..(38): Xaa is C or S
KAXXVPTELRPVQMRKIDEYDKVVKKATVEMVVEGXGXR

SEQ ID NO: 51818 - protein, 40 aa, Artificial Sequence
  GFR-binding peptide
  MOD_RES (6)..(7): Xaa is C or S
  MOD_RES (21)..(22)..(23)..(24)..(25): Xaa is A or G
  MOD_RES (26)..(27)..(28)..(29): Xaa is A or G or is absent
TVPKPXXAPTQLRPVQVRKIXXXXXXXXXKKATVNMVVRA

SEQ ID NO: 51819 - protein, 33 aa, Artificial Sequence
  GFR-binding peptide
  MOD_RES (1)..(1): Xaa is C or S
  MOD_RES (15)..(16)..(17)..(18)..(19): Xaa is A or G
  MOD_RES (20)..(21)..(22)..(23): Xaa is A or G or is absent
XVPTEEEPLPMVYYXXXXXXXXXEQLSNFLQHN

SEQ ID NO: 51820 - protein, 37 aa, Artificial Sequence
  GFR-binding peptide
  MOD_RES (1)..(35)..(37): Xaa is C or S
  MOD_RES (15)..(16)..(17)..(18)..(19): Xaa is A or G
  MOD_RES (20)..(21)..(22)..(23): Xaa is A or G or is absent
XAPTQLRSVKVAKVXXXXXXXXXKEVQVNMVVRAXGX

SEQ ID NO: 51821 - protein, 40 aa, Artificial Sequence
  GFR-binding peptide
  MOD_RES (6)..(40): Xaa is C or S
DEGLEXVPTEEEPLPMVYYRIKPHQGQHEQLSNFLQHNKX

SEQ ID NO: 51822 - protein, 37 aa, Artificial Sequence
  GFR-binding peptide
  MOD_RES (2)..(3)..(37): Xaa is C or S
  MOD_RES (17)..(18)..(19)..(20)..(21): Xaa is A or G
  MOD_RES (22)..(23)..(24)..(25): Xaa is A or G or is absent
AXXVPTELRPVQMRKIXXXXXXXXXKKATVDMVVEGX

SEQ ID NO: 51823 - protein, 42 aa, Artificial Sequence
  GFR-binding peptide
  MOD_RES (4)..(5)..(39)..(41): Xaa is C or S
  MOD_RES (19)..(20)..(21)..(22)..(23): Xaa is A or G
  MOD_RES (24)..(25)..(26)..(27): Xaa is A or G or is absent
PKPXXAPTQLRSVKVAKVXXXXXXXXXKEVQVNMVVRAXGXH

SEQ ID NO: 51824 - protein, 35 aa, Artificial Sequence; identical to SEQ ID NO: 13914
  GFR-binding peptide
  MOD_RES (1)..(32)..(34): Xaa is C or S

SEQ ID NO: 51825 - protein, 38 aa, Artificial Sequence; identical to SEQ ID NO: 18980
  GFR-binding peptide
  MOD_RES (1)..(38): Xaa is C or S

SEQ ID NO: 51826 - protein, 40 aa, Artificial Sequence; identical to SEQ ID NO: 13916
  GFR-binding peptide
  MOD_RES (4)..(5)..(39): Xaa is C or S
  MOD_RES (19)..(20)..(21)..(22)..(23): Xaa is A or G
  MOD_RES (24)..(25)..(26)..(27): Xaa is A or G or is absent

SEQ ID NO: 51827 - protein, 42 aa, Artificial Sequence; identical to SEQ ID NO: 13919
  GFR-binding peptide
  MOD_RES (4)..(5)..(39)..(41): Xaa is C or S
  MOD_RES (19)..(20)..(21)..(22)..(23): Xaa is A or G
  MOD_RES (24)..(25)..(26)..(27): Xaa is A or G or is absent

SEQ ID NO: 51828 - protein, 41 aa, Artificial Sequence; identical to SEQ ID NO: 18984
  GFR-binding peptide
  MOD_RES (5)..(5): Xaa is C or S
  MOD_RES (21)..(22)..(23)..(24)..(25): Xaa is A or G
  MOD_RES (26)..(27)..(28)..(29): Xaa is A or G or is absent

SEQ ID NO: 51829 - protein, 41 aa, Artificial Sequence
  GFR-binding peptide
  MOD_RES (5)..(6)..(38)..(40): Xaa is C or S
VPKPXXAPTQLSNITVQIMDDSSNVIIGEMSNMVVRAXGXH

SEQ ID NO: 51830 - protein, 38 aa, Artificial Sequence; identical to SEQ ID NO: 13924
  GFR-binding peptide
  MOD_RES (4)..(5)..(36)..(38): Xaa is C or S

SEQ ID NO: 51831 - protein, 36 aa, Artificial Sequence; identical to SEQ ID NO: 18988
  GFR-binding peptide

SEQ ID NO: 51832 - protein, 33 aa, Artificial Sequence; identical to SEQ ID NO: 13926
  GFR-binding peptide
  MOD_RES (2)..(3): Xaa is C or S

SEQ ID NO: 51833 - protein, 31 aa, Artificial Sequence
  GFR-binding peptide
  MOD_RES (31)..(31): Xaa is C or S
VPQALSNITIQIMVGRKPKVIGEMSMIVRSX

SEQ ID NO: 51834 - protein, 38 aa, Artificial Sequence; identical to SEQ ID NO: 13927
  GFR-binding peptide
  MOD_RES (4)..(5): Xaa is C or S
  MOD_RES (19)..(20)..(21)..(22)..(23): Xaa is A or G
  MOD_RES (24)..(25)..(26)..(27): Xaa is A or G or is absent

SEQ ID NO: 51835 - protein, 36 aa, Artificial Sequence
  GFR-binding peptide
  MOD_RES (1)..(2)..(35): Xaa is C or S
  MOD_RES (16)..(17)..(18)..(19)..(20): Xaa is A or G
  MOD_RES (21)..(22)..(23)..(24): Xaa is A or G or is absent
XXVPQALSNITIQIMXXXXXXXXXIGEMSMIVRSXK

SEQ ID NO: 51836 - protein, 39 aa, Artificial Sequence
  GFR-binding peptide
  MOD_RES (4)..(5)..(36)..(38): Xaa is C or S
ASPXXVPQDLRSVKIAKVVGRTPKVKEVQVMVVKSXKXS

SEQ ID NO: 51837 - protein, 35 aa, Artificial Sequence
  GFR-binding peptide
  MOD_RES (1)..(33)..(35): Xaa is C or S
XVPTELSNITMQIMDENEKVVIGEMSDMVVEGXGX

SEQ ID NO: 51838 - protein, 38 aa, Artificial Sequence
  GFR-binding peptide
  MOD_RES (2)..(3)..(37): Xaa is C or S
  MOD_RES (17)..(18)..(19)..(20)..(21): Xaa is A or G
  MOD_RES (22)..(23)..(24)..(25): Xaa is A or G or is absent
PXXAPTQLRSVKVAKVXXXXXXXXXKEVQVNMVVRAXG

SEQ ID NO: 51839 - protein, 41 aa, Artificial Sequence; identical to SEQ ID NO: 18989
  GFR-binding peptide
  MOD_RES (1)..(38)..(40): Xaa is C or S
  MOD_RES (17)..(18)..(19)..(20)..(21): Xaa is A or G
  MOD_RES (22)..(23)..(24)..(25): Xaa is A or G or is absent

SEQ ID NO: 51840 - protein, 36 aa, Artificial Sequence
  GFR-binding peptide
  MOD_RES (3)..(4)..(35): Xaa is C or S
SPXXVPQDLRSVKIAKVVGRTPKVKEVQVMVVKSXK

SEQ ID NO: 51841 - protein, 34 aa, Artificial Sequence; identical to SEQ ID NO: 13929
  GFR-binding peptide
  MOD_RES (1)..(32)..(34): Xaa is C or S

SEQ ID NO: 51842 - protein, 35 aa, Artificial Sequence; identical to SEQ ID NO: 18990
  GFR-binding peptide
  MOD_RES (35)..(35): Xaa is C or S

SEQ ID NO: 51843 - protein, 37 aa, Artificial Sequence
  GFR-binding peptide
  MOD_RES (36)..(36): Xaa is C or S
  MOD_RES (15)..(16)..(17)..(18)..(19): Xaa is A or G
  MOD_RES (20)..(21)..(22)..(23): Xaa is A or G or is absent
PSRVHHEPLPVVYYXXXXXXXXXEQLSNRLEEHLEXA

SEQ ID NO: 51844 - protein, 39 aa, Artificial Sequence; identical to SEQ ID NO: 13931
  GFR-binding peptide
  MOD_RES (3)..(4)..(38): Xaa is C or S
  MOD_RES (18)..(19)..(20)..(21)..(22): Xaa is A or G
  MOD_RES (23)..(24)..(25)..(26): Xaa is A or G or is absent

SEQ ID NO: 51845 - protein, 44 aa, Artificial Sequence; identical to SEQ ID NO: 18993
  GFR-binding peptide
  MOD_RES (7)..(41)..(43): Xaa is C or S
  MOD_RES (21)..(22)..(23)..(24)..(25): Xaa is A or G
  MOD_RES (26)..(27)..(28)..(29): Xaa is A or G or is absent

SEQ ID NO: 51846 - protein, 40 aa, Artificial Sequence; identical to SEQ ID NO: 18994
  GFR-binding peptide
  MOD_RES (3)..(37)..(39): Xaa is C or S
  MOD_RES (17)..(18)..(19)..(20)..(21): Xaa is A or G
  MOD_RES (22)..(23)..(24)..(25): Xaa is A or G or is absent

SEQ ID NO: 51847 - protein, 37 aa, Artificial Sequence
  GFR-binding peptide
  MOD_RES (3)..(4)..(37): Xaa is C or S
  MOD_RES (18)..(19)..(20)..(21)..(22): Xaa is A or G
  MOD_RES (23)..(24)..(25)..(26): Xaa is A or G or is absent
SPXXVPQDLRPVQIRKIXXXXXXXXXKKATVMVVKSX

SEQ ID NO: 51848 - protein, 37 aa, Artificial Sequence
  GFR-binding peptide
  MOD_RES (2)..(3)..(35)..(37): Xaa is C or S
PXXAPTKLRPVQVRKIDDSSNVIKKATVNMVVRSXGX

SEQ ID NO: 51849 - protein, 41 aa, Artificial Sequence; identical to SEQ ID NO: 13934
  GFR-binding peptide
  MOD_RES (5)..(6)..(38)..(40): Xaa is C or S

SEQ ID NO: 51850 - protein, 41 aa, Artificial Sequence
  GFR-binding peptide
  MOD_RES (1)..(38)..(40): Xaa is C or S
XQPSRVHHEPLPVVYYEYVRKKPKLEQLSNRLEEHLEXAXA

SEQ ID NO: 51851 - protein, 31 aa, Artificial Sequence; identical to SEQ ID NO: 13937
  GFR-binding peptide
  MOD_RES (1)..(1): Xaa is C or S

SEQ ID NO: 51852 - protein, 38 aa, Artificial Sequence
  GFR-binding peptide
  MOD_RES (2)..(3)..(36)..(38): Xaa is C or S
  MOD_RES (17)..(18)..(19)..(20)..(21): Xaa is A or G
  MOD_RES (22)..(23)..(24)..(25): Xaa is A or G or is absent
PXXVPQALSNITIQIMXXXXXXXXXIGEMSMIVRSXKX

SEQ ID NO: 51853 - protein, 36 aa, Artificial Sequence
  GFR-binding peptide
  MOD_RES (3)..(4): Xaa is C or S
  MOD_RES (18)..(19)..(20)..(21)..(22): Xaa is A or G
  MOD_RES (23)..(24)..(25)..(26): Xaa is A or G or is absent
KPXXAPTQLSNITVQIMXXXXXXXXXIGEMSNMVVR

SEQ ID NO: 51854 - protein, 34 aa, Artificial Sequence
  GFR-binding peptide
  MOD_RES (2)..(3): Xaa is C or S
AXXVPTELRPVQMRKIDENEKVVKKATVDMVVEG

SEQ ID NO: 51855 - protein, 40 aa, Artificial Sequence
  GFR-binding peptide
  MOD_RES (5)..(5): Xaa is C or S
  MOD_RES (21)..(22)..(23)..(24)..(25): Xaa is A or G
  MOD_RES (26)..(27)..(28)..(29): Xaa is A or G or is absent
RNVQXRPTQVQLEPLTVLYYXXXXXXXXXEQLSNTLEDHL

SEQ ID NO: 51856 - protein, 38 aa, Artificial Sequence; identical to SEQ ID NO: 13938
  GFR-binding peptide
  MOD_RES (5)..(6): Xaa is C or S
  MOD_RES (20)..(21)..(22)..(23)..(24): Xaa is A or G
  MOD_RES (25)..(26)..(27)..(28): Xaa is A or G or is absent

SEQ ID NO: 51857 - protein, 42 aa, Artificial Sequence; identical to SEQ ID NO: 13940
  GFR-binding peptide
  MOD_RES (5)..(6)..(40)..(42): Xaa is C or S
  MOD_RES (20)..(21)..(22)..(23)..(24): Xaa is A or G
  MOD_RES (25)..(26)..(27)..(28): Xaa is A or G or is absent

SEQ ID NO: 51858 - protein, 34 aa, Artificial Sequence; identical to SEQ ID NO: 13941
  GFR-binding peptide
  MOD_RES (1)..(32)..(34): Xaa is C or S

SEQ ID NO: 51859 - protein, 36 aa, Artificial Sequence; identical to SEQ ID NO: 13942
  GFR-binding peptide
  MOD_RES (3)..(4): Xaa is C or S
  MOD_RES (18)..(19)..(20)..(21)..(22): Xaa is A or G
  MOD_RES (23)..(24)..(25)..(26): Xaa is A or G or is absent

SEQ ID NO: 51860 - protein, 32 aa, Artificial Sequence
  GFR-binding peptide
  MOD_RES (1)..(1): Xaa is C or S
XAPTKLSNITVQIMDDSSNVIIGEMSNMVVRS

SEQ ID NO: 51861 - protein, 40 aa, Artificial Sequence; identical to SEQ ID NO: 13944
  GFR-binding peptide
  MOD_RES (2)..(3)..(37)..(39): Xaa is C or S
  MOD_RES (17)..(18)..(19)..(20)..(21): Xaa is A or G
  MOD_RES (22)..(23)..(24)..(25): Xaa is A or G or is absent

SEQ ID NO: 51862 - protein, 39 aa, Artificial Sequence
  GFR-binding peptide
  MOD_RES (4)..(5)..(38): Xaa is C or S
  MOD_RES (19)..(20)..(21)..(22)..(23): Xaa is A or G
  MOD_RES (24)..(25)..(26)..(27): Xaa is A or G or is absent
AAPXXVPQALRSVKIAKVXXXXXXXXXKEVQVMIVRSXK

SEQ ID NO: 51863 - protein, 39 aa, Artificial Sequence; identical to SEQ ID NO: 13947
  GFR-binding peptide
  MOD_RES (4)..(5)..(39): Xaa is C or S
  MOD_RES (19)..(20)..(21)..(22)..(23): Xaa is A or G
  MOD_RES (24)..(25)..(26)..(27): Xaa is A or G or is absent

SEQ ID NO: 51864 - protein, 36 aa, Artificial Sequence
  GFR-binding peptide
  MOD_RES (1)..(33)..(35): Xaa is C or S
XVPTELRPVQMRKIDEYDKVVKKATVEMVVEGXGXR

SEQ ID NO: 51865 - protein, 39 aa, Artificial Sequence; identical to SEQ ID NO: 13951
  GFR-binding peptide
  MOD_RES (5)..(6): Xaa is C or S
  MOD_RES (20)..(21)..(22)..(23)..(24): Xaa is A or G
  MOD_RES (25)..(26)..(27)..(28): Xaa is A or G or is absent

SEQ ID NO: 51866 - protein, 34 aa, Artificial Sequence
  GFR-binding peptide
  MOD_RES (1)..(33): Xaa is C or S
XVPTELRPVQMRKIDEYDKVVKKATVEMVVEGXG

SEQ ID NO: 51867 - protein, 35 aa, Artificial Sequence
  GFR-binding peptide
  MOD_RES (2)..(3)..(35): Xaa is C or S
PXXAPTQLSNITVQIMDDSSNVIIGEMSNMVVRAX

SEQ ID NO: 51868 - protein, 40 aa, Artificial Sequence
  GFR-binding peptide
  MOD_RES (5)..(5): Xaa is C or S
RNVQXRPTQVQLEPLPVVYYEIVRKKPIFEQLSNTLEDHL

SEQ ID NO: 51869 - protein, 35 aa, Artificial Sequence
  GFR-binding peptide
  MOD_RES (4)..(5): Xaa is C or S
PKPXXAPTKLSNITVQIMDDSSNVIIGEMSNMVVR

SEQ ID NO: 51870 - protein, 40 aa, Artificial Sequence
  GFR-binding peptide
  MOD_RES (4)..(5)..(38)..(40): Xaa is C or S
  MOD_RES (19)..(20)..(21)..(22)..(23): Xaa is A or G
  MOD_RES (24)..(25)..(26)..(27): Xaa is A or G or is absent
ASPXXVPQDLSNITIQIMXXXXXXXXXIGEMSMVVKSXKX

SEQ ID NO: 51871 - protein, 35 aa, Artificial Sequence
  GFR-binding peptide
  MOD_RES (1)..(2)..(33)..(35): Xaa is C or S
XXVSQDLSNITIQIMIGKTPKIIGEMSMIVKSXKX

SEQ ID NO: 51872 - protein, 33 aa, Artificial Sequence; identical to SEQ ID NO: 19006
  GFR-binding peptide

SEQ ID NO: 51873 - protein, 39 aa, Artificial Sequence; identical to SEQ ID NO: 19007
  GFR-binding peptide
  MOD_RES (4)..(4): Xaa is C or S
  MOD_RES (20)..(21)..(22)..(23)..(24): Xaa is A or G
  MOD_RES (25)..(26)..(27)..(28): Xaa is A or G or is absent

SEQ ID NO: 51874 - protein, 34 aa, Artificial Sequence; identical to SEQ ID NO: 13957
  GFR-binding peptide
  MOD_RES (4)..(4): Xaa is C or S

SEQ ID NO: 51875 - protein, 35 aa, Artificial Sequence; identical to SEQ ID NO: 13958
  GFR-binding peptide
  MOD_RES (1)..(2): Xaa is C or S
  MOD_RES (16)..(17)..(18)..(19)..(20): Xaa is A or G
  MOD_RES (21)..(22)..(23)..(24): Xaa is A or G or is absent

SEQ ID NO: 51876 - protein, 36 aa, Artificial Sequence
  GFR-binding peptide
  MOD_RES (1)..(35): Xaa is C or S
  MOD_RES (15)..(16)..(17)..(18)..(19): Xaa is A or G
  MOD_RES (20)..(21)..(22)..(23): Xaa is A or G or is absent
XAPTQLRPVQVRKIXXXXXXXXXKKATVNMVVRAXG

SEQ ID NO: 51877 - protein, 43 aa, Artificial Sequence
  GFR-binding peptide
  MOD_RES (5)..(6)..(40)..(42): Xaa is C or S
  MOD_RES (20)..(21)..(22)..(23)..(24): Xaa is A or G
  MOD_RES (25)..(26)..(27)..(28): Xaa is A or G or is absent
VPKPXXAPTKLRSVKVAKVXXXXXXXXXKEVQVNMVVRSXGXH

SEQ ID NO: 51878 - protein, 36 aa, Artificial Sequence
  GFR-binding peptide
  MOD_RES (2)..(2): Xaa is C or S
  MOD_RES (18)..(19)..(20)..(21)..(22): Xaa is A or G
  MOD_RES (23)..(24)..(25)..(26): Xaa is A or G or is absent
QXRPTQVQLEPLPVVYYXXXXXXXXXEQLSNTLEDH

SEQ ID NO: 51879 - protein, 40 aa, Artificial Sequence
  GFR-binding peptide
  MOD_RES (5)..(6)..(37)..(39): Xaa is C or S
SASPXXVPQDLSNITIQIMVGRTPKVIGEMSMVVKSXKXS

SEQ ID NO: 51880 - protein, 38 aa, Artificial Sequence
  GFR-binding peptide
  MOD_RES (3)..(4)..(38): Xaa is C or S
  MOD_RES (18)..(19)..(20)..(21)..(22): Xaa is A or G
  MOD_RES (23)..(24)..(25)..(26): Xaa is A or G or is absent
KAXXVPTELSNITMQIMXXXXXXXXXIGEMSDMVVEGX

SEQ ID NO: 51881 - protein, 37 aa, Artificial Sequence; identical to SEQ ID NO: 13960
  GFR-binding peptide
  MOD_RES (7)..(7): Xaa is C or S

SEQ ID NO: 51882 - protein, 36 aa, Artificial Sequence; identical to SEQ ID NO: 19008
  GFR-binding peptide
  MOD_RES (35)..(35): Xaa is C or S

SEQ ID NO: 51883 - protein, 38 aa, Artificial Sequence; identical to SEQ ID NO: 19009
  GFR-binding peptide
  MOD_RES (3)..(3): Xaa is C or S
  MOD_RES (19)..(20)..(21)..(22)..(23): Xaa is A or G
  MOD_RES (24)..(25)..(26)..(27): Xaa is A or G or is absent

SEQ ID NO: 51884 - protein, 41 aa, Artificial Sequence
  GFR-binding peptide
  MOD_RES (6)..(7)..(41): Xaa is C or S
  MOD_RES (21)..(22)..(23)..(24)..(25): Xaa is A or G
  MOD_RES (26)..(27)..(28)..(29): Xaa is A or G or is absent
KIPKAXXVPTELSNITMQIMXXXXXXXXXIGEMSDMVVEGX

SEQ ID NO: 51885 - protein, 35 aa, Artificial Sequence
  GFR-binding peptide
  MOD_RES (35)..(35): Xaa is C or S
  MOD_RES (14)..(15)..(16)..(17)..(18): Xaa is A or G
  MOD_RES (19)..(20)..(21)..(22): Xaa is A or G or is absent
TQVQLEPLPVVYYXXXXXXXXXEQLSNTLEDHLAX

SEQ ID NO: 51886 - protein, 36 aa, Artificial Sequence
  GFR-binding peptide
  MOD_RES (3)..(4)..(36): Xaa is C or S
KAXXVPTELRSVKMAKVDENEKVVKEVQVDMVVEGX

SEQ ID NO: 51887 - protein, 32 aa, Artificial Sequence
  GFR-binding peptide
  MOD_RES (32)..(32): Xaa is C or S
VPTELRSVKMAKVDEYDKVVKEVQVEMVVEGX

SEQ ID NO: 51888 - protein, 41 aa, Artificial Sequence; identical to SEQ ID NO: 13963
  GFR-binding peptide
  MOD_RES (6)..(7)..(40): Xaa is C or S
  MOD_RES (21)..(22)..(23)..(24)..(25): Xaa is A or G
  MOD_RES (26)..(27)..(28)..(29): Xaa is A or G or is absent

SEQ ID NO: 51889 - protein, 35 aa, Artificial Sequence
  GFR-binding peptide
  MOD_RES (1)..(2)..(33)..(35): Xaa is C or S
XXVPQDLSNITIQIMVGRTPKVIGEMSMVVKSXKX

SEQ ID NO: 51890 - protein, 39 aa, Artificial Sequence
  GFR-binding peptide
  MOD_RES (4)..(5)..(38): Xaa is C or S
  MOD_RES (19)..(20)..(21)..(22)..(23): Xaa is A or G
  MOD_RES (24)..(25)..(26)..(27): Xaa is A or G or is absent
ASPXXVSQDLRPVQIRKIXXXXXXXXXKKATVMIVKSXK

SEQ ID NO: 51891 - protein, 37 aa, Artificial Sequence
  GFR-binding peptide
  MOD_RES (4)..(5)..(37): Xaa is C or S
PKAXXVPTELSNITMQIMDEYDKVVIGEMSEMVVEGX

SEQ ID NO: 51892 - protein, 34 aa, Artificial Sequence; identical to SEQ ID NO: 13966
  GFR-binding peptide
  MOD_RES (2)..(34): Xaa is C or S

SEQ ID NO: 51893 - protein, 35 aa, Artificial Sequence
  GFR-binding peptide
  MOD_RES (3)..(4)..(35): Xaa is C or S
APXXVPQALSNITIQIMVGRKPKVIGEMSMIVRSX

SEQ ID NO: 51894 - protein, 36 aa, Artificial Sequence; identical to SEQ ID NO: 13969
  GFR-binding peptide
  MOD_RES (3)..(4)..(36): Xaa is C or S

SEQ ID NO: 51895 - protein, 36 aa, Artificial Sequence
  GFR-binding peptide
  MOD_RES (1)..(33)..(35): Xaa is C or S
XVPTELRSVKMAKVDENEKVVKEVQVDMVVEGXGXR

SEQ ID NO: 51896 - protein, 38 aa, Artificial Sequence
  GFR-binding peptide
  MOD_RES (5)..(6)..(37): Xaa is C or S
SASPXXVPQDLRSVKIAKVVGRTPKVKEVQVMVVKSXK

SEQ ID NO: 51897 - protein, 41 aa, Artificial Sequence
  GFR-binding peptide
  MOD_RES (4)..(5)..(38)..(40): Xaa is C or S
  MOD_RES (19)..(20)..(21)..(22)..(23): Xaa is A or G
  MOD_RES (24)..(25)..(26)..(27): Xaa is A or G or is absent
ASPXXVPQDLRPVQIRKIXXXXXXXXXKKATVMVVKSXKXS

SEQ ID NO: 51898 - protein, 35 aa, Artificial Sequence
  GFR-binding peptide
  MOD_RES (2)..(3): Xaa is C or S
  MOD_RES (17)..(18)..(19)..(20)..(21): Xaa is A or G
  MOD_RES (22)..(23)..(24)..(25): Xaa is A or G or is absent
AXXVPTELSNITMQIMXXXXXXXXXIGEMSDMVVE

SEQ ID NO: 51899 - protein, 38 aa, Artificial Sequence
  GFR-binding peptide
  MOD_RES (3)..(37): Xaa is C or S
  MOD_RES (17)..(18)..(19)..(20)..(21): Xaa is A or G
  MOD_RES (22)..(23)..(24)..(25): Xaa is A or G or is absent
LEXVPTEEEPLTMLYYXXXXXXXXXEQLSNFLQHNKXE

SEQ ID NO: 51900 - protein, 34 aa, Artificial Sequence
  GFR-binding peptide
  MOD_RES (1)..(2): Xaa is C or S
  MOD_RES (16)..(17)..(18)..(19)..(20): Xaa is A or G
  MOD_RES (21)..(22)..(23)..(24): Xaa is A or G or is absent
XXVSQDLRPVQIRKIXXXXXXXXXKKATVMIVKS

SEQ ID NO: 51901 - protein, 36 aa, Artificial Sequence
  GFR-binding peptide
  MOD_RES (1)..(1): Xaa is C or S
XRPTQVQLEPLPVVYYEIVRKKPIFEQLSNTLEDHL

SEQ ID NO: 51902 - protein, 33 aa, Artificial Sequence
  GFR-binding peptide
  MOD_RES (1)..(1): Xaa is C or S
  MOD_RES (15)..(16)..(17)..(18)..(19): Xaa is A or G
  MOD_RES (20)..(21)..(22)..(23): Xaa is A or G or is absent
XVPTEEEPLTMLYYXXXXXXXXXEQLSNFLQHN

SEQ ID NO: 51903 - protein, 38 aa, Artificial Sequence; identical to SEQ ID NO: 13976
  GFR-binding peptide
  MOD_RES (1)..(2)..(36)..(38): Xaa is C or S
  MOD_RES (16)..(17)..(18)..(19)..(20): Xaa is A or G
  MOD_RES (21)..(22)..(23)..(24): Xaa is A or G or is absent

SEQ ID NO: 51904 - protein, 37 aa, Artificial Sequence
  GFR-binding peptide
  MOD_RES (3)..(37): Xaa is C or S
  MOD_RES (17)..(18)..(19)..(20)..(21): Xaa is A or G
  MOD_RES (22)..(23)..(24)..(25): Xaa is A or G or is absent
LEXVPTEEEPLPMVYYXXXXXXXXXEQLSNFLQHNKX

SEQ ID NO: 51905 - protein, 35 aa, Artificial Sequence
  GFR-binding peptide
  MOD_RES (3)..(4): Xaa is C or S
KPXXAPTKLRSVKVAKVDDSSNVIKEVQVNMVVRS

SEQ ID NO: 51906 - protein, 37 aa, Artificial Sequence; identical to SEQ ID NO: 19026
  GFR-binding peptide
  MOD_RES (36)..(36): Xaa is C or S

SEQ ID NO: 51907 - protein, 34 aa, Artificial Sequence; identical to SEQ ID NO: 13979
  GFR-binding peptide
  MOD_RES (1)..(1): Xaa is C or S
  MOD_RES (15)..(16)..(17)..(18)..(19): Xaa is A or G
  MOD_RES (20)..(21)..(22)..(23): Xaa is A or G or is absent

SEQ ID NO: 51908 - protein, 41 aa, Artificial Sequence
  GFR-binding peptide
  MOD_RES (5)..(6)..(40): Xaa is C or S
  MOD_RES (20)..(21)..(22)..(23)..(24): Xaa is A or G
  MOD_RES (25)..(26)..(27)..(28): Xaa is A or G or is absent
VPKPXXAPTKLSNITVQIMXXXXXXXXXIGEMSNMVVRSXG

SEQ ID NO: 51909 - protein, 35 aa, Artificial Sequence
  GFR-binding peptide
  MOD_RES (4)..(5): Xaa is C or S
PKPXXAPTKLRSVKVAKVDDSSNVIKEVQVNMVVR

SEQ ID NO: 51910 - protein, 40 aa, Artificial Sequence; identical to SEQ ID NO: 13981
  GFR-binding peptide
  MOD_RES (7)..(39): Xaa is C or S

SEQ ID NO: 51911 - protein, 35 aa, Artificial Sequence
  GFR-binding peptide
  MOD_RES (4)..(5): Xaa is C or S
AAPXXVPQALRPVQIRKIVGRKPKVKKATVMIVRS

SEQ ID NO: 51912 - protein, 34 aa, Artificial Sequence
  GFR-binding peptide
  MOD_RES (1)..(2): Xaa is C or S
  MOD_RES (16)..(17)..(18)..(19)..(20): Xaa is A or G
  MOD_RES (21)..(22)..(23)..(24): Xaa is A or G or is absent
XXVPTELRSVKMAKVXXXXXXXXXKEVQVDMVVE

SEQ ID NO: 51913 - protein, 37 aa, Artificial Sequence
  GFR-binding peptide
  MOD_RES (4)..(5)..(37): Xaa is C or S
PKAXXVPTELSNITMQIMDENEKVVIGEMSDMVVEGX

SEQ ID NO: 51914 - protein, 43 aa, Artificial Sequence; identical to SEQ ID NO: 19031
  GFR-binding peptide
  MOD_RES (3)..(40)..(42): Xaa is C or S

SEQ ID NO: 51915 - protein, 39 aa, Artificial Sequence
  GFR-binding peptide
  MOD_RES (4)..(5)..(37)..(39): Xaa is C or S
PKAXXVPTELSNITMQIMDEYDKVVIGEMSEMVVEGXGX

SEQ ID NO: 51916 - protein, 40 aa, Artificial Sequence; identical to SEQ ID NO: 13983
  GFR-binding peptide
  MOD_RES (5)..(6)..(40): Xaa is C or S
  MOD_RES (20)..(21)..(22)..(23)..(24): Xaa is A or G
  MOD_RES (25)..(26)..(27)..(28): Xaa is A or G or is absent

SEQ ID NO: 51917 - protein, 31 aa, Artificial Sequence; identical to SEQ ID NO: 13984
  GFR-binding peptide

SEQ ID NO: 51918 - protein, 38 aa, Artificial Sequence
  GFR-binding peptide
  MOD_RES (2)..(3)..(35)..(37): Xaa is C or S
PXXAPTKLRPVQVRKIDDSSNVIKKATVNMVVRSXGXH

SEQ ID NO: 51919 - protein, 37 aa, Artificial Sequence; identical to SEQ ID NO: 13987
  GFR-binding peptide
  MOD_RES (3)..(4): Xaa is C or S
  MOD_RES (18)..(19)..(20)..(21)..(22): Xaa is A or G
  MOD_RES (23)..(24)..(25)..(26): Xaa is A or G or is absent

SEQ ID NO: 51920 - protein, 38 aa, Artificial Sequence; identical to SEQ ID NO: 13988
  GFR-binding peptide
  MOD_RES (1)..(35)..(37): Xaa is C or S
  MOD_RES (15)..(16)..(17)..(18)..(19): Xaa is A or G
  MOD_RES (20)..(21)..(22)..(23): Xaa is A or G or is absent

SEQ ID NO: 51921 - protein, 43 aa, Artificial Sequence
  GFR-binding peptide
  MOD_RES (5)..(6)..(40)..(42): Xaa is C or S
  MOD_RES (20)..(21)..(22)..(23)..(24): Xaa is A or G
  MOD_RES (25)..(26)..(27)..(28): Xaa is A or G or is absent
IPKAXXVPTELRSVKMAKVXXXXXXXXXKEVQVDMVVEGXGXR

SEQ ID NO: 51922 - protein, 34 aa, Artificial Sequence
  GFR-binding peptide
  MOD_RES (1)..(2): Xaa is C or S
  MOD_RES (16)..(17)..(18)..(19)..(20): Xaa is A or G
  MOD_RES (21)..(22)..(23)..(24): Xaa is A or G or is absent
XXVSQDLRSVKIAKVXXXXXXXXXKEVQVMIVKS

SEQ ID NO: 51923 - protein, 37 aa, Artificial Sequence
  GFR-binding peptide
  MOD_RES (35)..(37): Xaa is C or S
  MOD_RES (14)..(15)..(16)..(17)..(18): Xaa is A or G
  MOD_RES (19)..(20)..(21)..(22): Xaa is A or G or is absent
SRVHHEPLPVVYYXXXXXXXXXEQLSNRLEEHLEXAX

SEQ ID NO: 51924 - protein, 43 aa, Artificial Sequence
  GFR-binding peptide
  MOD_RES (5)..(42): Xaa is C or S
  MOD_RES (21)..(22)..(23)..(24)..(25): Xaa is A or G
  MOD_RES (26)..(27)..(28)..(29): Xaa is A or G or is absent
SSVKXQPSRVHHEPLTVLYYXXXXXXXXXEQLSNRLEEHLEXA

SEQ ID NO: 51925 - protein, 40 aa, Artificial Sequence; identical to SEQ ID NO: 19033
  GFR-binding peptide
  MOD_RES (3)..(40): Xaa is C or S

SEQ ID NO: 51926 - protein, 36 aa, Artificial Sequence; identical to SEQ ID NO: 13991
  GFR-binding peptide
  MOD_RES (1)..(2)..(34)..(36): Xaa is C or S

SEQ ID NO: 51927 - protein, 40 aa, Artificial Sequence; identical to SEQ ID NO: 19036
  GFR-binding peptide
  MOD_RES (4)..(38)..(40): Xaa is C or S
  MOD_RES (18)..(19)..(20)..(21)..(22): Xaa is A or G
  MOD_RES (23)..(24)..(25)..(26): Xaa is A or G or is absent

SEQ ID NO: 51928 - protein, 35 aa, Artificial Sequence
  GFR-binding peptide
  MOD_RES (1)..(2): Xaa is C or S
  MOD_RES (16)..(17)..(18)..(19)..(20): Xaa is A or G
  MOD_RES (21)..(22)..(23)..(24): Xaa is A or G or is absent
XXVPTELRSVKMAKVXXXXXXXXXKEVQVEMVVEG

SEQ ID NO: 51929 - protein, 36 aa, Artificial Sequence
  GFR-binding peptide
  MOD_RES (35)..(35): Xaa is C or S
SRVHHEPLTVLYYEYVRKKPKLEQLSNRLEEHLEXA

SEQ ID NO: 51930 - protein, 43 aa, Artificial Sequence; identical to SEQ ID NO: 19037
  GFR-binding peptide
  MOD_RES (6)..(40)..(42): Xaa is C or S
  MOD_RES (20)..(21)..(22)..(23)..(24): Xaa is A or G
  MOD_RES (25)..(26)..(27)..(28): Xaa is A or G or is absent

SEQ ID NO: 51931 - protein, 42 aa, Artificial Sequence; identical to SEQ ID NO: 13995
  GFR-binding peptide
  MOD_RES (5)..(6)..(40)..(42): Xaa is C or S
  MOD_RES (20)..(21)..(22)..(23)..(24): Xaa is A or G
  MOD_RES (25)..(26)..(27)..(28): Xaa is A or G or is absent

SEQ ID NO: 51932 - protein, 30 aa, Artificial Sequence; identical to SEQ ID NO: 13996
  GFR-binding peptide

SEQ ID NO: 51933 - protein, 41 aa, Artificial Sequence
  GFR-binding peptide
  MOD_RES (3)..(40): Xaa is C or S
VKXQPSRVHHEPLPVVYYEYVRKKPKLEQLSNRLEEHLEXA

SEQ ID NO: 51934 - protein, 35 aa, Artificial Sequence
  GFR-binding peptide
  MOD_RES (5)..(5): Xaa is C or S
TKPTXAPTKLRPVQVRKIDDSSNVIKKATVNMVVR

SEQ ID NO: 51935 - protein, 40 aa, Artificial Sequence; identical to SEQ ID NO: 19042
  GFR-binding peptide
  MOD_RES (5)..(5): Xaa is C or S
  MOD_RES (21)..(22)..(23)..(24)..(25): Xaa is A or G
  MOD_RES (26)..(27)..(28)..(29): Xaa is A or G or is absent

SEQ ID NO: 51936 - protein, 40 aa, Artificial Sequence; identical to SEQ ID NO: 19043
  GFR-binding peptide
  MOD_RES (1)..(38)..(40): Xaa is C or S
  MOD_RES (17)..(18)..(19)..(20)..(21): Xaa is A or G
  MOD_RES (22)..(23)..(24)..(25): Xaa is A or G or is absent

SEQ ID NO: 51937 - protein, 36 aa, Artificial Sequence
  GFR-binding peptide
  MOD_RES (1)..(1): Xaa is C or S
  MOD_RES (17)..(18)..(19)..(20)..(21): Xaa is A or G
  MOD_RES (22)..(23)..(24)..(25): Xaa is A or G or is absent
XRPTQVQLEPLTVLYYXXXXXXXXXEQLSNTLEDHL

SEQ ID NO: 51938 - protein, 37 aa, Artificial Sequence; identical to SEQ ID NO: 13997
  GFR-binding peptide
  MOD_RES (6)..(7): Xaa is C or S

SEQ ID NO: 51939 - protein, 34 aa, Artificial Sequence
  GFR-binding peptide
  MOD_RES (33)..(33): Xaa is C or S
  MOD_RES (14)..(15)..(16)..(17)..(18): Xaa is A or G
  MOD_RES (19)..(20)..(21)..(22): Xaa is A or G or is absent
VSQDLRPVQIRKIXXXXXXXXXKKATVMIVKSXK

SEQ ID NO: 51940 - protein, 36 aa, Artificial Sequence; identical to SEQ ID NO: 13998
  GFR-binding peptide
  MOD_RES (1)..(33)..(35): Xaa is C or S

SEQ ID NO: 51941 - protein, 35 aa, Artificial Sequence
  GFR-binding peptide
  MOD_RES (2)..(3): Xaa is C or S
  MOD_RES (17)..(18)..(19)..(20)..(21): Xaa is A or G
  MOD_RES (22)..(23)..(24)..(25): Xaa is A or G or is absent
PXXAPTKLSNITVQIMXXXXXXXXXIGEMSNMVVR

SEQ ID NO: 51942 - protein, 43 aa, Artificial Sequence; identical to SEQ ID NO: 14000
  GFR-binding peptide
  MOD_RES (6)..(7)..(40)..(42): Xaa is C or S
  MOD_RES (21)..(22)..(23)..(24)..(25): Xaa is A or G
  MOD_RES (26)..(27)..(28)..(29): Xaa is A or G or is absent

SEQ ID NO: 51943 - protein, 41 aa, Artificial Sequence
  GFR-binding peptide
  MOD_RES (6)..(7)..(41): Xaa is C or S
  MOD_RES (21)..(22)..(23)..(24)..(25): Xaa is A or G
  MOD_RES (26)..(27)..(28)..(29): Xaa is A or G or is absent
YVPKPXXAPTKLSNITVQIMXXXXXXXXXIGEMSNMVVRSX

SEQ ID NO: 51944 - protein, 38 aa, Artificial Sequence
  GFR-binding peptide
  MOD_RES (7)..(7): Xaa is C or S
HVTKPTXAPTKLRPVQVRKIDDSSNVIKKATVNMVVRS

SEQ ID NO: 51945 - protein, 37 aa, Artificial Sequence; identical to SEQ ID NO: 19047
  GFR-binding peptide
  MOD_RES (1)..(1): Xaa is C or S

SEQ ID NO: 51946 - protein, 39 aa, Artificial Sequence
  GFR-binding peptide
  MOD_RES (2)..(3)..(36)..(38): Xaa is C or S
  MOD_RES (17)..(18)..(19)..(20)..(21): Xaa is A or G
  MOD_RES (22)..(23)..(24)..(25): Xaa is A or G or is absent
PXXVPQDLSNITIQIMXXXXXXXXXIGEMSMVVKSXKXS

SEQ ID NO: 51947 - protein, 40 aa, Artificial Sequence
  GFR-binding peptide
  MOD_RES (4)..(5)..(37)..(39): Xaa is C or S
PKPXXAPTKLSNITVQIMDDSSNVIIGEMSNMVVRSXGXH

SEQ ID NO: 51948 - protein, 39 aa, Artificial Sequence; identical to SEQ ID NO: 19051
  GFR-binding peptide
  MOD_RES (7)..(7): Xaa is C or S
  MOD_RES (21)..(22)..(23)..(24)..(25): Xaa is A or G
  MOD_RES (26)..(27)..(28)..(29): Xaa is A or G or is absent

SEQ ID NO: 51949 - protein, 34 aa, Artificial Sequence
  GFR-binding peptide
  MOD_RES (14)..(15)..(16)..(17)..(18): Xaa is A or G
  MOD_RES (19)..(20)..(21)..(22): Xaa is A or G or is absent
TQVQLEPLTVLYYXXXXXXXXXEQLSNTLEDHLA

SEQ ID NO: 51950 - protein, 40 aa, Artificial Sequence; identical to SEQ ID NO: 19053
  GFR-binding peptide
  MOD_RES (37)..(39): Xaa is C or S

SEQ ID NO: 51951 - protein, 36 aa, Artificial Sequence; identical to SEQ ID NO: 14005
  GFR-binding peptide
  MOD_RES (5)..(5): Xaa is C or S

SEQ ID NO: 51952 - protein, 36 aa, Artificial Sequence
  GFR-binding peptide
  MOD_RES (1)..(1): Xaa is C or S
  MOD_RES (17)..(18)..(19)..(20)..(21): Xaa is A or G
  MOD_RES (22)..(23)..(24)..(25): Xaa is A or G or is absent
XQPSRVHHEPLTVLYYXXXXXXXXXEQLSNRLEEHL

SEQ ID NO: 51953 - protein, 39 aa, Artificial Sequence; identical to SEQ ID NO: 19056
  GFR-binding peptide
  MOD_RES (3)..(3): Xaa is C or S
  MOD_RES (19)..(20)..(21)..(22)..(23): Xaa is A or G
  MOD_RES (24)..(25)..(26)..(27): Xaa is A or G or is absent

SEQ ID NO: 51954 - protein, 37 aa, Artificial Sequence
  GFR-binding peptide
  MOD_RES (3)..(4)..(37): Xaa is C or S
  MOD_RES (18)..(19)..(20)..(21)..(22): Xaa is A or G
  MOD_RES (23)..(24)..(25)..(26): Xaa is A or G or is absent
APXXVPQALRPVQIRKIXXXXXXXXXKKATVMIVRSX

SEQ ID NO: 51955 - protein, 40 aa, Artificial Sequence
  GFR-binding peptide
  MOD_RES (2)..(39): Xaa is C or S
  MOD_RES (18)..(19)..(20)..(21)..(22): Xaa is A or G
  MOD_RES (23)..(24)..(25)..(26): Xaa is A or G or is absent
QXRPTQVQLEPLPVVYYXXXXXXXXXEQLSNTLEDHLAXK

SEQ ID NO: 51956 - protein, 38 aa, Artificial Sequence
  GFR-binding peptide
  MOD_RES (5)..(6): Xaa is C or S
  MOD_RES (20)..(21)..(22)..(23)..(24): Xaa is A or G
  MOD_RES (25)..(26)..(27)..(28): Xaa is A or G or is absent
IPKAXXVPTELRPVQMRKIXXXXXXXXXKKATVDMVVE

SEQ ID NO: 51957 - protein, 37 aa, Artificial Sequence
  GFR-binding peptide
  MOD_RES (3)..(4): Xaa is C or S
  MOD_RES (18)..(19)..(20)..(21)..(22): Xaa is A or G
  MOD_RES (23)..(24)..(25)..(26): Xaa is A or G or is absent
KPXXAPTQLRSVKVAKVXXXXXXXXXKEVQVNMVVRA

SEQ ID NO: 51958 - protein, 38 aa, Artificial Sequence
  GFR-binding peptide
  MOD_RES (3)..(3): Xaa is C or S
VQXRPTQVQLEPLTVLYYEIVRKKPIFEQLSNTLEDHL

SEQ ID NO: 51959 - protein, 39 aa, Artificial Sequence; identical to SEQ ID NO: 14011
  GFR-binding peptide
  MOD_RES (1)..(2)..(36)..(38): Xaa is C or S
  MOD_RES (16)..(17)..(18)..(19)..(20): Xaa is A or G
  MOD_RES (21)..(22)..(23)..(24): Xaa is A or G or is absent

SEQ ID NO: 51960 - protein, 39 aa, Artificial Sequence
  GFR-binding peptide
  MOD_RES (5)..(5): Xaa is C or S
  MOD_RES (21)..(22)..(23)..(24)..(25): Xaa is A or G
  MOD_RES (26)..(27)..(28)..(29): Xaa is A or G or is absent
SSVKXQPSRVHHEPLTVLYYXXXXXXXXXEQLSNRLEEH

SEQ ID NO: 51961 - protein, 42 aa, Artificial Sequence; identical to SEQ ID NO: 19061
  GFR-binding peptide
  MOD_RES (3)..(40)..(42): Xaa is C or S

SEQ ID NO: 51962 - protein, 33 aa, Artificial Sequence
  GFR-binding peptide
  MOD_RES (14)..(15)..(16)..(17)..(18): Xaa is A or G
  MOD_RES (19)..(20)..(21)..(22): Xaa is A or G or is absent
APTQLRSVKVAKVXXXXXXXXXKEVQVNMVVRA

SEQ ID NO: 51963 - protein, 40 aa, Artificial Sequence
  GFR-binding peptide
  MOD_RES (6)..(7)..(38)..(40): Xaa is C or S
ASASPXXVPQDLRSVKIAKVVGRTPKVKEVQVMVVKSXKX

SEQ ID NO: 51964 - protein, 36 aa, Artificial Sequence
  GFR-binding peptide
  MOD_RES (1)..(35): Xaa is C or S
  MOD_RES (15)..(16)..(17)..(18)..(19): Xaa is A or G
  MOD_RES (20)..(21)..(22)..(23): Xaa is A or G or is absent
XVPTELSNITMQIMXXXXXXXXXIGEMSEMVVEGXG

SEQ ID NO: 51965 - protein, 40 aa, Artificial Sequence
  GFR-binding peptide
  MOD_RES (5)..(39): Xaa is C or S
  MOD_RES (19)..(20)..(21)..(22)..(23): Xaa is A or G
  MOD_RES (24)..(25)..(26)..(27): Xaa is A or G or is absent
TKPTXAPTKLRPVQVRKIXXXXXXXXXKKATVNMVVRSXG

SEQ ID NO: 51966 - protein, 38 aa, Artificial Sequence
  GFR-binding peptide
  MOD_RES (6)..(6): Xaa is C or S
DEGLEXVPTEEEPLTMLYYRIKPHQGQHEQLSNFLQHN

SEQ ID NO: 51967 - protein, 35 aa, Artificial Sequence
  GFR-binding peptide
  MOD_RES (1)..(32)..(34): Xaa is C or S
XVPQDLSNITIQIMVGRTPKVIGEMSMVVKSXKXS

SEQ ID NO: 51968 - protein, 34 aa, Artificial Sequence
  GFR-binding peptide
  MOD_RES (33)..(33): Xaa is C or S
  MOD_RES (14)..(15)..(16)..(17)..(18): Xaa is A or G
  MOD_RES (19)..(20)..(21)..(22): Xaa is A or G or is absent
VPQDLRPVQIRKIXXXXXXXXXKKATVMVVKSXK

SEQ ID NO: 51969 - protein, 37 aa, Artificial Sequence
  GFR-binding peptide
  MOD_RES (4)..(4): Xaa is C or S
  MOD_RES (18)..(19)..(20)..(21)..(22): Xaa is A or G
  MOD_RES (23)..(24)..(25)..(26): Xaa is A or G or is absent
KPTXAPTKLRPVQVRKIXXXXXXXXXKKATVNMVVRS

SEQ ID NO: 51970 - protein, 41 aa, Artificial Sequence
  GFR-binding peptide
  MOD_RES (6)..(7)..(41): Xaa is C or S
  MOD_RES (21)..(22)..(23)..(24)..(25): Xaa is A or G
  MOD_RES (26)..(27)..(28)..(29): Xaa is A or G or is absent
KIPKAXXVPTELRSVKMAKVXXXXXXXXXKEVQVDMVVEGX

SEQ ID NO: 51971 - protein, 36 aa, Artificial Sequence
  GFR-binding peptide
  MOD_RES (1)..(2)..(36): Xaa is C or S
  MOD_RES (16)..(17)..(18)..(19)..(20): Xaa is A or G
  MOD_RES (21)..(22)..(23)..(24): Xaa is A or G or is absent
XXAPTQLRPVQVRKIXXXXXXXXXKKATVNMVVRAX

SEQ ID NO: 51972 - protein, 41 aa, Artificial Sequence; identical to SEQ ID NO: 14019
  GFR-binding peptide
  MOD_RES (4)..(38)..(40): Xaa is C or S
  MOD_RES (18)..(19)..(20)..(21)..(22): Xaa is A or G
  MOD_RES (23)..(24)..(25)..(26): Xaa is A or G or is absent

SEQ ID NO: 51973 - protein, 35 aa, Artificial Sequence; identical to SEQ ID NO: 14020
  GFR-binding peptide
  MOD_RES (1)..(2)..(33)..(35): Xaa is C or S

SEQ ID NO: 51974 - protein, 38 aa, Artificial Sequence
  GFR-binding peptide
  MOD_RES (6)..(7)..(38): Xaa is C or S
ASASPXXVSQDLRSVKIAKVIGKTPKIKEVQVMIVKSX

SEQ ID NO: 51975 - protein, 39 aa, Artificial Sequence
  GFR-binding peptide
  MOD_RES (6)..(6): Xaa is C or S
  MOD_RES (20)..(21)..(22)..(23)..(24): Xaa is A or G
  MOD_RES (25)..(26)..(27)..(28): Xaa is A or G or is absent
DEGLEXVPTEEEPLTMLYYXXXXXXXXXEQLSNFLQHNK

SEQ ID NO: 51976 - protein, 41 aa, Artificial Sequence
  GFR-binding peptide
  MOD_RES (4)..(5)..(38)..(40): Xaa is C or S
  MOD_RES (19)..(20)..(21)..(22)..(23): Xaa is A or G
  MOD_RES (24)..(25)..(26)..(27): Xaa is A or G or is absent
ASPXXVSQDLSNITIQIMXXXXXXXXXIGEMSMIVKSXKXS

SEQ ID NO: 51977 - protein, 38 aa, Artificial Sequence; identical to SEQ ID NO: 14023
  GFR-binding peptide
  MOD_RES (1)..(2)..(36)..(38): Xaa is C or S
  MOD_RES (16)..(17)..(18)..(19)..(20): Xaa is A or G
  MOD_RES (21)..(22)..(23)..(24): Xaa is A or G or is absent

SEQ ID NO: 51978 - protein, 33 aa, Artificial Sequence
  GFR-binding peptide
  MOD_RES (1)..(2): Xaa is C or S
XXVPTELSNITMQIMDEYDKVVIGEMSEMVVEG

SEQ ID NO: 51979 - protein, 37 aa, Artificial Sequence
  GFR-binding peptide
  MOD_RES (1)..(1): Xaa is C or S
XRPTQVQLEPLTVLYYEIVRKKPIFEQLSNTLEDHLA

SEQ ID NO: 51980 - protein, 38 aa, Artificial Sequence; identical to SEQ ID NO: 14025
  GFR-binding peptide
  MOD_RES (3)..(37): Xaa is C or S
  MOD_RES (17)..(18)..(19)..(20)..(21): Xaa is A or G
  MOD_RES (22)..(23)..(24)..(25): Xaa is A or G or is absent

SEQ ID NO: 51981 - protein, 31 aa, Artificial Sequence; identical to SEQ ID NO: 14026
  GFR-binding peptide

SEQ ID NO: 51982 - protein, 39 aa, Artificial Sequence; identical to SEQ ID NO: 14027
  GFR-binding peptide
  MOD_RES (5)..(37)..(39): Xaa is C or S

SEQ ID NO: 51983 - protein, 43 aa, Artificial Sequence
  GFR-binding peptide
  MOD_RES (6)..(7)..(41)..(43): Xaa is C or S
  MOD_RES (21)..(22)..(23)..(24)..(25): Xaa is A or G
  MOD_RES (26)..(27)..(28)..(29): Xaa is A or G or is absent
YVPKPXXAPTKLRSVKVAKVXXXXXXXXXKEVQVNMVVRSXGX

SEQ ID NO: 51984 - protein, 35 aa, Artificial Sequence
  GFR-binding peptide
  MOD_RES (4)..(5): Xaa is C or S
PKPXXAPTKLRPVQVRKIDDSSNVIKKATVNMVVR

SEQ ID NO: 51985 - protein, 35 aa, Artificial Sequence
  GFR-binding peptide
  MOD_RES (32)..(34): Xaa is C or S
APTQLRSVKVAKVDDSSNVIKEVQVNMVVRAXGXH

SEQ ID NO: 51986 - protein, 45 aa, Artificial Sequence
  GFR-binding peptide
  MOD_RES (5)..(42)..(44): Xaa is C or S
  MOD_RES (21)..(22)..(23)..(24)..(25): Xaa is A or G
  MOD_RES (26)..(27)..(28)..(29): Xaa is A or G or is absent
RNVQXRPTQVQLEPLPVVYYXXXXXXXXXEQLSNTLEDHLAXKXE

SEQ ID NO: 51987 - protein, 39 aa, Artificial Sequence
  GFR-binding peptide
  MOD_RES (3)..(4)..(37)..(39): Xaa is C or S
  MOD_RES (18)..(19)..(20)..(21)..(22): Xaa is A or G
  MOD_RES (23)..(24)..(25)..(26): Xaa is A or G or is absent
SPXXVPQDLSNITIQIMXXXXXXXXXIGEMSMVVKSXKX

SEQ ID NO: 51988 - protein, 37 aa, Artificial Sequence; identical to SEQ ID NO: 14028
  GFR-binding peptide
  MOD_RES (5)..(37): Xaa is C or S

SEQ ID NO: 51989 - protein, 34 aa, Artificial Sequence
  GFR-binding peptide
  MOD_RES (32)..(34): Xaa is C or S
VPTELRPVQMRKIDENEKVVKKATVDMVVEGXGX

SEQ ID NO: 51990 - protein, 39 aa, Artificial Sequence; identical to SEQ ID NO: 19077
  GFR-binding peptide
  MOD_RES (2)..(39): Xaa is C or S
  MOD_RES (18)..(19)..(20)..(21)..(22): Xaa is A or G
  MOD_RES (23)..(24)..(25)..(26): Xaa is A or G or is absent

SEQ ID NO: 51991 - protein, 35 aa, Artificial Sequence
  GFR-binding peptide
  MOD_RES (1)..(35): Xaa is C or S
  MOD_RES (15)..(16)..(17)..(18)..(19): Xaa is A or G
  MOD_RES (20)..(21)..(22)..(23): Xaa is A or G or is absent
XAPTQLRPVQVRKIXXXXXXXXXKKATVNMVVRAX

SEQ ID NO: 51992 - protein, 40 aa, Artificial Sequence
  GFR-binding peptide
  MOD_RES (3)..(4)..(37)..(39): Xaa is C or S
  MOD_RES (18)..(19)..(20)..(21)..(22): Xaa is A or G
  MOD_RES (23)..(24)..(25)..(26): Xaa is A or G or is absent
SPXXVSQDLSNITIQIMXXXXXXXXXIGEMSMIVKSXKXS

SEQ ID NO: 51993 - protein, 39 aa, Artificial Sequence; identical to SEQ ID NO: 19079
  GFR-binding peptide
  MOD_RES (5)..(39): Xaa is C or S
  MOD_RES (19)..(20)..(21)..(22)..(23): Xaa is A or G
  MOD_RES (24)..(25)..(26)..(27): Xaa is A or G or is absent

SEQ ID NO: 51994 - protein, 43 aa, Artificial Sequence
  GFR-binding peptide
  MOD_RES (4)..(41)..(43): Xaa is C or S
  MOD_RES (20)..(21)..(22)..(23)..(24): Xaa is A or G
  MOD_RES (25)..(26)..(27)..(28): Xaa is A or G or is absent
NVQXRPTQVQLEPLTVLYYXXXXXXXXXEQLSNTLEDHLAXKX

SEQ ID NO: 51995 - protein, 32 aa, Artificial Sequence; identical to SEQ ID NO: 14036
  GFR-binding peptide
  MOD_RES (1)..(32): Xaa is C or S

SEQ ID NO: 51996 - protein, 40 aa, Artificial Sequence
  GFR-binding peptide
  MOD_RES (5)..(39): Xaa is C or S
  MOD_RES (19)..(20)..(21)..(22)..(23): Xaa is A or G
  MOD_RES (24)..(25)..(26)..(27): Xaa is A or G or is absent
TKPTXAPTKLSNITVQIMXXXXXXXXXIGEMSNMVVRSXG

SEQ ID NO: 51997 - protein, 32 aa, Artificial Sequence; identical to SEQ ID NO: 14038
  GFR-binding peptide
  MOD_RES (2)..(2): Xaa is C or S

SEQ ID NO: 51998 - protein, 42 aa, Artificial Sequence
  GFR-binding peptide
  MOD_RES (5)..(6)..(39)..(41): Xaa is C or S
  MOD_RES (20)..(21)..(22)..(23)..(24): Xaa is A or G
  MOD_RES (25)..(26)..(27)..(28): Xaa is A or G or is absent
SASPXXVPQDLSNITIQIMXXXXXXXXXIGEMSMVVKSXKXS

SEQ ID NO: 51999 - protein, 35 aa, Artificial Sequence; identical to SEQ ID NO: 14042
  GFR-binding peptide
  MOD_RES (1)..(2)..(35): Xaa is C or S
  MOD_RES (16)..(17)..(18)..(19)..(20): Xaa is A or G
  MOD_RES (21)..(22)..(23)..(24): Xaa is A or G or is absent

SEQ ID NO: 52000 - protein, 43 aa, Artificial Sequence
  GFR-binding peptide
  MOD_RES (7)..(41)..(43): Xaa is C or S
  MOD_RES (21)..(22)..(23)..(24)..(25): Xaa is A or G
  MOD_RES (26)..(27)..(28)..(29): Xaa is A or G or is absent
NDEGLEXVPTEEEPLPMVYYXXXXXXXXXEQLSNFLQHNKXEX

SEQ ID NO: 52001 - protein, 35 aa, Artificial Sequence; identical to SEQ ID NO: 14045
  GFR-binding peptide
  MOD_RES (34)..(34): Xaa is C or S
  MOD_RES (14)..(15)..(16)..(17)..(18): Xaa is A or G
  MOD_RES (19)..(20)..(21)..(22): Xaa is A or G or is absent

SEQ ID NO: 52002 - protein, 39 aa, Artificial Sequence
  GFR-binding peptide
  MOD_RES (4)..(5)..(36)..(38): Xaa is C or S
ASPXXVSQDLRPVQIRKIIGKTPKIKKATVMIVKSXKXS

SEQ ID NO: 52003 - protein, 33 aa, Artificial Sequence
  GFR-binding peptide
  MOD_RES (2)..(2): Xaa is C or S
TXAPTKLRPVQVRKIDDSSNVIKKATVNMVVRS

SEQ ID NO: 52004 - protein, 31 aa, Artificial Sequence
  GFR-binding peptide
  MOD_RES (1)..(1): Xaa is C or S
XVPTELRSVKMAKVDEYDKVVKEVQVEMVVE

SEQ ID NO: 52005 - protein, 38 aa, Artificial Sequence
  GFR-binding peptide
  MOD_RES (1)..(2)..(35)..(37): Xaa is C or S
  MOD_RES (16)..(17)..(18)..(19)..(20): Xaa is A or G
  MOD_RES (21)..(22)..(23)..(24): Xaa is A or G or is absent
XXVSQDLRSVKIAKVXXXXXXXXXKEVQVMIVKSXKXS

SEQ ID NO: 52006 - protein, 34 aa, Artificial Sequence; identical to SEQ ID NO: 14046
  GFR-binding peptide
  MOD_RES (1)..(2): Xaa is C or S
  MOD_RES (16)..(17)..(18)..(19)..(20): Xaa is A or G
  MOD_RES (21)..(22)..(23)..(24): Xaa is A or G or is absent

SEQ ID NO: 52007 - protein, 39 aa, Artificial Sequence
  GFR-binding peptide
  MOD_RES (6)..(7): Xaa is C or S
  MOD_RES (21)..(22)..(23)..(24)..(25): Xaa is A or G
  MOD_RES (26)..(27)..(28)..(29): Xaa is A or G or is absent
YVPKPXXAPTKLRPVQVRKIXXXXXXXXXKKATVNMVVR

SEQ ID NO: 52008 - protein, 44 aa, Artificial Sequence; identical to SEQ ID NO: 14048
  GFR-binding peptide
  MOD_RES (6)..(7)..(41)..(43): Xaa is C or S
  MOD_RES (21)..(22)..(23)..(24)..(25): Xaa is A or G
  MOD_RES (26)..(27)..(28)..(29): Xaa is A or G or is absent

SEQ ID NO: 52009 - protein, 38 aa, Artificial Sequence; identical to SEQ ID NO: 14049
  GFR-binding peptide
  MOD_RES (6)..(7): Xaa is C or S

SEQ ID NO: 52010 - protein, 39 aa, Artificial Sequence; identical to SEQ ID NO: 19090
  GFR-binding peptide
  MOD_RES (2)..(39): Xaa is C or S
  MOD_RES (18)..(19)..(20)..(21)..(22): Xaa is A or G
  MOD_RES (23)..(24)..(25)..(26): Xaa is A or G or is absent

SEQ ID NO: 52011 - protein, 37 aa, Artificial Sequence; identical to SEQ ID NO: 14050
  GFR-binding peptide
  MOD_RES (4)..(5)..(37): Xaa is C or S

SEQ ID NO: 52012 - protein, 35 aa, Artificial Sequence
  GFR-binding peptide
  MOD_RES (1)..(1): Xaa is C or S
XRPTQVQLEPLPVVYYEIVRKKPIFEQLSNTLEDH

SEQ ID NO: 52013 - protein, 37 aa, Artificial Sequence; identical to SEQ ID NO: 14051
  GFR-binding peptide
  MOD_RES (2)..(3)..(35)..(37): Xaa is C or S

SEQ ID NO: 52014 - protein, 35 aa, Artificial Sequence; identical to SEQ ID NO: 14052
  GFR-binding peptide
  MOD_RES (1)..(33)..(35): Xaa is C or S

SEQ ID NO: 52015 - protein, 34 aa, Artificial Sequence
  GFR-binding peptide
  MOD_RES (3)..(4): Xaa is C or S
SPXXVSQDLRSVKIAKVIGKTPKIKEVQVMIVKS

SEQ ID NO: 52016 - protein, 39 aa, Artificial Sequence; identical to SEQ ID NO: 19094
  GFR-binding peptide
  MOD_RES (4)..(38): Xaa is C or S

SEQ ID NO: 52017 - protein, 44 aa, Artificial Sequence
  GFR-binding peptide
  MOD_RES (5)..(42)..(44): Xaa is C or S
  MOD_RES (21)..(22)..(23)..(24)..(25): Xaa is A or G
  MOD_RES (26)..(27)..(28)..(29): Xaa is A or G or is absent
RNVQXRPTQVQLEPLTVLYYXXXXXXXXXEQLSNTLEDHLAXKX

SEQ ID NO: 52018 - protein, 40 aa, Artificial Sequence
  GFR-binding peptide
  MOD_RES (3)..(4)..(38)..(40): Xaa is C or S
  MOD_RES (18)..(19)..(20)..(21)..(22): Xaa is A or G
  MOD_RES (23)..(24)..(25)..(26): Xaa is A or G or is absent
KPXXAPTKLSNITVQIMXXXXXXXXXIGEMSNMVVRSXGX

SEQ ID NO: 52019 - protein, 41 aa, Artificial Sequence
  GFR-binding peptide
  MOD_RES (6)..(40): Xaa is C or S
  MOD_RES (20)..(21)..(22)..(23)..(24): Xaa is A or G
  MOD_RES (25)..(26)..(27)..(28): Xaa is A or G or is absent
VTKPTXAPTKLRSVKVAKVXXXXXXXXXKEVQVNMVVRSXG

SEQ ID NO: 52020 - protein, 38 aa, Artificial Sequence
  GFR-binding peptide
  MOD_RES (36)..(38): Xaa is C or S
PSRVHHEPLTVLYYEYVRKKPKLEQLSNRLEEHLEXAX

SEQ ID NO: 52021 - protein, 37 aa, Artificial Sequence; identical to SEQ ID NO: 14054
  GFR-binding peptide
  MOD_RES (2)..(3)..(35)..(37): Xaa is C or S

SEQ ID NO: 52022 - protein, 34 aa, Artificial Sequence; identical to SEQ ID NO: 14055
  GFR-binding peptide
  MOD_RES (3)..(3): Xaa is C or S

SEQ ID NO: 52023 - protein, 35 aa, Artificial Sequence
  GFR-binding peptide
  MOD_RES (2)..(2): Xaa is C or S
  MOD_RES (16)..(17)..(18)..(19)..(20): Xaa is A or G
  MOD_RES (21)..(22)..(23)..(24): Xaa is A or G or is absent
TXAPTKLSNITVQIMXXXXXXXXXIGEMSNMVVRS

SEQ ID NO: 52024 - protein, 33 aa, Artificial Sequence; identical to SEQ ID NO: 14056
  GFR-binding peptide
  MOD_RES (2)..(3): Xaa is C or S

SEQ ID NO: 52025 - protein, 41 aa, Artificial Sequence
  GFR-binding peptide
  MOD_RES (5)..(6)..(39)..(41): Xaa is C or S
  MOD_RES (20)..(21)..(22)..(23)..(24): Xaa is A or G
  MOD_RES (25)..(26)..(27)..(28): Xaa is A or G or is absent
SASPXXVPQDLRSVKIAKVXXXXXXXXXKEVQVMVVKSXKX

SEQ ID NO: 52026 - protein, 38 aa, Artificial Sequence
  GFR-binding peptide
  MOD_RES (1)..(35)..(37): Xaa is C or S
  MOD_RES (15)..(16)..(17)..(18)..(19): Xaa is A or G
  MOD_RES (20)..(21)..(22)..(23): Xaa is A or G or is absent
XAPTQLSNITVQIMXXXXXXXXXIGEMSNMVVRAXGXH

SEQ ID NO: 52027 - protein, 33 aa, Artificial Sequence; identical to SEQ ID NO: 14058
  GFR-binding peptide
  MOD_RES (32)..(32): Xaa is C or S

SEQ ID NO: 52028 - protein, 36 aa, Artificial Sequence
  GFR-binding peptide
  MOD_RES (1)..(33)..(35): Xaa is C or S
XAPTQLRSVKVAKVDDSSNVIKEVQVNMVVRAXGXH

SEQ ID NO: 52029 - protein, 39 aa, Artificial Sequence; identical to SEQ ID NO: 19098
  GFR-binding peptide
  MOD_RES (6)..(6): Xaa is C or S

SEQ ID NO: 52030 - protein, 39 aa, Artificial Sequence
  GFR-binding peptide
  MOD_RES (4)..(4): Xaa is C or S
SVKXQPSRVHHEPLTVLYYEYVRKKPKLEQLSNRLEEHL

SEQ ID NO: 52031 - protein, 35 aa, Artificial Sequence; identical to SEQ ID NO: 14061
  GFR-binding peptide
  MOD_RES (4)..(5): Xaa is C or S

SEQ ID NO: 52032 - protein, 36 aa, Artificial Sequence; identical to SEQ ID NO: 14062
  GFR-binding peptide
  MOD_RES (33)..(35): Xaa is C or S
  MOD_RES (14)..(15)..(16)..(17)..(18): Xaa is A or G
  MOD_RES (19)..(20)..(21)..(22): Xaa is A or G or is absent

SEQ ID NO: 52033 - protein, 39 aa, Artificial Sequence
  GFR-binding peptide
  MOD_RES (7)..(7): Xaa is C or S
  MOD_RES (21)..(22)..(23)..(24)..(25): Xaa is A or G
  MOD_RES (26)..(27)..(28)..(29): Xaa is A or G or is absent
HVTKPTXAPTKLSNITVQIMXXXXXXXXXIGEMSNMVVR

SEQ ID NO: 52034 - protein, 34 aa, Artificial Sequence; identical to SEQ ID NO: 14064
  GFR-binding peptide
  MOD_RES (1)..(2): Xaa is C or S
  MOD_RES (16)..(17)..(18)..(19)..(20): Xaa is A or G
  MOD_RES (21)..(22)..(23)..(24): Xaa is A or G or is absent

SEQ ID NO: 52035 - protein, 36 aa, Artificial Sequence; identical to SEQ ID NO: 14065
  GFR-binding peptide
  MOD_RES (2)..(36): Xaa is C or S
  MOD_RES (16)..(17)..(18)..(19)..(20): Xaa is A or G
  MOD_RES (21)..(22)..(23)..(24): Xaa is A or G or is absent

SEQ ID NO: 52036 - protein, 35 aa, Artificial Sequence
  GFR-binding peptide
  MOD_RES (2)..(3)..(35): Xaa is C or S
PXXAPTKLSNITVQIMDDSSNVIIGEMSNMVVRSX

SEQ ID NO: 52037 - protein, 39 aa, Artificial Sequence
  GFR-binding peptide
  MOD_RES (3)..(3): Xaa is C or S
VQXRPTQVQLEPLPVVYYEIVRKKPIFEQLSNTLEDHLA

SEQ ID NO: 52038 - protein, 40 aa, Artificial Sequence
  GFR-binding peptide
  MOD_RES (4)..(5)..(37)..(39): Xaa is C or S
PKPXXAPTQLSNITVQIMDDSSNVIIGEMSNMVVRAXGXH

SEQ ID NO: 52039 - protein, 37 aa, Artificial Sequence
  GFR-binding peptide
  MOD_RES (2)..(3)..(36): Xaa is C or S
  MOD_RES (17)..(18)..(19)..(20)..(21): Xaa is A or G
  MOD_RES (22)..(23)..(24)..(25): Xaa is A or G or is absent
PXXVSQDLRSVKIAKVXXXXXXXXXKEVQVMIVKSXK

SEQ ID NO: 52040 - protein, 42 aa, Artificial Sequence
  GFR-binding peptide
  MOD_RES (2)..(39)..(41): Xaa is C or S
  MOD_RES (18)..(19)..(20)..(21)..(22): Xaa is A or G
  MOD_RES (23)..(24)..(25)..(26): Xaa is A or G or is absent
QXRPTQVQLEPLPVVYYXXXXXXXXXEQLSNTLEDHLAXKXE

SEQ ID NO: 52041 - protein, 43 aa, Artificial Sequence; identical to SEQ ID NO: 19104
  GFR-binding peptide
  MOD_RES (4)..(41)..(43): Xaa is C or S

SEQ ID NO: 52042 - protein, 35 aa, Artificial Sequence
  GFR-binding peptide
  MOD_RES (1)..(2)..(33)..(35): Xaa is C or S
XXVSQDLRPVQIRKIIGKTPKIKKATVMIVKSXKX

SEQ ID NO: 52043 - protein, 44 aa, Artificial Sequence; identical to SEQ ID NO: 19107
  GFR-binding peptide
  MOD_RES (5)..(42)..(44): Xaa is C or S

SEQ ID NO: 52044 - protein, 35 aa, Artificial Sequence
  GFR-binding peptide
  MOD_RES (3)..(4): Xaa is C or S
KPXXAPTQLRPVQVRKIDDSSNVIKKATVNMVVRA

SEQ ID NO: 52045 - protein, 38 aa, Artificial Sequence; identical to SEQ ID NO: 14068
  GFR-binding peptide
  MOD_RES (5)..(6)..(38): Xaa is C or S

SEQ ID NO: 52046 - protein, 36 aa, Artificial Sequence
  GFR-binding peptide
QPSRVHHEPLPVVYYEYVRKKPKLEQLSNRLEEHLE

SEQ ID NO: 52047 - protein, 35 aa, Artificial Sequence; identical to SEQ ID NO: 19111
  GFR-binding peptide
  MOD_RES (2)..(2): Xaa is C or S
  MOD_RES (16)..(17)..(18)..(19)..(20): Xaa is A or G
  MOD_RES (21)..(22)..(23)..(24): Xaa is A or G or is absent

SEQ ID NO: 52048 - protein, 37 aa, Artificial Sequence
  GFR-binding peptide
  MOD_RES (1)..(2)..(36): Xaa is C or S
  MOD_RES (16)..(17)..(18)..(19)..(20): Xaa is A or G
  MOD_RES (21)..(22)..(23)..(24): Xaa is A or G or is absent
XXVPTELRSVKMAKVXXXXXXXXXKEVQVDMVVEGXG

SEQ ID NO: 52049 - protein, 41 aa, Artificial Sequence
  GFR-binding peptide
  MOD_RES (4)..(41): Xaa is C or S
  MOD_RES (20)..(21)..(22)..(23)..(24): Xaa is A or G
  MOD_RES (25)..(26)..(27)..(28): Xaa is A or G or is absent
SVKXQPSRVHHEPLPVVYYXXXXXXXXXEQLSNRLEEHLEX

SEQ ID NO: 52050 - protein, 37 aa, Artificial Sequence
  GFR-binding peptide
  MOD_RES (4)..(5): Xaa is C or S
  MOD_RES (19)..(20)..(21)..(22)..(23): Xaa is A or G
  MOD_RES (24)..(25)..(26)..(27): Xaa is A or G or is absent
PKAXXVPTELRPVQMRKIXXXXXXXXXKKATVEMVVE

SEQ ID NO: 52051 - protein, 39 aa, Artificial Sequence
  GFR-binding peptide
  MOD_RES (37)..(39): Xaa is C or S
QPSRVHHEPLPVVYYEYVRKKPKLEQLSNRLEEHLEXAX

SEQ ID NO: 52052 - protein, 36 aa, Artificial Sequence; identical to SEQ ID NO: 39305
  GFR-binding peptide
  MOD_RES (1)..(34)..(36): Xaa is C or S
  MOD_RES (15)..(16)..(17)..(18)..(19): Xaa is A or G
  MOD_RES (20)..(21)..(22)..(23): Xaa is A or G or is absent

SEQ ID NO: 52053 - protein, 35 aa, Artificial Sequence
  GFR-binding peptide
  MOD_RES (1)..(2)..(33)..(35): Xaa is C or S
XXVPQALRPVQIRKIVGRKPKVKKATVMIVRSXKX

SEQ ID NO: 52054 - protein, 40 aa, Artificial Sequence
  GFR-binding peptide
  MOD_RES (6)..(40): Xaa is C or S
  MOD_RES (20)..(21)..(22)..(23)..(24): Xaa is A or G
  MOD_RES (25)..(26)..(27)..(28): Xaa is A or G or is absent
VTKPTXAPTKLSNITVQIMXXXXXXXXXIGEMSNMVVRSX

SEQ ID NO: 52055 - protein, 35 aa, Artificial Sequence; identical to SEQ ID NO: 19115
  GFR-binding peptide
  MOD_RES (1)..(35): Xaa is C or S

SEQ ID NO: 52056 - protein, 35 aa, Artificial Sequence
  GFR-binding peptide
  MOD_RES (2)..(3)..(35): Xaa is C or S
AXXVPTELSNITMQIMDEYDKVVIGEMSEMVVEGX

SEQ ID NO: 52057 - protein, 38 aa, Artificial Sequence
  GFR-binding peptide
  MOD_RES (4)..(5)..(36)..(38): Xaa is C or S
AAPXXVPQALRPVQIRKIVGRKPKVKKATVMIVRSXKX

SEQ ID NO: 52058 - protein, 39 aa, Artificial Sequence
  GFR-binding peptide
  MOD_RES (3)..(4)..(36)..(38): Xaa is C or S
KAXXVPTELRSVKMAKVDENEKVVKEVQVDMVVEGXGXR

SEQ ID NO: 52059 - protein, 42 aa, Artificial Sequence
  GFR-binding peptide
  MOD_RES (2)..(39)..(41): Xaa is C or S
KXQPSRVHHEPLTVLYYEYVRKKPKLEQLSNRLEEHLEXAXA

SEQ ID NO: 52060 - protein, 34 aa, Artificial Sequence
  GFR-binding peptide
  MOD_RES (1)..(1): Xaa is C or S
  MOD_RES (15)..(16)..(17)..(18)..(19): Xaa is A or G
  MOD_RES (20)..(21)..(22)..(23): Xaa is A or G or is absent
XAPTQLSNITVQIMXXXXXXXXXIGEMSNMVVRA

SEQ ID NO: 52061 - protein, 34 aa, Artificial Sequence
  GFR-binding peptide
  MOD_RES (1)..(32)..(34): Xaa is C or S
XVPQALRPVQIRKIVGRKPKVKKATVMIVRSXKX

SEQ ID NO: 52062 - protein, 39 aa, Artificial Sequence
  GFR-binding peptide
  MOD_RES (5)..(6): Xaa is C or S
  MOD_RES (20)..(21)..(22)..(23)..(24): Xaa is A or G
  MOD_RES (25)..(26)..(27)..(28): Xaa is A or G or is absent
VPKPXXAPTQLRSVKVAKVXXXXXXXXXKEVQVNMVVRA

SEQ ID NO: 52063 - protein, 37 aa, Artificial Sequence
  GFR-binding peptide
  MOD_RES (6)..(6): Xaa is C or S
VTKPTXAPTKLRSVKVAKVDDSSNVIKEVQVNMVVRS

SEQ ID NO: 52064 - protein, 34 aa, Artificial Sequence; identical to SEQ ID NO: 14078
  GFR-binding peptide
  MOD_RES (1)..(32)..(34): Xaa is C or S

SEQ ID NO: 52065 - protein, 38 aa, Artificial Sequence; identical to SEQ ID NO: 14079
  GFR-binding peptide
  MOD_RES (2)..(3)..(35)..(37): Xaa is C or S

SEQ ID NO: 52066 - protein, 40 aa, Artificial Sequence; identical to SEQ ID NO: 14080
  GFR-binding peptide
  MOD_RES (2)..(3)..(37)..(39): Xaa is C or S
  MOD_RES (17)..(18)..(19)..(20)..(21): Xaa is A or G
  MOD_RES (22)..(23)..(24)..(25): Xaa is A or G or is absent

SEQ ID NO: 52067 - protein, 40 aa, Artificial Sequence; identical to SEQ ID NO: 19126
  GFR-binding peptide
  MOD_RES (3)..(37)..(39): Xaa is C or S
  MOD_RES (17)..(18)..(19)..(20)..(21): Xaa is A or G
  MOD_RES (22)..(23)..(24)..(25): Xaa is A or G or is absent

SEQ ID NO: 52068 - protein, 38 aa, Artificial Sequence; identical to SEQ ID NO: 14081
  GFR-binding peptide
  MOD_RES (4)..(38): Xaa is C or S
  MOD_RES (18)..(19)..(20)..(21)..(22): Xaa is A or G
  MOD_RES (23)..(24)..(25)..(26): Xaa is A or G or is absent

SEQ ID NO: 52069 - protein, 38 aa, Artificial Sequence; identical to SEQ ID NO: 19127
  GFR-binding peptide
  MOD_RES (35)..(37): Xaa is C or S

SEQ ID NO: 52070 - protein, 38 aa, Artificial Sequence
  GFR-binding peptide
  MOD_RES (37)..(37): Xaa is C or S
  MOD_RES (16)..(17)..(18)..(19)..(20): Xaa is A or G
  MOD_RES (21)..(22)..(23)..(24): Xaa is A or G or is absent
QPSRVHHEPLTVLYYXXXXXXXXXEQLSNRLEEHLEXA

SEQ ID NO: 52071 - protein, 39 aa, Artificial Sequence
  GFR-binding peptide
  MOD_RES (6)..(7)..(39): Xaa is C or S
TVPKPXXAPTQLRSVKVAKVDDSSNVIKEVQVNMVVRAX

SEQ ID NO: 52072 - protein, 40 aa, Artificial Sequence
  GFR-binding peptide
  MOD_RES (6)..(7)..(40): Xaa is C or S
  MOD_RES (21)..(22)..(23)..(24)..(25): Xaa is A or G
  MOD_RES (26)..(27)..(28)..(29): Xaa is A or G or is absent
ASASPXXVPQDLSNITIQIMXXXXXXXXXIGEMSMVVKSX

SEQ ID NO: 52073 - protein, 32 aa, Artificial Sequence
  GFR-binding peptide
  MOD_RES (32)..(32): Xaa is C or S
APTKLRSVKVAKVDDSSNVIKEVQVNMVVRSX

SEQ ID NO: 52074 - protein, 45 aa, Artificial Sequence; identical to SEQ ID NO: 19129
  GFR-binding peptide
  MOD_RES (5)..(42)..(44): Xaa is C or S
  MOD_RES (21)..(22)..(23)..(24)..(25): Xaa is A or G
  MOD_RES (26)..(27)..(28)..(29): Xaa is A or G or is absent

SEQ ID NO: 52075 - protein, 43 aa, Artificial Sequence
  GFR-binding peptide
  MOD_RES (5)..(6)..(40)..(42): Xaa is C or S
  MOD_RES (20)..(21)..(22)..(23)..(24): Xaa is A or G
  MOD_RES (25)..(26)..(27)..(28): Xaa is A or G or is absent
VPKPXXAPTQLRPVQVRKIXXXXXXXXXKKATVNMVVRAXGXH

SEQ ID NO: 52076 - protein, 39 aa, Artificial Sequence
  GFR-binding peptide
  MOD_RES (6)..(7)..(39): Xaa is C or S
SIPKAXXVPTELRSVKMAKVDEYDKVVKEVQVEMVVEGX

SEQ ID NO: 52077 - protein, 39 aa, Artificial Sequence
  GFR-binding peptide
  MOD_RES (7)..(7): Xaa is C or S
NDEGLEXVPTEEEPLTMLYYRIKPHQGQHEQLSNFLQHN

SEQ ID NO: 52078 - protein, 39 aa, Artificial Sequence
  GFR-binding peptide
  MOD_RES (6)..(7): Xaa is C or S
  MOD_RES (21)..(22)..(23)..(24)..(25): Xaa is A or G
  MOD_RES (26)..(27)..(28)..(29): Xaa is A or G or is absent
ASAAPXXVPQALRSVKIAKVXXXXXXXXXKEVQVMIVRS

SEQ ID NO: 52079 - protein, 33 aa, Artificial Sequence; identical to SEQ ID NO: 14085
  GFR-binding peptide
  MOD_RES (14)..(15)..(16)..(17)..(18): Xaa is A or G
  MOD_RES (19)..(20)..(21)..(22): Xaa is A or G or is absent

SEQ ID NO: 52080 - protein, 34 aa, Artificial Sequence
  GFR-binding peptide
  MOD_RES (34)..(34): Xaa is C or S
  MOD_RES (14)..(15)..(16)..(17)..(18): Xaa is A or G
  MOD_RES (19)..(20)..(21)..(22): Xaa is A or G or is absent
VPTELRPVQMRKIXXXXXXXXXKKATVEMVVEGX

SEQ ID NO: 52081 - protein, 39 aa, Artificial Sequence; identical to SEQ ID NO: 19131
  GFR-binding peptide
  MOD_RES (3)..(3): Xaa is C or S

SEQ ID NO: 52082 - protein, 31 aa, Artificial Sequence
  GFR-binding peptide
APTQLRSVKVAKVDDSSNVIKEVQVNMVVRA

SEQ ID NO: 52083 - protein, 34 aa, Artificial Sequence
  GFR-binding peptide
  MOD_RES (1)..(2): Xaa is C or S
  MOD_RES (16)..(17)..(18)..(19)..(20): Xaa is A or G
  MOD_RES (21)..(22)..(23)..(24): Xaa is A or G or is absent
XXAPTQLRSVKVAKVXXXXXXXXXKEVQVNMVVR

SEQ ID NO: 52084 - protein, 36 aa, Artificial Sequence
  GFR-binding peptide
  MOD_RES (2)..(3)..(35): Xaa is C or S
AXXVPTELRSVKMAKVDENEKVVKEVQVDMVVEGXG

SEQ ID NO: 52085 - protein, 42 aa, Artificial Sequence; identical to SEQ ID NO: 19132
  GFR-binding peptide
  MOD_RES (4)..(41): Xaa is C or S
  MOD_RES (20)..(21)..(22)..(23)..(24): Xaa is A or G
  MOD_RES (25)..(26)..(27)..(28): Xaa is A or G or is absent

SEQ ID NO: 52086 - protein, 38 aa, Artificial Sequence
  GFR-binding peptide
  MOD_RES (5)..(5): Xaa is C or S
  MOD_RES (19)..(20)..(21)..(22)..(23): Xaa is A or G
  MOD_RES (24)..(25)..(26)..(27): Xaa is A or G or is absent
TKPTXAPTKLRSVKVAKVXXXXXXXXXKEVQVNMVVRS

SEQ ID NO: 52087 - protein, 43 aa, Artificial Sequence
  GFR-binding peptide
  MOD_RES (5)..(6)..(40)..(42): Xaa is C or S
  MOD_RES (20)..(21)..(22)..(23)..(24): Xaa is A or G
  MOD_RES (25)..(26)..(27)..(28): Xaa is A or G or is absent
VPKPXXAPTQLRSVKVAKVXXXXXXXXXKEVQVNMVVRAXGXH

SEQ ID NO: 52088 - protein, 43 aa, Artificial Sequence
  GFR-binding peptide
  MOD_RES (6)..(7)..(41)..(43): Xaa is C or S
  MOD_RES (21)..(22)..(23)..(24)..(25): Xaa is A or G
  MOD_RES (26)..(27)..(28)..(29): Xaa is A or G or is absent
SIPKAXXVPTELSNITMQIMXXXXXXXXXIGEMSEMVVEGXGX

SEQ ID NO: 52089 - protein, 37 aa, Artificial Sequence; identical to SEQ ID NO: 14089
  GFR-binding peptide
  MOD_RES (2)..(3)..(34)..(36): Xaa is C or S

SEQ ID NO: 52090 - protein, 43 aa, Artificial Sequence
  GFR-binding peptide
  MOD_RES (6)..(7)..(41)..(43): Xaa is C or S
  MOD_RES (21)..(22)..(23)..(24)..(25): Xaa is A or G
  MOD_RES (26)..(27)..(28)..(29): Xaa is A or G or is absent
SIPKAXXVPTELRSVKMAKVXXXXXXXXXKEVQVEMVVEGXGX

SEQ ID NO: 52091 - protein, 37 aa, Artificial Sequence
  GFR-binding peptide
  MOD_RES (34)..(36): Xaa is C or S
  MOD_RES (14)..(15)..(16)..(17)..(18): Xaa is A or G
  MOD_RES (19)..(20)..(21)..(22): Xaa is A or G or is absent
VPTEEEPLPMVYYXXXXXXXXXEQLSNFLQHNKXEXR

SEQ ID NO: 52092 - protein, 35 aa, Artificial Sequence
  GFR-binding peptide
  MOD_RES (2)..(3): Xaa is C or S
  MOD_RES (17)..(18)..(19)..(20)..(21): Xaa is A or G
  MOD_RES (22)..(23)..(24)..(25): Xaa is A or G or is absent
PXXAPTQLSNITVQIMXXXXXXXXXIGEMSNMVVR

SEQ ID NO: 52093 - protein, 34 aa, Artificial Sequence
  GFR-binding peptide
  MOD_RES (2)..(2): Xaa is C or S
  MOD_RES (16)..(17)..(18)..(19)..(20): Xaa is A or G
  MOD_RES (21)..(22)..(23)..(24): Xaa is A or G or is absent
TXAPTKLRPVQVRKIXXXXXXXXXKKATVNMVVR

SEQ ID NO: 52094 - protein, 40 aa, Artificial Sequence
  GFR-binding peptide
  MOD_RES (5)..(6)..(37)..(39): Xaa is C or S
SASPXXVSQDLRSVKIAKVIGKTPKIKEVQVMIVKSXKXS

SEQ ID NO: 52095 - protein, 41 aa, Artificial Sequence
  GFR-binding peptide
  MOD_RES (4)..(5)..(38)..(40): Xaa is C or S
  MOD_RES (19)..(20)..(21)..(22)..(23): Xaa is A or G
  MOD_RES (24)..(25)..(26)..(27): Xaa is A or G or is absent
ASPXXVPQDLSNITIQIMXXXXXXXXXIGEMSMVVKSXKXS

SEQ ID NO: 52096 - protein, 36 aa, Artificial Sequence
  GFR-binding peptide
  MOD_RES (5)..(6): Xaa is C or S
VPKPXXAPTQLRPVQVRKIDDSSNVIKKATVNMVVR

SEQ ID NO: 52097 - protein, 32 aa, Artificial Sequence
  GFR-binding peptide
  MOD_RES (1)..(2): Xaa is C or S
XXVPTELSNITMQIMDENEKVVIGEMSDMVVE

SEQ ID NO: 52098 - protein, 37 aa, Artificial Sequence; identical to SEQ ID NO: 19136
  GFR-binding peptide
  MOD_RES (1)..(35)..(37): Xaa is C or S

SEQ ID NO: 52099 - protein, 41 aa, Artificial Sequence; identical to SEQ ID NO: 14092
  GFR-binding peptide
  MOD_RES (3)..(4)..(38)..(40): Xaa is C or S
  MOD_RES (18)..(19)..(20)..(21)..(22): Xaa is A or G
  MOD_RES (23)..(24)..(25)..(26): Xaa is A or G or is absent

SEQ ID NO: 52100 - protein, 36 aa, Artificial Sequence
  GFR-binding peptide
  MOD_RES (4)..(4): Xaa is C or S
  MOD_RES (18)..(19)..(20)..(21)..(22): Xaa is A or G
  MOD_RES (23)..(24)..(25)..(26): Xaa is A or G or is absent
GLEXVPTEEEPLTMLYYXXXXXXXXXEQLSNFLQHN

SEQ ID NO: 52101 - protein, 34 aa, Artificial Sequence; identical to SEQ ID NO: 19137
  GFR-binding peptide
  MOD_RES (15)..(16)..(17)..(18)..(19): Xaa is A or G
  MOD_RES (20)..(21)..(22)..(23): Xaa is A or G or is absent

SEQ ID NO: 52102 - protein, 43 aa, Artificial Sequence
  GFR-binding peptide
  MOD_RES (5)..(42): Xaa is C or S
SSVKXQPSRVHHEPLTVLYYEYVRKKPKLEQLSNRLEEHLEXA

SEQ ID NO: 52103 - protein, 32 aa, Artificial Sequence; identical to SEQ ID NO: 14095
  GFR-binding peptide
  MOD_RES (1)..(2): Xaa is C or S

SEQ ID NO: 52104 - protein, 37 aa, Artificial Sequence
  GFR-binding peptide
  MOD_RES (1)..(34)..(36): Xaa is C or S
  MOD_RES (15)..(16)..(17)..(18)..(19): Xaa is A or G
  MOD_RES (20)..(21)..(22)..(23): Xaa is A or G or is absent
XVPQDLSNITIQIMXXXXXXXXXIGEMSMVVKSXKXS

SEQ ID NO: 52105 - protein, 41 aa, Artificial Sequence
  GFR-binding peptide
  MOD_RES (2)..(39)..(41): Xaa is C or S
KXQPSRVHHEPLPVVYYEYVRKKPKLEQLSNRLEEHLEXAX

SEQ ID NO: 52106 - protein, 36 aa, Artificial Sequence
  GFR-binding peptide
  MOD_RES (4)..(5): Xaa is C or S
PKPXXAPTKLRPVQVRKIDDSSNVIKKATVNMVVRS

SEQ ID NO: 52107 - protein, 33 aa, Artificial Sequence
  GFR-binding peptide
  MOD_RES (14)..(15)..(16)..(17)..(18): Xaa is A or G
  MOD_RES (19)..(20)..(21)..(22): Xaa is A or G or is absent
APTQLSNITVQIMXXXXXXXXXIGEMSNMVVRA

SEQ ID NO: 52108 - protein, 36 aa, Artificial Sequence
  GFR-binding peptide
  MOD_RES (4)..(5)..(36): Xaa is C or S
ASPXXVSQDLRPVQIRKIIGKTPKIKKATVMIVKSX

SEQ ID NO: 52109 - protein, 37 aa, Artificial Sequence; identical to SEQ ID NO: 14099
  GFR-binding peptide
  MOD_RES (2)..(3)..(37): Xaa is C or S
  MOD_RES (17)..(18)..(19)..(20)..(21): Xaa is A or G
  MOD_RES (22)..(23)..(24)..(25): Xaa is A or G or is absent

SEQ ID NO: 52110 - protein, 41 aa, Artificial Sequence
  GFR-binding peptide
  MOD_RES (7)..(41): Xaa is C or S
  MOD_RES (21)..(22)..(23)..(24)..(25): Xaa is A or G
  MOD_RES (26)..(27)..(28)..(29): Xaa is A or G or is absent
NDEGLEXVPTEEEPLTMLYYXXXXXXXXXEQLSNFLQHNKX

SEQ ID NO: 52111 - protein, 34 aa, Artificial Sequence; identical to SEQ ID NO: 14100
  GFR-binding peptide
  MOD_RES (2)..(2): Xaa is C or S
  MOD_RES (16)..(17)..(18)..(19)..(20): Xaa is A or G
  MOD_RES (21)..(22)..(23)..(24): Xaa is A or G or is absent

SEQ ID NO: 52112 - protein, 36 aa, Artificial Sequence
  GFR-binding peptide
  MOD_RES (1)..(35): Xaa is C or S
  MOD_RES (15)..(16)..(17)..(18)..(19): Xaa is A or G
  MOD_RES (20)..(21)..(22)..(23): Xaa is A or G or is absent
XAPTKLSNITVQIMXXXXXXXXXIGEMSNMVVRSXG

SEQ ID NO: 52113 - protein, 42 aa, Artificial Sequence
  GFR-binding peptide
  MOD_RES (5)..(42): Xaa is C or S
SSVKXQPSRVHHEPLTVLYYEYVRKKPKLEQLSNRLEEHLEX

SEQ ID NO: 52114 - protein, 42 aa, Artificial Sequence; identical to SEQ ID NO: 19145
  GFR-binding peptide
  MOD_RES (4)..(41): Xaa is C or S
  MOD_RES (20)..(21)..(22)..(23)..(24): Xaa is A or G
  MOD_RES (25)..(26)..(27)..(28): Xaa is A or G or is absent

SEQ ID NO: 52115 - protein, 41 aa, Artificial Sequence; identical to SEQ ID NO: 19146
  GFR-binding peptide
  MOD_RES (5)..(5): Xaa is C or S
  MOD_RES (21)..(22)..(23)..(24)..(25): Xaa is A or G
  MOD_RES (26)..(27)..(28)..(29): Xaa is A or G or is absent

SEQ ID NO: 52116 - protein, 36 aa, Artificial Sequence; identical to SEQ ID NO: 14106
  GFR-binding peptide
  MOD_RES (1)..(2)..(36): Xaa is C or S
  MOD_RES (16)..(17)..(18)..(19)..(20): Xaa is A or G
  MOD_RES (21)..(22)..(23)..(24): Xaa is A or G or is absent

SEQ ID NO: 52117 - protein, 44 aa, Artificial Sequence; identical to SEQ ID NO: 14107
  GFR-binding peptide
  MOD_RES (6)..(7)..(41)..(43): Xaa is C or S
  MOD_RES (21)..(22)..(23)..(24)..(25): Xaa is A or G
  MOD_RES (26)..(27)..(28)..(29): Xaa is A or G or is absent

SEQ ID NO: 52118 - protein, 43 aa, Artificial Sequence; identical to SEQ ID NO: 19148
  GFR-binding peptide
  MOD_RES (5)..(42): Xaa is C or S

SEQ ID NO: 52119 - protein, 41 aa, Artificial Sequence; identical to SEQ ID NO: 14109
  GFR-binding peptide
  MOD_RES (5)..(6)..(40): Xaa is C or S
  MOD_RES (20)..(21)..(22)..(23)..(24): Xaa is A or G
  MOD_RES (25)..(26)..(27)..(28): Xaa is A or G or is absent

SEQ ID NO: 52120 - protein, 37 aa, Artificial Sequence
  GFR-binding peptide
  MOD_RES (1)..(2)..(36): Xaa is C or S
  MOD_RES (16)..(17)..(18)..(19)..(20): Xaa is A or G
  MOD_RES (21)..(22)..(23)..(24): Xaa is A or G or is absent
XXAPTQLRSVKVAKVXXXXXXXXXKEVQVNMVVRAXG

SEQ ID NO: 52121 - protein, 34 aa, Artificial Sequence
  GFR-binding peptide
  MOD_RES (3)..(4): Xaa is C or S
KPXXAPTQLRPVQVRKIDDSSNVIKKATVNMVVR

SEQ ID NO: 52122 - protein, 35 aa, Artificial Sequence
  GFR-binding peptide
  MOD_RES (3)..(3): Xaa is C or S
  MOD_RES (17)..(18)..(19)..(20)..(21): Xaa is A or G
  MOD_RES (22)..(23)..(24)..(25): Xaa is A or G or is absent
PTXAPTKLRPVQVRKIXXXXXXXXXKKATVNMVVR

SEQ ID NO: 52123 - protein, 39 aa, Artificial Sequence
  GFR-binding peptide
  MOD_RES (6)..(7): Xaa is C or S
  MOD_RES (21)..(22)..(23)..(24)..(25): Xaa is A or G
  MOD_RES (26)..(27)..(28)..(29): Xaa is A or G or is absent
SIPKAXXVPTELSNITMQIMXXXXXXXXXIGEMSEMVVE

SEQ ID NO: 52124 - protein, 35 aa, Artificial Sequence
  GFR-binding peptide
  MOD_RES (3)..(4): Xaa is C or S
KPXXAPTKLRPVQVRKIDDSSNVIKKATVNMVVRS

SEQ ID NO: 52125 - protein, 33 aa, Artificial Sequence
  GFR-binding peptide
  MOD_RES (2)..(3): Xaa is C or S
PXXAPTKLRPVQVRKIDDSSNVIKKATVNMVVR

SEQ ID NO: 52126 - protein, 38 aa, Artificial Sequence; identical to SEQ ID NO: 19151
  GFR-binding peptide
  MOD_RES (37)..(37): Xaa is C or S

SEQ ID NO: 52127 - protein, 35 aa, Artificial Sequence
  GFR-binding peptide
  MOD_RES (35)..(35): Xaa is C or S
SRVHHEPLTVLYYEYVRKKPKLEQLSNRLEEHLEX

SEQ ID NO: 52128 - protein, 33 aa, Artificial Sequence
  GFR-binding peptide
  MOD_RES (33)..(33): Xaa is C or S
  MOD_RES (14)..(15)..(16)..(17)..(18): Xaa is A or G
  MOD_RES (19)..(20)..(21)..(22): Xaa is A or G or is absent
VPQALSNITIQIMXXXXXXXXXIGEMSMIVRSX

SEQ ID NO: 52129 - protein, 38 aa, Artificial Sequence; identical to SEQ ID NO: 14117
  GFR-binding peptide
  MOD_RES (4)..(36)..(38): Xaa is C or S

SEQ ID NO: 52130 - protein, 36 aa, Artificial Sequence; identical to SEQ ID NO: 19159
  GFR-binding peptide
  MOD_RES (35)..(35): Xaa is C or S
  MOD_RES (14)..(15)..(16)..(17)..(18): Xaa is A or G
  MOD_RES (19)..(20)..(21)..(22): Xaa is A or G or is absent

SEQ ID NO: 52131 - protein, 38 aa, Artificial Sequence
  GFR-binding peptide
  MOD_RES (1)..(38): Xaa is C or S
  MOD_RES (17)..(18)..(19)..(20)..(21): Xaa is A or G
  MOD_RES (22)..(23)..(24)..(25): Xaa is A or G or is absent
XQPSRVHHEPLPVVYYXXXXXXXXXEQLSNRLEEHLEX

SEQ ID NO: 52132 - protein, 38 aa, Artificial Sequence; identical to SEQ ID NO: 14121
  GFR-binding peptide
  MOD_RES (3)..(4)..(36)..(38): Xaa is C or S

SEQ ID NO: 52133 - protein, 34 aa, Artificial Sequence
  GFR-binding peptide
  MOD_RES (34)..(34): Xaa is C or S
  MOD_RES (14)..(15)..(16)..(17)..(18): Xaa is A or G
  MOD_RES (19)..(20)..(21)..(22): Xaa is A or G or is absent
APTKLRPVQVRKIXXXXXXXXXKKATVNMVVRSX

SEQ ID NO: 52134 - protein, 43 aa, Artificial Sequence
  GFR-binding peptide
  MOD_RES (6)..(7)..(40)..(42): Xaa is C or S
  MOD_RES (21)..(22)..(23)..(24)..(25): Xaa is A or G
  MOD_RES (26)..(27)..(28)..(29): Xaa is A or G or is absent
ASAAPXXVPQALRSVKIAKVXXXXXXXXXKEVQVMIVRSXKXS

SEQ ID NO: 52135 - protein, 35 aa, Artificial Sequence
  GFR-binding peptide
  MOD_RES (1)..(2): Xaa is C or S
  MOD_RES (16)..(17)..(18)..(19)..(20): Xaa is A or G
  MOD_RES (21)..(22)..(23)..(24): Xaa is A or G or is absent
XXVPTELSNITMQIMXXXXXXXXXIGEMSEMVVEG

SEQ ID NO: 52136 - protein, 37 aa, Artificial Sequence; identical to SEQ ID NO: 19163
  GFR-binding peptide
  MOD_RES (37)..(37): Xaa is C or S

SEQ ID NO: 52137 - protein, 36 aa, Artificial Sequence
  GFR-binding peptide
  MOD_RES (1)..(2)..(34)..(36): Xaa is C or S
XXAPTQLRSVKVAKVDDSSNVIKEVQVNMVVRAXGX

SEQ ID NO: 52138 - protein, 31 aa, Artificial Sequence
  GFR-binding peptide
  MOD_RES (1)..(1): Xaa is C or S
XAPTKLRPVQVRKIDDSSNVIKKATVNMVVR

SEQ ID NO: 52139 - protein, 33 aa, Artificial Sequence
  GFR-binding peptide
  MOD_RES (31)..(33): Xaa is C or S
VPQALRSVKIAKVVGRKPKVKEVQVMIVRSXKX

SEQ ID NO: 52140 - protein, 39 aa, Artificial Sequence
  GFR-binding peptide
  MOD_RES (5)..(6): Xaa is C or S
  MOD_RES (20)..(21)..(22)..(23)..(24): Xaa is A or G
  MOD_RES (25)..(26)..(27)..(28): Xaa is A or G or is absent
IPKAXXVPTELRPVQMRKIXXXXXXXXXKKATVDMVVEG

SEQ ID NO: 52141 - protein, 37 aa, Artificial Sequence
  GFR-binding peptide
  MOD_RES (6)..(7): Xaa is C or S
KIPKAXXVPTELRPVQMRKIDENEKVVKKATVDMVVE

SEQ ID NO: 52142 - protein, 37 aa, Artificial Sequence; identical to SEQ ID NO: 19167
  GFR-binding peptide
  MOD_RES (3)..(3): Xaa is C or S
  MOD_RES (19)..(20)..(21)..(22)..(23): Xaa is A or G
  MOD_RES (24)..(25)..(26)..(27): Xaa is A or G or is absent

SEQ ID NO: 52143 - protein, 39 aa, Artificial Sequence
  GFR-binding peptide
  MOD_RES (3)..(4)..(36)..(38): Xaa is C or S
KPXXAPTQLRPVQVRKIDDSSNVIKKATVNMVVRAXGXH

SEQ ID NO: 52144 - protein, 37 aa, Artificial Sequence
  GFR-binding peptide
  MOD_RES (6)..(7): Xaa is C or S
YVPKPXXAPTKLSNITVQIMDDSSNVIIGEMSNMVVR

SEQ ID NO: 52145 - protein, 31 aa, Artificial Sequence
  GFR-binding peptide
  MOD_RES (31)..(31): Xaa is C or S
VSQDLRSVKIAKVIGKTPKIKEVQVMIVKSX

SEQ ID NO: 52146 - protein, 36 aa, Artificial Sequence; identical to SEQ ID NO: 19168
  GFR-binding peptide
  MOD_RES (3)..(3): Xaa is C or S
  MOD_RES (17)..(18)..(19)..(20)..(21): Xaa is A or G
  MOD_RES (22)..(23)..(24)..(25): Xaa is A or G or is absent

SEQ ID NO: 52147 - protein, 37 aa, Artificial Sequence
  GFR-binding peptide
  MOD_RES (5)..(6)..(37): Xaa is C or S
SASPXXVSQDLRSVKIAKVIGKTPKIKEVQVMIVKSX

SEQ ID NO: 52148 - protein, 38 aa, Artificial Sequence
  GFR-binding peptide
  MOD_RES (6)..(38): Xaa is C or S
VTKPTXAPTKLRPVQVRKIDDSSNVIKKATVNMVVRSX

SEQ ID NO: 52149 - protein, 41 aa, Artificial Sequence
  GFR-binding peptide
  MOD_RES (6)..(7)..(38)..(40): Xaa is C or S
ASASPXXVSQDLRPVQIRKIIGKTPKIKKATVMIVKSXKXS

SEQ ID NO: 52150 - protein, 37 aa, Artificial Sequence
  GFR-binding peptide
  MOD_RES (2)..(3)..(35)..(37): Xaa is C or S
PXXAPTKLRSVKVAKVDDSSNVIKEVQVNMVVRSXGX

SEQ ID NO: 52151 - protein, 44 aa, Artificial Sequence; identical to SEQ ID NO: 19171
  GFR-binding peptide
  MOD_RES (5)..(42)..(44): Xaa is C or S
  MOD_RES (21)..(22)..(23)..(24)..(25): Xaa is A or G
  MOD_RES (26)..(27)..(28)..(29): Xaa is A or G or is absent

SEQ ID NO: 52152 - protein, 33 aa, Artificial Sequence
  GFR-binding peptide
  MOD_RES (31)..(33): Xaa is C or S
VPQDLSNITIQIMVGRTPKVIGEMSMVVKSXKX

SEQ ID NO: 52153 - protein, 33 aa, Artificial Sequence; identical to SEQ ID NO: 14131
  GFR-binding peptide
  MOD_RES (32)..(32): Xaa is C or S

SEQ ID NO: 52154 - protein, 35 aa, Artificial Sequence
  GFR-binding peptide
  MOD_RES (1)..(1): Xaa is C or S
XQPSRVHHEPLTVLYYEYVRKKPKLEQLSNRLEEH

SEQ ID NO: 52155 - protein, 43 aa, Artificial Sequence
  GFR-binding peptide
  MOD_RES (4)..(41)..(43): Xaa is C or S
  MOD_RES (20)..(21)..(22)..(23)..(24): Xaa is A or G
  MOD_RES (25)..(26)..(27)..(28): Xaa is A or G or is absent
SVKXQPSRVHHEPLTVLYYXXXXXXXXXEQLSNRLEEHLEXAX

SEQ ID NO: 52156 - protein, 38 aa, Artificial Sequence; identical to SEQ ID NO: 19173
  GFR-binding peptide
  MOD_RES (37)..(37): Xaa is C or S
  MOD_RES (16)..(17)..(18)..(19)..(20): Xaa is A or G
  MOD_RES (21)..(22)..(23)..(24): Xaa is A or G or is absent

SEQ ID NO: 52157 - protein, 37 aa, Artificial Sequence
  GFR-binding peptide
  MOD_RES (5)..(5): Xaa is C or S
  MOD_RES (19)..(20)..(21)..(22)..(23): Xaa is A or G
  MOD_RES (24)..(25)..(26)..(27): Xaa is A or G or is absent
TKPTXAPTKLSNITVQIMXXXXXXXXXIGEMSNMVVR

SEQ ID NO: 52158 - protein, 37 aa, Artificial Sequence
  GFR-binding peptide
  MOD_RES (2)..(2): Xaa is C or S
  MOD_RES (18)..(19)..(20)..(21)..(22): Xaa is A or G
  MOD_RES (23)..(24)..(25)..(26): Xaa is A or G or is absent
KXQPSRVHHEPLTVLYYXXXXXXXXXEQLSNRLEEHL

SEQ ID NO: 52159 - protein, 39 aa, Artificial Sequence; identical to SEQ ID NO: 14133
  GFR-binding peptide
  MOD_RES (2)..(36)..(38): Xaa is C or S
  MOD_RES (16)..(17)..(18)..(19)..(20): Xaa is A or G
  MOD_RES (21)..(22)..(23)..(24): Xaa is A or G or is absent

SEQ ID NO: 52160 - protein, 38 aa, Artificial Sequence; identical to SEQ ID NO: 14134
  GFR-binding peptide
  MOD_RES (1)..(2)..(36)..(38): Xaa is C or S
  MOD_RES (16)..(17)..(18)..(19)..(20): Xaa is A or G
  MOD_RES (21)..(22)..(23)..(24): Xaa is A or G or is absent

SEQ ID NO: 52161 - protein, 35 aa, Artificial Sequence
  GFR-binding peptide
  MOD_RES (1)..(34): Xaa is C or S
  MOD_RES (15)..(16)..(17)..(18)..(19): Xaa is A or G
  MOD_RES (20)..(21)..(22)..(23): Xaa is A or G or is absent
XVPQALRPVQIRKIXXXXXXXXXKKATVMIVRSXK

SEQ ID NO: 52162 - protein, 37 aa, Artificial Sequence; identical to SEQ ID NO: 19174
  GFR-binding peptide
  MOD_RES (2)..(2): Xaa is C or S
  MOD_RES (18)..(19)..(20)..(21)..(22): Xaa is A or G
  MOD_RES (23)..(24)..(25)..(26): Xaa is A or G or is absent

SEQ ID NO: 52163 - protein, 38 aa, Artificial Sequence; identical to SEQ ID NO: 19176
  GFR-binding peptide
  MOD_RES (2)..(2): Xaa is C or S
  MOD_RES (18)..(19)..(20)..(21)..(22): Xaa is A or G
  MOD_RES (23)..(24)..(25)..(26): Xaa is A or G or is absent

SEQ ID NO: 52164 - protein, 35 aa, Artificial Sequence; identical to SEQ ID NO: 39412
  GFR-binding peptide
  MOD_RES (33)..(35): Xaa is C or S
  MOD_RES (14)..(15)..(16)..(17)..(18): Xaa is A or G
  MOD_RES (19)..(20)..(21)..(22): Xaa is A or G or is absent

SEQ ID NO: 52165 - protein, 38 aa, Artificial Sequence
  GFR-binding peptide
  MOD_RES (3)..(37): Xaa is C or S
  MOD_RES (17)..(18)..(19)..(20)..(21): Xaa is A or G
  MOD_RES (22)..(23)..(24)..(25): Xaa is A or G or is absent
PTXAPTKLRSVKVAKVXXXXXXXXXKEVQVNMVVRSXG

SEQ ID NO: 52166 - protein, 40 aa, Artificial Sequence
  GFR-binding peptide
  MOD_RES (2)..(3)..(37)..(39): Xaa is C or S
  MOD_RES (17)..(18)..(19)..(20)..(21): Xaa is A or G
  MOD_RES (22)..(23)..(24)..(25): Xaa is A or G or is absent
PXXAPTKLSNITVQIMXXXXXXXXXIGEMSNMVVRSXGXH

SEQ ID NO: 52167 - protein, 31 aa, Artificial Sequence
  GFR-binding peptide
  MOD_RES (1)..(1): Xaa is C or S
XVPQALSNITIQIMVGRKPKVIGEMSMIVRS

SEQ ID NO: 52168 - protein, 38 aa, Artificial Sequence; identical to SEQ ID NO: 14136
  GFR-binding peptide
  MOD_RES (3)..(4)..(36)..(38): Xaa is C or S

SEQ ID NO: 52169 - protein, 43 aa, Artificial Sequence
  GFR-binding peptide
  MOD_RES (5)..(6)..(40)..(42): Xaa is C or S
  MOD_RES (20)..(21)..(22)..(23)..(24): Xaa is A or G
  MOD_RES (25)..(26)..(27)..(28): Xaa is A or G or is absent
VPKPXXAPTKLSNITVQIMXXXXXXXXXIGEMSNMVVRSXGXH

SEQ ID NO: 52170 - protein, 40 aa, Artificial Sequence
  GFR-binding peptide
  MOD_RES (3)..(4)..(37)..(39): Xaa is C or S
  MOD_RES (18)..(19)..(20)..(21)..(22): Xaa is A or G
  MOD_RES (23)..(24)..(25)..(26): Xaa is A or G or is absent
SPXXVPQDLSNITIQIMXXXXXXXXXIGEMSMVVKSXKXS

SEQ ID NO: 52171 - protein, 35 aa, Artificial Sequence; identical to SEQ ID NO: 14138
  GFR-binding peptide
  MOD_RES (4)..(5): Xaa is C or S

SEQ ID NO: 52172 - protein, 34 aa, Artificial Sequence; identical to SEQ ID NO: 14139
  GFR-binding peptide
  MOD_RES (1)..(33): Xaa is C or S

SEQ ID NO: 52173 - protein, 35 aa, Artificial Sequence; identical to SEQ ID NO: 19182
  GFR-binding peptide
  MOD_RES (35)..(35): Xaa is C or S
  MOD_RES (14)..(15)..(16)..(17)..(18): Xaa is A or G
  MOD_RES (19)..(20)..(21)..(22): Xaa is A or G or is absent

SEQ ID NO: 52174 - protein, 38 aa, Artificial Sequence
  GFR-binding peptide
  MOD_RES (4)..(5)..(38): Xaa is C or S
  MOD_RES (19)..(20)..(21)..(22)..(23): Xaa is A or G
  MOD_RES (24)..(25)..(26)..(27): Xaa is A or G or is absent
ASPXXVSQDLRSVKIAKVXXXXXXXXXKEVQVMIVKSX

SEQ ID NO: 52175 - protein, 41 aa, Artificial Sequence; identical to SEQ ID NO: 19183
  GFR-binding peptide
  MOD_RES (4)..(41): Xaa is C or S
  MOD_RES (20)..(21)..(22)..(23)..(24): Xaa is A or G
  MOD_RES (25)..(26)..(27)..(28): Xaa is A or G or is absent

SEQ ID NO: 52176 - protein, 38 aa, Artificial Sequence; identical to SEQ ID NO: 14143
  GFR-binding peptide
  MOD_RES (3)..(4)..(38): Xaa is C or S
  MOD_RES (18)..(19)..(20)..(21)..(22): Xaa is A or G
  MOD_RES (23)..(24)..(25)..(26): Xaa is A or G or is absent

SEQ ID NO: 52177 - protein, 33 aa, Artificial Sequence
  GFR-binding peptide
  MOD_RES (1)..(2)..(33): Xaa is C or S
XXVPQDLRPVQIRKIVGRTPKVKKATVMVVKSX

SEQ ID NO: 52178 - protein, 40 aa, Artificial Sequence; identical to SEQ ID NO: 39426
  GFR-binding peptide
  MOD_RES (5)..(6)..(39): Xaa is C or S
  MOD_RES (20)..(21)..(22)..(23)..(24): Xaa is A or G
  MOD_RES (25)..(26)..(27)..(28): Xaa is A or G or is absent

SEQ ID NO: 52179 - protein, 32 aa, Artificial Sequence
  GFR-binding peptide
  MOD_RES (31)..(31): Xaa is C or S
VPQDLRPVQIRKIVGRTPKVKKATVMVVKSXK

SEQ ID NO: 52180 - protein, 39 aa, Artificial Sequence
  GFR-binding peptide
  MOD_RES (2)..(3)..(37)..(39): Xaa is C or S
  MOD_RES (17)..(18)..(19)..(20)..(21): Xaa is A or G
  MOD_RES (22)..(23)..(24)..(25): Xaa is A or G or is absent
AXXVPTELRSVKMAKVXXXXXXXXXKEVQVDMVVEGXGX

SEQ ID NO: 52181 - protein, 39 aa, Artificial Sequence; identical to SEQ ID NO: 19189
  GFR-binding peptide
  MOD_RES (2)..(39): Xaa is C or S

SEQ ID NO: 52182 - protein, 39 aa, Artificial Sequence
  GFR-binding peptide
  MOD_RES (3)..(3): Xaa is C or S
VKXQPSRVHHEPLTVLYYEYVRKKPKLEQLSNRLEEHLE

SEQ ID NO: 52183 - protein, 40 aa, Artificial Sequence
  GFR-binding peptide
  MOD_RES (6)..(7)..(39): Xaa is C or S
TVPKPXXAPTQLRPVQVRKIDDSSNVIKKATVNMVVRAXG

SEQ ID NO: 52184 - protein, 37 aa, Artificial Sequence
  GFR-binding peptide
  MOD_RES (3)..(4)..(35)..(37): Xaa is C or S
APXXVPQALRSVKIAKVVGRKPKVKEVQVMIVRSXKX

SEQ ID NO: 52185 - protein, 43 aa, Artificial Sequence; identical to SEQ ID NO: 19194
  GFR-binding peptide
  MOD_RES (7)..(41)..(43): Xaa is C or S

SEQ ID NO: 52186 - protein, 38 aa, Artificial Sequence; identical to SEQ ID NO: 19195
  GFR-binding peptide
  MOD_RES (4)..(4): Xaa is C or S

SEQ ID NO: 52187 - protein, 37 aa, Artificial Sequence
  GFR-binding peptide
  MOD_RES (5)..(37): Xaa is C or S
TKPTXAPTKLSNITVQIMDDSSNVIIGEMSNMVVRSX

SEQ ID NO: 52188 - protein, 33 aa, Artificial Sequence; identical to SEQ ID NO: 14154
  GFR-binding peptide
  MOD_RES (1)..(33): Xaa is C or S

SEQ ID NO: 52189 - protein, 30 aa, Artificial Sequence
  GFR-binding peptide
VPTELRPVQMRKIDENEKVVKKATVDMVVE

SEQ ID NO: 52190 - protein, 40 aa, Artificial Sequence; identical to SEQ ID NO: 14156
  GFR-binding peptide
  MOD_RES (3)..(4)..(37)..(39): Xaa is C or S
  MOD_RES (18)..(19)..(20)..(21)..(22): Xaa is A or G
  MOD_RES (23)..(24)..(25)..(26): Xaa is A or G or is absent

SEQ ID NO: 52191 - protein, 38 aa, Artificial Sequence; identical to SEQ ID NO: 14157
  GFR-binding peptide
  MOD_RES (6)..(6): Xaa is C or S
  MOD_RES (20)..(21)..(22)..(23)..(24): Xaa is A or G
  MOD_RES (25)..(26)..(27)..(28): Xaa is A or G or is absent

SEQ ID NO: 52192 - protein, 38 aa, Artificial Sequence
  GFR-binding peptide
  MOD_RES (35)..(37): Xaa is C or S
SRVHHEPLPVVYYEYVRKKPKLEQLSNRLEEHLEXAXA

SEQ ID NO: 52193 - protein, 39 aa, Artificial Sequence; identical to SEQ ID NO: 14158
  GFR-binding peptide
  MOD_RES (6)..(7)..(39): Xaa is C or S

SEQ ID NO: 52194 - protein, 42 aa, Artificial Sequence
  GFR-binding peptide
  MOD_RES (5)..(42): Xaa is C or S
  MOD_RES (21)..(22)..(23)..(24)..(25): Xaa is A or G
  MOD_RES (26)..(27)..(28)..(29): Xaa is A or G or is absent
RNVQXRPTQVQLEPLTVLYYXXXXXXXXXEQLSNTLEDHLAX

SEQ ID NO: 52195 - protein, 36 aa, Artificial Sequence; identical to SEQ ID NO: 14159
  GFR-binding peptide
  MOD_RES (4)..(5): Xaa is C or S

SEQ ID NO: 52196 - protein, 42 aa, Artificial Sequence; identical to SEQ ID NO: 14160
  GFR-binding peptide
  MOD_RES (4)..(5)..(39)..(41): Xaa is C or S
  MOD_RES (19)..(20)..(21)..(22)..(23): Xaa is A or G
  MOD_RES (24)..(25)..(26)..(27): Xaa is A or G or is absent

SEQ ID NO: 52197 - protein, 40 aa, Artificial Sequence
  GFR-binding peptide
  MOD_RES (3)..(4)..(37)..(39): Xaa is C or S
  MOD_RES (18)..(19)..(20)..(21)..(22): Xaa is A or G
  MOD_RES (23)..(24)..(25)..(26): Xaa is A or G or is absent
SPXXVPQDLRPVQIRKIXXXXXXXXXKKATVMVVKSXKXS

SEQ ID NO: 52198 - protein, 34 aa, Artificial Sequence
  GFR-binding peptide
  MOD_RES (1)..(2)..(34): Xaa is C or S
XXAPTKLSNITVQIMDDSSNVIIGEMSNMVVRSX

SEQ ID NO: 52199 - protein, 42 aa, Artificial Sequence; identical to SEQ ID NO: 19200
  GFR-binding peptide
  MOD_RES (5)..(39)..(41): Xaa is C or S
  MOD_RES (19)..(20)..(21)..(22)..(23): Xaa is A or G
  MOD_RES (24)..(25)..(26)..(27): Xaa is A or G or is absent

SEQ ID NO: 52200 - protein, 39 aa, Artificial Sequence
  GFR-binding peptide
  MOD_RES (4)..(5)..(39): Xaa is C or S
  MOD_RES (19)..(20)..(21)..(22)..(23): Xaa is A or G
  MOD_RES (24)..(25)..(26)..(27): Xaa is A or G or is absent
PKPXXAPTQLSNITVQIMXXXXXXXXXIGEMSNMVVRAX

SEQ ID NO: 52201 - protein, 37 aa, Artificial Sequence; identical to SEQ ID NO: 19202
  GFR-binding peptide
  MOD_RES (2)..(2): Xaa is C or S
  MOD_RES (18)..(19)..(20)..(21)..(22): Xaa is A or G
  MOD_RES (23)..(24)..(25)..(26): Xaa is A or G or is absent

SEQ ID NO: 52202 - protein, 36 aa, Artificial Sequence; identical to SEQ ID NO: 19203
  GFR-binding peptide
  MOD_RES (4)..(4): Xaa is C or S
  MOD_RES (18)..(19)..(20)..(21)..(22): Xaa is A or G
  MOD_RES (23)..(24)..(25)..(26): Xaa is A or G or is absent

SEQ ID NO: 52203 - protein, 39 aa, Artificial Sequence
  GFR-binding peptide
  MOD_RES (5)..(6)..(39): Xaa is C or S
  MOD_RES (20)..(21)..(22)..(23)..(24): Xaa is A or G
  MOD_RES (25)..(26)..(27)..(28): Xaa is A or G or is absent
SASPXXVSQDLRPVQIRKIXXXXXXXXXKKATVMIVKSX

SEQ ID NO: 52204 - protein, 40 aa, Artificial Sequence
  GFR-binding peptide
  MOD_RES (1)..(38)..(40): Xaa is C or S
XRPTQVQLEPLTVLYYEIVRKKPIFEQLSNTLEDHLAXKX

SEQ ID NO: 52205 - protein, 40 aa, Artificial Sequence; identical to SEQ ID NO: 14162
  GFR-binding peptide
  MOD_RES (4)..(5)..(37)..(39): Xaa is C or S

SEQ ID NO: 52206 - protein, 37 aa, Artificial Sequence
  GFR-binding peptide
  MOD_RES (6)..(7): Xaa is C or S
TVPKPXXAPTQLSNITVQIMDDSSNVIIGEMSNMVVR

SEQ ID NO: 52207 - protein, 39 aa, Artificial Sequence; identical to SEQ ID NO: 14163
  GFR-binding peptide
  MOD_RES (2)..(3)..(36)..(38): Xaa is C or S
  MOD_RES (17)..(18)..(19)..(20)..(21): Xaa is A or G
  MOD_RES (22)..(23)..(24)..(25): Xaa is A or G or is absent

SEQ ID NO: 52208 - protein, 40 aa, Artificial Sequence; identical to SEQ ID NO: 19204
  GFR-binding peptide
  MOD_RES (5)..(5): Xaa is C or S
  MOD_RES (21)..(22)..(23)..(24)..(25): Xaa is A or G
  MOD_RES (26)..(27)..(28)..(29): Xaa is A or G or is absent

SEQ ID NO: 52209 - protein, 35 aa, Artificial Sequence; identical to SEQ ID NO: 14164
  GFR-binding peptide
  MOD_RES (1)..(32)..(34): Xaa is C or S

SEQ ID NO: 52210 - protein, 36 aa, Artificial Sequence
  GFR-binding peptide
  MOD_RES (36)..(36): Xaa is C or S
PTQVQLEPLTVLYYEIVRKKPIFEQLSNTLEDHLAX

SEQ ID NO: 52211 - protein, 32 aa, Artificial Sequence
  GFR-binding peptide
  MOD_RES (1)..(32): Xaa is C or S
XVPQDLRSVKIAKVVGRTPKVKEVQVMVVKSX

SEQ ID NO: 52212 - protein, 33 aa, Artificial Sequence
  GFR-binding peptide
  MOD_RES (14)..(15)..(16)..(17)..(18): Xaa is A or G
  MOD_RES (19)..(20)..(21)..(22): Xaa is A or G or is absent
VPTELSNITMQIMXXXXXXXXXIGEMSDMVVEG

SEQ ID NO: 52213 - protein, 37 aa, Artificial Sequence
  GFR-binding peptide
  MOD_RES (3)..(4)..(36): Xaa is C or S
KAXXVPTELRPVQMRKIDEYDKVVKKATVEMVVEGXG

SEQ ID NO: 52214 - protein, 40 aa, Artificial Sequence; identical to SEQ ID NO: 19205
  GFR-binding peptide
  MOD_RES (4)..(4): Xaa is C or S
  MOD_RES (20)..(21)..(22)..(23)..(24): Xaa is A or G
  MOD_RES (25)..(26)..(27)..(28): Xaa is A or G or is absent

SEQ ID NO: 52215 - protein, 36 aa, Artificial Sequence; identical to SEQ ID NO: 19206
  GFR-binding peptide
  MOD_RES (36)..(36): Xaa is C or S
  MOD_RES (15)..(16)..(17)..(18)..(19): Xaa is A or G
  MOD_RES (20)..(21)..(22)..(23): Xaa is A or G or is absent

SEQ ID NO: 52216 - protein, 41 aa, Artificial Sequence; identical to SEQ ID NO: 19207
  GFR-binding peptide
  MOD_RES (2)..(39)..(41): Xaa is C or S

SEQ ID NO: 52217 - protein, 34 aa, Artificial Sequence; identical to SEQ ID NO: 14168
  GFR-binding peptide
  MOD_RES (31)..(33): Xaa is C or S

SEQ ID NO: 52218 - protein, 36 aa, Artificial Sequence
  GFR-binding peptide
  MOD_RES (3)..(3): Xaa is C or S
  MOD_RES (17)..(18)..(19)..(20)..(21): Xaa is A or G
  MOD_RES (22)..(23)..(24)..(25): Xaa is A or G or is absent
LEXVPTEEEPLTMLYYXXXXXXXXXEQLSNFLQHNK

SEQ ID NO: 52219 - protein, 38 aa, Artificial Sequence
  GFR-binding peptide
  MOD_RES (3)..(4)..(37): Xaa is C or S
  MOD_RES (18)..(19)..(20)..(21)..(22): Xaa is A or G
  MOD_RES (23)..(24)..(25)..(26): Xaa is A or G or is absent
APXXVPQALRPVQIRKIXXXXXXXXXKKATVMIVRSXK

SEQ ID NO: 52220 - protein, 37 aa, Artificial Sequence; identical to SEQ ID NO: 14170
  GFR-binding peptide
  MOD_RES (1)..(34)..(36): Xaa is C or S
  MOD_RES (15)..(16)..(17)..(18)..(19): Xaa is A or G
  MOD_RES (20)..(21)..(22)..(23): Xaa is A or G or is absent

SEQ ID NO: 52221 - protein, 37 aa, Artificial Sequence; identical to SEQ ID NO: 14171
  GFR-binding peptide
  MOD_RES (34)..(36): Xaa is C or S
  MOD_RES (14)..(15)..(16)..(17)..(18): Xaa is A or G
  MOD_RES (19)..(20)..(21)..(22): Xaa is A or G or is absent

SEQ ID NO: 52222 - protein, 39 aa, Artificial Sequence
  GFR-binding peptide
  MOD_RES (4)..(38): Xaa is C or S
  MOD_RES (18)..(19)..(20)..(21)..(22): Xaa is A or G
  MOD_RES (23)..(24)..(25)..(26): Xaa is A or G or is absent
KPTXAPTKLSNITVQIMXXXXXXXXXIGEMSNMVVRSXG

SEQ ID NO: 52223 - protein, 37 aa, Artificial Sequence; identical to SEQ ID NO: 19216
  GFR-binding peptide
  MOD_RES (35)..(37): Xaa is C or S

SEQ ID NO: 52224 - protein, 38 aa, Artificial Sequence
  GFR-binding peptide
  MOD_RES (3)..(37): Xaa is C or S
LEXVPTEEEPLTMLYYRIKPHQGQHEQLSNFLQHNKXE

SEQ ID NO: 52225 - protein, 35 aa, Artificial Sequence; identical to SEQ ID NO: 14175
  GFR-binding peptide
  MOD_RES (2)..(3)..(35): Xaa is C or S

SEQ ID NO: 52226 - protein, 36 aa, Artificial Sequence; identical to SEQ ID NO: 14178
  GFR-binding peptide
  MOD_RES (1)..(2)..(35): Xaa is C or S
  MOD_RES (16)..(17)..(18)..(19)..(20): Xaa is A or G
  MOD_RES (21)..(22)..(23)..(24): Xaa is A or G or is absent

SEQ ID NO: 52227 - protein, 39 aa, Artificial Sequence
  GFR-binding peptide
  MOD_RES (1)..(2)..(36)..(38): Xaa is C or S
  MOD_RES (16)..(17)..(18)..(19)..(20): Xaa is A or G
  MOD_RES (21)..(22)..(23)..(24): Xaa is A or G or is absent
XXAPTKLRPVQVRKIXXXXXXXXXKKATVNMVVRSXGXH

SEQ ID NO: 52228 - protein, 35 aa, Artificial Sequence
  GFR-binding peptide
QPSRVHHEPLTVLYYEYVRKKPKLEQLSNRLEEHL

SEQ ID NO: 52229 - protein, 38 aa, Artificial Sequence; identical to SEQ ID NO: 19219
  GFR-binding peptide
  MOD_RES (37)..(37): Xaa is C or S
  MOD_RES (16)..(17)..(18)..(19)..(20): Xaa is A or G
  MOD_RES (21)..(22)..(23)..(24): Xaa is A or G or is absent

SEQ ID NO: 52230 - protein, 43 aa, Artificial Sequence
  GFR-binding peptide
  MOD_RES (5)..(6)..(40)..(42): Xaa is C or S
  MOD_RES (20)..(21)..(22)..(23)..(24): Xaa is A or G
  MOD_RES (25)..(26)..(27)..(28): Xaa is A or G or is absent
IPKAXXVPTELRPVQMRKIXXXXXXXXXKKATVDMVVEGXGXR

SEQ ID NO: 52231 - protein, 39 aa, Artificial Sequence
  GFR-binding peptide
  MOD_RES (5)..(6)..(37)..(39): Xaa is C or S
SASPXXVSQDLRSVKIAKVIGKTPKIKEVQVMIVKSXKX

SEQ ID NO: 52232 - protein, 41 aa, Artificial Sequence
  GFR-binding peptide
  MOD_RES (5)..(39)..(41): Xaa is C or S
EGLEXVPTEEEPLTMLYYRIKPHQGQHEQLSNFLQHNKXEX

SEQ ID NO: 52233 - protein, 39 aa, Artificial Sequence; identical to SEQ ID NO: 14182
  GFR-binding peptide
  MOD_RES (5)..(6)..(39): Xaa is C or S
  MOD_RES (20)..(21)..(22)..(23)..(24): Xaa is A or G
  MOD_RES (25)..(26)..(27)..(28): Xaa is A or G or is absent

SEQ ID NO: 52234 - protein, 35 aa, Artificial Sequence
  GFR-binding peptide
  MOD_RES (3)..(4): Xaa is C or S
KAXXVPTELRSVKMAKVDENEKVVKEVQVDMVVEG

SEQ ID NO: 52235 - protein, 43 aa, Artificial Sequence
  GFR-binding peptide
  MOD_RES (3)..(40)..(42): Xaa is C or S
VQXRPTQVQLEPLTVLYYEIVRKKPIFEQLSNTLEDHLAXKXE

SEQ ID NO: 52236 - protein, 39 aa, Artificial Sequence; identical to SEQ ID NO: 19227
  GFR-binding peptide
  MOD_RES (37)..(39): Xaa is C or S
  MOD_RES (16)..(17)..(18)..(19)..(20): Xaa is A or G
  MOD_RES (21)..(22)..(23)..(24): Xaa is A or G or is absent

SEQ ID NO: 52237 - protein, 35 aa, Artificial Sequence; identical to SEQ ID NO: 39499
  GFR-binding peptide
  MOD_RES (2)..(3): Xaa is C or S
  MOD_RES (17)..(18)..(19)..(20)..(21): Xaa is A or G
  MOD_RES (22)..(23)..(24)..(25): Xaa is A or G or is absent

SEQ ID NO: 52238 - protein, 32 aa, Artificial Sequence
  GFR-binding peptide
  MOD_RES (14)..(15)..(16)..(17)..(18): Xaa is A or G
  MOD_RES (19)..(20)..(21)..(22): Xaa is A or G or is absent
VPTELRPVQMRKIXXXXXXXXXKKATVDMVVE

SEQ ID NO: 52239 - protein, 41 aa, Artificial Sequence; identical to SEQ ID NO: 19230
  GFR-binding peptide
  MOD_RES (2)..(39)..(41): Xaa is C or S
  MOD_RES (18)..(19)..(20)..(21)..(22): Xaa is A or G
  MOD_RES (23)..(24)..(25)..(26): Xaa is A or G or is absent

SEQ ID NO: 52240 - protein, 36 aa, Artificial Sequence
  GFR-binding peptide
  MOD_RES (1)..(35): Xaa is C or S
XVPTEEEPLPMVYYRIKPHQGQHEQLSNFLQHNKXE

SEQ ID NO: 52241 - protein, 40 aa, Artificial Sequence
  GFR-binding peptide
  MOD_RES (5)..(6)..(40): Xaa is C or S
  MOD_RES (20)..(21)..(22)..(23)..(24): Xaa is A or G
  MOD_RES (25)..(26)..(27)..(28): Xaa is A or G or is absent
IPKAXXVPTELRPVQMRKIXXXXXXXXXKKATVDMVVEGX

SEQ ID NO: 52242 - protein, 36 aa, Artificial Sequence
  GFR-binding peptide
  MOD_RES (4)..(4): Xaa is C or S
GLEXVPTEEEPLPMVYYRIKPHQGQHEQLSNFLQHN

SEQ ID NO: 52243 - protein, 43 aa, Artificial Sequence; identical to SEQ ID NO: 19239
  GFR-binding peptide
  MOD_RES (3)..(40)..(42): Xaa is C or S
  MOD_RES (19)..(20)..(21)..(22)..(23): Xaa is A or G
  MOD_RES (24)..(25)..(26)..(27): Xaa is A or G or is absent

SEQ ID NO: 52244 - protein, 39 aa, Artificial Sequence
  GFR-binding peptide
  MOD_RES (6)..(7): Xaa is C or S
  MOD_RES (21)..(22)..(23)..(24)..(25): Xaa is A or G
  MOD_RES (26)..(27)..(28)..(29): Xaa is A or G or is absent
ASASPXXVSQDLRSVKIAKVXXXXXXXXXKEVQVMIVKS

SEQ ID NO: 52245 - protein, 42 aa, Artificial Sequence; identical to SEQ ID NO: 19240
  GFR-binding peptide
  MOD_RES (5)..(39)..(41): Xaa is C or S
  MOD_RES (19)..(20)..(21)..(22)..(23): Xaa is A or G
  MOD_RES (24)..(25)..(26)..(27): Xaa is A or G or is absent

SEQ ID NO: 52246 - protein, 39 aa, Artificial Sequence; identical to SEQ ID NO: 19241
  GFR-binding peptide
  MOD_RES (5)..(5): Xaa is C or S
  MOD_RES (21)..(22)..(23)..(24)..(25): Xaa is A or G
  MOD_RES (26)..(27)..(28)..(29): Xaa is A or G or is absent

SEQ ID NO: 52247 - protein, 39 aa, Artificial Sequence
  GFR-binding peptide
  MOD_RES (5)..(6)..(38): Xaa is C or S
IPKAXXVPTELSNITMQIMDEYDKVVIGEMSEMVVEGXG

SEQ ID NO: 52248 - protein, 38 aa, Artificial Sequence
  GFR-binding peptide
  MOD_RES (5)..(6): Xaa is C or S
  MOD_RES (20)..(21)..(22)..(23)..(24): Xaa is A or G
  MOD_RES (25)..(26)..(27)..(28): Xaa is A or G or is absent
SASPXXVSQDLRSVKIAKVXXXXXXXXXKEVQVMIVKS

SEQ ID NO: 52249 - protein, 37 aa, Artificial Sequence
  GFR-binding peptide
  MOD_RES (36)..(36): Xaa is C or S
PTQVQLEPLPVVYYEIVRKKPIFEQLSNTLEDHLAXK

SEQ ID NO: 52250 - protein, 36 aa, Artificial Sequence; identical to SEQ ID NO: 19244
  GFR-binding peptide
  MOD_RES (35)..(35): Xaa is C or S
  MOD_RES (14)..(15)..(16)..(17)..(18): Xaa is A or G
  MOD_RES (19)..(20)..(21)..(22): Xaa is A or G or is absent

SEQ ID NO: 52251 - protein, 38 aa, Artificial Sequence
  GFR-binding peptide
  MOD_RES (3)..(4)..(35)..(37): Xaa is C or S
SPXXVSQDLRSVKIAKVIGKTPKIKEVQVMIVKSXKXS

SEQ ID NO: 52252 - protein, 35 aa, Artificial Sequence; identical to SEQ ID NO: 14192
  GFR-binding peptide
  MOD_RES (2)..(3): Xaa is C or S
  MOD_RES (17)..(18)..(19)..(20)..(21): Xaa is A or G
  MOD_RES (22)..(23)..(24)..(25): Xaa is A or G or is absent

SEQ ID NO: 52253 - protein, 42 aa, Artificial Sequence; identical to SEQ ID NO: 14194
  GFR-binding peptide
  MOD_RES (6)..(7)..(39)..(41): Xaa is C or S

SEQ ID NO: 52254 - protein, 39 aa, Artificial Sequence
  GFR-binding peptide
  MOD_RES (1)..(38): Xaa is C or S
  MOD_RES (17)..(18)..(19)..(20)..(21): Xaa is A or G
  MOD_RES (22)..(23)..(24)..(25): Xaa is A or G or is absent
XRPTQVQLEPLPVVYYXXXXXXXXXEQLSNTLEDHLAXK

SEQ ID NO: 52255 - protein, 42 aa, Artificial Sequence; identical to SEQ ID NO: 19246
  GFR-binding peptide
  MOD_RES (5)..(39)..(41): Xaa is C or S
  MOD_RES (19)..(20)..(21)..(22)..(23): Xaa is A or G
  MOD_RES (24)..(25)..(26)..(27): Xaa is A or G or is absent

SEQ ID NO: 52256 - protein, 32 aa, Artificial Sequence; identical to SEQ ID NO: 19248
  GFR-binding peptide

SEQ ID NO: 52257 - protein, 38 aa, Artificial Sequence
  GFR-binding peptide
  MOD_RES (4)..(36)..(38): Xaa is C or S
KPTXAPTKLSNITVQIMDDSSNVIIGEMSNMVVRSXGX

SEQ ID NO: 52258 - protein, 39 aa, Artificial Sequence; identical to SEQ ID NO: 14197
  GFR-binding peptide
  MOD_RES (6)..(38): Xaa is C or S

SEQ ID NO: 52259 - protein, 34 aa, Artificial Sequence; identical to SEQ ID NO: 14198
  GFR-binding peptide
  MOD_RES (1)..(2): Xaa is C or S
  MOD_RES (16)..(17)..(18)..(19)..(20): Xaa is A or G
  MOD_RES (21)..(22)..(23)..(24): Xaa is A or G or is absent

SEQ ID NO: 52260 - protein, 35 aa, Artificial Sequence; identical to SEQ ID NO: 14200
  GFR-binding peptide
  MOD_RES (32)..(34): Xaa is C or S

SEQ ID NO: 52261 - protein, 36 aa, Artificial Sequence; identical to SEQ ID NO: 14202
  GFR-binding peptide
  MOD_RES (1)..(33)..(35): Xaa is C or S

SEQ ID NO: 52262 - protein, 36 aa, Artificial Sequence
  GFR-binding peptide
  MOD_RES (35)..(35): Xaa is C or S
SRVHHEPLPVVYYEYVRKKPKLEQLSNRLEEHLEXA

SEQ ID NO: 52263 - protein, 36 aa, Artificial Sequence; identical to SEQ ID NO: 14204
  GFR-binding peptide
  MOD_RES (2)..(3): Xaa is C or S
  MOD_RES (17)..(18)..(19)..(20)..(21): Xaa is A or G
  MOD_RES (22)..(23)..(24)..(25): Xaa is A or G or is absent

SEQ ID NO: 52264 - protein, 41 aa, Artificial Sequence; identical to SEQ ID NO: 19251
  GFR-binding peptide
  MOD_RES (1)..(38)..(40): Xaa is C or S

SEQ ID NO: 52265 - protein, 38 aa, Artificial Sequence
  GFR-binding peptide
  MOD_RES (5)..(6)..(38): Xaa is C or S
IPKAXXVPTELSNITMQIMDEYDKVVIGEMSEMVVEGX

SEQ ID NO: 52266 - protein, 37 aa, Artificial Sequence; identical to SEQ ID NO: 14205
  GFR-binding peptide
  MOD_RES (6)..(7): Xaa is C or S

SEQ ID NO: 52267 - protein, 40 aa, Artificial Sequence
  GFR-binding peptide
  MOD_RES (6)..(7): Xaa is C or S
  MOD_RES (21)..(22)..(23)..(24)..(25): Xaa is A or G
  MOD_RES (26)..(27)..(28)..(29): Xaa is A or G or is absent
YVPKPXXAPTKLSNITVQIMXXXXXXXXXIGEMSNMVVRS

SEQ ID NO: 52268 - protein, 40 aa, Artificial Sequence
  GFR-binding peptide
  MOD_RES (2)..(3)..(37)..(39): Xaa is C or S
  MOD_RES (17)..(18)..(19)..(20)..(21): Xaa is A or G
  MOD_RES (22)..(23)..(24)..(25): Xaa is A or G or is absent
PXXAPTQLRPVQVRKIXXXXXXXXXKKATVNMVVRAXGXH

SEQ ID NO: 52269 - protein, 32 aa, Artificial Sequence
  GFR-binding peptide
TQVQLEPLPVVYYEIVRKKPIFEQLSNTLEDH

SEQ ID NO: 52270 - protein, 36 aa, Artificial Sequence
  GFR-binding peptide
  MOD_RES (1)..(34)..(36): Xaa is C or S
  MOD_RES (15)..(16)..(17)..(18)..(19): Xaa is A or G
  MOD_RES (20)..(21)..(22)..(23): Xaa is A or G or is absent
XVPQDLSNITIQIMXXXXXXXXXIGEMSMVVKSXKX

SEQ ID NO: 52271 - protein, 32 aa, Artificial Sequence; identical to SEQ ID NO: 19253
  GFR-binding peptide
  MOD_RES (14)..(15)..(16)..(17)..(18): Xaa is A or G
  MOD_RES (19)..(20)..(21)..(22): Xaa is A or G or is absent

SEQ ID NO: 52272 - protein, 42 aa, Artificial Sequence; identical to SEQ ID NO: 19255
  GFR-binding peptide
  MOD_RES (2)..(39)..(41): Xaa is C or S

SEQ ID NO: 52273 - protein, 38 aa, Artificial Sequence
  GFR-binding peptide
  MOD_RES (5)..(6): Xaa is C or S
  MOD_RES (20)..(21)..(22)..(23)..(24): Xaa is A or G
  MOD_RES (25)..(26)..(27)..(28): Xaa is A or G or is absent
SASPXXVSQDLRPVQIRKIXXXXXXXXXKKATVMIVKS

SEQ ID NO: 52274 - protein, 32 aa, Artificial Sequence
  GFR-binding peptide
  MOD_RES (1)..(2): Xaa is C or S
XXAPTQLRSVKVAKVDDSSNVIKEVQVNMVVR

SEQ ID NO: 52275 - protein, 41 aa, Artificial Sequence
  GFR-binding peptide
  MOD_RES (4)..(41): Xaa is C or S
SVKXQPSRVHHEPLTVLYYEYVRKKPKLEQLSNRLEEHLEX

SEQ ID NO: 52276 - protein, 35 aa, Artificial Sequence
  GFR-binding peptide
  MOD_RES (4)..(5): Xaa is C or S
ASPXXVSQDLRSVKIAKVIGKTPKIKEVQVMIVKS

SEQ ID NO: 52277 - protein, 33 aa, Artificial Sequence
  GFR-binding peptide
  MOD_RES (1)..(2): Xaa is C or S
XXAPTKLRSVKVAKVDDSSNVIKEVQVNMVVRS

SEQ ID NO: 52278 - protein, 41 aa, Artificial Sequence
  GFR-binding peptide
  MOD_RES (6)..(40): Xaa is C or S
DEGLEXVPTEEEPLPMVYYRIKPHQGQHEQLSNFLQHNKXE

SEQ ID NO: 52279 - protein, 39 aa, Artificial Sequence; identical to SEQ ID NO: 19259
  GFR-binding peptide
  MOD_RES (3)..(3): Xaa is C or S
  MOD_RES (19)..(20)..(21)..(22)..(23): Xaa is A or G
  MOD_RES (24)..(25)..(26)..(27): Xaa is A or G or is absent

SEQ ID NO: 52280 - protein, 33 aa, Artificial Sequence; identical to SEQ ID NO: 14211
  GFR-binding peptide
  MOD_RES (32)..(32): Xaa is C or S

SEQ ID NO: 52281 - protein, 32 aa, Artificial Sequence; identical to SEQ ID NO: 19260
  GFR-binding peptide

SEQ ID NO: 52282 - protein, 34 aa, Artificial Sequence
  GFR-binding peptide
  MOD_RES (1)..(33): Xaa is C or S
XAPTQLSNITVQIMDDSSNVIIGEMSNMVVRAXG

SEQ ID NO: 52283 - protein, 36 aa, Artificial Sequence
  GFR-binding peptide
  MOD_RES (2)..(3)..(36): Xaa is C or S
  MOD_RES (17)..(18)..(19)..(20)..(21): Xaa is A or G
  MOD_RES (22)..(23)..(24)..(25): Xaa is A or G or is absent
PXXVPQDLRSVKIAKVXXXXXXXXXKEVQVMVVKSX

SEQ ID NO: 52284 - protein, 37 aa, Artificial Sequence; identical to SEQ ID NO: 19261
  GFR-binding peptide
  MOD_RES (1)..(1): Xaa is C or S
  MOD_RES (17)..(18)..(19)..(20)..(21): Xaa is A or G
  MOD_RES (22)..(23)..(24)..(25): Xaa is A or G or is absent

SEQ ID NO: 52285 - protein, 38 aa, Artificial Sequence
  GFR-binding peptide
  MOD_RES (6)..(7)..(38): Xaa is C or S
ASASPXXVPQDLRSVKIAKVVGRTPKVKEVQVMVVKSX

SEQ ID NO: 52286 - protein, 41 aa, Artificial Sequence
  GFR-binding peptide
  MOD_RES (6)..(7)..(41): Xaa is C or S
  MOD_RES (21)..(22)..(23)..(24)..(25): Xaa is A or G
  MOD_RES (26)..(27)..(28)..(29): Xaa is A or G or is absent
YVPKPXXAPTKLRSVKVAKVXXXXXXXXXKEVQVNMVVRSX

SEQ ID NO: 52287 - protein, 35 aa, Artificial Sequence
  GFR-binding peptide
  MOD_RES (1)..(2)..(34): Xaa is C or S
XXVPTELRSVKMAKVDENEKVVKEVQVDMVVEGXG

SEQ ID NO: 52288 - protein, 39 aa, Artificial Sequence
  GFR-binding peptide
  MOD_RES (5)..(6): Xaa is C or S
  MOD_RES (20)..(21)..(22)..(23)..(24): Xaa is A or G
  MOD_RES (25)..(26)..(27)..(28): Xaa is A or G or is absent
VPKPXXAPTQLRPVQVRKIXXXXXXXXXKKATVNMVVRA

SEQ ID NO: 52289 - protein, 40 aa, Artificial Sequence
  GFR-binding peptide
  MOD_RES (5)..(6)..(40): Xaa is C or S
  MOD_RES (20)..(21)..(22)..(23)..(24): Xaa is A or G
  MOD_RES (25)..(26)..(27)..(28): Xaa is A or G or is absent
IPKAXXVPTELSNITMQIMXXXXXXXXXIGEMSEMVVEGX

SEQ ID NO: 52290 - protein, 34 aa, Artificial Sequence; identical to SEQ ID NO: 14213
  GFR-binding peptide
  MOD_RES (1)..(2)..(34): Xaa is C or S

SEQ ID NO: 52291 - protein, 39 aa, Artificial Sequence; identical to SEQ ID NO: 39546
  GFR-binding peptide
  MOD_RES (3)..(4)..(37)..(39): Xaa is C or S
  MOD_RES (18)..(19)..(20)..(21)..(22): Xaa is A or G
  MOD_RES (23)..(24)..(25)..(26): Xaa is A or G or is absent

SEQ ID NO: 52292 - protein, 34 aa, Artificial Sequence
  GFR-binding peptide
  MOD_RES (31)..(33): Xaa is C or S
VPQALRPVQIRKIVGRKPKVKKATVMIVRSXKXS

SEQ ID NO: 52293 - protein, 37 aa, Artificial Sequence; identical to SEQ ID NO: 14216
  GFR-binding peptide
  MOD_RES (4)..(36): Xaa is C or S

SEQ ID NO: 52294 - protein, 43 aa, Artificial Sequence; identical to SEQ ID NO: 19266
  GFR-binding peptide
  MOD_RES (6)..(40)..(42): Xaa is C or S
  MOD_RES (20)..(21)..(22)..(23)..(24): Xaa is A or G
  MOD_RES (25)..(26)..(27)..(28): Xaa is A or G or is absent

SEQ ID NO: 52295 - protein, 40 aa, Artificial Sequence; identical to SEQ ID NO: 19267
  GFR-binding peptide
  MOD_RES (2)..(39): Xaa is C or S

SEQ ID NO: 52296 - protein, 38 aa, Artificial Sequence
  GFR-binding peptide
  MOD_RES (5)..(6): Xaa is C or S
  MOD_RES (20)..(21)..(22)..(23)..(24): Xaa is A or G
  MOD_RES (25)..(26)..(27)..(28): Xaa is A or G or is absent
IPKAXXVPTELRSVKMAKVXXXXXXXXXKEVQVDMVVE

SEQ ID NO: 52297 - protein, 42 aa, Artificial Sequence
  GFR-binding peptide
  MOD_RES (4)..(41): Xaa is C or S
  MOD_RES (20)..(21)..(22)..(23)..(24): Xaa is A or G
  MOD_RES (25)..(26)..(27)..(28): Xaa is A or G or is absent
NVQXRPTQVQLEPLTVLYYXXXXXXXXXEQLSNTLEDHLAXK

SEQ ID NO: 52298 - protein, 34 aa, Artificial Sequence
  GFR-binding peptide
  MOD_RES (1)..(34): Xaa is C or S
  MOD_RES (15)..(16)..(17)..(18)..(19): Xaa is A or G
  MOD_RES (20)..(21)..(22)..(23): Xaa is A or G or is absent
XVPQALRSVKIAKVXXXXXXXXXKEVQVMIVRSX

SEQ ID NO: 52299 - protein, 33 aa, Artificial Sequence
  GFR-binding peptide
  MOD_RES (2)..(3): Xaa is C or S
AXXVPTELRPVQMRKIDEYDKVVKKATVEMVVE

SEQ ID NO: 52300 - protein, 35 aa, Artificial Sequence
  GFR-binding peptide
  MOD_RES (4)..(5): Xaa is C or S
PKAXXVPTELRSVKMAKVDEYDKVVKEVQVEMVVE

SEQ ID NO: 52301 - protein, 33 aa, Artificial Sequence
  GFR-binding peptide
  MOD_RES (1)..(2): Xaa is C or S
XXVPTELRSVKMAKVDENEKVVKEVQVDMVVEG

SEQ ID NO: 52302 - protein, 37 aa, Artificial Sequence; identical to SEQ ID NO: 14218
  GFR-binding peptide
  MOD_RES (5)..(6): Xaa is C or S

SEQ ID NO: 52303 - protein, 40 aa, Artificial Sequence
  GFR-binding peptide
  MOD_RES (3)..(4)..(38)..(40): Xaa is C or S
  MOD_RES (18)..(19)..(20)..(21)..(22): Xaa is A or G
  MOD_RES (23)..(24)..(25)..(26): Xaa is A or G or is absent
KAXXVPTELRSVKMAKVXXXXXXXXXKEVQVEMVVEGXGX

SEQ ID NO: 52304 - protein, 36 aa, Artificial Sequence; identical to SEQ ID NO: 14219
  GFR-binding peptide
  MOD_RES (1)..(34)..(36): Xaa is C or S
  MOD_RES (15)..(16)..(17)..(18)..(19): Xaa is A or G
  MOD_RES (20)..(21)..(22)..(23): Xaa is A or G or is absent

SEQ ID NO: 52305 - protein, 38 aa, Artificial Sequence; identical to SEQ ID NO: 14220
  GFR-binding peptide
  MOD_RES (6)..(6): Xaa is C or S
  MOD_RES (20)..(21)..(22)..(23)..(24): Xaa is A or G
  MOD_RES (25)..(26)..(27)..(28): Xaa is A or G or is absent

SEQ ID NO: 52306 - protein, 36 aa, Artificial Sequence; identical to SEQ ID NO: 14221
  GFR-binding peptide
  MOD_RES (1)..(2)..(36): Xaa is C or S
  MOD_RES (16)..(17)..(18)..(19)..(20): Xaa is A or G
  MOD_RES (21)..(22)..(23)..(24): Xaa is A or G or is absent

SEQ ID NO: 52307 - protein, 33 aa, Artificial Sequence
  GFR-binding peptide
  MOD_RES (31)..(33): Xaa is C or S
VSQDLSNITIQIMIGKTPKIIGEMSMIVKSXKX

SEQ ID NO: 52308 - protein, 36 aa, Artificial Sequence
  GFR-binding peptide
  MOD_RES (1)..(34)..(36): Xaa is C or S
  MOD_RES (15)..(16)..(17)..(18)..(19): Xaa is A or G
  MOD_RES (20)..(21)..(22)..(23): Xaa is A or G or is absent
XVSQDLRSVKIAKVXXXXXXXXXKEVQVMIVKSXKX

SEQ ID NO: 52309 - protein, 40 aa, Artificial Sequence
  GFR-binding peptide
  MOD_RES (6)..(7)..(38)..(40): Xaa is C or S
ASASPXXVSQDLRPVQIRKIIGKTPKIKKATVMIVKSXKX

SEQ ID NO: 52310 - protein, 34 aa, Artificial Sequence; identical to SEQ ID NO: 19273
  GFR-binding peptide
  MOD_RES (15)..(16)..(17)..(18)..(19): Xaa is A or G
  MOD_RES (20)..(21)..(22)..(23): Xaa is A or G or is absent

SEQ ID NO: 52311 - protein, 41 aa, Artificial Sequence
  GFR-binding peptide
  MOD_RES (5)..(6)..(38)..(40): Xaa is C or S
VPKPXXAPTQLRSVKVAKVDDSSNVIKEVQVNMVVRAXGXH

SEQ ID NO: 52312 - protein, 39 aa, Artificial Sequence
  GFR-binding peptide
  MOD_RES (37)..(39): Xaa is C or S
RPTQVQLEPLPVVYYEIVRKKPIFEQLSNTLEDHLAXKX

SEQ ID NO: 52313 - protein, 39 aa, Artificial Sequence; identical to SEQ ID NO: 14227
  GFR-binding peptide
  MOD_RES (3)..(4)..(37)..(39): Xaa is C or S
  MOD_RES (18)..(19)..(20)..(21)..(22): Xaa is A or G
  MOD_RES (23)..(24)..(25)..(26): Xaa is A or G or is absent

SEQ ID NO: 52314 - protein, 37 aa, Artificial Sequence
  GFR-binding peptide
  MOD_RES (35)..(37): Xaa is C or S
  MOD_RES (14)..(15)..(16)..(17)..(18): Xaa is A or G
  MOD_RES (19)..(20)..(21)..(22): Xaa is A or G or is absent
SRVHHEPLTVLYYXXXXXXXXXEQLSNRLEEHLEXAX

SEQ ID NO: 52315 - protein, 34 aa, Artificial Sequence
  GFR-binding peptide
  MOD_RES (1)..(2): Xaa is C or S
  MOD_RES (16)..(17)..(18)..(19)..(20): Xaa is A or G
  MOD_RES (21)..(22)..(23)..(24): Xaa is A or G or is absent
XXAPTKLRPVQVRKIXXXXXXXXXKKATVNMVVR

SEQ ID NO: 52316 - protein, 35 aa, Artificial Sequence
  GFR-binding peptide
  MOD_RES (1)..(33)..(35): Xaa is C or S
XAPTKLSNITVQIMDDSSNVIIGEMSNMVVRSXGX

SEQ ID NO: 52317 - protein, 39 aa, Artificial Sequence
  GFR-binding peptide
  MOD_RES (7)..(7): Xaa is C or S
  MOD_RES (21)..(22)..(23)..(24)..(25): Xaa is A or G
  MOD_RES (26)..(27)..(28)..(29): Xaa is A or G or is absent
NDEGLEXVPTEEEPLTMLYYXXXXXXXXXEQLSNFLQHN

SEQ ID NO: 52318 - protein, 35 aa, Artificial Sequence
  GFR-binding peptide
  MOD_RES (1)..(1): Xaa is C or S
XQPSRVHHEPLPVVYYEYVRKKPKLEQLSNRLEEH

SEQ ID NO: 52319 - protein, 39 aa, Artificial Sequence; identical to SEQ ID NO: 14232
  GFR-binding peptide
  MOD_RES (2)..(3)..(37)..(39): Xaa is C or S
  MOD_RES (17)..(18)..(19)..(20)..(21): Xaa is A or G
  MOD_RES (22)..(23)..(24)..(25): Xaa is A or G or is absent

SEQ ID NO: 52320 - protein, 38 aa, Artificial Sequence
  GFR-binding peptide
  MOD_RES (2)..(3)..(35)..(37): Xaa is C or S
AXXVPTELSNITMQIMDENEKVVIGEMSDMVVEGXGXR

SEQ ID NO: 52321 - protein, 38 aa, Artificial Sequence; identical to SEQ ID NO: 14235
  GFR-binding peptide
  MOD_RES (2)..(3)..(37): Xaa is C or S
  MOD_RES (17)..(18)..(19)..(20)..(21): Xaa is A or G
  MOD_RES (22)..(23)..(24)..(25): Xaa is A or G or is absent

SEQ ID NO: 52322 - protein, 39 aa, Artificial Sequence
  GFR-binding peptide
  MOD_RES (3)..(3): Xaa is C or S
  MOD_RES (19)..(20)..(21)..(22)..(23): Xaa is A or G
  MOD_RES (24)..(25)..(26)..(27): Xaa is A or G or is absent
VQXRPTQVQLEPLPVVYYXXXXXXXXXEQLSNTLEDHLA

SEQ ID NO: 52323 - protein, 38 aa, Artificial Sequence
  GFR-binding peptide
  MOD_RES (4)..(5)..(37): Xaa is C or S
PKAXXVPTELRPVQMRKIDEYDKVVKKATVEMVVEGXG

SEQ ID NO: 52324 - protein, 39 aa, Artificial Sequence; identical to SEQ ID NO: 14237
  GFR-binding peptide
  MOD_RES (3)..(4)..(38): Xaa is C or S
  MOD_RES (18)..(19)..(20)..(21)..(22): Xaa is A or G
  MOD_RES (23)..(24)..(25)..(26): Xaa is A or G or is absent

SEQ ID NO: 52325 - protein, 42 aa, Artificial Sequence
  GFR-binding peptide
  MOD_RES (6)..(7)..(39)..(41): Xaa is C or S
TVPKPXXAPTQLSNITVQIMDDSSNVIIGEMSNMVVRAXGXH

SEQ ID NO: 52326 - protein, 38 aa, Artificial Sequence
  GFR-binding peptide
  MOD_RES (1)..(35)..(37): Xaa is C or S
  MOD_RES (15)..(16)..(17)..(18)..(19): Xaa is A or G
  MOD_RES (20)..(21)..(22)..(23): Xaa is A or G or is absent
XAPTQLRPVQVRKIXXXXXXXXXKKATVNMVVRAXGXH

SEQ ID NO: 52327 - protein, 39 aa, Artificial Sequence; identical to SEQ ID NO: 14239
  GFR-binding peptide
  MOD_RES (5)..(6)..(37)..(39): Xaa is C or S

SEQ ID NO: 52328 - protein, 34 aa, Artificial Sequence; identical to SEQ ID NO: 14241
  GFR-binding peptide
  MOD_RES (1)..(2): Xaa is C or S
  MOD_RES (16)..(17)..(18)..(19)..(20): Xaa is A or G
  MOD_RES (21)..(22)..(23)..(24): Xaa is A or G or is absent

SEQ ID NO: 52329 - protein, 33 aa, Artificial Sequence; identical to SEQ ID NO: 14243
  GFR-binding peptide
  MOD_RES (2)..(3): Xaa is C or S

SEQ ID NO: 52330 - protein, 36 aa, Artificial Sequence
  GFR-binding peptide
  MOD_RES (1)..(33)..(35): Xaa is C or S
XAPTQLSNITVQIMDDSSNVIIGEMSNMVVRAXGXH

SEQ ID NO: 52331 - protein, 37 aa, Artificial Sequence
  GFR-binding peptide
  MOD_RES (2)..(3)..(35)..(37): Xaa is C or S
PXXAPTQLSNITVQIMDDSSNVIIGEMSNMVVRAXGX

SEQ ID NO: 52332 - protein, 38 aa, Artificial Sequence; identical to SEQ ID NO: 19280
  GFR-binding peptide
  MOD_RES (35)..(37): Xaa is C or S
  MOD_RES (14)..(15)..(16)..(17)..(18): Xaa is A or G
  MOD_RES (19)..(20)..(21)..(22): Xaa is A or G or is absent

SEQ ID NO: 52333 - protein, 40 aa, Artificial Sequence
  GFR-binding peptide
  MOD_RES (6)..(7): Xaa is C or S
  MOD_RES (21)..(22)..(23)..(24)..(25): Xaa is A or G
  MOD_RES (26)..(27)..(28)..(29): Xaa is A or G or is absent
YVPKPXXAPTKLRPVQVRKIXXXXXXXXXKKATVNMVVRS

SEQ ID NO: 52334 - protein, 34 aa, Artificial Sequence; identical to SEQ ID NO: 14249
  GFR-binding peptide
  MOD_RES (1)..(1): Xaa is C or S
  MOD_RES (15)..(16)..(17)..(18)..(19): Xaa is A or G
  MOD_RES (20)..(21)..(22)..(23): Xaa is A or G or is absent

SEQ ID NO: 52335 - protein, 38 aa, Artificial Sequence; identical to SEQ ID NO: 14251
  GFR-binding peptide
  MOD_RES (1)..(2)..(36)..(38): Xaa is C or S
  MOD_RES (16)..(17)..(18)..(19)..(20): Xaa is A or G
  MOD_RES (21)..(22)..(23)..(24): Xaa is A or G or is absent

SEQ ID NO: 52336 - protein, 34 aa, Artificial Sequence
  GFR-binding peptide
  MOD_RES (15)..(16)..(17)..(18)..(19): Xaa is A or G
  MOD_RES (20)..(21)..(22)..(23): Xaa is A or G or is absent
PTQVQLEPLTVLYYXXXXXXXXXEQLSNTLEDHL

SEQ ID NO: 52337 - protein, 38 aa, Artificial Sequence
  GFR-binding peptide
  MOD_RES (1)..(35)..(37): Xaa is C or S
  MOD_RES (15)..(16)..(17)..(18)..(19): Xaa is A or G
  MOD_RES (20)..(21)..(22)..(23): Xaa is A or G or is absent
XAPTQLRSVKVAKVXXXXXXXXXKEVQVNMVVRAXGXH

SEQ ID NO: 52338 - protein, 36 aa, Artificial Sequence
  GFR-binding peptide
  MOD_RES (1)..(1): Xaa is C or S
XQPSRVHHEPLTVLYYEYVRKKPKLEQLSNRLEEHL

SEQ ID NO: 52339 - protein, 40 aa, Artificial Sequence; identical to SEQ ID NO: 14252
  GFR-binding peptide
  MOD_RES (3)..(4)..(37)..(39): Xaa is C or S
  MOD_RES (18)..(19)..(20)..(21)..(22): Xaa is A or G
  MOD_RES (23)..(24)..(25)..(26): Xaa is A or G or is absent

SEQ ID NO: 52340 - protein, 39 aa, Artificial Sequence; identical to SEQ ID NO: 19283
  GFR-binding peptide
  MOD_RES (36)..(38): Xaa is C or S

SEQ ID NO: 52341 - protein, 32 aa, Artificial Sequence; identical to SEQ ID NO: 14253
  GFR-binding peptide
  MOD_RES (1)..(2): Xaa is C or S

SEQ ID NO: 52342 - protein, 40 aa, Artificial Sequence; identical to SEQ ID NO: 19285
  GFR-binding peptide
  MOD_RES (37)..(39): Xaa is C or S
  MOD_RES (16)..(17)..(18)..(19)..(20): Xaa is A or G
  MOD_RES (21)..(22)..(23)..(24): Xaa is A or G or is absent

SEQ ID NO: 52343 - protein, 35 aa, Artificial Sequence
  GFR-binding peptide
  MOD_RES (33)..(35): Xaa is C or S
  MOD_RES (14)..(15)..(16)..(17)..(18): Xaa is A or G
  MOD_RES (19)..(20)..(21)..(22): Xaa is A or G or is absent
VPQDLSNITIQIMXXXXXXXXXIGEMSMVVKSXKX

SEQ ID NO: 52344 - protein, 34 aa, Artificial Sequence; identical to SEQ ID NO: 19286
  GFR-binding peptide
  MOD_RES (34)..(34): Xaa is C or S
  MOD_RES (14)..(15)..(16)..(17)..(18): Xaa is A or G
  MOD_RES (19)..(20)..(21)..(22): Xaa is A or G or is absent

SEQ ID NO: 52345 - protein, 35 aa, Artificial Sequence
  GFR-binding peptide
  MOD_RES (35)..(35): Xaa is C or S
  MOD_RES (14)..(15)..(16)..(17)..(18): Xaa is A or G
  MOD_RES (19)..(20)..(21)..(22): Xaa is A or G or is absent
SRVHHEPLPVVYYXXXXXXXXXEQLSNRLEEHLEX

SEQ ID NO: 52346 - protein, 37 aa, Artificial Sequence; identical to SEQ ID NO: 19287
  GFR-binding peptide
  MOD_RES (2)..(2): Xaa is C or S
  MOD_RES (18)..(19)..(20)..(21)..(22): Xaa is A or G
  MOD_RES (23)..(24)..(25)..(26): Xaa is A or G or is absent

SEQ ID NO: 52347 - protein, 37 aa, Artificial Sequence
  GFR-binding peptide
  MOD_RES (1)..(35)..(37): Xaa is C or S
  MOD_RES (15)..(16)..(17)..(18)..(19): Xaa is A or G
  MOD_RES (20)..(21)..(22)..(23): Xaa is A or G or is absent
XAPTQLRPVQVRKIXXXXXXXXXKKATVNMVVRAXGX

SEQ ID NO: 52348 - protein, 41 aa, Artificial Sequence
  GFR-binding peptide
  MOD_RES (5)..(6)..(40): Xaa is C or S
  MOD_RES (20)..(21)..(22)..(23)..(24): Xaa is A or G
  MOD_RES (25)..(26)..(27)..(28): Xaa is A or G or is absent
IPKAXXVPTELRSVKMAKVXXXXXXXXXKEVQVEMVVEGXG

SEQ ID NO: 52349 - protein, 38 aa, Artificial Sequence
  GFR-binding peptide
  MOD_RES (35)..(37): Xaa is C or S
TQVQLEPLPVVYYEIVRKKPIFEQLSNTLEDHLAXKXE

SEQ ID NO: 52350 - protein, 38 aa, Artificial Sequence
  GFR-binding peptide
  MOD_RES (4)..(5): Xaa is C or S
  MOD_RES (19)..(20)..(21)..(22)..(23): Xaa is A or G
  MOD_RES (24)..(25)..(26)..(27): Xaa is A or G or is absent
PKAXXVPTELRPVQMRKIXXXXXXXXXKKATVDMVVEG

SEQ ID NO: 52351 - protein, 38 aa, Artificial Sequence
  GFR-binding peptide
  MOD_RES (5)..(6)..(37): Xaa is C or S
SAAPXXVPQALRSVKIAKVVGRKPKVKEVQVMIVRSXK

SEQ ID NO: 52352 - protein, 41 aa, Artificial Sequence; identical to SEQ ID NO: 14260
  GFR-binding peptide
  MOD_RES (6)..(7)..(41): Xaa is C or S
  MOD_RES (21)..(22)..(23)..(24)..(25): Xaa is A or G
  MOD_RES (26)..(27)..(28)..(29): Xaa is A or G or is absent

SEQ ID NO: 52353 - protein, 31 aa, Artificial Sequence
  GFR-binding peptide
  MOD_RES (1)..(1): Xaa is C or S
XVPTELRPVQMRKIDEYDKVVKKATVEMVVE

SEQ ID NO: 52354 - protein, 35 aa, Artificial Sequence
  GFR-binding peptide
  MOD_RES (2)..(3): Xaa is C or S
  MOD_RES (17)..(18)..(19)..(20)..(21): Xaa is A or G
  MOD_RES (22)..(23)..(24)..(25): Xaa is A or G or is absent
PXXVPQALRPVQIRKIXXXXXXXXXKKATVMIVRS

SEQ ID NO: 52355 - protein, 37 aa, Artificial Sequence
  GFR-binding peptide
  MOD_RES (1)..(2)..(34)..(36): Xaa is C or S
XXVPTELSNITMQIMDENEKVVIGEMSDMVVEGXGXR

SEQ ID NO: 52356 - protein, 32 aa, Artificial Sequence
  GFR-binding peptide
  MOD_RES (1)..(1): Xaa is C or S
XAPTQLRSVKVAKVDDSSNVIKEVQVNMVVRA

SEQ ID NO: 52357 - protein, 32 aa, Artificial Sequence; identical to SEQ ID NO: 14264
  GFR-binding peptide
  MOD_RES (1)..(32): Xaa is C or S

SEQ ID NO: 52358 - protein, 37 aa, Artificial Sequence; identical to SEQ ID NO: 39626
  GFR-binding peptide
  MOD_RES (2)..(3)..(36): Xaa is C or S
  MOD_RES (17)..(18)..(19)..(20)..(21): Xaa is A or G
  MOD_RES (22)..(23)..(24)..(25): Xaa is A or G or is absent

SEQ ID NO: 52359 - protein, 42 aa, Artificial Sequence; identical to SEQ ID NO: 19290
  GFR-binding peptide
  MOD_RES (4)..(41): Xaa is C or S
  MOD_RES (20)..(21)..(22)..(23)..(24): Xaa is A or G
  MOD_RES (25)..(26)..(27)..(28): Xaa is A or G or is absent

SEQ ID NO: 52360 - protein, 39 aa, Artificial Sequence
  GFR-binding peptide
  MOD_RES (1)..(38): Xaa is C or S
  MOD_RES (17)..(18)..(19)..(20)..(21): Xaa is A or G
  MOD_RES (22)..(23)..(24)..(25): Xaa is A or G or is absent
XRPTQVQLEPLTVLYYXXXXXXXXXEQLSNTLEDHLAXK

SEQ ID NO: 52361 - protein, 42 aa, Artificial Sequence; identical to SEQ ID NO: 14265
  GFR-binding peptide
  MOD_RES (4)..(5)..(39)..(41): Xaa is C or S
  MOD_RES (19)..(20)..(21)..(22)..(23): Xaa is A or G
  MOD_RES (24)..(25)..(26)..(27): Xaa is A or G or is absent

SEQ ID NO: 52362 - protein, 38 aa, Artificial Sequence
  GFR-binding peptide
  MOD_RES (37)..(37): Xaa is C or S
  MOD_RES (16)..(17)..(18)..(19)..(20): Xaa is A or G
  MOD_RES (21)..(22)..(23)..(24): Xaa is A or G or is absent
QPSRVHHEPLPVVYYXXXXXXXXXEQLSNRLEEHLEXA

SEQ ID NO: 52363 - protein, 42 aa, Artificial Sequence
  GFR-binding peptide
  MOD_RES (7)..(41): Xaa is C or S
NDEGLEXVPTEEEPLTMLYYRIKPHQGQHEQLSNFLQHNKXE

SEQ ID NO: 52364 - protein, 32 aa, Artificial Sequence; identical to SEQ ID NO: 14269
  GFR-binding peptide
  MOD_RES (32)..(32): Xaa is C or S

SEQ ID NO: 52365 - protein, 41 aa, Artificial Sequence
  GFR-binding peptide
  MOD_RES (6)..(7)..(38)..(40): Xaa is C or S
ASASPXXVPQDLSNITIQIMVGRTPKVIGEMSMVVKSXKXS

SEQ ID NO: 52366 - protein, 35 aa, Artificial Sequence; identical to SEQ ID NO: 14271
  GFR-binding peptide
  MOD_RES (2)..(34): Xaa is C or S

SEQ ID NO: 52367 - protein, 35 aa, Artificial Sequence
  GFR-binding peptide
  MOD_RES (4)..(4): Xaa is C or S
KPTXAPTKLRPVQVRKIDDSSNVIKKATVNMVVRS

SEQ ID NO: 52368 - protein, 38 aa, Artificial Sequence
  GFR-binding peptide
  MOD_RES (2)..(3)..(35)..(37): Xaa is C or S
PXXAPTQLRPVQVRKIDDSSNVIKKATVNMVVRAXGXH

SEQ ID NO: 52369 - protein, 32 aa, Artificial Sequence; identical to SEQ ID NO: 19293
  GFR-binding peptide
  MOD_RES (14)..(15)..(16)..(17)..(18): Xaa is A or G
  MOD_RES (19)..(20)..(21)..(22): Xaa is A or G or is absent

SEQ ID NO: 52370 - protein, 36 aa, Artificial Sequence; identical to SEQ ID NO: 19295
  GFR-binding peptide
  MOD_RES (4)..(4): Xaa is C or S
  MOD_RES (18)..(19)..(20)..(21)..(22): Xaa is A or G
  MOD_RES (23)..(24)..(25)..(26): Xaa is A or G or is absent

SEQ ID NO: 52371 - protein, 35 aa, Artificial Sequence; identical to SEQ ID NO: 14274
  GFR-binding peptide
  MOD_RES (32)..(34): Xaa is C or S

SEQ ID NO: 52372 - protein, 37 aa, Artificial Sequence; identical to SEQ ID NO: 14275
  GFR-binding peptide
  MOD_RES (3)..(4): Xaa is C or S
  MOD_RES (18)..(19)..(20)..(21)..(22): Xaa is A or G
  MOD_RES (23)..(24)..(25)..(26): Xaa is A or G or is absent

SEQ ID NO: 52373 - protein, 35 aa, Artificial Sequence
  GFR-binding peptide
  MOD_RES (1)..(32)..(34): Xaa is C or S
XVPQALRSVKIAKVVGRKPKVKEVQVMIVRSXKXS

SEQ ID NO: 52374 - protein, 41 aa, Artificial Sequence; identical to SEQ ID NO: 14276
  GFR-binding peptide
  MOD_RES (5)..(6)..(40): Xaa is C or S
  MOD_RES (20)..(21)..(22)..(23)..(24): Xaa is A or G
  MOD_RES (25)..(26)..(27)..(28): Xaa is A or G or is absent

SEQ ID NO: 52375 - protein, 40 aa, Artificial Sequence; identical to SEQ ID NO: 14277
  GFR-binding peptide
  MOD_RES (4)..(5)..(39): Xaa is C or S
  MOD_RES (19)..(20)..(21)..(22)..(23): Xaa is A or G
  MOD_RES (24)..(25)..(26)..(27): Xaa is A or G or is absent

SEQ ID NO: 52376 - protein, 40 aa, Artificial Sequence
  GFR-binding peptide
  MOD_RES (5)..(39): Xaa is C or S
EGLEXVPTEEEPLTMLYYRIKPHQGQHEQLSNFLQHNKXE

SEQ ID NO: 52377 - protein, 37 aa, Artificial Sequence; identical to SEQ ID NO: 14280
  GFR-binding peptide
  MOD_RES (3)..(4)..(37): Xaa is C or S
  MOD_RES (18)..(19)..(20)..(21)..(22): Xaa is A or G
  MOD_RES (23)..(24)..(25)..(26): Xaa is A or G or is absent

SEQ ID NO: 52378 - protein, 40 aa, Artificial Sequence; identical to SEQ ID NO: 14281
  GFR-binding peptide
  MOD_RES (4)..(5)..(38)..(40): Xaa is C or S
  MOD_RES (19)..(20)..(21)..(22)..(23): Xaa is A or G
  MOD_RES (24)..(25)..(26)..(27): Xaa is A or G or is absent

SEQ ID NO: 52379 - protein, 35 aa, Artificial Sequence
  GFR-binding peptide
  MOD_RES (33)..(35): Xaa is C or S
  MOD_RES (14)..(15)..(16)..(17)..(18): Xaa is A or G
  MOD_RES (19)..(20)..(21)..(22): Xaa is A or G or is absent
VPQALSNITIQIMXXXXXXXXXIGEMSMIVRSXKX

SEQ ID NO: 52380 - protein, 32 aa, Artificial Sequence
  GFR-binding peptide
  MOD_RES (1)..(32): Xaa is C or S
XVPQDLSNITIQIMVGRTPKVIGEMSMVVKSX

SEQ ID NO: 52381 - protein, 41 aa, Artificial Sequence; identical to SEQ ID NO: 19302
  GFR-binding peptide
  MOD_RES (4)..(41): Xaa is C or S
  MOD_RES (20)..(21)..(22)..(23)..(24): Xaa is A or G
  MOD_RES (25)..(26)..(27)..(28): Xaa is A or G or is absent

SEQ ID NO: 52382 - protein, 38 aa, Artificial Sequence; identical to SEQ ID NO: 19303
  GFR-binding peptide
  MOD_RES (1)..(38): Xaa is C or S
  MOD_RES (17)..(18)..(19)..(20)..(21): Xaa is A or G
  MOD_RES (22)..(23)..(24)..(25): Xaa is A or G or is absent

SEQ ID NO: 52383 - protein, 35 aa, Artificial Sequence; identical to SEQ ID NO: 14282
  GFR-binding peptide
  MOD_RES (33)..(35): Xaa is C or S
  MOD_RES (14)..(15)..(16)..(17)..(18): Xaa is A or G
  MOD_RES (19)..(20)..(21)..(22): Xaa is A or G or is absent

SEQ ID NO: 52384 - protein, 37 aa, Artificial Sequence; identical to SEQ ID NO: 14283
  GFR-binding peptide
  MOD_RES (5)..(6)..(37): Xaa is C or S

SEQ ID NO: 52385 - protein, 35 aa, Artificial Sequence; identical to SEQ ID NO: 14284
  GFR-binding peptide
  MOD_RES (1)..(2)..(33)..(35): Xaa is C or S

SEQ ID NO: 52386 - protein, 37 aa, Artificial Sequence
  GFR-binding peptide
  MOD_RES (1)..(35)..(37): Xaa is C or S
  MOD_RES (15)..(16)..(17)..(18)..(19): Xaa is A or G
  MOD_RES (20)..(21)..(22)..(23): Xaa is A or G or is absent
XVPTELSNITMQIMXXXXXXXXXIGEMSEMVVEGXGX

SEQ ID NO: 52387 - protein, 35 aa, Artificial Sequence; identical to SEQ ID NO: 14285
  GFR-binding peptide
  MOD_RES (1)..(2): Xaa is C or S
  MOD_RES (16)..(17)..(18)..(19)..(20): Xaa is A or G
  MOD_RES (21)..(22)..(23)..(24): Xaa is A or G or is absent

SEQ ID NO: 52388 - protein, 38 aa, Artificial Sequence
  GFR-binding peptide
  MOD_RES (4)..(5): Xaa is C or S
  MOD_RES (19)..(20)..(21)..(22)..(23): Xaa is A or G
  MOD_RES (24)..(25)..(26)..(27): Xaa is A or G or is absent
PKPXXAPTQLSNITVQIMXXXXXXXXXIGEMSNMVVRA

SEQ ID NO: 52389 - protein, 38 aa, Artificial Sequence
  GFR-binding peptide
  MOD_RES (3)..(4)..(38): Xaa is C or S
  MOD_RES (18)..(19)..(20)..(21)..(22): Xaa is A or G
  MOD_RES (23)..(24)..(25)..(26): Xaa is A or G or is absent
KAXXVPTELSNITMQIMXXXXXXXXXIGEMSEMVVEGX

SEQ ID NO: 52390 - protein, 36 aa, Artificial Sequence; identical to SEQ ID NO: 14286
  GFR-binding peptide
  MOD_RES (1)..(33)..(35): Xaa is C or S

SEQ ID NO: 52391 - protein, 38 aa, Artificial Sequence
  GFR-binding peptide
  MOD_RES (6)..(7): Xaa is C or S
KIPKAXXVPTELSNITMQIMDENEKVVIGEMSDMVVEG

SEQ ID NO: 52392 - protein, 42 aa, Artificial Sequence; identical to SEQ ID NO: 14287
  GFR-binding peptide
  MOD_RES (6)..(7)..(41): Xaa is C or S
  MOD_RES (21)..(22)..(23)..(24)..(25): Xaa is A or G
  MOD_RES (26)..(27)..(28)..(29): Xaa is A or G or is absent

SEQ ID NO: 52393 - protein, 42 aa, Artificial Sequence
  GFR-binding peptide
  MOD_RES (7)..(41): Xaa is C or S
  MOD_RES (21)..(22)..(23)..(24)..(25): Xaa is A or G
  MOD_RES (26)..(27)..(28)..(29): Xaa is A or G or is absent
NDEGLEXVPTEEEPLTMLYYXXXXXXXXXEQLSNFLQHNKXE

SEQ ID NO: 52394 - protein, 34 aa, Artificial Sequence; identical to SEQ ID NO: 14290
  GFR-binding peptide
  MOD_RES (1)..(2): Xaa is C or S
  MOD_RES (16)..(17)..(18)..(19)..(20): Xaa is A or G
  MOD_RES (21)..(22)..(23)..(24): Xaa is A or G or is absent

SEQ ID NO: 52395 - protein, 38 aa, Artificial Sequence
  GFR-binding peptide
  MOD_RES (4)..(5)..(38): Xaa is C or S
  MOD_RES (19)..(20)..(21)..(22)..(23): Xaa is A or G
  MOD_RES (24)..(25)..(26)..(27): Xaa is A or G or is absent
AAPXXVPQALSNITIQIMXXXXXXXXXIGEMSMIVRSX

SEQ ID NO: 52396 - protein, 37 aa, Artificial Sequence
  GFR-binding peptide
  MOD_RES (37)..(37): Xaa is C or S
  MOD_RES (16)..(17)..(18)..(19)..(20): Xaa is A or G
  MOD_RES (21)..(22)..(23)..(24): Xaa is A or G or is absent
RPTQVQLEPLTVLYYXXXXXXXXXEQLSNTLEDHLAX

SEQ ID NO: 52397 - protein, 33 aa, Artificial Sequence; identical to SEQ ID NO: 19308
  GFR-binding peptide

SEQ ID NO: 52398 - protein, 37 aa, Artificial Sequence
  GFR-binding peptide
  MOD_RES (4)..(5): Xaa is C or S
  MOD_RES (19)..(20)..(21)..(22)..(23): Xaa is A or G
  MOD_RES (24)..(25)..(26)..(27): Xaa is A or G or is absent
PKAXXVPTELRSVKMAKVXXXXXXXXXKEVQVEMVVE

SEQ ID NO: 52399 - protein, 39 aa, Artificial Sequence
  GFR-binding peptide
  MOD_RES (7)..(7): Xaa is C or S
NDEGLEXVPTEEEPLPMVYYRIKPHQGQHEQLSNFLQHN

SEQ ID NO: 52400 - protein, 37 aa, Artificial Sequence
  GFR-binding peptide
  MOD_RES (1)..(35)..(37): Xaa is C or S
XVPTEEEPLTMLYYRIKPHQGQHEQLSNFLQHNKXEX

SEQ ID NO: 52401 - protein, 41 aa, Artificial Sequence; identical to SEQ ID NO: 19311
  GFR-binding peptide
  MOD_RES (5)..(5): Xaa is C or S
  MOD_RES (21)..(22)..(23)..(24)..(25): Xaa is A or G
  MOD_RES (26)..(27)..(28)..(29): Xaa is A or G or is absent

SEQ ID NO: 52402 - protein, 36 aa, Artificial Sequence; identical to SEQ ID NO: 19313
  GFR-binding peptide
  MOD_RES (1)..(35): Xaa is C or S

SEQ ID NO: 52403 - protein, 35 aa, Artificial Sequence; identical to SEQ ID NO: 19314
  GFR-binding peptide

SEQ ID NO: 52404 - protein, 40 aa, Artificial Sequence
  GFR-binding peptide
  MOD_RES (5)..(6)..(37)..(39): Xaa is C or S
SASPXXVSQDLSNITIQIMIGKTPKIIGEMSMIVKSXKXS

SEQ ID NO: 52405 - protein, 33 aa, Artificial Sequence
  GFR-binding peptide
  MOD_RES (2)..(3): Xaa is C or S
PXXAPTQLRSVKVAKVDDSSNVIKEVQVNMVVR

SEQ ID NO: 52406 - protein, 36 aa, Artificial Sequence; identical to SEQ ID NO: 14299
  GFR-binding peptide
  MOD_RES (3)..(3): Xaa is C or S
  MOD_RES (17)..(18)..(19)..(20)..(21): Xaa is A or G
  MOD_RES (22)..(23)..(24)..(25): Xaa is A or G or is absent

SEQ ID NO: 52407 - protein, 39 aa, Artificial Sequence
  GFR-binding peptide
  MOD_RES (2)..(3)..(37)..(39): Xaa is C or S
  MOD_RES (17)..(18)..(19)..(20)..(21): Xaa is A or G
  MOD_RES (22)..(23)..(24)..(25): Xaa is A or G or is absent
PXXAPTQLRSVKVAKVXXXXXXXXXKEVQVNMVVRAXGX

SEQ ID NO: 52408 - protein, 36 aa, Artificial Sequence
  GFR-binding peptide
  MOD_RES (4)..(4): Xaa is C or S
  MOD_RES (18)..(19)..(20)..(21)..(22): Xaa is A or G
  MOD_RES (23)..(24)..(25)..(26): Xaa is A or G or is absent
GLEXVPTEEEPLPMVYYXXXXXXXXXEQLSNFLQHN

SEQ ID NO: 52409 - protein, 37 aa, Artificial Sequence
  GFR-binding peptide
  MOD_RES (1)..(35)..(37): Xaa is C or S
  MOD_RES (15)..(16)..(17)..(18)..(19): Xaa is A or G
  MOD_RES (20)..(21)..(22)..(23): Xaa is A or G or is absent
XAPTQLSNITVQIMXXXXXXXXXIGEMSNMVVRAXGX

SEQ ID NO: 52410 - protein, 36 aa, Artificial Sequence; identical to SEQ ID NO: 19319
  GFR-binding peptide
  MOD_RES (36)..(36): Xaa is C or S
  MOD_RES (15)..(16)..(17)..(18)..(19): Xaa is A or G
  MOD_RES (20)..(21)..(22)..(23): Xaa is A or G or is absent

SEQ ID NO: 52411 - protein, 41 aa, Artificial Sequence
  GFR-binding peptide
  MOD_RES (4)..(5)..(38)..(40): Xaa is C or S
  MOD_RES (19)..(20)..(21)..(22)..(23): Xaa is A or G
  MOD_RES (24)..(25)..(26)..(27): Xaa is A or G or is absent
ASPXXVPQDLRSVKIAKVXXXXXXXXXKEVQVMVVKSXKXS

SEQ ID NO: 52412 - protein, 39 aa, Artificial Sequence; identical to SEQ ID NO: 14302
  GFR-binding peptide
  MOD_RES (7)..(7): Xaa is C or S
  MOD_RES (21)..(22)..(23)..(24)..(25): Xaa is A or G
  MOD_RES (26)..(27)..(28)..(29): Xaa is A or G or is absent

SEQ ID NO: 52413 - protein, 34 aa, Artificial Sequence; identical to SEQ ID NO: 19321
  GFR-binding peptide

SEQ ID NO: 52414 - protein, 32 aa, Artificial Sequence; identical to SEQ ID NO: 14303
  GFR-binding peptide
  MOD_RES (1)..(1): Xaa is C or S

SEQ ID NO: 52415 - protein, 41 aa, Artificial Sequence; identical to SEQ ID NO: 14306
  GFR-binding peptide
  MOD_RES (5)..(6)..(38)..(40): Xaa is C or S

SEQ ID NO: 52416 - protein, 39 aa, Artificial Sequence; identical to SEQ ID NO: 14307
  GFR-binding peptide
  MOD_RES (1)..(2)..(36)..(38): Xaa is C or S
  MOD_RES (16)..(17)..(18)..(19)..(20): Xaa is A or G
  MOD_RES (21)..(22)..(23)..(24): Xaa is A or G or is absent

SEQ ID NO: 52417 - protein, 42 aa, Artificial Sequence; identical to SEQ ID NO: 14308
  GFR-binding peptide
  MOD_RES (4)..(5)..(39)..(41): Xaa is C or S
  MOD_RES (19)..(20)..(21)..(22)..(23): Xaa is A or G
  MOD_RES (24)..(25)..(26)..(27): Xaa is A or G or is absent

SEQ ID NO: 52418 - protein, 32 aa, Artificial Sequence
  GFR-binding peptide
  MOD_RES (1)..(2): Xaa is C or S
XXVPQDLSNITIQIMVGRTPKVIGEMSMVVKS

SEQ ID NO: 52419 - protein, 43 aa, Artificial Sequence
  GFR-binding peptide
  MOD_RES (6)..(40)..(42): Xaa is C or S
DEGLEXVPTEEEPLPMVYYRIKPHQGQHEQLSNFLQHNKXEXR

SEQ ID NO: 52420 - protein, 33 aa, Artificial Sequence
  GFR-binding peptide
  MOD_RES (3)..(3): Xaa is C or S
PTXAPTKLRPVQVRKIDDSSNVIKKATVNMVVR

SEQ ID NO: 52421 - protein, 35 aa, Artificial Sequence
  GFR-binding peptide
  MOD_RES (5)..(5): Xaa is C or S
TKPTXAPTKLSNITVQIMDDSSNVIIGEMSNMVVR

SEQ ID NO: 52422 - protein, 37 aa, Artificial Sequence
  GFR-binding peptide
  MOD_RES (5)..(5): Xaa is C or S
  MOD_RES (19)..(20)..(21)..(22)..(23): Xaa is A or G
  MOD_RES (24)..(25)..(26)..(27): Xaa is A or G or is absent
EGLEXVPTEEEPLPMVYYXXXXXXXXXEQLSNFLQHN

SEQ ID NO: 52423 - protein, 43 aa, Artificial Sequence; identical to SEQ ID NO: 14311
  GFR-binding peptide
  MOD_RES (5)..(6)..(40)..(42): Xaa is C or S
  MOD_RES (20)..(21)..(22)..(23)..(24): Xaa is A or G
  MOD_RES (25)..(26)..(27)..(28): Xaa is A or G or is absent

SEQ ID NO: 52424 - protein, 37 aa, Artificial Sequence
  GFR-binding peptide
  MOD_RES (1)..(2)..(35)..(37): Xaa is C or S
  MOD_RES (16)..(17)..(18)..(19)..(20): Xaa is A or G
  MOD_RES (21)..(22)..(23)..(24): Xaa is A or G or is absent
XXVSQDLRPVQIRKIXXXXXXXXXKKATVMIVKSXKX

SEQ ID NO: 52425 - protein, 42 aa, Artificial Sequence; identical to SEQ ID NO: 19325
  GFR-binding peptide
  MOD_RES (3)..(40)..(42): Xaa is C or S

SEQ ID NO: 52426 - protein, 44 aa, Artificial Sequence
  GFR-binding peptide
  MOD_RES (6)..(7)..(41)..(43): Xaa is C or S
  MOD_RES (21)..(22)..(23)..(24)..(25): Xaa is A or G
  MOD_RES (26)..(27)..(28)..(29): Xaa is A or G or is absent
SIPKAXXVPTELRSVKMAKVXXXXXXXXXKEVQVEMVVEGXGXR

SEQ ID NO: 52427 - protein, 36 aa, Artificial Sequence
  GFR-binding peptide
  MOD_RES (2)..(3)..(35): Xaa is C or S
AXXVPTELRPVQMRKIDENEKVVKKATVDMVVEGXG

SEQ ID NO: 52428 - protein, 41 aa, Artificial Sequence; identical to SEQ ID NO: 19329
  GFR-binding peptide
  MOD_RES (5)..(5): Xaa is C or S

SEQ ID NO: 52429 - protein, 41 aa, Artificial Sequence; identical to SEQ ID NO: 14317
  GFR-binding peptide
  MOD_RES (4)..(5)..(39)..(41): Xaa is C or S
  MOD_RES (19)..(20)..(21)..(22)..(23): Xaa is A or G
  MOD_RES (24)..(25)..(26)..(27): Xaa is A or G or is absent

SEQ ID NO: 52430 - protein, 35 aa, Artificial Sequence
  GFR-binding peptide
  MOD_RES (1)..(2)..(35): Xaa is C or S
  MOD_RES (16)..(17)..(18)..(19)..(20): Xaa is A or G
  MOD_RES (21)..(22)..(23)..(24): Xaa is A or G or is absent
XXVPQALRPVQIRKIXXXXXXXXXKKATVMIVRSX

SEQ ID NO: 52431 - protein, 41 aa, Artificial Sequence
  GFR-binding peptide
  MOD_RES (6)..(7)..(41): Xaa is C or S
  MOD_RES (21)..(22)..(23)..(24)..(25): Xaa is A or G
  MOD_RES (26)..(27)..(28)..(29): Xaa is A or G or is absent
SIPKAXXVPTELRPVQMRKIXXXXXXXXXKKATVEMVVEGX

SEQ ID NO: 52432 - protein, 41 aa, Artificial Sequence
  GFR-binding peptide
  MOD_RES (2)..(39)..(41): Xaa is C or S
  MOD_RES (18)..(19)..(20)..(21)..(22): Xaa is A or G
  MOD_RES (23)..(24)..(25)..(26): Xaa is A or G or is absent
QXRPTQVQLEPLPVVYYXXXXXXXXXEQLSNTLEDHLAXKX

SEQ ID NO: 52433 - protein, 34 aa, Artificial Sequence
  GFR-binding peptide
  MOD_RES (2)..(2): Xaa is C or S
  MOD_RES (16)..(17)..(18)..(19)..(20): Xaa is A or G
  MOD_RES (21)..(22)..(23)..(24): Xaa is A or G or is absent
TXAPTKLRSVKVAKVXXXXXXXXXKEVQVNMVVR

SEQ ID NO: 52434 - protein, 38 aa, Artificial Sequence
  GFR-binding peptide
  MOD_RES (2)..(3)..(35)..(37): Xaa is C or S
AXXVPTELRSVKMAKVDENEKVVKEVQVDMVVEGXGXR

SEQ ID NO: 52435 - protein, 36 aa, Artificial Sequence
  GFR-binding peptide
  MOD_RES (2)..(3)..(36): Xaa is C or S
  MOD_RES (17)..(18)..(19)..(20)..(21): Xaa is A or G
  MOD_RES (22)..(23)..(24)..(25): Xaa is A or G or is absent
PXXVSQDLSNITIQIMXXXXXXXXXIGEMSMIVKSX

SEQ ID NO: 52436 - protein, 40 aa, Artificial Sequence
  GFR-binding peptide
  MOD_RES (5)..(6)..(38)..(40): Xaa is C or S
VPKPXXAPTQLRSVKVAKVDDSSNVIKEVQVNMVVRAXGX

SEQ ID NO: 52437 - protein, 37 aa, Artificial Sequence
  GFR-binding peptide
  MOD_RES (3)..(3): Xaa is C or S
  MOD_RES (19)..(20)..(21)..(22)..(23): Xaa is A or G
  MOD_RES (24)..(25)..(26)..(27): Xaa is A or G or is absent
VKXQPSRVHHEPLPVVYYXXXXXXXXXEQLSNRLEEH

SEQ ID NO: 52438 - protein, 39 aa, Artificial Sequence; identical to SEQ ID NO: 19334
  GFR-binding peptide
  MOD_RES (37)..(39): Xaa is C or S
  MOD_RES (16)..(17)..(18)..(19)..(20): Xaa is A or G
  MOD_RES (21)..(22)..(23)..(24): Xaa is A or G or is absent

SEQ ID NO: 52439 - protein, 35 aa, Artificial Sequence; identical to SEQ ID NO: 14320
  GFR-binding peptide
  MOD_RES (5)..(5): Xaa is C or S

SEQ ID NO: 52440 - protein, 36 aa, Artificial Sequence
  GFR-binding peptide
  MOD_RES (2)..(3)..(35): Xaa is C or S
PXXAPTKLRPVQVRKIDDSSNVIKKATVNMVVRSXG

SEQ ID NO: 52441 - protein, 33 aa, Artificial Sequence
  GFR-binding peptide
  MOD_RES (2)..(3): Xaa is C or S
AXXVPTELRSVKMAKVDEYDKVVKEVQVEMVVE

SEQ ID NO: 52442 - protein, 32 aa, Artificial Sequence
  GFR-binding peptide
  MOD_RES (1)..(2): Xaa is C or S
XXVSQDLSNITIQIMIGKTPKIIGEMSMIVKS

SEQ ID NO: 52443 - protein, 43 aa, Artificial Sequence; identical to SEQ ID NO: 19335
  GFR-binding peptide
  MOD_RES (4)..(41)..(43): Xaa is C or S

SEQ ID NO: 52444 - protein, 41 aa, Artificial Sequence; identical to SEQ ID NO: 19336
  GFR-binding peptide
  MOD_RES (2)..(39)..(41): Xaa is C or S
  MOD_RES (18)..(19)..(20)..(21)..(22): Xaa is A or G
  MOD_RES (23)..(24)..(25)..(26): Xaa is A or G or is absent

SEQ ID NO: 52445 - protein, 42 aa, Artificial Sequence; identical to SEQ ID NO: 14322
  GFR-binding peptide
  MOD_RES (6)..(7)..(39)..(41): Xaa is C or S

SEQ ID NO: 52446 - protein, 40 aa, Artificial Sequence; identical to SEQ ID NO: 14323
  GFR-binding peptide
  MOD_RES (5)..(6)..(39): Xaa is C or S
  MOD_RES (20)..(21)..(22)..(23)..(24): Xaa is A or G
  MOD_RES (25)..(26)..(27)..(28): Xaa is A or G or is absent

SEQ ID NO: 52447 - protein, 36 aa, Artificial Sequence; identical to SEQ ID NO: 14325
  GFR-binding peptide
  MOD_RES (34)..(36): Xaa is C or S
  MOD_RES (14)..(15)..(16)..(17)..(18): Xaa is A or G
  MOD_RES (19)..(20)..(21)..(22): Xaa is A or G or is absent

SEQ ID NO: 52448 - protein, 43 aa, Artificial Sequence
  GFR-binding peptide
  MOD_RES (6)..(7)..(41)..(43): Xaa is C or S
  MOD_RES (21)..(22)..(23)..(24)..(25): Xaa is A or G
  MOD_RES (26)..(27)..(28)..(29): Xaa is A or G or is absent
SIPKAXXVPTELRPVQMRKIXXXXXXXXXKKATVEMVVEGXGX

SEQ ID NO: 52449 - protein, 39 aa, Artificial Sequence
  GFR-binding peptide
  MOD_RES (4)..(38): Xaa is C or S
GLEXVPTEEEPLPMVYYRIKPHQGQHEQLSNFLQHNKXE

SEQ ID NO: 52450 - protein, 37 aa, Artificial Sequence
  GFR-binding peptide
  MOD_RES (3)..(4)..(37): Xaa is C or S
  MOD_RES (18)..(19)..(20)..(21)..(22): Xaa is A or G
  MOD_RES (23)..(24)..(25)..(26): Xaa is A or G or is absent
APXXVPQALSNITIQIMXXXXXXXXXIGEMSMIVRSX

SEQ ID NO: 52451 - protein, 36 aa, Artificial Sequence
  GFR-binding peptide
  MOD_RES (4)..(5): Xaa is C or S
PKAXXVPTELRPVQMRKIDEYDKVVKKATVEMVVEG

SEQ ID NO: 52452 - protein, 40 aa, Artificial Sequence; identical to SEQ ID NO: 14327
  GFR-binding peptide
  MOD_RES (3)..(37)..(39): Xaa is C or S
  MOD_RES (17)..(18)..(19)..(20)..(21): Xaa is A or G
  MOD_RES (22)..(23)..(24)..(25): Xaa is A or G or is absent

SEQ ID NO: 52453 - protein, 39 aa, Artificial Sequence; identical to SEQ ID NO: 19340
  GFR-binding peptide
  MOD_RES (3)..(3): Xaa is C or S

SEQ ID NO: 52454 - protein, 41 aa, Artificial Sequence; identical to SEQ ID NO: 19341
  GFR-binding peptide
  MOD_RES (6)..(40): Xaa is C or S

SEQ ID NO: 52455 - protein, 39 aa, Artificial Sequence
  GFR-binding peptide
  MOD_RES (4)..(38): Xaa is C or S
  MOD_RES (18)..(19)..(20)..(21)..(22): Xaa is A or G
  MOD_RES (23)..(24)..(25)..(26): Xaa is A or G or is absent
KPTXAPTKLRPVQVRKIXXXXXXXXXKKATVNMVVRSXG

SEQ ID NO: 52456 - protein, 35 aa, Artificial Sequence; identical to SEQ ID NO: 14330
  GFR-binding peptide
  MOD_RES (1)..(33)..(35): Xaa is C or S

SEQ ID NO: 52457 - protein, 35 aa, Artificial Sequence; identical to SEQ ID NO: 14331
  GFR-binding peptide
  MOD_RES (2)..(3)..(35): Xaa is C or S

SEQ ID NO: 52458 - protein, 38 aa, Artificial Sequence
  GFR-binding peptide
  MOD_RES (5)..(6)..(38): Xaa is C or S
VPKPXXAPTKLRSVKVAKVDDSSNVIKEVQVNMVVRSX

SEQ ID NO: 52459 - protein, 35 aa, Artificial Sequence; identical to SEQ ID NO: 19345
  GFR-binding peptide
  MOD_RES (1)..(35): Xaa is C or S
  MOD_RES (15)..(16)..(17)..(18)..(19): Xaa is A or G
  MOD_RES (20)..(21)..(22)..(23): Xaa is A or G or is absent

SEQ ID NO: 52460 - protein, 32 aa, Artificial Sequence
  GFR-binding peptide
  MOD_RES (32)..(32): Xaa is C or S
APTKLSNITVQIMDDSSNVIIGEMSNMVVRSX

SEQ ID NO: 52461 - protein, 40 aa, Artificial Sequence; identical to SEQ ID NO: 14333
  GFR-binding peptide
  MOD_RES (6)..(7)..(39): Xaa is C or S

SEQ ID NO: 52462 - protein, 36 aa, Artificial Sequence; identical to SEQ ID NO: 14336
  GFR-binding peptide
  MOD_RES (2)..(3)..(36): Xaa is C or S
  MOD_RES (17)..(18)..(19)..(20)..(21): Xaa is A or G
  MOD_RES (22)..(23)..(24)..(25): Xaa is A or G or is absent

SEQ ID NO: 52463 - protein, 36 aa, Artificial Sequence
  GFR-binding peptide
  MOD_RES (1)..(2)..(35): Xaa is C or S
  MOD_RES (16)..(17)..(18)..(19)..(20): Xaa is A or G
  MOD_RES (21)..(22)..(23)..(24): Xaa is A or G or is absent
XXVPQALRPVQIRKIXXXXXXXXXKKATVMIVRSXK

SEQ ID NO: 52464 - protein, 40 aa, Artificial Sequence; identical to SEQ ID NO: 19346
  GFR-binding peptide
  MOD_RES (3)..(40): Xaa is C or S
  MOD_RES (19)..(20)..(21)..(22)..(23): Xaa is A or G
  MOD_RES (24)..(25)..(26)..(27): Xaa is A or G or is absent

SEQ ID NO: 52465 - protein, 37 aa, Artificial Sequence
  GFR-binding peptide
  MOD_RES (5)..(5): Xaa is C or S
EGLEXVPTEEEPLTMLYYRIKPHQGQHEQLSNFLQHN

SEQ ID NO: 52466 - protein, 37 aa, Artificial Sequence; identical to SEQ ID NO: 14337
  GFR-binding peptide
  MOD_RES (4)..(5)..(37): Xaa is C or S

SEQ ID NO: 52467 - protein, 35 aa, Artificial Sequence
  GFR-binding peptide
  MOD_RES (1)..(33)..(35): Xaa is C or S
XVPTELRSVKMAKVDENEKVVKEVQVDMVVEGXGX

SEQ ID NO: 52468 - protein, 40 aa, Artificial Sequence; identical to SEQ ID NO: 14338
  GFR-binding peptide
  MOD_RES (6)..(7)..(38)..(40): Xaa is C or S

SEQ ID NO: 52469 - protein, 34 aa, Artificial Sequence; identical to SEQ ID NO: 19350
  GFR-binding peptide
  MOD_RES (34)..(34): Xaa is C or S

SEQ ID NO: 52470 - protein, 37 aa, Artificial Sequence; identical to SEQ ID NO: 19351
  GFR-binding peptide
  MOD_RES (2)..(2): Xaa is C or S

SEQ ID NO: 52471 - protein, 35 aa, Artificial Sequence
  GFR-binding peptide
  MOD_RES (3)..(4)..(35): Xaa is C or S
SPXXVSQDLRPVQIRKIIGKTPKIKKATVMIVKSX

SEQ ID NO: 52472 - protein, 38 aa, Artificial Sequence
  GFR-binding peptide
  MOD_RES (2)..(2): Xaa is C or S
  MOD_RES (18)..(19)..(20)..(21)..(22): Xaa is A or G
  MOD_RES (23)..(24)..(25)..(26): Xaa is A or G or is absent
KXQPSRVHHEPLTVLYYXXXXXXXXXEQLSNRLEEHLE

SEQ ID NO: 52473 - protein, 39 aa, Artificial Sequence
  GFR-binding peptide
  MOD_RES (6)..(7)..(39): Xaa is C or S
SIPKAXXVPTELSNITMQIMDEYDKVVIGEMSEMVVEGX

SEQ ID NO: 52474 - protein, 40 aa, Artificial Sequence
  GFR-binding peptide
  MOD_RES (6)..(7): Xaa is C or S
  MOD_RES (21)..(22)..(23)..(24)..(25): Xaa is A or G
  MOD_RES (26)..(27)..(28)..(29): Xaa is A or G or is absent
YVPKPXXAPTKLRSVKVAKVXXXXXXXXXKEVQVNMVVRS

SEQ ID NO: 52475 - protein, 38 aa, Artificial Sequence; identical to SEQ ID NO: 14345
  GFR-binding peptide
  MOD_RES (5)..(6)..(37): Xaa is C or S

SEQ ID NO: 52476 - protein, 40 aa, Artificial Sequence; identical to SEQ ID NO: 39755
  GFR-binding peptide
  MOD_RES (4)..(5)..(38)..(40): Xaa is C or S
  MOD_RES (19)..(20)..(21)..(22)..(23): Xaa is A or G
  MOD_RES (24)..(25)..(26)..(27): Xaa is A or G or is absent

SEQ ID NO: 52477 - protein, 43 aa, Artificial Sequence
  GFR-binding peptide
  MOD_RES (5)..(42): Xaa is C or S
RNVQXRPTQVQLEPLPVVYYEIVRKKPIFEQLSNTLEDHLAXK

SEQ ID NO: 52478 - protein, 37 aa, Artificial Sequence; identical to SEQ ID NO: 14347
  GFR-binding peptide
  MOD_RES (34)..(36): Xaa is C or S
  MOD_RES (14)..(15)..(16)..(17)..(18): Xaa is A or G
  MOD_RES (19)..(20)..(21)..(22): Xaa is A or G or is absent

SEQ ID NO: 52479 - protein, 43 aa, Artificial Sequence; identical to SEQ ID NO: 19357
  GFR-binding peptide
  MOD_RES (7)..(41)..(43): Xaa is C or S
  MOD_RES (21)..(22)..(23)..(24)..(25): Xaa is A or G
  MOD_RES (26)..(27)..(28)..(29): Xaa is A or G or is absent

SEQ ID NO: 52480 - protein, 41 aa, Artificial Sequence
  GFR-binding peptide
  MOD_RES (4)..(38)..(40): Xaa is C or S
GLEXVPTEEEPLTMLYYRIKPHQGQHEQLSNFLQHNKXEXR

SEQ ID NO: 52481 - protein, 39 aa, Artificial Sequence
  GFR-binding peptide
  MOD_RES (6)..(7): Xaa is C or S
  MOD_RES (21)..(22)..(23)..(24)..(25): Xaa is A or G
  MOD_RES (26)..(27)..(28)..(29): Xaa is A or G or is absent
ASASPXXVPQDLRPVQIRKIXXXXXXXXXKKATVMVVKS

SEQ ID NO: 52482 - protein, 39 aa, Artificial Sequence
  GFR-binding peptide
  MOD_RES (5)..(6)..(37)..(39): Xaa is C or S
SASPXXVSQDLRPVQIRKIIGKTPKIKKATVMIVKSXKX

SEQ ID NO: 52483 - protein, 33 aa, Artificial Sequence
  GFR-binding peptide
VPTEEEPLTMLYYRIKPHQGQHEQLSNFLQHNK

SEQ ID NO: 52484 - protein, 41 aa, Artificial Sequence
  GFR-binding peptide
  MOD_RES (6)..(7)..(39)..(41): Xaa is C or S
TVPKPXXAPTQLRSVKVAKVDDSSNVIKEVQVNMVVRAXGX

SEQ ID NO: 52485 - protein, 43 aa, Artificial Sequence
  GFR-binding peptide
  MOD_RES (6)..(7)..(41)..(43): Xaa is C or S
  MOD_RES (21)..(22)..(23)..(24)..(25): Xaa is A or G
  MOD_RES (26)..(27)..(28)..(29): Xaa is A or G or is absent
TVPKPXXAPTQLRSVKVAKVXXXXXXXXXKEVQVNMVVRAXGX

SEQ ID NO: 52486 - protein, 38 aa, Artificial Sequence
  GFR-binding peptide
  MOD_RES (2)..(3)..(36)..(38): Xaa is C or S
  MOD_RES (17)..(18)..(19)..(20)..(21): Xaa is A or G
  MOD_RES (22)..(23)..(24)..(25): Xaa is A or G or is absent
PXXVPQDLSNITIQIMXXXXXXXXXIGEMSMVVKSXKX

SEQ ID NO: 52487 - protein, 39 aa, Artificial Sequence; identical to SEQ ID NO: 19362
  GFR-binding peptide
  MOD_RES (3)..(37)..(39): Xaa is C or S
  MOD_RES (17)..(18)..(19)..(20)..(21): Xaa is A or G
  MOD_RES (22)..(23)..(24)..(25): Xaa is A or G or is absent

SEQ ID NO: 52488 - protein, 36 aa, Artificial Sequence; identical to SEQ ID NO: 14360
  GFR-binding peptide
  MOD_RES (2)..(36): Xaa is C or S
  MOD_RES (16)..(17)..(18)..(19)..(20): Xaa is A or G
  MOD_RES (21)..(22)..(23)..(24): Xaa is A or G or is absent

SEQ ID NO: 52489 - protein, 40 aa, Artificial Sequence; identical to SEQ ID NO: 19367
  GFR-binding peptide
  MOD_RES (7)..(7): Xaa is C or S
  MOD_RES (21)..(22)..(23)..(24)..(25): Xaa is A or G
  MOD_RES (26)..(27)..(28)..(29): Xaa is A or G or is absent

SEQ ID NO: 52490 - protein, 39 aa, Artificial Sequence
  GFR-binding peptide
  MOD_RES (36)..(38): Xaa is C or S
PSRVHHEPLPVVYYEYVRKKPKLEQLSNRLEEHLEXAXA

SEQ ID NO: 52491 - protein, 37 aa, Artificial Sequence; identical to SEQ ID NO: 14362
  GFR-binding peptide
  MOD_RES (5)..(6): Xaa is C or S

SEQ ID NO: 52492 - protein, 35 aa, Artificial Sequence
  GFR-binding peptide
  MOD_RES (1)..(33)..(35): Xaa is C or S
XAPTQLRPVQVRKIDDSSNVIKKATVNMVVRAXGX

SEQ ID NO: 52493 - protein, 37 aa, Artificial Sequence
  GFR-binding peptide
  MOD_RES (2)..(3)..(36): Xaa is C or S
  MOD_RES (17)..(18)..(19)..(20)..(21): Xaa is A or G
  MOD_RES (22)..(23)..(24)..(25): Xaa is A or G or is absent
PXXVPQDLSNITIQIMXXXXXXXXXIGEMSMVVKSXK

SEQ ID NO: 52494 - protein, 32 aa, Artificial Sequence
  GFR-binding peptide
  MOD_RES (1)..(1): Xaa is C or S
XAPTKLRSVKVAKVDDSSNVIKEVQVNMVVRS

SEQ ID NO: 52495 - protein, 37 aa, Artificial Sequence; identical to SEQ ID NO: 14363
  GFR-binding peptide
  MOD_RES (34)..(36): Xaa is C or S
  MOD_RES (14)..(15)..(16)..(17)..(18): Xaa is A or G
  MOD_RES (19)..(20)..(21)..(22): Xaa is A or G or is absent

SEQ ID NO: 52496 - protein, 37 aa, Artificial Sequence; identical to SEQ ID NO: 14365
  GFR-binding peptide
  MOD_RES (4)..(5)..(36): Xaa is C or S

SEQ ID NO: 52497 - protein, 37 aa, Artificial Sequence
  GFR-binding peptide
  MOD_RES (3)..(3): Xaa is C or S
  MOD_RES (19)..(20)..(21)..(22)..(23): Xaa is A or G
  MOD_RES (24)..(25)..(26)..(27): Xaa is A or G or is absent
VKXQPSRVHHEPLTVLYYXXXXXXXXXEQLSNRLEEH

SEQ ID NO: 52498 - protein, 40 aa, Artificial Sequence
  GFR-binding peptide
  MOD_RES (4)..(5)..(39): Xaa is C or S
  MOD_RES (19)..(20)..(21)..(22)..(23): Xaa is A or G
  MOD_RES (24)..(25)..(26)..(27): Xaa is A or G or is absent
PKPXXAPTQLRSVKVAKVXXXXXXXXXKEVQVNMVVRAXG

SEQ ID NO: 52499 - protein, 35 aa, Artificial Sequence; identical to SEQ ID NO: 14369
  GFR-binding peptide
  MOD_RES (1)..(35): Xaa is C or S
  MOD_RES (15)..(16)..(17)..(18)..(19): Xaa is A or G
  MOD_RES (20)..(21)..(22)..(23): Xaa is A or G or is absent

SEQ ID NO: 52500 - protein, 34 aa, Artificial Sequence; identical to SEQ ID NO: 14370
  GFR-binding peptide
  MOD_RES (1)..(34): Xaa is C or S
  MOD_RES (15)..(16)..(17)..(18)..(19): Xaa is A or G
  MOD_RES (20)..(21)..(22)..(23): Xaa is A or G or is absent

SEQ ID NO: 52501 - protein, 36 aa, Artificial Sequence
  GFR-binding peptide
  MOD_RES (1)..(2)..(34)..(36): Xaa is C or S
XXAPTKLRSVKVAKVDDSSNVIKEVQVNMVVRSXGX

SEQ ID NO: 52502 - protein, 34 aa, Artificial Sequence
  GFR-binding peptide
  MOD_RES (1)..(33): Xaa is C or S
XAPTKLSNITVQIMDDSSNVIIGEMSNMVVRSXG

SEQ ID NO: 52503 - protein, 34 aa, Artificial Sequence; identical to SEQ ID NO: 14372
  GFR-binding peptide
  MOD_RES (3)..(4): Xaa is C or S

SEQ ID NO: 52504 - protein, 41 aa, Artificial Sequence; identical to SEQ ID NO: 14373
  GFR-binding peptide
  MOD_RES (6)..(40): Xaa is C or S
  MOD_RES (20)..(21)..(22)..(23)..(24): Xaa is A or G
  MOD_RES (25)..(26)..(27)..(28): Xaa is A or G or is absent

SEQ ID NO: 52505 - protein, 42 aa, Artificial Sequence
  GFR-binding peptide
  MOD_RES (6)..(7)..(41): Xaa is C or S
  MOD_RES (21)..(22)..(23)..(24)..(25): Xaa is A or G
  MOD_RES (26)..(27)..(28)..(29): Xaa is A or G or is absent
TVPKPXXAPTQLRSVKVAKVXXXXXXXXXKEVQVNMVVRAXG

SEQ ID NO: 52506 - protein, 39 aa, Artificial Sequence
  GFR-binding peptide
  MOD_RES (2)..(39): Xaa is C or S
QXRPTQVQLEPLPVVYYEIVRKKPIFEQLSNTLEDHLAX

SEQ ID NO: 52507 - protein, 37 aa, Artificial Sequence; identical to SEQ ID NO: 19372
  GFR-binding peptide
  MOD_RES (4)..(4): Xaa is C or S

SEQ ID NO: 52508 - protein, 36 aa, Artificial Sequence; identical to SEQ ID NO: 14377
  GFR-binding peptide
  MOD_RES (3)..(4)..(36): Xaa is C or S

SEQ ID NO: 52509 - protein, 31 aa, Artificial Sequence
  GFR-binding peptide
  MOD_RES (31)..(31): Xaa is C or S
VSQDLSNITIQIMIGKTPKIIGEMSMIVKSX

SEQ ID NO: 52510 - protein, 37 aa, Artificial Sequence
  GFR-binding peptide
  MOD_RES (2)..(3)..(37): Xaa is C or S
  MOD_RES (17)..(18)..(19)..(20)..(21): Xaa is A or G
  MOD_RES (22)..(23)..(24)..(25): Xaa is A or G or is absent
AXXVPTELRSVKMAKVXXXXXXXXXKEVQVEMVVEGX

SEQ ID NO: 52511 - protein, 44 aa, Artificial Sequence
  GFR-binding peptide
  MOD_RES (4)..(41)..(43): Xaa is C or S
NVQXRPTQVQLEPLPVVYYEIVRKKPIFEQLSNTLEDHLAXKXE

SEQ ID NO: 52512 - protein, 39 aa, Artificial Sequence; identical to SEQ ID NO: 14379
  GFR-binding peptide
  MOD_RES (6)..(7)..(39): Xaa is C or S

SEQ ID NO: 52513 - protein, 36 aa, Artificial Sequence
  GFR-binding peptide
  MOD_RES (1)..(34)..(36): Xaa is C or S
  MOD_RES (15)..(16)..(17)..(18)..(19): Xaa is A or G
  MOD_RES (20)..(21)..(22)..(23): Xaa is A or G or is absent
XVPQALRPVQIRKIXXXXXXXXXKKATVMIVRSXKX

SEQ ID NO: 52514 - protein, 35 aa, Artificial Sequence; identical to SEQ ID NO: 14380
  GFR-binding peptide
  MOD_RES (1)..(34): Xaa is C or S
  MOD_RES (15)..(16)..(17)..(18)..(19): Xaa is A or G
  MOD_RES (20)..(21)..(22)..(23): Xaa is A or G or is absent

SEQ ID NO: 52515 - protein, 40 aa, Artificial Sequence; identical to SEQ ID NO: 19375
  GFR-binding peptide
  MOD_RES (3)..(40): Xaa is C or S
  MOD_RES (19)..(20)..(21)..(22)..(23): Xaa is A or G
  MOD_RES (24)..(25)..(26)..(27): Xaa is A or G or is absent

SEQ ID NO: 52516 - protein, 36 aa, Artificial Sequence; identical to SEQ ID NO: 14381
  GFR-binding peptide
  MOD_RES (3)..(4): Xaa is C or S
  MOD_RES (18)..(19)..(20)..(21)..(22): Xaa is A or G
  MOD_RES (23)..(24)..(25)..(26): Xaa is A or G or is absent

SEQ ID NO: 52517 - protein, 32 aa, Artificial Sequence
  GFR-binding peptide
  MOD_RES (2)..(2): Xaa is C or S
TXAPTKLRSVKVAKVDDSSNVIKEVQVNMVVR

SEQ ID NO: 52518 - protein, 39 aa, Artificial Sequence
  GFR-binding peptide
  MOD_RES (5)..(6)..(37)..(39): Xaa is C or S
SASPXXVPQDLRPVQIRKIVGRTPKVKKATVMVVKSXKX

SEQ ID NO: 52519 - protein, 45 aa, Artificial Sequence
  GFR-binding peptide
  MOD_RES (5)..(42)..(44): Xaa is C or S
  MOD_RES (21)..(22)..(23)..(24)..(25): Xaa is A or G
  MOD_RES (26)..(27)..(28)..(29): Xaa is A or G or is absent
SSVKXQPSRVHHEPLPVVYYXXXXXXXXXEQLSNRLEEHLEXAXA

SEQ ID NO: 52520 - protein, 38 aa, Artificial Sequence
  GFR-binding peptide
  MOD_RES (4)..(5)..(38): Xaa is C or S
  MOD_RES (19)..(20)..(21)..(22)..(23): Xaa is A or G
  MOD_RES (24)..(25)..(26)..(27): Xaa is A or G or is absent
ASPXXVPQDLSNITIQIMXXXXXXXXXIGEMSMVVKSX

SEQ ID NO: 52521 - protein, 36 aa, Artificial Sequence
  GFR-binding peptide
  MOD_RES (2)..(36): Xaa is C or S
  MOD_RES (16)..(17)..(18)..(19)..(20): Xaa is A or G
  MOD_RES (21)..(22)..(23)..(24): Xaa is A or G or is absent
EXVPTEEEPLPMVYYXXXXXXXXXEQLSNFLQHNKX

SEQ ID NO: 52522 - protein, 37 aa, Artificial Sequence
  GFR-binding peptide
  MOD_RES (3)..(4)..(35)..(37): Xaa is C or S
APXXVPQALRPVQIRKIVGRKPKVKKATVMIVRSXKX

SEQ ID NO: 52523 - protein, 39 aa, Artificial Sequence; identical to SEQ ID NO: 14383
  GFR-binding peptide
  MOD_RES (5)..(6)..(38): Xaa is C or S

SEQ ID NO: 52524 - protein, 35 aa, Artificial Sequence; identical to SEQ ID NO: 19378
  GFR-binding peptide
  MOD_RES (1)..(1): Xaa is C or S

SEQ ID NO: 52525 - protein, 40 aa, Artificial Sequence
  GFR-binding peptide
  MOD_RES (4)..(5)..(37)..(39): Xaa is C or S
PKPXXAPTKLRSVKVAKVDDSSNVIKEVQVNMVVRSXGXH

SEQ ID NO: 52526 - protein, 39 aa, Artificial Sequence
  GFR-binding peptide
  MOD_RES (4)..(4): Xaa is C or S
  MOD_RES (20)..(21)..(22)..(23)..(24): Xaa is A or G
  MOD_RES (25)..(26)..(27)..(28): Xaa is A or G or is absent
SVKXQPSRVHHEPLTVLYYXXXXXXXXXEQLSNRLEEHL

SEQ ID NO: 52527 - protein, 37 aa, Artificial Sequence
  GFR-binding peptide
  MOD_RES (5)..(5): Xaa is C or S
EGLEXVPTEEEPLPMVYYRIKPHQGQHEQLSNFLQHN

SEQ ID NO: 52528 - protein, 37 aa, Artificial Sequence
  GFR-binding peptide
  MOD_RES (35)..(37): Xaa is C or S
  MOD_RES (14)..(15)..(16)..(17)..(18): Xaa is A or G
  MOD_RES (19)..(20)..(21)..(22): Xaa is A or G or is absent
TQVQLEPLTVLYYXXXXXXXXXEQLSNTLEDHLAXKX

SEQ ID NO: 52529 - protein, 35 aa, Artificial Sequence; identical to SEQ ID NO: 14386
  GFR-binding peptide
  MOD_RES (34)..(34): Xaa is C or S
  MOD_RES (14)..(15)..(16)..(17)..(18): Xaa is A or G
  MOD_RES (19)..(20)..(21)..(22): Xaa is A or G or is absent

SEQ ID NO: 52530 - protein, 38 aa, Artificial Sequence; identical to SEQ ID NO: 19381
  GFR-binding peptide
  MOD_RES (1)..(35)..(37): Xaa is C or S

SEQ ID NO: 52531 - protein, 37 aa, Artificial Sequence; identical to SEQ ID NO: 14387
  GFR-binding peptide
  MOD_RES (2)..(36): Xaa is C or S
  MOD_RES (16)..(17)..(18)..(19)..(20): Xaa is A or G
  MOD_RES (21)..(22)..(23)..(24): Xaa is A or G or is absent

SEQ ID NO: 52532 - protein, 43 aa, Artificial Sequence; identical to SEQ ID NO: 19383
  GFR-binding peptide
  MOD_RES (3)..(40)..(42): Xaa is C or S

SEQ ID NO: 52533 - protein, 37 aa, Artificial Sequence
  GFR-binding peptide
  MOD_RES (4)..(5)..(37): Xaa is C or S
PKPXXAPTKLSNITVQIMDDSSNVIIGEMSNMVVRSX

SEQ ID NO: 52534 - protein, 35 aa, Artificial Sequence
  GFR-binding peptide
  MOD_RES (1)..(2)..(34): Xaa is C or S
XXVPTELRPVQMRKIDENEKVVKKATVDMVVEGXG

SEQ ID NO: 52535 - protein, 38 aa, Artificial Sequence
  GFR-binding peptide
  MOD_RES (2)..(36)..(38): Xaa is C or S
  MOD_RES (16)..(17)..(18)..(19)..(20): Xaa is A or G
  MOD_RES (21)..(22)..(23)..(24): Xaa is A or G or is absent
TXAPTKLRSVKVAKVXXXXXXXXXKEVQVNMVVRSXGX

SEQ ID NO: 52536 - protein, 37 aa, Artificial Sequence; identical to SEQ ID NO: 14390
  GFR-binding peptide
  MOD_RES (1)..(2)..(34)..(36): Xaa is C or S

SEQ ID NO: 52537 - protein, 42 aa, Artificial Sequence; identical to SEQ ID NO: 19389
  GFR-binding peptide
  MOD_RES (5)..(42): Xaa is C or S
  MOD_RES (21)..(22)..(23)..(24)..(25): Xaa is A or G
  MOD_RES (26)..(27)..(28)..(29): Xaa is A or G or is absent

SEQ ID NO: 52538 - protein, 39 aa, Artificial Sequence; identical to SEQ ID NO: 19390
  GFR-binding peptide
  MOD_RES (1)..(38): Xaa is C or S

SEQ ID NO: 52539 - protein, 38 aa, Artificial Sequence; identical to SEQ ID NO: 19391
  GFR-binding peptide
  MOD_RES (1)..(38): Xaa is C or S
  MOD_RES (17)..(18)..(19)..(20)..(21): Xaa is A or G
  MOD_RES (22)..(23)..(24)..(25): Xaa is A or G or is absent

SEQ ID NO: 52540 - protein, 34 aa, Artificial Sequence
  GFR-binding peptide
  MOD_RES (4)..(4): Xaa is C or S
KPTXAPTKLRPVQVRKIDDSSNVIKKATVNMVVR

SEQ ID NO: 52541 - protein, 35 aa, Artificial Sequence
  GFR-binding peptide
  MOD_RES (2)..(2): Xaa is C or S
  MOD_RES (16)..(17)..(18)..(19)..(20): Xaa is A or G
  MOD_RES (21)..(22)..(23)..(24): Xaa is A or G or is absent
EXVPTEEEPLPMVYYXXXXXXXXXEQLSNFLQHNK

SEQ ID NO: 52542 - protein, 37 aa, Artificial Sequence
  GFR-binding peptide
  MOD_RES (2)..(3)..(34)..(36): Xaa is C or S
PXXVPQDLRSVKIAKVVGRTPKVKEVQVMVVKSXKXS

SEQ ID NO: 52543 - protein, 36 aa, Artificial Sequence
  GFR-binding peptide
  MOD_RES (4)..(5): Xaa is C or S
PKAXXVPTELRPVQMRKIDENEKVVKKATVDMVVEG

SEQ ID NO: 52544 - protein, 38 aa, Artificial Sequence
  GFR-binding peptide
  MOD_RES (36)..(38): Xaa is C or S
PTQVQLEPLPVVYYEIVRKKPIFEQLSNTLEDHLAXKX

SEQ ID NO: 52545 - protein, 36 aa, Artificial Sequence
  GFR-binding peptide
  MOD_RES (5)..(5): Xaa is C or S
TKPTXAPTKLSNITVQIMDDSSNVIIGEMSNMVVRS

SEQ ID NO: 52546 - protein, 36 aa, Artificial Sequence; identical to SEQ ID NO: 14392
  GFR-binding peptide
  MOD_RES (3)..(4): Xaa is C or S
  MOD_RES (18)..(19)..(20)..(21)..(22): Xaa is A or G
  MOD_RES (23)..(24)..(25)..(26): Xaa is A or G or is absent

SEQ ID NO: 52547 - protein, 39 aa, Artificial Sequence
  GFR-binding peptide
  MOD_RES (2)..(3)..(37)..(39): Xaa is C or S
  MOD_RES (17)..(18)..(19)..(20)..(21): Xaa is A or G
  MOD_RES (22)..(23)..(24)..(25): Xaa is A or G or is absent
AXXVPTELRPVQMRKIXXXXXXXXXKKATVDMVVEGXGX

SEQ ID NO: 52548 - protein, 38 aa, Artificial Sequence; identical to SEQ ID NO: 19397
  GFR-binding peptide
  MOD_RES (1)..(38): Xaa is C or S
  MOD_RES (17)..(18)..(19)..(20)..(21): Xaa is A or G
  MOD_RES (22)..(23)..(24)..(25): Xaa is A or G or is absent

SEQ ID NO: 52549 - protein, 43 aa, Artificial Sequence
  GFR-binding peptide
  MOD_RES (3)..(40)..(42): Xaa is C or S
  MOD_RES (19)..(20)..(21)..(22)..(23): Xaa is A or G
  MOD_RES (24)..(25)..(26)..(27): Xaa is A or G or is absent
VKXQPSRVHHEPLTVLYYXXXXXXXXXEQLSNRLEEHLEXAXA

SEQ ID NO: 52550 - protein, 35 aa, Artificial Sequence; identical to SEQ ID NO: 14396
  GFR-binding peptide
  MOD_RES (2)..(2): Xaa is C or S
  MOD_RES (16)..(17)..(18)..(19)..(20): Xaa is A or G
  MOD_RES (21)..(22)..(23)..(24): Xaa is A or G or is absent

SEQ ID NO: 52551 - protein, 40 aa, Artificial Sequence; identical to SEQ ID NO: 14397
  GFR-binding peptide
  MOD_RES (4)..(5)..(39): Xaa is C or S
  MOD_RES (19)..(20)..(21)..(22)..(23): Xaa is A or G
  MOD_RES (24)..(25)..(26)..(27): Xaa is A or G or is absent

SEQ ID NO: 52552 - protein, 36 aa, Artificial Sequence
  GFR-binding peptide
  MOD_RES (3)..(4)..(36): Xaa is C or S
KPXXAPTKLRSVKVAKVDDSSNVIKEVQVNMVVRSX

SEQ ID NO: 52553 - protein, 42 aa, Artificial Sequence; identical to SEQ ID NO: 14402
  GFR-binding peptide
  MOD_RES (6)..(7)..(40)..(42): Xaa is C or S
  MOD_RES (21)..(22)..(23)..(24)..(25): Xaa is A or G
  MOD_RES (26)..(27)..(28)..(29): Xaa is A or G or is absent

SEQ ID NO: 52554 - protein, 43 aa, Artificial Sequence
  GFR-binding peptide
  MOD_RES (6)..(7)..(41)..(43): Xaa is C or S
  MOD_RES (21)..(22)..(23)..(24)..(25): Xaa is A or G
  MOD_RES (26)..(27)..(28)..(29): Xaa is A or G or is absent
YVPKPXXAPTKLRPVQVRKIXXXXXXXXXKKATVNMVVRSXGX

SEQ ID NO: 52555 - protein, 37 aa, Artificial Sequence; identical to SEQ ID NO: 19401
  GFR-binding peptide
  MOD_RES (37)..(37): Xaa is C or S

SEQ ID NO: 52556 - protein, 40 aa, Artificial Sequence; identical to SEQ ID NO: 14405
  GFR-binding peptide
  MOD_RES (6)..(7)..(38)..(40): Xaa is C or S

SEQ ID NO: 52557 - protein, 33 aa, Artificial Sequence
  GFR-binding peptide
  MOD_RES (15)..(16)..(17)..(18)..(19): Xaa is A or G
  MOD_RES (20)..(21)..(22)..(23): Xaa is A or G or is absent
PTQVQLEPLPVVYYXXXXXXXXXEQLSNTLEDH

SEQ ID NO: 52558 - protein, 37 aa, Artificial Sequence
  GFR-binding peptide
  MOD_RES (3)..(37): Xaa is C or S
  MOD_RES (17)..(18)..(19)..(20)..(21): Xaa is A or G
  MOD_RES (22)..(23)..(24)..(25): Xaa is A or G or is absent
LEXVPTEEEPLTMLYYXXXXXXXXXEQLSNFLQHNKX

SEQ ID NO: 52559 - protein, 34 aa, Artificial Sequence; identical to SEQ ID NO: 14406
  GFR-binding peptide
  MOD_RES (1)..(34): Xaa is C or S
  MOD_RES (15)..(16)..(17)..(18)..(19): Xaa is A or G
  MOD_RES (20)..(21)..(22)..(23): Xaa is A or G or is absent

SEQ ID NO: 52560 - protein, 36 aa, Artificial Sequence; identical to SEQ ID NO: 14407
  GFR-binding peptide
  MOD_RES (3)..(4): Xaa is C or S
  MOD_RES (18)..(19)..(20)..(21)..(22): Xaa is A or G
  MOD_RES (23)..(24)..(25)..(26): Xaa is A or G or is absent

SEQ ID NO: 52561 - protein, 34 aa, Artificial Sequence
  GFR-binding peptide
  MOD_RES (33)..(33): Xaa is C or S
  MOD_RES (14)..(15)..(16)..(17)..(18): Xaa is A or G
  MOD_RES (19)..(20)..(21)..(22): Xaa is A or G or is absent
VSQDLSNITIQIMXXXXXXXXXIGEMSMIVKSXK

SEQ ID NO: 52562 - protein, 38 aa, Artificial Sequence; identical to SEQ ID NO: 14410
  GFR-binding peptide
  MOD_RES (5)..(6): Xaa is C or S
  MOD_RES (20)..(21)..(22)..(23)..(24): Xaa is A or G
  MOD_RES (25)..(26)..(27)..(28): Xaa is A or G or is absent

SEQ ID NO: 52563 - protein, 35 aa, Artificial Sequence
  GFR-binding peptide
  MOD_RES (2)..(3): Xaa is C or S
  MOD_RES (17)..(18)..(19)..(20)..(21): Xaa is A or G
  MOD_RES (22)..(23)..(24)..(25): Xaa is A or G or is absent
PXXVSQDLSNITIQIMXXXXXXXXXIGEMSMIVKS

SEQ ID NO: 52564 - protein, 35 aa, Artificial Sequence; identical to SEQ ID NO: 14411
  GFR-binding peptide
  MOD_RES (3)..(4): Xaa is C or S

SEQ ID NO: 52565 - protein, 34 aa, Artificial Sequence
  GFR-binding peptide
  MOD_RES (1)..(1): Xaa is C or S
XVPTEEEPLPMVYYRIKPHQGQHEQLSNFLQHNK

SEQ ID NO: 52566 - protein, 32 aa, Artificial Sequence
  GFR-binding peptide
TQVQLEPLTVLYYEIVRKKPIFEQLSNTLEDH

SEQ ID NO: 52567 - protein, 38 aa, Artificial Sequence
  GFR-binding peptide
  MOD_RES (1)..(2)..(35)..(37): Xaa is C or S
  MOD_RES (16)..(17)..(18)..(19)..(20): Xaa is A or G
  MOD_RES (21)..(22)..(23)..(24): Xaa is A or G or is absent
XXVSQDLRPVQIRKIXXXXXXXXXKKATVMIVKSXKXS

SEQ ID NO: 52568 - protein, 36 aa, Artificial Sequence; identical to SEQ ID NO: 14413
  GFR-binding peptide
  MOD_RES (3)..(4): Xaa is C or S
  MOD_RES (18)..(19)..(20)..(21)..(22): Xaa is A or G
  MOD_RES (23)..(24)..(25)..(26): Xaa is A or G or is absent

SEQ ID NO: 52569 - protein, 30 aa, Artificial Sequence
  GFR-binding peptide
VPTELRSVKMAKVDENEKVVKEVQVDMVVE

SEQ ID NO: 52570 - protein, 39 aa, Artificial Sequence; identical to SEQ ID NO: 19403
  GFR-binding peptide
  MOD_RES (2)..(36)..(38): Xaa is C or S

SEQ ID NO: 52571 - protein, 41 aa, Artificial Sequence; identical to SEQ ID NO: 14414
  GFR-binding peptide
  MOD_RES (6)..(7)..(40): Xaa is C or S
  MOD_RES (21)..(22)..(23)..(24)..(25): Xaa is A or G
  MOD_RES (26)..(27)..(28)..(29): Xaa is A or G or is absent

SEQ ID NO: 52572 - protein, 38 aa, Artificial Sequence
  GFR-binding peptide
  MOD_RES (3)..(4)..(38): Xaa is C or S
  MOD_RES (18)..(19)..(20)..(21)..(22): Xaa is A or G
  MOD_RES (23)..(24)..(25)..(26): Xaa is A or G or is absent
KAXXVPTELRPVQMRKIXXXXXXXXXKKATVDMVVEGX

SEQ ID NO: 52573 - protein, 33 aa, Artificial Sequence
  GFR-binding peptide
  MOD_RES (15)..(16)..(17)..(18)..(19): Xaa is A or G
  MOD_RES (20)..(21)..(22)..(23): Xaa is A or G or is absent
PTQVQLEPLTVLYYXXXXXXXXXEQLSNTLEDH

SEQ ID NO: 52574 - protein, 36 aa, Artificial Sequence
  GFR-binding peptide
  MOD_RES (1)..(35): Xaa is C or S
  MOD_RES (15)..(16)..(17)..(18)..(19): Xaa is A or G
  MOD_RES (20)..(21)..(22)..(23): Xaa is A or G or is absent
XAPTKLRPVQVRKIXXXXXXXXXKKATVNMVVRSXG

SEQ ID NO: 52575 - protein, 35 aa, Artificial Sequence
  GFR-binding peptide
  MOD_RES (2)..(3)..(34): Xaa is C or S
PXXVPQALRSVKIAKVVGRKPKVKEVQVMIVRSXK

SEQ ID NO: 52576 - protein, 38 aa, Artificial Sequence
  GFR-binding peptide
  MOD_RES (4)..(5)..(36)..(38): Xaa is C or S
AAPXXVPQALRSVKIAKVVGRKPKVKEVQVMIVRSXKX

SEQ ID NO: 52577 - protein, 41 aa, Artificial Sequence
  GFR-binding peptide
  MOD_RES (6)..(7)..(39)..(41): Xaa is C or S
YVPKPXXAPTKLRSVKVAKVDDSSNVIKEVQVNMVVRSXGX

SEQ ID NO: 52578 - protein, 35 aa, Artificial Sequence; identical to SEQ ID NO: 14426
  GFR-binding peptide
  MOD_RES (32)..(34): Xaa is C or S

SEQ ID NO: 52579 - protein, 37 aa, Artificial Sequence
  GFR-binding peptide
  MOD_RES (3)..(4): Xaa is C or S
  MOD_RES (18)..(19)..(20)..(21)..(22): Xaa is A or G
  MOD_RES (23)..(24)..(25)..(26): Xaa is A or G or is absent
KAXXVPTELRSVKMAKVXXXXXXXXXKEVQVDMVVEG

SEQ ID NO: 52580 - protein, 37 aa, Artificial Sequence
  GFR-binding peptide
  MOD_RES (36)..(36): Xaa is C or S
PTQVQLEPLTVLYYEIVRKKPIFEQLSNTLEDHLAXK

SEQ ID NO: 52581 - protein, 35 aa, Artificial Sequence
  GFR-binding peptide
  MOD_RES (1)..(35): Xaa is C or S
  MOD_RES (15)..(16)..(17)..(18)..(19): Xaa is A or G
  MOD_RES (20)..(21)..(22)..(23): Xaa is A or G or is absent
XVPTEEEPLPMVYYXXXXXXXXXEQLSNFLQHNKX

SEQ ID NO: 52582 - protein, 34 aa, Artificial Sequence
  GFR-binding peptide
  MOD_RES (1)..(2)..(34): Xaa is C or S
XXAPTKLRPVQVRKIDDSSNVIKKATVNMVVRSX

SEQ ID NO: 52583 - protein, 40 aa, Artificial Sequence
  GFR-binding peptide
  MOD_RES (6)..(7): Xaa is C or S
  MOD_RES (21)..(22)..(23)..(24)..(25): Xaa is A or G
  MOD_RES (26)..(27)..(28)..(29): Xaa is A or G or is absent
SIPKAXXVPTELRSVKMAKVXXXXXXXXXKEVQVEMVVEG

SEQ ID NO: 52584 - protein, 42 aa, Artificial Sequence
  GFR-binding peptide
  MOD_RES (5)..(42): Xaa is C or S
  MOD_RES (21)..(22)..(23)..(24)..(25): Xaa is A or G
  MOD_RES (26)..(27)..(28)..(29): Xaa is A or G or is absent
RNVQXRPTQVQLEPLPVVYYXXXXXXXXXEQLSNTLEDHLAX

SEQ ID NO: 52585 - protein, 36 aa, Artificial Sequence; identical to SEQ ID NO: 14432
  GFR-binding peptide
  MOD_RES (34)..(36): Xaa is C or S
  MOD_RES (14)..(15)..(16)..(17)..(18): Xaa is A or G
  MOD_RES (19)..(20)..(21)..(22): Xaa is A or G or is absent

SEQ ID NO: 52586 - protein, 35 aa, Artificial Sequence
  GFR-binding peptide
  MOD_RES (34)..(34): Xaa is C or S
  MOD_RES (14)..(15)..(16)..(17)..(18): Xaa is A or G
  MOD_RES (19)..(20)..(21)..(22): Xaa is A or G or is absent
VPTELRSVKMAKVXXXXXXXXXKEVQVEMVVEGXG

SEQ ID NO: 52587 - protein, 37 aa, Artificial Sequence
  GFR-binding peptide
  MOD_RES (1)..(35)..(37): Xaa is C or S
  MOD_RES (15)..(16)..(17)..(18)..(19): Xaa is A or G
  MOD_RES (20)..(21)..(22)..(23): Xaa is A or G or is absent
XAPTKLRSVKVAKVXXXXXXXXXKEVQVNMVVRSXGX

SEQ ID NO: 52588 - protein, 40 aa, Artificial Sequence
  GFR-binding peptide
  MOD_RES (3)..(40): Xaa is C or S
  MOD_RES (19)..(20)..(21)..(22)..(23): Xaa is A or G
  MOD_RES (24)..(25)..(26)..(27): Xaa is A or G or is absent
VKXQPSRVHHEPLPVVYYXXXXXXXXXEQLSNRLEEHLEX

SEQ ID NO: 52589 - protein, 36 aa, Artificial Sequence
  GFR-binding peptide
  MOD_RES (5)..(5): Xaa is C or S
TKPTXAPTKLRSVKVAKVDDSSNVIKEVQVNMVVRS

SEQ ID NO: 52590 - protein, 40 aa, Artificial Sequence
  GFR-binding peptide
  MOD_RES (5)..(6)..(38)..(40): Xaa is C or S
IPKAXXVPTELRSVKMAKVDENEKVVKEVQVDMVVEGXGX

SEQ ID NO: 52591 - protein, 39 aa, Artificial Sequence; identical to SEQ ID NO: 19419
  GFR-binding peptide
  MOD_RES (4)..(4): Xaa is C or S
  MOD_RES (20)..(21)..(22)..(23)..(24): Xaa is A or G
  MOD_RES (25)..(26)..(27)..(28): Xaa is A or G or is absent

SEQ ID NO: 52592 - protein, 36 aa, Artificial Sequence
  GFR-binding peptide
  MOD_RES (3)..(4): Xaa is C or S
  MOD_RES (18)..(19)..(20)..(21)..(22): Xaa is A or G
  MOD_RES (23)..(24)..(25)..(26): Xaa is A or G or is absent
SPXXVSQDLSNITIQIMXXXXXXXXXIGEMSMIVKS

SEQ ID NO: 52593 - protein, 41 aa, Artificial Sequence; identical to SEQ ID NO: 19420
  GFR-binding peptide
  MOD_RES (5)..(39)..(41): Xaa is C or S

SEQ ID NO: 52594 - protein, 41 aa, Artificial Sequence; identical to SEQ ID NO: 14439
  GFR-binding peptide
  MOD_RES (5)..(6)..(40): Xaa is C or S
  MOD_RES (20)..(21)..(22)..(23)..(24): Xaa is A or G
  MOD_RES (25)..(26)..(27)..(28): Xaa is A or G or is absent

SEQ ID NO: 52595 - protein, 38 aa, Artificial Sequence
  GFR-binding peptide
  MOD_RES (3)..(4)..(36)..(38): Xaa is C or S
KPXXAPTKLRSVKVAKVDDSSNVIKEVQVNMVVRSXGX

SEQ ID NO: 52596 - protein, 38 aa, Artificial Sequence
  GFR-binding peptide
  MOD_RES (37)..(37): Xaa is C or S
QPSRVHHEPLPVVYYEYVRKKPKLEQLSNRLEEHLEXA

SEQ ID NO: 52597 - protein, 38 aa, Artificial Sequence
  GFR-binding peptide
  MOD_RES (4)..(5)..(37): Xaa is C or S
PKAXXVPTELRSVKMAKVDEYDKVVKEVQVEMVVEGXG

SEQ ID NO: 52598 - protein, 40 aa, Artificial Sequence
  GFR-binding peptide
  MOD_RES (5)..(6)..(40): Xaa is C or S
  MOD_RES (20)..(21)..(22)..(23)..(24): Xaa is A or G
  MOD_RES (25)..(26)..(27)..(28): Xaa is A or G or is absent
IPKAXXVPTELRPVQMRKIXXXXXXXXXKKATVEMVVEGX

SEQ ID NO: 52599 - protein, 39 aa, Artificial Sequence
  GFR-binding peptide
  MOD_RES (5)..(6)..(38): Xaa is C or S
IPKAXXVPTELRSVKMAKVDENEKVVKEVQVDMVVEGXG

SEQ ID NO: 52600 - protein, 40 aa, Artificial Sequence
  GFR-binding peptide
  MOD_RES (5)..(6)..(37)..(39): Xaa is C or S
SASPXXVPQDLRSVKIAKVVGRTPKVKEVQVMVVKSXKXS

SEQ ID NO: 52601 - protein, 36 aa, Artificial Sequence; identical to SEQ ID NO: 14445
  GFR-binding peptide
  MOD_RES (1)..(33)..(35): Xaa is C or S

SEQ ID NO: 52602 - protein, 38 aa, Artificial Sequence; identical to SEQ ID NO: 14449
  GFR-binding peptide
  MOD_RES (1)..(2)..(35)..(37): Xaa is C or S
  MOD_RES (16)..(17)..(18)..(19)..(20): Xaa is A or G
  MOD_RES (21)..(22)..(23)..(24): Xaa is A or G or is absent

SEQ ID NO: 52603 - protein, 44 aa, Artificial Sequence
  GFR-binding peptide
  MOD_RES (7)..(41)..(43): Xaa is C or S
  MOD_RES (21)..(22)..(23)..(24)..(25): Xaa is A or G
  MOD_RES (26)..(27)..(28)..(29): Xaa is A or G or is absent
NDEGLEXVPTEEEPLPMVYYXXXXXXXXXEQLSNFLQHNKXEXR

SEQ ID NO: 52604 - protein, 33 aa, Artificial Sequence; identical to SEQ ID NO: 19425
  GFR-binding peptide
  MOD_RES (14)..(15)..(16)..(17)..(18): Xaa is A or G
  MOD_RES (19)..(20)..(21)..(22): Xaa is A or G or is absent

SEQ ID NO: 52605 - protein, 36 aa, Artificial Sequence
  GFR-binding peptide
  MOD_RES (1)..(2)..(34)..(36): Xaa is C or S
XXVPTELSNITMQIMDENEKVVIGEMSDMVVEGXGX

SEQ ID NO: 52606 - protein, 38 aa, Artificial Sequence
  GFR-binding peptide
  MOD_RES (3)..(4)..(37): Xaa is C or S
  MOD_RES (18)..(19)..(20)..(21)..(22): Xaa is A or G
  MOD_RES (23)..(24)..(25)..(26): Xaa is A or G or is absent
SPXXVPQDLSNITIQIMXXXXXXXXXIGEMSMVVKSXK

SEQ ID NO: 52607 - protein, 33 aa, Artificial Sequence; identical to SEQ ID NO: 14450
  GFR-binding peptide
  MOD_RES (33)..(33): Xaa is C or S
  MOD_RES (14)..(15)..(16)..(17)..(18): Xaa is A or G
  MOD_RES (19)..(20)..(21)..(22): Xaa is A or G or is absent

SEQ ID NO: 52608 - protein, 40 aa, Artificial Sequence
  GFR-binding peptide
  MOD_RES (7)..(39): Xaa is C or S
HVTKPTXAPTKLRPVQVRKIDDSSNVIKKATVNMVVRSXG

SEQ ID NO: 52609 - protein, 32 aa, Artificial Sequence
  GFR-binding peptide
  MOD_RES (1)..(2): Xaa is C or S
XXAPTQLSNITVQIMDDSSNVIIGEMSNMVVR

SEQ ID NO: 52610 - protein, 37 aa, Artificial Sequence; identical to SEQ ID NO: 14453
  GFR-binding peptide
  MOD_RES (3)..(4)..(37): Xaa is C or S
  MOD_RES (18)..(19)..(20)..(21)..(22): Xaa is A or G
  MOD_RES (23)..(24)..(25)..(26): Xaa is A or G or is absent

SEQ ID NO: 52611 - protein, 33 aa, Artificial Sequence; identical to SEQ ID NO: 14456
  GFR-binding peptide
  MOD_RES (1)..(2): Xaa is C or S

SEQ ID NO: 52612 - protein, 39 aa, Artificial Sequence
  GFR-binding peptide
  MOD_RES (1)..(38): Xaa is C or S
XRPTQVQLEPLTVLYYEIVRKKPIFEQLSNTLEDHLAXK

SEQ ID NO: 52613 - protein, 37 aa, Artificial Sequence; identical to SEQ ID NO: 14457
  GFR-binding peptide
  MOD_RES (2)..(3)..(35)..(37): Xaa is C or S

SEQ ID NO: 52614 - protein, 40 aa, Artificial Sequence; identical to SEQ ID NO: 19433
  GFR-binding peptide
  MOD_RES (5)..(5): Xaa is C or S

SEQ ID NO: 52615 - protein, 37 aa, Artificial Sequence; identical to SEQ ID NO: 14459
  GFR-binding peptide
  MOD_RES (5)..(6): Xaa is C or S

SEQ ID NO: 52616 - protein, 39 aa, Artificial Sequence
  GFR-binding peptide
  MOD_RES (3)..(4)..(36)..(38): Xaa is C or S
KPXXAPTQLSNITVQIMDDSSNVIIGEMSNMVVRAXGXH

SEQ ID NO: 52617 - protein, 37 aa, Artificial Sequence; identical to SEQ ID NO: 14460
  GFR-binding peptide
  MOD_RES (34)..(36): Xaa is C or S
  MOD_RES (14)..(15)..(16)..(17)..(18): Xaa is A or G
  MOD_RES (19)..(20)..(21)..(22): Xaa is A or G or is absent

SEQ ID NO: 52618 - protein, 37 aa, Artificial Sequence
  GFR-binding peptide
  MOD_RES (4)..(5)..(37): Xaa is C or S
PKAXXVPTELRPVQMRKIDEYDKVVKKATVEMVVEGX

SEQ ID NO: 52619 - protein, 36 aa, Artificial Sequence
  GFR-binding peptide
  MOD_RES (4)..(4): Xaa is C or S
  MOD_RES (18)..(19)..(20)..(21)..(22): Xaa is A or G
  MOD_RES (23)..(24)..(25)..(26): Xaa is A or G or is absent
KPTXAPTKLSNITVQIMXXXXXXXXXIGEMSNMVVR

SEQ ID NO: 52620 - protein, 35 aa, Artificial Sequence; identical to SEQ ID NO: 14462
  GFR-binding peptide
  MOD_RES (1)..(2)..(34): Xaa is C or S

SEQ ID NO: 52621 - protein, 37 aa, Artificial Sequence; identical to SEQ ID NO: 14463
  GFR-binding peptide
  MOD_RES (4)..(5)..(37): Xaa is C or S

SEQ ID NO: 52622 - protein, 37 aa, Artificial Sequence
  GFR-binding peptide
  MOD_RES (2)..(36): Xaa is C or S
  MOD_RES (16)..(17)..(18)..(19)..(20): Xaa is A or G
  MOD_RES (21)..(22)..(23)..(24): Xaa is A or G or is absent
TXAPTKLRPVQVRKIXXXXXXXXXKKATVNMVVRSXG

SEQ ID NO: 52623 - protein, 35 aa, Artificial Sequence; identical to SEQ ID NO: 19435
  GFR-binding peptide

SEQ ID NO: 52624 - protein, 38 aa, Artificial Sequence
  GFR-binding peptide
  MOD_RES (5)..(37): Xaa is C or S
TKPTXAPTKLSNITVQIMDDSSNVIIGEMSNMVVRSXG

SEQ ID NO: 52625 - protein, 38 aa, Artificial Sequence
  GFR-binding peptide
  MOD_RES (3)..(4)..(35)..(37): Xaa is C or S
APXXVPQALSNITIQIMVGRKPKVIGEMSMIVRSXKXS

SEQ ID NO: 52626 - protein, 38 aa, Artificial Sequence; identical to SEQ ID NO: 19437
  GFR-binding peptide
  MOD_RES (1)..(35)..(37): Xaa is C or S
  MOD_RES (15)..(16)..(17)..(18)..(19): Xaa is A or G
  MOD_RES (20)..(21)..(22)..(23): Xaa is A or G or is absent

SEQ ID NO: 52627 - protein, 37 aa, Artificial Sequence
  GFR-binding peptide
  MOD_RES (1)..(2)..(36): Xaa is C or S
  MOD_RES (16)..(17)..(18)..(19)..(20): Xaa is A or G
  MOD_RES (21)..(22)..(23)..(24): Xaa is A or G or is absent
XXAPTKLSNITVQIMXXXXXXXXXIGEMSNMVVRSXG

SEQ ID NO: 52628 - protein, 39 aa, Artificial Sequence
  GFR-binding peptide
  MOD_RES (3)..(4)..(37)..(39): Xaa is C or S
  MOD_RES (18)..(19)..(20)..(21)..(22): Xaa is A or G
  MOD_RES (23)..(24)..(25)..(26): Xaa is A or G or is absent
APXXVPQALRPVQIRKIXXXXXXXXXKKATVMIVRSXKX

SEQ ID NO: 52629 - protein, 37 aa, Artificial Sequence; identical to SEQ ID NO: 14467
  GFR-binding peptide
  MOD_RES (4)..(5): Xaa is C or S
  MOD_RES (19)..(20)..(21)..(22)..(23): Xaa is A or G
  MOD_RES (24)..(25)..(26)..(27): Xaa is A or G or is absent

SEQ ID NO: 52630 - protein, 33 aa, Artificial Sequence; identical to SEQ ID NO: 19443
  GFR-binding peptide

SEQ ID NO: 52631 - protein, 34 aa, Artificial Sequence; identical to SEQ ID NO: 19445
  GFR-binding peptide
  MOD_RES (2)..(2): Xaa is C or S
  MOD_RES (16)..(17)..(18)..(19)..(20): Xaa is A or G
  MOD_RES (21)..(22)..(23)..(24): Xaa is A or G or is absent

SEQ ID NO: 52632 - protein, 38 aa, Artificial Sequence; identical to SEQ ID NO: 14469
  GFR-binding peptide
  MOD_RES (4)..(5)..(37): Xaa is C or S

SEQ ID NO: 52633 - protein, 38 aa, Artificial Sequence
  GFR-binding peptide
  MOD_RES (4)..(5)..(37): Xaa is C or S
PKAXXVPTELRPVQMRKIDENEKVVKKATVDMVVEGXG

SEQ ID NO: 52634 - protein, 39 aa, Artificial Sequence
  GFR-binding peptide
  MOD_RES (36)..(38): Xaa is C or S
  MOD_RES (15)..(16)..(17)..(18)..(19): Xaa is A or G
  MOD_RES (20)..(21)..(22)..(23): Xaa is A or G or is absent
PTQVQLEPLTVLYYXXXXXXXXXEQLSNTLEDHLAXKXE

SEQ ID NO: 52635 - protein, 43 aa, Artificial Sequence
  GFR-binding peptide
  MOD_RES (5)..(6)..(40)..(42): Xaa is C or S
  MOD_RES (20)..(21)..(22)..(23)..(24): Xaa is A or G
  MOD_RES (25)..(26)..(27)..(28): Xaa is A or G or is absent
IPKAXXVPTELSNITMQIMXXXXXXXXXIGEMSEMVVEGXGXR

SEQ ID NO: 52636 - protein, 36 aa, Artificial Sequence; identical to SEQ ID NO: 14472
  GFR-binding peptide
  MOD_RES (1)..(2)..(35): Xaa is C or S
  MOD_RES (16)..(17)..(18)..(19)..(20): Xaa is A or G
  MOD_RES (21)..(22)..(23)..(24): Xaa is A or G or is absent

SEQ ID NO: 52637 - protein, 37 aa, Artificial Sequence; identical to SEQ ID NO: 19452
  GFR-binding peptide
  MOD_RES (1)..(1): Xaa is C or S

SEQ ID NO: 52638 - protein, 33 aa, Artificial Sequence; identical to SEQ ID NO: 19453
  GFR-binding peptide
  MOD_RES (14)..(15)..(16)..(17)..(18): Xaa is A or G
  MOD_RES (19)..(20)..(21)..(22): Xaa is A or G or is absent

SEQ ID NO: 52639 - protein, 39 aa, Artificial Sequence; identical to SEQ ID NO: 19456
  GFR-binding peptide
  MOD_RES (7)..(7): Xaa is C or S
  MOD_RES (21)..(22)..(23)..(24)..(25): Xaa is A or G
  MOD_RES (26)..(27)..(28)..(29): Xaa is A or G or is absent

SEQ ID NO: 52640 - protein, 38 aa, Artificial Sequence; identical to SEQ ID NO: 19457
  GFR-binding peptide
  MOD_RES (1)..(38): Xaa is C or S

SEQ ID NO: 52641 - protein, 35 aa, Artificial Sequence
  GFR-binding peptide
  MOD_RES (4)..(5): Xaa is C or S
ASPXXVSQDLSNITIQIMIGKTPKIIGEMSMIVKS

SEQ ID NO: 52642 - protein, 43 aa, Artificial Sequence
  GFR-binding peptide
  MOD_RES (3)..(40)..(42): Xaa is C or S
VKXQPSRVHHEPLTVLYYEYVRKKPKLEQLSNRLEEHLEXAXA

SEQ ID NO: 52643 - protein, 34 aa, Artificial Sequence
  GFR-binding peptide
  MOD_RES (3)..(4): Xaa is C or S
KPXXAPTQLRSVKVAKVDDSSNVIKEVQVNMVVR

SEQ ID NO: 52644 - protein, 43 aa, Artificial Sequence; identical to SEQ ID NO: 14478
  GFR-binding peptide
  MOD_RES (5)..(6)..(40)..(42): Xaa is C or S
  MOD_RES (20)..(21)..(22)..(23)..(24): Xaa is A or G
  MOD_RES (25)..(26)..(27)..(28): Xaa is A or G or is absent

SEQ ID NO: 52645 - protein, 35 aa, Artificial Sequence
  GFR-binding peptide
  MOD_RES (1)..(2)..(33)..(35): Xaa is C or S
XXVSQDLRSVKIAKVIGKTPKIKEVQVMIVKSXKX

SEQ ID NO: 52646 - protein, 40 aa, Artificial Sequence
  GFR-binding peptide
  MOD_RES (2)..(39): Xaa is C or S
  MOD_RES (18)..(19)..(20)..(21)..(22): Xaa is A or G
  MOD_RES (23)..(24)..(25)..(26): Xaa is A or G or is absent
KXQPSRVHHEPLTVLYYXXXXXXXXXEQLSNRLEEHLEXA

SEQ ID NO: 52647 - protein, 33 aa, Artificial Sequence; identical to SEQ ID NO: 14482
  GFR-binding peptide
  MOD_RES (33)..(33): Xaa is C or S
  MOD_RES (14)..(15)..(16)..(17)..(18): Xaa is A or G
  MOD_RES (19)..(20)..(21)..(22): Xaa is A or G or is absent

SEQ ID NO: 52648 - protein, 32 aa, Artificial Sequence; identical to SEQ ID NO: 19459
  GFR-binding peptide
  MOD_RES (14)..(15)..(16)..(17)..(18): Xaa is A or G
  MOD_RES (19)..(20)..(21)..(22): Xaa is A or G or is absent

SEQ ID NO: 52649 - protein, 42 aa, Artificial Sequence
  GFR-binding peptide
  MOD_RES (5)..(6)..(39)..(41): Xaa is C or S
  MOD_RES (20)..(21)..(22)..(23)..(24): Xaa is A or G
  MOD_RES (25)..(26)..(27)..(28): Xaa is A or G or is absent
SAAPXXVPQALRSVKIAKVXXXXXXXXXKEVQVMIVRSXKXS

SEQ ID NO: 52650 - protein, 37 aa, Artificial Sequence
  GFR-binding peptide
  MOD_RES (4)..(5)..(37): Xaa is C or S
PKAXXVPTELRSVKMAKVDEYDKVVKEVQVEMVVEGX

SEQ ID NO: 52651 - protein, 34 aa, Artificial Sequence
  GFR-binding peptide
  MOD_RES (2)..(3): Xaa is C or S
PXXAPTKLRPVQVRKIDDSSNVIKKATVNMVVRS

SEQ ID NO: 52652 - protein, 38 aa, Artificial Sequence; identical to SEQ ID NO: 19464
  GFR-binding peptide
  MOD_RES (2)..(2): Xaa is C or S
  MOD_RES (18)..(19)..(20)..(21)..(22): Xaa is A or G
  MOD_RES (23)..(24)..(25)..(26): Xaa is A or G or is absent

SEQ ID NO: 52653 - protein, 43 aa, Artificial Sequence
  GFR-binding peptide
  MOD_RES (6)..(7)..(41)..(43): Xaa is C or S
  MOD_RES (21)..(22)..(23)..(24)..(25): Xaa is A or G
  MOD_RES (26)..(27)..(28)..(29): Xaa is A or G or is absent
KIPKAXXVPTELSNITMQIMXXXXXXXXXIGEMSDMVVEGXGX

SEQ ID NO: 52654 - protein, 41 aa, Artificial Sequence
  GFR-binding peptide
  MOD_RES (5)..(39)..(41): Xaa is C or S
  MOD_RES (19)..(20)..(21)..(22)..(23): Xaa is A or G
  MOD_RES (24)..(25)..(26)..(27): Xaa is A or G or is absent
TKPTXAPTKLSNITVQIMXXXXXXXXXIGEMSNMVVRSXGX

SEQ ID NO: 52655 - protein, 36 aa, Artificial Sequence
  GFR-binding peptide
  MOD_RES (5)..(6): Xaa is C or S
VPKPXXAPTQLRSVKVAKVDDSSNVIKEVQVNMVVR

SEQ ID NO: 52656 - protein, 42 aa, Artificial Sequence
  GFR-binding peptide
  MOD_RES (5)..(42): Xaa is C or S
RNVQXRPTQVQLEPLPVVYYEIVRKKPIFEQLSNTLEDHLAX

SEQ ID NO: 52657 - protein, 39 aa, Artificial Sequence; identical to SEQ ID NO: 19467
  GFR-binding peptide
  MOD_RES (5)..(5): Xaa is C or S
  MOD_RES (21)..(22)..(23)..(24)..(25): Xaa is A or G
  MOD_RES (26)..(27)..(28)..(29): Xaa is A or G or is absent

SEQ ID NO: 52658 - protein, 33 aa, Artificial Sequence
  GFR-binding peptide
  MOD_RES (1)..(1): Xaa is C or S
XVPTEEEPLPMVYYRIKPHQGQHEQLSNFLQHN

SEQ ID NO: 52659 - protein, 37 aa, Artificial Sequence
  GFR-binding peptide
  MOD_RES (1)..(2)..(36): Xaa is C or S
  MOD_RES (16)..(17)..(18)..(19)..(20): Xaa is A or G
  MOD_RES (21)..(22)..(23)..(24): Xaa is A or G or is absent
XXVPTELRSVKMAKVXXXXXXXXXKEVQVEMVVEGXG

SEQ ID NO: 52660 - protein, 33 aa, Artificial Sequence
  GFR-binding peptide
TQVQLEPLTVLYYEIVRKKPIFEQLSNTLEDHL

SEQ ID NO: 52661 - protein, 35 aa, Artificial Sequence
  GFR-binding peptide
  MOD_RES (2)..(3): Xaa is C or S
  MOD_RES (17)..(18)..(19)..(20)..(21): Xaa is A or G
  MOD_RES (22)..(23)..(24)..(25): Xaa is A or G or is absent
PXXVPQALRSVKIAKVXXXXXXXXXKEVQVMIVRS

SEQ ID NO: 52662 - protein, 32 aa, Artificial Sequence; identical to SEQ ID NO: 14490
  GFR-binding peptide
  MOD_RES (31)..(31): Xaa is C or S

SEQ ID NO: 52663 - protein, 40 aa, Artificial Sequence
  GFR-binding peptide
  MOD_RES (4)..(4): Xaa is C or S
  MOD_RES (20)..(21)..(22)..(23)..(24): Xaa is A or G
  MOD_RES (25)..(26)..(27)..(28): Xaa is A or G or is absent
SVKXQPSRVHHEPLTVLYYXXXXXXXXXEQLSNRLEEHLE

SEQ ID NO: 52664 - protein, 39 aa, Artificial Sequence
  GFR-binding peptide
  MOD_RES (2)..(36)..(38): Xaa is C or S
  MOD_RES (16)..(17)..(18)..(19)..(20): Xaa is A or G
  MOD_RES (21)..(22)..(23)..(24): Xaa is A or G or is absent
TXAPTKLRSVKVAKVXXXXXXXXXKEVQVNMVVRSXGXH

SEQ ID NO: 52665 - protein, 40 aa, Artificial Sequence; identical to SEQ ID NO: 19473
  GFR-binding peptide
  MOD_RES (5)..(39): Xaa is C or S

SEQ ID NO: 52666 - protein, 39 aa, Artificial Sequence; identical to SEQ ID NO: 19474
  GFR-binding peptide
  MOD_RES (3)..(37)..(39): Xaa is C or S

SEQ ID NO: 52667 - protein, 39 aa, Artificial Sequence
  GFR-binding peptide
  MOD_RES (4)..(5)..(37)..(39): Xaa is C or S
PKPXXAPTQLRSVKVAKVDDSSNVIKEVQVNMVVRAXGX

SEQ ID NO: 52668 - protein, 37 aa, Artificial Sequence; identical to SEQ ID NO: 19475
  GFR-binding peptide
  MOD_RES (36)..(36): Xaa is C or S
  MOD_RES (15)..(16)..(17)..(18)..(19): Xaa is A or G
  MOD_RES (20)..(21)..(22)..(23): Xaa is A or G or is absent

SEQ ID NO: 52669 - protein, 39 aa, Artificial Sequence
  GFR-binding peptide
  MOD_RES (36)..(38): Xaa is C or S
PTQVQLEPLPVVYYEIVRKKPIFEQLSNTLEDHLAXKXE

SEQ ID NO: 52670 - protein, 38 aa, Artificial Sequence; identical to SEQ ID NO: 14492
  GFR-binding peptide
  MOD_RES (6)..(7): Xaa is C or S

SEQ ID NO: 52671 - protein, 34 aa, Artificial Sequence
  GFR-binding peptide
  MOD_RES (1)..(2)..(33): Xaa is C or S
XXVPQDLRPVQIRKIVGRTPKVKKATVMVVKSXK

SEQ ID NO: 52672 - protein, 41 aa, Artificial Sequence; identical to SEQ ID NO: 19478
  GFR-binding peptide
  MOD_RES (1)..(38)..(40): Xaa is C or S
  MOD_RES (17)..(18)..(19)..(20)..(21): Xaa is A or G
  MOD_RES (22)..(23)..(24)..(25): Xaa is A or G or is absent

SEQ ID NO: 52673 - protein, 35 aa, Artificial Sequence
  GFR-binding peptide
  MOD_RES (3)..(4)..(35): Xaa is C or S
SPXXVPQDLSNITIQIMVGRTPKVIGEMSMVVKSX

SEQ ID NO: 52674 - protein, 41 aa, Artificial Sequence
  GFR-binding peptide
  MOD_RES (4)..(5)..(39)..(41): Xaa is C or S
  MOD_RES (19)..(20)..(21)..(22)..(23): Xaa is A or G
  MOD_RES (24)..(25)..(26)..(27): Xaa is A or G or is absent
PKAXXVPTELRPVQMRKIXXXXXXXXXKKATVDMVVEGXGX

SEQ ID NO: 52675 - protein, 41 aa, Artificial Sequence
  GFR-binding peptide
  MOD_RES (3)..(4)..(38)..(40): Xaa is C or S
  MOD_RES (18)..(19)..(20)..(21)..(22): Xaa is A or G
  MOD_RES (23)..(24)..(25)..(26): Xaa is A or G or is absent
KAXXVPTELRPVQMRKIXXXXXXXXXKKATVDMVVEGXGXR

SEQ ID NO: 52676 - protein, 37 aa, Artificial Sequence
  GFR-binding peptide
  MOD_RES (4)..(5)..(37): Xaa is C or S
PKPXXAPTKLRSVKVAKVDDSSNVIKEVQVNMVVRSX

SEQ ID NO: 52677 - protein, 41 aa, Artificial Sequence; identical to SEQ ID NO: 19481
  GFR-binding peptide
  MOD_RES (4)..(41): Xaa is C or S
  MOD_RES (20)..(21)..(22)..(23)..(24): Xaa is A or G
  MOD_RES (25)..(26)..(27)..(28): Xaa is A or G or is absent

SEQ ID NO: 52678 - protein, 34 aa, Artificial Sequence
  GFR-binding peptide
  MOD_RES (1)..(2)..(34): Xaa is C or S
XXAPTKLRSVKVAKVDDSSNVIKEVQVNMVVRSX

SEQ ID NO: 52679 - protein, 32 aa, Artificial Sequence
  GFR-binding peptide
  MOD_RES (1)..(1): Xaa is C or S
XVPTELSNITMQIMDENEKVVIGEMSDMVVEG

SEQ ID NO: 52680 - protein, 38 aa, Artificial Sequence
  GFR-binding peptide
  MOD_RES (3)..(4)..(38): Xaa is C or S
  MOD_RES (18)..(19)..(20)..(21)..(22): Xaa is A or G
  MOD_RES (23)..(24)..(25)..(26): Xaa is A or G or is absent
KAXXVPTELRPVQMRKIXXXXXXXXXKKATVEMVVEGX

SEQ ID NO: 52681 - protein, 36 aa, Artificial Sequence
  GFR-binding peptide
  MOD_RES (4)..(5): Xaa is C or S
PKPXXAPTKLRSVKVAKVDDSSNVIKEVQVNMVVRS

SEQ ID NO: 52682 - protein, 40 aa, Artificial Sequence; identical to SEQ ID NO: 19484
  GFR-binding peptide
  MOD_RES (4)..(4): Xaa is C or S
  MOD_RES (20)..(21)..(22)..(23)..(24): Xaa is A or G
  MOD_RES (25)..(26)..(27)..(28): Xaa is A or G or is absent

SEQ ID NO: 52683 - protein, 39 aa, Artificial Sequence; identical to SEQ ID NO: 19485
  GFR-binding peptide
  MOD_RES (3)..(37)..(39): Xaa is C or S

SEQ ID NO: 52684 - protein, 39 aa, Artificial Sequence
  GFR-binding peptide
  MOD_RES (4)..(5)..(39): Xaa is C or S
  MOD_RES (19)..(20)..(21)..(22)..(23): Xaa is A or G
  MOD_RES (24)..(25)..(26)..(27): Xaa is A or G or is absent
PKAXXVPTELSNITMQIMXXXXXXXXXIGEMSDMVVEGX

SEQ ID NO: 52685 - protein, 33 aa, Artificial Sequence; identical to SEQ ID NO: 14500
  GFR-binding peptide
  MOD_RES (1)..(1): Xaa is C or S
  MOD_RES (15)..(16)..(17)..(18)..(19): Xaa is A or G
  MOD_RES (20)..(21)..(22)..(23): Xaa is A or G or is absent

SEQ ID NO: 52686 - protein, 31 aa, Artificial Sequence; identical to SEQ ID NO: 14501
  GFR-binding peptide

SEQ ID NO: 52687 - protein, 39 aa, Artificial Sequence; identical to SEQ ID NO: 14503
  GFR-binding peptide
  MOD_RES (5)..(6): Xaa is C or S
  MOD_RES (20)..(21)..(22)..(23)..(24): Xaa is A or G
  MOD_RES (25)..(26)..(27)..(28): Xaa is A or G or is absent

SEQ ID NO: 52688 - protein, 40 aa, Artificial Sequence; identical to SEQ ID NO: 14504
  GFR-binding peptide
  MOD_RES (6)..(7)..(39): Xaa is C or S

SEQ ID NO: 52689 - protein, 34 aa, Artificial Sequence; identical to SEQ ID NO: 19490
  GFR-binding peptide
  MOD_RES (16)..(17)..(18)..(19)..(20): Xaa is A or G
  MOD_RES (21)..(22)..(23)..(24): Xaa is A or G or is absent

SEQ ID NO: 52690 - protein, 44 aa, Artificial Sequence
  GFR-binding peptide
  MOD_RES (4)..(41)..(43): Xaa is C or S
NVQXRPTQVQLEPLTVLYYEIVRKKPIFEQLSNTLEDHLAXKXE

SEQ ID NO: 52691 - protein, 32 aa, Artificial Sequence; identical to SEQ ID NO: 14509
  GFR-binding peptide
  MOD_RES (14)..(15)..(16)..(17)..(18): Xaa is A or G
  MOD_RES (19)..(20)..(21)..(22): Xaa is A or G or is absent

SEQ ID NO: 52692 - protein, 33 aa, Artificial Sequence
  GFR-binding peptide
  MOD_RES (2)..(3): Xaa is C or S
PXXAPTQLRPVQVRKIDDSSNVIKKATVNMVVR

SEQ ID NO: 52693 - protein, 38 aa, Artificial Sequence
  GFR-binding peptide
  MOD_RES (6)..(6): Xaa is C or S
  MOD_RES (20)..(21)..(22)..(23)..(24): Xaa is A or G
  MOD_RES (25)..(26)..(27)..(28): Xaa is A or G or is absent
VTKPTXAPTKLRPVQVRKIXXXXXXXXXKKATVNMVVR

SEQ ID NO: 52694 - protein, 40 aa, Artificial Sequence; identical to SEQ ID NO: 19493
  GFR-binding peptide
  MOD_RES (2)..(39): Xaa is C or S
  MOD_RES (18)..(19)..(20)..(21)..(22): Xaa is A or G
  MOD_RES (23)..(24)..(25)..(26): Xaa is A or G or is absent

SEQ ID NO: 52695 - protein, 34 aa, Artificial Sequence
  GFR-binding peptide
  MOD_RES (1)..(2)..(34): Xaa is C or S
XXVPTELSNITMQIMDENEKVVIGEMSDMVVEGX

SEQ ID NO: 52696 - protein, 38 aa, Artificial Sequence
  GFR-binding peptide
  MOD_RES (4)..(5): Xaa is C or S
  MOD_RES (19)..(20)..(21)..(22)..(23): Xaa is A or G
  MOD_RES (24)..(25)..(26)..(27): Xaa is A or G or is absent
PKPXXAPTQLRSVKVAKVXXXXXXXXXKEVQVNMVVRA

SEQ ID NO: 52697 - protein, 39 aa, Artificial Sequence
  GFR-binding peptide
  MOD_RES (36)..(38): Xaa is C or S
  MOD_RES (15)..(16)..(17)..(18)..(19): Xaa is A or G
  MOD_RES (20)..(21)..(22)..(23): Xaa is A or G or is absent
PSRVHHEPLTVLYYXXXXXXXXXEQLSNRLEEHLEXAXA

SEQ ID NO: 52698 - protein, 35 aa, Artificial Sequence
  GFR-binding peptide
  MOD_RES (1)..(33)..(35): Xaa is C or S
XVPTELRPVQMRKIDEYDKVVKKATVEMVVEGXGX

SEQ ID NO: 52699 - protein, 39 aa, Artificial Sequence; identical to SEQ ID NO: 14510
  GFR-binding peptide
  MOD_RES (5)..(6)..(38): Xaa is C or S

SEQ ID NO: 52700 - protein, 35 aa, Artificial Sequence; identical to SEQ ID NO: 14513
  GFR-binding peptide
  MOD_RES (1)..(2): Xaa is C or S
  MOD_RES (16)..(17)..(18)..(19)..(20): Xaa is A or G
  MOD_RES (21)..(22)..(23)..(24): Xaa is A or G or is absent

SEQ ID NO: 52701 - protein, 39 aa, Artificial Sequence
  GFR-binding peptide
  MOD_RES (2)..(3)..(37)..(39): Xaa is C or S
  MOD_RES (17)..(18)..(19)..(20)..(21): Xaa is A or G
  MOD_RES (22)..(23)..(24)..(25): Xaa is A or G or is absent
PXXAPTKLRSVKVAKVXXXXXXXXXKEVQVNMVVRSXGX

SEQ ID NO: 52702 - protein, 38 aa, Artificial Sequence; identical to SEQ ID NO: 14514
  GFR-binding peptide
  MOD_RES (4)..(5)..(37): Xaa is C or S

SEQ ID NO: 52703 - protein, 42 aa, Artificial Sequence
  GFR-binding peptide
  MOD_RES (5)..(6)..(40)..(42): Xaa is C or S
  MOD_RES (20)..(21)..(22)..(23)..(24): Xaa is A or G
  MOD_RES (25)..(26)..(27)..(28): Xaa is A or G or is absent
VPKPXXAPTQLSNITVQIMXXXXXXXXXIGEMSNMVVRAXGX

SEQ ID NO: 52704 - protein, 39 aa, Artificial Sequence
  GFR-binding peptide
  MOD_RES (4)..(4): Xaa is C or S
NVQXRPTQVQLEPLPVVYYEIVRKKPIFEQLSNTLEDHL

SEQ ID NO: 52705 - protein, 36 aa, Artificial Sequence
  GFR-binding peptide
  MOD_RES (2)..(3)..(35): Xaa is C or S
AXXVPTELSNITMQIMDEYDKVVIGEMSEMVVEGXG

SEQ ID NO: 52706 - protein, 37 aa, Artificial Sequence
  GFR-binding peptide
  MOD_RES (4)..(5): Xaa is C or S
  MOD_RES (19)..(20)..(21)..(22)..(23): Xaa is A or G
  MOD_RES (24)..(25)..(26)..(27): Xaa is A or G or is absent
ASPXXVSQDLRPVQIRKIXXXXXXXXXKKATVMIVKS

SEQ ID NO: 52707 - protein, 36 aa, Artificial Sequence
  GFR-binding peptide
  MOD_RES (2)..(3): Xaa is C or S
  MOD_RES (17)..(18)..(19)..(20)..(21): Xaa is A or G
  MOD_RES (22)..(23)..(24)..(25): Xaa is A or G or is absent
PXXAPTQLSNITVQIMXXXXXXXXXIGEMSNMVVRA

SEQ ID NO: 52708 - protein, 40 aa, Artificial Sequence; identical to SEQ ID NO: 19498
  GFR-binding peptide
  MOD_RES (4)..(4): Xaa is C or S
  MOD_RES (20)..(21)..(22)..(23)..(24): Xaa is A or G
  MOD_RES (25)..(26)..(27)..(28): Xaa is A or G or is absent

SEQ ID NO: 52709 - protein, 35 aa, Artificial Sequence
  GFR-binding peptide
  MOD_RES (1)..(2)..(33)..(35): Xaa is C or S
XXVPQDLRPVQIRKIVGRTPKVKKATVMVVKSXKX

SEQ ID NO: 52710 - protein, 34 aa, Artificial Sequence
  GFR-binding peptide
  MOD_RES (3)..(4): Xaa is C or S
SPXXVSQDLRPVQIRKIIGKTPKIKKATVMIVKS

SEQ ID NO: 52711 - protein, 39 aa, Artificial Sequence
  GFR-binding peptide
  MOD_RES (3)..(4)..(37)..(39): Xaa is C or S
  MOD_RES (18)..(19)..(20)..(21)..(22): Xaa is A or G
  MOD_RES (23)..(24)..(25)..(26): Xaa is A or G or is absent
SPXXVSQDLRPVQIRKIXXXXXXXXXKKATVMIVKSXKX

SEQ ID NO: 52712 - protein, 40 aa, Artificial Sequence
  GFR-binding peptide
  MOD_RES (5)..(6)..(39): Xaa is C or S
  MOD_RES (20)..(21)..(22)..(23)..(24): Xaa is A or G
  MOD_RES (25)..(26)..(27)..(28): Xaa is A or G or is absent
SASPXXVPQDLSNITIQIMXXXXXXXXXIGEMSMVVKSXK

SEQ ID NO: 52713 - protein, 38 aa, Artificial Sequence; identical to SEQ ID NO: 14520
  GFR-binding peptide
  MOD_RES (3)..(4)..(38): Xaa is C or S
  MOD_RES (18)..(19)..(20)..(21)..(22): Xaa is A or G
  MOD_RES (23)..(24)..(25)..(26): Xaa is A or G or is absent

SEQ ID NO: 52714 - protein, 38 aa, Artificial Sequence
  GFR-binding peptide
  MOD_RES (4)..(5)..(38): Xaa is C or S
  MOD_RES (19)..(20)..(21)..(22)..(23): Xaa is A or G
  MOD_RES (24)..(25)..(26)..(27): Xaa is A or G or is absent
ASPXXVSQDLRPVQIRKIXXXXXXXXXKKATVMIVKSX

SEQ ID NO: 52715 - protein, 36 aa, Artificial Sequence
  GFR-binding peptide
  MOD_RES (1)..(2)..(34)..(36): Xaa is C or S
XXAPTQLSNITVQIMDDSSNVIIGEMSNMVVRAXGX

SEQ ID NO: 52716 - protein, 42 aa, Artificial Sequence
  GFR-binding peptide
  MOD_RES (4)..(41): Xaa is C or S
SVKXQPSRVHHEPLTVLYYEYVRKKPKLEQLSNRLEEHLEXA

SEQ ID NO: 52717 - protein, 39 aa, Artificial Sequence
  GFR-binding peptide
  MOD_RES (6)..(6): Xaa is C or S
  MOD_RES (20)..(21)..(22)..(23)..(24): Xaa is A or G
  MOD_RES (25)..(26)..(27)..(28): Xaa is A or G or is absent
DEGLEXVPTEEEPLPMVYYXXXXXXXXXEQLSNFLQHNK

SEQ ID NO: 52718 - protein, 35 aa, Artificial Sequence; identical to SEQ ID NO: 14523
  GFR-binding peptide
  MOD_RES (1)..(32)..(34): Xaa is C or S

SEQ ID NO: 52719 - protein, 38 aa, Artificial Sequence; identical to SEQ ID NO: 19512
  GFR-binding peptide
  MOD_RES (35)..(37): Xaa is C or S
  MOD_RES (14)..(15)..(16)..(17)..(18): Xaa is A or G
  MOD_RES (19)..(20)..(21)..(22): Xaa is A or G or is absent

SEQ ID NO: 52720 - protein, 35 aa, Artificial Sequence
  GFR-binding peptide
  MOD_RES (1)..(2): Xaa is C or S
  MOD_RES (16)..(17)..(18)..(19)..(20): Xaa is A or G
  MOD_RES (21)..(22)..(23)..(24): Xaa is A or G or is absent
XXAPTQLRSVKVAKVXXXXXXXXXKEVQVNMVVRA

SEQ ID NO: 52721 - protein, 39 aa, Artificial Sequence; identical to SEQ ID NO: 14524
  GFR-binding peptide
  MOD_RES (2)..(3)..(37)..(39): Xaa is C or S
  MOD_RES (17)..(18)..(19)..(20)..(21): Xaa is A or G
  MOD_RES (22)..(23)..(24)..(25): Xaa is A or G or is absent

SEQ ID NO: 52722 - protein, 40 aa, Artificial Sequence
  GFR-binding peptide
  MOD_RES (4)..(5)..(37)..(39): Xaa is C or S
PKPXXAPTQLRSVKVAKVDDSSNVIKEVQVNMVVRAXGXH

SEQ ID NO: 52723 - protein, 34 aa, Artificial Sequence
  GFR-binding peptide
  MOD_RES (1)..(33): Xaa is C or S
XAPTQLRSVKVAKVDDSSNVIKEVQVNMVVRAXG

SEQ ID NO: 52724 - protein, 37 aa, Artificial Sequence
  GFR-binding peptide
  MOD_RES (3)..(35)..(37): Xaa is C or S
PTXAPTKLRPVQVRKIDDSSNVIKKATVNMVVRSXGX

SEQ ID NO: 52725 - protein, 38 aa, Artificial Sequence; identical to SEQ ID NO: 19514
  GFR-binding peptide
  MOD_RES (36)..(38): Xaa is C or S
  MOD_RES (15)..(16)..(17)..(18)..(19): Xaa is A or G
  MOD_RES (20)..(21)..(22)..(23): Xaa is A or G or is absent

SEQ ID NO: 52726 - protein, 39 aa, Artificial Sequence; identical to SEQ ID NO: 14527
  GFR-binding peptide
  MOD_RES (4)..(38): Xaa is C or S
  MOD_RES (18)..(19)..(20)..(21)..(22): Xaa is A or G
  MOD_RES (23)..(24)..(25)..(26): Xaa is A or G or is absent

SEQ ID NO: 52727 - protein, 39 aa, Artificial Sequence; identical to SEQ ID NO: 19518
  GFR-binding peptide
  MOD_RES (5)..(5): Xaa is C or S

SEQ ID NO: 52728 - protein, 35 aa, Artificial Sequence
  GFR-binding peptide
  MOD_RES (35)..(35): Xaa is C or S
  MOD_RES (14)..(15)..(16)..(17)..(18): Xaa is A or G
  MOD_RES (19)..(20)..(21)..(22): Xaa is A or G or is absent
SRVHHEPLTVLYYXXXXXXXXXEQLSNRLEEHLEX

SEQ ID NO: 52729 - protein, 41 aa, Artificial Sequence
  GFR-binding peptide
  MOD_RES (6)..(7)..(39)..(41): Xaa is C or S
TVPKPXXAPTQLRPVQVRKIDDSSNVIKKATVNMVVRAXGX

SEQ ID NO: 52730 - protein, 36 aa, Artificial Sequence
  GFR-binding peptide
  MOD_RES (5)..(6): Xaa is C or S
IPKAXXVPTELSNITMQIMDENEKVVIGEMSDMVVE

SEQ ID NO: 52731 - protein, 40 aa, Artificial Sequence
  GFR-binding peptide
  MOD_RES (2)..(3)..(37)..(39): Xaa is C or S
  MOD_RES (17)..(18)..(19)..(20)..(21): Xaa is A or G
  MOD_RES (22)..(23)..(24)..(25): Xaa is A or G or is absent
AXXVPTELRPVQMRKIXXXXXXXXXKKATVDMVVEGXGXR

SEQ ID NO: 52732 - protein, 41 aa, Artificial Sequence
  GFR-binding peptide
  MOD_RES (3)..(40): Xaa is C or S
  MOD_RES (19)..(20)..(21)..(22)..(23): Xaa is A or G
  MOD_RES (24)..(25)..(26)..(27): Xaa is A or G or is absent
VKXQPSRVHHEPLPVVYYXXXXXXXXXEQLSNRLEEHLEXA

SEQ ID NO: 52733 - protein, 37 aa, Artificial Sequence
  GFR-binding peptide
  MOD_RES (2)..(3)..(36): Xaa is C or S
  MOD_RES (17)..(18)..(19)..(20)..(21): Xaa is A or G
  MOD_RES (22)..(23)..(24)..(25): Xaa is A or G or is absent
PXXVSQDLRPVQIRKIXXXXXXXXXKKATVMIVKSXK

SEQ ID NO: 52734 - protein, 34 aa, Artificial Sequence
  GFR-binding peptide
  MOD_RES (1)..(32)..(34): Xaa is C or S
XVPQALSNITIQIMVGRKPKVIGEMSMIVRSXKX

SEQ ID NO: 52735 - protein, 39 aa, Artificial Sequence
  GFR-binding peptide
  MOD_RES (5)..(6)..(38): Xaa is C or S
VPKPXXAPTQLSNITVQIMDDSSNVIIGEMSNMVVRAXG

SEQ ID NO: 52736 - protein, 42 aa, Artificial Sequence
  GFR-binding peptide
  MOD_RES (6)..(7)..(40)..(42): Xaa is C or S
  MOD_RES (21)..(22)..(23)..(24)..(25): Xaa is A or G
  MOD_RES (26)..(27)..(28)..(29): Xaa is A or G or is absent
ASASPXXVSQDLRPVQIRKIXXXXXXXXXKKATVMIVKSXKX

SEQ ID NO: 52737 - protein, 36 aa, Artificial Sequence
  GFR-binding peptide
  MOD_RES (2)..(3)..(36): Xaa is C or S
  MOD_RES (17)..(18)..(19)..(20)..(21): Xaa is A or G
  MOD_RES (22)..(23)..(24)..(25): Xaa is A or G or is absent
PXXVPQALSNITIQIMXXXXXXXXXIGEMSMIVRSX

SEQ ID NO: 52738 - protein, 44 aa, Artificial Sequence
  GFR-binding peptide
  MOD_RES (4)..(41)..(43): Xaa is C or S
SVKXQPSRVHHEPLTVLYYEYVRKKPKLEQLSNRLEEHLEXAXA

SEQ ID NO: 52739 - protein, 40 aa, Artificial Sequence
  GFR-binding peptide
  MOD_RES (3)..(4)..(38)..(40): Xaa is C or S
  MOD_RES (18)..(19)..(20)..(21)..(22): Xaa is A or G
  MOD_RES (23)..(24)..(25)..(26): Xaa is A or G or is absent
KAXXVPTELSNITMQIMXXXXXXXXXIGEMSDMVVEGXGX

SEQ ID NO: 52740 - protein, 33 aa, Artificial Sequence
  GFR-binding peptide
  MOD_RES (1)..(1): Xaa is C or S
  MOD_RES (15)..(16)..(17)..(18)..(19): Xaa is A or G
  MOD_RES (20)..(21)..(22)..(23): Xaa is A or G or is absent
XVPTELSNITMQIMXXXXXXXXXIGEMSDMVVE

SEQ ID NO: 52741 - protein, 37 aa, Artificial Sequence; identical to SEQ ID NO: 14532
  GFR-binding peptide
  MOD_RES (4)..(5)..(37): Xaa is C or S

SEQ ID NO: 52742 - protein, 36 aa, Artificial Sequence; identical to SEQ ID NO: 14533
  GFR-binding peptide
  MOD_RES (1)..(35): Xaa is C or S
  MOD_RES (15)..(16)..(17)..(18)..(19): Xaa is A or G
  MOD_RES (20)..(21)..(22)..(23): Xaa is A or G or is absent

SEQ ID NO: 52743 - protein, 33 aa, Artificial Sequence; identical to SEQ ID NO: 14534
  GFR-binding peptide
  MOD_RES (1)..(2): Xaa is C or S

SEQ ID NO: 52744 - protein, 40 aa, Artificial Sequence
  GFR-binding peptide
  MOD_RES (5)..(6)..(38)..(40): Xaa is C or S
IPKAXXVPTELRSVKMAKVDEYDKVVKEVQVEMVVEGXGX

SEQ ID NO: 52745 - protein, 34 aa, Artificial Sequence
  GFR-binding peptide
  MOD_RES (14)..(15)..(16)..(17)..(18): Xaa is A or G
  MOD_RES (19)..(20)..(21)..(22): Xaa is A or G or is absent
SRVHHEPLTVLYYXXXXXXXXXEQLSNRLEEHLE

SEQ ID NO: 52746 - protein, 42 aa, Artificial Sequence
  GFR-binding peptide
  MOD_RES (6)..(7)..(41): Xaa is C or S
  MOD_RES (21)..(22)..(23)..(24)..(25): Xaa is A or G
  MOD_RES (26)..(27)..(28)..(29): Xaa is A or G or is absent
KIPKAXXVPTELRPVQMRKIXXXXXXXXXKKATVDMVVEGXG

SEQ ID NO: 52747 - protein, 40 aa, Artificial Sequence; identical to SEQ ID NO: 14535
  GFR-binding peptide
  MOD_RES (5)..(39): Xaa is C or S
  MOD_RES (19)..(20)..(21)..(22)..(23): Xaa is A or G
  MOD_RES (24)..(25)..(26)..(27): Xaa is A or G or is absent

SEQ ID NO: 52748 - protein, 35 aa, Artificial Sequence
  GFR-binding peptide
  MOD_RES (1)..(35): Xaa is C or S
  MOD_RES (15)..(16)..(17)..(18)..(19): Xaa is A or G
  MOD_RES (20)..(21)..(22)..(23): Xaa is A or G or is absent
XAPTKLRSVKVAKVXXXXXXXXXKEVQVNMVVRSX

SEQ ID NO: 52749 - protein, 34 aa, Artificial Sequence; identical to SEQ ID NO: 14536
  GFR-binding peptide
  MOD_RES (1)..(1): Xaa is C or S
  MOD_RES (15)..(16)..(17)..(18)..(19): Xaa is A or G
  MOD_RES (20)..(21)..(22)..(23): Xaa is A or G or is absent

SEQ ID NO: 52750 - protein, 37 aa, Artificial Sequence; identical to SEQ ID NO: 19528
  GFR-binding peptide
  MOD_RES (3)..(3): Xaa is C or S
  MOD_RES (19)..(20)..(21)..(22)..(23): Xaa is A or G
  MOD_RES (24)..(25)..(26)..(27): Xaa is A or G or is absent

SEQ ID NO: 52751 - protein, 35 aa, Artificial Sequence
  GFR-binding peptide
  MOD_RES (2)..(3)..(34): Xaa is C or S
PXXVPQALRPVQIRKIVGRKPKVKKATVMIVRSXK

SEQ ID NO: 52752 - protein, 35 aa, Artificial Sequence
  GFR-binding peptide
  MOD_RES (15)..(16)..(17)..(18)..(19): Xaa is A or G
  MOD_RES (20)..(21)..(22)..(23): Xaa is A or G or is absent
PSRVHHEPLPVVYYXXXXXXXXXEQLSNRLEEHLE

SEQ ID NO: 52753 - protein, 37 aa, Artificial Sequence; identical to SEQ ID NO: 14538
  GFR-binding peptide
  MOD_RES (2)..(3)..(36): Xaa is C or S
  MOD_RES (17)..(18)..(19)..(20)..(21): Xaa is A or G
  MOD_RES (22)..(23)..(24)..(25): Xaa is A or G or is absent

SEQ ID NO: 52754 - protein, 39 aa, Artificial Sequence
  GFR-binding peptide
  MOD_RES (37)..(39): Xaa is C or S
QPSRVHHEPLTVLYYEYVRKKPKLEQLSNRLEEHLEXAX

SEQ ID NO: 52755 - protein, 37 aa, Artificial Sequence; identical to SEQ ID NO: 14539
  GFR-binding peptide
  MOD_RES (5)..(37): Xaa is C or S

SEQ ID NO: 52756 - protein, 41 aa, Artificial Sequence; identical to SEQ ID NO: 19530
  GFR-binding peptide
  MOD_RES (5)..(39)..(41): Xaa is C or S

SEQ ID NO: 52757 - protein, 42 aa, Artificial Sequence
  GFR-binding peptide
  MOD_RES (6)..(7)..(40)..(42): Xaa is C or S
  MOD_RES (21)..(22)..(23)..(24)..(25): Xaa is A or G
  MOD_RES (26)..(27)..(28)..(29): Xaa is A or G or is absent
ASAAPXXVPQALRPVQIRKIXXXXXXXXXKKATVMIVRSXKX

SEQ ID NO: 52758 - protein, 36 aa, Artificial Sequence
  GFR-binding peptide
  MOD_RES (4)..(36): Xaa is C or S
KPTXAPTKLRPVQVRKIDDSSNVIKKATVNMVVRSX

SEQ ID NO: 52759 - protein, 42 aa, Artificial Sequence; identical to SEQ ID NO: 14543
  GFR-binding peptide
  MOD_RES (5)..(6)..(39)..(41): Xaa is C or S
  MOD_RES (20)..(21)..(22)..(23)..(24): Xaa is A or G
  MOD_RES (25)..(26)..(27)..(28): Xaa is A or G or is absent

SEQ ID NO: 52760 - protein, 41 aa, Artificial Sequence
  GFR-binding peptide
  MOD_RES (5)..(6)..(38)..(40): Xaa is C or S
IPKAXXVPTELSNITMQIMDENEKVVIGEMSDMVVEGXGXR

SEQ ID NO: 52761 - protein, 37 aa, Artificial Sequence; identical to SEQ ID NO: 19533
  GFR-binding peptide
  MOD_RES (3)..(3): Xaa is C or S
  MOD_RES (19)..(20)..(21)..(22)..(23): Xaa is A or G
  MOD_RES (24)..(25)..(26)..(27): Xaa is A or G or is absent

SEQ ID NO: 52762 - protein, 39 aa, Artificial Sequence
  GFR-binding peptide
  MOD_RES (36)..(38): Xaa is C or S
  MOD_RES (15)..(16)..(17)..(18)..(19): Xaa is A or G
  MOD_RES (20)..(21)..(22)..(23): Xaa is A or G or is absent
PTQVQLEPLPVVYYXXXXXXXXXEQLSNTLEDHLAXKXE

SEQ ID NO: 52763 - protein, 35 aa, Artificial Sequence
  GFR-binding peptide
  MOD_RES (1)..(33)..(35): Xaa is C or S
XVPTELRPVQMRKIDENEKVVKKATVDMVVEGXGX

SEQ ID NO: 52764 - protein, 42 aa, Artificial Sequence
  GFR-binding peptide
  MOD_RES (5)..(39)..(41): Xaa is C or S
  MOD_RES (19)..(20)..(21)..(22)..(23): Xaa is A or G
  MOD_RES (24)..(25)..(26)..(27): Xaa is A or G or is absent
TKPTXAPTKLSNITVQIMXXXXXXXXXIGEMSNMVVRSXGXH

SEQ ID NO: 52765 - protein, 35 aa, Artificial Sequence; identical to SEQ ID NO: 14545
  GFR-binding peptide
  MOD_RES (4)..(5): Xaa is C or S

SEQ ID NO: 52766 - protein, 35 aa, Artificial Sequence
  GFR-binding peptide
  MOD_RES (3)..(3): Xaa is C or S
  MOD_RES (17)..(18)..(19)..(20)..(21): Xaa is A or G
  MOD_RES (22)..(23)..(24)..(25): Xaa is A or G or is absent
PTXAPTKLRSVKVAKVXXXXXXXXXKEVQVNMVVR

SEQ ID NO: 52767 - protein, 39 aa, Artificial Sequence
  GFR-binding peptide
  MOD_RES (5)..(39): Xaa is C or S
  MOD_RES (19)..(20)..(21)..(22)..(23): Xaa is A or G
  MOD_RES (24)..(25)..(26)..(27): Xaa is A or G or is absent
EGLEXVPTEEEPLTMLYYXXXXXXXXXEQLSNFLQHNKX

SEQ ID NO: 52768 - protein, 41 aa, Artificial Sequence; identical to SEQ ID NO: 14546
  GFR-binding peptide
  MOD_RES (6)..(7)..(41): Xaa is C or S
  MOD_RES (21)..(22)..(23)..(24)..(25): Xaa is A or G
  MOD_RES (26)..(27)..(28)..(29): Xaa is A or G or is absent

SEQ ID NO: 52769 - protein, 37 aa, Artificial Sequence
  GFR-binding peptide
  MOD_RES (1)..(35)..(37): Xaa is C or S
  MOD_RES (15)..(16)..(17)..(18)..(19): Xaa is A or G
  MOD_RES (20)..(21)..(22)..(23): Xaa is A or G or is absent
XVPTELRSVKMAKVXXXXXXXXXKEVQVEMVVEGXGX

SEQ ID NO: 52770 - protein, 35 aa, Artificial Sequence
  GFR-binding peptide
  MOD_RES (4)..(5): Xaa is C or S
AAPXXVPQALRSVKIAKVVGRKPKVKEVQVMIVRS

SEQ ID NO: 52771 - protein, 42 aa, Artificial Sequence
  GFR-binding peptide
  MOD_RES (6)..(7)..(41): Xaa is C or S
  MOD_RES (21)..(22)..(23)..(24)..(25): Xaa is A or G
  MOD_RES (26)..(27)..(28)..(29): Xaa is A or G or is absent
SIPKAXXVPTELSNITMQIMXXXXXXXXXIGEMSEMVVEGXG

SEQ ID NO: 52772 - protein, 35 aa, Artificial Sequence
  GFR-binding peptide
  MOD_RES (1)..(2)..(34): Xaa is C or S
XXAPTKLSNITVQIMDDSSNVIIGEMSNMVVRSXG

SEQ ID NO: 52773 - protein, 34 aa, Artificial Sequence; identical to SEQ ID NO: 40097
  GFR-binding peptide
  MOD_RES (1)..(2): Xaa is C or S
  MOD_RES (16)..(17)..(18)..(19)..(20): Xaa is A or G
  MOD_RES (21)..(22)..(23)..(24): Xaa is A or G or is absent

SEQ ID NO: 52774 - protein, 39 aa, Artificial Sequence
  GFR-binding peptide
  MOD_RES (4)..(5)..(36)..(38): Xaa is C or S
AAPXXVPQALRSVKIAKVVGRKPKVKEVQVMIVRSXKXS

SEQ ID NO: 52775 - protein, 40 aa, Artificial Sequence
  GFR-binding peptide
  MOD_RES (4)..(5)..(38)..(40): Xaa is C or S
  MOD_RES (19)..(20)..(21)..(22)..(23): Xaa is A or G
  MOD_RES (24)..(25)..(26)..(27): Xaa is A or G or is absent
AAPXXVPQALRSVKIAKVXXXXXXXXXKEVQVMIVRSXKX

SEQ ID NO: 52776 - protein, 37 aa, Artificial Sequence
  GFR-binding peptide
  MOD_RES (4)..(5): Xaa is C or S
  MOD_RES (19)..(20)..(21)..(22)..(23): Xaa is A or G
  MOD_RES (24)..(25)..(26)..(27): Xaa is A or G or is absent
PKPXXAPTQLRPVQVRKIXXXXXXXXXKKATVNMVVR

SEQ ID NO: 52777 - protein, 40 aa, Artificial Sequence; identical to SEQ ID NO: 14549
  GFR-binding peptide
  MOD_RES (7)..(7): Xaa is C or S
  MOD_RES (21)..(22)..(23)..(24)..(25): Xaa is A or G
  MOD_RES (26)..(27)..(28)..(29): Xaa is A or G or is absent

SEQ ID NO: 52778 - protein, 35 aa, Artificial Sequence
  GFR-binding peptide
  MOD_RES (3)..(35): Xaa is C or S
PTXAPTKLRSVKVAKVDDSSNVIKEVQVNMVVRSX

SEQ ID NO: 52779 - protein, 32 aa, Artificial Sequence
  GFR-binding peptide
  MOD_RES (14)..(15)..(16)..(17)..(18): Xaa is A or G
  MOD_RES (19)..(20)..(21)..(22): Xaa is A or G or is absent
VPTELRSVKMAKVXXXXXXXXXKEVQVEMVVE

SEQ ID NO: 52780 - protein, 37 aa, Artificial Sequence; identical to SEQ ID NO: 14550
  GFR-binding peptide
  MOD_RES (1)..(2)..(34)..(36): Xaa is C or S

SEQ ID NO: 52781 - protein, 35 aa, Artificial Sequence
  GFR-binding peptide
  MOD_RES (1)..(34): Xaa is C or S
  MOD_RES (15)..(16)..(17)..(18)..(19): Xaa is A or G
  MOD_RES (20)..(21)..(22)..(23): Xaa is A or G or is absent
XVPQDLRPVQIRKIXXXXXXXXXKKATVMVVKSXK

SEQ ID NO: 52782 - protein, 36 aa, Artificial Sequence
  GFR-binding peptide
  MOD_RES (3)..(35): Xaa is C or S
PTXAPTKLRPVQVRKIDDSSNVIKKATVNMVVRSXG

SEQ ID NO: 52783 - protein, 41 aa, Artificial Sequence; identical to SEQ ID NO: 14556
  GFR-binding peptide
  MOD_RES (6)..(7)..(39)..(41): Xaa is C or S

SEQ ID NO: 52784 - protein, 34 aa, Artificial Sequence
  GFR-binding peptide
  MOD_RES (34)..(34): Xaa is C or S
  MOD_RES (14)..(15)..(16)..(17)..(18): Xaa is A or G
  MOD_RES (19)..(20)..(21)..(22): Xaa is A or G or is absent
VPTELRPVQMRKIXXXXXXXXXKKATVDMVVEGX

SEQ ID NO: 52785 - protein, 36 aa, Artificial Sequence
  GFR-binding peptide
  MOD_RES (1)..(35): Xaa is C or S
  MOD_RES (15)..(16)..(17)..(18)..(19): Xaa is A or G
  MOD_RES (20)..(21)..(22)..(23): Xaa is A or G or is absent
XAPTQLSNITVQIMXXXXXXXXXIGEMSNMVVRAXG

SEQ ID NO: 52786 - protein, 34 aa, Artificial Sequence
  GFR-binding peptide
  MOD_RES (1)..(34): Xaa is C or S
  MOD_RES (15)..(16)..(17)..(18)..(19): Xaa is A or G
  MOD_RES (20)..(21)..(22)..(23): Xaa is A or G or is absent
XVSQDLRPVQIRKIXXXXXXXXXKKATVMIVKSX

SEQ ID NO: 52787 - protein, 37 aa, Artificial Sequence; identical to SEQ ID NO: 19546
  GFR-binding peptide
  MOD_RES (34)..(36): Xaa is C or S

SEQ ID NO: 52788 - protein, 37 aa, Artificial Sequence; identical to SEQ ID NO: 19547
  GFR-binding peptide
  MOD_RES (34)..(36): Xaa is C or S
  MOD_RES (14)..(15)..(16)..(17)..(18): Xaa is A or G
  MOD_RES (19)..(20)..(21)..(22): Xaa is A or G or is absent

SEQ ID NO: 52789 - protein, 43 aa, Artificial Sequence; identical to SEQ ID NO: 14561
  GFR-binding peptide
  MOD_RES (6)..(7)..(40)..(42): Xaa is C or S
  MOD_RES (21)..(22)..(23)..(24)..(25): Xaa is A or G
  MOD_RES (26)..(27)..(28)..(29): Xaa is A or G or is absent

SEQ ID NO: 52790 - protein, 37 aa, Artificial Sequence
  GFR-binding peptide
  MOD_RES (1)..(2)..(36): Xaa is C or S
  MOD_RES (16)..(17)..(18)..(19)..(20): Xaa is A or G
  MOD_RES (21)..(22)..(23)..(24): Xaa is A or G or is absent
XXVPTELRPVQMRKIXXXXXXXXXKKATVEMVVEGXG

SEQ ID NO: 52791 - protein, 33 aa, Artificial Sequence
  GFR-binding peptide
  MOD_RES (1)..(33): Xaa is C or S
XAPTQLRPVQVRKIDDSSNVIKKATVNMVVRAX

SEQ ID NO: 52792 - protein, 37 aa, Artificial Sequence; identical to SEQ ID NO: 14564
  GFR-binding peptide
  MOD_RES (1)..(35)..(37): Xaa is C or S
  MOD_RES (15)..(16)..(17)..(18)..(19): Xaa is A or G
  MOD_RES (20)..(21)..(22)..(23): Xaa is A or G or is absent

SEQ ID NO: 52793 - protein, 35 aa, Artificial Sequence
  GFR-binding peptide
  MOD_RES (2)..(3)..(35): Xaa is C or S
AXXVPTELSNITMQIMDENEKVVIGEMSDMVVEGX

SEQ ID NO: 52794 - protein, 38 aa, Artificial Sequence; identical to SEQ ID NO: 19550
  GFR-binding peptide
  MOD_RES (3)..(3): Xaa is C or S
  MOD_RES (19)..(20)..(21)..(22)..(23): Xaa is A or G
  MOD_RES (24)..(25)..(26)..(27): Xaa is A or G or is absent

SEQ ID NO: 52795 - protein, 34 aa, Artificial Sequence; identical to SEQ ID NO: 14565
  GFR-binding peptide
  MOD_RES (1)..(2)..(34): Xaa is C or S

SEQ ID NO: 52796 - protein, 38 aa, Artificial Sequence; identical to SEQ ID NO: 14566
  GFR-binding peptide
  MOD_RES (2)..(3)..(35)..(37): Xaa is C or S

SEQ ID NO: 52797 - protein, 33 aa, Artificial Sequence; identical to SEQ ID NO: 14567
  GFR-binding peptide
  MOD_RES (3)..(3): Xaa is C or S

SEQ ID NO: 52798 - protein, 42 aa, Artificial Sequence
  GFR-binding peptide
  MOD_RES (3)..(40)..(42): Xaa is C or S
  MOD_RES (19)..(20)..(21)..(22)..(23): Xaa is A or G
  MOD_RES (24)..(25)..(26)..(27): Xaa is A or G or is absent
VKXQPSRVHHEPLPVVYYXXXXXXXXXEQLSNRLEEHLEXAX

SEQ ID NO: 52799 - protein, 37 aa, Artificial Sequence
  GFR-binding peptide
  MOD_RES (5)..(6): Xaa is C or S
VPKPXXAPTQLRSVKVAKVDDSSNVIKEVQVNMVVRA

SEQ ID NO: 52800 - protein, 36 aa, Artificial Sequence
  GFR-binding peptide
  MOD_RES (1)..(1): Xaa is C or S
  MOD_RES (17)..(18)..(19)..(20)..(21): Xaa is A or G
  MOD_RES (22)..(23)..(24)..(25): Xaa is A or G or is absent
XQPSRVHHEPLPVVYYXXXXXXXXXEQLSNRLEEHL

SEQ ID NO: 52801 - protein, 36 aa, Artificial Sequence
  GFR-binding peptide
  MOD_RES (2)..(3)..(35): Xaa is C or S
PXXAPTQLRSVKVAKVDDSSNVIKEVQVNMVVRAXG

SEQ ID NO: 52802 - protein, 38 aa, Artificial Sequence
  GFR-binding peptide
  MOD_RES (1)..(35)..(37): Xaa is C or S
  MOD_RES (15)..(16)..(17)..(18)..(19): Xaa is A or G
  MOD_RES (20)..(21)..(22)..(23): Xaa is A or G or is absent
XAPTKLRSVKVAKVXXXXXXXXXKEVQVNMVVRSXGXH

SEQ ID NO: 52803 - protein, 42 aa, Artificial Sequence
  GFR-binding peptide
  MOD_RES (5)..(6)..(39)..(41): Xaa is C or S
  MOD_RES (20)..(21)..(22)..(23)..(24): Xaa is A or G
  MOD_RES (25)..(26)..(27)..(28): Xaa is A or G or is absent
SAAPXXVPQALRPVQIRKIXXXXXXXXXKKATVMIVRSXKXS

SEQ ID NO: 52804 - protein, 36 aa, Artificial Sequence
  GFR-binding peptide
RPTQVQLEPLPVVYYEIVRKKPIFEQLSNTLEDHLA

SEQ ID NO: 52805 - protein, 40 aa, Artificial Sequence; identical to SEQ ID NO: 19557
  GFR-binding peptide
  MOD_RES (37)..(39): Xaa is C or S

SEQ ID NO: 52806 - protein, 41 aa, Artificial Sequence; identical to SEQ ID NO: 14574
  GFR-binding peptide
  MOD_RES (6)..(7)..(39)..(41): Xaa is C or S

SEQ ID NO: 52807 - protein, 41 aa, Artificial Sequence; identical to SEQ ID NO: 40142
  GFR-binding peptide
  MOD_RES (6)..(7)..(40): Xaa is C or S
  MOD_RES (21)..(22)..(23)..(24)..(25): Xaa is A or G
  MOD_RES (26)..(27)..(28)..(29): Xaa is A or G or is absent

SEQ ID NO: 52808 - protein, 33 aa, Artificial Sequence
  GFR-binding peptide
  MOD_RES (1)..(33): Xaa is C or S
XVPTELRSVKMAKVDENEKVVKEVQVDMVVEGX

SEQ ID NO: 52809 - protein, 40 aa, Artificial Sequence
  GFR-binding peptide
  MOD_RES (4)..(5)..(38)..(40): Xaa is C or S
  MOD_RES (19)..(20)..(21)..(22)..(23): Xaa is A or G
  MOD_RES (24)..(25)..(26)..(27): Xaa is A or G or is absent
ASPXXVSQDLRSVKIAKVXXXXXXXXXKEVQVMIVKSXKX

SEQ ID NO: 52810 - protein, 37 aa, Artificial Sequence
  GFR-binding peptide
  MOD_RES (3)..(4)..(36): Xaa is C or S
KPXXAPTKLRPVQVRKIDDSSNVIKKATVNMVVRSXG

SEQ ID NO: 52811 - protein, 41 aa, Artificial Sequence; identical to SEQ ID NO: 14575
  GFR-binding peptide
  MOD_RES (4)..(5)..(39)..(41): Xaa is C or S
  MOD_RES (19)..(20)..(21)..(22)..(23): Xaa is A or G
  MOD_RES (24)..(25)..(26)..(27): Xaa is A or G or is absent

SEQ ID NO: 52812 - protein, 39 aa, Artificial Sequence; identical to SEQ ID NO: 14577
  GFR-binding peptide
  MOD_RES (4)..(5)..(36)..(38): Xaa is C or S

SEQ ID NO: 52813 - protein, 34 aa, Artificial Sequence; identical to SEQ ID NO: 14578
  GFR-binding peptide
  MOD_RES (3)..(4): Xaa is C or S

SEQ ID NO: 52814 - protein, 34 aa, Artificial Sequence; identical to SEQ ID NO: 14581
  GFR-binding peptide
  MOD_RES (3)..(4): Xaa is C or S

SEQ ID NO: 52815 - protein, 43 aa, Artificial Sequence; identical to SEQ ID NO: 14582
  GFR-binding peptide
  MOD_RES (6)..(40)..(42): Xaa is C or S
  MOD_RES (20)..(21)..(22)..(23)..(24): Xaa is A or G
  MOD_RES (25)..(26)..(27)..(28): Xaa is A or G or is absent

SEQ ID NO: 52816 - protein, 35 aa, Artificial Sequence; identical to SEQ ID NO: 19565
  GFR-binding peptide
  MOD_RES (35)..(35): Xaa is C or S
  MOD_RES (14)..(15)..(16)..(17)..(18): Xaa is A or G
  MOD_RES (19)..(20)..(21)..(22): Xaa is A or G or is absent

SEQ ID NO: 52817 - protein, 40 aa, Artificial Sequence; identical to SEQ ID NO: 14583
  GFR-binding peptide
  MOD_RES (3)..(37)..(39): Xaa is C or S
  MOD_RES (17)..(18)..(19)..(20)..(21): Xaa is A or G
  MOD_RES (22)..(23)..(24)..(25): Xaa is A or G or is absent

SEQ ID NO: 52818 - protein, 43 aa, Artificial Sequence
  GFR-binding peptide
  MOD_RES (6)..(7)..(40)..(42): Xaa is C or S
  MOD_RES (21)..(22)..(23)..(24)..(25): Xaa is A or G
  MOD_RES (26)..(27)..(28)..(29): Xaa is A or G or is absent
ASASPXXVSQDLRPVQIRKIXXXXXXXXXKKATVMIVKSXKXS

SEQ ID NO: 52819 - protein, 39 aa, Artificial Sequence
  GFR-binding peptide
  MOD_RES (2)..(39): Xaa is C or S
KXQPSRVHHEPLPVVYYEYVRKKPKLEQLSNRLEEHLEX

SEQ ID NO: 52820 - protein, 39 aa, Artificial Sequence; identical to SEQ ID NO: 14585
  GFR-binding peptide
  MOD_RES (2)..(3)..(37)..(39): Xaa is C or S
  MOD_RES (17)..(18)..(19)..(20)..(21): Xaa is A or G
  MOD_RES (22)..(23)..(24)..(25): Xaa is A or G or is absent

SEQ ID NO: 52821 - protein, 38 aa, Artificial Sequence
  GFR-binding peptide
  MOD_RES (2)..(36)..(38): Xaa is C or S
  MOD_RES (16)..(17)..(18)..(19)..(20): Xaa is A or G
  MOD_RES (21)..(22)..(23)..(24): Xaa is A or G or is absent
EXVPTEEEPLPMVYYXXXXXXXXXEQLSNFLQHNKXEX

SEQ ID NO: 52822 - protein, 41 aa, Artificial Sequence
  GFR-binding peptide
  MOD_RES (5)..(6)..(38)..(40): Xaa is C or S
VPKPXXAPTKLRSVKVAKVDDSSNVIKEVQVNMVVRSXGXH

SEQ ID NO: 52823 - protein, 35 aa, Artificial Sequence
  GFR-binding peptide
  MOD_RES (1)..(33)..(35): Xaa is C or S
XAPTQLRSVKVAKVDDSSNVIKEVQVNMVVRAXGX

SEQ ID NO: 52824 - protein, 36 aa, Artificial Sequence; identical to SEQ ID NO: 14593
  GFR-binding peptide
  MOD_RES (3)..(4)..(36): Xaa is C or S

SEQ ID NO: 52825 - protein, 32 aa, Artificial Sequence
  GFR-binding peptide
  MOD_RES (14)..(15)..(16)..(17)..(18): Xaa is A or G
  MOD_RES (19)..(20)..(21)..(22): Xaa is A or G or is absent
VPQALRSVKIAKVXXXXXXXXXKEVQVMIVRS

SEQ ID NO: 52826 - protein, 38 aa, Artificial Sequence; identical to SEQ ID NO: 19569
  GFR-binding peptide
  MOD_RES (3)..(37): Xaa is C or S

SEQ ID NO: 52827 - protein, 43 aa, Artificial Sequence; identical to SEQ ID NO: 19570
  GFR-binding peptide
  MOD_RES (7)..(41)..(43): Xaa is C or S
  MOD_RES (21)..(22)..(23)..(24)..(25): Xaa is A or G
  MOD_RES (26)..(27)..(28)..(29): Xaa is A or G or is absent

SEQ ID NO: 52828 - protein, 42 aa, Artificial Sequence
  GFR-binding peptide
  MOD_RES (5)..(6)..(40)..(42): Xaa is C or S
  MOD_RES (20)..(21)..(22)..(23)..(24): Xaa is A or G
  MOD_RES (25)..(26)..(27)..(28): Xaa is A or G or is absent
IPKAXXVPTELRPVQMRKIXXXXXXXXXKKATVDMVVEGXGX

SEQ ID NO: 52829 - protein, 36 aa, Artificial Sequence; identical to SEQ ID NO: 14596
  GFR-binding peptide
  MOD_RES (2)..(3)..(35): Xaa is C or S

SEQ ID NO: 52830 - protein, 40 aa, Artificial Sequence
  GFR-binding peptide
  MOD_RES (3)..(37)..(39): Xaa is C or S
  MOD_RES (17)..(18)..(19)..(20)..(21): Xaa is A or G
  MOD_RES (22)..(23)..(24)..(25): Xaa is A or G or is absent
LEXVPTEEEPLPMVYYXXXXXXXXXEQLSNFLQHNKXEXR

SEQ ID NO: 52831 - protein, 39 aa, Artificial Sequence
  GFR-binding peptide
  MOD_RES (3)..(4)..(37)..(39): Xaa is C or S
  MOD_RES (18)..(19)..(20)..(21)..(22): Xaa is A or G
  MOD_RES (23)..(24)..(25)..(26): Xaa is A or G or is absent
SPXXVPQDLRPVQIRKIXXXXXXXXXKKATVMVVKSXKX

SEQ ID NO: 52832 - protein, 39 aa, Artificial Sequence; identical to SEQ ID NO: 19575
  GFR-binding peptide
  MOD_RES (2)..(36)..(38): Xaa is C or S

SEQ ID NO: 52833 - protein, 33 aa, Artificial Sequence; identical to SEQ ID NO: 14598
  GFR-binding peptide
  MOD_RES (32)..(32): Xaa is C or S

SEQ ID NO: 52834 - protein, 38 aa, Artificial Sequence
  GFR-binding peptide
  MOD_RES (3)..(4)..(35)..(37): Xaa is C or S
SPXXVSQDLSNITIQIMIGKTPKIIGEMSMIVKSXKXS

SEQ ID NO: 52835 - protein, 41 aa, Artificial Sequence
  GFR-binding peptide
  MOD_RES (5)..(5): Xaa is C or S
  MOD_RES (21)..(22)..(23)..(24)..(25): Xaa is A or G
  MOD_RES (26)..(27)..(28)..(29): Xaa is A or G or is absent
RNVQXRPTQVQLEPLTVLYYXXXXXXXXXEQLSNTLEDHLA

SEQ ID NO: 52836 - protein, 40 aa, Artificial Sequence; identical to SEQ ID NO: 14600
  GFR-binding peptide
  MOD_RES (5)..(6)..(39): Xaa is C or S
  MOD_RES (20)..(21)..(22)..(23)..(24): Xaa is A or G
  MOD_RES (25)..(26)..(27)..(28): Xaa is A or G or is absent

SEQ ID NO: 52837 - protein, 40 aa, Artificial Sequence; identical to SEQ ID NO: 14601
  GFR-binding peptide
  MOD_RES (6)..(7)..(39): Xaa is C or S

SEQ ID NO: 52838 - protein, 39 aa, Artificial Sequence
  GFR-binding peptide
  MOD_RES (2)..(3)..(37)..(39): Xaa is C or S
  MOD_RES (17)..(18)..(19)..(20)..(21): Xaa is A or G
  MOD_RES (22)..(23)..(24)..(25): Xaa is A or G or is absent
PXXAPTKLRPVQVRKIXXXXXXXXXKKATVNMVVRSXGX

SEQ ID NO: 52839 - protein, 34 aa, Artificial Sequence
  GFR-binding peptide
  MOD_RES (34)..(34): Xaa is C or S
VPTEEEPLTMLYYRIKPHQGQHEQLSNFLQHNKX

SEQ ID NO: 52840 - protein, 39 aa, Artificial Sequence; identical to SEQ ID NO: 19581
  GFR-binding peptide
  MOD_RES (3)..(3): Xaa is C or S
  MOD_RES (19)..(20)..(21)..(22)..(23): Xaa is A or G
  MOD_RES (24)..(25)..(26)..(27): Xaa is A or G or is absent

SEQ ID NO: 52841 - protein, 41 aa, Artificial Sequence
  GFR-binding peptide
  MOD_RES (4)..(5)..(39)..(41): Xaa is C or S
  MOD_RES (19)..(20)..(21)..(22)..(23): Xaa is A or G
  MOD_RES (24)..(25)..(26)..(27): Xaa is A or G or is absent
PKAXXVPTELRSVKMAKVXXXXXXXXXKEVQVDMVVEGXGX

SEQ ID NO: 52842 - protein, 32 aa, Artificial Sequence
  GFR-binding peptide
  MOD_RES (32)..(32): Xaa is C or S
APTQLSNITVQIMDDSSNVIIGEMSNMVVRAX

SEQ ID NO: 52843 - protein, 39 aa, Artificial Sequence
  GFR-binding peptide
  MOD_RES (6)..(7)..(39): Xaa is C or S
YVPKPXXAPTKLSNITVQIMDDSSNVIIGEMSNMVVRSX

SEQ ID NO: 52844 - protein, 32 aa, Artificial Sequence; identical to SEQ ID NO: 14608
  GFR-binding peptide
  MOD_RES (2)..(2): Xaa is C or S

SEQ ID NO: 52845 - protein, 38 aa, Artificial Sequence
  GFR-binding peptide
  MOD_RES (2)..(3)..(35)..(37): Xaa is C or S
PXXAPTKLSNITVQIMDDSSNVIIGEMSNMVVRSXGXH

SEQ ID NO: 52846 - protein, 35 aa, Artificial Sequence; identical to SEQ ID NO: 14609
  GFR-binding peptide
  MOD_RES (2)..(2): Xaa is C or S
  MOD_RES (16)..(17)..(18)..(19)..(20): Xaa is A or G
  MOD_RES (21)..(22)..(23)..(24): Xaa is A or G or is absent

SEQ ID NO: 52847 - protein, 33 aa, Artificial Sequence; identical to SEQ ID NO: 14611
  GFR-binding peptide
  MOD_RES (2)..(3): Xaa is C or S

SEQ ID NO: 52848 - protein, 39 aa, Artificial Sequence
  GFR-binding peptide
  MOD_RES (3)..(4)..(38): Xaa is C or S
  MOD_RES (18)..(19)..(20)..(21)..(22): Xaa is A or G
  MOD_RES (23)..(24)..(25)..(26): Xaa is A or G or is absent
KAXXVPTELRPVQMRKIXXXXXXXXXKKATVDMVVEGXG

SEQ ID NO: 52849 - protein, 36 aa, Artificial Sequence; identical to SEQ ID NO: 14612
  GFR-binding peptide
  MOD_RES (1)..(35): Xaa is C or S
  MOD_RES (15)..(16)..(17)..(18)..(19): Xaa is A or G
  MOD_RES (20)..(21)..(22)..(23): Xaa is A or G or is absent

SEQ ID NO: 52850 - protein, 33 aa, Artificial Sequence; identical to SEQ ID NO: 14613
  GFR-binding peptide
  MOD_RES (14)..(15)..(16)..(17)..(18): Xaa is A or G
  MOD_RES (19)..(20)..(21)..(22): Xaa is A or G or is absent

SEQ ID NO: 52851 - protein, 34 aa, Artificial Sequence
  GFR-binding peptide
TQVQLEPLTVLYYEIVRKKPIFEQLSNTLEDHLA

SEQ ID NO: 52852 - protein, 34 aa, Artificial Sequence; identical to SEQ ID NO: 14614
  GFR-binding peptide
  MOD_RES (2)..(2): Xaa is C or S
  MOD_RES (16)..(17)..(18)..(19)..(20): Xaa is A or G
  MOD_RES (21)..(22)..(23)..(24): Xaa is A or G or is absent

SEQ ID NO: 52853 - protein, 40 aa, Artificial Sequence
  GFR-binding peptide
  MOD_RES (7)..(7): Xaa is C or S
  MOD_RES (21)..(22)..(23)..(24)..(25): Xaa is A or G
  MOD_RES (26)..(27)..(28)..(29): Xaa is A or G or is absent
NDEGLEXVPTEEEPLPMVYYXXXXXXXXXEQLSNFLQHNK

SEQ ID NO: 52854 - protein, 36 aa, Artificial Sequence
  GFR-binding peptide
  MOD_RES (33)..(35): Xaa is C or S
  MOD_RES (14)..(15)..(16)..(17)..(18): Xaa is A or G
  MOD_RES (19)..(20)..(21)..(22): Xaa is A or G or is absent
VPQDLRPVQIRKIXXXXXXXXXKKATVMVVKSXKXS

SEQ ID NO: 52855 - protein, 37 aa, Artificial Sequence; identical to SEQ ID NO: 14623
  GFR-binding peptide
  MOD_RES (3)..(4)..(36): Xaa is C or S

SEQ ID NO: 52856 - protein, 37 aa, Artificial Sequence; identical to SEQ ID NO: 19599
  GFR-binding peptide
  MOD_RES (3)..(37): Xaa is C or S

SEQ ID NO: 52857 - protein, 41 aa, Artificial Sequence
  GFR-binding peptide
  MOD_RES (6)..(40): Xaa is C or S
  MOD_RES (20)..(21)..(22)..(23)..(24): Xaa is A or G
  MOD_RES (25)..(26)..(27)..(28): Xaa is A or G or is absent
DEGLEXVPTEEEPLPMVYYXXXXXXXXXEQLSNFLQHNKXE

SEQ ID NO: 52858 - protein, 39 aa, Artificial Sequence; identical to SEQ ID NO: 14625
  GFR-binding peptide
  MOD_RES (3)..(4)..(36)..(38): Xaa is C or S

SEQ ID NO: 52859 - protein, 33 aa, Artificial Sequence
  GFR-binding peptide
  MOD_RES (1)..(2): Xaa is C or S
XXAPTKLSNITVQIMDDSSNVIIGEMSNMVVRS

SEQ ID NO: 52860 - protein, 39 aa, Artificial Sequence
  GFR-binding peptide
  MOD_RES (4)..(5)..(38): Xaa is C or S
  MOD_RES (19)..(20)..(21)..(22)..(23): Xaa is A or G
  MOD_RES (24)..(25)..(26)..(27): Xaa is A or G or is absent
ASPXXVSQDLRSVKIAKVXXXXXXXXXKEVQVMIVKSXK

SEQ ID NO: 52861 - protein, 37 aa, Artificial Sequence; identical to SEQ ID NO: 19601
  GFR-binding peptide
  MOD_RES (5)..(5): Xaa is C or S
  MOD_RES (19)..(20)..(21)..(22)..(23): Xaa is A or G
  MOD_RES (24)..(25)..(26)..(27): Xaa is A or G or is absent

SEQ ID NO: 52862 - protein, 40 aa, Artificial Sequence
  GFR-binding peptide
  MOD_RES (6)..(7)..(40): Xaa is C or S
  MOD_RES (21)..(22)..(23)..(24)..(25): Xaa is A or G
  MOD_RES (26)..(27)..(28)..(29): Xaa is A or G or is absent
ASAAPXXVPQALRSVKIAKVXXXXXXXXXKEVQVMIVRSX

SEQ ID NO: 52863 - protein, 35 aa, Artificial Sequence
  GFR-binding peptide
RPTQVQLEPLPVVYYEIVRKKPIFEQLSNTLEDHL

SEQ ID NO: 52864 - protein, 33 aa, Artificial Sequence
  GFR-binding peptide
  MOD_RES (1)..(1): Xaa is C or S
XVPTEEEPLTMLYYRIKPHQGQHEQLSNFLQHN

SEQ ID NO: 52865 - protein, 41 aa, Artificial Sequence; identical to SEQ ID NO: 19602
  GFR-binding peptide
  MOD_RES (4)..(41): Xaa is C or S

SEQ ID NO: 52866 - protein, 39 aa, Artificial Sequence; identical to SEQ ID NO: 40228
  GFR-binding peptide
  MOD_RES (2)..(3)..(36)..(38): Xaa is C or S
  MOD_RES (17)..(18)..(19)..(20)..(21): Xaa is A or G
  MOD_RES (22)..(23)..(24)..(25): Xaa is A or G or is absent

SEQ ID NO: 52867 - protein, 36 aa, Artificial Sequence
  GFR-binding peptide
  MOD_RES (4)..(5)..(36): Xaa is C or S
ASPXXVPQDLRSVKIAKVVGRTPKVKEVQVMVVKSX

SEQ ID NO: 52868 - protein, 34 aa, Artificial Sequence
  GFR-binding peptide
  MOD_RES (3)..(4): Xaa is C or S
KPXXAPTQLSNITVQIMDDSSNVIIGEMSNMVVR

SEQ ID NO: 52869 - protein, 40 aa, Artificial Sequence
  GFR-binding peptide
  MOD_RES (5)..(5): Xaa is C or S
SSVKXQPSRVHHEPLTVLYYEYVRKKPKLEQLSNRLEEHL

SEQ ID NO: 52870 - protein, 37 aa, Artificial Sequence
  GFR-binding peptide
  MOD_RES (5)..(37): Xaa is C or S
TKPTXAPTKLRPVQVRKIDDSSNVIKKATVNMVVRSX

SEQ ID NO: 52871 - protein, 39 aa, Artificial Sequence; identical to SEQ ID NO: 19603
  GFR-binding peptide
  MOD_RES (7)..(7): Xaa is C or S
  MOD_RES (21)..(22)..(23)..(24)..(25): Xaa is A or G
  MOD_RES (26)..(27)..(28)..(29): Xaa is A or G or is absent

SEQ ID NO: 52872 - protein, 35 aa, Artificial Sequence
  GFR-binding peptide
  MOD_RES (1)..(35): Xaa is C or S
XVPTEEEPLTMLYYRIKPHQGQHEQLSNFLQHNKX

SEQ ID NO: 52873 - protein, 35 aa, Artificial Sequence
  GFR-binding peptide
  MOD_RES (2)..(3): Xaa is C or S
  MOD_RES (17)..(18)..(19)..(20)..(21): Xaa is A or G
  MOD_RES (22)..(23)..(24)..(25): Xaa is A or G or is absent
AXXVPTELSNITMQIMXXXXXXXXXIGEMSEMVVE

SEQ ID NO: 52874 - protein, 38 aa, Artificial Sequence
  GFR-binding peptide
  MOD_RES (5)..(6): Xaa is C or S
  MOD_RES (20)..(21)..(22)..(23)..(24): Xaa is A or G
  MOD_RES (25)..(26)..(27)..(28): Xaa is A or G or is absent
IPKAXXVPTELSNITMQIMXXXXXXXXXIGEMSDMVVE

SEQ ID NO: 52875 - protein, 35 aa, Artificial Sequence
  GFR-binding peptide
  MOD_RES (33)..(35): Xaa is C or S
  MOD_RES (14)..(15)..(16)..(17)..(18): Xaa is A or G
  MOD_RES (19)..(20)..(21)..(22): Xaa is A or G or is absent
VPQDLRPVQIRKIXXXXXXXXXKKATVMVVKSXKX

SEQ ID NO: 52876 - protein, 43 aa, Artificial Sequence
  GFR-binding peptide
  MOD_RES (3)..(40)..(42): Xaa is C or S
VQXRPTQVQLEPLPVVYYEIVRKKPIFEQLSNTLEDHLAXKXE

SEQ ID NO: 52877 - protein, 38 aa, Artificial Sequence
  GFR-binding peptide
  MOD_RES (6)..(7): Xaa is C or S
YVPKPXXAPTKLRSVKVAKVDDSSNVIKEVQVNMVVRS

SEQ ID NO: 52878 - protein, 33 aa, Artificial Sequence
  GFR-binding peptide
  MOD_RES (1)..(1): Xaa is C or S
  MOD_RES (15)..(16)..(17)..(18)..(19): Xaa is A or G
  MOD_RES (20)..(21)..(22)..(23): Xaa is A or G or is absent
XVPQDLSNITIQIMXXXXXXXXXIGEMSMVVKS

SEQ ID NO: 52879 - protein, 38 aa, Artificial Sequence
  GFR-binding peptide
  MOD_RES (6)..(6): Xaa is C or S
  MOD_RES (20)..(21)..(22)..(23)..(24): Xaa is A or G
  MOD_RES (25)..(26)..(27)..(28): Xaa is A or G or is absent
VTKPTXAPTKLRSVKVAKVXXXXXXXXXKEVQVNMVVR

SEQ ID NO: 52880 - protein, 42 aa, Artificial Sequence
  GFR-binding peptide
  MOD_RES (6)..(40)..(42): Xaa is C or S
  MOD_RES (20)..(21)..(22)..(23)..(24): Xaa is A or G
  MOD_RES (25)..(26)..(27)..(28): Xaa is A or G or is absent
VTKPTXAPTKLRPVQVRKIXXXXXXXXXKKATVNMVVRSXGX

SEQ ID NO: 52881 - protein, 35 aa, Artificial Sequence
  GFR-binding peptide
  MOD_RES (33)..(35): Xaa is C or S
  MOD_RES (14)..(15)..(16)..(17)..(18): Xaa is A or G
  MOD_RES (19)..(20)..(21)..(22): Xaa is A or G or is absent
VSQDLRSVKIAKVXXXXXXXXXKEVQVMIVKSXKX

SEQ ID NO: 52882 - protein, 37 aa, Artificial Sequence
  GFR-binding peptide
  MOD_RES (3)..(4)..(36): Xaa is C or S
KAXXVPTELRSVKMAKVDEYDKVVKEVQVEMVVEGXG

SEQ ID NO: 52883 - protein, 37 aa, Artificial Sequence; identical to SEQ ID NO: 14636
  GFR-binding peptide
  MOD_RES (4)..(4): Xaa is C or S
  MOD_RES (18)..(19)..(20)..(21)..(22): Xaa is A or G
  MOD_RES (23)..(24)..(25)..(26): Xaa is A or G or is absent

SEQ ID NO: 52884 - protein, 37 aa, Artificial Sequence
  GFR-binding peptide
  MOD_RES (2)..(2): Xaa is C or S
QXRPTQVQLEPLPVVYYEIVRKKPIFEQLSNTLEDHL

SEQ ID NO: 52885 - protein, 35 aa, Artificial Sequence; identical to SEQ ID NO: 14638
  GFR-binding peptide
  MOD_RES (1)..(35): Xaa is C or S
  MOD_RES (15)..(16)..(17)..(18)..(19): Xaa is A or G
  MOD_RES (20)..(21)..(22)..(23): Xaa is A or G or is absent

SEQ ID NO: 52886 - protein, 32 aa, Artificial Sequence
  GFR-binding peptide
VPTEEEPLPMVYYRIKPHQGQHEQLSNFLQHN

SEQ ID NO: 52887 - protein, 34 aa, Artificial Sequence
  GFR-binding peptide
  MOD_RES (1)..(2)..(34): Xaa is C or S
XXAPTQLRPVQVRKIDDSSNVIKKATVNMVVRAX

SEQ ID NO: 52888 - protein, 40 aa, Artificial Sequence; identical to SEQ ID NO: 19611
  GFR-binding peptide
  MOD_RES (37)..(39): Xaa is C or S
  MOD_RES (16)..(17)..(18)..(19)..(20): Xaa is A or G
  MOD_RES (21)..(22)..(23)..(24): Xaa is A or G or is absent

SEQ ID NO: 52889 - protein, 41 aa, Artificial Sequence
  GFR-binding peptide
  MOD_RES (4)..(41): Xaa is C or S
  MOD_RES (20)..(21)..(22)..(23)..(24): Xaa is A or G
  MOD_RES (25)..(26)..(27)..(28): Xaa is A or G or is absent
SVKXQPSRVHHEPLTVLYYXXXXXXXXXEQLSNRLEEHLEX

SEQ ID NO: 52890 - protein, 35 aa, Artificial Sequence
  GFR-binding peptide
  MOD_RES (33)..(35): Xaa is C or S
  MOD_RES (14)..(15)..(16)..(17)..(18): Xaa is A or G
  MOD_RES (19)..(20)..(21)..(22): Xaa is A or G or is absent
VPQALRPVQIRKIXXXXXXXXXKKATVMIVRSXKX

SEQ ID NO: 52891 - protein, 39 aa, Artificial Sequence
  GFR-binding peptide
  MOD_RES (2)..(39): Xaa is C or S
  MOD_RES (18)..(19)..(20)..(21)..(22): Xaa is A or G
  MOD_RES (23)..(24)..(25)..(26): Xaa is A or G or is absent
QXRPTQVQLEPLPVVYYXXXXXXXXXEQLSNTLEDHLAX

SEQ ID NO: 52892 - protein, 39 aa, Artificial Sequence; identical to SEQ ID NO: 19613
  GFR-binding peptide
  MOD_RES (6)..(6): Xaa is C or S
  MOD_RES (20)..(21)..(22)..(23)..(24): Xaa is A or G
  MOD_RES (25)..(26)..(27)..(28): Xaa is A or G or is absent

SEQ ID NO: 52893 - protein, 32 aa, Artificial Sequence
  GFR-binding peptide
  MOD_RES (1)..(2): Xaa is C or S
XXVSQDLRPVQIRKIIGKTPKIKKATVMIVKS

SEQ ID NO: 52894 - protein, 36 aa, Artificial Sequence; identical to SEQ ID NO: 14639
  GFR-binding peptide
  MOD_RES (1)..(33)..(35): Xaa is C or S

SEQ ID NO: 52895 - protein, 42 aa, Artificial Sequence; identical to SEQ ID NO: 14642
  GFR-binding peptide
  MOD_RES (5)..(6)..(40)..(42): Xaa is C or S
  MOD_RES (20)..(21)..(22)..(23)..(24): Xaa is A or G
  MOD_RES (25)..(26)..(27)..(28): Xaa is A or G or is absent

SEQ ID NO: 52896 - protein, 40 aa, Artificial Sequence; identical to SEQ ID NO: 14643
  GFR-binding peptide
  MOD_RES (3)..(4)..(38)..(40): Xaa is C or S
  MOD_RES (18)..(19)..(20)..(21)..(22): Xaa is A or G
  MOD_RES (23)..(24)..(25)..(26): Xaa is A or G or is absent

SEQ ID NO: 52897 - protein, 37 aa, Artificial Sequence; identical to SEQ ID NO: 14644
  GFR-binding peptide
  MOD_RES (1)..(2)..(36): Xaa is C or S
  MOD_RES (16)..(17)..(18)..(19)..(20): Xaa is A or G
  MOD_RES (21)..(22)..(23)..(24): Xaa is A or G or is absent

SEQ ID NO: 52898 - protein, 38 aa, Artificial Sequence; identical to SEQ ID NO: 14646
  GFR-binding peptide
  MOD_RES (5)..(6): Xaa is C or S
  MOD_RES (20)..(21)..(22)..(23)..(24): Xaa is A or G
  MOD_RES (25)..(26)..(27)..(28): Xaa is A or G or is absent

SEQ ID NO: 52899 - protein, 33 aa, Artificial Sequence
  GFR-binding peptide
  MOD_RES (31)..(33): Xaa is C or S
VPQALSNITIQIMVGRKPKVIGEMSMIVRSXKX

SEQ ID NO: 52900 - protein, 36 aa, Artificial Sequence; identical to SEQ ID NO: 19618
  GFR-binding peptide

SEQ ID NO: 52901 - protein, 36 aa, Artificial Sequence; identical to SEQ ID NO: 19619
  GFR-binding peptide
  MOD_RES (36)..(36): Xaa is C or S

SEQ ID NO: 52902 - protein, 38 aa, Artificial Sequence; identical to SEQ ID NO: 19620
  GFR-binding peptide
  MOD_RES (4)..(38): Xaa is C or S
  MOD_RES (18)..(19)..(20)..(21)..(22): Xaa is A or G
  MOD_RES (23)..(24)..(25)..(26): Xaa is A or G or is absent

SEQ ID NO: 52903 - protein, 34 aa, Artificial Sequence; identical to SEQ ID NO: 14647
  GFR-binding peptide
  MOD_RES (32)..(34): Xaa is C or S

SEQ ID NO: 52904 - protein, 38 aa, Artificial Sequence
  GFR-binding peptide
  MOD_RES (6)..(7): Xaa is C or S
SIPKAXXVPTELRSVKMAKVDEYDKVVKEVQVEMVVEG

SEQ ID NO: 52905 - protein, 43 aa, Artificial Sequence; identical to SEQ ID NO: 14650
  GFR-binding peptide
  MOD_RES (6)..(7)..(41)..(43): Xaa is C or S
  MOD_RES (21)..(22)..(23)..(24)..(25): Xaa is A or G
  MOD_RES (26)..(27)..(28)..(29): Xaa is A or G or is absent

SEQ ID NO: 52906 - protein, 32 aa, Artificial Sequence; identical to SEQ ID NO: 14651
  GFR-binding peptide
  MOD_RES (32)..(32): Xaa is C or S

SEQ ID NO: 52907 - protein, 40 aa, Artificial Sequence
  GFR-binding peptide
  MOD_RES (3)..(4)..(38)..(40): Xaa is C or S
  MOD_RES (18)..(19)..(20)..(21)..(22): Xaa is A or G
  MOD_RES (23)..(24)..(25)..(26): Xaa is A or G or is absent
KPXXAPTQLRPVQVRKIXXXXXXXXXKKATVNMVVRAXGX

SEQ ID NO: 52908 - protein, 38 aa, Artificial Sequence; identical to SEQ ID NO: 14655
  GFR-binding peptide
  MOD_RES (6)..(7): Xaa is C or S

SEQ ID NO: 52909 - protein, 38 aa, Artificial Sequence
  GFR-binding peptide
  MOD_RES (7)..(7): Xaa is C or S
HVTKPTXAPTKLRSVKVAKVDDSSNVIKEVQVNMVVRS

SEQ ID NO: 52910 - protein, 43 aa, Artificial Sequence; identical to SEQ ID NO: 14659
  GFR-binding peptide
  MOD_RES (7)..(41)..(43): Xaa is C or S
  MOD_RES (21)..(22)..(23)..(24)..(25): Xaa is A or G
  MOD_RES (26)..(27)..(28)..(29): Xaa is A or G or is absent

SEQ ID NO: 52911 - protein, 31 aa, Artificial Sequence; identical to SEQ ID NO: 14661
  GFR-binding peptide
  MOD_RES (1)..(1): Xaa is C or S

SEQ ID NO: 52912 - protein, 34 aa, Artificial Sequence; identical to SEQ ID NO: 19625
  GFR-binding peptide
  MOD_RES (1)..(1): Xaa is C or S

SEQ ID NO: 52913 - protein, 44 aa, Artificial Sequence; identical to SEQ ID NO: 19628
  GFR-binding peptide
  MOD_RES (4)..(41)..(43): Xaa is C or S

SEQ ID NO: 52914 - protein, 38 aa, Artificial Sequence; identical to SEQ ID NO: 14662
  GFR-binding peptide
  MOD_RES (4)..(5): Xaa is C or S
  MOD_RES (19)..(20)..(21)..(22)..(23): Xaa is A or G
  MOD_RES (24)..(25)..(26)..(27): Xaa is A or G or is absent

SEQ ID NO: 52915 - protein, 37 aa, Artificial Sequence
  GFR-binding peptide
  MOD_RES (2)..(3)..(37): Xaa is C or S
  MOD_RES (17)..(18)..(19)..(20)..(21): Xaa is A or G
  MOD_RES (22)..(23)..(24)..(25): Xaa is A or G or is absent
PXXAPTKLRPVQVRKIXXXXXXXXXKKATVNMVVRSX

SEQ ID NO: 52916 - protein, 38 aa, Artificial Sequence
  GFR-binding peptide
  MOD_RES (2)..(36)..(38): Xaa is C or S
EXVPTEEEPLTMLYYRIKPHQGQHEQLSNFLQHNKXEX

SEQ ID NO: 52917 - protein, 40 aa, Artificial Sequence
  GFR-binding peptide
  MOD_RES (4)..(38)..(40): Xaa is C or S
  MOD_RES (18)..(19)..(20)..(21)..(22): Xaa is A or G
  MOD_RES (23)..(24)..(25)..(26): Xaa is A or G or is absent
GLEXVPTEEEPLTMLYYXXXXXXXXXEQLSNFLQHNKXEX

SEQ ID NO: 52918 - protein, 38 aa, Artificial Sequence
  GFR-binding peptide
  MOD_RES (1)..(2)..(36)..(38): Xaa is C or S
  MOD_RES (16)..(17)..(18)..(19)..(20): Xaa is A or G
  MOD_RES (21)..(22)..(23)..(24): Xaa is A or G or is absent
XXVPTELSNITMQIMXXXXXXXXXIGEMSEMVVEGXGX

SEQ ID NO: 52919 - protein, 36 aa, Artificial Sequence
  GFR-binding peptide
  MOD_RES (34)..(36): Xaa is C or S
VPTEEEPLTMLYYRIKPHQGQHEQLSNFLQHNKXEX

SEQ ID NO: 52920 - protein, 38 aa, Artificial Sequence
  GFR-binding peptide
  MOD_RES (35)..(37): Xaa is C or S
SRVHHEPLTVLYYEYVRKKPKLEQLSNRLEEHLEXAXA

SEQ ID NO: 52921 - protein, 41 aa, Artificial Sequence; identical to SEQ ID NO: 14665
  GFR-binding peptide
  MOD_RES (6)..(7)..(39)..(41): Xaa is C or S

SEQ ID NO: 52922 - protein, 31 aa, Artificial Sequence
  GFR-binding peptide
  MOD_RES (31)..(31): Xaa is C or S
VPQDLRPVQIRKIVGRTPKVKKATVMVVKSX

SEQ ID NO: 52923 - protein, 41 aa, Artificial Sequence
  GFR-binding peptide
  MOD_RES (5)..(6)..(38)..(40): Xaa is C or S
IPKAXXVPTELRSVKMAKVDENEKVVKEVQVDMVVEGXGXR

SEQ ID NO: 52924 - protein, 39 aa, Artificial Sequence
  GFR-binding peptide
  MOD_RES (6)..(7): Xaa is C or S
  MOD_RES (21)..(22)..(23)..(24)..(25): Xaa is A or G
  MOD_RES (26)..(27)..(28)..(29): Xaa is A or G or is absent
YVPKPXXAPTKLSNITVQIMXXXXXXXXXIGEMSNMVVR

SEQ ID NO: 52925 - protein, 40 aa, Artificial Sequence; identical to SEQ ID NO: 19633
  GFR-binding peptide
  MOD_RES (4)..(4): Xaa is C or S

SEQ ID NO: 52926 - protein, 30 aa, Artificial Sequence; identical to SEQ ID NO: 14666
  GFR-binding peptide

SEQ ID NO: 52927 - protein, 38 aa, Artificial Sequence; identical to SEQ ID NO: 19635
  GFR-binding peptide
  MOD_RES (3)..(3): Xaa is C or S
  MOD_RES (19)..(20)..(21)..(22)..(23): Xaa is A or G
  MOD_RES (24)..(25)..(26)..(27): Xaa is A or G or is absent

SEQ ID NO: 52928 - protein, 43 aa, Artificial Sequence
  GFR-binding peptide
  MOD_RES (6)..(7)..(41)..(43): Xaa is C or S
  MOD_RES (21)..(22)..(23)..(24)..(25): Xaa is A or G
  MOD_RES (26)..(27)..(28)..(29): Xaa is A or G or is absent
TVPKPXXAPTQLSNITVQIMXXXXXXXXXIGEMSNMVVRAXGX

SEQ ID NO: 52929 - protein, 32 aa, Artificial Sequence
  GFR-binding peptide
  MOD_RES (1)..(32): Xaa is C or S
XVSQDLRPVQIRKIIGKTPKIKKATVMIVKSX

SEQ ID NO: 52930 - protein, 34 aa, Artificial Sequence
  GFR-binding peptide
  MOD_RES (2)..(34): Xaa is C or S
TXAPTKLSNITVQIMDDSSNVIIGEMSNMVVRSX

SEQ ID NO: 52931 - protein, 41 aa, Artificial Sequence; identical to SEQ ID NO: 19637
  GFR-binding peptide
  MOD_RES (3)..(40): Xaa is C or S

SEQ ID NO: 52932 - protein, 36 aa, Artificial Sequence; identical to SEQ ID NO: 14671
  GFR-binding peptide
  MOD_RES (3)..(35): Xaa is C or S

SEQ ID NO: 52933 - protein, 36 aa, Artificial Sequence; identical to SEQ ID NO: 19638
  GFR-binding peptide
  MOD_RES (2)..(2): Xaa is C or S
  MOD_RES (18)..(19)..(20)..(21)..(22): Xaa is A or G
  MOD_RES (23)..(24)..(25)..(26): Xaa is A or G or is absent

SEQ ID NO: 52934 - protein, 44 aa, Artificial Sequence; identical to SEQ ID NO: 19640
  GFR-binding peptide
  MOD_RES (5)..(42)..(44): Xaa is C or S
  MOD_RES (21)..(22)..(23)..(24)..(25): Xaa is A or G
  MOD_RES (26)..(27)..(28)..(29): Xaa is A or G or is absent

SEQ ID NO: 52935 - protein, 36 aa, Artificial Sequence; identical to SEQ ID NO: 14672
  GFR-binding peptide
  MOD_RES (1)..(2)..(36): Xaa is C or S
  MOD_RES (16)..(17)..(18)..(19)..(20): Xaa is A or G
  MOD_RES (21)..(22)..(23)..(24): Xaa is A or G or is absent

SEQ ID NO: 52936 - protein, 35 aa, Artificial Sequence; identical to SEQ ID NO: 14673
  GFR-binding peptide
  MOD_RES (1)..(33)..(35): Xaa is C or S

SEQ ID NO: 52937 - protein, 35 aa, Artificial Sequence
  GFR-binding peptide
  MOD_RES (32)..(34): Xaa is C or S
APTQLSNITVQIMDDSSNVIIGEMSNMVVRAXGXH

SEQ ID NO: 52938 - protein, 44 aa, Artificial Sequence
  GFR-binding peptide
  MOD_RES (7)..(41)..(43): Xaa is C or S
  MOD_RES (21)..(22)..(23)..(24)..(25): Xaa is A or G
  MOD_RES (26)..(27)..(28)..(29): Xaa is A or G or is absent
HVTKPTXAPTKLRPVQVRKIXXXXXXXXXKKATVNMVVRSXGXH

SEQ ID NO: 52939 - protein, 36 aa, Artificial Sequence; identical to SEQ ID NO: 14676
  GFR-binding peptide
  MOD_RES (2)..(3)..(35): Xaa is C or S

SEQ ID NO: 52940 - protein, 38 aa, Artificial Sequence; identical to SEQ ID NO: 19644
  GFR-binding peptide
  MOD_RES (1)..(35)..(37): Xaa is C or S
  MOD_RES (15)..(16)..(17)..(18)..(19): Xaa is A or G
  MOD_RES (20)..(21)..(22)..(23): Xaa is A or G or is absent

SEQ ID NO: 52941 - protein, 40 aa, Artificial Sequence; identical to SEQ ID NO: 14677
  GFR-binding peptide
  MOD_RES (6)..(7)..(39): Xaa is C or S

SEQ ID NO: 52942 - protein, 39 aa, Artificial Sequence; identical to SEQ ID NO: 14678
  GFR-binding peptide
  MOD_RES (1)..(2)..(36)..(38): Xaa is C or S
  MOD_RES (16)..(17)..(18)..(19)..(20): Xaa is A or G
  MOD_RES (21)..(22)..(23)..(24): Xaa is A or G or is absent

SEQ ID NO: 52943 - protein, 40 aa, Artificial Sequence
  GFR-binding peptide
  MOD_RES (6)..(7)..(39): Xaa is C or S
SIPKAXXVPTELRSVKMAKVDEYDKVVKEVQVEMVVEGXG

SEQ ID NO: 52944 - protein, 31 aa, Artificial Sequence
  GFR-binding peptide
  MOD_RES (1)..(1): Xaa is C or S
XVPTELSNITMQIMDENEKVVIGEMSDMVVE

SEQ ID NO: 52945 - protein, 32 aa, Artificial Sequence; identical to SEQ ID NO: 14680
  GFR-binding peptide
  MOD_RES (31)..(31): Xaa is C or S

SEQ ID NO: 52946 - protein, 38 aa, Artificial Sequence
  GFR-binding peptide
  MOD_RES (1)..(38): Xaa is C or S
XRPTQVQLEPLTVLYYEIVRKKPIFEQLSNTLEDHLAX

SEQ ID NO: 52947 - protein, 39 aa, Artificial Sequence
  GFR-binding peptide
  MOD_RES (5)..(6)..(39): Xaa is C or S
  MOD_RES (20)..(21)..(22)..(23)..(24): Xaa is A or G
  MOD_RES (25)..(26)..(27)..(28): Xaa is A or G or is absent
SASPXXVPQDLRSVKIAKVXXXXXXXXXKEVQVMVVKSX

SEQ ID NO: 52948 - protein, 37 aa, Artificial Sequence; identical to SEQ ID NO: 14683
  GFR-binding peptide
  MOD_RES (7)..(7): Xaa is C or S

SEQ ID NO: 52949 - protein, 38 aa, Artificial Sequence
  GFR-binding peptide
  MOD_RES (4)..(5): Xaa is C or S
  MOD_RES (19)..(20)..(21)..(22)..(23): Xaa is A or G
  MOD_RES (24)..(25)..(26)..(27): Xaa is A or G or is absent
PKPXXAPTKLRSVKVAKVXXXXXXXXXKEVQVNMVVRS

SEQ ID NO: 52950 - protein, 37 aa, Artificial Sequence; identical to SEQ ID NO: 19648
  GFR-binding peptide
  MOD_RES (35)..(37): Xaa is C or S

SEQ ID NO: 52951 - protein, 34 aa, Artificial Sequence
  GFR-binding peptide
  MOD_RES (2)..(34): Xaa is C or S
TXAPTKLRPVQVRKIDDSSNVIKKATVNMVVRSX

SEQ ID NO: 52952 - protein, 40 aa, Artificial Sequence; identical to SEQ ID NO: 19649
  GFR-binding peptide
  MOD_RES (3)..(37)..(39): Xaa is C or S
  MOD_RES (17)..(18)..(19)..(20)..(21): Xaa is A or G
  MOD_RES (22)..(23)..(24)..(25): Xaa is A or G or is absent

SEQ ID NO: 52953 - protein, 37 aa, Artificial Sequence
  GFR-binding peptide
  MOD_RES (6)..(7): Xaa is C or S
TVPKPXXAPTQLRPVQVRKIDDSSNVIKKATVNMVVR

SEQ ID NO: 52954 - protein, 42 aa, Artificial Sequence
  GFR-binding peptide
  MOD_RES (4)..(5)..(39)..(41): Xaa is C or S
  MOD_RES (19)..(20)..(21)..(22)..(23): Xaa is A or G
  MOD_RES (24)..(25)..(26)..(27): Xaa is A or G or is absent
PKPXXAPTKLRPVQVRKIXXXXXXXXXKKATVNMVVRSXGXH

SEQ ID NO: 52955 - protein, 42 aa, Artificial Sequence
  GFR-binding peptide
  MOD_RES (5)..(39)..(41): Xaa is C or S
  MOD_RES (19)..(20)..(21)..(22)..(23): Xaa is A or G
  MOD_RES (24)..(25)..(26)..(27): Xaa is A or G or is absent
TKPTXAPTKLRSVKVAKVXXXXXXXXXKEVQVNMVVRSXGXH

SEQ ID NO: 52956 - protein, 44 aa, Artificial Sequence; identical to SEQ ID NO: 19651
  GFR-binding peptide
  MOD_RES (7)..(41)..(43): Xaa is C or S
  MOD_RES (21)..(22)..(23)..(24)..(25): Xaa is A or G
  MOD_RES (26)..(27)..(28)..(29): Xaa is A or G or is absent

SEQ ID NO: 52957 - protein, 37 aa, Artificial Sequence
  GFR-binding peptide
  MOD_RES (1)..(2)..(34)..(36): Xaa is C or S
XXAPTQLSNITVQIMDDSSNVIIGEMSNMVVRAXGXH

SEQ ID NO: 52958 - protein, 38 aa, Artificial Sequence
  GFR-binding peptide
  MOD_RES (1)..(38): Xaa is C or S
  MOD_RES (17)..(18)..(19)..(20)..(21): Xaa is A or G
  MOD_RES (22)..(23)..(24)..(25): Xaa is A or G or is absent
XRPTQVQLEPLPVVYYXXXXXXXXXEQLSNTLEDHLAX

SEQ ID NO: 52959 - protein, 34 aa, Artificial Sequence; identical to SEQ ID NO: 14691
  GFR-binding peptide
  MOD_RES (1)..(1): Xaa is C or S
  MOD_RES (15)..(16)..(17)..(18)..(19): Xaa is A or G
  MOD_RES (20)..(21)..(22)..(23): Xaa is A or G or is absent

SEQ ID NO: 52960 - protein, 44 aa, Artificial Sequence
  GFR-binding peptide
  MOD_RES (7)..(41)..(43): Xaa is C or S
  MOD_RES (21)..(22)..(23)..(24)..(25): Xaa is A or G
  MOD_RES (26)..(27)..(28)..(29): Xaa is A or G or is absent
NDEGLEXVPTEEEPLTMLYYXXXXXXXXXEQLSNFLQHNKXEXR

SEQ ID NO: 52961 - protein, 39 aa, Artificial Sequence
  GFR-binding peptide
  MOD_RES (37)..(39): Xaa is C or S
  MOD_RES (16)..(17)..(18)..(19)..(20): Xaa is A or G
  MOD_RES (21)..(22)..(23)..(24): Xaa is A or G or is absent
QPSRVHHEPLPVVYYXXXXXXXXXEQLSNRLEEHLEXAX

SEQ ID NO: 52962 - protein, 40 aa, Artificial Sequence
  GFR-binding peptide
  MOD_RES (5)..(6)..(37)..(39): Xaa is C or S
SASPXXVSQDLRPVQIRKIIGKTPKIKKATVMIVKSXKXS

SEQ ID NO: 52963 - protein, 35 aa, Artificial Sequence; identical to SEQ ID NO: 14693
  GFR-binding peptide
  MOD_RES (4)..(5): Xaa is C or S

SEQ ID NO: 52964 - protein, 37 aa, Artificial Sequence; identical to SEQ ID NO: 14694
  GFR-binding peptide
  MOD_RES (2)..(34)..(36): Xaa is C or S

SEQ ID NO: 52965 - protein, 41 aa, Artificial Sequence; identical to SEQ ID NO: 14695
  GFR-binding peptide
  MOD_RES (4)..(5)..(38)..(40): Xaa is C or S
  MOD_RES (19)..(20)..(21)..(22)..(23): Xaa is A or G
  MOD_RES (24)..(25)..(26)..(27): Xaa is A or G or is absent

SEQ ID NO: 52966 - protein, 36 aa, Artificial Sequence
  GFR-binding peptide
  MOD_RES (2)..(3): Xaa is C or S
  MOD_RES (17)..(18)..(19)..(20)..(21): Xaa is A or G
  MOD_RES (22)..(23)..(24)..(25): Xaa is A or G or is absent
PXXAPTKLSNITVQIMXXXXXXXXXIGEMSNMVVRS

SEQ ID NO: 52967 - protein, 35 aa, Artificial Sequence
  GFR-binding peptide
  MOD_RES (1)..(32)..(34): Xaa is C or S
XVSQDLRSVKIAKVIGKTPKIKEVQVMIVKSXKXS

SEQ ID NO: 52968 - protein, 40 aa, Artificial Sequence; identical to SEQ ID NO: 14698
  GFR-binding peptide
  MOD_RES (6)..(7): Xaa is C or S
  MOD_RES (21)..(22)..(23)..(24)..(25): Xaa is A or G
  MOD_RES (26)..(27)..(28)..(29): Xaa is A or G or is absent

SEQ ID NO: 52969 - protein, 37 aa, Artificial Sequence
  GFR-binding peptide
  MOD_RES (36)..(36): Xaa is C or S
PSRVHHEPLPVVYYEYVRKKPKLEQLSNRLEEHLEXA

SEQ ID NO: 52970 - protein, 38 aa, Artificial Sequence; identical to SEQ ID NO: 19663
  GFR-binding peptide
  MOD_RES (5)..(5): Xaa is C or S
  MOD_RES (19)..(20)..(21)..(22)..(23): Xaa is A or G
  MOD_RES (24)..(25)..(26)..(27): Xaa is A or G or is absent

SEQ ID NO: 52971 - protein, 41 aa, Artificial Sequence
  GFR-binding peptide
  MOD_RES (5)..(6)..(38)..(40): Xaa is C or S
IPKAXXVPTELRPVQMRKIDEYDKVVKKATVEMVVEGXGXR

SEQ ID NO: 52972 - protein, 34 aa, Artificial Sequence; identical to SEQ ID NO: 14700
  GFR-binding peptide
  MOD_RES (1)..(33): Xaa is C or S

SEQ ID NO: 52973 - protein, 39 aa, Artificial Sequence
  GFR-binding peptide
  MOD_RES (4)..(38): Xaa is C or S
  MOD_RES (18)..(19)..(20)..(21)..(22): Xaa is A or G
  MOD_RES (23)..(24)..(25)..(26): Xaa is A or G or is absent
KPTXAPTKLRSVKVAKVXXXXXXXXXKEVQVNMVVRSXG

SEQ ID NO: 52974 - protein, 36 aa, Artificial Sequence; identical to SEQ ID NO: 14701
  GFR-binding peptide
  MOD_RES (1)..(2)..(36): Xaa is C or S
  MOD_RES (16)..(17)..(18)..(19)..(20): Xaa is A or G
  MOD_RES (21)..(22)..(23)..(24): Xaa is A or G or is absent

SEQ ID NO: 52975 - protein, 34 aa, Artificial Sequence
  GFR-binding peptide
  MOD_RES (2)..(34): Xaa is C or S
TXAPTKLRSVKVAKVDDSSNVIKEVQVNMVVRSX

SEQ ID NO: 52976 - protein, 40 aa, Artificial Sequence; identical to SEQ ID NO: 14702
  GFR-binding peptide
  MOD_RES (6)..(7): Xaa is C or S
  MOD_RES (21)..(22)..(23)..(24)..(25): Xaa is A or G
  MOD_RES (26)..(27)..(28)..(29): Xaa is A or G or is absent

SEQ ID NO: 52977 - protein, 37 aa, Artificial Sequence
  GFR-binding peptide
  MOD_RES (5)..(6): Xaa is C or S
VPKPXXAPTQLRPVQVRKIDDSSNVIKKATVNMVVRA

SEQ ID NO: 52978 - protein, 34 aa, Artificial Sequence
  GFR-binding peptide
  MOD_RES (31)..(33): Xaa is C or S
VSQDLRPVQIRKIIGKTPKIKKATVMIVKSXKXS

SEQ ID NO: 52979 - protein, 40 aa, Artificial Sequence; identical to SEQ ID NO: 14703
  GFR-binding peptide
  MOD_RES (7)..(39): Xaa is C or S

SEQ ID NO: 52980 - protein, 40 aa, Artificial Sequence; identical to SEQ ID NO: 19665
  GFR-binding peptide
  MOD_RES (6)..(40): Xaa is C or S
  MOD_RES (20)..(21)..(22)..(23)..(24): Xaa is A or G
  MOD_RES (25)..(26)..(27)..(28): Xaa is A or G or is absent

SEQ ID NO: 52981 - protein, 40 aa, Artificial Sequence; identical to SEQ ID NO: 19667
  GFR-binding peptide
  MOD_RES (5)..(5): Xaa is C or S
  MOD_RES (21)..(22)..(23)..(24)..(25): Xaa is A or G
  MOD_RES (26)..(27)..(28)..(29): Xaa is A or G or is absent

SEQ ID NO: 52982 - protein, 34 aa, Artificial Sequence
  GFR-binding peptide
  MOD_RES (1)..(34): Xaa is C or S
  MOD_RES (15)..(16)..(17)..(18)..(19): Xaa is A or G
  MOD_RES (20)..(21)..(22)..(23): Xaa is A or G or is absent
XVPQALSNITIQIMXXXXXXXXXIGEMSMIVRSX

SEQ ID NO: 52983 - protein, 37 aa, Artificial Sequence; identical to SEQ ID NO: 14704
  GFR-binding peptide
  MOD_RES (34)..(36): Xaa is C or S
  MOD_RES (14)..(15)..(16)..(17)..(18): Xaa is A or G
  MOD_RES (19)..(20)..(21)..(22): Xaa is A or G or is absent

SEQ ID NO: 52984 - protein, 37 aa, Artificial Sequence
  GFR-binding peptide
  MOD_RES (3)..(3): Xaa is C or S
  MOD_RES (19)..(20)..(21)..(22)..(23): Xaa is A or G
  MOD_RES (24)..(25)..(26)..(27): Xaa is A or G or is absent
VQXRPTQVQLEPLPVVYYXXXXXXXXXEQLSNTLEDH

SEQ ID NO: 52985 - protein, 37 aa, Artificial Sequence; identical to SEQ ID NO: 14708
  GFR-binding peptide
  MOD_RES (3)..(4)..(36): Xaa is C or S

SEQ ID NO: 52986 - protein, 39 aa, Artificial Sequence; identical to SEQ ID NO: 14710
  GFR-binding peptide
  MOD_RES (3)..(4)..(38): Xaa is C or S
  MOD_RES (18)..(19)..(20)..(21)..(22): Xaa is A or G
  MOD_RES (23)..(24)..(25)..(26): Xaa is A or G or is absent

SEQ ID NO: 52987 - protein, 39 aa, Artificial Sequence
  GFR-binding peptide
  MOD_RES (5)..(5): Xaa is C or S
SSVKXQPSRVHHEPLTVLYYEYVRKKPKLEQLSNRLEEH

SEQ ID NO: 52988 - protein, 36 aa, Artificial Sequence; identical to SEQ ID NO: 14711
  GFR-binding peptide
  MOD_RES (5)..(6): Xaa is C or S

SEQ ID NO: 52989 - protein, 37 aa, Artificial Sequence; identical to SEQ ID NO: 14712
  GFR-binding peptide
  MOD_RES (1)..(2)..(34)..(36): Xaa is C or S

SEQ ID NO: 52990 - protein, 36 aa, Artificial Sequence; identical to SEQ ID NO: 19675
  GFR-binding peptide
  MOD_RES (2)..(36): Xaa is C or S
  MOD_RES (16)..(17)..(18)..(19)..(20): Xaa is A or G
  MOD_RES (21)..(22)..(23)..(24): Xaa is A or G or is absent

SEQ ID NO: 52991 - protein, 39 aa, Artificial Sequence
  GFR-binding peptide
  MOD_RES (6)..(7): Xaa is C or S
  MOD_RES (21)..(22)..(23)..(24)..(25): Xaa is A or G
  MOD_RES (26)..(27)..(28)..(29): Xaa is A or G or is absent
ASASPXXVSQDLSNITIQIMXXXXXXXXXIGEMSMIVKS

SEQ ID NO: 52992 - protein, 39 aa, Artificial Sequence
  GFR-binding peptide
  MOD_RES (6)..(7)..(39): Xaa is C or S
KIPKAXXVPTELRSVKMAKVDENEKVVKEVQVDMVVEGX

SEQ ID NO: 52993 - protein, 35 aa, Artificial Sequence
  GFR-binding peptide
  MOD_RES (34)..(34): Xaa is C or S
  MOD_RES (14)..(15)..(16)..(17)..(18): Xaa is A or G
  MOD_RES (19)..(20)..(21)..(22): Xaa is A or G or is absent
VPTELSNITMQIMXXXXXXXXXIGEMSDMVVEGXG

SEQ ID NO: 52994 - protein, 34 aa, Artificial Sequence
  GFR-binding peptide
  MOD_RES (34)..(34): Xaa is C or S
  MOD_RES (14)..(15)..(16)..(17)..(18): Xaa is A or G
  MOD_RES (19)..(20)..(21)..(22): Xaa is A or G or is absent
VPTELSNITMQIMXXXXXXXXXIGEMSEMVVEGX

SEQ ID NO: 52995 - protein, 30 aa, Artificial Sequence; identical to SEQ ID NO: 14717
  GFR-binding peptide

SEQ ID NO: 52996 - protein, 38 aa, Artificial Sequence; identical to SEQ ID NO: 14718
  GFR-binding peptide
  MOD_RES (1)..(2)..(36)..(38): Xaa is C or S
  MOD_RES (16)..(17)..(18)..(19)..(20): Xaa is A or G
  MOD_RES (21)..(22)..(23)..(24): Xaa is A or G or is absent

SEQ ID NO: 52997 - protein, 39 aa, Artificial Sequence
  GFR-binding peptide
  MOD_RES (3)..(4)..(38): Xaa is C or S
  MOD_RES (18)..(19)..(20)..(21)..(22): Xaa is A or G
  MOD_RES (23)..(24)..(25)..(26): Xaa is A or G or is absent
KPXXAPTQLRPVQVRKIXXXXXXXXXKKATVNMVVRAXG

SEQ ID NO: 52998 - protein, 39 aa, Artificial Sequence; identical to SEQ ID NO: 14719
  GFR-binding peptide
  MOD_RES (3)..(4)..(36)..(38): Xaa is C or S

SEQ ID NO: 52999 - protein, 39 aa, Artificial Sequence
  GFR-binding peptide
  MOD_RES (6)..(7)..(38): Xaa is C or S
ASAAPXXVPQALRPVQIRKIVGRKPKVKKATVMIVRSXK

SEQ ID NO: 53000 - protein, 34 aa, Artificial Sequence
  GFR-binding peptide
  MOD_RES (1)..(2)..(33): Xaa is C or S
XXVPQALSNITIQIMVGRKPKVIGEMSMIVRSXK

SEQ ID NO: 53001 - protein, 41 aa, Artificial Sequence; identical to SEQ ID NO: 14721
  GFR-binding peptide
  MOD_RES (6)..(7)..(40): Xaa is C or S
  MOD_RES (21)..(22)..(23)..(24)..(25): Xaa is A or G
  MOD_RES (26)..(27)..(28)..(29): Xaa is A or G or is absent

SEQ ID NO: 53002 - protein, 43 aa, Artificial Sequence; identical to SEQ ID NO: 14723
  GFR-binding peptide
  MOD_RES (5)..(6)..(40)..(42): Xaa is C or S
  MOD_RES (20)..(21)..(22)..(23)..(24): Xaa is A or G
  MOD_RES (25)..(26)..(27)..(28): Xaa is A or G or is absent

SEQ ID NO: 53003 - protein, 42 aa, Artificial Sequence; identical to SEQ ID NO: 14725
  GFR-binding peptide
  MOD_RES (6)..(7)..(39)..(41): Xaa is C or S

SEQ ID NO: 53004 - protein, 37 aa, Artificial Sequence
  GFR-binding peptide
  MOD_RES (6)..(7): Xaa is C or S
ASASPXXVSQDLRPVQIRKIIGKTPKIKKATVMIVKS

SEQ ID NO: 53005 - protein, 35 aa, Artificial Sequence
  GFR-binding peptide
  MOD_RES (1)..(2)..(35): Xaa is C or S
  MOD_RES (16)..(17)..(18)..(19)..(20): Xaa is A or G
  MOD_RES (21)..(22)..(23)..(24): Xaa is A or G or is absent
XXVSQDLSNITIQIMXXXXXXXXXIGEMSMIVKSX

SEQ ID NO: 53006 - protein, 37 aa, Artificial Sequence; identical to SEQ ID NO: 14728
  GFR-binding peptide
  MOD_RES (3)..(4)..(36): Xaa is C or S

SEQ ID NO: 53007 - protein, 34 aa, Artificial Sequence; identical to SEQ ID NO: 14729
  GFR-binding peptide
  MOD_RES (1)..(2)..(33): Xaa is C or S

SEQ ID NO: 53008 - protein, 38 aa, Artificial Sequence; identical to SEQ ID NO: 14730
  GFR-binding peptide
  MOD_RES (5)..(6)..(37): Xaa is C or S

SEQ ID NO: 53009 - protein, 40 aa, Artificial Sequence
  GFR-binding peptide
  MOD_RES (4)..(5)..(37)..(39): Xaa is C or S
PKAXXVPTELRSVKMAKVDEYDKVVKEVQVEMVVEGXGXR

SEQ ID NO: 53010 - protein, 40 aa, Artificial Sequence
  GFR-binding peptide
  MOD_RES (5)..(6)..(38)..(40): Xaa is C or S
VPKPXXAPTKLSNITVQIMDDSSNVIIGEMSNMVVRSXGX

SEQ ID NO: 53011 - protein, 37 aa, Artificial Sequence; identical to SEQ ID NO: 14731
  GFR-binding peptide
  MOD_RES (5)..(5): Xaa is C or S
  MOD_RES (19)..(20)..(21)..(22)..(23): Xaa is A or G
  MOD_RES (24)..(25)..(26)..(27): Xaa is A or G or is absent

SEQ ID NO: 53012 - protein, 34 aa, Artificial Sequence; identical to SEQ ID NO: 14732
  GFR-binding peptide
  MOD_RES (2)..(3): Xaa is C or S

SEQ ID NO: 53013 - protein, 41 aa, Artificial Sequence
  GFR-binding peptide
  MOD_RES (6)..(7)..(41): Xaa is C or S
  MOD_RES (21)..(22)..(23)..(24)..(25): Xaa is A or G
  MOD_RES (26)..(27)..(28)..(29): Xaa is A or G or is absent
SIPKAXXVPTELSNITMQIMXXXXXXXXXIGEMSEMVVEGX

SEQ ID NO: 53014 - protein, 37 aa, Artificial Sequence
  GFR-binding peptide
  MOD_RES (2)..(3)..(35)..(37): Xaa is C or S
AXXVPTELRSVKMAKVDEYDKVVKEVQVEMVVEGXGX

SEQ ID NO: 53015 - protein, 38 aa, Artificial Sequence
  GFR-binding peptide
  MOD_RES (1)..(35)..(37): Xaa is C or S
  MOD_RES (15)..(16)..(17)..(18)..(19): Xaa is A or G
  MOD_RES (20)..(21)..(22)..(23): Xaa is A or G or is absent
XAPTKLSNITVQIMXXXXXXXXXIGEMSNMVVRSXGXH

SEQ ID NO: 53016 - protein, 40 aa, Artificial Sequence
  GFR-binding peptide
  MOD_RES (7)..(7): Xaa is C or S
NDEGLEXVPTEEEPLTMLYYRIKPHQGQHEQLSNFLQHNK

SEQ ID NO: 53017 - protein, 38 aa, Artificial Sequence; identical to SEQ ID NO: 19683
  GFR-binding peptide
  MOD_RES (4)..(4): Xaa is C or S

SEQ ID NO: 53018 - protein, 37 aa, Artificial Sequence
  GFR-binding peptide
  MOD_RES (1)..(2)..(35)..(37): Xaa is C or S
  MOD_RES (16)..(17)..(18)..(19)..(20): Xaa is A or G
  MOD_RES (21)..(22)..(23)..(24): Xaa is A or G or is absent
XXVPQDLRPVQIRKIXXXXXXXXXKKATVMVVKSXKX

SEQ ID NO: 53019 - protein, 37 aa, Artificial Sequence
  GFR-binding peptide
  MOD_RES (1)..(34)..(36): Xaa is C or S
  MOD_RES (15)..(16)..(17)..(18)..(19): Xaa is A or G
  MOD_RES (20)..(21)..(22)..(23): Xaa is A or G or is absent
XVPQALSNITIQIMXXXXXXXXXIGEMSMIVRSXKXS

SEQ ID NO: 53020 - protein, 37 aa, Artificial Sequence; identical to SEQ ID NO: 14734
  GFR-binding peptide
  MOD_RES (4)..(5)..(37): Xaa is C or S

SEQ ID NO: 53021 - protein, 30 aa, Artificial Sequence
  GFR-binding peptide
VPQDLRSVKIAKVVGRTPKVKEVQVMVVKS

SEQ ID NO: 53022 - protein, 42 aa, Artificial Sequence; identical to SEQ ID NO: 14737
  GFR-binding peptide
  MOD_RES (7)..(39)..(41): Xaa is C or S

SEQ ID NO: 53023 - protein, 36 aa, Artificial Sequence
  GFR-binding peptide
  MOD_RES (36)..(36): Xaa is C or S
  MOD_RES (15)..(16)..(17)..(18)..(19): Xaa is A or G
  MOD_RES (20)..(21)..(22)..(23): Xaa is A or G or is absent
PSRVHHEPLTVLYYXXXXXXXXXEQLSNRLEEHLEX

SEQ ID NO: 53024 - protein, 38 aa, Artificial Sequence
  GFR-binding peptide
  MOD_RES (6)..(7): Xaa is C or S
TVPKPXXAPTQLRPVQVRKIDDSSNVIKKATVNMVVRA

SEQ ID NO: 53025 - protein, 33 aa, Artificial Sequence
  GFR-binding peptide
  MOD_RES (3)..(3): Xaa is C or S
PTXAPTKLRSVKVAKVDDSSNVIKEVQVNMVVR

SEQ ID NO: 53026 - protein, 36 aa, Artificial Sequence
  GFR-binding peptide
  MOD_RES (34)..(36): Xaa is C or S
  MOD_RES (14)..(15)..(16)..(17)..(18): Xaa is A or G
  MOD_RES (19)..(20)..(21)..(22): Xaa is A or G or is absent
VPTELRPVQMRKIXXXXXXXXXKKATVEMVVEGXGX

SEQ ID NO: 53027 - protein, 33 aa, Artificial Sequence; identical to SEQ ID NO: 14739
  GFR-binding peptide
  MOD_RES (1)..(2): Xaa is C or S

SEQ ID NO: 53028 - protein, 40 aa, Artificial Sequence; identical to SEQ ID NO: 14742
  GFR-binding peptide
  MOD_RES (5)..(6)..(38)..(40): Xaa is C or S

SEQ ID NO: 53029 - protein, 40 aa, Artificial Sequence
  GFR-binding peptide
  MOD_RES (6)..(7): Xaa is C or S
  MOD_RES (21)..(22)..(23)..(24)..(25): Xaa is A or G
  MOD_RES (26)..(27)..(28)..(29): Xaa is A or G or is absent
TVPKPXXAPTQLSNITVQIMXXXXXXXXXIGEMSNMVVRA

SEQ ID NO: 53030 - protein, 38 aa, Artificial Sequence
  GFR-binding peptide
  MOD_RES (3)..(4)..(36)..(38): Xaa is C or S
KAXXVPTELSNITMQIMDEYDKVVIGEMSEMVVEGXGX

SEQ ID NO: 53031 - protein, 33 aa, Artificial Sequence
  GFR-binding peptide
  MOD_RES (1)..(32): Xaa is C or S
XVPQALSNITIQIMVGRKPKVIGEMSMIVRSXK

SEQ ID NO: 53032 - protein, 40 aa, Artificial Sequence
  GFR-binding peptide
  MOD_RES (4)..(5)..(37)..(39): Xaa is C or S
PKAXXVPTELRPVQMRKIDENEKVVKKATVDMVVEGXGXR

SEQ ID NO: 53033 - protein, 31 aa, Artificial Sequence; identical to SEQ ID NO: 14745
  GFR-binding peptide
  MOD_RES (1)..(1): Xaa is C or S

SEQ ID NO: 53034 - protein, 42 aa, Artificial Sequence; identical to SEQ ID NO: 14747
  GFR-binding peptide
  MOD_RES (6)..(40)..(42): Xaa is C or S
  MOD_RES (20)..(21)..(22)..(23)..(24): Xaa is A or G
  MOD_RES (25)..(26)..(27)..(28): Xaa is A or G or is absent

SEQ ID NO: 53035 - protein, 39 aa, Artificial Sequence
  GFR-binding peptide
  MOD_RES (4)..(5)..(36)..(38): Xaa is C or S
AAPXXVPQALRPVQIRKIVGRKPKVKKATVMIVRSXKXS

SEQ ID NO: 53036 - protein, 39 aa, Artificial Sequence
  GFR-binding peptide
  MOD_RES (37)..(39): Xaa is C or S
RPTQVQLEPLTVLYYEIVRKKPIFEQLSNTLEDHLAXKX

SEQ ID NO: 53037 - protein, 36 aa, Artificial Sequence; identical to SEQ ID NO: 14748
  GFR-binding peptide
  MOD_RES (3)..(4): Xaa is C or S
  MOD_RES (18)..(19)..(20)..(21)..(22): Xaa is A or G
  MOD_RES (23)..(24)..(25)..(26): Xaa is A or G or is absent

SEQ ID NO: 53038 - protein, 36 aa, Artificial Sequence; identical to SEQ ID NO: 19707
  GFR-binding peptide
  MOD_RES (35)..(35): Xaa is C or S

SEQ ID NO: 53039 - protein, 34 aa, Artificial Sequence
  GFR-binding peptide
  MOD_RES (1)..(2): Xaa is C or S
  MOD_RES (16)..(17)..(18)..(19)..(20): Xaa is A or G
  MOD_RES (21)..(22)..(23)..(24): Xaa is A or G or is absent
XXVPQDLSNITIQIMXXXXXXXXXIGEMSMVVKS

SEQ ID NO: 53040 - protein, 33 aa, Artificial Sequence; identical to SEQ ID NO: 14751
  GFR-binding peptide
  MOD_RES (1)..(1): Xaa is C or S
  MOD_RES (15)..(16)..(17)..(18)..(19): Xaa is A or G
  MOD_RES (20)..(21)..(22)..(23): Xaa is A or G or is absent

SEQ ID NO: 53041 - protein, 37 aa, Artificial Sequence; identical to SEQ ID NO: 14753
  GFR-binding peptide
  MOD_RES (4)..(5): Xaa is C or S
  MOD_RES (19)..(20)..(21)..(22)..(23): Xaa is A or G
  MOD_RES (24)..(25)..(26)..(27): Xaa is A or G or is absent

SEQ ID NO: 53042 - protein, 43 aa, Artificial Sequence
  GFR-binding peptide
  MOD_RES (6)..(40)..(42): Xaa is C or S
DEGLEXVPTEEEPLTMLYYRIKPHQGQHEQLSNFLQHNKXEXR

SEQ ID NO: 53043 - protein, 33 aa, Artificial Sequence; identical to SEQ ID NO: 14754
  GFR-binding peptide
  MOD_RES (1)..(1): Xaa is C or S
  MOD_RES (15)..(16)..(17)..(18)..(19): Xaa is A or G
  MOD_RES (20)..(21)..(22)..(23): Xaa is A or G or is absent

SEQ ID NO: 53044 - protein, 40 aa, Artificial Sequence; identical to SEQ ID NO: 14755
  GFR-binding peptide
  MOD_RES (5)..(6)..(37)..(39): Xaa is C or S

SEQ ID NO: 53045 - protein, 41 aa, Artificial Sequence
  GFR-binding peptide
  MOD_RES (6)..(7)..(38)..(40): Xaa is C or S
ASASPXXVSQDLSNITIQIMIGKTPKIIGEMSMIVKSXKXS

SEQ ID NO: 53046 - protein, 36 aa, Artificial Sequence
  GFR-binding peptide
  MOD_RES (1)..(2)..(33)..(35): Xaa is C or S
XXVSQDLSNITIQIMIGKTPKIIGEMSMIVKSXKXS

SEQ ID NO: 53047 - protein, 37 aa, Artificial Sequence; identical to SEQ ID NO: 19709
  GFR-binding peptide
  MOD_RES (4)..(4): Xaa is C or S
  MOD_RES (18)..(19)..(20)..(21)..(22): Xaa is A or G
  MOD_RES (23)..(24)..(25)..(26): Xaa is A or G or is absent

SEQ ID NO: 53048 - protein, 42 aa, Artificial Sequence
  GFR-binding peptide
  MOD_RES (7)..(41): Xaa is C or S
  MOD_RES (21)..(22)..(23)..(24)..(25): Xaa is A or G
  MOD_RES (26)..(27)..(28)..(29): Xaa is A or G or is absent
HVTKPTXAPTKLSNITVQIMXXXXXXXXXIGEMSNMVVRSXG

SEQ ID NO: 53049 - protein, 36 aa, Artificial Sequence
  GFR-binding peptide
  MOD_RES (16)..(17)..(18)..(19)..(20): Xaa is A or G
  MOD_RES (21)..(22)..(23)..(24): Xaa is A or G or is absent
QPSRVHHEPLPVVYYXXXXXXXXXEQLSNRLEEHLE

SEQ ID NO: 53050 - protein, 44 aa, Artificial Sequence
  GFR-binding peptide
  MOD_RES (4)..(41)..(43): Xaa is C or S
  MOD_RES (20)..(21)..(22)..(23)..(24): Xaa is A or G
  MOD_RES (25)..(26)..(27)..(28): Xaa is A or G or is absent
NVQXRPTQVQLEPLPVVYYXXXXXXXXXEQLSNTLEDHLAXKXE

SEQ ID NO: 53051 - protein, 42 aa, Artificial Sequence
  GFR-binding peptide
  MOD_RES (6)..(7)..(41): Xaa is C or S
  MOD_RES (21)..(22)..(23)..(24)..(25): Xaa is A or G
  MOD_RES (26)..(27)..(28)..(29): Xaa is A or G or is absent
YVPKPXXAPTKLSNITVQIMXXXXXXXXXIGEMSNMVVRSXG

SEQ ID NO: 53052 - protein, 44 aa, Artificial Sequence; identical to SEQ ID NO: 19710
  GFR-binding peptide
  MOD_RES (4)..(41)..(43): Xaa is C or S
  MOD_RES (20)..(21)..(22)..(23)..(24): Xaa is A or G
  MOD_RES (25)..(26)..(27)..(28): Xaa is A or G or is absent

SEQ ID NO: 53053 - protein, 36 aa, Artificial Sequence; identical to SEQ ID NO: 14757
  GFR-binding peptide
  MOD_RES (33)..(35): Xaa is C or S
  MOD_RES (14)..(15)..(16)..(17)..(18): Xaa is A or G
  MOD_RES (19)..(20)..(21)..(22): Xaa is A or G or is absent

SEQ ID NO: 53054 - protein, 37 aa, Artificial Sequence
  GFR-binding peptide
  MOD_RES (36)..(36): Xaa is C or S
  MOD_RES (15)..(16)..(17)..(18)..(19): Xaa is A or G
  MOD_RES (20)..(21)..(22)..(23): Xaa is A or G or is absent
PTQVQLEPLTVLYYXXXXXXXXXEQLSNTLEDHLAXK

SEQ ID NO: 53055 - protein, 42 aa, Artificial Sequence; identical to SEQ ID NO: 14762
  GFR-binding peptide
  MOD_RES (5)..(6)..(40)..(42): Xaa is C or S
  MOD_RES (20)..(21)..(22)..(23)..(24): Xaa is A or G
  MOD_RES (25)..(26)..(27)..(28): Xaa is A or G or is absent

SEQ ID NO: 53056 - protein, 39 aa, Artificial Sequence; identical to SEQ ID NO: 19715
  GFR-binding peptide
  MOD_RES (5)..(5): Xaa is C or S

SEQ ID NO: 53057 - protein, 32 aa, Artificial Sequence; identical to SEQ ID NO: 14763
  GFR-binding peptide
  MOD_RES (32)..(32): Xaa is C or S

SEQ ID NO: 53058 - protein, 38 aa, Artificial Sequence
  GFR-binding peptide
  MOD_RES (2)..(2): Xaa is C or S
KXQPSRVHHEPLTVLYYEYVRKKPKLEQLSNRLEEHLE

SEQ ID NO: 53059 - protein, 32 aa, Artificial Sequence; identical to SEQ ID NO: 14764
  GFR-binding peptide
  MOD_RES (14)..(15)..(16)..(17)..(18): Xaa is A or G
  MOD_RES (19)..(20)..(21)..(22): Xaa is A or G or is absent

SEQ ID NO: 53060 - protein, 40 aa, Artificial Sequence
  GFR-binding peptide
  MOD_RES (4)..(5)..(38)..(40): Xaa is C or S
  MOD_RES (19)..(20)..(21)..(22)..(23): Xaa is A or G
  MOD_RES (24)..(25)..(26)..(27): Xaa is A or G or is absent
AAPXXVPQALRPVQIRKIXXXXXXXXXKKATVMIVRSXKX

SEQ ID NO: 53061 - protein, 33 aa, Artificial Sequence
  GFR-binding peptide
  MOD_RES (1)..(33): Xaa is C or S
XVPTELRPVQMRKIDENEKVVKKATVDMVVEGX

SEQ ID NO: 53062 - protein, 38 aa, Artificial Sequence; identical to SEQ ID NO: 19719
  GFR-binding peptide
  MOD_RES (6)..(6): Xaa is C or S
  MOD_RES (20)..(21)..(22)..(23)..(24): Xaa is A or G
  MOD_RES (25)..(26)..(27)..(28): Xaa is A or G or is absent

SEQ ID NO: 53063 - protein, 42 aa, Artificial Sequence
  GFR-binding peptide
  MOD_RES (4)..(41): Xaa is C or S
NVQXRPTQVQLEPLPVVYYEIVRKKPIFEQLSNTLEDHLAXK

SEQ ID NO: 53064 - protein, 32 aa, Artificial Sequence; identical to SEQ ID NO: 14768
  GFR-binding peptide
  MOD_RES (1)..(2): Xaa is C or S

SEQ ID NO: 53065 - protein, 38 aa, Artificial Sequence
  GFR-binding peptide
  MOD_RES (1)..(2)..(36)..(38): Xaa is C or S
  MOD_RES (16)..(17)..(18)..(19)..(20): Xaa is A or G
  MOD_RES (21)..(22)..(23)..(24): Xaa is A or G or is absent
XXAPTKLSNITVQIMXXXXXXXXXIGEMSNMVVRSXGX

SEQ ID NO: 53066 - protein, 40 aa, Artificial Sequence; identical to SEQ ID NO: 14772
  GFR-binding peptide
  MOD_RES (4)..(5)..(39): Xaa is C or S
  MOD_RES (19)..(20)..(21)..(22)..(23): Xaa is A or G
  MOD_RES (24)..(25)..(26)..(27): Xaa is A or G or is absent

SEQ ID NO: 53067 - protein, 34 aa, Artificial Sequence
  GFR-binding peptide
  MOD_RES (1)..(1): Xaa is C or S
  MOD_RES (15)..(16)..(17)..(18)..(19): Xaa is A or G
  MOD_RES (20)..(21)..(22)..(23): Xaa is A or G or is absent
XVPTELRPVQMRKIXXXXXXXXXKKATVDMVVEG

SEQ ID NO: 53068 - protein, 41 aa, Artificial Sequence
  GFR-binding peptide
  MOD_RES (4)..(5)..(39)..(41): Xaa is C or S
  MOD_RES (19)..(20)..(21)..(22)..(23): Xaa is A or G
  MOD_RES (24)..(25)..(26)..(27): Xaa is A or G or is absent
PKAXXVPTELRPVQMRKIXXXXXXXXXKKATVEMVVEGXGX

SEQ ID NO: 53069 - protein, 40 aa, Artificial Sequence; identical to SEQ ID NO: 19724
  GFR-binding peptide
  MOD_RES (4)..(38)..(40): Xaa is C or S
  MOD_RES (18)..(19)..(20)..(21)..(22): Xaa is A or G
  MOD_RES (23)..(24)..(25)..(26): Xaa is A or G or is absent

SEQ ID NO: 53070 - protein, 36 aa, Artificial Sequence
  GFR-binding peptide
  MOD_RES (1)..(2)..(36): Xaa is C or S
  MOD_RES (16)..(17)..(18)..(19)..(20): Xaa is A or G
  MOD_RES (21)..(22)..(23)..(24): Xaa is A or G or is absent
XXAPTKLRPVQVRKIXXXXXXXXXKKATVNMVVRSX

SEQ ID NO: 53071 - protein, 38 aa, Artificial Sequence; identical to SEQ ID NO: 14775
  GFR-binding peptide
  MOD_RES (5)..(6): Xaa is C or S
  MOD_RES (20)..(21)..(22)..(23)..(24): Xaa is A or G
  MOD_RES (25)..(26)..(27)..(28): Xaa is A or G or is absent

SEQ ID NO: 53072 - protein, 35 aa, Artificial Sequence
  GFR-binding peptide
  MOD_RES (16)..(17)..(18)..(19)..(20): Xaa is A or G
  MOD_RES (21)..(22)..(23)..(24): Xaa is A or G or is absent
QPSRVHHEPLTVLYYXXXXXXXXXEQLSNRLEEHL

SEQ ID NO: 53073 - protein, 40 aa, Artificial Sequence; identical to SEQ ID NO: 14777
  GFR-binding peptide
  MOD_RES (5)..(6)..(40): Xaa is C or S
  MOD_RES (20)..(21)..(22)..(23)..(24): Xaa is A or G
  MOD_RES (25)..(26)..(27)..(28): Xaa is A or G or is absent

SEQ ID NO: 53074 - protein, 42 aa, Artificial Sequence; identical to SEQ ID NO: 14780
  GFR-binding peptide
  MOD_RES (5)..(6)..(40)..(42): Xaa is C or S
  MOD_RES (20)..(21)..(22)..(23)..(24): Xaa is A or G
  MOD_RES (25)..(26)..(27)..(28): Xaa is A or G or is absent

SEQ ID NO: 53075 - protein, 36 aa, Artificial Sequence
  GFR-binding peptide
  MOD_RES (1)..(33)..(35): Xaa is C or S
XAPTKLRPVQVRKIDDSSNVIKKATVNMVVRSXGXH

SEQ ID NO: 53076 - protein, 37 aa, Artificial Sequence; identical to SEQ ID NO: 14783
  GFR-binding peptide
  MOD_RES (3)..(4)..(36): Xaa is C or S

SEQ ID NO: 53077 - protein, 38 aa, Artificial Sequence
  GFR-binding peptide
  MOD_RES (4)..(5)..(38): Xaa is C or S
  MOD_RES (19)..(20)..(21)..(22)..(23): Xaa is A or G
  MOD_RES (24)..(25)..(26)..(27): Xaa is A or G or is absent
ASPXXVPQDLRPVQIRKIXXXXXXXXXKKATVMVVKSX

SEQ ID NO: 53078 - protein, 35 aa, Artificial Sequence
  GFR-binding peptide
  MOD_RES (34)..(34): Xaa is C or S
  MOD_RES (14)..(15)..(16)..(17)..(18): Xaa is A or G
  MOD_RES (19)..(20)..(21)..(22): Xaa is A or G or is absent
APTQLRSVKVAKVXXXXXXXXXKEVQVNMVVRAXG

SEQ ID NO: 53079 - protein, 39 aa, Artificial Sequence; identical to SEQ ID NO: 14787
  GFR-binding peptide
  MOD_RES (5)..(39): Xaa is C or S
  MOD_RES (19)..(20)..(21)..(22)..(23): Xaa is A or G
  MOD_RES (24)..(25)..(26)..(27): Xaa is A or G or is absent

SEQ ID NO: 53080 - protein, 33 aa, Artificial Sequence
  GFR-binding peptide
  MOD_RES (14)..(15)..(16)..(17)..(18): Xaa is A or G
  MOD_RES (19)..(20)..(21)..(22): Xaa is A or G or is absent
VPTELSNITMQIMXXXXXXXXXIGEMSEMVVEG

SEQ ID NO: 53081 - protein, 38 aa, Artificial Sequence; identical to SEQ ID NO: 14788
  GFR-binding peptide
  MOD_RES (1)..(35)..(37): Xaa is C or S
  MOD_RES (15)..(16)..(17)..(18)..(19): Xaa is A or G
  MOD_RES (20)..(21)..(22)..(23): Xaa is A or G or is absent

SEQ ID NO: 53082 - protein, 38 aa, Artificial Sequence; identical to SEQ ID NO: 14790
  GFR-binding peptide
  MOD_RES (5)..(6): Xaa is C or S
  MOD_RES (20)..(21)..(22)..(23)..(24): Xaa is A or G
  MOD_RES (25)..(26)..(27)..(28): Xaa is A or G or is absent

SEQ ID NO: 53083 - protein, 40 aa, Artificial Sequence; identical to SEQ ID NO: 14792
  GFR-binding peptide
  MOD_RES (6)..(7): Xaa is C or S
  MOD_RES (21)..(22)..(23)..(24)..(25): Xaa is A or G
  MOD_RES (26)..(27)..(28)..(29): Xaa is A or G or is absent

SEQ ID NO: 53084 - protein, 35 aa, Artificial Sequence
  GFR-binding peptide
  MOD_RES (1)..(34): Xaa is C or S
  MOD_RES (15)..(16)..(17)..(18)..(19): Xaa is A or G
  MOD_RES (20)..(21)..(22)..(23): Xaa is A or G or is absent
XVSQDLRSVKIAKVXXXXXXXXXKEVQVMIVKSXK

SEQ ID NO: 53085 - protein, 41 aa, Artificial Sequence; identical to SEQ ID NO: 14793
  GFR-binding peptide
  MOD_RES (3)..(4)..(38)..(40): Xaa is C or S
  MOD_RES (18)..(19)..(20)..(21)..(22): Xaa is A or G
  MOD_RES (23)..(24)..(25)..(26): Xaa is A or G or is absent

SEQ ID NO: 53086 - protein, 39 aa, Artificial Sequence
  GFR-binding peptide
  MOD_RES (7)..(7): Xaa is C or S
  MOD_RES (21)..(22)..(23)..(24)..(25): Xaa is A or G
  MOD_RES (26)..(27)..(28)..(29): Xaa is A or G or is absent
HVTKPTXAPTKLRPVQVRKIXXXXXXXXXKKATVNMVVR

SEQ ID NO: 53087 - protein, 39 aa, Artificial Sequence
  GFR-binding peptide
  MOD_RES (7)..(7): Xaa is C or S
  MOD_RES (21)..(22)..(23)..(24)..(25): Xaa is A or G
  MOD_RES (26)..(27)..(28)..(29): Xaa is A or G or is absent
HVTKPTXAPTKLRSVKVAKVXXXXXXXXXKEVQVNMVVR

SEQ ID NO: 53088 - protein, 37 aa, Artificial Sequence; identical to SEQ ID NO: 14801
  GFR-binding peptide
  MOD_RES (5)..(5): Xaa is C or S
  MOD_RES (19)..(20)..(21)..(22)..(23): Xaa is A or G
  MOD_RES (24)..(25)..(26)..(27): Xaa is A or G or is absent

SEQ ID NO: 53089 - protein, 36 aa, Artificial Sequence
  GFR-binding peptide
  MOD_RES (1)..(35): Xaa is C or S
  MOD_RES (15)..(16)..(17)..(18)..(19): Xaa is A or G
  MOD_RES (20)..(21)..(22)..(23): Xaa is A or G or is absent
XVPTEEEPLPMVYYXXXXXXXXXEQLSNFLQHNKXE

SEQ ID NO: 53090 - protein, 41 aa, Artificial Sequence; identical to SEQ ID NO: 19738
  GFR-binding peptide
  MOD_RES (7)..(41): Xaa is C or S
  MOD_RES (21)..(22)..(23)..(24)..(25): Xaa is A or G
  MOD_RES (26)..(27)..(28)..(29): Xaa is A or G or is absent

SEQ ID NO: 53091 - protein, 38 aa, Artificial Sequence
  GFR-binding peptide
  MOD_RES (3)..(3): Xaa is C or S
  MOD_RES (19)..(20)..(21)..(22)..(23): Xaa is A or G
  MOD_RES (24)..(25)..(26)..(27): Xaa is A or G or is absent
VQXRPTQVQLEPLTVLYYXXXXXXXXXEQLSNTLEDHL

SEQ ID NO: 53092 - protein, 35 aa, Artificial Sequence
  GFR-binding peptide
  MOD_RES (3)..(4): Xaa is C or S
KAXXVPTELRPVQMRKIDENEKVVKKATVDMVVEG

SEQ ID NO: 53093 - protein, 40 aa, Artificial Sequence
  GFR-binding peptide
  MOD_RES (7)..(7): Xaa is C or S
  MOD_RES (21)..(22)..(23)..(24)..(25): Xaa is A or G
  MOD_RES (26)..(27)..(28)..(29): Xaa is A or G or is absent
NDEGLEXVPTEEEPLTMLYYXXXXXXXXXEQLSNFLQHNK

SEQ ID NO: 53094 - protein, 40 aa, Artificial Sequence; identical to SEQ ID NO: 14807
  GFR-binding peptide
  MOD_RES (6)..(7): Xaa is C or S
  MOD_RES (21)..(22)..(23)..(24)..(25): Xaa is A or G
  MOD_RES (26)..(27)..(28)..(29): Xaa is A or G or is absent

SEQ ID NO: 53095 - protein, 42 aa, Artificial Sequence; identical to SEQ ID NO: 19742
  GFR-binding peptide
  MOD_RES (3)..(40)..(42): Xaa is C or S
  MOD_RES (19)..(20)..(21)..(22)..(23): Xaa is A or G
  MOD_RES (24)..(25)..(26)..(27): Xaa is A or G or is absent

SEQ ID NO: 53096 - protein, 41 aa, Artificial Sequence
  GFR-binding peptide
  MOD_RES (4)..(41): Xaa is C or S
NVQXRPTQVQLEPLTVLYYEIVRKKPIFEQLSNTLEDHLAX

SEQ ID NO: 53097 - protein, 38 aa, Artificial Sequence
  GFR-binding peptide
  MOD_RES (5)..(6)..(38): Xaa is C or S
VPKPXXAPTQLRPVQVRKIDDSSNVIKKATVNMVVRAX

SEQ ID NO: 53098 - protein, 33 aa, Artificial Sequence
  GFR-binding peptide
  MOD_RES (32)..(32): Xaa is C or S
VPTELSNITMQIMDENEKVVIGEMSDMVVEGXG

SEQ ID NO: 53099 - protein, 41 aa, Artificial Sequence
  GFR-binding peptide
  MOD_RES (5)..(6)..(40): Xaa is C or S
  MOD_RES (20)..(21)..(22)..(23)..(24): Xaa is A or G
  MOD_RES (25)..(26)..(27)..(28): Xaa is A or G or is absent
IPKAXXVPTELRPVQMRKIXXXXXXXXXKKATVDMVVEGXG

SEQ ID NO: 53100 - protein, 36 aa, Artificial Sequence
  GFR-binding peptide
  MOD_RES (34)..(36): Xaa is C or S
VPTEEEPLPMVYYRIKPHQGQHEQLSNFLQHNKXEX

SEQ ID NO: 53101 - protein, 39 aa, Artificial Sequence; identical to SEQ ID NO: 14814
  GFR-binding peptide
  MOD_RES (4)..(5)..(36)..(38): Xaa is C or S

SEQ ID NO: 53102 - protein, 40 aa, Artificial Sequence
  GFR-binding peptide
  MOD_RES (6)..(7)..(40): Xaa is C or S
  MOD_RES (21)..(22)..(23)..(24)..(25): Xaa is A or G
  MOD_RES (26)..(27)..(28)..(29): Xaa is A or G or is absent
ASAAPXXVPQALSNITIQIMXXXXXXXXXIGEMSMIVRSX

SEQ ID NO: 53103 - protein, 40 aa, Artificial Sequence; identical to SEQ ID NO: 14815
  GFR-binding peptide
  MOD_RES (5)..(6)..(38)..(40): Xaa is C or S

SEQ ID NO: 53104 - protein, 43 aa, Artificial Sequence; identical to SEQ ID NO: 14816
  GFR-binding peptide
  MOD_RES (6)..(7)..(41)..(43): Xaa is C or S
  MOD_RES (21)..(22)..(23)..(24)..(25): Xaa is A or G
  MOD_RES (26)..(27)..(28)..(29): Xaa is A or G or is absent

SEQ ID NO: 53105 - protein, 33 aa, Artificial Sequence; identical to SEQ ID NO: 14817
  GFR-binding peptide
  MOD_RES (14)..(15)..(16)..(17)..(18): Xaa is A or G
  MOD_RES (19)..(20)..(21)..(22): Xaa is A or G or is absent

SEQ ID NO: 53106 - protein, 32 aa, Artificial Sequence; identical to SEQ ID NO: 14818
  GFR-binding peptide
  MOD_RES (1)..(2): Xaa is C or S

SEQ ID NO: 53107 - protein, 38 aa, Artificial Sequence
  GFR-binding peptide
  MOD_RES (4)..(4): Xaa is C or S
SVKXQPSRVHHEPLTVLYYEYVRKKPKLEQLSNRLEEH

SEQ ID NO: 53108 - protein, 42 aa, Artificial Sequence; identical to SEQ ID NO: 14819
  GFR-binding peptide
  MOD_RES (4)..(5)..(39)..(41): Xaa is C or S
  MOD_RES (19)..(20)..(21)..(22)..(23): Xaa is A or G
  MOD_RES (24)..(25)..(26)..(27): Xaa is A or G or is absent

SEQ ID NO: 53109 - protein, 36 aa, Artificial Sequence
  GFR-binding peptide
  MOD_RES (2)..(34)..(36): Xaa is C or S
TXAPTKLRPVQVRKIDDSSNVIKKATVNMVVRSXGX

SEQ ID NO: 53110 - protein, 34 aa, Artificial Sequence; identical to SEQ ID NO: 14820
  GFR-binding peptide
  MOD_RES (2)..(3): Xaa is C or S

SEQ ID NO: 53111 - protein, 37 aa, Artificial Sequence
  GFR-binding peptide
  MOD_RES (5)..(6)..(37): Xaa is C or S
SAAPXXVPQALSNITIQIMVGRKPKVIGEMSMIVRSX

SEQ ID NO: 53112 - protein, 37 aa, Artificial Sequence
  GFR-binding peptide
  MOD_RES (3)..(4): Xaa is C or S
  MOD_RES (18)..(19)..(20)..(21)..(22): Xaa is A or G
  MOD_RES (23)..(24)..(25)..(26): Xaa is A or G or is absent
KAXXVPTELRPVQMRKIXXXXXXXXXKKATVEMVVEG

SEQ ID NO: 53113 - protein, 41 aa, Artificial Sequence; identical to SEQ ID NO: 14823
  GFR-binding peptide
  MOD_RES (6)..(7)..(39)..(41): Xaa is C or S

SEQ ID NO: 53114 - protein, 40 aa, Artificial Sequence
  GFR-binding peptide
  MOD_RES (4)..(5)..(38)..(40): Xaa is C or S
  MOD_RES (19)..(20)..(21)..(22)..(23): Xaa is A or G
  MOD_RES (24)..(25)..(26)..(27): Xaa is A or G or is absent
ASPXXVSQDLRPVQIRKIXXXXXXXXXKKATVMIVKSXKX

SEQ ID NO: 53115 - protein, 38 aa, Artificial Sequence
  GFR-binding peptide
  MOD_RES (4)..(4): Xaa is C or S
SVKXQPSRVHHEPLPVVYYEYVRKKPKLEQLSNRLEEH

SEQ ID NO: 53116 - protein, 40 aa, Artificial Sequence
  GFR-binding peptide
  MOD_RES (6)..(7)..(39): Xaa is C or S
TVPKPXXAPTQLRSVKVAKVDDSSNVIKEVQVNMVVRAXG

SEQ ID NO: 53117 - protein, 37 aa, Artificial Sequence
  GFR-binding peptide
  MOD_RES (1)..(35)..(37): Xaa is C or S
  MOD_RES (15)..(16)..(17)..(18)..(19): Xaa is A or G
  MOD_RES (20)..(21)..(22)..(23): Xaa is A or G or is absent
XVPTEEEPLPMVYYXXXXXXXXXEQLSNFLQHNKXEX

SEQ ID NO: 53118 - protein, 34 aa, Artificial Sequence; identical to SEQ ID NO: 14826
  GFR-binding peptide
  MOD_RES (31)..(33): Xaa is C or S

SEQ ID NO: 53119 - protein, 36 aa, Artificial Sequence
  GFR-binding peptide
  MOD_RES (1)..(2)..(35): Xaa is C or S
  MOD_RES (16)..(17)..(18)..(19)..(20): Xaa is A or G
  MOD_RES (21)..(22)..(23)..(24): Xaa is A or G or is absent
XXVPQDLRSVKIAKVXXXXXXXXXKEVQVMVVKSXK

SEQ ID NO: 53120 - protein, 38 aa, Artificial Sequence; identical to SEQ ID NO: 14828
  GFR-binding peptide
  MOD_RES (2)..(36)..(38): Xaa is C or S
  MOD_RES (16)..(17)..(18)..(19)..(20): Xaa is A or G
  MOD_RES (21)..(22)..(23)..(24): Xaa is A or G or is absent

SEQ ID NO: 53121 - protein, 39 aa, Artificial Sequence; identical to SEQ ID NO: 19753
  GFR-binding peptide
  MOD_RES (5)..(39): Xaa is C or S
  MOD_RES (19)..(20)..(21)..(22)..(23): Xaa is A or G
  MOD_RES (24)..(25)..(26)..(27): Xaa is A or G or is absent

SEQ ID NO: 53122 - protein, 40 aa, Artificial Sequence; identical to SEQ ID NO: 14829
  GFR-binding peptide
  MOD_RES (3)..(4)..(38)..(40): Xaa is C or S
  MOD_RES (18)..(19)..(20)..(21)..(22): Xaa is A or G
  MOD_RES (23)..(24)..(25)..(26): Xaa is A or G or is absent

SEQ ID NO: 53123 - protein, 37 aa, Artificial Sequence; identical to SEQ ID NO: 40575
  GFR-binding peptide
  MOD_RES (4)..(5): Xaa is C or S
  MOD_RES (19)..(20)..(21)..(22)..(23): Xaa is A or G
  MOD_RES (24)..(25)..(26)..(27): Xaa is A or G or is absent

SEQ ID NO: 53124 - protein, 33 aa, Artificial Sequence
  GFR-binding peptide
  MOD_RES (1)..(32): Xaa is C or S
XVPQALRSVKIAKVVGRKPKVKEVQVMIVRSXK

SEQ ID NO: 53125 - protein, 36 aa, Artificial Sequence; identical to SEQ ID NO: 14831
  GFR-binding peptide
  MOD_RES (1)..(2)..(34)..(36): Xaa is C or S

SEQ ID NO: 53126 - protein, 40 aa, Artificial Sequence
  GFR-binding peptide
  MOD_RES (4)..(4): Xaa is C or S
  MOD_RES (20)..(21)..(22)..(23)..(24): Xaa is A or G
  MOD_RES (25)..(26)..(27)..(28): Xaa is A or G or is absent
NVQXRPTQVQLEPLTVLYYXXXXXXXXXEQLSNTLEDHLA

SEQ ID NO: 53127 - protein, 39 aa, Artificial Sequence; identical to SEQ ID NO: 14833
  GFR-binding peptide
  MOD_RES (6)..(7)..(39): Xaa is C or S

SEQ ID NO: 53128 - protein, 38 aa, Artificial Sequence
  GFR-binding peptide
  MOD_RES (2)..(3)..(35)..(37): Xaa is C or S
PXXAPTKLRSVKVAKVDDSSNVIKEVQVNMVVRSXGXH

SEQ ID NO: 53129 - protein, 39 aa, Artificial Sequence
  GFR-binding peptide
  MOD_RES (5)..(5): Xaa is C or S
  MOD_RES (21)..(22)..(23)..(24)..(25): Xaa is A or G
  MOD_RES (26)..(27)..(28)..(29): Xaa is A or G or is absent
SSVKXQPSRVHHEPLPVVYYXXXXXXXXXEQLSNRLEEH

SEQ ID NO: 53130 - protein, 40 aa, Artificial Sequence; identical to SEQ ID NO: 19758
  GFR-binding peptide
  MOD_RES (4)..(4): Xaa is C or S

SEQ ID NO: 53131 - protein, 34 aa, Artificial Sequence
  GFR-binding peptide
  MOD_RES (1)..(2): Xaa is C or S
  MOD_RES (16)..(17)..(18)..(19)..(20): Xaa is A or G
  MOD_RES (21)..(22)..(23)..(24): Xaa is A or G or is absent
XXVPTELRPVQMRKIXXXXXXXXXKKATVDMVVE

SEQ ID NO: 53132 - protein, 35 aa, Artificial Sequence; identical to SEQ ID NO: 14835
  GFR-binding peptide
  MOD_RES (34)..(34): Xaa is C or S
  MOD_RES (14)..(15)..(16)..(17)..(18): Xaa is A or G
  MOD_RES (19)..(20)..(21)..(22): Xaa is A or G or is absent

SEQ ID NO: 53133 - protein, 40 aa, Artificial Sequence
  GFR-binding peptide
  MOD_RES (6)..(7)..(38)..(40): Xaa is C or S
ASAAPXXVPQALRSVKIAKVVGRKPKVKEVQVMIVRSXKX

SEQ ID NO: 53134 - protein, 39 aa, Artificial Sequence; identical to SEQ ID NO: 14837
  GFR-binding peptide
  MOD_RES (4)..(5)..(37)..(39): Xaa is C or S

SEQ ID NO: 53135 - protein, 36 aa, Artificial Sequence
  GFR-binding peptide
  MOD_RES (16)..(17)..(18)..(19)..(20): Xaa is A or G
  MOD_RES (21)..(22)..(23)..(24): Xaa is A or G or is absent
RPTQVQLEPLPVVYYXXXXXXXXXEQLSNTLEDHLA

SEQ ID NO: 53136 - protein, 38 aa, Artificial Sequence
  GFR-binding peptide
  MOD_RES (35)..(37): Xaa is C or S
  MOD_RES (14)..(15)..(16)..(17)..(18): Xaa is A or G
  MOD_RES (19)..(20)..(21)..(22): Xaa is A or G or is absent
TQVQLEPLPVVYYXXXXXXXXXEQLSNTLEDHLAXKXE

SEQ ID NO: 53137 - protein, 41 aa, Artificial Sequence
  GFR-binding peptide
  MOD_RES (5)..(5): Xaa is C or S
RNVQXRPTQVQLEPLTVLYYEIVRKKPIFEQLSNTLEDHLA

SEQ ID NO: 53138 - protein, 42 aa, Artificial Sequence; identical to SEQ ID NO: 14841
  GFR-binding peptide
  MOD_RES (5)..(6)..(40)..(42): Xaa is C or S
  MOD_RES (20)..(21)..(22)..(23)..(24): Xaa is A or G
  MOD_RES (25)..(26)..(27)..(28): Xaa is A or G or is absent

SEQ ID NO: 53139 - protein, 37 aa, Artificial Sequence
  GFR-binding peptide
  MOD_RES (4)..(5): Xaa is C or S
  MOD_RES (19)..(20)..(21)..(22)..(23): Xaa is A or G
  MOD_RES (24)..(25)..(26)..(27): Xaa is A or G or is absent
AAPXXVPQALRSVKIAKVXXXXXXXXXKEVQVMIVRS

SEQ ID NO: 53140 - protein, 32 aa, Artificial Sequence
  GFR-binding peptide
  MOD_RES (1)..(2): Xaa is C or S
XXVPQDLRPVQIRKIVGRTPKVKKATVMVVKS

SEQ ID NO: 53141 - protein, 35 aa, Artificial Sequence; identical to SEQ ID NO: 14843
  GFR-binding peptide
  MOD_RES (1)..(33)..(35): Xaa is C or S

SEQ ID NO: 53142 - protein, 37 aa, Artificial Sequence; identical to SEQ ID NO: 19765
  GFR-binding peptide
  MOD_RES (5)..(5): Xaa is C or S
  MOD_RES (19)..(20)..(21)..(22)..(23): Xaa is A or G
  MOD_RES (24)..(25)..(26)..(27): Xaa is A or G or is absent

SEQ ID NO: 53143 - protein, 37 aa, Artificial Sequence; identical to SEQ ID NO: 14844
  GFR-binding peptide
  MOD_RES (3)..(35)..(37): Xaa is C or S

SEQ ID NO: 53144 - protein, 36 aa, Artificial Sequence
  GFR-binding peptide
  MOD_RES (2)..(3)..(36): Xaa is C or S
  MOD_RES (17)..(18)..(19)..(20)..(21): Xaa is A or G
  MOD_RES (22)..(23)..(24)..(25): Xaa is A or G or is absent
PXXVSQDLRPVQIRKIXXXXXXXXXKKATVMIVKSX

SEQ ID NO: 53145 - protein, 42 aa, Artificial Sequence; identical to SEQ ID NO: 14845
  GFR-binding peptide
  MOD_RES (5)..(6)..(39)..(41): Xaa is C or S
  MOD_RES (20)..(21)..(22)..(23)..(24): Xaa is A or G
  MOD_RES (25)..(26)..(27)..(28): Xaa is A or G or is absent

SEQ ID NO: 53146 - protein, 40 aa, Artificial Sequence; identical to SEQ ID NO: 19767
  GFR-binding peptide
  MOD_RES (7)..(7): Xaa is C or S

SEQ ID NO: 53147 - protein, 37 aa, Artificial Sequence; identical to SEQ ID NO: 19768
  GFR-binding peptide
  MOD_RES (34)..(36): Xaa is C or S
  MOD_RES (14)..(15)..(16)..(17)..(18): Xaa is A or G
  MOD_RES (19)..(20)..(21)..(22): Xaa is A or G or is absent

SEQ ID NO: 53148 - protein, 31 aa, Artificial Sequence
  GFR-binding peptide
  MOD_RES (1)..(1): Xaa is C or S
XVPQDLRPVQIRKIVGRTPKVKKATVMVVKS

SEQ ID NO: 53149 - protein, 34 aa, Artificial Sequence; identical to SEQ ID NO: 14846
  GFR-binding peptide
  MOD_RES (34)..(34): Xaa is C or S
  MOD_RES (14)..(15)..(16)..(17)..(18): Xaa is A or G
  MOD_RES (19)..(20)..(21)..(22): Xaa is A or G or is absent

SEQ ID NO: 53150 - protein, 36 aa, Artificial Sequence
  GFR-binding peptide
  MOD_RES (3)..(4)..(36): Xaa is C or S
KAXXVPTELRSVKMAKVDEYDKVVKEVQVEMVVEGX

SEQ ID NO: 53151 - protein, 43 aa, Artificial Sequence; identical to SEQ ID NO: 14847
  GFR-binding peptide
  MOD_RES (5)..(6)..(40)..(42): Xaa is C or S
  MOD_RES (20)..(21)..(22)..(23)..(24): Xaa is A or G
  MOD_RES (25)..(26)..(27)..(28): Xaa is A or G or is absent

SEQ ID NO: 53152 - protein, 42 aa, Artificial Sequence
  GFR-binding peptide
  MOD_RES (4)..(5)..(39)..(41): Xaa is C or S
  MOD_RES (19)..(20)..(21)..(22)..(23): Xaa is A or G
  MOD_RES (24)..(25)..(26)..(27): Xaa is A or G or is absent
PKAXXVPTELRPVQMRKIXXXXXXXXXKKATVDMVVEGXGXR

SEQ ID NO: 53153 - protein, 38 aa, Artificial Sequence; identical to SEQ ID NO: 19771
  GFR-binding peptide
  MOD_RES (4)..(38): Xaa is C or S

SEQ ID NO: 53154 - protein, 38 aa, Artificial Sequence; identical to SEQ ID NO: 19772
  GFR-binding peptide
  MOD_RES (4)..(4): Xaa is C or S
  MOD_RES (20)..(21)..(22)..(23)..(24): Xaa is A or G
  MOD_RES (25)..(26)..(27)..(28): Xaa is A or G or is absent

SEQ ID NO: 53155 - protein, 38 aa, Artificial Sequence; identical to SEQ ID NO: 19773
  GFR-binding peptide
  MOD_RES (35)..(37): Xaa is C or S
  MOD_RES (14)..(15)..(16)..(17)..(18): Xaa is A or G
  MOD_RES (19)..(20)..(21)..(22): Xaa is A or G or is absent

SEQ ID NO: 53156 - protein, 37 aa, Artificial Sequence; identical to SEQ ID NO: 14849
  GFR-binding peptide
  MOD_RES (2)..(3)..(36): Xaa is C or S
  MOD_RES (17)..(18)..(19)..(20)..(21): Xaa is A or G
  MOD_RES (22)..(23)..(24)..(25): Xaa is A or G or is absent

SEQ ID NO: 53157 - protein, 38 aa, Artificial Sequence
  GFR-binding peptide
  MOD_RES (4)..(5): Xaa is C or S
  MOD_RES (19)..(20)..(21)..(22)..(23): Xaa is A or G
  MOD_RES (24)..(25)..(26)..(27): Xaa is A or G or is absent
PKPXXAPTKLRPVQVRKIXXXXXXXXXKKATVNMVVRS

SEQ ID NO: 53158 - protein, 40 aa, Artificial Sequence; identical to SEQ ID NO: 14853
  GFR-binding peptide
  MOD_RES (3)..(4)..(38)..(40): Xaa is C or S
  MOD_RES (18)..(19)..(20)..(21)..(22): Xaa is A or G
  MOD_RES (23)..(24)..(25)..(26): Xaa is A or G or is absent

SEQ ID NO: 53159 - protein, 37 aa, Artificial Sequence
  GFR-binding peptide
  MOD_RES (3)..(4)..(36): Xaa is C or S
KPXXAPTQLRPVQVRKIDDSSNVIKKATVNMVVRAXG

SEQ ID NO: 53160 - protein, 36 aa, Artificial Sequence
  GFR-binding peptide
  MOD_RES (34)..(36): Xaa is C or S
  MOD_RES (14)..(15)..(16)..(17)..(18): Xaa is A or G
  MOD_RES (19)..(20)..(21)..(22): Xaa is A or G or is absent
APTKLSNITVQIMXXXXXXXXXIGEMSNMVVRSXGX

SEQ ID NO: 53161 - protein, 41 aa, Artificial Sequence
  GFR-binding peptide
  MOD_RES (6)..(7)..(40): Xaa is C or S
  MOD_RES (21)..(22)..(23)..(24)..(25): Xaa is A or G
  MOD_RES (26)..(27)..(28)..(29): Xaa is A or G or is absent
ASASPXXVSQDLRPVQIRKIXXXXXXXXXKKATVMIVKSXK

SEQ ID NO: 53162 - protein, 40 aa, Artificial Sequence; identical to SEQ ID NO: 14856
  GFR-binding peptide
  MOD_RES (3)..(4)..(38)..(40): Xaa is C or S
  MOD_RES (18)..(19)..(20)..(21)..(22): Xaa is A or G
  MOD_RES (23)..(24)..(25)..(26): Xaa is A or G or is absent

SEQ ID NO: 53163 - protein, 38 aa, Artificial Sequence; identical to SEQ ID NO: 14859
  GFR-binding peptide
  MOD_RES (3)..(4)..(36)..(38): Xaa is C or S

SEQ ID NO: 53164 - protein, 41 aa, Artificial Sequence
  GFR-binding peptide
  MOD_RES (7)..(39)..(41): Xaa is C or S
HVTKPTXAPTKLSNITVQIMDDSSNVIIGEMSNMVVRSXGX

SEQ ID NO: 53165 - protein, 37 aa, Artificial Sequence
  GFR-binding peptide
  MOD_RES (2)..(3)..(35)..(37): Xaa is C or S
AXXVPTELRSVKMAKVDENEKVVKEVQVDMVVEGXGX

SEQ ID NO: 53166 - protein, 34 aa, Artificial Sequence
  GFR-binding peptide
  MOD_RES (32)..(34): Xaa is C or S
APTQLRPVQVRKIDDSSNVIKKATVNMVVRAXGX

SEQ ID NO: 53167 - protein, 36 aa, Artificial Sequence
  GFR-binding peptide
  MOD_RES (3)..(4)..(35): Xaa is C or S
SPXXVPQDLSNITIQIMVGRTPKVIGEMSMVVKSXK

SEQ ID NO: 53168 - protein, 38 aa, Artificial Sequence; identical to SEQ ID NO: 19784
  GFR-binding peptide
  MOD_RES (2)..(2): Xaa is C or S
  MOD_RES (18)..(19)..(20)..(21)..(22): Xaa is A or G
  MOD_RES (23)..(24)..(25)..(26): Xaa is A or G or is absent

SEQ ID NO: 53169 - protein, 41 aa, Artificial Sequence; identical to SEQ ID NO: 19786
  GFR-binding peptide
  MOD_RES (5)..(5): Xaa is C or S

SEQ ID NO: 53170 - protein, 38 aa, Artificial Sequence
  GFR-binding peptide
  MOD_RES (2)..(2): Xaa is C or S
  MOD_RES (18)..(19)..(20)..(21)..(22): Xaa is A or G
  MOD_RES (23)..(24)..(25)..(26): Xaa is A or G or is absent
QXRPTQVQLEPLTVLYYXXXXXXXXXEQLSNTLEDHLA

SEQ ID NO: 53171 - protein, 32 aa, Artificial Sequence; identical to SEQ ID NO: 19788
  GFR-binding peptide
  MOD_RES (14)..(15)..(16)..(17)..(18): Xaa is A or G
  MOD_RES (19)..(20)..(21)..(22): Xaa is A or G or is absent

SEQ ID NO: 53172 - protein, 36 aa, Artificial Sequence; identical to SEQ ID NO: 19789
  GFR-binding peptide
  MOD_RES (1)..(1): Xaa is C or S

SEQ ID NO: 53173 - protein, 40 aa, Artificial Sequence
  GFR-binding peptide
  MOD_RES (4)..(38)..(40): Xaa is C or S
  MOD_RES (18)..(19)..(20)..(21)..(22): Xaa is A or G
  MOD_RES (23)..(24)..(25)..(26): Xaa is A or G or is absent
GLEXVPTEEEPLPMVYYXXXXXXXXXEQLSNFLQHNKXEX

SEQ ID NO: 53174 - protein, 41 aa, Artificial Sequence; identical to SEQ ID NO: 14869
  GFR-binding peptide
  MOD_RES (6)..(7)..(41): Xaa is C or S
  MOD_RES (21)..(22)..(23)..(24)..(25): Xaa is A or G
  MOD_RES (26)..(27)..(28)..(29): Xaa is A or G or is absent

SEQ ID NO: 53175 - protein, 33 aa, Artificial Sequence; identical to SEQ ID NO: 14870
  GFR-binding peptide
  MOD_RES (1)..(1): Xaa is C or S
  MOD_RES (15)..(16)..(17)..(18)..(19): Xaa is A or G
  MOD_RES (20)..(21)..(22)..(23): Xaa is A or G or is absent

SEQ ID NO: 53176 - protein, 32 aa, Artificial Sequence; identical to SEQ ID NO: 14872
  GFR-binding peptide
  MOD_RES (1)..(2): Xaa is C or S

SEQ ID NO: 53177 - protein, 42 aa, Artificial Sequence; identical to SEQ ID NO: 14873
  GFR-binding peptide
  MOD_RES (5)..(39)..(41): Xaa is C or S
  MOD_RES (19)..(20)..(21)..(22)..(23): Xaa is A or G
  MOD_RES (24)..(25)..(26)..(27): Xaa is A or G or is absent

SEQ ID NO: 53178 - protein, 41 aa, Artificial Sequence
  GFR-binding peptide
  MOD_RES (4)..(5)..(39)..(41): Xaa is C or S
  MOD_RES (19)..(20)..(21)..(22)..(23): Xaa is A or G
  MOD_RES (24)..(25)..(26)..(27): Xaa is A or G or is absent
PKPXXAPTQLRPVQVRKIXXXXXXXXXKKATVNMVVRAXGX

SEQ ID NO: 53179 - protein, 41 aa, Artificial Sequence
  GFR-binding peptide
  MOD_RES (4)..(5)..(39)..(41): Xaa is C or S
  MOD_RES (19)..(20)..(21)..(22)..(23): Xaa is A or G
  MOD_RES (24)..(25)..(26)..(27): Xaa is A or G or is absent
PKAXXVPTELRSVKMAKVXXXXXXXXXKEVQVEMVVEGXGX

SEQ ID NO: 53180 - protein, 39 aa, Artificial Sequence
  GFR-binding peptide
  MOD_RES (36)..(38): Xaa is C or S
PSRVHHEPLTVLYYEYVRKKPKLEQLSNRLEEHLEXAXA

SEQ ID NO: 53181 - protein, 33 aa, Artificial Sequence
  GFR-binding peptide
  MOD_RES (1)..(1): Xaa is C or S
  MOD_RES (15)..(16)..(17)..(18)..(19): Xaa is A or G
  MOD_RES (20)..(21)..(22)..(23): Xaa is A or G or is absent
XVPQALRSVKIAKVXXXXXXXXXKEVQVMIVRS

SEQ ID NO: 53182 - protein, 40 aa, Artificial Sequence
  GFR-binding peptide
  MOD_RES (4)..(4): Xaa is C or S
  MOD_RES (20)..(21)..(22)..(23)..(24): Xaa is A or G
  MOD_RES (25)..(26)..(27)..(28): Xaa is A or G or is absent
NVQXRPTQVQLEPLPVVYYXXXXXXXXXEQLSNTLEDHLA

SEQ ID NO: 53183 - protein, 36 aa, Artificial Sequence; identical to SEQ ID NO: 14879
  GFR-binding peptide
  MOD_RES (2)..(3)..(35): Xaa is C or S

SEQ ID NO: 53184 - protein, 37 aa, Artificial Sequence
  GFR-binding peptide
  MOD_RES (1)..(35)..(37): Xaa is C or S
  MOD_RES (15)..(16)..(17)..(18)..(19): Xaa is A or G
  MOD_RES (20)..(21)..(22)..(23): Xaa is A or G or is absent
XVPTELRPVQMRKIXXXXXXXXXKKATVDMVVEGXGX

SEQ ID NO: 53185 - protein, 35 aa, Artificial Sequence
  GFR-binding peptide
  MOD_RES (3)..(4): Xaa is C or S
KPXXAPTQLSNITVQIMDDSSNVIIGEMSNMVVRA

SEQ ID NO: 53186 - protein, 38 aa, Artificial Sequence; identical to SEQ ID NO: 14880
  GFR-binding peptide
  MOD_RES (6)..(7)..(38): Xaa is C or S

SEQ ID NO: 53187 - protein, 37 aa, Artificial Sequence
  GFR-binding peptide
  MOD_RES (1)..(2)..(35)..(37): Xaa is C or S
  MOD_RES (16)..(17)..(18)..(19)..(20): Xaa is A or G
  MOD_RES (21)..(22)..(23)..(24): Xaa is A or G or is absent
XXVPQDLRSVKIAKVXXXXXXXXXKEVQVMVVKSXKX

SEQ ID NO: 53188 - protein, 35 aa, Artificial Sequence; identical to SEQ ID NO: 14881
  GFR-binding peptide
  MOD_RES (32)..(34): Xaa is C or S

SEQ ID NO: 53189 - protein, 32 aa, Artificial Sequence; identical to SEQ ID NO: 40652
  GFR-binding peptide
  MOD_RES (14)..(15)..(16)..(17)..(18): Xaa is A or G
  MOD_RES (19)..(20)..(21)..(22): Xaa is A or G or is absent

SEQ ID NO: 53190 - protein, 32 aa, Artificial Sequence
  GFR-binding peptide
  MOD_RES (14)..(15)..(16)..(17)..(18): Xaa is A or G
  MOD_RES (19)..(20)..(21)..(22): Xaa is A or G or is absent
VPQDLSNITIQIMXXXXXXXXXIGEMSMVVKS

SEQ ID NO: 53191 - protein, 40 aa, Artificial Sequence; identical to SEQ ID NO: 14882
  GFR-binding peptide
  MOD_RES (5)..(6)..(38)..(40): Xaa is C or S

SEQ ID NO: 53192 - protein, 38 aa, Artificial Sequence
  GFR-binding peptide
  MOD_RES (2)..(3)..(36)..(38): Xaa is C or S
  MOD_RES (17)..(18)..(19)..(20)..(21): Xaa is A or G
  MOD_RES (22)..(23)..(24)..(25): Xaa is A or G or is absent
PXXVSQDLRPVQIRKIXXXXXXXXXKKATVMIVKSXKX

SEQ ID NO: 53193 - protein, 37 aa, Artificial Sequence
  GFR-binding peptide
  MOD_RES (3)..(4)..(37): Xaa is C or S
  MOD_RES (18)..(19)..(20)..(21)..(22): Xaa is A or G
  MOD_RES (23)..(24)..(25)..(26): Xaa is A or G or is absent
SPXXVPQDLRSVKIAKVXXXXXXXXXKEVQVMVVKSX

SEQ ID NO: 53194 - protein, 35 aa, Artificial Sequence; identical to SEQ ID NO: 19797
  GFR-binding peptide
  MOD_RES (16)..(17)..(18)..(19)..(20): Xaa is A or G
  MOD_RES (21)..(22)..(23)..(24): Xaa is A or G or is absent

SEQ ID NO: 53195 - protein, 40 aa, Artificial Sequence
  GFR-binding peptide
  MOD_RES (6)..(7)..(40): Xaa is C or S
  MOD_RES (21)..(22)..(23)..(24)..(25): Xaa is A or G
  MOD_RES (26)..(27)..(28)..(29): Xaa is A or G or is absent
ASASPXXVSQDLSNITIQIMXXXXXXXXXIGEMSMIVKSX

SEQ ID NO: 53196 - protein, 40 aa, Artificial Sequence
  GFR-binding peptide
  MOD_RES (5)..(6)..(40): Xaa is C or S
  MOD_RES (20)..(21)..(22)..(23)..(24): Xaa is A or G
  MOD_RES (25)..(26)..(27)..(28): Xaa is A or G or is absent
VPKPXXAPTKLRSVKVAKVXXXXXXXXXKEVQVNMVVRSX

SEQ ID NO: 53197 - protein, 37 aa, Artificial Sequence
  GFR-binding peptide
  MOD_RES (6)..(7): Xaa is C or S
YVPKPXXAPTKLRPVQVRKIDDSSNVIKKATVNMVVR

SEQ ID NO: 53198 - protein, 39 aa, Artificial Sequence
  GFR-binding peptide
  MOD_RES (4)..(5)..(38): Xaa is C or S
  MOD_RES (19)..(20)..(21)..(22)..(23): Xaa is A or G
  MOD_RES (24)..(25)..(26)..(27): Xaa is A or G or is absent
ASPXXVPQDLSNITIQIMXXXXXXXXXIGEMSMVVKSXK

SEQ ID NO: 53199 - protein, 34 aa, Artificial Sequence
  GFR-binding peptide
  MOD_RES (33)..(33): Xaa is C or S
  MOD_RES (14)..(15)..(16)..(17)..(18): Xaa is A or G
  MOD_RES (19)..(20)..(21)..(22): Xaa is A or G or is absent
VSQDLRSVKIAKVXXXXXXXXXKEVQVMIVKSXK

SEQ ID NO: 53200 - protein, 40 aa, Artificial Sequence
  GFR-binding peptide
  MOD_RES (5)..(6)..(37)..(39): Xaa is C or S
SAAPXXVPQALRPVQIRKIVGRKPKVKKATVMIVRSXKXS

SEQ ID NO: 53201 - protein, 40 aa, Artificial Sequence
  GFR-binding peptide
  MOD_RES (37)..(39): Xaa is C or S
QPSRVHHEPLTVLYYEYVRKKPKLEQLSNRLEEHLEXAXA

SEQ ID NO: 53202 - protein, 37 aa, Artificial Sequence
  GFR-binding peptide
  MOD_RES (4)..(36): Xaa is C or S
KPTXAPTKLSNITVQIMDDSSNVIIGEMSNMVVRSXG

SEQ ID NO: 53203 - protein, 42 aa, Artificial Sequence
  GFR-binding peptide
  MOD_RES (4)..(41): Xaa is C or S
  MOD_RES (20)..(21)..(22)..(23)..(24): Xaa is A or G
  MOD_RES (25)..(26)..(27)..(28): Xaa is A or G or is absent
NVQXRPTQVQLEPLPVVYYXXXXXXXXXEQLSNTLEDHLAXK

SEQ ID NO: 53204 - protein, 41 aa, Artificial Sequence
  GFR-binding peptide
  MOD_RES (6)..(7)..(38)..(40): Xaa is C or S
ASASPXXVSQDLRSVKIAKVIGKTPKIKEVQVMIVKSXKXS

SEQ ID NO: 53205 - protein, 33 aa, Artificial Sequence
  GFR-binding peptide
  MOD_RES (14)..(15)..(16)..(17)..(18): Xaa is A or G
  MOD_RES (19)..(20)..(21)..(22): Xaa is A or G or is absent
VPTEEEPLTMLYYXXXXXXXXXEQLSNFLQHNK

SEQ ID NO: 53206 - protein, 39 aa, Artificial Sequence; identical to SEQ ID NO: 14890
  GFR-binding peptide
  MOD_RES (4)..(5)..(38): Xaa is C or S
  MOD_RES (19)..(20)..(21)..(22)..(23): Xaa is A or G
  MOD_RES (24)..(25)..(26)..(27): Xaa is A or G or is absent

SEQ ID NO: 53207 - protein, 36 aa, Artificial Sequence; identical to SEQ ID NO: 19800
  GFR-binding peptide
  MOD_RES (2)..(2): Xaa is C or S

SEQ ID NO: 53208 - protein, 40 aa, Artificial Sequence; identical to SEQ ID NO: 19801
  GFR-binding peptide
  MOD_RES (5)..(39): Xaa is C or S
  MOD_RES (19)..(20)..(21)..(22)..(23): Xaa is A or G
  MOD_RES (24)..(25)..(26)..(27): Xaa is A or G or is absent

SEQ ID NO: 53209 - protein, 39 aa, Artificial Sequence; identical to SEQ ID NO: 14892
  GFR-binding peptide
  MOD_RES (1)..(2)..(36)..(38): Xaa is C or S
  MOD_RES (16)..(17)..(18)..(19)..(20): Xaa is A or G
  MOD_RES (21)..(22)..(23)..(24): Xaa is A or G or is absent

SEQ ID NO: 53210 - protein, 35 aa, Artificial Sequence; identical to SEQ ID NO: 19802
  GFR-binding peptide
  MOD_RES (34)..(34): Xaa is C or S
  MOD_RES (14)..(15)..(16)..(17)..(18): Xaa is A or G
  MOD_RES (19)..(20)..(21)..(22): Xaa is A or G or is absent

SEQ ID NO: 53211 - protein, 35 aa, Artificial Sequence; identical to SEQ ID NO: 14894
  GFR-binding peptide
  MOD_RES (1)..(2): Xaa is C or S
  MOD_RES (16)..(17)..(18)..(19)..(20): Xaa is A or G
  MOD_RES (21)..(22)..(23)..(24): Xaa is A or G or is absent

SEQ ID NO: 53212 - protein, 37 aa, Artificial Sequence
  GFR-binding peptide
  MOD_RES (4)..(5): Xaa is C or S
  MOD_RES (19)..(20)..(21)..(22)..(23): Xaa is A or G
  MOD_RES (24)..(25)..(26)..(27): Xaa is A or G or is absent
PKPXXAPTKLSNITVQIMXXXXXXXXXIGEMSNMVVR

SEQ ID NO: 53213 - protein, 39 aa, Artificial Sequence; identical to SEQ ID NO: 19804
  GFR-binding peptide
  MOD_RES (37)..(39): Xaa is C or S
  MOD_RES (16)..(17)..(18)..(19)..(20): Xaa is A or G
  MOD_RES (21)..(22)..(23)..(24): Xaa is A or G or is absent

SEQ ID NO: 53214 - protein, 40 aa, Artificial Sequence
  GFR-binding peptide
  MOD_RES (3)..(37)..(39): Xaa is C or S
LEXVPTEEEPLTMLYYRIKPHQGQHEQLSNFLQHNKXEXR

SEQ ID NO: 53215 - protein, 39 aa, Artificial Sequence; identical to SEQ ID NO: 14896
  GFR-binding peptide
  MOD_RES (5)..(6): Xaa is C or S
  MOD_RES (20)..(21)..(22)..(23)..(24): Xaa is A or G
  MOD_RES (25)..(26)..(27)..(28): Xaa is A or G or is absent

SEQ ID NO: 53216 - protein, 38 aa, Artificial Sequence
  GFR-binding peptide
  MOD_RES (5)..(6): Xaa is C or S
  MOD_RES (20)..(21)..(22)..(23)..(24): Xaa is A or G
  MOD_RES (25)..(26)..(27)..(28): Xaa is A or G or is absent
VPKPXXAPTKLRPVQVRKIXXXXXXXXXKKATVNMVVR

SEQ ID NO: 53217 - protein, 41 aa, Artificial Sequence
  GFR-binding peptide
  MOD_RES (4)..(5)..(39)..(41): Xaa is C or S
  MOD_RES (19)..(20)..(21)..(22)..(23): Xaa is A or G
  MOD_RES (24)..(25)..(26)..(27): Xaa is A or G or is absent
PKPXXAPTQLSNITVQIMXXXXXXXXXIGEMSNMVVRAXGX

SEQ ID NO: 53218 - protein, 31 aa, Artificial Sequence
  GFR-binding peptide
  MOD_RES (31)..(31): Xaa is C or S
VSQDLRPVQIRKIIGKTPKIKKATVMIVKSX

SEQ ID NO: 53219 - protein, 34 aa, Artificial Sequence; identical to SEQ ID NO: 19809
  GFR-binding peptide
  MOD_RES (1)..(1): Xaa is C or S
  MOD_RES (15)..(16)..(17)..(18)..(19): Xaa is A or G
  MOD_RES (20)..(21)..(22)..(23): Xaa is A or G or is absent

SEQ ID NO: 53220 - protein, 37 aa, Artificial Sequence
  GFR-binding peptide
  MOD_RES (2)..(3)..(37): Xaa is C or S
  MOD_RES (17)..(18)..(19)..(20)..(21): Xaa is A or G
  MOD_RES (22)..(23)..(24)..(25): Xaa is A or G or is absent
AXXVPTELSNITMQIMXXXXXXXXXIGEMSEMVVEGX

SEQ ID NO: 53221 - protein, 36 aa, Artificial Sequence; identical to SEQ ID NO: 14898
  GFR-binding peptide
  MOD_RES (5)..(6): Xaa is C or S

SEQ ID NO: 53222 - protein, 30 aa, Artificial Sequence
  GFR-binding peptide
VSQDLRPVQIRKIIGKTPKIKKATVMIVKS

SEQ ID NO: 53223 - protein, 39 aa, Artificial Sequence
  GFR-binding peptide
  MOD_RES (3)..(4)..(37)..(39): Xaa is C or S
  MOD_RES (18)..(19)..(20)..(21)..(22): Xaa is A or G
  MOD_RES (23)..(24)..(25)..(26): Xaa is A or G or is absent
APXXVPQALRSVKIAKVXXXXXXXXXKEVQVMIVRSXKX

SEQ ID NO: 53224 - protein, 40 aa, Artificial Sequence; identical to SEQ ID NO: 14901
  GFR-binding peptide
  MOD_RES (6)..(7): Xaa is C or S
  MOD_RES (21)..(22)..(23)..(24)..(25): Xaa is A or G
  MOD_RES (26)..(27)..(28)..(29): Xaa is A or G or is absent

SEQ ID NO: 53225 - protein, 36 aa, Artificial Sequence; identical to SEQ ID NO: 19813
  GFR-binding peptide
  MOD_RES (1)..(1): Xaa is C or S

SEQ ID NO: 53226 - protein, 43 aa, Artificial Sequence; identical to SEQ ID NO: 19816
  GFR-binding peptide
  MOD_RES (3)..(40)..(42): Xaa is C or S

SEQ ID NO: 53227 - protein, 33 aa, Artificial Sequence
  GFR-binding peptide
  MOD_RES (1)..(2): Xaa is C or S
XXVPTELRPVQMRKIDEYDKVVKKATVEMVVEG

SEQ ID NO: 53228 - protein, 38 aa, Artificial Sequence
  GFR-binding peptide
  MOD_RES (4)..(38): Xaa is C or S
GLEXVPTEEEPLPMVYYRIKPHQGQHEQLSNFLQHNKX

SEQ ID NO: 53229 - protein, 33 aa, Artificial Sequence
  GFR-binding peptide
  MOD_RES (1)..(33): Xaa is C or S
XVPTELSNITMQIMDENEKVVIGEMSDMVVEGX

SEQ ID NO: 53230 - protein, 32 aa, Artificial Sequence; identical to SEQ ID NO: 14903
  GFR-binding peptide
  MOD_RES (1)..(2): Xaa is C or S

SEQ ID NO: 53231 - protein, 39 aa, Artificial Sequence
  GFR-binding peptide
  MOD_RES (6)..(7)..(39): Xaa is C or S
TVPKPXXAPTQLRPVQVRKIDDSSNVIKKATVNMVVRAX

SEQ ID NO: 53232 - protein, 41 aa, Artificial Sequence; identical to SEQ ID NO: 19819
  GFR-binding peptide
  MOD_RES (4)..(41): Xaa is C or S
  MOD_RES (20)..(21)..(22)..(23)..(24): Xaa is A or G
  MOD_RES (25)..(26)..(27)..(28): Xaa is A or G or is absent

SEQ ID NO: 53233 - protein, 43 aa, Artificial Sequence; identical to SEQ ID NO: 19820
  GFR-binding peptide
  MOD_RES (4)..(41)..(43): Xaa is C or S
  MOD_RES (20)..(21)..(22)..(23)..(24): Xaa is A or G
  MOD_RES (25)..(26)..(27)..(28): Xaa is A or G or is absent

SEQ ID NO: 53234 - protein, 37 aa, Artificial Sequence
  GFR-binding peptide
  MOD_RES (6)..(7): Xaa is C or S
TVPKPXXAPTQLRSVKVAKVDDSSNVIKEVQVNMVVR

SEQ ID NO: 53235 - protein, 40 aa, Artificial Sequence
  GFR-binding peptide
  MOD_RES (5)..(6)..(40): Xaa is C or S
  MOD_RES (20)..(21)..(22)..(23)..(24): Xaa is A or G
  MOD_RES (25)..(26)..(27)..(28): Xaa is A or G or is absent
VPKPXXAPTQLSNITVQIMXXXXXXXXXIGEMSNMVVRAX

SEQ ID NO: 53236 - protein, 34 aa, Artificial Sequence
  GFR-binding peptide
  MOD_RES (3)..(4): Xaa is C or S
SPXXVPQDLRPVQIRKIVGRTPKVKKATVMVVKS

SEQ ID NO: 53237 - protein, 44 aa, Artificial Sequence; identical to SEQ ID NO: 19823
  GFR-binding peptide
  MOD_RES (7)..(41)..(43): Xaa is C or S

SEQ ID NO: 53238 - protein, 41 aa, Artificial Sequence
  GFR-binding peptide
  MOD_RES (5)..(5): Xaa is C or S
RNVQXRPTQVQLEPLPVVYYEIVRKKPIFEQLSNTLEDHLA

SEQ ID NO: 53239 - protein, 39 aa, Artificial Sequence
  GFR-binding peptide
  MOD_RES (3)..(4)..(37)..(39): Xaa is C or S
  MOD_RES (18)..(19)..(20)..(21)..(22): Xaa is A or G
  MOD_RES (23)..(24)..(25)..(26): Xaa is A or G or is absent
SPXXVSQDLRSVKIAKVXXXXXXXXXKEVQVMIVKSXKX

SEQ ID NO: 53240 - protein, 32 aa, Artificial Sequence
  GFR-binding peptide
  MOD_RES (32)..(32): Xaa is C or S
APTKLRPVQVRKIDDSSNVIKKATVNMVVRSX

SEQ ID NO: 53241 - protein, 32 aa, Artificial Sequence
  GFR-binding peptide
VPTEEEPLTMLYYRIKPHQGQHEQLSNFLQHN

SEQ ID NO: 53242 - protein, 36 aa, Artificial Sequence
  GFR-binding peptide
  MOD_RES (4)..(5): Xaa is C or S
PKAXXVPTELSNITMQIMDEYDKVVIGEMSEMVVEG

SEQ ID NO: 53243 - protein, 38 aa, Artificial Sequence
  GFR-binding peptide
  MOD_RES (3)..(37): Xaa is C or S
  MOD_RES (17)..(18)..(19)..(20)..(21): Xaa is A or G
  MOD_RES (22)..(23)..(24)..(25): Xaa is A or G or is absent
PTXAPTKLRPVQVRKIXXXXXXXXXKKATVNMVVRSXG

SEQ ID NO: 53244 - protein, 36 aa, Artificial Sequence; identical to SEQ ID NO: 19826
  GFR-binding peptide
  MOD_RES (36)..(36): Xaa is C or S
  MOD_RES (15)..(16)..(17)..(18)..(19): Xaa is A or G
  MOD_RES (20)..(21)..(22)..(23): Xaa is A or G or is absent

SEQ ID NO: 53245 - protein, 40 aa, Artificial Sequence; identical to SEQ ID NO: 14910
  GFR-binding peptide
  MOD_RES (6)..(7)..(39): Xaa is C or S

SEQ ID NO: 53246 - protein, 39 aa, Artificial Sequence
  GFR-binding peptide
  MOD_RES (3)..(4)..(38): Xaa is C or S
  MOD_RES (18)..(19)..(20)..(21)..(22): Xaa is A or G
  MOD_RES (23)..(24)..(25)..(26): Xaa is A or G or is absent
KAXXVPTELRPVQMRKIXXXXXXXXXKKATVEMVVEGXG

SEQ ID NO: 53247 - protein, 36 aa, Artificial Sequence
  GFR-binding peptide
  MOD_RES (6)..(6): Xaa is C or S
VTKPTXAPTKLSNITVQIMDDSSNVIIGEMSNMVVR

SEQ ID NO: 53248 - protein, 40 aa, Artificial Sequence
  GFR-binding peptide
  MOD_RES (5)..(37)..(39): Xaa is C or S
TKPTXAPTKLSNITVQIMDDSSNVIIGEMSNMVVRSXGXH

SEQ ID NO: 53249 - protein, 38 aa, Artificial Sequence; identical to SEQ ID NO: 19829
  GFR-binding peptide
  MOD_RES (4)..(38): Xaa is C or S
  MOD_RES (18)..(19)..(20)..(21)..(22): Xaa is A or G
  MOD_RES (23)..(24)..(25)..(26): Xaa is A or G or is absent

SEQ ID NO: 53250 - protein, 39 aa, Artificial Sequence
  GFR-binding peptide
  MOD_RES (5)..(39): Xaa is C or S
EGLEXVPTEEEPLPMVYYRIKPHQGQHEQLSNFLQHNKX

SEQ ID NO: 53251 - protein, 40 aa, Artificial Sequence
  GFR-binding peptide
  MOD_RES (37)..(39): Xaa is C or S
  MOD_RES (16)..(17)..(18)..(19)..(20): Xaa is A or G
  MOD_RES (21)..(22)..(23)..(24): Xaa is A or G or is absent
RPTQVQLEPLPVVYYXXXXXXXXXEQLSNTLEDHLAXKXE

SEQ ID NO: 53252 - protein, 34 aa, Artificial Sequence
  GFR-binding peptide
  MOD_RES (2)..(3)..(34): Xaa is C or S
PXXVSQDLRSVKIAKVIGKTPKIKEVQVMIVKSX

SEQ ID NO: 53253 - protein, 42 aa, Artificial Sequence
  GFR-binding peptide
  MOD_RES (2)..(39)..(41): Xaa is C or S
QXRPTQVQLEPLPVVYYEIVRKKPIFEQLSNTLEDHLAXKXE

SEQ ID NO: 53254 - protein, 37 aa, Artificial Sequence
  GFR-binding peptide
  MOD_RES (2)..(36): Xaa is C or S
  MOD_RES (16)..(17)..(18)..(19)..(20): Xaa is A or G
  MOD_RES (21)..(22)..(23)..(24): Xaa is A or G or is absent
EXVPTEEEPLTMLYYXXXXXXXXXEQLSNFLQHNKXE

SEQ ID NO: 53255 - protein, 42 aa, Artificial Sequence; identical to SEQ ID NO: 14913
  GFR-binding peptide
  MOD_RES (6)..(7)..(41): Xaa is C or S
  MOD_RES (21)..(22)..(23)..(24)..(25): Xaa is A or G
  MOD_RES (26)..(27)..(28)..(29): Xaa is A or G or is absent

SEQ ID NO: 53256 - protein, 38 aa, Artificial Sequence; identical to SEQ ID NO: 14914
  GFR-binding peptide
  MOD_RES (2)..(3)..(37): Xaa is C or S
  MOD_RES (17)..(18)..(19)..(20)..(21): Xaa is A or G
  MOD_RES (22)..(23)..(24)..(25): Xaa is A or G or is absent

SEQ ID NO: 53257 - protein, 35 aa, Artificial Sequence
  GFR-binding peptide
  MOD_RES (1)..(35): Xaa is C or S
  MOD_RES (15)..(16)..(17)..(18)..(19): Xaa is A or G
  MOD_RES (20)..(21)..(22)..(23): Xaa is A or G or is absent
XVPTELRPVQMRKIXXXXXXXXXKKATVDMVVEGX

SEQ ID NO: 53258 - protein, 43 aa, Artificial Sequence
  GFR-binding peptide
  MOD_RES (6)..(40)..(42): Xaa is C or S
  MOD_RES (20)..(21)..(22)..(23)..(24): Xaa is A or G
  MOD_RES (25)..(26)..(27)..(28): Xaa is A or G or is absent
VTKPTXAPTKLSNITVQIMXXXXXXXXXIGEMSNMVVRSXGXH

SEQ ID NO: 53259 - protein, 38 aa, Artificial Sequence
  GFR-binding peptide
  MOD_RES (2)..(3)..(37): Xaa is C or S
  MOD_RES (17)..(18)..(19)..(20)..(21): Xaa is A or G
  MOD_RES (22)..(23)..(24)..(25): Xaa is A or G or is absent
AXXVPTELRPVQMRKIXXXXXXXXXKKATVDMVVEGXG

SEQ ID NO: 53260 - protein, 36 aa, Artificial Sequence
  GFR-binding peptide
  MOD_RES (4)..(5)..(36): Xaa is C or S
ASPXXVSQDLRSVKIAKVIGKTPKIKEVQVMIVKSX

SEQ ID NO: 53261 - protein, 33 aa, Artificial Sequence; identical to SEQ ID NO: 14918
  GFR-binding peptide
  MOD_RES (1)..(1): Xaa is C or S
  MOD_RES (15)..(16)..(17)..(18)..(19): Xaa is A or G
  MOD_RES (20)..(21)..(22)..(23): Xaa is A or G or is absent

SEQ ID NO: 53262 - protein, 34 aa, Artificial Sequence; identical to SEQ ID NO: 19835
  GFR-binding peptide
  MOD_RES (14)..(15)..(16)..(17)..(18): Xaa is A or G
  MOD_RES (19)..(20)..(21)..(22): Xaa is A or G or is absent

SEQ ID NO: 53263 - protein, 34 aa, Artificial Sequence
  GFR-binding peptide
  MOD_RES (14)..(15)..(16)..(17)..(18): Xaa is A or G
  MOD_RES (19)..(20)..(21)..(22): Xaa is A or G or is absent
TQVQLEPLPVVYYXXXXXXXXXEQLSNTLEDHLA

SEQ ID NO: 53264 - protein, 36 aa, Artificial Sequence
  GFR-binding peptide
  MOD_RES (1)..(2)..(33)..(35): Xaa is C or S
XXVPQDLRPVQIRKIVGRTPKVKKATVMVVKSXKXS

SEQ ID NO: 53265 - protein, 35 aa, Artificial Sequence
  GFR-binding peptide
  MOD_RES (1)..(32)..(34): Xaa is C or S
XVPQALRPVQIRKIVGRKPKVKKATVMIVRSXKXS

SEQ ID NO: 53266 - protein, 39 aa, Artificial Sequence
  GFR-binding peptide
  MOD_RES (2)..(36)..(38): Xaa is C or S
EXVPTEEEPLPMVYYRIKPHQGQHEQLSNFLQHNKXEXR

SEQ ID NO: 53267 - protein, 41 aa, Artificial Sequence
  GFR-binding peptide
  MOD_RES (3)..(4)..(38)..(40): Xaa is C or S
  MOD_RES (18)..(19)..(20)..(21)..(22): Xaa is A or G
  MOD_RES (23)..(24)..(25)..(26): Xaa is A or G or is absent
KPXXAPTQLRSVKVAKVXXXXXXXXXKEVQVNMVVRAXGXH

SEQ ID NO: 53268 - protein, 39 aa, Artificial Sequence
  GFR-binding peptide
  MOD_RES (6)..(7): Xaa is C or S
  MOD_RES (21)..(22)..(23)..(24)..(25): Xaa is A or G
  MOD_RES (26)..(27)..(28)..(29): Xaa is A or G or is absent
KIPKAXXVPTELRSVKMAKVXXXXXXXXXKEVQVDMVVE

SEQ ID NO: 53269 - protein, 39 aa, Artificial Sequence; identical to SEQ ID NO: 14922
  GFR-binding peptide
  MOD_RES (4)..(5)..(37)..(39): Xaa is C or S

SEQ ID NO: 53270 - protein, 34 aa, Artificial Sequence; identical to SEQ ID NO: 14923
  GFR-binding peptide
  MOD_RES (1)..(2): Xaa is C or S
  MOD_RES (16)..(17)..(18)..(19)..(20): Xaa is A or G
  MOD_RES (21)..(22)..(23)..(24): Xaa is A or G or is absent

SEQ ID NO: 53271 - protein, 44 aa, Artificial Sequence; identical to SEQ ID NO: 19840
  GFR-binding peptide
  MOD_RES (5)..(42)..(44): Xaa is C or S
  MOD_RES (21)..(22)..(23)..(24)..(25): Xaa is A or G
  MOD_RES (26)..(27)..(28)..(29): Xaa is A or G or is absent

SEQ ID NO: 53272 - protein, 33 aa, Artificial Sequence
  GFR-binding peptide
TQVQLEPLPVVYYEIVRKKPIFEQLSNTLEDHL

SEQ ID NO: 53273 - protein, 41 aa, Artificial Sequence; identical to SEQ ID NO: 14927
  GFR-binding peptide
  MOD_RES (7)..(41): Xaa is C or S
  MOD_RES (21)..(22)..(23)..(24)..(25): Xaa is A or G
  MOD_RES (26)..(27)..(28)..(29): Xaa is A or G or is absent

SEQ ID NO: 53274 - protein, 38 aa, Artificial Sequence
  GFR-binding peptide
  MOD_RES (4)..(38): Xaa is C or S
  MOD_RES (18)..(19)..(20)..(21)..(22): Xaa is A or G
  MOD_RES (23)..(24)..(25)..(26): Xaa is A or G or is absent
KPTXAPTKLRSVKVAKVXXXXXXXXXKEVQVNMVVRSX

SEQ ID NO: 53275 - protein, 37 aa, Artificial Sequence; identical to SEQ ID NO: 19847
  GFR-binding peptide
  MOD_RES (1)..(35)..(37): Xaa is C or S
  MOD_RES (15)..(16)..(17)..(18)..(19): Xaa is A or G
  MOD_RES (20)..(21)..(22)..(23): Xaa is A or G or is absent

SEQ ID NO: 53276 - protein, 42 aa, Artificial Sequence; identical to SEQ ID NO: 14930
  GFR-binding peptide
  MOD_RES (6)..(7)..(39)..(41): Xaa is C or S

SEQ ID NO: 53277 - protein, 34 aa, Artificial Sequence; identical to SEQ ID NO: 19848
  GFR-binding peptide
  MOD_RES (1)..(1): Xaa is C or S

SEQ ID NO: 53278 - protein, 39 aa, Artificial Sequence; identical to SEQ ID NO: 14932
  GFR-binding peptide
  MOD_RES (3)..(4)..(36)..(38): Xaa is C or S

SEQ ID NO: 53279 - protein, 39 aa, Artificial Sequence
  GFR-binding peptide
  MOD_RES (6)..(7)..(39): Xaa is C or S
SIPKAXXVPTELRPVQMRKIDEYDKVVKKATVEMVVEGX

SEQ ID NO: 53280 - protein, 38 aa, Artificial Sequence
  GFR-binding peptide
  MOD_RES (4)..(38): Xaa is C or S
  MOD_RES (18)..(19)..(20)..(21)..(22): Xaa is A or G
  MOD_RES (23)..(24)..(25)..(26): Xaa is A or G or is absent
GLEXVPTEEEPLPMVYYXXXXXXXXXEQLSNFLQHNKX

SEQ ID NO: 53281 - protein, 34 aa, Artificial Sequence
  GFR-binding peptide
  MOD_RES (3)..(4): Xaa is C or S
KPXXAPTKLRSVKVAKVDDSSNVIKEVQVNMVVR

SEQ ID NO: 53282 - protein, 38 aa, Artificial Sequence; identical to SEQ ID NO: 19852
  GFR-binding peptide
  MOD_RES (4)..(4): Xaa is C or S
  MOD_RES (20)..(21)..(22)..(23)..(24): Xaa is A or G
  MOD_RES (25)..(26)..(27)..(28): Xaa is A or G or is absent

SEQ ID NO: 53283 - protein, 38 aa, Artificial Sequence; identical to SEQ ID NO: 14934
  GFR-binding peptide
  MOD_RES (5)..(6)..(37): Xaa is C or S

SEQ ID NO: 53284 - protein, 38 aa, Artificial Sequence; identical to SEQ ID NO: 14936
  GFR-binding peptide
  MOD_RES (3)..(4)..(36)..(38): Xaa is C or S

SEQ ID NO: 53285 - protein, 42 aa, Artificial Sequence; identical to SEQ ID NO: 19853
  GFR-binding peptide
  MOD_RES (3)..(40)..(42): Xaa is C or S
  MOD_RES (19)..(20)..(21)..(22)..(23): Xaa is A or G
  MOD_RES (24)..(25)..(26)..(27): Xaa is A or G or is absent

SEQ ID NO: 53286 - protein, 39 aa, Artificial Sequence; identical to SEQ ID NO: 19856
  GFR-binding peptide
  MOD_RES (1)..(38): Xaa is C or S
  MOD_RES (17)..(18)..(19)..(20)..(21): Xaa is A or G
  MOD_RES (22)..(23)..(24)..(25): Xaa is A or G or is absent

SEQ ID NO: 53287 - protein, 35 aa, Artificial Sequence; identical to SEQ ID NO: 14938
  GFR-binding peptide
  MOD_RES (3)..(4): Xaa is C or S

SEQ ID NO: 53288 - protein, 42 aa, Artificial Sequence
  GFR-binding peptide
  MOD_RES (6)..(7)..(39)..(41): Xaa is C or S
KIPKAXXVPTELRPVQMRKIDENEKVVKKATVDMVVEGXGXR

SEQ ID NO: 53289 - protein, 35 aa, Artificial Sequence; identical to SEQ ID NO: 19857
  GFR-binding peptide
  MOD_RES (2)..(2): Xaa is C or S
  MOD_RES (16)..(17)..(18)..(19)..(20): Xaa is A or G
  MOD_RES (21)..(22)..(23)..(24): Xaa is A or G or is absent

SEQ ID NO: 53290 - protein, 41 aa, Artificial Sequence
  GFR-binding peptide
  MOD_RES (5)..(6)..(40): Xaa is C or S
  MOD_RES (20)..(21)..(22)..(23)..(24): Xaa is A or G
  MOD_RES (25)..(26)..(27)..(28): Xaa is A or G or is absent
VPKPXXAPTQLRPVQVRKIXXXXXXXXXKKATVNMVVRAXG

SEQ ID NO: 53291 - protein, 40 aa, Artificial Sequence; identical to SEQ ID NO: 14941
  GFR-binding peptide
  MOD_RES (6)..(7)..(40): Xaa is C or S
  MOD_RES (21)..(22)..(23)..(24)..(25): Xaa is A or G
  MOD_RES (26)..(27)..(28)..(29): Xaa is A or G or is absent

SEQ ID NO: 53292 - protein, 39 aa, Artificial Sequence; identical to SEQ ID NO: 19858
  GFR-binding peptide
  MOD_RES (4)..(4): Xaa is C or S
  MOD_RES (20)..(21)..(22)..(23)..(24): Xaa is A or G
  MOD_RES (25)..(26)..(27)..(28): Xaa is A or G or is absent

SEQ ID NO: 53293 - protein, 40 aa, Artificial Sequence; identical to SEQ ID NO: 19860
  GFR-binding peptide
  MOD_RES (3)..(40): Xaa is C or S

SEQ ID NO: 53294 - protein, 35 aa, Artificial Sequence; identical to SEQ ID NO: 14944
  GFR-binding peptide
  MOD_RES (4)..(5): Xaa is C or S

SEQ ID NO: 53295 - protein, 32 aa, Artificial Sequence
  GFR-binding peptide
  MOD_RES (32)..(32): Xaa is C or S
VPTELSNITMQIMDENEKVVIGEMSDMVVEGX

SEQ ID NO: 53296 - protein, 41 aa, Artificial Sequence
  GFR-binding peptide
  MOD_RES (6)..(40): Xaa is C or S
  MOD_RES (20)..(21)..(22)..(23)..(24): Xaa is A or G
  MOD_RES (25)..(26)..(27)..(28): Xaa is A or G or is absent
VTKPTXAPTKLRPVQVRKIXXXXXXXXXKKATVNMVVRSXG

SEQ ID NO: 53297 - protein, 37 aa, Artificial Sequence
  GFR-binding peptide
  MOD_RES (2)..(3)..(34)..(36): Xaa is C or S
PXXVPQALSNITIQIMVGRKPKVIGEMSMIVRSXKXS

SEQ ID NO: 53298 - protein, 37 aa, Artificial Sequence; identical to SEQ ID NO: 14947
  GFR-binding peptide
  MOD_RES (4)..(5): Xaa is C or S
  MOD_RES (19)..(20)..(21)..(22)..(23): Xaa is A or G
  MOD_RES (24)..(25)..(26)..(27): Xaa is A or G or is absent

SEQ ID NO: 53299 - protein, 34 aa, Artificial Sequence
  GFR-binding peptide
  MOD_RES (2)..(3): Xaa is C or S
AXXVPTELRSVKMAKVDEYDKVVKEVQVEMVVEG

SEQ ID NO: 53300 - protein, 40 aa, Artificial Sequence
  GFR-binding peptide
  MOD_RES (3)..(4)..(38)..(40): Xaa is C or S
  MOD_RES (18)..(19)..(20)..(21)..(22): Xaa is A or G
  MOD_RES (23)..(24)..(25)..(26): Xaa is A or G or is absent
KPXXAPTQLRSVKVAKVXXXXXXXXXKEVQVNMVVRAXGX

SEQ ID NO: 53301 - protein, 39 aa, Artificial Sequence
  GFR-binding peptide
  MOD_RES (5)..(5): Xaa is C or S
  MOD_RES (21)..(22)..(23)..(24)..(25): Xaa is A or G
  MOD_RES (26)..(27)..(28)..(29): Xaa is A or G or is absent
RNVQXRPTQVQLEPLTVLYYXXXXXXXXXEQLSNTLEDH

SEQ ID NO: 53302 - protein, 36 aa, Artificial Sequence; identical to SEQ ID NO: 19861
  GFR-binding peptide
  MOD_RES (2)..(2): Xaa is C or S

SEQ ID NO: 53303 - protein, 37 aa, Artificial Sequence
  GFR-binding peptide
  MOD_RES (1)..(34)..(36): Xaa is C or S
  MOD_RES (15)..(16)..(17)..(18)..(19): Xaa is A or G
  MOD_RES (20)..(21)..(22)..(23): Xaa is A or G or is absent
XVPQDLRSVKIAKVXXXXXXXXXKEVQVMVVKSXKXS

SEQ ID NO: 53304 - protein, 40 aa, Artificial Sequence
  GFR-binding peptide
  MOD_RES (6)..(7)..(38)..(40): Xaa is C or S
ASAAPXXVPQALRPVQIRKIVGRKPKVKKATVMIVRSXKX

SEQ ID NO: 53305 - protein, 37 aa, Artificial Sequence
  GFR-binding peptide
  MOD_RES (1)..(2)..(35)..(37): Xaa is C or S
  MOD_RES (16)..(17)..(18)..(19)..(20): Xaa is A or G
  MOD_RES (21)..(22)..(23)..(24): Xaa is A or G or is absent
XXVSQDLRSVKIAKVXXXXXXXXXKEVQVMIVKSXKX

SEQ ID NO: 53306 - protein, 36 aa, Artificial Sequence; identical to SEQ ID NO: 40773
  GFR-binding peptide
  MOD_RES (33)..(35): Xaa is C or S
  MOD_RES (14)..(15)..(16)..(17)..(18): Xaa is A or G
  MOD_RES (19)..(20)..(21)..(22): Xaa is A or G or is absent

SEQ ID NO: 53307 - protein, 38 aa, Artificial Sequence
  GFR-binding peptide
  MOD_RES (6)..(7): Xaa is C or S
KIPKAXXVPTELRPVQMRKIDENEKVVKKATVDMVVEG

SEQ ID NO: 53308 - protein, 33 aa, Artificial Sequence; identical to SEQ ID NO: 19869
  GFR-binding peptide

SEQ ID NO: 53309 - protein, 36 aa, Artificial Sequence
  GFR-binding peptide
QPSRVHHEPLTVLYYEYVRKKPKLEQLSNRLEEHLE

SEQ ID NO: 53310 - protein, 33 aa, Artificial Sequence
  GFR-binding peptide
  MOD_RES (1)..(1): Xaa is C or S
  MOD_RES (15)..(16)..(17)..(18)..(19): Xaa is A or G
  MOD_RES (20)..(21)..(22)..(23): Xaa is A or G or is absent
XVSQDLRPVQIRKIXXXXXXXXXKKATVMIVKS

SEQ ID NO: 53311 - protein, 39 aa, Artificial Sequence
  GFR-binding peptide
  MOD_RES (4)..(5)..(37)..(39): Xaa is C or S
PKPXXAPTQLSNITVQIMDDSSNVIIGEMSNMVVRAXGX

SEQ ID NO: 53312 - protein, 34 aa, Artificial Sequence
  GFR-binding peptide
  MOD_RES (1)..(33): Xaa is C or S
XVPTELSNITMQIMDENEKVVIGEMSDMVVEGXG

SEQ ID NO: 53313 - protein, 38 aa, Artificial Sequence
  GFR-binding peptide
  MOD_RES (3)..(3): Xaa is C or S
VKXQPSRVHHEPLTVLYYEYVRKKPKLEQLSNRLEEHL

SEQ ID NO: 53314 - protein, 33 aa, Artificial Sequence
  GFR-binding peptide
  MOD_RES (32)..(32): Xaa is C or S
APTKLSNITVQIMDDSSNVIIGEMSNMVVRSXG

SEQ ID NO: 53315 - protein, 34 aa, Artificial Sequence; identical to SEQ ID NO: 19871
  GFR-binding peptide
  MOD_RES (14)..(15)..(16)..(17)..(18): Xaa is A or G
  MOD_RES (19)..(20)..(21)..(22): Xaa is A or G or is absent

SEQ ID NO: 53316 - protein, 38 aa, Artificial Sequence
  GFR-binding peptide
  MOD_RES (3)..(4)..(36)..(38): Xaa is C or S
KPXXAPTQLSNITVQIMDDSSNVIIGEMSNMVVRAXGX

SEQ ID NO: 53317 - protein, 40 aa, Artificial Sequence
  GFR-binding peptide
  MOD_RES (7)..(7): Xaa is C or S
  MOD_RES (21)..(22)..(23)..(24)..(25): Xaa is A or G
  MOD_RES (26)..(27)..(28)..(29): Xaa is A or G or is absent
HVTKPTXAPTKLRPVQVRKIXXXXXXXXXKKATVNMVVRS

SEQ ID NO: 53318 - protein, 33 aa, Artificial Sequence; identical to SEQ ID NO: 19872
  GFR-binding peptide

SEQ ID NO: 53319 - protein, 41 aa, Artificial Sequence
  GFR-binding peptide
  MOD_RES (6)..(7)..(39)..(41): Xaa is C or S
SIPKAXXVPTELRPVQMRKIDEYDKVVKKATVEMVVEGXGX

SEQ ID NO: 53320 - protein, 31 aa, Artificial Sequence
  GFR-binding peptide
  MOD_RES (1)..(1): Xaa is C or S
XVPQDLRSVKIAKVVGRTPKVKEVQVMVVKS

SEQ ID NO: 53321 - protein, 40 aa, Artificial Sequence
  GFR-binding peptide
  MOD_RES (3)..(4)..(37)..(39): Xaa is C or S
  MOD_RES (18)..(19)..(20)..(21)..(22): Xaa is A or G
  MOD_RES (23)..(24)..(25)..(26): Xaa is A or G or is absent
SPXXVSQDLRSVKIAKVXXXXXXXXXKEVQVMIVKSXKXS

SEQ ID NO: 53322 - protein, 38 aa, Artificial Sequence
  GFR-binding peptide
  MOD_RES (3)..(4)..(37): Xaa is C or S
  MOD_RES (18)..(19)..(20)..(21)..(22): Xaa is A or G
  MOD_RES (23)..(24)..(25)..(26): Xaa is A or G or is absent
APXXVPQALRSVKIAKVXXXXXXXXXKEVQVMIVRSXK

SEQ ID NO: 53323 - protein, 38 aa, Artificial Sequence
  GFR-binding peptide
  MOD_RES (4)..(5)..(37): Xaa is C or S
PKPXXAPTKLRSVKVAKVDDSSNVIKEVQVNMVVRSXG

SEQ ID NO: 53324 - protein, 40 aa, Artificial Sequence; identical to SEQ ID NO: 14958
  GFR-binding peptide
  MOD_RES (5)..(37)..(39): Xaa is C or S

SEQ ID NO: 53325 - protein, 38 aa, Artificial Sequence
  GFR-binding peptide
  MOD_RES (1)..(35)..(37): Xaa is C or S
  MOD_RES (15)..(16)..(17)..(18)..(19): Xaa is A or G
  MOD_RES (20)..(21)..(22)..(23): Xaa is A or G or is absent
XVPTELSNITMQIMXXXXXXXXXIGEMSEMVVEGXGXR

SEQ ID NO: 53326 - protein, 33 aa, Artificial Sequence
  GFR-binding peptide
  MOD_RES (2)..(3): Xaa is C or S
AXXVPTELSNITMQIMDEYDKVVIGEMSEMVVE

SEQ ID NO: 53327 - protein, 40 aa, Artificial Sequence; identical to SEQ ID NO: 19880
  GFR-binding peptide
  MOD_RES (7)..(7): Xaa is C or S

SEQ ID NO: 53328 - protein, 40 aa, Artificial Sequence
  GFR-binding peptide
  MOD_RES (5)..(5): Xaa is C or S
  MOD_RES (21)..(22)..(23)..(24)..(25): Xaa is A or G
  MOD_RES (26)..(27)..(28)..(29): Xaa is A or G or is absent
SSVKXQPSRVHHEPLPVVYYXXXXXXXXXEQLSNRLEEHL

SEQ ID NO: 53329 - protein, 35 aa, Artificial Sequence
  GFR-binding peptide
  MOD_RES (33)..(35): Xaa is C or S
  MOD_RES (14)..(15)..(16)..(17)..(18): Xaa is A or G
  MOD_RES (19)..(20)..(21)..(22): Xaa is A or G or is absent
VSQDLRPVQIRKIXXXXXXXXXKKATVMIVKSXKX

SEQ ID NO: 53330 - protein, 35 aa, Artificial Sequence
  GFR-binding peptide
  MOD_RES (1)..(34): Xaa is C or S
  MOD_RES (15)..(16)..(17)..(18)..(19): Xaa is A or G
  MOD_RES (20)..(21)..(22)..(23): Xaa is A or G or is absent
XVPQALSNITIQIMXXXXXXXXXIGEMSMIVRSXK

SEQ ID NO: 53331 - protein, 39 aa, Artificial Sequence
  GFR-binding peptide
  MOD_RES (5)..(5): Xaa is C or S
RNVQXRPTQVQLEPLTVLYYEIVRKKPIFEQLSNTLEDH

SEQ ID NO: 53332 - protein, 37 aa, Artificial Sequence
  GFR-binding peptide
  MOD_RES (2)..(34)..(36): Xaa is C or S
TXAPTKLRPVQVRKIDDSSNVIKKATVNMVVRSXGXH

SEQ ID NO: 53333 - protein, 37 aa, Artificial Sequence; identical to SEQ ID NO: 19881
  GFR-binding peptide
  MOD_RES (36)..(36): Xaa is C or S
  MOD_RES (15)..(16)..(17)..(18)..(19): Xaa is A or G
  MOD_RES (20)..(21)..(22)..(23): Xaa is A or G or is absent

SEQ ID NO: 53334 - protein, 36 aa, Artificial Sequence; identical to SEQ ID NO: 19882
  GFR-binding peptide

SEQ ID NO: 53335 - protein, 37 aa, Artificial Sequence; identical to SEQ ID NO: 19883
  GFR-binding peptide
  MOD_RES (37)..(37): Xaa is C or S
  MOD_RES (16)..(17)..(18)..(19)..(20): Xaa is A or G
  MOD_RES (21)..(22)..(23)..(24): Xaa is A or G or is absent

SEQ ID NO: 53336 - protein, 38 aa, Artificial Sequence
  GFR-binding peptide
  MOD_RES (5)..(6)..(38): Xaa is C or S
VPKPXXAPTQLRSVKVAKVDDSSNVIKEVQVNMVVRAX

SEQ ID NO: 53337 - protein, 34 aa, Artificial Sequence; identical to SEQ ID NO: 19885
  GFR-binding peptide
  MOD_RES (15)..(16)..(17)..(18)..(19): Xaa is A or G
  MOD_RES (20)..(21)..(22)..(23): Xaa is A or G or is absent

SEQ ID NO: 53338 - protein, 39 aa, Artificial Sequence
  GFR-binding peptide
  MOD_RES (4)..(5)..(36)..(38): Xaa is C or S
ASPXXVSQDLRSVKIAKVIGKTPKIKEVQVMIVKSXKXS

SEQ ID NO: 53339 - protein, 39 aa, Artificial Sequence; identical to SEQ ID NO: 14962
  GFR-binding peptide
  MOD_RES (4)..(5)..(37)..(39): Xaa is C or S

SEQ ID NO: 53340 - protein, 39 aa, Artificial Sequence
  GFR-binding peptide
  MOD_RES (6)..(7)..(39): Xaa is C or S
YVPKPXXAPTKLRSVKVAKVDDSSNVIKEVQVNMVVRSX

SEQ ID NO: 53341 - protein, 38 aa, Artificial Sequence; identical to SEQ ID NO: 19889
  GFR-binding peptide
  MOD_RES (3)..(3): Xaa is C or S
  MOD_RES (19)..(20)..(21)..(22)..(23): Xaa is A or G
  MOD_RES (24)..(25)..(26)..(27): Xaa is A or G or is absent

SEQ ID NO: 53342 - protein, 39 aa, Artificial Sequence
  GFR-binding peptide
  MOD_RES (3)..(37)..(39): Xaa is C or S
LEXVPTEEEPLPMVYYRIKPHQGQHEQLSNFLQHNKXEX

SEQ ID NO: 53343 - protein, 38 aa, Artificial Sequence
  GFR-binding peptide
  MOD_RES (3)..(3): Xaa is C or S
  MOD_RES (19)..(20)..(21)..(22)..(23): Xaa is A or G
  MOD_RES (24)..(25)..(26)..(27): Xaa is A or G or is absent
VQXRPTQVQLEPLPVVYYXXXXXXXXXEQLSNTLEDHL

SEQ ID NO: 53344 - protein, 39 aa, Artificial Sequence
  GFR-binding peptide
  MOD_RES (5)..(6)..(39): Xaa is C or S
  MOD_RES (20)..(21)..(22)..(23)..(24): Xaa is A or G
  MOD_RES (25)..(26)..(27)..(28): Xaa is A or G or is absent
SASPXXVPQDLRPVQIRKIXXXXXXXXXKKATVMVVKSX

SEQ ID NO: 53345 - protein, 35 aa, Artificial Sequence
  GFR-binding peptide
  MOD_RES (1)..(2)..(34): Xaa is C or S
XXAPTQLSNITVQIMDDSSNVIIGEMSNMVVRAXG

SEQ ID NO: 53346 - protein, 38 aa, Artificial Sequence; identical to SEQ ID NO: 19890
  GFR-binding peptide
  MOD_RES (3)..(3): Xaa is C or S

SEQ ID NO: 53347 - protein, 40 aa, Artificial Sequence; identical to SEQ ID NO: 19891
  GFR-binding peptide
  MOD_RES (37)..(39): Xaa is C or S
  MOD_RES (16)..(17)..(18)..(19)..(20): Xaa is A or G
  MOD_RES (21)..(22)..(23)..(24): Xaa is A or G or is absent

SEQ ID NO: 53348 - protein, 32 aa, Artificial Sequence
  GFR-binding peptide
  MOD_RES (14)..(15)..(16)..(17)..(18): Xaa is A or G
  MOD_RES (19)..(20)..(21)..(22): Xaa is A or G or is absent
VPTELRPVQMRKIXXXXXXXXXKKATVEMVVE

SEQ ID NO: 53349 - protein, 41 aa, Artificial Sequence; identical to SEQ ID NO: 14966
  GFR-binding peptide
  MOD_RES (6)..(7)..(41): Xaa is C or S
  MOD_RES (21)..(22)..(23)..(24)..(25): Xaa is A or G
  MOD_RES (26)..(27)..(28)..(29): Xaa is A or G or is absent

SEQ ID NO: 53350 - protein, 37 aa, Artificial Sequence; identical to SEQ ID NO: 14968
  GFR-binding peptide
  MOD_RES (5)..(6)..(37): Xaa is C or S

SEQ ID NO: 53351 - protein, 43 aa, Artificial Sequence; identical to SEQ ID NO: 19894
  GFR-binding peptide
  MOD_RES (4)..(41)..(43): Xaa is C or S

SEQ ID NO: 53352 - protein, 40 aa, Artificial Sequence; identical to SEQ ID NO: 19895
  GFR-binding peptide
  MOD_RES (2)..(39): Xaa is C or S

SEQ ID NO: 53353 - protein, 42 aa, Artificial Sequence; identical to SEQ ID NO: 14969
  GFR-binding peptide
  MOD_RES (7)..(41): Xaa is C or S
  MOD_RES (21)..(22)..(23)..(24)..(25): Xaa is A or G
  MOD_RES (26)..(27)..(28)..(29): Xaa is A or G or is absent

SEQ ID NO: 53354 - protein, 37 aa, Artificial Sequence
  GFR-binding peptide
  MOD_RES (3)..(37): Xaa is C or S
  MOD_RES (17)..(18)..(19)..(20)..(21): Xaa is A or G
  MOD_RES (22)..(23)..(24)..(25): Xaa is A or G or is absent
PTXAPTKLSNITVQIMXXXXXXXXXIGEMSNMVVRSX

SEQ ID NO: 53355 - protein, 37 aa, Artificial Sequence
  GFR-binding peptide
  MOD_RES (2)..(3)..(34)..(36): Xaa is C or S
PXXVPQDLRPVQIRKIVGRTPKVKKATVMVVKSXKXS

SEQ ID NO: 53356 - protein, 32 aa, Artificial Sequence
  GFR-binding peptide
  MOD_RES (14)..(15)..(16)..(17)..(18): Xaa is A or G
  MOD_RES (19)..(20)..(21)..(22): Xaa is A or G or is absent
APTKLRSVKVAKVXXXXXXXXXKEVQVNMVVR

SEQ ID NO: 53357 - protein, 34 aa, Artificial Sequence
  GFR-binding peptide
  MOD_RES (1)..(2)..(34): Xaa is C or S
XXVPTELRSVKMAKVDENEKVVKEVQVDMVVEGX

SEQ ID NO: 53358 - protein, 39 aa, Artificial Sequence
  GFR-binding peptide
  MOD_RES (5)..(39): Xaa is C or S
  MOD_RES (19)..(20)..(21)..(22)..(23): Xaa is A or G
  MOD_RES (24)..(25)..(26)..(27): Xaa is A or G or is absent
EGLEXVPTEEEPLPMVYYXXXXXXXXXEQLSNFLQHNKX

SEQ ID NO: 53359 - protein, 36 aa, Artificial Sequence
  GFR-binding peptide
  MOD_RES (2)..(3)..(36): Xaa is C or S
  MOD_RES (17)..(18)..(19)..(20)..(21): Xaa is A or G
  MOD_RES (22)..(23)..(24)..(25): Xaa is A or G or is absent
PXXVSQDLRSVKIAKVXXXXXXXXXKEVQVMIVKSX

SEQ ID NO: 53360 - protein, 41 aa, Artificial Sequence; identical to SEQ ID NO: 14970
  GFR-binding peptide
  MOD_RES (7)..(39)..(41): Xaa is C or S

SEQ ID NO: 53361 - protein, 35 aa, Artificial Sequence; identical to SEQ ID NO: 14972
  GFR-binding peptide
  MOD_RES (4)..(5): Xaa is C or S

SEQ ID NO: 53362 - protein, 41 aa, Artificial Sequence
  GFR-binding peptide
  MOD_RES (4)..(5)..(39)..(41): Xaa is C or S
  MOD_RES (19)..(20)..(21)..(22)..(23): Xaa is A or G
  MOD_RES (24)..(25)..(26)..(27): Xaa is A or G or is absent
PKPXXAPTQLRSVKVAKVXXXXXXXXXKEVQVNMVVRAXGX

SEQ ID NO: 53363 - protein, 37 aa, Artificial Sequence
  GFR-binding peptide
  MOD_RES (1)..(35)..(37): Xaa is C or S
  MOD_RES (15)..(16)..(17)..(18)..(19): Xaa is A or G
  MOD_RES (20)..(21)..(22)..(23): Xaa is A or G or is absent
XVPTELRSVKMAKVXXXXXXXXXKEVQVDMVVEGXGX

SEQ ID NO: 53364 - protein, 39 aa, Artificial Sequence
  GFR-binding peptide
  MOD_RES (5)..(6): Xaa is C or S
  MOD_RES (20)..(21)..(22)..(23)..(24): Xaa is A or G
  MOD_RES (25)..(26)..(27)..(28): Xaa is A or G or is absent
IPKAXXVPTELRSVKMAKVXXXXXXXXXKEVQVEMVVEG

SEQ ID NO: 53365 - protein, 37 aa, Artificial Sequence
  GFR-binding peptide
  MOD_RES (3)..(3): Xaa is C or S
VQXRPTQVQLEPLPVVYYEIVRKKPIFEQLSNTLEDH

SEQ ID NO: 53366 - protein, 37 aa, Artificial Sequence
  GFR-binding peptide
  MOD_RES (1)..(2)..(35)..(37): Xaa is C or S
  MOD_RES (16)..(17)..(18)..(19)..(20): Xaa is A or G
  MOD_RES (21)..(22)..(23)..(24): Xaa is A or G or is absent
XXVPQALRPVQIRKIXXXXXXXXXKKATVMIVRSXKX

SEQ ID NO: 53367 - protein, 33 aa, Artificial Sequence; identical to SEQ ID NO: 14975
  GFR-binding peptide
  MOD_RES (14)..(15)..(16)..(17)..(18): Xaa is A or G
  MOD_RES (19)..(20)..(21)..(22): Xaa is A or G or is absent

SEQ ID NO: 53368 - protein, 40 aa, Artificial Sequence
  GFR-binding peptide
  MOD_RES (5)..(6)..(38)..(40): Xaa is C or S
IPKAXXVPTELSNITMQIMDEYDKVVIGEMSEMVVEGXGX

SEQ ID NO: 53369 - protein, 38 aa, Artificial Sequence; identical to SEQ ID NO: 14977
  GFR-binding peptide
  MOD_RES (4)..(5)..(37): Xaa is C or S

SEQ ID NO: 53370 - protein, 30 aa, Artificial Sequence; identical to SEQ ID NO: 14978
  GFR-binding peptide

SEQ ID NO: 53371 - protein, 42 aa, Artificial Sequence
  GFR-binding peptide
  MOD_RES (5)..(39)..(41): Xaa is C or S
EGLEXVPTEEEPLTMLYYRIKPHQGQHEQLSNFLQHNKXEXR

SEQ ID NO: 53372 - protein, 38 aa, Artificial Sequence; identical to SEQ ID NO: 19905
  GFR-binding peptide
  MOD_RES (2)..(36)..(38): Xaa is C or S
  MOD_RES (16)..(17)..(18)..(19)..(20): Xaa is A or G
  MOD_RES (21)..(22)..(23)..(24): Xaa is A or G or is absent

SEQ ID NO: 53373 - protein, 35 aa, Artificial Sequence; identical to SEQ ID NO: 19906
  GFR-binding peptide
  MOD_RES (1)..(1): Xaa is C or S
  MOD_RES (17)..(18)..(19)..(20)..(21): Xaa is A or G
  MOD_RES (22)..(23)..(24)..(25): Xaa is A or G or is absent

SEQ ID NO: 53374 - protein, 38 aa, Artificial Sequence; identical to SEQ ID NO: 14979
  GFR-binding peptide
  MOD_RES (2)..(3)..(36)..(38): Xaa is C or S
  MOD_RES (17)..(18)..(19)..(20)..(21): Xaa is A or G
  MOD_RES (22)..(23)..(24)..(25): Xaa is A or G or is absent

SEQ ID NO: 53375 - protein, 35 aa, Artificial Sequence
  GFR-binding peptide
  MOD_RES (4)..(4): Xaa is C or S
KPTXAPTKLRSVKVAKVDDSSNVIKEVQVNMVVRS

SEQ ID NO: 53376 - protein, 43 aa, Artificial Sequence; identical to SEQ ID NO: 14980
  GFR-binding peptide
  MOD_RES (5)..(6)..(40)..(42): Xaa is C or S
  MOD_RES (20)..(21)..(22)..(23)..(24): Xaa is A or G
  MOD_RES (25)..(26)..(27)..(28): Xaa is A or G or is absent

SEQ ID NO: 53377 - protein, 38 aa, Artificial Sequence
  GFR-binding peptide
  MOD_RES (5)..(5): Xaa is C or S
  MOD_RES (19)..(20)..(21)..(22)..(23): Xaa is A or G
  MOD_RES (24)..(25)..(26)..(27): Xaa is A or G or is absent
TKPTXAPTKLSNITVQIMXXXXXXXXXIGEMSNMVVRS

SEQ ID NO: 53378 - protein, 40 aa, Artificial Sequence
  GFR-binding peptide
  MOD_RES (4)..(5)..(39): Xaa is C or S
  MOD_RES (19)..(20)..(21)..(22)..(23): Xaa is A or G
  MOD_RES (24)..(25)..(26)..(27): Xaa is A or G or is absent
PKPXXAPTKLSNITVQIMXXXXXXXXXIGEMSNMVVRSXG

SEQ ID NO: 53379 - protein, 37 aa, Artificial Sequence; identical to SEQ ID NO: 19913
  GFR-binding peptide
  MOD_RES (3)..(3): Xaa is C or S

SEQ ID NO: 53380 - protein, 33 aa, Artificial Sequence; identical to SEQ ID NO: 19914
  GFR-binding peptide
  MOD_RES (14)..(15)..(16)..(17)..(18): Xaa is A or G
  MOD_RES (19)..(20)..(21)..(22): Xaa is A or G or is absent

SEQ ID NO: 53381 - protein, 40 aa, Artificial Sequence; identical to SEQ ID NO: 19915
  GFR-binding peptide
  MOD_RES (4)..(4): Xaa is C or S
  MOD_RES (20)..(21)..(22)..(23)..(24): Xaa is A or G
  MOD_RES (25)..(26)..(27)..(28): Xaa is A or G or is absent

SEQ ID NO: 53382 - protein, 41 aa, Artificial Sequence
  GFR-binding peptide
  MOD_RES (2)..(39)..(41): Xaa is C or S
  MOD_RES (18)..(19)..(20)..(21)..(22): Xaa is A or G
  MOD_RES (23)..(24)..(25)..(26): Xaa is A or G or is absent
QXRPTQVQLEPLTVLYYXXXXXXXXXEQLSNTLEDHLAXKX

SEQ ID NO: 53383 - protein, 35 aa, Artificial Sequence; identical to SEQ ID NO: 14985
  GFR-binding peptide
  MOD_RES (33)..(35): Xaa is C or S
  MOD_RES (14)..(15)..(16)..(17)..(18): Xaa is A or G
  MOD_RES (19)..(20)..(21)..(22): Xaa is A or G or is absent

SEQ ID NO: 53384 - protein, 43 aa, Artificial Sequence
  GFR-binding peptide
  MOD_RES (5)..(42): Xaa is C or S
SSVKXQPSRVHHEPLPVVYYEYVRKKPKLEQLSNRLEEHLEXA

SEQ ID NO: 53385 - protein, 35 aa, Artificial Sequence
  GFR-binding peptide
  MOD_RES (16)..(17)..(18)..(19)..(20): Xaa is A or G
  MOD_RES (21)..(22)..(23)..(24): Xaa is A or G or is absent
QPSRVHHEPLPVVYYXXXXXXXXXEQLSNRLEEHL

SEQ ID NO: 53386 - protein, 31 aa, Artificial Sequence
  GFR-binding peptide
  MOD_RES (1)..(1): Xaa is C or S
XAPTQLSNITVQIMDDSSNVIIGEMSNMVVR

SEQ ID NO: 53387 - protein, 37 aa, Artificial Sequence; identical to SEQ ID NO: 14988
  GFR-binding peptide
  MOD_RES (5)..(6): Xaa is C or S

SEQ ID NO: 53388 - protein, 40 aa, Artificial Sequence; identical to SEQ ID NO: 19918
  GFR-binding peptide
  MOD_RES (1)..(38)..(40): Xaa is C or S
  MOD_RES (17)..(18)..(19)..(20)..(21): Xaa is A or G
  MOD_RES (22)..(23)..(24)..(25): Xaa is A or G or is absent

SEQ ID NO: 53389 - protein, 37 aa, Artificial Sequence; identical to SEQ ID NO: 14989
  GFR-binding peptide
  MOD_RES (1)..(35)..(37): Xaa is C or S
  MOD_RES (15)..(16)..(17)..(18)..(19): Xaa is A or G
  MOD_RES (20)..(21)..(22)..(23): Xaa is A or G or is absent

SEQ ID NO: 53390 - protein, 38 aa, Artificial Sequence
  GFR-binding peptide
  MOD_RES (1)..(35)..(37): Xaa is C or S
  MOD_RES (15)..(16)..(17)..(18)..(19): Xaa is A or G
  MOD_RES (20)..(21)..(22)..(23): Xaa is A or G or is absent
XVPTEEEPLPMVYYXXXXXXXXXEQLSNFLQHNKXEXR

SEQ ID NO: 53391 - protein, 41 aa, Artificial Sequence
  GFR-binding peptide
  MOD_RES (3)..(4)..(38)..(40): Xaa is C or S
  MOD_RES (18)..(19)..(20)..(21)..(22): Xaa is A or G
  MOD_RES (23)..(24)..(25)..(26): Xaa is A or G or is absent
KAXXVPTELRSVKMAKVXXXXXXXXXKEVQVEMVVEGXGXR

SEQ ID NO: 53392 - protein, 38 aa, Artificial Sequence
  GFR-binding peptide
  MOD_RES (5)..(6)..(38): Xaa is C or S
VPKPXXAPTKLRPVQVRKIDDSSNVIKKATVNMVVRSX

SEQ ID NO: 53393 - protein, 40 aa, Artificial Sequence; identical to SEQ ID NO: 19919
  GFR-binding peptide
  MOD_RES (4)..(4): Xaa is C or S
  MOD_RES (20)..(21)..(22)..(23)..(24): Xaa is A or G
  MOD_RES (25)..(26)..(27)..(28): Xaa is A or G or is absent

SEQ ID NO: 53394 - protein, 40 aa, Artificial Sequence
  GFR-binding peptide
  MOD_RES (37)..(39): Xaa is C or S
QPSRVHHEPLPVVYYEYVRKKPKLEQLSNRLEEHLEXAXA

SEQ ID NO: 53395 - protein, 38 aa, Artificial Sequence; identical to SEQ ID NO: 19920
  GFR-binding peptide
  MOD_RES (3)..(37): Xaa is C or S
  MOD_RES (17)..(18)..(19)..(20)..(21): Xaa is A or G
  MOD_RES (22)..(23)..(24)..(25): Xaa is A or G or is absent

SEQ ID NO: 53396 - protein, 38 aa, Artificial Sequence; identical to SEQ ID NO: 14992
  GFR-binding peptide
  MOD_RES (4)..(5): Xaa is C or S
  MOD_RES (19)..(20)..(21)..(22)..(23): Xaa is A or G
  MOD_RES (24)..(25)..(26)..(27): Xaa is A or G or is absent

SEQ ID NO: 53397 - protein, 33 aa, Artificial Sequence
  GFR-binding peptide
  MOD_RES (1)..(32): Xaa is C or S
XVPQALRPVQIRKIVGRKPKVKKATVMIVRSXK

SEQ ID NO: 53398 - protein, 35 aa, Artificial Sequence
  GFR-binding peptide
  MOD_RES (3)..(4): Xaa is C or S
KAXXVPTELSNITMQIMDEYDKVVIGEMSEMVVEG

SEQ ID NO: 53399 - protein, 37 aa, Artificial Sequence
  GFR-binding peptide
  MOD_RES (2)..(3)..(36): Xaa is C or S
  MOD_RES (17)..(18)..(19)..(20)..(21): Xaa is A or G
  MOD_RES (22)..(23)..(24)..(25): Xaa is A or G or is absent
PXXVPQALRSVKIAKVXXXXXXXXXKEVQVMIVRSXK

SEQ ID NO: 53400 - protein, 38 aa, Artificial Sequence
  GFR-binding peptide
  MOD_RES (2)..(3)..(37): Xaa is C or S
  MOD_RES (17)..(18)..(19)..(20)..(21): Xaa is A or G
  MOD_RES (22)..(23)..(24)..(25): Xaa is A or G or is absent
PXXAPTQLRPVQVRKIXXXXXXXXXKKATVNMVVRAXG

SEQ ID NO: 53401 - protein, 37 aa, Artificial Sequence
  GFR-binding peptide
  MOD_RES (37)..(37): Xaa is C or S
QPSRVHHEPLPVVYYEYVRKKPKLEQLSNRLEEHLEX

SEQ ID NO: 53402 - protein, 36 aa, Artificial Sequence
  GFR-binding peptide
  MOD_RES (34)..(36): Xaa is C or S
  MOD_RES (14)..(15)..(16)..(17)..(18): Xaa is A or G
  MOD_RES (19)..(20)..(21)..(22): Xaa is A or G or is absent
APTKLRPVQVRKIXXXXXXXXXKKATVNMVVRSXGX

SEQ ID NO: 53403 - protein, 38 aa, Artificial Sequence
  GFR-binding peptide
  MOD_RES (35)..(37): Xaa is C or S
TQVQLEPLTVLYYEIVRKKPIFEQLSNTLEDHLAXKXE

SEQ ID NO: 53404 - protein, 33 aa, Artificial Sequence
  GFR-binding peptide
  MOD_RES (1)..(1): Xaa is C or S
  MOD_RES (15)..(16)..(17)..(18)..(19): Xaa is A or G
  MOD_RES (20)..(21)..(22)..(23): Xaa is A or G or is absent
XVPTELRSVKMAKVXXXXXXXXXKEVQVEMVVE

SEQ ID NO: 53405 - protein, 39 aa, Artificial Sequence; identical to SEQ ID NO: 14994
  GFR-binding peptide
  MOD_RES (2)..(3)..(37)..(39): Xaa is C or S
  MOD_RES (17)..(18)..(19)..(20)..(21): Xaa is A or G
  MOD_RES (22)..(23)..(24)..(25): Xaa is A or G or is absent

SEQ ID NO: 53406 - protein, 36 aa, Artificial Sequence
  GFR-binding peptide
  MOD_RES (3)..(4): Xaa is C or S
  MOD_RES (18)..(19)..(20)..(21)..(22): Xaa is A or G
  MOD_RES (23)..(24)..(25)..(26): Xaa is A or G or is absent
KAXXVPTELSNITMQIMXXXXXXXXXIGEMSEMVVE

SEQ ID NO: 53407 - protein, 41 aa, Artificial Sequence; identical to SEQ ID NO: 14999
  GFR-binding peptide
  MOD_RES (5)..(6)..(40): Xaa is C or S
  MOD_RES (20)..(21)..(22)..(23)..(24): Xaa is A or G
  MOD_RES (25)..(26)..(27)..(28): Xaa is A or G or is absent

SEQ ID NO: 53408 - protein, 39 aa, Artificial Sequence
  GFR-binding peptide
  MOD_RES (5)..(5): Xaa is C or S
RNVQXRPTQVQLEPLPVVYYEIVRKKPIFEQLSNTLEDH

SEQ ID NO: 53409 - protein, 39 aa, Artificial Sequence
  GFR-binding peptide
  MOD_RES (4)..(5)..(37)..(39): Xaa is C or S
PKPXXAPTKLSNITVQIMDDSSNVIIGEMSNMVVRSXGX

SEQ ID NO: 53410 - protein, 33 aa, Artificial Sequence
  GFR-binding peptide
  MOD_RES (1)..(1): Xaa is C or S
  MOD_RES (15)..(16)..(17)..(18)..(19): Xaa is A or G
  MOD_RES (20)..(21)..(22)..(23): Xaa is A or G or is absent
XVPTELRPVQMRKIXXXXXXXXXKKATVEMVVE

SEQ ID NO: 53411 - protein, 31 aa, Artificial Sequence
  GFR-binding peptide
  MOD_RES (1)..(1): Xaa is C or S
XVSQDLRPVQIRKIIGKTPKIKKATVMIVKS

SEQ ID NO: 53412 - protein, 40 aa, Artificial Sequence
  GFR-binding peptide
  MOD_RES (5)..(39): Xaa is C or S
  MOD_RES (19)..(20)..(21)..(22)..(23): Xaa is A or G
  MOD_RES (24)..(25)..(26)..(27): Xaa is A or G or is absent
TKPTXAPTKLRSVKVAKVXXXXXXXXXKEVQVNMVVRSXG

SEQ ID NO: 53413 - protein, 36 aa, Artificial Sequence
  GFR-binding peptide
  MOD_RES (1)..(2)..(35): Xaa is C or S
  MOD_RES (16)..(17)..(18)..(19)..(20): Xaa is A or G
  MOD_RES (21)..(22)..(23)..(24): Xaa is A or G or is absent
XXVSQDLRPVQIRKIXXXXXXXXXKKATVMIVKSXK

SEQ ID NO: 53414 - protein, 37 aa, Artificial Sequence
  GFR-binding peptide
  MOD_RES (4)..(5): Xaa is C or S
  MOD_RES (19)..(20)..(21)..(22)..(23): Xaa is A or G
  MOD_RES (24)..(25)..(26)..(27): Xaa is A or G or is absent
PKPXXAPTQLRSVKVAKVXXXXXXXXXKEVQVNMVVR

SEQ ID NO: 53415 - protein, 32 aa, Artificial Sequence
  GFR-binding peptide
  MOD_RES (14)..(15)..(16)..(17)..(18): Xaa is A or G
  MOD_RES (19)..(20)..(21)..(22): Xaa is A or G or is absent
VPQALRPVQIRKIXXXXXXXXXKKATVMIVRS

SEQ ID NO: 53416 - protein, 37 aa, Artificial Sequence
  GFR-binding peptide
  MOD_RES (35)..(37): Xaa is C or S
SRVHHEPLPVVYYEYVRKKPKLEQLSNRLEEHLEXAX

SEQ ID NO: 53417 - protein, 36 aa, Artificial Sequence
  GFR-binding peptide
  MOD_RES (3)..(4)..(36): Xaa is C or S
KAXXVPTELRPVQMRKIDEYDKVVKKATVEMVVEGX

SEQ ID NO: 53418 - protein, 34 aa, Artificial Sequence; identical to SEQ ID NO: 19935
  GFR-binding peptide

SEQ ID NO: 53419 - protein, 39 aa, Artificial Sequence
  GFR-binding peptide
  MOD_RES (3)..(4)..(38): Xaa is C or S
  MOD_RES (18)..(19)..(20)..(21)..(22): Xaa is A or G
  MOD_RES (23)..(24)..(25)..(26): Xaa is A or G or is absent
KPXXAPTKLSNITVQIMXXXXXXXXXIGEMSNMVVRSXG

SEQ ID NO: 53420 - protein, 41 aa, Artificial Sequence
  GFR-binding peptide
  MOD_RES (5)..(6)..(39)..(41): Xaa is C or S
  MOD_RES (20)..(21)..(22)..(23)..(24): Xaa is A or G
  MOD_RES (25)..(26)..(27)..(28): Xaa is A or G or is absent
SASPXXVSQDLSNITIQIMXXXXXXXXXIGEMSMIVKSXKX

SEQ ID NO: 53421 - protein, 37 aa, Artificial Sequence; identical to SEQ ID NO: 19938
  GFR-binding peptide
  MOD_RES (1)..(35)..(37): Xaa is C or S
  MOD_RES (15)..(16)..(17)..(18)..(19): Xaa is A or G
  MOD_RES (20)..(21)..(22)..(23): Xaa is A or G or is absent

SEQ ID NO: 53422 - protein, 38 aa, Artificial Sequence
  GFR-binding peptide
  MOD_RES (4)..(5)..(38): Xaa is C or S
  MOD_RES (19)..(20)..(21)..(22)..(23): Xaa is A or G
  MOD_RES (24)..(25)..(26)..(27): Xaa is A or G or is absent
ASPXXVPQDLRSVKIAKVXXXXXXXXXKEVQVMVVKSX

SEQ ID NO: 53423 - protein, 41 aa, Artificial Sequence; identical to SEQ ID NO: 19940
  GFR-binding peptide
  MOD_RES (3)..(40): Xaa is C or S
  MOD_RES (19)..(20)..(21)..(22)..(23): Xaa is A or G
  MOD_RES (24)..(25)..(26)..(27): Xaa is A or G or is absent

SEQ ID NO: 53424 - protein, 42 aa, Artificial Sequence; identical to SEQ ID NO: 19941
  GFR-binding peptide
  MOD_RES (3)..(40)..(42): Xaa is C or S
  MOD_RES (19)..(20)..(21)..(22)..(23): Xaa is A or G
  MOD_RES (24)..(25)..(26)..(27): Xaa is A or G or is absent

SEQ ID NO: 53425 - protein, 40 aa, Artificial Sequence
  GFR-binding peptide
  MOD_RES (4)..(5)..(37)..(39): Xaa is C or S
PKAXXVPTELSNITMQIMDEYDKVVIGEMSEMVVEGXGXR

SEQ ID NO: 53426 - protein, 34 aa, Artificial Sequence
  GFR-binding peptide
  MOD_RES (34)..(34): Xaa is C or S
  MOD_RES (14)..(15)..(16)..(17)..(18): Xaa is A or G
  MOD_RES (19)..(20)..(21)..(22): Xaa is A or G or is absent
APTKLRSVKVAKVXXXXXXXXXKEVQVNMVVRSX

SEQ ID NO: 53427 - protein, 37 aa, Artificial Sequence
  GFR-binding peptide
  MOD_RES (34)..(36): Xaa is C or S
  MOD_RES (14)..(15)..(16)..(17)..(18): Xaa is A or G
  MOD_RES (19)..(20)..(21)..(22): Xaa is A or G or is absent
APTQLSNITVQIMXXXXXXXXXIGEMSNMVVRAXGXH

SEQ ID NO: 53428 - protein, 42 aa, Artificial Sequence
  GFR-binding peptide
  MOD_RES (6)..(40)..(42): Xaa is C or S
  MOD_RES (20)..(21)..(22)..(23)..(24): Xaa is A or G
  MOD_RES (25)..(26)..(27)..(28): Xaa is A or G or is absent
VTKPTXAPTKLSNITVQIMXXXXXXXXXIGEMSNMVVRSXGX

SEQ ID NO: 53429 - protein, 39 aa, Artificial Sequence
  GFR-binding peptide
  MOD_RES (6)..(38): Xaa is C or S
VTKPTXAPTKLRSVKVAKVDDSSNVIKEVQVNMVVRSXG

SEQ ID NO: 53430 - protein, 37 aa, Artificial Sequence; identical to SEQ ID NO: 40888
  GFR-binding peptide
  MOD_RES (1)..(2)..(35)..(37): Xaa is C or S
  MOD_RES (16)..(17)..(18)..(19)..(20): Xaa is A or G
  MOD_RES (21)..(22)..(23)..(24): Xaa is A or G or is absent

SEQ ID NO: 53431 - protein, 35 aa, Artificial Sequence; identical to SEQ ID NO: 15010
  GFR-binding peptide
  MOD_RES (1)..(2)..(35): Xaa is C or S
  MOD_RES (16)..(17)..(18)..(19)..(20): Xaa is A or G
  MOD_RES (21)..(22)..(23)..(24): Xaa is A or G or is absent

SEQ ID NO: 53432 - protein, 38 aa, Artificial Sequence; identical to SEQ ID NO: 19945
  GFR-binding peptide
  MOD_RES (2)..(2): Xaa is C or S

SEQ ID NO: 53433 - protein, 37 aa, Artificial Sequence
  GFR-binding peptide
  MOD_RES (3)..(4): Xaa is C or S
  MOD_RES (18)..(19)..(20)..(21)..(22): Xaa is A or G
  MOD_RES (23)..(24)..(25)..(26): Xaa is A or G or is absent
KPXXAPTKLRSVKVAKVXXXXXXXXXKEVQVNMVVRS

SEQ ID NO: 53434 - protein, 41 aa, Artificial Sequence
  GFR-binding peptide
  MOD_RES (6)..(38)..(40): Xaa is C or S
VTKPTXAPTKLRSVKVAKVDDSSNVIKEVQVNMVVRSXGXH

SEQ ID NO: 53435 - protein, 38 aa, Artificial Sequence
  GFR-binding peptide
  MOD_RES (3)..(4)..(37): Xaa is C or S
  MOD_RES (18)..(19)..(20)..(21)..(22): Xaa is A or G
  MOD_RES (23)..(24)..(25)..(26): Xaa is A or G or is absent
SPXXVSQDLRSVKIAKVXXXXXXXXXKEVQVMIVKSXK

SEQ ID NO: 53436 - protein, 40 aa, Artificial Sequence; identical to SEQ ID NO: 15016
  GFR-binding peptide
  MOD_RES (4)..(5)..(37)..(39): Xaa is C or S

SEQ ID NO: 53437 - protein, 33 aa, Artificial Sequence; identical to SEQ ID NO: 15018
  GFR-binding peptide
  MOD_RES (1)..(2): Xaa is C or S

SEQ ID NO: 53438 - protein, 40 aa, Artificial Sequence; identical to SEQ ID NO: 15019
  GFR-binding peptide
  MOD_RES (5)..(6)..(39): Xaa is C or S
  MOD_RES (20)..(21)..(22)..(23)..(24): Xaa is A or G
  MOD_RES (25)..(26)..(27)..(28): Xaa is A or G or is absent

SEQ ID NO: 53439 - protein, 36 aa, Artificial Sequence; identical to SEQ ID NO: 15022
  GFR-binding peptide
  MOD_RES (1)..(35): Xaa is C or S
  MOD_RES (15)..(16)..(17)..(18)..(19): Xaa is A or G
  MOD_RES (20)..(21)..(22)..(23): Xaa is A or G or is absent

SEQ ID NO: 53440 - protein, 37 aa, Artificial Sequence; identical to SEQ ID NO: 15023
  GFR-binding peptide
  MOD_RES (2)..(3)..(37): Xaa is C or S
  MOD_RES (17)..(18)..(19)..(20)..(21): Xaa is A or G
  MOD_RES (22)..(23)..(24)..(25): Xaa is A or G or is absent

SEQ ID NO: 53441 - protein, 41 aa, Artificial Sequence; identical to SEQ ID NO: 15026
  GFR-binding peptide
  MOD_RES (4)..(5)..(39)..(41): Xaa is C or S
  MOD_RES (19)..(20)..(21)..(22)..(23): Xaa is A or G
  MOD_RES (24)..(25)..(26)..(27): Xaa is A or G or is absent

SEQ ID NO: 53442 - protein, 37 aa, Artificial Sequence; identical to SEQ ID NO: 19951
  GFR-binding peptide
  MOD_RES (35)..(37): Xaa is C or S
  MOD_RES (14)..(15)..(16)..(17)..(18): Xaa is A or G
  MOD_RES (19)..(20)..(21)..(22): Xaa is A or G or is absent

SEQ ID NO: 53443 - protein, 39 aa, Artificial Sequence; identical to SEQ ID NO: 15031
  GFR-binding peptide
  MOD_RES (6)..(38): Xaa is C or S

SEQ ID NO: 53444 - protein, 40 aa, Artificial Sequence; identical to SEQ ID NO: 19952
  GFR-binding peptide
  MOD_RES (3)..(40): Xaa is C or S

SEQ ID NO: 53445 - protein, 40 aa, Artificial Sequence
  GFR-binding peptide
  MOD_RES (6)..(7): Xaa is C or S
  MOD_RES (21)..(22)..(23)..(24)..(25): Xaa is A or G
  MOD_RES (26)..(27)..(28)..(29): Xaa is A or G or is absent
KIPKAXXVPTELRSVKMAKVXXXXXXXXXKEVQVDMVVEG

SEQ ID NO: 53446 - protein, 35 aa, Artificial Sequence
  GFR-binding peptide
  MOD_RES (32)..(34): Xaa is C or S
APTKLRSVKVAKVDDSSNVIKEVQVNMVVRSXGXH

SEQ ID NO: 53447 - protein, 33 aa, Artificial Sequence; identical to SEQ ID NO: 15032
  GFR-binding peptide
  MOD_RES (3)..(3): Xaa is C or S

SEQ ID NO: 53448 - protein, 42 aa, Artificial Sequence; identical to SEQ ID NO: 19953
  GFR-binding peptide
  MOD_RES (5)..(42): Xaa is C or S
  MOD_RES (21)..(22)..(23)..(24)..(25): Xaa is A or G
  MOD_RES (26)..(27)..(28)..(29): Xaa is A or G or is absent

SEQ ID NO: 53449 - protein, 39 aa, Artificial Sequence
  GFR-binding peptide
  MOD_RES (1)..(38): Xaa is C or S
  MOD_RES (17)..(18)..(19)..(20)..(21): Xaa is A or G
  MOD_RES (22)..(23)..(24)..(25): Xaa is A or G or is absent
XQPSRVHHEPLTVLYYXXXXXXXXXEQLSNRLEEHLEXA

SEQ ID NO: 53450 - protein, 37 aa, Artificial Sequence
  GFR-binding peptide
  MOD_RES (7)..(7): Xaa is C or S
HVTKPTXAPTKLRSVKVAKVDDSSNVIKEVQVNMVVR

SEQ ID NO: 53451 - protein, 37 aa, Artificial Sequence
  GFR-binding peptide
  MOD_RES (37)..(37): Xaa is C or S
RPTQVQLEPLPVVYYEIVRKKPIFEQLSNTLEDHLAX

SEQ ID NO: 53452 - protein, 44 aa, Artificial Sequence; identical to SEQ ID NO: 15035
  GFR-binding peptide
  MOD_RES (6)..(7)..(41)..(43): Xaa is C or S
  MOD_RES (21)..(22)..(23)..(24)..(25): Xaa is A or G
  MOD_RES (26)..(27)..(28)..(29): Xaa is A or G or is absent

SEQ ID NO: 53453 - protein, 41 aa, Artificial Sequence; identical to SEQ ID NO: 15036
  GFR-binding peptide
  MOD_RES (5)..(6)..(39)..(41): Xaa is C or S
  MOD_RES (20)..(21)..(22)..(23)..(24): Xaa is A or G
  MOD_RES (25)..(26)..(27)..(28): Xaa is A or G or is absent

SEQ ID NO: 53454 - protein, 40 aa, Artificial Sequence; identical to SEQ ID NO: 19957
  GFR-binding peptide
  MOD_RES (5)..(5): Xaa is C or S

SEQ ID NO: 53455 - protein, 40 aa, Artificial Sequence
  GFR-binding peptide
  MOD_RES (4)..(5)..(39): Xaa is C or S
  MOD_RES (19)..(20)..(21)..(22)..(23): Xaa is A or G
  MOD_RES (24)..(25)..(26)..(27): Xaa is A or G or is absent
PKAXXVPTELRPVQMRKIXXXXXXXXXKKATVEMVVEGXG

SEQ ID NO: 53456 - protein, 39 aa, Artificial Sequence
  GFR-binding peptide
  MOD_RES (5)..(39): Xaa is C or S
  MOD_RES (19)..(20)..(21)..(22)..(23): Xaa is A or G
  MOD_RES (24)..(25)..(26)..(27): Xaa is A or G or is absent
TKPTXAPTKLRSVKVAKVXXXXXXXXXKEVQVNMVVRSX

SEQ ID NO: 53457 - protein, 39 aa, Artificial Sequence; identical to SEQ ID NO: 15041
  GFR-binding peptide
  MOD_RES (5)..(6)..(37)..(39): Xaa is C or S

SEQ ID NO: 53458 - protein, 38 aa, Artificial Sequence
  GFR-binding peptide
  MOD_RES (2)..(2): Xaa is C or S
QXRPTQVQLEPLTVLYYEIVRKKPIFEQLSNTLEDHLA

SEQ ID NO: 53459 - protein, 37 aa, Artificial Sequence
  GFR-binding peptide
  MOD_RES (4)..(5): Xaa is C or S
  MOD_RES (19)..(20)..(21)..(22)..(23): Xaa is A or G
  MOD_RES (24)..(25)..(26)..(27): Xaa is A or G or is absent
PKAXXVPTELSNITMQIMXXXXXXXXXIGEMSDMVVE

SEQ ID NO: 53460 - protein, 34 aa, Artificial Sequence; identical to SEQ ID NO: 15043
  GFR-binding peptide
  MOD_RES (1)..(1): Xaa is C or S
  MOD_RES (15)..(16)..(17)..(18)..(19): Xaa is A or G
  MOD_RES (20)..(21)..(22)..(23): Xaa is A or G or is absent

SEQ ID NO: 53461 - protein, 42 aa, Artificial Sequence; identical to SEQ ID NO: 19960
  GFR-binding peptide
  MOD_RES (3)..(40)..(42): Xaa is C or S
  MOD_RES (19)..(20)..(21)..(22)..(23): Xaa is A or G
  MOD_RES (24)..(25)..(26)..(27): Xaa is A or G or is absent

SEQ ID NO: 53462 - protein, 34 aa, Artificial Sequence
  GFR-binding peptide
  MOD_RES (2)..(3)..(34): Xaa is C or S
PXXVPQALSNITIQIMVGRKPKVIGEMSMIVRSX

SEQ ID NO: 53463 - protein, 36 aa, Artificial Sequence
  GFR-binding peptide
  MOD_RES (1)..(35): Xaa is C or S
  MOD_RES (15)..(16)..(17)..(18)..(19): Xaa is A or G
  MOD_RES (20)..(21)..(22)..(23): Xaa is A or G or is absent
XAPTKLRSVKVAKVXXXXXXXXXKEVQVNMVVRSXG

SEQ ID NO: 53464 - protein, 38 aa, Artificial Sequence; identical to SEQ ID NO: 40936
  GFR-binding peptide
  MOD_RES (1)..(2)..(35)..(37): Xaa is C or S
  MOD_RES (16)..(17)..(18)..(19)..(20): Xaa is A or G
  MOD_RES (21)..(22)..(23)..(24): Xaa is A or G or is absent

SEQ ID NO: 53465 - protein, 43 aa, Artificial Sequence; identical to SEQ ID NO: 19964
  GFR-binding peptide
  MOD_RES (5)..(42): Xaa is C or S
  MOD_RES (21)..(22)..(23)..(24)..(25): Xaa is A or G
  MOD_RES (26)..(27)..(28)..(29): Xaa is A or G or is absent

SEQ ID NO: 53466 - protein, 37 aa, Artificial Sequence
  GFR-binding peptide
  MOD_RES (5)..(6): Xaa is C or S
VPKPXXAPTKLSNITVQIMDDSSNVIIGEMSNMVVRS

SEQ ID NO: 53467 - protein, 40 aa, Artificial Sequence; identical to SEQ ID NO: 15049
  GFR-binding peptide
  MOD_RES (6)..(7)..(40): Xaa is C or S
  MOD_RES (21)..(22)..(23)..(24)..(25): Xaa is A or G
  MOD_RES (26)..(27)..(28)..(29): Xaa is A or G or is absent

SEQ ID NO: 53468 - protein, 37 aa, Artificial Sequence; identical to SEQ ID NO: 19966
  GFR-binding peptide
  MOD_RES (35)..(37): Xaa is C or S
  MOD_RES (14)..(15)..(16)..(17)..(18): Xaa is A or G
  MOD_RES (19)..(20)..(21)..(22): Xaa is A or G or is absent

SEQ ID NO: 53469 - protein, 35 aa, Artificial Sequence
  GFR-binding peptide
  MOD_RES (4)..(5): Xaa is C or S
PKPXXAPTQLSNITVQIMDDSSNVIIGEMSNMVVR

SEQ ID NO: 53470 - protein, 38 aa, Artificial Sequence
  GFR-binding peptide
  MOD_RES (37)..(37): Xaa is C or S
RPTQVQLEPLPVVYYEIVRKKPIFEQLSNTLEDHLAXK

SEQ ID NO: 53471 - protein, 38 aa, Artificial Sequence; identical to SEQ ID NO: 15051
  GFR-binding peptide
  MOD_RES (1)..(35)..(37): Xaa is C or S
  MOD_RES (15)..(16)..(17)..(18)..(19): Xaa is A or G
  MOD_RES (20)..(21)..(22)..(23): Xaa is A or G or is absent

SEQ ID NO: 53472 - protein, 42 aa, Artificial Sequence; identical to SEQ ID NO: 15052
  GFR-binding peptide
  MOD_RES (4)..(5)..(39)..(41): Xaa is C or S
  MOD_RES (19)..(20)..(21)..(22)..(23): Xaa is A or G
  MOD_RES (24)..(25)..(26)..(27): Xaa is A or G or is absent

SEQ ID NO: 53473 - protein, 34 aa, Artificial Sequence
  GFR-binding peptide
  MOD_RES (1)..(1): Xaa is C or S
  MOD_RES (15)..(16)..(17)..(18)..(19): Xaa is A or G
  MOD_RES (20)..(21)..(22)..(23): Xaa is A or G or is absent
XAPTKLSNITVQIMXXXXXXXXXIGEMSNMVVRS

SEQ ID NO: 53474 - protein, 37 aa, Artificial Sequence
  GFR-binding peptide
  MOD_RES (1)..(2)..(36): Xaa is C or S
  MOD_RES (16)..(17)..(18)..(19)..(20): Xaa is A or G
  MOD_RES (21)..(22)..(23)..(24): Xaa is A or G or is absent
XXAPTQLRPVQVRKIXXXXXXXXXKKATVNMVVRAXG

SEQ ID NO: 53475 - protein, 40 aa, Artificial Sequence
  GFR-binding peptide
  MOD_RES (6)..(7)..(39): Xaa is C or S
KIPKAXXVPTELRPVQMRKIDENEKVVKKATVDMVVEGXG

SEQ ID NO: 53476 - protein, 42 aa, Artificial Sequence
  GFR-binding peptide
  MOD_RES (6)..(7)..(41): Xaa is C or S
  MOD_RES (21)..(22)..(23)..(24)..(25): Xaa is A or G
  MOD_RES (26)..(27)..(28)..(29): Xaa is A or G or is absent
KIPKAXXVPTELRSVKMAKVXXXXXXXXXKEVQVDMVVEGXG

SEQ ID NO: 53477 - protein, 41 aa, Artificial Sequence; identical to SEQ ID NO: 19968
  GFR-binding peptide
  MOD_RES (5)..(5): Xaa is C or S
  MOD_RES (21)..(22)..(23)..(24)..(25): Xaa is A or G
  MOD_RES (26)..(27)..(28)..(29): Xaa is A or G or is absent

SEQ ID NO: 53478 - protein, 39 aa, Artificial Sequence
  GFR-binding peptide
  MOD_RES (1)..(2)..(36)..(38): Xaa is C or S
  MOD_RES (16)..(17)..(18)..(19)..(20): Xaa is A or G
  MOD_RES (21)..(22)..(23)..(24): Xaa is A or G or is absent
XXVPTELRPVQMRKIXXXXXXXXXKKATVDMVVEGXGXR

SEQ ID NO: 53479 - protein, 41 aa, Artificial Sequence
  GFR-binding peptide
  MOD_RES (2)..(39)..(41): Xaa is C or S
QXRPTQVQLEPLTVLYYEIVRKKPIFEQLSNTLEDHLAXKX

SEQ ID NO: 53480 - protein, 40 aa, Artificial Sequence; identical to SEQ ID NO: 15059
  GFR-binding peptide
  MOD_RES (5)..(6)..(39): Xaa is C or S
  MOD_RES (20)..(21)..(22)..(23)..(24): Xaa is A or G
  MOD_RES (25)..(26)..(27)..(28): Xaa is A or G or is absent

SEQ ID NO: 53481 - protein, 38 aa, Artificial Sequence; identical to SEQ ID NO: 15060
  GFR-binding peptide
  MOD_RES (3)..(4)..(38): Xaa is C or S
  MOD_RES (18)..(19)..(20)..(21)..(22): Xaa is A or G
  MOD_RES (23)..(24)..(25)..(26): Xaa is A or G or is absent

SEQ ID NO: 53482 - protein, 33 aa, Artificial Sequence
  GFR-binding peptide
  MOD_RES (1)..(2): Xaa is C or S
XXAPTQLRPVQVRKIDDSSNVIKKATVNMVVRA

SEQ ID NO: 53483 - protein, 37 aa, Artificial Sequence
  GFR-binding peptide
  MOD_RES (1)..(2)..(36): Xaa is C or S
  MOD_RES (16)..(17)..(18)..(19)..(20): Xaa is A or G
  MOD_RES (21)..(22)..(23)..(24): Xaa is A or G or is absent
XXVPTELRPVQMRKIXXXXXXXXXKKATVDMVVEGXG

SEQ ID NO: 53484 - protein, 38 aa, Artificial Sequence; identical to SEQ ID NO: 19971
  GFR-binding peptide
  MOD_RES (36)..(38): Xaa is C or S

SEQ ID NO: 53485 - protein, 35 aa, Artificial Sequence
  GFR-binding peptide
  MOD_RES (2)..(3)..(35): Xaa is C or S
PXXAPTQLRPVQVRKIDDSSNVIKKATVNMVVRAX

SEQ ID NO: 53486 - protein, 39 aa, Artificial Sequence
  GFR-binding peptide
  MOD_RES (5)..(6): Xaa is C or S
  MOD_RES (20)..(21)..(22)..(23)..(24): Xaa is A or G
  MOD_RES (25)..(26)..(27)..(28): Xaa is A or G or is absent
IPKAXXVPTELRPVQMRKIXXXXXXXXXKKATVEMVVEG

SEQ ID NO: 53487 - protein, 39 aa, Artificial Sequence; identical to SEQ ID NO: 15064
  GFR-binding peptide
  MOD_RES (6)..(6): Xaa is C or S
  MOD_RES (20)..(21)..(22)..(23)..(24): Xaa is A or G
  MOD_RES (25)..(26)..(27)..(28): Xaa is A or G or is absent

SEQ ID NO: 53488 - protein, 35 aa, Artificial Sequence; identical to SEQ ID NO: 19973
  GFR-binding peptide
  MOD_RES (15)..(16)..(17)..(18)..(19): Xaa is A or G
  MOD_RES (20)..(21)..(22)..(23): Xaa is A or G or is absent

SEQ ID NO: 53489 - protein, 38 aa, Artificial Sequence
  GFR-binding peptide
  MOD_RES (35)..(37): Xaa is C or S
  MOD_RES (14)..(15)..(16)..(17)..(18): Xaa is A or G
  MOD_RES (19)..(20)..(21)..(22): Xaa is A or G or is absent
TQVQLEPLTVLYYXXXXXXXXXEQLSNTLEDHLAXKXE

SEQ ID NO: 53490 - protein, 41 aa, Artificial Sequence; identical to SEQ ID NO: 19974
  GFR-binding peptide
  MOD_RES (6)..(40): Xaa is C or S
  MOD_RES (20)..(21)..(22)..(23)..(24): Xaa is A or G
  MOD_RES (25)..(26)..(27)..(28): Xaa is A or G or is absent

SEQ ID NO: 53491 - protein, 34 aa, Artificial Sequence; identical to SEQ ID NO: 15065
  GFR-binding peptide
  MOD_RES (3)..(4): Xaa is C or S

SEQ ID NO: 53492 - protein, 33 aa, Artificial Sequence
  GFR-binding peptide
  MOD_RES (1)..(33): Xaa is C or S
XAPTQLSNITVQIMDDSSNVIIGEMSNMVVRAX

SEQ ID NO: 53493 - protein, 35 aa, Artificial Sequence
  GFR-binding peptide
  MOD_RES (2)..(3)..(35): Xaa is C or S
AXXVPTELRPVQMRKIDENEKVVKKATVDMVVEGX

SEQ ID NO: 53494 - protein, 39 aa, Artificial Sequence; identical to SEQ ID NO: 19979
  GFR-binding peptide
  MOD_RES (36)..(38): Xaa is C or S
  MOD_RES (15)..(16)..(17)..(18)..(19): Xaa is A or G
  MOD_RES (20)..(21)..(22)..(23): Xaa is A or G or is absent

SEQ ID NO: 53495 - protein, 40 aa, Artificial Sequence
  GFR-binding peptide
  MOD_RES (5)..(6)..(39): Xaa is C or S
  MOD_RES (20)..(21)..(22)..(23)..(24): Xaa is A or G
  MOD_RES (25)..(26)..(27)..(28): Xaa is A or G or is absent
SAAPXXVPQALRPVQIRKIXXXXXXXXXKKATVMIVRSXK

SEQ ID NO: 53496 - protein, 31 aa, Artificial Sequence; identical to SEQ ID NO: 15066
  GFR-binding peptide
  MOD_RES (1)..(1): Xaa is C or S

SEQ ID NO: 53497 - protein, 34 aa, Artificial Sequence; identical to SEQ ID NO: 15070
  GFR-binding peptide
  MOD_RES (32)..(34): Xaa is C or S

SEQ ID NO: 53498 - protein, 44 aa, Artificial Sequence
  GFR-binding peptide
  MOD_RES (5)..(42)..(44): Xaa is C or S
SSVKXQPSRVHHEPLPVVYYEYVRKKPKLEQLSNRLEEHLEXAX

SEQ ID NO: 53499 - protein, 40 aa, Artificial Sequence
  GFR-binding peptide
  MOD_RES (7)..(7): Xaa is C or S
  MOD_RES (21)..(22)..(23)..(24)..(25): Xaa is A or G
  MOD_RES (26)..(27)..(28)..(29): Xaa is A or G or is absent
HVTKPTXAPTKLRSVKVAKVXXXXXXXXXKEVQVNMVVRS

SEQ ID NO: 53500 - protein, 35 aa, Artificial Sequence
  GFR-binding peptide
  MOD_RES (34)..(34): Xaa is C or S
  MOD_RES (14)..(15)..(16)..(17)..(18): Xaa is A or G
  MOD_RES (19)..(20)..(21)..(22): Xaa is A or G or is absent
VPTEEEPLTMLYYXXXXXXXXXEQLSNFLQHNKXE

SEQ ID NO: 53501 - protein, 43 aa, Artificial Sequence
  GFR-binding peptide
  MOD_RES (4)..(41)..(43): Xaa is C or S
SVKXQPSRVHHEPLPVVYYEYVRKKPKLEQLSNRLEEHLEXAX

SEQ ID NO: 53502 - protein, 38 aa, Artificial Sequence; identical to SEQ ID NO: 15073
  GFR-binding peptide
  MOD_RES (1)..(35)..(37): Xaa is C or S
  MOD_RES (15)..(16)..(17)..(18)..(19): Xaa is A or G
  MOD_RES (20)..(21)..(22)..(23): Xaa is A or G or is absent

SEQ ID NO: 53503 - protein, 35 aa, Artificial Sequence
  GFR-binding peptide
  MOD_RES (1)..(2)..(34): Xaa is C or S
XXVPTELRPVQMRKIDEYDKVVKKATVEMVVEGXG

SEQ ID NO: 53504 - protein, 37 aa, Artificial Sequence
  GFR-binding peptide
  MOD_RES (34)..(36): Xaa is C or S
  MOD_RES (14)..(15)..(16)..(17)..(18): Xaa is A or G
  MOD_RES (19)..(20)..(21)..(22): Xaa is A or G or is absent
VPTELRPVQMRKIXXXXXXXXXKKATVDMVVEGXGXR

SEQ ID NO: 53505 - protein, 38 aa, Artificial Sequence; identical to SEQ ID NO: 19981
  GFR-binding peptide
  MOD_RES (3)..(3): Xaa is C or S

SEQ ID NO: 53506 - protein, 40 aa, Artificial Sequence
  GFR-binding peptide
  MOD_RES (2)..(39): Xaa is C or S
  MOD_RES (18)..(19)..(20)..(21)..(22): Xaa is A or G
  MOD_RES (23)..(24)..(25)..(26): Xaa is A or G or is absent
QXRPTQVQLEPLTVLYYXXXXXXXXXEQLSNTLEDHLAXK

SEQ ID NO: 53507 - protein, 37 aa, Artificial Sequence
  GFR-binding peptide
  MOD_RES (3)..(3): Xaa is C or S
VQXRPTQVQLEPLTVLYYEIVRKKPIFEQLSNTLEDH

SEQ ID NO: 53508 - protein, 38 aa, Artificial Sequence; identical to SEQ ID NO: 15079
  GFR-binding peptide
  MOD_RES (4)..(5)..(37): Xaa is C or S

SEQ ID NO: 53509 - protein, 42 aa, Artificial Sequence; identical to SEQ ID NO: 19984
  GFR-binding peptide
  MOD_RES (4)..(41): Xaa is C or S

SEQ ID NO: 53510 - protein, 38 aa, Artificial Sequence; identical to SEQ ID NO: 19986
  GFR-binding peptide
  MOD_RES (36)..(38): Xaa is C or S
  MOD_RES (15)..(16)..(17)..(18)..(19): Xaa is A or G
  MOD_RES (20)..(21)..(22)..(23): Xaa is A or G or is absent

SEQ ID NO: 53511 - protein, 38 aa, Artificial Sequence
  GFR-binding peptide
  MOD_RES (5)..(6): Xaa is C or S
  MOD_RES (20)..(21)..(22)..(23)..(24): Xaa is A or G
  MOD_RES (25)..(26)..(27)..(28): Xaa is A or G or is absent
VPKPXXAPTKLRSVKVAKVXXXXXXXXXKEVQVNMVVR

SEQ ID NO: 53512 - protein, 42 aa, Artificial Sequence
  GFR-binding peptide
  MOD_RES (5)..(6)..(40)..(42): Xaa is C or S
  MOD_RES (20)..(21)..(22)..(23)..(24): Xaa is A or G
  MOD_RES (25)..(26)..(27)..(28): Xaa is A or G or is absent
IPKAXXVPTELSNITMQIMXXXXXXXXXIGEMSDMVVEGXGX

SEQ ID NO: 53513 - protein, 43 aa, Artificial Sequence
  GFR-binding peptide
  MOD_RES (7)..(41)..(43): Xaa is C or S
NDEGLEXVPTEEEPLPMVYYRIKPHQGQHEQLSNFLQHNKXEX

SEQ ID NO: 53514 - protein, 35 aa, Artificial Sequence; identical to SEQ ID NO: 19988
  GFR-binding peptide
  MOD_RES (35)..(35): Xaa is C or S

SEQ ID NO: 53515 - protein, 42 aa, Artificial Sequence
  GFR-binding peptide
  MOD_RES (4)..(41): Xaa is C or S
  MOD_RES (20)..(21)..(22)..(23)..(24): Xaa is A or G
  MOD_RES (25)..(26)..(27)..(28): Xaa is A or G or is absent
SVKXQPSRVHHEPLPVVYYXXXXXXXXXEQLSNRLEEHLEXA

SEQ ID NO: 53516 - protein, 34 aa, Artificial Sequence; identical to SEQ ID NO: 15084
  GFR-binding peptide
  MOD_RES (1)..(2)..(33): Xaa is C or S

SEQ ID NO: 53517 - protein, 40 aa, Artificial Sequence
  GFR-binding peptide
  MOD_RES (4)..(4): Xaa is C or S
NVQXRPTQVQLEPLTVLYYEIVRKKPIFEQLSNTLEDHLA

SEQ ID NO: 53518 - protein, 41 aa, Artificial Sequence
  GFR-binding peptide
  MOD_RES (7)..(41): Xaa is C or S
  MOD_RES (21)..(22)..(23)..(24)..(25): Xaa is A or G
  MOD_RES (26)..(27)..(28)..(29): Xaa is A or G or is absent
HVTKPTXAPTKLRPVQVRKIXXXXXXXXXKKATVNMVVRSX

SEQ ID NO: 53519 - protein, 34 aa, Artificial Sequence; identical to SEQ ID NO: 19993
  GFR-binding peptide

SEQ ID NO: 53520 - protein, 42 aa, Artificial Sequence
  GFR-binding peptide
  MOD_RES (6)..(7)..(40)..(42): Xaa is C or S
  MOD_RES (21)..(22)..(23)..(24)..(25): Xaa is A or G
  MOD_RES (26)..(27)..(28)..(29): Xaa is A or G or is absent
ASASPXXVPQDLRPVQIRKIXXXXXXXXXKKATVMVVKSXKX

SEQ ID NO: 53521 - protein, 35 aa, Artificial Sequence; identical to SEQ ID NO: 15091
  GFR-binding peptide
  MOD_RES (3)..(4)..(35): Xaa is C or S

SEQ ID NO: 53522 - protein, 33 aa, Artificial Sequence
  GFR-binding peptide
  MOD_RES (1)..(2)..(33): Xaa is C or S
XXVPQDLRSVKIAKVVGRTPKVKEVQVMVVKSX

SEQ ID NO: 53523 - protein, 38 aa, Artificial Sequence
  GFR-binding peptide
  MOD_RES (4)..(5)..(37): Xaa is C or S
PKAXXVPTELRSVKMAKVDENEKVVKEVQVDMVVEGXG

SEQ ID NO: 53524 - protein, 35 aa, Artificial Sequence
  GFR-binding peptide
  MOD_RES (3)..(4)..(35): Xaa is C or S
APXXVPQALRPVQIRKIVGRKPKVKKATVMIVRSX

SEQ ID NO: 53525 - protein, 38 aa, Artificial Sequence; identical to SEQ ID NO: 19997
  GFR-binding peptide
  MOD_RES (2)..(2): Xaa is C or S

SEQ ID NO: 53526 - protein, 34 aa, Artificial Sequence; identical to SEQ ID NO: 15096
  GFR-binding peptide
  MOD_RES (1)..(33): Xaa is C or S

SEQ ID NO: 53527 - protein, 35 aa, Artificial Sequence; identical to SEQ ID NO: 15097
  GFR-binding peptide
  MOD_RES (4)..(5): Xaa is C or S

SEQ ID NO: 53528 - protein, 32 aa, Artificial Sequence
  GFR-binding peptide
  MOD_RES (31)..(31): Xaa is C or S
VPQALRPVQIRKIVGRKPKVKKATVMIVRSXK

SEQ ID NO: 53529 - protein, 36 aa, Artificial Sequence; identical to SEQ ID NO: 15098
  GFR-binding peptide
  MOD_RES (1)..(2)..(34)..(36): Xaa is C or S

SEQ ID NO: 53530 - protein, 38 aa, Artificial Sequence
  GFR-binding peptide
  MOD_RES (3)..(4)..(35)..(37): Xaa is C or S
SPXXVPQDLRPVQIRKIVGRTPKVKKATVMVVKSXKXS

SEQ ID NO: 53531 - protein, 34 aa, Artificial Sequence
  GFR-binding peptide
  MOD_RES (1)..(2)..(34): Xaa is C or S
XXAPTQLRSVKVAKVDDSSNVIKEVQVNMVVRAX

SEQ ID NO: 53532 - protein, 33 aa, Artificial Sequence
  GFR-binding peptide
  MOD_RES (2)..(3): Xaa is C or S
PXXVPQALRPVQIRKIVGRKPKVKKATVMIVRS

SEQ ID NO: 53533 - protein, 39 aa, Artificial Sequence
  GFR-binding peptide
  MOD_RES (3)..(4)..(36)..(38): Xaa is C or S
KPXXAPTKLRSVKVAKVDDSSNVIKEVQVNMVVRSXGXH

SEQ ID NO: 53534 - protein, 32 aa, Artificial Sequence; identical to SEQ ID NO: 15099
  GFR-binding peptide
  MOD_RES (14)..(15)..(16)..(17)..(18): Xaa is A or G
  MOD_RES (19)..(20)..(21)..(22): Xaa is A or G or is absent

SEQ ID NO: 53535 - protein, 39 aa, Artificial Sequence; identical to SEQ ID NO: 15100
  GFR-binding peptide
  MOD_RES (4)..(5)..(38): Xaa is C or S
  MOD_RES (19)..(20)..(21)..(22)..(23): Xaa is A or G
  MOD_RES (24)..(25)..(26)..(27): Xaa is A or G or is absent

SEQ ID NO: 53536 - protein, 42 aa, Artificial Sequence; identical to SEQ ID NO: 15104
  GFR-binding peptide
  MOD_RES (6)..(7)..(41): Xaa is C or S
  MOD_RES (21)..(22)..(23)..(24)..(25): Xaa is A or G
  MOD_RES (26)..(27)..(28)..(29): Xaa is A or G or is absent

SEQ ID NO: 53537 - protein, 37 aa, Artificial Sequence; identical to SEQ ID NO: 15106
  GFR-binding peptide
  MOD_RES (4)..(5): Xaa is C or S
  MOD_RES (19)..(20)..(21)..(22)..(23): Xaa is A or G
  MOD_RES (24)..(25)..(26)..(27): Xaa is A or G or is absent

SEQ ID NO: 53538 - protein, 41 aa, Artificial Sequence
  GFR-binding peptide
  MOD_RES (5)..(6)..(39)..(41): Xaa is C or S
  MOD_RES (20)..(21)..(22)..(23)..(24): Xaa is A or G
  MOD_RES (25)..(26)..(27)..(28): Xaa is A or G or is absent
SAAPXXVPQALSNITIQIMXXXXXXXXXIGEMSMIVRSXKX

SEQ ID NO: 53539 - protein, 37 aa, Artificial Sequence; identical to SEQ ID NO: 20003
  GFR-binding peptide
  MOD_RES (1)..(35)..(37): Xaa is C or S
  MOD_RES (15)..(16)..(17)..(18)..(19): Xaa is A or G
  MOD_RES (20)..(21)..(22)..(23): Xaa is A or G or is absent

SEQ ID NO: 53540 - protein, 40 aa, Artificial Sequence; identical to SEQ ID NO: 20007
  GFR-binding peptide
  MOD_RES (3)..(40): Xaa is C or S
  MOD_RES (19)..(20)..(21)..(22)..(23): Xaa is A or G
  MOD_RES (24)..(25)..(26)..(27): Xaa is A or G or is absent

SEQ ID NO: 53541 - protein, 42 aa, Artificial Sequence
  GFR-binding peptide
  MOD_RES (3)..(40)..(42): Xaa is C or S
VKXQPSRVHHEPLTVLYYEYVRKKPKLEQLSNRLEEHLEXAX

SEQ ID NO: 53542 - protein, 37 aa, Artificial Sequence; identical to SEQ ID NO: 15110
  GFR-binding peptide
  MOD_RES (4)..(5): Xaa is C or S
  MOD_RES (19)..(20)..(21)..(22)..(23): Xaa is A or G
  MOD_RES (24)..(25)..(26)..(27): Xaa is A or G or is absent

SEQ ID NO: 53543 - protein, 38 aa, Artificial Sequence; identical to SEQ ID NO: 15111
  GFR-binding peptide
  MOD_RES (3)..(4)..(38): Xaa is C or S
  MOD_RES (18)..(19)..(20)..(21)..(22): Xaa is A or G
  MOD_RES (23)..(24)..(25)..(26): Xaa is A or G or is absent

SEQ ID NO: 53544 - protein, 40 aa, Artificial Sequence
  GFR-binding peptide
  MOD_RES (6)..(40): Xaa is C or S
  MOD_RES (20)..(21)..(22)..(23)..(24): Xaa is A or G
  MOD_RES (25)..(26)..(27)..(28): Xaa is A or G or is absent
VTKPTXAPTKLRPVQVRKIXXXXXXXXXKKATVNMVVRSX

SEQ ID NO: 53545 - protein, 36 aa, Artificial Sequence
  GFR-binding peptide
  MOD_RES (4)..(5): Xaa is C or S
PKAXXVPTELRSVKMAKVDENEKVVKEVQVDMVVEG

SEQ ID NO: 53546 - protein, 40 aa, Artificial Sequence
  GFR-binding peptide
  MOD_RES (6)..(7): Xaa is C or S
  MOD_RES (21)..(22)..(23)..(24)..(25): Xaa is A or G
  MOD_RES (26)..(27)..(28)..(29): Xaa is A or G or is absent
SIPKAXXVPTELRPVQMRKIXXXXXXXXXKKATVEMVVEG

SEQ ID NO: 53547 - protein, 44 aa, Artificial Sequence
  GFR-binding peptide
  MOD_RES (4)..(41)..(43): Xaa is C or S
  MOD_RES (20)..(21)..(22)..(23)..(24): Xaa is A or G
  MOD_RES (25)..(26)..(27)..(28): Xaa is A or G or is absent
NVQXRPTQVQLEPLTVLYYXXXXXXXXXEQLSNTLEDHLAXKXE

SEQ ID NO: 53548 - protein, 38 aa, Artificial Sequence
  GFR-binding peptide
  MOD_RES (3)..(4)..(36)..(38): Xaa is C or S
KAXXVPTELRSVKMAKVDENEKVVKEVQVDMVVEGXGX

SEQ ID NO: 53549 - protein, 38 aa, Artificial Sequence
  GFR-binding peptide
  MOD_RES (3)..(4)..(36)..(38): Xaa is C or S
KAXXVPTELRSVKMAKVDEYDKVVKEVQVEMVVEGXGX

SEQ ID NO: 53550 - protein, 40 aa, Artificial Sequence
  GFR-binding peptide
  MOD_RES (4)..(5)..(38)..(40): Xaa is C or S
  MOD_RES (19)..(20)..(21)..(22)..(23): Xaa is A or G
  MOD_RES (24)..(25)..(26)..(27): Xaa is A or G or is absent
ASPXXVPQDLRPVQIRKIXXXXXXXXXKKATVMVVKSXKX

SEQ ID NO: 53551 - protein, 40 aa, Artificial Sequence
  GFR-binding peptide
  MOD_RES (7)..(7): Xaa is C or S
NDEGLEXVPTEEEPLPMVYYRIKPHQGQHEQLSNFLQHNK

SEQ ID NO: 53552 - protein, 40 aa, Artificial Sequence; identical to SEQ ID NO: 20011
  GFR-binding peptide
  MOD_RES (37)..(39): Xaa is C or S

SEQ ID NO: 53553 - protein, 33 aa, Artificial Sequence
  GFR-binding peptide
  MOD_RES (32)..(32): Xaa is C or S
APTQLSNITVQIMDDSSNVIIGEMSNMVVRAXG

SEQ ID NO: 53554 - protein, 42 aa, Artificial Sequence
  GFR-binding peptide
  MOD_RES (6)..(7)..(41): Xaa is C or S
  MOD_RES (21)..(22)..(23)..(24)..(25): Xaa is A or G
  MOD_RES (26)..(27)..(28)..(29): Xaa is A or G or is absent
TVPKPXXAPTQLSNITVQIMXXXXXXXXXIGEMSNMVVRAXG

SEQ ID NO: 53555 - protein, 36 aa, Artificial Sequence; identical to SEQ ID NO: 20013
  GFR-binding peptide
  MOD_RES (1)..(1): Xaa is C or S
  MOD_RES (17)..(18)..(19)..(20)..(21): Xaa is A or G
  MOD_RES (22)..(23)..(24)..(25): Xaa is A or G or is absent

SEQ ID NO: 53556 - protein, 39 aa, Artificial Sequence
  GFR-binding peptide
  MOD_RES (6)..(7): Xaa is C or S
  MOD_RES (21)..(22)..(23)..(24)..(25): Xaa is A or G
  MOD_RES (26)..(27)..(28)..(29): Xaa is A or G or is absent
TVPKPXXAPTQLSNITVQIMXXXXXXXXXIGEMSNMVVR

SEQ ID NO: 53557 - protein, 33 aa, Artificial Sequence; identical to SEQ ID NO: 20015
  GFR-binding peptide

SEQ ID NO: 53558 - protein, 36 aa, Artificial Sequence
  GFR-binding peptide
  MOD_RES (1)..(2)..(33)..(35): Xaa is C or S
XXVPQALSNITIQIMVGRKPKVIGEMSMIVRSXKXS

SEQ ID NO: 53559 - protein, 34 aa, Artificial Sequence
  GFR-binding peptide
  MOD_RES (1)..(1): Xaa is C or S
  MOD_RES (15)..(16)..(17)..(18)..(19): Xaa is A or G
  MOD_RES (20)..(21)..(22)..(23): Xaa is A or G or is absent
XVPTEEEPLPMVYYXXXXXXXXXEQLSNFLQHNK

SEQ ID NO: 53560 - protein, 42 aa, Artificial Sequence
  GFR-binding peptide
  MOD_RES (3)..(40)..(42): Xaa is C or S
  MOD_RES (19)..(20)..(21)..(22)..(23): Xaa is A or G
  MOD_RES (24)..(25)..(26)..(27): Xaa is A or G or is absent
VQXRPTQVQLEPLPVVYYXXXXXXXXXEQLSNTLEDHLAXKX

SEQ ID NO: 53561 - protein, 38 aa, Artificial Sequence; identical to SEQ ID NO: 20018
  GFR-binding peptide
  MOD_RES (1)..(38): Xaa is C or S
  MOD_RES (17)..(18)..(19)..(20)..(21): Xaa is A or G
  MOD_RES (22)..(23)..(24)..(25): Xaa is A or G or is absent

SEQ ID NO: 53562 - protein, 38 aa, Artificial Sequence
  GFR-binding peptide
  MOD_RES (3)..(4)..(38): Xaa is C or S
  MOD_RES (18)..(19)..(20)..(21)..(22): Xaa is A or G
  MOD_RES (23)..(24)..(25)..(26): Xaa is A or G or is absent
KPXXAPTKLRSVKVAKVXXXXXXXXXKEVQVNMVVRSX

SEQ ID NO: 53563 - protein, 35 aa, Artificial Sequence; identical to SEQ ID NO: 15118
  GFR-binding peptide
  MOD_RES (3)..(4): Xaa is C or S

SEQ ID NO: 53564 - protein, 40 aa, Artificial Sequence; identical to SEQ ID NO: 15120
  GFR-binding peptide
  MOD_RES (5)..(6)..(37)..(39): Xaa is C or S

SEQ ID NO: 53565 - protein, 44 aa, Artificial Sequence
  GFR-binding peptide
  MOD_RES (6)..(7)..(41)..(43): Xaa is C or S
  MOD_RES (21)..(22)..(23)..(24)..(25): Xaa is A or G
  MOD_RES (26)..(27)..(28)..(29): Xaa is A or G or is absent
KIPKAXXVPTELRPVQMRKIXXXXXXXXXKKATVDMVVEGXGXR

SEQ ID NO: 53566 - protein, 35 aa, Artificial Sequence
  GFR-binding peptide
  MOD_RES (34)..(34): Xaa is C or S
VPTEEEPLTMLYYRIKPHQGQHEQLSNFLQHNKXE

SEQ ID NO: 53567 - protein, 36 aa, Artificial Sequence; identical to SEQ ID NO: 15124
  GFR-binding peptide
  MOD_RES (2)..(3)..(36): Xaa is C or S
  MOD_RES (17)..(18)..(19)..(20)..(21): Xaa is A or G
  MOD_RES (22)..(23)..(24)..(25): Xaa is A or G or is absent

SEQ ID NO: 53568 - protein, 41 aa, Artificial Sequence; identical to SEQ ID NO: 20023
  GFR-binding peptide
  MOD_RES (5)..(5): Xaa is C or S
  MOD_RES (21)..(22)..(23)..(24)..(25): Xaa is A or G
  MOD_RES (26)..(27)..(28)..(29): Xaa is A or G or is absent

SEQ ID NO: 53569 - protein, 42 aa, Artificial Sequence; identical to SEQ ID NO: 20024
  GFR-binding peptide
  MOD_RES (2)..(39)..(41): Xaa is C or S
  MOD_RES (18)..(19)..(20)..(21)..(22): Xaa is A or G
  MOD_RES (23)..(24)..(25)..(26): Xaa is A or G or is absent

SEQ ID NO: 53570 - protein, 36 aa, Artificial Sequence
  GFR-binding peptide
  MOD_RES (2)..(3)..(36): Xaa is C or S
  MOD_RES (17)..(18)..(19)..(20)..(21): Xaa is A or G
  MOD_RES (22)..(23)..(24)..(25): Xaa is A or G or is absent
PXXVPQDLSNITIQIMXXXXXXXXXIGEMSMVVKSX

SEQ ID NO: 53571 - protein, 33 aa, Artificial Sequence; identical to SEQ ID NO: 15131
  GFR-binding peptide
  MOD_RES (1)..(1): Xaa is C or S
  MOD_RES (15)..(16)..(17)..(18)..(19): Xaa is A or G
  MOD_RES (20)..(21)..(22)..(23): Xaa is A or G or is absent

SEQ ID NO: 53572 - protein, 34 aa, Artificial Sequence; identical to SEQ ID NO: 15134
  GFR-binding peptide
  MOD_RES (1)..(2): Xaa is C or S
  MOD_RES (16)..(17)..(18)..(19)..(20): Xaa is A or G
  MOD_RES (21)..(22)..(23)..(24): Xaa is A or G or is absent

SEQ ID NO: 53573 - protein, 39 aa, Artificial Sequence; identical to SEQ ID NO: 15135
  GFR-binding peptide
  MOD_RES (4)..(5)..(38): Xaa is C or S
  MOD_RES (19)..(20)..(21)..(22)..(23): Xaa is A or G
  MOD_RES (24)..(25)..(26)..(27): Xaa is A or G or is absent

SEQ ID NO: 53574 - protein, 38 aa, Artificial Sequence
  GFR-binding peptide
  MOD_RES (4)..(5)..(37): Xaa is C or S
PKPXXAPTQLRPVQVRKIDDSSNVIKKATVNMVVRAXG

SEQ ID NO: 53575 - protein, 34 aa, Artificial Sequence
  GFR-binding peptide
TQVQLEPLPVVYYEIVRKKPIFEQLSNTLEDHLA

SEQ ID NO: 53576 - protein, 41 aa, Artificial Sequence
  GFR-binding peptide
  MOD_RES (5)..(5): Xaa is C or S
  MOD_RES (21)..(22)..(23)..(24)..(25): Xaa is A or G
  MOD_RES (26)..(27)..(28)..(29): Xaa is A or G or is absent
RNVQXRPTQVQLEPLPVVYYXXXXXXXXXEQLSNTLEDHLA

SEQ ID NO: 53577 - protein, 36 aa, Artificial Sequence
  GFR-binding peptide
  MOD_RES (1)..(2)..(36): Xaa is C or S
  MOD_RES (16)..(17)..(18)..(19)..(20): Xaa is A or G
  MOD_RES (21)..(22)..(23)..(24): Xaa is A or G or is absent
XXAPTQLRSVKVAKVXXXXXXXXXKEVQVNMVVRAX

SEQ ID NO: 53578 - protein, 41 aa, Artificial Sequence; identical to SEQ ID NO: 15138
  GFR-binding peptide
  MOD_RES (5)..(6)..(38)..(40): Xaa is C or S

SEQ ID NO: 53579 - protein, 36 aa, Artificial Sequence; identical to SEQ ID NO: 15139
  GFR-binding peptide
  MOD_RES (1)..(2)..(35): Xaa is C or S
  MOD_RES (16)..(17)..(18)..(19)..(20): Xaa is A or G
  MOD_RES (21)..(22)..(23)..(24): Xaa is A or G or is absent

SEQ ID NO: 53580 - protein, 43 aa, Artificial Sequence
  GFR-binding peptide
  MOD_RES (7)..(41)..(43): Xaa is C or S
  MOD_RES (21)..(22)..(23)..(24)..(25): Xaa is A or G
  MOD_RES (26)..(27)..(28)..(29): Xaa is A or G or is absent
HVTKPTXAPTKLRPVQVRKIXXXXXXXXXKKATVNMVVRSXGX

SEQ ID NO: 53581 - protein, 35 aa, Artificial Sequence; identical to SEQ ID NO: 20032
  GFR-binding peptide
  MOD_RES (16)..(17)..(18)..(19)..(20): Xaa is A or G
  MOD_RES (21)..(22)..(23)..(24): Xaa is A or G or is absent

SEQ ID NO: 53582 - protein, 40 aa, Artificial Sequence; identical to SEQ ID NO: 15141
  GFR-binding peptide
  MOD_RES (3)..(4)..(38)..(40): Xaa is C or S
  MOD_RES (18)..(19)..(20)..(21)..(22): Xaa is A or G
  MOD_RES (23)..(24)..(25)..(26): Xaa is A or G or is absent

SEQ ID NO: 53583 - protein, 39 aa, Artificial Sequence; identical to SEQ ID NO: 20033
  GFR-binding peptide
  MOD_RES (37)..(39): Xaa is C or S
  MOD_RES (16)..(17)..(18)..(19)..(20): Xaa is A or G
  MOD_RES (21)..(22)..(23)..(24): Xaa is A or G or is absent

SEQ ID NO: 53584 - protein, 39 aa, Artificial Sequence; identical to SEQ ID NO: 15142
  GFR-binding peptide
  MOD_RES (5)..(6)..(38): Xaa is C or S

SEQ ID NO: 53585 - protein, 39 aa, Artificial Sequence; identical to SEQ ID NO: 20034
  GFR-binding peptide
  MOD_RES (1)..(38): Xaa is C or S

SEQ ID NO: 53586 - protein, 36 aa, Artificial Sequence
  GFR-binding peptide
  MOD_RES (1)..(2)..(36): Xaa is C or S
  MOD_RES (16)..(17)..(18)..(19)..(20): Xaa is A or G
  MOD_RES (21)..(22)..(23)..(24): Xaa is A or G or is absent
XXVPTELRSVKMAKVXXXXXXXXXKEVQVEMVVEGX

SEQ ID NO: 53587 - protein, 43 aa, Artificial Sequence
  GFR-binding peptide
  MOD_RES (6)..(7)..(40)..(42): Xaa is C or S
  MOD_RES (21)..(22)..(23)..(24)..(25): Xaa is A or G
  MOD_RES (26)..(27)..(28)..(29): Xaa is A or G or is absent
ASASPXXVSQDLRSVKIAKVXXXXXXXXXKEVQVMIVKSXKXS

SEQ ID NO: 53588 - protein, 43 aa, Artificial Sequence; identical to SEQ ID NO: 15145
  GFR-binding peptide
  MOD_RES (6)..(7)..(41)..(43): Xaa is C or S
  MOD_RES (21)..(22)..(23)..(24)..(25): Xaa is A or G
  MOD_RES (26)..(27)..(28)..(29): Xaa is A or G or is absent

SEQ ID NO: 53589 - protein, 39 aa, Artificial Sequence; identical to SEQ ID NO: 20038
  GFR-binding peptide
  MOD_RES (4)..(38): Xaa is C or S
  MOD_RES (18)..(19)..(20)..(21)..(22): Xaa is A or G
  MOD_RES (23)..(24)..(25)..(26): Xaa is A or G or is absent

SEQ ID NO: 53590 - protein, 39 aa, Artificial Sequence; identical to SEQ ID NO: 15146
  GFR-binding peptide
  MOD_RES (6)..(6): Xaa is C or S
  MOD_RES (20)..(21)..(22)..(23)..(24): Xaa is A or G
  MOD_RES (25)..(26)..(27)..(28): Xaa is A or G or is absent

SEQ ID NO: 53591 - protein, 37 aa, Artificial Sequence
  GFR-binding peptide
  MOD_RES (6)..(7): Xaa is C or S
ASASPXXVSQDLRSVKIAKVIGKTPKIKEVQVMIVKS

SEQ ID NO: 53592 - protein, 38 aa, Artificial Sequence
  GFR-binding peptide
  MOD_RES (3)..(4)..(36)..(38): Xaa is C or S
KPXXAPTKLSNITVQIMDDSSNVIIGEMSNMVVRSXGX

SEQ ID NO: 53593 - protein, 38 aa, Artificial Sequence; identical to SEQ ID NO: 15147
  GFR-binding peptide
  MOD_RES (2)..(3)..(37): Xaa is C or S
  MOD_RES (17)..(18)..(19)..(20)..(21): Xaa is A or G
  MOD_RES (22)..(23)..(24)..(25): Xaa is A or G or is absent

SEQ ID NO: 53594 - protein, 44 aa, Artificial Sequence; identical to SEQ ID NO: 15148
  GFR-binding peptide
  MOD_RES (6)..(7)..(41)..(43): Xaa is C or S
  MOD_RES (21)..(22)..(23)..(24)..(25): Xaa is A or G
  MOD_RES (26)..(27)..(28)..(29): Xaa is A or G or is absent

SEQ ID NO: 53595 - protein, 37 aa, Artificial Sequence
  GFR-binding peptide
  MOD_RES (4)..(5): Xaa is C or S
  MOD_RES (19)..(20)..(21)..(22)..(23): Xaa is A or G
  MOD_RES (24)..(25)..(26)..(27): Xaa is A or G or is absent
ASPXXVSQDLRSVKIAKVXXXXXXXXXKEVQVMIVKS

SEQ ID NO: 53596 - protein, 39 aa, Artificial Sequence; identical to SEQ ID NO: 20044
  GFR-binding peptide
  MOD_RES (5)..(5): Xaa is C or S
  MOD_RES (21)..(22)..(23)..(24)..(25): Xaa is A or G
  MOD_RES (26)..(27)..(28)..(29): Xaa is A or G or is absent

SEQ ID NO: 53597 - protein, 43 aa, Artificial Sequence
  GFR-binding peptide
  MOD_RES (5)..(6)..(40)..(42): Xaa is C or S
  MOD_RES (20)..(21)..(22)..(23)..(24): Xaa is A or G
  MOD_RES (25)..(26)..(27)..(28): Xaa is A or G or is absent
IPKAXXVPTELRSVKMAKVXXXXXXXXXKEVQVEMVVEGXGXR

SEQ ID NO: 53598 - protein, 42 aa, Artificial Sequence
  GFR-binding peptide
  MOD_RES (6)..(7)..(40)..(42): Xaa is C or S
  MOD_RES (21)..(22)..(23)..(24)..(25): Xaa is A or G
  MOD_RES (26)..(27)..(28)..(29): Xaa is A or G or is absent
ASASPXXVSQDLRSVKIAKVXXXXXXXXXKEVQVMIVKSXKX

SEQ ID NO: 53599 - protein, 34 aa, Artificial Sequence; identical to SEQ ID NO: 15150
  GFR-binding peptide
  MOD_RES (2)..(3): Xaa is C or S

SEQ ID NO: 53600 - protein, 32 aa, Artificial Sequence; identical to SEQ ID NO: 15155
  GFR-binding peptide
  MOD_RES (14)..(15)..(16)..(17)..(18): Xaa is A or G
  MOD_RES (19)..(20)..(21)..(22): Xaa is A or G or is absent

SEQ ID NO: 53601 - protein, 41 aa, Artificial Sequence
  GFR-binding peptide
  MOD_RES (6)..(7)..(41): Xaa is C or S
  MOD_RES (21)..(22)..(23)..(24)..(25): Xaa is A or G
  MOD_RES (26)..(27)..(28)..(29): Xaa is A or G or is absent
TVPKPXXAPTQLRPVQVRKIXXXXXXXXXKKATVNMVVRAX

SEQ ID NO: 53602 - protein, 37 aa, Artificial Sequence; identical to SEQ ID NO: 15158
  GFR-binding peptide
  MOD_RES (4)..(5): Xaa is C or S
  MOD_RES (19)..(20)..(21)..(22)..(23): Xaa is A or G
  MOD_RES (24)..(25)..(26)..(27): Xaa is A or G or is absent

SEQ ID NO: 53603 - protein, 37 aa, Artificial Sequence
  GFR-binding peptide
  MOD_RES (4)..(4): Xaa is C or S
GLEXVPTEEEPLTMLYYRIKPHQGQHEQLSNFLQHNK

SEQ ID NO: 53604 - protein, 33 aa, Artificial Sequence
  GFR-binding peptide
  MOD_RES (14)..(15)..(16)..(17)..(18): Xaa is A or G
  MOD_RES (19)..(20)..(21)..(22): Xaa is A or G or is absent
VPTEEEPLPMVYYXXXXXXXXXEQLSNFLQHNK

SEQ ID NO: 53605 - protein, 42 aa, Artificial Sequence; identical to SEQ ID NO: 20052
  GFR-binding peptide
  MOD_RES (3)..(40)..(42): Xaa is C or S

SEQ ID NO: 53606 - protein, 40 aa, Artificial Sequence
  GFR-binding peptide
  MOD_RES (5)..(6)..(39): Xaa is C or S
  MOD_RES (20)..(21)..(22)..(23)..(24): Xaa is A or G
  MOD_RES (25)..(26)..(27)..(28): Xaa is A or G or is absent
SASPXXVSQDLRPVQIRKIXXXXXXXXXKKATVMIVKSXK

SEQ ID NO: 53607 - protein, 33 aa, Artificial Sequence
  GFR-binding peptide
  MOD_RES (1)..(33): Xaa is C or S
XAPTQLRSVKVAKVDDSSNVIKEVQVNMVVRAX

SEQ ID NO: 53608 - protein, 40 aa, Artificial Sequence; identical to SEQ ID NO: 20054
  GFR-binding peptide
  MOD_RES (5)..(5): Xaa is C or S
  MOD_RES (21)..(22)..(23)..(24)..(25): Xaa is A or G
  MOD_RES (26)..(27)..(28)..(29): Xaa is A or G or is absent

SEQ ID NO: 53609 - protein, 40 aa, Artificial Sequence; identical to SEQ ID NO: 15165
  GFR-binding peptide
  MOD_RES (2)..(3)..(37)..(39): Xaa is C or S
  MOD_RES (17)..(18)..(19)..(20)..(21): Xaa is A or G
  MOD_RES (22)..(23)..(24)..(25): Xaa is A or G or is absent

SEQ ID NO: 53610 - protein, 30 aa, Artificial Sequence
  GFR-binding peptide
VPQALSNITIQIMVGRKPKVIGEMSMIVRS

SEQ ID NO: 53611 - protein, 37 aa, Artificial Sequence; identical to SEQ ID NO: 15166
  GFR-binding peptide
  MOD_RES (1)..(34)..(36): Xaa is C or S
  MOD_RES (15)..(16)..(17)..(18)..(19): Xaa is A or G
  MOD_RES (20)..(21)..(22)..(23): Xaa is A or G or is absent

SEQ ID NO: 53612 - protein, 33 aa, Artificial Sequence
  GFR-binding peptide
  MOD_RES (2)..(2): Xaa is C or S
TXAPTKLRSVKVAKVDDSSNVIKEVQVNMVVRS

SEQ ID NO: 53613 - protein, 36 aa, Artificial Sequence
  GFR-binding peptide
  MOD_RES (3)..(4)..(35): Xaa is C or S
SPXXVSQDLSNITIQIMIGKTPKIIGEMSMIVKSXK

SEQ ID NO: 53614 - protein, 37 aa, Artificial Sequence
  GFR-binding peptide
  MOD_RES (5)..(6): Xaa is C or S
IPKAXXVPTELSNITMQIMDENEKVVIGEMSDMVVEG

SEQ ID NO: 53615 - protein, 37 aa, Artificial Sequence
  GFR-binding peptide
  MOD_RES (7)..(7): Xaa is C or S
HVTKPTXAPTKLRPVQVRKIDDSSNVIKKATVNMVVR

SEQ ID NO: 53616 - protein, 42 aa, Artificial Sequence
  GFR-binding peptide
  MOD_RES (6)..(40)..(42): Xaa is C or S
  MOD_RES (20)..(21)..(22)..(23)..(24): Xaa is A or G
  MOD_RES (25)..(26)..(27)..(28): Xaa is A or G or is absent
VTKPTXAPTKLRSVKVAKVXXXXXXXXXKEVQVNMVVRSXGX

SEQ ID NO: 53617 - protein, 33 aa, Artificial Sequence
  GFR-binding peptide
  MOD_RES (2)..(3): Xaa is C or S
AXXVPTELRSVKMAKVDENEKVVKEVQVDMVVE

SEQ ID NO: 53618 - protein, 33 aa, Artificial Sequence
  GFR-binding peptide
  MOD_RES (2)..(3): Xaa is C or S
PXXVPQALRSVKIAKVVGRKPKVKEVQVMIVRS

SEQ ID NO: 53619 - protein, 34 aa, Artificial Sequence; identical to SEQ ID NO: 15173
  GFR-binding peptide
  MOD_RES (1)..(34): Xaa is C or S
  MOD_RES (15)..(16)..(17)..(18)..(19): Xaa is A or G
  MOD_RES (20)..(21)..(22)..(23): Xaa is A or G or is absent

SEQ ID NO: 53620 - protein, 35 aa, Artificial Sequence
  GFR-binding peptide
  MOD_RES (32)..(34): Xaa is C or S
APTKLSNITVQIMDDSSNVIIGEMSNMVVRSXGXH

SEQ ID NO: 53621 - protein, 40 aa, Artificial Sequence; identical to SEQ ID NO: 15175
  GFR-binding peptide
  MOD_RES (6)..(7)..(38)..(40): Xaa is C or S

SEQ ID NO: 53622 - protein, 38 aa, Artificial Sequence
  GFR-binding peptide
  MOD_RES (4)..(38): Xaa is C or S
GLEXVPTEEEPLTMLYYRIKPHQGQHEQLSNFLQHNKX

SEQ ID NO: 53623 - protein, 32 aa, Artificial Sequence
  GFR-binding peptide
  MOD_RES (1)..(2): Xaa is C or S
XXVSQDLRSVKIAKVIGKTPKIKEVQVMIVKS

SEQ ID NO: 53624 - protein, 33 aa, Artificial Sequence; identical to SEQ ID NO: 15176
  GFR-binding peptide
  MOD_RES (1)..(32): Xaa is C or S

SEQ ID NO: 53625 - protein, 35 aa, Artificial Sequence; identical to SEQ ID NO: 20063
  GFR-binding peptide
  MOD_RES (1)..(35): Xaa is C or S

SEQ ID NO: 53626 - protein, 36 aa, Artificial Sequence
  GFR-binding peptide
  MOD_RES (2)..(2): Xaa is C or S
KXQPSRVHHEPLPVVYYEYVRKKPKLEQLSNRLEEH

SEQ ID NO: 53627 - protein, 38 aa, Artificial Sequence; identical to SEQ ID NO: 41132
  GFR-binding peptide
  MOD_RES (3)..(4)..(37): Xaa is C or S
  MOD_RES (18)..(19)..(20)..(21)..(22): Xaa is A or G
  MOD_RES (23)..(24)..(25)..(26): Xaa is A or G or is absent

SEQ ID NO: 53628 - protein, 36 aa, Artificial Sequence
  GFR-binding peptide
  MOD_RES (3)..(4): Xaa is C or S
  MOD_RES (18)..(19)..(20)..(21)..(22): Xaa is A or G
  MOD_RES (23)..(24)..(25)..(26): Xaa is A or G or is absent
SPXXVPQDLRPVQIRKIXXXXXXXXXKKATVMVVKS

SEQ ID NO: 53629 - protein, 41 aa, Artificial Sequence; identical to SEQ ID NO: 20066
  GFR-binding peptide
  MOD_RES (2)..(39)..(41): Xaa is C or S

SEQ ID NO: 53630 - protein, 38 aa, Artificial Sequence
  GFR-binding peptide
  MOD_RES (37)..(37): Xaa is C or S
  MOD_RES (16)..(17)..(18)..(19)..(20): Xaa is A or G
  MOD_RES (21)..(22)..(23)..(24): Xaa is A or G or is absent
RPTQVQLEPLPVVYYXXXXXXXXXEQLSNTLEDHLAXK

SEQ ID NO: 53631 - protein, 34 aa, Artificial Sequence; identical to SEQ ID NO: 15180
  GFR-binding peptide
  MOD_RES (2)..(3)..(34): Xaa is C or S

SEQ ID NO: 53632 - protein, 37 aa, Artificial Sequence; identical to SEQ ID NO: 20068
  GFR-binding peptide
  MOD_RES (2)..(36): Xaa is C or S

SEQ ID NO: 53633 - protein, 38 aa, Artificial Sequence
  GFR-binding peptide
  MOD_RES (36)..(38): Xaa is C or S
PSRVHHEPLPVVYYEYVRKKPKLEQLSNRLEEHLEXAX

SEQ ID NO: 53634 - protein, 36 aa, Artificial Sequence
  GFR-binding peptide
RPTQVQLEPLTVLYYEIVRKKPIFEQLSNTLEDHLA

SEQ ID NO: 53635 - protein, 37 aa, Artificial Sequence; identical to SEQ ID NO: 15182
  GFR-binding peptide
  MOD_RES (6)..(7): Xaa is C or S

SEQ ID NO: 53636 - protein, 37 aa, Artificial Sequence; identical to SEQ ID NO: 15183
  GFR-binding peptide
  MOD_RES (5)..(6): Xaa is C or S

SEQ ID NO: 53637 - protein, 33 aa, Artificial Sequence
  GFR-binding peptide
  MOD_RES (1)..(33): Xaa is C or S
XAPTKLRPVQVRKIDDSSNVIKKATVNMVVRSX

SEQ ID NO: 53638 - protein, 44 aa, Artificial Sequence; identical to SEQ ID NO: 20072
  GFR-binding peptide
  MOD_RES (5)..(42)..(44): Xaa is C or S

SEQ ID NO: 53639 - protein, 33 aa, Artificial Sequence
  GFR-binding peptide
  MOD_RES (33)..(33): Xaa is C or S
  MOD_RES (14)..(15)..(16)..(17)..(18): Xaa is A or G
  MOD_RES (19)..(20)..(21)..(22): Xaa is A or G or is absent
VSQDLSNITIQIMXXXXXXXXXIGEMSMIVKSX

SEQ ID NO: 53640 - protein, 39 aa, Artificial Sequence; identical to SEQ ID NO: 15185
  GFR-binding peptide
  MOD_RES (4)..(5)..(39): Xaa is C or S
  MOD_RES (19)..(20)..(21)..(22)..(23): Xaa is A or G
  MOD_RES (24)..(25)..(26)..(27): Xaa is A or G or is absent

SEQ ID NO: 53641 - protein, 32 aa, Artificial Sequence; identical to SEQ ID NO: 15187
  GFR-binding peptide
  MOD_RES (1)..(1): Xaa is C or S

SEQ ID NO: 53642 - protein, 38 aa, Artificial Sequence
  GFR-binding peptide
  MOD_RES (3)..(3): Xaa is C or S
  MOD_RES (19)..(20)..(21)..(22)..(23): Xaa is A or G
  MOD_RES (24)..(25)..(26)..(27): Xaa is A or G or is absent
VKXQPSRVHHEPLTVLYYXXXXXXXXXEQLSNRLEEHL

SEQ ID NO: 53643 - protein, 42 aa, Artificial Sequence; identical to SEQ ID NO: 20073
  GFR-binding peptide
  MOD_RES (7)..(41): Xaa is C or S
  MOD_RES (21)..(22)..(23)..(24)..(25): Xaa is A or G
  MOD_RES (26)..(27)..(28)..(29): Xaa is A or G or is absent

SEQ ID NO: 53644 - protein, 35 aa, Artificial Sequence
  GFR-binding peptide
PSRVHHEPLTVLYYEYVRKKPKLEQLSNRLEEHLE

SEQ ID NO: 53645 - protein, 44 aa, Artificial Sequence; identical to SEQ ID NO: 15190
  GFR-binding peptide
  MOD_RES (6)..(7)..(41)..(43): Xaa is C or S
  MOD_RES (21)..(22)..(23)..(24)..(25): Xaa is A or G
  MOD_RES (26)..(27)..(28)..(29): Xaa is A or G or is absent

SEQ ID NO: 53646 - protein, 31 aa, Artificial Sequence
  GFR-binding peptide
APTKLRPVQVRKIDDSSNVIKKATVNMVVRS

SEQ ID NO: 53647 - protein, 38 aa, Artificial Sequence
  GFR-binding peptide
  MOD_RES (4)..(5): Xaa is C or S
  MOD_RES (19)..(20)..(21)..(22)..(23): Xaa is A or G
  MOD_RES (24)..(25)..(26)..(27): Xaa is A or G or is absent
PKAXXVPTELRSVKMAKVXXXXXXXXXKEVQVEMVVEG

SEQ ID NO: 53648 - protein, 39 aa, Artificial Sequence; identical to SEQ ID NO: 20075
  GFR-binding peptide
  MOD_RES (36)..(38): Xaa is C or S
  MOD_RES (15)..(16)..(17)..(18)..(19): Xaa is A or G
  MOD_RES (20)..(21)..(22)..(23): Xaa is A or G or is absent

SEQ ID NO: 53649 - protein, 38 aa, Artificial Sequence
  GFR-binding peptide
  MOD_RES (4)..(38): Xaa is C or S
  MOD_RES (18)..(19)..(20)..(21)..(22): Xaa is A or G
  MOD_RES (23)..(24)..(25)..(26): Xaa is A or G or is absent
GLEXVPTEEEPLTMLYYXXXXXXXXXEQLSNFLQHNKX

SEQ ID NO: 53650 - protein, 36 aa, Artificial Sequence; identical to SEQ ID NO: 15193
  GFR-binding peptide
  MOD_RES (1)..(35): Xaa is C or S
  MOD_RES (15)..(16)..(17)..(18)..(19): Xaa is A or G
  MOD_RES (20)..(21)..(22)..(23): Xaa is A or G or is absent

SEQ ID NO: 53651 - protein, 37 aa, Artificial Sequence; identical to SEQ ID NO: 20076
  GFR-binding peptide
  MOD_RES (3)..(3): Xaa is C or S

SEQ ID NO: 53652 - protein, 42 aa, Artificial Sequence
  GFR-binding peptide
  MOD_RES (6)..(7)..(39)..(41): Xaa is C or S
SIPKAXXVPTELRSVKMAKVDEYDKVVKEVQVEMVVEGXGXR

SEQ ID NO: 53653 - protein, 38 aa, Artificial Sequence
  GFR-binding peptide
  MOD_RES (4)..(5)..(37): Xaa is C or S
PKPXXAPTKLRPVQVRKIDDSSNVIKKATVNMVVRSXG

SEQ ID NO: 53654 - protein, 38 aa, Artificial Sequence
  GFR-binding peptide
  MOD_RES (5)..(6)..(37): Xaa is C or S
SAAPXXVPQALRPVQIRKIVGRKPKVKKATVMIVRSXK

SEQ ID NO: 53655 - protein, 41 aa, Artificial Sequence
  GFR-binding peptide
  MOD_RES (2)..(39)..(41): Xaa is C or S
  MOD_RES (18)..(19)..(20)..(21)..(22): Xaa is A or G
  MOD_RES (23)..(24)..(25)..(26): Xaa is A or G or is absent
KXQPSRVHHEPLTVLYYXXXXXXXXXEQLSNRLEEHLEXAX

SEQ ID NO: 53656 - protein, 36 aa, Artificial Sequence
  GFR-binding peptide
  MOD_RES (2)..(3): Xaa is C or S
  MOD_RES (17)..(18)..(19)..(20)..(21): Xaa is A or G
  MOD_RES (22)..(23)..(24)..(25): Xaa is A or G or is absent
AXXVPTELSNITMQIMXXXXXXXXXIGEMSEMVVEG

SEQ ID NO: 53657 - protein, 37 aa, Artificial Sequence; identical to SEQ ID NO: 15196
  GFR-binding peptide
  MOD_RES (2)..(3)..(35)..(37): Xaa is C or S

SEQ ID NO: 53658 - protein, 36 aa, Artificial Sequence
  GFR-binding peptide
  MOD_RES (2)..(2): Xaa is C or S
KXQPSRVHHEPLTVLYYEYVRKKPKLEQLSNRLEEH

SEQ ID NO: 53659 - protein, 43 aa, Artificial Sequence; identical to SEQ ID NO: 20080
  GFR-binding peptide
  MOD_RES (3)..(40)..(42): Xaa is C or S
  MOD_RES (19)..(20)..(21)..(22)..(23): Xaa is A or G
  MOD_RES (24)..(25)..(26)..(27): Xaa is A or G or is absent

SEQ ID NO: 53660 - protein, 41 aa, Artificial Sequence; identical to SEQ ID NO: 20081
  GFR-binding peptide
  MOD_RES (3)..(40): Xaa is C or S

SEQ ID NO: 53661 - protein, 32 aa, Artificial Sequence; identical to SEQ ID NO: 15198
  GFR-binding peptide
  MOD_RES (14)..(15)..(16)..(17)..(18): Xaa is A or G
  MOD_RES (19)..(20)..(21)..(22): Xaa is A or G or is absent

SEQ ID NO: 53662 - protein, 40 aa, Artificial Sequence
  GFR-binding peptide
  MOD_RES (5)..(5): Xaa is C or S
SSVKXQPSRVHHEPLPVVYYEYVRKKPKLEQLSNRLEEHL

SEQ ID NO: 53663 - protein, 37 aa, Artificial Sequence; identical to SEQ ID NO: 15199
  GFR-binding peptide
  MOD_RES (4)..(5)..(36): Xaa is C or S

SEQ ID NO: 53664 - protein, 38 aa, Artificial Sequence
  GFR-binding peptide
  MOD_RES (3)..(4)..(38): Xaa is C or S
  MOD_RES (18)..(19)..(20)..(21)..(22): Xaa is A or G
  MOD_RES (23)..(24)..(25)..(26): Xaa is A or G or is absent
KAXXVPTELRSVKMAKVXXXXXXXXXKEVQVDMVVEGX

SEQ ID NO: 53665 - protein, 41 aa, Artificial Sequence; identical to SEQ ID NO: 20082
  GFR-binding peptide
  MOD_RES (4)..(38)..(40): Xaa is C or S

SEQ ID NO: 53666 - protein, 39 aa, Artificial Sequence
  GFR-binding peptide
  MOD_RES (4)..(5)..(37)..(39): Xaa is C or S
PKAXXVPTELRSVKMAKVDENEKVVKEVQVDMVVEGXGX

SEQ ID NO: 53667 - protein, 36 aa, Artificial Sequence
  GFR-binding peptide
  MOD_RES (3)..(4): Xaa is C or S
  MOD_RES (18)..(19)..(20)..(21)..(22): Xaa is A or G
  MOD_RES (23)..(24)..(25)..(26): Xaa is A or G or is absent
SPXXVPQDLRSVKIAKVXXXXXXXXXKEVQVMVVKS

SEQ ID NO: 53668 - protein, 36 aa, Artificial Sequence
  GFR-binding peptide
  MOD_RES (1)..(2)..(34)..(36): Xaa is C or S
XXVPTELSNITMQIMDEYDKVVIGEMSEMVVEGXGX

SEQ ID NO: 53669 - protein, 33 aa, Artificial Sequence; identical to SEQ ID NO: 15200
  GFR-binding peptide
  MOD_RES (1)..(1): Xaa is C or S
  MOD_RES (15)..(16)..(17)..(18)..(19): Xaa is A or G
  MOD_RES (20)..(21)..(22)..(23): Xaa is A or G or is absent

SEQ ID NO: 53670 - protein, 33 aa, Artificial Sequence; identical to SEQ ID NO: 41174
  GFR-binding peptide
  MOD_RES (1)..(1): Xaa is C or S
  MOD_RES (15)..(16)..(17)..(18)..(19): Xaa is A or G
  MOD_RES (20)..(21)..(22)..(23): Xaa is A or G or is absent

SEQ ID NO: 53671 - protein, 37 aa, Artificial Sequence
  GFR-binding peptide
  MOD_RES (1)..(2)..(34)..(36): Xaa is C or S
XXAPTQLRSVKVAKVDDSSNVIKEVQVNMVVRAXGXH

SEQ ID NO: 53672 - protein, 33 aa, Artificial Sequence; identical to SEQ ID NO: 15202
  GFR-binding peptide
  MOD_RES (1)..(1): Xaa is C or S
  MOD_RES (15)..(16)..(17)..(18)..(19): Xaa is A or G
  MOD_RES (20)..(21)..(22)..(23): Xaa is A or G or is absent

SEQ ID NO: 53673 - protein, 37 aa, Artificial Sequence
  GFR-binding peptide
  MOD_RES (4)..(5): Xaa is C or S
  MOD_RES (19)..(20)..(21)..(22)..(23): Xaa is A or G
  MOD_RES (24)..(25)..(26)..(27): Xaa is A or G or is absent
ASPXXVPQDLSNITIQIMXXXXXXXXXIGEMSMVVKS

SEQ ID NO: 53674 - protein, 36 aa, Artificial Sequence
  GFR-binding peptide
  MOD_RES (4)..(36): Xaa is C or S
KPTXAPTKLRSVKVAKVDDSSNVIKEVQVNMVVRSX

SEQ ID NO: 53675 - protein, 38 aa, Artificial Sequence; identical to SEQ ID NO: 20089
  GFR-binding peptide
  MOD_RES (2)..(36)..(38): Xaa is C or S
  MOD_RES (16)..(17)..(18)..(19)..(20): Xaa is A or G
  MOD_RES (21)..(22)..(23)..(24): Xaa is A or G or is absent

SEQ ID NO: 53676 - protein, 38 aa, Artificial Sequence
  GFR-binding peptide
  MOD_RES (3)..(4)..(38): Xaa is C or S
  MOD_RES (18)..(19)..(20)..(21)..(22): Xaa is A or G
  MOD_RES (23)..(24)..(25)..(26): Xaa is A or G or is absent
KPXXAPTQLSNITVQIMXXXXXXXXXIGEMSNMVVRAX

SEQ ID NO: 53677 - protein, 39 aa, Artificial Sequence
  GFR-binding peptide
  MOD_RES (1)..(38): Xaa is C or S
XQPSRVHHEPLPVVYYEYVRKKPKLEQLSNRLEEHLEXA

SEQ ID NO: 53678 - protein, 35 aa, Artificial Sequence; identical to SEQ ID NO: 20093
  GFR-binding peptide
  MOD_RES (16)..(17)..(18)..(19)..(20): Xaa is A or G
  MOD_RES (21)..(22)..(23)..(24): Xaa is A or G or is absent

SEQ ID NO: 53679 - protein, 36 aa, Artificial Sequence
  GFR-binding peptide
  MOD_RES (1)..(2)..(36): Xaa is C or S
  MOD_RES (16)..(17)..(18)..(19)..(20): Xaa is A or G
  MOD_RES (21)..(22)..(23)..(24): Xaa is A or G or is absent
XXVPTELSNITMQIMXXXXXXXXXIGEMSDMVVEGX

SEQ ID NO: 53680 - protein, 40 aa, Artificial Sequence; identical to SEQ ID NO: 15205
  GFR-binding peptide
  MOD_RES (3)..(4)..(37)..(39): Xaa is C or S
  MOD_RES (18)..(19)..(20)..(21)..(22): Xaa is A or G
  MOD_RES (23)..(24)..(25)..(26): Xaa is A or G or is absent

SEQ ID NO: 53681 - protein, 43 aa, Artificial Sequence; identical to SEQ ID NO: 20095
  GFR-binding peptide
  MOD_RES (4)..(41)..(43): Xaa is C or S
  MOD_RES (20)..(21)..(22)..(23)..(24): Xaa is A or G
  MOD_RES (25)..(26)..(27)..(28): Xaa is A or G or is absent

SEQ ID NO: 53682 - protein, 43 aa, Artificial Sequence
  GFR-binding peptide
  MOD_RES (7)..(41)..(43): Xaa is C or S
  MOD_RES (21)..(22)..(23)..(24)..(25): Xaa is A or G
  MOD_RES (26)..(27)..(28)..(29): Xaa is A or G or is absent
HVTKPTXAPTKLSNITVQIMXXXXXXXXXIGEMSNMVVRSXGX

SEQ ID NO: 53683 - protein, 33 aa, Artificial Sequence
  GFR-binding peptide
  MOD_RES (14)..(15)..(16)..(17)..(18): Xaa is A or G
  MOD_RES (19)..(20)..(21)..(22): Xaa is A or G or is absent
APTKLSNITVQIMXXXXXXXXXIGEMSNMVVRS

SEQ ID NO: 53684 - protein, 41 aa, Artificial Sequence
  GFR-binding peptide
  MOD_RES (5)..(6)..(38)..(40): Xaa is C or S
VPKPXXAPTKLSNITVQIMDDSSNVIIGEMSNMVVRSXGXH

SEQ ID NO: 53685 - protein, 41 aa, Artificial Sequence
  GFR-binding peptide
  MOD_RES (5)..(6)..(40): Xaa is C or S
  MOD_RES (20)..(21)..(22)..(23)..(24): Xaa is A or G
  MOD_RES (25)..(26)..(27)..(28): Xaa is A or G or is absent
IPKAXXVPTELRPVQMRKIXXXXXXXXXKKATVEMVVEGXG

SEQ ID NO: 53686 - protein, 38 aa, Artificial Sequence; identical to SEQ ID NO: 20099
  GFR-binding peptide
  MOD_RES (3)..(37): Xaa is C or S

SEQ ID NO: 53687 - protein, 35 aa, Artificial Sequence
  GFR-binding peptide
  MOD_RES (3)..(35): Xaa is C or S
PTXAPTKLRPVQVRKIDDSSNVIKKATVNMVVRSX

SEQ ID NO: 53688 - protein, 37 aa, Artificial Sequence
  GFR-binding peptide
  MOD_RES (2)..(2): Xaa is C or S
QXRPTQVQLEPLTVLYYEIVRKKPIFEQLSNTLEDHL

SEQ ID NO: 53689 - protein, 38 aa, Artificial Sequence; identical to SEQ ID NO: 15211
  GFR-binding peptide
  MOD_RES (2)..(3)..(35)..(37): Xaa is C or S

SEQ ID NO: 53690 - protein, 32 aa, Artificial Sequence
  GFR-binding peptide
  MOD_RES (14)..(15)..(16)..(17)..(18): Xaa is A or G
  MOD_RES (19)..(20)..(21)..(22): Xaa is A or G or is absent
APTQLSNITVQIMXXXXXXXXXIGEMSNMVVR

SEQ ID NO: 53691 - protein, 39 aa, Artificial Sequence; identical to SEQ ID NO: 15213
  GFR-binding peptide
  MOD_RES (4)..(36)..(38): Xaa is C or S

SEQ ID NO: 53692 - protein, 37 aa, Artificial Sequence
  GFR-binding peptide
  MOD_RES (2)..(3)..(35)..(37): Xaa is C or S
AXXVPTELSNITMQIMDEYDKVVIGEMSEMVVEGXGX

SEQ ID NO: 53693 - protein, 40 aa, Artificial Sequence; identical to SEQ ID NO: 15214
  GFR-binding peptide
  MOD_RES (3)..(4)..(38)..(40): Xaa is C or S
  MOD_RES (18)..(19)..(20)..(21)..(22): Xaa is A or G
  MOD_RES (23)..(24)..(25)..(26): Xaa is A or G or is absent

SEQ ID NO: 53694 - protein, 42 aa, Artificial Sequence
  GFR-binding peptide
  MOD_RES (5)..(6)..(40)..(42): Xaa is C or S
  MOD_RES (20)..(21)..(22)..(23)..(24): Xaa is A or G
  MOD_RES (25)..(26)..(27)..(28): Xaa is A or G or is absent
IPKAXXVPTELRSVKMAKVXXXXXXXXXKEVQVDMVVEGXGX

SEQ ID NO: 53695 - protein, 38 aa, Artificial Sequence; identical to SEQ ID NO: 15216
  GFR-binding peptide
  MOD_RES (2)..(3)..(36)..(38): Xaa is C or S
  MOD_RES (17)..(18)..(19)..(20)..(21): Xaa is A or G
  MOD_RES (22)..(23)..(24)..(25): Xaa is A or G or is absent

SEQ ID NO: 53696 - protein, 34 aa, Artificial Sequence; identical to SEQ ID NO: 15217
  GFR-binding peptide
  MOD_RES (1)..(1): Xaa is C or S
  MOD_RES (15)..(16)..(17)..(18)..(19): Xaa is A or G
  MOD_RES (20)..(21)..(22)..(23): Xaa is A or G or is absent

SEQ ID NO: 53697 - protein, 41 aa, Artificial Sequence; identical to SEQ ID NO: 20105
  GFR-binding peptide
  MOD_RES (4)..(38)..(40): Xaa is C or S
  MOD_RES (18)..(19)..(20)..(21)..(22): Xaa is A or G
  MOD_RES (23)..(24)..(25)..(26): Xaa is A or G or is absent

SEQ ID NO: 53698 - protein, 41 aa, Artificial Sequence; identical to SEQ ID NO: 20106
  GFR-binding peptide
  MOD_RES (3)..(40): Xaa is C or S
  MOD_RES (19)..(20)..(21)..(22)..(23): Xaa is A or G
  MOD_RES (24)..(25)..(26)..(27): Xaa is A or G or is absent

SEQ ID NO: 53699 - protein, 41 aa, Artificial Sequence
  GFR-binding peptide
  MOD_RES (6)..(7)..(41): Xaa is C or S
  MOD_RES (21)..(22)..(23)..(24)..(25): Xaa is A or G
  MOD_RES (26)..(27)..(28)..(29): Xaa is A or G or is absent
KIPKAXXVPTELRPVQMRKIXXXXXXXXXKKATVDMVVEGX

SEQ ID NO: 53700 - protein, 35 aa, Artificial Sequence; identical to SEQ ID NO: 20107
  GFR-binding peptide
  MOD_RES (1)..(35): Xaa is C or S
  MOD_RES (15)..(16)..(17)..(18)..(19): Xaa is A or G
  MOD_RES (20)..(21)..(22)..(23): Xaa is A or G or is absent

SEQ ID NO: 53701 - protein, 41 aa, Artificial Sequence; identical to SEQ ID NO: 15220
  GFR-binding peptide
  MOD_RES (6)..(38)..(40): Xaa is C or S

SEQ ID NO: 53702 - protein, 39 aa, Artificial Sequence
  GFR-binding peptide
  MOD_RES (4)..(36)..(38): Xaa is C or S
KPTXAPTKLRPVQVRKIDDSSNVIKKATVNMVVRSXGXH

SEQ ID NO: 53703 - protein, 37 aa, Artificial Sequence
  GFR-binding peptide
  MOD_RES (1)..(35)..(37): Xaa is C or S
  MOD_RES (15)..(16)..(17)..(18)..(19): Xaa is A or G
  MOD_RES (20)..(21)..(22)..(23): Xaa is A or G or is absent
XVPTELSNITMQIMXXXXXXXXXIGEMSDMVVEGXGX

SEQ ID NO: 53704 - protein, 37 aa, Artificial Sequence
  GFR-binding peptide
  MOD_RES (2)..(3)..(37): Xaa is C or S
  MOD_RES (17)..(18)..(19)..(20)..(21): Xaa is A or G
  MOD_RES (22)..(23)..(24)..(25): Xaa is A or G or is absent
PXXAPTQLRSVKVAKVXXXXXXXXXKEVQVNMVVRAX

SEQ ID NO: 53705 - protein, 34 aa, Artificial Sequence; identical to SEQ ID NO: 15223
  GFR-binding peptide
  MOD_RES (34)..(34): Xaa is C or S
  MOD_RES (14)..(15)..(16)..(17)..(18): Xaa is A or G
  MOD_RES (19)..(20)..(21)..(22): Xaa is A or G or is absent

SEQ ID NO: 53706 - protein, 37 aa, Artificial Sequence
  GFR-binding peptide
  MOD_RES (34)..(36): Xaa is C or S
  MOD_RES (14)..(15)..(16)..(17)..(18): Xaa is A or G
  MOD_RES (19)..(20)..(21)..(22): Xaa is A or G or is absent
APTQLRSVKVAKVXXXXXXXXXKEVQVNMVVRAXGXH

SEQ ID NO: 53707 - protein, 32 aa, Artificial Sequence
  GFR-binding peptide
  MOD_RES (2)..(2): Xaa is C or S
TXAPTKLSNITVQIMDDSSNVIIGEMSNMVVR

SEQ ID NO: 53708 - protein, 43 aa, Artificial Sequence
  GFR-binding peptide
  MOD_RES (7)..(41)..(43): Xaa is C or S
NDEGLEXVPTEEEPLTMLYYRIKPHQGQHEQLSNFLQHNKXEX

SEQ ID NO: 53709 - protein, 37 aa, Artificial Sequence; identical to SEQ ID NO: 20111
  GFR-binding peptide
  MOD_RES (36)..(36): Xaa is C or S

SEQ ID NO: 53710 - protein, 39 aa, Artificial Sequence
  GFR-binding peptide
  MOD_RES (36)..(38): Xaa is C or S
PTQVQLEPLTVLYYEIVRKKPIFEQLSNTLEDHLAXKXE

SEQ ID NO: 53711 - protein, 42 aa, Artificial Sequence
  GFR-binding peptide
  MOD_RES (6)..(7)..(40)..(42): Xaa is C or S
  MOD_RES (21)..(22)..(23)..(24)..(25): Xaa is A or G
  MOD_RES (26)..(27)..(28)..(29): Xaa is A or G or is absent
ASAAPXXVPQALRSVKIAKVXXXXXXXXXKEVQVMIVRSXKX

SEQ ID NO: 53712 - protein, 38 aa, Artificial Sequence
  GFR-binding peptide
  MOD_RES (5)..(6): Xaa is C or S
  MOD_RES (20)..(21)..(22)..(23)..(24): Xaa is A or G
  MOD_RES (25)..(26)..(27)..(28): Xaa is A or G or is absent
VPKPXXAPTQLSNITVQIMXXXXXXXXXIGEMSNMVVR

SEQ ID NO: 53713 - protein, 36 aa, Artificial Sequence
  GFR-binding peptide
  MOD_RES (36)..(36): Xaa is C or S
  MOD_RES (15)..(16)..(17)..(18)..(19): Xaa is A or G
  MOD_RES (20)..(21)..(22)..(23): Xaa is A or G or is absent
PTQVQLEPLPVVYYXXXXXXXXXEQLSNTLEDHLAX

SEQ ID NO: 53714 - protein, 37 aa, Artificial Sequence
  GFR-binding peptide
  MOD_RES (2)..(3)..(35)..(37): Xaa is C or S
AXXVPTELSNITMQIMDENEKVVIGEMSDMVVEGXGX

SEQ ID NO: 53715 - protein, 40 aa, Artificial Sequence; identical to SEQ ID NO: 15227
  GFR-binding peptide
  MOD_RES (5)..(6)..(40): Xaa is C or S
  MOD_RES (20)..(21)..(22)..(23)..(24): Xaa is A or G
  MOD_RES (25)..(26)..(27)..(28): Xaa is A or G or is absent

SEQ ID NO: 53716 - protein, 40 aa, Artificial Sequence
  GFR-binding peptide
  MOD_RES (6)..(7): Xaa is C or S
  MOD_RES (21)..(22)..(23)..(24)..(25): Xaa is A or G
  MOD_RES (26)..(27)..(28)..(29): Xaa is A or G or is absent
KIPKAXXVPTELRPVQMRKIXXXXXXXXXKKATVDMVVEG

SEQ ID NO: 53717 - protein, 41 aa, Artificial Sequence
  GFR-binding peptide
  MOD_RES (5)..(5): Xaa is C or S
  MOD_RES (21)..(22)..(23)..(24)..(25): Xaa is A or G
  MOD_RES (26)..(27)..(28)..(29): Xaa is A or G or is absent
SSVKXQPSRVHHEPLTVLYYXXXXXXXXXEQLSNRLEEHLE

SEQ ID NO: 53718 - protein, 41 aa, Artificial Sequence; identical to SEQ ID NO: 20116
  GFR-binding peptide
  MOD_RES (4)..(41): Xaa is C or S

SEQ ID NO: 53719 - protein, 39 aa, Artificial Sequence
  GFR-binding peptide
  MOD_RES (5)..(6): Xaa is C or S
  MOD_RES (20)..(21)..(22)..(23)..(24): Xaa is A or G
  MOD_RES (25)..(26)..(27)..(28): Xaa is A or G or is absent
VPKPXXAPTKLSNITVQIMXXXXXXXXXIGEMSNMVVRS

SEQ ID NO: 53720 - protein, 35 aa, Artificial Sequence
  GFR-binding peptide
  MOD_RES (4)..(5): Xaa is C or S
ASPXXVPQDLSNITIQIMVGRTPKVIGEMSMVVKS

SEQ ID NO: 53721 - protein, 41 aa, Artificial Sequence
  GFR-binding peptide
  MOD_RES (6)..(7)..(40): Xaa is C or S
  MOD_RES (21)..(22)..(23)..(24)..(25): Xaa is A or G
  MOD_RES (26)..(27)..(28)..(29): Xaa is A or G or is absent
ASAAPXXVPQALRPVQIRKIXXXXXXXXXKKATVMIVRSXK

SEQ ID NO: 53722 - protein, 36 aa, Artificial Sequence; identical to SEQ ID NO: 15231
  GFR-binding peptide
  MOD_RES (1)..(2)..(34)..(36): Xaa is C or S

SEQ ID NO: 53723 - protein, 34 aa, Artificial Sequence; identical to SEQ ID NO: 15232
  GFR-binding peptide
  MOD_RES (1)..(33): Xaa is C or S

SEQ ID NO: 53724 - protein, 32 aa, Artificial Sequence; identical to SEQ ID NO: 20121
  GFR-binding peptide
  MOD_RES (14)..(15)..(16)..(17)..(18): Xaa is A or G
  MOD_RES (19)..(20)..(21)..(22): Xaa is A or G or is absent

SEQ ID NO: 53725 - protein, 31 aa, Artificial Sequence
  GFR-binding peptide
  MOD_RES (1)..(1): Xaa is C or S
XVSQDLRSVKIAKVIGKTPKIKEVQVMIVKS

SEQ ID NO: 53726 - protein, 35 aa, Artificial Sequence; identical to SEQ ID NO: 15233
  GFR-binding peptide
  MOD_RES (1)..(2): Xaa is C or S
  MOD_RES (16)..(17)..(18)..(19)..(20): Xaa is A or G
  MOD_RES (21)..(22)..(23)..(24): Xaa is A or G or is absent

SEQ ID NO: 53727 - protein, 34 aa, Artificial Sequence; identical to SEQ ID NO: 20125
  GFR-binding peptide
  MOD_RES (34)..(34): Xaa is C or S
  MOD_RES (14)..(15)..(16)..(17)..(18): Xaa is A or G
  MOD_RES (19)..(20)..(21)..(22): Xaa is A or G or is absent

SEQ ID NO: 53728 - protein, 37 aa, Artificial Sequence; identical to SEQ ID NO: 15234
  GFR-binding peptide
  MOD_RES (1)..(34)..(36): Xaa is C or S
  MOD_RES (15)..(16)..(17)..(18)..(19): Xaa is A or G
  MOD_RES (20)..(21)..(22)..(23): Xaa is A or G or is absent

SEQ ID NO: 53729 - protein, 35 aa, Artificial Sequence; identical to SEQ ID NO: 15235
  GFR-binding peptide
  MOD_RES (1)..(35): Xaa is C or S
  MOD_RES (15)..(16)..(17)..(18)..(19): Xaa is A or G
  MOD_RES (20)..(21)..(22)..(23): Xaa is A or G or is absent

SEQ ID NO: 53730 - protein, 34 aa, Artificial Sequence
  GFR-binding peptide
  MOD_RES (1)..(2)..(34): Xaa is C or S
XXAPTQLSNITVQIMDDSSNVIIGEMSNMVVRAX

SEQ ID NO: 53731 - protein, 38 aa, Artificial Sequence; identical to SEQ ID NO: 20129
  GFR-binding peptide
  MOD_RES (2)..(36)..(38): Xaa is C or S
  MOD_RES (16)..(17)..(18)..(19)..(20): Xaa is A or G
  MOD_RES (21)..(22)..(23)..(24): Xaa is A or G or is absent

SEQ ID NO: 53732 - protein, 39 aa, Artificial Sequence; identical to SEQ ID NO: 15239
  GFR-binding peptide
  MOD_RES (6)..(7): Xaa is C or S
  MOD_RES (21)..(22)..(23)..(24)..(25): Xaa is A or G
  MOD_RES (26)..(27)..(28)..(29): Xaa is A or G or is absent

SEQ ID NO: 53733 - protein, 35 aa, Artificial Sequence
  GFR-binding peptide
  MOD_RES (2)..(34): Xaa is C or S
TXAPTKLRSVKVAKVDDSSNVIKEVQVNMVVRSXG

SEQ ID NO: 53734 - protein, 39 aa, Artificial Sequence; identical to SEQ ID NO: 15240
  GFR-binding peptide
  MOD_RES (6)..(7): Xaa is C or S
  MOD_RES (21)..(22)..(23)..(24)..(25): Xaa is A or G
  MOD_RES (26)..(27)..(28)..(29): Xaa is A or G or is absent

SEQ ID NO: 53735 - protein, 39 aa, Artificial Sequence
  GFR-binding peptide
  MOD_RES (4)..(5)..(37)..(39): Xaa is C or S
PKAXXVPTELRSVKMAKVDEYDKVVKEVQVEMVVEGXGX

SEQ ID NO: 53736 - protein, 38 aa, Artificial Sequence
  GFR-binding peptide
  MOD_RES (3)..(3): Xaa is C or S
VKXQPSRVHHEPLPVVYYEYVRKKPKLEQLSNRLEEHL

SEQ ID NO: 53737 - protein, 36 aa, Artificial Sequence; identical to SEQ ID NO: 20132
  GFR-binding peptide
  MOD_RES (1)..(1): Xaa is C or S
  MOD_RES (17)..(18)..(19)..(20)..(21): Xaa is A or G
  MOD_RES (22)..(23)..(24)..(25): Xaa is A or G or is absent

SEQ ID NO: 53738 - protein, 31 aa, Artificial Sequence
  GFR-binding peptide
VPTELRPVQMRKIDENEKVVKKATVDMVVEG

SEQ ID NO: 53739 - protein, 42 aa, Artificial Sequence; identical to SEQ ID NO: 20133
  GFR-binding peptide
  MOD_RES (2)..(39)..(41): Xaa is C or S

SEQ ID NO: 53740 - protein, 38 aa, Artificial Sequence; identical to SEQ ID NO: 15245
  GFR-binding peptide
  MOD_RES (3)..(4)..(37): Xaa is C or S
  MOD_RES (18)..(19)..(20)..(21)..(22): Xaa is A or G
  MOD_RES (23)..(24)..(25)..(26): Xaa is A or G or is absent

SEQ ID NO: 53741 - protein, 34 aa, Artificial Sequence; identical to SEQ ID NO: 20135
  GFR-binding peptide
  MOD_RES (16)..(17)..(18)..(19)..(20): Xaa is A or G
  MOD_RES (21)..(22)..(23)..(24): Xaa is A or G or is absent

SEQ ID NO: 53742 - protein, 34 aa, Artificial Sequence; identical to SEQ ID NO: 20136
  GFR-binding peptide
  MOD_RES (34)..(34): Xaa is C or S

SEQ ID NO: 53743 - protein, 34 aa, Artificial Sequence
  GFR-binding peptide
  MOD_RES (1)..(34): Xaa is C or S
  MOD_RES (15)..(16)..(17)..(18)..(19): Xaa is A or G
  MOD_RES (20)..(21)..(22)..(23): Xaa is A or G or is absent
XVSQDLRSVKIAKVXXXXXXXXXKEVQVMIVKSX

SEQ ID NO: 53744 - protein, 36 aa, Artificial Sequence; identical to SEQ ID NO: 15249
  GFR-binding peptide
  MOD_RES (2)..(3)..(36): Xaa is C or S
  MOD_RES (17)..(18)..(19)..(20)..(21): Xaa is A or G
  MOD_RES (22)..(23)..(24)..(25): Xaa is A or G or is absent

SEQ ID NO: 53745 - protein, 37 aa, Artificial Sequence
  GFR-binding peptide
  MOD_RES (3)..(4)..(36): Xaa is C or S
KAXXVPTELRPVQMRKIDENEKVVKKATVDMVVEGXG

SEQ ID NO: 53746 - protein, 41 aa, Artificial Sequence
  GFR-binding peptide
  MOD_RES (6)..(38)..(40): Xaa is C or S
VTKPTXAPTKLSNITVQIMDDSSNVIIGEMSNMVVRSXGXH

SEQ ID NO: 53747 - protein, 36 aa, Artificial Sequence; identical to SEQ ID NO: 15250
  GFR-binding peptide
  MOD_RES (1)..(34)..(36): Xaa is C or S
  MOD_RES (15)..(16)..(17)..(18)..(19): Xaa is A or G
  MOD_RES (20)..(21)..(22)..(23): Xaa is A or G or is absent

SEQ ID NO: 53748 - protein, 39 aa, Artificial Sequence
  GFR-binding peptide
  MOD_RES (6)..(38): Xaa is C or S
VTKPTXAPTKLRPVQVRKIDDSSNVIKKATVNMVVRSXG

SEQ ID NO: 53749 - protein, 35 aa, Artificial Sequence
  GFR-binding peptide
  MOD_RES (32)..(34): Xaa is C or S
VPTELSNITMQIMDENEKVVIGEMSDMVVEGXGXR

SEQ ID NO: 53750 - protein, 37 aa, Artificial Sequence; identical to SEQ ID NO: 15252
  GFR-binding peptide
  MOD_RES (2)..(3)..(36): Xaa is C or S
  MOD_RES (17)..(18)..(19)..(20)..(21): Xaa is A or G
  MOD_RES (22)..(23)..(24)..(25): Xaa is A or G or is absent

SEQ ID NO: 53751 - protein, 40 aa, Artificial Sequence; identical to SEQ ID NO: 20141
  GFR-binding peptide
  MOD_RES (3)..(40): Xaa is C or S
  MOD_RES (19)..(20)..(21)..(22)..(23): Xaa is A or G
  MOD_RES (24)..(25)..(26)..(27): Xaa is A or G or is absent

SEQ ID NO: 53752 - protein, 38 aa, Artificial Sequence
  GFR-binding peptide
  MOD_RES (2)..(3)..(35)..(37): Xaa is C or S
AXXVPTELRPVQMRKIDEYDKVVKKATVEMVVEGXGXR

SEQ ID NO: 53753 - protein, 36 aa, Artificial Sequence
  GFR-binding peptide
  MOD_RES (4)..(36): Xaa is C or S
KPTXAPTKLSNITVQIMDDSSNVIIGEMSNMVVRSX

SEQ ID NO: 53754 - protein, 34 aa, Artificial Sequence
  GFR-binding peptide
  MOD_RES (31)..(33): Xaa is C or S
VPQDLRSVKIAKVVGRTPKVKEVQVMVVKSXKXS

SEQ ID NO: 53755 - protein, 35 aa, Artificial Sequence; identical to SEQ ID NO: 15258
  GFR-binding peptide
  MOD_RES (2)..(34): Xaa is C or S

SEQ ID NO: 53756 - protein, 41 aa, Artificial Sequence
  GFR-binding peptide
  MOD_RES (3)..(4)..(38)..(40): Xaa is C or S
  MOD_RES (18)..(19)..(20)..(21)..(22): Xaa is A or G
  MOD_RES (23)..(24)..(25)..(26): Xaa is A or G or is absent
KAXXVPTELSNITMQIMXXXXXXXXXIGEMSEMVVEGXGXR

SEQ ID NO: 53757 - protein, 42 aa, Artificial Sequence; identical to SEQ ID NO: 18703
  GFR-binding peptide
  MOD_RES (7)..(41): Xaa is C or S
  MOD_RES (21)..(22)..(23)..(24)..(25): Xaa is A or G
  MOD_RES (26)..(27)..(28)..(29): Xaa is A or G or is absent

SEQ ID NO: 53758 - protein, 37 aa, Artificial Sequence
  GFR-binding peptide
  MOD_RES (34)..(36): Xaa is C or S
  MOD_RES (14)..(15)..(16)..(17)..(18): Xaa is A or G
  MOD_RES (19)..(20)..(21)..(22): Xaa is A or G or is absent
VPTELRSVKMAKVXXXXXXXXXKEVQVEMVVEGXGXR

SEQ ID NO: 53759 - protein, 39 aa, Artificial Sequence
  GFR-binding peptide
  MOD_RES (6)..(7)..(38): Xaa is C or S
ASASPXXVSQDLRPVQIRKIIGKTPKIKKATVMIVKSXK

SEQ ID NO: 53760 - protein, 37 aa, Artificial Sequence
  GFR-binding peptide
  MOD_RES (6)..(7): Xaa is C or S
ASASPXXVSQDLSNITIQIMIGKTPKIIGEMSMIVKS

SEQ ID NO: 53761 - protein, 42 aa, Artificial Sequence; identical to SEQ ID NO: 15263
  GFR-binding peptide
  MOD_RES (6)..(7)..(41): Xaa is C or S
  MOD_RES (21)..(22)..(23)..(24)..(25): Xaa is A or G
  MOD_RES (26)..(27)..(28)..(29): Xaa is A or G or is absent

SEQ ID NO: 53762 - protein, 37 aa, Artificial Sequence
  GFR-binding peptide
  MOD_RES (34)..(36): Xaa is C or S
  MOD_RES (14)..(15)..(16)..(17)..(18): Xaa is A or G
  MOD_RES (19)..(20)..(21)..(22): Xaa is A or G or is absent
VPTELSNITMQIMXXXXXXXXXIGEMSDMVVEGXGXR

SEQ ID NO: 53763 - protein, 38 aa, Artificial Sequence
  GFR-binding peptide
  MOD_RES (5)..(6): Xaa is C or S
  MOD_RES (20)..(21)..(22)..(23)..(24): Xaa is A or G
  MOD_RES (25)..(26)..(27)..(28): Xaa is A or G or is absent
SASPXXVSQDLSNITIQIMXXXXXXXXXIGEMSMIVKS

SEQ ID NO: 53764 - protein, 35 aa, Artificial Sequence; identical to SEQ ID NO: 15268
  GFR-binding peptide
  MOD_RES (34)..(34): Xaa is C or S
  MOD_RES (14)..(15)..(16)..(17)..(18): Xaa is A or G
  MOD_RES (19)..(20)..(21)..(22): Xaa is A or G or is absent

SEQ ID NO: 53765 - protein, 32 aa, Artificial Sequence
  GFR-binding peptide
  MOD_RES (14)..(15)..(16)..(17)..(18): Xaa is A or G
  MOD_RES (19)..(20)..(21)..(22): Xaa is A or G or is absent
VPQDLRSVKIAKVXXXXXXXXXKEVQVMVVKS

SEQ ID NO: 53766 - protein, 35 aa, Artificial Sequence; identical to SEQ ID NO: 15270
  GFR-binding peptide
  MOD_RES (33)..(35): Xaa is C or S
  MOD_RES (14)..(15)..(16)..(17)..(18): Xaa is A or G
  MOD_RES (19)..(20)..(21)..(22): Xaa is A or G or is absent

SEQ ID NO: 53767 - protein, 34 aa, Artificial Sequence; identical to SEQ ID NO: 38513
  GFR-binding peptide
  MOD_RES (1)..(34): Xaa is C or S
  MOD_RES (15)..(16)..(17)..(18)..(19): Xaa is A or G
  MOD_RES (20)..(21)..(22)..(23): Xaa is A or G or is absent

SEQ ID NO: 53768 - protein, 36 aa, Artificial Sequence
  GFR-binding peptide
  MOD_RES (3)..(4): Xaa is C or S
  MOD_RES (18)..(19)..(20)..(21)..(22): Xaa is A or G
  MOD_RES (23)..(24)..(25)..(26): Xaa is A or G or is absent
KAXXVPTELRPVQMRKIXXXXXXXXXKKATVDMVVE

SEQ ID NO: 53769 - protein, 37 aa, Artificial Sequence
  GFR-binding peptide
  MOD_RES (1)..(35)..(37): Xaa is C or S
XVPTEEEPLPMVYYRIKPHQGQHEQLSNFLQHNKXEX

SEQ ID NO: 53770 - protein, 35 aa, Artificial Sequence
  GFR-binding peptide
  MOD_RES (35)..(35): Xaa is C or S
  MOD_RES (14)..(15)..(16)..(17)..(18): Xaa is A or G
  MOD_RES (19)..(20)..(21)..(22): Xaa is A or G or is absent
TQVQLEPLTVLYYXXXXXXXXXEQLSNTLEDHLAX

SEQ ID NO: 53771 - protein, 42 aa, Artificial Sequence; identical to SEQ ID NO: 18709
  GFR-binding peptide
  MOD_RES (2)..(39)..(41): Xaa is C or S
  MOD_RES (18)..(19)..(20)..(21)..(22): Xaa is A or G
  MOD_RES (23)..(24)..(25)..(26): Xaa is A or G or is absent

SEQ ID NO: 53772 - protein, 36 aa, Artificial Sequence; identical to SEQ ID NO: 15273
  GFR-binding peptide
  MOD_RES (6)..(6): Xaa is C or S

SEQ ID NO: 53773 - protein, 41 aa, Artificial Sequence
  GFR-binding peptide
  MOD_RES (7)..(39)..(41): Xaa is C or S
HVTKPTXAPTKLRPVQVRKIDDSSNVIKKATVNMVVRSXGX

SEQ ID NO: 53774 - protein, 35 aa, Artificial Sequence; identical to SEQ ID NO: 15274
  GFR-binding peptide
  MOD_RES (1)..(34): Xaa is C or S
  MOD_RES (15)..(16)..(17)..(18)..(19): Xaa is A or G
  MOD_RES (20)..(21)..(22)..(23): Xaa is A or G or is absent

SEQ ID NO: 53775 - protein, 36 aa, Artificial Sequence
  GFR-binding peptide
  MOD_RES (5)..(6): Xaa is C or S
VPKPXXAPTKLRPVQVRKIDDSSNVIKKATVNMVVR

SEQ ID NO: 53776 - protein, 41 aa, Artificial Sequence; identical to SEQ ID NO: 18711
  GFR-binding peptide
  MOD_RES (2)..(39)..(41): Xaa is C or S
  MOD_RES (18)..(19)..(20)..(21)..(22): Xaa is A or G
  MOD_RES (23)..(24)..(25)..(26): Xaa is A or G or is absent

SEQ ID NO: 53777 - protein, 37 aa, Artificial Sequence
  GFR-binding peptide
  MOD_RES (2)..(3)..(37): Xaa is C or S
  MOD_RES (17)..(18)..(19)..(20)..(21): Xaa is A or G
  MOD_RES (22)..(23)..(24)..(25): Xaa is A or G or is absent
PXXAPTQLRPVQVRKIXXXXXXXXXKKATVNMVVRAX

SEQ ID NO: 53778 - protein, 40 aa, Artificial Sequence
  GFR-binding peptide
  MOD_RES (5)..(5): Xaa is C or S
RNVQXRPTQVQLEPLTVLYYEIVRKKPIFEQLSNTLEDHL

SEQ ID NO: 53779 - protein, 39 aa, Artificial Sequence
  GFR-binding peptide
  MOD_RES (4)..(5)..(39): Xaa is C or S
  MOD_RES (19)..(20)..(21)..(22)..(23): Xaa is A or G
  MOD_RES (24)..(25)..(26)..(27): Xaa is A or G or is absent
PKAXXVPTELRSVKMAKVXXXXXXXXXKEVQVEMVVEGX

SEQ ID NO: 53780 - protein, 40 aa, Artificial Sequence
  GFR-binding peptide
  MOD_RES (3)..(37)..(39): Xaa is C or S
  MOD_RES (17)..(18)..(19)..(20)..(21): Xaa is A or G
  MOD_RES (22)..(23)..(24)..(25): Xaa is A or G or is absent
PTXAPTKLRPVQVRKIXXXXXXXXXKKATVNMVVRSXGXH

SEQ ID NO: 53781 - protein, 32 aa, Artificial Sequence
  GFR-binding peptide
  MOD_RES (14)..(15)..(16)..(17)..(18): Xaa is A or G
  MOD_RES (19)..(20)..(21)..(22): Xaa is A or G or is absent
SRVHHEPLTVLYYXXXXXXXXXEQLSNRLEEH

SEQ ID NO: 53782 - protein, 34 aa, Artificial Sequence; identical to SEQ ID NO: 15279
  GFR-binding peptide
  MOD_RES (2)..(3): Xaa is C or S

SEQ ID NO: 53783 - protein, 37 aa, Artificial Sequence
  GFR-binding peptide
  MOD_RES (35)..(37): Xaa is C or S
SRVHHEPLTVLYYEYVRKKPKLEQLSNRLEEHLEXAX

SEQ ID NO: 53784 - protein, 34 aa, Artificial Sequence; identical to SEQ ID NO: 15281
  GFR-binding peptide
  MOD_RES (2)..(3)..(34): Xaa is C or S

SEQ ID NO: 53785 - protein, 32 aa, Artificial Sequence
  GFR-binding peptide
  MOD_RES (1)..(32): Xaa is C or S
XVSQDLSNITIQIMIGKTPKIIGEMSMIVKSX

SEQ ID NO: 53786 - protein, 34 aa, Artificial Sequence
  GFR-binding peptide
  MOD_RES (2)..(3): Xaa is C or S
PXXAPTKLSNITVQIMDDSSNVIIGEMSNMVVRS

SEQ ID NO: 53787 - protein, 32 aa, Artificial Sequence
  GFR-binding peptide
  MOD_RES (32)..(32): Xaa is C or S
VPTELRPVQMRKIDENEKVVKKATVDMVVEGX

SEQ ID NO: 53788 - protein, 37 aa, Artificial Sequence
  GFR-binding peptide
  MOD_RES (2)..(36): Xaa is C or S
  MOD_RES (16)..(17)..(18)..(19)..(20): Xaa is A or G
  MOD_RES (21)..(22)..(23)..(24): Xaa is A or G or is absent
TXAPTKLSNITVQIMXXXXXXXXXIGEMSNMVVRSXG

SEQ ID NO: 53789 - protein, 32 aa, Artificial Sequence
  GFR-binding peptide
  MOD_RES (1)..(1): Xaa is C or S
XVPTELRPVQMRKIDENEKVVKKATVDMVVEG

SEQ ID NO: 53790 - protein, 36 aa, Artificial Sequence
  GFR-binding peptide
  MOD_RES (1)..(1): Xaa is C or S
  MOD_RES (17)..(18)..(19)..(20)..(21): Xaa is A or G
  MOD_RES (22)..(23)..(24)..(25): Xaa is A or G or is absent
XRPTQVQLEPLPVVYYXXXXXXXXXEQLSNTLEDHL

SEQ ID NO: 53791 - protein, 40 aa, Artificial Sequence
  GFR-binding peptide
  MOD_RES (3)..(40): Xaa is C or S
  MOD_RES (19)..(20)..(21)..(22)..(23): Xaa is A or G
  MOD_RES (24)..(25)..(26)..(27): Xaa is A or G or is absent
VQXRPTQVQLEPLTVLYYXXXXXXXXXEQLSNTLEDHLAX

SEQ ID NO: 53792 - protein, 34 aa, Artificial Sequence
  GFR-binding peptide
  MOD_RES (1)..(1): Xaa is C or S
  MOD_RES (15)..(16)..(17)..(18)..(19): Xaa is A or G
  MOD_RES (20)..(21)..(22)..(23): Xaa is A or G or is absent
XVPTELRSVKMAKVXXXXXXXXXKEVQVDMVVEG

SEQ ID NO: 53793 - protein, 34 aa, Artificial Sequence
  GFR-binding peptide
  MOD_RES (2)..(3): Xaa is C or S
PXXAPTQLRPVQVRKIDDSSNVIKKATVNMVVRA

SEQ ID NO: 53794 - protein, 38 aa, Artificial Sequence; identical to SEQ ID NO: 18720
  GFR-binding peptide
  MOD_RES (2)..(2): Xaa is C or S
  MOD_RES (18)..(19)..(20)..(21)..(22): Xaa is A or G
  MOD_RES (23)..(24)..(25)..(26): Xaa is A or G or is absent

SEQ ID NO: 53795 - protein, 37 aa, Artificial Sequence
  GFR-binding peptide
  MOD_RES (34)..(36): Xaa is C or S
  MOD_RES (14)..(15)..(16)..(17)..(18): Xaa is A or G
  MOD_RES (19)..(20)..(21)..(22): Xaa is A or G or is absent
VPTELRPVQMRKIXXXXXXXXXKKATVEMVVEGXGXR

SEQ ID NO: 53796 - protein, 40 aa, Artificial Sequence
  GFR-binding peptide
  MOD_RES (3)..(4)..(37)..(39): Xaa is C or S
  MOD_RES (18)..(19)..(20)..(21)..(22): Xaa is A or G
  MOD_RES (23)..(24)..(25)..(26): Xaa is A or G or is absent
APXXVPQALRSVKIAKVXXXXXXXXXKEVQVMIVRSXKXS

SEQ ID NO: 53797 - protein, 36 aa, Artificial Sequence; identical to SEQ ID NO: 18723
  GFR-binding peptide
  MOD_RES (1)..(35): Xaa is C or S
  MOD_RES (15)..(16)..(17)..(18)..(19): Xaa is A or G
  MOD_RES (20)..(21)..(22)..(23): Xaa is A or G or is absent

SEQ ID NO: 53798 - protein, 40 aa, Artificial Sequence; identical to SEQ ID NO: 15283
  GFR-binding peptide
  MOD_RES (5)..(6)..(40): Xaa is C or S
  MOD_RES (20)..(21)..(22)..(23)..(24): Xaa is A or G
  MOD_RES (25)..(26)..(27)..(28): Xaa is A or G or is absent

SEQ ID NO: 53799 - protein, 35 aa, Artificial Sequence
  GFR-binding peptide
  MOD_RES (1)..(32)..(34): Xaa is C or S
XVPQDLRPVQIRKIVGRTPKVKKATVMVVKSXKXS

SEQ ID NO: 53800 - protein, 38 aa, Artificial Sequence; identical to SEQ ID NO: 18726
  GFR-binding peptide
  MOD_RES (4)..(38): Xaa is C or S
  MOD_RES (18)..(19)..(20)..(21)..(22): Xaa is A or G
  MOD_RES (23)..(24)..(25)..(26): Xaa is A or G or is absent

SEQ ID NO: 53801 - protein, 38 aa, Artificial Sequence; identical to SEQ ID NO: 15286
  GFR-binding peptide
  MOD_RES (4)..(5)..(37): Xaa is C or S

SEQ ID NO: 53802 - protein, 36 aa, Artificial Sequence; identical to SEQ ID NO: 18727
  GFR-binding peptide
  MOD_RES (34)..(36): Xaa is C or S

SEQ ID NO: 53803 - protein, 38 aa, Artificial Sequence; identical to SEQ ID NO: 15289
  GFR-binding peptide
  MOD_RES (3)..(4)..(38): Xaa is C or S
  MOD_RES (18)..(19)..(20)..(21)..(22): Xaa is A or G
  MOD_RES (23)..(24)..(25)..(26): Xaa is A or G or is absent

SEQ ID NO: 53804 - protein, 34 aa, Artificial Sequence
  GFR-binding peptide
  MOD_RES (1)..(2)..(34): Xaa is C or S
XXVPTELRPVQMRKIDEYDKVVKKATVEMVVEGX

SEQ ID NO: 53805 - protein, 39 aa, Artificial Sequence
  GFR-binding peptide
  MOD_RES (6)..(6): Xaa is C or S
  MOD_RES (20)..(21)..(22)..(23)..(24): Xaa is A or G
  MOD_RES (25)..(26)..(27)..(28): Xaa is A or G or is absent
VTKPTXAPTKLRPVQVRKIXXXXXXXXXKKATVNMVVRS

SEQ ID NO: 53806 - protein, 40 aa, Artificial Sequence
  GFR-binding peptide
  MOD_RES (1)..(38)..(40): Xaa is C or S
  MOD_RES (17)..(18)..(19)..(20)..(21): Xaa is A or G
  MOD_RES (22)..(23)..(24)..(25): Xaa is A or G or is absent
XRPTQVQLEPLTVLYYXXXXXXXXXEQLSNTLEDHLAXKX

SEQ ID NO: 53807 - protein, 37 aa, Artificial Sequence; identical to SEQ ID NO: 15292
  GFR-binding peptide
  MOD_RES (6)..(6): Xaa is C or S

SEQ ID NO: 53808 - protein, 36 aa, Artificial Sequence
  GFR-binding peptide
  MOD_RES (2)..(2): Xaa is C or S
QXRPTQVQLEPLPVVYYEIVRKKPIFEQLSNTLEDH

SEQ ID NO: 53809 - protein, 40 aa, Artificial Sequence; identical to SEQ ID NO: 18731
  GFR-binding peptide
  MOD_RES (37)..(39): Xaa is C or S
  MOD_RES (16)..(17)..(18)..(19)..(20): Xaa is A or G
  MOD_RES (21)..(22)..(23)..(24): Xaa is A or G or is absent

SEQ ID NO: 53810 - protein, 40 aa, Artificial Sequence
  GFR-binding peptide
  MOD_RES (3)..(37)..(39): Xaa is C or S
  MOD_RES (17)..(18)..(19)..(20)..(21): Xaa is A or G
  MOD_RES (22)..(23)..(24)..(25): Xaa is A or G or is absent
PTXAPTKLRSVKVAKVXXXXXXXXXKEVQVNMVVRSXGXH

SEQ ID NO: 53811 - protein, 37 aa, Artificial Sequence; identical to SEQ ID NO: 18732
  GFR-binding peptide
  MOD_RES (1)..(1): Xaa is C or S

SEQ ID NO: 53812 - protein, 42 aa, Artificial Sequence; identical to SEQ ID NO: 18733
  GFR-binding peptide
  MOD_RES (5)..(42): Xaa is C or S
  MOD_RES (21)..(22)..(23)..(24)..(25): Xaa is A or G
  MOD_RES (26)..(27)..(28)..(29): Xaa is A or G or is absent

SEQ ID NO: 53813 - protein, 36 aa, Artificial Sequence; identical to SEQ ID NO: 18734
  GFR-binding peptide
  MOD_RES (35)..(35): Xaa is C or S
  MOD_RES (14)..(15)..(16)..(17)..(18): Xaa is A or G
  MOD_RES (19)..(20)..(21)..(22): Xaa is A or G or is absent

SEQ ID NO: 53814 - protein, 36 aa, Artificial Sequence; identical to SEQ ID NO: 18735
  GFR-binding peptide
  MOD_RES (1)..(1): Xaa is C or S

SEQ ID NO: 53815 - protein, 38 aa, Artificial Sequence
  GFR-binding peptide
  MOD_RES (1)..(2)..(36)..(38): Xaa is C or S
  MOD_RES (16)..(17)..(18)..(19)..(20): Xaa is A or G
  MOD_RES (21)..(22)..(23)..(24): Xaa is A or G or is absent
XXAPTKLRSVKVAKVXXXXXXXXXKEVQVNMVVRSXGX

SEQ ID NO: 53816 - protein, 35 aa, Artificial Sequence; identical to SEQ ID NO: 15296
  GFR-binding peptide
  MOD_RES (2)..(3)..(35): Xaa is C or S

SEQ ID NO: 53817 - protein, 36 aa, Artificial Sequence
  GFR-binding peptide
  MOD_RES (3)..(4)..(36): Xaa is C or S
KAXXVPTELSNITMQIMDEYDKVVIGEMSEMVVEGX

SEQ ID NO: 53818 - protein, 45 aa, Artificial Sequence; identical to SEQ ID NO: 18736
  GFR-binding peptide
  MOD_RES (5)..(42)..(44): Xaa is C or S

SEQ ID NO: 53819 - protein, 34 aa, Artificial Sequence; identical to SEQ ID NO: 18737
  GFR-binding peptide

SEQ ID NO: 53820 - protein, 39 aa, Artificial Sequence
  GFR-binding peptide
  MOD_RES (4)..(5)..(36)..(38): Xaa is C or S
ASPXXVSQDLSNITIQIMIGKTPKIIGEMSMIVKSXKXS

SEQ ID NO: 53821 - protein, 40 aa, Artificial Sequence; identical to SEQ ID NO: 15301
  GFR-binding peptide
  MOD_RES (4)..(5)..(37)..(39): Xaa is C or S

SEQ ID NO: 53822 - protein, 37 aa, Artificial Sequence; identical to SEQ ID NO: 15302
  GFR-binding peptide
  MOD_RES (3)..(4)..(37): Xaa is C or S
  MOD_RES (18)..(19)..(20)..(21)..(22): Xaa is A or G
  MOD_RES (23)..(24)..(25)..(26): Xaa is A or G or is absent

SEQ ID NO: 53823 - protein, 37 aa, Artificial Sequence
  GFR-binding peptide
  MOD_RES (35)..(37): Xaa is C or S
TQVQLEPLTVLYYEIVRKKPIFEQLSNTLEDHLAXKX

SEQ ID NO: 53824 - protein, 34 aa, Artificial Sequence
  GFR-binding peptide
  MOD_RES (1)..(34): Xaa is C or S
  MOD_RES (15)..(16)..(17)..(18)..(19): Xaa is A or G
  MOD_RES (20)..(21)..(22)..(23): Xaa is A or G or is absent
XVSQDLSNITIQIMXXXXXXXXXIGEMSMIVKSX

SEQ ID NO: 53825 - protein, 37 aa, Artificial Sequence; identical to SEQ ID NO: 18740
  GFR-binding peptide
  MOD_RES (37)..(37): Xaa is C or S
  MOD_RES (16)..(17)..(18)..(19)..(20): Xaa is A or G
  MOD_RES (21)..(22)..(23)..(24): Xaa is A or G or is absent

SEQ ID NO: 53826 - protein, 37 aa, Artificial Sequence
  GFR-binding peptide
  MOD_RES (1)..(2)..(35)..(37): Xaa is C or S
  MOD_RES (16)..(17)..(18)..(19)..(20): Xaa is A or G
  MOD_RES (21)..(22)..(23)..(24): Xaa is A or G or is absent
XXVPQALRSVKIAKVXXXXXXXXXKEVQVMIVRSXKX

SEQ ID NO: 53827 - protein, 36 aa, Artificial Sequence; identical to SEQ ID NO: 15304
  GFR-binding peptide
  MOD_RES (1)..(2)..(35): Xaa is C or S
  MOD_RES (16)..(17)..(18)..(19)..(20): Xaa is A or G
  MOD_RES (21)..(22)..(23)..(24): Xaa is A or G or is absent

SEQ ID NO: 53828 - protein, 33 aa, Artificial Sequence
  GFR-binding peptide
  MOD_RES (33)..(33): Xaa is C or S
  MOD_RES (14)..(15)..(16)..(17)..(18): Xaa is A or G
  MOD_RES (19)..(20)..(21)..(22): Xaa is A or G or is absent
VPQDLSNITIQIMXXXXXXXXXIGEMSMVVKSX

SEQ ID NO: 53829 - protein, 44 aa, Artificial Sequence; identical to SEQ ID NO: 18743
  GFR-binding peptide
  MOD_RES (4)..(41)..(43): Xaa is C or S

SEQ ID NO: 53830 - protein, 42 aa, Artificial Sequence
  GFR-binding peptide
  MOD_RES (6)..(7)..(41): Xaa is C or S
  MOD_RES (21)..(22)..(23)..(24)..(25): Xaa is A or G
  MOD_RES (26)..(27)..(28)..(29): Xaa is A or G or is absent
SIPKAXXVPTELRSVKMAKVXXXXXXXXXKEVQVEMVVEGXG

SEQ ID NO: 53831 - protein, 40 aa, Artificial Sequence
  GFR-binding peptide
  MOD_RES (5)..(6)..(39): Xaa is C or S
  MOD_RES (20)..(21)..(22)..(23)..(24): Xaa is A or G
  MOD_RES (25)..(26)..(27)..(28): Xaa is A or G or is absent
SAAPXXVPQALSNITIQIMXXXXXXXXXIGEMSMIVRSXK

SEQ ID NO: 53832 - protein, 38 aa, Artificial Sequence; identical to SEQ ID NO: 15306
  GFR-binding peptide
  MOD_RES (4)..(5)..(37): Xaa is C or S

SEQ ID NO: 53833 - protein, 39 aa, Artificial Sequence; identical to SEQ ID NO: 15307
  GFR-binding peptide
  MOD_RES (6)..(7)..(38): Xaa is C or S

SEQ ID NO: 53834 - protein, 36 aa, Artificial Sequence
  GFR-binding peptide
  MOD_RES (3)..(4)..(35): Xaa is C or S
SPXXVSQDLRPVQIRKIIGKTPKIKKATVMIVKSXK

SEQ ID NO: 53835 - protein, 41 aa, Artificial Sequence; identical to SEQ ID NO: 15308
  GFR-binding peptide
  MOD_RES (3)..(4)..(38)..(40): Xaa is C or S
  MOD_RES (18)..(19)..(20)..(21)..(22): Xaa is A or G
  MOD_RES (23)..(24)..(25)..(26): Xaa is A or G or is absent

SEQ ID NO: 53836 - protein, 44 aa, Artificial Sequence
  GFR-binding peptide
  MOD_RES (5)..(42)..(44): Xaa is C or S
  MOD_RES (21)..(22)..(23)..(24)..(25): Xaa is A or G
  MOD_RES (26)..(27)..(28)..(29): Xaa is A or G or is absent
SSVKXQPSRVHHEPLPVVYYXXXXXXXXXEQLSNRLEEHLEXAX

SEQ ID NO: 53837 - protein, 35 aa, Artificial Sequence
  GFR-binding peptide
  MOD_RES (1)..(33)..(35): Xaa is C or S
XAPTKLRSVKVAKVDDSSNVIKEVQVNMVVRSXGX

SEQ ID NO: 53838 - protein, 36 aa, Artificial Sequence; identical to SEQ ID NO: 15311
  GFR-binding peptide
  MOD_RES (3)..(4)..(35): Xaa is C or S

SEQ ID NO: 53839 - protein, 36 aa, Artificial Sequence; identical to SEQ ID NO: 15312
  GFR-binding peptide
  MOD_RES (3)..(4)..(36): Xaa is C or S

SEQ ID NO: 53840 - protein, 37 aa, Artificial Sequence
  GFR-binding peptide
  MOD_RES (1)..(2)..(36): Xaa is C or S
  MOD_RES (16)..(17)..(18)..(19)..(20): Xaa is A or G
  MOD_RES (21)..(22)..(23)..(24): Xaa is A or G or is absent
XXAPTKLRPVQVRKIXXXXXXXXXKKATVNMVVRSXG

SEQ ID NO: 53841 - protein, 38 aa, Artificial Sequence
  GFR-binding peptide
  MOD_RES (4)..(5)..(37): Xaa is C or S
PKPXXAPTQLRSVKVAKVDDSSNVIKEVQVNMVVRAXG

SEQ ID NO: 53842 - protein, 42 aa, Artificial Sequence; identical to SEQ ID NO: 18748
  GFR-binding peptide
  MOD_RES (4)..(41): Xaa is C or S
  MOD_RES (20)..(21)..(22)..(23)..(24): Xaa is A or G
  MOD_RES (25)..(26)..(27)..(28): Xaa is A or G or is absent

SEQ ID NO: 53843 - protein, 37 aa, Artificial Sequence
  GFR-binding peptide
  MOD_RES (1)..(35)..(37): Xaa is C or S
  MOD_RES (15)..(16)..(17)..(18)..(19): Xaa is A or G
  MOD_RES (20)..(21)..(22)..(23): Xaa is A or G or is absent
XVPTEEEPLTMLYYXXXXXXXXXEQLSNFLQHNKXEX

SEQ ID NO: 53844 - protein, 40 aa, Artificial Sequence
  GFR-binding peptide
  MOD_RES (6)..(7)..(39): Xaa is C or S
SIPKAXXVPTELSNITMQIMDEYDKVVIGEMSEMVVEGXG

SEQ ID NO: 53845 - protein, 40 aa, Artificial Sequence; identical to SEQ ID NO: 15319
  GFR-binding peptide
  MOD_RES (4)..(5)..(37)..(39): Xaa is C or S

SEQ ID NO: 53846 - protein, 37 aa, Artificial Sequence
  GFR-binding peptide
  MOD_RES (5)..(6): Xaa is C or S
IPKAXXVPTELRPVQMRKIDENEKVVKKATVDMVVEG

SEQ ID NO: 53847 - protein, 36 aa, Artificial Sequence
  GFR-binding peptide
  MOD_RES (33)..(35): Xaa is C or S
  MOD_RES (14)..(15)..(16)..(17)..(18): Xaa is A or G
  MOD_RES (19)..(20)..(21)..(22): Xaa is A or G or is absent
VPQALSNITIQIMXXXXXXXXXIGEMSMIVRSXKXS

SEQ ID NO: 53848 - protein, 39 aa, Artificial Sequence; identical to SEQ ID NO: 18754
  GFR-binding peptide
  MOD_RES (5)..(5): Xaa is C or S
  MOD_RES (21)..(22)..(23)..(24)..(25): Xaa is A or G
  MOD_RES (26)..(27)..(28)..(29): Xaa is A or G or is absent

SEQ ID NO: 53849 - protein, 39 aa, Artificial Sequence
  GFR-binding peptide
  MOD_RES (5)..(37)..(39): Xaa is C or S
TKPTXAPTKLRSVKVAKVDDSSNVIKEVQVNMVVRSXGX

SEQ ID NO: 53850 - protein, 37 aa, Artificial Sequence; identical to SEQ ID NO: 15320
  GFR-binding peptide
  MOD_RES (2)..(3)..(37): Xaa is C or S
  MOD_RES (17)..(18)..(19)..(20)..(21): Xaa is A or G
  MOD_RES (22)..(23)..(24)..(25): Xaa is A or G or is absent

SEQ ID NO: 53851 - protein, 39 aa, Artificial Sequence; identical to SEQ ID NO: 15321
  GFR-binding peptide
  MOD_RES (2)..(3)..(37)..(39): Xaa is C or S
  MOD_RES (17)..(18)..(19)..(20)..(21): Xaa is A or G
  MOD_RES (22)..(23)..(24)..(25): Xaa is A or G or is absent

SEQ ID NO: 53852 - protein, 33 aa, Artificial Sequence
  GFR-binding peptide
  MOD_RES (1)..(1): Xaa is C or S
  MOD_RES (15)..(16)..(17)..(18)..(19): Xaa is A or G
  MOD_RES (20)..(21)..(22)..(23): Xaa is A or G or is absent
XVPTELSNITMQIMXXXXXXXXXIGEMSEMVVE

SEQ ID NO: 53853 - protein, 35 aa, Artificial Sequence
  GFR-binding peptide
  MOD_RES (2)..(3)..(35): Xaa is C or S
PXXAPTKLRSVKVAKVDDSSNVIKEVQVNMVVRSX

SEQ ID NO: 53854 - protein, 38 aa, Artificial Sequence
  GFR-binding peptide
  MOD_RES (5)..(6): Xaa is C or S
  MOD_RES (20)..(21)..(22)..(23)..(24): Xaa is A or G
  MOD_RES (25)..(26)..(27)..(28): Xaa is A or G or is absent
VPKPXXAPTQLRPVQVRKIXXXXXXXXXKKATVNMVVR

SEQ ID NO: 53855 - protein, 35 aa, Artificial Sequence
  GFR-binding peptide
  MOD_RES (35)..(35): Xaa is C or S
TQVQLEPLTVLYYEIVRKKPIFEQLSNTLEDHLAX

SEQ ID NO: 53856 - protein, 40 aa, Artificial Sequence
  GFR-binding peptide
  MOD_RES (3)..(40): Xaa is C or S
VQXRPTQVQLEPLTVLYYEIVRKKPIFEQLSNTLEDHLAX

SEQ ID NO: 53857 - protein, 38 aa, Artificial Sequence
  GFR-binding peptide
  MOD_RES (6)..(7): Xaa is C or S
TVPKPXXAPTQLSNITVQIMDDSSNVIIGEMSNMVVRA

SEQ ID NO: 53858 - protein, 41 aa, Artificial Sequence; identical to SEQ ID NO: 18758
  GFR-binding peptide
  MOD_RES (4)..(41): Xaa is C or S

SEQ ID NO: 53859 - protein, 38 aa, Artificial Sequence
  GFR-binding peptide
  MOD_RES (4)..(5): Xaa is C or S
  MOD_RES (19)..(20)..(21)..(22)..(23): Xaa is A or G
  MOD_RES (24)..(25)..(26)..(27): Xaa is A or G or is absent
PKAXXVPTELRPVQMRKIXXXXXXXXXKKATVEMVVEG

SEQ ID NO: 53860 - protein, 33 aa, Artificial Sequence
  GFR-binding peptide
  MOD_RES (1)..(32): Xaa is C or S
XVPQDLSNITIQIMVGRTPKVIGEMSMVVKSXK

SEQ ID NO: 53861 - protein, 38 aa, Artificial Sequence
  GFR-binding peptide
  MOD_RES (4)..(36)..(38): Xaa is C or S
KPTXAPTKLRSVKVAKVDDSSNVIKEVQVNMVVRSXGX

SEQ ID NO: 53862 - protein, 35 aa, Artificial Sequence; identical to SEQ ID NO: 15322
  GFR-binding peptide
  MOD_RES (1)..(33)..(35): Xaa is C or S

SEQ ID NO: 53863 - protein, 37 aa, Artificial Sequence
  GFR-binding peptide
  MOD_RES (5)..(6)..(37): Xaa is C or S
SASPXXVPQDLRSVKIAKVVGRTPKVKEVQVMVVKSX

SEQ ID NO: 53864 - protein, 38 aa, Artificial Sequence; identical to SEQ ID NO: 18760
  GFR-binding peptide
  MOD_RES (4)..(4): Xaa is C or S

SEQ ID NO: 53865 - protein, 37 aa, Artificial Sequence; identical to SEQ ID NO: 18761
  GFR-binding peptide
  MOD_RES (5)..(5): Xaa is C or S

SEQ ID NO: 53866 - protein, 35 aa, Artificial Sequence
  GFR-binding peptide
  MOD_RES (2)..(3): Xaa is C or S
  MOD_RES (17)..(18)..(19)..(20)..(21): Xaa is A or G
  MOD_RES (22)..(23)..(24)..(25): Xaa is A or G or is absent
AXXVPTELRPVQMRKIXXXXXXXXXKKATVDMVVE

SEQ ID NO: 53867 - protein, 35 aa, Artificial Sequence
  GFR-binding peptide
  MOD_RES (3)..(3): Xaa is C or S
  MOD_RES (17)..(18)..(19)..(20)..(21): Xaa is A or G
  MOD_RES (22)..(23)..(24)..(25): Xaa is A or G or is absent
LEXVPTEEEPLTMLYYXXXXXXXXXEQLSNFLQHN

SEQ ID NO: 53868 - protein, 37 aa, Artificial Sequence; identical to SEQ ID NO: 15324
  GFR-binding peptide
  MOD_RES (3)..(4)..(36): Xaa is C or S

SEQ ID NO: 53869 - protein, 32 aa, Artificial Sequence
  GFR-binding peptide
  MOD_RES (1)..(32): Xaa is C or S
XVSQDLRSVKIAKVIGKTPKIKEVQVMIVKSX

SEQ ID NO: 53870 - protein, 42 aa, Artificial Sequence; identical to SEQ ID NO: 15326
  GFR-binding peptide
  MOD_RES (6)..(7)..(39)..(41): Xaa is C or S

SEQ ID NO: 53871 - protein, 35 aa, Artificial Sequence; identical to SEQ ID NO: 18765
  GFR-binding peptide
  MOD_RES (1)..(1): Xaa is C or S

SEQ ID NO: 53872 - protein, 37 aa, Artificial Sequence
  GFR-binding peptide
  MOD_RES (34)..(36): Xaa is C or S
VPTEEEPLTMLYYRIKPHQGQHEQLSNFLQHNKXEXR

SEQ ID NO: 53873 - protein, 40 aa, Artificial Sequence; identical to SEQ ID NO: 15329
  GFR-binding peptide
  MOD_RES (5)..(6)..(37)..(39): Xaa is C or S

SEQ ID NO: 53874 - protein, 34 aa, Artificial Sequence
  GFR-binding peptide
  MOD_RES (3)..(4): Xaa is C or S
KPXXAPTKLRPVQVRKIDDSSNVIKKATVNMVVR

SEQ ID NO: 53875 - protein, 37 aa, Artificial Sequence
  GFR-binding peptide
  MOD_RES (1)..(2)..(34)..(36): Xaa is C or S
XXAPTQLRPVQVRKIDDSSNVIKKATVNMVVRAXGXH

SEQ ID NO: 53876 - protein, 33 aa, Artificial Sequence
  GFR-binding peptide
  MOD_RES (1)..(1): Xaa is C or S
  MOD_RES (15)..(16)..(17)..(18)..(19): Xaa is A or G
  MOD_RES (20)..(21)..(22)..(23): Xaa is A or G or is absent
XVPQALSNITIQIMXXXXXXXXXIGEMSMIVRS

SEQ ID NO: 53877 - protein, 40 aa, Artificial Sequence
  GFR-binding peptide
  MOD_RES (4)..(5)..(39): Xaa is C or S
  MOD_RES (19)..(20)..(21)..(22)..(23): Xaa is A or G
  MOD_RES (24)..(25)..(26)..(27): Xaa is A or G or is absent
PKAXXVPTELRSVKMAKVXXXXXXXXXKEVQVDMVVEGXG

SEQ ID NO: 53878 - protein, 35 aa, Artificial Sequence; identical to SEQ ID NO: 15333
  GFR-binding peptide
  MOD_RES (1)..(2): Xaa is C or S
  MOD_RES (16)..(17)..(18)..(19)..(20): Xaa is A or G
  MOD_RES (21)..(22)..(23)..(24): Xaa is A or G or is absent

SEQ ID NO: 53879 - protein, 36 aa, Artificial Sequence
  GFR-binding peptide
  MOD_RES (1)..(2)..(33)..(35): Xaa is C or S
XXVPQDLSNITIQIMVGRTPKVIGEMSMVVKSXKXS

SEQ ID NO: 53880 - protein, 42 aa, Artificial Sequence
  GFR-binding peptide
  MOD_RES (5)..(42): Xaa is C or S
SSVKXQPSRVHHEPLPVVYYEYVRKKPKLEQLSNRLEEHLEX

SEQ ID NO: 53881 - protein, 36 aa, Artificial Sequence; identical to SEQ ID NO: 15334
  GFR-binding peptide
  MOD_RES (1)..(34)..(36): Xaa is C or S
  MOD_RES (15)..(16)..(17)..(18)..(19): Xaa is A or G
  MOD_RES (20)..(21)..(22)..(23): Xaa is A or G or is absent

SEQ ID NO: 53882 - protein, 39 aa, Artificial Sequence; identical to SEQ ID NO: 15337
  GFR-binding peptide
  MOD_RES (3)..(4)..(38): Xaa is C or S
  MOD_RES (18)..(19)..(20)..(21)..(22): Xaa is A or G
  MOD_RES (23)..(24)..(25)..(26): Xaa is A or G or is absent

SEQ ID NO: 53883 - protein, 42 aa, Artificial Sequence
  GFR-binding peptide
  MOD_RES (5)..(39)..(41): Xaa is C or S
  MOD_RES (19)..(20)..(21)..(22)..(23): Xaa is A or G
  MOD_RES (24)..(25)..(26)..(27): Xaa is A or G or is absent
EGLEXVPTEEEPLPMVYYXXXXXXXXXEQLSNFLQHNKXEXR

SEQ ID NO: 53884 - protein, 41 aa, Artificial Sequence; identical to SEQ ID NO: 15339
  GFR-binding peptide
  MOD_RES (5)..(6)..(39)..(41): Xaa is C or S
  MOD_RES (20)..(21)..(22)..(23)..(24): Xaa is A or G
  MOD_RES (25)..(26)..(27)..(28): Xaa is A or G or is absent

SEQ ID NO: 53885 - protein, 33 aa, Artificial Sequence
  GFR-binding peptide
  MOD_RES (32)..(32): Xaa is C or S
VPTELRPVQMRKIDEYDKVVKKATVEMVVEGXG

SEQ ID NO: 53886 - protein, 43 aa, Artificial Sequence
  GFR-binding peptide
  MOD_RES (4)..(41)..(43): Xaa is C or S
SVKXQPSRVHHEPLTVLYYEYVRKKPKLEQLSNRLEEHLEXAX

SEQ ID NO: 53887 - protein, 40 aa, Artificial Sequence
  GFR-binding peptide
  MOD_RES (4)..(5)..(38)..(40): Xaa is C or S
  MOD_RES (19)..(20)..(21)..(22)..(23): Xaa is A or G
  MOD_RES (24)..(25)..(26)..(27): Xaa is A or G or is absent
AAPXXVPQALSNITIQIMXXXXXXXXXIGEMSMIVRSXKX

SEQ ID NO: 53888 - protein, 36 aa, Artificial Sequence; identical to SEQ ID NO: 18776
  GFR-binding peptide
  MOD_RES (2)..(36): Xaa is C or S
  MOD_RES (16)..(17)..(18)..(19)..(20): Xaa is A or G
  MOD_RES (21)..(22)..(23)..(24): Xaa is A or G or is absent

SEQ ID NO: 53889 - protein, 42 aa, Artificial Sequence; identical to SEQ ID NO: 18777
  GFR-binding peptide
  MOD_RES (5)..(42): Xaa is C or S

SEQ ID NO: 53890 - protein, 41 aa, Artificial Sequence
  GFR-binding peptide
  MOD_RES (5)..(39)..(41): Xaa is C or S
  MOD_RES (19)..(20)..(21)..(22)..(23): Xaa is A or G
  MOD_RES (24)..(25)..(26)..(27): Xaa is A or G or is absent
TKPTXAPTKLRSVKVAKVXXXXXXXXXKEVQVNMVVRSXGX

SEQ ID NO: 53891 - protein, 39 aa, Artificial Sequence; identical to SEQ ID NO: 15343
  GFR-binding peptide
  MOD_RES (5)..(6)..(38): Xaa is C or S

SEQ ID NO: 53892 - protein, 36 aa, Artificial Sequence; identical to SEQ ID NO: 15347
  GFR-binding peptide
  MOD_RES (1)..(2)..(34)..(36): Xaa is C or S

SEQ ID NO: 53893 - protein, 38 aa, Artificial Sequence
  GFR-binding peptide
  MOD_RES (36)..(38): Xaa is C or S
  MOD_RES (15)..(16)..(17)..(18)..(19): Xaa is A or G
  MOD_RES (20)..(21)..(22)..(23): Xaa is A or G or is absent
PTQVQLEPLTVLYYXXXXXXXXXEQLSNTLEDHLAXKX

SEQ ID NO: 53894 - protein, 36 aa, Artificial Sequence
  GFR-binding peptide
  MOD_RES (2)..(3)..(35): Xaa is C or S
PXXAPTQLSNITVQIMDDSSNVIIGEMSNMVVRAXG

SEQ ID NO: 53895 - protein, 35 aa, Artificial Sequence; identical to SEQ ID NO: 18780
  GFR-binding peptide
  MOD_RES (2)..(2): Xaa is C or S
  MOD_RES (16)..(17)..(18)..(19)..(20): Xaa is A or G
  MOD_RES (21)..(22)..(23)..(24): Xaa is A or G or is absent

SEQ ID NO: 53896 - protein, 37 aa, Artificial Sequence; identical to SEQ ID NO: 15351
  GFR-binding peptide
  MOD_RES (4)..(5): Xaa is C or S
  MOD_RES (19)..(20)..(21)..(22)..(23): Xaa is A or G
  MOD_RES (24)..(25)..(26)..(27): Xaa is A or G or is absent

SEQ ID NO: 53897 - protein, 41 aa, Artificial Sequence
  GFR-binding peptide
  MOD_RES (4)..(5)..(38)..(40): Xaa is C or S
  MOD_RES (19)..(20)..(21)..(22)..(23): Xaa is A or G
  MOD_RES (24)..(25)..(26)..(27): Xaa is A or G or is absent
AAPXXVPQALRSVKIAKVXXXXXXXXXKEVQVMIVRSXKXS

SEQ ID NO: 53898 - protein, 41 aa, Artificial Sequence; identical to SEQ ID NO: 15352
  GFR-binding peptide
  MOD_RES (3)..(4)..(38)..(40): Xaa is C or S
  MOD_RES (18)..(19)..(20)..(21)..(22): Xaa is A or G
  MOD_RES (23)..(24)..(25)..(26): Xaa is A or G or is absent

SEQ ID NO: 53899 - protein, 34 aa, Artificial Sequence
  GFR-binding peptide
  MOD_RES (2)..(2): Xaa is C or S
EXVPTEEEPLTMLYYRIKPHQGQHEQLSNFLQHN

SEQ ID NO: 53900 - protein, 37 aa, Artificial Sequence
  GFR-binding peptide
  MOD_RES (2)..(3)..(34)..(36): Xaa is C or S
PXXVPQALRPVQIRKIVGRKPKVKKATVMIVRSXKXS

SEQ ID NO: 53901 - protein, 35 aa, Artificial Sequence; identical to SEQ ID NO: 18787
  GFR-binding peptide

SEQ ID NO: 53902 - protein, 34 aa, Artificial Sequence
  GFR-binding peptide
  MOD_RES (1)..(1): Xaa is C or S
  MOD_RES (15)..(16)..(17)..(18)..(19): Xaa is A or G
  MOD_RES (20)..(21)..(22)..(23): Xaa is A or G or is absent
XAPTQLRPVQVRKIXXXXXXXXXKKATVNMVVRA

SEQ ID NO: 53903 - protein, 39 aa, Artificial Sequence
  GFR-binding peptide
  MOD_RES (4)..(4): Xaa is C or S
SVKXQPSRVHHEPLPVVYYEYVRKKPKLEQLSNRLEEHL

SEQ ID NO: 53904 - protein, 36 aa, Artificial Sequence
  GFR-binding peptide
  MOD_RES (3)..(4)..(36): Xaa is C or S
KPXXAPTQLSNITVQIMDDSSNVIIGEMSNMVVRAX

SEQ ID NO: 53905 - protein, 42 aa, Artificial Sequence
  GFR-binding peptide
  MOD_RES (4)..(5)..(39)..(41): Xaa is C or S
  MOD_RES (19)..(20)..(21)..(22)..(23): Xaa is A or G
  MOD_RES (24)..(25)..(26)..(27): Xaa is A or G or is absent
PKAXXVPTELSNITMQIMXXXXXXXXXIGEMSEMVVEGXGXR

SEQ ID NO: 53906 - protein, 33 aa, Artificial Sequence; identical to SEQ ID NO: 15358
  GFR-binding peptide
  MOD_RES (32)..(32): Xaa is C or S

SEQ ID NO: 53907 - protein, 31 aa, Artificial Sequence
  GFR-binding peptide
  MOD_RES (1)..(1): Xaa is C or S
XVPQDLSNITIQIMVGRTPKVIGEMSMVVKS

SEQ ID NO: 53908 - protein, 39 aa, Artificial Sequence; identical to SEQ ID NO: 18793
  GFR-binding peptide
  MOD_RES (1)..(38): Xaa is C or S
  MOD_RES (17)..(18)..(19)..(20)..(21): Xaa is A or G
  MOD_RES (22)..(23)..(24)..(25): Xaa is A or G or is absent

SEQ ID NO: 53909 - protein, 34 aa, Artificial Sequence; identical to SEQ ID NO: 18794
  GFR-binding peptide
  MOD_RES (16)..(17)..(18)..(19)..(20): Xaa is A or G
  MOD_RES (21)..(22)..(23)..(24): Xaa is A or G or is absent

SEQ ID NO: 53910 - protein, 38 aa, Artificial Sequence
  GFR-binding peptide
  MOD_RES (4)..(5)..(38): Xaa is C or S
  MOD_RES (19)..(20)..(21)..(22)..(23): Xaa is A or G
  MOD_RES (24)..(25)..(26)..(27): Xaa is A or G or is absent
ASPXXVSQDLSNITIQIMXXXXXXXXXIGEMSMIVKSX

SEQ ID NO: 53911 - protein, 37 aa, Artificial Sequence
  GFR-binding peptide
  MOD_RES (5)..(6)..(37): Xaa is C or S
SASPXXVPQDLSNITIQIMVGRTPKVIGEMSMVVKSX

SEQ ID NO: 53912 - protein, 39 aa, Artificial Sequence
  GFR-binding peptide
  MOD_RES (4)..(5)..(39): Xaa is C or S
  MOD_RES (19)..(20)..(21)..(22)..(23): Xaa is A or G
  MOD_RES (24)..(25)..(26)..(27): Xaa is A or G or is absent
PKPXXAPTKLSNITVQIMXXXXXXXXXIGEMSNMVVRSX

SEQ ID NO: 53913 - protein, 35 aa, Artificial Sequence
  GFR-binding peptide
  MOD_RES (2)..(3): Xaa is C or S
  MOD_RES (17)..(18)..(19)..(20)..(21): Xaa is A or G
  MOD_RES (22)..(23)..(24)..(25): Xaa is A or G or is absent
PXXVSQDLRPVQIRKIXXXXXXXXXKKATVMIVKS

SEQ ID NO: 53914 - protein, 42 aa, Artificial Sequence
  GFR-binding peptide
  MOD_RES (6)..(7)..(41): Xaa is C or S
  MOD_RES (21)..(22)..(23)..(24)..(25): Xaa is A or G
  MOD_RES (26)..(27)..(28)..(29): Xaa is A or G or is absent
KIPKAXXVPTELSNITMQIMXXXXXXXXXIGEMSDMVVEGXG

SEQ ID NO: 53915 - protein, 41 aa, Artificial Sequence
  GFR-binding peptide
  MOD_RES (6)..(7)..(39)..(41): Xaa is C or S
KIPKAXXVPTELSNITMQIMDENEKVVIGEMSDMVVEGXGX

SEQ ID NO: 53916 - protein, 43 aa, Artificial Sequence
  GFR-binding peptide
  MOD_RES (6)..(7)..(40)..(42): Xaa is C or S
  MOD_RES (21)..(22)..(23)..(24)..(25): Xaa is A or G
  MOD_RES (26)..(27)..(28)..(29): Xaa is A or G or is absent
ASASPXXVSQDLSNITIQIMXXXXXXXXXIGEMSMIVKSXKXS

SEQ ID NO: 53917 - protein, 36 aa, Artificial Sequence
  GFR-binding peptide
  MOD_RES (5)..(6): Xaa is C or S
IPKAXXVPTELRSVKMAKVDEYDKVVKEVQVEMVVE

SEQ ID NO: 53918 - protein, 33 aa, Artificial Sequence
  GFR-binding peptide
  MOD_RES (1)..(1): Xaa is C or S
  MOD_RES (15)..(16)..(17)..(18)..(19): Xaa is A or G
  MOD_RES (20)..(21)..(22)..(23): Xaa is A or G or is absent
XVSQDLRSVKIAKVXXXXXXXXXKEVQVMIVKS

SEQ ID NO: 53919 - protein, 37 aa, Artificial Sequence; identical to SEQ ID NO: 15369
  GFR-binding peptide
  MOD_RES (2)..(3)..(37): Xaa is C or S
  MOD_RES (17)..(18)..(19)..(20)..(21): Xaa is A or G
  MOD_RES (22)..(23)..(24)..(25): Xaa is A or G or is absent

SEQ ID NO: 53920 - protein, 45 aa, Artificial Sequence; identical to SEQ ID NO: 18804
  GFR-binding peptide
  MOD_RES (5)..(42)..(44): Xaa is C or S
  MOD_RES (21)..(22)..(23)..(24)..(25): Xaa is A or G
  MOD_RES (26)..(27)..(28)..(29): Xaa is A or G or is absent

SEQ ID NO: 53921 - protein, 42 aa, Artificial Sequence; identical to SEQ ID NO: 15370
  GFR-binding peptide
  MOD_RES (6)..(7)..(40)..(42): Xaa is C or S
  MOD_RES (21)..(22)..(23)..(24)..(25): Xaa is A or G
  MOD_RES (26)..(27)..(28)..(29): Xaa is A or G or is absent

SEQ ID NO: 53922 - protein, 39 aa, Artificial Sequence
  GFR-binding peptide
  MOD_RES (5)..(37)..(39): Xaa is C or S
TKPTXAPTKLRPVQVRKIDDSSNVIKKATVNMVVRSXGX

SEQ ID NO: 53923 - protein, 43 aa, Artificial Sequence; identical to SEQ ID NO: 15371
  GFR-binding peptide
  MOD_RES (6)..(7)..(40)..(42): Xaa is C or S
  MOD_RES (21)..(22)..(23)..(24)..(25): Xaa is A or G
  MOD_RES (26)..(27)..(28)..(29): Xaa is A or G or is absent

SEQ ID NO: 53924 - protein, 44 aa, Artificial Sequence
  GFR-binding peptide
  MOD_RES (5)..(42)..(44): Xaa is C or S
RNVQXRPTQVQLEPLTVLYYEIVRKKPIFEQLSNTLEDHLAXKX

SEQ ID NO: 53925 - protein, 35 aa, Artificial Sequence
  GFR-binding peptide
  MOD_RES (4)..(5): Xaa is C or S
PKPXXAPTQLRPVQVRKIDDSSNVIKKATVNMVVR

SEQ ID NO: 53926 - protein, 38 aa, Artificial Sequence
  GFR-binding peptide
  MOD_RES (2)..(3)..(36)..(38): Xaa is C or S
  MOD_RES (17)..(18)..(19)..(20)..(21): Xaa is A or G
  MOD_RES (22)..(23)..(24)..(25): Xaa is A or G or is absent
PXXVSQDLRSVKIAKVXXXXXXXXXKEVQVMIVKSXKX

SEQ ID NO: 53927 - protein, 36 aa, Artificial Sequence
  GFR-binding peptide
  MOD_RES (35)..(35): Xaa is C or S
  MOD_RES (14)..(15)..(16)..(17)..(18): Xaa is A or G
  MOD_RES (19)..(20)..(21)..(22): Xaa is A or G or is absent
TQVQLEPLTVLYYXXXXXXXXXEQLSNTLEDHLAXK

SEQ ID NO: 53928 - protein, 43 aa, Artificial Sequence; identical to SEQ ID NO: 18805
  GFR-binding peptide
  MOD_RES (6)..(40)..(42): Xaa is C or S

SEQ ID NO: 53929 - protein, 41 aa, Artificial Sequence
  GFR-binding peptide
  MOD_RES (6)..(7)..(40): Xaa is C or S
  MOD_RES (21)..(22)..(23)..(24)..(25): Xaa is A or G
  MOD_RES (26)..(27)..(28)..(29): Xaa is A or G or is absent
ASASPXXVPQDLRSVKIAKVXXXXXXXXXKEVQVMVVKSXK

SEQ ID NO: 53930 - protein, 39 aa, Artificial Sequence
  GFR-binding peptide
  MOD_RES (3)..(4)..(36)..(38): Xaa is C or S
KAXXVPTELRPVQMRKIDENEKVVKKATVDMVVEGXGXR

SEQ ID NO: 53931 - protein, 38 aa, Artificial Sequence; identical to SEQ ID NO: 15373
  GFR-binding peptide
  MOD_RES (2)..(3)..(37): Xaa is C or S
  MOD_RES (17)..(18)..(19)..(20)..(21): Xaa is A or G
  MOD_RES (22)..(23)..(24)..(25): Xaa is A or G or is absent

SEQ ID NO: 53932 - protein, 37 aa, Artificial Sequence
  GFR-binding peptide
  MOD_RES (2)..(3)..(36): Xaa is C or S
  MOD_RES (17)..(18)..(19)..(20)..(21): Xaa is A or G
  MOD_RES (22)..(23)..(24)..(25): Xaa is A or G or is absent
PXXVPQALRPVQIRKIXXXXXXXXXKKATVMIVRSXK

SEQ ID NO: 53933 - protein, 40 aa, Artificial Sequence; identical to SEQ ID NO: 18808
  GFR-binding peptide
  MOD_RES (2)..(39): Xaa is C or S

SEQ ID NO: 53934 - protein, 35 aa, Artificial Sequence
  GFR-binding peptide
  MOD_RES (2)..(2): Xaa is C or S
  MOD_RES (16)..(17)..(18)..(19)..(20): Xaa is A or G
  MOD_RES (21)..(22)..(23)..(24): Xaa is A or G or is absent
EXVPTEEEPLTMLYYXXXXXXXXXEQLSNFLQHNK

SEQ ID NO: 53935 - protein, 37 aa, Artificial Sequence
  GFR-binding peptide
  MOD_RES (2)..(36): Xaa is C or S
  MOD_RES (16)..(17)..(18)..(19)..(20): Xaa is A or G
  MOD_RES (21)..(22)..(23)..(24): Xaa is A or G or is absent
EXVPTEEEPLPMVYYXXXXXXXXXEQLSNFLQHNKXE

SEQ ID NO: 53936 - protein, 32 aa, Artificial Sequence; identical to SEQ ID NO: 15374
  GFR-binding peptide
  MOD_RES (1)..(2): Xaa is C or S

SEQ ID NO: 53937 - protein, 40 aa, Artificial Sequence
  GFR-binding peptide
  MOD_RES (7)..(7): Xaa is C or S
  MOD_RES (21)..(22)..(23)..(24)..(25): Xaa is A or G
  MOD_RES (26)..(27)..(28)..(29): Xaa is A or G or is absent
HVTKPTXAPTKLSNITVQIMXXXXXXXXXIGEMSNMVVRS

SEQ ID NO: 53938 - protein, 36 aa, Artificial Sequence; identical to SEQ ID NO: 15377
  GFR-binding peptide
  MOD_RES (2)..(3)..(35): Xaa is C or S

SEQ ID NO: 53939 - protein, 34 aa, Artificial Sequence; identical to SEQ ID NO: 15380
  GFR-binding peptide
  MOD_RES (32)..(34): Xaa is C or S

SEQ ID NO: 53940 - protein, 39 aa, Artificial Sequence; identical to SEQ ID NO: 15381
  GFR-binding peptide
  MOD_RES (3)..(4)..(37)..(39): Xaa is C or S
  MOD_RES (18)..(19)..(20)..(21)..(22): Xaa is A or G
  MOD_RES (23)..(24)..(25)..(26): Xaa is A or G or is absent

SEQ ID NO: 53941 - protein, 37 aa, Artificial Sequence; identical to SEQ ID NO: 15382
  GFR-binding peptide
  MOD_RES (6)..(7): Xaa is C or S

SEQ ID NO: 53942 - protein, 40 aa, Artificial Sequence
  GFR-binding peptide
  MOD_RES (2)..(39): Xaa is C or S
KXQPSRVHHEPLTVLYYEYVRKKPKLEQLSNRLEEHLEXA

SEQ ID NO: 53943 - protein, 32 aa, Artificial Sequence
  GFR-binding peptide
  MOD_RES (1)..(32): Xaa is C or S
XVPQALRSVKIAKVVGRKPKVKEVQVMIVRSX

SEQ ID NO: 53944 - protein, 34 aa, Artificial Sequence
  GFR-binding peptide
PSRVHHEPLPVVYYEYVRKKPKLEQLSNRLEEHL

SEQ ID NO: 53945 - protein, 33 aa, Artificial Sequence; identical to SEQ ID NO: 15384
  GFR-binding peptide
  MOD_RES (2)..(3): Xaa is C or S

SEQ ID NO: 53946 - protein, 40 aa, Artificial Sequence
  GFR-binding peptide
  MOD_RES (6)..(7)..(40): Xaa is C or S
  MOD_RES (21)..(22)..(23)..(24)..(25): Xaa is A or G
  MOD_RES (26)..(27)..(28)..(29): Xaa is A or G or is absent
ASASPXXVPQDLRSVKIAKVXXXXXXXXXKEVQVMVVKSX

SEQ ID NO: 53947 - protein, 38 aa, Artificial Sequence; identical to SEQ ID NO: 15388
  GFR-binding peptide
  MOD_RES (3)..(4)..(35)..(37): Xaa is C or S

SEQ ID NO: 53948 - protein, 42 aa, Artificial Sequence
  GFR-binding peptide
  MOD_RES (5)..(6)..(39)..(41): Xaa is C or S
  MOD_RES (20)..(21)..(22)..(23)..(24): Xaa is A or G
  MOD_RES (25)..(26)..(27)..(28): Xaa is A or G or is absent
SAAPXXVPQALSNITIQIMXXXXXXXXXIGEMSMIVRSXKXS

SEQ ID NO: 53949 - protein, 40 aa, Artificial Sequence
  GFR-binding peptide
  MOD_RES (5)..(6)..(40): Xaa is C or S
  MOD_RES (20)..(21)..(22)..(23)..(24): Xaa is A or G
  MOD_RES (25)..(26)..(27)..(28): Xaa is A or G or is absent
VPKPXXAPTQLRSVKVAKVXXXXXXXXXKEVQVNMVVRAX

SEQ ID NO: 53950 - protein, 38 aa, Artificial Sequence
  GFR-binding peptide
  MOD_RES (6)..(7)..(38): Xaa is C or S
ASAAPXXVPQALRSVKIAKVVGRKPKVKEVQVMIVRSX

SEQ ID NO: 53951 - protein, 42 aa, Artificial Sequence
  GFR-binding peptide
  MOD_RES (7)..(41): Xaa is C or S
  MOD_RES (21)..(22)..(23)..(24)..(25): Xaa is A or G
  MOD_RES (26)..(27)..(28)..(29): Xaa is A or G or is absent
NDEGLEXVPTEEEPLPMVYYXXXXXXXXXEQLSNFLQHNKXE

SEQ ID NO: 53952 - protein, 36 aa, Artificial Sequence
  GFR-binding peptide
  MOD_RES (1)..(34)..(36): Xaa is C or S
  MOD_RES (15)..(16)..(17)..(18)..(19): Xaa is A or G
  MOD_RES (20)..(21)..(22)..(23): Xaa is A or G or is absent
XVPQALRSVKIAKVXXXXXXXXXKEVQVMIVRSXKX

SEQ ID NO: 53953 - protein, 39 aa, Artificial Sequence; identical to SEQ ID NO: 38713
  GFR-binding peptide
  MOD_RES (4)..(5)..(38): Xaa is C or S
  MOD_RES (19)..(20)..(21)..(22)..(23): Xaa is A or G
  MOD_RES (24)..(25)..(26)..(27): Xaa is A or G or is absent

SEQ ID NO: 53954 - protein, 35 aa, Artificial Sequence
  GFR-binding peptide
  MOD_RES (1)..(35): Xaa is C or S
  MOD_RES (15)..(16)..(17)..(18)..(19): Xaa is A or G
  MOD_RES (20)..(21)..(22)..(23): Xaa is A or G or is absent
XVPTELRSVKMAKVXXXXXXXXXKEVQVDMVVEGX

SEQ ID NO: 53955 - protein, 34 aa, Artificial Sequence
  GFR-binding peptide
RPTQVQLEPLTVLYYEIVRKKPIFEQLSNTLEDH

SEQ ID NO: 53956 - protein, 32 aa, Artificial Sequence
  GFR-binding peptide
  MOD_RES (1)..(2): Xaa is C or S
XXVPTELRPVQMRKIDEYDKVVKKATVEMVVE

SEQ ID NO: 53957 - protein, 40 aa, Artificial Sequence
  GFR-binding peptide
  MOD_RES (37)..(39): Xaa is C or S
  MOD_RES (16)..(17)..(18)..(19)..(20): Xaa is A or G
  MOD_RES (21)..(22)..(23)..(24): Xaa is A or G or is absent
QPSRVHHEPLPVVYYXXXXXXXXXEQLSNRLEEHLEXAXA

SEQ ID NO: 53958 - protein, 32 aa, Artificial Sequence; identical to SEQ ID NO: 15394
  GFR-binding peptide
  MOD_RES (14)..(15)..(16)..(17)..(18): Xaa is A or G
  MOD_RES (19)..(20)..(21)..(22): Xaa is A or G or is absent

SEQ ID NO: 53959 - protein, 44 aa, Artificial Sequence; identical to SEQ ID NO: 18817
  GFR-binding peptide
  MOD_RES (4)..(41)..(43): Xaa is C or S

SEQ ID NO: 53960 - protein, 36 aa, Artificial Sequence
  GFR-binding peptide
  MOD_RES (3)..(4)..(36): Xaa is C or S
KAXXVPTELRPVQMRKIDENEKVVKKATVDMVVEGX

SEQ ID NO: 53961 - protein, 34 aa, Artificial Sequence; identical to SEQ ID NO: 15395
  GFR-binding peptide
  MOD_RES (3)..(4): Xaa is C or S

SEQ ID NO: 53962 - protein, 43 aa, Artificial Sequence; identical to SEQ ID NO: 18818
  GFR-binding peptide
  MOD_RES (5)..(42): Xaa is C or S

SEQ ID NO: 53963 - protein, 31 aa, Artificial Sequence
  GFR-binding peptide
VPTELSNITMQIMDENEKVVIGEMSDMVVEG

SEQ ID NO: 53964 - protein, 33 aa, Artificial Sequence
  GFR-binding peptide
  MOD_RES (14)..(15)..(16)..(17)..(18): Xaa is A or G
  MOD_RES (19)..(20)..(21)..(22): Xaa is A or G or is absent
VPTELRPVQMRKIXXXXXXXXXKKATVDMVVEG

SEQ ID NO: 53965 - protein, 41 aa, Artificial Sequence
  GFR-binding peptide
  MOD_RES (4)..(38)..(40): Xaa is C or S
  MOD_RES (18)..(19)..(20)..(21)..(22): Xaa is A or G
  MOD_RES (23)..(24)..(25)..(26): Xaa is A or G or is absent
GLEXVPTEEEPLTMLYYXXXXXXXXXEQLSNFLQHNKXEXR

SEQ ID NO: 53966 - protein, 36 aa, Artificial Sequence; identical to SEQ ID NO: 15397
  GFR-binding peptide
  MOD_RES (1)..(34)..(36): Xaa is C or S
  MOD_RES (15)..(16)..(17)..(18)..(19): Xaa is A or G
  MOD_RES (20)..(21)..(22)..(23): Xaa is A or G or is absent

SEQ ID NO: 53967 - protein, 41 aa, Artificial Sequence
  GFR-binding peptide
  MOD_RES (4)..(5)..(38)..(40): Xaa is C or S
  MOD_RES (19)..(20)..(21)..(22)..(23): Xaa is A or G
  MOD_RES (24)..(25)..(26)..(27): Xaa is A or G or is absent
AAPXXVPQALRPVQIRKIXXXXXXXXXKKATVMIVRSXKXS

SEQ ID NO: 53968 - protein, 36 aa, Artificial Sequence; identical to SEQ ID NO: 15399
  GFR-binding peptide
  MOD_RES (5)..(6): Xaa is C or S

SEQ ID NO: 53969 - protein, 36 aa, Artificial Sequence
  GFR-binding peptide
  MOD_RES (3)..(4)..(35): Xaa is C or S
SPXXVPQDLRPVQIRKIVGRTPKVKKATVMVVKSXK

SEQ ID NO: 53970 - protein, 34 aa, Artificial Sequence; identical to SEQ ID NO: 38731
  GFR-binding peptide
  MOD_RES (33)..(33): Xaa is C or S
  MOD_RES (14)..(15)..(16)..(17)..(18): Xaa is A or G
  MOD_RES (19)..(20)..(21)..(22): Xaa is A or G or is absent

SEQ ID NO: 53971 - protein, 41 aa, Artificial Sequence; identical to SEQ ID NO: 15402
  GFR-binding peptide
  MOD_RES (4)..(5)..(39)..(41): Xaa is C or S
  MOD_RES (19)..(20)..(21)..(22)..(23): Xaa is A or G
  MOD_RES (24)..(25)..(26)..(27): Xaa is A or G or is absent

SEQ ID NO: 53972 - protein, 32 aa, Artificial Sequence
  GFR-binding peptide
  MOD_RES (14)..(15)..(16)..(17)..(18): Xaa is A or G
  MOD_RES (19)..(20)..(21)..(22): Xaa is A or G or is absent
APTKLSNITVQIMXXXXXXXXXIGEMSNMVVR

SEQ ID NO: 53973 - protein, 33 aa, Artificial Sequence
  GFR-binding peptide
  MOD_RES (1)..(1): Xaa is C or S
  MOD_RES (15)..(16)..(17)..(18)..(19): Xaa is A or G
  MOD_RES (20)..(21)..(22)..(23): Xaa is A or G or is absent
XAPTKLRSVKVAKVXXXXXXXXXKEVQVNMVVR

SEQ ID NO: 53974 - protein, 37 aa, Artificial Sequence; identical to SEQ ID NO: 15405
  GFR-binding peptide
  MOD_RES (1)..(2)..(35)..(37): Xaa is C or S
  MOD_RES (16)..(17)..(18)..(19)..(20): Xaa is A or G
  MOD_RES (21)..(22)..(23)..(24): Xaa is A or G or is absent

SEQ ID NO: 53975 - protein, 40 aa, Artificial Sequence; identical to SEQ ID NO: 15406
  GFR-binding peptide
  MOD_RES (2)..(3)..(37)..(39): Xaa is C or S
  MOD_RES (17)..(18)..(19)..(20)..(21): Xaa is A or G
  MOD_RES (22)..(23)..(24)..(25): Xaa is A or G or is absent

SEQ ID NO: 53976 - protein, 37 aa, Artificial Sequence
  GFR-binding peptide
  MOD_RES (5)..(5): Xaa is C or S
  MOD_RES (19)..(20)..(21)..(22)..(23): Xaa is A or G
  MOD_RES (24)..(25)..(26)..(27): Xaa is A or G or is absent
TKPTXAPTKLRPVQVRKIXXXXXXXXXKKATVNMVVR

SEQ ID NO: 53977 - protein, 37 aa, Artificial Sequence
  GFR-binding peptide
  MOD_RES (5)..(5): Xaa is C or S
  MOD_RES (19)..(20)..(21)..(22)..(23): Xaa is A or G
  MOD_RES (24)..(25)..(26)..(27): Xaa is A or G or is absent
TKPTXAPTKLRSVKVAKVXXXXXXXXXKEVQVNMVVR

SEQ ID NO: 53978 - protein, 38 aa, Artificial Sequence
  GFR-binding peptide
  MOD_RES (2)..(3)..(35)..(37): Xaa is C or S
PXXAPTQLSNITVQIMDDSSNVIIGEMSNMVVRAXGXH

SEQ ID NO: 53979 - protein, 36 aa, Artificial Sequence
  GFR-binding peptide
  MOD_RES (33)..(35): Xaa is C or S
  MOD_RES (14)..(15)..(16)..(17)..(18): Xaa is A or G
  MOD_RES (19)..(20)..(21)..(22): Xaa is A or G or is absent
VPQDLSNITIQIMXXXXXXXXXIGEMSMVVKSXKXS

SEQ ID NO: 53980 - protein, 31 aa, Artificial Sequence
  GFR-binding peptide
VPTELSNITMQIMDEYDKVVIGEMSEMVVEG

SEQ ID NO: 53981 - protein, 43 aa, Artificial Sequence; identical to SEQ ID NO: 15414
  GFR-binding peptide
  MOD_RES (5)..(6)..(40)..(42): Xaa is C or S
  MOD_RES (20)..(21)..(22)..(23)..(24): Xaa is A or G
  MOD_RES (25)..(26)..(27)..(28): Xaa is A or G or is absent

SEQ ID NO: 53982 - protein, 37 aa, Artificial Sequence; identical to SEQ ID NO: 18824
  GFR-binding peptide
  MOD_RES (3)..(3): Xaa is C or S

SEQ ID NO: 53983 - protein, 38 aa, Artificial Sequence
  GFR-binding peptide
  MOD_RES (1)..(35)..(37): Xaa is C or S
  MOD_RES (15)..(16)..(17)..(18)..(19): Xaa is A or G
  MOD_RES (20)..(21)..(22)..(23): Xaa is A or G or is absent
XVPTELRPVQMRKIXXXXXXXXXKKATVEMVVEGXGXR

SEQ ID NO: 53984 - protein, 43 aa, Artificial Sequence
  GFR-binding peptide
  MOD_RES (6)..(40)..(42): Xaa is C or S
  MOD_RES (20)..(21)..(22)..(23)..(24): Xaa is A or G
  MOD_RES (25)..(26)..(27)..(28): Xaa is A or G or is absent
VTKPTXAPTKLRPVQVRKIXXXXXXXXXKKATVNMVVRSXGXH

SEQ ID NO: 53985 - protein, 41 aa, Artificial Sequence
  GFR-binding peptide
  MOD_RES (5)..(39)..(41): Xaa is C or S
  MOD_RES (19)..(20)..(21)..(22)..(23): Xaa is A or G
  MOD_RES (24)..(25)..(26)..(27): Xaa is A or G or is absent
TKPTXAPTKLRPVQVRKIXXXXXXXXXKKATVNMVVRSXGX

SEQ ID NO: 53986 - protein, 34 aa, Artificial Sequence; identical to SEQ ID NO: 18827
  GFR-binding peptide

SEQ ID NO: 53987 - protein, 36 aa, Artificial Sequence; identical to SEQ ID NO: 15417
  GFR-binding peptide
  MOD_RES (1)..(2)..(36): Xaa is C or S
  MOD_RES (16)..(17)..(18)..(19)..(20): Xaa is A or G
  MOD_RES (21)..(22)..(23)..(24): Xaa is A or G or is absent

SEQ ID NO: 53988 - protein, 39 aa, Artificial Sequence
  GFR-binding peptide
  MOD_RES (6)..(7)..(39): Xaa is C or S
TVPKPXXAPTQLSNITVQIMDDSSNVIIGEMSNMVVRAX

SEQ ID NO: 53989 - protein, 43 aa, Artificial Sequence
  GFR-binding peptide
  MOD_RES (6)..(7)..(40)..(42): Xaa is C or S
  MOD_RES (21)..(22)..(23)..(24)..(25): Xaa is A or G
  MOD_RES (26)..(27)..(28)..(29): Xaa is A or G or is absent
ASASPXXVPQDLRPVQIRKIXXXXXXXXXKKATVMVVKSXKXS

SEQ ID NO: 53990 - protein, 36 aa, Artificial Sequence
  GFR-binding peptide
  MOD_RES (1)..(1): Xaa is C or S
XRPTQVQLEPLTVLYYEIVRKKPIFEQLSNTLEDHL

SEQ ID NO: 53991 - protein, 40 aa, Artificial Sequence
  GFR-binding peptide
  MOD_RES (37)..(39): Xaa is C or S
RPTQVQLEPLTVLYYEIVRKKPIFEQLSNTLEDHLAXKXE

SEQ ID NO: 53992 - protein, 44 aa, Artificial Sequence; identical to SEQ ID NO: 15421
  GFR-binding peptide
  MOD_RES (7)..(41)..(43): Xaa is C or S
  MOD_RES (21)..(22)..(23)..(24)..(25): Xaa is A or G
  MOD_RES (26)..(27)..(28)..(29): Xaa is A or G or is absent

SEQ ID NO: 53993 - protein, 33 aa, Artificial Sequence
  GFR-binding peptide
  MOD_RES (1)..(1): Xaa is C or S
  MOD_RES (15)..(16)..(17)..(18)..(19): Xaa is A or G
  MOD_RES (20)..(21)..(22)..(23): Xaa is A or G or is absent
XAPTKLRPVQVRKIXXXXXXXXXKKATVNMVVR

SEQ ID NO: 53994 - protein, 39 aa, Artificial Sequence; identical to SEQ ID NO: 15422
  GFR-binding peptide
  MOD_RES (6)..(7)..(38): Xaa is C or S

SEQ ID NO: 53995 - protein, 37 aa, Artificial Sequence
  GFR-binding peptide
  MOD_RES (1)..(2)..(34)..(36): Xaa is C or S
XXVPTELRSVKMAKVDEYDKVVKEVQVEMVVEGXGXR

SEQ ID NO: 53996 - protein, 42 aa, Artificial Sequence
  GFR-binding peptide
  MOD_RES (4)..(41): Xaa is C or S
  MOD_RES (20)..(21)..(22)..(23)..(24): Xaa is A or G
  MOD_RES (25)..(26)..(27)..(28): Xaa is A or G or is absent
SVKXQPSRVHHEPLTVLYYXXXXXXXXXEQLSNRLEEHLEXA

SEQ ID NO: 53997 - protein, 34 aa, Artificial Sequence
  GFR-binding peptide
  MOD_RES (1)..(2): Xaa is C or S
  MOD_RES (16)..(17)..(18)..(19)..(20): Xaa is A or G
  MOD_RES (21)..(22)..(23)..(24): Xaa is A or G or is absent
XXAPTQLSNITVQIMXXXXXXXXXIGEMSNMVVR

SEQ ID NO: 53998 - protein, 32 aa, Artificial Sequence
  GFR-binding peptide
  MOD_RES (1)..(2): Xaa is C or S
XXVPQALRPVQIRKIVGRKPKVKKATVMIVRS

SEQ ID NO: 53999 - protein, 40 aa, Artificial Sequence
  GFR-binding peptide
  MOD_RES (2)..(39): Xaa is C or S
QXRPTQVQLEPLTVLYYEIVRKKPIFEQLSNTLEDHLAXK

SEQ ID NO: 54000 - protein, 36 aa, Artificial Sequence; identical to SEQ ID NO: 18834
  GFR-binding peptide
  MOD_RES (36)..(36): Xaa is C or S
  MOD_RES (15)..(16)..(17)..(18)..(19): Xaa is A or G
  MOD_RES (20)..(21)..(22)..(23): Xaa is A or G or is absent

SEQ ID NO: 54001 - protein, 41 aa, Artificial Sequence
  GFR-binding peptide
  MOD_RES (4)..(38)..(40): Xaa is C or S
  MOD_RES (18)..(19)..(20)..(21)..(22): Xaa is A or G
  MOD_RES (23)..(24)..(25)..(26): Xaa is A or G or is absent
KPTXAPTKLSNITVQIMXXXXXXXXXIGEMSNMVVRSXGXH

SEQ ID NO: 54002 - protein, 40 aa, Artificial Sequence; identical to SEQ ID NO: 15429
  GFR-binding peptide
  MOD_RES (4)..(5)..(39): Xaa is C or S
  MOD_RES (19)..(20)..(21)..(22)..(23): Xaa is A or G
  MOD_RES (24)..(25)..(26)..(27): Xaa is A or G or is absent

SEQ ID NO: 54003 - protein, 41 aa, Artificial Sequence; identical to SEQ ID NO: 18836
  GFR-binding peptide
  MOD_RES (3)..(40): Xaa is C or S
  MOD_RES (19)..(20)..(21)..(22)..(23): Xaa is A or G
  MOD_RES (24)..(25)..(26)..(27): Xaa is A or G or is absent

SEQ ID NO: 54004 - protein, 38 aa, Artificial Sequence; identical to SEQ ID NO: 15430
  GFR-binding peptide
  MOD_RES (3)..(4)..(37): Xaa is C or S
  MOD_RES (18)..(19)..(20)..(21)..(22): Xaa is A or G
  MOD_RES (23)..(24)..(25)..(26): Xaa is A or G or is absent

SEQ ID NO: 54005 - protein, 40 aa, Artificial Sequence
  GFR-binding peptide
  MOD_RES (6)..(7)..(39): Xaa is C or S
YVPKPXXAPTKLRPVQVRKIDDSSNVIKKATVNMVVRSXG

SEQ ID NO: 54006 - protein, 38 aa, Artificial Sequence
  GFR-binding peptide
  MOD_RES (2)..(3)..(35)..(37): Xaa is C or S
AXXVPTELSNITMQIMDEYDKVVIGEMSEMVVEGXGXR

SEQ ID NO: 54007 - protein, 37 aa, Artificial Sequence
  GFR-binding peptide
  MOD_RES (37)..(37): Xaa is C or S
  MOD_RES (16)..(17)..(18)..(19)..(20): Xaa is A or G
  MOD_RES (21)..(22)..(23)..(24): Xaa is A or G or is absent
QPSRVHHEPLPVVYYXXXXXXXXXEQLSNRLEEHLEX

SEQ ID NO: 54008 - protein, 38 aa, Artificial Sequence; identical to SEQ ID NO: 18841
  GFR-binding peptide
  MOD_RES (1)..(38): Xaa is C or S

SEQ ID NO: 54009 - protein, 38 aa, Artificial Sequence
  GFR-binding peptide
  MOD_RES (1)..(35)..(37): Xaa is C or S
  MOD_RES (15)..(16)..(17)..(18)..(19): Xaa is A or G
  MOD_RES (20)..(21)..(22)..(23): Xaa is A or G or is absent
XVPTELRSVKMAKVXXXXXXXXXKEVQVDMVVEGXGXR

SEQ ID NO: 54010 - protein, 35 aa, Artificial Sequence; identical to SEQ ID NO: 15433
  GFR-binding peptide
  MOD_RES (3)..(4): Xaa is C or S

SEQ ID NO: 54011 - protein, 36 aa, Artificial Sequence; identical to SEQ ID NO: 15434
  GFR-binding peptide
  MOD_RES (5)..(6): Xaa is C or S

SEQ ID NO: 54012 - protein, 39 aa, Artificial Sequence
  GFR-binding peptide
  MOD_RES (6)..(7): Xaa is C or S
  MOD_RES (21)..(22)..(23)..(24)..(25): Xaa is A or G
  MOD_RES (26)..(27)..(28)..(29): Xaa is A or G or is absent
ASAAPXXVPQALSNITIQIMXXXXXXXXXIGEMSMIVRS

SEQ ID NO: 54013 - protein, 35 aa, Artificial Sequence
  GFR-binding peptide
  MOD_RES (1)..(32)..(34): Xaa is C or S
XVPQDLRSVKIAKVVGRTPKVKEVQVMVVKSXKXS

SEQ ID NO: 54014 - protein, 41 aa, Artificial Sequence; identical to SEQ ID NO: 18844
  GFR-binding peptide
  MOD_RES (3)..(40): Xaa is C or S
  MOD_RES (19)..(20)..(21)..(22)..(23): Xaa is A or G
  MOD_RES (24)..(25)..(26)..(27): Xaa is A or G or is absent

SEQ ID NO: 54015 - protein, 43 aa, Artificial Sequence; identical to SEQ ID NO: 18847
  GFR-binding peptide
  MOD_RES (7)..(41)..(43): Xaa is C or S
  MOD_RES (21)..(22)..(23)..(24)..(25): Xaa is A or G
  MOD_RES (26)..(27)..(28)..(29): Xaa is A or G or is absent

SEQ ID NO: 54016 - protein, 41 aa, Artificial Sequence; identical to SEQ ID NO: 15437
  GFR-binding peptide
  MOD_RES (5)..(6)..(40): Xaa is C or S
  MOD_RES (20)..(21)..(22)..(23)..(24): Xaa is A or G
  MOD_RES (25)..(26)..(27)..(28): Xaa is A or G or is absent

SEQ ID NO: 54017 - protein, 32 aa, Artificial Sequence; identical to SEQ ID NO: 15438
  GFR-binding peptide
  MOD_RES (32)..(32): Xaa is C or S

SEQ ID NO: 54018 - protein, 33 aa, Artificial Sequence; identical to SEQ ID NO: 18848
  GFR-binding peptide
  MOD_RES (1)..(1): Xaa is C or S

SEQ ID NO: 54019 - protein, 32 aa, Artificial Sequence; identical to SEQ ID NO: 15441
  GFR-binding peptide
  MOD_RES (1)..(1): Xaa is C or S

SEQ ID NO: 54020 - protein, 37 aa, Artificial Sequence
  GFR-binding peptide
  MOD_RES (4)..(5)..(36): Xaa is C or S
AAPXXVPQALRPVQIRKIVGRKPKVKKATVMIVRSXK

SEQ ID NO: 54021 - protein, 37 aa, Artificial Sequence; identical to SEQ ID NO: 18849
  GFR-binding peptide
  MOD_RES (1)..(1): Xaa is C or S
  MOD_RES (17)..(18)..(19)..(20)..(21): Xaa is A or G
  MOD_RES (22)..(23)..(24)..(25): Xaa is A or G or is absent

SEQ ID NO: 54022 - protein, 39 aa, Artificial Sequence; identical to SEQ ID NO: 15443
  GFR-binding peptide
  MOD_RES (3)..(4)..(36)..(38): Xaa is C or S

SEQ ID NO: 54023 - protein, 41 aa, Artificial Sequence; identical to SEQ ID NO: 18851
  GFR-binding peptide
  MOD_RES (6)..(40): Xaa is C or S

SEQ ID NO: 54024 - protein, 36 aa, Artificial Sequence
  GFR-binding peptide
  MOD_RES (1)..(35): Xaa is C or S
  MOD_RES (15)..(16)..(17)..(18)..(19): Xaa is A or G
  MOD_RES (20)..(21)..(22)..(23): Xaa is A or G or is absent
XAPTQLRSVKVAKVXXXXXXXXXKEVQVNMVVRAXG

SEQ ID NO: 54025 - protein, 40 aa, Artificial Sequence
  GFR-binding peptide
  MOD_RES (4)..(5)..(39): Xaa is C or S
  MOD_RES (19)..(20)..(21)..(22)..(23): Xaa is A or G
  MOD_RES (24)..(25)..(26)..(27): Xaa is A or G or is absent
PKPXXAPTQLRPVQVRKIXXXXXXXXXKKATVNMVVRAXG

SEQ ID NO: 54026 - protein, 34 aa, Artificial Sequence
  GFR-binding peptide
  MOD_RES (34)..(34): Xaa is C or S
  MOD_RES (14)..(15)..(16)..(17)..(18): Xaa is A or G
  MOD_RES (19)..(20)..(21)..(22): Xaa is A or G or is absent
VPTELSNITMQIMXXXXXXXXXIGEMSDMVVEGX

SEQ ID NO: 54027 - protein, 34 aa, Artificial Sequence
  GFR-binding peptide
  MOD_RES (3)..(4): Xaa is C or S
KAXXVPTELRSVKMAKVDENEKVVKEVQVDMVVE

SEQ ID NO: 54028 - protein, 41 aa, Artificial Sequence
  GFR-binding peptide
  MOD_RES (3)..(4)..(38)..(40): Xaa is C or S
  MOD_RES (18)..(19)..(20)..(21)..(22): Xaa is A or G
  MOD_RES (23)..(24)..(25)..(26): Xaa is A or G or is absent
KPXXAPTKLRPVQVRKIXXXXXXXXXKKATVNMVVRSXGXH

SEQ ID NO: 54029 - protein, 38 aa, Artificial Sequence
  GFR-binding peptide
  MOD_RES (5)..(6)..(37): Xaa is C or S
SAAPXXVPQALSNITIQIMVGRKPKVIGEMSMIVRSXK

SEQ ID NO: 54030 - protein, 34 aa, Artificial Sequence
  GFR-binding peptide
  MOD_RES (16)..(17)..(18)..(19)..(20): Xaa is A or G
  MOD_RES (21)..(22)..(23)..(24): Xaa is A or G or is absent
QPSRVHHEPLPVVYYXXXXXXXXXEQLSNRLEEH

SEQ ID NO: 54031 - protein, 36 aa, Artificial Sequence
  GFR-binding peptide
  MOD_RES (1)..(33)..(35): Xaa is C or S
XAPTKLSNITVQIMDDSSNVIIGEMSNMVVRSXGXH

SEQ ID NO: 54032 - protein, 43 aa, Artificial Sequence; identical to SEQ ID NO: 15451
  GFR-binding peptide
  MOD_RES (6)..(7)..(41)..(43): Xaa is C or S
  MOD_RES (21)..(22)..(23)..(24)..(25): Xaa is A or G
  MOD_RES (26)..(27)..(28)..(29): Xaa is A or G or is absent

SEQ ID NO: 54033 - protein, 43 aa, Artificial Sequence
  GFR-binding peptide
  MOD_RES (4)..(41)..(43): Xaa is C or S
NVQXRPTQVQLEPLPVVYYEIVRKKPIFEQLSNTLEDHLAXKX

SEQ ID NO: 54034 - protein, 34 aa, Artificial Sequence; identical to SEQ ID NO: 15452
  GFR-binding peptide
  MOD_RES (32)..(34): Xaa is C or S

SEQ ID NO: 54035 - protein, 42 aa, Artificial Sequence
  GFR-binding peptide
  MOD_RES (6)..(7)..(41): Xaa is C or S
  MOD_RES (21)..(22)..(23)..(24)..(25): Xaa is A or G
  MOD_RES (26)..(27)..(28)..(29): Xaa is A or G or is absent
TVPKPXXAPTQLRPVQVRKIXXXXXXXXXKKATVNMVVRAXG

SEQ ID NO: 54036 - protein, 36 aa, Artificial Sequence; identical to SEQ ID NO: 15456
  GFR-binding peptide
  MOD_RES (2)..(3)..(34)..(36): Xaa is C or S

SEQ ID NO: 54037 - protein, 42 aa, Artificial Sequence; identical to SEQ ID NO: 15459
  GFR-binding peptide
  MOD_RES (6)..(7)..(39)..(41): Xaa is C or S

SEQ ID NO: 54038 - protein, 44 aa, Artificial Sequence; identical to SEQ ID NO: 18857
  GFR-binding peptide
  MOD_RES (4)..(41)..(43): Xaa is C or S
  MOD_RES (20)..(21)..(22)..(23)..(24): Xaa is A or G
  MOD_RES (25)..(26)..(27)..(28): Xaa is A or G or is absent

SEQ ID NO: 54039 - protein, 36 aa, Artificial Sequence; identical to SEQ ID NO: 18858
  GFR-binding peptide
  MOD_RES (34)..(36): Xaa is C or S

SEQ ID NO: 54040 - protein, 35 aa, Artificial Sequence
  GFR-binding peptide
PTQVQLEPLTVLYYEIVRKKPIFEQLSNTLEDHLA

SEQ ID NO: 54041 - protein, 38 aa, Artificial Sequence
  GFR-binding peptide
  MOD_RES (5)..(6)..(38): Xaa is C or S
VPKPXXAPTQLSNITVQIMDDSSNVIIGEMSNMVVRAX

SEQ ID NO: 54042 - protein, 35 aa, Artificial Sequence
  GFR-binding peptide
  MOD_RES (2)..(34): Xaa is C or S
TXAPTKLSNITVQIMDDSSNVIIGEMSNMVVRSXG

SEQ ID NO: 54043 - protein, 38 aa, Artificial Sequence; identical to SEQ ID NO: 18864
  GFR-binding peptide
  MOD_RES (37)..(37): Xaa is C or S
  MOD_RES (16)..(17)..(18)..(19)..(20): Xaa is A or G
  MOD_RES (21)..(22)..(23)..(24): Xaa is A or G or is absent

SEQ ID NO: 54044 - protein, 39 aa, Artificial Sequence
  GFR-binding peptide
  MOD_RES (4)..(5)..(37)..(39): Xaa is C or S
PKAXXVPTELRPVQMRKIDEYDKVVKKATVEMVVEGXGX

SEQ ID NO: 54045 - protein, 35 aa, Artificial Sequence
  GFR-binding peptide
  MOD_RES (33)..(35): Xaa is C or S
  MOD_RES (14)..(15)..(16)..(17)..(18): Xaa is A or G
  MOD_RES (19)..(20)..(21)..(22): Xaa is A or G or is absent
VSQDLSNITIQIMXXXXXXXXXIGEMSMIVKSXKX

SEQ ID NO: 54046 - protein, 38 aa, Artificial Sequence; identical to SEQ ID NO: 15465
  GFR-binding peptide
  MOD_RES (2)..(3)..(35)..(37): Xaa is C or S

SEQ ID NO: 54047 - protein, 37 aa, Artificial Sequence
  GFR-binding peptide
  MOD_RES (1)..(1): Xaa is C or S
  MOD_RES (17)..(18)..(19)..(20)..(21): Xaa is A or G
  MOD_RES (22)..(23)..(24)..(25): Xaa is A or G or is absent
XRPTQVQLEPLPVVYYXXXXXXXXXEQLSNTLEDHLA

SEQ ID NO: 54048 - protein, 36 aa, Artificial Sequence
  GFR-binding peptide
  MOD_RES (2)..(36): Xaa is C or S
  MOD_RES (16)..(17)..(18)..(19)..(20): Xaa is A or G
  MOD_RES (21)..(22)..(23)..(24): Xaa is A or G or is absent
TXAPTKLRPVQVRKIXXXXXXXXXKKATVNMVVRSX

SEQ ID NO: 54049 - protein, 35 aa, Artificial Sequence; identical to SEQ ID NO: 15469
  GFR-binding peptide
  MOD_RES (2)..(3): Xaa is C or S
  MOD_RES (17)..(18)..(19)..(20)..(21): Xaa is A or G
  MOD_RES (22)..(23)..(24)..(25): Xaa is A or G or is absent

SEQ ID NO: 54050 - protein, 34 aa, Artificial Sequence
  GFR-binding peptide
  MOD_RES (34)..(34): Xaa is C or S
  MOD_RES (14)..(15)..(16)..(17)..(18): Xaa is A or G
  MOD_RES (19)..(20)..(21)..(22): Xaa is A or G or is absent
VPTEEEPLTMLYYXXXXXXXXXEQLSNFLQHNKX

SEQ ID NO: 54051 - protein, 37 aa, Artificial Sequence
  GFR-binding peptide
  MOD_RES (3)..(4)..(36): Xaa is C or S
KAXXVPTELRSVKMAKVDENEKVVKEVQVDMVVEGXG

SEQ ID NO: 54052 - protein, 39 aa, Artificial Sequence
  GFR-binding peptide
  MOD_RES (5)..(6)..(37)..(39): Xaa is C or S
SAAPXXVPQALRPVQIRKIVGRKPKVKKATVMIVRSXKX

SEQ ID NO: 54053 - protein, 35 aa, Artificial Sequence; identical to SEQ ID NO: 15472
  GFR-binding peptide
  MOD_RES (2)..(3): Xaa is C or S
  MOD_RES (17)..(18)..(19)..(20)..(21): Xaa is A or G
  MOD_RES (22)..(23)..(24)..(25): Xaa is A or G or is absent

SEQ ID NO: 54054 - protein, 35 aa, Artificial Sequence; identical to SEQ ID NO: 15474
  GFR-binding peptide
  MOD_RES (2)..(3): Xaa is C or S
  MOD_RES (17)..(18)..(19)..(20)..(21): Xaa is A or G
  MOD_RES (22)..(23)..(24)..(25): Xaa is A or G or is absent

SEQ ID NO: 54055 - protein, 38 aa, Artificial Sequence
  GFR-binding peptide
  MOD_RES (1)..(35)..(37): Xaa is C or S
XVPTEEEPLTMLYYRIKPHQGQHEQLSNFLQHNKXEXR

SEQ ID NO: 54056 - protein, 42 aa, Artificial Sequence; identical to SEQ ID NO: 38843
  GFR-binding peptide
  MOD_RES (6)..(7)..(40)..(42): Xaa is C or S
  MOD_RES (21)..(22)..(23)..(24)..(25): Xaa is A or G
  MOD_RES (26)..(27)..(28)..(29): Xaa is A or G or is absent

SEQ ID NO: 54057 - protein, 36 aa, Artificial Sequence
  GFR-binding peptide
  MOD_RES (3)..(3): Xaa is C or S
  MOD_RES (17)..(18)..(19)..(20)..(21): Xaa is A or G
  MOD_RES (22)..(23)..(24)..(25): Xaa is A or G or is absent
PTXAPTKLSNITVQIMXXXXXXXXXIGEMSNMVVRS

SEQ ID NO: 54058 - protein, 39 aa, Artificial Sequence
  GFR-binding peptide
  MOD_RES (37)..(39): Xaa is C or S
  MOD_RES (16)..(17)..(18)..(19)..(20): Xaa is A or G
  MOD_RES (21)..(22)..(23)..(24): Xaa is A or G or is absent
RPTQVQLEPLPVVYYXXXXXXXXXEQLSNTLEDHLAXKX

SEQ ID NO: 54059 - protein, 41 aa, Artificial Sequence; identical to SEQ ID NO: 15477
  GFR-binding peptide
  MOD_RES (5)..(6)..(39)..(41): Xaa is C or S
  MOD_RES (20)..(21)..(22)..(23)..(24): Xaa is A or G
  MOD_RES (25)..(26)..(27)..(28): Xaa is A or G or is absent

SEQ ID NO: 54060 - protein, 39 aa, Artificial Sequence
  GFR-binding peptide
  MOD_RES (6)..(7): Xaa is C or S
  MOD_RES (21)..(22)..(23)..(24)..(25): Xaa is A or G
  MOD_RES (26)..(27)..(28)..(29): Xaa is A or G or is absent
KIPKAXXVPTELSNITMQIMXXXXXXXXXIGEMSDMVVE

SEQ ID NO: 54061 - protein, 36 aa, Artificial Sequence; identical to SEQ ID NO: 15479
  GFR-binding peptide
  MOD_RES (2)..(34)..(36): Xaa is C or S

SEQ ID NO: 54062 - protein, 37 aa, Artificial Sequence; identical to SEQ ID NO: 18878
  GFR-binding peptide
  MOD_RES (3)..(37): Xaa is C or S
  MOD_RES (17)..(18)..(19)..(20)..(21): Xaa is A or G
  MOD_RES (22)..(23)..(24)..(25): Xaa is A or G or is absent

SEQ ID NO: 54063 - protein, 33 aa, Artificial Sequence; identical to SEQ ID NO: 15481
  GFR-binding peptide
  MOD_RES (33)..(33): Xaa is C or S
  MOD_RES (14)..(15)..(16)..(17)..(18): Xaa is A or G
  MOD_RES (19)..(20)..(21)..(22): Xaa is A or G or is absent

SEQ ID NO: 54064 - protein, 39 aa, Artificial Sequence; identical to SEQ ID NO: 18879
  GFR-binding peptide
  MOD_RES (3)..(3): Xaa is C or S
  MOD_RES (19)..(20)..(21)..(22)..(23): Xaa is A or G
  MOD_RES (24)..(25)..(26)..(27): Xaa is A or G or is absent

SEQ ID NO: 54065 - protein, 36 aa, Artificial Sequence
  GFR-binding peptide
  MOD_RES (6)..(6): Xaa is C or S
VTKPTXAPTKLRSVKVAKVDDSSNVIKEVQVNMVVR

SEQ ID NO: 54066 - protein, 40 aa, Artificial Sequence
  GFR-binding peptide
  MOD_RES (5)..(5): Xaa is C or S
  MOD_RES (21)..(22)..(23)..(24)..(25): Xaa is A or G
  MOD_RES (26)..(27)..(28)..(29): Xaa is A or G or is absent
RNVQXRPTQVQLEPLPVVYYXXXXXXXXXEQLSNTLEDHL

SEQ ID NO: 54067 - protein, 36 aa, Artificial Sequence; identical to SEQ ID NO: 15482
  GFR-binding peptide
  MOD_RES (2)..(3): Xaa is C or S
  MOD_RES (17)..(18)..(19)..(20)..(21): Xaa is A or G
  MOD_RES (22)..(23)..(24)..(25): Xaa is A or G or is absent

SEQ ID NO: 54068 - protein, 39 aa, Artificial Sequence
  GFR-binding peptide
  MOD_RES (4)..(38): Xaa is C or S
  MOD_RES (18)..(19)..(20)..(21)..(22): Xaa is A or G
  MOD_RES (23)..(24)..(25)..(26): Xaa is A or G or is absent
GLEXVPTEEEPLTMLYYXXXXXXXXXEQLSNFLQHNKXE

SEQ ID NO: 54069 - protein, 42 aa, Artificial Sequence
  GFR-binding peptide
  MOD_RES (4)..(5)..(39)..(41): Xaa is C or S
  MOD_RES (19)..(20)..(21)..(22)..(23): Xaa is A or G
  MOD_RES (24)..(25)..(26)..(27): Xaa is A or G or is absent
PKAXXVPTELSNITMQIMXXXXXXXXXIGEMSDMVVEGXGXR

SEQ ID NO: 54070 - protein, 36 aa, Artificial Sequence
  GFR-binding peptide
  MOD_RES (5)..(6): Xaa is C or S
IPKAXXVPTELRPVQMRKIDENEKVVKKATVDMVVE

SEQ ID NO: 54071 - protein, 39 aa, Artificial Sequence; identical to SEQ ID NO: 18882
  GFR-binding peptide
  MOD_RES (4)..(4): Xaa is C or S

SEQ ID NO: 54072 - protein, 35 aa, Artificial Sequence
  GFR-binding peptide
  MOD_RES (1)..(35): Xaa is C or S
XVPTEEEPLPMVYYRIKPHQGQHEQLSNFLQHNKX

SEQ ID NO: 54073 - protein, 38 aa, Artificial Sequence
  GFR-binding peptide
  MOD_RES (2)..(3)..(37): Xaa is C or S
  MOD_RES (17)..(18)..(19)..(20)..(21): Xaa is A or G
  MOD_RES (22)..(23)..(24)..(25): Xaa is A or G or is absent
AXXVPTELRSVKMAKVXXXXXXXXXKEVQVEMVVEGXG

SEQ ID NO: 54074 - protein, 37 aa, Artificial Sequence; identical to SEQ ID NO: 18884
  GFR-binding peptide
  MOD_RES (2)..(36): Xaa is C or S

SEQ ID NO: 54075 - protein, 37 aa, Artificial Sequence; identical to SEQ ID NO: 15491
  GFR-binding peptide
  MOD_RES (2)..(3)..(34)..(36): Xaa is C or S

SEQ ID NO: 54076 - protein, 37 aa, Artificial Sequence; identical to SEQ ID NO: 15492
  GFR-binding peptide
  MOD_RES (3)..(4)..(36): Xaa is C or S

SEQ ID NO: 54077 - protein, 37 aa, Artificial Sequence; identical to SEQ ID NO: 18887
  GFR-binding peptide
  MOD_RES (2)..(36): Xaa is C or S
  MOD_RES (16)..(17)..(18)..(19)..(20): Xaa is A or G
  MOD_RES (21)..(22)..(23)..(24): Xaa is A or G or is absent

SEQ ID NO: 54078 - protein, 36 aa, Artificial Sequence; identical to SEQ ID NO: 15496
  GFR-binding peptide
  MOD_RES (3)..(3): Xaa is C or S
  MOD_RES (17)..(18)..(19)..(20)..(21): Xaa is A or G
  MOD_RES (22)..(23)..(24)..(25): Xaa is A or G or is absent

SEQ ID NO: 54079 - protein, 37 aa, Artificial Sequence; identical to SEQ ID NO: 15497
  GFR-binding peptide
  MOD_RES (3)..(4)..(36): Xaa is C or S

SEQ ID NO: 54080 - protein, 40 aa, Artificial Sequence
  GFR-binding peptide
  MOD_RES (5)..(6)..(37)..(39): Xaa is C or S
SAAPXXVPQALRSVKIAKVVGRKPKVKEVQVMIVRSXKXS

SEQ ID NO: 54081 - protein, 38 aa, Artificial Sequence; identical to SEQ ID NO: 15502
  GFR-binding peptide
  MOD_RES (6)..(7)..(38): Xaa is C or S

SEQ ID NO: 54082 - protein, 36 aa, Artificial Sequence
  GFR-binding peptide
  MOD_RES (2)..(3)..(36): Xaa is C or S
  MOD_RES (17)..(18)..(19)..(20)..(21): Xaa is A or G
  MOD_RES (22)..(23)..(24)..(25): Xaa is A or G or is absent
PXXVPQALRPVQIRKIXXXXXXXXXKKATVMIVRSX

SEQ ID NO: 54083 - protein, 34 aa, Artificial Sequence; identical to SEQ ID NO: 18893
  GFR-binding peptide

SEQ ID NO: 54084 - protein, 38 aa, Artificial Sequence
  GFR-binding peptide
  MOD_RES (2)..(3)..(37): Xaa is C or S
  MOD_RES (17)..(18)..(19)..(20)..(21): Xaa is A or G
  MOD_RES (22)..(23)..(24)..(25): Xaa is A or G or is absent
PXXAPTKLRPVQVRKIXXXXXXXXXKKATVNMVVRSXG

SEQ ID NO: 54085 - protein, 41 aa, Artificial Sequence; identical to SEQ ID NO: 15503
  GFR-binding peptide
  MOD_RES (4)..(5)..(38)..(40): Xaa is C or S
  MOD_RES (19)..(20)..(21)..(22)..(23): Xaa is A or G
  MOD_RES (24)..(25)..(26)..(27): Xaa is A or G or is absent

SEQ ID NO: 54086 - protein, 40 aa, Artificial Sequence; identical to SEQ ID NO: 18895
  GFR-binding peptide
  MOD_RES (4)..(4): Xaa is C or S

SEQ ID NO: 54087 - protein, 42 aa, Artificial Sequence
  GFR-binding peptide
  MOD_RES (2)..(39)..(41): Xaa is C or S
KXQPSRVHHEPLPVVYYEYVRKKPKLEQLSNRLEEHLEXAXA

SEQ ID NO: 54088 - protein, 31 aa, Artificial Sequence; identical to SEQ ID NO: 15504
  GFR-binding peptide
  MOD_RES (1)..(1): Xaa is C or S

SEQ ID NO: 54089 - protein, 35 aa, Artificial Sequence
  GFR-binding peptide
  MOD_RES (1)..(2)..(35): Xaa is C or S
  MOD_RES (16)..(17)..(18)..(19)..(20): Xaa is A or G
  MOD_RES (21)..(22)..(23)..(24): Xaa is A or G or is absent
XXVPQDLRSVKIAKVXXXXXXXXXKEVQVMVVKSX

SEQ ID NO: 54090 - protein, 33 aa, Artificial Sequence
  GFR-binding peptide
  MOD_RES (31)..(33): Xaa is C or S
VPQDLRSVKIAKVVGRTPKVKEVQVMVVKSXKX

SEQ ID NO: 54091 - protein, 38 aa, Artificial Sequence; identical to SEQ ID NO: 15506
  GFR-binding peptide
  MOD_RES (6)..(7): Xaa is C or S

SEQ ID NO: 54092 - protein, 32 aa, Artificial Sequence
  GFR-binding peptide
  MOD_RES (14)..(15)..(16)..(17)..(18): Xaa is A or G
  MOD_RES (19)..(20)..(21)..(22): Xaa is A or G or is absent
VPTEEEPLTMLYYXXXXXXXXXEQLSNFLQHN

SEQ ID NO: 54093 - protein, 41 aa, Artificial Sequence
  GFR-binding peptide
  MOD_RES (6)..(7)..(39)..(41): Xaa is C or S
YVPKPXXAPTKLSNITVQIMDDSSNVIIGEMSNMVVRSXGX

SEQ ID NO: 54094 - protein, 36 aa, Artificial Sequence; identical to SEQ ID NO: 15510
  GFR-binding peptide
  MOD_RES (3)..(4)..(36): Xaa is C or S

SEQ ID NO: 54095 - protein, 32 aa, Artificial Sequence
  GFR-binding peptide
  MOD_RES (14)..(15)..(16)..(17)..(18): Xaa is A or G
  MOD_RES (19)..(20)..(21)..(22): Xaa is A or G or is absent
VPQDLRPVQIRKIXXXXXXXXXKKATVMVVKS

SEQ ID NO: 54096 - protein, 34 aa, Artificial Sequence
  GFR-binding peptide
  MOD_RES (31)..(33): Xaa is C or S
VPQALSNITIQIMVGRKPKVIGEMSMIVRSXKXS

SEQ ID NO: 54097 - protein, 38 aa, Artificial Sequence
  GFR-binding peptide
  MOD_RES (1)..(2)..(36)..(38): Xaa is C or S
  MOD_RES (16)..(17)..(18)..(19)..(20): Xaa is A or G
  MOD_RES (21)..(22)..(23)..(24): Xaa is A or G or is absent
XXVPTELRPVQMRKIXXXXXXXXXKKATVEMVVEGXGX

SEQ ID NO: 54098 - protein, 35 aa, Artificial Sequence
  GFR-binding peptide
  MOD_RES (3)..(35): Xaa is C or S
PTXAPTKLSNITVQIMDDSSNVIIGEMSNMVVRSX

SEQ ID NO: 54099 - protein, 36 aa, Artificial Sequence
  GFR-binding peptide
  MOD_RES (1)..(2)..(36): Xaa is C or S
  MOD_RES (16)..(17)..(18)..(19)..(20): Xaa is A or G
  MOD_RES (21)..(22)..(23)..(24): Xaa is A or G or is absent
XXVPTELSNITMQIMXXXXXXXXXIGEMSEMVVEGX

SEQ ID NO: 54100 - protein, 34 aa, Artificial Sequence
  GFR-binding peptide
  MOD_RES (2)..(2): Xaa is C or S
EXVPTEEEPLPMVYYRIKPHQGQHEQLSNFLQHN

SEQ ID NO: 54101 - protein, 37 aa, Artificial Sequence
  GFR-binding peptide
  MOD_RES (34)..(36): Xaa is C or S
VPTEEEPLPMVYYRIKPHQGQHEQLSNFLQHNKXEXR

SEQ ID NO: 54102 - protein, 35 aa, Artificial Sequence
  GFR-binding peptide
  MOD_RES (1)..(2): Xaa is C or S
  MOD_RES (16)..(17)..(18)..(19)..(20): Xaa is A or G
  MOD_RES (21)..(22)..(23)..(24): Xaa is A or G or is absent
XXVPTELRPVQMRKIXXXXXXXXXKKATVDMVVEG

SEQ ID NO: 54103 - protein, 37 aa, Artificial Sequence; identical to SEQ ID NO: 15512
  GFR-binding peptide
  MOD_RES (4)..(5): Xaa is C or S
  MOD_RES (19)..(20)..(21)..(22)..(23): Xaa is A or G
  MOD_RES (24)..(25)..(26)..(27): Xaa is A or G or is absent

SEQ ID NO: 54104 - protein, 38 aa, Artificial Sequence; identical to SEQ ID NO: 18907
  GFR-binding peptide
  MOD_RES (35)..(37): Xaa is C or S

SEQ ID NO: 54105 - protein, 39 aa, Artificial Sequence; identical to SEQ ID NO: 15514
  GFR-binding peptide
  MOD_RES (5)..(6): Xaa is C or S
  MOD_RES (20)..(21)..(22)..(23)..(24): Xaa is A or G
  MOD_RES (25)..(26)..(27)..(28): Xaa is A or G or is absent

SEQ ID NO: 54106 - protein, 41 aa, Artificial Sequence; identical to SEQ ID NO: 18911
  GFR-binding peptide
  MOD_RES (2)..(39)..(41): Xaa is C or S
  MOD_RES (18)..(19)..(20)..(21)..(22): Xaa is A or G
  MOD_RES (23)..(24)..(25)..(26): Xaa is A or G or is absent

SEQ ID NO: 54107 - protein, 37 aa, Artificial Sequence
  GFR-binding peptide
  MOD_RES (3)..(4)..(36): Xaa is C or S
KPXXAPTQLRSVKVAKVDDSSNVIKEVQVNMVVRAXG

SEQ ID NO: 54108 - protein, 38 aa, Artificial Sequence; identical to SEQ ID NO: 18912
  GFR-binding peptide
  MOD_RES (37)..(37): Xaa is C or S
  MOD_RES (16)..(17)..(18)..(19)..(20): Xaa is A or G
  MOD_RES (21)..(22)..(23)..(24): Xaa is A or G or is absent

SEQ ID NO: 54109 - protein, 35 aa, Artificial Sequence; identical to SEQ ID NO: 15520
  GFR-binding peptide
  MOD_RES (2)..(3)..(35): Xaa is C or S

SEQ ID NO: 54110 - protein, 36 aa, Artificial Sequence; identical to SEQ ID NO: 15521
  GFR-binding peptide
  MOD_RES (33)..(35): Xaa is C or S
  MOD_RES (14)..(15)..(16)..(17)..(18): Xaa is A or G
  MOD_RES (19)..(20)..(21)..(22): Xaa is A or G or is absent

SEQ ID NO: 54111 - protein, 38 aa, Artificial Sequence; identical to SEQ ID NO: 38912
  GFR-binding peptide
  MOD_RES (2)..(3)..(36)..(38): Xaa is C or S
  MOD_RES (17)..(18)..(19)..(20)..(21): Xaa is A or G
  MOD_RES (22)..(23)..(24)..(25): Xaa is A or G or is absent

SEQ ID NO: 54112 - protein, 39 aa, Artificial Sequence; identical to SEQ ID NO: 18915
  GFR-binding peptide
  MOD_RES (4)..(4): Xaa is C or S

SEQ ID NO: 54113 - protein, 33 aa, Artificial Sequence; identical to SEQ ID NO: 18918
  GFR-binding peptide
  MOD_RES (14)..(15)..(16)..(17)..(18): Xaa is A or G
  MOD_RES (19)..(20)..(21)..(22): Xaa is A or G or is absent

SEQ ID NO: 54114 - protein, 32 aa, Artificial Sequence
  GFR-binding peptide
  MOD_RES (1)..(1): Xaa is C or S
XVPTELRPVQMRKIDEYDKVVKKATVEMVVEG

SEQ ID NO: 54115 - protein, 33 aa, Artificial Sequence; identical to SEQ ID NO: 15527
  GFR-binding peptide
  MOD_RES (1)..(2): Xaa is C or S

SEQ ID NO: 54116 - protein, 41 aa, Artificial Sequence; identical to SEQ ID NO: 18921
  GFR-binding peptide
  MOD_RES (2)..(39)..(41): Xaa is C or S
  MOD_RES (18)..(19)..(20)..(21)..(22): Xaa is A or G
  MOD_RES (23)..(24)..(25)..(26): Xaa is A or G or is absent

SEQ ID NO: 54117 - protein, 35 aa, Artificial Sequence; identical to SEQ ID NO: 15528
  GFR-binding peptide
  MOD_RES (1)..(2)..(35): Xaa is C or S
  MOD_RES (16)..(17)..(18)..(19)..(20): Xaa is A or G
  MOD_RES (21)..(22)..(23)..(24): Xaa is A or G or is absent

SEQ ID NO: 54118 - protein, 37 aa, Artificial Sequence; identical to SEQ ID NO: 15530
  GFR-binding peptide
  MOD_RES (4)..(5): Xaa is C or S
  MOD_RES (19)..(20)..(21)..(22)..(23): Xaa is A or G
  MOD_RES (24)..(25)..(26)..(27): Xaa is A or G or is absent

SEQ ID NO: 54119 - protein, 35 aa, Artificial Sequence; identical to SEQ ID NO: 15531
  GFR-binding peptide
  MOD_RES (33)..(35): Xaa is C or S
  MOD_RES (14)..(15)..(16)..(17)..(18): Xaa is A or G
  MOD_RES (19)..(20)..(21)..(22): Xaa is A or G or is absent

SEQ ID NO: 54120 - protein, 41 aa, Artificial Sequence
  GFR-binding peptide
  MOD_RES (3)..(4)..(38)..(40): Xaa is C or S
  MOD_RES (18)..(19)..(20)..(21)..(22): Xaa is A or G
  MOD_RES (23)..(24)..(25)..(26): Xaa is A or G or is absent
KPXXAPTQLSNITVQIMXXXXXXXXXIGEMSNMVVRAXGXH

SEQ ID NO: 54121 - protein, 36 aa, Artificial Sequence; identical to SEQ ID NO: 15533
  GFR-binding peptide
  MOD_RES (3)..(4)..(35): Xaa is C or S

SEQ ID NO: 54122 - protein, 36 aa, Artificial Sequence; identical to SEQ ID NO: 15535
  GFR-binding peptide
  MOD_RES (4)..(5): Xaa is C or S

SEQ ID NO: 54123 - protein, 37 aa, Artificial Sequence
  GFR-binding peptide
  MOD_RES (5)..(6): Xaa is C or S
VPKPXXAPTKLRSVKVAKVDDSSNVIKEVQVNMVVRS

SEQ ID NO: 54124 - protein, 34 aa, Artificial Sequence
  GFR-binding peptide
  MOD_RES (1)..(2): Xaa is C or S
  MOD_RES (16)..(17)..(18)..(19)..(20): Xaa is A or G
  MOD_RES (21)..(22)..(23)..(24): Xaa is A or G or is absent
XXVPTELRPVQMRKIXXXXXXXXXKKATVEMVVE

SEQ ID NO: 54125 - protein, 41 aa, Artificial Sequence
  GFR-binding peptide
  MOD_RES (6)..(7)..(38)..(40): Xaa is C or S
ASAAPXXVPQALRSVKIAKVVGRKPKVKEVQVMIVRSXKXS

SEQ ID NO: 54126 - protein, 35 aa, Artificial Sequence
  GFR-binding peptide
  MOD_RES (1)..(35): Xaa is C or S
  MOD_RES (15)..(16)..(17)..(18)..(19): Xaa is A or G
  MOD_RES (20)..(21)..(22)..(23): Xaa is A or G or is absent
XVPTEEEPLTMLYYXXXXXXXXXEQLSNFLQHNKX

SEQ ID NO: 54127 - protein, 37 aa, Artificial Sequence
  GFR-binding peptide
  MOD_RES (1)..(2)..(35)..(37): Xaa is C or S
  MOD_RES (16)..(17)..(18)..(19)..(20): Xaa is A or G
  MOD_RES (21)..(22)..(23)..(24): Xaa is A or G or is absent
XXVSQDLSNITIQIMXXXXXXXXXIGEMSMIVKSXKX

SEQ ID NO: 54128 - protein, 34 aa, Artificial Sequence
  GFR-binding peptide
  MOD_RES (1)..(1): Xaa is C or S
  MOD_RES (15)..(16)..(17)..(18)..(19): Xaa is A or G
  MOD_RES (20)..(21)..(22)..(23): Xaa is A or G or is absent
XVPTEEEPLTMLYYXXXXXXXXXEQLSNFLQHNK

SEQ ID NO: 54129 - protein, 35 aa, Artificial Sequence; identical to SEQ ID NO: 18932
  GFR-binding peptide
  MOD_RES (35)..(35): Xaa is C or S
  MOD_RES (14)..(15)..(16)..(17)..(18): Xaa is A or G
  MOD_RES (19)..(20)..(21)..(22): Xaa is A or G or is absent

SEQ ID NO: 54130 - protein, 36 aa, Artificial Sequence
  GFR-binding peptide
  MOD_RES (2)..(36): Xaa is C or S
EXVPTEEEPLTMLYYRIKPHQGQHEQLSNFLQHNKX

SEQ ID NO: 54131 - protein, 32 aa, Artificial Sequence; identical to SEQ ID NO: 15542
  GFR-binding peptide
  MOD_RES (14)..(15)..(16)..(17)..(18): Xaa is A or G
  MOD_RES (19)..(20)..(21)..(22): Xaa is A or G or is absent

SEQ ID NO: 54132 - protein, 34 aa, Artificial Sequence; identical to SEQ ID NO: 15543
  GFR-binding peptide
  MOD_RES (1)..(2)..(34): Xaa is C or S

SEQ ID NO: 54133 - protein, 34 aa, Artificial Sequence; identical to SEQ ID NO: 18937
  GFR-binding peptide

SEQ ID NO: 54134 - protein, 42 aa, Artificial Sequence; identical to SEQ ID NO: 15546
  GFR-binding peptide
  MOD_RES (6)..(7)..(40)..(42): Xaa is C or S
  MOD_RES (21)..(22)..(23)..(24)..(25): Xaa is A or G
  MOD_RES (26)..(27)..(28)..(29): Xaa is A or G or is absent

SEQ ID NO: 54135 - protein, 33 aa, Artificial Sequence; identical to SEQ ID NO: 18938
  GFR-binding peptide
  MOD_RES (14)..(15)..(16)..(17)..(18): Xaa is A or G
  MOD_RES (19)..(20)..(21)..(22): Xaa is A or G or is absent

SEQ ID NO: 54136 - protein, 36 aa, Artificial Sequence
  GFR-binding peptide
  MOD_RES (3)..(4): Xaa is C or S
  MOD_RES (18)..(19)..(20)..(21)..(22): Xaa is A or G
  MOD_RES (23)..(24)..(25)..(26): Xaa is A or G or is absent
KPXXAPTKLRPVQVRKIXXXXXXXXXKKATVNMVVR

SEQ ID NO: 54137 - protein, 39 aa, Artificial Sequence
  GFR-binding peptide
  MOD_RES (5)..(6)..(38): Xaa is C or S
VPKPXXAPTKLSNITVQIMDDSSNVIIGEMSNMVVRSXG

SEQ ID NO: 54138 - protein, 32 aa, Artificial Sequence
  GFR-binding peptide
  MOD_RES (1)..(2): Xaa is C or S
XXAPTKLRSVKVAKVDDSSNVIKEVQVNMVVR

SEQ ID NO: 54139 - protein, 33 aa, Artificial Sequence; identical to SEQ ID NO: 18940
  GFR-binding peptide
  MOD_RES (14)..(15)..(16)..(17)..(18): Xaa is A or G
  MOD_RES (19)..(20)..(21)..(22): Xaa is A or G or is absent

SEQ ID NO: 54140 - protein, 36 aa, Artificial Sequence; identical to SEQ ID NO: 15549
  GFR-binding peptide
  MOD_RES (4)..(5): Xaa is C or S

SEQ ID NO: 54141 - protein, 35 aa, Artificial Sequence
  GFR-binding peptide
  MOD_RES (1)..(35): Xaa is C or S
  MOD_RES (15)..(16)..(17)..(18)..(19): Xaa is A or G
  MOD_RES (20)..(21)..(22)..(23): Xaa is A or G or is absent
XVPTELSNITMQIMXXXXXXXXXIGEMSEMVVEGX

SEQ ID NO: 54142 - protein, 35 aa, Artificial Sequence
  GFR-binding peptide
  MOD_RES (15)..(16)..(17)..(18)..(19): Xaa is A or G
  MOD_RES (20)..(21)..(22)..(23): Xaa is A or G or is absent
PSRVHHEPLTVLYYXXXXXXXXXEQLSNRLEEHLE

SEQ ID NO: 54143 - protein, 36 aa, Artificial Sequence
  GFR-binding peptide
  MOD_RES (2)..(3): Xaa is C or S
  MOD_RES (17)..(18)..(19)..(20)..(21): Xaa is A or G
  MOD_RES (22)..(23)..(24)..(25): Xaa is A or G or is absent
PXXAPTKLRSVKVAKVXXXXXXXXXKEVQVNMVVRS

SEQ ID NO: 54144 - protein, 42 aa, Artificial Sequence; identical to SEQ ID NO: 15550
  GFR-binding peptide
  MOD_RES (5)..(6)..(39)..(41): Xaa is C or S
  MOD_RES (20)..(21)..(22)..(23)..(24): Xaa is A or G
  MOD_RES (25)..(26)..(27)..(28): Xaa is A or G or is absent

SEQ ID NO: 54145 - protein, 41 aa, Artificial Sequence; identical to SEQ ID NO: 15551
  GFR-binding peptide
  MOD_RES (4)..(5)..(39)..(41): Xaa is C or S
  MOD_RES (19)..(20)..(21)..(22)..(23): Xaa is A or G
  MOD_RES (24)..(25)..(26)..(27): Xaa is A or G or is absent

SEQ ID NO: 54146 - protein, 38 aa, Artificial Sequence; identical to SEQ ID NO: 15553
  GFR-binding peptide
  MOD_RES (6)..(7): Xaa is C or S

SEQ ID NO: 54147 - protein, 40 aa, Artificial Sequence
  GFR-binding peptide
  MOD_RES (3)..(40): Xaa is C or S
VKXQPSRVHHEPLTVLYYEYVRKKPKLEQLSNRLEEHLEX

SEQ ID NO: 54148 - protein, 32 aa, Artificial Sequence; identical to SEQ ID NO: 15555
  GFR-binding peptide
  MOD_RES (1)..(1): Xaa is C or S

SEQ ID NO: 54149 - protein, 39 aa, Artificial Sequence; identical to SEQ ID NO: 15556
  GFR-binding peptide
  MOD_RES (4)..(5)..(39): Xaa is C or S
  MOD_RES (19)..(20)..(21)..(22)..(23): Xaa is A or G
  MOD_RES (24)..(25)..(26)..(27): Xaa is A or G or is absent

SEQ ID NO: 54150 - protein, 38 aa, Artificial Sequence; identical to SEQ ID NO: 15557
  GFR-binding peptide
  MOD_RES (3)..(35)..(37): Xaa is C or S

SEQ ID NO: 54151 - protein, 41 aa, Artificial Sequence; identical to SEQ ID NO: 15558
  GFR-binding peptide
  MOD_RES (6)..(7)..(41): Xaa is C or S
  MOD_RES (21)..(22)..(23)..(24)..(25): Xaa is A or G
  MOD_RES (26)..(27)..(28)..(29): Xaa is A or G or is absent

SEQ ID NO: 54152 - protein, 38 aa, Artificial Sequence
  GFR-binding peptide
  MOD_RES (4)..(5)..(38): Xaa is C or S
  MOD_RES (19)..(20)..(21)..(22)..(23): Xaa is A or G
  MOD_RES (24)..(25)..(26)..(27): Xaa is A or G or is absent
AAPXXVPQALRPVQIRKIXXXXXXXXXKKATVMIVRSX

SEQ ID NO: 54153 - protein, 37 aa, Artificial Sequence; identical to SEQ ID NO: 18945
  GFR-binding peptide
  MOD_RES (3)..(3): Xaa is C or S
  MOD_RES (19)..(20)..(21)..(22)..(23): Xaa is A or G
  MOD_RES (24)..(25)..(26)..(27): Xaa is A or G or is absent

SEQ ID NO: 54154 - protein, 42 aa, Artificial Sequence; identical to SEQ ID NO: 15559
  GFR-binding peptide
  MOD_RES (5)..(39)..(41): Xaa is C or S
  MOD_RES (19)..(20)..(21)..(22)..(23): Xaa is A or G
  MOD_RES (24)..(25)..(26)..(27): Xaa is A or G or is absent

SEQ ID NO: 54155 - protein, 40 aa, Artificial Sequence; identical to SEQ ID NO: 15560
  GFR-binding peptide
  MOD_RES (6)..(7)..(40): Xaa is C or S
  MOD_RES (21)..(22)..(23)..(24)..(25): Xaa is A or G
  MOD_RES (26)..(27)..(28)..(29): Xaa is A or G or is absent

SEQ ID NO: 54156 - protein, 37 aa, Artificial Sequence
  GFR-binding peptide
  MOD_RES (6)..(7): Xaa is C or S
ASASPXXVPQDLRPVQIRKIVGRTPKVKKATVMVVKS

SEQ ID NO: 54157 - protein, 42 aa, Artificial Sequence; identical to SEQ ID NO: 15565
  GFR-binding peptide
  MOD_RES (6)..(7)..(40)..(42): Xaa is C or S
  MOD_RES (21)..(22)..(23)..(24)..(25): Xaa is A or G
  MOD_RES (26)..(27)..(28)..(29): Xaa is A or G or is absent

SEQ ID NO: 54158 - protein, 42 aa, Artificial Sequence
  GFR-binding peptide
  MOD_RES (4)..(5)..(39)..(41): Xaa is C or S
  MOD_RES (19)..(20)..(21)..(22)..(23): Xaa is A or G
  MOD_RES (24)..(25)..(26)..(27): Xaa is A or G or is absent
PKAXXVPTELRPVQMRKIXXXXXXXXXKKATVEMVVEGXGXR

SEQ ID NO: 54159 - protein, 37 aa, Artificial Sequence; identical to SEQ ID NO: 18951
  GFR-binding peptide
  MOD_RES (5)..(5): Xaa is C or S

SEQ ID NO: 54160 - protein, 37 aa, Artificial Sequence
  GFR-binding peptide
  MOD_RES (1)..(34)..(36): Xaa is C or S
  MOD_RES (15)..(16)..(17)..(18)..(19): Xaa is A or G
  MOD_RES (20)..(21)..(22)..(23): Xaa is A or G or is absent
XVPQALRPVQIRKIXXXXXXXXXKKATVMIVRSXKXS

SEQ ID NO: 54161 - protein, 38 aa, Artificial Sequence
  GFR-binding peptide
  MOD_RES (3)..(4)..(35)..(37): Xaa is C or S
APXXVPQALRSVKIAKVVGRKPKVKEVQVMIVRSXKXS

SEQ ID NO: 54162 - protein, 37 aa, Artificial Sequence
  GFR-binding peptide
  MOD_RES (6)..(7): Xaa is C or S
ASASPXXVPQDLRSVKIAKVVGRTPKVKEVQVMVVKS

SEQ ID NO: 54163 - protein, 32 aa, Artificial Sequence
  GFR-binding peptide
  MOD_RES (32)..(32): Xaa is C or S
VPTELSNITMQIMDEYDKVVIGEMSEMVVEGX

SEQ ID NO: 54164 - protein, 35 aa, Artificial Sequence
  GFR-binding peptide
  MOD_RES (2)..(3): Xaa is C or S
  MOD_RES (17)..(18)..(19)..(20)..(21): Xaa is A or G
  MOD_RES (22)..(23)..(24)..(25): Xaa is A or G or is absent
AXXVPTELRSVKMAKVXXXXXXXXXKEVQVDMVVE

SEQ ID NO: 54165 - protein, 32 aa, Artificial Sequence
  GFR-binding peptide
  MOD_RES (1)..(32): Xaa is C or S
XVPQALSNITIQIMVGRKPKVIGEMSMIVRSX

SEQ ID NO: 54166 - protein, 33 aa, Artificial Sequence; identical to SEQ ID NO: 15571
  GFR-binding peptide
  MOD_RES (1)..(32): Xaa is C or S

SEQ ID NO: 54167 - protein, 37 aa, Artificial Sequence; identical to SEQ ID NO: 15573
  GFR-binding peptide
  MOD_RES (3)..(4): Xaa is C or S
  MOD_RES (18)..(19)..(20)..(21)..(22): Xaa is A or G
  MOD_RES (23)..(24)..(25)..(26): Xaa is A or G or is absent

SEQ ID NO: 54168 - protein, 38 aa, Artificial Sequence; identical to SEQ ID NO: 38984
  GFR-binding peptide
  MOD_RES (5)..(6): Xaa is C or S
  MOD_RES (20)..(21)..(22)..(23)..(24): Xaa is A or G
  MOD_RES (25)..(26)..(27)..(28): Xaa is A or G or is absent

SEQ ID NO: 54169 - protein, 38 aa, Artificial Sequence; identical to SEQ ID NO: 15576
  GFR-binding peptide
  MOD_RES (3)..(4)..(36)..(38): Xaa is C or S

SEQ ID NO: 54170 - protein, 42 aa, Artificial Sequence
  GFR-binding peptide
  MOD_RES (3)..(40)..(42): Xaa is C or S
VQXRPTQVQLEPLPVVYYEIVRKKPIFEQLSNTLEDHLAXKX

SEQ ID NO: 54171 - protein, 41 aa, Artificial Sequence
  GFR-binding peptide
  MOD_RES (2)..(39)..(41): Xaa is C or S
  MOD_RES (18)..(19)..(20)..(21)..(22): Xaa is A or G
  MOD_RES (23)..(24)..(25)..(26): Xaa is A or G or is absent
KXQPSRVHHEPLPVVYYXXXXXXXXXEQLSNRLEEHLEXAX

SEQ ID NO: 54172 - protein, 36 aa, Artificial Sequence
  GFR-binding peptide
  MOD_RES (3)..(4): Xaa is C or S
  MOD_RES (18)..(19)..(20)..(21)..(22): Xaa is A or G
  MOD_RES (23)..(24)..(25)..(26): Xaa is A or G or is absent
KAXXVPTELRSVKMAKVXXXXXXXXXKEVQVDMVVE

SEQ ID NO: 54173 - protein, 33 aa, Artificial Sequence; identical to SEQ ID NO: 18960
  GFR-binding peptide
  MOD_RES (15)..(16)..(17)..(18)..(19): Xaa is A or G
  MOD_RES (20)..(21)..(22)..(23): Xaa is A or G or is absent

SEQ ID NO: 54174 - protein, 37 aa, Artificial Sequence
  GFR-binding peptide
  MOD_RES (6)..(7): Xaa is C or S
ASAAPXXVPQALSNITIQIMVGRKPKVIGEMSMIVRS

SEQ ID NO: 54175 - protein, 41 aa, Artificial Sequence
  GFR-binding peptide
  MOD_RES (4)..(38)..(40): Xaa is C or S
  MOD_RES (18)..(19)..(20)..(21)..(22): Xaa is A or G
  MOD_RES (23)..(24)..(25)..(26): Xaa is A or G or is absent
GLEXVPTEEEPLPMVYYXXXXXXXXXEQLSNFLQHNKXEXR

SEQ ID NO: 54176 - protein, 32 aa, Artificial Sequence
  GFR-binding peptide
  MOD_RES (14)..(15)..(16)..(17)..(18): Xaa is A or G
  MOD_RES (19)..(20)..(21)..(22): Xaa is A or G or is absent
SRVHHEPLPVVYYXXXXXXXXXEQLSNRLEEH

SEQ ID NO: 54177 - protein, 43 aa, Artificial Sequence; identical to SEQ ID NO: 18961
  GFR-binding peptide
  MOD_RES (3)..(40)..(42): Xaa is C or S
  MOD_RES (19)..(20)..(21)..(22)..(23): Xaa is A or G
  MOD_RES (24)..(25)..(26)..(27): Xaa is A or G or is absent

SEQ ID NO: 54178 - protein, 40 aa, Artificial Sequence
  GFR-binding peptide
  MOD_RES (1)..(38)..(40): Xaa is C or S
  MOD_RES (17)..(18)..(19)..(20)..(21): Xaa is A or G
  MOD_RES (22)..(23)..(24)..(25): Xaa is A or G or is absent
XQPSRVHHEPLPVVYYXXXXXXXXXEQLSNRLEEHLEXAX

SEQ ID NO: 54179 - protein, 35 aa, Artificial Sequence; identical to SEQ ID NO: 15583
  GFR-binding peptide
  MOD_RES (2)..(3)..(34): Xaa is C or S

SEQ ID NO: 54180 - protein, 39 aa, Artificial Sequence
  GFR-binding peptide
  MOD_RES (3)..(4)..(38): Xaa is C or S
  MOD_RES (18)..(19)..(20)..(21)..(22): Xaa is A or G
  MOD_RES (23)..(24)..(25)..(26): Xaa is A or G or is absent
KAXXVPTELSNITMQIMXXXXXXXXXIGEMSDMVVEGXG

SEQ ID NO: 54181 - protein, 36 aa, Artificial Sequence
  GFR-binding peptide
  MOD_RES (5)..(6): Xaa is C or S
SASPXXVPQDLSNITIQIMVGRTPKVIGEMSMVVKS

SEQ ID NO: 54182 - protein, 39 aa, Artificial Sequence; identical to SEQ ID NO: 15586
  GFR-binding peptide
  MOD_RES (3)..(4)..(37)..(39): Xaa is C or S
  MOD_RES (18)..(19)..(20)..(21)..(22): Xaa is A or G
  MOD_RES (23)..(24)..(25)..(26): Xaa is A or G or is absent

SEQ ID NO: 54183 - protein, 36 aa, Artificial Sequence
  GFR-binding peptide
  MOD_RES (2)..(3): Xaa is C or S
  MOD_RES (17)..(18)..(19)..(20)..(21): Xaa is A or G
  MOD_RES (22)..(23)..(24)..(25): Xaa is A or G or is absent
PXXAPTKLRPVQVRKIXXXXXXXXXKKATVNMVVRS

SEQ ID NO: 54184 - protein, 38 aa, Artificial Sequence
  GFR-binding peptide
  MOD_RES (36)..(38): Xaa is C or S
  MOD_RES (15)..(16)..(17)..(18)..(19): Xaa is A or G
  MOD_RES (20)..(21)..(22)..(23): Xaa is A or G or is absent
PSRVHHEPLPVVYYXXXXXXXXXEQLSNRLEEHLEXAX

SEQ ID NO: 54185 - protein, 35 aa, Artificial Sequence
  GFR-binding peptide
  MOD_RES (2)..(3)..(35): Xaa is C or S
PXXAPTQLRSVKVAKVDDSSNVIKEVQVNMVVRAX

SEQ ID NO: 54186 - protein, 36 aa, Artificial Sequence
  GFR-binding peptide
  MOD_RES (2)..(3)..(34)..(36): Xaa is C or S
PXXVPQDLSNITIQIMVGRTPKVIGEMSMVVKSXKX

SEQ ID NO: 54187 - protein, 37 aa, Artificial Sequence; identical to SEQ ID NO: 15588
  GFR-binding peptide
  MOD_RES (6)..(6): Xaa is C or S

SEQ ID NO: 54188 - protein, 40 aa, Artificial Sequence; identical to SEQ ID NO: 18962
  GFR-binding peptide
  MOD_RES (37)..(39): Xaa is C or S

SEQ ID NO: 54189 - protein, 37 aa, Artificial Sequence; identical to SEQ ID NO: 18963
  GFR-binding peptide
  MOD_RES (36)..(36): Xaa is C or S

SEQ ID NO: 54190 - protein, 38 aa, Artificial Sequence; identical to SEQ ID NO: 18965
  GFR-binding peptide
  MOD_RES (5)..(5): Xaa is C or S
  MOD_RES (19)..(20)..(21)..(22)..(23): Xaa is A or G
  MOD_RES (24)..(25)..(26)..(27): Xaa is A or G or is absent

SEQ ID NO: 54191 - protein, 38 aa, Artificial Sequence
  GFR-binding peptide
  MOD_RES (1)..(2)..(36)..(38): Xaa is C or S
  MOD_RES (16)..(17)..(18)..(19)..(20): Xaa is A or G
  MOD_RES (21)..(22)..(23)..(24): Xaa is A or G or is absent
XXAPTKLRPVQVRKIXXXXXXXXXKKATVNMVVRSXGX

SEQ ID NO: 54192 - protein, 35 aa, Artificial Sequence; identical to SEQ ID NO: 18967
  GFR-binding peptide
  MOD_RES (34)..(34): Xaa is C or S

SEQ ID NO: 54193 - protein, 42 aa, Artificial Sequence; identical to SEQ ID NO: 18970
  GFR-binding peptide
  MOD_RES (4)..(41): Xaa is C or S
  MOD_RES (20)..(21)..(22)..(23)..(24): Xaa is A or G
  MOD_RES (25)..(26)..(27)..(28): Xaa is A or G or is absent

SEQ ID NO: 54194 - protein, 38 aa, Artificial Sequence
  GFR-binding peptide
  MOD_RES (5)..(6): Xaa is C or S
  MOD_RES (20)..(21)..(22)..(23)..(24): Xaa is A or G
  MOD_RES (25)..(26)..(27)..(28): Xaa is A or G or is absent
SAAPXXVPQALRSVKIAKVXXXXXXXXXKEVQVMIVRS

SEQ ID NO: 54195 - protein, 41 aa, Artificial Sequence; identical to SEQ ID NO: 15591
  GFR-binding peptide
  MOD_RES (5)..(6)..(38)..(40): Xaa is C or S

SEQ ID NO: 54196 - protein, 37 aa, Artificial Sequence; identical to SEQ ID NO: 15592
  GFR-binding peptide
  MOD_RES (3)..(4): Xaa is C or S
  MOD_RES (18)..(19)..(20)..(21)..(22): Xaa is A or G
  MOD_RES (23)..(24)..(25)..(26): Xaa is A or G or is absent

SEQ ID NO: 54197 - protein, 35 aa, Artificial Sequence
  GFR-binding peptide
  MOD_RES (2)..(3): Xaa is C or S
  MOD_RES (17)..(18)..(19)..(20)..(21): Xaa is A or G
  MOD_RES (22)..(23)..(24)..(25): Xaa is A or G or is absent
PXXAPTKLRPVQVRKIXXXXXXXXXKKATVNMVVR

SEQ ID NO: 54198 - protein, 37 aa, Artificial Sequence
  GFR-binding peptide
  MOD_RES (3)..(4)..(37): Xaa is C or S
  MOD_RES (18)..(19)..(20)..(21)..(22): Xaa is A or G
  MOD_RES (23)..(24)..(25)..(26): Xaa is A or G or is absent
SPXXVSQDLRPVQIRKIXXXXXXXXXKKATVMIVKSX

SEQ ID NO: 54199 - protein, 34 aa, Artificial Sequence
  GFR-binding peptide
  MOD_RES (3)..(4): Xaa is C or S
KAXXVPTELRSVKMAKVDEYDKVVKEVQVEMVVE

SEQ ID NO: 54200 - protein, 40 aa, Artificial Sequence; identical to SEQ ID NO: 15594
  GFR-binding peptide
  MOD_RES (6)..(7)..(39): Xaa is C or S

SEQ ID NO: 54201 - protein, 34 aa, Artificial Sequence
  GFR-binding peptide
  MOD_RES (1)..(2)..(33): Xaa is C or S
XXVPQDLSNITIQIMVGRTPKVIGEMSMVVKSXK

SEQ ID NO: 54202 - protein, 35 aa, Artificial Sequence; identical to SEQ ID NO: 15595
  GFR-binding peptide
  MOD_RES (34)..(34): Xaa is C or S
  MOD_RES (14)..(15)..(16)..(17)..(18): Xaa is A or G
  MOD_RES (19)..(20)..(21)..(22): Xaa is A or G or is absent

SEQ ID NO: 54203 - protein, 44 aa, Artificial Sequence
  GFR-binding peptide
  MOD_RES (5)..(42)..(44): Xaa is C or S
  MOD_RES (21)..(22)..(23)..(24)..(25): Xaa is A or G
  MOD_RES (26)..(27)..(28)..(29): Xaa is A or G or is absent
SSVKXQPSRVHHEPLTVLYYXXXXXXXXXEQLSNRLEEHLEXAX

SEQ ID NO: 54204 - protein, 37 aa, Artificial Sequence
  GFR-binding peptide
  MOD_RES (34)..(36): Xaa is C or S
  MOD_RES (14)..(15)..(16)..(17)..(18): Xaa is A or G
  MOD_RES (19)..(20)..(21)..(22): Xaa is A or G or is absent
VPTELSNITMQIMXXXXXXXXXIGEMSEMVVEGXGXR

SEQ ID NO: 54205 - protein, 36 aa, Artificial Sequence
  GFR-binding peptide
  MOD_RES (5)..(6): Xaa is C or S
SAAPXXVPQALRSVKIAKVVGRKPKVKEVQVMIVRS

SEQ ID NO: 54206 - protein, 40 aa, Artificial Sequence; identical to SEQ ID NO: 15598
  GFR-binding peptide
  MOD_RES (6)..(7)..(39): Xaa is C or S

SEQ ID NO: 54207 - protein, 33 aa, Artificial Sequence; identical to SEQ ID NO: 15599
  GFR-binding peptide
  MOD_RES (1)..(2): Xaa is C or S

SEQ ID NO: 54208 - protein, 36 aa, Artificial Sequence
  GFR-binding peptide
  MOD_RES (1)..(2)..(33)..(35): Xaa is C or S
XXVPQALRSVKIAKVVGRKPKVKEVQVMIVRSXKXS

SEQ ID NO: 54209 - protein, 41 aa, Artificial Sequence; identical to SEQ ID NO: 18976
  GFR-binding peptide
  MOD_RES (1)..(38)..(40): Xaa is C or S
  MOD_RES (17)..(18)..(19)..(20)..(21): Xaa is A or G
  MOD_RES (22)..(23)..(24)..(25): Xaa is A or G or is absent

SEQ ID NO: 54210 - protein, 39 aa, Artificial Sequence; identical to SEQ ID NO: 18977
  GFR-binding peptide
  MOD_RES (37)..(39): Xaa is C or S

SEQ ID NO: 54211 - protein, 38 aa, Artificial Sequence
  GFR-binding peptide
  MOD_RES (2)..(3)..(36)..(38): Xaa is C or S
  MOD_RES (17)..(18)..(19)..(20)..(21): Xaa is A or G
  MOD_RES (22)..(23)..(24)..(25): Xaa is A or G or is absent
PXXVPQDLRPVQIRKIXXXXXXXXXKKATVMVVKSXKX

SEQ ID NO: 54212 - protein, 39 aa, Artificial Sequence
  GFR-binding peptide
  MOD_RES (5)..(6)..(37)..(39): Xaa is C or S
SAAPXXVPQALRSVKIAKVVGRKPKVKEVQVMIVRSXKX

SEQ ID NO: 54213 - protein, 41 aa, Artificial Sequence
  GFR-binding peptide
  MOD_RES (4)..(5)..(39)..(41): Xaa is C or S
  MOD_RES (19)..(20)..(21)..(22)..(23): Xaa is A or G
  MOD_RES (24)..(25)..(26)..(27): Xaa is A or G or is absent
PKAXXVPTELSNITMQIMXXXXXXXXXIGEMSDMVVEGXGX

SEQ ID NO: 54214 - protein, 33 aa, Artificial Sequence
  GFR-binding peptide
  MOD_RES (1)..(32): Xaa is C or S
XVSQDLRPVQIRKIIGKTPKIKKATVMIVKSXK

SEQ ID NO: 54215 - protein, 45 aa, Artificial Sequence
  GFR-binding peptide
  MOD_RES (5)..(42)..(44): Xaa is C or S
  MOD_RES (21)..(22)..(23)..(24)..(25): Xaa is A or G
  MOD_RES (26)..(27)..(28)..(29): Xaa is A or G or is absent
RNVQXRPTQVQLEPLTVLYYXXXXXXXXXEQLSNTLEDHLAXKXE

SEQ ID NO: 54216 - protein, 36 aa, Artificial Sequence
  GFR-binding peptide
  MOD_RES (34)..(36): Xaa is C or S
  MOD_RES (14)..(15)..(16)..(17)..(18): Xaa is A or G
  MOD_RES (19)..(20)..(21)..(22): Xaa is A or G or is absent
VPTELSNITMQIMXXXXXXXXXIGEMSDMVVEGXGX

SEQ ID NO: 54217 - protein, 42 aa, Artificial Sequence; identical to SEQ ID NO: 18979
  GFR-binding peptide
  MOD_RES (2)..(39)..(41): Xaa is C or S
  MOD_RES (18)..(19)..(20)..(21)..(22): Xaa is A or G
  MOD_RES (23)..(24)..(25)..(26): Xaa is A or G or is absent

SEQ ID NO: 54218 - protein, 35 aa, Artificial Sequence
  GFR-binding peptide
  MOD_RES (3)..(4)..(35): Xaa is C or S
SPXXVSQDLSNITIQIMIGKTPKIIGEMSMIVKSX

SEQ ID NO: 54219 - protein, 35 aa, Artificial Sequence; identical to SEQ ID NO: 15602
  GFR-binding peptide
  MOD_RES (1)..(35): Xaa is C or S
  MOD_RES (15)..(16)..(17)..(18)..(19): Xaa is A or G
  MOD_RES (20)..(21)..(22)..(23): Xaa is A or G or is absent

SEQ ID NO: 54220 - protein, 41 aa, Artificial Sequence; identical to SEQ ID NO: 15604
  GFR-binding peptide
  MOD_RES (5)..(6)..(40): Xaa is C or S
  MOD_RES (20)..(21)..(22)..(23)..(24): Xaa is A or G
  MOD_RES (25)..(26)..(27)..(28): Xaa is A or G or is absent

SEQ ID NO: 54221 - protein, 36 aa, Artificial Sequence
  GFR-binding peptide
  MOD_RES (5)..(6): Xaa is C or S
SAAPXXVPQALSNITIQIMVGRKPKVIGEMSMIVRS

SEQ ID NO: 54222 - protein, 34 aa, Artificial Sequence
  GFR-binding peptide
  MOD_RES (2)..(3)..(34): Xaa is C or S
PXXVSQDLRPVQIRKIIGKTPKIKKATVMIVKSX

SEQ ID NO: 54223 - protein, 34 aa, Artificial Sequence
  GFR-binding peptide
  MOD_RES (2)..(3): Xaa is C or S
PXXAPTQLRSVKVAKVDDSSNVIKEVQVNMVVRA

SEQ ID NO: 54224 - protein, 36 aa, Artificial Sequence
  GFR-binding peptide
  MOD_RES (1)..(2)..(34)..(36): Xaa is C or S
XXAPTKLSNITVQIMDDSSNVIIGEMSNMVVRSXGX

SEQ ID NO: 54225 - protein, 36 aa, Artificial Sequence
  GFR-binding peptide
  MOD_RES (1)..(2)..(36): Xaa is C or S
  MOD_RES (16)..(17)..(18)..(19)..(20): Xaa is A or G
  MOD_RES (21)..(22)..(23)..(24): Xaa is A or G or is absent
XXVPTELRPVQMRKIXXXXXXXXXKKATVDMVVEGX

SEQ ID NO: 54226 - protein, 39 aa, Artificial Sequence
  GFR-binding peptide
  MOD_RES (3)..(3): Xaa is C or S
VKXQPSRVHHEPLPVVYYEYVRKKPKLEQLSNRLEEHLE

SEQ ID NO: 54227 - protein, 39 aa, Artificial Sequence
  GFR-binding peptide
  MOD_RES (5)..(6)..(38): Xaa is C or S
VPKPXXAPTQLRSVKVAKVDDSSNVIKEVQVNMVVRAXG

SEQ ID NO: 54228 - protein, 39 aa, Artificial Sequence; identical to SEQ ID NO: 15610
  GFR-binding peptide
  MOD_RES (6)..(7): Xaa is C or S
  MOD_RES (21)..(22)..(23)..(24)..(25): Xaa is A or G
  MOD_RES (26)..(27)..(28)..(29): Xaa is A or G or is absent

SEQ ID NO: 54229 - protein, 41 aa, Artificial Sequence
  GFR-binding peptide
  MOD_RES (4)..(5)..(39)..(41): Xaa is C or S
  MOD_RES (19)..(20)..(21)..(22)..(23): Xaa is A or G
  MOD_RES (24)..(25)..(26)..(27): Xaa is A or G or is absent
PKAXXVPTELSNITMQIMXXXXXXXXXIGEMSEMVVEGXGX

SEQ ID NO: 54230 - protein, 40 aa, Artificial Sequence
  GFR-binding peptide
  MOD_RES (2)..(39): Xaa is C or S
QXRPTQVQLEPLPVVYYEIVRKKPIFEQLSNTLEDHLAXK

SEQ ID NO: 54231 - protein, 37 aa, Artificial Sequence
  GFR-binding peptide
  MOD_RES (2)..(36): Xaa is C or S
EXVPTEEEPLPMVYYRIKPHQGQHEQLSNFLQHNKXE

SEQ ID NO: 54232 - protein, 34 aa, Artificial Sequence; identical to SEQ ID NO: 18986
  GFR-binding peptide
  MOD_RES (1)..(1): Xaa is C or S
  MOD_RES (15)..(16)..(17)..(18)..(19): Xaa is A or G
  MOD_RES (20)..(21)..(22)..(23): Xaa is A or G or is absent

SEQ ID NO: 54233 - protein, 37 aa, Artificial Sequence; identical to SEQ ID NO: 18987
  GFR-binding peptide
  MOD_RES (1)..(1): Xaa is C or S
  MOD_RES (17)..(18)..(19)..(20)..(21): Xaa is A or G
  MOD_RES (22)..(23)..(24)..(25): Xaa is A or G or is absent

SEQ ID NO: 54234 - protein, 36 aa, Artificial Sequence
  GFR-binding peptide
  MOD_RES (34)..(36): Xaa is C or S
  MOD_RES (14)..(15)..(16)..(17)..(18): Xaa is A or G
  MOD_RES (19)..(20)..(21)..(22): Xaa is A or G or is absent
VPTELSNITMQIMXXXXXXXXXIGEMSEMVVEGXGX

SEQ ID NO: 54235 - protein, 37 aa, Artificial Sequence
  GFR-binding peptide
  MOD_RES (5)..(6): Xaa is C or S
IPKAXXVPTELRSVKMAKVDENEKVVKEVQVDMVVEG

SEQ ID NO: 54236 - protein, 36 aa, Artificial Sequence
  GFR-binding peptide
  MOD_RES (1)..(34)..(36): Xaa is C or S
  MOD_RES (15)..(16)..(17)..(18)..(19): Xaa is A or G
  MOD_RES (20)..(21)..(22)..(23): Xaa is A or G or is absent
XVSQDLSNITIQIMXXXXXXXXXIGEMSMIVKSXKX

SEQ ID NO: 54237 - protein, 35 aa, Artificial Sequence; identical to SEQ ID NO: 15622
  GFR-binding peptide
  MOD_RES (4)..(4): Xaa is C or S

SEQ ID NO: 54238 - protein, 38 aa, Artificial Sequence
  GFR-binding peptide
  MOD_RES (1)..(35)..(37): Xaa is C or S
  MOD_RES (15)..(16)..(17)..(18)..(19): Xaa is A or G
  MOD_RES (20)..(21)..(22)..(23): Xaa is A or G or is absent
XVPTELSNITMQIMXXXXXXXXXIGEMSDMVVEGXGXR

SEQ ID NO: 54239 - protein, 38 aa, Artificial Sequence
  GFR-binding peptide
  MOD_RES (1)..(35)..(37): Xaa is C or S
  MOD_RES (15)..(16)..(17)..(18)..(19): Xaa is A or G
  MOD_RES (20)..(21)..(22)..(23): Xaa is A or G or is absent
XVPTELRSVKMAKVXXXXXXXXXKEVQVEMVVEGXGXR

SEQ ID NO: 54240 - protein, 38 aa, Artificial Sequence
  GFR-binding peptide
  MOD_RES (1)..(38): Xaa is C or S
XQPSRVHHEPLTVLYYEYVRKKPKLEQLSNRLEEHLEX

SEQ ID NO: 54241 - protein, 34 aa, Artificial Sequence
  GFR-binding peptide
  MOD_RES (1)..(33): Xaa is C or S
XVPTELSNITMQIMDEYDKVVIGEMSEMVVEGXG

SEQ ID NO: 54242 - protein, 37 aa, Artificial Sequence
  GFR-binding peptide
  MOD_RES (6)..(7): Xaa is C or S
SIPKAXXVPTELRPVQMRKIDEYDKVVKKATVEMVVE

SEQ ID NO: 54243 - protein, 42 aa, Artificial Sequence
  GFR-binding peptide
  MOD_RES (6)..(7)..(41): Xaa is C or S
  MOD_RES (21)..(22)..(23)..(24)..(25): Xaa is A or G
  MOD_RES (26)..(27)..(28)..(29): Xaa is A or G or is absent
YVPKPXXAPTKLRPVQVRKIXXXXXXXXXKKATVNMVVRSXG

SEQ ID NO: 54244 - protein, 43 aa, Artificial Sequence
  GFR-binding peptide
  MOD_RES (6)..(40)..(42): Xaa is C or S
  MOD_RES (20)..(21)..(22)..(23)..(24): Xaa is A or G
  MOD_RES (25)..(26)..(27)..(28): Xaa is A or G or is absent
VTKPTXAPTKLRSVKVAKVXXXXXXXXXKEVQVNMVVRSXGXH

SEQ ID NO: 54245 - protein, 37 aa, Artificial Sequence
  GFR-binding peptide
  MOD_RES (2)..(3)..(34)..(36): Xaa is C or S
PXXVPQDLSNITIQIMVGRTPKVIGEMSMVVKSXKXS

SEQ ID NO: 54246 - protein, 38 aa, Artificial Sequence
  GFR-binding peptide
  MOD_RES (36)..(38): Xaa is C or S
  MOD_RES (15)..(16)..(17)..(18)..(19): Xaa is A or G
  MOD_RES (20)..(21)..(22)..(23): Xaa is A or G or is absent
PTQVQLEPLPVVYYXXXXXXXXXEQLSNTLEDHLAXKX

SEQ ID NO: 54247 - protein, 37 aa, Artificial Sequence
  GFR-binding peptide
  MOD_RES (3)..(4)..(36): Xaa is C or S
KPXXAPTKLRSVKVAKVDDSSNVIKEVQVNMVVRSXG

SEQ ID NO: 54248 - protein, 34 aa, Artificial Sequence
  GFR-binding peptide
QPSRVHHEPLTVLYYEYVRKKPKLEQLSNRLEEH

SEQ ID NO: 54249 - protein, 38 aa, Artificial Sequence
  GFR-binding peptide
  MOD_RES (1)..(35)..(37): Xaa is C or S
XVPTEEEPLPMVYYRIKPHQGQHEQLSNFLQHNKXEXR

SEQ ID NO: 54250 - protein, 41 aa, Artificial Sequence
  GFR-binding peptide
  MOD_RES (3)..(40): Xaa is C or S
  MOD_RES (19)..(20)..(21)..(22)..(23): Xaa is A or G
  MOD_RES (24)..(25)..(26)..(27): Xaa is A or G or is absent
VQXRPTQVQLEPLPVVYYXXXXXXXXXEQLSNTLEDHLAXK

SEQ ID NO: 54251 - protein, 36 aa, Artificial Sequence; identical to SEQ ID NO: 15629
  GFR-binding peptide
  MOD_RES (3)..(35): Xaa is C or S

SEQ ID NO: 54252 - protein, 34 aa, Artificial Sequence; identical to SEQ ID NO: 18996
  GFR-binding peptide

SEQ ID NO: 54253 - protein, 33 aa, Artificial Sequence
  GFR-binding peptide
PTQVQLEPLTVLYYEIVRKKPIFEQLSNTLEDH

SEQ ID NO: 54254 - protein, 39 aa, Artificial Sequence; identical to SEQ ID NO: 15630
  GFR-binding peptide
  MOD_RES (5)..(37)..(39): Xaa is C or S

SEQ ID NO: 54255 - protein, 34 aa, Artificial Sequence; identical to SEQ ID NO: 15631
  GFR-binding peptide
  MOD_RES (3)..(4): Xaa is C or S

SEQ ID NO: 54256 - protein, 39 aa, Artificial Sequence
  GFR-binding peptide
  MOD_RES (6)..(7)..(39): Xaa is C or S
KIPKAXXVPTELSNITMQIMDENEKVVIGEMSDMVVEGX

SEQ ID NO: 54257 - protein, 36 aa, Artificial Sequence
  GFR-binding peptide
  MOD_RES (2)..(3): Xaa is C or S
  MOD_RES (17)..(18)..(19)..(20)..(21): Xaa is A or G
  MOD_RES (22)..(23)..(24)..(25): Xaa is A or G or is absent
PXXAPTQLRSVKVAKVXXXXXXXXXKEVQVNMVVRA

SEQ ID NO: 54258 - protein, 36 aa, Artificial Sequence; identical to SEQ ID NO: 18999
  GFR-binding peptide
  MOD_RES (2)..(2): Xaa is C or S
  MOD_RES (18)..(19)..(20)..(21)..(22): Xaa is A or G
  MOD_RES (23)..(24)..(25)..(26): Xaa is A or G or is absent

SEQ ID NO: 54259 - protein, 41 aa, Artificial Sequence; identical to SEQ ID NO: 19002
  GFR-binding peptide
  MOD_RES (4)..(41): Xaa is C or S
  MOD_RES (20)..(21)..(22)..(23)..(24): Xaa is A or G
  MOD_RES (25)..(26)..(27)..(28): Xaa is A or G or is absent

SEQ ID NO: 54260 - protein, 32 aa, Artificial Sequence
  GFR-binding peptide
  MOD_RES (32)..(32): Xaa is C or S
APTQLRPVQVRKIDDSSNVIKKATVNMVVRAX

SEQ ID NO: 54261 - protein, 37 aa, Artificial Sequence; identical to SEQ ID NO: 15636
  GFR-binding peptide
  MOD_RES (4)..(5): Xaa is C or S
  MOD_RES (19)..(20)..(21)..(22)..(23): Xaa is A or G
  MOD_RES (24)..(25)..(26)..(27): Xaa is A or G or is absent

SEQ ID NO: 54262 - protein, 38 aa, Artificial Sequence; identical to SEQ ID NO: 39086
  GFR-binding peptide
  MOD_RES (4)..(5)..(38): Xaa is C or S
  MOD_RES (19)..(20)..(21)..(22)..(23): Xaa is A or G
  MOD_RES (24)..(25)..(26)..(27): Xaa is A or G or is absent

SEQ ID NO: 54263 - protein, 42 aa, Artificial Sequence; identical to SEQ ID NO: 15637
  GFR-binding peptide
  MOD_RES (6)..(7)..(41): Xaa is C or S
  MOD_RES (21)..(22)..(23)..(24)..(25): Xaa is A or G
  MOD_RES (26)..(27)..(28)..(29): Xaa is A or G or is absent

SEQ ID NO: 54264 - protein, 33 aa, Artificial Sequence
  GFR-binding peptide
PTQVQLEPLPVVYYEIVRKKPIFEQLSNTLEDH

SEQ ID NO: 54265 - protein, 34 aa, Artificial Sequence
  GFR-binding peptide
  MOD_RES (32)..(34): Xaa is C or S
APTKLRPVQVRKIDDSSNVIKKATVNMVVRSXGX

SEQ ID NO: 54266 - protein, 36 aa, Artificial Sequence
  GFR-binding peptide
  MOD_RES (34)..(36): Xaa is C or S
  MOD_RES (14)..(15)..(16)..(17)..(18): Xaa is A or G
  MOD_RES (19)..(20)..(21)..(22): Xaa is A or G or is absent
APTKLRSVKVAKVXXXXXXXXXKEVQVNMVVRSXGX

SEQ ID NO: 54267 - protein, 37 aa, Artificial Sequence
  GFR-binding peptide
  MOD_RES (1)..(1): Xaa is C or S
XRPTQVQLEPLPVVYYEIVRKKPIFEQLSNTLEDHLA

SEQ ID NO: 54268 - protein, 34 aa, Artificial Sequence
  GFR-binding peptide
  MOD_RES (1)..(2)..(33): Xaa is C or S
XXVPQALRSVKIAKVVGRKPKVKEVQVMIVRSXK

SEQ ID NO: 54269 - protein, 33 aa, Artificial Sequence; identical to SEQ ID NO: 15640
  GFR-binding peptide
  MOD_RES (1)..(2)..(33): Xaa is C or S

SEQ ID NO: 54270 - protein, 35 aa, Artificial Sequence; identical to SEQ ID NO: 19003
  GFR-binding peptide
  MOD_RES (3)..(3): Xaa is C or S
  MOD_RES (17)..(18)..(19)..(20)..(21): Xaa is A or G
  MOD_RES (22)..(23)..(24)..(25): Xaa is A or G or is absent

SEQ ID NO: 54271 - protein, 33 aa, Artificial Sequence; identical to SEQ ID NO: 15641
  GFR-binding peptide
  MOD_RES (2)..(3): Xaa is C or S

SEQ ID NO: 54272 - protein, 36 aa, Artificial Sequence
  GFR-binding peptide
  MOD_RES (5)..(6): Xaa is C or S
SASPXXVPQDLRSVKIAKVVGRTPKVKEVQVMVVKS

SEQ ID NO: 54273 - protein, 43 aa, Artificial Sequence; identical to SEQ ID NO: 19004
  GFR-binding peptide
  MOD_RES (6)..(40)..(42): Xaa is C or S

SEQ ID NO: 54274 - protein, 38 aa, Artificial Sequence; identical to SEQ ID NO: 15645
  GFR-binding peptide
  MOD_RES (3)..(4)..(37): Xaa is C or S
  MOD_RES (18)..(19)..(20)..(21)..(22): Xaa is A or G
  MOD_RES (23)..(24)..(25)..(26): Xaa is A or G or is absent

SEQ ID NO: 54275 - protein, 37 aa, Artificial Sequence
  GFR-binding peptide
  MOD_RES (6)..(7): Xaa is C or S
ASAAPXXVPQALRSVKIAKVVGRKPKVKEVQVMIVRS

SEQ ID NO: 54276 - protein, 38 aa, Artificial Sequence; identical to SEQ ID NO: 15647
  GFR-binding peptide
  MOD_RES (5)..(6)..(38): Xaa is C or S

SEQ ID NO: 54277 - protein, 35 aa, Artificial Sequence
  GFR-binding peptide
  MOD_RES (2)..(3)..(34): Xaa is C or S
PXXVPQDLRPVQIRKIVGRTPKVKKATVMVVKSXK

SEQ ID NO: 54278 - protein, 44 aa, Artificial Sequence
  GFR-binding peptide
  MOD_RES (6)..(7)..(41)..(43): Xaa is C or S
  MOD_RES (21)..(22)..(23)..(24)..(25): Xaa is A or G
  MOD_RES (26)..(27)..(28)..(29): Xaa is A or G or is absent
YVPKPXXAPTKLRPVQVRKIXXXXXXXXXKKATVNMVVRSXGXH

SEQ ID NO: 54279 - protein, 37 aa, Artificial Sequence
  GFR-binding peptide
  MOD_RES (1)..(2)..(36): Xaa is C or S
  MOD_RES (16)..(17)..(18)..(19)..(20): Xaa is A or G
  MOD_RES (21)..(22)..(23)..(24): Xaa is A or G or is absent
XXVPTELSNITMQIMXXXXXXXXXIGEMSEMVVEGXG

SEQ ID NO: 54280 - protein, 37 aa, Artificial Sequence; identical to SEQ ID NO: 15648
  GFR-binding peptide
  MOD_RES (1)..(2)..(35)..(37): Xaa is C or S
  MOD_RES (16)..(17)..(18)..(19)..(20): Xaa is A or G
  MOD_RES (21)..(22)..(23)..(24): Xaa is A or G or is absent

SEQ ID NO: 54281 - protein, 36 aa, Artificial Sequence; identical to SEQ ID NO: 15649
  GFR-binding peptide
  MOD_RES (4)..(5): Xaa is C or S

SEQ ID NO: 54282 - protein, 36 aa, Artificial Sequence
  GFR-binding peptide
  MOD_RES (1)..(33)..(35): Xaa is C or S
XVPTELRSVKMAKVDEYDKVVKEVQVEMVVEGXGXR

SEQ ID NO: 54283 - protein, 34 aa, Artificial Sequence
  GFR-binding peptide
  MOD_RES (32)..(34): Xaa is C or S
APTQLRSVKVAKVDDSSNVIKEVQVNMVVRAXGX

SEQ ID NO: 54284 - protein, 35 aa, Artificial Sequence
  GFR-binding peptide
  MOD_RES (34)..(34): Xaa is C or S
  MOD_RES (14)..(15)..(16)..(17)..(18): Xaa is A or G
  MOD_RES (19)..(20)..(21)..(22): Xaa is A or G or is absent
APTQLSNITVQIMXXXXXXXXXIGEMSNMVVRAXG

SEQ ID NO: 54285 - protein, 40 aa, Artificial Sequence; identical to SEQ ID NO: 15651
  GFR-binding peptide
  MOD_RES (7)..(7): Xaa is C or S
  MOD_RES (21)..(22)..(23)..(24)..(25): Xaa is A or G
  MOD_RES (26)..(27)..(28)..(29): Xaa is A or G or is absent

SEQ ID NO: 54286 - protein, 37 aa, Artificial Sequence
  GFR-binding peptide
  MOD_RES (5)..(6): Xaa is C or S
VPKPXXAPTKLRPVQVRKIDDSSNVIKKATVNMVVRS

SEQ ID NO: 54287 - protein, 38 aa, Artificial Sequence
  GFR-binding peptide
  MOD_RES (6)..(38): Xaa is C or S
VTKPTXAPTKLRSVKVAKVDDSSNVIKEVQVNMVVRSX

SEQ ID NO: 54288 - protein, 34 aa, Artificial Sequence
  GFR-binding peptide
  MOD_RES (1)..(2): Xaa is C or S
  MOD_RES (16)..(17)..(18)..(19)..(20): Xaa is A or G
  MOD_RES (21)..(22)..(23)..(24): Xaa is A or G or is absent
XXVPQALRSVKIAKVXXXXXXXXXKEVQVMIVRS

SEQ ID NO: 54289 - protein, 32 aa, Artificial Sequence
  GFR-binding peptide
  MOD_RES (14)..(15)..(16)..(17)..(18): Xaa is A or G
  MOD_RES (19)..(20)..(21)..(22): Xaa is A or G or is absent
VPTEEEPLPMVYYXXXXXXXXXEQLSNFLQHN

SEQ ID NO: 54290 - protein, 36 aa, Artificial Sequence
  GFR-binding peptide
  MOD_RES (3)..(35): Xaa is C or S
PTXAPTKLRSVKVAKVDDSSNVIKEVQVNMVVRSXG

SEQ ID NO: 54291 - protein, 34 aa, Artificial Sequence; identical to SEQ ID NO: 15654
  GFR-binding peptide
  MOD_RES (33)..(33): Xaa is C or S
  MOD_RES (14)..(15)..(16)..(17)..(18): Xaa is A or G
  MOD_RES (19)..(20)..(21)..(22): Xaa is A or G or is absent

SEQ ID NO: 54292 - protein, 39 aa, Artificial Sequence
  GFR-binding peptide
  MOD_RES (2)..(39): Xaa is C or S
  MOD_RES (18)..(19)..(20)..(21)..(22): Xaa is A or G
  MOD_RES (23)..(24)..(25)..(26): Xaa is A or G or is absent
QXRPTQVQLEPLTVLYYXXXXXXXXXEQLSNTLEDHLAX

SEQ ID NO: 54293 - protein, 39 aa, Artificial Sequence; identical to SEQ ID NO: 15655
  GFR-binding peptide
  MOD_RES (5)..(6)..(39): Xaa is C or S
  MOD_RES (20)..(21)..(22)..(23)..(24): Xaa is A or G
  MOD_RES (25)..(26)..(27)..(28): Xaa is A or G or is absent

SEQ ID NO: 54294 - protein, 37 aa, Artificial Sequence
  GFR-binding peptide
  MOD_RES (1)..(34)..(36): Xaa is C or S
  MOD_RES (15)..(16)..(17)..(18)..(19): Xaa is A or G
  MOD_RES (20)..(21)..(22)..(23): Xaa is A or G or is absent
XVSQDLSNITIQIMXXXXXXXXXIGEMSMIVKSXKXS

SEQ ID NO: 54295 - protein, 33 aa, Artificial Sequence; identical to SEQ ID NO: 15657
  GFR-binding peptide
  MOD_RES (1)..(32): Xaa is C or S

SEQ ID NO: 54296 - protein, 38 aa, Artificial Sequence; identical to SEQ ID NO: 15658
  GFR-binding peptide
  MOD_RES (2)..(3)..(37): Xaa is C or S
  MOD_RES (17)..(18)..(19)..(20)..(21): Xaa is A or G
  MOD_RES (22)..(23)..(24)..(25): Xaa is A or G or is absent

SEQ ID NO: 54297 - protein, 34 aa, Artificial Sequence; identical to SEQ ID NO: 15662
  GFR-binding peptide
  MOD_RES (34)..(34): Xaa is C or S
  MOD_RES (14)..(15)..(16)..(17)..(18): Xaa is A or G
  MOD_RES (19)..(20)..(21)..(22): Xaa is A or G or is absent

SEQ ID NO: 54298 - protein, 41 aa, Artificial Sequence; identical to SEQ ID NO: 15663
  GFR-binding peptide
  MOD_RES (5)..(6)..(38)..(40): Xaa is C or S

SEQ ID NO: 54299 - protein, 37 aa, Artificial Sequence
  GFR-binding peptide
  MOD_RES (5)..(6): Xaa is C or S
IPKAXXVPTELRSVKMAKVDEYDKVVKEVQVEMVVEG

SEQ ID NO: 54300 - protein, 39 aa, Artificial Sequence
  GFR-binding peptide
  MOD_RES (5)..(6)..(38): Xaa is C or S
IPKAXXVPTELRPVQMRKIDENEKVVKKATVDMVVEGXG

SEQ ID NO: 54301 - protein, 36 aa, Artificial Sequence; identical to SEQ ID NO: 15666
  GFR-binding peptide
  MOD_RES (2)..(3): Xaa is C or S
  MOD_RES (17)..(18)..(19)..(20)..(21): Xaa is A or G
  MOD_RES (22)..(23)..(24)..(25): Xaa is A or G or is absent

SEQ ID NO: 54302 - protein, 41 aa, Artificial Sequence
  GFR-binding peptide
  MOD_RES (6)..(7)..(40): Xaa is C or S
  MOD_RES (21)..(22)..(23)..(24)..(25): Xaa is A or G
  MOD_RES (26)..(27)..(28)..(29): Xaa is A or G or is absent
ASAAPXXVPQALSNITIQIMXXXXXXXXXIGEMSMIVRSXK

SEQ ID NO: 54303 - protein, 36 aa, Artificial Sequence; identical to SEQ ID NO: 15669
  GFR-binding peptide
  MOD_RES (5)..(6): Xaa is C or S

SEQ ID NO: 54304 - protein, 36 aa, Artificial Sequence
  GFR-binding peptide
  MOD_RES (6)..(6): Xaa is C or S
VTKPTXAPTKLRPVQVRKIDDSSNVIKKATVNMVVR

SEQ ID NO: 54305 - protein, 38 aa, Artificial Sequence
  GFR-binding peptide
  MOD_RES (3)..(3): Xaa is C or S
VQXRPTQVQLEPLPVVYYEIVRKKPIFEQLSNTLEDHL

SEQ ID NO: 54306 - protein, 36 aa, Artificial Sequence
  GFR-binding peptide
  MOD_RES (1)..(1): Xaa is C or S
XQPSRVHHEPLPVVYYEYVRKKPKLEQLSNRLEEHL

SEQ ID NO: 54307 - protein, 35 aa, Artificial Sequence
  GFR-binding peptide
QPSRVHHEPLPVVYYEYVRKKPKLEQLSNRLEEHL

SEQ ID NO: 54308 - protein, 39 aa, Artificial Sequence; identical to SEQ ID NO: 19014
  GFR-binding peptide
  MOD_RES (7)..(7): Xaa is C or S

SEQ ID NO: 54309 - protein, 36 aa, Artificial Sequence
  GFR-binding peptide
  MOD_RES (1)..(2)..(36): Xaa is C or S
  MOD_RES (16)..(17)..(18)..(19)..(20): Xaa is A or G
  MOD_RES (21)..(22)..(23)..(24): Xaa is A or G or is absent
XXVPTELRSVKMAKVXXXXXXXXXKEVQVDMVVEGX

SEQ ID NO: 54310 - protein, 34 aa, Artificial Sequence
  GFR-binding peptide
  MOD_RES (3)..(4): Xaa is C or S
KAXXVPTELSNITMQIMDEYDKVVIGEMSEMVVE

SEQ ID NO: 54311 - protein, 36 aa, Artificial Sequence; identical to SEQ ID NO: 15671
  GFR-binding peptide
  MOD_RES (5)..(6): Xaa is C or S

SEQ ID NO: 54312 - protein, 33 aa, Artificial Sequence; identical to SEQ ID NO: 19015
  GFR-binding peptide
  MOD_RES (15)..(16)..(17)..(18)..(19): Xaa is A or G
  MOD_RES (20)..(21)..(22)..(23): Xaa is A or G or is absent

SEQ ID NO: 54313 - protein, 39 aa, Artificial Sequence
  GFR-binding peptide
  MOD_RES (1)..(2)..(36)..(38): Xaa is C or S
  MOD_RES (16)..(17)..(18)..(19)..(20): Xaa is A or G
  MOD_RES (21)..(22)..(23)..(24): Xaa is A or G or is absent
XXVPTELRPVQMRKIXXXXXXXXXKKATVEMVVEGXGXR

SEQ ID NO: 54314 - protein, 40 aa, Artificial Sequence
  GFR-binding peptide
  MOD_RES (5)..(6)..(38)..(40): Xaa is C or S
VPKPXXAPTQLSNITVQIMDDSSNVIIGEMSNMVVRAXGX

SEQ ID NO: 54315 - protein, 33 aa, Artificial Sequence
  GFR-binding peptide
  MOD_RES (1)..(33): Xaa is C or S
XVPTELRPVQMRKIDEYDKVVKKATVEMVVEGX

SEQ ID NO: 54316 - protein, 38 aa, Artificial Sequence; identical to SEQ ID NO: 19018
  GFR-binding peptide
  MOD_RES (3)..(3): Xaa is C or S
  MOD_RES (19)..(20)..(21)..(22)..(23): Xaa is A or G
  MOD_RES (24)..(25)..(26)..(27): Xaa is A or G or is absent

SEQ ID NO: 54317 - protein, 39 aa, Artificial Sequence; identical to SEQ ID NO: 19019
  GFR-binding peptide
  MOD_RES (7)..(7): Xaa is C or S

SEQ ID NO: 54318 - protein, 39 aa, Artificial Sequence; identical to SEQ ID NO: 19020
  GFR-binding peptide
  MOD_RES (37)..(39): Xaa is C or S

SEQ ID NO: 54319 - protein, 37 aa, Artificial Sequence; identical to SEQ ID NO: 19021
  GFR-binding peptide
  MOD_RES (1)..(1): Xaa is C or S
  MOD_RES (17)..(18)..(19)..(20)..(21): Xaa is A or G
  MOD_RES (22)..(23)..(24)..(25): Xaa is A or G or is absent

SEQ ID NO: 54320 - protein, 43 aa, Artificial Sequence
  GFR-binding peptide
  MOD_RES (6)..(7)..(40)..(42): Xaa is C or S
  MOD_RES (21)..(22)..(23)..(24)..(25): Xaa is A or G
  MOD_RES (26)..(27)..(28)..(29): Xaa is A or G or is absent
ASAAPXXVPQALSNITIQIMXXXXXXXXXIGEMSMIVRSXKXS

SEQ ID NO: 54321 - protein, 36 aa, Artificial Sequence
  GFR-binding peptide
  MOD_RES (2)..(3)..(34)..(36): Xaa is C or S
PXXVSQDLRPVQIRKIIGKTPKIKKATVMIVKSXKX

SEQ ID NO: 54322 - protein, 34 aa, Artificial Sequence; identical to SEQ ID NO: 15675
  GFR-binding peptide
  MOD_RES (1)..(33): Xaa is C or S

SEQ ID NO: 54323 - protein, 43 aa, Artificial Sequence
  GFR-binding peptide
  MOD_RES (7)..(41)..(43): Xaa is C or S
  MOD_RES (21)..(22)..(23)..(24)..(25): Xaa is A or G
  MOD_RES (26)..(27)..(28)..(29): Xaa is A or G or is absent
NDEGLEXVPTEEEPLTMLYYXXXXXXXXXEQLSNFLQHNKXEX

SEQ ID NO: 54324 - protein, 36 aa, Artificial Sequence
  GFR-binding peptide
  MOD_RES (36)..(36): Xaa is C or S
  MOD_RES (15)..(16)..(17)..(18)..(19): Xaa is A or G
  MOD_RES (20)..(21)..(22)..(23): Xaa is A or G or is absent
PSRVHHEPLPVVYYXXXXXXXXXEQLSNRLEEHLEX

SEQ ID NO: 54325 - protein, 36 aa, Artificial Sequence
  GFR-binding peptide
  MOD_RES (4)..(5): Xaa is C or S
PKPXXAPTQLSNITVQIMDDSSNVIIGEMSNMVVRA

SEQ ID NO: 54326 - protein, 40 aa, Artificial Sequence
  GFR-binding peptide
  MOD_RES (1)..(38)..(40): Xaa is C or S
  MOD_RES (17)..(18)..(19)..(20)..(21): Xaa is A or G
  MOD_RES (22)..(23)..(24)..(25): Xaa is A or G or is absent
XRPTQVQLEPLPVVYYXXXXXXXXXEQLSNTLEDHLAXKX

SEQ ID NO: 54327 - protein, 40 aa, Artificial Sequence; identical to SEQ ID NO: 15680
  GFR-binding peptide
  MOD_RES (2)..(3)..(37)..(39): Xaa is C or S
  MOD_RES (17)..(18)..(19)..(20)..(21): Xaa is A or G
  MOD_RES (22)..(23)..(24)..(25): Xaa is A or G or is absent

SEQ ID NO: 54328 - protein, 33 aa, Artificial Sequence; identical to SEQ ID NO: 19024
  GFR-binding peptide
  MOD_RES (15)..(16)..(17)..(18)..(19): Xaa is A or G
  MOD_RES (20)..(21)..(22)..(23): Xaa is A or G or is absent

SEQ ID NO: 54329 - protein, 43 aa, Artificial Sequence; identical to SEQ ID NO: 19025
  GFR-binding peptide
  MOD_RES (4)..(41)..(43): Xaa is C or S
  MOD_RES (20)..(21)..(22)..(23)..(24): Xaa is A or G
  MOD_RES (25)..(26)..(27)..(28): Xaa is A or G or is absent

SEQ ID NO: 54330 - protein, 38 aa, Artificial Sequence; identical to SEQ ID NO: 19027
  GFR-binding peptide
  MOD_RES (3)..(37): Xaa is C or S
  MOD_RES (17)..(18)..(19)..(20)..(21): Xaa is A or G
  MOD_RES (22)..(23)..(24)..(25): Xaa is A or G or is absent

SEQ ID NO: 54331 - protein, 32 aa, Artificial Sequence
  GFR-binding peptide
  MOD_RES (14)..(15)..(16)..(17)..(18): Xaa is A or G
  MOD_RES (19)..(20)..(21)..(22): Xaa is A or G or is absent
TQVQLEPLTVLYYXXXXXXXXXEQLSNTLEDH

SEQ ID NO: 54332 - protein, 36 aa, Artificial Sequence; identical to SEQ ID NO: 19028
  GFR-binding peptide
  MOD_RES (16)..(17)..(18)..(19)..(20): Xaa is A or G
  MOD_RES (21)..(22)..(23)..(24): Xaa is A or G or is absent

SEQ ID NO: 54333 - protein, 36 aa, Artificial Sequence; identical to SEQ ID NO: 19030
  GFR-binding peptide
  MOD_RES (35)..(35): Xaa is C or S
  MOD_RES (14)..(15)..(16)..(17)..(18): Xaa is A or G
  MOD_RES (19)..(20)..(21)..(22): Xaa is A or G or is absent

SEQ ID NO: 54334 - protein, 35 aa, Artificial Sequence
  GFR-binding peptide
  MOD_RES (33)..(35): Xaa is C or S
  MOD_RES (14)..(15)..(16)..(17)..(18): Xaa is A or G
  MOD_RES (19)..(20)..(21)..(22): Xaa is A or G or is absent
VPQALRSVKIAKVXXXXXXXXXKEVQVMIVRSXKX

SEQ ID NO: 54335 - protein, 34 aa, Artificial Sequence; identical to SEQ ID NO: 15685
  GFR-binding peptide
  MOD_RES (3)..(4): Xaa is C or S

SEQ ID NO: 54336 - protein, 37 aa, Artificial Sequence; identical to SEQ ID NO: 15686
  GFR-binding peptide
  MOD_RES (4)..(5): Xaa is C or S
  MOD_RES (19)..(20)..(21)..(22)..(23): Xaa is A or G
  MOD_RES (24)..(25)..(26)..(27): Xaa is A or G or is absent

SEQ ID NO: 54337 - protein, 36 aa, Artificial Sequence
  GFR-binding peptide
  MOD_RES (2)..(3)..(34)..(36): Xaa is C or S
PXXVPQDLRPVQIRKIVGRTPKVKKATVMVVKSXKX

SEQ ID NO: 54338 - protein, 34 aa, Artificial Sequence
  GFR-binding peptide
  MOD_RES (1)..(2): Xaa is C or S
  MOD_RES (16)..(17)..(18)..(19)..(20): Xaa is A or G
  MOD_RES (21)..(22)..(23)..(24): Xaa is A or G or is absent
XXVPQALRPVQIRKIXXXXXXXXXKKATVMIVRS

SEQ ID NO: 54339 - protein, 38 aa, Artificial Sequence
  GFR-binding peptide
  MOD_RES (6)..(7)..(38): Xaa is C or S
ASAAPXXVPQALSNITIQIMVGRKPKVIGEMSMIVRSX

SEQ ID NO: 54340 - protein, 38 aa, Artificial Sequence; identical to SEQ ID NO: 15688
  GFR-binding peptide
  MOD_RES (3)..(4)..(37): Xaa is C or S
  MOD_RES (18)..(19)..(20)..(21)..(22): Xaa is A or G
  MOD_RES (23)..(24)..(25)..(26): Xaa is A or G or is absent

SEQ ID NO: 54341 - protein, 32 aa, Artificial Sequence
  GFR-binding peptide
  MOD_RES (14)..(15)..(16)..(17)..(18): Xaa is A or G
  MOD_RES (19)..(20)..(21)..(22): Xaa is A or G or is absent
TQVQLEPLPVVYYXXXXXXXXXEQLSNTLEDH

SEQ ID NO: 54342 - protein, 35 aa, Artificial Sequence
  GFR-binding peptide
  MOD_RES (34)..(34): Xaa is C or S
  MOD_RES (14)..(15)..(16)..(17)..(18): Xaa is A or G
  MOD_RES (19)..(20)..(21)..(22): Xaa is A or G or is absent
VPTELRSVKMAKVXXXXXXXXXKEVQVDMVVEGXG

SEQ ID NO: 54343 - protein, 39 aa, Artificial Sequence; identical to SEQ ID NO: 15690
  GFR-binding peptide
  MOD_RES (5)..(6)..(38): Xaa is C or S

SEQ ID NO: 54344 - protein, 40 aa, Artificial Sequence; identical to SEQ ID NO: 15692
  GFR-binding peptide
  MOD_RES (6)..(40): Xaa is C or S
  MOD_RES (20)..(21)..(22)..(23)..(24): Xaa is A or G
  MOD_RES (25)..(26)..(27)..(28): Xaa is A or G or is absent

SEQ ID NO: 54345 - protein, 41 aa, Artificial Sequence
  GFR-binding peptide
  MOD_RES (3)..(4)..(38)..(40): Xaa is C or S
  MOD_RES (18)..(19)..(20)..(21)..(22): Xaa is A or G
  MOD_RES (23)..(24)..(25)..(26): Xaa is A or G or is absent
KPXXAPTKLRSVKVAKVXXXXXXXXXKEVQVNMVVRSXGXH

SEQ ID NO: 54346 - protein, 36 aa, Artificial Sequence
  GFR-binding peptide
  MOD_RES (1)..(2)..(34)..(36): Xaa is C or S
XXVPTELRSVKMAKVDENEKVVKEVQVDMVVEGXGX

SEQ ID NO: 54347 - protein, 36 aa, Artificial Sequence
  GFR-binding peptide
  MOD_RES (34)..(36): Xaa is C or S
  MOD_RES (14)..(15)..(16)..(17)..(18): Xaa is A or G
  MOD_RES (19)..(20)..(21)..(22): Xaa is A or G or is absent
APTQLRPVQVRKIXXXXXXXXXKKATVNMVVRAXGX

SEQ ID NO: 54348 - protein, 34 aa, Artificial Sequence; identical to SEQ ID NO: 15693
  GFR-binding peptide
  MOD_RES (1)..(2)..(33): Xaa is C or S

SEQ ID NO: 54349 - protein, 33 aa, Artificial Sequence
  GFR-binding peptide
  MOD_RES (2)..(3): Xaa is C or S
PXXVPQDLRPVQIRKIVGRTPKVKKATVMVVKS

SEQ ID NO: 54350 - protein, 38 aa, Artificial Sequence
  GFR-binding peptide
  MOD_RES (3)..(4)..(38): Xaa is C or S
  MOD_RES (18)..(19)..(20)..(21)..(22): Xaa is A or G
  MOD_RES (23)..(24)..(25)..(26): Xaa is A or G or is absent
KPXXAPTQLRSVKVAKVXXXXXXXXXKEVQVNMVVRAX

SEQ ID NO: 54351 - protein, 34 aa, Artificial Sequence
  GFR-binding peptide
  MOD_RES (3)..(3): Xaa is C or S
PTXAPTKLSNITVQIMDDSSNVIIGEMSNMVVRS

SEQ ID NO: 54352 - protein, 39 aa, Artificial Sequence; identical to SEQ ID NO: 15696
  GFR-binding peptide
  MOD_RES (5)..(6): Xaa is C or S
  MOD_RES (20)..(21)..(22)..(23)..(24): Xaa is A or G
  MOD_RES (25)..(26)..(27)..(28): Xaa is A or G or is absent

SEQ ID NO: 54353 - protein, 37 aa, Artificial Sequence
  GFR-binding peptide
  MOD_RES (4)..(5): Xaa is C or S
  MOD_RES (19)..(20)..(21)..(22)..(23): Xaa is A or G
  MOD_RES (24)..(25)..(26)..(27): Xaa is A or G or is absent
AAPXXVPQALRPVQIRKIXXXXXXXXXKKATVMIVRS

SEQ ID NO: 54354 - protein, 39 aa, Artificial Sequence; identical to SEQ ID NO: 15700
  GFR-binding peptide
  MOD_RES (4)..(5)..(38): Xaa is C or S
  MOD_RES (19)..(20)..(21)..(22)..(23): Xaa is A or G
  MOD_RES (24)..(25)..(26)..(27): Xaa is A or G or is absent

SEQ ID NO: 54355 - protein, 37 aa, Artificial Sequence; identical to SEQ ID NO: 15701
  GFR-binding peptide
  MOD_RES (1)..(35)..(37): Xaa is C or S
  MOD_RES (15)..(16)..(17)..(18)..(19): Xaa is A or G
  MOD_RES (20)..(21)..(22)..(23): Xaa is A or G or is absent

SEQ ID NO: 54356 - protein, 36 aa, Artificial Sequence
  GFR-binding peptide
  MOD_RES (1)..(33)..(35): Xaa is C or S
XVPTELRPVQMRKIDENEKVVKKATVDMVVEGXGXR

SEQ ID NO: 54357 - protein, 39 aa, Artificial Sequence; identical to SEQ ID NO: 19045
  GFR-binding peptide
  MOD_RES (5)..(39): Xaa is C or S

SEQ ID NO: 54358 - protein, 39 aa, Artificial Sequence
  GFR-binding peptide
  MOD_RES (2)..(36)..(38): Xaa is C or S
  MOD_RES (16)..(17)..(18)..(19)..(20): Xaa is A or G
  MOD_RES (21)..(22)..(23)..(24): Xaa is A or G or is absent
EXVPTEEEPLTMLYYXXXXXXXXXEQLSNFLQHNKXEXR

SEQ ID NO: 54359 - protein, 41 aa, Artificial Sequence
  GFR-binding peptide
  MOD_RES (6)..(7)..(40): Xaa is C or S
  MOD_RES (21)..(22)..(23)..(24)..(25): Xaa is A or G
  MOD_RES (26)..(27)..(28)..(29): Xaa is A or G or is absent
ASASPXXVSQDLSNITIQIMXXXXXXXXXIGEMSMIVKSXK

SEQ ID NO: 54360 - protein, 33 aa, Artificial Sequence
  GFR-binding peptide
  MOD_RES (3)..(3): Xaa is C or S
PTXAPTKLSNITVQIMDDSSNVIIGEMSNMVVR

SEQ ID NO: 54361 - protein, 38 aa, Artificial Sequence; identical to SEQ ID NO: 19050
  GFR-binding peptide
  MOD_RES (36)..(38): Xaa is C or S

SEQ ID NO: 54362 - protein, 34 aa, Artificial Sequence
  GFR-binding peptide
  MOD_RES (34)..(34): Xaa is C or S
  MOD_RES (14)..(15)..(16)..(17)..(18): Xaa is A or G
  MOD_RES (19)..(20)..(21)..(22): Xaa is A or G or is absent
VPTELRSVKMAKVXXXXXXXXXKEVQVDMVVEGX

SEQ ID NO: 54363 - protein, 38 aa, Artificial Sequence; identical to SEQ ID NO: 15706
  GFR-binding peptide
  MOD_RES (3)..(35)..(37): Xaa is C or S

SEQ ID NO: 54364 - protein, 35 aa, Artificial Sequence; identical to SEQ ID NO: 15707
  GFR-binding peptide
  MOD_RES (4)..(4): Xaa is C or S

SEQ ID NO: 54365 - protein, 39 aa, Artificial Sequence
  GFR-binding peptide
  MOD_RES (2)..(3)..(36)..(38): Xaa is C or S
  MOD_RES (17)..(18)..(19)..(20)..(21): Xaa is A or G
  MOD_RES (22)..(23)..(24)..(25): Xaa is A or G or is absent
PXXVSQDLRSVKIAKVXXXXXXXXXKEVQVMIVKSXKXS

SEQ ID NO: 54366 - protein, 35 aa, Artificial Sequence; identical to SEQ ID NO: 15709
  GFR-binding peptide
  MOD_RES (1)..(33)..(35): Xaa is C or S

SEQ ID NO: 54367 - protein, 40 aa, Artificial Sequence; identical to SEQ ID NO: 19055
  GFR-binding peptide
  MOD_RES (6)..(40): Xaa is C or S

SEQ ID NO: 54368 - protein, 37 aa, Artificial Sequence; identical to SEQ ID NO: 15715
  GFR-binding peptide
  MOD_RES (2)..(3)..(36): Xaa is C or S
  MOD_RES (17)..(18)..(19)..(20)..(21): Xaa is A or G
  MOD_RES (22)..(23)..(24)..(25): Xaa is A or G or is absent

SEQ ID NO: 54369 - protein, 30 aa, Artificial Sequence
  GFR-binding peptide
VPQALRPVQIRKIVGRKPKVKKATVMIVRS

SEQ ID NO: 54370 - protein, 33 aa, Artificial Sequence
  GFR-binding peptide
PSRVHHEPLPVVYYEYVRKKPKLEQLSNRLEEH

SEQ ID NO: 54371 - protein, 36 aa, Artificial Sequence
  GFR-binding peptide
  MOD_RES (2)..(36): Xaa is C or S
  MOD_RES (16)..(17)..(18)..(19)..(20): Xaa is A or G
  MOD_RES (21)..(22)..(23)..(24): Xaa is A or G or is absent
TXAPTKLRSVKVAKVXXXXXXXXXKEVQVNMVVRSX

SEQ ID NO: 54372 - protein, 36 aa, Artificial Sequence
  GFR-binding peptide
  MOD_RES (2)..(36): Xaa is C or S
EXVPTEEEPLPMVYYRIKPHQGQHEQLSNFLQHNKX

SEQ ID NO: 54373 - protein, 32 aa, Artificial Sequence
  GFR-binding peptide
  MOD_RES (1)..(32): Xaa is C or S
XVPQDLRPVQIRKIVGRTPKVKKATVMVVKSX

SEQ ID NO: 54374 - protein, 32 aa, Artificial Sequence; identical to SEQ ID NO: 19059
  GFR-binding peptide
  MOD_RES (14)..(15)..(16)..(17)..(18): Xaa is A or G
  MOD_RES (19)..(20)..(21)..(22): Xaa is A or G or is absent

SEQ ID NO: 54375 - protein, 33 aa, Artificial Sequence
  GFR-binding peptide
SRVHHEPLTVLYYEYVRKKPKLEQLSNRLEEHL

SEQ ID NO: 54376 - protein, 33 aa, Artificial Sequence
  GFR-binding peptide
  MOD_RES (2)..(3): Xaa is C or S
PXXAPTKLSNITVQIMDDSSNVIIGEMSNMVVR

SEQ ID NO: 54377 - protein, 37 aa, Artificial Sequence
  GFR-binding peptide
  MOD_RES (1)..(34)..(36): Xaa is C or S
  MOD_RES (15)..(16)..(17)..(18)..(19): Xaa is A or G
  MOD_RES (20)..(21)..(22)..(23): Xaa is A or G or is absent
XVPQDLRPVQIRKIXXXXXXXXXKKATVMVVKSXKXS

SEQ ID NO: 54378 - protein, 41 aa, Artificial Sequence
  GFR-binding peptide
  MOD_RES (4)..(5)..(38)..(40): Xaa is C or S
  MOD_RES (19)..(20)..(21)..(22)..(23): Xaa is A or G
  MOD_RES (24)..(25)..(26)..(27): Xaa is A or G or is absent
ASPXXVSQDLRPVQIRKIXXXXXXXXXKKATVMIVKSXKXS

SEQ ID NO: 54379 - protein, 42 aa, Artificial Sequence
  GFR-binding peptide
  MOD_RES (5)..(6)..(40)..(42): Xaa is C or S
  MOD_RES (20)..(21)..(22)..(23)..(24): Xaa is A or G
  MOD_RES (25)..(26)..(27)..(28): Xaa is A or G or is absent
IPKAXXVPTELSNITMQIMXXXXXXXXXIGEMSEMVVEGXGX

SEQ ID NO: 54380 - protein, 34 aa, Artificial Sequence
  GFR-binding peptide
  MOD_RES (1)..(33): Xaa is C or S
XAPTKLRPVQVRKIDDSSNVIKKATVNMVVRSXG

SEQ ID NO: 54381 - protein, 33 aa, Artificial Sequence
  GFR-binding peptide
  MOD_RES (1)..(32): Xaa is C or S
XVPQDLRPVQIRKIVGRTPKVKKATVMVVKSXK

SEQ ID NO: 54382 - protein, 38 aa, Artificial Sequence
  GFR-binding peptide
  MOD_RES (1)..(2)..(35)..(37): Xaa is C or S
  MOD_RES (16)..(17)..(18)..(19)..(20): Xaa is A or G
  MOD_RES (21)..(22)..(23)..(24): Xaa is A or G or is absent
XXVPQDLSNITIQIMXXXXXXXXXIGEMSMVVKSXKXS

SEQ ID NO: 54383 - protein, 43 aa, Artificial Sequence; identical to SEQ ID NO: 15722
  GFR-binding peptide
  MOD_RES (7)..(41)..(43): Xaa is C or S
  MOD_RES (21)..(22)..(23)..(24)..(25): Xaa is A or G
  MOD_RES (26)..(27)..(28)..(29): Xaa is A or G or is absent

SEQ ID NO: 54384 - protein, 41 aa, Artificial Sequence; identical to SEQ ID NO: 19063
  GFR-binding peptide
  MOD_RES (5)..(5): Xaa is C or S
  MOD_RES (21)..(22)..(23)..(24)..(25): Xaa is A or G
  MOD_RES (26)..(27)..(28)..(29): Xaa is A or G or is absent

SEQ ID NO: 54385 - protein, 41 aa, Artificial Sequence
  GFR-binding peptide
  MOD_RES (5)..(6)..(38)..(40): Xaa is C or S
IPKAXXVPTELRPVQMRKIDENEKVVKKATVDMVVEGXGXR

SEQ ID NO: 54386 - protein, 40 aa, Artificial Sequence
  GFR-binding peptide
  MOD_RES (3)..(4)..(37)..(39): Xaa is C or S
  MOD_RES (18)..(19)..(20)..(21)..(22): Xaa is A or G
  MOD_RES (23)..(24)..(25)..(26): Xaa is A or G or is absent
SPXXVSQDLRPVQIRKIXXXXXXXXXKKATVMIVKSXKXS

SEQ ID NO: 54387 - protein, 36 aa, Artificial Sequence; identical to SEQ ID NO: 15724
  GFR-binding peptide
  MOD_RES (3)..(4): Xaa is C or S
  MOD_RES (18)..(19)..(20)..(21)..(22): Xaa is A or G
  MOD_RES (23)..(24)..(25)..(26): Xaa is A or G or is absent

SEQ ID NO: 54388 - protein, 34 aa, Artificial Sequence
  GFR-binding peptide
  MOD_RES (2)..(3): Xaa is C or S
PXXAPTKLRSVKVAKVDDSSNVIKEVQVNMVVRS

SEQ ID NO: 54389 - protein, 41 aa, Artificial Sequence; identical to SEQ ID NO: 15725
  GFR-binding peptide
  MOD_RES (5)..(6)..(40): Xaa is C or S
  MOD_RES (20)..(21)..(22)..(23)..(24): Xaa is A or G
  MOD_RES (25)..(26)..(27)..(28): Xaa is A or G or is absent

SEQ ID NO: 54390 - protein, 45 aa, Artificial Sequence; identical to SEQ ID NO: 19066
  GFR-binding peptide
  MOD_RES (5)..(42)..(44): Xaa is C or S
  MOD_RES (21)..(22)..(23)..(24)..(25): Xaa is A or G
  MOD_RES (26)..(27)..(28)..(29): Xaa is A or G or is absent

SEQ ID NO: 54391 - protein, 35 aa, Artificial Sequence; identical to SEQ ID NO: 15728
  GFR-binding peptide
  MOD_RES (1)..(35): Xaa is C or S
  MOD_RES (15)..(16)..(17)..(18)..(19): Xaa is A or G
  MOD_RES (20)..(21)..(22)..(23): Xaa is A or G or is absent

SEQ ID NO: 54392 - protein, 34 aa, Artificial Sequence
  GFR-binding peptide
  MOD_RES (16)..(17)..(18)..(19)..(20): Xaa is A or G
  MOD_RES (21)..(22)..(23)..(24): Xaa is A or G or is absent
QPSRVHHEPLTVLYYXXXXXXXXXEQLSNRLEEH

SEQ ID NO: 54393 - protein, 38 aa, Artificial Sequence; identical to SEQ ID NO: 19067
  GFR-binding peptide
  MOD_RES (35)..(37): Xaa is C or S
  MOD_RES (14)..(15)..(16)..(17)..(18): Xaa is A or G
  MOD_RES (19)..(20)..(21)..(22): Xaa is A or G or is absent

SEQ ID NO: 54394 - protein, 36 aa, Artificial Sequence
  GFR-binding peptide
  MOD_RES (34)..(36): Xaa is C or S
  MOD_RES (14)..(15)..(16)..(17)..(18): Xaa is A or G
  MOD_RES (19)..(20)..(21)..(22): Xaa is A or G or is absent
VPTELRSVKMAKVXXXXXXXXXKEVQVEMVVEGXGX

SEQ ID NO: 54395 - protein, 40 aa, Artificial Sequence
  GFR-binding peptide
  MOD_RES (3)..(4)..(38)..(40): Xaa is C or S
  MOD_RES (18)..(19)..(20)..(21)..(22): Xaa is A or G
  MOD_RES (23)..(24)..(25)..(26): Xaa is A or G or is absent
KPXXAPTKLRSVKVAKVXXXXXXXXXKEVQVNMVVRSXGX

SEQ ID NO: 54396 - protein, 41 aa, Artificial Sequence
  GFR-binding peptide
  MOD_RES (5)..(6)..(38)..(40): Xaa is C or S
VPKPXXAPTQLRPVQVRKIDDSSNVIKKATVNMVVRAXGXH

SEQ ID NO: 54397 - protein, 37 aa, Artificial Sequence; identical to SEQ ID NO: 15733
  GFR-binding peptide
  MOD_RES (6)..(7): Xaa is C or S

SEQ ID NO: 54398 - protein, 36 aa, Artificial Sequence
  GFR-binding peptide
  MOD_RES (3)..(4)..(35): Xaa is C or S
APXXVPQALSNITIQIMVGRKPKVIGEMSMIVRSXK

SEQ ID NO: 54399 - protein, 35 aa, Artificial Sequence
  GFR-binding peptide
  MOD_RES (4)..(5): Xaa is C or S
PKPXXAPTQLRSVKVAKVDDSSNVIKEVQVNMVVR

SEQ ID NO: 54400 - protein, 40 aa, Artificial Sequence
  GFR-binding peptide
  MOD_RES (5)..(6)..(39): Xaa is C or S
  MOD_RES (20)..(21)..(22)..(23)..(24): Xaa is A or G
  MOD_RES (25)..(26)..(27)..(28): Xaa is A or G or is absent
SASPXXVPQDLRSVKIAKVXXXXXXXXXKEVQVMVVKSXK

SEQ ID NO: 54401 - protein, 42 aa, Artificial Sequence; identical to SEQ ID NO: 19071
  GFR-binding peptide
  MOD_RES (7)..(41): Xaa is C or S

SEQ ID NO: 54402 - protein, 38 aa, Artificial Sequence
  GFR-binding peptide
  MOD_RES (3)..(4)..(38): Xaa is C or S
  MOD_RES (18)..(19)..(20)..(21)..(22): Xaa is A or G
  MOD_RES (23)..(24)..(25)..(26): Xaa is A or G or is absent
KPXXAPTKLRPVQVRKIXXXXXXXXXKKATVNMVVRSX

SEQ ID NO: 54403 - protein, 41 aa, Artificial Sequence; identical to SEQ ID NO: 15741
  GFR-binding peptide
  MOD_RES (4)..(5)..(39)..(41): Xaa is C or S
  MOD_RES (19)..(20)..(21)..(22)..(23): Xaa is A or G
  MOD_RES (24)..(25)..(26)..(27): Xaa is A or G or is absent

SEQ ID NO: 54404 - protein, 41 aa, Artificial Sequence
  GFR-binding peptide
  MOD_RES (5)..(6)..(39)..(41): Xaa is C or S
  MOD_RES (20)..(21)..(22)..(23)..(24): Xaa is A or G
  MOD_RES (25)..(26)..(27)..(28): Xaa is A or G or is absent
SASPXXVSQDLRSVKIAKVXXXXXXXXXKEVQVMIVKSXKX

SEQ ID NO: 54405 - protein, 37 aa, Artificial Sequence; identical to SEQ ID NO: 19072
  GFR-binding peptide
  MOD_RES (3)..(37): Xaa is C or S
  MOD_RES (17)..(18)..(19)..(20)..(21): Xaa is A or G
  MOD_RES (22)..(23)..(24)..(25): Xaa is A or G or is absent

SEQ ID NO: 54406 - protein, 34 aa, Artificial Sequence
  GFR-binding peptide
  MOD_RES (1)..(2): Xaa is C or S
  MOD_RES (16)..(17)..(18)..(19)..(20): Xaa is A or G
  MOD_RES (21)..(22)..(23)..(24): Xaa is A or G or is absent
XXVPTELRSVKMAKVXXXXXXXXXKEVQVEMVVE

SEQ ID NO: 54407 - protein, 38 aa, Artificial Sequence; identical to SEQ ID NO: 19075
  GFR-binding peptide
  MOD_RES (36)..(38): Xaa is C or S

SEQ ID NO: 54408 - protein, 36 aa, Artificial Sequence
  GFR-binding peptide
  MOD_RES (4)..(5): Xaa is C or S
PKPXXAPTQLRPVQVRKIDDSSNVIKKATVNMVVRA

SEQ ID NO: 54409 - protein, 39 aa, Artificial Sequence
  GFR-binding peptide
  MOD_RES (37)..(39): Xaa is C or S
  MOD_RES (16)..(17)..(18)..(19)..(20): Xaa is A or G
  MOD_RES (21)..(22)..(23)..(24): Xaa is A or G or is absent
RPTQVQLEPLTVLYYXXXXXXXXXEQLSNTLEDHLAXKX

SEQ ID NO: 54410 - protein, 36 aa, Artificial Sequence; identical to SEQ ID NO: 15743
  GFR-binding peptide
  MOD_RES (4)..(5): Xaa is C or S

SEQ ID NO: 54411 - protein, 33 aa, Artificial Sequence
  GFR-binding peptide
  MOD_RES (33)..(33): Xaa is C or S
  MOD_RES (14)..(15)..(16)..(17)..(18): Xaa is A or G
  MOD_RES (19)..(20)..(21)..(22): Xaa is A or G or is absent
VPQALRPVQIRKIXXXXXXXXXKKATVMIVRSX

SEQ ID NO: 54412 - protein, 38 aa, Artificial Sequence
  GFR-binding peptide
  MOD_RES (2)..(2): Xaa is C or S
KXQPSRVHHEPLPVVYYEYVRKKPKLEQLSNRLEEHLE

SEQ ID NO: 54413 - protein, 39 aa, Artificial Sequence
  GFR-binding peptide
  MOD_RES (2)..(3)..(36)..(38): Xaa is C or S
  MOD_RES (17)..(18)..(19)..(20)..(21): Xaa is A or G
  MOD_RES (22)..(23)..(24)..(25): Xaa is A or G or is absent
PXXVPQDLRPVQIRKIXXXXXXXXXKKATVMVVKSXKXS

SEQ ID NO: 54414 - protein, 37 aa, Artificial Sequence
  GFR-binding peptide
  MOD_RES (3)..(4)..(37): Xaa is C or S
  MOD_RES (18)..(19)..(20)..(21)..(22): Xaa is A or G
  MOD_RES (23)..(24)..(25)..(26): Xaa is A or G or is absent
SPXXVSQDLRSVKIAKVXXXXXXXXXKEVQVMIVKSX

SEQ ID NO: 54415 - protein, 38 aa, Artificial Sequence
  GFR-binding peptide
  MOD_RES (3)..(4)..(36)..(38): Xaa is C or S
KAXXVPTELSNITMQIMDENEKVVIGEMSDMVVEGXGX

SEQ ID NO: 54416 - protein, 34 aa, Artificial Sequence
  GFR-binding peptide
  MOD_RES (2)..(2): Xaa is C or S
  MOD_RES (16)..(17)..(18)..(19)..(20): Xaa is A or G
  MOD_RES (21)..(22)..(23)..(24): Xaa is A or G or is absent
EXVPTEEEPLPMVYYXXXXXXXXXEQLSNFLQHN

SEQ ID NO: 54417 - protein, 38 aa, Artificial Sequence; identical to SEQ ID NO: 15747
  GFR-binding peptide
  MOD_RES (2)..(3)..(37): Xaa is C or S
  MOD_RES (17)..(18)..(19)..(20)..(21): Xaa is A or G
  MOD_RES (22)..(23)..(24)..(25): Xaa is A or G or is absent

SEQ ID NO: 54418 - protein, 39 aa, Artificial Sequence; identical to SEQ ID NO: 15749
  GFR-binding peptide
  MOD_RES (3)..(4)..(38): Xaa is C or S
  MOD_RES (18)..(19)..(20)..(21)..(22): Xaa is A or G
  MOD_RES (23)..(24)..(25)..(26): Xaa is A or G or is absent

SEQ ID NO: 54419 - protein, 39 aa, Artificial Sequence
  GFR-binding peptide
  MOD_RES (5)..(6)..(38): Xaa is C or S
IPKAXXVPTELRPVQMRKIDEYDKVVKKATVEMVVEGXG

SEQ ID NO: 54420 - protein, 41 aa, Artificial Sequence; identical to SEQ ID NO: 15751
  GFR-binding peptide
  MOD_RES (6)..(7)..(40): Xaa is C or S
  MOD_RES (21)..(22)..(23)..(24)..(25): Xaa is A or G
  MOD_RES (26)..(27)..(28)..(29): Xaa is A or G or is absent

SEQ ID NO: 54421 - protein, 34 aa, Artificial Sequence
  GFR-binding peptide
  MOD_RES (3)..(4): Xaa is C or S
KAXXVPTELSNITMQIMDENEKVVIGEMSDMVVE

SEQ ID NO: 54422 - protein, 32 aa, Artificial Sequence; identical to SEQ ID NO: 15754
  GFR-binding peptide
  MOD_RES (32)..(32): Xaa is C or S

SEQ ID NO: 54423 - protein, 39 aa, Artificial Sequence; identical to SEQ ID NO: 19081
  GFR-binding peptide
  MOD_RES (36)..(38): Xaa is C or S

SEQ ID NO: 54424 - protein, 36 aa, Artificial Sequence
  GFR-binding peptide
  MOD_RES (2)..(3)..(34)..(36): Xaa is C or S
PXXVSQDLRSVKIAKVIGKTPKIKEVQVMIVKSXKX

SEQ ID NO: 54425 - protein, 39 aa, Artificial Sequence; identical to SEQ ID NO: 19082
  GFR-binding peptide
  MOD_RES (1)..(38): Xaa is C or S

SEQ ID NO: 54426 - protein, 42 aa, Artificial Sequence
  GFR-binding peptide
  MOD_RES (5)..(6)..(39)..(41): Xaa is C or S
  MOD_RES (20)..(21)..(22)..(23)..(24): Xaa is A or G
  MOD_RES (25)..(26)..(27)..(28): Xaa is A or G or is absent
SASPXXVSQDLRSVKIAKVXXXXXXXXXKEVQVMIVKSXKXS

SEQ ID NO: 54427 - protein, 44 aa, Artificial Sequence
  GFR-binding peptide
  MOD_RES (7)..(41)..(43): Xaa is C or S
NDEGLEXVPTEEEPLTMLYYRIKPHQGQHEQLSNFLQHNKXEXR

SEQ ID NO: 54428 - protein, 41 aa, Artificial Sequence; identical to SEQ ID NO: 15756
  GFR-binding peptide
  MOD_RES (6)..(7)..(41): Xaa is C or S
  MOD_RES (21)..(22)..(23)..(24)..(25): Xaa is A or G
  MOD_RES (26)..(27)..(28)..(29): Xaa is A or G or is absent

SEQ ID NO: 54429 - protein, 40 aa, Artificial Sequence
  GFR-binding peptide
  MOD_RES (1)..(38)..(40): Xaa is C or S
  MOD_RES (17)..(18)..(19)..(20)..(21): Xaa is A or G
  MOD_RES (22)..(23)..(24)..(25): Xaa is A or G or is absent
XQPSRVHHEPLTVLYYXXXXXXXXXEQLSNRLEEHLEXAX

SEQ ID NO: 54430 - protein, 37 aa, Artificial Sequence; identical to SEQ ID NO: 19085
  GFR-binding peptide
  MOD_RES (37)..(37): Xaa is C or S
  MOD_RES (16)..(17)..(18)..(19)..(20): Xaa is A or G
  MOD_RES (21)..(22)..(23)..(24): Xaa is A or G or is absent

SEQ ID NO: 54431 - protein, 40 aa, Artificial Sequence
  GFR-binding peptide
  MOD_RES (5)..(39): Xaa is C or S
  MOD_RES (19)..(20)..(21)..(22)..(23): Xaa is A or G
  MOD_RES (24)..(25)..(26)..(27): Xaa is A or G or is absent
EGLEXVPTEEEPLPMVYYXXXXXXXXXEQLSNFLQHNKXE

SEQ ID NO: 54432 - protein, 33 aa, Artificial Sequence; identical to SEQ ID NO: 19086
  GFR-binding peptide
  MOD_RES (14)..(15)..(16)..(17)..(18): Xaa is A or G
  MOD_RES (19)..(20)..(21)..(22): Xaa is A or G or is absent

SEQ ID NO: 54433 - protein, 39 aa, Artificial Sequence
  GFR-binding peptide
  MOD_RES (1)..(2)..(36)..(38): Xaa is C or S
  MOD_RES (16)..(17)..(18)..(19)..(20): Xaa is A or G
  MOD_RES (21)..(22)..(23)..(24): Xaa is A or G or is absent
XXVPTELRSVKMAKVXXXXXXXXXKEVQVEMVVEGXGXR

SEQ ID NO: 54434 - protein, 36 aa, Artificial Sequence
  GFR-binding peptide
  MOD_RES (2)..(3)..(34)..(36): Xaa is C or S
PXXVPQALRSVKIAKVVGRKPKVKEVQVMIVRSXKX

SEQ ID NO: 54435 - protein, 39 aa, Artificial Sequence; identical to SEQ ID NO: 19088
  GFR-binding peptide
  MOD_RES (5)..(39): Xaa is C or S

SEQ ID NO: 54436 - protein, 36 aa, Artificial Sequence
  GFR-binding peptide
  MOD_RES (1)..(33)..(35): Xaa is C or S
XVPTELSNITMQIMDEYDKVVIGEMSEMVVEGXGXR

SEQ ID NO: 54437 - protein, 42 aa, Artificial Sequence
  GFR-binding peptide
  MOD_RES (4)..(5)..(39)..(41): Xaa is C or S
  MOD_RES (19)..(20)..(21)..(22)..(23): Xaa is A or G
  MOD_RES (24)..(25)..(26)..(27): Xaa is A or G or is absent
PKAXXVPTELRSVKMAKVXXXXXXXXXKEVQVDMVVEGXGXR

SEQ ID NO: 54438 - protein, 39 aa, Artificial Sequence; identical to SEQ ID NO: 15758
  GFR-binding peptide
  MOD_RES (6)..(7): Xaa is C or S
  MOD_RES (21)..(22)..(23)..(24)..(25): Xaa is A or G
  MOD_RES (26)..(27)..(28)..(29): Xaa is A or G or is absent

SEQ ID NO: 54439 - protein, 39 aa, Artificial Sequence; identical to SEQ ID NO: 15759
  GFR-binding peptide
  MOD_RES (3)..(4)..(36)..(38): Xaa is C or S

SEQ ID NO: 54440 - protein, 38 aa, Artificial Sequence
  GFR-binding peptide
  MOD_RES (6)..(7): Xaa is C or S
TVPKPXXAPTQLRSVKVAKVDDSSNVIKEVQVNMVVRA

SEQ ID NO: 54441 - protein, 36 aa, Artificial Sequence; identical to SEQ ID NO: 15761
  GFR-binding peptide
  MOD_RES (3)..(4)..(36): Xaa is C or S

SEQ ID NO: 54442 - protein, 39 aa, Artificial Sequence
  GFR-binding peptide
  MOD_RES (2)..(39): Xaa is C or S
  MOD_RES (18)..(19)..(20)..(21)..(22): Xaa is A or G
  MOD_RES (23)..(24)..(25)..(26): Xaa is A or G or is absent
KXQPSRVHHEPLPVVYYXXXXXXXXXEQLSNRLEEHLEX

SEQ ID NO: 54443 - protein, 35 aa, Artificial Sequence
  GFR-binding peptide
  MOD_RES (1)..(35): Xaa is C or S
  MOD_RES (15)..(16)..(17)..(18)..(19): Xaa is A or G
  MOD_RES (20)..(21)..(22)..(23): Xaa is A or G or is absent
XAPTKLSNITVQIMXXXXXXXXXIGEMSNMVVRSX

SEQ ID NO: 54444 - protein, 38 aa, Artificial Sequence; identical to SEQ ID NO: 19092
  GFR-binding peptide
  MOD_RES (2)..(36)..(38): Xaa is C or S

SEQ ID NO: 54445 - protein, 31 aa, Artificial Sequence; identical to SEQ ID NO: 15767
  GFR-binding peptide
  MOD_RES (1)..(1): Xaa is C or S

SEQ ID NO: 54446 - protein, 34 aa, Artificial Sequence
  GFR-binding peptide
  MOD_RES (3)..(3): Xaa is C or S
PTXAPTKLRPVQVRKIDDSSNVIKKATVNMVVRS

SEQ ID NO: 54447 - protein, 35 aa, Artificial Sequence; identical to SEQ ID NO: 15770
  GFR-binding peptide
  MOD_RES (2)..(3)..(35): Xaa is C or S

SEQ ID NO: 54448 - protein, 36 aa, Artificial Sequence
  GFR-binding peptide
  MOD_RES (2)..(3): Xaa is C or S
  MOD_RES (17)..(18)..(19)..(20)..(21): Xaa is A or G
  MOD_RES (22)..(23)..(24)..(25): Xaa is A or G or is absent
PXXAPTQLRPVQVRKIXXXXXXXXXKKATVNMVVRA

SEQ ID NO: 54449 - protein, 39 aa, Artificial Sequence; identical to SEQ ID NO: 15773
  GFR-binding peptide
  MOD_RES (4)..(5)..(37)..(39): Xaa is C or S

SEQ ID NO: 54450 - protein, 38 aa, Artificial Sequence; identical to SEQ ID NO: 19095
  GFR-binding peptide
  MOD_RES (35)..(37): Xaa is C or S

SEQ ID NO: 54451 - protein, 31 aa, Artificial Sequence
  GFR-binding peptide
  MOD_RES (1)..(1): Xaa is C or S
XAPTQLRSVKVAKVDDSSNVIKEVQVNMVVR

SEQ ID NO: 54452 - protein, 32 aa, Artificial Sequence
  GFR-binding peptide
  MOD_RES (1)..(2): Xaa is C or S
XXAPTKLSNITVQIMDDSSNVIIGEMSNMVVR

SEQ ID NO: 54453 - protein, 38 aa, Artificial Sequence
  GFR-binding peptide
  MOD_RES (2)..(2): Xaa is C or S
  MOD_RES (18)..(19)..(20)..(21)..(22): Xaa is A or G
  MOD_RES (23)..(24)..(25)..(26): Xaa is A or G or is absent
QXRPTQVQLEPLPVVYYXXXXXXXXXEQLSNTLEDHLA

SEQ ID NO: 54454 - protein, 36 aa, Artificial Sequence
  GFR-binding peptide
  MOD_RES (4)..(5): Xaa is C or S
PKPXXAPTKLSNITVQIMDDSSNVIIGEMSNMVVRS

SEQ ID NO: 54455 - protein, 38 aa, Artificial Sequence
  GFR-binding peptide
  MOD_RES (1)..(2)..(35)..(37): Xaa is C or S
  MOD_RES (16)..(17)..(18)..(19)..(20): Xaa is A or G
  MOD_RES (21)..(22)..(23)..(24): Xaa is A or G or is absent
XXVPQDLRPVQIRKIXXXXXXXXXKKATVMVVKSXKXS

SEQ ID NO: 54456 - protein, 32 aa, Artificial Sequence
  GFR-binding peptide
  MOD_RES (14)..(15)..(16)..(17)..(18): Xaa is A or G
  MOD_RES (19)..(20)..(21)..(22): Xaa is A or G or is absent
VPTELSNITMQIMXXXXXXXXXIGEMSDMVVE

SEQ ID NO: 54457 - protein, 40 aa, Artificial Sequence; identical to SEQ ID NO: 15777
  GFR-binding peptide
  MOD_RES (6)..(7): Xaa is C or S
  MOD_RES (21)..(22)..(23)..(24)..(25): Xaa is A or G
  MOD_RES (26)..(27)..(28)..(29): Xaa is A or G or is absent

SEQ ID NO: 54458 - protein, 34 aa, Artificial Sequence
  GFR-binding peptide
PTQVQLEPLPVVYYEIVRKKPIFEQLSNTLEDHL

SEQ ID NO: 54459 - protein, 37 aa, Artificial Sequence
  GFR-binding peptide
  MOD_RES (1)..(2)..(34)..(36): Xaa is C or S
XXVPTELRPVQMRKIDENEKVVKKATVDMVVEGXGXR

SEQ ID NO: 54460 - protein, 38 aa, Artificial Sequence; identical to SEQ ID NO: 15778
  GFR-binding peptide
  MOD_RES (2)..(36)..(38): Xaa is C or S
  MOD_RES (16)..(17)..(18)..(19)..(20): Xaa is A or G
  MOD_RES (21)..(22)..(23)..(24): Xaa is A or G or is absent

SEQ ID NO: 54461 - protein, 33 aa, Artificial Sequence
  GFR-binding peptide
  MOD_RES (2)..(3): Xaa is C or S
PXXVSQDLSNITIQIMIGKTPKIIGEMSMIVKS

SEQ ID NO: 54462 - protein, 34 aa, Artificial Sequence
  GFR-binding peptide
  MOD_RES (1)..(2)..(34): Xaa is C or S
XXVPTELRPVQMRKIDENEKVVKKATVDMVVEGX

SEQ ID NO: 54463 - protein, 39 aa, Artificial Sequence
  GFR-binding peptide
  MOD_RES (1)..(2)..(36)..(38): Xaa is C or S
  MOD_RES (16)..(17)..(18)..(19)..(20): Xaa is A or G
  MOD_RES (21)..(22)..(23)..(24): Xaa is A or G or is absent
XXVPTELSNITMQIMXXXXXXXXXIGEMSDMVVEGXGXR

SEQ ID NO: 54464 - protein, 39 aa, Artificial Sequence
  GFR-binding peptide
  MOD_RES (4)..(5)..(39): Xaa is C or S
  MOD_RES (19)..(20)..(21)..(22)..(23): Xaa is A or G
  MOD_RES (24)..(25)..(26)..(27): Xaa is A or G or is absent
PKPXXAPTKLRSVKVAKVXXXXXXXXXKEVQVNMVVRSX

SEQ ID NO: 54465 - protein, 39 aa, Artificial Sequence
  GFR-binding peptide
  MOD_RES (6)..(7)..(38): Xaa is C or S
ASAAPXXVPQALSNITIQIMVGRKPKVIGEMSMIVRSXK

SEQ ID NO: 54466 - protein, 42 aa, Artificial Sequence; identical to SEQ ID NO: 19102
  GFR-binding peptide
  MOD_RES (5)..(42): Xaa is C or S
  MOD_RES (21)..(22)..(23)..(24)..(25): Xaa is A or G
  MOD_RES (26)..(27)..(28)..(29): Xaa is A or G or is absent

SEQ ID NO: 54467 - protein, 39 aa, Artificial Sequence; identical to SEQ ID NO: 19103
  GFR-binding peptide
  MOD_RES (37)..(39): Xaa is C or S

SEQ ID NO: 54468 - protein, 35 aa, Artificial Sequence
  GFR-binding peptide
  MOD_RES (1)..(2): Xaa is C or S
  MOD_RES (16)..(17)..(18)..(19)..(20): Xaa is A or G
  MOD_RES (21)..(22)..(23)..(24): Xaa is A or G or is absent
XXAPTQLRPVQVRKIXXXXXXXXXKKATVNMVVRA

SEQ ID NO: 54469 - protein, 39 aa, Artificial Sequence
  GFR-binding peptide
  MOD_RES (4)..(5)..(37)..(39): Xaa is C or S
PKAXXVPTELSNITMQIMDENEKVVIGEMSDMVVEGXGX

SEQ ID NO: 54470 - protein, 36 aa, Artificial Sequence; identical to SEQ ID NO: 15785
  GFR-binding peptide
  MOD_RES (4)..(5)..(36): Xaa is C or S

SEQ ID NO: 54471 - protein, 42 aa, Artificial Sequence
  GFR-binding peptide
  MOD_RES (6)..(40)..(42): Xaa is C or S
DEGLEXVPTEEEPLTMLYYRIKPHQGQHEQLSNFLQHNKXEX

SEQ ID NO: 54472 - protein, 39 aa, Artificial Sequence
  GFR-binding peptide
  MOD_RES (3)..(4)..(38): Xaa is C or S
  MOD_RES (18)..(19)..(20)..(21)..(22): Xaa is A or G
  MOD_RES (23)..(24)..(25)..(26): Xaa is A or G or is absent
KAXXVPTELRSVKMAKVXXXXXXXXXKEVQVEMVVEGXG

SEQ ID NO: 54473 - protein, 36 aa, Artificial Sequence
  GFR-binding peptide
  MOD_RES (3)..(4): Xaa is C or S
  MOD_RES (18)..(19)..(20)..(21)..(22): Xaa is A or G
  MOD_RES (23)..(24)..(25)..(26): Xaa is A or G or is absent
KPXXAPTKLRSVKVAKVXXXXXXXXXKEVQVNMVVR

SEQ ID NO: 54474 - protein, 40 aa, Artificial Sequence; identical to SEQ ID NO: 19113
  GFR-binding peptide
  MOD_RES (6)..(40): Xaa is C or S
  MOD_RES (20)..(21)..(22)..(23)..(24): Xaa is A or G
  MOD_RES (25)..(26)..(27)..(28): Xaa is A or G or is absent

SEQ ID NO: 54475 - protein, 38 aa, Artificial Sequence
  GFR-binding peptide
  MOD_RES (2)..(3)..(35)..(37): Xaa is C or S
PXXAPTQLRSVKVAKVDDSSNVIKEVQVNMVVRAXGXH

SEQ ID NO: 54476 - protein, 34 aa, Artificial Sequence
  GFR-binding peptide
  MOD_RES (1)..(2): Xaa is C or S
  MOD_RES (16)..(17)..(18)..(19)..(20): Xaa is A or G
  MOD_RES (21)..(22)..(23)..(24): Xaa is A or G or is absent
XXAPTKLSNITVQIMXXXXXXXXXIGEMSNMVVR

SEQ ID NO: 54477 - protein, 36 aa, Artificial Sequence
  GFR-binding peptide
  MOD_RES (34)..(36): Xaa is C or S
  MOD_RES (14)..(15)..(16)..(17)..(18): Xaa is A or G
  MOD_RES (19)..(20)..(21)..(22): Xaa is A or G or is absent
APTQLRSVKVAKVXXXXXXXXXKEVQVNMVVRAXGX

SEQ ID NO: 54478 - protein, 38 aa, Artificial Sequence
  GFR-binding peptide
  MOD_RES (2)..(3)..(37): Xaa is C or S
  MOD_RES (17)..(18)..(19)..(20)..(21): Xaa is A or G
  MOD_RES (22)..(23)..(24)..(25): Xaa is A or G or is absent
AXXVPTELRSVKMAKVXXXXXXXXXKEVQVDMVVEGXG

SEQ ID NO: 54479 - protein, 31 aa, Artificial Sequence
  GFR-binding peptide
  MOD_RES (31)..(31): Xaa is C or S
VPQDLSNITIQIMVGRTPKVIGEMSMVVKSX

SEQ ID NO: 54480 - protein, 36 aa, Artificial Sequence; identical to SEQ ID NO: 15788
  GFR-binding peptide
  MOD_RES (4)..(5): Xaa is C or S

SEQ ID NO: 54481 - protein, 42 aa, Artificial Sequence
  GFR-binding peptide
  MOD_RES (5)..(6)..(40)..(42): Xaa is C or S
  MOD_RES (20)..(21)..(22)..(23)..(24): Xaa is A or G
  MOD_RES (25)..(26)..(27)..(28): Xaa is A or G or is absent
IPKAXXVPTELRSVKMAKVXXXXXXXXXKEVQVEMVVEGXGX

SEQ ID NO: 54482 - protein, 39 aa, Artificial Sequence; identical to SEQ ID NO: 19117
  GFR-binding peptide
  MOD_RES (36)..(38): Xaa is C or S

SEQ ID NO: 54483 - protein, 34 aa, Artificial Sequence; identical to SEQ ID NO: 15789
  GFR-binding peptide
  MOD_RES (3)..(4): Xaa is C or S

SEQ ID NO: 54484 - protein, 35 aa, Artificial Sequence
  GFR-binding peptide
  MOD_RES (1)..(33)..(35): Xaa is C or S
XVPTELSNITMQIMDEYDKVVIGEMSEMVVEGXGX

SEQ ID NO: 54485 - protein, 40 aa, Artificial Sequence
  GFR-binding peptide
  MOD_RES (2)..(39): Xaa is C or S
KXQPSRVHHEPLPVVYYEYVRKKPKLEQLSNRLEEHLEXA

SEQ ID NO: 54486 - protein, 43 aa, Artificial Sequence; identical to SEQ ID NO: 19118
  GFR-binding peptide
  MOD_RES (5)..(42): Xaa is C or S
  MOD_RES (21)..(22)..(23)..(24)..(25): Xaa is A or G
  MOD_RES (26)..(27)..(28)..(29): Xaa is A or G or is absent

SEQ ID NO: 54487 - protein, 37 aa, Artificial Sequence
  GFR-binding peptide
  MOD_RES (1)..(34)..(36): Xaa is C or S
  MOD_RES (15)..(16)..(17)..(18)..(19): Xaa is A or G
  MOD_RES (20)..(21)..(22)..(23): Xaa is A or G or is absent
XVSQDLRPVQIRKIXXXXXXXXXKKATVMIVKSXKXS

SEQ ID NO: 54488 - protein, 41 aa, Artificial Sequence
  GFR-binding peptide
  MOD_RES (6)..(7)..(38)..(40): Xaa is C or S
ASAAPXXVPQALRPVQIRKIVGRKPKVKKATVMIVRSXKXS

SEQ ID NO: 54489 - protein, 41 aa, Artificial Sequence
  GFR-binding peptide
  MOD_RES (7)..(41): Xaa is C or S
  MOD_RES (21)..(22)..(23)..(24)..(25): Xaa is A or G
  MOD_RES (26)..(27)..(28)..(29): Xaa is A or G or is absent
HVTKPTXAPTKLRSVKVAKVXXXXXXXXXKEVQVNMVVRSX

SEQ ID NO: 54490 - protein, 34 aa, Artificial Sequence
  GFR-binding peptide
  MOD_RES (1)..(34): Xaa is C or S
  MOD_RES (15)..(16)..(17)..(18)..(19): Xaa is A or G
  MOD_RES (20)..(21)..(22)..(23): Xaa is A or G or is absent
XVPQDLRSVKIAKVXXXXXXXXXKEVQVMVVKSX

SEQ ID NO: 54491 - protein, 33 aa, Artificial Sequence; identical to SEQ ID NO: 19121
  GFR-binding peptide
  MOD_RES (1)..(1): Xaa is C or S
  MOD_RES (15)..(16)..(17)..(18)..(19): Xaa is A or G
  MOD_RES (20)..(21)..(22)..(23): Xaa is A or G or is absent

SEQ ID NO: 54492 - protein, 33 aa, Artificial Sequence; identical to SEQ ID NO: 19123
  GFR-binding peptide
  MOD_RES (15)..(16)..(17)..(18)..(19): Xaa is A or G
  MOD_RES (20)..(21)..(22)..(23): Xaa is A or G or is absent

SEQ ID NO: 54493 - protein, 37 aa, Artificial Sequence
  GFR-binding peptide
  MOD_RES (2)..(2): Xaa is C or S
  MOD_RES (18)..(19)..(20)..(21)..(22): Xaa is A or G
  MOD_RES (23)..(24)..(25)..(26): Xaa is A or G or is absent
QXRPTQVQLEPLPVVYYXXXXXXXXXEQLSNTLEDHL

SEQ ID NO: 54494 - protein, 33 aa, Artificial Sequence; identical to SEQ ID NO: 15796
  GFR-binding peptide
  MOD_RES (1)..(33): Xaa is C or S

SEQ ID NO: 54495 - protein, 43 aa, Artificial Sequence; identical to SEQ ID NO: 15797
  GFR-binding peptide
  MOD_RES (6)..(7)..(40)..(42): Xaa is C or S
  MOD_RES (21)..(22)..(23)..(24)..(25): Xaa is A or G
  MOD_RES (26)..(27)..(28)..(29): Xaa is A or G or is absent

SEQ ID NO: 54496 - protein, 36 aa, Artificial Sequence; identical to SEQ ID NO: 15798
  GFR-binding peptide
  MOD_RES (3)..(4)..(36): Xaa is C or S

SEQ ID NO: 54497 - protein, 34 aa, Artificial Sequence; identical to SEQ ID NO: 15799
  GFR-binding peptide
  MOD_RES (3)..(4): Xaa is C or S

SEQ ID NO: 54498 - protein, 36 aa, Artificial Sequence
  GFR-binding peptide
  MOD_RES (4)..(5)..(36): Xaa is C or S
ASPXXVSQDLSNITIQIMIGKTPKIIGEMSMIVKSX

SEQ ID NO: 54499 - protein, 39 aa, Artificial Sequence
  GFR-binding peptide
  MOD_RES (4)..(5)..(36)..(38): Xaa is C or S
ASPXXVPQDLSNITIQIMVGRTPKVIGEMSMVVKSXKXS

SEQ ID NO: 54500 - protein, 36 aa, Artificial Sequence; identical to SEQ ID NO: 15801
  GFR-binding peptide
  MOD_RES (5)..(6): Xaa is C or S

SEQ ID NO: 54501 - protein, 40 aa, Artificial Sequence
  GFR-binding peptide
  MOD_RES (6)..(7)..(40): Xaa is C or S
  MOD_RES (21)..(22)..(23)..(24)..(25): Xaa is A or G
  MOD_RES (26)..(27)..(28)..(29): Xaa is A or G or is absent
ASASPXXVPQDLRPVQIRKIXXXXXXXXXKKATVMVVKSX

SEQ ID NO: 54502 - protein, 36 aa, Artificial Sequence
  GFR-binding peptide
  MOD_RES (2)..(3)..(35): Xaa is C or S
PXXAPTKLSNITVQIMDDSSNVIIGEMSNMVVRSXG

SEQ ID NO: 54503 - protein, 36 aa, Artificial Sequence; identical to SEQ ID NO: 15804
  GFR-binding peptide
  MOD_RES (2)..(3)..(35): Xaa is C or S

SEQ ID NO: 54504 - protein, 40 aa, Artificial Sequence; identical to SEQ ID NO: 15805
  GFR-binding peptide
  MOD_RES (5)..(6)..(40): Xaa is C or S
  MOD_RES (20)..(21)..(22)..(23)..(24): Xaa is A or G
  MOD_RES (25)..(26)..(27)..(28): Xaa is A or G or is absent

SEQ ID NO: 54505 - protein, 32 aa, Artificial Sequence
  GFR-binding peptide
  MOD_RES (1)..(1): Xaa is C or S
XVPTELRSVKMAKVDENEKVVKEVQVDMVVEG

SEQ ID NO: 54506 - protein, 40 aa, Artificial Sequence; identical to SEQ ID NO: 15806
  GFR-binding peptide
  MOD_RES (4)..(5)..(39): Xaa is C or S
  MOD_RES (19)..(20)..(21)..(22)..(23): Xaa is A or G
  MOD_RES (24)..(25)..(26)..(27): Xaa is A or G or is absent

SEQ ID NO: 54507 - protein, 38 aa, Artificial Sequence; identical to SEQ ID NO: 15807
  GFR-binding peptide
  MOD_RES (2)..(3)..(36)..(38): Xaa is C or S
  MOD_RES (17)..(18)..(19)..(20)..(21): Xaa is A or G
  MOD_RES (22)..(23)..(24)..(25): Xaa is A or G or is absent

SEQ ID NO: 54508 - protein, 40 aa, Artificial Sequence
  GFR-binding peptide
  MOD_RES (2)..(3)..(37)..(39): Xaa is C or S
  MOD_RES (17)..(18)..(19)..(20)..(21): Xaa is A or G
  MOD_RES (22)..(23)..(24)..(25): Xaa is A or G or is absent
AXXVPTELSNITMQIMXXXXXXXXXIGEMSEMVVEGXGXR

SEQ ID NO: 54509 - protein, 36 aa, Artificial Sequence; identical to SEQ ID NO: 19134
  GFR-binding peptide
  MOD_RES (4)..(4): Xaa is C or S

SEQ ID NO: 54510 - protein, 39 aa, Artificial Sequence; identical to SEQ ID NO: 15810
  GFR-binding peptide
  MOD_RES (4)..(5)..(36)..(38): Xaa is C or S

SEQ ID NO: 54511 - protein, 41 aa, Artificial Sequence
  GFR-binding peptide
  MOD_RES (6)..(7)..(41): Xaa is C or S
  MOD_RES (21)..(22)..(23)..(24)..(25): Xaa is A or G
  MOD_RES (26)..(27)..(28)..(29): Xaa is A or G or is absent
TVPKPXXAPTQLRSVKVAKVXXXXXXXXXKEVQVNMVVRAX

SEQ ID NO: 54512 - protein, 37 aa, Artificial Sequence; identical to SEQ ID NO: 15813
  GFR-binding peptide
  MOD_RES (1)..(2)..(35)..(37): Xaa is C or S
  MOD_RES (16)..(17)..(18)..(19)..(20): Xaa is A or G
  MOD_RES (21)..(22)..(23)..(24): Xaa is A or G or is absent

SEQ ID NO: 54513 - protein, 37 aa, Artificial Sequence
  GFR-binding peptide
  MOD_RES (3)..(3): Xaa is C or S
  MOD_RES (19)..(20)..(21)..(22)..(23): Xaa is A or G
  MOD_RES (24)..(25)..(26)..(27): Xaa is A or G or is absent
VQXRPTQVQLEPLTVLYYXXXXXXXXXEQLSNTLEDH

SEQ ID NO: 54514 - protein, 37 aa, Artificial Sequence; identical to SEQ ID NO: 15814
  GFR-binding peptide
  MOD_RES (3)..(4)..(36): Xaa is C or S

SEQ ID NO: 54515 - protein, 37 aa, Artificial Sequence; identical to SEQ ID NO: 15815
  GFR-binding peptide
  MOD_RES (6)..(7): Xaa is C or S

SEQ ID NO: 54516 - protein, 39 aa, Artificial Sequence; identical to SEQ ID NO: 15818
  GFR-binding peptide
  MOD_RES (4)..(5)..(37)..(39): Xaa is C or S

SEQ ID NO: 54517 - protein, 39 aa, Artificial Sequence
  GFR-binding peptide
  MOD_RES (2)..(3)..(36)..(38): Xaa is C or S
  MOD_RES (17)..(18)..(19)..(20)..(21): Xaa is A or G
  MOD_RES (22)..(23)..(24)..(25): Xaa is A or G or is absent
PXXVPQDLRSVKIAKVXXXXXXXXXKEVQVMVVKSXKXS

SEQ ID NO: 54518 - protein, 42 aa, Artificial Sequence
  GFR-binding peptide
  MOD_RES (3)..(40)..(42): Xaa is C or S
  MOD_RES (19)..(20)..(21)..(22)..(23): Xaa is A or G
  MOD_RES (24)..(25)..(26)..(27): Xaa is A or G or is absent
VKXQPSRVHHEPLTVLYYXXXXXXXXXEQLSNRLEEHLEXAX

SEQ ID NO: 54519 - protein, 35 aa, Artificial Sequence
  GFR-binding peptide
  MOD_RES (1)..(32)..(34): Xaa is C or S
XVSQDLRPVQIRKIIGKTPKIKKATVMIVKSXKXS

SEQ ID NO: 54520 - protein, 38 aa, Artificial Sequence
  GFR-binding peptide
  MOD_RES (5)..(6): Xaa is C or S
  MOD_RES (20)..(21)..(22)..(23)..(24): Xaa is A or G
  MOD_RES (25)..(26)..(27)..(28): Xaa is A or G or is absent
SAAPXXVPQALRPVQIRKIXXXXXXXXXKKATVMIVRS

SEQ ID NO: 54521 - protein, 35 aa, Artificial Sequence
  GFR-binding peptide
  MOD_RES (2)..(3): Xaa is C or S
  MOD_RES (17)..(18)..(19)..(20)..(21): Xaa is A or G
  MOD_RES (22)..(23)..(24)..(25): Xaa is A or G or is absent
PXXAPTKLRSVKVAKVXXXXXXXXXKEVQVNMVVR

SEQ ID NO: 54522 - protein, 36 aa, Artificial Sequence
  GFR-binding peptide
  MOD_RES (1)..(35): Xaa is C or S
  MOD_RES (15)..(16)..(17)..(18)..(19): Xaa is A or G
  MOD_RES (20)..(21)..(22)..(23): Xaa is A or G or is absent
XVPTELRPVQMRKIXXXXXXXXXKKATVEMVVEGXG

SEQ ID NO: 54523 - protein, 43 aa, Artificial Sequence
  GFR-binding peptide
  MOD_RES (5)..(42): Xaa is C or S
  MOD_RES (21)..(22)..(23)..(24)..(25): Xaa is A or G
  MOD_RES (26)..(27)..(28)..(29): Xaa is A or G or is absent
RNVQXRPTQVQLEPLTVLYYXXXXXXXXXEQLSNTLEDHLAXK

SEQ ID NO: 54524 - protein, 33 aa, Artificial Sequence
  GFR-binding peptide
  MOD_RES (1)..(1): Xaa is C or S
  MOD_RES (15)..(16)..(17)..(18)..(19): Xaa is A or G
  MOD_RES (20)..(21)..(22)..(23): Xaa is A or G or is absent
XVPTELRPVQMRKIXXXXXXXXXKKATVDMVVE

SEQ ID NO: 54525 - protein, 36 aa, Artificial Sequence
  GFR-binding peptide
  MOD_RES (1)..(34)..(36): Xaa is C or S
  MOD_RES (15)..(16)..(17)..(18)..(19): Xaa is A or G
  MOD_RES (20)..(21)..(22)..(23): Xaa is A or G or is absent
XVPQDLRSVKIAKVXXXXXXXXXKEVQVMVVKSXKX

SEQ ID NO: 54526 - protein, 42 aa, Artificial Sequence
  GFR-binding peptide
  MOD_RES (6)..(7)..(39)..(41): Xaa is C or S
YVPKPXXAPTKLSNITVQIMDDSSNVIIGEMSNMVVRSXGXH

SEQ ID NO: 54527 - protein, 36 aa, Artificial Sequence; identical to SEQ ID NO: 19141
  GFR-binding peptide
  MOD_RES (4)..(4): Xaa is C or S

SEQ ID NO: 54528 - protein, 39 aa, Artificial Sequence; identical to SEQ ID NO: 15829
  GFR-binding peptide
  MOD_RES (1)..(2)..(36)..(38): Xaa is C or S
  MOD_RES (16)..(17)..(18)..(19)..(20): Xaa is A or G
  MOD_RES (21)..(22)..(23)..(24): Xaa is A or G or is absent

SEQ ID NO: 54529 - protein, 37 aa, Artificial Sequence
  GFR-binding peptide
  MOD_RES (2)..(3)..(34)..(36): Xaa is C or S
PXXVSQDLSNITIQIMIGKTPKIIGEMSMIVKSXKXS

SEQ ID NO: 54530 - protein, 34 aa, Artificial Sequence
  GFR-binding peptide
  MOD_RES (31)..(33): Xaa is C or S
VPQDLRPVQIRKIVGRTPKVKKATVMVVKSXKXS

SEQ ID NO: 54531 - protein, 36 aa, Artificial Sequence
  GFR-binding peptide
  MOD_RES (5)..(6): Xaa is C or S
IPKAXXVPTELSNITMQIMDEYDKVVIGEMSEMVVE

SEQ ID NO: 54532 - protein, 41 aa, Artificial Sequence
  GFR-binding peptide
  MOD_RES (5)..(6)..(40): Xaa is C or S
  MOD_RES (20)..(21)..(22)..(23)..(24): Xaa is A or G
  MOD_RES (25)..(26)..(27)..(28): Xaa is A or G or is absent
VPKPXXAPTQLRSVKVAKVXXXXXXXXXKEVQVNMVVRAXG

SEQ ID NO: 54533 - protein, 43 aa, Artificial Sequence; identical to SEQ ID NO: 15834
  GFR-binding peptide
  MOD_RES (6)..(7)..(41)..(43): Xaa is C or S
  MOD_RES (21)..(22)..(23)..(24)..(25): Xaa is A or G
  MOD_RES (26)..(27)..(28)..(29): Xaa is A or G or is absent

SEQ ID NO: 54534 - protein, 31 aa, Artificial Sequence
  GFR-binding peptide
  MOD_RES (31)..(31): Xaa is C or S
VPQDLRSVKIAKVVGRTPKVKEVQVMVVKSX

SEQ ID NO: 54535 - protein, 39 aa, Artificial Sequence
  GFR-binding peptide
  MOD_RES (2)..(39): Xaa is C or S
QXRPTQVQLEPLTVLYYEIVRKKPIFEQLSNTLEDHLAX

SEQ ID NO: 54536 - protein, 34 aa, Artificial Sequence; identical to SEQ ID NO: 15835
  GFR-binding peptide
  MOD_RES (1)..(2): Xaa is C or S
  MOD_RES (16)..(17)..(18)..(19)..(20): Xaa is A or G
  MOD_RES (21)..(22)..(23)..(24): Xaa is A or G or is absent

SEQ ID NO: 54537 - protein, 35 aa, Artificial Sequence; identical to SEQ ID NO: 15837
  GFR-binding peptide
  MOD_RES (1)..(2)..(34): Xaa is C or S

SEQ ID NO: 54538 - protein, 40 aa, Artificial Sequence; identical to SEQ ID NO: 19147
  GFR-binding peptide
  MOD_RES (2)..(39): Xaa is C or S
  MOD_RES (18)..(19)..(20)..(21)..(22): Xaa is A or G
  MOD_RES (23)..(24)..(25)..(26): Xaa is A or G or is absent

SEQ ID NO: 54539 - protein, 38 aa, Artificial Sequence
  GFR-binding peptide
  MOD_RES (3)..(35)..(37): Xaa is C or S
PTXAPTKLRPVQVRKIDDSSNVIKKATVNMVVRSXGXH

SEQ ID NO: 54540 - protein, 33 aa, Artificial Sequence; identical to SEQ ID NO: 15840
  GFR-binding peptide
  MOD_RES (2)..(2): Xaa is C or S

SEQ ID NO: 54541 - protein, 35 aa, Artificial Sequence
  GFR-binding peptide
  MOD_RES (2)..(3): Xaa is C or S
  MOD_RES (17)..(18)..(19)..(20)..(21): Xaa is A or G
  MOD_RES (22)..(23)..(24)..(25): Xaa is A or G or is absent
PXXVPQDLSNITIQIMXXXXXXXXXIGEMSMVVKS

SEQ ID NO: 54542 - protein, 37 aa, Artificial Sequence; identical to SEQ ID NO: 15841
  GFR-binding peptide
  MOD_RES (1)..(2)..(35)..(37): Xaa is C or S
  MOD_RES (16)..(17)..(18)..(19)..(20): Xaa is A or G
  MOD_RES (21)..(22)..(23)..(24): Xaa is A or G or is absent

SEQ ID NO: 54543 - protein, 37 aa, Artificial Sequence; identical to SEQ ID NO: 19149
  GFR-binding peptide
  MOD_RES (4)..(4): Xaa is C or S

SEQ ID NO: 54544 - protein, 39 aa, Artificial Sequence; identical to SEQ ID NO: 15843
  GFR-binding peptide
  MOD_RES (6)..(7)..(38): Xaa is C or S

SEQ ID NO: 54545 - protein, 35 aa, Artificial Sequence
  GFR-binding peptide
  MOD_RES (3)..(3): Xaa is C or S
  MOD_RES (17)..(18)..(19)..(20)..(21): Xaa is A or G
  MOD_RES (22)..(23)..(24)..(25): Xaa is A or G or is absent
PTXAPTKLSNITVQIMXXXXXXXXXIGEMSNMVVR

SEQ ID NO: 54546 - protein, 39 aa, Artificial Sequence
  GFR-binding peptide
  MOD_RES (5)..(5): Xaa is C or S
SSVKXQPSRVHHEPLPVVYYEYVRKKPKLEQLSNRLEEH

SEQ ID NO: 54547 - protein, 41 aa, Artificial Sequence; identical to SEQ ID NO: 19152
  GFR-binding peptide
  MOD_RES (1)..(38)..(40): Xaa is C or S

SEQ ID NO: 54548 - protein, 39 aa, Artificial Sequence
  GFR-binding peptide
  MOD_RES (4)..(4): Xaa is C or S
NVQXRPTQVQLEPLTVLYYEIVRKKPIFEQLSNTLEDHL

SEQ ID NO: 54549 - protein, 41 aa, Artificial Sequence; identical to SEQ ID NO: 39380
  GFR-binding peptide
  MOD_RES (5)..(6)..(39)..(41): Xaa is C or S
  MOD_RES (20)..(21)..(22)..(23)..(24): Xaa is A or G
  MOD_RES (25)..(26)..(27)..(28): Xaa is A or G or is absent

SEQ ID NO: 54550 - protein, 33 aa, Artificial Sequence
  GFR-binding peptide
  MOD_RES (31)..(33): Xaa is C or S
VSQDLRSVKIAKVIGKTPKIKEVQVMIVKSXKX

SEQ ID NO: 54551 - protein, 37 aa, Artificial Sequence
  GFR-binding peptide
  MOD_RES (1)..(2)..(34)..(36): Xaa is C or S
XXAPTKLRSVKVAKVDDSSNVIKEVQVNMVVRSXGXH

SEQ ID NO: 54552 - protein, 39 aa, Artificial Sequence; identical to SEQ ID NO: 19158
  GFR-binding peptide
  MOD_RES (2)..(36)..(38): Xaa is C or S
  MOD_RES (16)..(17)..(18)..(19)..(20): Xaa is A or G
  MOD_RES (21)..(22)..(23)..(24): Xaa is A or G or is absent

SEQ ID NO: 54553 - protein, 39 aa, Artificial Sequence; identical to SEQ ID NO: 15848
  GFR-binding peptide
  MOD_RES (2)..(3)..(37)..(39): Xaa is C or S
  MOD_RES (17)..(18)..(19)..(20)..(21): Xaa is A or G
  MOD_RES (22)..(23)..(24)..(25): Xaa is A or G or is absent

SEQ ID NO: 54554 - protein, 37 aa, Artificial Sequence
  GFR-binding peptide
  MOD_RES (3)..(4): Xaa is C or S
  MOD_RES (18)..(19)..(20)..(21)..(22): Xaa is A or G
  MOD_RES (23)..(24)..(25)..(26): Xaa is A or G or is absent
KPXXAPTQLSNITVQIMXXXXXXXXXIGEMSNMVVRA

SEQ ID NO: 54555 - protein, 36 aa, Artificial Sequence; identical to SEQ ID NO: 15851
  GFR-binding peptide
  MOD_RES (2)..(3)..(34)..(36): Xaa is C or S

SEQ ID NO: 54556 - protein, 37 aa, Artificial Sequence
  GFR-binding peptide
  MOD_RES (2)..(3)..(35)..(37): Xaa is C or S
PXXAPTKLSNITVQIMDDSSNVIIGEMSNMVVRSXGX

SEQ ID NO: 54557 - protein, 34 aa, Artificial Sequence
  GFR-binding peptide
  MOD_RES (34)..(34): Xaa is C or S
  MOD_RES (14)..(15)..(16)..(17)..(18): Xaa is A or G
  MOD_RES (19)..(20)..(21)..(22): Xaa is A or G or is absent
VPTEEEPLPMVYYXXXXXXXXXEQLSNFLQHNKX

SEQ ID NO: 54558 - protein, 40 aa, Artificial Sequence; identical to SEQ ID NO: 19165
  GFR-binding peptide
  MOD_RES (3)..(40): Xaa is C or S
  MOD_RES (19)..(20)..(21)..(22)..(23): Xaa is A or G
  MOD_RES (24)..(25)..(26)..(27): Xaa is A or G or is absent

SEQ ID NO: 54559 - protein, 40 aa, Artificial Sequence; identical to SEQ ID NO: 19166
  GFR-binding peptide
  MOD_RES (1)..(38)..(40): Xaa is C or S

SEQ ID NO: 54560 - protein, 35 aa, Artificial Sequence
  GFR-binding peptide
  MOD_RES (1)..(34): Xaa is C or S
  MOD_RES (15)..(16)..(17)..(18)..(19): Xaa is A or G
  MOD_RES (20)..(21)..(22)..(23): Xaa is A or G or is absent
XVPQDLSNITIQIMXXXXXXXXXIGEMSMVVKSXK

SEQ ID NO: 54561 - protein, 33 aa, Artificial Sequence
  GFR-binding peptide
  MOD_RES (1)..(2): Xaa is C or S
XXAPTQLSNITVQIMDDSSNVIIGEMSNMVVRA

SEQ ID NO: 54562 - protein, 35 aa, Artificial Sequence
  GFR-binding peptide
  MOD_RES (4)..(5): Xaa is C or S
PKAXXVPTELRPVQMRKIDEYDKVVKKATVEMVVE

SEQ ID NO: 54563 - protein, 34 aa, Artificial Sequence; identical to SEQ ID NO: 15859
  GFR-binding peptide
  MOD_RES (33)..(33): Xaa is C or S
  MOD_RES (14)..(15)..(16)..(17)..(18): Xaa is A or G
  MOD_RES (19)..(20)..(21)..(22): Xaa is A or G or is absent

SEQ ID NO: 54564 - protein, 38 aa, Artificial Sequence; identical to SEQ ID NO: 15860
  GFR-binding peptide
  MOD_RES (5)..(6)..(38): Xaa is C or S

SEQ ID NO: 54565 - protein, 38 aa, Artificial Sequence; identical to SEQ ID NO: 15861
  GFR-binding peptide
  MOD_RES (1)..(2)..(35)..(37): Xaa is C or S
  MOD_RES (16)..(17)..(18)..(19)..(20): Xaa is A or G
  MOD_RES (21)..(22)..(23)..(24): Xaa is A or G or is absent

SEQ ID NO: 54566 - protein, 45 aa, Artificial Sequence; identical to SEQ ID NO: 19170
  GFR-binding peptide
  MOD_RES (5)..(42)..(44): Xaa is C or S
  MOD_RES (21)..(22)..(23)..(24)..(25): Xaa is A or G
  MOD_RES (26)..(27)..(28)..(29): Xaa is A or G or is absent

SEQ ID NO: 54567 - protein, 44 aa, Artificial Sequence
  GFR-binding peptide
  MOD_RES (4)..(41)..(43): Xaa is C or S
  MOD_RES (20)..(21)..(22)..(23)..(24): Xaa is A or G
  MOD_RES (25)..(26)..(27)..(28): Xaa is A or G or is absent
SVKXQPSRVHHEPLTVLYYXXXXXXXXXEQLSNRLEEHLEXAXA

SEQ ID NO: 54568 - protein, 37 aa, Artificial Sequence
  GFR-binding peptide
  MOD_RES (5)..(6): Xaa is C or S
IPKAXXVPTELRPVQMRKIDEYDKVVKKATVEMVVEG

SEQ ID NO: 54569 - protein, 35 aa, Artificial Sequence; identical to SEQ ID NO: 15863
  GFR-binding peptide
  MOD_RES (3)..(4)..(35): Xaa is C or S

SEQ ID NO: 54570 - protein, 32 aa, Artificial Sequence; identical to SEQ ID NO: 15865
  GFR-binding peptide
  MOD_RES (1)..(32): Xaa is C or S

SEQ ID NO: 54571 - protein, 39 aa, Artificial Sequence
  GFR-binding peptide
  MOD_RES (6)..(7): Xaa is C or S
  MOD_RES (21)..(22)..(23)..(24)..(25): Xaa is A or G
  MOD_RES (26)..(27)..(28)..(29): Xaa is A or G or is absent
ASASPXXVPQDLSNITIQIMXXXXXXXXXIGEMSMVVKS

SEQ ID NO: 54572 - protein, 42 aa, Artificial Sequence
  GFR-binding peptide
  MOD_RES (5)..(6)..(39)..(41): Xaa is C or S
  MOD_RES (20)..(21)..(22)..(23)..(24): Xaa is A or G
  MOD_RES (25)..(26)..(27)..(28): Xaa is A or G or is absent
SASPXXVPQDLRSVKIAKVXXXXXXXXXKEVQVMVVKSXKXS

SEQ ID NO: 54573 - protein, 36 aa, Artificial Sequence; identical to SEQ ID NO: 15866
  GFR-binding peptide
  MOD_RES (2)..(3)..(34)..(36): Xaa is C or S

SEQ ID NO: 54574 - protein, 38 aa, Artificial Sequence; identical to SEQ ID NO: 19177
  GFR-binding peptide
  MOD_RES (4)..(4): Xaa is C or S

SEQ ID NO: 54575 - protein, 31 aa, Artificial Sequence; identical to SEQ ID NO: 15868
  GFR-binding peptide
  MOD_RES (31)..(31): Xaa is C or S

SEQ ID NO: 54576 - protein, 31 aa, Artificial Sequence
  GFR-binding peptide
VPTELRSVKMAKVDENEKVVKEVQVDMVVEG

SEQ ID NO: 54577 - protein, 40 aa, Artificial Sequence; identical to SEQ ID NO: 19180
  GFR-binding peptide
  MOD_RES (3)..(37)..(39): Xaa is C or S

SEQ ID NO: 54578 - protein, 40 aa, Artificial Sequence; identical to SEQ ID NO: 15870
  GFR-binding peptide
  MOD_RES (4)..(5)..(37)..(39): Xaa is C or S

SEQ ID NO: 54579 - protein, 39 aa, Artificial Sequence
  GFR-binding peptide
  MOD_RES (3)..(4)..(36)..(38): Xaa is C or S
KPXXAPTQLRSVKVAKVDDSSNVIKEVQVNMVVRAXGXH

SEQ ID NO: 54580 - protein, 38 aa, Artificial Sequence
  GFR-binding peptide
  MOD_RES (36)..(38): Xaa is C or S
  MOD_RES (15)..(16)..(17)..(18)..(19): Xaa is A or G
  MOD_RES (20)..(21)..(22)..(23): Xaa is A or G or is absent
PSRVHHEPLTVLYYXXXXXXXXXEQLSNRLEEHLEXAX

SEQ ID NO: 54581 - protein, 41 aa, Artificial Sequence; identical to SEQ ID NO: 15871
  GFR-binding peptide
  MOD_RES (5)..(6)..(38)..(40): Xaa is C or S

SEQ ID NO: 54582 - protein, 35 aa, Artificial Sequence
  GFR-binding peptide
  MOD_RES (3)..(3): Xaa is C or S
  MOD_RES (17)..(18)..(19)..(20)..(21): Xaa is A or G
  MOD_RES (22)..(23)..(24)..(25): Xaa is A or G or is absent
LEXVPTEEEPLPMVYYXXXXXXXXXEQLSNFLQHN

SEQ ID NO: 54583 - protein, 36 aa, Artificial Sequence; identical to SEQ ID NO: 19184
  GFR-binding peptide
  MOD_RES (36)..(36): Xaa is C or S

SEQ ID NO: 54584 - protein, 37 aa, Artificial Sequence
  GFR-binding peptide
  MOD_RES (3)..(4): Xaa is C or S
  MOD_RES (18)..(19)..(20)..(21)..(22): Xaa is A or G
  MOD_RES (23)..(24)..(25)..(26): Xaa is A or G or is absent
KAXXVPTELRPVQMRKIXXXXXXXXXKKATVDMVVEG

SEQ ID NO: 54585 - protein, 42 aa, Artificial Sequence
  GFR-binding peptide
  MOD_RES (5)..(6)..(39)..(41): Xaa is C or S
  MOD_RES (20)..(21)..(22)..(23)..(24): Xaa is A or G
  MOD_RES (25)..(26)..(27)..(28): Xaa is A or G or is absent
SASPXXVSQDLSNITIQIMXXXXXXXXXIGEMSMIVKSXKXS

SEQ ID NO: 54586 - protein, 40 aa, Artificial Sequence; identical to SEQ ID NO: 19185
  GFR-binding peptide
  MOD_RES (5)..(39): Xaa is C or S
  MOD_RES (19)..(20)..(21)..(22)..(23): Xaa is A or G
  MOD_RES (24)..(25)..(26)..(27): Xaa is A or G or is absent

SEQ ID NO: 54587 - protein, 39 aa, Artificial Sequence; identical to SEQ ID NO: 19186
  GFR-binding peptide
  MOD_RES (36)..(38): Xaa is C or S

SEQ ID NO: 54588 - protein, 35 aa, Artificial Sequence
  GFR-binding peptide
  MOD_RES (1)..(2): Xaa is C or S
  MOD_RES (16)..(17)..(18)..(19)..(20): Xaa is A or G
  MOD_RES (21)..(22)..(23)..(24): Xaa is A or G or is absent
XXVPTELRSVKMAKVXXXXXXXXXKEVQVDMVVEG

SEQ ID NO: 54589 - protein, 41 aa, Artificial Sequence
  GFR-binding peptide
  MOD_RES (5)..(39)..(41): Xaa is C or S
EGLEXVPTEEEPLPMVYYRIKPHQGQHEQLSNFLQHNKXEX

SEQ ID NO: 54590 - protein, 36 aa, Artificial Sequence
  GFR-binding peptide
  MOD_RES (2)..(3)..(34)..(36): Xaa is C or S
PXXVSQDLSNITIQIMIGKTPKIIGEMSMIVKSXKX

SEQ ID NO: 54591 - protein, 37 aa, Artificial Sequence; identical to SEQ ID NO: 15879
  GFR-binding peptide
  MOD_RES (1)..(2)..(36): Xaa is C or S
  MOD_RES (16)..(17)..(18)..(19)..(20): Xaa is A or G
  MOD_RES (21)..(22)..(23)..(24): Xaa is A or G or is absent

SEQ ID NO: 54592 - protein, 42 aa, Artificial Sequence; identical to SEQ ID NO: 19188
  GFR-binding peptide
  MOD_RES (5)..(39)..(41): Xaa is C or S

SEQ ID NO: 54593 - protein, 41 aa, Artificial Sequence
  GFR-binding peptide
  MOD_RES (4)..(41): Xaa is C or S
  MOD_RES (20)..(21)..(22)..(23)..(24): Xaa is A or G
  MOD_RES (25)..(26)..(27)..(28): Xaa is A or G or is absent
NVQXRPTQVQLEPLTVLYYXXXXXXXXXEQLSNTLEDHLAX

SEQ ID NO: 54594 - protein, 33 aa, Artificial Sequence
  GFR-binding peptide
  MOD_RES (2)..(3): Xaa is C or S
PXXVPQALSNITIQIMVGRKPKVIGEMSMIVRS

SEQ ID NO: 54595 - protein, 41 aa, Artificial Sequence
  GFR-binding peptide
  MOD_RES (7)..(41): Xaa is C or S
NDEGLEXVPTEEEPLTMLYYRIKPHQGQHEQLSNFLQHNKX

SEQ ID NO: 54596 - protein, 35 aa, Artificial Sequence
  GFR-binding peptide
  MOD_RES (1)..(33)..(35): Xaa is C or S
XAPTQLSNITVQIMDDSSNVIIGEMSNMVVRAXGX

SEQ ID NO: 54597 - protein, 40 aa, Artificial Sequence; identical to SEQ ID NO: 15881
  GFR-binding peptide
  MOD_RES (4)..(5)..(37)..(39): Xaa is C or S

SEQ ID NO: 54598 - protein, 33 aa, Artificial Sequence
  GFR-binding peptide
  MOD_RES (33)..(33): Xaa is C or S
  MOD_RES (14)..(15)..(16)..(17)..(18): Xaa is A or G
  MOD_RES (19)..(20)..(21)..(22): Xaa is A or G or is absent
VSQDLRSVKIAKVXXXXXXXXXKEVQVMIVKSX

SEQ ID NO: 54599 - protein, 41 aa, Artificial Sequence
  GFR-binding peptide
  MOD_RES (5)..(6)..(39)..(41): Xaa is C or S
  MOD_RES (20)..(21)..(22)..(23)..(24): Xaa is A or G
  MOD_RES (25)..(26)..(27)..(28): Xaa is A or G or is absent
SASPXXVPQDLSNITIQIMXXXXXXXXXIGEMSMVVKSXKX

SEQ ID NO: 54600 - protein, 36 aa, Artificial Sequence; identical to SEQ ID NO: 19191
  GFR-binding peptide
  MOD_RES (35)..(35): Xaa is C or S

SEQ ID NO: 54601 - protein, 39 aa, Artificial Sequence
  GFR-binding peptide
  MOD_RES (6)..(6): Xaa is C or S
  MOD_RES (20)..(21)..(22)..(23)..(24): Xaa is A or G
  MOD_RES (25)..(26)..(27)..(28): Xaa is A or G or is absent
VTKPTXAPTKLRSVKVAKVXXXXXXXXXKEVQVNMVVRS

SEQ ID NO: 54602 - protein, 39 aa, Artificial Sequence; identical to SEQ ID NO: 19193
  GFR-binding peptide
  MOD_RES (1)..(38): Xaa is C or S
  MOD_RES (17)..(18)..(19)..(20)..(21): Xaa is A or G
  MOD_RES (22)..(23)..(24)..(25): Xaa is A or G or is absent

SEQ ID NO: 54603 - protein, 40 aa, Artificial Sequence; identical to SEQ ID NO: 15885
  GFR-binding peptide
  MOD_RES (6)..(7)..(40): Xaa is C or S
  MOD_RES (21)..(22)..(23)..(24)..(25): Xaa is A or G
  MOD_RES (26)..(27)..(28)..(29): Xaa is A or G or is absent

SEQ ID NO: 54604 - protein, 32 aa, Artificial Sequence
  GFR-binding peptide
  MOD_RES (1)..(2): Xaa is C or S
XXAPTKLRPVQVRKIDDSSNVIKKATVNMVVR

SEQ ID NO: 54605 - protein, 37 aa, Artificial Sequence; identical to SEQ ID NO: 15889
  GFR-binding peptide
  MOD_RES (2)..(3)..(37): Xaa is C or S
  MOD_RES (17)..(18)..(19)..(20)..(21): Xaa is A or G
  MOD_RES (22)..(23)..(24)..(25): Xaa is A or G or is absent

SEQ ID NO: 54606 - protein, 31 aa, Artificial Sequence
  GFR-binding peptide
VPTELRSVKMAKVDEYDKVVKEVQVEMVVEG

SEQ ID NO: 54607 - protein, 37 aa, Artificial Sequence; identical to SEQ ID NO: 15892
  GFR-binding peptide
  MOD_RES (4)..(4): Xaa is C or S
  MOD_RES (18)..(19)..(20)..(21)..(22): Xaa is A or G
  MOD_RES (23)..(24)..(25)..(26): Xaa is A or G or is absent

SEQ ID NO: 54608 - protein, 42 aa, Artificial Sequence
  GFR-binding peptide
  MOD_RES (5)..(6)..(40)..(42): Xaa is C or S
  MOD_RES (20)..(21)..(22)..(23)..(24): Xaa is A or G
  MOD_RES (25)..(26)..(27)..(28): Xaa is A or G or is absent
IPKAXXVPTELRPVQMRKIXXXXXXXXXKKATVEMVVEGXGX

SEQ ID NO: 54609 - protein, 33 aa, Artificial Sequence
  GFR-binding peptide
VPTEEEPLPMVYYRIKPHQGQHEQLSNFLQHNK

SEQ ID NO: 54610 - protein, 32 aa, Artificial Sequence; identical to SEQ ID NO: 19197
  GFR-binding peptide

SEQ ID NO: 54611 - protein, 37 aa, Artificial Sequence
  GFR-binding peptide
  MOD_RES (1)..(34)..(36): Xaa is C or S
  MOD_RES (15)..(16)..(17)..(18)..(19): Xaa is A or G
  MOD_RES (20)..(21)..(22)..(23): Xaa is A or G or is absent
XVPQALRSVKIAKVXXXXXXXXXKEVQVMIVRSXKXS

SEQ ID NO: 54612 - protein, 35 aa, Artificial Sequence; identical to SEQ ID NO: 15895
  GFR-binding peptide
  MOD_RES (1)..(2)..(34): Xaa is C or S

SEQ ID NO: 54613 - protein, 39 aa, Artificial Sequence
  GFR-binding peptide
  MOD_RES (4)..(5)..(39): Xaa is C or S
  MOD_RES (19)..(20)..(21)..(22)..(23): Xaa is A or G
  MOD_RES (24)..(25)..(26)..(27): Xaa is A or G or is absent
PKAXXVPTELRPVQMRKIXXXXXXXXXKKATVEMVVEGX

SEQ ID NO: 54614 - protein, 37 aa, Artificial Sequence
  GFR-binding peptide
  MOD_RES (6)..(7): Xaa is C or S
ASASPXXVPQDLSNITIQIMVGRTPKVIGEMSMVVKS

SEQ ID NO: 54615 - protein, 34 aa, Artificial Sequence
  GFR-binding peptide
  MOD_RES (34)..(34): Xaa is C or S
VPTEEEPLPMVYYRIKPHQGQHEQLSNFLQHNKX

SEQ ID NO: 54616 - protein, 35 aa, Artificial Sequence
  GFR-binding peptide
RPTQVQLEPLTVLYYEIVRKKPIFEQLSNTLEDHL

SEQ ID NO: 54617 - protein, 34 aa, Artificial Sequence
  GFR-binding peptide
  MOD_RES (1)..(1): Xaa is C or S
  MOD_RES (15)..(16)..(17)..(18)..(19): Xaa is A or G
  MOD_RES (20)..(21)..(22)..(23): Xaa is A or G or is absent
XVPTELRPVQMRKIXXXXXXXXXKKATVEMVVEG

SEQ ID NO: 54618 - protein, 38 aa, Artificial Sequence
  GFR-binding peptide
  MOD_RES (4)..(5): Xaa is C or S
  MOD_RES (19)..(20)..(21)..(22)..(23): Xaa is A or G
  MOD_RES (24)..(25)..(26)..(27): Xaa is A or G or is absent
PKAXXVPTELRSVKMAKVXXXXXXXXXKEVQVDMVVEG

SEQ ID NO: 54619 - protein, 34 aa, Artificial Sequence; identical to SEQ ID NO: 15905
  GFR-binding peptide
  MOD_RES (1)..(1): Xaa is C or S
  MOD_RES (15)..(16)..(17)..(18)..(19): Xaa is A or G
  MOD_RES (20)..(21)..(22)..(23): Xaa is A or G or is absent

SEQ ID NO: 54620 - protein, 40 aa, Artificial Sequence
  GFR-binding peptide
  MOD_RES (4)..(38)..(40): Xaa is C or S
GLEXVPTEEEPLPMVYYRIKPHQGQHEQLSNFLQHNKXEX

SEQ ID NO: 54621 - protein, 32 aa, Artificial Sequence; identical to SEQ ID NO: 15906
  GFR-binding peptide
  MOD_RES (1)..(2): Xaa is C or S

SEQ ID NO: 54622 - protein, 38 aa, Artificial Sequence
  GFR-binding peptide
  MOD_RES (1)..(2)..(35)..(37): Xaa is C or S
  MOD_RES (16)..(17)..(18)..(19)..(20): Xaa is A or G
  MOD_RES (21)..(22)..(23)..(24): Xaa is A or G or is absent
XXVPQDLRSVKIAKVXXXXXXXXXKEVQVMVVKSXKXS

SEQ ID NO: 54623 - protein, 32 aa, Artificial Sequence; identical to SEQ ID NO: 15907
  GFR-binding peptide
  MOD_RES (31)..(31): Xaa is C or S

SEQ ID NO: 54624 - protein, 38 aa, Artificial Sequence; identical to SEQ ID NO: 19211
  GFR-binding peptide
  MOD_RES (35)..(37): Xaa is C or S

SEQ ID NO: 54625 - protein, 36 aa, Artificial Sequence
  GFR-binding peptide
  MOD_RES (2)..(3): Xaa is C or S
  MOD_RES (17)..(18)..(19)..(20)..(21): Xaa is A or G
  MOD_RES (22)..(23)..(24)..(25): Xaa is A or G or is absent
AXXVPTELSNITMQIMXXXXXXXXXIGEMSDMVVEG

SEQ ID NO: 54626 - protein, 32 aa, Artificial Sequence
  GFR-binding peptide
  MOD_RES (31)..(31): Xaa is C or S
VPQALRSVKIAKVVGRKPKVKEVQVMIVRSXK

SEQ ID NO: 54627 - protein, 41 aa, Artificial Sequence
  GFR-binding peptide
  MOD_RES (6)..(7)..(40): Xaa is C or S
  MOD_RES (21)..(22)..(23)..(24)..(25): Xaa is A or G
  MOD_RES (26)..(27)..(28)..(29): Xaa is A or G or is absent
ASASPXXVPQDLSNITIQIMXXXXXXXXXIGEMSMVVKSXK

SEQ ID NO: 54628 - protein, 36 aa, Artificial Sequence
  GFR-binding peptide
  MOD_RES (1)..(2)..(35): Xaa is C or S
  MOD_RES (16)..(17)..(18)..(19)..(20): Xaa is A or G
  MOD_RES (21)..(22)..(23)..(24): Xaa is A or G or is absent
XXVSQDLSNITIQIMXXXXXXXXXIGEMSMIVKSXK

SEQ ID NO: 54629 - protein, 39 aa, Artificial Sequence; identical to SEQ ID NO: 15910
  GFR-binding peptide
  MOD_RES (6)..(7)..(39): Xaa is C or S

SEQ ID NO: 54630 - protein, 41 aa, Artificial Sequence
  GFR-binding peptide
  MOD_RES (4)..(38)..(40): Xaa is C or S
  MOD_RES (18)..(19)..(20)..(21)..(22): Xaa is A or G
  MOD_RES (23)..(24)..(25)..(26): Xaa is A or G or is absent
KPTXAPTKLRPVQVRKIXXXXXXXXXKKATVNMVVRSXGXH

SEQ ID NO: 54631 - protein, 43 aa, Artificial Sequence; identical to SEQ ID NO: 19215
  GFR-binding peptide
  MOD_RES (5)..(42): Xaa is C or S
  MOD_RES (21)..(22)..(23)..(24)..(25): Xaa is A or G
  MOD_RES (26)..(27)..(28)..(29): Xaa is A or G or is absent

SEQ ID NO: 54632 - protein, 38 aa, Artificial Sequence; identical to SEQ ID NO: 15920
  GFR-binding peptide
  MOD_RES (3)..(4)..(38): Xaa is C or S
  MOD_RES (18)..(19)..(20)..(21)..(22): Xaa is A or G
  MOD_RES (23)..(24)..(25)..(26): Xaa is A or G or is absent

SEQ ID NO: 54633 - protein, 37 aa, Artificial Sequence
  GFR-binding peptide
  MOD_RES (2)..(2): Xaa is C or S
KXQPSRVHHEPLPVVYYEYVRKKPKLEQLSNRLEEHL

SEQ ID NO: 54634 - protein, 37 aa, Artificial Sequence
  GFR-binding peptide
  MOD_RES (6)..(7): Xaa is C or S
ASAAPXXVPQALRPVQIRKIVGRKPKVKKATVMIVRS

SEQ ID NO: 54635 - protein, 40 aa, Artificial Sequence
  GFR-binding peptide
  MOD_RES (6)..(7)..(39): Xaa is C or S
TVPKPXXAPTQLSNITVQIMDDSSNVIIGEMSNMVVRAXG

SEQ ID NO: 54636 - protein, 36 aa, Artificial Sequence; identical to SEQ ID NO: 15922
  GFR-binding peptide
  MOD_RES (1)..(2)..(35): Xaa is C or S
  MOD_RES (16)..(17)..(18)..(19)..(20): Xaa is A or G
  MOD_RES (21)..(22)..(23)..(24): Xaa is A or G or is absent

SEQ ID NO: 54637 - protein, 41 aa, Artificial Sequence; identical to SEQ ID NO: 19221
  GFR-binding peptide
  MOD_RES (1)..(38)..(40): Xaa is C or S
  MOD_RES (17)..(18)..(19)..(20)..(21): Xaa is A or G
  MOD_RES (22)..(23)..(24)..(25): Xaa is A or G or is absent

SEQ ID NO: 54638 - protein, 36 aa, Artificial Sequence
  GFR-binding peptide
  MOD_RES (5)..(6): Xaa is C or S
SASPXXVPQDLRPVQIRKIVGRTPKVKKATVMVVKS

SEQ ID NO: 54639 - protein, 44 aa, Artificial Sequence; identical to SEQ ID NO: 15923
  GFR-binding peptide
  MOD_RES (6)..(7)..(41)..(43): Xaa is C or S
  MOD_RES (21)..(22)..(23)..(24)..(25): Xaa is A or G
  MOD_RES (26)..(27)..(28)..(29): Xaa is A or G or is absent

SEQ ID NO: 54640 - protein, 36 aa, Artificial Sequence; identical to SEQ ID NO: 15924
  GFR-binding peptide
  MOD_RES (1)..(2)..(36): Xaa is C or S
  MOD_RES (16)..(17)..(18)..(19)..(20): Xaa is A or G
  MOD_RES (21)..(22)..(23)..(24): Xaa is A or G or is absent

SEQ ID NO: 54641 - protein, 36 aa, Artificial Sequence; identical to SEQ ID NO: 19224
  GFR-binding peptide
  MOD_RES (3)..(3): Xaa is C or S

SEQ ID NO: 54642 - protein, 34 aa, Artificial Sequence
  GFR-binding peptide
  MOD_RES (2)..(3)..(34): Xaa is C or S
PXXVPQALRPVQIRKIVGRKPKVKKATVMIVRSX

SEQ ID NO: 54643 - protein, 34 aa, Artificial Sequence
  GFR-binding peptide
  MOD_RES (1)..(32)..(34): Xaa is C or S
XVPQDLRSVKIAKVVGRTPKVKEVQVMVVKSXKX

SEQ ID NO: 54644 - protein, 37 aa, Artificial Sequence
  GFR-binding peptide
  MOD_RES (3)..(4)..(36): Xaa is C or S
KAXXVPTELSNITMQIMDEYDKVVIGEMSEMVVEGXG

SEQ ID NO: 54645 - protein, 45 aa, Artificial Sequence; identical to SEQ ID NO: 19229
  GFR-binding peptide
  MOD_RES (5)..(42)..(44): Xaa is C or S
  MOD_RES (21)..(22)..(23)..(24)..(25): Xaa is A or G
  MOD_RES (26)..(27)..(28)..(29): Xaa is A or G or is absent

SEQ ID NO: 54646 - protein, 33 aa, Artificial Sequence
  GFR-binding peptide
  MOD_RES (1)..(1): Xaa is C or S
  MOD_RES (15)..(16)..(17)..(18)..(19): Xaa is A or G
  MOD_RES (20)..(21)..(22)..(23): Xaa is A or G or is absent
XVPTELRSVKMAKVXXXXXXXXXKEVQVDMVVE

SEQ ID NO: 54647 - protein, 38 aa, Artificial Sequence; identical to SEQ ID NO: 19232
  GFR-binding peptide
  MOD_RES (2)..(2): Xaa is C or S

SEQ ID NO: 54648 - protein, 39 aa, Artificial Sequence
  GFR-binding peptide
  MOD_RES (7)..(39): Xaa is C or S
HVTKPTXAPTKLSNITVQIMDDSSNVIIGEMSNMVVRSX

SEQ ID NO: 54649 - protein, 32 aa, Artificial Sequence; identical to SEQ ID NO: 19238
  GFR-binding peptide
  MOD_RES (14)..(15)..(16)..(17)..(18): Xaa is A or G
  MOD_RES (19)..(20)..(21)..(22): Xaa is A or G or is absent

SEQ ID NO: 54650 - protein, 37 aa, Artificial Sequence
  GFR-binding peptide
  MOD_RES (36)..(36): Xaa is C or S
  MOD_RES (15)..(16)..(17)..(18)..(19): Xaa is A or G
  MOD_RES (20)..(21)..(22)..(23): Xaa is A or G or is absent
PTQVQLEPLPVVYYXXXXXXXXXEQLSNTLEDHLAXK

SEQ ID NO: 54651 - protein, 31 aa, Artificial Sequence
  GFR-binding peptide
APTKLRSVKVAKVDDSSNVIKEVQVNMVVRS

SEQ ID NO: 54652 - protein, 40 aa, Artificial Sequence
  GFR-binding peptide
  MOD_RES (37)..(39): Xaa is C or S
  MOD_RES (16)..(17)..(18)..(19)..(20): Xaa is A or G
  MOD_RES (21)..(22)..(23)..(24): Xaa is A or G or is absent
RPTQVQLEPLTVLYYXXXXXXXXXEQLSNTLEDHLAXKXE

SEQ ID NO: 54653 - protein, 38 aa, Artificial Sequence
  GFR-binding peptide
  MOD_RES (5)..(5): Xaa is C or S
  MOD_RES (19)..(20)..(21)..(22)..(23): Xaa is A or G
  MOD_RES (24)..(25)..(26)..(27): Xaa is A or G or is absent
EGLEXVPTEEEPLTMLYYXXXXXXXXXEQLSNFLQHNK

SEQ ID NO: 54654 - protein, 35 aa, Artificial Sequence; identical to SEQ ID NO: 39506
  GFR-binding peptide
  MOD_RES (1)..(34): Xaa is C or S
  MOD_RES (15)..(16)..(17)..(18)..(19): Xaa is A or G
  MOD_RES (20)..(21)..(22)..(23): Xaa is A or G or is absent

SEQ ID NO: 54655 - protein, 38 aa, Artificial Sequence
  GFR-binding peptide
  MOD_RES (5)..(6)..(37): Xaa is C or S
SASPXXVPQDLRPVQIRKIVGRTPKVKKATVMVVKSXK

SEQ ID NO: 54656 - protein, 37 aa, Artificial Sequence; identical to SEQ ID NO: 15929
  GFR-binding peptide
  MOD_RES (1)..(2)..(36): Xaa is C or S
  MOD_RES (16)..(17)..(18)..(19)..(20): Xaa is A or G
  MOD_RES (21)..(22)..(23)..(24): Xaa is A or G or is absent

SEQ ID NO: 54657 - protein, 35 aa, Artificial Sequence; identical to SEQ ID NO: 15930
  GFR-binding peptide
  MOD_RES (2)..(3): Xaa is C or S
  MOD_RES (17)..(18)..(19)..(20)..(21): Xaa is A or G
  MOD_RES (22)..(23)..(24)..(25): Xaa is A or G or is absent

SEQ ID NO: 54658 - protein, 39 aa, Artificial Sequence
  GFR-binding peptide
  MOD_RES (1)..(38): Xaa is C or S
XRPTQVQLEPLPVVYYEIVRKKPIFEQLSNTLEDHLAXK

SEQ ID NO: 54659 - protein, 44 aa, Artificial Sequence
  GFR-binding peptide
  MOD_RES (6)..(7)..(41)..(43): Xaa is C or S
  MOD_RES (21)..(22)..(23)..(24)..(25): Xaa is A or G
  MOD_RES (26)..(27)..(28)..(29): Xaa is A or G or is absent
YVPKPXXAPTKLRSVKVAKVXXXXXXXXXKEVQVNMVVRSXGXH

SEQ ID NO: 54660 - protein, 38 aa, Artificial Sequence
  GFR-binding peptide
  MOD_RES (5)..(6)..(37): Xaa is C or S
SASPXXVSQDLRPVQIRKIIGKTPKIKKATVMIVKSXK

SEQ ID NO: 54661 - protein, 34 aa, Artificial Sequence
  GFR-binding peptide
  MOD_RES (33)..(33): Xaa is C or S
  MOD_RES (14)..(15)..(16)..(17)..(18): Xaa is A or G
  MOD_RES (19)..(20)..(21)..(22): Xaa is A or G or is absent
VPQDLSNITIQIMXXXXXXXXXIGEMSMVVKSXK

SEQ ID NO: 54662 - protein, 35 aa, Artificial Sequence; identical to SEQ ID NO: 19247
  GFR-binding peptide
  MOD_RES (1)..(1): Xaa is C or S
  MOD_RES (17)..(18)..(19)..(20)..(21): Xaa is A or G
  MOD_RES (22)..(23)..(24)..(25): Xaa is A or G or is absent

SEQ ID NO: 54663 - protein, 38 aa, Artificial Sequence
  GFR-binding peptide
  MOD_RES (35)..(37): Xaa is C or S
  MOD_RES (14)..(15)..(16)..(17)..(18): Xaa is A or G
  MOD_RES (19)..(20)..(21)..(22): Xaa is A or G or is absent
SRVHHEPLTVLYYXXXXXXXXXEQLSNRLEEHLEXAXA

SEQ ID NO: 54664 - protein, 34 aa, Artificial Sequence; identical to SEQ ID NO: 15936
  GFR-binding peptide
  MOD_RES (2)..(3): Xaa is C or S

SEQ ID NO: 54665 - protein, 40 aa, Artificial Sequence; identical to SEQ ID NO: 15937
  GFR-binding peptide
  MOD_RES (4)..(5)..(38)..(40): Xaa is C or S
  MOD_RES (19)..(20)..(21)..(22)..(23): Xaa is A or G
  MOD_RES (24)..(25)..(26)..(27): Xaa is A or G or is absent

SEQ ID NO: 54666 - protein, 39 aa, Artificial Sequence
  GFR-binding peptide
  MOD_RES (5)..(6)..(37)..(39): Xaa is C or S
SAAPXXVPQALSNITIQIMVGRKPKVIGEMSMIVRSXKX

SEQ ID NO: 54667 - protein, 37 aa, Artificial Sequence; identical to SEQ ID NO: 15941
  GFR-binding peptide
  MOD_RES (2)..(3)..(37): Xaa is C or S
  MOD_RES (17)..(18)..(19)..(20)..(21): Xaa is A or G
  MOD_RES (22)..(23)..(24)..(25): Xaa is A or G or is absent

SEQ ID NO: 54668 - protein, 39 aa, Artificial Sequence
  GFR-binding peptide
  MOD_RES (5)..(6): Xaa is C or S
  MOD_RES (20)..(21)..(22)..(23)..(24): Xaa is A or G
  MOD_RES (25)..(26)..(27)..(28): Xaa is A or G or is absent
VPKPXXAPTQLSNITVQIMXXXXXXXXXIGEMSNMVVRA

SEQ ID NO: 54669 - protein, 39 aa, Artificial Sequence
  GFR-binding peptide
  MOD_RES (3)..(3): Xaa is C or S
  MOD_RES (19)..(20)..(21)..(22)..(23): Xaa is A or G
  MOD_RES (24)..(25)..(26)..(27): Xaa is A or G or is absent
VKXQPSRVHHEPLTVLYYXXXXXXXXXEQLSNRLEEHLE

SEQ ID NO: 54670 - protein, 30 aa, Artificial Sequence; identical to SEQ ID NO: 15944
  GFR-binding peptide

SEQ ID NO: 54671 - protein, 31 aa, Artificial Sequence; identical to SEQ ID NO: 15945
  GFR-binding peptide
  MOD_RES (31)..(31): Xaa is C or S

SEQ ID NO: 54672 - protein, 33 aa, Artificial Sequence; identical to SEQ ID NO: 19254
  GFR-binding peptide

SEQ ID NO: 54673 - protein, 34 aa, Artificial Sequence
  GFR-binding peptide
SRVHHEPLPVVYYEYVRKKPKLEQLSNRLEEHLE

SEQ ID NO: 54674 - protein, 35 aa, Artificial Sequence; identical to SEQ ID NO: 15949
  GFR-binding peptide
  MOD_RES (1)..(2)..(34): Xaa is C or S

SEQ ID NO: 54675 - protein, 39 aa, Artificial Sequence; identical to SEQ ID NO: 19258
  GFR-binding peptide
  MOD_RES (6)..(6): Xaa is C or S

SEQ ID NO: 54676 - protein, 38 aa, Artificial Sequence
  GFR-binding peptide
  MOD_RES (5)..(6)..(38): Xaa is C or S
VPKPXXAPTKLSNITVQIMDDSSNVIIGEMSNMVVRSX

SEQ ID NO: 54677 - protein, 39 aa, Artificial Sequence; identical to SEQ ID NO: 15951
  GFR-binding peptide
  MOD_RES (7)..(39): Xaa is C or S

SEQ ID NO: 54678 - protein, 39 aa, Artificial Sequence
  GFR-binding peptide
  MOD_RES (5)..(6)..(38): Xaa is C or S
IPKAXXVPTELRSVKMAKVDEYDKVVKEVQVEMVVEGXG

SEQ ID NO: 54679 - protein, 36 aa, Artificial Sequence
  GFR-binding peptide
  MOD_RES (5)..(6): Xaa is C or S
SAAPXXVPQALRPVQIRKIVGRKPKVKKATVMIVRS

SEQ ID NO: 54680 - protein, 38 aa, Artificial Sequence
  GFR-binding peptide
  MOD_RES (4)..(5)..(37): Xaa is C or S
PKAXXVPTELSNITMQIMDEYDKVVIGEMSEMVVEGXG

SEQ ID NO: 54681 - protein, 37 aa, Artificial Sequence
  GFR-binding peptide
  MOD_RES (5)..(6)..(37): Xaa is C or S
SAAPXXVPQALRPVQIRKIVGRKPKVKKATVMIVRSX

SEQ ID NO: 54682 - protein, 32 aa, Artificial Sequence; identical to SEQ ID NO: 15956
  GFR-binding peptide
  MOD_RES (32)..(32): Xaa is C or S

SEQ ID NO: 54683 - protein, 40 aa, Artificial Sequence; identical to SEQ ID NO: 19263
  GFR-binding peptide
  MOD_RES (2)..(39): Xaa is C or S
  MOD_RES (18)..(19)..(20)..(21)..(22): Xaa is A or G
  MOD_RES (23)..(24)..(25)..(26): Xaa is A or G or is absent

SEQ ID NO: 54684 - protein, 36 aa, Artificial Sequence
  GFR-binding peptide
  MOD_RES (2)..(3)..(35): Xaa is C or S
AXXVPTELSNITMQIMDENEKVVIGEMSDMVVEGXG

SEQ ID NO: 54685 - protein, 38 aa, Artificial Sequence; identical to SEQ ID NO: 15959
  GFR-binding peptide
  MOD_RES (4)..(5)..(38): Xaa is C or S
  MOD_RES (19)..(20)..(21)..(22)..(23): Xaa is A or G
  MOD_RES (24)..(25)..(26)..(27): Xaa is A or G or is absent

SEQ ID NO: 54686 - protein, 35 aa, Artificial Sequence
  GFR-binding peptide
  MOD_RES (3)..(3): Xaa is C or S
LEXVPTEEEPLTMLYYRIKPHQGQHEQLSNFLQHN

SEQ ID NO: 54687 - protein, 41 aa, Artificial Sequence; identical to SEQ ID NO: 15961
  GFR-binding peptide
  MOD_RES (6)..(40): Xaa is C or S
  MOD_RES (20)..(21)..(22)..(23)..(24): Xaa is A or G
  MOD_RES (25)..(26)..(27)..(28): Xaa is A or G or is absent

SEQ ID NO: 54688 - protein, 33 aa, Artificial Sequence; identical to SEQ ID NO: 15962
  GFR-binding peptide
  MOD_RES (33)..(33): Xaa is C or S
  MOD_RES (14)..(15)..(16)..(17)..(18): Xaa is A or G
  MOD_RES (19)..(20)..(21)..(22): Xaa is A or G or is absent

SEQ ID NO: 54689 - protein, 39 aa, Artificial Sequence
  GFR-binding peptide
  MOD_RES (6)..(7)..(39): Xaa is C or S
KIPKAXXVPTELRPVQMRKIDENEKVVKKATVDMVVEGX

SEQ ID NO: 54690 - protein, 35 aa, Artificial Sequence; identical to SEQ ID NO: 19269
  GFR-binding peptide
  MOD_RES (15)..(16)..(17)..(18)..(19): Xaa is A or G
  MOD_RES (20)..(21)..(22)..(23): Xaa is A or G or is absent

SEQ ID NO: 54691 - protein, 39 aa, Artificial Sequence
  GFR-binding peptide
  MOD_RES (2)..(36)..(38): Xaa is C or S
  MOD_RES (16)..(17)..(18)..(19)..(20): Xaa is A or G
  MOD_RES (21)..(22)..(23)..(24): Xaa is A or G or is absent
TXAPTKLSNITVQIMXXXXXXXXXIGEMSNMVVRSXGXH

SEQ ID NO: 54692 - protein, 35 aa, Artificial Sequence
  GFR-binding peptide
  MOD_RES (32)..(34): Xaa is C or S
VPTELRSVKMAKVDEYDKVVKEVQVEMVVEGXGXR

SEQ ID NO: 54693 - protein, 36 aa, Artificial Sequence; identical to SEQ ID NO: 15964
  GFR-binding peptide
  MOD_RES (2)..(3): Xaa is C or S
  MOD_RES (17)..(18)..(19)..(20)..(21): Xaa is A or G
  MOD_RES (22)..(23)..(24)..(25): Xaa is A or G or is absent

SEQ ID NO: 54694 - protein, 35 aa, Artificial Sequence
  GFR-binding peptide
  MOD_RES (1)..(1): Xaa is C or S
  MOD_RES (17)..(18)..(19)..(20)..(21): Xaa is A or G
  MOD_RES (22)..(23)..(24)..(25): Xaa is A or G or is absent
XRPTQVQLEPLPVVYYXXXXXXXXXEQLSNTLEDH

SEQ ID NO: 54695 - protein, 38 aa, Artificial Sequence
  GFR-binding peptide
  MOD_RES (6)..(7): Xaa is C or S
YVPKPXXAPTKLSNITVQIMDDSSNVIIGEMSNMVVRS

SEQ ID NO: 54696 - protein, 38 aa, Artificial Sequence
  GFR-binding peptide
  MOD_RES (4)..(36)..(38): Xaa is C or S
KPTXAPTKLRPVQVRKIDDSSNVIKKATVNMVVRSXGX

SEQ ID NO: 54697 - protein, 33 aa, Artificial Sequence
  GFR-binding peptide
  MOD_RES (32)..(32): Xaa is C or S
VPTELRSVKMAKVDEYDKVVKEVQVEMVVEGXG

SEQ ID NO: 54698 - protein, 37 aa, Artificial Sequence; identical to SEQ ID NO: 15965
  GFR-binding peptide
  MOD_RES (2)..(3)..(35)..(37): Xaa is C or S

SEQ ID NO: 54699 - protein, 34 aa, Artificial Sequence; identical to SEQ ID NO: 15966
  GFR-binding peptide
  MOD_RES (1)..(34): Xaa is C or S
  MOD_RES (15)..(16)..(17)..(18)..(19): Xaa is A or G
  MOD_RES (20)..(21)..(22)..(23): Xaa is A or G or is absent

SEQ ID NO: 54700 - protein, 34 aa, Artificial Sequence; identical to SEQ ID NO: 15967
  GFR-binding peptide
  MOD_RES (1)..(2): Xaa is C or S
  MOD_RES (16)..(17)..(18)..(19)..(20): Xaa is A or G
  MOD_RES (21)..(22)..(23)..(24): Xaa is A or G or is absent

SEQ ID NO: 54701 - protein, 41 aa, Artificial Sequence
  GFR-binding peptide
  MOD_RES (5)..(5): Xaa is C or S
  MOD_RES (21)..(22)..(23)..(24)..(25): Xaa is A or G
  MOD_RES (26)..(27)..(28)..(29): Xaa is A or G or is absent
SSVKXQPSRVHHEPLPVVYYXXXXXXXXXEQLSNRLEEHLE

SEQ ID NO: 54702 - protein, 38 aa, Artificial Sequence
  GFR-binding peptide
  MOD_RES (4)..(38): Xaa is C or S
  MOD_RES (18)..(19)..(20)..(21)..(22): Xaa is A or G
  MOD_RES (23)..(24)..(25)..(26): Xaa is A or G or is absent
KPTXAPTKLRPVQVRKIXXXXXXXXXKKATVNMVVRSX

SEQ ID NO: 54703 - protein, 37 aa, Artificial Sequence; identical to SEQ ID NO: 15974
  GFR-binding peptide
  MOD_RES (3)..(4): Xaa is C or S
  MOD_RES (18)..(19)..(20)..(21)..(22): Xaa is A or G
  MOD_RES (23)..(24)..(25)..(26): Xaa is A or G or is absent

SEQ ID NO: 54704 - protein, 37 aa, Artificial Sequence
  GFR-binding peptide
  MOD_RES (1)..(2)..(34)..(36): Xaa is C or S
XXAPTKLSNITVQIMDDSSNVIIGEMSNMVVRSXGXH

SEQ ID NO: 54705 - protein, 35 aa, Artificial Sequence
  GFR-binding peptide
  MOD_RES (1)..(33)..(35): Xaa is C or S
XAPTKLRPVQVRKIDDSSNVIKKATVNMVVRSXGX

SEQ ID NO: 54706 - protein, 44 aa, Artificial Sequence
  GFR-binding peptide
  MOD_RES (6)..(7)..(41)..(43): Xaa is C or S
  MOD_RES (21)..(22)..(23)..(24)..(25): Xaa is A or G
  MOD_RES (26)..(27)..(28)..(29): Xaa is A or G or is absent
YVPKPXXAPTKLSNITVQIMXXXXXXXXXIGEMSNMVVRSXGXH

SEQ ID NO: 54707 - protein, 36 aa, Artificial Sequence; identical to SEQ ID NO: 15980
  GFR-binding peptide
  MOD_RES (2)..(3)..(36): Xaa is C or S
  MOD_RES (17)..(18)..(19)..(20)..(21): Xaa is A or G
  MOD_RES (22)..(23)..(24)..(25): Xaa is A or G or is absent

SEQ ID NO: 54708 - protein, 41 aa, Artificial Sequence; identical to SEQ ID NO: 15981
  GFR-binding peptide
  MOD_RES (5)..(6)..(40): Xaa is C or S
  MOD_RES (20)..(21)..(22)..(23)..(24): Xaa is A or G
  MOD_RES (25)..(26)..(27)..(28): Xaa is A or G or is absent

SEQ ID NO: 54709 - protein, 33 aa, Artificial Sequence; identical to SEQ ID NO: 19276
  GFR-binding peptide
  MOD_RES (1)..(1): Xaa is C or S

SEQ ID NO: 54710 - protein, 42 aa, Artificial Sequence
  GFR-binding peptide
  MOD_RES (4)..(5)..(39)..(41): Xaa is C or S
  MOD_RES (19)..(20)..(21)..(22)..(23): Xaa is A or G
  MOD_RES (24)..(25)..(26)..(27): Xaa is A or G or is absent
PKAXXVPTELRSVKMAKVXXXXXXXXXKEVQVEMVVEGXGXR

SEQ ID NO: 54711 - protein, 37 aa, Artificial Sequence
  GFR-binding peptide
  MOD_RES (4)..(5)..(36): Xaa is C or S
ASPXXVSQDLRSVKIAKVIGKTPKIKEVQVMIVKSXK

SEQ ID NO: 54712 - protein, 36 aa, Artificial Sequence
  GFR-binding peptide
  MOD_RES (1)..(2)..(35): Xaa is C or S
  MOD_RES (16)..(17)..(18)..(19)..(20): Xaa is A or G
  MOD_RES (21)..(22)..(23)..(24): Xaa is A or G or is absent
XXVPQDLSNITIQIMXXXXXXXXXIGEMSMVVKSXK

SEQ ID NO: 54713 - protein, 38 aa, Artificial Sequence; identical to SEQ ID NO: 15984
  GFR-binding peptide
  MOD_RES (3)..(4)..(36)..(38): Xaa is C or S

SEQ ID NO: 54714 - protein, 36 aa, Artificial Sequence
  GFR-binding peptide
  MOD_RES (33)..(35): Xaa is C or S
  MOD_RES (14)..(15)..(16)..(17)..(18): Xaa is A or G
  MOD_RES (19)..(20)..(21)..(22): Xaa is A or G or is absent
VPQDLRSVKIAKVXXXXXXXXXKEVQVMVVKSXKXS

SEQ ID NO: 54715 - protein, 38 aa, Artificial Sequence
  GFR-binding peptide
  MOD_RES (7)..(7): Xaa is C or S
HVTKPTXAPTKLSNITVQIMDDSSNVIIGEMSNMVVRS

SEQ ID NO: 54716 - protein, 32 aa, Artificial Sequence; identical to SEQ ID NO: 15988
  GFR-binding peptide
  MOD_RES (1)..(1): Xaa is C or S

SEQ ID NO: 54717 - protein, 42 aa, Artificial Sequence
  GFR-binding peptide
  MOD_RES (2)..(39)..(41): Xaa is C or S
QXRPTQVQLEPLTVLYYEIVRKKPIFEQLSNTLEDHLAXKXE

SEQ ID NO: 54718 - protein, 41 aa, Artificial Sequence; identical to SEQ ID NO: 15990
  GFR-binding peptide
  MOD_RES (3)..(4)..(38)..(40): Xaa is C or S
  MOD_RES (18)..(19)..(20)..(21)..(22): Xaa is A or G
  MOD_RES (23)..(24)..(25)..(26): Xaa is A or G or is absent

SEQ ID NO: 54719 - protein, 41 aa, Artificial Sequence; identical to SEQ ID NO: 19281
  GFR-binding peptide
  MOD_RES (7)..(41): Xaa is C or S

SEQ ID NO: 54720 - protein, 36 aa, Artificial Sequence; identical to SEQ ID NO: 15991
  GFR-binding peptide
  MOD_RES (2)..(3)..(36): Xaa is C or S
  MOD_RES (17)..(18)..(19)..(20)..(21): Xaa is A or G
  MOD_RES (22)..(23)..(24)..(25): Xaa is A or G or is absent

SEQ ID NO: 54721 - protein, 41 aa, Artificial Sequence; identical to SEQ ID NO: 19282
  GFR-binding peptide
  MOD_RES (7)..(41): Xaa is C or S
  MOD_RES (21)..(22)..(23)..(24)..(25): Xaa is A or G
  MOD_RES (26)..(27)..(28)..(29): Xaa is A or G or is absent

SEQ ID NO: 54722 - protein, 39 aa, Artificial Sequence
  GFR-binding peptide
  MOD_RES (5)..(6)..(39): Xaa is C or S
  MOD_RES (20)..(21)..(22)..(23)..(24): Xaa is A or G
  MOD_RES (25)..(26)..(27)..(28): Xaa is A or G or is absent
SASPXXVPQDLSNITIQIMXXXXXXXXXIGEMSMVVKSX

SEQ ID NO: 54723 - protein, 34 aa, Artificial Sequence; identical to SEQ ID NO: 15993
  GFR-binding peptide
  MOD_RES (34)..(34): Xaa is C or S
  MOD_RES (14)..(15)..(16)..(17)..(18): Xaa is A or G
  MOD_RES (19)..(20)..(21)..(22): Xaa is A or G or is absent

SEQ ID NO: 54724 - protein, 35 aa, Artificial Sequence
  GFR-binding peptide
  MOD_RES (2)..(3)..(34): Xaa is C or S
PXXVPQALSNITIQIMVGRKPKVIGEMSMIVRSXK

SEQ ID NO: 54725 - protein, 40 aa, Artificial Sequence
  GFR-binding peptide
  MOD_RES (5)..(6)..(39): Xaa is C or S
  MOD_RES (20)..(21)..(22)..(23)..(24): Xaa is A or G
  MOD_RES (25)..(26)..(27)..(28): Xaa is A or G or is absent
SASPXXVSQDLRSVKIAKVXXXXXXXXXKEVQVMIVKSXK

SEQ ID NO: 54726 - protein, 42 aa, Artificial Sequence
  GFR-binding peptide
  MOD_RES (6)..(40)..(42): Xaa is C or S
DEGLEXVPTEEEPLPMVYYRIKPHQGQHEQLSNFLQHNKXEX

SEQ ID NO: 54727 - protein, 45 aa, Artificial Sequence
  GFR-binding peptide
  MOD_RES (5)..(42)..(44): Xaa is C or S
RNVQXRPTQVQLEPLTVLYYEIVRKKPIFEQLSNTLEDHLAXKXE

SEQ ID NO: 54728 - protein, 33 aa, Artificial Sequence; identical to SEQ ID NO: 15996
  GFR-binding peptide
  MOD_RES (2)..(3): Xaa is C or S

SEQ ID NO: 54729 - protein, 37 aa, Artificial Sequence; identical to SEQ ID NO: 15998
  GFR-binding peptide
  MOD_RES (2)..(3)..(37): Xaa is C or S
  MOD_RES (17)..(18)..(19)..(20)..(21): Xaa is A or G
  MOD_RES (22)..(23)..(24)..(25): Xaa is A or G or is absent

SEQ ID NO: 54730 - protein, 31 aa, Artificial Sequence
  GFR-binding peptide
  MOD_RES (1)..(1): Xaa is C or S
XAPTQLRPVQVRKIDDSSNVIKKATVNMVVR

SEQ ID NO: 54731 - protein, 32 aa, Artificial Sequence
  GFR-binding peptide
  MOD_RES (1)..(2): Xaa is C or S
XXVPQALSNITIQIMVGRKPKVIGEMSMIVRS

SEQ ID NO: 54732 - protein, 37 aa, Artificial Sequence; identical to SEQ ID NO: 16000
  GFR-binding peptide
  MOD_RES (2)..(3)..(35)..(37): Xaa is C or S

SEQ ID NO: 54733 - protein, 39 aa, Artificial Sequence; identical to SEQ ID NO: 19289
  GFR-binding peptide
  MOD_RES (3)..(37)..(39): Xaa is C or S
  MOD_RES (17)..(18)..(19)..(20)..(21): Xaa is A or G
  MOD_RES (22)..(23)..(24)..(25): Xaa is A or G or is absent

SEQ ID NO: 54734 - protein, 40 aa, Artificial Sequence
  GFR-binding peptide
  MOD_RES (3)..(40): Xaa is C or S
  MOD_RES (19)..(20)..(21)..(22)..(23): Xaa is A or G
  MOD_RES (24)..(25)..(26)..(27): Xaa is A or G or is absent
VKXQPSRVHHEPLTVLYYXXXXXXXXXEQLSNRLEEHLEX

SEQ ID NO: 54735 - protein, 35 aa, Artificial Sequence
  GFR-binding peptide
  MOD_RES (32)..(34): Xaa is C or S
APTQLRPVQVRKIDDSSNVIKKATVNMVVRAXGXH

SEQ ID NO: 54736 - protein, 38 aa, Artificial Sequence
  GFR-binding peptide
  MOD_RES (4)..(5): Xaa is C or S
  MOD_RES (19)..(20)..(21)..(22)..(23): Xaa is A or G
  MOD_RES (24)..(25)..(26)..(27): Xaa is A or G or is absent
PKPXXAPTQLRPVQVRKIXXXXXXXXXKKATVNMVVRA

SEQ ID NO: 54737 - protein, 37 aa, Artificial Sequence; identical to SEQ ID NO: 19291
  GFR-binding peptide
  MOD_RES (2)..(2): Xaa is C or S
  MOD_RES (18)..(19)..(20)..(21)..(22): Xaa is A or G
  MOD_RES (23)..(24)..(25)..(26): Xaa is A or G or is absent

SEQ ID NO: 54738 - protein, 37 aa, Artificial Sequence; identical to SEQ ID NO: 16002
  GFR-binding peptide
  MOD_RES (2)..(3)..(36): Xaa is C or S
  MOD_RES (17)..(18)..(19)..(20)..(21): Xaa is A or G
  MOD_RES (22)..(23)..(24)..(25): Xaa is A or G or is absent

SEQ ID NO: 54739 - protein, 35 aa, Artificial Sequence
  GFR-binding peptide
  MOD_RES (4)..(5): Xaa is C or S
ASPXXVPQDLRSVKIAKVVGRTPKVKEVQVMVVKS

SEQ ID NO: 54740 - protein, 35 aa, Artificial Sequence
  GFR-binding peptide
PSRVHHEPLPVVYYEYVRKKPKLEQLSNRLEEHLE

SEQ ID NO: 54741 - protein, 33 aa, Artificial Sequence
  GFR-binding peptide
  MOD_RES (14)..(15)..(16)..(17)..(18): Xaa is A or G
  MOD_RES (19)..(20)..(21)..(22): Xaa is A or G or is absent
VPTELRSVKMAKVXXXXXXXXXKEVQVDMVVEG

SEQ ID NO: 54742 - protein, 38 aa, Artificial Sequence
  GFR-binding peptide
  MOD_RES (4)..(5): Xaa is C or S
  MOD_RES (19)..(20)..(21)..(22)..(23): Xaa is A or G
  MOD_RES (24)..(25)..(26)..(27): Xaa is A or G or is absent
PKAXXVPTELSNITMQIMXXXXXXXXXIGEMSDMVVEG

SEQ ID NO: 54743 - protein, 38 aa, Artificial Sequence
  GFR-binding peptide
  MOD_RES (5)..(6): Xaa is C or S
  MOD_RES (20)..(21)..(22)..(23)..(24): Xaa is A or G
  MOD_RES (25)..(26)..(27)..(28): Xaa is A or G or is absent
SASPXXVPQDLRSVKIAKVXXXXXXXXXKEVQVMVVKS

SEQ ID NO: 54744 - protein, 38 aa, Artificial Sequence; identical to SEQ ID NO: 16004
  GFR-binding peptide
  MOD_RES (2)..(3)..(35)..(37): Xaa is C or S

SEQ ID NO: 54745 - protein, 44 aa, Artificial Sequence
  GFR-binding peptide
  MOD_RES (6)..(7)..(41)..(43): Xaa is C or S
  MOD_RES (21)..(22)..(23)..(24)..(25): Xaa is A or G
  MOD_RES (26)..(27)..(28)..(29): Xaa is A or G or is absent
TVPKPXXAPTQLRSVKVAKVXXXXXXXXXKEVQVNMVVRAXGXH

SEQ ID NO: 54746 - protein, 41 aa, Artificial Sequence
  GFR-binding peptide
  MOD_RES (6)..(7)..(38)..(40): Xaa is C or S
ASASPXXVPQDLRPVQIRKIVGRTPKVKKATVMVVKSXKXS

SEQ ID NO: 54747 - protein, 35 aa, Artificial Sequence; identical to SEQ ID NO: 16005
  GFR-binding peptide
  MOD_RES (34)..(34): Xaa is C or S
  MOD_RES (14)..(15)..(16)..(17)..(18): Xaa is A or G
  MOD_RES (19)..(20)..(21)..(22): Xaa is A or G or is absent

SEQ ID NO: 54748 - protein, 34 aa, Artificial Sequence; identical to SEQ ID NO: 19300
  GFR-binding peptide
  MOD_RES (16)..(17)..(18)..(19)..(20): Xaa is A or G
  MOD_RES (21)..(22)..(23)..(24): Xaa is A or G or is absent

SEQ ID NO: 54749 - protein, 40 aa, Artificial Sequence; identical to SEQ ID NO: 16009
  GFR-binding peptide
  MOD_RES (2)..(3)..(37)..(39): Xaa is C or S
  MOD_RES (17)..(18)..(19)..(20)..(21): Xaa is A or G
  MOD_RES (22)..(23)..(24)..(25): Xaa is A or G or is absent

SEQ ID NO: 54750 - protein, 38 aa, Artificial Sequence
  GFR-binding peptide
  MOD_RES (6)..(7): Xaa is C or S
SIPKAXXVPTELSNITMQIMDEYDKVVIGEMSEMVVEG

SEQ ID NO: 54751 - protein, 40 aa, Artificial Sequence
  GFR-binding peptide
  MOD_RES (5)..(6)..(40): Xaa is C or S
  MOD_RES (20)..(21)..(22)..(23)..(24): Xaa is A or G
  MOD_RES (25)..(26)..(27)..(28): Xaa is A or G or is absent
VPKPXXAPTQLRPVQVRKIXXXXXXXXXKKATVNMVVRAX

SEQ ID NO: 54752 - protein, 35 aa, Artificial Sequence
  GFR-binding peptide
  MOD_RES (2)..(3)..(35): Xaa is C or S
AXXVPTELRSVKMAKVDEYDKVVKEVQVEMVVEGX

SEQ ID NO: 54753 - protein, 41 aa, Artificial Sequence
  GFR-binding peptide
  MOD_RES (7)..(39)..(41): Xaa is C or S
HVTKPTXAPTKLRSVKVAKVDDSSNVIKEVQVNMVVRSXGX

SEQ ID NO: 54754 - protein, 38 aa, Artificial Sequence; identical to SEQ ID NO: 16013
  GFR-binding peptide
  MOD_RES (5)..(37): Xaa is C or S

SEQ ID NO: 54755 - protein, 31 aa, Artificial Sequence
  GFR-binding peptide
  MOD_RES (1)..(1): Xaa is C or S
XVSQDLSNITIQIMIGKTPKIIGEMSMIVKS

SEQ ID NO: 54756 - protein, 34 aa, Artificial Sequence
  GFR-binding peptide
  MOD_RES (1)..(1): Xaa is C or S
  MOD_RES (15)..(16)..(17)..(18)..(19): Xaa is A or G
  MOD_RES (20)..(21)..(22)..(23): Xaa is A or G or is absent
XAPTQLRSVKVAKVXXXXXXXXXKEVQVNMVVRA

SEQ ID NO: 54757 - protein, 39 aa, Artificial Sequence
  GFR-binding peptide
  MOD_RES (6)..(7)..(38): Xaa is C or S
ASAAPXXVPQALRSVKIAKVVGRKPKVKEVQVMIVRSXK

SEQ ID NO: 54758 - protein, 36 aa, Artificial Sequence
  GFR-binding peptide
  MOD_RES (1)..(2)..(33)..(35): Xaa is C or S
XXVSQDLRSVKIAKVIGKTPKIKEVQVMIVKSXKXS

SEQ ID NO: 54759 - protein, 40 aa, Artificial Sequence
  GFR-binding peptide
  MOD_RES (5)..(6)..(38)..(40): Xaa is C or S
VPKPXXAPTKLRSVKVAKVDDSSNVIKEVQVNMVVRSXGX

SEQ ID NO: 54760 - protein, 34 aa, Artificial Sequence
  GFR-binding peptide
  MOD_RES (1)..(33): Xaa is C or S
XAPTKLRSVKVAKVDDSSNVIKEVQVNMVVRSXG

SEQ ID NO: 54761 - protein, 37 aa, Artificial Sequence
  GFR-binding peptide
  MOD_RES (2)..(3)..(34)..(36): Xaa is C or S
PXXVPQALRSVKIAKVVGRKPKVKEVQVMIVRSXKXS

SEQ ID NO: 54762 - protein, 40 aa, Artificial Sequence
  GFR-binding peptide
  MOD_RES (4)..(5)..(38)..(40): Xaa is C or S
  MOD_RES (19)..(20)..(21)..(22)..(23): Xaa is A or G
  MOD_RES (24)..(25)..(26)..(27): Xaa is A or G or is absent
ASPXXVPQDLRSVKIAKVXXXXXXXXXKEVQVMVVKSXKX

SEQ ID NO: 54763 - protein, 38 aa, Artificial Sequence; identical to SEQ ID NO: 16019
  GFR-binding peptide
  MOD_RES (4)..(5)..(37): Xaa is C or S

SEQ ID NO: 54764 - protein, 35 aa, Artificial Sequence; identical to SEQ ID NO: 39667
  GFR-binding peptide
  MOD_RES (1)..(2)..(35): Xaa is C or S
  MOD_RES (16)..(17)..(18)..(19)..(20): Xaa is A or G
  MOD_RES (21)..(22)..(23)..(24): Xaa is A or G or is absent

SEQ ID NO: 54765 - protein, 36 aa, Artificial Sequence
  GFR-binding peptide
  MOD_RES (5)..(6): Xaa is C or S
SASPXXVSQDLSNITIQIMIGKTPKIIGEMSMIVKS

SEQ ID NO: 54766 - protein, 38 aa, Artificial Sequence; identical to SEQ ID NO: 16020
  GFR-binding peptide
  MOD_RES (3)..(37): Xaa is C or S
  MOD_RES (17)..(18)..(19)..(20)..(21): Xaa is A or G
  MOD_RES (22)..(23)..(24)..(25): Xaa is A or G or is absent

SEQ ID NO: 54767 - protein, 35 aa, Artificial Sequence; identical to SEQ ID NO: 16021
  GFR-binding peptide
  MOD_RES (3)..(35): Xaa is C or S

SEQ ID NO: 54768 - protein, 37 aa, Artificial Sequence
  GFR-binding peptide
  MOD_RES (6)..(7): Xaa is C or S
SIPKAXXVPTELRSVKMAKVDEYDKVVKEVQVEMVVE

SEQ ID NO: 54769 - protein, 33 aa, Artificial Sequence
  GFR-binding peptide
  MOD_RES (14)..(15)..(16)..(17)..(18): Xaa is A or G
  MOD_RES (19)..(20)..(21)..(22): Xaa is A or G or is absent
APTQLRPVQVRKIXXXXXXXXXKKATVNMVVRA

SEQ ID NO: 54770 - protein, 35 aa, Artificial Sequence
  GFR-binding peptide
  MOD_RES (2)..(3): Xaa is C or S
  MOD_RES (17)..(18)..(19)..(20)..(21): Xaa is A or G
  MOD_RES (22)..(23)..(24)..(25): Xaa is A or G or is absent
PXXVSQDLRSVKIAKVXXXXXXXXXKEVQVMIVKS

SEQ ID NO: 54771 - protein, 32 aa, Artificial Sequence; identical to SEQ ID NO: 16024
  GFR-binding peptide
  MOD_RES (14)..(15)..(16)..(17)..(18): Xaa is A or G
  MOD_RES (19)..(20)..(21)..(22): Xaa is A or G or is absent

SEQ ID NO: 54772 - protein, 35 aa, Artificial Sequence
  GFR-binding peptide
  MOD_RES (1)..(33)..(35): Xaa is C or S
XVPTELRSVKMAKVDEYDKVVKEVQVEMVVEGXGX

SEQ ID NO: 54773 - protein, 38 aa, Artificial Sequence; identical to SEQ ID NO: 16025
  GFR-binding peptide
  MOD_RES (7)..(7): Xaa is C or S

SEQ ID NO: 54774 - protein, 34 aa, Artificial Sequence
  GFR-binding peptide
  MOD_RES (2)..(3): Xaa is C or S
AXXVPTELSNITMQIMDENEKVVIGEMSDMVVEG

SEQ ID NO: 54775 - protein, 38 aa, Artificial Sequence
  GFR-binding peptide
  MOD_RES (5)..(6)..(38): Xaa is C or S
IPKAXXVPTELSNITMQIMDENEKVVIGEMSDMVVEGX

SEQ ID NO: 54776 - protein, 35 aa, Artificial Sequence; identical to SEQ ID NO: 16027
  GFR-binding peptide
  MOD_RES (3)..(4): Xaa is C or S

SEQ ID NO: 54777 - protein, 37 aa, Artificial Sequence
  GFR-binding peptide
  MOD_RES (35)..(37): Xaa is C or S
TQVQLEPLPVVYYEIVRKKPIFEQLSNTLEDHLAXKX

SEQ ID NO: 54778 - protein, 36 aa, Artificial Sequence
  GFR-binding peptide
  MOD_RES (1)..(35): Xaa is C or S
XVPTEEEPLTMLYYRIKPHQGQHEQLSNFLQHNKXE

SEQ ID NO: 54779 - protein, 32 aa, Artificial Sequence
  GFR-binding peptide
  MOD_RES (1)..(1): Xaa is C or S
XVPTELRSVKMAKVDEYDKVVKEVQVEMVVEG

SEQ ID NO: 54780 - protein, 33 aa, Artificial Sequence; identical to SEQ ID NO: 19323
  GFR-binding peptide
  MOD_RES (1)..(1): Xaa is C or S
  MOD_RES (15)..(16)..(17)..(18)..(19): Xaa is A or G
  MOD_RES (20)..(21)..(22)..(23): Xaa is A or G or is absent

SEQ ID NO: 54781 - protein, 35 aa, Artificial Sequence; identical to SEQ ID NO: 16030
  GFR-binding peptide
  MOD_RES (4)..(5): Xaa is C or S

SEQ ID NO: 54782 - protein, 39 aa, Artificial Sequence
  GFR-binding peptide
  MOD_RES (4)..(5)..(39): Xaa is C or S
  MOD_RES (19)..(20)..(21)..(22)..(23): Xaa is A or G
  MOD_RES (24)..(25)..(26)..(27): Xaa is A or G or is absent
PKAXXVPTELRSVKMAKVXXXXXXXXXKEVQVDMVVEGX

SEQ ID NO: 54783 - protein, 36 aa, Artificial Sequence
  GFR-binding peptide
  MOD_RES (2)..(3)..(34)..(36): Xaa is C or S
PXXVPQDLRSVKIAKVVGRTPKVKEVQVMVVKSXKX

SEQ ID NO: 54784 - protein, 34 aa, Artificial Sequence
  GFR-binding peptide
  MOD_RES (32)..(34): Xaa is C or S
VPTELRPVQMRKIDEYDKVVKKATVEMVVEGXGX

SEQ ID NO: 54785 - protein, 35 aa, Artificial Sequence; identical to SEQ ID NO: 16032
  GFR-binding peptide
  MOD_RES (2)..(3)..(34): Xaa is C or S

SEQ ID NO: 54786 - protein, 44 aa, Artificial Sequence; identical to SEQ ID NO: 16035
  GFR-binding peptide
  MOD_RES (7)..(41)..(43): Xaa is C or S
  MOD_RES (21)..(22)..(23)..(24)..(25): Xaa is A or G
  MOD_RES (26)..(27)..(28)..(29): Xaa is A or G or is absent

SEQ ID NO: 54787 - protein, 38 aa, Artificial Sequence
  GFR-binding peptide
  MOD_RES (2)..(3)..(37): Xaa is C or S
  MOD_RES (17)..(18)..(19)..(20)..(21): Xaa is A or G
  MOD_RES (22)..(23)..(24)..(25): Xaa is A or G or is absent
PXXAPTKLSNITVQIMXXXXXXXXXIGEMSNMVVRSXG

SEQ ID NO: 54788 - protein, 39 aa, Artificial Sequence; identical to SEQ ID NO: 19324
  GFR-binding peptide
  MOD_RES (5)..(5): Xaa is C or S
  MOD_RES (21)..(22)..(23)..(24)..(25): Xaa is A or G
  MOD_RES (26)..(27)..(28)..(29): Xaa is A or G or is absent

SEQ ID NO: 54789 - protein, 33 aa, Artificial Sequence
  GFR-binding peptide
  MOD_RES (1)..(33): Xaa is C or S
XAPTKLRSVKVAKVDDSSNVIKEVQVNMVVRSX

SEQ ID NO: 54790 - protein, 35 aa, Artificial Sequence
  GFR-binding peptide
  MOD_RES (33)..(35): Xaa is C or S
  MOD_RES (14)..(15)..(16)..(17)..(18): Xaa is A or G
  MOD_RES (19)..(20)..(21)..(22): Xaa is A or G or is absent
VPQDLRSVKIAKVXXXXXXXXXKEVQVMVVKSXKX

SEQ ID NO: 54791 - protein, 34 aa, Artificial Sequence
  GFR-binding peptide
  MOD_RES (1)..(33): Xaa is C or S
XAPTQLRPVQVRKIDDSSNVIKKATVNMVVRAXG

SEQ ID NO: 54792 - protein, 38 aa, Artificial Sequence; identical to SEQ ID NO: 19330
  GFR-binding peptide
  MOD_RES (36)..(38): Xaa is C or S

SEQ ID NO: 54793 - protein, 35 aa, Artificial Sequence
  GFR-binding peptide
  MOD_RES (2)..(3)..(35): Xaa is C or S
AXXVPTELRSVKMAKVDENEKVVKEVQVDMVVEGX

SEQ ID NO: 54794 - protein, 35 aa, Artificial Sequence
  GFR-binding peptide
  MOD_RES (3)..(4)..(35): Xaa is C or S
SPXXVPQDLRPVQIRKIVGRTPKVKKATVMVVKSX

SEQ ID NO: 54795 - protein, 37 aa, Artificial Sequence
  GFR-binding peptide
  MOD_RES (2)..(36): Xaa is C or S
  MOD_RES (16)..(17)..(18)..(19)..(20): Xaa is A or G
  MOD_RES (21)..(22)..(23)..(24): Xaa is A or G or is absent
TXAPTKLRSVKVAKVXXXXXXXXXKEVQVNMVVRSXG

SEQ ID NO: 54796 - protein, 40 aa, Artificial Sequence
  GFR-binding peptide
  MOD_RES (4)..(5)..(37)..(39): Xaa is C or S
PKPXXAPTKLRPVQVRKIDDSSNVIKKATVNMVVRSXGXH

SEQ ID NO: 54797 - protein, 35 aa, Artificial Sequence; identical to SEQ ID NO: 16043
  GFR-binding peptide
  MOD_RES (2)..(3)..(34): Xaa is C or S

SEQ ID NO: 54798 - protein, 36 aa, Artificial Sequence; identical to SEQ ID NO: 16045
  GFR-binding peptide
  MOD_RES (6)..(6): Xaa is C or S

SEQ ID NO: 54799 - protein, 39 aa, Artificial Sequence
  GFR-binding peptide
  MOD_RES (2)..(3)..(36)..(38): Xaa is C or S
  MOD_RES (17)..(18)..(19)..(20)..(21): Xaa is A or G
  MOD_RES (22)..(23)..(24)..(25): Xaa is A or G or is absent
PXXVSQDLRPVQIRKIXXXXXXXXXKKATVMIVKSXKXS

SEQ ID NO: 54800 - protein, 37 aa, Artificial Sequence; identical to SEQ ID NO: 19332
  GFR-binding peptide
  MOD_RES (2)..(2): Xaa is C or S

SEQ ID NO: 54801 - protein, 37 aa, Artificial Sequence; identical to SEQ ID NO: 16049
  GFR-binding peptide
  MOD_RES (6)..(7): Xaa is C or S

SEQ ID NO: 54802 - protein, 36 aa, Artificial Sequence
  GFR-binding peptide
  MOD_RES (36)..(36): Xaa is C or S
PSRVHHEPLTVLYYEYVRKKPKLEQLSNRLEEHLEX

SEQ ID NO: 54803 - protein, 42 aa, Artificial Sequence; identical to SEQ ID NO: 16050
  GFR-binding peptide
  MOD_RES (6)..(7)..(41): Xaa is C or S
  MOD_RES (21)..(22)..(23)..(24)..(25): Xaa is A or G
  MOD_RES (26)..(27)..(28)..(29): Xaa is A or G or is absent

SEQ ID NO: 54804 - protein, 35 aa, Artificial Sequence; identical to SEQ ID NO: 16052
  GFR-binding peptide
  MOD_RES (2)..(3): Xaa is C or S
  MOD_RES (17)..(18)..(19)..(20)..(21): Xaa is A or G
  MOD_RES (22)..(23)..(24)..(25): Xaa is A or G or is absent

SEQ ID NO: 54805 - protein, 35 aa, Artificial Sequence; identical to SEQ ID NO: 19338
  GFR-binding peptide
  MOD_RES (34)..(34): Xaa is C or S
  MOD_RES (14)..(15)..(16)..(17)..(18): Xaa is A or G
  MOD_RES (19)..(20)..(21)..(22): Xaa is A or G or is absent

SEQ ID NO: 54806 - protein, 39 aa, Artificial Sequence
  GFR-binding peptide
  MOD_RES (5)..(6)..(39): Xaa is C or S
  MOD_RES (20)..(21)..(22)..(23)..(24): Xaa is A or G
  MOD_RES (25)..(26)..(27)..(28): Xaa is A or G or is absent
SAAPXXVPQALSNITIQIMXXXXXXXXXIGEMSMIVRSX

SEQ ID NO: 54807 - protein, 39 aa, Artificial Sequence; identical to SEQ ID NO: 16055
  GFR-binding peptide
  MOD_RES (3)..(4)..(38): Xaa is C or S
  MOD_RES (18)..(19)..(20)..(21)..(22): Xaa is A or G
  MOD_RES (23)..(24)..(25)..(26): Xaa is A or G or is absent

SEQ ID NO: 54808 - protein, 41 aa, Artificial Sequence; identical to SEQ ID NO: 16057
  GFR-binding peptide
  MOD_RES (5)..(6)..(39)..(41): Xaa is C or S
  MOD_RES (20)..(21)..(22)..(23)..(24): Xaa is A or G
  MOD_RES (25)..(26)..(27)..(28): Xaa is A or G or is absent

SEQ ID NO: 54809 - protein, 35 aa, Artificial Sequence; identical to SEQ ID NO: 16058
  GFR-binding peptide
  MOD_RES (3)..(3): Xaa is C or S
  MOD_RES (17)..(18)..(19)..(20)..(21): Xaa is A or G
  MOD_RES (22)..(23)..(24)..(25): Xaa is A or G or is absent

SEQ ID NO: 54810 - protein, 40 aa, Artificial Sequence; identical to SEQ ID NO: 16059
  GFR-binding peptide
  MOD_RES (4)..(5)..(39): Xaa is C or S
  MOD_RES (19)..(20)..(21)..(22)..(23): Xaa is A or G
  MOD_RES (24)..(25)..(26)..(27): Xaa is A or G or is absent

SEQ ID NO: 54811 - protein, 36 aa, Artificial Sequence
  GFR-binding peptide
  MOD_RES (5)..(6): Xaa is C or S
IPKAXXVPTELRSVKMAKVDENEKVVKEVQVDMVVE

SEQ ID NO: 54812 - protein, 42 aa, Artificial Sequence
  GFR-binding peptide
  MOD_RES (7)..(41): Xaa is C or S
NDEGLEXVPTEEEPLPMVYYRIKPHQGQHEQLSNFLQHNKXE

SEQ ID NO: 54813 - protein, 39 aa, Artificial Sequence
  GFR-binding peptide
  MOD_RES (2)..(39): Xaa is C or S
KXQPSRVHHEPLTVLYYEYVRKKPKLEQLSNRLEEHLEX

SEQ ID NO: 54814 - protein, 38 aa, Artificial Sequence
  GFR-binding peptide
  MOD_RES (2)..(3)..(36)..(38): Xaa is C or S
  MOD_RES (17)..(18)..(19)..(20)..(21): Xaa is A or G
  MOD_RES (22)..(23)..(24)..(25): Xaa is A or G or is absent
PXXVPQALRPVQIRKIXXXXXXXXXKKATVMIVRSXKX

SEQ ID NO: 54815 - protein, 35 aa, Artificial Sequence
  GFR-binding peptide
  MOD_RES (1)..(34): Xaa is C or S
  MOD_RES (15)..(16)..(17)..(18)..(19): Xaa is A or G
  MOD_RES (20)..(21)..(22)..(23): Xaa is A or G or is absent
XVSQDLSNITIQIMXXXXXXXXXIGEMSMIVKSXK

SEQ ID NO: 54816 - protein, 33 aa, Artificial Sequence; identical to SEQ ID NO: 16062
  GFR-binding peptide
  MOD_RES (1)..(1): Xaa is C or S
  MOD_RES (15)..(16)..(17)..(18)..(19): Xaa is A or G
  MOD_RES (20)..(21)..(22)..(23): Xaa is A or G or is absent

SEQ ID NO: 54817 - protein, 36 aa, Artificial Sequence; identical to SEQ ID NO: 16063
  GFR-binding peptide
  MOD_RES (5)..(6): Xaa is C or S

SEQ ID NO: 54818 - protein, 38 aa, Artificial Sequence; identical to SEQ ID NO: 19342
  GFR-binding peptide
  MOD_RES (2)..(2): Xaa is C or S
  MOD_RES (18)..(19)..(20)..(21)..(22): Xaa is A or G
  MOD_RES (23)..(24)..(25)..(26): Xaa is A or G or is absent

SEQ ID NO: 54819 - protein, 39 aa, Artificial Sequence
  GFR-binding peptide
  MOD_RES (6)..(7): Xaa is C or S
  MOD_RES (21)..(22)..(23)..(24)..(25): Xaa is A or G
  MOD_RES (26)..(27)..(28)..(29): Xaa is A or G or is absent
ASASPXXVPQDLRSVKIAKVXXXXXXXXXKEVQVMVVKS

SEQ ID NO: 54820 - protein, 36 aa, Artificial Sequence
  GFR-binding peptide
  MOD_RES (3)..(4)..(35): Xaa is C or S
APXXVPQALRSVKIAKVVGRKPKVKEVQVMIVRSXK

SEQ ID NO: 54821 - protein, 42 aa, Artificial Sequence
  GFR-binding peptide
  MOD_RES (5)..(6)..(39)..(41): Xaa is C or S
  MOD_RES (20)..(21)..(22)..(23)..(24): Xaa is A or G
  MOD_RES (25)..(26)..(27)..(28): Xaa is A or G or is absent
SASPXXVSQDLRPVQIRKIXXXXXXXXXKKATVMIVKSXKXS

SEQ ID NO: 54822 - protein, 39 aa, Artificial Sequence
  GFR-binding peptide
  MOD_RES (6)..(7): Xaa is C or S
  MOD_RES (21)..(22)..(23)..(24)..(25): Xaa is A or G
  MOD_RES (26)..(27)..(28)..(29): Xaa is A or G or is absent
SIPKAXXVPTELRPVQMRKIXXXXXXXXXKKATVEMVVE

SEQ ID NO: 54823 - protein, 34 aa, Artificial Sequence
  GFR-binding peptide
  MOD_RES (2)..(3): Xaa is C or S
PXXAPTQLSNITVQIMDDSSNVIIGEMSNMVVRA

SEQ ID NO: 54824 - protein, 37 aa, Artificial Sequence
  GFR-binding peptide
  MOD_RES (37)..(37): Xaa is C or S
  MOD_RES (16)..(17)..(18)..(19)..(20): Xaa is A or G
  MOD_RES (21)..(22)..(23)..(24): Xaa is A or G or is absent
RPTQVQLEPLPVVYYXXXXXXXXXEQLSNTLEDHLAX

SEQ ID NO: 54825 - protein, 41 aa, Artificial Sequence
  GFR-binding peptide
  MOD_RES (3)..(40): Xaa is C or S
  MOD_RES (19)..(20)..(21)..(22)..(23): Xaa is A or G
  MOD_RES (24)..(25)..(26)..(27): Xaa is A or G or is absent
VQXRPTQVQLEPLTVLYYXXXXXXXXXEQLSNTLEDHLAXK

SEQ ID NO: 54826 - protein, 41 aa, Artificial Sequence
  GFR-binding peptide
  MOD_RES (4)..(5)..(38)..(40): Xaa is C or S
  MOD_RES (19)..(20)..(21)..(22)..(23): Xaa is A or G
  MOD_RES (24)..(25)..(26)..(27): Xaa is A or G or is absent
ASPXXVSQDLRSVKIAKVXXXXXXXXXKEVQVMIVKSXKXS

SEQ ID NO: 54827 - protein, 39 aa, Artificial Sequence; identical to SEQ ID NO: 16068
  GFR-binding peptide
  MOD_RES (5)..(39): Xaa is C or S
  MOD_RES (19)..(20)..(21)..(22)..(23): Xaa is A or G
  MOD_RES (24)..(25)..(26)..(27): Xaa is A or G or is absent

SEQ ID NO: 54828 - protein, 38 aa, Artificial Sequence; identical to SEQ ID NO: 16069
  GFR-binding peptide
  MOD_RES (4)..(5)..(38): Xaa is C or S
  MOD_RES (19)..(20)..(21)..(22)..(23): Xaa is A or G
  MOD_RES (24)..(25)..(26)..(27): Xaa is A or G or is absent

SEQ ID NO: 54829 - protein, 34 aa, Artificial Sequence; identical to SEQ ID NO: 19349
  GFR-binding peptide
  MOD_RES (14)..(15)..(16)..(17)..(18): Xaa is A or G
  MOD_RES (19)..(20)..(21)..(22): Xaa is A or G or is absent

SEQ ID NO: 54830 - protein, 35 aa, Artificial Sequence; identical to SEQ ID NO: 16074
  GFR-binding peptide
  MOD_RES (34)..(34): Xaa is C or S
  MOD_RES (14)..(15)..(16)..(17)..(18): Xaa is A or G
  MOD_RES (19)..(20)..(21)..(22): Xaa is A or G or is absent

SEQ ID NO: 54831 - protein, 37 aa, Artificial Sequence
  GFR-binding peptide
  MOD_RES (2)..(3)..(37): Xaa is C or S
  MOD_RES (17)..(18)..(19)..(20)..(21): Xaa is A or G
  MOD_RES (22)..(23)..(24)..(25): Xaa is A or G or is absent
AXXVPTELSNITMQIMXXXXXXXXXIGEMSDMVVEGX

SEQ ID NO: 54832 - protein, 43 aa, Artificial Sequence
  GFR-binding peptide
  MOD_RES (6)..(40)..(42): Xaa is C or S
  MOD_RES (20)..(21)..(22)..(23)..(24): Xaa is A or G
  MOD_RES (25)..(26)..(27)..(28): Xaa is A or G or is absent
DEGLEXVPTEEEPLPMVYYXXXXXXXXXEQLSNFLQHNKXEXR

SEQ ID NO: 54833 - protein, 36 aa, Artificial Sequence
  GFR-binding peptide
  MOD_RES (3)..(4)..(36): Xaa is C or S
KPXXAPTKLSNITVQIMDDSSNVIIGEMSNMVVRSX

SEQ ID NO: 54834 - protein, 36 aa, Artificial Sequence
  GFR-binding peptide
  MOD_RES (4)..(5)..(36): Xaa is C or S
ASPXXVPQDLRPVQIRKIVGRTPKVKKATVMVVKSX

SEQ ID NO: 54835 - protein, 41 aa, Artificial Sequence
  GFR-binding peptide
  MOD_RES (6)..(7)..(40): Xaa is C or S
  MOD_RES (21)..(22)..(23)..(24)..(25): Xaa is A or G
  MOD_RES (26)..(27)..(28)..(29): Xaa is A or G or is absent
ASAAPXXVPQALRSVKIAKVXXXXXXXXXKEVQVMIVRSXK

SEQ ID NO: 54836 - protein, 36 aa, Artificial Sequence; identical to SEQ ID NO: 19352
  GFR-binding peptide

SEQ ID NO: 54837 - protein, 38 aa, Artificial Sequence
  GFR-binding peptide
  MOD_RES (2)..(3)..(35)..(37): Xaa is C or S
AXXVPTELRPVQMRKIDENEKVVKKATVDMVVEGXGXR

SEQ ID NO: 54838 - protein, 36 aa, Artificial Sequence; identical to SEQ ID NO: 16076
  GFR-binding peptide
  MOD_RES (34)..(36): Xaa is C or S
  MOD_RES (14)..(15)..(16)..(17)..(18): Xaa is A or G
  MOD_RES (19)..(20)..(21)..(22): Xaa is A or G or is absent

SEQ ID NO: 54839 - protein, 35 aa, Artificial Sequence; identical to SEQ ID NO: 19353
  GFR-binding peptide
  MOD_RES (35)..(35): Xaa is C or S
  MOD_RES (14)..(15)..(16)..(17)..(18): Xaa is A or G
  MOD_RES (19)..(20)..(21)..(22): Xaa is A or G or is absent

SEQ ID NO: 54840 - protein, 40 aa, Artificial Sequence
  GFR-binding peptide
  MOD_RES (2)..(3)..(37)..(39): Xaa is C or S
  MOD_RES (17)..(18)..(19)..(20)..(21): Xaa is A or G
  MOD_RES (22)..(23)..(24)..(25): Xaa is A or G or is absent
AXXVPTELRSVKMAKVXXXXXXXXXKEVQVEMVVEGXGXR

SEQ ID NO: 54841 - protein, 36 aa, Artificial Sequence
  GFR-binding peptide
  MOD_RES (1)..(2)..(36): Xaa is C or S
  MOD_RES (16)..(17)..(18)..(19)..(20): Xaa is A or G
  MOD_RES (21)..(22)..(23)..(24): Xaa is A or G or is absent
XXAPTKLSNITVQIMXXXXXXXXXIGEMSNMVVRSX

SEQ ID NO: 54842 - protein, 44 aa, Artificial Sequence
  GFR-binding peptide
  MOD_RES (6)..(7)..(41)..(43): Xaa is C or S
  MOD_RES (21)..(22)..(23)..(24)..(25): Xaa is A or G
  MOD_RES (26)..(27)..(28)..(29): Xaa is A or G or is absent
SIPKAXXVPTELSNITMQIMXXXXXXXXXIGEMSEMVVEGXGXR

SEQ ID NO: 54843 - protein, 40 aa, Artificial Sequence; identical to SEQ ID NO: 19356
  GFR-binding peptide
  MOD_RES (3)..(37)..(39): Xaa is C or S

SEQ ID NO: 54844 - protein, 39 aa, Artificial Sequence
  GFR-binding peptide
  MOD_RES (6)..(7)..(38): Xaa is C or S
ASASPXXVPQDLRPVQIRKIVGRTPKVKKATVMVVKSXK

SEQ ID NO: 54845 - protein, 39 aa, Artificial Sequence
  GFR-binding peptide
  MOD_RES (6)..(7): Xaa is C or S
  MOD_RES (21)..(22)..(23)..(24)..(25): Xaa is A or G
  MOD_RES (26)..(27)..(28)..(29): Xaa is A or G or is absent
SIPKAXXVPTELRSVKMAKVXXXXXXXXXKEVQVEMVVE

SEQ ID NO: 54846 - protein, 39 aa, Artificial Sequence
  GFR-binding peptide
  MOD_RES (2)..(3)..(37)..(39): Xaa is C or S
  MOD_RES (17)..(18)..(19)..(20)..(21): Xaa is A or G
  MOD_RES (22)..(23)..(24)..(25): Xaa is A or G or is absent
AXXVPTELSNITMQIMXXXXXXXXXIGEMSDMVVEGXGX

SEQ ID NO: 54847 - protein, 36 aa, Artificial Sequence
  GFR-binding peptide
  MOD_RES (2)..(2): Xaa is C or S
  MOD_RES (18)..(19)..(20)..(21)..(22): Xaa is A or G
  MOD_RES (23)..(24)..(25)..(26): Xaa is A or G or is absent
KXQPSRVHHEPLPVVYYXXXXXXXXXEQLSNRLEEH

SEQ ID NO: 54848 - protein, 36 aa, Artificial Sequence
  GFR-binding peptide
  MOD_RES (1)..(33)..(35): Xaa is C or S
XAPTQLRPVQVRKIDDSSNVIKKATVNMVVRAXGXH

SEQ ID NO: 54849 - protein, 33 aa, Artificial Sequence; identical to SEQ ID NO: 16087
  GFR-binding peptide
  MOD_RES (1)..(33): Xaa is C or S

SEQ ID NO: 54850 - protein, 37 aa, Artificial Sequence; identical to SEQ ID NO: 19358
  GFR-binding peptide
  MOD_RES (2)..(2): Xaa is C or S

SEQ ID NO: 54851 - protein, 37 aa, Artificial Sequence; identical to SEQ ID NO: 19359
  GFR-binding peptide
  MOD_RES (36)..(36): Xaa is C or S

SEQ ID NO: 54852 - protein, 35 aa, Artificial Sequence; identical to SEQ ID NO: 16091
  GFR-binding peptide
  MOD_RES (2)..(3): Xaa is C or S
  MOD_RES (17)..(18)..(19)..(20)..(21): Xaa is A or G
  MOD_RES (22)..(23)..(24)..(25): Xaa is A or G or is absent

SEQ ID NO: 54853 - protein, 38 aa, Artificial Sequence
  GFR-binding peptide
  MOD_RES (1)..(2)..(36)..(38): Xaa is C or S
  MOD_RES (16)..(17)..(18)..(19)..(20): Xaa is A or G
  MOD_RES (21)..(22)..(23)..(24): Xaa is A or G or is absent
XXVPTELRSVKMAKVXXXXXXXXXKEVQVEMVVEGXGX

SEQ ID NO: 54854 - protein, 30 aa, Artificial Sequence
  GFR-binding peptide
APTQLSNITVQIMDDSSNVIIGEMSNMVVR

SEQ ID NO: 54855 - protein, 38 aa, Artificial Sequence; identical to SEQ ID NO: 16092
  GFR-binding peptide
  MOD_RES (4)..(5)..(37): Xaa is C or S

SEQ ID NO: 54856 - protein, 34 aa, Artificial Sequence; identical to SEQ ID NO: 16094
  GFR-binding peptide
  MOD_RES (33)..(33): Xaa is C or S
  MOD_RES (14)..(15)..(16)..(17)..(18): Xaa is A or G
  MOD_RES (19)..(20)..(21)..(22): Xaa is A or G or is absent

SEQ ID NO: 54857 - protein, 35 aa, Artificial Sequence; identical to SEQ ID NO: 16095
  GFR-binding peptide
  MOD_RES (3)..(3): Xaa is C or S
  MOD_RES (17)..(18)..(19)..(20)..(21): Xaa is A or G
  MOD_RES (22)..(23)..(24)..(25): Xaa is A or G or is absent

SEQ ID NO: 54858 - protein, 38 aa, Artificial Sequence
  GFR-binding peptide
  MOD_RES (1)..(2)..(35)..(37): Xaa is C or S
  MOD_RES (16)..(17)..(18)..(19)..(20): Xaa is A or G
  MOD_RES (21)..(22)..(23)..(24): Xaa is A or G or is absent
XXVSQDLSNITIQIMXXXXXXXXXIGEMSMIVKSXKXS

SEQ ID NO: 54859 - protein, 35 aa, Artificial Sequence; identical to SEQ ID NO: 19365
  GFR-binding peptide
  MOD_RES (34)..(34): Xaa is C or S
  MOD_RES (14)..(15)..(16)..(17)..(18): Xaa is A or G
  MOD_RES (19)..(20)..(21)..(22): Xaa is A or G or is absent

SEQ ID NO: 54860 - protein, 44 aa, Artificial Sequence; identical to SEQ ID NO: 16096
  GFR-binding peptide
  MOD_RES (6)..(7)..(41)..(43): Xaa is C or S
  MOD_RES (21)..(22)..(23)..(24)..(25): Xaa is A or G
  MOD_RES (26)..(27)..(28)..(29): Xaa is A or G or is absent

SEQ ID NO: 54861 - protein, 42 aa, Artificial Sequence
  GFR-binding peptide
  MOD_RES (3)..(40)..(42): Xaa is C or S
VQXRPTQVQLEPLTVLYYEIVRKKPIFEQLSNTLEDHLAXKX

SEQ ID NO: 54862 - protein, 38 aa, Artificial Sequence
  GFR-binding peptide
  MOD_RES (5)..(6): Xaa is C or S
  MOD_RES (20)..(21)..(22)..(23)..(24): Xaa is A or G
  MOD_RES (25)..(26)..(27)..(28): Xaa is A or G or is absent
SASPXXVPQDLRPVQIRKIXXXXXXXXXKKATVMVVKS

SEQ ID NO: 54863 - protein, 39 aa, Artificial Sequence
  GFR-binding peptide
  MOD_RES (6)..(7)..(39): Xaa is C or S
YVPKPXXAPTKLRPVQVRKIDDSSNVIKKATVNMVVRSX

SEQ ID NO: 54864 - protein, 39 aa, Artificial Sequence; identical to SEQ ID NO: 16099
  GFR-binding peptide
  MOD_RES (4)..(5)..(39): Xaa is C or S
  MOD_RES (19)..(20)..(21)..(22)..(23): Xaa is A or G
  MOD_RES (24)..(25)..(26)..(27): Xaa is A or G or is absent

SEQ ID NO: 54865 - protein, 35 aa, Artificial Sequence; identical to SEQ ID NO: 16100
  GFR-binding peptide
  MOD_RES (1)..(33)..(35): Xaa is C or S

SEQ ID NO: 54866 - protein, 38 aa, Artificial Sequence
  GFR-binding peptide
  MOD_RES (1)..(35)..(37): Xaa is C or S
  MOD_RES (15)..(16)..(17)..(18)..(19): Xaa is A or G
  MOD_RES (20)..(21)..(22)..(23): Xaa is A or G or is absent
XVPTELRPVQMRKIXXXXXXXXXKKATVDMVVEGXGXR

SEQ ID NO: 54867 - protein, 43 aa, Artificial Sequence
  GFR-binding peptide
  MOD_RES (6)..(7)..(41)..(43): Xaa is C or S
  MOD_RES (21)..(22)..(23)..(24)..(25): Xaa is A or G
  MOD_RES (26)..(27)..(28)..(29): Xaa is A or G or is absent
YVPKPXXAPTKLSNITVQIMXXXXXXXXXIGEMSNMVVRSXGX

SEQ ID NO: 54868 - protein, 38 aa, Artificial Sequence; identical to SEQ ID NO: 16103
  GFR-binding peptide
  MOD_RES (5)..(6)..(38): Xaa is C or S

SEQ ID NO: 54869 - protein, 40 aa, Artificial Sequence; identical to SEQ ID NO: 16104
  GFR-binding peptide
  MOD_RES (6)..(40): Xaa is C or S
  MOD_RES (20)..(21)..(22)..(23)..(24): Xaa is A or G
  MOD_RES (25)..(26)..(27)..(28): Xaa is A or G or is absent

SEQ ID NO: 54870 - protein, 37 aa, Artificial Sequence; identical to SEQ ID NO: 16105
  GFR-binding peptide
  MOD_RES (1)..(2)..(34)..(36): Xaa is C or S

SEQ ID NO: 54871 - protein, 35 aa, Artificial Sequence
  GFR-binding peptide
  MOD_RES (32)..(34): Xaa is C or S
VPTELSNITMQIMDEYDKVVIGEMSEMVVEGXGXR

SEQ ID NO: 54872 - protein, 38 aa, Artificial Sequence
  GFR-binding peptide
  MOD_RES (6)..(7)..(38): Xaa is C or S
ASAAPXXVPQALRPVQIRKIVGRKPKVKKATVMIVRSX

SEQ ID NO: 54873 - protein, 35 aa, Artificial Sequence
  GFR-binding peptide
  MOD_RES (1)..(2)..(33)..(35): Xaa is C or S
XXVPQDLRSVKIAKVVGRTPKVKEVQVMVVKSXKX

SEQ ID NO: 54874 - protein, 36 aa, Artificial Sequence
  GFR-binding peptide
  MOD_RES (36)..(36): Xaa is C or S
PSRVHHEPLPVVYYEYVRKKPKLEQLSNRLEEHLEX

SEQ ID NO: 54875 - protein, 41 aa, Artificial Sequence
  GFR-binding peptide
  MOD_RES (6)..(40): Xaa is C or S
DEGLEXVPTEEEPLTMLYYRIKPHQGQHEQLSNFLQHNKXE

SEQ ID NO: 54876 - protein, 39 aa, Artificial Sequence; identical to SEQ ID NO: 16112
  GFR-binding peptide
  MOD_RES (3)..(4)..(38): Xaa is C or S
  MOD_RES (18)..(19)..(20)..(21)..(22): Xaa is A or G
  MOD_RES (23)..(24)..(25)..(26): Xaa is A or G or is absent

SEQ ID NO: 54877 - protein, 43 aa, Artificial Sequence
  GFR-binding peptide
  MOD_RES (5)..(42): Xaa is C or S
  MOD_RES (21)..(22)..(23)..(24)..(25): Xaa is A or G
  MOD_RES (26)..(27)..(28)..(29): Xaa is A or G or is absent
RNVQXRPTQVQLEPLPVVYYXXXXXXXXXEQLSNTLEDHLAXK

SEQ ID NO: 54878 - protein, 37 aa, Artificial Sequence; identical to SEQ ID NO: 19369
  GFR-binding peptide
  MOD_RES (37)..(37): Xaa is C or S

SEQ ID NO: 54879 - protein, 39 aa, Artificial Sequence
  GFR-binding peptide
  MOD_RES (4)..(38): Xaa is C or S
GLEXVPTEEEPLTMLYYRIKPHQGQHEQLSNFLQHNKXE

SEQ ID NO: 54880 - protein, 35 aa, Artificial Sequence; identical to SEQ ID NO: 16121
  GFR-binding peptide
  MOD_RES (2)..(3)..(35): Xaa is C or S

SEQ ID NO: 54881 - protein, 38 aa, Artificial Sequence
  GFR-binding peptide
  MOD_RES (2)..(2): Xaa is C or S
QXRPTQVQLEPLPVVYYEIVRKKPIFEQLSNTLEDHLA

SEQ ID NO: 54882 - protein, 35 aa, Artificial Sequence
  GFR-binding peptide
  MOD_RES (2)..(3): Xaa is C or S
  MOD_RES (17)..(18)..(19)..(20)..(21): Xaa is A or G
  MOD_RES (22)..(23)..(24)..(25): Xaa is A or G or is absent
PXXVPQALSNITIQIMXXXXXXXXXIGEMSMIVRS

SEQ ID NO: 54883 - protein, 41 aa, Artificial Sequence
  GFR-binding peptide
  MOD_RES (1)..(38)..(40): Xaa is C or S
  MOD_RES (17)..(18)..(19)..(20)..(21): Xaa is A or G
  MOD_RES (22)..(23)..(24)..(25): Xaa is A or G or is absent
XQPSRVHHEPLPVVYYXXXXXXXXXEQLSNRLEEHLEXAXA

SEQ ID NO: 54884 - protein, 41 aa, Artificial Sequence
  GFR-binding peptide
  MOD_RES (6)..(7)..(40): Xaa is C or S
  MOD_RES (21)..(22)..(23)..(24)..(25): Xaa is A or G
  MOD_RES (26)..(27)..(28)..(29): Xaa is A or G or is absent
ASASPXXVSQDLRSVKIAKVXXXXXXXXXKEVQVMIVKSXK

SEQ ID NO: 54885 - protein, 35 aa, Artificial Sequence
  GFR-binding peptide
  MOD_RES (15)..(16)..(17)..(18)..(19): Xaa is A or G
  MOD_RES (20)..(21)..(22)..(23): Xaa is A or G or is absent
PTQVQLEPLTVLYYXXXXXXXXXEQLSNTLEDHLA

SEQ ID NO: 54886 - protein, 44 aa, Artificial Sequence
  GFR-binding peptide
  MOD_RES (5)..(42)..(44): Xaa is C or S
RNVQXRPTQVQLEPLPVVYYEIVRKKPIFEQLSNTLEDHLAXKX

SEQ ID NO: 54887 - protein, 40 aa, Artificial Sequence
  GFR-binding peptide
  MOD_RES (5)..(6)..(39): Xaa is C or S
  MOD_RES (20)..(21)..(22)..(23)..(24): Xaa is A or G
  MOD_RES (25)..(26)..(27)..(28): Xaa is A or G or is absent
SAAPXXVPQALRSVKIAKVXXXXXXXXXKEVQVMIVRSXK

SEQ ID NO: 54888 - protein, 38 aa, Artificial Sequence
  GFR-binding peptide
  MOD_RES (5)..(6)..(38): Xaa is C or S
IPKAXXVPTELRSVKMAKVDENEKVVKEVQVDMVVEGX

SEQ ID NO: 54889 - protein, 39 aa, Artificial Sequence
  GFR-binding peptide
  MOD_RES (3)..(4)..(37)..(39): Xaa is C or S
  MOD_RES (18)..(19)..(20)..(21)..(22): Xaa is A or G
  MOD_RES (23)..(24)..(25)..(26): Xaa is A or G or is absent
SPXXVPQDLRSVKIAKVXXXXXXXXXKEVQVMVVKSXKX

SEQ ID NO: 54890 - protein, 37 aa, Artificial Sequence
  GFR-binding peptide
  MOD_RES (2)..(2): Xaa is C or S
  MOD_RES (18)..(19)..(20)..(21)..(22): Xaa is A or G
  MOD_RES (23)..(24)..(25)..(26): Xaa is A or G or is absent
KXQPSRVHHEPLPVVYYXXXXXXXXXEQLSNRLEEHL

SEQ ID NO: 54891 - protein, 38 aa, Artificial Sequence; identical to SEQ ID NO: 16129
  GFR-binding peptide
  MOD_RES (5)..(6)..(38): Xaa is C or S

SEQ ID NO: 54892 - protein, 38 aa, Artificial Sequence
  GFR-binding peptide
  MOD_RES (1)..(38): Xaa is C or S
  MOD_RES (17)..(18)..(19)..(20)..(21): Xaa is A or G
  MOD_RES (22)..(23)..(24)..(25): Xaa is A or G or is absent
XQPSRVHHEPLTVLYYXXXXXXXXXEQLSNRLEEHLEX

SEQ ID NO: 54893 - protein, 43 aa, Artificial Sequence
  GFR-binding peptide
  MOD_RES (3)..(40)..(42): Xaa is C or S
  MOD_RES (19)..(20)..(21)..(22)..(23): Xaa is A or G
  MOD_RES (24)..(25)..(26)..(27): Xaa is A or G or is absent
VQXRPTQVQLEPLPVVYYXXXXXXXXXEQLSNTLEDHLAXKXE

SEQ ID NO: 54894 - protein, 36 aa, Artificial Sequence
  GFR-binding peptide
  MOD_RES (35)..(35): Xaa is C or S
  MOD_RES (14)..(15)..(16)..(17)..(18): Xaa is A or G
  MOD_RES (19)..(20)..(21)..(22): Xaa is A or G or is absent
SRVHHEPLPVVYYXXXXXXXXXEQLSNRLEEHLEXA

SEQ ID NO: 54895 - protein, 39 aa, Artificial Sequence
  GFR-binding peptide
  MOD_RES (2)..(3)..(36)..(38): Xaa is C or S
  MOD_RES (17)..(18)..(19)..(20)..(21): Xaa is A or G
  MOD_RES (22)..(23)..(24)..(25): Xaa is A or G or is absent
PXXVSQDLSNITIQIMXXXXXXXXXIGEMSMIVKSXKXS

SEQ ID NO: 54896 - protein, 34 aa, Artificial Sequence
  GFR-binding peptide
  MOD_RES (3)..(4): Xaa is C or S
KPXXAPTKLSNITVQIMDDSSNVIIGEMSNMVVR

SEQ ID NO: 54897 - protein, 34 aa, Artificial Sequence; identical to SEQ ID NO: 19380
  GFR-binding peptide
  MOD_RES (16)..(17)..(18)..(19)..(20): Xaa is A or G
  MOD_RES (21)..(22)..(23)..(24): Xaa is A or G or is absent

SEQ ID NO: 54898 - protein, 33 aa, Artificial Sequence
  GFR-binding peptide
PSRVHHEPLTVLYYEYVRKKPKLEQLSNRLEEH

SEQ ID NO: 54899 - protein, 38 aa, Artificial Sequence; identical to SEQ ID NO: 16136
  GFR-binding peptide
  MOD_RES (4)..(5): Xaa is C or S
  MOD_RES (19)..(20)..(21)..(22)..(23): Xaa is A or G
  MOD_RES (24)..(25)..(26)..(27): Xaa is A or G or is absent

SEQ ID NO: 54900 - protein, 37 aa, Artificial Sequence
  GFR-binding peptide
  MOD_RES (4)..(4): Xaa is C or S
  MOD_RES (18)..(19)..(20)..(21)..(22): Xaa is A or G
  MOD_RES (23)..(24)..(25)..(26): Xaa is A or G or is absent
GLEXVPTEEEPLTMLYYXXXXXXXXXEQLSNFLQHNK

SEQ ID NO: 54901 - protein, 38 aa, Artificial Sequence; identical to SEQ ID NO: 16139
  GFR-binding peptide
  MOD_RES (4)..(36)..(38): Xaa is C or S

SEQ ID NO: 54902 - protein, 42 aa, Artificial Sequence; identical to SEQ ID NO: 19384
  GFR-binding peptide
  MOD_RES (2)..(39)..(41): Xaa is C or S
  MOD_RES (18)..(19)..(20)..(21)..(22): Xaa is A or G
  MOD_RES (23)..(24)..(25)..(26): Xaa is A or G or is absent

SEQ ID NO: 54903 - protein, 40 aa, Artificial Sequence
  GFR-binding peptide
  MOD_RES (6)..(7)..(40): Xaa is C or S
  MOD_RES (21)..(22)..(23)..(24)..(25): Xaa is A or G
  MOD_RES (26)..(27)..(28)..(29): Xaa is A or G or is absent
ASAAPXXVPQALRPVQIRKIXXXXXXXXXKKATVMIVRSX

SEQ ID NO: 54904 - protein, 39 aa, Artificial Sequence; identical to SEQ ID NO: 16143
  GFR-binding peptide
  MOD_RES (5)..(6): Xaa is C or S
  MOD_RES (20)..(21)..(22)..(23)..(24): Xaa is A or G
  MOD_RES (25)..(26)..(27)..(28): Xaa is A or G or is absent

SEQ ID NO: 54905 - protein, 36 aa, Artificial Sequence
  GFR-binding peptide
  MOD_RES (2)..(3)..(34)..(36): Xaa is C or S
PXXVPQALRPVQIRKIVGRKPKVKKATVMIVRSXKX

SEQ ID NO: 54906 - protein, 37 aa, Artificial Sequence
  GFR-binding peptide
  MOD_RES (1)..(35)..(37): Xaa is C or S
  MOD_RES (15)..(16)..(17)..(18)..(19): Xaa is A or G
  MOD_RES (20)..(21)..(22)..(23): Xaa is A or G or is absent
XVPTELRPVQMRKIXXXXXXXXXKKATVEMVVEGXGX

SEQ ID NO: 54907 - protein, 41 aa, Artificial Sequence; identical to SEQ ID NO: 19393
  GFR-binding peptide
  MOD_RES (1)..(38)..(40): Xaa is C or S

SEQ ID NO: 54908 - protein, 44 aa, Artificial Sequence; identical to SEQ ID NO: 19394
  GFR-binding peptide
  MOD_RES (4)..(41)..(43): Xaa is C or S
  MOD_RES (20)..(21)..(22)..(23)..(24): Xaa is A or G
  MOD_RES (25)..(26)..(27)..(28): Xaa is A or G or is absent

SEQ ID NO: 54909 - protein, 36 aa, Artificial Sequence
  GFR-binding peptide
  MOD_RES (2)..(3)..(36): Xaa is C or S
  MOD_RES (17)..(18)..(19)..(20)..(21): Xaa is A or G
  MOD_RES (22)..(23)..(24)..(25): Xaa is A or G or is absent
PXXVPQALRSVKIAKVXXXXXXXXXKEVQVMIVRSX

SEQ ID NO: 54910 - protein, 37 aa, Artificial Sequence
  GFR-binding peptide
  MOD_RES (4)..(4): Xaa is C or S
  MOD_RES (18)..(19)..(20)..(21)..(22): Xaa is A or G
  MOD_RES (23)..(24)..(25)..(26): Xaa is A or G or is absent
KPTXAPTKLSNITVQIMXXXXXXXXXIGEMSNMVVRS

SEQ ID NO: 54911 - protein, 35 aa, Artificial Sequence; identical to SEQ ID NO: 16146
  GFR-binding peptide
  MOD_RES (3)..(4): Xaa is C or S

SEQ ID NO: 54912 - protein, 39 aa, Artificial Sequence; identical to SEQ ID NO: 16147
  GFR-binding peptide
  MOD_RES (6)..(7): Xaa is C or S
  MOD_RES (21)..(22)..(23)..(24)..(25): Xaa is A or G
  MOD_RES (26)..(27)..(28)..(29): Xaa is A or G or is absent

SEQ ID NO: 54913 - protein, 39 aa, Artificial Sequence
  GFR-binding peptide
  MOD_RES (1)..(2)..(36)..(38): Xaa is C or S
  MOD_RES (16)..(17)..(18)..(19)..(20): Xaa is A or G
  MOD_RES (21)..(22)..(23)..(24): Xaa is A or G or is absent
XXVPTELSNITMQIMXXXXXXXXXIGEMSEMVVEGXGXR

SEQ ID NO: 54914 - protein, 36 aa, Artificial Sequence; identical to SEQ ID NO: 16148
  GFR-binding peptide
  MOD_RES (3)..(4)..(35): Xaa is C or S

SEQ ID NO: 54915 - protein, 40 aa, Artificial Sequence; identical to SEQ ID NO: 16149
  GFR-binding peptide
  MOD_RES (5)..(6)..(40): Xaa is C or S
  MOD_RES (20)..(21)..(22)..(23)..(24): Xaa is A or G
  MOD_RES (25)..(26)..(27)..(28): Xaa is A or G or is absent

SEQ ID NO: 54916 - protein, 34 aa, Artificial Sequence; identical to SEQ ID NO: 16152
  GFR-binding peptide
  MOD_RES (1)..(2): Xaa is C or S
  MOD_RES (16)..(17)..(18)..(19)..(20): Xaa is A or G
  MOD_RES (21)..(22)..(23)..(24): Xaa is A or G or is absent

SEQ ID NO: 54917 - protein, 33 aa, Artificial Sequence
  GFR-binding peptide
  MOD_RES (14)..(15)..(16)..(17)..(18): Xaa is A or G
  MOD_RES (19)..(20)..(21)..(22): Xaa is A or G or is absent
SRVHHEPLPVVYYXXXXXXXXXEQLSNRLEEHL

SEQ ID NO: 54918 - protein, 35 aa, Artificial Sequence
  GFR-binding peptide
  MOD_RES (2)..(3): Xaa is C or S
  MOD_RES (17)..(18)..(19)..(20)..(21): Xaa is A or G
  MOD_RES (22)..(23)..(24)..(25): Xaa is A or G or is absent
PXXAPTQLRSVKVAKVXXXXXXXXXKEVQVNMVVR

SEQ ID NO: 54919 - protein, 42 aa, Artificial Sequence; identical to SEQ ID NO: 19398
  GFR-binding peptide
  MOD_RES (4)..(41): Xaa is C or S

SEQ ID NO: 54920 - protein, 34 aa, Artificial Sequence
  GFR-binding peptide
  MOD_RES (2)..(2): Xaa is C or S
  MOD_RES (16)..(17)..(18)..(19)..(20): Xaa is A or G
  MOD_RES (21)..(22)..(23)..(24): Xaa is A or G or is absent
TXAPTKLSNITVQIMXXXXXXXXXIGEMSNMVVR

SEQ ID NO: 54921 - protein, 36 aa, Artificial Sequence; identical to SEQ ID NO: 39850
  GFR-binding peptide
  MOD_RES (1)..(2)..(35): Xaa is C or S
  MOD_RES (16)..(17)..(18)..(19)..(20): Xaa is A or G
  MOD_RES (21)..(22)..(23)..(24): Xaa is A or G or is absent

SEQ ID NO: 54922 - protein, 35 aa, Artificial Sequence
  GFR-binding peptide
  MOD_RES (1)..(1): Xaa is C or S
  MOD_RES (17)..(18)..(19)..(20)..(21): Xaa is A or G
  MOD_RES (22)..(23)..(24)..(25): Xaa is A or G or is absent
XRPTQVQLEPLTVLYYXXXXXXXXXEQLSNTLEDH

SEQ ID NO: 54923 - protein, 38 aa, Artificial Sequence
  GFR-binding peptide
  MOD_RES (1)..(2)..(36)..(38): Xaa is C or S
  MOD_RES (16)..(17)..(18)..(19)..(20): Xaa is A or G
  MOD_RES (21)..(22)..(23)..(24): Xaa is A or G or is absent
XXAPTQLRSVKVAKVXXXXXXXXXKEVQVNMVVRAXGX

SEQ ID NO: 54924 - protein, 35 aa, Artificial Sequence
  GFR-binding peptide
  MOD_RES (1)..(2)..(35): Xaa is C or S
  MOD_RES (16)..(17)..(18)..(19)..(20): Xaa is A or G
  MOD_RES (21)..(22)..(23)..(24): Xaa is A or G or is absent
XXVPQDLRPVQIRKIXXXXXXXXXKKATVMVVKSX

SEQ ID NO: 54925 - protein, 40 aa, Artificial Sequence
  GFR-binding peptide
  MOD_RES (6)..(7)..(39): Xaa is C or S
YVPKPXXAPTKLRSVKVAKVDDSSNVIKEVQVNMVVRSXG

SEQ ID NO: 54926 - protein, 40 aa, Artificial Sequence
  GFR-binding peptide
  MOD_RES (3)..(37)..(39): Xaa is C or S
  MOD_RES (17)..(18)..(19)..(20)..(21): Xaa is A or G
  MOD_RES (22)..(23)..(24)..(25): Xaa is A or G or is absent
PTXAPTKLSNITVQIMXXXXXXXXXIGEMSNMVVRSXGXH

SEQ ID NO: 54927 - protein, 35 aa, Artificial Sequence
  GFR-binding peptide
  MOD_RES (1)..(2)..(34): Xaa is C or S
XXVPTELSNITMQIMDENEKVVIGEMSDMVVEGXG

SEQ ID NO: 54928 - protein, 40 aa, Artificial Sequence
  GFR-binding peptide
  MOD_RES (3)..(4)..(38)..(40): Xaa is C or S
  MOD_RES (18)..(19)..(20)..(21)..(22): Xaa is A or G
  MOD_RES (23)..(24)..(25)..(26): Xaa is A or G or is absent
KPXXAPTKLRPVQVRKIXXXXXXXXXKKATVNMVVRSXGX

SEQ ID NO: 54929 - protein, 35 aa, Artificial Sequence
  GFR-binding peptide
  MOD_RES (34)..(34): Xaa is C or S
  MOD_RES (14)..(15)..(16)..(17)..(18): Xaa is A or G
  MOD_RES (19)..(20)..(21)..(22): Xaa is A or G or is absent
APTKLRSVKVAKVXXXXXXXXXKEVQVNMVVRSXG

SEQ ID NO: 54930 - protein, 42 aa, Artificial Sequence
  GFR-binding peptide
  MOD_RES (5)..(6)..(39)..(41): Xaa is C or S
  MOD_RES (20)..(21)..(22)..(23)..(24): Xaa is A or G
  MOD_RES (25)..(26)..(27)..(28): Xaa is A or G or is absent
SASPXXVPQDLRPVQIRKIXXXXXXXXXKKATVMVVKSXKXS

SEQ ID NO: 54931 - protein, 37 aa, Artificial Sequence
  GFR-binding peptide
  MOD_RES (3)..(37): Xaa is C or S
LEXVPTEEEPLTMLYYRIKPHQGQHEQLSNFLQHNKX

SEQ ID NO: 54932 - protein, 40 aa, Artificial Sequence; identical to SEQ ID NO: 39874
  GFR-binding peptide
  MOD_RES (6)..(7)..(40): Xaa is C or S
  MOD_RES (21)..(22)..(23)..(24)..(25): Xaa is A or G
  MOD_RES (26)..(27)..(28)..(29): Xaa is A or G or is absent

SEQ ID NO: 54933 - protein, 39 aa, Artificial Sequence; identical to SEQ ID NO: 16165
  GFR-binding peptide
  MOD_RES (2)..(3)..(37)..(39): Xaa is C or S
  MOD_RES (17)..(18)..(19)..(20)..(21): Xaa is A or G
  MOD_RES (22)..(23)..(24)..(25): Xaa is A or G or is absent

SEQ ID NO: 54934 - protein, 35 aa, Artificial Sequence
  GFR-binding peptide
  MOD_RES (2)..(3): Xaa is C or S
  MOD_RES (17)..(18)..(19)..(20)..(21): Xaa is A or G
  MOD_RES (22)..(23)..(24)..(25): Xaa is A or G or is absent
PXXAPTQLRPVQVRKIXXXXXXXXXKKATVNMVVR

SEQ ID NO: 54935 - protein, 36 aa, Artificial Sequence
  GFR-binding peptide
  MOD_RES (3)..(3): Xaa is C or S
  MOD_RES (17)..(18)..(19)..(20)..(21): Xaa is A or G
  MOD_RES (22)..(23)..(24)..(25): Xaa is A or G or is absent
LEXVPTEEEPLPMVYYXXXXXXXXXEQLSNFLQHNK

SEQ ID NO: 54936 - protein, 40 aa, Artificial Sequence
  GFR-binding peptide
  MOD_RES (6)..(7)..(38)..(40): Xaa is C or S
ASAAPXXVPQALSNITIQIMVGRKPKVIGEMSMIVRSXKX

SEQ ID NO: 54937 - protein, 38 aa, Artificial Sequence
  GFR-binding peptide
  MOD_RES (5)..(6)..(38): Xaa is C or S
IPKAXXVPTELRSVKMAKVDEYDKVVKEVQVEMVVEGX

SEQ ID NO: 54938 - protein, 33 aa, Artificial Sequence
  GFR-binding peptide
  MOD_RES (2)..(3): Xaa is C or S
AXXVPTELSNITMQIMDENEKVVIGEMSDMVVE

SEQ ID NO: 54939 - protein, 38 aa, Artificial Sequence; identical to SEQ ID NO: 16170
  GFR-binding peptide
  MOD_RES (5)..(6): Xaa is C or S
  MOD_RES (20)..(21)..(22)..(23)..(24): Xaa is A or G
  MOD_RES (25)..(26)..(27)..(28): Xaa is A or G or is absent

SEQ ID NO: 54940 - protein, 39 aa, Artificial Sequence; identical to SEQ ID NO: 16172
  GFR-binding peptide
  MOD_RES (6)..(7): Xaa is C or S
  MOD_RES (21)..(22)..(23)..(24)..(25): Xaa is A or G
  MOD_RES (26)..(27)..(28)..(29): Xaa is A or G or is absent

SEQ ID NO: 54941 - protein, 40 aa, Artificial Sequence
  GFR-binding peptide
  MOD_RES (4)..(5)..(39): Xaa is C or S
  MOD_RES (19)..(20)..(21)..(22)..(23): Xaa is A or G
  MOD_RES (24)..(25)..(26)..(27): Xaa is A or G or is absent
PKAXXVPTELRSVKMAKVXXXXXXXXXKEVQVEMVVEGXG

SEQ ID NO: 54942 - protein, 34 aa, Artificial Sequence; identical to SEQ ID NO: 19411
  GFR-binding peptide
  MOD_RES (14)..(15)..(16)..(17)..(18): Xaa is A or G
  MOD_RES (19)..(20)..(21)..(22): Xaa is A or G or is absent

SEQ ID NO: 54943 - protein, 41 aa, Artificial Sequence
  GFR-binding peptide
  MOD_RES (6)..(7)..(38)..(40): Xaa is C or S
ASASPXXVPQDLRSVKIAKVVGRTPKVKEVQVMVVKSXKXS

SEQ ID NO: 54944 - protein, 39 aa, Artificial Sequence
  GFR-binding peptide
  MOD_RES (7)..(39): Xaa is C or S
HVTKPTXAPTKLRPVQVRKIDDSSNVIKKATVNMVVRSX

SEQ ID NO: 54945 - protein, 37 aa, Artificial Sequence
  GFR-binding peptide
  MOD_RES (3)..(4)..(37): Xaa is C or S
  MOD_RES (18)..(19)..(20)..(21)..(22): Xaa is A or G
  MOD_RES (23)..(24)..(25)..(26): Xaa is A or G or is absent
SPXXVPQDLSNITIQIMXXXXXXXXXIGEMSMVVKSX

SEQ ID NO: 54946 - protein, 36 aa, Artificial Sequence; identical to SEQ ID NO: 19412
  GFR-binding peptide
  MOD_RES (16)..(17)..(18)..(19)..(20): Xaa is A or G
  MOD_RES (21)..(22)..(23)..(24): Xaa is A or G or is absent

SEQ ID NO: 54947 - protein, 34 aa, Artificial Sequence; identical to SEQ ID NO: 19413
  GFR-binding peptide
  MOD_RES (1)..(1): Xaa is C or S
  MOD_RES (15)..(16)..(17)..(18)..(19): Xaa is A or G
  MOD_RES (20)..(21)..(22)..(23): Xaa is A or G or is absent

SEQ ID NO: 54948 - protein, 41 aa, Artificial Sequence
  GFR-binding peptide
  MOD_RES (5)..(6)..(38)..(40): Xaa is C or S
IPKAXXVPTELRSVKMAKVDEYDKVVKEVQVEMVVEGXGXR

SEQ ID NO: 54949 - protein, 40 aa, Artificial Sequence; identical to SEQ ID NO: 19414
  GFR-binding peptide
  MOD_RES (1)..(38)..(40): Xaa is C or S
  MOD_RES (17)..(18)..(19)..(20)..(21): Xaa is A or G
  MOD_RES (22)..(23)..(24)..(25): Xaa is A or G or is absent

SEQ ID NO: 54950 - protein, 35 aa, Artificial Sequence
  GFR-binding peptide
  MOD_RES (2)..(3): Xaa is C or S
  MOD_RES (17)..(18)..(19)..(20)..(21): Xaa is A or G
  MOD_RES (22)..(23)..(24)..(25): Xaa is A or G or is absent
AXXVPTELRPVQMRKIXXXXXXXXXKKATVEMVVE

SEQ ID NO: 54951 - protein, 39 aa, Artificial Sequence; identical to SEQ ID NO: 16175
  GFR-binding peptide
  MOD_RES (6)..(7)..(39): Xaa is C or S

SEQ ID NO: 54952 - protein, 38 aa, Artificial Sequence
  GFR-binding peptide
  MOD_RES (4)..(5)..(37): Xaa is C or S
PKAXXVPTELSNITMQIMDENEKVVIGEMSDMVVEGXG

SEQ ID NO: 54953 - protein, 43 aa, Artificial Sequence; identical to SEQ ID NO: 16177
  GFR-binding peptide
  MOD_RES (6)..(7)..(41)..(43): Xaa is C or S
  MOD_RES (21)..(22)..(23)..(24)..(25): Xaa is A or G
  MOD_RES (26)..(27)..(28)..(29): Xaa is A or G or is absent

SEQ ID NO: 54954 - protein, 34 aa, Artificial Sequence
  GFR-binding peptide
  MOD_RES (2)..(3): Xaa is C or S
AXXVPTELSNITMQIMDEYDKVVIGEMSEMVVEG

SEQ ID NO: 54955 - protein, 36 aa, Artificial Sequence
  GFR-binding peptide
  MOD_RES (2)..(3)..(35): Xaa is C or S
AXXVPTELRPVQMRKIDEYDKVVKKATVEMVVEGXG

SEQ ID NO: 54956 - protein, 37 aa, Artificial Sequence
  GFR-binding peptide
  MOD_RES (3)..(4): Xaa is C or S
  MOD_RES (18)..(19)..(20)..(21)..(22): Xaa is A or G
  MOD_RES (23)..(24)..(25)..(26): Xaa is A or G or is absent
KAXXVPTELSNITMQIMXXXXXXXXXIGEMSEMVVEG

SEQ ID NO: 54957 - protein, 36 aa, Artificial Sequence
  GFR-binding peptide
  MOD_RES (1)..(2)..(35): Xaa is C or S
  MOD_RES (16)..(17)..(18)..(19)..(20): Xaa is A or G
  MOD_RES (21)..(22)..(23)..(24): Xaa is A or G or is absent
XXVSQDLRSVKIAKVXXXXXXXXXKEVQVMIVKSXK

SEQ ID NO: 54958 - protein, 39 aa, Artificial Sequence
  GFR-binding peptide
  MOD_RES (3)..(4)..(36)..(38): Xaa is C or S
KAXXVPTELSNITMQIMDEYDKVVIGEMSEMVVEGXGXR

SEQ ID NO: 54959 - protein, 41 aa, Artificial Sequence
  GFR-binding peptide
  MOD_RES (1)..(38)..(40): Xaa is C or S
XRPTQVQLEPLTVLYYEIVRKKPIFEQLSNTLEDHLAXKXE

SEQ ID NO: 54960 - protein, 40 aa, Artificial Sequence; identical to SEQ ID NO: 16183
  GFR-binding peptide
  MOD_RES (4)..(5)..(37)..(39): Xaa is C or S

SEQ ID NO: 54961 - protein, 36 aa, Artificial Sequence
  GFR-binding peptide
  MOD_RES (1)..(2)..(36): Xaa is C or S
  MOD_RES (16)..(17)..(18)..(19)..(20): Xaa is A or G
  MOD_RES (21)..(22)..(23)..(24): Xaa is A or G or is absent
XXVPTELRPVQMRKIXXXXXXXXXKKATVEMVVEGX

SEQ ID NO: 54962 - protein, 34 aa, Artificial Sequence
  GFR-binding peptide
  MOD_RES (32)..(34): Xaa is C or S
APTQLSNITVQIMDDSSNVIIGEMSNMVVRAXGX

SEQ ID NO: 54963 - protein, 35 aa, Artificial Sequence; identical to SEQ ID NO: 16185
  GFR-binding peptide
  MOD_RES (1)..(34): Xaa is C or S
  MOD_RES (15)..(16)..(17)..(18)..(19): Xaa is A or G
  MOD_RES (20)..(21)..(22)..(23): Xaa is A or G or is absent

SEQ ID NO: 54964 - protein, 32 aa, Artificial Sequence
  GFR-binding peptide
  MOD_RES (1)..(1): Xaa is C or S
XAPTKLRPVQVRKIDDSSNVIKKATVNMVVRS

SEQ ID NO: 54965 - protein, 40 aa, Artificial Sequence; identical to SEQ ID NO: 16187
  GFR-binding peptide
  MOD_RES (2)..(3)..(37)..(39): Xaa is C or S
  MOD_RES (17)..(18)..(19)..(20)..(21): Xaa is A or G
  MOD_RES (22)..(23)..(24)..(25): Xaa is A or G or is absent

SEQ ID NO: 54966 - protein, 41 aa, Artificial Sequence
  GFR-binding peptide
  MOD_RES (5)..(6)..(39)..(41): Xaa is C or S
  MOD_RES (20)..(21)..(22)..(23)..(24): Xaa is A or G
  MOD_RES (25)..(26)..(27)..(28): Xaa is A or G or is absent
SASPXXVPQDLRPVQIRKIXXXXXXXXXKKATVMVVKSXKX

SEQ ID NO: 54967 - protein, 40 aa, Artificial Sequence; identical to SEQ ID NO: 16188
  GFR-binding peptide
  MOD_RES (4)..(38)..(40): Xaa is C or S
  MOD_RES (18)..(19)..(20)..(21)..(22): Xaa is A or G
  MOD_RES (23)..(24)..(25)..(26): Xaa is A or G or is absent

SEQ ID NO: 54968 - protein, 37 aa, Artificial Sequence
  GFR-binding peptide
  MOD_RES (34)..(36): Xaa is C or S
  MOD_RES (14)..(15)..(16)..(17)..(18): Xaa is A or G
  MOD_RES (19)..(20)..(21)..(22): Xaa is A or G or is absent
APTKLRPVQVRKIXXXXXXXXXKKATVNMVVRSXGXH

SEQ ID NO: 54969 - protein, 36 aa, Artificial Sequence; identical to SEQ ID NO: 19421
  GFR-binding peptide
  MOD_RES (1)..(35): Xaa is C or S
  MOD_RES (15)..(16)..(17)..(18)..(19): Xaa is A or G
  MOD_RES (20)..(21)..(22)..(23): Xaa is A or G or is absent

SEQ ID NO: 54970 - protein, 32 aa, Artificial Sequence
  GFR-binding peptide
  MOD_RES (1)..(2): Xaa is C or S
XXVPTELSNITMQIMDEYDKVVIGEMSEMVVE

SEQ ID NO: 54971 - protein, 34 aa, Artificial Sequence; identical to SEQ ID NO: 16190
  GFR-binding peptide
  MOD_RES (1)..(2): Xaa is C or S
  MOD_RES (16)..(17)..(18)..(19)..(20): Xaa is A or G
  MOD_RES (21)..(22)..(23)..(24): Xaa is A or G or is absent

SEQ ID NO: 54972 - protein, 33 aa, Artificial Sequence; identical to SEQ ID NO: 16191
  GFR-binding peptide
  MOD_RES (1)..(1): Xaa is C or S
  MOD_RES (15)..(16)..(17)..(18)..(19): Xaa is A or G
  MOD_RES (20)..(21)..(22)..(23): Xaa is A or G or is absent

SEQ ID NO: 54973 - protein, 37 aa, Artificial Sequence; identical to SEQ ID NO: 16192
  GFR-binding peptide
  MOD_RES (2)..(3)..(37): Xaa is C or S
  MOD_RES (17)..(18)..(19)..(20)..(21): Xaa is A or G
  MOD_RES (22)..(23)..(24)..(25): Xaa is A or G or is absent

SEQ ID NO: 54974 - protein, 37 aa, Artificial Sequence
  GFR-binding peptide
  MOD_RES (1)..(1): Xaa is C or S
XQPSRVHHEPLTVLYYEYVRKKPKLEQLSNRLEEHLE

SEQ ID NO: 54975 - protein, 36 aa, Artificial Sequence; identical to SEQ ID NO: 16194
  GFR-binding peptide
  MOD_RES (4)..(5)..(36): Xaa is C or S

SEQ ID NO: 54976 - protein, 37 aa, Artificial Sequence; identical to SEQ ID NO: 16196
  GFR-binding peptide
  MOD_RES (2)..(36): Xaa is C or S
  MOD_RES (16)..(17)..(18)..(19)..(20): Xaa is A or G
  MOD_RES (21)..(22)..(23)..(24): Xaa is A or G or is absent

SEQ ID NO: 54977 - protein, 36 aa, Artificial Sequence
  GFR-binding peptide
  MOD_RES (1)..(35): Xaa is C or S
  MOD_RES (15)..(16)..(17)..(18)..(19): Xaa is A or G
  MOD_RES (20)..(21)..(22)..(23): Xaa is A or G or is absent
XVPTELRSVKMAKVXXXXXXXXXKEVQVDMVVEGXG

SEQ ID NO: 54978 - protein, 40 aa, Artificial Sequence
  GFR-binding peptide
  MOD_RES (6)..(7)..(38)..(40): Xaa is C or S
ASASPXXVSQDLSNITIQIMIGKTPKIIGEMSMIVKSXKX

SEQ ID NO: 54979 - protein, 32 aa, Artificial Sequence; identical to SEQ ID NO: 16200
  GFR-binding peptide
  MOD_RES (14)..(15)..(16)..(17)..(18): Xaa is A or G
  MOD_RES (19)..(20)..(21)..(22): Xaa is A or G or is absent

SEQ ID NO: 54980 - protein, 40 aa, Artificial Sequence
  GFR-binding peptide
  MOD_RES (5)..(39): Xaa is C or S
EGLEXVPTEEEPLPMVYYRIKPHQGQHEQLSNFLQHNKXE

SEQ ID NO: 54981 - protein, 40 aa, Artificial Sequence; identical to SEQ ID NO: 19427
  GFR-binding peptide
  MOD_RES (1)..(38)..(40): Xaa is C or S
  MOD_RES (17)..(18)..(19)..(20)..(21): Xaa is A or G
  MOD_RES (22)..(23)..(24)..(25): Xaa is A or G or is absent

SEQ ID NO: 54982 - protein, 38 aa, Artificial Sequence
  GFR-binding peptide
  MOD_RES (3)..(4)..(36)..(38): Xaa is C or S
KAXXVPTELRPVQMRKIDENEKVVKKATVDMVVEGXGX

SEQ ID NO: 54983 - protein, 31 aa, Artificial Sequence; identical to SEQ ID NO: 16205
  GFR-binding peptide

SEQ ID NO: 54984 - protein, 37 aa, Artificial Sequence
  GFR-binding peptide
  MOD_RES (34)..(36): Xaa is C or S
  MOD_RES (14)..(15)..(16)..(17)..(18): Xaa is A or G
  MOD_RES (19)..(20)..(21)..(22): Xaa is A or G or is absent
APTKLRSVKVAKVXXXXXXXXXKEVQVNMVVRSXGXH

SEQ ID NO: 54985 - protein, 42 aa, Artificial Sequence; identical to SEQ ID NO: 19432
  GFR-binding peptide
  MOD_RES (5)..(42): Xaa is C or S

SEQ ID NO: 54986 - protein, 35 aa, Artificial Sequence
  GFR-binding peptide
  MOD_RES (2)..(2): Xaa is C or S
EXVPTEEEPLPMVYYRIKPHQGQHEQLSNFLQHNK

SEQ ID NO: 54987 - protein, 33 aa, Artificial Sequence
  GFR-binding peptide
  MOD_RES (1)..(33): Xaa is C or S
XVPTELSNITMQIMDEYDKVVIGEMSEMVVEGX

SEQ ID NO: 54988 - protein, 36 aa, Artificial Sequence
  GFR-binding peptide
  MOD_RES (33)..(35): Xaa is C or S
  MOD_RES (14)..(15)..(16)..(17)..(18): Xaa is A or G
  MOD_RES (19)..(20)..(21)..(22): Xaa is A or G or is absent
VPQALRSVKIAKVXXXXXXXXXKEVQVMIVRSXKXS

SEQ ID NO: 54989 - protein, 38 aa, Artificial Sequence; identical to SEQ ID NO: 19434
  GFR-binding peptide
  MOD_RES (1)..(35)..(37): Xaa is C or S
  MOD_RES (15)..(16)..(17)..(18)..(19): Xaa is A or G
  MOD_RES (20)..(21)..(22)..(23): Xaa is A or G or is absent

SEQ ID NO: 54990 - protein, 34 aa, Artificial Sequence; identical to SEQ ID NO: 16206
  GFR-binding peptide
  MOD_RES (32)..(34): Xaa is C or S

SEQ ID NO: 54991 - protein, 34 aa, Artificial Sequence
  GFR-binding peptide
  MOD_RES (1)..(1): Xaa is C or S
XVPTEEEPLTMLYYRIKPHQGQHEQLSNFLQHNK

SEQ ID NO: 54992 - protein, 34 aa, Artificial Sequence
  GFR-binding peptide
  MOD_RES (1)..(2)..(33): Xaa is C or S
XXVPQDLRSVKIAKVVGRTPKVKEVQVMVVKSXK

SEQ ID NO: 54993 - protein, 39 aa, Artificial Sequence
  GFR-binding peptide
  MOD_RES (7)..(39): Xaa is C or S
HVTKPTXAPTKLRSVKVAKVDDSSNVIKEVQVNMVVRSX

SEQ ID NO: 54994 - protein, 36 aa, Artificial Sequence; identical to SEQ ID NO: 19436
  GFR-binding peptide
  MOD_RES (2)..(2): Xaa is C or S

SEQ ID NO: 54995 - protein, 36 aa, Artificial Sequence
  GFR-binding peptide
  MOD_RES (33)..(35): Xaa is C or S
  MOD_RES (14)..(15)..(16)..(17)..(18): Xaa is A or G
  MOD_RES (19)..(20)..(21)..(22): Xaa is A or G or is absent
VSQDLSNITIQIMXXXXXXXXXIGEMSMIVKSXKXS

SEQ ID NO: 54996 - protein, 35 aa, Artificial Sequence
  GFR-binding peptide
  MOD_RES (3)..(4)..(35): Xaa is C or S
SPXXVPQDLRSVKIAKVVGRTPKVKEVQVMVVKSX

SEQ ID NO: 54997 - protein, 36 aa, Artificial Sequence
  GFR-binding peptide
  MOD_RES (2)..(2): Xaa is C or S
  MOD_RES (18)..(19)..(20)..(21)..(22): Xaa is A or G
  MOD_RES (23)..(24)..(25)..(26): Xaa is A or G or is absent
KXQPSRVHHEPLTVLYYXXXXXXXXXEQLSNRLEEH

SEQ ID NO: 54998 - protein, 37 aa, Artificial Sequence; identical to SEQ ID NO: 39945
  GFR-binding peptide
  MOD_RES (3)..(4)..(37): Xaa is C or S
  MOD_RES (18)..(19)..(20)..(21)..(22): Xaa is A or G
  MOD_RES (23)..(24)..(25)..(26): Xaa is A or G or is absent

SEQ ID NO: 54999 - protein, 35 aa, Artificial Sequence; identical to SEQ ID NO: 19440
  GFR-binding peptide

SEQ ID NO: 55000 - protein, 37 aa, Artificial Sequence
  GFR-binding peptide
  MOD_RES (36)..(36): Xaa is C or S
PSRVHHEPLTVLYYEYVRKKPKLEQLSNRLEEHLEXA

SEQ ID NO: 55001 - protein, 33 aa, Artificial Sequence
  GFR-binding peptide
  MOD_RES (1)..(2)..(33): Xaa is C or S
XXVPQALRPVQIRKIVGRKPKVKKATVMIVRSX

SEQ ID NO: 55002 - protein, 40 aa, Artificial Sequence; identical to SEQ ID NO: 16211
  GFR-binding peptide
  MOD_RES (3)..(4)..(37)..(39): Xaa is C or S
  MOD_RES (18)..(19)..(20)..(21)..(22): Xaa is A or G
  MOD_RES (23)..(24)..(25)..(26): Xaa is A or G or is absent

SEQ ID NO: 55003 - protein, 35 aa, Artificial Sequence
  GFR-binding peptide
  MOD_RES (1)..(35): Xaa is C or S
  MOD_RES (15)..(16)..(17)..(18)..(19): Xaa is A or G
  MOD_RES (20)..(21)..(22)..(23): Xaa is A or G or is absent
XVPTELRPVQMRKIXXXXXXXXXKKATVEMVVEGX

SEQ ID NO: 55004 - protein, 37 aa, Artificial Sequence; identical to SEQ ID NO: 19444
  GFR-binding peptide
  MOD_RES (35)..(37): Xaa is C or S

SEQ ID NO: 55005 - protein, 39 aa, Artificial Sequence; identical to SEQ ID NO: 19446
  GFR-binding peptide
  MOD_RES (1)..(38): Xaa is C or S
  MOD_RES (17)..(18)..(19)..(20)..(21): Xaa is A or G
  MOD_RES (22)..(23)..(24)..(25): Xaa is A or G or is absent

SEQ ID NO: 55006 - protein, 37 aa, Artificial Sequence; identical to SEQ ID NO: 19447
  GFR-binding peptide
  MOD_RES (36)..(36): Xaa is C or S
  MOD_RES (15)..(16)..(17)..(18)..(19): Xaa is A or G
  MOD_RES (20)..(21)..(22)..(23): Xaa is A or G or is absent

SEQ ID NO: 55007 - protein, 39 aa, Artificial Sequence; identical to SEQ ID NO: 16213
  GFR-binding peptide
  MOD_RES (6)..(7): Xaa is C or S
  MOD_RES (21)..(22)..(23)..(24)..(25): Xaa is A or G
  MOD_RES (26)..(27)..(28)..(29): Xaa is A or G or is absent

SEQ ID NO: 55008 - protein, 41 aa, Artificial Sequence
  GFR-binding peptide
  MOD_RES (5)..(5): Xaa is C or S
SSVKXQPSRVHHEPLTVLYYEYVRKKPKLEQLSNRLEEHLE

SEQ ID NO: 55009 - protein, 39 aa, Artificial Sequence; identical to SEQ ID NO: 19448
  GFR-binding peptide
  MOD_RES (2)..(39): Xaa is C or S

SEQ ID NO: 55010 - protein, 41 aa, Artificial Sequence
  GFR-binding peptide
  MOD_RES (7)..(41): Xaa is C or S
  MOD_RES (21)..(22)..(23)..(24)..(25): Xaa is A or G
  MOD_RES (26)..(27)..(28)..(29): Xaa is A or G or is absent
HVTKPTXAPTKLSNITVQIMXXXXXXXXXIGEMSNMVVRSX

SEQ ID NO: 55011 - protein, 37 aa, Artificial Sequence; identical to SEQ ID NO: 19450
  GFR-binding peptide
  MOD_RES (35)..(37): Xaa is C or S

SEQ ID NO: 55012 - protein, 34 aa, Artificial Sequence
  GFR-binding peptide
  MOD_RES (1)..(32)..(34): Xaa is C or S
XVSQDLRSVKIAKVIGKTPKIKEVQVMIVKSXKX

SEQ ID NO: 55013 - protein, 42 aa, Artificial Sequence
  GFR-binding peptide
  MOD_RES (4)..(5)..(39)..(41): Xaa is C or S
  MOD_RES (19)..(20)..(21)..(22)..(23): Xaa is A or G
  MOD_RES (24)..(25)..(26)..(27): Xaa is A or G or is absent
PKPXXAPTKLSNITVQIMXXXXXXXXXIGEMSNMVVRSXGXH

SEQ ID NO: 55014 - protein, 32 aa, Artificial Sequence
  GFR-binding peptide
  MOD_RES (1)..(32): Xaa is C or S
XVPQALRPVQIRKIVGRKPKVKKATVMIVRSX

SEQ ID NO: 55015 - protein, 42 aa, Artificial Sequence; identical to SEQ ID NO: 19455
  GFR-binding peptide
  MOD_RES (5)..(42): Xaa is C or S
  MOD_RES (21)..(22)..(23)..(24)..(25): Xaa is A or G
  MOD_RES (26)..(27)..(28)..(29): Xaa is A or G or is absent

SEQ ID NO: 55016 - protein, 39 aa, Artificial Sequence
  GFR-binding peptide
  MOD_RES (5)..(6)..(37)..(39): Xaa is C or S
SASPXXVPQDLSNITIQIMVGRTPKVIGEMSMVVKSXKX

SEQ ID NO: 55017 - protein, 36 aa, Artificial Sequence
  GFR-binding peptide
  MOD_RES (1)..(2)..(35): Xaa is C or S
  MOD_RES (16)..(17)..(18)..(19)..(20): Xaa is A or G
  MOD_RES (21)..(22)..(23)..(24): Xaa is A or G or is absent
XXVPQDLRPVQIRKIXXXXXXXXXKKATVMVVKSXK

SEQ ID NO: 55018 - protein, 38 aa, Artificial Sequence; identical to SEQ ID NO: 16221
  GFR-binding peptide
  MOD_RES (4)..(5): Xaa is C or S
  MOD_RES (19)..(20)..(21)..(22)..(23): Xaa is A or G
  MOD_RES (24)..(25)..(26)..(27): Xaa is A or G or is absent

SEQ ID NO: 55019 - protein, 33 aa, Artificial Sequence
  GFR-binding peptide
  MOD_RES (31)..(33): Xaa is C or S
VSQDLRPVQIRKIIGKTPKIKKATVMIVKSXKX

SEQ ID NO: 55020 - protein, 38 aa, Artificial Sequence
  GFR-binding peptide
  MOD_RES (4)..(38): Xaa is C or S
  MOD_RES (18)..(19)..(20)..(21)..(22): Xaa is A or G
  MOD_RES (23)..(24)..(25)..(26): Xaa is A or G or is absent
KPTXAPTKLSNITVQIMXXXXXXXXXIGEMSNMVVRSX

SEQ ID NO: 55021 - protein, 41 aa, Artificial Sequence
  GFR-binding peptide
  MOD_RES (3)..(4)..(38)..(40): Xaa is C or S
  MOD_RES (18)..(19)..(20)..(21)..(22): Xaa is A or G
  MOD_RES (23)..(24)..(25)..(26): Xaa is A or G or is absent
KAXXVPTELRSVKMAKVXXXXXXXXXKEVQVDMVVEGXGXR

SEQ ID NO: 55022 - protein, 33 aa, Artificial Sequence; identical to SEQ ID NO: 16223
  GFR-binding peptide
  MOD_RES (1)..(33): Xaa is C or S

SEQ ID NO: 55023 - protein, 33 aa, Artificial Sequence; identical to SEQ ID NO: 16226
  GFR-binding peptide
  MOD_RES (31)..(33): Xaa is C or S

SEQ ID NO: 55024 - protein, 39 aa, Artificial Sequence
  GFR-binding peptide
  MOD_RES (5)..(6)..(38): Xaa is C or S
VPKPXXAPTKLRSVKVAKVDDSSNVIKEVQVNMVVRSXG

SEQ ID NO: 55025 - protein, 43 aa, Artificial Sequence; identical to SEQ ID NO: 19460
  GFR-binding peptide
  MOD_RES (5)..(42): Xaa is C or S

SEQ ID NO: 55026 - protein, 40 aa, Artificial Sequence
  GFR-binding peptide
  MOD_RES (7)..(39): Xaa is C or S
HVTKPTXAPTKLSNITVQIMDDSSNVIIGEMSNMVVRSXG

SEQ ID NO: 55027 - protein, 33 aa, Artificial Sequence; identical to SEQ ID NO: 16230
  GFR-binding peptide
  MOD_RES (2)..(3): Xaa is C or S

SEQ ID NO: 55028 - protein, 34 aa, Artificial Sequence; identical to SEQ ID NO: 16231
  GFR-binding peptide
  MOD_RES (1)..(2): Xaa is C or S
  MOD_RES (16)..(17)..(18)..(19)..(20): Xaa is A or G
  MOD_RES (21)..(22)..(23)..(24): Xaa is A or G or is absent

SEQ ID NO: 55029 - protein, 38 aa, Artificial Sequence; identical to SEQ ID NO: 19461
  GFR-binding peptide
  MOD_RES (3)..(3): Xaa is C or S

SEQ ID NO: 55030 - protein, 43 aa, Artificial Sequence; identical to SEQ ID NO: 16232
  GFR-binding peptide
  MOD_RES (5)..(6)..(40)..(42): Xaa is C or S
  MOD_RES (20)..(21)..(22)..(23)..(24): Xaa is A or G
  MOD_RES (25)..(26)..(27)..(28): Xaa is A or G or is absent

SEQ ID NO: 55031 - protein, 33 aa, Artificial Sequence
  GFR-binding peptide
  MOD_RES (32)..(32): Xaa is C or S
APTQLRSVKVAKVDDSSNVIKEVQVNMVVRAXG

SEQ ID NO: 55032 - protein, 38 aa, Artificial Sequence
  GFR-binding peptide
  MOD_RES (3)..(4)..(35)..(37): Xaa is C or S
SPXXVPQDLRSVKIAKVVGRTPKVKEVQVMVVKSXKXS

SEQ ID NO: 55033 - protein, 39 aa, Artificial Sequence; identical to SEQ ID NO: 16235
  GFR-binding peptide
  MOD_RES (4)..(5)..(39): Xaa is C or S
  MOD_RES (19)..(20)..(21)..(22)..(23): Xaa is A or G
  MOD_RES (24)..(25)..(26)..(27): Xaa is A or G or is absent

SEQ ID NO: 55034 - protein, 44 aa, Artificial Sequence; identical to SEQ ID NO: 19466
  GFR-binding peptide
  MOD_RES (4)..(41)..(43): Xaa is C or S
  MOD_RES (20)..(21)..(22)..(23)..(24): Xaa is A or G
  MOD_RES (25)..(26)..(27)..(28): Xaa is A or G or is absent

SEQ ID NO: 55035 - protein, 38 aa, Artificial Sequence; identical to SEQ ID NO: 16236
  GFR-binding peptide
  MOD_RES (1)..(35)..(37): Xaa is C or S
  MOD_RES (15)..(16)..(17)..(18)..(19): Xaa is A or G
  MOD_RES (20)..(21)..(22)..(23): Xaa is A or G or is absent

SEQ ID NO: 55036 - protein, 40 aa, Artificial Sequence; identical to SEQ ID NO: 19468
  GFR-binding peptide
  MOD_RES (7)..(7): Xaa is C or S
  MOD_RES (21)..(22)..(23)..(24)..(25): Xaa is A or G
  MOD_RES (26)..(27)..(28)..(29): Xaa is A or G or is absent

SEQ ID NO: 55037 - protein, 37 aa, Artificial Sequence
  GFR-binding peptide
  MOD_RES (4)..(5): Xaa is C or S
  MOD_RES (19)..(20)..(21)..(22)..(23): Xaa is A or G
  MOD_RES (24)..(25)..(26)..(27): Xaa is A or G or is absent
PKPXXAPTKLRSVKVAKVXXXXXXXXXKEVQVNMVVR

SEQ ID NO: 55038 - protein, 36 aa, Artificial Sequence; identical to SEQ ID NO: 16238
  GFR-binding peptide
  MOD_RES (4)..(5): Xaa is C or S

SEQ ID NO: 55039 - protein, 34 aa, Artificial Sequence; identical to SEQ ID NO: 19469
  GFR-binding peptide
  MOD_RES (15)..(16)..(17)..(18)..(19): Xaa is A or G
  MOD_RES (20)..(21)..(22)..(23): Xaa is A or G or is absent

SEQ ID NO: 55040 - protein, 40 aa, Artificial Sequence
  GFR-binding peptide
  MOD_RES (3)..(4)..(37)..(39): Xaa is C or S
  MOD_RES (18)..(19)..(20)..(21)..(22): Xaa is A or G
  MOD_RES (23)..(24)..(25)..(26): Xaa is A or G or is absent
APXXVPQALSNITIQIMXXXXXXXXXIGEMSMIVRSXKXS

SEQ ID NO: 55041 - protein, 42 aa, Artificial Sequence; identical to SEQ ID NO: 19471
  GFR-binding peptide
  MOD_RES (4)..(41): Xaa is C or S
  MOD_RES (20)..(21)..(22)..(23)..(24): Xaa is A or G
  MOD_RES (25)..(26)..(27)..(28): Xaa is A or G or is absent

SEQ ID NO: 55042 - protein, 35 aa, Artificial Sequence; identical to SEQ ID NO: 16240
  GFR-binding peptide
  MOD_RES (3)..(35): Xaa is C or S

SEQ ID NO: 55043 - protein, 41 aa, Artificial Sequence
  GFR-binding peptide
  MOD_RES (4)..(41): Xaa is C or S
SVKXQPSRVHHEPLPVVYYEYVRKKPKLEQLSNRLEEHLEX

SEQ ID NO: 55044 - protein, 37 aa, Artificial Sequence
  GFR-binding peptide
  MOD_RES (2)..(3)..(34)..(36): Xaa is C or S
PXXVSQDLRSVKIAKVIGKTPKIKEVQVMIVKSXKXS

SEQ ID NO: 55045 - protein, 42 aa, Artificial Sequence; identical to SEQ ID NO: 16242
  GFR-binding peptide
  MOD_RES (6)..(7)..(39)..(41): Xaa is C or S

SEQ ID NO: 55046 - protein, 33 aa, Artificial Sequence
  GFR-binding peptide
  MOD_RES (14)..(15)..(16)..(17)..(18): Xaa is A or G
  MOD_RES (19)..(20)..(21)..(22): Xaa is A or G or is absent
APTKLRPVQVRKIXXXXXXXXXKKATVNMVVRS

SEQ ID NO: 55047 - protein, 34 aa, Artificial Sequence
  GFR-binding peptide
  MOD_RES (3)..(4): Xaa is C or S
KAXXVPTELRPVQMRKIDEYDKVVKKATVEMVVE

SEQ ID NO: 55048 - protein, 38 aa, Artificial Sequence; identical to SEQ ID NO: 19479
  GFR-binding peptide
  MOD_RES (37)..(37): Xaa is C or S
  MOD_RES (16)..(17)..(18)..(19)..(20): Xaa is A or G
  MOD_RES (21)..(22)..(23)..(24): Xaa is A or G or is absent

SEQ ID NO: 55049 - protein, 38 aa, Artificial Sequence; identical to SEQ ID NO: 19480
  GFR-binding peptide
  MOD_RES (36)..(38): Xaa is C or S
  MOD_RES (15)..(16)..(17)..(18)..(19): Xaa is A or G
  MOD_RES (20)..(21)..(22)..(23): Xaa is A or G or is absent

SEQ ID NO: 55050 - protein, 36 aa, Artificial Sequence
  GFR-binding peptide
  MOD_RES (3)..(35): Xaa is C or S
PTXAPTKLSNITVQIMDDSSNVIIGEMSNMVVRSXG

SEQ ID NO: 55051 - protein, 37 aa, Artificial Sequence; identical to SEQ ID NO: 19482
  GFR-binding peptide
  MOD_RES (4)..(4): Xaa is C or S
  MOD_RES (18)..(19)..(20)..(21)..(22): Xaa is A or G
  MOD_RES (23)..(24)..(25)..(26): Xaa is A or G or is absent

SEQ ID NO: 55052 - protein, 36 aa, Artificial Sequence
  GFR-binding peptide
  MOD_RES (3)..(4): Xaa is C or S
  MOD_RES (18)..(19)..(20)..(21)..(22): Xaa is A or G
  MOD_RES (23)..(24)..(25)..(26): Xaa is A or G or is absent
KAXXVPTELRPVQMRKIXXXXXXXXXKKATVEMVVE

SEQ ID NO: 55053 - protein, 36 aa, Artificial Sequence
  GFR-binding peptide
  MOD_RES (4)..(5)..(36): Xaa is C or S
AAPXXVPQALRPVQIRKIVGRKPKVKKATVMIVRSX

SEQ ID NO: 55054 - protein, 41 aa, Artificial Sequence
  GFR-binding peptide
  MOD_RES (6)..(7)..(38)..(40): Xaa is C or S
ASAAPXXVPQALSNITIQIMVGRKPKVIGEMSMIVRSXKXS

SEQ ID NO: 55055 - protein, 39 aa, Artificial Sequence; identical to SEQ ID NO: 16248
  GFR-binding peptide
  MOD_RES (3)..(4)..(36)..(38): Xaa is C or S

SEQ ID NO: 55056 - protein, 38 aa, Artificial Sequence; identical to SEQ ID NO: 19486
  GFR-binding peptide
  MOD_RES (6)..(6): Xaa is C or S

SEQ ID NO: 55057 - protein, 36 aa, Artificial Sequence
  GFR-binding peptide
  MOD_RES (2)..(3)..(36): Xaa is C or S
  MOD_RES (17)..(18)..(19)..(20)..(21): Xaa is A or G
  MOD_RES (22)..(23)..(24)..(25): Xaa is A or G or is absent
PXXVPQDLRPVQIRKIXXXXXXXXXKKATVMVVKSX

SEQ ID NO: 55058 - protein, 38 aa, Artificial Sequence; identical to SEQ ID NO: 16255
  GFR-binding peptide
  MOD_RES (6)..(7)..(38): Xaa is C or S

SEQ ID NO: 55059 - protein, 41 aa, Artificial Sequence; identical to SEQ ID NO: 19491
  GFR-binding peptide
  MOD_RES (1)..(38)..(40): Xaa is C or S
  MOD_RES (17)..(18)..(19)..(20)..(21): Xaa is A or G
  MOD_RES (22)..(23)..(24)..(25): Xaa is A or G or is absent

SEQ ID NO: 55060 - protein, 40 aa, Artificial Sequence; identical to SEQ ID NO: 19494
  GFR-binding peptide
  MOD_RES (3)..(40): Xaa is C or S
  MOD_RES (19)..(20)..(21)..(22)..(23): Xaa is A or G
  MOD_RES (24)..(25)..(26)..(27): Xaa is A or G or is absent

SEQ ID NO: 55061 - protein, 38 aa, Artificial Sequence
  GFR-binding peptide
  MOD_RES (3)..(37): Xaa is C or S
LEXVPTEEEPLPMVYYRIKPHQGQHEQLSNFLQHNKXE

SEQ ID NO: 55062 - protein, 35 aa, Artificial Sequence
  GFR-binding peptide
  MOD_RES (1)..(32)..(34): Xaa is C or S
XVPQALSNITIQIMVGRKPKVIGEMSMIVRSXKXS

SEQ ID NO: 55063 - protein, 34 aa, Artificial Sequence
  GFR-binding peptide
  MOD_RES (1)..(32)..(34): Xaa is C or S
XVPQDLRPVQIRKIVGRTPKVKKATVMVVKSXKX

SEQ ID NO: 55064 - protein, 35 aa, Artificial Sequence
  GFR-binding peptide
  MOD_RES (34)..(34): Xaa is C or S
  MOD_RES (14)..(15)..(16)..(17)..(18): Xaa is A or G
  MOD_RES (19)..(20)..(21)..(22): Xaa is A or G or is absent
APTKLSNITVQIMXXXXXXXXXIGEMSNMVVRSXG

SEQ ID NO: 55065 - protein, 43 aa, Artificial Sequence
  GFR-binding peptide
  MOD_RES (3)..(40)..(42): Xaa is C or S
VKXQPSRVHHEPLPVVYYEYVRKKPKLEQLSNRLEEHLEXAXA

SEQ ID NO: 55066 - protein, 40 aa, Artificial Sequence
  GFR-binding peptide
  MOD_RES (4)..(5)..(37)..(39): Xaa is C or S
PKAXXVPTELRSVKMAKVDENEKVVKEVQVDMVVEGXGXR

SEQ ID NO: 55067 - protein, 36 aa, Artificial Sequence
  GFR-binding peptide
  MOD_RES (33)..(35): Xaa is C or S
  MOD_RES (14)..(15)..(16)..(17)..(18): Xaa is A or G
  MOD_RES (19)..(20)..(21)..(22): Xaa is A or G or is absent
VPQALRPVQIRKIXXXXXXXXXKKATVMIVRSXKXS

SEQ ID NO: 55068 - protein, 35 aa, Artificial Sequence
  GFR-binding peptide
  MOD_RES (3)..(4): Xaa is C or S
KPXXAPTQLRSVKVAKVDDSSNVIKEVQVNMVVRA

SEQ ID NO: 55069 - protein, 39 aa, Artificial Sequence; identical to SEQ ID NO: 19495
  GFR-binding peptide
  MOD_RES (4)..(4): Xaa is C or S
  MOD_RES (20)..(21)..(22)..(23)..(24): Xaa is A or G
  MOD_RES (25)..(26)..(27)..(28): Xaa is A or G or is absent

SEQ ID NO: 55070 - protein, 40 aa, Artificial Sequence; identical to SEQ ID NO: 16260
  GFR-binding peptide
  MOD_RES (5)..(37)..(39): Xaa is C or S

SEQ ID NO: 55071 - protein, 41 aa, Artificial Sequence; identical to SEQ ID NO: 16261
  GFR-binding peptide
  MOD_RES (4)..(5)..(38)..(40): Xaa is C or S
  MOD_RES (19)..(20)..(21)..(22)..(23): Xaa is A or G
  MOD_RES (24)..(25)..(26)..(27): Xaa is A or G or is absent

SEQ ID NO: 55072 - protein, 35 aa, Artificial Sequence
  GFR-binding peptide
  MOD_RES (2)..(2): Xaa is C or S
  MOD_RES (16)..(17)..(18)..(19)..(20): Xaa is A or G
  MOD_RES (21)..(22)..(23)..(24): Xaa is A or G or is absent
TXAPTKLRPVQVRKIXXXXXXXXXKKATVNMVVRS

SEQ ID NO: 55073 - protein, 32 aa, Artificial Sequence; identical to SEQ ID NO: 19496
  GFR-binding peptide
  MOD_RES (14)..(15)..(16)..(17)..(18): Xaa is A or G
  MOD_RES (19)..(20)..(21)..(22): Xaa is A or G or is absent

SEQ ID NO: 55074 - protein, 33 aa, Artificial Sequence
  GFR-binding peptide
  MOD_RES (1)..(2): Xaa is C or S
XXVPTELRSVKMAKVDEYDKVVKEVQVEMVVEG

SEQ ID NO: 55075 - protein, 37 aa, Artificial Sequence; identical to SEQ ID NO: 19497
  GFR-binding peptide
  MOD_RES (2)..(2): Xaa is C or S

SEQ ID NO: 55076 - protein, 41 aa, Artificial Sequence; identical to SEQ ID NO: 16266
  GFR-binding peptide
  MOD_RES (6)..(7)..(39)..(41): Xaa is C or S

SEQ ID NO: 55077 - protein, 33 aa, Artificial Sequence
  GFR-binding peptide
  MOD_RES (2)..(3): Xaa is C or S
PXXVPQDLSNITIQIMVGRTPKVIGEMSMVVKS

SEQ ID NO: 55078 - protein, 42 aa, Artificial Sequence; identical to SEQ ID NO: 19501
  GFR-binding peptide
  MOD_RES (4)..(41): Xaa is C or S

SEQ ID NO: 55079 - protein, 44 aa, Artificial Sequence
  GFR-binding peptide
  MOD_RES (4)..(41)..(43): Xaa is C or S
SVKXQPSRVHHEPLPVVYYEYVRKKPKLEQLSNRLEEHLEXAXA

SEQ ID NO: 55080 - protein, 40 aa, Artificial Sequence; identical to SEQ ID NO: 19502
  GFR-binding peptide
  MOD_RES (5)..(39): Xaa is C or S

SEQ ID NO: 55081 - protein, 36 aa, Artificial Sequence
  GFR-binding peptide
  MOD_RES (3)..(4)..(35): Xaa is C or S
APXXVPQALRPVQIRKIVGRKPKVKKATVMIVRSXK

SEQ ID NO: 55082 - protein, 42 aa, Artificial Sequence; identical to SEQ ID NO: 19504
  GFR-binding peptide
  MOD_RES (2)..(39)..(41): Xaa is C or S

SEQ ID NO: 55083 - protein, 44 aa, Artificial Sequence
  GFR-binding peptide
  MOD_RES (6)..(7)..(41)..(43): Xaa is C or S
  MOD_RES (21)..(22)..(23)..(24)..(25): Xaa is A or G
  MOD_RES (26)..(27)..(28)..(29): Xaa is A or G or is absent
KIPKAXXVPTELSNITMQIMXXXXXXXXXIGEMSDMVVEGXGXR

SEQ ID NO: 55084 - protein, 41 aa, Artificial Sequence
  GFR-binding peptide
  MOD_RES (4)..(5)..(38)..(40): Xaa is C or S
  MOD_RES (19)..(20)..(21)..(22)..(23): Xaa is A or G
  MOD_RES (24)..(25)..(26)..(27): Xaa is A or G or is absent
AAPXXVPQALSNITIQIMXXXXXXXXXIGEMSMIVRSXKXS

SEQ ID NO: 55085 - protein, 37 aa, Artificial Sequence
  GFR-binding peptide
  MOD_RES (6)..(6): Xaa is C or S
VTKPTXAPTKLSNITVQIMDDSSNVIIGEMSNMVVRS

SEQ ID NO: 55086 - protein, 38 aa, Artificial Sequence; identical to SEQ ID NO: 16273
  GFR-binding peptide
  MOD_RES (2)..(3)..(36)..(38): Xaa is C or S
  MOD_RES (17)..(18)..(19)..(20)..(21): Xaa is A or G
  MOD_RES (22)..(23)..(24)..(25): Xaa is A or G or is absent

SEQ ID NO: 55087 - protein, 39 aa, Artificial Sequence
  GFR-binding peptide
  MOD_RES (3)..(4)..(38): Xaa is C or S
  MOD_RES (18)..(19)..(20)..(21)..(22): Xaa is A or G
  MOD_RES (23)..(24)..(25)..(26): Xaa is A or G or is absent
KPXXAPTQLRSVKVAKVXXXXXXXXXKEVQVNMVVRAXG

SEQ ID NO: 55088 - protein, 36 aa, Artificial Sequence
  GFR-binding peptide
  MOD_RES (3)..(3): Xaa is C or S
LEXVPTEEEPLTMLYYRIKPHQGQHEQLSNFLQHNK

SEQ ID NO: 55089 - protein, 40 aa, Artificial Sequence
  GFR-binding peptide
  MOD_RES (5)..(6)..(38)..(40): Xaa is C or S
VPKPXXAPTKLRPVQVRKIDDSSNVIKKATVNMVVRSXGX

SEQ ID NO: 55090 - protein, 37 aa, Artificial Sequence; identical to SEQ ID NO: 16274
  GFR-binding peptide
  MOD_RES (1)..(34)..(36): Xaa is C or S
  MOD_RES (15)..(16)..(17)..(18)..(19): Xaa is A or G
  MOD_RES (20)..(21)..(22)..(23): Xaa is A or G or is absent

SEQ ID NO: 55091 - protein, 37 aa, Artificial Sequence
  GFR-binding peptide
  MOD_RES (3)..(4)..(37): Xaa is C or S
  MOD_RES (18)..(19)..(20)..(21)..(22): Xaa is A or G
  MOD_RES (23)..(24)..(25)..(26): Xaa is A or G or is absent
SPXXVSQDLSNITIQIMXXXXXXXXXIGEMSMIVKSX

SEQ ID NO: 55092 - protein, 39 aa, Artificial Sequence; identical to SEQ ID NO: 19507
  GFR-binding peptide
  MOD_RES (36)..(38): Xaa is C or S
  MOD_RES (15)..(16)..(17)..(18)..(19): Xaa is A or G
  MOD_RES (20)..(21)..(22)..(23): Xaa is A or G or is absent

SEQ ID NO: 55093 - protein, 44 aa, Artificial Sequence; identical to SEQ ID NO: 19510
  GFR-binding peptide
  MOD_RES (5)..(42)..(44): Xaa is C or S
  MOD_RES (21)..(22)..(23)..(24)..(25): Xaa is A or G
  MOD_RES (26)..(27)..(28)..(29): Xaa is A or G or is absent

SEQ ID NO: 55094 - protein, 34 aa, Artificial Sequence
  GFR-binding peptide
  MOD_RES (1)..(1): Xaa is C or S
  MOD_RES (15)..(16)..(17)..(18)..(19): Xaa is A or G
  MOD_RES (20)..(21)..(22)..(23): Xaa is A or G or is absent
XAPTKLRSVKVAKVXXXXXXXXXKEVQVNMVVRS

SEQ ID NO: 55095 - protein, 34 aa, Artificial Sequence
  GFR-binding peptide
  MOD_RES (34)..(34): Xaa is C or S
  MOD_RES (14)..(15)..(16)..(17)..(18): Xaa is A or G
  MOD_RES (19)..(20)..(21)..(22): Xaa is A or G or is absent
APTQLRPVQVRKIXXXXXXXXXKKATVNMVVRAX

SEQ ID NO: 55096 - protein, 39 aa, Artificial Sequence
  GFR-binding peptide
  MOD_RES (2)..(36)..(38): Xaa is C or S
  MOD_RES (16)..(17)..(18)..(19)..(20): Xaa is A or G
  MOD_RES (21)..(22)..(23)..(24): Xaa is A or G or is absent
TXAPTKLRPVQVRKIXXXXXXXXXKKATVNMVVRSXGXH

SEQ ID NO: 55097 - protein, 34 aa, Artificial Sequence
  GFR-binding peptide
  MOD_RES (1)..(2): Xaa is C or S
  MOD_RES (16)..(17)..(18)..(19)..(20): Xaa is A or G
  MOD_RES (21)..(22)..(23)..(24): Xaa is A or G or is absent
XXVPTELSNITMQIMXXXXXXXXXIGEMSDMVVE

SEQ ID NO: 55098 - protein, 44 aa, Artificial Sequence
  GFR-binding peptide
  MOD_RES (6)..(7)..(41)..(43): Xaa is C or S
  MOD_RES (21)..(22)..(23)..(24)..(25): Xaa is A or G
  MOD_RES (26)..(27)..(28)..(29): Xaa is A or G or is absent
TVPKPXXAPTQLSNITVQIMXXXXXXXXXIGEMSNMVVRAXGXH

SEQ ID NO: 55099 - protein, 44 aa, Artificial Sequence; identical to SEQ ID NO: 19511
  GFR-binding peptide
  MOD_RES (5)..(42)..(44): Xaa is C or S

SEQ ID NO: 55100 - protein, 34 aa, Artificial Sequence
  GFR-binding peptide
PTQVQLEPLTVLYYEIVRKKPIFEQLSNTLEDHL

SEQ ID NO: 55101 - protein, 39 aa, Artificial Sequence; identical to SEQ ID NO: 16280
  GFR-binding peptide
  MOD_RES (5)..(6)..(37)..(39): Xaa is C or S

SEQ ID NO: 55102 - protein, 41 aa, Artificial Sequence; identical to SEQ ID NO: 19515
  GFR-binding peptide
  MOD_RES (5)..(5): Xaa is C or S

SEQ ID NO: 55103 - protein, 39 aa, Artificial Sequence; identical to SEQ ID NO: 16282
  GFR-binding peptide
  MOD_RES (2)..(3)..(36)..(38): Xaa is C or S
  MOD_RES (17)..(18)..(19)..(20)..(21): Xaa is A or G
  MOD_RES (22)..(23)..(24)..(25): Xaa is A or G or is absent

SEQ ID NO: 55104 - protein, 37 aa, Artificial Sequence
  GFR-binding peptide
  MOD_RES (1)..(35)..(37): Xaa is C or S
  MOD_RES (15)..(16)..(17)..(18)..(19): Xaa is A or G
  MOD_RES (20)..(21)..(22)..(23): Xaa is A or G or is absent
XAPTKLRPVQVRKIXXXXXXXXXKKATVNMVVRSXGX

SEQ ID NO: 55105 - protein, 37 aa, Artificial Sequence; identical to SEQ ID NO: 19517
  GFR-binding peptide
  MOD_RES (2)..(2): Xaa is C or S
  MOD_RES (18)..(19)..(20)..(21)..(22): Xaa is A or G
  MOD_RES (23)..(24)..(25)..(26): Xaa is A or G or is absent

SEQ ID NO: 55106 - protein, 38 aa, Artificial Sequence; identical to SEQ ID NO: 16284
  GFR-binding peptide
  MOD_RES (3)..(4)..(38): Xaa is C or S
  MOD_RES (18)..(19)..(20)..(21)..(22): Xaa is A or G
  MOD_RES (23)..(24)..(25)..(26): Xaa is A or G or is absent

SEQ ID NO: 55107 - protein, 37 aa, Artificial Sequence
  GFR-binding peptide
  MOD_RES (35)..(37): Xaa is C or S
  MOD_RES (14)..(15)..(16)..(17)..(18): Xaa is A or G
  MOD_RES (19)..(20)..(21)..(22): Xaa is A or G or is absent
TQVQLEPLPVVYYXXXXXXXXXEQLSNTLEDHLAXKX

SEQ ID NO: 55108 - protein, 34 aa, Artificial Sequence
  GFR-binding peptide
  MOD_RES (34)..(34): Xaa is C or S
  MOD_RES (14)..(15)..(16)..(17)..(18): Xaa is A or G
  MOD_RES (19)..(20)..(21)..(22): Xaa is A or G or is absent
APTKLSNITVQIMXXXXXXXXXIGEMSNMVVRSX

SEQ ID NO: 55109 - protein, 36 aa, Artificial Sequence; identical to SEQ ID NO: 19520
  GFR-binding peptide
  MOD_RES (34)..(36): Xaa is C or S
  MOD_RES (14)..(15)..(16)..(17)..(18): Xaa is A or G
  MOD_RES (19)..(20)..(21)..(22): Xaa is A or G or is absent

SEQ ID NO: 55110 - protein, 34 aa, Artificial Sequence
  GFR-binding peptide
  MOD_RES (34)..(34): Xaa is C or S
  MOD_RES (14)..(15)..(16)..(17)..(18): Xaa is A or G
  MOD_RES (19)..(20)..(21)..(22): Xaa is A or G or is absent
VPTELRSVKMAKVXXXXXXXXXKEVQVEMVVEGX

SEQ ID NO: 55111 - protein, 36 aa, Artificial Sequence; identical to SEQ ID NO: 19521
  GFR-binding peptide
  MOD_RES (3)..(3): Xaa is C or S
  MOD_RES (17)..(18)..(19)..(20)..(21): Xaa is A or G
  MOD_RES (22)..(23)..(24)..(25): Xaa is A or G or is absent

SEQ ID NO: 55112 - protein, 38 aa, Artificial Sequence
  GFR-binding peptide
  MOD_RES (1)..(38): Xaa is C or S
XRPTQVQLEPLPVVYYEIVRKKPIFEQLSNTLEDHLAX

SEQ ID NO: 55113 - protein, 35 aa, Artificial Sequence
  GFR-binding peptide
  MOD_RES (1)..(2): Xaa is C or S
  MOD_RES (16)..(17)..(18)..(19)..(20): Xaa is A or G
  MOD_RES (21)..(22)..(23)..(24): Xaa is A or G or is absent
XXVPTELRPVQMRKIXXXXXXXXXKKATVEMVVEG

SEQ ID NO: 55114 - protein, 41 aa, Artificial Sequence
  GFR-binding peptide
  MOD_RES (5)..(6)..(39)..(41): Xaa is C or S
  MOD_RES (20)..(21)..(22)..(23)..(24): Xaa is A or G
  MOD_RES (25)..(26)..(27)..(28): Xaa is A or G or is absent
SASPXXVSQDLRPVQIRKIXXXXXXXXXKKATVMIVKSXKX

SEQ ID NO: 55115 - protein, 35 aa, Artificial Sequence
  GFR-binding peptide
  MOD_RES (1)..(2)..(34): Xaa is C or S
XXAPTKLRPVQVRKIDDSSNVIKKATVNMVVRSXG

SEQ ID NO: 55116 - protein, 38 aa, Artificial Sequence
  GFR-binding peptide
  MOD_RES (5)..(5): Xaa is C or S
  MOD_RES (19)..(20)..(21)..(22)..(23): Xaa is A or G
  MOD_RES (24)..(25)..(26)..(27): Xaa is A or G or is absent
TKPTXAPTKLRPVQVRKIXXXXXXXXXKKATVNMVVRS

SEQ ID NO: 55117 - protein, 33 aa, Artificial Sequence
  GFR-binding peptide
  MOD_RES (1)..(2)..(33): Xaa is C or S
XXVSQDLRPVQIRKIIGKTPKIKKATVMIVKSX

SEQ ID NO: 55118 - protein, 34 aa, Artificial Sequence; identical to SEQ ID NO: 16290
  GFR-binding peptide
  MOD_RES (33)..(33): Xaa is C or S
  MOD_RES (14)..(15)..(16)..(17)..(18): Xaa is A or G
  MOD_RES (19)..(20)..(21)..(22): Xaa is A or G or is absent

SEQ ID NO: 55119 - protein, 35 aa, Artificial Sequence
  GFR-binding peptide
  MOD_RES (4)..(4): Xaa is C or S
KPTXAPTKLSNITVQIMDDSSNVIIGEMSNMVVRS

SEQ ID NO: 55120 - protein, 43 aa, Artificial Sequence; identical to SEQ ID NO: 19524
  GFR-binding peptide
  MOD_RES (4)..(41)..(43): Xaa is C or S

SEQ ID NO: 55121 - protein, 41 aa, Artificial Sequence; identical to SEQ ID NO: 19525
  GFR-binding peptide
  MOD_RES (2)..(39)..(41): Xaa is C or S
  MOD_RES (18)..(19)..(20)..(21)..(22): Xaa is A or G
  MOD_RES (23)..(24)..(25)..(26): Xaa is A or G or is absent

SEQ ID NO: 55122 - protein, 40 aa, Artificial Sequence
  GFR-binding peptide
  MOD_RES (5)..(6)..(40): Xaa is C or S
  MOD_RES (20)..(21)..(22)..(23)..(24): Xaa is A or G
  MOD_RES (25)..(26)..(27)..(28): Xaa is A or G or is absent
VPKPXXAPTKLRPVQVRKIXXXXXXXXXKKATVNMVVRSX

SEQ ID NO: 55123 - protein, 41 aa, Artificial Sequence; identical to SEQ ID NO: 19527
  GFR-binding peptide
  MOD_RES (6)..(40): Xaa is C or S
  MOD_RES (20)..(21)..(22)..(23)..(24): Xaa is A or G
  MOD_RES (25)..(26)..(27)..(28): Xaa is A or G or is absent

SEQ ID NO: 55124 - protein, 36 aa, Artificial Sequence
  GFR-binding peptide
  MOD_RES (3)..(4): Xaa is C or S
  MOD_RES (18)..(19)..(20)..(21)..(22): Xaa is A or G
  MOD_RES (23)..(24)..(25)..(26): Xaa is A or G or is absent
SPXXVPQDLSNITIQIMXXXXXXXXXIGEMSMVVKS

SEQ ID NO: 55125 - protein, 38 aa, Artificial Sequence
  GFR-binding peptide
  MOD_RES (6)..(7): Xaa is C or S
SIPKAXXVPTELRPVQMRKIDEYDKVVKKATVEMVVEG

SEQ ID NO: 55126 - protein, 37 aa, Artificial Sequence; identical to SEQ ID NO: 16292
  GFR-binding peptide
  MOD_RES (6)..(7): Xaa is C or S

SEQ ID NO: 55127 - protein, 38 aa, Artificial Sequence
  GFR-binding peptide
  MOD_RES (1)..(38): Xaa is C or S
  MOD_RES (17)..(18)..(19)..(20)..(21): Xaa is A or G
  MOD_RES (22)..(23)..(24)..(25): Xaa is A or G or is absent
XRPTQVQLEPLTVLYYXXXXXXXXXEQLSNTLEDHLAX

SEQ ID NO: 55128 - protein, 33 aa, Artificial Sequence; identical to SEQ ID NO: 16293
  GFR-binding peptide
  MOD_RES (1)..(2): Xaa is C or S

SEQ ID NO: 55129 - protein, 38 aa, Artificial Sequence
  GFR-binding peptide
  MOD_RES (3)..(4)..(36)..(38): Xaa is C or S
KAXXVPTELRPVQMRKIDEYDKVVKKATVEMVVEGXGX

SEQ ID NO: 55130 - protein, 38 aa, Artificial Sequence; identical to SEQ ID NO: 16294
  GFR-binding peptide
  MOD_RES (5)..(5): Xaa is C or S
  MOD_RES (19)..(20)..(21)..(22)..(23): Xaa is A or G
  MOD_RES (24)..(25)..(26)..(27): Xaa is A or G or is absent

SEQ ID NO: 55131 - protein, 39 aa, Artificial Sequence; identical to SEQ ID NO: 19534
  GFR-binding peptide
  MOD_RES (1)..(38): Xaa is C or S
  MOD_RES (17)..(18)..(19)..(20)..(21): Xaa is A or G
  MOD_RES (22)..(23)..(24)..(25): Xaa is A or G or is absent

SEQ ID NO: 55132 - protein, 40 aa, Artificial Sequence; identical to SEQ ID NO: 19535
  GFR-binding peptide
  MOD_RES (6)..(40): Xaa is C or S
  MOD_RES (20)..(21)..(22)..(23)..(24): Xaa is A or G
  MOD_RES (25)..(26)..(27)..(28): Xaa is A or G or is absent

SEQ ID NO: 55133 - protein, 37 aa, Artificial Sequence
  GFR-binding peptide
  MOD_RES (2)..(3)..(36): Xaa is C or S
  MOD_RES (17)..(18)..(19)..(20)..(21): Xaa is A or G
  MOD_RES (22)..(23)..(24)..(25): Xaa is A or G or is absent
PXXVPQALSNITIQIMXXXXXXXXXIGEMSMIVRSXK

SEQ ID NO: 55134 - protein, 40 aa, Artificial Sequence
  GFR-binding peptide
  MOD_RES (3)..(4)..(38)..(40): Xaa is C or S
  MOD_RES (18)..(19)..(20)..(21)..(22): Xaa is A or G
  MOD_RES (23)..(24)..(25)..(26): Xaa is A or G or is absent
KAXXVPTELSNITMQIMXXXXXXXXXIGEMSEMVVEGXGX

SEQ ID NO: 55135 - protein, 41 aa, Artificial Sequence; identical to SEQ ID NO: 16302
  GFR-binding peptide
  MOD_RES (6)..(7)..(41): Xaa is C or S
  MOD_RES (21)..(22)..(23)..(24)..(25): Xaa is A or G
  MOD_RES (26)..(27)..(28)..(29): Xaa is A or G or is absent

SEQ ID NO: 55136 - protein, 36 aa, Artificial Sequence
  GFR-binding peptide
  MOD_RES (2)..(36): Xaa is C or S
  MOD_RES (16)..(17)..(18)..(19)..(20): Xaa is A or G
  MOD_RES (21)..(22)..(23)..(24): Xaa is A or G or is absent
TXAPTKLSNITVQIMXXXXXXXXXIGEMSNMVVRSX

SEQ ID NO: 55137 - protein, 37 aa, Artificial Sequence
  GFR-binding peptide
  MOD_RES (1)..(2)..(34)..(36): Xaa is C or S
XXAPTKLRPVQVRKIDDSSNVIKKATVNMVVRSXGXH

SEQ ID NO: 55138 - protein, 37 aa, Artificial Sequence
  GFR-binding peptide
  MOD_RES (4)..(5): Xaa is C or S
  MOD_RES (19)..(20)..(21)..(22)..(23): Xaa is A or G
  MOD_RES (24)..(25)..(26)..(27): Xaa is A or G or is absent
PKPXXAPTQLSNITVQIMXXXXXXXXXIGEMSNMVVR

SEQ ID NO: 55139 - protein, 36 aa, Artificial Sequence; identical to SEQ ID NO: 16305
  GFR-binding peptide
  MOD_RES (1)..(2)..(33)..(35): Xaa is C or S

SEQ ID NO: 55140 - protein, 38 aa, Artificial Sequence
  GFR-binding peptide
  MOD_RES (35)..(37): Xaa is C or S
  MOD_RES (14)..(15)..(16)..(17)..(18): Xaa is A or G
  MOD_RES (19)..(20)..(21)..(22): Xaa is A or G or is absent
SRVHHEPLPVVYYXXXXXXXXXEQLSNRLEEHLEXAXA

SEQ ID NO: 55141 - protein, 43 aa, Artificial Sequence; identical to SEQ ID NO: 19536
  GFR-binding peptide
  MOD_RES (3)..(40)..(42): Xaa is C or S
  MOD_RES (19)..(20)..(21)..(22)..(23): Xaa is A or G
  MOD_RES (24)..(25)..(26)..(27): Xaa is A or G or is absent

SEQ ID NO: 55142 - protein, 33 aa, Artificial Sequence; identical to SEQ ID NO: 16310
  GFR-binding peptide
  MOD_RES (1)..(33): Xaa is C or S

SEQ ID NO: 55143 - protein, 39 aa, Artificial Sequence; identical to SEQ ID NO: 16311
  GFR-binding peptide
  MOD_RES (7)..(39): Xaa is C or S

SEQ ID NO: 55144 - protein, 36 aa, Artificial Sequence
  GFR-binding peptide
  MOD_RES (1)..(2)..(33)..(35): Xaa is C or S
XXVSQDLRPVQIRKIIGKTPKIKKATVMIVKSXKXS

SEQ ID NO: 55145 - protein, 36 aa, Artificial Sequence; identical to SEQ ID NO: 16317
  GFR-binding peptide
  MOD_RES (5)..(6): Xaa is C or S

SEQ ID NO: 55146 - protein, 38 aa, Artificial Sequence; identical to SEQ ID NO: 16320
  GFR-binding peptide
  MOD_RES (6)..(7): Xaa is C or S

SEQ ID NO: 55147 - protein, 37 aa, Artificial Sequence; identical to SEQ ID NO: 16322
  GFR-binding peptide
  MOD_RES (4)..(5)..(37): Xaa is C or S

SEQ ID NO: 55148 - protein, 37 aa, Artificial Sequence
  GFR-binding peptide
  MOD_RES (4)..(5)..(37): Xaa is C or S
PKPXXAPTQLRSVKVAKVDDSSNVIKEVQVNMVVRAX

SEQ ID NO: 55149 - protein, 41 aa, Artificial Sequence
  GFR-binding peptide
  MOD_RES (5)..(39)..(41): Xaa is C or S
  MOD_RES (19)..(20)..(21)..(22)..(23): Xaa is A or G
  MOD_RES (24)..(25)..(26)..(27): Xaa is A or G or is absent
EGLEXVPTEEEPLPMVYYXXXXXXXXXEQLSNFLQHNKXEX

SEQ ID NO: 55150 - protein, 37 aa, Artificial Sequence; identical to SEQ ID NO: 16324
  GFR-binding peptide
  MOD_RES (3)..(4)..(35)..(37): Xaa is C or S

SEQ ID NO: 55151 - protein, 44 aa, Artificial Sequence; identical to SEQ ID NO: 19539
  GFR-binding peptide
  MOD_RES (5)..(42)..(44): Xaa is C or S

SEQ ID NO: 55152 - protein, 36 aa, Artificial Sequence
  GFR-binding peptide
  MOD_RES (3)..(4): Xaa is C or S
  MOD_RES (18)..(19)..(20)..(21)..(22): Xaa is A or G
  MOD_RES (23)..(24)..(25)..(26): Xaa is A or G or is absent
KAXXVPTELRSVKMAKVXXXXXXXXXKEVQVEMVVE

SEQ ID NO: 55153 - protein, 42 aa, Artificial Sequence; identical to SEQ ID NO: 19540
  GFR-binding peptide
  MOD_RES (5)..(42): Xaa is C or S
  MOD_RES (21)..(22)..(23)..(24)..(25): Xaa is A or G
  MOD_RES (26)..(27)..(28)..(29): Xaa is A or G or is absent

SEQ ID NO: 55154 - protein, 38 aa, Artificial Sequence; identical to SEQ ID NO: 19541
  GFR-binding peptide
  MOD_RES (3)..(3): Xaa is C or S

SEQ ID NO: 55155 - protein, 38 aa, Artificial Sequence; identical to SEQ ID NO: 19542
  GFR-binding peptide
  MOD_RES (35)..(37): Xaa is C or S
  MOD_RES (14)..(15)..(16)..(17)..(18): Xaa is A or G
  MOD_RES (19)..(20)..(21)..(22): Xaa is A or G or is absent

SEQ ID NO: 55156 - protein, 41 aa, Artificial Sequence
  GFR-binding peptide
  MOD_RES (1)..(38)..(40): Xaa is C or S
  MOD_RES (17)..(18)..(19)..(20)..(21): Xaa is A or G
  MOD_RES (22)..(23)..(24)..(25): Xaa is A or G or is absent
XQPSRVHHEPLTVLYYXXXXXXXXXEQLSNRLEEHLEXAXA

SEQ ID NO: 55157 - protein, 38 aa, Artificial Sequence; identical to SEQ ID NO: 16325
  GFR-binding peptide
  MOD_RES (1)..(2)..(35)..(37): Xaa is C or S
  MOD_RES (16)..(17)..(18)..(19)..(20): Xaa is A or G
  MOD_RES (21)..(22)..(23)..(24): Xaa is A or G or is absent

SEQ ID NO: 55158 - protein, 41 aa, Artificial Sequence; identical to SEQ ID NO: 16326
  GFR-binding peptide
  MOD_RES (3)..(4)..(38)..(40): Xaa is C or S
  MOD_RES (18)..(19)..(20)..(21)..(22): Xaa is A or G
  MOD_RES (23)..(24)..(25)..(26): Xaa is A or G or is absent

SEQ ID NO: 55159 - protein, 33 aa, Artificial Sequence; identical to SEQ ID NO: 16327
  GFR-binding peptide
  MOD_RES (14)..(15)..(16)..(17)..(18): Xaa is A or G
  MOD_RES (19)..(20)..(21)..(22): Xaa is A or G or is absent

SEQ ID NO: 55160 - protein, 42 aa, Artificial Sequence
  GFR-binding peptide
  MOD_RES (5)..(6)..(40)..(42): Xaa is C or S
  MOD_RES (20)..(21)..(22)..(23)..(24): Xaa is A or G
  MOD_RES (25)..(26)..(27)..(28): Xaa is A or G or is absent
VPKPXXAPTKLRSVKVAKVXXXXXXXXXKEVQVNMVVRSXGX

SEQ ID NO: 55161 - protein, 30 aa, Artificial Sequence
  GFR-binding peptide
VPQALRSVKIAKVVGRKPKVKEVQVMIVRS

SEQ ID NO: 55162 - protein, 34 aa, Artificial Sequence; identical to SEQ ID NO: 19544
  GFR-binding peptide

SEQ ID NO: 55163 - protein, 37 aa, Artificial Sequence
  GFR-binding peptide
  MOD_RES (4)..(4): Xaa is C or S
  MOD_RES (18)..(19)..(20)..(21)..(22): Xaa is A or G
  MOD_RES (23)..(24)..(25)..(26): Xaa is A or G or is absent
KPTXAPTKLRSVKVAKVXXXXXXXXXKEVQVNMVVRS

SEQ ID NO: 55164 - protein, 33 aa, Artificial Sequence
  GFR-binding peptide
  MOD_RES (1)..(2): Xaa is C or S
XXAPTQLRSVKVAKVDDSSNVIKEVQVNMVVRA

SEQ ID NO: 55165 - protein, 39 aa, Artificial Sequence
  GFR-binding peptide
  MOD_RES (5)..(6): Xaa is C or S
  MOD_RES (20)..(21)..(22)..(23)..(24): Xaa is A or G
  MOD_RES (25)..(26)..(27)..(28): Xaa is A or G or is absent
IPKAXXVPTELSNITMQIMXXXXXXXXXIGEMSDMVVEG

SEQ ID NO: 55166 - protein, 35 aa, Artificial Sequence
  GFR-binding peptide
  MOD_RES (34)..(34): Xaa is C or S
  MOD_RES (14)..(15)..(16)..(17)..(18): Xaa is A or G
  MOD_RES (19)..(20)..(21)..(22): Xaa is A or G or is absent
APTQLRPVQVRKIXXXXXXXXXKKATVNMVVRAXG

SEQ ID NO: 55167 - protein, 37 aa, Artificial Sequence
  GFR-binding peptide
  MOD_RES (4)..(5)..(37): Xaa is C or S
PKPXXAPTKLRPVQVRKIDDSSNVIKKATVNMVVRSX

SEQ ID NO: 55168 - protein, 35 aa, Artificial Sequence; identical to SEQ ID NO: 19548
  GFR-binding peptide
  MOD_RES (1)..(1): Xaa is C or S
  MOD_RES (17)..(18)..(19)..(20)..(21): Xaa is A or G
  MOD_RES (22)..(23)..(24)..(25): Xaa is A or G or is absent

SEQ ID NO: 55169 - protein, 41 aa, Artificial Sequence
  GFR-binding peptide
  MOD_RES (4)..(41): Xaa is C or S
  MOD_RES (20)..(21)..(22)..(23)..(24): Xaa is A or G
  MOD_RES (25)..(26)..(27)..(28): Xaa is A or G or is absent
NVQXRPTQVQLEPLPVVYYXXXXXXXXXEQLSNTLEDHLAX

SEQ ID NO: 55170 - protein, 36 aa, Artificial Sequence; identical to SEQ ID NO: 19549
  GFR-binding peptide
  MOD_RES (35)..(35): Xaa is C or S
  MOD_RES (14)..(15)..(16)..(17)..(18): Xaa is A or G
  MOD_RES (19)..(20)..(21)..(22): Xaa is A or G or is absent

SEQ ID NO: 55171 - protein, 39 aa, Artificial Sequence; identical to SEQ ID NO: 16331
  GFR-binding peptide
  MOD_RES (4)..(36)..(38): Xaa is C or S

SEQ ID NO: 55172 - protein, 38 aa, Artificial Sequence
  GFR-binding peptide
  MOD_RES (6)..(6): Xaa is C or S
  MOD_RES (20)..(21)..(22)..(23)..(24): Xaa is A or G
  MOD_RES (25)..(26)..(27)..(28): Xaa is A or G or is absent
DEGLEXVPTEEEPLPMVYYXXXXXXXXXEQLSNFLQHN

SEQ ID NO: 55173 - protein, 33 aa, Artificial Sequence
  GFR-binding peptide
  MOD_RES (2)..(3): Xaa is C or S
PXXVPQDLRSVKIAKVVGRTPKVKEVQVMVVKS

SEQ ID NO: 55174 - protein, 37 aa, Artificial Sequence
  GFR-binding peptide
  MOD_RES (4)..(5)..(36): Xaa is C or S
ASPXXVPQDLRSVKIAKVVGRTPKVKEVQVMVVKSXK

SEQ ID NO: 55175 - protein, 41 aa, Artificial Sequence
  GFR-binding peptide
  MOD_RES (5)..(6)..(39)..(41): Xaa is C or S
  MOD_RES (20)..(21)..(22)..(23)..(24): Xaa is A or G
  MOD_RES (25)..(26)..(27)..(28): Xaa is A or G or is absent
SAAPXXVPQALRPVQIRKIXXXXXXXXXKKATVMIVRSXKX

SEQ ID NO: 55176 - protein, 36 aa, Artificial Sequence; identical to SEQ ID NO: 16334
  GFR-binding peptide
  MOD_RES (5)..(6): Xaa is C or S

SEQ ID NO: 55177 - protein, 34 aa, Artificial Sequence; identical to SEQ ID NO: 19551
  GFR-binding peptide
  MOD_RES (15)..(16)..(17)..(18)..(19): Xaa is A or G
  MOD_RES (20)..(21)..(22)..(23): Xaa is A or G or is absent

SEQ ID NO: 55178 - protein, 35 aa, Artificial Sequence; identical to SEQ ID NO: 19552
  GFR-binding peptide
  MOD_RES (1)..(1): Xaa is C or S
  MOD_RES (17)..(18)..(19)..(20)..(21): Xaa is A or G
  MOD_RES (22)..(23)..(24)..(25): Xaa is A or G or is absent

SEQ ID NO: 55179 - protein, 35 aa, Artificial Sequence; identical to SEQ ID NO: 16335
  GFR-binding peptide
  MOD_RES (1)..(2): Xaa is C or S
  MOD_RES (16)..(17)..(18)..(19)..(20): Xaa is A or G
  MOD_RES (21)..(22)..(23)..(24): Xaa is A or G or is absent

SEQ ID NO: 55180 - protein, 41 aa, Artificial Sequence
  GFR-binding peptide
  MOD_RES (3)..(40): Xaa is C or S
  MOD_RES (19)..(20)..(21)..(22)..(23): Xaa is A or G
  MOD_RES (24)..(25)..(26)..(27): Xaa is A or G or is absent
VKXQPSRVHHEPLTVLYYXXXXXXXXXEQLSNRLEEHLEXA

SEQ ID NO: 55181 - protein, 31 aa, Artificial Sequence
  GFR-binding peptide
APTQLRPVQVRKIDDSSNVIKKATVNMVVRA

SEQ ID NO: 55182 - protein, 33 aa, Artificial Sequence; identical to SEQ ID NO: 19553
  GFR-binding peptide

SEQ ID NO: 55183 - protein, 42 aa, Artificial Sequence; identical to SEQ ID NO: 19554
  GFR-binding peptide
  MOD_RES (3)..(40)..(42): Xaa is C or S
  MOD_RES (19)..(20)..(21)..(22)..(23): Xaa is A or G
  MOD_RES (24)..(25)..(26)..(27): Xaa is A or G or is absent

SEQ ID NO: 55184 - protein, 39 aa, Artificial Sequence
  GFR-binding peptide
  MOD_RES (1)..(2)..(36)..(38): Xaa is C or S
  MOD_RES (16)..(17)..(18)..(19)..(20): Xaa is A or G
  MOD_RES (21)..(22)..(23)..(24): Xaa is A or G or is absent
XXAPTKLSNITVQIMXXXXXXXXXIGEMSNMVVRSXGXH

SEQ ID NO: 55185 - protein, 41 aa, Artificial Sequence
  GFR-binding peptide
  MOD_RES (6)..(40): Xaa is C or S
  MOD_RES (20)..(21)..(22)..(23)..(24): Xaa is A or G
  MOD_RES (25)..(26)..(27)..(28): Xaa is A or G or is absent
DEGLEXVPTEEEPLTMLYYXXXXXXXXXEQLSNFLQHNKXE

SEQ ID NO: 55186 - protein, 39 aa, Artificial Sequence
  GFR-binding peptide
  MOD_RES (6)..(7): Xaa is C or S
  MOD_RES (21)..(22)..(23)..(24)..(25): Xaa is A or G
  MOD_RES (26)..(27)..(28)..(29): Xaa is A or G or is absent
ASASPXXVSQDLRPVQIRKIXXXXXXXXXKKATVMIVKS

SEQ ID NO: 55187 - protein, 40 aa, Artificial Sequence; identical to SEQ ID NO: 16341
  GFR-binding peptide
  MOD_RES (3)..(4)..(38)..(40): Xaa is C or S
  MOD_RES (18)..(19)..(20)..(21)..(22): Xaa is A or G
  MOD_RES (23)..(24)..(25)..(26): Xaa is A or G or is absent

SEQ ID NO: 55188 - protein, 38 aa, Artificial Sequence; identical to SEQ ID NO: 19555
  GFR-binding peptide
  MOD_RES (1)..(38): Xaa is C or S
  MOD_RES (17)..(18)..(19)..(20)..(21): Xaa is A or G
  MOD_RES (22)..(23)..(24)..(25): Xaa is A or G or is absent

SEQ ID NO: 55189 - protein, 38 aa, Artificial Sequence
  GFR-binding peptide
  MOD_RES (37)..(37): Xaa is C or S
RPTQVQLEPLTVLYYEIVRKKPIFEQLSNTLEDHLAXK

SEQ ID NO: 55190 - protein, 35 aa, Artificial Sequence
  GFR-binding peptide
  MOD_RES (3)..(4): Xaa is C or S
KAXXVPTELRSVKMAKVDEYDKVVKEVQVEMVVEG

SEQ ID NO: 55191 - protein, 32 aa, Artificial Sequence; identical to SEQ ID NO: 16342
  GFR-binding peptide
  MOD_RES (1)..(2): Xaa is C or S

SEQ ID NO: 55192 - protein, 36 aa, Artificial Sequence; identical to SEQ ID NO: 19556
  GFR-binding peptide
  MOD_RES (4)..(4): Xaa is C or S
  MOD_RES (18)..(19)..(20)..(21)..(22): Xaa is A or G
  MOD_RES (23)..(24)..(25)..(26): Xaa is A or G or is absent

SEQ ID NO: 55193 - protein, 39 aa, Artificial Sequence; identical to SEQ ID NO: 19558
  GFR-binding peptide
  MOD_RES (2)..(36)..(38): Xaa is C or S
  MOD_RES (16)..(17)..(18)..(19)..(20): Xaa is A or G
  MOD_RES (21)..(22)..(23)..(24): Xaa is A or G or is absent

SEQ ID NO: 55194 - protein, 37 aa, Artificial Sequence
  GFR-binding peptide
  MOD_RES (3)..(4)..(35)..(37): Xaa is C or S
APXXVPQALSNITIQIMVGRKPKVIGEMSMIVRSXKX

SEQ ID NO: 55195 - protein, 39 aa, Artificial Sequence; identical to SEQ ID NO: 16345
  GFR-binding peptide
  MOD_RES (3)..(4)..(36)..(38): Xaa is C or S

SEQ ID NO: 55196 - protein, 40 aa, Artificial Sequence
  GFR-binding peptide
  MOD_RES (5)..(6)..(37)..(39): Xaa is C or S
SASPXXVPQDLRPVQIRKIVGRTPKVKKATVMVVKSXKXS

SEQ ID NO: 55197 - protein, 41 aa, Artificial Sequence; identical to SEQ ID NO: 19562
  GFR-binding peptide
  MOD_RES (4)..(38)..(40): Xaa is C or S
  MOD_RES (18)..(19)..(20)..(21)..(22): Xaa is A or G
  MOD_RES (23)..(24)..(25)..(26): Xaa is A or G or is absent

SEQ ID NO: 55198 - protein, 35 aa, Artificial Sequence; identical to SEQ ID NO: 16347
  GFR-binding peptide
  MOD_RES (32)..(34): Xaa is C or S

SEQ ID NO: 55199 - protein, 36 aa, Artificial Sequence
  GFR-binding peptide
  MOD_RES (3)..(4): Xaa is C or S
  MOD_RES (18)..(19)..(20)..(21)..(22): Xaa is A or G
  MOD_RES (23)..(24)..(25)..(26): Xaa is A or G or is absent
KPXXAPTQLRSVKVAKVXXXXXXXXXKEVQVNMVVR

SEQ ID NO: 55200 - protein, 38 aa, Artificial Sequence; identical to SEQ ID NO: 19564
  GFR-binding peptide
  MOD_RES (1)..(35)..(37): Xaa is C or S

SEQ ID NO: 55201 - protein, 38 aa, Artificial Sequence; identical to SEQ ID NO: 16349
  GFR-binding peptide
  MOD_RES (4)..(5)..(38): Xaa is C or S
  MOD_RES (19)..(20)..(21)..(22)..(23): Xaa is A or G
  MOD_RES (24)..(25)..(26)..(27): Xaa is A or G or is absent

SEQ ID NO: 55202 - protein, 45 aa, Artificial Sequence
  GFR-binding peptide
  MOD_RES (5)..(42)..(44): Xaa is C or S
SSVKXQPSRVHHEPLTVLYYEYVRKKPKLEQLSNRLEEHLEXAXA

SEQ ID NO: 55203 - protein, 36 aa, Artificial Sequence; identical to SEQ ID NO: 16350
  GFR-binding peptide
  MOD_RES (1)..(35): Xaa is C or S
  MOD_RES (15)..(16)..(17)..(18)..(19): Xaa is A or G
  MOD_RES (20)..(21)..(22)..(23): Xaa is A or G or is absent

SEQ ID NO: 55204 - protein, 34 aa, Artificial Sequence
  GFR-binding peptide
  MOD_RES (1)..(2)..(33): Xaa is C or S
XXVSQDLRSVKIAKVIGKTPKIKEVQVMIVKSXK

SEQ ID NO: 55205 - protein, 37 aa, Artificial Sequence
  GFR-binding peptide
  MOD_RES (5)..(6)..(37): Xaa is C or S
SAAPXXVPQALRSVKIAKVVGRKPKVKEVQVMIVRSX

SEQ ID NO: 55206 - protein, 39 aa, Artificial Sequence
  GFR-binding peptide
  MOD_RES (3)..(37)..(39): Xaa is C or S
  MOD_RES (17)..(18)..(19)..(20)..(21): Xaa is A or G
  MOD_RES (22)..(23)..(24)..(25): Xaa is A or G or is absent
LEXVPTEEEPLPMVYYXXXXXXXXXEQLSNFLQHNKXEX

SEQ ID NO: 55207 - protein, 36 aa, Artificial Sequence; identical to SEQ ID NO: 16357
  GFR-binding peptide
  MOD_RES (1)..(33)..(35): Xaa is C or S

SEQ ID NO: 55208 - protein, 40 aa, Artificial Sequence; identical to SEQ ID NO: 19566
  GFR-binding peptide
  MOD_RES (37)..(39): Xaa is C or S
  MOD_RES (16)..(17)..(18)..(19)..(20): Xaa is A or G
  MOD_RES (21)..(22)..(23)..(24): Xaa is A or G or is absent

SEQ ID NO: 55209 - protein, 41 aa, Artificial Sequence
  GFR-binding peptide
  MOD_RES (6)..(7)..(39)..(41): Xaa is C or S
KIPKAXXVPTELRSVKMAKVDENEKVVKEVQVDMVVEGXGX

SEQ ID NO: 55210 - protein, 43 aa, Artificial Sequence
  GFR-binding peptide
  MOD_RES (4)..(41)..(43): Xaa is C or S
  MOD_RES (20)..(21)..(22)..(23)..(24): Xaa is A or G
  MOD_RES (25)..(26)..(27)..(28): Xaa is A or G or is absent
NVQXRPTQVQLEPLPVVYYXXXXXXXXXEQLSNTLEDHLAXKX

SEQ ID NO: 55211 - protein, 40 aa, Artificial Sequence
  GFR-binding peptide
  MOD_RES (5)..(6)..(37)..(39): Xaa is C or S
SAAPXXVPQALSNITIQIMVGRKPKVIGEMSMIVRSXKXS

SEQ ID NO: 55212 - protein, 37 aa, Artificial Sequence; identical to SEQ ID NO: 16358
  GFR-binding peptide
  MOD_RES (5)..(6)..(37): Xaa is C or S

SEQ ID NO: 55213 - protein, 31 aa, Artificial Sequence
  GFR-binding peptide
  MOD_RES (1)..(1): Xaa is C or S
XVPTELRSVKMAKVDENEKVVKEVQVDMVVE

SEQ ID NO: 55214 - protein, 31 aa, Artificial Sequence; identical to SEQ ID NO: 16359
  GFR-binding peptide
  MOD_RES (1)..(1): Xaa is C or S

SEQ ID NO: 55215 - protein, 37 aa, Artificial Sequence; identical to SEQ ID NO: 16360
  GFR-binding peptide
  MOD_RES (1)..(2)..(36): Xaa is C or S
  MOD_RES (16)..(17)..(18)..(19)..(20): Xaa is A or G
  MOD_RES (21)..(22)..(23)..(24): Xaa is A or G or is absent

SEQ ID NO: 55216 - protein, 34 aa, Artificial Sequence
  GFR-binding peptide
  MOD_RES (32)..(34): Xaa is C or S
VPTELSNITMQIMDENEKVVIGEMSDMVVEGXGX

SEQ ID NO: 55217 - protein, 38 aa, Artificial Sequence; identical to SEQ ID NO: 16362
  GFR-binding peptide
  MOD_RES (5)..(6): Xaa is C or S
  MOD_RES (20)..(21)..(22)..(23)..(24): Xaa is A or G
  MOD_RES (25)..(26)..(27)..(28): Xaa is A or G or is absent

SEQ ID NO: 55218 - protein, 35 aa, Artificial Sequence; identical to SEQ ID NO: 16363
  GFR-binding peptide
  MOD_RES (32)..(34): Xaa is C or S

SEQ ID NO: 55219 - protein, 42 aa, Artificial Sequence
  GFR-binding peptide
  MOD_RES (2)..(39)..(41): Xaa is C or S
  MOD_RES (18)..(19)..(20)..(21)..(22): Xaa is A or G
  MOD_RES (23)..(24)..(25)..(26): Xaa is A or G or is absent
KXQPSRVHHEPLTVLYYXXXXXXXXXEQLSNRLEEHLEXAXA

SEQ ID NO: 55220 - protein, 39 aa, Artificial Sequence
  GFR-binding peptide
  MOD_RES (6)..(7): Xaa is C or S
  MOD_RES (21)..(22)..(23)..(24)..(25): Xaa is A or G
  MOD_RES (26)..(27)..(28)..(29): Xaa is A or G or is absent
TVPKPXXAPTQLRPVQVRKIXXXXXXXXXKKATVNMVVR

SEQ ID NO: 55221 - protein, 32 aa, Artificial Sequence; identical to SEQ ID NO: 16365
  GFR-binding peptide
  MOD_RES (1)..(2): Xaa is C or S

SEQ ID NO: 55222 - protein, 37 aa, Artificial Sequence
  GFR-binding peptide
  MOD_RES (4)..(5): Xaa is C or S
  MOD_RES (19)..(20)..(21)..(22)..(23): Xaa is A or G
  MOD_RES (24)..(25)..(26)..(27): Xaa is A or G or is absent
PKAXXVPTELSNITMQIMXXXXXXXXXIGEMSEMVVE

SEQ ID NO: 55223 - protein, 37 aa, Artificial Sequence; identical to SEQ ID NO: 40177
  GFR-binding peptide
  MOD_RES (1)..(34)..(36): Xaa is C or S
  MOD_RES (15)..(16)..(17)..(18)..(19): Xaa is A or G
  MOD_RES (20)..(21)..(22)..(23): Xaa is A or G or is absent

SEQ ID NO: 55224 - protein, 34 aa, Artificial Sequence
  GFR-binding peptide
  MOD_RES (1)..(34): Xaa is C or S
  MOD_RES (15)..(16)..(17)..(18)..(19): Xaa is A or G
  MOD_RES (20)..(21)..(22)..(23): Xaa is A or G or is absent
XVPQDLRPVQIRKIXXXXXXXXXKKATVMVVKSX

SEQ ID NO: 55225 - protein, 38 aa, Artificial Sequence
  GFR-binding peptide
  MOD_RES (37)..(37): Xaa is C or S
  MOD_RES (16)..(17)..(18)..(19)..(20): Xaa is A or G
  MOD_RES (21)..(22)..(23)..(24): Xaa is A or G or is absent
RPTQVQLEPLTVLYYXXXXXXXXXEQLSNTLEDHLAXK

SEQ ID NO: 55226 - protein, 39 aa, Artificial Sequence; identical to SEQ ID NO: 19573
  GFR-binding peptide
  MOD_RES (3)..(3): Xaa is C or S
  MOD_RES (19)..(20)..(21)..(22)..(23): Xaa is A or G
  MOD_RES (24)..(25)..(26)..(27): Xaa is A or G or is absent

SEQ ID NO: 55227 - protein, 35 aa, Artificial Sequence
  GFR-binding peptide
  MOD_RES (3)..(3): Xaa is C or S
LEXVPTEEEPLPMVYYRIKPHQGQHEQLSNFLQHN

SEQ ID NO: 55228 - protein, 43 aa, Artificial Sequence
  GFR-binding peptide
  MOD_RES (6)..(40)..(42): Xaa is C or S
  MOD_RES (20)..(21)..(22)..(23)..(24): Xaa is A or G
  MOD_RES (25)..(26)..(27)..(28): Xaa is A or G or is absent
DEGLEXVPTEEEPLTMLYYXXXXXXXXXEQLSNFLQHNKXEXR

SEQ ID NO: 55229 - protein, 40 aa, Artificial Sequence; identical to SEQ ID NO: 19576
  GFR-binding peptide
  MOD_RES (2)..(39): Xaa is C or S

SEQ ID NO: 55230 - protein, 41 aa, Artificial Sequence
  GFR-binding peptide
  MOD_RES (5)..(6)..(40): Xaa is C or S
  MOD_RES (20)..(21)..(22)..(23)..(24): Xaa is A or G
  MOD_RES (25)..(26)..(27)..(28): Xaa is A or G or is absent
IPKAXXVPTELRSVKMAKVXXXXXXXXXKEVQVDMVVEGXG

SEQ ID NO: 55231 - protein, 39 aa, Artificial Sequence; identical to SEQ ID NO: 16371
  GFR-binding peptide
  MOD_RES (4)..(5)..(37)..(39): Xaa is C or S

SEQ ID NO: 55232 - protein, 36 aa, Artificial Sequence
  GFR-binding peptide
  MOD_RES (34)..(36): Xaa is C or S
  MOD_RES (14)..(15)..(16)..(17)..(18): Xaa is A or G
  MOD_RES (19)..(20)..(21)..(22): Xaa is A or G or is absent
VPTELRSVKMAKVXXXXXXXXXKEVQVDMVVEGXGX

SEQ ID NO: 55233 - protein, 38 aa, Artificial Sequence; identical to SEQ ID NO: 19579
  GFR-binding peptide
  MOD_RES (4)..(4): Xaa is C or S
  MOD_RES (20)..(21)..(22)..(23)..(24): Xaa is A or G
  MOD_RES (25)..(26)..(27)..(28): Xaa is A or G or is absent

SEQ ID NO: 55234 - protein, 36 aa, Artificial Sequence; identical to SEQ ID NO: 16372
  GFR-binding peptide
  MOD_RES (5)..(5): Xaa is C or S

SEQ ID NO: 55235 - protein, 36 aa, Artificial Sequence
  GFR-binding peptide
  MOD_RES (2)..(34)..(36): Xaa is C or S
TXAPTKLSNITVQIMDDSSNVIIGEMSNMVVRSXGX

SEQ ID NO: 55236 - protein, 34 aa, Artificial Sequence
  GFR-binding peptide
  MOD_RES (2)..(3)..(34): Xaa is C or S
PXXVPQDLRPVQIRKIVGRTPKVKKATVMVVKSX

SEQ ID NO: 55237 - protein, 39 aa, Artificial Sequence; identical to SEQ ID NO: 19585
  GFR-binding peptide
  MOD_RES (2)..(39): Xaa is C or S
  MOD_RES (18)..(19)..(20)..(21)..(22): Xaa is A or G
  MOD_RES (23)..(24)..(25)..(26): Xaa is A or G or is absent

SEQ ID NO: 55238 - protein, 34 aa, Artificial Sequence
  GFR-binding peptide
  MOD_RES (33)..(33): Xaa is C or S
  MOD_RES (14)..(15)..(16)..(17)..(18): Xaa is A or G
  MOD_RES (19)..(20)..(21)..(22): Xaa is A or G or is absent
VPQDLRSVKIAKVXXXXXXXXXKEVQVMVVKSXK

SEQ ID NO: 55239 - protein, 44 aa, Artificial Sequence; identical to SEQ ID NO: 19587
  GFR-binding peptide
  MOD_RES (4)..(41)..(43): Xaa is C or S

SEQ ID NO: 55240 - protein, 43 aa, Artificial Sequence
  GFR-binding peptide
  MOD_RES (6)..(7)..(40)..(42): Xaa is C or S
  MOD_RES (21)..(22)..(23)..(24)..(25): Xaa is A or G
  MOD_RES (26)..(27)..(28)..(29): Xaa is A or G or is absent
ASASPXXVPQDLSNITIQIMXXXXXXXXXIGEMSMVVKSXKXS

SEQ ID NO: 55241 - protein, 42 aa, Artificial Sequence
  GFR-binding peptide
  MOD_RES (4)..(41): Xaa is C or S
NVQXRPTQVQLEPLTVLYYEIVRKKPIFEQLSNTLEDHLAXK

SEQ ID NO: 55242 - protein, 39 aa, Artificial Sequence
  GFR-binding peptide
  MOD_RES (6)..(7): Xaa is C or S
  MOD_RES (21)..(22)..(23)..(24)..(25): Xaa is A or G
  MOD_RES (26)..(27)..(28)..(29): Xaa is A or G or is absent
TVPKPXXAPTQLRSVKVAKVXXXXXXXXXKEVQVNMVVR

SEQ ID NO: 55243 - protein, 33 aa, Artificial Sequence; identical to SEQ ID NO: 19589
  GFR-binding peptide
  MOD_RES (14)..(15)..(16)..(17)..(18): Xaa is A or G
  MOD_RES (19)..(20)..(21)..(22): Xaa is A or G or is absent

SEQ ID NO: 55244 - protein, 36 aa, Artificial Sequence; identical to SEQ ID NO: 19591
  GFR-binding peptide
  MOD_RES (16)..(17)..(18)..(19)..(20): Xaa is A or G
  MOD_RES (21)..(22)..(23)..(24): Xaa is A or G or is absent

SEQ ID NO: 55245 - protein, 34 aa, Artificial Sequence; identical to SEQ ID NO: 16376
  GFR-binding peptide
  MOD_RES (2)..(34): Xaa is C or S

SEQ ID NO: 55246 - protein, 35 aa, Artificial Sequence; identical to SEQ ID NO: 16377
  GFR-binding peptide
  MOD_RES (4)..(5): Xaa is C or S

SEQ ID NO: 55247 - protein, 37 aa, Artificial Sequence
  GFR-binding peptide
  MOD_RES (4)..(4): Xaa is C or S
  MOD_RES (18)..(19)..(20)..(21)..(22): Xaa is A or G
  MOD_RES (23)..(24)..(25)..(26): Xaa is A or G or is absent
GLEXVPTEEEPLPMVYYXXXXXXXXXEQLSNFLQHNK

SEQ ID NO: 55248 - protein, 39 aa, Artificial Sequence
  GFR-binding peptide
  MOD_RES (4)..(5)..(38): Xaa is C or S
  MOD_RES (19)..(20)..(21)..(22)..(23): Xaa is A or G
  MOD_RES (24)..(25)..(26)..(27): Xaa is A or G or is absent
ASPXXVPQDLRSVKIAKVXXXXXXXXXKEVQVMVVKSXK

SEQ ID NO: 55249 - protein, 37 aa, Artificial Sequence
  GFR-binding peptide
  MOD_RES (4)..(5): Xaa is C or S
  MOD_RES (19)..(20)..(21)..(22)..(23): Xaa is A or G
  MOD_RES (24)..(25)..(26)..(27): Xaa is A or G or is absent
ASPXXVSQDLSNITIQIMXXXXXXXXXIGEMSMIVKS

SEQ ID NO: 55250 - protein, 42 aa, Artificial Sequence; identical to SEQ ID NO: 19597
  GFR-binding peptide
  MOD_RES (2)..(39)..(41): Xaa is C or S
  MOD_RES (18)..(19)..(20)..(21)..(22): Xaa is A or G
  MOD_RES (23)..(24)..(25)..(26): Xaa is A or G or is absent

SEQ ID NO: 55251 - protein, 31 aa, Artificial Sequence
  GFR-binding peptide
APTKLSNITVQIMDDSSNVIIGEMSNMVVRS

SEQ ID NO: 55252 - protein, 33 aa, Artificial Sequence; identical to SEQ ID NO: 16380
  GFR-binding peptide
  MOD_RES (14)..(15)..(16)..(17)..(18): Xaa is A or G
  MOD_RES (19)..(20)..(21)..(22): Xaa is A or G or is absent

SEQ ID NO: 55253 - protein, 40 aa, Artificial Sequence
  GFR-binding peptide
  MOD_RES (2)..(3)..(37)..(39): Xaa is C or S
  MOD_RES (17)..(18)..(19)..(20)..(21): Xaa is A or G
  MOD_RES (22)..(23)..(24)..(25): Xaa is A or G or is absent
AXXVPTELSNITMQIMXXXXXXXXXIGEMSDMVVEGXGXR

SEQ ID NO: 55254 - protein, 37 aa, Artificial Sequence
  GFR-binding peptide
  MOD_RES (1)..(2)..(35)..(37): Xaa is C or S
  MOD_RES (16)..(17)..(18)..(19)..(20): Xaa is A or G
  MOD_RES (21)..(22)..(23)..(24): Xaa is A or G or is absent
XXVPQALSNITIQIMXXXXXXXXXIGEMSMIVRSXKX

SEQ ID NO: 55255 - protein, 38 aa, Artificial Sequence
  GFR-binding peptide
  MOD_RES (2)..(36)..(38): Xaa is C or S
  MOD_RES (16)..(17)..(18)..(19)..(20): Xaa is A or G
  MOD_RES (21)..(22)..(23)..(24): Xaa is A or G or is absent
TXAPTKLSNITVQIMXXXXXXXXXIGEMSNMVVRSXGX

SEQ ID NO: 55256 - protein, 38 aa, Artificial Sequence
  GFR-binding peptide
  MOD_RES (5)..(6): Xaa is C or S
  MOD_RES (20)..(21)..(22)..(23)..(24): Xaa is A or G
  MOD_RES (25)..(26)..(27)..(28): Xaa is A or G or is absent
SAAPXXVPQALSNITIQIMXXXXXXXXXIGEMSMIVRS

SEQ ID NO: 55257 - protein, 41 aa, Artificial Sequence
  GFR-binding peptide
  MOD_RES (6)..(38)..(40): Xaa is C or S
VTKPTXAPTKLRPVQVRKIDDSSNVIKKATVNMVVRSXGXH

SEQ ID NO: 55258 - protein, 37 aa, Artificial Sequence
  GFR-binding peptide
  MOD_RES (3)..(4)..(36): Xaa is C or S
KPXXAPTKLSNITVQIMDDSSNVIIGEMSNMVVRSXG

SEQ ID NO: 55259 - protein, 38 aa, Artificial Sequence; identical to SEQ ID NO: 19598
  GFR-binding peptide
  MOD_RES (4)..(4): Xaa is C or S
  MOD_RES (20)..(21)..(22)..(23)..(24): Xaa is A or G
  MOD_RES (25)..(26)..(27)..(28): Xaa is A or G or is absent

SEQ ID NO: 55260 - protein, 39 aa, Artificial Sequence; identical to SEQ ID NO: 16386
  GFR-binding peptide
  MOD_RES (2)..(3)..(37)..(39): Xaa is C or S
  MOD_RES (17)..(18)..(19)..(20)..(21): Xaa is A or G
  MOD_RES (22)..(23)..(24)..(25): Xaa is A or G or is absent

SEQ ID NO: 55261 - protein, 35 aa, Artificial Sequence
  GFR-binding peptide
  MOD_RES (1)..(2): Xaa is C or S
  MOD_RES (16)..(17)..(18)..(19)..(20): Xaa is A or G
  MOD_RES (21)..(22)..(23)..(24): Xaa is A or G or is absent
XXVPTELSNITMQIMXXXXXXXXXIGEMSDMVVEG

SEQ ID NO: 55262 - protein, 39 aa, Artificial Sequence
  GFR-binding peptide
  MOD_RES (1)..(2)..(36)..(38): Xaa is C or S
  MOD_RES (16)..(17)..(18)..(19)..(20): Xaa is A or G
  MOD_RES (21)..(22)..(23)..(24): Xaa is A or G or is absent
XXVPTELRSVKMAKVXXXXXXXXXKEVQVDMVVEGXGXR

SEQ ID NO: 55263 - protein, 36 aa, Artificial Sequence
  GFR-binding peptide
  MOD_RES (1)..(2)..(33)..(35): Xaa is C or S
XXVPQDLRSVKIAKVVGRTPKVKEVQVMVVKSXKXS

SEQ ID NO: 55264 - protein, 32 aa, Artificial Sequence
  GFR-binding peptide
  MOD_RES (1)..(2): Xaa is C or S
XXVPTELRSVKMAKVDENEKVVKEVQVDMVVE

SEQ ID NO: 55265 - protein, 38 aa, Artificial Sequence
  GFR-binding peptide
  MOD_RES (3)..(4)..(38): Xaa is C or S
  MOD_RES (18)..(19)..(20)..(21)..(22): Xaa is A or G
  MOD_RES (23)..(24)..(25)..(26): Xaa is A or G or is absent
KPXXAPTKLSNITVQIMXXXXXXXXXIGEMSNMVVRSX

SEQ ID NO: 55266 - protein, 32 aa, Artificial Sequence
  GFR-binding peptide
  MOD_RES (31)..(31): Xaa is C or S
VSQDLRSVKIAKVIGKTPKIKEVQVMIVKSXK

SEQ ID NO: 55267 - protein, 34 aa, Artificial Sequence
  GFR-binding peptide
  MOD_RES (2)..(3): Xaa is C or S
AXXVPTELRSVKMAKVDENEKVVKEVQVDMVVEG

SEQ ID NO: 55268 - protein, 36 aa, Artificial Sequence; identical to SEQ ID NO: 16395
  GFR-binding peptide
  MOD_RES (34)..(36): Xaa is C or S
  MOD_RES (14)..(15)..(16)..(17)..(18): Xaa is A or G
  MOD_RES (19)..(20)..(21)..(22): Xaa is A or G or is absent

SEQ ID NO: 55269 - protein, 36 aa, Artificial Sequence; identical to SEQ ID NO: 16396
  GFR-binding peptide
  MOD_RES (5)..(6): Xaa is C or S

SEQ ID NO: 55270 - protein, 39 aa, Artificial Sequence
  GFR-binding peptide
  MOD_RES (3)..(4)..(36)..(38): Xaa is C or S
KAXXVPTELSNITMQIMDENEKVVIGEMSDMVVEGXGXR

SEQ ID NO: 55271 - protein, 35 aa, Artificial Sequence
  GFR-binding peptide
  MOD_RES (1)..(34): Xaa is C or S
  MOD_RES (15)..(16)..(17)..(18)..(19): Xaa is A or G
  MOD_RES (20)..(21)..(22)..(23): Xaa is A or G or is absent
XVPQDLRSVKIAKVXXXXXXXXXKEVQVMVVKSXK

SEQ ID NO: 55272 - protein, 39 aa, Artificial Sequence
  GFR-binding peptide
  MOD_RES (2)..(3)..(37)..(39): Xaa is C or S
  MOD_RES (17)..(18)..(19)..(20)..(21): Xaa is A or G
  MOD_RES (22)..(23)..(24)..(25): Xaa is A or G or is absent
PXXAPTQLSNITVQIMXXXXXXXXXIGEMSNMVVRAXGX

SEQ ID NO: 55273 - protein, 33 aa, Artificial Sequence; identical to SEQ ID NO: 16399
  GFR-binding peptide
  MOD_RES (2)..(2): Xaa is C or S

SEQ ID NO: 55274 - protein, 40 aa, Artificial Sequence
  GFR-binding peptide
  MOD_RES (2)..(3)..(37)..(39): Xaa is C or S
  MOD_RES (17)..(18)..(19)..(20)..(21): Xaa is A or G
  MOD_RES (22)..(23)..(24)..(25): Xaa is A or G or is absent
PXXAPTQLRSVKVAKVXXXXXXXXXKEVQVNMVVRAXGXH

SEQ ID NO: 55275 - protein, 40 aa, Artificial Sequence
  GFR-binding peptide
  MOD_RES (2)..(39): Xaa is C or S
  MOD_RES (18)..(19)..(20)..(21)..(22): Xaa is A or G
  MOD_RES (23)..(24)..(25)..(26): Xaa is A or G or is absent
KXQPSRVHHEPLPVVYYXXXXXXXXXEQLSNRLEEHLEXA

SEQ ID NO: 55276 - protein, 40 aa, Artificial Sequence; identical to SEQ ID NO: 19604
  GFR-binding peptide
  MOD_RES (4)..(38)..(40): Xaa is C or S

SEQ ID NO: 55277 - protein, 44 aa, Artificial Sequence
  GFR-binding peptide
  MOD_RES (5)..(42)..(44): Xaa is C or S
  MOD_RES (21)..(22)..(23)..(24)..(25): Xaa is A or G
  MOD_RES (26)..(27)..(28)..(29): Xaa is A or G or is absent
RNVQXRPTQVQLEPLPVVYYXXXXXXXXXEQLSNTLEDHLAXKX

SEQ ID NO: 55278 - protein, 32 aa, Artificial Sequence
  GFR-binding peptide
  MOD_RES (1)..(2): Xaa is C or S
XXVPTELRSVKMAKVDEYDKVVKEVQVEMVVE

SEQ ID NO: 55279 - protein, 37 aa, Artificial Sequence
  GFR-binding peptide
  MOD_RES (7)..(7): Xaa is C or S
HVTKPTXAPTKLSNITVQIMDDSSNVIIGEMSNMVVR

SEQ ID NO: 55280 - protein, 36 aa, Artificial Sequence; identical to SEQ ID NO: 16400
  GFR-binding peptide
  MOD_RES (4)..(36): Xaa is C or S

SEQ ID NO: 55281 - protein, 40 aa, Artificial Sequence
  GFR-binding peptide
  MOD_RES (4)..(5)..(37)..(39): Xaa is C or S
PKAXXVPTELSNITMQIMDENEKVVIGEMSDMVVEGXGXR

SEQ ID NO: 55282 - protein, 35 aa, Artificial Sequence
  GFR-binding peptide
  MOD_RES (2)..(3): Xaa is C or S
  MOD_RES (17)..(18)..(19)..(20)..(21): Xaa is A or G
  MOD_RES (22)..(23)..(24)..(25): Xaa is A or G or is absent
AXXVPTELRSVKMAKVXXXXXXXXXKEVQVEMVVE

SEQ ID NO: 55283 - protein, 41 aa, Artificial Sequence
  GFR-binding peptide
  MOD_RES (5)..(6)..(40): Xaa is C or S
  MOD_RES (20)..(21)..(22)..(23)..(24): Xaa is A or G
  MOD_RES (25)..(26)..(27)..(28): Xaa is A or G or is absent
VPKPXXAPTKLRPVQVRKIXXXXXXXXXKKATVNMVVRSXG

SEQ ID NO: 55284 - protein, 34 aa, Artificial Sequence
  GFR-binding peptide
  MOD_RES (2)..(2): Xaa is C or S
  MOD_RES (16)..(17)..(18)..(19)..(20): Xaa is A or G
  MOD_RES (21)..(22)..(23)..(24): Xaa is A or G or is absent
EXVPTEEEPLTMLYYXXXXXXXXXEQLSNFLQHN

SEQ ID NO: 55285 - protein, 38 aa, Artificial Sequence; identical to SEQ ID NO: 19608
  GFR-binding peptide
  MOD_RES (37)..(37): Xaa is C or S

SEQ ID NO: 55286 - protein, 34 aa, Artificial Sequence
  GFR-binding peptide
  MOD_RES (3)..(4): Xaa is C or S
APXXVPQALRPVQIRKIVGRKPKVKKATVMIVRS

SEQ ID NO: 55287 - protein, 38 aa, Artificial Sequence; identical to SEQ ID NO: 16404
  GFR-binding peptide
  MOD_RES (5)..(37): Xaa is C or S

SEQ ID NO: 55288 - protein, 36 aa, Artificial Sequence
  GFR-binding peptide
  MOD_RES (3)..(4): Xaa is C or S
  MOD_RES (18)..(19)..(20)..(21)..(22): Xaa is A or G
  MOD_RES (23)..(24)..(25)..(26): Xaa is A or G or is absent
APXXVPQALRSVKIAKVXXXXXXXXXKEVQVMIVRS

SEQ ID NO: 55289 - protein, 37 aa, Artificial Sequence
  GFR-binding peptide
  MOD_RES (2)..(3)..(37): Xaa is C or S
  MOD_RES (17)..(18)..(19)..(20)..(21): Xaa is A or G
  MOD_RES (22)..(23)..(24)..(25): Xaa is A or G or is absent
PXXAPTQLSNITVQIMXXXXXXXXXIGEMSNMVVRAX

SEQ ID NO: 55290 - protein, 33 aa, Artificial Sequence
  GFR-binding peptide
  MOD_RES (2)..(3): Xaa is C or S
PXXAPTKLRSVKVAKVDDSSNVIKEVQVNMVVR

SEQ ID NO: 55291 - protein, 36 aa, Artificial Sequence
  GFR-binding peptide
  MOD_RES (1)..(34)..(36): Xaa is C or S
  MOD_RES (15)..(16)..(17)..(18)..(19): Xaa is A or G
  MOD_RES (20)..(21)..(22)..(23): Xaa is A or G or is absent
XVPQALSNITIQIMXXXXXXXXXIGEMSMIVRSXKX

SEQ ID NO: 55292 - protein, 34 aa, Artificial Sequence; identical to SEQ ID NO: 19615
  GFR-binding peptide
  MOD_RES (2)..(2): Xaa is C or S

SEQ ID NO: 55293 - protein, 33 aa, Artificial Sequence
  GFR-binding peptide
  MOD_RES (14)..(15)..(16)..(17)..(18): Xaa is A or G
  MOD_RES (19)..(20)..(21)..(22): Xaa is A or G or is absent
SRVHHEPLTVLYYXXXXXXXXXEQLSNRLEEHL

SEQ ID NO: 55294 - protein, 38 aa, Artificial Sequence; identical to SEQ ID NO: 19616
  GFR-binding peptide
  MOD_RES (36)..(38): Xaa is C or S
  MOD_RES (15)..(16)..(17)..(18)..(19): Xaa is A or G
  MOD_RES (20)..(21)..(22)..(23): Xaa is A or G or is absent

SEQ ID NO: 55295 - protein, 37 aa, Artificial Sequence
  GFR-binding peptide
  MOD_RES (6)..(7): Xaa is C or S
KIPKAXXVPTELSNITMQIMDENEKVVIGEMSDMVVE

SEQ ID NO: 55296 - protein, 40 aa, Artificial Sequence; identical to SEQ ID NO: 16410
  GFR-binding peptide
  MOD_RES (5)..(6)..(38)..(40): Xaa is C or S

SEQ ID NO: 55297 - protein, 33 aa, Artificial Sequence
  GFR-binding peptide
  MOD_RES (33)..(33): Xaa is C or S
  MOD_RES (14)..(15)..(16)..(17)..(18): Xaa is A or G
  MOD_RES (19)..(20)..(21)..(22): Xaa is A or G or is absent
VSQDLRPVQIRKIXXXXXXXXXKKATVMIVKSX

SEQ ID NO: 55298 - protein, 33 aa, Artificial Sequence; identical to SEQ ID NO: 16413
  GFR-binding peptide
  MOD_RES (14)..(15)..(16)..(17)..(18): Xaa is A or G
  MOD_RES (19)..(20)..(21)..(22): Xaa is A or G or is absent

SEQ ID NO: 55299 - protein, 33 aa, Artificial Sequence; identical to SEQ ID NO: 19621
  GFR-binding peptide

SEQ ID NO: 55300 - protein, 39 aa, Artificial Sequence; identical to SEQ ID NO: 19622
  GFR-binding peptide
  MOD_RES (6)..(6): Xaa is C or S
  MOD_RES (20)..(21)..(22)..(23)..(24): Xaa is A or G
  MOD_RES (25)..(26)..(27)..(28): Xaa is A or G or is absent

SEQ ID NO: 55301 - protein, 39 aa, Artificial Sequence
  GFR-binding peptide
  MOD_RES (4)..(4): Xaa is C or S
  MOD_RES (20)..(21)..(22)..(23)..(24): Xaa is A or G
  MOD_RES (25)..(26)..(27)..(28): Xaa is A or G or is absent
SVKXQPSRVHHEPLPVVYYXXXXXXXXXEQLSNRLEEHL

SEQ ID NO: 55302 - protein, 39 aa, Artificial Sequence; identical to SEQ ID NO: 16416
  GFR-binding peptide
  MOD_RES (5)..(6)..(39): Xaa is C or S
  MOD_RES (20)..(21)..(22)..(23)..(24): Xaa is A or G
  MOD_RES (25)..(26)..(27)..(28): Xaa is A or G or is absent

SEQ ID NO: 55303 - protein, 40 aa, Artificial Sequence
  GFR-binding peptide
  MOD_RES (5)..(6)..(38)..(40): Xaa is C or S
IPKAXXVPTELRPVQMRKIDENEKVVKKATVDMVVEGXGX

SEQ ID NO: 55304 - protein, 38 aa, Artificial Sequence; identical to SEQ ID NO: 16419
  GFR-binding peptide
  MOD_RES (4)..(5)..(36)..(38): Xaa is C or S

SEQ ID NO: 55305 - protein, 38 aa, Artificial Sequence
  GFR-binding peptide
  MOD_RES (4)..(5)..(36)..(38): Xaa is C or S
ASPXXVSQDLRPVQIRKIIGKTPKIKKATVMIVKSXKX

SEQ ID NO: 55306 - protein, 36 aa, Artificial Sequence
  GFR-binding peptide
  MOD_RES (4)..(4): Xaa is C or S
  MOD_RES (18)..(19)..(20)..(21)..(22): Xaa is A or G
  MOD_RES (23)..(24)..(25)..(26): Xaa is A or G or is absent
KPTXAPTKLRPVQVRKIXXXXXXXXXKKATVNMVVR

SEQ ID NO: 55307 - protein, 39 aa, Artificial Sequence
  GFR-binding peptide
  MOD_RES (4)..(5)..(38): Xaa is C or S
  MOD_RES (19)..(20)..(21)..(22)..(23): Xaa is A or G
  MOD_RES (24)..(25)..(26)..(27): Xaa is A or G or is absent
ASPXXVPQDLRPVQIRKIXXXXXXXXXKKATVMVVKSXK

SEQ ID NO: 55308 - protein, 38 aa, Artificial Sequence
  GFR-binding peptide
  MOD_RES (3)..(4)..(38): Xaa is C or S
  MOD_RES (18)..(19)..(20)..(21)..(22): Xaa is A or G
  MOD_RES (23)..(24)..(25)..(26): Xaa is A or G or is absent
KAXXVPTELRSVKMAKVXXXXXXXXXKEVQVEMVVEGX

SEQ ID NO: 55309 - protein, 40 aa, Artificial Sequence
  GFR-binding peptide
  MOD_RES (4)..(5)..(39): Xaa is C or S
  MOD_RES (19)..(20)..(21)..(22)..(23): Xaa is A or G
  MOD_RES (24)..(25)..(26)..(27): Xaa is A or G or is absent
PKPXXAPTKLRSVKVAKVXXXXXXXXXKEVQVNMVVRSXG

SEQ ID NO: 55310 - protein, 37 aa, Artificial Sequence; identical to SEQ ID NO: 16424
  GFR-binding peptide
  MOD_RES (4)..(5)..(37): Xaa is C or S

SEQ ID NO: 55311 - protein, 36 aa, Artificial Sequence
  GFR-binding peptide
  MOD_RES (36)..(36): Xaa is C or S
PTQVQLEPLPVVYYEIVRKKPIFEQLSNTLEDHLAX

SEQ ID NO: 55312 - protein, 34 aa, Artificial Sequence
  GFR-binding peptide
  MOD_RES (1)..(2)..(33): Xaa is C or S
XXVSQDLRPVQIRKIIGKTPKIKKATVMIVKSXK

SEQ ID NO: 55313 - protein, 35 aa, Artificial Sequence; identical to SEQ ID NO: 19626
  GFR-binding peptide
  MOD_RES (35)..(35): Xaa is C or S
  MOD_RES (14)..(15)..(16)..(17)..(18): Xaa is A or G
  MOD_RES (19)..(20)..(21)..(22): Xaa is A or G or is absent

SEQ ID NO: 55314 - protein, 39 aa, Artificial Sequence
  GFR-binding peptide
  MOD_RES (5)..(6)..(39): Xaa is C or S
  MOD_RES (20)..(21)..(22)..(23)..(24): Xaa is A or G
  MOD_RES (25)..(26)..(27)..(28): Xaa is A or G or is absent
SAAPXXVPQALRPVQIRKIXXXXXXXXXKKATVMIVRSX

SEQ ID NO: 55315 - protein, 43 aa, Artificial Sequence
  GFR-binding peptide
  MOD_RES (3)..(40)..(42): Xaa is C or S
  MOD_RES (19)..(20)..(21)..(22)..(23): Xaa is A or G
  MOD_RES (24)..(25)..(26)..(27): Xaa is A or G or is absent
VQXRPTQVQLEPLTVLYYXXXXXXXXXEQLSNTLEDHLAXKXE

SEQ ID NO: 55316 - protein, 36 aa, Artificial Sequence; identical to SEQ ID NO: 16427
  GFR-binding peptide
  MOD_RES (2)..(3): Xaa is C or S
  MOD_RES (17)..(18)..(19)..(20)..(21): Xaa is A or G
  MOD_RES (22)..(23)..(24)..(25): Xaa is A or G or is absent

SEQ ID NO: 55317 - protein, 39 aa, Artificial Sequence
  GFR-binding peptide
  MOD_RES (5)..(6)..(39): Xaa is C or S
  MOD_RES (20)..(21)..(22)..(23)..(24): Xaa is A or G
  MOD_RES (25)..(26)..(27)..(28): Xaa is A or G or is absent
SASPXXVSQDLRSVKIAKVXXXXXXXXXKEVQVMIVKSX

SEQ ID NO: 55318 - protein, 32 aa, Artificial Sequence
  GFR-binding peptide
  MOD_RES (31)..(31): Xaa is C or S
VSQDLRPVQIRKIIGKTPKIKKATVMIVKSXK

SEQ ID NO: 55319 - protein, 35 aa, Artificial Sequence; identical to SEQ ID NO: 16429
  GFR-binding peptide
  MOD_RES (34)..(34): Xaa is C or S
  MOD_RES (14)..(15)..(16)..(17)..(18): Xaa is A or G
  MOD_RES (19)..(20)..(21)..(22): Xaa is A or G or is absent

SEQ ID NO: 55320 - protein, 36 aa, Artificial Sequence; identical to SEQ ID NO: 40280
  GFR-binding peptide
  MOD_RES (3)..(4): Xaa is C or S
  MOD_RES (18)..(19)..(20)..(21)..(22): Xaa is A or G
  MOD_RES (23)..(24)..(25)..(26): Xaa is A or G or is absent

SEQ ID NO: 55321 - protein, 42 aa, Artificial Sequence; identical to SEQ ID NO: 16431
  GFR-binding peptide
  MOD_RES (7)..(41): Xaa is C or S
  MOD_RES (21)..(22)..(23)..(24)..(25): Xaa is A or G
  MOD_RES (26)..(27)..(28)..(29): Xaa is A or G or is absent

SEQ ID NO: 55322 - protein, 38 aa, Artificial Sequence; identical to SEQ ID NO: 16433
  GFR-binding peptide
  MOD_RES (6)..(7): Xaa is C or S

SEQ ID NO: 55323 - protein, 39 aa, Artificial Sequence; identical to SEQ ID NO: 16434
  GFR-binding peptide
  MOD_RES (6)..(7): Xaa is C or S
  MOD_RES (21)..(22)..(23)..(24)..(25): Xaa is A or G
  MOD_RES (26)..(27)..(28)..(29): Xaa is A or G or is absent

SEQ ID NO: 55324 - protein, 43 aa, Artificial Sequence; identical to SEQ ID NO: 19630
  GFR-binding peptide
  MOD_RES (5)..(42): Xaa is C or S
  MOD_RES (21)..(22)..(23)..(24)..(25): Xaa is A or G
  MOD_RES (26)..(27)..(28)..(29): Xaa is A or G or is absent

SEQ ID NO: 55325 - protein, 40 aa, Artificial Sequence; identical to SEQ ID NO: 16435
  GFR-binding peptide
  MOD_RES (5)..(6)..(40): Xaa is C or S
  MOD_RES (20)..(21)..(22)..(23)..(24): Xaa is A or G
  MOD_RES (25)..(26)..(27)..(28): Xaa is A or G or is absent

SEQ ID NO: 55326 - protein, 35 aa, Artificial Sequence
  GFR-binding peptide
  MOD_RES (1)..(35): Xaa is C or S
  MOD_RES (15)..(16)..(17)..(18)..(19): Xaa is A or G
  MOD_RES (20)..(21)..(22)..(23): Xaa is A or G or is absent
XAPTKLRPVQVRKIXXXXXXXXXKKATVNMVVRSX

SEQ ID NO: 55327 - protein, 37 aa, Artificial Sequence
  GFR-binding peptide
  MOD_RES (2)..(3)..(35)..(37): Xaa is C or S
PXXAPTQLRPVQVRKIDDSSNVIKKATVNMVVRAXGX

SEQ ID NO: 55328 - protein, 35 aa, Artificial Sequence
  GFR-binding peptide
  MOD_RES (2)..(3)..(34): Xaa is C or S
PXXVSQDLSNITIQIMIGKTPKIIGEMSMIVKSXK

SEQ ID NO: 55329 - protein, 39 aa, Artificial Sequence
  GFR-binding peptide
  MOD_RES (5)..(39): Xaa is C or S
  MOD_RES (19)..(20)..(21)..(22)..(23): Xaa is A or G
  MOD_RES (24)..(25)..(26)..(27): Xaa is A or G or is absent
TKPTXAPTKLRPVQVRKIXXXXXXXXXKKATVNMVVRSX

SEQ ID NO: 55330 - protein, 36 aa, Artificial Sequence; identical to SEQ ID NO: 19636
  GFR-binding peptide
  MOD_RES (34)..(36): Xaa is C or S
  MOD_RES (14)..(15)..(16)..(17)..(18): Xaa is A or G
  MOD_RES (19)..(20)..(21)..(22): Xaa is A or G or is absent

SEQ ID NO: 55331 - protein, 37 aa, Artificial Sequence; identical to SEQ ID NO: 16440
  GFR-binding peptide
  MOD_RES (4)..(5)..(37): Xaa is C or S

SEQ ID NO: 55332 - protein, 38 aa, Artificial Sequence
  GFR-binding peptide
  MOD_RES (3)..(4)..(37): Xaa is C or S
  MOD_RES (18)..(19)..(20)..(21)..(22): Xaa is A or G
  MOD_RES (23)..(24)..(25)..(26): Xaa is A or G or is absent
SPXXVSQDLSNITIQIMXXXXXXXXXIGEMSMIVKSXK

SEQ ID NO: 55333 - protein, 38 aa, Artificial Sequence; identical to SEQ ID NO: 16443
  GFR-binding peptide
  MOD_RES (5)..(6)..(38): Xaa is C or S

SEQ ID NO: 55334 - protein, 38 aa, Artificial Sequence
  GFR-binding peptide
  MOD_RES (3)..(4)..(38): Xaa is C or S
  MOD_RES (18)..(19)..(20)..(21)..(22): Xaa is A or G
  MOD_RES (23)..(24)..(25)..(26): Xaa is A or G or is absent
KPXXAPTQLRPVQVRKIXXXXXXXXXKKATVNMVVRAX

SEQ ID NO: 55335 - protein, 38 aa, Artificial Sequence; identical to SEQ ID NO: 16448
  GFR-binding peptide
  MOD_RES (4)..(5)..(38): Xaa is C or S
  MOD_RES (19)..(20)..(21)..(22)..(23): Xaa is A or G
  MOD_RES (24)..(25)..(26)..(27): Xaa is A or G or is absent

SEQ ID NO: 55336 - protein, 42 aa, Artificial Sequence
  GFR-binding peptide
  MOD_RES (6)..(7)..(40)..(42): Xaa is C or S
  MOD_RES (21)..(22)..(23)..(24)..(25): Xaa is A or G
  MOD_RES (26)..(27)..(28)..(29): Xaa is A or G or is absent
ASASPXXVPQDLSNITIQIMXXXXXXXXXIGEMSMVVKSXKX

SEQ ID NO: 55337 - protein, 38 aa, Artificial Sequence; identical to SEQ ID NO: 19642
  GFR-binding peptide
  MOD_RES (6)..(6): Xaa is C or S

SEQ ID NO: 55338 - protein, 34 aa, Artificial Sequence
  GFR-binding peptide
  MOD_RES (1)..(2): Xaa is C or S
  MOD_RES (16)..(17)..(18)..(19)..(20): Xaa is A or G
  MOD_RES (21)..(22)..(23)..(24): Xaa is A or G or is absent
XXVSQDLSNITIQIMXXXXXXXXXIGEMSMIVKS

SEQ ID NO: 55339 - protein, 39 aa, Artificial Sequence
  GFR-binding peptide
  MOD_RES (2)..(3)..(37)..(39): Xaa is C or S
  MOD_RES (17)..(18)..(19)..(20)..(21): Xaa is A or G
  MOD_RES (22)..(23)..(24)..(25): Xaa is A or G or is absent
AXXVPTELRSVKMAKVXXXXXXXXXKEVQVEMVVEGXGX

SEQ ID NO: 55340 - protein, 36 aa, Artificial Sequence; identical to SEQ ID NO: 16452
  GFR-binding peptide
  MOD_RES (2)..(3)..(35): Xaa is C or S

SEQ ID NO: 55341 - protein, 32 aa, Artificial Sequence
  GFR-binding peptide
  MOD_RES (2)..(2): Xaa is C or S
TXAPTKLRPVQVRKIDDSSNVIKKATVNMVVR

SEQ ID NO: 55342 - protein, 34 aa, Artificial Sequence
  GFR-binding peptide
  MOD_RES (32)..(34): Xaa is C or S
VPTELSNITMQIMDEYDKVVIGEMSEMVVEGXGX

SEQ ID NO: 55343 - protein, 38 aa, Artificial Sequence
  GFR-binding peptide
  MOD_RES (5)..(6): Xaa is C or S
  MOD_RES (20)..(21)..(22)..(23)..(24): Xaa is A or G
  MOD_RES (25)..(26)..(27)..(28): Xaa is A or G or is absent
VPKPXXAPTKLSNITVQIMXXXXXXXXXIGEMSNMVVR

SEQ ID NO: 55344 - protein, 37 aa, Artificial Sequence
  GFR-binding peptide
  MOD_RES (1)..(1): Xaa is C or S
  MOD_RES (17)..(18)..(19)..(20)..(21): Xaa is A or G
  MOD_RES (22)..(23)..(24)..(25): Xaa is A or G or is absent
XQPSRVHHEPLTVLYYXXXXXXXXXEQLSNRLEEHLE

SEQ ID NO: 55345 - protein, 42 aa, Artificial Sequence
  GFR-binding peptide
  MOD_RES (6)..(40)..(42): Xaa is C or S
  MOD_RES (20)..(21)..(22)..(23)..(24): Xaa is A or G
  MOD_RES (25)..(26)..(27)..(28): Xaa is A or G or is absent
DEGLEXVPTEEEPLTMLYYXXXXXXXXXEQLSNFLQHNKXEX

SEQ ID NO: 55346 - protein, 38 aa, Artificial Sequence
  GFR-binding peptide
  MOD_RES (6)..(6): Xaa is C or S
  MOD_RES (20)..(21)..(22)..(23)..(24): Xaa is A or G
  MOD_RES (25)..(26)..(27)..(28): Xaa is A or G or is absent
DEGLEXVPTEEEPLTMLYYXXXXXXXXXEQLSNFLQHN

SEQ ID NO: 55347 - protein, 40 aa, Artificial Sequence
  GFR-binding peptide
  MOD_RES (4)..(5)..(37)..(39): Xaa is C or S
PKPXXAPTQLRPVQVRKIDDSSNVIKKATVNMVVRAXGXH

SEQ ID NO: 55348 - protein, 44 aa, Artificial Sequence; identical to SEQ ID NO: 19646
  GFR-binding peptide
  MOD_RES (4)..(41)..(43): Xaa is C or S
  MOD_RES (20)..(21)..(22)..(23)..(24): Xaa is A or G
  MOD_RES (25)..(26)..(27)..(28): Xaa is A or G or is absent

SEQ ID NO: 55349 - protein, 37 aa, Artificial Sequence
  GFR-binding peptide
  MOD_RES (2)..(3)..(37): Xaa is C or S
  MOD_RES (17)..(18)..(19)..(20)..(21): Xaa is A or G
  MOD_RES (22)..(23)..(24)..(25): Xaa is A or G or is absent
AXXVPTELRSVKMAKVXXXXXXXXXKEVQVDMVVEGX

SEQ ID NO: 55350 - protein, 34 aa, Artificial Sequence; identical to SEQ ID NO: 16457
  GFR-binding peptide
  MOD_RES (1)..(2): Xaa is C or S
  MOD_RES (16)..(17)..(18)..(19)..(20): Xaa is A or G
  MOD_RES (21)..(22)..(23)..(24): Xaa is A or G or is absent

SEQ ID NO: 55351 - protein, 38 aa, Artificial Sequence
  GFR-binding peptide
  MOD_RES (4)..(5)..(36)..(38): Xaa is C or S
ASPXXVSQDLRSVKIAKVIGKTPKIKEVQVMIVKSXKX

SEQ ID NO: 55352 - protein, 38 aa, Artificial Sequence
  GFR-binding peptide
  MOD_RES (1)..(2)..(36)..(38): Xaa is C or S
  MOD_RES (16)..(17)..(18)..(19)..(20): Xaa is A or G
  MOD_RES (21)..(22)..(23)..(24): Xaa is A or G or is absent
XXAPTQLRPVQVRKIXXXXXXXXXKKATVNMVVRAXGX

SEQ ID NO: 55353 - protein, 39 aa, Artificial Sequence
  GFR-binding peptide
  MOD_RES (5)..(6)..(38): Xaa is C or S
VPKPXXAPTQLRPVQVRKIDDSSNVIKKATVNMVVRAXG

SEQ ID NO: 55354 - protein, 43 aa, Artificial Sequence
  GFR-binding peptide
  MOD_RES (5)..(6)..(40)..(42): Xaa is C or S
  MOD_RES (20)..(21)..(22)..(23)..(24): Xaa is A or G
  MOD_RES (25)..(26)..(27)..(28): Xaa is A or G or is absent
IPKAXXVPTELRPVQMRKIXXXXXXXXXKKATVEMVVEGXGXR

SEQ ID NO: 55355 - protein, 36 aa, Artificial Sequence
  GFR-binding peptide
  MOD_RES (4)..(5): Xaa is C or S
PKAXXVPTELSNITMQIMDENEKVVIGEMSDMVVEG

SEQ ID NO: 55356 - protein, 31 aa, Artificial Sequence; identical to SEQ ID NO: 16461
  GFR-binding peptide

SEQ ID NO: 55357 - protein, 43 aa, Artificial Sequence; identical to SEQ ID NO: 16462
  GFR-binding peptide
  MOD_RES (6)..(7)..(40)..(42): Xaa is C or S
  MOD_RES (21)..(22)..(23)..(24)..(25): Xaa is A or G
  MOD_RES (26)..(27)..(28)..(29): Xaa is A or G or is absent

SEQ ID NO: 55358 - protein, 36 aa, Artificial Sequence; identical to SEQ ID NO: 19650
  GFR-binding peptide
  MOD_RES (36)..(36): Xaa is C or S
  MOD_RES (15)..(16)..(17)..(18)..(19): Xaa is A or G
  MOD_RES (20)..(21)..(22)..(23): Xaa is A or G or is absent

SEQ ID NO: 55359 - protein, 36 aa, Artificial Sequence
  GFR-binding peptide
  MOD_RES (1)..(34)..(36): Xaa is C or S
  MOD_RES (15)..(16)..(17)..(18)..(19): Xaa is A or G
  MOD_RES (20)..(21)..(22)..(23): Xaa is A or G or is absent
XVPQDLRPVQIRKIXXXXXXXXXKKATVMVVKSXKX

SEQ ID NO: 55360 - protein, 39 aa, Artificial Sequence; identical to SEQ ID NO: 16463
  GFR-binding peptide
  MOD_RES (6)..(7): Xaa is C or S
  MOD_RES (21)..(22)..(23)..(24)..(25): Xaa is A or G
  MOD_RES (26)..(27)..(28)..(29): Xaa is A or G or is absent

SEQ ID NO: 55361 - protein, 37 aa, Artificial Sequence
  GFR-binding peptide
  MOD_RES (4)..(5)..(36): Xaa is C or S
ASPXXVSQDLRPVQIRKIIGKTPKIKKATVMIVKSXK

SEQ ID NO: 55362 - protein, 38 aa, Artificial Sequence
  GFR-binding peptide
  MOD_RES (4)..(4): Xaa is C or S
NVQXRPTQVQLEPLTVLYYEIVRKKPIFEQLSNTLEDH

SEQ ID NO: 55363 - protein, 36 aa, Artificial Sequence
  GFR-binding peptide
  MOD_RES (35)..(35): Xaa is C or S
  MOD_RES (14)..(15)..(16)..(17)..(18): Xaa is A or G
  MOD_RES (19)..(20)..(21)..(22): Xaa is A or G or is absent
SRVHHEPLTVLYYXXXXXXXXXEQLSNRLEEHLEXA

SEQ ID NO: 55364 - protein, 44 aa, Artificial Sequence
  GFR-binding peptide
  MOD_RES (6)..(7)..(41)..(43): Xaa is C or S
  MOD_RES (21)..(22)..(23)..(24)..(25): Xaa is A or G
  MOD_RES (26)..(27)..(28)..(29): Xaa is A or G or is absent
TVPKPXXAPTQLRPVQVRKIXXXXXXXXXKKATVNMVVRAXGXH

SEQ ID NO: 55365 - protein, 36 aa, Artificial Sequence; identical to SEQ ID NO: 19652
  GFR-binding peptide
  MOD_RES (1)..(35): Xaa is C or S
  MOD_RES (15)..(16)..(17)..(18)..(19): Xaa is A or G
  MOD_RES (20)..(21)..(22)..(23): Xaa is A or G or is absent

SEQ ID NO: 55366 - protein, 35 aa, Artificial Sequence
  GFR-binding peptide
  MOD_RES (4)..(5): Xaa is C or S
ASPXXVPQDLRPVQIRKIVGRTPKVKKATVMVVKS

SEQ ID NO: 55367 - protein, 39 aa, Artificial Sequence
  GFR-binding peptide
  MOD_RES (3)..(4)..(36)..(38): Xaa is C or S
KAXXVPTELRSVKMAKVDEYDKVVKEVQVEMVVEGXGXR

SEQ ID NO: 55368 - protein, 43 aa, Artificial Sequence; identical to SEQ ID NO: 19658
  GFR-binding peptide
  MOD_RES (4)..(41)..(43): Xaa is C or S
  MOD_RES (20)..(21)..(22)..(23)..(24): Xaa is A or G
  MOD_RES (25)..(26)..(27)..(28): Xaa is A or G or is absent

SEQ ID NO: 55369 - protein, 31 aa, Artificial Sequence; identical to SEQ ID NO: 16470
  GFR-binding peptide
  MOD_RES (1)..(1): Xaa is C or S

SEQ ID NO: 55370 - protein, 38 aa, Artificial Sequence; identical to SEQ ID NO: 16471
  GFR-binding peptide
  MOD_RES (1)..(2)..(36)..(38): Xaa is C or S
  MOD_RES (16)..(17)..(18)..(19)..(20): Xaa is A or G
  MOD_RES (21)..(22)..(23)..(24): Xaa is A or G or is absent

SEQ ID NO: 55371 - protein, 36 aa, Artificial Sequence; identical to SEQ ID NO: 16472
  GFR-binding peptide
  MOD_RES (1)..(2)..(34)..(36): Xaa is C or S

SEQ ID NO: 55372 - protein, 41 aa, Artificial Sequence; identical to SEQ ID NO: 16473
  GFR-binding peptide
  MOD_RES (5)..(39)..(41): Xaa is C or S
  MOD_RES (19)..(20)..(21)..(22)..(23): Xaa is A or G
  MOD_RES (24)..(25)..(26)..(27): Xaa is A or G or is absent

SEQ ID NO: 55373 - protein, 36 aa, Artificial Sequence; identical to SEQ ID NO: 19661
  GFR-binding peptide
  MOD_RES (1)..(1): Xaa is C or S
  MOD_RES (17)..(18)..(19)..(20)..(21): Xaa is A or G
  MOD_RES (22)..(23)..(24)..(25): Xaa is A or G or is absent

SEQ ID NO: 55374 - protein, 39 aa, Artificial Sequence
  GFR-binding peptide
  MOD_RES (1)..(38): Xaa is C or S
XQPSRVHHEPLTVLYYEYVRKKPKLEQLSNRLEEHLEXA

SEQ ID NO: 55375 - protein, 42 aa, Artificial Sequence
  GFR-binding peptide
  MOD_RES (4)..(5)..(39)..(41): Xaa is C or S
  MOD_RES (19)..(20)..(21)..(22)..(23): Xaa is A or G
  MOD_RES (24)..(25)..(26)..(27): Xaa is A or G or is absent
PKPXXAPTKLRSVKVAKVXXXXXXXXXKEVQVNMVVRSXGXH

SEQ ID NO: 55376 - protein, 41 aa, Artificial Sequence
  GFR-binding peptide
  MOD_RES (7)..(41): Xaa is C or S
NDEGLEXVPTEEEPLPMVYYRIKPHQGQHEQLSNFLQHNKX

SEQ ID NO: 55377 - protein, 33 aa, Artificial Sequence
  GFR-binding peptide
  MOD_RES (14)..(15)..(16)..(17)..(18): Xaa is A or G
  MOD_RES (19)..(20)..(21)..(22): Xaa is A or G or is absent
TQVQLEPLTVLYYXXXXXXXXXEQLSNTLEDHL

SEQ ID NO: 55378 - protein, 45 aa, Artificial Sequence
  GFR-binding peptide
  MOD_RES (5)..(42)..(44): Xaa is C or S
SSVKXQPSRVHHEPLPVVYYEYVRKKPKLEQLSNRLEEHLEXAXA

SEQ ID NO: 55379 - protein, 37 aa, Artificial Sequence
  GFR-binding peptide
  MOD_RES (34)..(36): Xaa is C or S
  MOD_RES (14)..(15)..(16)..(17)..(18): Xaa is A or G
  MOD_RES (19)..(20)..(21)..(22): Xaa is A or G or is absent
APTKLSNITVQIMXXXXXXXXXIGEMSNMVVRSXGXH

SEQ ID NO: 55380 - protein, 40 aa, Artificial Sequence
  GFR-binding peptide
  MOD_RES (2)..(3)..(37)..(39): Xaa is C or S
  MOD_RES (17)..(18)..(19)..(20)..(21): Xaa is A or G
  MOD_RES (22)..(23)..(24)..(25): Xaa is A or G or is absent
AXXVPTELRPVQMRKIXXXXXXXXXKKATVEMVVEGXGXR

SEQ ID NO: 55381 - protein, 38 aa, Artificial Sequence
  GFR-binding peptide
  MOD_RES (6)..(7)..(38): Xaa is C or S
ASASPXXVPQDLSNITIQIMVGRTPKVIGEMSMVVKSX

SEQ ID NO: 55382 - protein, 32 aa, Artificial Sequence
  GFR-binding peptide
  MOD_RES (1)..(1): Xaa is C or S
XVPTELSNITMQIMDEYDKVVIGEMSEMVVEG

SEQ ID NO: 55383 - protein, 35 aa, Artificial Sequence
  GFR-binding peptide
  MOD_RES (34)..(34): Xaa is C or S
  MOD_RES (14)..(15)..(16)..(17)..(18): Xaa is A or G
  MOD_RES (19)..(20)..(21)..(22): Xaa is A or G or is absent
VPTELRPVQMRKIXXXXXXXXXKKATVEMVVEGXG

SEQ ID NO: 55384 - protein, 34 aa, Artificial Sequence; identical to SEQ ID NO: 16479
  GFR-binding peptide
  MOD_RES (2)..(3)..(34): Xaa is C or S

SEQ ID NO: 55385 - protein, 37 aa, Artificial Sequence
  GFR-binding peptide
  MOD_RES (1)..(1): Xaa is C or S
  MOD_RES (17)..(18)..(19)..(20)..(21): Xaa is A or G
  MOD_RES (22)..(23)..(24)..(25): Xaa is A or G or is absent
XRPTQVQLEPLTVLYYXXXXXXXXXEQLSNTLEDHLA

SEQ ID NO: 55386 - protein, 37 aa, Artificial Sequence
  GFR-binding peptide
  MOD_RES (3)..(4)..(35)..(37): Xaa is C or S
SPXXVSQDLRPVQIRKIIGKTPKIKKATVMIVKSXKX

SEQ ID NO: 55387 - protein, 40 aa, Artificial Sequence; identical to SEQ ID NO: 19672
  GFR-binding peptide
  MOD_RES (1)..(38)..(40): Xaa is C or S
  MOD_RES (17)..(18)..(19)..(20)..(21): Xaa is A or G
  MOD_RES (22)..(23)..(24)..(25): Xaa is A or G or is absent

SEQ ID NO: 55388 - protein, 39 aa, Artificial Sequence; identical to SEQ ID NO: 16483
  GFR-binding peptide
  MOD_RES (5)..(6)..(39): Xaa is C or S
  MOD_RES (20)..(21)..(22)..(23)..(24): Xaa is A or G
  MOD_RES (25)..(26)..(27)..(28): Xaa is A or G or is absent

SEQ ID NO: 55389 - protein, 44 aa, Artificial Sequence; identical to SEQ ID NO: 19673
  GFR-binding peptide
  MOD_RES (5)..(42)..(44): Xaa is C or S
  MOD_RES (21)..(22)..(23)..(24)..(25): Xaa is A or G
  MOD_RES (26)..(27)..(28)..(29): Xaa is A or G or is absent

SEQ ID NO: 55390 - protein, 37 aa, Artificial Sequence
  GFR-binding peptide
  MOD_RES (5)..(37): Xaa is C or S
TKPTXAPTKLRSVKVAKVDDSSNVIKEVQVNMVVRSX

SEQ ID NO: 55391 - protein, 41 aa, Artificial Sequence
  GFR-binding peptide
  MOD_RES (3)..(4)..(38)..(40): Xaa is C or S
  MOD_RES (18)..(19)..(20)..(21)..(22): Xaa is A or G
  MOD_RES (23)..(24)..(25)..(26): Xaa is A or G or is absent
KAXXVPTELSNITMQIMXXXXXXXXXIGEMSDMVVEGXGXR

SEQ ID NO: 55392 - protein, 36 aa, Artificial Sequence; identical to SEQ ID NO: 16484
  GFR-binding peptide
  MOD_RES (1)..(35): Xaa is C or S
  MOD_RES (15)..(16)..(17)..(18)..(19): Xaa is A or G
  MOD_RES (20)..(21)..(22)..(23): Xaa is A or G or is absent

SEQ ID NO: 55393 - protein, 37 aa, Artificial Sequence; identical to SEQ ID NO: 16486
  GFR-binding peptide
  MOD_RES (1)..(2)..(34)..(36): Xaa is C or S

SEQ ID NO: 55394 - protein, 34 aa, Artificial Sequence
  GFR-binding peptide
  MOD_RES (33)..(33): Xaa is C or S
  MOD_RES (14)..(15)..(16)..(17)..(18): Xaa is A or G
  MOD_RES (19)..(20)..(21)..(22): Xaa is A or G or is absent
VPQALRPVQIRKIXXXXXXXXXKKATVMIVRSXK

SEQ ID NO: 55395 - protein, 30 aa, Artificial Sequence
  GFR-binding peptide
APTKLSNITVQIMDDSSNVIIGEMSNMVVR

SEQ ID NO: 55396 - protein, 42 aa, Artificial Sequence
  GFR-binding peptide
  MOD_RES (5)..(39)..(41): Xaa is C or S
  MOD_RES (19)..(20)..(21)..(22)..(23): Xaa is A or G
  MOD_RES (24)..(25)..(26)..(27): Xaa is A or G or is absent
TKPTXAPTKLRPVQVRKIXXXXXXXXXKKATVNMVVRSXGXH

SEQ ID NO: 55397 - protein, 37 aa, Artificial Sequence; identical to SEQ ID NO: 16489
  GFR-binding peptide
  MOD_RES (1)..(2)..(36): Xaa is C or S
  MOD_RES (16)..(17)..(18)..(19)..(20): Xaa is A or G
  MOD_RES (21)..(22)..(23)..(24): Xaa is A or G or is absent

SEQ ID NO: 55398 - protein, 36 aa, Artificial Sequence
  GFR-binding peptide
  MOD_RES (5)..(6): Xaa is C or S
VPKPXXAPTKLRSVKVAKVDDSSNVIKEVQVNMVVR

SEQ ID NO: 55399 - protein, 38 aa, Artificial Sequence
  GFR-binding peptide
  MOD_RES (4)..(5)..(36)..(38): Xaa is C or S
ASPXXVPQDLRPVQIRKIVGRTPKVKKATVMVVKSXKX

SEQ ID NO: 55400 - protein, 38 aa, Artificial Sequence; identical to SEQ ID NO: 16491
  GFR-binding peptide
  MOD_RES (5)..(6)..(38): Xaa is C or S

SEQ ID NO: 55401 - protein, 35 aa, Artificial Sequence
  GFR-binding peptide
  MOD_RES (1)..(2)..(35): Xaa is C or S
  MOD_RES (16)..(17)..(18)..(19)..(20): Xaa is A or G
  MOD_RES (21)..(22)..(23)..(24): Xaa is A or G or is absent
XXVPQALSNITIQIMXXXXXXXXXIGEMSMIVRSX

SEQ ID NO: 55402 - protein, 42 aa, Artificial Sequence
  GFR-binding peptide
  MOD_RES (3)..(40)..(42): Xaa is C or S
VKXQPSRVHHEPLPVVYYEYVRKKPKLEQLSNRLEEHLEXAX

SEQ ID NO: 55403 - protein, 41 aa, Artificial Sequence
  GFR-binding peptide
  MOD_RES (6)..(7)..(39)..(41): Xaa is C or S
KIPKAXXVPTELRPVQMRKIDENEKVVKKATVDMVVEGXGX

SEQ ID NO: 55404 - protein, 34 aa, Artificial Sequence
  GFR-binding peptide
  MOD_RES (1)..(1): Xaa is C or S
  MOD_RES (15)..(16)..(17)..(18)..(19): Xaa is A or G
  MOD_RES (20)..(21)..(22)..(23): Xaa is A or G or is absent
XVPTELRSVKMAKVXXXXXXXXXKEVQVEMVVEG

SEQ ID NO: 55405 - protein, 39 aa, Artificial Sequence
  GFR-binding peptide
  MOD_RES (36)..(38): Xaa is C or S
  MOD_RES (15)..(16)..(17)..(18)..(19): Xaa is A or G
  MOD_RES (20)..(21)..(22)..(23): Xaa is A or G or is absent
PSRVHHEPLPVVYYXXXXXXXXXEQLSNRLEEHLEXAXA

SEQ ID NO: 55406 - protein, 44 aa, Artificial Sequence
  GFR-binding peptide
  MOD_RES (6)..(7)..(41)..(43): Xaa is C or S
  MOD_RES (21)..(22)..(23)..(24)..(25): Xaa is A or G
  MOD_RES (26)..(27)..(28)..(29): Xaa is A or G or is absent
SIPKAXXVPTELRPVQMRKIXXXXXXXXXKKATVEMVVEGXGXR

SEQ ID NO: 55407 - protein, 32 aa, Artificial Sequence
  GFR-binding peptide
  MOD_RES (31)..(31): Xaa is C or S
VSQDLSNITIQIMIGKTPKIIGEMSMIVKSXK

SEQ ID NO: 55408 - protein, 39 aa, Artificial Sequence; identical to SEQ ID NO: 16493
  GFR-binding peptide
  MOD_RES (2)..(3)..(36)..(38): Xaa is C or S
  MOD_RES (17)..(18)..(19)..(20)..(21): Xaa is A or G
  MOD_RES (22)..(23)..(24)..(25): Xaa is A or G or is absent

SEQ ID NO: 55409 - protein, 34 aa, Artificial Sequence; identical to SEQ ID NO: 16494
  GFR-binding peptide
  MOD_RES (1)..(33): Xaa is C or S

SEQ ID NO: 55410 - protein, 40 aa, Artificial Sequence
  GFR-binding peptide
  MOD_RES (5)..(6)..(39): Xaa is C or S
  MOD_RES (20)..(21)..(22)..(23)..(24): Xaa is A or G
  MOD_RES (25)..(26)..(27)..(28): Xaa is A or G or is absent
SASPXXVSQDLSNITIQIMXXXXXXXXXIGEMSMIVKSXK

SEQ ID NO: 55411 - protein, 36 aa, Artificial Sequence
  GFR-binding peptide
  MOD_RES (34)..(36): Xaa is C or S
  MOD_RES (14)..(15)..(16)..(17)..(18): Xaa is A or G
  MOD_RES (19)..(20)..(21)..(22): Xaa is A or G or is absent
APTQLSNITVQIMXXXXXXXXXIGEMSNMVVRAXGX

SEQ ID NO: 55412 - protein, 37 aa, Artificial Sequence
  GFR-binding peptide
  MOD_RES (3)..(37): Xaa is C or S
LEXVPTEEEPLPMVYYRIKPHQGQHEQLSNFLQHNKX

SEQ ID NO: 55413 - protein, 37 aa, Artificial Sequence; identical to SEQ ID NO: 19681
  GFR-binding peptide
  MOD_RES (2)..(36): Xaa is C or S
  MOD_RES (16)..(17)..(18)..(19)..(20): Xaa is A or G
  MOD_RES (21)..(22)..(23)..(24): Xaa is A or G or is absent

SEQ ID NO: 55414 - protein, 37 aa, Artificial Sequence
  GFR-binding peptide
  MOD_RES (2)..(3)..(34)..(36): Xaa is C or S
PXXVSQDLRPVQIRKIIGKTPKIKKATVMIVKSXKXS

SEQ ID NO: 55415 - protein, 35 aa, Artificial Sequence
  GFR-binding peptide
  MOD_RES (1)..(34): Xaa is C or S
  MOD_RES (15)..(16)..(17)..(18)..(19): Xaa is A or G
  MOD_RES (20)..(21)..(22)..(23): Xaa is A or G or is absent
XVSQDLRPVQIRKIXXXXXXXXXKKATVMIVKSXK

SEQ ID NO: 55416 - protein, 36 aa, Artificial Sequence
  GFR-binding peptide
  MOD_RES (5)..(6): Xaa is C or S
VPKPXXAPTKLSNITVQIMDDSSNVIIGEMSNMVVR

SEQ ID NO: 55417 - protein, 34 aa, Artificial Sequence
  GFR-binding peptide
  MOD_RES (1)..(33): Xaa is C or S
XVPTELRSVKMAKVDENEKVVKEVQVDMVVEGXG

SEQ ID NO: 55418 - protein, 38 aa, Artificial Sequence
  GFR-binding peptide
  MOD_RES (2)..(3)..(37): Xaa is C or S
  MOD_RES (17)..(18)..(19)..(20)..(21): Xaa is A or G
  MOD_RES (22)..(23)..(24)..(25): Xaa is A or G or is absent
AXXVPTELSNITMQIMXXXXXXXXXIGEMSEMVVEGXG

SEQ ID NO: 55419 - protein, 39 aa, Artificial Sequence
  GFR-binding peptide
  MOD_RES (5)..(37)..(39): Xaa is C or S
TKPTXAPTKLSNITVQIMDDSSNVIIGEMSNMVVRSXGX

SEQ ID NO: 55420 - protein, 37 aa, Artificial Sequence; identical to SEQ ID NO: 19684
  GFR-binding peptide
  MOD_RES (37)..(37): Xaa is C or S
  MOD_RES (16)..(17)..(18)..(19)..(20): Xaa is A or G
  MOD_RES (21)..(22)..(23)..(24): Xaa is A or G or is absent

SEQ ID NO: 55421 - protein, 37 aa, Artificial Sequence
  GFR-binding peptide
  MOD_RES (4)..(5)..(37): Xaa is C or S
PKPXXAPTQLRPVQVRKIDDSSNVIKKATVNMVVRAX

SEQ ID NO: 55422 - protein, 36 aa, Artificial Sequence; identical to SEQ ID NO: 16504
  GFR-binding peptide
  MOD_RES (2)..(3): Xaa is C or S
  MOD_RES (17)..(18)..(19)..(20)..(21): Xaa is A or G
  MOD_RES (22)..(23)..(24)..(25): Xaa is A or G or is absent

SEQ ID NO: 55423 - protein, 40 aa, Artificial Sequence
  GFR-binding peptide
  MOD_RES (2)..(3)..(37)..(39): Xaa is C or S
  MOD_RES (17)..(18)..(19)..(20)..(21): Xaa is A or G
  MOD_RES (22)..(23)..(24)..(25): Xaa is A or G or is absent
AXXVPTELRSVKMAKVXXXXXXXXXKEVQVDMVVEGXGXR

SEQ ID NO: 55424 - protein, 39 aa, Artificial Sequence; identical to SEQ ID NO: 16506
  GFR-binding peptide
  MOD_RES (3)..(4)..(38): Xaa is C or S
  MOD_RES (18)..(19)..(20)..(21)..(22): Xaa is A or G
  MOD_RES (23)..(24)..(25)..(26): Xaa is A or G or is absent

SEQ ID NO: 55425 - protein, 43 aa, Artificial Sequence; identical to SEQ ID NO: 16507
  GFR-binding peptide
  MOD_RES (6)..(40)..(42): Xaa is C or S
  MOD_RES (20)..(21)..(22)..(23)..(24): Xaa is A or G
  MOD_RES (25)..(26)..(27)..(28): Xaa is A or G or is absent

SEQ ID NO: 55426 - protein, 37 aa, Artificial Sequence
  GFR-binding peptide
  MOD_RES (5)..(6)..(37): Xaa is C or S
SASPXXVSQDLSNITIQIMIGKTPKIIGEMSMIVKSX

SEQ ID NO: 55427 - protein, 40 aa, Artificial Sequence
  GFR-binding peptide
  MOD_RES (4)..(4): Xaa is C or S
SVKXQPSRVHHEPLTVLYYEYVRKKPKLEQLSNRLEEHLE

SEQ ID NO: 55428 - protein, 39 aa, Artificial Sequence; identical to SEQ ID NO: 19690
  GFR-binding peptide
  MOD_RES (5)..(5): Xaa is C or S

SEQ ID NO: 55429 - protein, 38 aa, Artificial Sequence; identical to SEQ ID NO: 19692
  GFR-binding peptide
  MOD_RES (37)..(37): Xaa is C or S

SEQ ID NO: 55430 - protein, 39 aa, Artificial Sequence; identical to SEQ ID NO: 16512
  GFR-binding peptide
  MOD_RES (5)..(6)..(38): Xaa is C or S

SEQ ID NO: 55431 - protein, 38 aa, Artificial Sequence; identical to SEQ ID NO: 16513
  GFR-binding peptide
  MOD_RES (4)..(5): Xaa is C or S
  MOD_RES (19)..(20)..(21)..(22)..(23): Xaa is A or G
  MOD_RES (24)..(25)..(26)..(27): Xaa is A or G or is absent

SEQ ID NO: 55432 - protein, 39 aa, Artificial Sequence; identical to SEQ ID NO: 19694
  GFR-binding peptide
  MOD_RES (2)..(39): Xaa is C or S
  MOD_RES (18)..(19)..(20)..(21)..(22): Xaa is A or G
  MOD_RES (23)..(24)..(25)..(26): Xaa is A or G or is absent

SEQ ID NO: 55433 - protein, 35 aa, Artificial Sequence; identical to SEQ ID NO: 19695
  GFR-binding peptide
  MOD_RES (1)..(35): Xaa is C or S
  MOD_RES (15)..(16)..(17)..(18)..(19): Xaa is A or G
  MOD_RES (20)..(21)..(22)..(23): Xaa is A or G or is absent

SEQ ID NO: 55434 - protein, 34 aa, Artificial Sequence
  GFR-binding peptide
  MOD_RES (15)..(16)..(17)..(18)..(19): Xaa is A or G
  MOD_RES (20)..(21)..(22)..(23): Xaa is A or G or is absent
PTQVQLEPLPVVYYXXXXXXXXXEQLSNTLEDHL

SEQ ID NO: 55435 - protein, 39 aa, Artificial Sequence; identical to SEQ ID NO: 19696
  GFR-binding peptide
  MOD_RES (5)..(5): Xaa is C or S

SEQ ID NO: 55436 - protein, 41 aa, Artificial Sequence
  GFR-binding peptide
  MOD_RES (6)..(7)..(41): Xaa is C or S
  MOD_RES (21)..(22)..(23)..(24)..(25): Xaa is A or G
  MOD_RES (26)..(27)..(28)..(29): Xaa is A or G or is absent
TVPKPXXAPTQLSNITVQIMXXXXXXXXXIGEMSNMVVRAX

SEQ ID NO: 55437 - protein, 34 aa, Artificial Sequence
  GFR-binding peptide
  MOD_RES (31)..(33): Xaa is C or S
VSQDLRSVKIAKVIGKTPKIKEVQVMIVKSXKXS

SEQ ID NO: 55438 - protein, 38 aa, Artificial Sequence; identical to SEQ ID NO: 16518
  GFR-binding peptide
  MOD_RES (1)..(2)..(36)..(38): Xaa is C or S
  MOD_RES (16)..(17)..(18)..(19)..(20): Xaa is A or G
  MOD_RES (21)..(22)..(23)..(24): Xaa is A or G or is absent

SEQ ID NO: 55439 - protein, 30 aa, Artificial Sequence
  GFR-binding peptide
VPQDLSNITIQIMVGRTPKVIGEMSMVVKS

SEQ ID NO: 55440 - protein, 40 aa, Artificial Sequence
  GFR-binding peptide
  MOD_RES (3)..(37)..(39): Xaa is C or S
  MOD_RES (17)..(18)..(19)..(20)..(21): Xaa is A or G
  MOD_RES (22)..(23)..(24)..(25): Xaa is A or G or is absent
LEXVPTEEEPLTMLYYXXXXXXXXXEQLSNFLQHNKXEXR

SEQ ID NO: 55441 - protein, 35 aa, Artificial Sequence; identical to SEQ ID NO: 16523
  GFR-binding peptide
  MOD_RES (1)..(34): Xaa is C or S
  MOD_RES (15)..(16)..(17)..(18)..(19): Xaa is A or G
  MOD_RES (20)..(21)..(22)..(23): Xaa is A or G or is absent

SEQ ID NO: 55442 - protein, 39 aa, Artificial Sequence; identical to SEQ ID NO: 16525
  GFR-binding peptide
  MOD_RES (6)..(7): Xaa is C or S
  MOD_RES (21)..(22)..(23)..(24)..(25): Xaa is A or G
  MOD_RES (26)..(27)..(28)..(29): Xaa is A or G or is absent

SEQ ID NO: 55443 - protein, 41 aa, Artificial Sequence
  GFR-binding peptide
  MOD_RES (4)..(41): Xaa is C or S
NVQXRPTQVQLEPLPVVYYEIVRKKPIFEQLSNTLEDHLAX

SEQ ID NO: 55444 - protein, 42 aa, Artificial Sequence; identical to SEQ ID NO: 19705
  GFR-binding peptide
  MOD_RES (7)..(41): Xaa is C or S

SEQ ID NO: 55445 - protein, 36 aa, Artificial Sequence
  GFR-binding peptide
  MOD_RES (1)..(35): Xaa is C or S
  MOD_RES (15)..(16)..(17)..(18)..(19): Xaa is A or G
  MOD_RES (20)..(21)..(22)..(23): Xaa is A or G or is absent
XVPTELRPVQMRKIXXXXXXXXXKKATVDMVVEGXG

SEQ ID NO: 55446 - protein, 34 aa, Artificial Sequence
  GFR-binding peptide
  MOD_RES (1)..(1): Xaa is C or S
  MOD_RES (15)..(16)..(17)..(18)..(19): Xaa is A or G
  MOD_RES (20)..(21)..(22)..(23): Xaa is A or G or is absent
XVPTELSNITMQIMXXXXXXXXXIGEMSDMVVEG

SEQ ID NO: 55447 - protein, 41 aa, Artificial Sequence
  GFR-binding peptide
  MOD_RES (6)..(7)..(39)..(41): Xaa is C or S
SIPKAXXVPTELRSVKMAKVDEYDKVVKEVQVEMVVEGXGX

SEQ ID NO: 55448 - protein, 35 aa, Artificial Sequence; identical to SEQ ID NO: 16528
  GFR-binding peptide
  MOD_RES (1)..(35): Xaa is C or S
  MOD_RES (15)..(16)..(17)..(18)..(19): Xaa is A or G
  MOD_RES (20)..(21)..(22)..(23): Xaa is A or G or is absent

SEQ ID NO: 55449 - protein, 34 aa, Artificial Sequence; identical to SEQ ID NO: 16531
  GFR-binding peptide
  MOD_RES (1)..(2)..(34): Xaa is C or S

SEQ ID NO: 55450 - protein, 36 aa, Artificial Sequence
  GFR-binding peptide
  MOD_RES (34)..(36): Xaa is C or S
  MOD_RES (14)..(15)..(16)..(17)..(18): Xaa is A or G
  MOD_RES (19)..(20)..(21)..(22): Xaa is A or G or is absent
VPTELRPVQMRKIXXXXXXXXXKKATVDMVVEGXGX

SEQ ID NO: 55451 - protein, 35 aa, Artificial Sequence
  GFR-binding peptide
  MOD_RES (1)..(2)..(35): Xaa is C or S
  MOD_RES (16)..(17)..(18)..(19)..(20): Xaa is A or G
  MOD_RES (21)..(22)..(23)..(24): Xaa is A or G or is absent
XXVPQALRSVKIAKVXXXXXXXXXKEVQVMIVRSX

SEQ ID NO: 55452 - protein, 41 aa, Artificial Sequence
  GFR-binding peptide
  MOD_RES (1)..(38)..(40): Xaa is C or S
  MOD_RES (17)..(18)..(19)..(20)..(21): Xaa is A or G
  MOD_RES (22)..(23)..(24)..(25): Xaa is A or G or is absent
XRPTQVQLEPLTVLYYXXXXXXXXXEQLSNTLEDHLAXKXE

SEQ ID NO: 55453 - protein, 41 aa, Artificial Sequence
  GFR-binding peptide
  MOD_RES (1)..(38)..(40): Xaa is C or S
XRPTQVQLEPLPVVYYEIVRKKPIFEQLSNTLEDHLAXKXE

SEQ ID NO: 55454 - protein, 38 aa, Artificial Sequence
  GFR-binding peptide
  MOD_RES (5)..(6)..(37): Xaa is C or S
SASPXXVPQDLSNITIQIMVGRTPKVIGEMSMVVKSXK

SEQ ID NO: 55455 - protein, 35 aa, Artificial Sequence
  GFR-binding peptide
  MOD_RES (3)..(4): Xaa is C or S
KAXXVPTELRPVQMRKIDEYDKVVKKATVEMVVEG

SEQ ID NO: 55456 - protein, 43 aa, Artificial Sequence; identical to SEQ ID NO: 16536
  GFR-binding peptide
  MOD_RES (6)..(7)..(41)..(43): Xaa is C or S
  MOD_RES (21)..(22)..(23)..(24)..(25): Xaa is A or G
  MOD_RES (26)..(27)..(28)..(29): Xaa is A or G or is absent

SEQ ID NO: 55457 - protein, 36 aa, Artificial Sequence
  GFR-binding peptide
  MOD_RES (3)..(4)..(36): Xaa is C or S
KPXXAPTQLRPVQVRKIDDSSNVIKKATVNMVVRAX

SEQ ID NO: 55458 - protein, 41 aa, Artificial Sequence; identical to SEQ ID NO: 16540
  GFR-binding peptide
  MOD_RES (6)..(7)..(39)..(41): Xaa is C or S

SEQ ID NO: 55459 - protein, 37 aa, Artificial Sequence
  GFR-binding peptide
  MOD_RES (4)..(5)..(37): Xaa is C or S
PKAXXVPTELRSVKMAKVDENEKVVKEVQVDMVVEGX

SEQ ID NO: 55460 - protein, 41 aa, Artificial Sequence; identical to SEQ ID NO: 19712
  GFR-binding peptide
  MOD_RES (2)..(39)..(41): Xaa is C or S

SEQ ID NO: 55461 - protein, 39 aa, Artificial Sequence; identical to SEQ ID NO: 19713
  GFR-binding peptide
  MOD_RES (2)..(39): Xaa is C or S
  MOD_RES (18)..(19)..(20)..(21)..(22): Xaa is A or G
  MOD_RES (23)..(24)..(25)..(26): Xaa is A or G or is absent

SEQ ID NO: 55462 - protein, 37 aa, Artificial Sequence
  GFR-binding peptide
  MOD_RES (2)..(3)..(35)..(37): Xaa is C or S
PXXAPTQLRSVKVAKVDDSSNVIKEVQVNMVVRAXGX

SEQ ID NO: 55463 - protein, 37 aa, Artificial Sequence
  GFR-binding peptide
  MOD_RES (2)..(3)..(36): Xaa is C or S
  MOD_RES (17)..(18)..(19)..(20)..(21): Xaa is A or G
  MOD_RES (22)..(23)..(24)..(25): Xaa is A or G or is absent
PXXVPQDLRPVQIRKIXXXXXXXXXKKATVMVVKSXK

SEQ ID NO: 55464 - protein, 34 aa, Artificial Sequence; identical to SEQ ID NO: 19718
  GFR-binding peptide

SEQ ID NO: 55465 - protein, 32 aa, Artificial Sequence; identical to SEQ ID NO: 16544
  GFR-binding peptide
  MOD_RES (1)..(2): Xaa is C or S

SEQ ID NO: 55466 - protein, 42 aa, Artificial Sequence; identical to SEQ ID NO: 19720
  GFR-binding peptide
  MOD_RES (2)..(39)..(41): Xaa is C or S
  MOD_RES (18)..(19)..(20)..(21)..(22): Xaa is A or G
  MOD_RES (23)..(24)..(25)..(26): Xaa is A or G or is absent

SEQ ID NO: 55467 - protein, 38 aa, Artificial Sequence; identical to SEQ ID NO: 16545
  GFR-binding peptide
  MOD_RES (6)..(38): Xaa is C or S

SEQ ID NO: 55468 - protein, 36 aa, Artificial Sequence
  GFR-binding peptide
  MOD_RES (2)..(36): Xaa is C or S
  MOD_RES (16)..(17)..(18)..(19)..(20): Xaa is A or G
  MOD_RES (21)..(22)..(23)..(24): Xaa is A or G or is absent
EXVPTEEEPLTMLYYXXXXXXXXXEQLSNFLQHNKX

SEQ ID NO: 55469 - protein, 33 aa, Artificial Sequence
  GFR-binding peptide
  MOD_RES (33)..(33): Xaa is C or S
  MOD_RES (14)..(15)..(16)..(17)..(18): Xaa is A or G
  MOD_RES (19)..(20)..(21)..(22): Xaa is A or G or is absent
VPQDLRPVQIRKIXXXXXXXXXKKATVMVVKSX

SEQ ID NO: 55470 - protein, 36 aa, Artificial Sequence
  GFR-binding peptide
  MOD_RES (1)..(35): Xaa is C or S
  MOD_RES (15)..(16)..(17)..(18)..(19): Xaa is A or G
  MOD_RES (20)..(21)..(22)..(23): Xaa is A or G or is absent
XVPTEEEPLTMLYYXXXXXXXXXEQLSNFLQHNKXE

SEQ ID NO: 55471 - protein, 40 aa, Artificial Sequence
  GFR-binding peptide
  MOD_RES (5)..(6)..(38)..(40): Xaa is C or S
IPKAXXVPTELRPVQMRKIDEYDKVVKKATVEMVVEGXGX

SEQ ID NO: 55472 - protein, 33 aa, Artificial Sequence
  GFR-binding peptide
  MOD_RES (32)..(32): Xaa is C or S
VPTELRPVQMRKIDENEKVVKKATVDMVVEGXG

SEQ ID NO: 55473 - protein, 34 aa, Artificial Sequence
  GFR-binding peptide
  MOD_RES (15)..(16)..(17)..(18)..(19): Xaa is A or G
  MOD_RES (20)..(21)..(22)..(23): Xaa is A or G or is absent
PSRVHHEPLPVVYYXXXXXXXXXEQLSNRLEEHL

SEQ ID NO: 55474 - protein, 40 aa, Artificial Sequence
  GFR-binding peptide
  MOD_RES (6)..(40): Xaa is C or S
  MOD_RES (20)..(21)..(22)..(23)..(24): Xaa is A or G
  MOD_RES (25)..(26)..(27)..(28): Xaa is A or G or is absent
DEGLEXVPTEEEPLPMVYYXXXXXXXXXEQLSNFLQHNKX

SEQ ID NO: 55475 - protein, 40 aa, Artificial Sequence; identical to SEQ ID NO: 16548
  GFR-binding peptide
  MOD_RES (4)..(5)..(39): Xaa is C or S
  MOD_RES (19)..(20)..(21)..(22)..(23): Xaa is A or G
  MOD_RES (24)..(25)..(26)..(27): Xaa is A or G or is absent

SEQ ID NO: 55476 - protein, 38 aa, Artificial Sequence; identical to SEQ ID NO: 19722
  GFR-binding peptide
  MOD_RES (1)..(38): Xaa is C or S

SEQ ID NO: 55477 - protein, 39 aa, Artificial Sequence
  GFR-binding peptide
  MOD_RES (2)..(39): Xaa is C or S
  MOD_RES (18)..(19)..(20)..(21)..(22): Xaa is A or G
  MOD_RES (23)..(24)..(25)..(26): Xaa is A or G or is absent
KXQPSRVHHEPLTVLYYXXXXXXXXXEQLSNRLEEHLEX

SEQ ID NO: 55478 - protein, 32 aa, Artificial Sequence
  GFR-binding peptide
  MOD_RES (1)..(1): Xaa is C or S
XAPTQLSNITVQIMDDSSNVIIGEMSNMVVRA

SEQ ID NO: 55479 - protein, 36 aa, Artificial Sequence; identical to SEQ ID NO: 16552
  GFR-binding peptide
  MOD_RES (3)..(4)..(36): Xaa is C or S

SEQ ID NO: 55480 - protein, 39 aa, Artificial Sequence; identical to SEQ ID NO: 19725
  GFR-binding peptide
  MOD_RES (1)..(38): Xaa is C or S

SEQ ID NO: 55481 - protein, 30 aa, Artificial Sequence; identical to SEQ ID NO: 16553
  GFR-binding peptide

SEQ ID NO: 55482 - protein, 34 aa, Artificial Sequence
  GFR-binding peptide
QPSRVHHEPLPVVYYEYVRKKPKLEQLSNRLEEH

SEQ ID NO: 55483 - protein, 42 aa, Artificial Sequence; identical to SEQ ID NO: 19728
  GFR-binding peptide
  MOD_RES (5)..(39)..(41): Xaa is C or S

SEQ ID NO: 55484 - protein, 44 aa, Artificial Sequence; identical to SEQ ID NO: 16555
  GFR-binding peptide
  MOD_RES (6)..(7)..(41)..(43): Xaa is C or S
  MOD_RES (21)..(22)..(23)..(24)..(25): Xaa is A or G
  MOD_RES (26)..(27)..(28)..(29): Xaa is A or G or is absent

SEQ ID NO: 55485 - protein, 38 aa, Artificial Sequence
  GFR-binding peptide
  MOD_RES (6)..(7)..(38): Xaa is C or S
ASASPXXVSQDLSNITIQIMIGKTPKIIGEMSMIVKSX

SEQ ID NO: 55486 - protein, 31 aa, Artificial Sequence
  GFR-binding peptide
  MOD_RES (1)..(1): Xaa is C or S
XVPTELSNITMQIMDEYDKVVIGEMSEMVVE

SEQ ID NO: 55487 - protein, 36 aa, Artificial Sequence; identical to SEQ ID NO: 19729
  GFR-binding peptide
  MOD_RES (2)..(2): Xaa is C or S
  MOD_RES (18)..(19)..(20)..(21)..(22): Xaa is A or G
  MOD_RES (23)..(24)..(25)..(26): Xaa is A or G or is absent

SEQ ID NO: 55488 - protein, 40 aa, Artificial Sequence; identical to SEQ ID NO: 16560
  GFR-binding peptide
  MOD_RES (5)..(6)..(39): Xaa is C or S
  MOD_RES (20)..(21)..(22)..(23)..(24): Xaa is A or G
  MOD_RES (25)..(26)..(27)..(28): Xaa is A or G or is absent

SEQ ID NO: 55489 - protein, 40 aa, Artificial Sequence; identical to SEQ ID NO: 19730
  GFR-binding peptide
  MOD_RES (5)..(5): Xaa is C or S
  MOD_RES (21)..(22)..(23)..(24)..(25): Xaa is A or G
  MOD_RES (26)..(27)..(28)..(29): Xaa is A or G or is absent

SEQ ID NO: 55490 - protein, 41 aa, Artificial Sequence; identical to SEQ ID NO: 19732
  GFR-binding peptide
  MOD_RES (2)..(39)..(41): Xaa is C or S

SEQ ID NO: 55491 - protein, 33 aa, Artificial Sequence; identical to SEQ ID NO: 16562
  GFR-binding peptide
  MOD_RES (1)..(33): Xaa is C or S

SEQ ID NO: 55492 - protein, 33 aa, Artificial Sequence; identical to SEQ ID NO: 16565
  GFR-binding peptide
  MOD_RES (31)..(33): Xaa is C or S

SEQ ID NO: 55493 - protein, 31 aa, Artificial Sequence; identical to SEQ ID NO: 16567
  GFR-binding peptide

SEQ ID NO: 55494 - protein, 34 aa, Artificial Sequence; identical to SEQ ID NO: 19737
  GFR-binding peptide
  MOD_RES (34)..(34): Xaa is C or S
  MOD_RES (14)..(15)..(16)..(17)..(18): Xaa is A or G
  MOD_RES (19)..(20)..(21)..(22): Xaa is A or G or is absent

SEQ ID NO: 55495 - protein, 38 aa, Artificial Sequence
  GFR-binding peptide
  MOD_RES (3)..(4)..(37): Xaa is C or S
  MOD_RES (18)..(19)..(20)..(21)..(22): Xaa is A or G
  MOD_RES (23)..(24)..(25)..(26): Xaa is A or G or is absent
SPXXVPQDLRSVKIAKVXXXXXXXXXKEVQVMVVKSXK

SEQ ID NO: 55496 - protein, 34 aa, Artificial Sequence; identical to SEQ ID NO: 16569
  GFR-binding peptide
  MOD_RES (34)..(34): Xaa is C or S
  MOD_RES (14)..(15)..(16)..(17)..(18): Xaa is A or G
  MOD_RES (19)..(20)..(21)..(22): Xaa is A or G or is absent

SEQ ID NO: 55497 - protein, 37 aa, Artificial Sequence; identical to SEQ ID NO: 16570
  GFR-binding peptide
  MOD_RES (2)..(3)..(34)..(36): Xaa is C or S

SEQ ID NO: 55498 - protein, 35 aa, Artificial Sequence
  GFR-binding peptide
  MOD_RES (1)..(2)..(35): Xaa is C or S
  MOD_RES (16)..(17)..(18)..(19)..(20): Xaa is A or G
  MOD_RES (21)..(22)..(23)..(24): Xaa is A or G or is absent
XXVPQDLSNITIQIMXXXXXXXXXIGEMSMVVKSX

SEQ ID NO: 55499 - protein, 38 aa, Artificial Sequence; identical to SEQ ID NO: 19740
  GFR-binding peptide
  MOD_RES (2)..(36)..(38): Xaa is C or S

SEQ ID NO: 55500 - protein, 41 aa, Artificial Sequence; identical to SEQ ID NO: 16571
  GFR-binding peptide
  MOD_RES (5)..(39)..(41): Xaa is C or S
  MOD_RES (19)..(20)..(21)..(22)..(23): Xaa is A or G
  MOD_RES (24)..(25)..(26)..(27): Xaa is A or G or is absent

SEQ ID NO: 55501 - protein, 43 aa, Artificial Sequence; identical to SEQ ID NO: 19741
  GFR-binding peptide
  MOD_RES (5)..(42): Xaa is C or S
  MOD_RES (21)..(22)..(23)..(24)..(25): Xaa is A or G
  MOD_RES (26)..(27)..(28)..(29): Xaa is A or G or is absent

SEQ ID NO: 55502 - protein, 35 aa, Artificial Sequence
  GFR-binding peptide
  MOD_RES (35)..(35): Xaa is C or S
SRVHHEPLPVVYYEYVRKKPKLEQLSNRLEEHLEX

SEQ ID NO: 55503 - protein, 41 aa, Artificial Sequence
  GFR-binding peptide
  MOD_RES (2)..(39)..(41): Xaa is C or S
QXRPTQVQLEPLPVVYYEIVRKKPIFEQLSNTLEDHLAXKX

SEQ ID NO: 55504 - protein, 42 aa, Artificial Sequence; identical to SEQ ID NO: 19743
  GFR-binding peptide
  MOD_RES (5)..(42): Xaa is C or S

SEQ ID NO: 55505 - protein, 34 aa, Artificial Sequence; identical to SEQ ID NO: 16579
  GFR-binding peptide
  MOD_RES (34)..(34): Xaa is C or S
  MOD_RES (14)..(15)..(16)..(17)..(18): Xaa is A or G
  MOD_RES (19)..(20)..(21)..(22): Xaa is A or G or is absent

SEQ ID NO: 55506 - protein, 37 aa, Artificial Sequence; identical to SEQ ID NO: 16580
  GFR-binding peptide
  MOD_RES (4)..(5)..(36): Xaa is C or S

SEQ ID NO: 55507 - protein, 37 aa, Artificial Sequence
  GFR-binding peptide
  MOD_RES (6)..(7): Xaa is C or S
KIPKAXXVPTELRSVKMAKVDENEKVVKEVQVDMVVE

SEQ ID NO: 55508 - protein, 45 aa, Artificial Sequence; identical to SEQ ID NO: 19744
  GFR-binding peptide
  MOD_RES (5)..(42)..(44): Xaa is C or S
  MOD_RES (21)..(22)..(23)..(24)..(25): Xaa is A or G
  MOD_RES (26)..(27)..(28)..(29): Xaa is A or G or is absent

SEQ ID NO: 55509 - protein, 37 aa, Artificial Sequence
  GFR-binding peptide
  MOD_RES (3)..(4)..(35)..(37): Xaa is C or S
SPXXVSQDLSNITIQIMIGKTPKIIGEMSMIVKSXKX

SEQ ID NO: 55510 - protein, 37 aa, Artificial Sequence
  GFR-binding peptide
  MOD_RES (2)..(2): Xaa is C or S
KXQPSRVHHEPLTVLYYEYVRKKPKLEQLSNRLEEHL

SEQ ID NO: 55511 - protein, 37 aa, Artificial Sequence; identical to SEQ ID NO: 19745
  GFR-binding peptide
  MOD_RES (37)..(37): Xaa is C or S
  MOD_RES (16)..(17)..(18)..(19)..(20): Xaa is A or G
  MOD_RES (21)..(22)..(23)..(24): Xaa is A or G or is absent

SEQ ID NO: 55512 - protein, 40 aa, Artificial Sequence; identical to SEQ ID NO: 16589
  GFR-binding peptide
  MOD_RES (5)..(6)..(38)..(40): Xaa is C or S

SEQ ID NO: 55513 - protein, 41 aa, Artificial Sequence
  GFR-binding peptide
  MOD_RES (3)..(4)..(38)..(40): Xaa is C or S
  MOD_RES (18)..(19)..(20)..(21)..(22): Xaa is A or G
  MOD_RES (23)..(24)..(25)..(26): Xaa is A or G or is absent
KAXXVPTELRPVQMRKIXXXXXXXXXKKATVEMVVEGXGXR

SEQ ID NO: 55514 - protein, 38 aa, Artificial Sequence
  GFR-binding peptide
  MOD_RES (37)..(37): Xaa is C or S
QPSRVHHEPLTVLYYEYVRKKPKLEQLSNRLEEHLEXA

SEQ ID NO: 55515 - protein, 38 aa, Artificial Sequence
  GFR-binding peptide
  MOD_RES (6)..(6): Xaa is C or S
  MOD_RES (20)..(21)..(22)..(23)..(24): Xaa is A or G
  MOD_RES (25)..(26)..(27)..(28): Xaa is A or G or is absent
VTKPTXAPTKLSNITVQIMXXXXXXXXXIGEMSNMVVR

SEQ ID NO: 55516 - protein, 42 aa, Artificial Sequence
  GFR-binding peptide
  MOD_RES (7)..(41): Xaa is C or S
  MOD_RES (21)..(22)..(23)..(24)..(25): Xaa is A or G
  MOD_RES (26)..(27)..(28)..(29): Xaa is A or G or is absent
HVTKPTXAPTKLRSVKVAKVXXXXXXXXXKEVQVNMVVRSXG

SEQ ID NO: 55517 - protein, 40 aa, Artificial Sequence
  GFR-binding peptide
  MOD_RES (4)..(5)..(37)..(39): Xaa is C or S
PKAXXVPTELRPVQMRKIDEYDKVVKKATVEMVVEGXGXR

SEQ ID NO: 55518 - protein, 37 aa, Artificial Sequence
  GFR-binding peptide
  MOD_RES (3)..(4)..(35)..(37): Xaa is C or S
SPXXVPQDLSNITIQIMVGRTPKVIGEMSMVVKSXKX

SEQ ID NO: 55519 - protein, 38 aa, Artificial Sequence
  GFR-binding peptide
  MOD_RES (3)..(4)..(35)..(37): Xaa is C or S
SPXXVSQDLRPVQIRKIIGKTPKIKKATVMIVKSXKXS

SEQ ID NO: 55520 - protein, 41 aa, Artificial Sequence; identical to SEQ ID NO: 19748
  GFR-binding peptide
  MOD_RES (5)..(39)..(41): Xaa is C or S
  MOD_RES (19)..(20)..(21)..(22)..(23): Xaa is A or G
  MOD_RES (24)..(25)..(26)..(27): Xaa is A or G or is absent

SEQ ID NO: 55521 - protein, 37 aa, Artificial Sequence; identical to SEQ ID NO: 16598
  GFR-binding peptide
  MOD_RES (3)..(37): Xaa is C or S
  MOD_RES (17)..(18)..(19)..(20)..(21): Xaa is A or G
  MOD_RES (22)..(23)..(24)..(25): Xaa is A or G or is absent

SEQ ID NO: 55522 - protein, 36 aa, Artificial Sequence
  GFR-binding peptide
  MOD_RES (5)..(6): Xaa is C or S
SASPXXVSQDLRPVQIRKIIGKTPKIKKATVMIVKS

SEQ ID NO: 55523 - protein, 38 aa, Artificial Sequence; identical to SEQ ID NO: 16600
  GFR-binding peptide
  MOD_RES (5)..(6): Xaa is C or S
  MOD_RES (20)..(21)..(22)..(23)..(24): Xaa is A or G
  MOD_RES (25)..(26)..(27)..(28): Xaa is A or G or is absent

SEQ ID NO: 55524 - protein, 41 aa, Artificial Sequence; identical to SEQ ID NO: 19749
  GFR-binding peptide
  MOD_RES (3)..(40): Xaa is C or S
  MOD_RES (19)..(20)..(21)..(22)..(23): Xaa is A or G
  MOD_RES (24)..(25)..(26)..(27): Xaa is A or G or is absent

SEQ ID NO: 55525 - protein, 35 aa, Artificial Sequence; identical to SEQ ID NO: 19751
  GFR-binding peptide
  MOD_RES (15)..(16)..(17)..(18)..(19): Xaa is A or G
  MOD_RES (20)..(21)..(22)..(23): Xaa is A or G or is absent

SEQ ID NO: 55526 - protein, 41 aa, Artificial Sequence; identical to SEQ ID NO: 19752
  GFR-binding peptide
  MOD_RES (4)..(38)..(40): Xaa is C or S
  MOD_RES (18)..(19)..(20)..(21)..(22): Xaa is A or G
  MOD_RES (23)..(24)..(25)..(26): Xaa is A or G or is absent

SEQ ID NO: 55527 - protein, 36 aa, Artificial Sequence
  GFR-binding peptide
  MOD_RES (1)..(33)..(35): Xaa is C or S
XAPTKLRSVKVAKVDDSSNVIKEVQVNMVVRSXGXH

SEQ ID NO: 55528 - protein, 34 aa, Artificial Sequence; identical to SEQ ID NO: 16602
  GFR-binding peptide
  MOD_RES (1)..(2)..(34): Xaa is C or S

SEQ ID NO: 55529 - protein, 35 aa, Artificial Sequence
  GFR-binding peptide
  MOD_RES (4)..(5): Xaa is C or S
PKAXXVPTELRPVQMRKIDENEKVVKKATVDMVVE

SEQ ID NO: 55530 - protein, 32 aa, Artificial Sequence
  GFR-binding peptide
SRVHHEPLPVVYYEYVRKKPKLEQLSNRLEEH

SEQ ID NO: 55531 - protein, 39 aa, Artificial Sequence; identical to SEQ ID NO: 16606
  GFR-binding peptide
  MOD_RES (5)..(6)..(38): Xaa is C or S

SEQ ID NO: 55532 - protein, 38 aa, Artificial Sequence; identical to SEQ ID NO: 16607
  GFR-binding peptide
  MOD_RES (2)..(3)..(35)..(37): Xaa is C or S

SEQ ID NO: 55533 - protein, 36 aa, Artificial Sequence
  GFR-binding peptide
  MOD_RES (2)..(3): Xaa is C or S
  MOD_RES (17)..(18)..(19)..(20)..(21): Xaa is A or G
  MOD_RES (22)..(23)..(24)..(25): Xaa is A or G or is absent
AXXVPTELRSVKMAKVXXXXXXXXXKEVQVDMVVEG

SEQ ID NO: 55534 - protein, 38 aa, Artificial Sequence
  GFR-binding peptide
  MOD_RES (2)..(3)..(36)..(38): Xaa is C or S
  MOD_RES (17)..(18)..(19)..(20)..(21): Xaa is A or G
  MOD_RES (22)..(23)..(24)..(25): Xaa is A or G or is absent
PXXVSQDLSNITIQIMXXXXXXXXXIGEMSMIVKSXKX

SEQ ID NO: 55535 - protein, 38 aa, Artificial Sequence; identical to SEQ ID NO: 16610
  GFR-binding peptide
  MOD_RES (5)..(6): Xaa is C or S
  MOD_RES (20)..(21)..(22)..(23)..(24): Xaa is A or G
  MOD_RES (25)..(26)..(27)..(28): Xaa is A or G or is absent

SEQ ID NO: 55536 - protein, 36 aa, Artificial Sequence; identical to SEQ ID NO: 19754
  GFR-binding peptide
  MOD_RES (3)..(3): Xaa is C or S

SEQ ID NO: 55537 - protein, 40 aa, Artificial Sequence
  GFR-binding peptide
  MOD_RES (4)..(5)..(39): Xaa is C or S
  MOD_RES (19)..(20)..(21)..(22)..(23): Xaa is A or G
  MOD_RES (24)..(25)..(26)..(27): Xaa is A or G or is absent
PKAXXVPTELSNITMQIMXXXXXXXXXIGEMSDMVVEGXG

SEQ ID NO: 55538 - protein, 42 aa, Artificial Sequence
  GFR-binding peptide
  MOD_RES (2)..(39)..(41): Xaa is C or S
  MOD_RES (18)..(19)..(20)..(21)..(22): Xaa is A or G
  MOD_RES (23)..(24)..(25)..(26): Xaa is A or G or is absent
QXRPTQVQLEPLTVLYYXXXXXXXXXEQLSNTLEDHLAXKXE

SEQ ID NO: 55539 - protein, 40 aa, Artificial Sequence
  GFR-binding peptide
  MOD_RES (3)..(37)..(39): Xaa is C or S
LEXVPTEEEPLPMVYYRIKPHQGQHEQLSNFLQHNKXEXR

SEQ ID NO: 55540 - protein, 35 aa, Artificial Sequence; identical to SEQ ID NO: 19760
  GFR-binding peptide
  MOD_RES (35)..(35): Xaa is C or S

SEQ ID NO: 55541 - protein, 38 aa, Artificial Sequence; identical to SEQ ID NO: 19761
  GFR-binding peptide
  MOD_RES (5)..(5): Xaa is C or S

SEQ ID NO: 55542 - protein, 36 aa, Artificial Sequence
  GFR-binding peptide
  MOD_RES (4)..(5)..(36): Xaa is C or S
ASPXXVPQDLSNITIQIMVGRTPKVIGEMSMVVKSX

SEQ ID NO: 55543 - protein, 40 aa, Artificial Sequence; identical to SEQ ID NO: 16615
  GFR-binding peptide
  MOD_RES (4)..(5)..(38)..(40): Xaa is C or S
  MOD_RES (19)..(20)..(21)..(22)..(23): Xaa is A or G
  MOD_RES (24)..(25)..(26)..(27): Xaa is A or G or is absent

SEQ ID NO: 55544 - protein, 36 aa, Artificial Sequence
  GFR-binding peptide
  MOD_RES (1)..(2)..(36): Xaa is C or S
  MOD_RES (16)..(17)..(18)..(19)..(20): Xaa is A or G
  MOD_RES (21)..(22)..(23)..(24): Xaa is A or G or is absent
XXAPTKLRSVKVAKVXXXXXXXXXKEVQVNMVVRSX

SEQ ID NO: 55545 - protein, 33 aa, Artificial Sequence
  GFR-binding peptide
  MOD_RES (14)..(15)..(16)..(17)..(18): Xaa is A or G
  MOD_RES (19)..(20)..(21)..(22): Xaa is A or G or is absent
VPTELRPVQMRKIXXXXXXXXXKKATVEMVVEG

SEQ ID NO: 55546 - protein, 39 aa, Artificial Sequence; identical to SEQ ID NO: 19763
  GFR-binding peptide
  MOD_RES (36)..(38): Xaa is C or S
  MOD_RES (15)..(16)..(17)..(18)..(19): Xaa is A or G
  MOD_RES (20)..(21)..(22)..(23): Xaa is A or G or is absent

SEQ ID NO: 55547 - protein, 39 aa, Artificial Sequence; identical to SEQ ID NO: 16620
  GFR-binding peptide
  MOD_RES (4)..(38): Xaa is C or S
  MOD_RES (18)..(19)..(20)..(21)..(22): Xaa is A or G
  MOD_RES (23)..(24)..(25)..(26): Xaa is A or G or is absent

SEQ ID NO: 55548 - protein, 42 aa, Artificial Sequence
  GFR-binding peptide
  MOD_RES (5)..(6)..(40)..(42): Xaa is C or S
  MOD_RES (20)..(21)..(22)..(23)..(24): Xaa is A or G
  MOD_RES (25)..(26)..(27)..(28): Xaa is A or G or is absent
VPKPXXAPTKLRPVQVRKIXXXXXXXXXKKATVNMVVRSXGX

SEQ ID NO: 55549 - protein, 42 aa, Artificial Sequence
  GFR-binding peptide
  MOD_RES (5)..(42): Xaa is C or S
RNVQXRPTQVQLEPLTVLYYEIVRKKPIFEQLSNTLEDHLAX

SEQ ID NO: 55550 - protein, 41 aa, Artificial Sequence; identical to SEQ ID NO: 16621
  GFR-binding peptide
  MOD_RES (4)..(5)..(39)..(41): Xaa is C or S
  MOD_RES (19)..(20)..(21)..(22)..(23): Xaa is A or G
  MOD_RES (24)..(25)..(26)..(27): Xaa is A or G or is absent

SEQ ID NO: 55551 - protein, 39 aa, Artificial Sequence; identical to SEQ ID NO: 19766
  GFR-binding peptide
  MOD_RES (2)..(36)..(38): Xaa is C or S
  MOD_RES (16)..(17)..(18)..(19)..(20): Xaa is A or G
  MOD_RES (21)..(22)..(23)..(24): Xaa is A or G or is absent

SEQ ID NO: 55552 - protein, 38 aa, Artificial Sequence
  GFR-binding peptide
  MOD_RES (4)..(5)..(36)..(38): Xaa is C or S
AAPXXVPQALSNITIQIMVGRKPKVIGEMSMIVRSXKX

SEQ ID NO: 55553 - protein, 39 aa, Artificial Sequence
  GFR-binding peptide
  MOD_RES (3)..(4)..(38): Xaa is C or S
  MOD_RES (18)..(19)..(20)..(21)..(22): Xaa is A or G
  MOD_RES (23)..(24)..(25)..(26): Xaa is A or G or is absent
KAXXVPTELRSVKMAKVXXXXXXXXXKEVQVDMVVEGXG

SEQ ID NO: 55554 - protein, 35 aa, Artificial Sequence; identical to SEQ ID NO: 19769
  GFR-binding peptide
  MOD_RES (2)..(2): Xaa is C or S

SEQ ID NO: 55555 - protein, 39 aa, Artificial Sequence
  GFR-binding peptide
  MOD_RES (3)..(37)..(39): Xaa is C or S
  MOD_RES (17)..(18)..(19)..(20)..(21): Xaa is A or G
  MOD_RES (22)..(23)..(24)..(25): Xaa is A or G or is absent
PTXAPTKLRPVQVRKIXXXXXXXXXKKATVNMVVRSXGX

SEQ ID NO: 55556 - protein, 44 aa, Artificial Sequence
  GFR-binding peptide
  MOD_RES (7)..(41)..(43): Xaa is C or S
NDEGLEXVPTEEEPLPMVYYRIKPHQGQHEQLSNFLQHNKXEXR

SEQ ID NO: 55557 - protein, 32 aa, Artificial Sequence
  GFR-binding peptide
SRVHHEPLTVLYYEYVRKKPKLEQLSNRLEEH

SEQ ID NO: 55558 - protein, 33 aa, Artificial Sequence
  GFR-binding peptide
  MOD_RES (2)..(2): Xaa is C or S
TXAPTKLSNITVQIMDDSSNVIIGEMSNMVVRS

SEQ ID NO: 55559 - protein, 41 aa, Artificial Sequence
  GFR-binding peptide
  MOD_RES (3)..(4)..(38)..(40): Xaa is C or S
  MOD_RES (18)..(19)..(20)..(21)..(22): Xaa is A or G
  MOD_RES (23)..(24)..(25)..(26): Xaa is A or G or is absent
KPXXAPTKLSNITVQIMXXXXXXXXXIGEMSNMVVRSXGXH

SEQ ID NO: 55560 - protein, 35 aa, Artificial Sequence; identical to SEQ ID NO: 16628
  GFR-binding peptide
  MOD_RES (33)..(35): Xaa is C or S
  MOD_RES (14)..(15)..(16)..(17)..(18): Xaa is A or G
  MOD_RES (19)..(20)..(21)..(22): Xaa is A or G or is absent

SEQ ID NO: 55561 - protein, 35 aa, Artificial Sequence; identical to SEQ ID NO: 19774
  GFR-binding peptide
  MOD_RES (1)..(1): Xaa is C or S

SEQ ID NO: 55562 - protein, 35 aa, Artificial Sequence; identical to SEQ ID NO: 16630
  GFR-binding peptide
  MOD_RES (2)..(3): Xaa is C or S
  MOD_RES (17)..(18)..(19)..(20)..(21): Xaa is A or G
  MOD_RES (22)..(23)..(24)..(25): Xaa is A or G or is absent

SEQ ID NO: 55563 - protein, 37 aa, Artificial Sequence; identical to SEQ ID NO: 19775
  GFR-binding peptide
  MOD_RES (36)..(36): Xaa is C or S
  MOD_RES (15)..(16)..(17)..(18)..(19): Xaa is A or G
  MOD_RES (20)..(21)..(22)..(23): Xaa is A or G or is absent

SEQ ID NO: 55564 - protein, 44 aa, Artificial Sequence
  GFR-binding peptide
  MOD_RES (4)..(41)..(43): Xaa is C or S
  MOD_RES (20)..(21)..(22)..(23)..(24): Xaa is A or G
  MOD_RES (25)..(26)..(27)..(28): Xaa is A or G or is absent
SVKXQPSRVHHEPLPVVYYXXXXXXXXXEQLSNRLEEHLEXAXA

SEQ ID NO: 55565 - protein, 36 aa, Artificial Sequence
  GFR-binding peptide
  MOD_RES (5)..(6): Xaa is C or S
IPKAXXVPTELRPVQMRKIDEYDKVVKKATVEMVVE

SEQ ID NO: 55566 - protein, 38 aa, Artificial Sequence
  GFR-binding peptide
  MOD_RES (1)..(2)..(36)..(38): Xaa is C or S
  MOD_RES (16)..(17)..(18)..(19)..(20): Xaa is A or G
  MOD_RES (21)..(22)..(23)..(24): Xaa is A or G or is absent
XXVPTELSNITMQIMXXXXXXXXXIGEMSDMVVEGXGX

SEQ ID NO: 55567 - protein, 40 aa, Artificial Sequence
  GFR-binding peptide
  MOD_RES (3)..(40): Xaa is C or S
VKXQPSRVHHEPLPVVYYEYVRKKPKLEQLSNRLEEHLEX

SEQ ID NO: 55568 - protein, 37 aa, Artificial Sequence
  GFR-binding peptide
  MOD_RES (4)..(36): Xaa is C or S
KPTXAPTKLRPVQVRKIDDSSNVIKKATVNMVVRSXG

SEQ ID NO: 55569 - protein, 33 aa, Artificial Sequence
  GFR-binding peptide
  MOD_RES (1)..(1): Xaa is C or S
  MOD_RES (15)..(16)..(17)..(18)..(19): Xaa is A or G
  MOD_RES (20)..(21)..(22)..(23): Xaa is A or G or is absent
XAPTQLRSVKVAKVXXXXXXXXXKEVQVNMVVR

SEQ ID NO: 55570 - protein, 35 aa, Artificial Sequence
  GFR-binding peptide
  MOD_RES (1)..(2)..(35): Xaa is C or S
  MOD_RES (16)..(17)..(18)..(19)..(20): Xaa is A or G
  MOD_RES (21)..(22)..(23)..(24): Xaa is A or G or is absent
XXVSQDLRPVQIRKIXXXXXXXXXKKATVMIVKSX

SEQ ID NO: 55571 - protein, 33 aa, Artificial Sequence; identical to SEQ ID NO: 16642
  GFR-binding peptide
  MOD_RES (1)..(1): Xaa is C or S
  MOD_RES (15)..(16)..(17)..(18)..(19): Xaa is A or G
  MOD_RES (20)..(21)..(22)..(23): Xaa is A or G or is absent

SEQ ID NO: 55572 - protein, 43 aa, Artificial Sequence
  GFR-binding peptide
  MOD_RES (6)..(7)..(40)..(42): Xaa is C or S
  MOD_RES (21)..(22)..(23)..(24)..(25): Xaa is A or G
  MOD_RES (26)..(27)..(28)..(29): Xaa is A or G or is absent
ASAAPXXVPQALRPVQIRKIXXXXXXXXXKKATVMIVRSXKXS

SEQ ID NO: 55573 - protein, 39 aa, Artificial Sequence
  GFR-binding peptide
  MOD_RES (1)..(2)..(36)..(38): Xaa is C or S
  MOD_RES (16)..(17)..(18)..(19)..(20): Xaa is A or G
  MOD_RES (21)..(22)..(23)..(24): Xaa is A or G or is absent
XXAPTKLRSVKVAKVXXXXXXXXXKEVQVNMVVRSXGXH

SEQ ID NO: 55574 - protein, 38 aa, Artificial Sequence; identical to SEQ ID NO: 16645
  GFR-binding peptide
  MOD_RES (2)..(3)..(37): Xaa is C or S
  MOD_RES (17)..(18)..(19)..(20)..(21): Xaa is A or G
  MOD_RES (22)..(23)..(24)..(25): Xaa is A or G or is absent

SEQ ID NO: 55575 - protein, 36 aa, Artificial Sequence
  GFR-binding peptide
  MOD_RES (34)..(36): Xaa is C or S
  MOD_RES (14)..(15)..(16)..(17)..(18): Xaa is A or G
  MOD_RES (19)..(20)..(21)..(22): Xaa is A or G or is absent
VPTEEEPLTMLYYXXXXXXXXXEQLSNFLQHNKXEX

SEQ ID NO: 55576 - protein, 36 aa, Artificial Sequence; identical to SEQ ID NO: 19790
  GFR-binding peptide
  MOD_RES (35)..(35): Xaa is C or S
  MOD_RES (14)..(15)..(16)..(17)..(18): Xaa is A or G
  MOD_RES (19)..(20)..(21)..(22): Xaa is A or G or is absent

SEQ ID NO: 55577 - protein, 44 aa, Artificial Sequence; identical to SEQ ID NO: 19791
  GFR-binding peptide
  MOD_RES (4)..(41)..(43): Xaa is C or S
  MOD_RES (20)..(21)..(22)..(23)..(24): Xaa is A or G
  MOD_RES (25)..(26)..(27)..(28): Xaa is A or G or is absent

SEQ ID NO: 55578 - protein, 41 aa, Artificial Sequence; identical to SEQ ID NO: 16646
  GFR-binding peptide
  MOD_RES (6)..(7)..(39)..(41): Xaa is C or S

SEQ ID NO: 55579 - protein, 40 aa, Artificial Sequence; identical to SEQ ID NO: 16647
  GFR-binding peptide
  MOD_RES (5)..(6)..(40): Xaa is C or S
  MOD_RES (20)..(21)..(22)..(23)..(24): Xaa is A or G
  MOD_RES (25)..(26)..(27)..(28): Xaa is A or G or is absent

SEQ ID NO: 55580 - protein, 39 aa, Artificial Sequence; identical to SEQ ID NO: 16649
  GFR-binding peptide
  MOD_RES (3)..(4)..(36)..(38): Xaa is C or S

SEQ ID NO: 55581 - protein, 37 aa, Artificial Sequence
  GFR-binding peptide
  MOD_RES (6)..(7): Xaa is C or S
SIPKAXXVPTELSNITMQIMDEYDKVVIGEMSEMVVE

SEQ ID NO: 55582 - protein, 36 aa, Artificial Sequence
  GFR-binding peptide
  MOD_RES (3)..(3): Xaa is C or S
LEXVPTEEEPLPMVYYRIKPHQGQHEQLSNFLQHNK

SEQ ID NO: 55583 - protein, 36 aa, Artificial Sequence
  GFR-binding peptide
  MOD_RES (3)..(4): Xaa is C or S
  MOD_RES (18)..(19)..(20)..(21)..(22): Xaa is A or G
  MOD_RES (23)..(24)..(25)..(26): Xaa is A or G or is absent
APXXVPQALRPVQIRKIXXXXXXXXXKKATVMIVRS

SEQ ID NO: 55584 - protein, 38 aa, Artificial Sequence
  GFR-binding peptide
  MOD_RES (3)..(37): Xaa is C or S
  MOD_RES (17)..(18)..(19)..(20)..(21): Xaa is A or G
  MOD_RES (22)..(23)..(24)..(25): Xaa is A or G or is absent
LEXVPTEEEPLPMVYYXXXXXXXXXEQLSNFLQHNKXE

SEQ ID NO: 55585 - protein, 41 aa, Artificial Sequence
  GFR-binding peptide
  MOD_RES (5)..(6)..(40): Xaa is C or S
  MOD_RES (20)..(21)..(22)..(23)..(24): Xaa is A or G
  MOD_RES (25)..(26)..(27)..(28): Xaa is A or G or is absent
VPKPXXAPTQLSNITVQIMXXXXXXXXXIGEMSNMVVRAXG

SEQ ID NO: 55586 - protein, 35 aa, Artificial Sequence
  GFR-binding peptide
  MOD_RES (15)..(16)..(17)..(18)..(19): Xaa is A or G
  MOD_RES (20)..(21)..(22)..(23): Xaa is A or G or is absent
PTQVQLEPLPVVYYXXXXXXXXXEQLSNTLEDHLA

SEQ ID NO: 55587 - protein, 39 aa, Artificial Sequence
  GFR-binding peptide
  MOD_RES (4)..(5)..(38): Xaa is C or S
  MOD_RES (19)..(20)..(21)..(22)..(23): Xaa is A or G
  MOD_RES (24)..(25)..(26)..(27): Xaa is A or G or is absent
AAPXXVPQALSNITIQIMXXXXXXXXXIGEMSMIVRSXK

SEQ ID NO: 55588 - protein, 33 aa, Artificial Sequence
  GFR-binding peptide
  MOD_RES (1)..(1): Xaa is C or S
  MOD_RES (15)..(16)..(17)..(18)..(19): Xaa is A or G
  MOD_RES (20)..(21)..(22)..(23): Xaa is A or G or is absent
XVPQDLRPVQIRKIXXXXXXXXXKKATVMVVKS

SEQ ID NO: 55589 - protein, 33 aa, Artificial Sequence; identical to SEQ ID NO: 16652
  GFR-binding peptide
  MOD_RES (2)..(3): Xaa is C or S

SEQ ID NO: 55590 - protein, 41 aa, Artificial Sequence
  GFR-binding peptide
  MOD_RES (4)..(38)..(40): Xaa is C or S
  MOD_RES (18)..(19)..(20)..(21)..(22): Xaa is A or G
  MOD_RES (23)..(24)..(25)..(26): Xaa is A or G or is absent
KPTXAPTKLRSVKVAKVXXXXXXXXXKEVQVNMVVRSXGXH

SEQ ID NO: 55591 - protein, 36 aa, Artificial Sequence
  GFR-binding peptide
  MOD_RES (3)..(4): Xaa is C or S
  MOD_RES (18)..(19)..(20)..(21)..(22): Xaa is A or G
  MOD_RES (23)..(24)..(25)..(26): Xaa is A or G or is absent
SPXXVSQDLRSVKIAKVXXXXXXXXXKEVQVMIVKS

SEQ ID NO: 55592 - protein, 39 aa, Artificial Sequence; identical to SEQ ID NO: 19795
  GFR-binding peptide
  MOD_RES (4)..(4): Xaa is C or S
  MOD_RES (20)..(21)..(22)..(23)..(24): Xaa is A or G
  MOD_RES (25)..(26)..(27)..(28): Xaa is A or G or is absent

SEQ ID NO: 55593 - protein, 37 aa, Artificial Sequence
  GFR-binding peptide
  MOD_RES (4)..(5): Xaa is C or S
  MOD_RES (19)..(20)..(21)..(22)..(23): Xaa is A or G
  MOD_RES (24)..(25)..(26)..(27): Xaa is A or G or is absent
PKAXXVPTELRPVQMRKIXXXXXXXXXKKATVDMVVE

SEQ ID NO: 55594 - protein, 38 aa, Artificial Sequence
  GFR-binding peptide
  MOD_RES (2)..(3)..(37): Xaa is C or S
  MOD_RES (17)..(18)..(19)..(20)..(21): Xaa is A or G
  MOD_RES (22)..(23)..(24)..(25): Xaa is A or G or is absent
PXXAPTQLSNITVQIMXXXXXXXXXIGEMSNMVVRAXG

SEQ ID NO: 55595 - protein, 40 aa, Artificial Sequence; identical to SEQ ID NO: 16655
  GFR-binding peptide
  MOD_RES (5)..(6)..(38)..(40): Xaa is C or S

SEQ ID NO: 55596 - protein, 37 aa, Artificial Sequence
  GFR-binding peptide
  MOD_RES (3)..(4)..(36): Xaa is C or S
KPXXAPTQLSNITVQIMDDSSNVIIGEMSNMVVRAXG

SEQ ID NO: 55597 - protein, 39 aa, Artificial Sequence; identical to SEQ ID NO: 16656
  GFR-binding peptide
  MOD_RES (6)..(7)..(39): Xaa is C or S

SEQ ID NO: 55598 - protein, 34 aa, Artificial Sequence; identical to SEQ ID NO: 19796
  GFR-binding peptide
  MOD_RES (2)..(2): Xaa is C or S
  MOD_RES (16)..(17)..(18)..(19)..(20): Xaa is A or G
  MOD_RES (21)..(22)..(23)..(24): Xaa is A or G or is absent

SEQ ID NO: 55599 - protein, 35 aa, Artificial Sequence
  GFR-binding peptide
  MOD_RES (4)..(5): Xaa is C or S
PKAXXVPTELSNITMQIMDEYDKVVIGEMSEMVVE

SEQ ID NO: 55600 - protein, 36 aa, Artificial Sequence; identical to SEQ ID NO: 16659
  GFR-binding peptide
  MOD_RES (1)..(2)..(33)..(35): Xaa is C or S

SEQ ID NO: 55601 - protein, 44 aa, Artificial Sequence
  GFR-binding peptide
  MOD_RES (7)..(41)..(43): Xaa is C or S
  MOD_RES (21)..(22)..(23)..(24)..(25): Xaa is A or G
  MOD_RES (26)..(27)..(28)..(29): Xaa is A or G or is absent
HVTKPTXAPTKLSNITVQIMXXXXXXXXXIGEMSNMVVRSXGXH

SEQ ID NO: 55602 - protein, 38 aa, Artificial Sequence
  GFR-binding peptide
  MOD_RES (1)..(2)..(36)..(38): Xaa is C or S
  MOD_RES (16)..(17)..(18)..(19)..(20): Xaa is A or G
  MOD_RES (21)..(22)..(23)..(24): Xaa is A or G or is absent
XXVPTELRPVQMRKIXXXXXXXXXKKATVDMVVEGXGX

SEQ ID NO: 55603 - protein, 36 aa, Artificial Sequence; identical to SEQ ID NO: 16661
  GFR-binding peptide
  MOD_RES (1)..(33)..(35): Xaa is C or S

SEQ ID NO: 55604 - protein, 43 aa, Artificial Sequence
  GFR-binding peptide
  MOD_RES (5)..(42): Xaa is C or S
  MOD_RES (21)..(22)..(23)..(24)..(25): Xaa is A or G
  MOD_RES (26)..(27)..(28)..(29): Xaa is A or G or is absent
SSVKXQPSRVHHEPLPVVYYXXXXXXXXXEQLSNRLEEHLEXA

SEQ ID NO: 55605 - protein, 43 aa, Artificial Sequence; identical to SEQ ID NO: 19798
  GFR-binding peptide
  MOD_RES (3)..(40)..(42): Xaa is C or S
  MOD_RES (19)..(20)..(21)..(22)..(23): Xaa is A or G
  MOD_RES (24)..(25)..(26)..(27): Xaa is A or G or is absent

SEQ ID NO: 55606 - protein, 38 aa, Artificial Sequence
  GFR-binding peptide
  MOD_RES (36)..(38): Xaa is C or S
PTQVQLEPLTVLYYEIVRKKPIFEQLSNTLEDHLAXKX

SEQ ID NO: 55607 - protein, 38 aa, Artificial Sequence
  GFR-binding peptide
  MOD_RES (3)..(4)..(35)..(37): Xaa is C or S
APXXVPQALRPVQIRKIVGRKPKVKKATVMIVRSXKXS

SEQ ID NO: 55608 - protein, 40 aa, Artificial Sequence
  GFR-binding peptide
  MOD_RES (6)..(38)..(40): Xaa is C or S
VTKPTXAPTKLSNITVQIMDDSSNVIIGEMSNMVVRSXGX

SEQ ID NO: 55609 - protein, 42 aa, Artificial Sequence; identical to SEQ ID NO: 16663
  GFR-binding peptide
  MOD_RES (4)..(5)..(39)..(41): Xaa is C or S
  MOD_RES (19)..(20)..(21)..(22)..(23): Xaa is A or G
  MOD_RES (24)..(25)..(26)..(27): Xaa is A or G or is absent

SEQ ID NO: 55610 - protein, 34 aa, Artificial Sequence
  GFR-binding peptide
  MOD_RES (33)..(33): Xaa is C or S
  MOD_RES (14)..(15)..(16)..(17)..(18): Xaa is A or G
  MOD_RES (19)..(20)..(21)..(22): Xaa is A or G or is absent
VPQALRSVKIAKVXXXXXXXXXKEVQVMIVRSXK

SEQ ID NO: 55611 - protein, 40 aa, Artificial Sequence; identical to SEQ ID NO: 19799
  GFR-binding peptide
  MOD_RES (5)..(39): Xaa is C or S
  MOD_RES (19)..(20)..(21)..(22)..(23): Xaa is A or G
  MOD_RES (24)..(25)..(26)..(27): Xaa is A or G or is absent

SEQ ID NO: 55612 - protein, 38 aa, Artificial Sequence
  GFR-binding peptide
  MOD_RES (2)..(3)..(37): Xaa is C or S
  MOD_RES (17)..(18)..(19)..(20)..(21): Xaa is A or G
  MOD_RES (22)..(23)..(24)..(25): Xaa is A or G or is absent
AXXVPTELSNITMQIMXXXXXXXXXIGEMSDMVVEGXG

SEQ ID NO: 55613 - protein, 36 aa, Artificial Sequence
  GFR-binding peptide
  MOD_RES (36)..(36): Xaa is C or S
  MOD_RES (15)..(16)..(17)..(18)..(19): Xaa is A or G
  MOD_RES (20)..(21)..(22)..(23): Xaa is A or G or is absent
PTQVQLEPLTVLYYXXXXXXXXXEQLSNTLEDHLAX

SEQ ID NO: 55614 - protein, 38 aa, Artificial Sequence; identical to SEQ ID NO: 16667
  GFR-binding peptide
  MOD_RES (5)..(6): Xaa is C or S
  MOD_RES (20)..(21)..(22)..(23)..(24): Xaa is A or G
  MOD_RES (25)..(26)..(27)..(28): Xaa is A or G or is absent

SEQ ID NO: 55615 - protein, 31 aa, Artificial Sequence
  GFR-binding peptide
  MOD_RES (1)..(1): Xaa is C or S
XVPQALRPVQIRKIVGRKPKVKKATVMIVRS

SEQ ID NO: 55616 - protein, 33 aa, Artificial Sequence
  GFR-binding peptide
  MOD_RES (32)..(32): Xaa is C or S
VPTELRSVKMAKVDENEKVVKEVQVDMVVEGXG

SEQ ID NO: 55617 - protein, 39 aa, Artificial Sequence
  GFR-binding peptide
  MOD_RES (6)..(6): Xaa is C or S
  MOD_RES (20)..(21)..(22)..(23)..(24): Xaa is A or G
  MOD_RES (25)..(26)..(27)..(28): Xaa is A or G or is absent
VTKPTXAPTKLSNITVQIMXXXXXXXXXIGEMSNMVVRS

SEQ ID NO: 55618 - protein, 41 aa, Artificial Sequence
  GFR-binding peptide
  MOD_RES (5)..(6)..(39)..(41): Xaa is C or S
  MOD_RES (20)..(21)..(22)..(23)..(24): Xaa is A or G
  MOD_RES (25)..(26)..(27)..(28): Xaa is A or G or is absent
SAAPXXVPQALRSVKIAKVXXXXXXXXXKEVQVMIVRSXKX

SEQ ID NO: 55619 - protein, 40 aa, Artificial Sequence
  GFR-binding peptide
  MOD_RES (2)..(3)..(37)..(39): Xaa is C or S
  MOD_RES (17)..(18)..(19)..(20)..(21): Xaa is A or G
  MOD_RES (22)..(23)..(24)..(25): Xaa is A or G or is absent
PXXAPTQLSNITVQIMXXXXXXXXXIGEMSNMVVRAXGXH

SEQ ID NO: 55620 - protein, 33 aa, Artificial Sequence; identical to SEQ ID NO: 16671
  GFR-binding peptide
  MOD_RES (32)..(32): Xaa is C or S

SEQ ID NO: 55621 - protein, 36 aa, Artificial Sequence; identical to SEQ ID NO: 19805
  GFR-binding peptide
  MOD_RES (16)..(17)..(18)..(19)..(20): Xaa is A or G
  MOD_RES (21)..(22)..(23)..(24): Xaa is A or G or is absent

SEQ ID NO: 55622 - protein, 45 aa, Artificial Sequence
  GFR-binding peptide
  MOD_RES (5)..(42)..(44): Xaa is C or S
  MOD_RES (21)..(22)..(23)..(24)..(25): Xaa is A or G
  MOD_RES (26)..(27)..(28)..(29): Xaa is A or G or is absent
SSVKXQPSRVHHEPLTVLYYXXXXXXXXXEQLSNRLEEHLEXAXA

SEQ ID NO: 55623 - protein, 41 aa, Artificial Sequence
  GFR-binding peptide
  MOD_RES (5)..(6)..(38)..(40): Xaa is C or S
VPKPXXAPTKLRPVQVRKIDDSSNVIKKATVNMVVRSXGXH

SEQ ID NO: 55624 - protein, 36 aa, Artificial Sequence; identical to SEQ ID NO: 19806
  GFR-binding peptide
  MOD_RES (2)..(36): Xaa is C or S
  MOD_RES (16)..(17)..(18)..(19)..(20): Xaa is A or G
  MOD_RES (21)..(22)..(23)..(24): Xaa is A or G or is absent

SEQ ID NO: 55625 - protein, 42 aa, Artificial Sequence; identical to SEQ ID NO: 16674
  GFR-binding peptide
  MOD_RES (4)..(5)..(39)..(41): Xaa is C or S
  MOD_RES (19)..(20)..(21)..(22)..(23): Xaa is A or G
  MOD_RES (24)..(25)..(26)..(27): Xaa is A or G or is absent

SEQ ID NO: 55626 - protein, 36 aa, Artificial Sequence; identical to SEQ ID NO: 16676
  GFR-binding peptide
  MOD_RES (33)..(35): Xaa is C or S
  MOD_RES (14)..(15)..(16)..(17)..(18): Xaa is A or G
  MOD_RES (19)..(20)..(21)..(22): Xaa is A or G or is absent

SEQ ID NO: 55627 - protein, 33 aa, Artificial Sequence; identical to SEQ ID NO: 16678
  GFR-binding peptide
  MOD_RES (1)..(2)..(33): Xaa is C or S

SEQ ID NO: 55628 - protein, 35 aa, Artificial Sequence; identical to SEQ ID NO: 19810
  GFR-binding peptide
  MOD_RES (16)..(17)..(18)..(19)..(20): Xaa is A or G
  MOD_RES (21)..(22)..(23)..(24): Xaa is A or G or is absent

SEQ ID NO: 55629 - protein, 34 aa, Artificial Sequence
  GFR-binding peptide
PSRVHHEPLTVLYYEYVRKKPKLEQLSNRLEEHL

SEQ ID NO: 55630 - protein, 41 aa, Artificial Sequence; identical to SEQ ID NO: 16680
  GFR-binding peptide
  MOD_RES (5)..(6)..(38)..(40): Xaa is C or S

SEQ ID NO: 55631 - protein, 44 aa, Artificial Sequence; identical to SEQ ID NO: 19812
  GFR-binding peptide
  MOD_RES (7)..(41)..(43): Xaa is C or S

SEQ ID NO: 55632 - protein, 39 aa, Artificial Sequence; identical to SEQ ID NO: 19814
  GFR-binding peptide
  MOD_RES (37)..(39): Xaa is C or S
  MOD_RES (16)..(17)..(18)..(19)..(20): Xaa is A or G
  MOD_RES (21)..(22)..(23)..(24): Xaa is A or G or is absent

SEQ ID NO: 55633 - protein, 39 aa, Artificial Sequence
  GFR-binding peptide
  MOD_RES (3)..(4)..(38): Xaa is C or S
  MOD_RES (18)..(19)..(20)..(21)..(22): Xaa is A or G
  MOD_RES (23)..(24)..(25)..(26): Xaa is A or G or is absent
KPXXAPTKLRPVQVRKIXXXXXXXXXKKATVNMVVRSXG

SEQ ID NO: 55634 - protein, 37 aa, Artificial Sequence
  GFR-binding peptide
  MOD_RES (3)..(4): Xaa is C or S
  MOD_RES (18)..(19)..(20)..(21)..(22): Xaa is A or G
  MOD_RES (23)..(24)..(25)..(26): Xaa is A or G or is absent
KPXXAPTKLSNITVQIMXXXXXXXXXIGEMSNMVVRS

SEQ ID NO: 55635 - protein, 39 aa, Artificial Sequence
  GFR-binding peptide
  MOD_RES (3)..(4)..(37)..(39): Xaa is C or S
  MOD_RES (18)..(19)..(20)..(21)..(22): Xaa is A or G
  MOD_RES (23)..(24)..(25)..(26): Xaa is A or G or is absent
SPXXVSQDLSNITIQIMXXXXXXXXXIGEMSMIVKSXKX

SEQ ID NO: 55636 - protein, 30 aa, Artificial Sequence
  GFR-binding peptide
VPTELRSVKMAKVDEYDKVVKEVQVEMVVE

SEQ ID NO: 55637 - protein, 36 aa, Artificial Sequence
  GFR-binding peptide
  MOD_RES (35)..(35): Xaa is C or S
  MOD_RES (14)..(15)..(16)..(17)..(18): Xaa is A or G
  MOD_RES (19)..(20)..(21)..(22): Xaa is A or G or is absent
TQVQLEPLPVVYYXXXXXXXXXEQLSNTLEDHLAXK

SEQ ID NO: 55638 - protein, 40 aa, Artificial Sequence
  GFR-binding peptide
  MOD_RES (4)..(4): Xaa is C or S
SVKXQPSRVHHEPLPVVYYEYVRKKPKLEQLSNRLEEHLE

SEQ ID NO: 55639 - protein, 43 aa, Artificial Sequence
  GFR-binding peptide
  MOD_RES (3)..(40)..(42): Xaa is C or S
  MOD_RES (19)..(20)..(21)..(22)..(23): Xaa is A or G
  MOD_RES (24)..(25)..(26)..(27): Xaa is A or G or is absent
VKXQPSRVHHEPLPVVYYXXXXXXXXXEQLSNRLEEHLEXAXA

SEQ ID NO: 55640 - protein, 39 aa, Artificial Sequence; identical to SEQ ID NO: 19824
  GFR-binding peptide
  MOD_RES (1)..(38): Xaa is C or S
  MOD_RES (17)..(18)..(19)..(20)..(21): Xaa is A or G
  MOD_RES (22)..(23)..(24)..(25): Xaa is A or G or is absent

SEQ ID NO: 55641 - protein, 32 aa, Artificial Sequence
  GFR-binding peptide
  MOD_RES (1)..(2): Xaa is C or S
XXVPQALRSVKIAKVVGRKPKVKEVQVMIVRS

SEQ ID NO: 55642 - protein, 40 aa, Artificial Sequence; identical to SEQ ID NO: 16688
  GFR-binding peptide
  MOD_RES (5)..(39): Xaa is C or S
  MOD_RES (19)..(20)..(21)..(22)..(23): Xaa is A or G
  MOD_RES (24)..(25)..(26)..(27): Xaa is A or G or is absent

SEQ ID NO: 55643 - protein, 34 aa, Artificial Sequence
  GFR-binding peptide
  MOD_RES (31)..(33): Xaa is C or S
VPQALRSVKIAKVVGRKPKVKEVQVMIVRSXKXS

SEQ ID NO: 55644 - protein, 42 aa, Artificial Sequence
  GFR-binding peptide
  MOD_RES (5)..(42): Xaa is C or S
  MOD_RES (21)..(22)..(23)..(24)..(25): Xaa is A or G
  MOD_RES (26)..(27)..(28)..(29): Xaa is A or G or is absent
SSVKXQPSRVHHEPLPVVYYXXXXXXXXXEQLSNRLEEHLEX

SEQ ID NO: 55645 - protein, 36 aa, Artificial Sequence
  GFR-binding peptide
  MOD_RES (3)..(4)..(36): Xaa is C or S
KAXXVPTELSNITMQIMDENEKVVIGEMSDMVVEGX

SEQ ID NO: 55646 - protein, 33 aa, Artificial Sequence; identical to SEQ ID NO: 16693
  GFR-binding peptide
  MOD_RES (2)..(3): Xaa is C or S

SEQ ID NO: 55647 - protein, 40 aa, Artificial Sequence
  GFR-binding peptide
  MOD_RES (4)..(5)..(39): Xaa is C or S
  MOD_RES (19)..(20)..(21)..(22)..(23): Xaa is A or G
  MOD_RES (24)..(25)..(26)..(27): Xaa is A or G or is absent
PKAXXVPTELSNITMQIMXXXXXXXXXIGEMSEMVVEGXG

SEQ ID NO: 55648 - protein, 43 aa, Artificial Sequence; identical to SEQ ID NO: 19828
  GFR-binding peptide
  MOD_RES (4)..(41)..(43): Xaa is C or S
  MOD_RES (20)..(21)..(22)..(23)..(24): Xaa is A or G
  MOD_RES (25)..(26)..(27)..(28): Xaa is A or G or is absent

SEQ ID NO: 55649 - protein, 35 aa, Artificial Sequence
  GFR-binding peptide
  MOD_RES (1)..(2)..(34): Xaa is C or S
XXAPTQLRPVQVRKIDDSSNVIKKATVNMVVRAXG

SEQ ID NO: 55650 - protein, 39 aa, Artificial Sequence; identical to SEQ ID NO: 16696
  GFR-binding peptide
  MOD_RES (6)..(7): Xaa is C or S
  MOD_RES (21)..(22)..(23)..(24)..(25): Xaa is A or G
  MOD_RES (26)..(27)..(28)..(29): Xaa is A or G or is absent

SEQ ID NO: 55651 - protein, 41 aa, Artificial Sequence
  GFR-binding peptide
  MOD_RES (3)..(4)..(38)..(40): Xaa is C or S
  MOD_RES (18)..(19)..(20)..(21)..(22): Xaa is A or G
  MOD_RES (23)..(24)..(25)..(26): Xaa is A or G or is absent
KPXXAPTQLRPVQVRKIXXXXXXXXXKKATVNMVVRAXGXH

SEQ ID NO: 55652 - protein, 41 aa, Artificial Sequence
  GFR-binding peptide
  MOD_RES (5)..(6)..(40): Xaa is C or S
  MOD_RES (20)..(21)..(22)..(23)..(24): Xaa is A or G
  MOD_RES (25)..(26)..(27)..(28): Xaa is A or G or is absent
VPKPXXAPTKLRSVKVAKVXXXXXXXXXKEVQVNMVVRSXG

SEQ ID NO: 55653 - protein, 38 aa, Artificial Sequence; identical to SEQ ID NO: 19830
  GFR-binding peptide
  MOD_RES (3)..(37): Xaa is C or S
  MOD_RES (17)..(18)..(19)..(20)..(21): Xaa is A or G
  MOD_RES (22)..(23)..(24)..(25): Xaa is A or G or is absent

SEQ ID NO: 55654 - protein, 32 aa, Artificial Sequence
  GFR-binding peptide
  MOD_RES (14)..(15)..(16)..(17)..(18): Xaa is A or G
  MOD_RES (19)..(20)..(21)..(22): Xaa is A or G or is absent
APTQLRPVQVRKIXXXXXXXXXKKATVNMVVR

SEQ ID NO: 55655 - protein, 41 aa, Artificial Sequence
  GFR-binding peptide
  MOD_RES (6)..(7)..(41): Xaa is C or S
  MOD_RES (21)..(22)..(23)..(24)..(25): Xaa is A or G
  MOD_RES (26)..(27)..(28)..(29): Xaa is A or G or is absent
SIPKAXXVPTELRSVKMAKVXXXXXXXXXKEVQVEMVVEGX

SEQ ID NO: 55656 - protein, 37 aa, Artificial Sequence; identical to SEQ ID NO: 16700
  GFR-binding peptide
  MOD_RES (2)..(3)..(35)..(37): Xaa is C or S

SEQ ID NO: 55657 - protein, 36 aa, Artificial Sequence
  GFR-binding peptide
  MOD_RES (4)..(4): Xaa is C or S
  MOD_RES (18)..(19)..(20)..(21)..(22): Xaa is A or G
  MOD_RES (23)..(24)..(25)..(26): Xaa is A or G or is absent
KPTXAPTKLRSVKVAKVXXXXXXXXXKEVQVNMVVR

SEQ ID NO: 55658 - protein, 34 aa, Artificial Sequence
  GFR-binding peptide
  MOD_RES (2)..(3)..(34): Xaa is C or S
PXXVSQDLSNITIQIMIGKTPKIIGEMSMIVKSX

SEQ ID NO: 55659 - protein, 36 aa, Artificial Sequence; identical to SEQ ID NO: 19834
  GFR-binding peptide
  MOD_RES (2)..(2): Xaa is C or S
  MOD_RES (18)..(19)..(20)..(21)..(22): Xaa is A or G
  MOD_RES (23)..(24)..(25)..(26): Xaa is A or G or is absent

SEQ ID NO: 55660 - protein, 42 aa, Artificial Sequence; identical to SEQ ID NO: 19836
  GFR-binding peptide
  MOD_RES (6)..(40)..(42): Xaa is C or S
  MOD_RES (20)..(21)..(22)..(23)..(24): Xaa is A or G
  MOD_RES (25)..(26)..(27)..(28): Xaa is A or G or is absent

SEQ ID NO: 55661 - protein, 39 aa, Artificial Sequence; identical to SEQ ID NO: 16703
  GFR-binding peptide
  MOD_RES (5)..(6)..(39): Xaa is C or S
  MOD_RES (20)..(21)..(22)..(23)..(24): Xaa is A or G
  MOD_RES (25)..(26)..(27)..(28): Xaa is A or G or is absent

SEQ ID NO: 55662 - protein, 40 aa, Artificial Sequence; identical to SEQ ID NO: 19838
  GFR-binding peptide
  MOD_RES (2)..(39): Xaa is C or S
  MOD_RES (18)..(19)..(20)..(21)..(22): Xaa is A or G
  MOD_RES (23)..(24)..(25)..(26): Xaa is A or G or is absent

SEQ ID NO: 55663 - protein, 35 aa, Artificial Sequence; identical to SEQ ID NO: 16706
  GFR-binding peptide
  MOD_RES (3)..(4): Xaa is C or S

SEQ ID NO: 55664 - protein, 42 aa, Artificial Sequence; identical to SEQ ID NO: 19839
  GFR-binding peptide
  MOD_RES (3)..(40)..(42): Xaa is C or S
  MOD_RES (19)..(20)..(21)..(22)..(23): Xaa is A or G
  MOD_RES (24)..(25)..(26)..(27): Xaa is A or G or is absent

SEQ ID NO: 55665 - protein, 39 aa, Artificial Sequence
  GFR-binding peptide
  MOD_RES (3)..(37)..(39): Xaa is C or S
  MOD_RES (17)..(18)..(19)..(20)..(21): Xaa is A or G
  MOD_RES (22)..(23)..(24)..(25): Xaa is A or G or is absent
LEXVPTEEEPLTMLYYXXXXXXXXXEQLSNFLQHNKXEX

SEQ ID NO: 55666 - protein, 33 aa, Artificial Sequence; identical to SEQ ID NO: 16708
  GFR-binding peptide
  MOD_RES (32)..(32): Xaa is C or S

SEQ ID NO: 55667 - protein, 33 aa, Artificial Sequence
  GFR-binding peptide
  MOD_RES (32)..(32): Xaa is C or S
APTKLRPVQVRKIDDSSNVIKKATVNMVVRSXG

SEQ ID NO: 55668 - protein, 38 aa, Artificial Sequence
  GFR-binding peptide
  MOD_RES (1)..(2)..(36)..(38): Xaa is C or S
  MOD_RES (16)..(17)..(18)..(19)..(20): Xaa is A or G
  MOD_RES (21)..(22)..(23)..(24): Xaa is A or G or is absent
XXVPTELRSVKMAKVXXXXXXXXXKEVQVDMVVEGXGX

SEQ ID NO: 55669 - protein, 38 aa, Artificial Sequence; identical to SEQ ID NO: 16713
  GFR-binding peptide
  MOD_RES (5)..(6): Xaa is C or S
  MOD_RES (20)..(21)..(22)..(23)..(24): Xaa is A or G
  MOD_RES (25)..(26)..(27)..(28): Xaa is A or G or is absent

SEQ ID NO: 55670 - protein, 34 aa, Artificial Sequence
  GFR-binding peptide
  MOD_RES (1)..(32)..(34): Xaa is C or S
XVSQDLRPVQIRKIIGKTPKIKKATVMIVKSXKX

SEQ ID NO: 55671 - protein, 39 aa, Artificial Sequence
  GFR-binding peptide
  MOD_RES (2)..(3)..(37)..(39): Xaa is C or S
  MOD_RES (17)..(18)..(19)..(20)..(21): Xaa is A or G
  MOD_RES (22)..(23)..(24)..(25): Xaa is A or G or is absent
AXXVPTELSNITMQIMXXXXXXXXXIGEMSEMVVEGXGX

SEQ ID NO: 55672 - protein, 37 aa, Artificial Sequence; identical to SEQ ID NO: 19842
  GFR-binding peptide
  MOD_RES (35)..(37): Xaa is C or S
  MOD_RES (14)..(15)..(16)..(17)..(18): Xaa is A or G
  MOD_RES (19)..(20)..(21)..(22): Xaa is A or G or is absent

SEQ ID NO: 55673 - protein, 34 aa, Artificial Sequence
  GFR-binding peptide
  MOD_RES (1)..(34): Xaa is C or S
  MOD_RES (15)..(16)..(17)..(18)..(19): Xaa is A or G
  MOD_RES (20)..(21)..(22)..(23): Xaa is A or G or is absent
XVPQALRPVQIRKIXXXXXXXXXKKATVMIVRSX

SEQ ID NO: 55674 - protein, 39 aa, Artificial Sequence; identical to SEQ ID NO: 19849
  GFR-binding peptide
  MOD_RES (3)..(3): Xaa is C or S

SEQ ID NO: 55675 - protein, 35 aa, Artificial Sequence
  GFR-binding peptide
  MOD_RES (2)..(2): Xaa is C or S
EXVPTEEEPLTMLYYRIKPHQGQHEQLSNFLQHNK

SEQ ID NO: 55676 - protein, 35 aa, Artificial Sequence
  GFR-binding peptide
  MOD_RES (2)..(2): Xaa is C or S
  MOD_RES (16)..(17)..(18)..(19)..(20): Xaa is A or G
  MOD_RES (21)..(22)..(23)..(24): Xaa is A or G or is absent
TXAPTKLRSVKVAKVXXXXXXXXXKEVQVNMVVRS

SEQ ID NO: 55677 - protein, 37 aa, Artificial Sequence; identical to SEQ ID NO: 19854
  GFR-binding peptide
  MOD_RES (37)..(37): Xaa is C or S

SEQ ID NO: 55678 - protein, 38 aa, Artificial Sequence
  GFR-binding peptide
  MOD_RES (4)..(5): Xaa is C or S
  MOD_RES (19)..(20)..(21)..(22)..(23): Xaa is A or G
  MOD_RES (24)..(25)..(26)..(27): Xaa is A or G or is absent
PKAXXVPTELSNITMQIMXXXXXXXXXIGEMSEMVVEG

SEQ ID NO: 55679 - protein, 39 aa, Artificial Sequence; identical to SEQ ID NO: 40752
  GFR-binding peptide
  MOD_RES (6)..(7): Xaa is C or S
  MOD_RES (21)..(22)..(23)..(24)..(25): Xaa is A or G
  MOD_RES (26)..(27)..(28)..(29): Xaa is A or G or is absent

SEQ ID NO: 55680 - protein, 36 aa, Artificial Sequence; identical to SEQ ID NO: 19855
  GFR-binding peptide
  MOD_RES (1)..(35): Xaa is C or S

SEQ ID NO: 55681 - protein, 38 aa, Artificial Sequence
  GFR-binding peptide
  MOD_RES (4)..(4): Xaa is C or S
  MOD_RES (20)..(21)..(22)..(23)..(24): Xaa is A or G
  MOD_RES (25)..(26)..(27)..(28): Xaa is A or G or is absent
NVQXRPTQVQLEPLTVLYYXXXXXXXXXEQLSNTLEDH

SEQ ID NO: 55682 - protein, 36 aa, Artificial Sequence
  GFR-binding peptide
  MOD_RES (1)..(2)..(34)..(36): Xaa is C or S
XXAPTQLRPVQVRKIDDSSNVIKKATVNMVVRAXGX

SEQ ID NO: 55683 - protein, 43 aa, Artificial Sequence; identical to SEQ ID NO: 16723
  GFR-binding peptide
  MOD_RES (5)..(6)..(40)..(42): Xaa is C or S
  MOD_RES (20)..(21)..(22)..(23)..(24): Xaa is A or G
  MOD_RES (25)..(26)..(27)..(28): Xaa is A or G or is absent

SEQ ID NO: 55684 - protein, 37 aa, Artificial Sequence; identical to SEQ ID NO: 16724
  GFR-binding peptide
  MOD_RES (3)..(35)..(37): Xaa is C or S

SEQ ID NO: 55685 - protein, 33 aa, Artificial Sequence
  GFR-binding peptide
  MOD_RES (33)..(33): Xaa is C or S
  MOD_RES (14)..(15)..(16)..(17)..(18): Xaa is A or G
  MOD_RES (19)..(20)..(21)..(22): Xaa is A or G or is absent
VPQDLRSVKIAKVXXXXXXXXXKEVQVMVVKSX

SEQ ID NO: 55686 - protein, 34 aa, Artificial Sequence; identical to SEQ ID NO: 16725
  GFR-binding peptide
  MOD_RES (1)..(2)..(34): Xaa is C or S

SEQ ID NO: 55687 - protein, 37 aa, Artificial Sequence
  GFR-binding peptide
  MOD_RES (3)..(35)..(37): Xaa is C or S
PTXAPTKLSNITVQIMDDSSNVIIGEMSNMVVRSXGX

SEQ ID NO: 55688 - protein, 35 aa, Artificial Sequence; identical to SEQ ID NO: 19862
  GFR-binding peptide

SEQ ID NO: 55689 - protein, 35 aa, Artificial Sequence
  GFR-binding peptide
  MOD_RES (1)..(2): Xaa is C or S
  MOD_RES (16)..(17)..(18)..(19)..(20): Xaa is A or G
  MOD_RES (21)..(22)..(23)..(24): Xaa is A or G or is absent
XXAPTKLRPVQVRKIXXXXXXXXXKKATVNMVVRS

SEQ ID NO: 55690 - protein, 37 aa, Artificial Sequence
  GFR-binding peptide
  MOD_RES (3)..(3): Xaa is C or S
VKXQPSRVHHEPLTVLYYEYVRKKPKLEQLSNRLEEH

SEQ ID NO: 55691 - protein, 33 aa, Artificial Sequence
  GFR-binding peptide
  MOD_RES (31)..(33): Xaa is C or S
VPQDLRPVQIRKIVGRTPKVKKATVMVVKSXKX

SEQ ID NO: 55692 - protein, 37 aa, Artificial Sequence; identical to SEQ ID NO: 16728
  GFR-binding peptide
  MOD_RES (1)..(2)..(36): Xaa is C or S
  MOD_RES (16)..(17)..(18)..(19)..(20): Xaa is A or G
  MOD_RES (21)..(22)..(23)..(24): Xaa is A or G or is absent

SEQ ID NO: 55693 - protein, 40 aa, Artificial Sequence; identical to SEQ ID NO: 19867
  GFR-binding peptide
  MOD_RES (1)..(38)..(40): Xaa is C or S

SEQ ID NO: 55694 - protein, 44 aa, Artificial Sequence; identical to SEQ ID NO: 19868
  GFR-binding peptide
  MOD_RES (7)..(41)..(43): Xaa is C or S
  MOD_RES (21)..(22)..(23)..(24)..(25): Xaa is A or G
  MOD_RES (26)..(27)..(28)..(29): Xaa is A or G or is absent

SEQ ID NO: 55695 - protein, 41 aa, Artificial Sequence
  GFR-binding peptide
  MOD_RES (5)..(39)..(41): Xaa is C or S
  MOD_RES (19)..(20)..(21)..(22)..(23): Xaa is A or G
  MOD_RES (24)..(25)..(26)..(27): Xaa is A or G or is absent
EGLEXVPTEEEPLTMLYYXXXXXXXXXEQLSNFLQHNKXEX

SEQ ID NO: 55696 - protein, 33 aa, Artificial Sequence
  GFR-binding peptide
  MOD_RES (1)..(1): Xaa is C or S
  MOD_RES (15)..(16)..(17)..(18)..(19): Xaa is A or G
  MOD_RES (20)..(21)..(22)..(23): Xaa is A or G or is absent
XAPTKLSNITVQIMXXXXXXXXXIGEMSNMVVR

SEQ ID NO: 55697 - protein, 36 aa, Artificial Sequence; identical to SEQ ID NO: 19870
  GFR-binding peptide
  MOD_RES (1)..(1): Xaa is C or S

SEQ ID NO: 55698 - protein, 31 aa, Artificial Sequence; identical to SEQ ID NO: 16732
  GFR-binding peptide

SEQ ID NO: 55699 - protein, 38 aa, Artificial Sequence; identical to SEQ ID NO: 16733
  GFR-binding peptide
  MOD_RES (6)..(7): Xaa is C or S

SEQ ID NO: 55700 - protein, 39 aa, Artificial Sequence; identical to SEQ ID NO: 16734
  GFR-binding peptide
  MOD_RES (4)..(5)..(39): Xaa is C or S
  MOD_RES (19)..(20)..(21)..(22)..(23): Xaa is A or G
  MOD_RES (24)..(25)..(26)..(27): Xaa is A or G or is absent

SEQ ID NO: 55701 - protein, 38 aa, Artificial Sequence; identical to SEQ ID NO: 16737
  GFR-binding peptide
  MOD_RES (3)..(4)..(37): Xaa is C or S
  MOD_RES (18)..(19)..(20)..(21)..(22): Xaa is A or G
  MOD_RES (23)..(24)..(25)..(26): Xaa is A or G or is absent

SEQ ID NO: 55702 - protein, 34 aa, Artificial Sequence
  GFR-binding peptide
  MOD_RES (1)..(2)..(34): Xaa is C or S
XXVPTELSNITMQIMDEYDKVVIGEMSEMVVEGX

SEQ ID NO: 55703 - protein, 34 aa, Artificial Sequence
  GFR-binding peptide
  MOD_RES (32)..(34): Xaa is C or S
APTKLRSVKVAKVDDSSNVIKEVQVNMVVRSXGX

SEQ ID NO: 55704 - protein, 37 aa, Artificial Sequence
  GFR-binding peptide
  MOD_RES (4)..(5)..(37): Xaa is C or S
PKAXXVPTELRPVQMRKIDENEKVVKKATVDMVVEGX

SEQ ID NO: 55705 - protein, 40 aa, Artificial Sequence; identical to SEQ ID NO: 19874
  GFR-binding peptide
  MOD_RES (4)..(4): Xaa is C or S

SEQ ID NO: 55706 - protein, 36 aa, Artificial Sequence
  GFR-binding peptide
  MOD_RES (2)..(34)..(36): Xaa is C or S
TXAPTKLRSVKVAKVDDSSNVIKEVQVNMVVRSXGX

SEQ ID NO: 55707 - protein, 35 aa, Artificial Sequence; identical to SEQ ID NO: 19875
  GFR-binding peptide
  MOD_RES (15)..(16)..(17)..(18)..(19): Xaa is A or G
  MOD_RES (20)..(21)..(22)..(23): Xaa is A or G or is absent

SEQ ID NO: 55708 - protein, 39 aa, Artificial Sequence
  GFR-binding peptide
  MOD_RES (5)..(6)..(37)..(39): Xaa is C or S
SASPXXVSQDLSNITIQIMIGKTPKIIGEMSMIVKSXKX

SEQ ID NO: 55709 - protein, 43 aa, Artificial Sequence; identical to SEQ ID NO: 19876
  GFR-binding peptide
  MOD_RES (4)..(41)..(43): Xaa is C or S
  MOD_RES (20)..(21)..(22)..(23)..(24): Xaa is A or G
  MOD_RES (25)..(26)..(27)..(28): Xaa is A or G or is absent

SEQ ID NO: 55710 - protein, 40 aa, Artificial Sequence
  GFR-binding peptide
  MOD_RES (6)..(7)..(38)..(40): Xaa is C or S
ASASPXXVPQDLSNITIQIMVGRTPKVIGEMSMVVKSXKX

SEQ ID NO: 55711 - protein, 41 aa, Artificial Sequence; identical to SEQ ID NO: 19877
  GFR-binding peptide
  MOD_RES (5)..(39)..(41): Xaa is C or S
  MOD_RES (19)..(20)..(21)..(22)..(23): Xaa is A or G
  MOD_RES (24)..(25)..(26)..(27): Xaa is A or G or is absent

SEQ ID NO: 55712 - protein, 38 aa, Artificial Sequence
  GFR-binding peptide
  MOD_RES (4)..(4): Xaa is C or S
NVQXRPTQVQLEPLPVVYYEIVRKKPIFEQLSNTLEDH

SEQ ID NO: 55713 - protein, 36 aa, Artificial Sequence; identical to SEQ ID NO: 19879
  GFR-binding peptide
  MOD_RES (2)..(2): Xaa is C or S

SEQ ID NO: 55714 - protein, 42 aa, Artificial Sequence
  GFR-binding peptide
  MOD_RES (7)..(41): Xaa is C or S
  MOD_RES (21)..(22)..(23)..(24)..(25): Xaa is A or G
  MOD_RES (26)..(27)..(28)..(29): Xaa is A or G or is absent
HVTKPTXAPTKLRPVQVRKIXXXXXXXXXKKATVNMVVRSXG

SEQ ID NO: 55715 - protein, 31 aa, Artificial Sequence; identical to SEQ ID NO: 16754
  GFR-binding peptide
  MOD_RES (1)..(1): Xaa is C or S

SEQ ID NO: 55716 - protein, 42 aa, Artificial Sequence; identical to SEQ ID NO: 16755
  GFR-binding peptide
  MOD_RES (5)..(6)..(40)..(42): Xaa is C or S
  MOD_RES (20)..(21)..(22)..(23)..(24): Xaa is A or G
  MOD_RES (25)..(26)..(27)..(28): Xaa is A or G or is absent

SEQ ID NO: 55717 - protein, 36 aa, Artificial Sequence
  GFR-binding peptide
  MOD_RES (5)..(5): Xaa is C or S
TKPTXAPTKLRPVQVRKIDDSSNVIKKATVNMVVRS

SEQ ID NO: 55718 - protein, 39 aa, Artificial Sequence
  GFR-binding peptide
  MOD_RES (6)..(6): Xaa is C or S
DEGLEXVPTEEEPLPMVYYRIKPHQGQHEQLSNFLQHNK

SEQ ID NO: 55719 - protein, 35 aa, Artificial Sequence; identical to SEQ ID NO: 19886
  GFR-binding peptide
  MOD_RES (3)..(3): Xaa is C or S
  MOD_RES (17)..(18)..(19)..(20)..(21): Xaa is A or G
  MOD_RES (22)..(23)..(24)..(25): Xaa is A or G or is absent

SEQ ID NO: 55720 - protein, 38 aa, Artificial Sequence; identical to SEQ ID NO: 16757
  GFR-binding peptide
  MOD_RES (3)..(4)..(35)..(37): Xaa is C or S

SEQ ID NO: 55721 - protein, 34 aa, Artificial Sequence; identical to SEQ ID NO: 19888
  GFR-binding peptide
  MOD_RES (14)..(15)..(16)..(17)..(18): Xaa is A or G
  MOD_RES (19)..(20)..(21)..(22): Xaa is A or G or is absent

SEQ ID NO: 55722 - protein, 41 aa, Artificial Sequence; identical to SEQ ID NO: 16760
  GFR-binding peptide
  MOD_RES (5)..(6)..(38)..(40): Xaa is C or S

SEQ ID NO: 55723 - protein, 37 aa, Artificial Sequence
  GFR-binding peptide
  MOD_RES (3)..(37): Xaa is C or S
  MOD_RES (17)..(18)..(19)..(20)..(21): Xaa is A or G
  MOD_RES (22)..(23)..(24)..(25): Xaa is A or G or is absent
PTXAPTKLRPVQVRKIXXXXXXXXXKKATVNMVVRSX

SEQ ID NO: 55724 - protein, 38 aa, Artificial Sequence
  GFR-binding peptide
  MOD_RES (1)..(2)..(35)..(37): Xaa is C or S
  MOD_RES (16)..(17)..(18)..(19)..(20): Xaa is A or G
  MOD_RES (21)..(22)..(23)..(24): Xaa is A or G or is absent
XXVPQALRSVKIAKVXXXXXXXXXKEVQVMIVRSXKXS

SEQ ID NO: 55725 - protein, 40 aa, Artificial Sequence
  GFR-binding peptide
  MOD_RES (6)..(7)..(40): Xaa is C or S
  MOD_RES (21)..(22)..(23)..(24)..(25): Xaa is A or G
  MOD_RES (26)..(27)..(28)..(29): Xaa is A or G or is absent
ASASPXXVSQDLRPVQIRKIXXXXXXXXXKKATVMIVKSX

SEQ ID NO: 55726 - protein, 44 aa, Artificial Sequence; identical to SEQ ID NO: 19892
  GFR-binding peptide
  MOD_RES (5)..(42)..(44): Xaa is C or S
  MOD_RES (21)..(22)..(23)..(24)..(25): Xaa is A or G
  MOD_RES (26)..(27)..(28)..(29): Xaa is A or G or is absent

SEQ ID NO: 55727 - protein, 35 aa, Artificial Sequence; identical to SEQ ID NO: 16764
  GFR-binding peptide
  MOD_RES (1)..(2)..(35): Xaa is C or S
  MOD_RES (16)..(17)..(18)..(19)..(20): Xaa is A or G
  MOD_RES (21)..(22)..(23)..(24): Xaa is A or G or is absent

SEQ ID NO: 55728 - protein, 34 aa, Artificial Sequence
  GFR-binding peptide
  MOD_RES (34)..(34): Xaa is C or S
  MOD_RES (14)..(15)..(16)..(17)..(18): Xaa is A or G
  MOD_RES (19)..(20)..(21)..(22): Xaa is A or G or is absent
APTQLRSVKVAKVXXXXXXXXXKEVQVNMVVRAX

SEQ ID NO: 55729 - protein, 38 aa, Artificial Sequence
  GFR-binding peptide
  MOD_RES (5)..(6): Xaa is C or S
  MOD_RES (20)..(21)..(22)..(23)..(24): Xaa is A or G
  MOD_RES (25)..(26)..(27)..(28): Xaa is A or G or is absent
IPKAXXVPTELRSVKMAKVXXXXXXXXXKEVQVEMVVE

SEQ ID NO: 55730 - protein, 38 aa, Artificial Sequence
  GFR-binding peptide
  MOD_RES (5)..(6)..(38): Xaa is C or S
IPKAXXVPTELRPVQMRKIDENEKVVKKATVDMVVEGX

SEQ ID NO: 55731 - protein, 34 aa, Artificial Sequence; identical to SEQ ID NO: 16766
  GFR-binding peptide
  MOD_RES (3)..(4): Xaa is C or S

SEQ ID NO: 55732 - protein, 35 aa, Artificial Sequence
  GFR-binding peptide
  MOD_RES (16)..(17)..(18)..(19)..(20): Xaa is A or G
  MOD_RES (21)..(22)..(23)..(24): Xaa is A or G or is absent
RPTQVQLEPLPVVYYXXXXXXXXXEQLSNTLEDHL

SEQ ID NO: 55733 - protein, 34 aa, Artificial Sequence
  GFR-binding peptide
  MOD_RES (1)..(2): Xaa is C or S
  MOD_RES (16)..(17)..(18)..(19)..(20): Xaa is A or G
  MOD_RES (21)..(22)..(23)..(24): Xaa is A or G or is absent
XXVPQDLRPVQIRKIXXXXXXXXXKKATVMVVKS

SEQ ID NO: 55734 - protein, 34 aa, Artificial Sequence
  GFR-binding peptide
  MOD_RES (1)..(33): Xaa is C or S
XVPTELRSVKMAKVDEYDKVVKEVQVEMVVEGXG

SEQ ID NO: 55735 - protein, 37 aa, Artificial Sequence
  GFR-binding peptide
  MOD_RES (5)..(6): Xaa is C or S
VPKPXXAPTQLSNITVQIMDDSSNVIIGEMSNMVVRA

SEQ ID NO: 55736 - protein, 39 aa, Artificial Sequence
  GFR-binding peptide
  MOD_RES (5)..(6): Xaa is C or S
  MOD_RES (20)..(21)..(22)..(23)..(24): Xaa is A or G
  MOD_RES (25)..(26)..(27)..(28): Xaa is A or G or is absent
VPKPXXAPTKLRSVKVAKVXXXXXXXXXKEVQVNMVVRS

SEQ ID NO: 55737 - protein, 40 aa, Artificial Sequence
  GFR-binding peptide
  MOD_RES (5)..(6)..(40): Xaa is C or S
  MOD_RES (20)..(21)..(22)..(23)..(24): Xaa is A or G
  MOD_RES (25)..(26)..(27)..(28): Xaa is A or G or is absent
IPKAXXVPTELRSVKMAKVXXXXXXXXXKEVQVEMVVEGX

SEQ ID NO: 55738 - protein, 40 aa, Artificial Sequence
  GFR-binding peptide
  MOD_RES (4)..(5)..(39): Xaa is C or S
  MOD_RES (19)..(20)..(21)..(22)..(23): Xaa is A or G
  MOD_RES (24)..(25)..(26)..(27): Xaa is A or G or is absent
PKPXXAPTKLRPVQVRKIXXXXXXXXXKKATVNMVVRSXG

SEQ ID NO: 55739 - protein, 34 aa, Artificial Sequence
  GFR-binding peptide
  MOD_RES (1)..(33): Xaa is C or S
XVPTELRPVQMRKIDENEKVVKKATVDMVVEGXG

SEQ ID NO: 55740 - protein, 44 aa, Artificial Sequence
  GFR-binding peptide
  MOD_RES (6)..(7)..(41)..(43): Xaa is C or S
  MOD_RES (21)..(22)..(23)..(24)..(25): Xaa is A or G
  MOD_RES (26)..(27)..(28)..(29): Xaa is A or G or is absent
KIPKAXXVPTELRSVKMAKVXXXXXXXXXKEVQVDMVVEGXGXR

SEQ ID NO: 55741 - protein, 39 aa, Artificial Sequence
  GFR-binding peptide
  MOD_RES (3)..(3): Xaa is C or S
VQXRPTQVQLEPLTVLYYEIVRKKPIFEQLSNTLEDHLA

SEQ ID NO: 55742 - protein, 43 aa, Artificial Sequence; identical to SEQ ID NO: 19899
  GFR-binding peptide
  MOD_RES (3)..(40)..(42): Xaa is C or S

SEQ ID NO: 55743 - protein, 33 aa, Artificial Sequence
  GFR-binding peptide
  MOD_RES (1)..(1): Xaa is C or S
  MOD_RES (15)..(16)..(17)..(18)..(19): Xaa is A or G
  MOD_RES (20)..(21)..(22)..(23): Xaa is A or G or is absent
XVSQDLSNITIQIMXXXXXXXXXIGEMSMIVKS

SEQ ID NO: 55744 - protein, 35 aa, Artificial Sequence; identical to SEQ ID NO: 16773
  GFR-binding peptide
  MOD_RES (2)..(3): Xaa is C or S
  MOD_RES (17)..(18)..(19)..(20)..(21): Xaa is A or G
  MOD_RES (22)..(23)..(24)..(25): Xaa is A or G or is absent

SEQ ID NO: 55745 - protein, 40 aa, Artificial Sequence; identical to SEQ ID NO: 16774
  GFR-binding peptide
  MOD_RES (6)..(38)..(40): Xaa is C or S

SEQ ID NO: 55746 - protein, 32 aa, Artificial Sequence
  GFR-binding peptide
  MOD_RES (32)..(32): Xaa is C or S
VPTELRPVQMRKIDEYDKVVKKATVEMVVEGX

SEQ ID NO: 55747 - protein, 35 aa, Artificial Sequence
  GFR-binding peptide
  MOD_RES (3)..(4)..(35): Xaa is C or S
SPXXVSQDLRSVKIAKVIGKTPKIKEVQVMIVKSX

SEQ ID NO: 55748 - protein, 37 aa, Artificial Sequence
  GFR-binding peptide
  MOD_RES (3)..(4)..(35)..(37): Xaa is C or S
SPXXVPQDLRPVQIRKIVGRTPKVKKATVMVVKSXKX

SEQ ID NO: 55749 - protein, 38 aa, Artificial Sequence; identical to SEQ ID NO: 19900
  GFR-binding peptide
  MOD_RES (6)..(6): Xaa is C or S
  MOD_RES (20)..(21)..(22)..(23)..(24): Xaa is A or G
  MOD_RES (25)..(26)..(27)..(28): Xaa is A or G or is absent

SEQ ID NO: 55750 - protein, 34 aa, Artificial Sequence; identical to SEQ ID NO: 16778
  GFR-binding peptide
  MOD_RES (1)..(33): Xaa is C or S

SEQ ID NO: 55751 - protein, 37 aa, Artificial Sequence; identical to SEQ ID NO: 16779
  GFR-binding peptide
  MOD_RES (3)..(4)..(37): Xaa is C or S
  MOD_RES (18)..(19)..(20)..(21)..(22): Xaa is A or G
  MOD_RES (23)..(24)..(25)..(26): Xaa is A or G or is absent

SEQ ID NO: 55752 - protein, 37 aa, Artificial Sequence
  GFR-binding peptide
  MOD_RES (2)..(3)..(35)..(37): Xaa is C or S
AXXVPTELRPVQMRKIDEYDKVVKKATVEMVVEGXGX

SEQ ID NO: 55753 - protein, 38 aa, Artificial Sequence
  GFR-binding peptide
  MOD_RES (5)..(6): Xaa is C or S
  MOD_RES (20)..(21)..(22)..(23)..(24): Xaa is A or G
  MOD_RES (25)..(26)..(27)..(28): Xaa is A or G or is absent
IPKAXXVPTELRPVQMRKIXXXXXXXXXKKATVEMVVE

SEQ ID NO: 55754 - protein, 41 aa, Artificial Sequence; identical to SEQ ID NO: 19904
  GFR-binding peptide
  MOD_RES (4)..(38)..(40): Xaa is C or S

SEQ ID NO: 55755 - protein, 42 aa, Artificial Sequence
  GFR-binding peptide
  MOD_RES (6)..(7)..(40)..(42): Xaa is C or S
  MOD_RES (21)..(22)..(23)..(24)..(25): Xaa is A or G
  MOD_RES (26)..(27)..(28)..(29): Xaa is A or G or is absent
ASASPXXVSQDLSNITIQIMXXXXXXXXXIGEMSMIVKSXKX

SEQ ID NO: 55756 - protein, 42 aa, Artificial Sequence
  GFR-binding peptide
  MOD_RES (7)..(39)..(41): Xaa is C or S
HVTKPTXAPTKLSNITVQIMDDSSNVIIGEMSNMVVRSXGXH

SEQ ID NO: 55757 - protein, 42 aa, Artificial Sequence; identical to SEQ ID NO: 16780
  GFR-binding peptide
  MOD_RES (5)..(6)..(40)..(42): Xaa is C or S
  MOD_RES (20)..(21)..(22)..(23)..(24): Xaa is A or G
  MOD_RES (25)..(26)..(27)..(28): Xaa is A or G or is absent

SEQ ID NO: 55758 - protein, 36 aa, Artificial Sequence
  GFR-binding peptide
  MOD_RES (2)..(3)..(34)..(36): Xaa is C or S
PXXVPQALSNITIQIMVGRKPKVIGEMSMIVRSXKX

SEQ ID NO: 55759 - protein, 37 aa, Artificial Sequence; identical to SEQ ID NO: 19907
  GFR-binding peptide
  MOD_RES (36)..(36): Xaa is C or S
  MOD_RES (15)..(16)..(17)..(18)..(19): Xaa is A or G
  MOD_RES (20)..(21)..(22)..(23): Xaa is A or G or is absent

SEQ ID NO: 55760 - protein, 34 aa, Artificial Sequence
  GFR-binding peptide
  MOD_RES (1)..(2): Xaa is C or S
  MOD_RES (16)..(17)..(18)..(19)..(20): Xaa is A or G
  MOD_RES (21)..(22)..(23)..(24): Xaa is A or G or is absent
XXVPQDLRSVKIAKVXXXXXXXXXKEVQVMVVKS

SEQ ID NO: 55761 - protein, 36 aa, Artificial Sequence
  GFR-binding peptide
  MOD_RES (1)..(2)..(34)..(36): Xaa is C or S
XXVPTELRPVQMRKIDEYDKVVKKATVEMVVEGXGX

SEQ ID NO: 55762 - protein, 39 aa, Artificial Sequence; identical to SEQ ID NO: 19910
  GFR-binding peptide
  MOD_RES (4)..(38): Xaa is C or S

SEQ ID NO: 55763 - protein, 35 aa, Artificial Sequence
  GFR-binding peptide
  MOD_RES (34)..(34): Xaa is C or S
  MOD_RES (14)..(15)..(16)..(17)..(18): Xaa is A or G
  MOD_RES (19)..(20)..(21)..(22): Xaa is A or G or is absent
VPTEEEPLPMVYYXXXXXXXXXEQLSNFLQHNKXE

SEQ ID NO: 55764 - protein, 41 aa, Artificial Sequence
  GFR-binding peptide
  MOD_RES (4)..(5)..(39)..(41): Xaa is C or S
  MOD_RES (19)..(20)..(21)..(22)..(23): Xaa is A or G
  MOD_RES (24)..(25)..(26)..(27): Xaa is A or G or is absent
PKPXXAPTKLRPVQVRKIXXXXXXXXXKKATVNMVVRSXGX

SEQ ID NO: 55765 - protein, 35 aa, Artificial Sequence
  GFR-binding peptide
  MOD_RES (2)..(3)..(34): Xaa is C or S
PXXVPQDLSNITIQIMVGRTPKVIGEMSMVVKSXK

SEQ ID NO: 55766 - protein, 35 aa, Artificial Sequence; identical to SEQ ID NO: 19912
  GFR-binding peptide
  MOD_RES (3)..(3): Xaa is C or S
  MOD_RES (17)..(18)..(19)..(20)..(21): Xaa is A or G
  MOD_RES (22)..(23)..(24)..(25): Xaa is A or G or is absent

SEQ ID NO: 55767 - protein, 37 aa, Artificial Sequence; identical to SEQ ID NO: 16784
  GFR-binding peptide
  MOD_RES (4)..(5): Xaa is C or S
  MOD_RES (19)..(20)..(21)..(22)..(23): Xaa is A or G
  MOD_RES (24)..(25)..(26)..(27): Xaa is A or G or is absent

SEQ ID NO: 55768 - protein, 30 aa, Artificial Sequence
  GFR-binding peptide
VSQDLSNITIQIMIGKTPKIIGEMSMIVKS

SEQ ID NO: 55769 - protein, 39 aa, Artificial Sequence
  GFR-binding peptide
  MOD_RES (6)..(7)..(38): Xaa is C or S
ASASPXXVPQDLSNITIQIMVGRTPKVIGEMSMVVKSXK

SEQ ID NO: 55770 - protein, 39 aa, Artificial Sequence
  GFR-binding peptide
  MOD_RES (3)..(4)..(38): Xaa is C or S
  MOD_RES (18)..(19)..(20)..(21)..(22): Xaa is A or G
  MOD_RES (23)..(24)..(25)..(26): Xaa is A or G or is absent
KAXXVPTELSNITMQIMXXXXXXXXXIGEMSEMVVEGXG

SEQ ID NO: 55771 - protein, 36 aa, Artificial Sequence; identical to SEQ ID NO: 16789
  GFR-binding peptide
  MOD_RES (1)..(2)..(36): Xaa is C or S
  MOD_RES (16)..(17)..(18)..(19)..(20): Xaa is A or G
  MOD_RES (21)..(22)..(23)..(24): Xaa is A or G or is absent

SEQ ID NO: 55772 - protein, 39 aa, Artificial Sequence; identical to SEQ ID NO: 16792
  GFR-binding peptide
  MOD_RES (3)..(37)..(39): Xaa is C or S
  MOD_RES (17)..(18)..(19)..(20)..(21): Xaa is A or G
  MOD_RES (22)..(23)..(24)..(25): Xaa is A or G or is absent

SEQ ID NO: 55773 - protein, 39 aa, Artificial Sequence
  GFR-binding peptide
  MOD_RES (4)..(5)..(39): Xaa is C or S
  MOD_RES (19)..(20)..(21)..(22)..(23): Xaa is A or G
  MOD_RES (24)..(25)..(26)..(27): Xaa is A or G or is absent
PKAXXVPTELSNITMQIMXXXXXXXXXIGEMSEMVVEGX

SEQ ID NO: 55774 - protein, 40 aa, Artificial Sequence
  GFR-binding peptide
  MOD_RES (3)..(40): Xaa is C or S
  MOD_RES (19)..(20)..(21)..(22)..(23): Xaa is A or G
  MOD_RES (24)..(25)..(26)..(27): Xaa is A or G or is absent
VQXRPTQVQLEPLPVVYYXXXXXXXXXEQLSNTLEDHLAX

SEQ ID NO: 55775 - protein, 37 aa, Artificial Sequence; identical to SEQ ID NO: 16793
  GFR-binding peptide
  MOD_RES (3)..(4): Xaa is C or S
  MOD_RES (18)..(19)..(20)..(21)..(22): Xaa is A or G
  MOD_RES (23)..(24)..(25)..(26): Xaa is A or G or is absent

SEQ ID NO: 55776 - protein, 42 aa, Artificial Sequence
  GFR-binding peptide
  MOD_RES (6)..(7)..(40)..(42): Xaa is C or S
  MOD_RES (21)..(22)..(23)..(24)..(25): Xaa is A or G
  MOD_RES (26)..(27)..(28)..(29): Xaa is A or G or is absent
ASAAPXXVPQALSNITIQIMXXXXXXXXXIGEMSMIVRSXKX

SEQ ID NO: 55777 - protein, 33 aa, Artificial Sequence
  GFR-binding peptide
  MOD_RES (2)..(3): Xaa is C or S
PXXVSQDLRPVQIRKIIGKTPKIKKATVMIVKS

SEQ ID NO: 55778 - protein, 37 aa, Artificial Sequence
  GFR-binding peptide
  MOD_RES (3)..(3): Xaa is C or S
VKXQPSRVHHEPLPVVYYEYVRKKPKLEQLSNRLEEH

SEQ ID NO: 55779 - protein, 36 aa, Artificial Sequence
  GFR-binding peptide
  MOD_RES (3)..(3): Xaa is C or S
  MOD_RES (17)..(18)..(19)..(20)..(21): Xaa is A or G
  MOD_RES (22)..(23)..(24)..(25): Xaa is A or G or is absent
PTXAPTKLRPVQVRKIXXXXXXXXXKKATVNMVVRS

SEQ ID NO: 55780 - protein, 34 aa, Artificial Sequence
  GFR-binding peptide
RPTQVQLEPLPVVYYEIVRKKPIFEQLSNTLEDH

SEQ ID NO: 55781 - protein, 38 aa, Artificial Sequence; identical to SEQ ID NO: 19921
  GFR-binding peptide
  MOD_RES (1)..(38): Xaa is C or S
  MOD_RES (17)..(18)..(19)..(20)..(21): Xaa is A or G
  MOD_RES (22)..(23)..(24)..(25): Xaa is A or G or is absent

SEQ ID NO: 55782 - protein, 34 aa, Artificial Sequence
  GFR-binding peptide
  MOD_RES (3)..(4): Xaa is C or S
SPXXVPQDLSNITIQIMVGRTPKVIGEMSMVVKS

SEQ ID NO: 55783 - protein, 43 aa, Artificial Sequence
  GFR-binding peptide
  MOD_RES (5)..(6)..(40)..(42): Xaa is C or S
  MOD_RES (20)..(21)..(22)..(23)..(24): Xaa is A or G
  MOD_RES (25)..(26)..(27)..(28): Xaa is A or G or is absent
IPKAXXVPTELSNITMQIMXXXXXXXXXIGEMSDMVVEGXGXR

SEQ ID NO: 55784 - protein, 41 aa, Artificial Sequence
  GFR-binding peptide
  MOD_RES (4)..(5)..(39)..(41): Xaa is C or S
  MOD_RES (19)..(20)..(21)..(22)..(23): Xaa is A or G
  MOD_RES (24)..(25)..(26)..(27): Xaa is A or G or is absent
PKPXXAPTKLSNITVQIMXXXXXXXXXIGEMSNMVVRSXGX

SEQ ID NO: 55785 - protein, 36 aa, Artificial Sequence; identical to SEQ ID NO: 19922
  GFR-binding peptide
  MOD_RES (2)..(36): Xaa is C or S

SEQ ID NO: 55786 - protein, 33 aa, Artificial Sequence
  GFR-binding peptide
  MOD_RES (1)..(32): Xaa is C or S
XVPQDLRSVKIAKVVGRTPKVKEVQVMVVKSXK

SEQ ID NO: 55787 - protein, 39 aa, Artificial Sequence
  GFR-binding peptide
  MOD_RES (4)..(36)..(38): Xaa is C or S
KPTXAPTKLSNITVQIMDDSSNVIIGEMSNMVVRSXGXH

SEQ ID NO: 55788 - protein, 35 aa, Artificial Sequence; identical to SEQ ID NO: 19923
  GFR-binding peptide
  MOD_RES (15)..(16)..(17)..(18)..(19): Xaa is A or G
  MOD_RES (20)..(21)..(22)..(23): Xaa is A or G or is absent

SEQ ID NO: 55789 - protein, 37 aa, Artificial Sequence; identical to SEQ ID NO: 19924
  GFR-binding peptide
  MOD_RES (1)..(1): Xaa is C or S
  MOD_RES (17)..(18)..(19)..(20)..(21): Xaa is A or G
  MOD_RES (22)..(23)..(24)..(25): Xaa is A or G or is absent

SEQ ID NO: 55790 - protein, 36 aa, Artificial Sequence
  GFR-binding peptide
  MOD_RES (3)..(4)..(36): Xaa is C or S
KPXXAPTKLRPVQVRKIDDSSNVIKKATVNMVVRSX

SEQ ID NO: 55791 - protein, 40 aa, Artificial Sequence; identical to SEQ ID NO: 19925
  GFR-binding peptide
  MOD_RES (1)..(38)..(40): Xaa is C or S

SEQ ID NO: 55792 - protein, 34 aa, Artificial Sequence
  GFR-binding peptide
  MOD_RES (2)..(3)..(34): Xaa is C or S
PXXVPQDLSNITIQIMVGRTPKVIGEMSMVVKSX

SEQ ID NO: 55793 - protein, 40 aa, Artificial Sequence; identical to SEQ ID NO: 19926
  GFR-binding peptide
  MOD_RES (5)..(5): Xaa is C or S

SEQ ID NO: 55794 - protein, 36 aa, Artificial Sequence
  GFR-binding peptide
  MOD_RES (3)..(4)..(36): Xaa is C or S
KPXXAPTQLRSVKVAKVDDSSNVIKEVQVNMVVRAX

SEQ ID NO: 55795 - protein, 35 aa, Artificial Sequence; identical to SEQ ID NO: 16801
  GFR-binding peptide
  MOD_RES (2)..(3): Xaa is C or S
  MOD_RES (17)..(18)..(19)..(20)..(21): Xaa is A or G
  MOD_RES (22)..(23)..(24)..(25): Xaa is A or G or is absent

SEQ ID NO: 55796 - protein, 39 aa, Artificial Sequence
  GFR-binding peptide
  MOD_RES (2)..(3)..(36)..(38): Xaa is C or S
  MOD_RES (17)..(18)..(19)..(20)..(21): Xaa is A or G
  MOD_RES (22)..(23)..(24)..(25): Xaa is A or G or is absent
PXXVPQALRSVKIAKVXXXXXXXXXKEVQVMIVRSXKXS

SEQ ID NO: 55797 - protein, 41 aa, Artificial Sequence; identical to SEQ ID NO: 16804
  GFR-binding peptide
  MOD_RES (7)..(39)..(41): Xaa is C or S

SEQ ID NO: 55798 - protein, 37 aa, Artificial Sequence; identical to SEQ ID NO: 16805
  GFR-binding peptide
  MOD_RES (1)..(35)..(37): Xaa is C or S
  MOD_RES (15)..(16)..(17)..(18)..(19): Xaa is A or G
  MOD_RES (20)..(21)..(22)..(23): Xaa is A or G or is absent

SEQ ID NO: 55799 - protein, 38 aa, Artificial Sequence; identical to SEQ ID NO: 16806
  GFR-binding peptide
  MOD_RES (3)..(4)..(38): Xaa is C or S
  MOD_RES (18)..(19)..(20)..(21)..(22): Xaa is A or G
  MOD_RES (23)..(24)..(25)..(26): Xaa is A or G or is absent

SEQ ID NO: 55800 - protein, 39 aa, Artificial Sequence
  GFR-binding peptide
  MOD_RES (5)..(6)..(39): Xaa is C or S
  MOD_RES (20)..(21)..(22)..(23)..(24): Xaa is A or G
  MOD_RES (25)..(26)..(27)..(28): Xaa is A or G or is absent
SASPXXVSQDLSNITIQIMXXXXXXXXXIGEMSMIVKSX

SEQ ID NO: 55801 - protein, 35 aa, Artificial Sequence
  GFR-binding peptide
  MOD_RES (5)..(5): Xaa is C or S
TKPTXAPTKLRSVKVAKVDDSSNVIKEVQVNMVVR

SEQ ID NO: 55802 - protein, 37 aa, Artificial Sequence; identical to SEQ ID NO: 19929
  GFR-binding peptide
  MOD_RES (1)..(35)..(37): Xaa is C or S

SEQ ID NO: 55803 - protein, 41 aa, Artificial Sequence
  GFR-binding peptide
  MOD_RES (6)..(40): Xaa is C or S
  MOD_RES (20)..(21)..(22)..(23)..(24): Xaa is A or G
  MOD_RES (25)..(26)..(27)..(28): Xaa is A or G or is absent
VTKPTXAPTKLSNITVQIMXXXXXXXXXIGEMSNMVVRSXG

SEQ ID NO: 55804 - protein, 37 aa, Artificial Sequence
  GFR-binding peptide
  MOD_RES (2)..(3)..(35)..(37): Xaa is C or S
AXXVPTELRPVQMRKIDENEKVVKKATVDMVVEGXGX

SEQ ID NO: 55805 - protein, 43 aa, Artificial Sequence
  GFR-binding peptide
  MOD_RES (5)..(6)..(40)..(42): Xaa is C or S
  MOD_RES (20)..(21)..(22)..(23)..(24): Xaa is A or G
  MOD_RES (25)..(26)..(27)..(28): Xaa is A or G or is absent
VPKPXXAPTKLRPVQVRKIXXXXXXXXXKKATVNMVVRSXGXH

SEQ ID NO: 55806 - protein, 34 aa, Artificial Sequence; identical to SEQ ID NO: 16808
  GFR-binding peptide
  MOD_RES (33)..(33): Xaa is C or S
  MOD_RES (14)..(15)..(16)..(17)..(18): Xaa is A or G
  MOD_RES (19)..(20)..(21)..(22): Xaa is A or G or is absent

SEQ ID NO: 55807 - protein, 34 aa, Artificial Sequence; identical to SEQ ID NO: 19931
  GFR-binding peptide
  MOD_RES (2)..(2): Xaa is C or S

SEQ ID NO: 55808 - protein, 36 aa, Artificial Sequence
  GFR-binding peptide
  MOD_RES (3)..(4): Xaa is C or S
  MOD_RES (18)..(19)..(20)..(21)..(22): Xaa is A or G
  MOD_RES (23)..(24)..(25)..(26): Xaa is A or G or is absent
KPXXAPTQLRPVQVRKIXXXXXXXXXKKATVNMVVR

SEQ ID NO: 55809 - protein, 36 aa, Artificial Sequence
  GFR-binding peptide
  MOD_RES (5)..(6): Xaa is C or S
SASPXXVSQDLRSVKIAKVIGKTPKIKEVQVMIVKS

SEQ ID NO: 55810 - protein, 38 aa, Artificial Sequence
  GFR-binding peptide
  MOD_RES (4)..(5)..(36)..(38): Xaa is C or S
ASPXXVPQDLSNITIQIMVGRTPKVIGEMSMVVKSXKX

SEQ ID NO: 55811 - protein, 38 aa, Artificial Sequence
  GFR-binding peptide
  MOD_RES (4)..(5)..(36)..(38): Xaa is C or S
ASPXXVPQDLRSVKIAKVVGRTPKVKEVQVMVVKSXKX

SEQ ID NO: 55812 - protein, 42 aa, Artificial Sequence; identical to SEQ ID NO: 19934
  GFR-binding peptide
  MOD_RES (2)..(39)..(41): Xaa is C or S

SEQ ID NO: 55813 - protein, 38 aa, Artificial Sequence
  GFR-binding peptide
  MOD_RES (3)..(37): Xaa is C or S
  MOD_RES (17)..(18)..(19)..(20)..(21): Xaa is A or G
  MOD_RES (22)..(23)..(24)..(25): Xaa is A or G or is absent
PTXAPTKLSNITVQIMXXXXXXXXXIGEMSNMVVRSXG

SEQ ID NO: 55814 - protein, 41 aa, Artificial Sequence; identical to SEQ ID NO: 19936
  GFR-binding peptide
  MOD_RES (1)..(38)..(40): Xaa is C or S

SEQ ID NO: 55815 - protein, 36 aa, Artificial Sequence
  GFR-binding peptide
  MOD_RES (1)..(2)..(34)..(36): Xaa is C or S
XXVPTELRPVQMRKIDENEKVVKKATVDMVVEGXGX

SEQ ID NO: 55816 - protein, 40 aa, Artificial Sequence; identical to SEQ ID NO: 16813
  GFR-binding peptide
  MOD_RES (5)..(6)..(38)..(40): Xaa is C or S

SEQ ID NO: 55817 - protein, 33 aa, Artificial Sequence
  GFR-binding peptide
  MOD_RES (1)..(33): Xaa is C or S
XVPTELRSVKMAKVDEYDKVVKEVQVEMVVEGX

SEQ ID NO: 55818 - protein, 38 aa, Artificial Sequence; identical to SEQ ID NO: 16815
  GFR-binding peptide
  MOD_RES (4)..(5): Xaa is C or S
  MOD_RES (19)..(20)..(21)..(22)..(23): Xaa is A or G
  MOD_RES (24)..(25)..(26)..(27): Xaa is A or G or is absent

SEQ ID NO: 55819 - protein, 34 aa, Artificial Sequence
  GFR-binding peptide
  MOD_RES (15)..(16)..(17)..(18)..(19): Xaa is A or G
  MOD_RES (20)..(21)..(22)..(23): Xaa is A or G or is absent
PSRVHHEPLTVLYYXXXXXXXXXEQLSNRLEEHL

SEQ ID NO: 55820 - protein, 35 aa, Artificial Sequence; identical to SEQ ID NO: 16816
  GFR-binding peptide
  MOD_RES (32)..(34): Xaa is C or S

SEQ ID NO: 55821 - protein, 33 aa, Artificial Sequence
  GFR-binding peptide
  MOD_RES (1)..(32): Xaa is C or S
XVSQDLRSVKIAKVIGKTPKIKEVQVMIVKSXK

SEQ ID NO: 55822 - protein, 33 aa, Artificial Sequence; identical to SEQ ID NO: 16819
  GFR-binding peptide
  MOD_RES (1)..(33): Xaa is C or S

SEQ ID NO: 55823 - protein, 34 aa, Artificial Sequence; identical to SEQ ID NO: 16821
  GFR-binding peptide
  MOD_RES (2)..(3): Xaa is C or S

SEQ ID NO: 55824 - protein, 36 aa, Artificial Sequence; identical to SEQ ID NO: 16822
  GFR-binding peptide
  MOD_RES (34)..(36): Xaa is C or S
  MOD_RES (14)..(15)..(16)..(17)..(18): Xaa is A or G
  MOD_RES (19)..(20)..(21)..(22): Xaa is A or G or is absent

SEQ ID NO: 55825 - protein, 38 aa, Artificial Sequence; identical to SEQ ID NO: 19944
  GFR-binding peptide
  MOD_RES (35)..(37): Xaa is C or S
  MOD_RES (14)..(15)..(16)..(17)..(18): Xaa is A or G
  MOD_RES (19)..(20)..(21)..(22): Xaa is A or G or is absent

SEQ ID NO: 55826 - protein, 37 aa, Artificial Sequence
  GFR-binding peptide
  MOD_RES (1)..(34)..(36): Xaa is C or S
  MOD_RES (15)..(16)..(17)..(18)..(19): Xaa is A or G
  MOD_RES (20)..(21)..(22)..(23): Xaa is A or G or is absent
XVSQDLRSVKIAKVXXXXXXXXXKEVQVMIVKSXKXS

SEQ ID NO: 55827 - protein, 35 aa, Artificial Sequence; identical to SEQ ID NO: 16827
  GFR-binding peptide
  MOD_RES (3)..(4): Xaa is C or S

SEQ ID NO: 55828 - protein, 35 aa, Artificial Sequence
  GFR-binding peptide
  MOD_RES (32)..(34): Xaa is C or S
VPTELRPVQMRKIDENEKVVKKATVDMVVEGXGXR

SEQ ID NO: 55829 - protein, 39 aa, Artificial Sequence
  GFR-binding peptide
  MOD_RES (6)..(7)..(38): Xaa is C or S
ASASPXXVSQDLSNITIQIMIGKTPKIIGEMSMIVKSXK

SEQ ID NO: 55830 - protein, 36 aa, Artificial Sequence
  GFR-binding peptide
  MOD_RES (1)..(2)..(34)..(36): Xaa is C or S
XXAPTKLRPVQVRKIDDSSNVIKKATVNMVVRSXGX

SEQ ID NO: 55831 - protein, 38 aa, Artificial Sequence
  GFR-binding peptide
  MOD_RES (2)..(3)..(36)..(38): Xaa is C or S
  MOD_RES (17)..(18)..(19)..(20)..(21): Xaa is A or G
  MOD_RES (22)..(23)..(24)..(25): Xaa is A or G or is absent
PXXVPQALRSVKIAKVXXXXXXXXXKEVQVMIVRSXKX

SEQ ID NO: 55832 - protein, 33 aa, Artificial Sequence; identical to SEQ ID NO: 16834
  GFR-binding peptide
  MOD_RES (1)..(2): Xaa is C or S

SEQ ID NO: 55833 - protein, 34 aa, Artificial Sequence
  GFR-binding peptide
  MOD_RES (16)..(17)..(18)..(19)..(20): Xaa is A or G
  MOD_RES (21)..(22)..(23)..(24): Xaa is A or G or is absent
RPTQVQLEPLTVLYYXXXXXXXXXEQLSNTLEDH

SEQ ID NO: 55834 - protein, 37 aa, Artificial Sequence
  GFR-binding peptide
  MOD_RES (4)..(5)..(37): Xaa is C or S
PKPXXAPTQLSNITVQIMDDSSNVIIGEMSNMVVRAX

SEQ ID NO: 55835 - protein, 40 aa, Artificial Sequence
  GFR-binding peptide
  MOD_RES (4)..(38)..(40): Xaa is C or S
  MOD_RES (18)..(19)..(20)..(21)..(22): Xaa is A or G
  MOD_RES (23)..(24)..(25)..(26): Xaa is A or G or is absent
KPTXAPTKLRSVKVAKVXXXXXXXXXKEVQVNMVVRSXGX

SEQ ID NO: 55836 - protein, 34 aa, Artificial Sequence
  GFR-binding peptide
  MOD_RES (16)..(17)..(18)..(19)..(20): Xaa is A or G
  MOD_RES (21)..(22)..(23)..(24): Xaa is A or G or is absent
RPTQVQLEPLPVVYYXXXXXXXXXEQLSNTLEDH

SEQ ID NO: 55837 - protein, 38 aa, Artificial Sequence
  GFR-binding peptide
  MOD_RES (5)..(37): Xaa is C or S
TKPTXAPTKLRSVKVAKVDDSSNVIKEVQVNMVVRSXG

SEQ ID NO: 55838 - protein, 40 aa, Artificial Sequence
  GFR-binding peptide
  MOD_RES (5)..(6)..(40): Xaa is C or S
  MOD_RES (20)..(21)..(22)..(23)..(24): Xaa is A or G
  MOD_RES (25)..(26)..(27)..(28): Xaa is A or G or is absent
IPKAXXVPTELSNITMQIMXXXXXXXXXIGEMSDMVVEGX

SEQ ID NO: 55839 - protein, 41 aa, Artificial Sequence
  GFR-binding peptide
  MOD_RES (1)..(38)..(40): Xaa is C or S
XQPSRVHHEPLTVLYYEYVRKKPKLEQLSNRLEEHLEXAXA

SEQ ID NO: 55840 - protein, 36 aa, Artificial Sequence
  GFR-binding peptide
  MOD_RES (1)..(33)..(35): Xaa is C or S
XVPTELSNITMQIMDENEKVVIGEMSDMVVEGXGXR

SEQ ID NO: 55841 - protein, 41 aa, Artificial Sequence; identical to SEQ ID NO: 16840
  GFR-binding peptide
  MOD_RES (3)..(4)..(38)..(40): Xaa is C or S
  MOD_RES (18)..(19)..(20)..(21)..(22): Xaa is A or G
  MOD_RES (23)..(24)..(25)..(26): Xaa is A or G or is absent

SEQ ID NO: 55842 - protein, 36 aa, Artificial Sequence; identical to SEQ ID NO: 16842
  GFR-binding peptide
  MOD_RES (4)..(4): Xaa is C or S
  MOD_RES (18)..(19)..(20)..(21)..(22): Xaa is A or G
  MOD_RES (23)..(24)..(25)..(26): Xaa is A or G or is absent

SEQ ID NO: 55843 - protein, 37 aa, Artificial Sequence
  GFR-binding peptide
  MOD_RES (1)..(1): Xaa is C or S
  MOD_RES (17)..(18)..(19)..(20)..(21): Xaa is A or G
  MOD_RES (22)..(23)..(24)..(25): Xaa is A or G or is absent
XQPSRVHHEPLPVVYYXXXXXXXXXEQLSNRLEEHLE

SEQ ID NO: 55844 - protein, 37 aa, Artificial Sequence
  GFR-binding peptide
  MOD_RES (1)..(2)..(36): Xaa is C or S
  MOD_RES (16)..(17)..(18)..(19)..(20): Xaa is A or G
  MOD_RES (21)..(22)..(23)..(24): Xaa is A or G or is absent
XXAPTQLSNITVQIMXXXXXXXXXIGEMSNMVVRAXG

SEQ ID NO: 55845 - protein, 36 aa, Artificial Sequence; identical to SEQ ID NO: 19958
  GFR-binding peptide
  MOD_RES (36)..(36): Xaa is C or S

SEQ ID NO: 55846 - protein, 39 aa, Artificial Sequence
  GFR-binding peptide
  MOD_RES (5)..(6): Xaa is C or S
  MOD_RES (20)..(21)..(22)..(23)..(24): Xaa is A or G
  MOD_RES (25)..(26)..(27)..(28): Xaa is A or G or is absent
IPKAXXVPTELSNITMQIMXXXXXXXXXIGEMSEMVVEG

SEQ ID NO: 55847 - protein, 37 aa, Artificial Sequence
  GFR-binding peptide
  MOD_RES (2)..(3)..(37): Xaa is C or S
  MOD_RES (17)..(18)..(19)..(20)..(21): Xaa is A or G
  MOD_RES (22)..(23)..(24)..(25): Xaa is A or G or is absent
AXXVPTELRPVQMRKIXXXXXXXXXKKATVEMVVEGX

SEQ ID NO: 55848 - protein, 35 aa, Artificial Sequence; identical to SEQ ID NO: 16845
  GFR-binding peptide
  MOD_RES (5)..(5): Xaa is C or S

SEQ ID NO: 55849 - protein, 39 aa, Artificial Sequence
  GFR-binding peptide
  MOD_RES (4)..(5)..(39): Xaa is C or S
  MOD_RES (19)..(20)..(21)..(22)..(23): Xaa is A or G
  MOD_RES (24)..(25)..(26)..(27): Xaa is A or G or is absent
PKPXXAPTKLRPVQVRKIXXXXXXXXXKKATVNMVVRSX

SEQ ID NO: 55850 - protein, 38 aa, Artificial Sequence; identical to SEQ ID NO: 16847
  GFR-binding peptide
  MOD_RES (1)..(35)..(37): Xaa is C or S
  MOD_RES (15)..(16)..(17)..(18)..(19): Xaa is A or G
  MOD_RES (20)..(21)..(22)..(23): Xaa is A or G or is absent

SEQ ID NO: 55851 - protein, 38 aa, Artificial Sequence; identical to SEQ ID NO: 19962
  GFR-binding peptide
  MOD_RES (4)..(4): Xaa is C or S
  MOD_RES (20)..(21)..(22)..(23)..(24): Xaa is A or G
  MOD_RES (25)..(26)..(27)..(28): Xaa is A or G or is absent

SEQ ID NO: 55852 - protein, 37 aa, Artificial Sequence; identical to SEQ ID NO: 19963
  GFR-binding peptide
  MOD_RES (4)..(4): Xaa is C or S
  MOD_RES (18)..(19)..(20)..(21)..(22): Xaa is A or G
  MOD_RES (23)..(24)..(25)..(26): Xaa is A or G or is absent

SEQ ID NO: 55853 - protein, 36 aa, Artificial Sequence
  GFR-binding peptide
  MOD_RES (3)..(4): Xaa is C or S
  MOD_RES (18)..(19)..(20)..(21)..(22): Xaa is A or G
  MOD_RES (23)..(24)..(25)..(26): Xaa is A or G or is absent
SPXXVSQDLRPVQIRKIXXXXXXXXXKKATVMIVKS

SEQ ID NO: 55854 - protein, 35 aa, Artificial Sequence
  GFR-binding peptide
  MOD_RES (1)..(2)..(34): Xaa is C or S
XXVPTELSNITMQIMDEYDKVVIGEMSEMVVEGXG

SEQ ID NO: 55855 - protein, 37 aa, Artificial Sequence; identical to SEQ ID NO: 19965
  GFR-binding peptide
  MOD_RES (35)..(37): Xaa is C or S
  MOD_RES (14)..(15)..(16)..(17)..(18): Xaa is A or G
  MOD_RES (19)..(20)..(21)..(22): Xaa is A or G or is absent

SEQ ID NO: 55856 - protein, 34 aa, Artificial Sequence; identical to SEQ ID NO: 16852
  GFR-binding peptide
  MOD_RES (34)..(34): Xaa is C or S
  MOD_RES (14)..(15)..(16)..(17)..(18): Xaa is A or G
  MOD_RES (19)..(20)..(21)..(22): Xaa is A or G or is absent

SEQ ID NO: 55857 - protein, 36 aa, Artificial Sequence; identical to SEQ ID NO: 16855
  GFR-binding peptide
  MOD_RES (34)..(36): Xaa is C or S
  MOD_RES (14)..(15)..(16)..(17)..(18): Xaa is A or G
  MOD_RES (19)..(20)..(21)..(22): Xaa is A or G or is absent

SEQ ID NO: 55858 - protein, 37 aa, Artificial Sequence; identical to SEQ ID NO: 16857
  GFR-binding peptide
  MOD_RES (6)..(7): Xaa is C or S

SEQ ID NO: 55859 - protein, 32 aa, Artificial Sequence; identical to SEQ ID NO: 19967
  GFR-binding peptide
  MOD_RES (14)..(15)..(16)..(17)..(18): Xaa is A or G
  MOD_RES (19)..(20)..(21)..(22): Xaa is A or G or is absent

SEQ ID NO: 55860 - protein, 33 aa, Artificial Sequence; identical to SEQ ID NO: 16860
  GFR-binding peptide
  MOD_RES (1)..(2)..(33): Xaa is C or S

SEQ ID NO: 55861 - protein, 41 aa, Artificial Sequence; identical to SEQ ID NO: 16862
  GFR-binding peptide
  MOD_RES (6)..(7)..(39)..(41): Xaa is C or S

SEQ ID NO: 55862 - protein, 33 aa, Artificial Sequence
  GFR-binding peptide
  MOD_RES (1)..(1): Xaa is C or S
  MOD_RES (15)..(16)..(17)..(18)..(19): Xaa is A or G
  MOD_RES (20)..(21)..(22)..(23): Xaa is A or G or is absent
XAPTQLRPVQVRKIXXXXXXXXXKKATVNMVVR

SEQ ID NO: 55863 - protein, 39 aa, Artificial Sequence
  GFR-binding peptide
  MOD_RES (1)..(2)..(36)..(38): Xaa is C or S
  MOD_RES (16)..(17)..(18)..(19)..(20): Xaa is A or G
  MOD_RES (21)..(22)..(23)..(24): Xaa is A or G or is absent
XXAPTQLRPVQVRKIXXXXXXXXXKKATVNMVVRAXGXH

SEQ ID NO: 55864 - protein, 40 aa, Artificial Sequence; identical to SEQ ID NO: 16863
  GFR-binding peptide
  MOD_RES (3)..(4)..(37)..(39): Xaa is C or S
  MOD_RES (18)..(19)..(20)..(21)..(22): Xaa is A or G
  MOD_RES (23)..(24)..(25)..(26): Xaa is A or G or is absent

SEQ ID NO: 55865 - protein, 37 aa, Artificial Sequence; identical to SEQ ID NO: 19969
  GFR-binding peptide
  MOD_RES (35)..(37): Xaa is C or S
  MOD_RES (14)..(15)..(16)..(17)..(18): Xaa is A or G
  MOD_RES (19)..(20)..(21)..(22): Xaa is A or G or is absent

SEQ ID NO: 55866 - protein, 40 aa, Artificial Sequence
  GFR-binding peptide
  MOD_RES (1)..(38)..(40): Xaa is C or S
XRPTQVQLEPLPVVYYEIVRKKPIFEQLSNTLEDHLAXKX

SEQ ID NO: 55867 - protein, 41 aa, Artificial Sequence
  GFR-binding peptide
  MOD_RES (4)..(5)..(39)..(41): Xaa is C or S
  MOD_RES (19)..(20)..(21)..(22)..(23): Xaa is A or G
  MOD_RES (24)..(25)..(26)..(27): Xaa is A or G or is absent
PKPXXAPTKLRSVKVAKVXXXXXXXXXKEVQVNMVVRSXGX

SEQ ID NO: 55868 - protein, 35 aa, Artificial Sequence
  GFR-binding peptide
  MOD_RES (32)..(34): Xaa is C or S
APTKLRPVQVRKIDDSSNVIKKATVNMVVRSXGXH

SEQ ID NO: 55869 - protein, 36 aa, Artificial Sequence
  GFR-binding peptide
  MOD_RES (2)..(3): Xaa is C or S
  MOD_RES (17)..(18)..(19)..(20)..(21): Xaa is A or G
  MOD_RES (22)..(23)..(24)..(25): Xaa is A or G or is absent
AXXVPTELRSVKMAKVXXXXXXXXXKEVQVEMVVEG

SEQ ID NO: 55870 - protein, 36 aa, Artificial Sequence; identical to SEQ ID NO: 16864
  GFR-binding peptide
  MOD_RES (1)..(2)..(34)..(36): Xaa is C or S

SEQ ID NO: 55871 - protein, 32 aa, Artificial Sequence
  GFR-binding peptide
  MOD_RES (31)..(31): Xaa is C or S
VPQDLSNITIQIMVGRTPKVIGEMSMVVKSXK

SEQ ID NO: 55872 - protein, 33 aa, Artificial Sequence
  GFR-binding peptide
  MOD_RES (32)..(32): Xaa is C or S
APTQLRPVQVRKIDDSSNVIKKATVNMVVRAXG

SEQ ID NO: 55873 - protein, 41 aa, Artificial Sequence
  GFR-binding peptide
  MOD_RES (6)..(7)..(39)..(41): Xaa is C or S
YVPKPXXAPTKLRPVQVRKIDDSSNVIKKATVNMVVRSXGX

SEQ ID NO: 55874 - protein, 35 aa, Artificial Sequence; identical to SEQ ID NO: 16868
  GFR-binding peptide
  MOD_RES (1)..(2)..(35): Xaa is C or S
  MOD_RES (16)..(17)..(18)..(19)..(20): Xaa is A or G
  MOD_RES (21)..(22)..(23)..(24): Xaa is A or G or is absent

SEQ ID NO: 55875 - protein, 34 aa, Artificial Sequence; identical to SEQ ID NO: 19976
  GFR-binding peptide
  MOD_RES (15)..(16)..(17)..(18)..(19): Xaa is A or G
  MOD_RES (20)..(21)..(22)..(23): Xaa is A or G or is absent

SEQ ID NO: 55876 - protein, 42 aa, Artificial Sequence
  GFR-binding peptide
  MOD_RES (5)..(39)..(41): Xaa is C or S
  MOD_RES (19)..(20)..(21)..(22)..(23): Xaa is A or G
  MOD_RES (24)..(25)..(26)..(27): Xaa is A or G or is absent
EGLEXVPTEEEPLTMLYYXXXXXXXXXEQLSNFLQHNKXEXR

SEQ ID NO: 55877 - protein, 38 aa, Artificial Sequence; identical to SEQ ID NO: 16872
  GFR-binding peptide
  MOD_RES (6)..(38): Xaa is C or S

SEQ ID NO: 55878 - protein, 34 aa, Artificial Sequence; identical to SEQ ID NO: 16873
  GFR-binding peptide
  MOD_RES (34)..(34): Xaa is C or S
  MOD_RES (14)..(15)..(16)..(17)..(18): Xaa is A or G
  MOD_RES (19)..(20)..(21)..(22): Xaa is A or G or is absent

SEQ ID NO: 55879 - protein, 36 aa, Artificial Sequence; identical to SEQ ID NO: 16874
  GFR-binding peptide
  MOD_RES (3)..(4): Xaa is C or S
  MOD_RES (18)..(19)..(20)..(21)..(22): Xaa is A or G
  MOD_RES (23)..(24)..(25)..(26): Xaa is A or G or is absent

SEQ ID NO: 55880 - protein, 37 aa, Artificial Sequence
  GFR-binding peptide
  MOD_RES (2)..(34)..(36): Xaa is C or S
TXAPTKLSNITVQIMDDSSNVIIGEMSNMVVRSXGXH

SEQ ID NO: 55881 - protein, 35 aa, Artificial Sequence; identical to SEQ ID NO: 19977
  GFR-binding peptide
  MOD_RES (16)..(17)..(18)..(19)..(20): Xaa is A or G
  MOD_RES (21)..(22)..(23)..(24): Xaa is A or G or is absent

SEQ ID NO: 55882 - protein, 40 aa, Artificial Sequence; identical to SEQ ID NO: 16875
  GFR-binding peptide
  MOD_RES (3)..(4)..(38)..(40): Xaa is C or S
  MOD_RES (18)..(19)..(20)..(21)..(22): Xaa is A or G
  MOD_RES (23)..(24)..(25)..(26): Xaa is A or G or is absent

SEQ ID NO: 55883 - protein, 37 aa, Artificial Sequence
  GFR-binding peptide
  MOD_RES (1)..(2)..(36): Xaa is C or S
  MOD_RES (16)..(17)..(18)..(19)..(20): Xaa is A or G
  MOD_RES (21)..(22)..(23)..(24): Xaa is A or G or is absent
XXVPTELSNITMQIMXXXXXXXXXIGEMSDMVVEGXG

SEQ ID NO: 55884 - protein, 37 aa, Artificial Sequence; identical to SEQ ID NO: 16878
  GFR-binding peptide
  MOD_RES (5)..(6): Xaa is C or S

SEQ ID NO: 55885 - protein, 35 aa, Artificial Sequence; identical to SEQ ID NO: 19980
  GFR-binding peptide
  MOD_RES (35)..(35): Xaa is C or S

SEQ ID NO: 55886 - protein, 32 aa, Artificial Sequence; identical to SEQ ID NO: 16881
  GFR-binding peptide
  MOD_RES (14)..(15)..(16)..(17)..(18): Xaa is A or G
  MOD_RES (19)..(20)..(21)..(22): Xaa is A or G or is absent

SEQ ID NO: 55887 - protein, 39 aa, Artificial Sequence
  GFR-binding peptide
  MOD_RES (3)..(37)..(39): Xaa is C or S
  MOD_RES (17)..(18)..(19)..(20)..(21): Xaa is A or G
  MOD_RES (22)..(23)..(24)..(25): Xaa is A or G or is absent
PTXAPTKLRSVKVAKVXXXXXXXXXKEVQVNMVVRSXGX

SEQ ID NO: 55888 - protein, 37 aa, Artificial Sequence
  GFR-binding peptide
  MOD_RES (4)..(5): Xaa is C or S
  MOD_RES (19)..(20)..(21)..(22)..(23): Xaa is A or G
  MOD_RES (24)..(25)..(26)..(27): Xaa is A or G or is absent
PKAXXVPTELRSVKMAKVXXXXXXXXXKEVQVDMVVE

SEQ ID NO: 55889 - protein, 35 aa, Artificial Sequence
  GFR-binding peptide
  MOD_RES (1)..(2): Xaa is C or S
  MOD_RES (16)..(17)..(18)..(19)..(20): Xaa is A or G
  MOD_RES (21)..(22)..(23)..(24): Xaa is A or G or is absent
XXAPTKLRSVKVAKVXXXXXXXXXKEVQVNMVVRS

SEQ ID NO: 55890 - protein, 34 aa, Artificial Sequence; identical to SEQ ID NO: 19982
  GFR-binding peptide
  MOD_RES (2)..(2): Xaa is C or S
  MOD_RES (16)..(17)..(18)..(19)..(20): Xaa is A or G
  MOD_RES (21)..(22)..(23)..(24): Xaa is A or G or is absent

SEQ ID NO: 55891 - protein, 42 aa, Artificial Sequence; identical to SEQ ID NO: 40995
  GFR-binding peptide
  MOD_RES (5)..(6)..(39)..(41): Xaa is C or S
  MOD_RES (20)..(21)..(22)..(23)..(24): Xaa is A or G
  MOD_RES (25)..(26)..(27)..(28): Xaa is A or G or is absent

SEQ ID NO: 55892 - protein, 42 aa, Artificial Sequence; identical to SEQ ID NO: 19983
  GFR-binding peptide
  MOD_RES (6)..(40)..(42): Xaa is C or S
  MOD_RES (20)..(21)..(22)..(23)..(24): Xaa is A or G
  MOD_RES (25)..(26)..(27)..(28): Xaa is A or G or is absent

SEQ ID NO: 55893 - protein, 41 aa, Artificial Sequence
  GFR-binding peptide
  MOD_RES (6)..(7)..(40): Xaa is C or S
  MOD_RES (21)..(22)..(23)..(24)..(25): Xaa is A or G
  MOD_RES (26)..(27)..(28)..(29): Xaa is A or G or is absent
ASASPXXVPQDLRPVQIRKIXXXXXXXXXKKATVMVVKSXK

SEQ ID NO: 55894 - protein, 43 aa, Artificial Sequence; identical to SEQ ID NO: 16883
  GFR-binding peptide
  MOD_RES (6)..(7)..(41)..(43): Xaa is C or S
  MOD_RES (21)..(22)..(23)..(24)..(25): Xaa is A or G
  MOD_RES (26)..(27)..(28)..(29): Xaa is A or G or is absent

SEQ ID NO: 55895 - protein, 33 aa, Artificial Sequence
  GFR-binding peptide
  MOD_RES (1)..(32): Xaa is C or S
XVSQDLSNITIQIMIGKTPKIIGEMSMIVKSXK

SEQ ID NO: 55896 - protein, 39 aa, Artificial Sequence; identical to SEQ ID NO: 16886
  GFR-binding peptide
  MOD_RES (4)..(5)..(39): Xaa is C or S
  MOD_RES (19)..(20)..(21)..(22)..(23): Xaa is A or G
  MOD_RES (24)..(25)..(26)..(27): Xaa is A or G or is absent

SEQ ID NO: 55897 - protein, 38 aa, Artificial Sequence; identical to SEQ ID NO: 16887
  GFR-binding peptide
  MOD_RES (3)..(4)..(35)..(37): Xaa is C or S

SEQ ID NO: 55898 - protein, 36 aa, Artificial Sequence; identical to SEQ ID NO: 19987
  GFR-binding peptide
  MOD_RES (36)..(36): Xaa is C or S

SEQ ID NO: 55899 - protein, 39 aa, Artificial Sequence
  GFR-binding peptide
  MOD_RES (3)..(3): Xaa is C or S
  MOD_RES (19)..(20)..(21)..(22)..(23): Xaa is A or G
  MOD_RES (24)..(25)..(26)..(27): Xaa is A or G or is absent
VKXQPSRVHHEPLPVVYYXXXXXXXXXEQLSNRLEEHLE

SEQ ID NO: 55900 - protein, 38 aa, Artificial Sequence
  GFR-binding peptide
  MOD_RES (5)..(5): Xaa is C or S
EGLEXVPTEEEPLPMVYYRIKPHQGQHEQLSNFLQHNK

SEQ ID NO: 55901 - protein, 39 aa, Artificial Sequence
  GFR-binding peptide
  MOD_RES (2)..(36)..(38): Xaa is C or S
  MOD_RES (16)..(17)..(18)..(19)..(20): Xaa is A or G
  MOD_RES (21)..(22)..(23)..(24): Xaa is A or G or is absent
EXVPTEEEPLPMVYYXXXXXXXXXEQLSNFLQHNKXEXR

SEQ ID NO: 55902 - protein, 33 aa, Artificial Sequence; identical to SEQ ID NO: 19992
  GFR-binding peptide

SEQ ID NO: 55903 - protein, 36 aa, Artificial Sequence
  GFR-binding peptide
  MOD_RES (2)..(2): Xaa is C or S
QXRPTQVQLEPLTVLYYEIVRKKPIFEQLSNTLEDH

SEQ ID NO: 55904 - protein, 40 aa, Artificial Sequence
  GFR-binding peptide
  MOD_RES (6)..(7)..(39): Xaa is C or S
KIPKAXXVPTELSNITMQIMDENEKVVIGEMSDMVVEGXG

SEQ ID NO: 55905 - protein, 33 aa, Artificial Sequence; identical to SEQ ID NO: 16892
  GFR-binding peptide
  MOD_RES (1)..(1): Xaa is C or S
  MOD_RES (15)..(16)..(17)..(18)..(19): Xaa is A or G
  MOD_RES (20)..(21)..(22)..(23): Xaa is A or G or is absent

SEQ ID NO: 55906 - protein, 37 aa, Artificial Sequence; identical to SEQ ID NO: 19994
  GFR-binding peptide
  MOD_RES (3)..(37): Xaa is C or S

SEQ ID NO: 55907 - protein, 37 aa, Artificial Sequence
  GFR-binding peptide
  MOD_RES (4)..(5)..(36): Xaa is C or S
AAPXXVPQALSNITIQIMVGRKPKVIGEMSMIVRSXK

SEQ ID NO: 55908 - protein, 34 aa, Artificial Sequence
  GFR-binding peptide
  MOD_RES (32)..(34): Xaa is C or S
VPTELRSVKMAKVDENEKVVKEVQVDMVVEGXGX

SEQ ID NO: 55909 - protein, 37 aa, Artificial Sequence; identical to SEQ ID NO: 19996
  GFR-binding peptide
  MOD_RES (3)..(37): Xaa is C or S
  MOD_RES (17)..(18)..(19)..(20)..(21): Xaa is A or G
  MOD_RES (22)..(23)..(24)..(25): Xaa is A or G or is absent

SEQ ID NO: 55910 - protein, 37 aa, Artificial Sequence; identical to SEQ ID NO: 16895
  GFR-binding peptide
  MOD_RES (2)..(3)..(35)..(37): Xaa is C or S

SEQ ID NO: 55911 - protein, 36 aa, Artificial Sequence
  GFR-binding peptide
  MOD_RES (35)..(35): Xaa is C or S
TQVQLEPLPVVYYEIVRKKPIFEQLSNTLEDHLAXK

SEQ ID NO: 55912 - protein, 37 aa, Artificial Sequence
  GFR-binding peptide
  MOD_RES (34)..(36): Xaa is C or S
  MOD_RES (14)..(15)..(16)..(17)..(18): Xaa is A or G
  MOD_RES (19)..(20)..(21)..(22): Xaa is A or G or is absent
VPTELRSVKMAKVXXXXXXXXXKEVQVDMVVEGXGXR

SEQ ID NO: 55913 - protein, 33 aa, Artificial Sequence; identical to SEQ ID NO: 16896
  GFR-binding peptide
  MOD_RES (32)..(32): Xaa is C or S

SEQ ID NO: 55914 - protein, 35 aa, Artificial Sequence
  GFR-binding peptide
  MOD_RES (4)..(5): Xaa is C or S
PKAXXVPTELRSVKMAKVDENEKVVKEVQVDMVVE

SEQ ID NO: 55915 - protein, 30 aa, Artificial Sequence
  GFR-binding peptide
VPTELRPVQMRKIDEYDKVVKKATVEMVVE

SEQ ID NO: 55916 - protein, 32 aa, Artificial Sequence; identical to SEQ ID NO: 16897
  GFR-binding peptide
  MOD_RES (14)..(15)..(16)..(17)..(18): Xaa is A or G
  MOD_RES (19)..(20)..(21)..(22): Xaa is A or G or is absent

SEQ ID NO: 55917 - protein, 32 aa, Artificial Sequence
  GFR-binding peptide
  MOD_RES (14)..(15)..(16)..(17)..(18): Xaa is A or G
  MOD_RES (19)..(20)..(21)..(22): Xaa is A or G or is absent
VSQDLSNITIQIMXXXXXXXXXIGEMSMIVKS

SEQ ID NO: 55918 - protein, 36 aa, Artificial Sequence; identical to SEQ ID NO: 20000
  GFR-binding peptide
  MOD_RES (1)..(1): Xaa is C or S
  MOD_RES (17)..(18)..(19)..(20)..(21): Xaa is A or G
  MOD_RES (22)..(23)..(24)..(25): Xaa is A or G or is absent

SEQ ID NO: 55919 - protein, 37 aa, Artificial Sequence
  GFR-binding peptide
  MOD_RES (4)..(5): Xaa is C or S
  MOD_RES (19)..(20)..(21)..(22)..(23): Xaa is A or G
  MOD_RES (24)..(25)..(26)..(27): Xaa is A or G or is absent
PKPXXAPTKLRPVQVRKIXXXXXXXXXKKATVNMVVR

SEQ ID NO: 55920 - protein, 42 aa, Artificial Sequence
  GFR-binding peptide
  MOD_RES (6)..(7)..(39)..(41): Xaa is C or S
SIPKAXXVPTELRPVQMRKIDEYDKVVKKATVEMVVEGXGXR

SEQ ID NO: 55921 - protein, 38 aa, Artificial Sequence
  GFR-binding peptide
  MOD_RES (1)..(2)..(35)..(37): Xaa is C or S
  MOD_RES (16)..(17)..(18)..(19)..(20): Xaa is A or G
  MOD_RES (21)..(22)..(23)..(24): Xaa is A or G or is absent
XXVPQALSNITIQIMXXXXXXXXXIGEMSMIVRSXKXS

SEQ ID NO: 55922 - protein, 40 aa, Artificial Sequence; identical to SEQ ID NO: 20001
  GFR-binding peptide
  MOD_RES (6)..(40): Xaa is C or S

SEQ ID NO: 55923 - protein, 37 aa, Artificial Sequence; identical to SEQ ID NO: 16900
  GFR-binding peptide
  MOD_RES (4)..(36): Xaa is C or S

SEQ ID NO: 55924 - protein, 36 aa, Artificial Sequence; identical to SEQ ID NO: 20005
  GFR-binding peptide
  MOD_RES (2)..(2): Xaa is C or S
  MOD_RES (18)..(19)..(20)..(21)..(22): Xaa is A or G
  MOD_RES (23)..(24)..(25)..(26): Xaa is A or G or is absent

SEQ ID NO: 55925 - protein, 35 aa, Artificial Sequence
  GFR-binding peptide
  MOD_RES (1)..(35): Xaa is C or S
  MOD_RES (15)..(16)..(17)..(18)..(19): Xaa is A or G
  MOD_RES (20)..(21)..(22)..(23): Xaa is A or G or is absent
XVPTELSNITMQIMXXXXXXXXXIGEMSDMVVEGX

SEQ ID NO: 55926 - protein, 34 aa, Artificial Sequence; identical to SEQ ID NO: 20009
  GFR-binding peptide
  MOD_RES (16)..(17)..(18)..(19)..(20): Xaa is A or G
  MOD_RES (21)..(22)..(23)..(24): Xaa is A or G or is absent

SEQ ID NO: 55927 - protein, 35 aa, Artificial Sequence
  GFR-binding peptide
  MOD_RES (1)..(35): Xaa is C or S
  MOD_RES (15)..(16)..(17)..(18)..(19): Xaa is A or G
  MOD_RES (20)..(21)..(22)..(23): Xaa is A or G or is absent
XAPTQLRSVKVAKVXXXXXXXXXKEVQVNMVVRAX

SEQ ID NO: 55928 - protein, 39 aa, Artificial Sequence
  GFR-binding peptide
  MOD_RES (6)..(7)..(38): Xaa is C or S
ASASPXXVPQDLRSVKIAKVVGRTPKVKEVQVMVVKSXK

SEQ ID NO: 55929 - protein, 38 aa, Artificial Sequence
  GFR-binding peptide
  MOD_RES (4)..(5)..(37): Xaa is C or S
PKPXXAPTQLSNITVQIMDDSSNVIIGEMSNMVVRAXG

SEQ ID NO: 55930 - protein, 39 aa, Artificial Sequence
  GFR-binding peptide
  MOD_RES (4)..(5)..(39): Xaa is C or S
  MOD_RES (19)..(20)..(21)..(22)..(23): Xaa is A or G
  MOD_RES (24)..(25)..(26)..(27): Xaa is A or G or is absent
PKAXXVPTELRPVQMRKIXXXXXXXXXKKATVDMVVEGX

SEQ ID NO: 55931 - protein, 42 aa, Artificial Sequence; identical to SEQ ID NO: 16905
  GFR-binding peptide
  MOD_RES (7)..(39)..(41): Xaa is C or S

SEQ ID NO: 55932 - protein, 39 aa, Artificial Sequence; identical to SEQ ID NO: 16906
  GFR-binding peptide
  MOD_RES (1)..(2)..(36)..(38): Xaa is C or S
  MOD_RES (16)..(17)..(18)..(19)..(20): Xaa is A or G
  MOD_RES (21)..(22)..(23)..(24): Xaa is A or G or is absent

SEQ ID NO: 55933 - protein, 41 aa, Artificial Sequence; identical to SEQ ID NO: 16907
  GFR-binding peptide
  MOD_RES (6)..(7)..(41): Xaa is C or S
  MOD_RES (21)..(22)..(23)..(24)..(25): Xaa is A or G
  MOD_RES (26)..(27)..(28)..(29): Xaa is A or G or is absent

SEQ ID NO: 55934 - protein, 33 aa, Artificial Sequence
  GFR-binding peptide
  MOD_RES (15)..(16)..(17)..(18)..(19): Xaa is A or G
  MOD_RES (20)..(21)..(22)..(23): Xaa is A or G or is absent
PSRVHHEPLPVVYYXXXXXXXXXEQLSNRLEEH

SEQ ID NO: 55935 - protein, 40 aa, Artificial Sequence
  GFR-binding peptide
  MOD_RES (4)..(5)..(39): Xaa is C or S
  MOD_RES (19)..(20)..(21)..(22)..(23): Xaa is A or G
  MOD_RES (24)..(25)..(26)..(27): Xaa is A or G or is absent
PKPXXAPTQLSNITVQIMXXXXXXXXXIGEMSNMVVRAXG

SEQ ID NO: 55936 - protein, 36 aa, Artificial Sequence; identical to SEQ ID NO: 20012
  GFR-binding peptide
  MOD_RES (35)..(35): Xaa is C or S

SEQ ID NO: 55937 - protein, 38 aa, Artificial Sequence
  GFR-binding peptide
  MOD_RES (4)..(5)..(38): Xaa is C or S
  MOD_RES (19)..(20)..(21)..(22)..(23): Xaa is A or G
  MOD_RES (24)..(25)..(26)..(27): Xaa is A or G or is absent
AAPXXVPQALRSVKIAKVXXXXXXXXXKEVQVMIVRSX

SEQ ID NO: 55938 - protein, 36 aa, Artificial Sequence
  GFR-binding peptide
  MOD_RES (1)..(2)..(33)..(35): Xaa is C or S
XXVPQALRPVQIRKIVGRKPKVKKATVMIVRSXKXS

SEQ ID NO: 55939 - protein, 40 aa, Artificial Sequence
  GFR-binding peptide
  MOD_RES (5)..(37)..(39): Xaa is C or S
TKPTXAPTKLRPVQVRKIDDSSNVIKKATVNMVVRSXGXH

SEQ ID NO: 55940 - protein, 45 aa, Artificial Sequence; identical to SEQ ID NO: 20017
  GFR-binding peptide
  MOD_RES (5)..(42)..(44): Xaa is C or S

SEQ ID NO: 55941 - protein, 38 aa, Artificial Sequence; identical to SEQ ID NO: 16913
  GFR-binding peptide
  MOD_RES (3)..(4)..(36)..(38): Xaa is C or S

SEQ ID NO: 55942 - protein, 36 aa, Artificial Sequence; identical to SEQ ID NO: 20019
  GFR-binding peptide
  MOD_RES (36)..(36): Xaa is C or S
  MOD_RES (15)..(16)..(17)..(18)..(19): Xaa is A or G
  MOD_RES (20)..(21)..(22)..(23): Xaa is A or G or is absent

SEQ ID NO: 55943 - protein, 32 aa, Artificial Sequence
  GFR-binding peptide
  MOD_RES (14)..(15)..(16)..(17)..(18): Xaa is A or G
  MOD_RES (19)..(20)..(21)..(22): Xaa is A or G or is absent
APTQLRSVKVAKVXXXXXXXXXKEVQVNMVVR

SEQ ID NO: 55944 - protein, 38 aa, Artificial Sequence
  GFR-binding peptide
  MOD_RES (5)..(6): Xaa is C or S
  MOD_RES (20)..(21)..(22)..(23)..(24): Xaa is A or G
  MOD_RES (25)..(26)..(27)..(28): Xaa is A or G or is absent
VPKPXXAPTQLRSVKVAKVXXXXXXXXXKEVQVNMVVR

SEQ ID NO: 55945 - protein, 40 aa, Artificial Sequence
  GFR-binding peptide
  MOD_RES (5)..(6)..(39): Xaa is C or S
  MOD_RES (20)..(21)..(22)..(23)..(24): Xaa is A or G
  MOD_RES (25)..(26)..(27)..(28): Xaa is A or G or is absent
SASPXXVPQDLRPVQIRKIXXXXXXXXXKKATVMVVKSXK

SEQ ID NO: 55946 - protein, 40 aa, Artificial Sequence
  GFR-binding peptide
  MOD_RES (6)..(40): Xaa is C or S
DEGLEXVPTEEEPLTMLYYRIKPHQGQHEQLSNFLQHNKX

SEQ ID NO: 55947 - protein, 33 aa, Artificial Sequence; identical to SEQ ID NO: 16915
  GFR-binding peptide
  MOD_RES (1)..(1): Xaa is C or S
  MOD_RES (15)..(16)..(17)..(18)..(19): Xaa is A or G
  MOD_RES (20)..(21)..(22)..(23): Xaa is A or G or is absent

SEQ ID NO: 55948 - protein, 41 aa, Artificial Sequence; identical to SEQ ID NO: 16917
  GFR-binding peptide
  MOD_RES (4)..(38)..(40): Xaa is C or S
  MOD_RES (18)..(19)..(20)..(21)..(22): Xaa is A or G
  MOD_RES (23)..(24)..(25)..(26): Xaa is A or G or is absent

SEQ ID NO: 55949 - protein, 37 aa, Artificial Sequence
  GFR-binding peptide
  MOD_RES (1)..(2)..(35)..(37): Xaa is C or S
  MOD_RES (16)..(17)..(18)..(19)..(20): Xaa is A or G
  MOD_RES (21)..(22)..(23)..(24): Xaa is A or G or is absent
XXVPQDLSNITIQIMXXXXXXXXXIGEMSMVVKSXKX

SEQ ID NO: 55950 - protein, 42 aa, Artificial Sequence; identical to SEQ ID NO: 20025
  GFR-binding peptide
  MOD_RES (6)..(40)..(42): Xaa is C or S
  MOD_RES (20)..(21)..(22)..(23)..(24): Xaa is A or G
  MOD_RES (25)..(26)..(27)..(28): Xaa is A or G or is absent

SEQ ID NO: 55951 - protein, 32 aa, Artificial Sequence
  GFR-binding peptide
  MOD_RES (14)..(15)..(16)..(17)..(18): Xaa is A or G
  MOD_RES (19)..(20)..(21)..(22): Xaa is A or G or is absent
VPQALSNITIQIMXXXXXXXXXIGEMSMIVRS

SEQ ID NO: 55952 - protein, 34 aa, Artificial Sequence
  GFR-binding peptide
  MOD_RES (1)..(1): Xaa is C or S
  MOD_RES (15)..(16)..(17)..(18)..(19): Xaa is A or G
  MOD_RES (20)..(21)..(22)..(23): Xaa is A or G or is absent
XAPTKLRPVQVRKIXXXXXXXXXKKATVNMVVRS

SEQ ID NO: 55953 - protein, 40 aa, Artificial Sequence
  GFR-binding peptide
  MOD_RES (6)..(7): Xaa is C or S
  MOD_RES (21)..(22)..(23)..(24)..(25): Xaa is A or G
  MOD_RES (26)..(27)..(28)..(29): Xaa is A or G or is absent
SIPKAXXVPTELSNITMQIMXXXXXXXXXIGEMSEMVVEG

SEQ ID NO: 55954 - protein, 39 aa, Artificial Sequence
  GFR-binding peptide
  MOD_RES (3)..(3): Xaa is C or S
  MOD_RES (19)..(20)..(21)..(22)..(23): Xaa is A or G
  MOD_RES (24)..(25)..(26)..(27): Xaa is A or G or is absent
VQXRPTQVQLEPLTVLYYXXXXXXXXXEQLSNTLEDHLA

SEQ ID NO: 55955 - protein, 37 aa, Artificial Sequence
  GFR-binding peptide
  MOD_RES (4)..(5)..(36): Xaa is C or S
ASPXXVPQDLRPVQIRKIVGRTPKVKKATVMVVKSXK

SEQ ID NO: 55956 - protein, 36 aa, Artificial Sequence; identical to SEQ ID NO: 16921
  GFR-binding peptide
  MOD_RES (4)..(36): Xaa is C or S

SEQ ID NO: 55957 - protein, 42 aa, Artificial Sequence
  GFR-binding peptide
  MOD_RES (6)..(7)..(39)..(41): Xaa is C or S
KIPKAXXVPTELRSVKMAKVDENEKVVKEVQVDMVVEGXGXR

SEQ ID NO: 55958 - protein, 36 aa, Artificial Sequence; identical to SEQ ID NO: 16924
  GFR-binding peptide
  MOD_RES (1)..(35): Xaa is C or S
  MOD_RES (15)..(16)..(17)..(18)..(19): Xaa is A or G
  MOD_RES (20)..(21)..(22)..(23): Xaa is A or G or is absent

SEQ ID NO: 55959 - protein, 35 aa, Artificial Sequence
  GFR-binding peptide
  MOD_RES (2)..(3)..(35): Xaa is C or S
AXXVPTELRPVQMRKIDEYDKVVKKATVEMVVEGX

SEQ ID NO: 55960 - protein, 37 aa, Artificial Sequence
  GFR-binding peptide
  MOD_RES (3)..(35)..(37): Xaa is C or S
PTXAPTKLRSVKVAKVDDSSNVIKEVQVNMVVRSXGX

SEQ ID NO: 55961 - protein, 35 aa, Artificial Sequence
  GFR-binding peptide
  MOD_RES (4)..(5): Xaa is C or S
AAPXXVPQALSNITIQIMVGRKPKVIGEMSMIVRS

SEQ ID NO: 55962 - protein, 34 aa, Artificial Sequence
  GFR-binding peptide
  MOD_RES (31)..(33): Xaa is C or S
VSQDLSNITIQIMIGKTPKIIGEMSMIVKSXKXS

SEQ ID NO: 55963 - protein, 42 aa, Artificial Sequence; identical to SEQ ID NO: 20030
  GFR-binding peptide
  MOD_RES (7)..(41): Xaa is C or S
  MOD_RES (21)..(22)..(23)..(24)..(25): Xaa is A or G
  MOD_RES (26)..(27)..(28)..(29): Xaa is A or G or is absent

SEQ ID NO: 55964 - protein, 37 aa, Artificial Sequence; identical to SEQ ID NO: 16925
  GFR-binding peptide
  MOD_RES (6)..(7): Xaa is C or S

SEQ ID NO: 55965 - protein, 39 aa, Artificial Sequence
  GFR-binding peptide
  MOD_RES (2)..(3)..(36)..(38): Xaa is C or S
  MOD_RES (17)..(18)..(19)..(20)..(21): Xaa is A or G
  MOD_RES (22)..(23)..(24)..(25): Xaa is A or G or is absent
PXXVPQALRPVQIRKIXXXXXXXXXKKATVMIVRSXKXS

SEQ ID NO: 55966 - protein, 37 aa, Artificial Sequence
  GFR-binding peptide
  MOD_RES (37)..(37): Xaa is C or S
RPTQVQLEPLTVLYYEIVRKKPIFEQLSNTLEDHLAX

SEQ ID NO: 55967 - protein, 40 aa, Artificial Sequence
  GFR-binding peptide
  MOD_RES (6)..(40): Xaa is C or S
  MOD_RES (20)..(21)..(22)..(23)..(24): Xaa is A or G
  MOD_RES (25)..(26)..(27)..(28): Xaa is A or G or is absent
DEGLEXVPTEEEPLTMLYYXXXXXXXXXEQLSNFLQHNKX

SEQ ID NO: 55968 - protein, 41 aa, Artificial Sequence
  GFR-binding peptide
  MOD_RES (5)..(6)..(38)..(40): Xaa is C or S
IPKAXXVPTELSNITMQIMDEYDKVVIGEMSEMVVEGXGXR

SEQ ID NO: 55969 - protein, 33 aa, Artificial Sequence
  GFR-binding peptide
  MOD_RES (1)..(2): Xaa is C or S
XXVPTELRPVQMRKIDENEKVVKKATVDMVVEG

SEQ ID NO: 55970 - protein, 35 aa, Artificial Sequence
  GFR-binding peptide
  MOD_RES (1)..(2)..(34): Xaa is C or S
XXAPTQLRSVKVAKVDDSSNVIKEVQVNMVVRAXG

SEQ ID NO: 55971 - protein, 33 aa, Artificial Sequence
  GFR-binding peptide
  MOD_RES (1)..(2)..(33): Xaa is C or S
XXVPQDLSNITIQIMVGRTPKVIGEMSMVVKSX

SEQ ID NO: 55972 - protein, 38 aa, Artificial Sequence
  GFR-binding peptide
  MOD_RES (5)..(5): Xaa is C or S
EGLEXVPTEEEPLTMLYYRIKPHQGQHEQLSNFLQHNK

SEQ ID NO: 55973 - protein, 41 aa, Artificial Sequence; identical to SEQ ID NO: 16931
  GFR-binding peptide
  MOD_RES (4)..(5)..(38)..(40): Xaa is C or S
  MOD_RES (19)..(20)..(21)..(22)..(23): Xaa is A or G
  MOD_RES (24)..(25)..(26)..(27): Xaa is A or G or is absent

SEQ ID NO: 55974 - protein, 37 aa, Artificial Sequence; identical to SEQ ID NO: 16932
  GFR-binding peptide
  MOD_RES (3)..(4)..(35)..(37): Xaa is C or S

SEQ ID NO: 55975 - protein, 34 aa, Artificial Sequence; identical to SEQ ID NO: 16933
  GFR-binding peptide
  MOD_RES (31)..(33): Xaa is C or S

SEQ ID NO: 55976 - protein, 44 aa, Artificial Sequence
  GFR-binding peptide
  MOD_RES (7)..(41)..(43): Xaa is C or S
  MOD_RES (21)..(22)..(23)..(24)..(25): Xaa is A or G
  MOD_RES (26)..(27)..(28)..(29): Xaa is A or G or is absent
HVTKPTXAPTKLRSVKVAKVXXXXXXXXXKEVQVNMVVRSXGXH

SEQ ID NO: 55977 - protein, 37 aa, Artificial Sequence; identical to SEQ ID NO: 16937
  GFR-binding peptide
  MOD_RES (1)..(35)..(37): Xaa is C or S
  MOD_RES (15)..(16)..(17)..(18)..(19): Xaa is A or G
  MOD_RES (20)..(21)..(22)..(23): Xaa is A or G or is absent

SEQ ID NO: 55978 - protein, 37 aa, Artificial Sequence
  GFR-binding peptide
  MOD_RES (37)..(37): Xaa is C or S
QPSRVHHEPLTVLYYEYVRKKPKLEQLSNRLEEHLEX

SEQ ID NO: 55979 - protein, 39 aa, Artificial Sequence
  GFR-binding peptide
  MOD_RES (4)..(5)..(37)..(39): Xaa is C or S
PKPXXAPTQLRPVQVRKIDDSSNVIKKATVNMVVRAXGX

SEQ ID NO: 55980 - protein, 33 aa, Artificial Sequence; identical to SEQ ID NO: 16938
  GFR-binding peptide
  MOD_RES (33)..(33): Xaa is C or S
  MOD_RES (14)..(15)..(16)..(17)..(18): Xaa is A or G
  MOD_RES (19)..(20)..(21)..(22): Xaa is A or G or is absent

SEQ ID NO: 55981 - protein, 41 aa, Artificial Sequence
  GFR-binding peptide
  MOD_RES (1)..(38)..(40): Xaa is C or S
  MOD_RES (17)..(18)..(19)..(20)..(21): Xaa is A or G
  MOD_RES (22)..(23)..(24)..(25): Xaa is A or G or is absent
XRPTQVQLEPLPVVYYXXXXXXXXXEQLSNTLEDHLAXKXE

SEQ ID NO: 55982 - protein, 33 aa, Artificial Sequence
  GFR-binding peptide
  MOD_RES (15)..(16)..(17)..(18)..(19): Xaa is A or G
  MOD_RES (20)..(21)..(22)..(23): Xaa is A or G or is absent
PSRVHHEPLTVLYYXXXXXXXXXEQLSNRLEEH

SEQ ID NO: 55983 - protein, 41 aa, Artificial Sequence; identical to SEQ ID NO: 20035
  GFR-binding peptide
  MOD_RES (3)..(40): Xaa is C or S

SEQ ID NO: 55984 - protein, 35 aa, Artificial Sequence; identical to SEQ ID NO: 16941
  GFR-binding peptide
  MOD_RES (1)..(35): Xaa is C or S
  MOD_RES (15)..(16)..(17)..(18)..(19): Xaa is A or G
  MOD_RES (20)..(21)..(22)..(23): Xaa is A or G or is absent

SEQ ID NO: 55985 - protein, 37 aa, Artificial Sequence
  GFR-binding peptide
  MOD_RES (4)..(36): Xaa is C or S
KPTXAPTKLRSVKVAKVDDSSNVIKEVQVNMVVRSXG

SEQ ID NO: 55986 - protein, 34 aa, Artificial Sequence
  GFR-binding peptide
  MOD_RES (1)..(2)..(33): Xaa is C or S
XXVSQDLSNITIQIMIGKTPKIIGEMSMIVKSXK

SEQ ID NO: 55987 - protein, 35 aa, Artificial Sequence
  GFR-binding peptide
PTQVQLEPLPVVYYEIVRKKPIFEQLSNTLEDHLA

SEQ ID NO: 55988 - protein, 38 aa, Artificial Sequence
  GFR-binding peptide
  MOD_RES (3)..(4)..(36)..(38): Xaa is C or S
KPXXAPTKLRPVQVRKIDDSSNVIKKATVNMVVRSXGX

SEQ ID NO: 55989 - protein, 42 aa, Artificial Sequence
  GFR-binding peptide
  MOD_RES (2)..(39)..(41): Xaa is C or S
  MOD_RES (18)..(19)..(20)..(21)..(22): Xaa is A or G
  MOD_RES (23)..(24)..(25)..(26): Xaa is A or G or is absent
KXQPSRVHHEPLPVVYYXXXXXXXXXEQLSNRLEEHLEXAXA

SEQ ID NO: 55990 - protein, 35 aa, Artificial Sequence; identical to SEQ ID NO: 16943
  GFR-binding peptide
  MOD_RES (1)..(2)..(34): Xaa is C or S

SEQ ID NO: 55991 - protein, 35 aa, Artificial Sequence; identical to SEQ ID NO: 16944
  GFR-binding peptide
  MOD_RES (1)..(34): Xaa is C or S
  MOD_RES (15)..(16)..(17)..(18)..(19): Xaa is A or G
  MOD_RES (20)..(21)..(22)..(23): Xaa is A or G or is absent

SEQ ID NO: 55992 - protein, 35 aa, Artificial Sequence; identical to SEQ ID NO: 16945
  GFR-binding peptide
  MOD_RES (1)..(35): Xaa is C or S
  MOD_RES (15)..(16)..(17)..(18)..(19): Xaa is A or G
  MOD_RES (20)..(21)..(22)..(23): Xaa is A or G or is absent

SEQ ID NO: 55993 - protein, 36 aa, Artificial Sequence
  GFR-binding peptide
  MOD_RES (1)..(35): Xaa is C or S
  MOD_RES (15)..(16)..(17)..(18)..(19): Xaa is A or G
  MOD_RES (20)..(21)..(22)..(23): Xaa is A or G or is absent
XVPTELRSVKMAKVXXXXXXXXXKEVQVEMVVEGXG

SEQ ID NO: 55994 - protein, 35 aa, Artificial Sequence
  GFR-binding peptide
  MOD_RES (1)..(35): Xaa is C or S
  MOD_RES (15)..(16)..(17)..(18)..(19): Xaa is A or G
  MOD_RES (20)..(21)..(22)..(23): Xaa is A or G or is absent
XVPTELRSVKMAKVXXXXXXXXXKEVQVEMVVEGX

SEQ ID NO: 55995 - protein, 40 aa, Artificial Sequence; identical to SEQ ID NO: 20045
  GFR-binding peptide
  MOD_RES (4)..(38)..(40): Xaa is C or S

SEQ ID NO: 55996 - protein, 34 aa, Artificial Sequence; identical to SEQ ID NO: 20046
  GFR-binding peptide

SEQ ID NO: 55997 - protein, 34 aa, Artificial Sequence
  GFR-binding peptide
  MOD_RES (32)..(34): Xaa is C or S
VPTELRSVKMAKVDEYDKVVKEVQVEMVVEGXGX

SEQ ID NO: 55998 - protein, 34 aa, Artificial Sequence; identical to SEQ ID NO: 16948
  GFR-binding peptide
  MOD_RES (2)..(3): Xaa is C or S

SEQ ID NO: 55999 - protein, 41 aa, Artificial Sequence; identical to SEQ ID NO: 20053
  GFR-binding peptide
  MOD_RES (7)..(41): Xaa is C or S

SEQ ID NO: 56000 - protein, 39 aa, Artificial Sequence; identical to SEQ ID NO: 20055
  GFR-binding peptide
  MOD_RES (4)..(4): Xaa is C or S
  MOD_RES (20)..(21)..(22)..(23)..(24): Xaa is A or G
  MOD_RES (25)..(26)..(27)..(28): Xaa is A or G or is absent

SEQ ID NO: 56001 - protein, 38 aa, Artificial Sequence
  GFR-binding peptide
  MOD_RES (3)..(4)..(36)..(38): Xaa is C or S
KPXXAPTQLRPVQVRKIDDSSNVIKKATVNMVVRAXGX

SEQ ID NO: 56002 - protein, 41 aa, Artificial Sequence
  GFR-binding peptide
  MOD_RES (5)..(6)..(40): Xaa is C or S
  MOD_RES (20)..(21)..(22)..(23)..(24): Xaa is A or G
  MOD_RES (25)..(26)..(27)..(28): Xaa is A or G or is absent
IPKAXXVPTELSNITMQIMXXXXXXXXXIGEMSEMVVEGXG

SEQ ID NO: 56003 - protein, 38 aa, Artificial Sequence; identical to SEQ ID NO: 16954
  GFR-binding peptide
  MOD_RES (2)..(3)..(36)..(38): Xaa is C or S
  MOD_RES (17)..(18)..(19)..(20)..(21): Xaa is A or G
  MOD_RES (22)..(23)..(24)..(25): Xaa is A or G or is absent

SEQ ID NO: 56004 - protein, 37 aa, Artificial Sequence
  GFR-binding peptide
  MOD_RES (4)..(5): Xaa is C or S
  MOD_RES (19)..(20)..(21)..(22)..(23): Xaa is A or G
  MOD_RES (24)..(25)..(26)..(27): Xaa is A or G or is absent
ASPXXVPQDLRSVKIAKVXXXXXXXXXKEVQVMVVKS

SEQ ID NO: 56005 - protein, 38 aa, Artificial Sequence
  GFR-binding peptide
  MOD_RES (4)..(5)..(37): Xaa is C or S
PKPXXAPTKLSNITVQIMDDSSNVIIGEMSNMVVRSXG

SEQ ID NO: 56006 - protein, 38 aa, Artificial Sequence
  GFR-binding peptide
  MOD_RES (2)..(3)..(37): Xaa is C or S
  MOD_RES (17)..(18)..(19)..(20)..(21): Xaa is A or G
  MOD_RES (22)..(23)..(24)..(25): Xaa is A or G or is absent
PXXAPTKLRSVKVAKVXXXXXXXXXKEVQVNMVVRSXG

SEQ ID NO: 56007 - protein, 32 aa, Artificial Sequence
  GFR-binding peptide
  MOD_RES (31)..(31): Xaa is C or S
VPQDLRSVKIAKVVGRTPKVKEVQVMVVKSXK

SEQ ID NO: 56008 - protein, 32 aa, Artificial Sequence
  GFR-binding peptide
  MOD_RES (14)..(15)..(16)..(17)..(18): Xaa is A or G
  MOD_RES (19)..(20)..(21)..(22): Xaa is A or G or is absent
VPTELSNITMQIMXXXXXXXXXIGEMSEMVVE

SEQ ID NO: 56009 - protein, 38 aa, Artificial Sequence; identical to SEQ ID NO: 16960
  GFR-binding peptide
  MOD_RES (7)..(7): Xaa is C or S

SEQ ID NO: 56010 - protein, 35 aa, Artificial Sequence; identical to SEQ ID NO: 20061
  GFR-binding peptide
  MOD_RES (16)..(17)..(18)..(19)..(20): Xaa is A or G
  MOD_RES (21)..(22)..(23)..(24): Xaa is A or G or is absent

SEQ ID NO: 56011 - protein, 43 aa, Artificial Sequence; identical to SEQ ID NO: 20062
  GFR-binding peptide
  MOD_RES (3)..(40)..(42): Xaa is C or S
  MOD_RES (19)..(20)..(21)..(22)..(23): Xaa is A or G
  MOD_RES (24)..(25)..(26)..(27): Xaa is A or G or is absent

SEQ ID NO: 56012 - protein, 35 aa, Artificial Sequence; identical to SEQ ID NO: 16961
  GFR-binding peptide
  MOD_RES (1)..(2)..(34): Xaa is C or S

SEQ ID NO: 56013 - protein, 37 aa, Artificial Sequence
  GFR-binding peptide
  MOD_RES (5)..(6)..(37): Xaa is C or S
SASPXXVPQDLRPVQIRKIVGRTPKVKKATVMVVKSX

SEQ ID NO: 56014 - protein, 32 aa, Artificial Sequence; identical to SEQ ID NO: 16962
  GFR-binding peptide
  MOD_RES (1)..(1): Xaa is C or S

SEQ ID NO: 56015 - protein, 36 aa, Artificial Sequence; identical to SEQ ID NO: 16963
  GFR-binding peptide
  MOD_RES (1)..(34)..(36): Xaa is C or S
  MOD_RES (15)..(16)..(17)..(18)..(19): Xaa is A or G
  MOD_RES (20)..(21)..(22)..(23): Xaa is A or G or is absent

SEQ ID NO: 56016 - protein, 39 aa, Artificial Sequence; identical to SEQ ID NO: 16964
  GFR-binding peptide
  MOD_RES (4)..(5)..(38): Xaa is C or S
  MOD_RES (19)..(20)..(21)..(22)..(23): Xaa is A or G
  MOD_RES (24)..(25)..(26)..(27): Xaa is A or G or is absent

SEQ ID NO: 56017 - protein, 39 aa, Artificial Sequence; identical to SEQ ID NO: 16966
  GFR-binding peptide
  MOD_RES (6)..(7): Xaa is C or S
  MOD_RES (21)..(22)..(23)..(24)..(25): Xaa is A or G
  MOD_RES (26)..(27)..(28)..(29): Xaa is A or G or is absent

SEQ ID NO: 56018 - protein, 37 aa, Artificial Sequence; identical to SEQ ID NO: 20067
  GFR-binding peptide
  MOD_RES (34)..(36): Xaa is C or S

SEQ ID NO: 56019 - protein, 39 aa, Artificial Sequence; identical to SEQ ID NO: 16969
  GFR-binding peptide
  MOD_RES (6)..(7)..(39): Xaa is C or S

SEQ ID NO: 56020 - protein, 31 aa, Artificial Sequence
  GFR-binding peptide
  MOD_RES (1)..(1): Xaa is C or S
XVPQALRSVKIAKVVGRKPKVKEVQVMIVRS

SEQ ID NO: 56021 - protein, 42 aa, Artificial Sequence; identical to SEQ ID NO: 16972
  GFR-binding peptide
  MOD_RES (6)..(7)..(41): Xaa is C or S
  MOD_RES (21)..(22)..(23)..(24)..(25): Xaa is A or G
  MOD_RES (26)..(27)..(28)..(29): Xaa is A or G or is absent

SEQ ID NO: 56022 - protein, 40 aa, Artificial Sequence; identical to SEQ ID NO: 20070
  GFR-binding peptide
  MOD_RES (1)..(38)..(40): Xaa is C or S

SEQ ID NO: 56023 - protein, 40 aa, Artificial Sequence; identical to SEQ ID NO: 16973
  GFR-binding peptide
  MOD_RES (6)..(7)..(40): Xaa is C or S
  MOD_RES (21)..(22)..(23)..(24)..(25): Xaa is A or G
  MOD_RES (26)..(27)..(28)..(29): Xaa is A or G or is absent

SEQ ID NO: 56024 - protein, 35 aa, Artificial Sequence
  GFR-binding peptide
  MOD_RES (1)..(2)..(34): Xaa is C or S
XXAPTKLRSVKVAKVDDSSNVIKEVQVNMVVRSXG

SEQ ID NO: 56025 - protein, 42 aa, Artificial Sequence
  GFR-binding peptide
  MOD_RES (4)..(41): Xaa is C or S
SVKXQPSRVHHEPLPVVYYEYVRKKPKLEQLSNRLEEHLEXA

SEQ ID NO: 56026 - protein, 39 aa, Artificial Sequence
  GFR-binding peptide
  MOD_RES (37)..(39): Xaa is C or S
  MOD_RES (16)..(17)..(18)..(19)..(20): Xaa is A or G
  MOD_RES (21)..(22)..(23)..(24): Xaa is A or G or is absent
QPSRVHHEPLTVLYYXXXXXXXXXEQLSNRLEEHLEXAX

SEQ ID NO: 56027 - protein, 43 aa, Artificial Sequence
  GFR-binding peptide
  MOD_RES (4)..(41)..(43): Xaa is C or S
NVQXRPTQVQLEPLTVLYYEIVRKKPIFEQLSNTLEDHLAXKX

SEQ ID NO: 56028 - protein, 40 aa, Artificial Sequence
  GFR-binding peptide
  MOD_RES (4)..(38)..(40): Xaa is C or S
  MOD_RES (18)..(19)..(20)..(21)..(22): Xaa is A or G
  MOD_RES (23)..(24)..(25)..(26): Xaa is A or G or is absent
KPTXAPTKLRPVQVRKIXXXXXXXXXKKATVNMVVRSXGX

SEQ ID NO: 56029 - protein, 37 aa, Artificial Sequence; identical to SEQ ID NO: 16980
  GFR-binding peptide
  MOD_RES (1)..(2)..(35)..(37): Xaa is C or S
  MOD_RES (16)..(17)..(18)..(19)..(20): Xaa is A or G
  MOD_RES (21)..(22)..(23)..(24): Xaa is A or G or is absent

SEQ ID NO: 56030 - protein, 36 aa, Artificial Sequence
  GFR-binding peptide
  MOD_RES (3)..(3): Xaa is C or S
  MOD_RES (17)..(18)..(19)..(20)..(21): Xaa is A or G
  MOD_RES (22)..(23)..(24)..(25): Xaa is A or G or is absent
PTXAPTKLRSVKVAKVXXXXXXXXXKEVQVNMVVRS

SEQ ID NO: 56031 - protein, 36 aa, Artificial Sequence; identical to SEQ ID NO: 16982
  GFR-binding peptide
  MOD_RES (1)..(2)..(34)..(36): Xaa is C or S

SEQ ID NO: 56032 - protein, 36 aa, Artificial Sequence; identical to SEQ ID NO: 16983
  GFR-binding peptide
  MOD_RES (3)..(4): Xaa is C or S
  MOD_RES (18)..(19)..(20)..(21)..(22): Xaa is A or G
  MOD_RES (23)..(24)..(25)..(26): Xaa is A or G or is absent

SEQ ID NO: 56033 - protein, 35 aa, Artificial Sequence
  GFR-binding peptide
  MOD_RES (1)..(1): Xaa is C or S
  MOD_RES (17)..(18)..(19)..(20)..(21): Xaa is A or G
  MOD_RES (22)..(23)..(24)..(25): Xaa is A or G or is absent
XQPSRVHHEPLPVVYYXXXXXXXXXEQLSNRLEEH

SEQ ID NO: 56034 - protein, 39 aa, Artificial Sequence
  GFR-binding peptide
  MOD_RES (3)..(4)..(36)..(38): Xaa is C or S
KPXXAPTKLRPVQVRKIDDSSNVIKKATVNMVVRSXGXH

SEQ ID NO: 56035 - protein, 39 aa, Artificial Sequence
  GFR-binding peptide
  MOD_RES (1)..(38): Xaa is C or S
  MOD_RES (17)..(18)..(19)..(20)..(21): Xaa is A or G
  MOD_RES (22)..(23)..(24)..(25): Xaa is A or G or is absent
XQPSRVHHEPLPVVYYXXXXXXXXXEQLSNRLEEHLEXA

SEQ ID NO: 56036 - protein, 34 aa, Artificial Sequence
  GFR-binding peptide
  MOD_RES (3)..(4): Xaa is C or S
KAXXVPTELRPVQMRKIDENEKVVKKATVDMVVE

SEQ ID NO: 56037 - protein, 37 aa, Artificial Sequence
  GFR-binding peptide
  MOD_RES (3)..(4)..(37): Xaa is C or S
  MOD_RES (18)..(19)..(20)..(21)..(22): Xaa is A or G
  MOD_RES (23)..(24)..(25)..(26): Xaa is A or G or is absent
APXXVPQALRSVKIAKVXXXXXXXXXKEVQVMIVRSX

SEQ ID NO: 56038 - protein, 35 aa, Artificial Sequence
  GFR-binding peptide
  MOD_RES (1)..(1): Xaa is C or S
  MOD_RES (17)..(18)..(19)..(20)..(21): Xaa is A or G
  MOD_RES (22)..(23)..(24)..(25): Xaa is A or G or is absent
XQPSRVHHEPLTVLYYXXXXXXXXXEQLSNRLEEH

SEQ ID NO: 56039 - protein, 34 aa, Artificial Sequence; identical to SEQ ID NO: 16988
  GFR-binding peptide
  MOD_RES (32)..(34): Xaa is C or S

SEQ ID NO: 56040 - protein, 41 aa, Artificial Sequence
  GFR-binding peptide
  MOD_RES (6)..(7)..(39)..(41): Xaa is C or S
SIPKAXXVPTELSNITMQIMDEYDKVVIGEMSEMVVEGXGX

SEQ ID NO: 56041 - protein, 37 aa, Artificial Sequence; identical to SEQ ID NO: 16990
  GFR-binding peptide
  MOD_RES (2)..(34)..(36): Xaa is C or S

SEQ ID NO: 56042 - protein, 37 aa, Artificial Sequence
  GFR-binding peptide
  MOD_RES (4)..(5): Xaa is C or S
  MOD_RES (19)..(20)..(21)..(22)..(23): Xaa is A or G
  MOD_RES (24)..(25)..(26)..(27): Xaa is A or G or is absent
ASPXXVPQDLRPVQIRKIXXXXXXXXXKKATVMVVKS

SEQ ID NO: 56043 - protein, 39 aa, Artificial Sequence; identical to SEQ ID NO: 20085
  GFR-binding peptide
  MOD_RES (37)..(39): Xaa is C or S

SEQ ID NO: 56044 - protein, 39 aa, Artificial Sequence; identical to SEQ ID NO: 20087
  GFR-binding peptide
  MOD_RES (3)..(3): Xaa is C or S

SEQ ID NO: 56045 - protein, 33 aa, Artificial Sequence
  GFR-binding peptide
  MOD_RES (14)..(15)..(16)..(17)..(18): Xaa is A or G
  MOD_RES (19)..(20)..(21)..(22): Xaa is A or G or is absent
TQVQLEPLPVVYYXXXXXXXXXEQLSNTLEDHL

SEQ ID NO: 56046 - protein, 41 aa, Artificial Sequence; identical to SEQ ID NO: 20094
  GFR-binding peptide
  MOD_RES (3)..(40): Xaa is C or S
  MOD_RES (19)..(20)..(21)..(22)..(23): Xaa is A or G
  MOD_RES (24)..(25)..(26)..(27): Xaa is A or G or is absent

SEQ ID NO: 56047 - protein, 39 aa, Artificial Sequence; identical to SEQ ID NO: 20096
  GFR-binding peptide
  MOD_RES (36)..(38): Xaa is C or S
  MOD_RES (15)..(16)..(17)..(18)..(19): Xaa is A or G
  MOD_RES (20)..(21)..(22)..(23): Xaa is A or G or is absent

SEQ ID NO: 56048 - protein, 31 aa, Artificial Sequence
  GFR-binding peptide
  MOD_RES (31)..(31): Xaa is C or S
VPQALRPVQIRKIVGRKPKVKKATVMIVRSX

SEQ ID NO: 56049 - protein, 35 aa, Artificial Sequence; identical to SEQ ID NO: 20097
  GFR-binding peptide

SEQ ID NO: 56050 - protein, 40 aa, Artificial Sequence; identical to SEQ ID NO: 20098
  GFR-binding peptide
  MOD_RES (5)..(5): Xaa is C or S
  MOD_RES (21)..(22)..(23)..(24)..(25): Xaa is A or G
  MOD_RES (26)..(27)..(28)..(29): Xaa is A or G or is absent

SEQ ID NO: 56051 - protein, 35 aa, Artificial Sequence
  GFR-binding peptide
  MOD_RES (1)..(2)..(33)..(35): Xaa is C or S
XXVPQALSNITIQIMVGRKPKVIGEMSMIVRSXKX

SEQ ID NO: 56052 - protein, 37 aa, Artificial Sequence; identical to SEQ ID NO: 17001
  GFR-binding peptide
  MOD_RES (1)..(2)..(34)..(36): Xaa is C or S

SEQ ID NO: 56053 - protein, 39 aa, Artificial Sequence
  GFR-binding peptide
  MOD_RES (5)..(6): Xaa is C or S
  MOD_RES (20)..(21)..(22)..(23)..(24): Xaa is A or G
  MOD_RES (25)..(26)..(27)..(28): Xaa is A or G or is absent
VPKPXXAPTKLRPVQVRKIXXXXXXXXXKKATVNMVVRS

SEQ ID NO: 56054 - protein, 41 aa, Artificial Sequence; identical to SEQ ID NO: 20101
  GFR-binding peptide
  MOD_RES (4)..(41): Xaa is C or S
  MOD_RES (20)..(21)..(22)..(23)..(24): Xaa is A or G
  MOD_RES (25)..(26)..(27)..(28): Xaa is A or G or is absent

SEQ ID NO: 56055 - protein, 36 aa, Artificial Sequence
  GFR-binding peptide
  MOD_RES (2)..(3): Xaa is C or S
  MOD_RES (17)..(18)..(19)..(20)..(21): Xaa is A or G
  MOD_RES (22)..(23)..(24)..(25): Xaa is A or G or is absent
AXXVPTELRPVQMRKIXXXXXXXXXKKATVEMVVEG

SEQ ID NO: 56056 - protein, 40 aa, Artificial Sequence
  GFR-binding peptide
  MOD_RES (6)..(7): Xaa is C or S
  MOD_RES (21)..(22)..(23)..(24)..(25): Xaa is A or G
  MOD_RES (26)..(27)..(28)..(29): Xaa is A or G or is absent
KIPKAXXVPTELSNITMQIMXXXXXXXXXIGEMSDMVVEG

SEQ ID NO: 56057 - protein, 35 aa, Artificial Sequence; identical to SEQ ID NO: 17004
  GFR-binding peptide
  MOD_RES (1)..(2)..(34): Xaa is C or S

SEQ ID NO: 56058 - protein, 41 aa, Artificial Sequence; identical to SEQ ID NO: 20102
  GFR-binding peptide
  MOD_RES (1)..(38)..(40): Xaa is C or S
  MOD_RES (17)..(18)..(19)..(20)..(21): Xaa is A or G
  MOD_RES (22)..(23)..(24)..(25): Xaa is A or G or is absent

SEQ ID NO: 56059 - protein, 36 aa, Artificial Sequence; identical to SEQ ID NO: 17007
  GFR-binding peptide
  MOD_RES (4)..(4): Xaa is C or S
  MOD_RES (18)..(19)..(20)..(21)..(22): Xaa is A or G
  MOD_RES (23)..(24)..(25)..(26): Xaa is A or G or is absent

SEQ ID NO: 56060 - protein, 33 aa, Artificial Sequence
  GFR-binding peptide
  MOD_RES (2)..(3): Xaa is C or S
PXXVSQDLRSVKIAKVIGKTPKIKEVQVMIVKS

SEQ ID NO: 56061 - protein, 38 aa, Artificial Sequence
  GFR-binding peptide
  MOD_RES (5)..(6)..(37): Xaa is C or S
SASPXXVSQDLSNITIQIMIGKTPKIIGEMSMIVKSXK

SEQ ID NO: 56062 - protein, 39 aa, Artificial Sequence
  GFR-binding peptide
  MOD_RES (2)..(3)..(37)..(39): Xaa is C or S
  MOD_RES (17)..(18)..(19)..(20)..(21): Xaa is A or G
  MOD_RES (22)..(23)..(24)..(25): Xaa is A or G or is absent
AXXVPTELRPVQMRKIXXXXXXXXXKKATVEMVVEGXGX

SEQ ID NO: 56063 - protein, 33 aa, Artificial Sequence
  GFR-binding peptide
  MOD_RES (33)..(33): Xaa is C or S
  MOD_RES (14)..(15)..(16)..(17)..(18): Xaa is A or G
  MOD_RES (19)..(20)..(21)..(22): Xaa is A or G or is absent
VPQALRSVKIAKVXXXXXXXXXKEVQVMIVRSX

SEQ ID NO: 56064 - protein, 31 aa, Artificial Sequence
  GFR-binding peptide
  MOD_RES (1)..(1): Xaa is C or S
XVPTELRPVQMRKIDENEKVVKKATVDMVVE

SEQ ID NO: 56065 - protein, 39 aa, Artificial Sequence
  GFR-binding peptide
  MOD_RES (4)..(4): Xaa is C or S
  MOD_RES (20)..(21)..(22)..(23)..(24): Xaa is A or G
  MOD_RES (25)..(26)..(27)..(28): Xaa is A or G or is absent
NVQXRPTQVQLEPLPVVYYXXXXXXXXXEQLSNTLEDHL

SEQ ID NO: 56066 - protein, 36 aa, Artificial Sequence
  GFR-binding peptide
  MOD_RES (1)..(34)..(36): Xaa is C or S
  MOD_RES (15)..(16)..(17)..(18)..(19): Xaa is A or G
  MOD_RES (20)..(21)..(22)..(23): Xaa is A or G or is absent
XVSQDLRPVQIRKIXXXXXXXXXKKATVMIVKSXKX

SEQ ID NO: 56067 - protein, 39 aa, Artificial Sequence; identical to SEQ ID NO: 20108
  GFR-binding peptide
  MOD_RES (4)..(4): Xaa is C or S

SEQ ID NO: 56068 - protein, 34 aa, Artificial Sequence
  GFR-binding peptide
  MOD_RES (3)..(3): Xaa is C or S
PTXAPTKLRSVKVAKVDDSSNVIKEVQVNMVVRS

SEQ ID NO: 56069 - protein, 37 aa, Artificial Sequence
  GFR-binding peptide
  MOD_RES (1)..(2)..(34)..(36): Xaa is C or S
XXVPTELSNITMQIMDEYDKVVIGEMSEMVVEGXGXR

SEQ ID NO: 56070 - protein, 40 aa, Artificial Sequence; identical to SEQ ID NO: 20110
  GFR-binding peptide
  MOD_RES (5)..(5): Xaa is C or S

SEQ ID NO: 56071 - protein, 36 aa, Artificial Sequence; identical to SEQ ID NO: 17013
  GFR-binding peptide
  MOD_RES (2)..(3): Xaa is C or S
  MOD_RES (17)..(18)..(19)..(20)..(21): Xaa is A or G
  MOD_RES (22)..(23)..(24)..(25): Xaa is A or G or is absent

SEQ ID NO: 56072 - protein, 38 aa, Artificial Sequence
  GFR-binding peptide
  MOD_RES (1)..(35)..(37): Xaa is C or S
  MOD_RES (15)..(16)..(17)..(18)..(19): Xaa is A or G
  MOD_RES (20)..(21)..(22)..(23): Xaa is A or G or is absent
XAPTKLRPVQVRKIXXXXXXXXXKKATVNMVVRSXGXH

SEQ ID NO: 56073 - protein, 37 aa, Artificial Sequence; identical to SEQ ID NO: 17016
  GFR-binding peptide
  MOD_RES (3)..(37): Xaa is C or S
  MOD_RES (17)..(18)..(19)..(20)..(21): Xaa is A or G
  MOD_RES (22)..(23)..(24)..(25): Xaa is A or G or is absent

SEQ ID NO: 56074 - protein, 36 aa, Artificial Sequence
  GFR-binding peptide
  MOD_RES (34)..(36): Xaa is C or S
  MOD_RES (14)..(15)..(16)..(17)..(18): Xaa is A or G
  MOD_RES (19)..(20)..(21)..(22): Xaa is A or G or is absent
VPTEEEPLPMVYYXXXXXXXXXEQLSNFLQHNKXEX

SEQ ID NO: 56075 - protein, 41 aa, Artificial Sequence; identical to SEQ ID NO: 17017
  GFR-binding peptide
  MOD_RES (4)..(5)..(38)..(40): Xaa is C or S
  MOD_RES (19)..(20)..(21)..(22)..(23): Xaa is A or G
  MOD_RES (24)..(25)..(26)..(27): Xaa is A or G or is absent

SEQ ID NO: 56076 - protein, 40 aa, Artificial Sequence
  GFR-binding peptide
  MOD_RES (4)..(5)..(38)..(40): Xaa is C or S
  MOD_RES (19)..(20)..(21)..(22)..(23): Xaa is A or G
  MOD_RES (24)..(25)..(26)..(27): Xaa is A or G or is absent
ASPXXVSQDLSNITIQIMXXXXXXXXXIGEMSMIVKSXKX

SEQ ID NO: 56077 - protein, 34 aa, Artificial Sequence
  GFR-binding peptide
SRVHHEPLTVLYYEYVRKKPKLEQLSNRLEEHLE

SEQ ID NO: 56078 - protein, 36 aa, Artificial Sequence
  GFR-binding peptide
  MOD_RES (4)..(5): Xaa is C or S
PKPXXAPTQLRSVKVAKVDDSSNVIKEVQVNMVVRA

SEQ ID NO: 56079 - protein, 39 aa, Artificial Sequence
  GFR-binding peptide
  MOD_RES (2)..(3)..(36)..(38): Xaa is C or S
  MOD_RES (17)..(18)..(19)..(20)..(21): Xaa is A or G
  MOD_RES (22)..(23)..(24)..(25): Xaa is A or G or is absent
PXXVPQALSNITIQIMXXXXXXXXXIGEMSMIVRSXKXS

SEQ ID NO: 56080 - protein, 35 aa, Artificial Sequence
  GFR-binding peptide
  MOD_RES (3)..(4): Xaa is C or S
KPXXAPTKLSNITVQIMDDSSNVIIGEMSNMVVRS

SEQ ID NO: 56081 - protein, 37 aa, Artificial Sequence
  GFR-binding peptide
  MOD_RES (5)..(6)..(37): Xaa is C or S
SASPXXVSQDLRPVQIRKIIGKTPKIKKATVMIVKSX

SEQ ID NO: 56082 - protein, 36 aa, Artificial Sequence; identical to SEQ ID NO: 17021
  GFR-binding peptide
  MOD_RES (3)..(4): Xaa is C or S
  MOD_RES (18)..(19)..(20)..(21)..(22): Xaa is A or G
  MOD_RES (23)..(24)..(25)..(26): Xaa is A or G or is absent

SEQ ID NO: 56083 - protein, 37 aa, Artificial Sequence; identical to SEQ ID NO: 20115
  GFR-binding peptide
  MOD_RES (1)..(1): Xaa is C or S
  MOD_RES (17)..(18)..(19)..(20)..(21): Xaa is A or G
  MOD_RES (22)..(23)..(24)..(25): Xaa is A or G or is absent

SEQ ID NO: 56084 - protein, 39 aa, Artificial Sequence
  GFR-binding peptide
  MOD_RES (4)..(5)..(37)..(39): Xaa is C or S
PKPXXAPTKLRPVQVRKIDDSSNVIKKATVNMVVRSXGX

SEQ ID NO: 56085 - protein, 40 aa, Artificial Sequence; identical to SEQ ID NO: 20118
  GFR-binding peptide
  MOD_RES (1)..(38)..(40): Xaa is C or S
  MOD_RES (17)..(18)..(19)..(20)..(21): Xaa is A or G
  MOD_RES (22)..(23)..(24)..(25): Xaa is A or G or is absent

SEQ ID NO: 56086 - protein, 39 aa, Artificial Sequence; identical to SEQ ID NO: 17025
  GFR-binding peptide
  MOD_RES (6)..(7)..(39): Xaa is C or S

SEQ ID NO: 56087 - protein, 33 aa, Artificial Sequence
  GFR-binding peptide
  MOD_RES (1)..(2): Xaa is C or S
XXAPTKLRPVQVRKIDDSSNVIKKATVNMVVRS

SEQ ID NO: 56088 - protein, 37 aa, Artificial Sequence; identical to SEQ ID NO: 20120
  GFR-binding peptide
  MOD_RES (34)..(36): Xaa is C or S
  MOD_RES (14)..(15)..(16)..(17)..(18): Xaa is A or G
  MOD_RES (19)..(20)..(21)..(22): Xaa is A or G or is absent

SEQ ID NO: 56089 - protein, 38 aa, Artificial Sequence
  GFR-binding peptide
  MOD_RES (5)..(6)..(37): Xaa is C or S
SASPXXVSQDLRSVKIAKVIGKTPKIKEVQVMIVKSXK

SEQ ID NO: 56090 - protein, 34 aa, Artificial Sequence
  GFR-binding peptide
  MOD_RES (2)..(3)..(34): Xaa is C or S
PXXVPQALRSVKIAKVVGRKPKVKEVQVMIVRSX

SEQ ID NO: 56091 - protein, 37 aa, Artificial Sequence; identical to SEQ ID NO: 20122
  GFR-binding peptide
  MOD_RES (35)..(37): Xaa is C or S
  MOD_RES (14)..(15)..(16)..(17)..(18): Xaa is A or G
  MOD_RES (19)..(20)..(21)..(22): Xaa is A or G or is absent

SEQ ID NO: 56092 - protein, 37 aa, Artificial Sequence
  GFR-binding peptide
  MOD_RES (5)..(6): Xaa is C or S
IPKAXXVPTELSNITMQIMDEYDKVVIGEMSEMVVEG

SEQ ID NO: 56093 - protein, 37 aa, Artificial Sequence
  GFR-binding peptide
  MOD_RES (3)..(4)..(35)..(37): Xaa is C or S
SPXXVPQDLRSVKIAKVVGRTPKVKEVQVMVVKSXKX

SEQ ID NO: 56094 - protein, 39 aa, Artificial Sequence; identical to SEQ ID NO: 20124
  GFR-binding peptide
  MOD_RES (5)..(5): Xaa is C or S
  MOD_RES (21)..(22)..(23)..(24)..(25): Xaa is A or G
  MOD_RES (26)..(27)..(28)..(29): Xaa is A or G or is absent

SEQ ID NO: 56095 - protein, 38 aa, Artificial Sequence; identical to SEQ ID NO: 17030
  GFR-binding peptide
  MOD_RES (2)..(3)..(37): Xaa is C or S
  MOD_RES (17)..(18)..(19)..(20)..(21): Xaa is A or G
  MOD_RES (22)..(23)..(24)..(25): Xaa is A or G or is absent

SEQ ID NO: 56096 - protein, 37 aa, Artificial Sequence
  GFR-binding peptide
  MOD_RES (3)..(4)..(36): Xaa is C or S
KAXXVPTELSNITMQIMDENEKVVIGEMSDMVVEGXG

SEQ ID NO: 56097 - protein, 39 aa, Artificial Sequence
  GFR-binding peptide
  MOD_RES (6)..(38): Xaa is C or S
VTKPTXAPTKLSNITVQIMDDSSNVIIGEMSNMVVRSXG

SEQ ID NO: 56098 - protein, 37 aa, Artificial Sequence
  GFR-binding peptide
  MOD_RES (3)..(4)..(35)..(37): Xaa is C or S
SPXXVSQDLRSVKIAKVIGKTPKIKEVQVMIVKSXKX

SEQ ID NO: 56099 - protein, 32 aa, Artificial Sequence; identical to SEQ ID NO: 17033
  GFR-binding peptide
  MOD_RES (1)..(1): Xaa is C or S

SEQ ID NO: 56100 - protein, 35 aa, Artificial Sequence
  GFR-binding peptide
  MOD_RES (34)..(34): Xaa is C or S
VPTEEEPLPMVYYRIKPHQGQHEQLSNFLQHNKXE

SEQ ID NO: 56101 - protein, 39 aa, Artificial Sequence; identical to SEQ ID NO: 20131
  GFR-binding peptide
  MOD_RES (4)..(38): Xaa is C or S
  MOD_RES (18)..(19)..(20)..(21)..(22): Xaa is A or G
  MOD_RES (23)..(24)..(25)..(26): Xaa is A or G or is absent

SEQ ID NO: 56102 - protein, 35 aa, Artificial Sequence
  GFR-binding peptide
  MOD_RES (2)..(3)..(34): Xaa is C or S
PXXVSQDLRPVQIRKIIGKTPKIKKATVMIVKSXK

SEQ ID NO: 56103 - protein, 41 aa, Artificial Sequence
  GFR-binding peptide
  MOD_RES (6)..(7)..(41): Xaa is C or S
  MOD_RES (21)..(22)..(23)..(24)..(25): Xaa is A or G
  MOD_RES (26)..(27)..(28)..(29): Xaa is A or G or is absent
YVPKPXXAPTKLRPVQVRKIXXXXXXXXXKKATVNMVVRSX

SEQ ID NO: 56104 - protein, 34 aa, Artificial Sequence
  GFR-binding peptide
  MOD_RES (3)..(4): Xaa is C or S
SPXXVSQDLSNITIQIMIGKTPKIIGEMSMIVKS

SEQ ID NO: 56105 - protein, 38 aa, Artificial Sequence
  GFR-binding peptide
  MOD_RES (6)..(7)..(38): Xaa is C or S
ASASPXXVSQDLRPVQIRKIIGKTPKIKKATVMIVKSX

SEQ ID NO: 56106 - protein, 43 aa, Artificial Sequence
  GFR-binding peptide
  MOD_RES (6)..(7)..(40)..(42): Xaa is C or S
  MOD_RES (21)..(22)..(23)..(24)..(25): Xaa is A or G
  MOD_RES (26)..(27)..(28)..(29): Xaa is A or G or is absent
ASASPXXVPQDLRSVKIAKVXXXXXXXXXKEVQVMVVKSXKXS

SEQ ID NO: 56107 - protein, 41 aa, Artificial Sequence; identical to SEQ ID NO: 20134
  GFR-binding peptide
  MOD_RES (6)..(40): Xaa is C or S
  MOD_RES (20)..(21)..(22)..(23)..(24): Xaa is A or G
  MOD_RES (25)..(26)..(27)..(28): Xaa is A or G or is absent

SEQ ID NO: 56108 - protein, 34 aa, Artificial Sequence; identical to SEQ ID NO: 17037
  GFR-binding peptide
  MOD_RES (3)..(4): Xaa is C or S

SEQ ID NO: 56109 - protein, 38 aa, Artificial Sequence
  GFR-binding peptide
  MOD_RES (2)..(3)..(35)..(37): Xaa is C or S
AXXVPTELRSVKMAKVDEYDKVVKEVQVEMVVEGXGXR

SEQ ID NO: 56110 - protein, 36 aa, Artificial Sequence; identical to SEQ ID NO: 20137
  GFR-binding peptide
  MOD_RES (1)..(1): Xaa is C or S
  MOD_RES (17)..(18)..(19)..(20)..(21): Xaa is A or G
  MOD_RES (22)..(23)..(24)..(25): Xaa is A or G or is absent

SEQ ID NO: 56111 - protein, 39 aa, Artificial Sequence
  GFR-binding peptide
  MOD_RES (4)..(36)..(38): Xaa is C or S
KPTXAPTKLRSVKVAKVDDSSNVIKEVQVNMVVRSXGXH

SEQ ID NO: 56112 - protein, 39 aa, Artificial Sequence
  GFR-binding peptide
  MOD_RES (3)..(4)..(37)..(39): Xaa is C or S
  MOD_RES (18)..(19)..(20)..(21)..(22): Xaa is A or G
  MOD_RES (23)..(24)..(25)..(26): Xaa is A or G or is absent
APXXVPQALSNITIQIMXXXXXXXXXIGEMSMIVRSXKX

SEQ ID NO: 56113 - protein, 37 aa, Artificial Sequence; identical to SEQ ID NO: 17038
  GFR-binding peptide
  MOD_RES (1)..(2)..(34)..(36): Xaa is C or S

SEQ ID NO: 56114 - protein, 37 aa, Artificial Sequence
  GFR-binding peptide
  MOD_RES (4)..(5)..(36): Xaa is C or S
AAPXXVPQALRSVKIAKVVGRKPKVKEVQVMIVRSXK

SEQ ID NO: 56115 - protein, 31 aa, Artificial Sequence
  GFR-binding peptide
VPTELRPVQMRKIDEYDKVVKKATVEMVVEG

SEQ ID NO: 56116 - protein, 38 aa, Artificial Sequence
  GFR-binding peptide
  MOD_RES (5)..(37): Xaa is C or S
TKPTXAPTKLRPVQVRKIDDSSNVIKKATVNMVVRSXG

SEQ ID NO: 56117 - protein, 36 aa, Artificial Sequence
  GFR-binding peptide
  MOD_RES (5)..(6): Xaa is C or S
VPKPXXAPTQLSNITVQIMDDSSNVIIGEMSNMVVR

SEQ ID NO: 56118 - protein, 38 aa, Artificial Sequence
  GFR-binding peptide
  MOD_RES (1)..(2)..(35)..(37): Xaa is C or S
  MOD_RES (16)..(17)..(18)..(19)..(20): Xaa is A or G
  MOD_RES (21)..(22)..(23)..(24): Xaa is A or G or is absent
XXVPQALRPVQIRKIXXXXXXXXXKKATVMIVRSXKXS

SEQ ID NO: 56119 - protein, 39 aa, Artificial Sequence
  GFR-binding peptide
  MOD_RES (4)..(5)..(38): Xaa is C or S
  MOD_RES (19)..(20)..(21)..(22)..(23): Xaa is A or G
  MOD_RES (24)..(25)..(26)..(27): Xaa is A or G or is absent
ASPXXVSQDLSNITIQIMXXXXXXXXXIGEMSMIVKSXK

SEQ ID NO: 56120 - protein, 39 aa, Artificial Sequence
  GFR-binding peptide
  MOD_RES (6)..(6): Xaa is C or S
DEGLEXVPTEEEPLTMLYYRIKPHQGQHEQLSNFLQHNK

SEQ ID NO: 56121 - protein, 40 aa, Artificial Sequence
  GFR-binding peptide
  MOD_RES (4)..(38)..(40): Xaa is C or S
  MOD_RES (18)..(19)..(20)..(21)..(22): Xaa is A or G
  MOD_RES (23)..(24)..(25)..(26): Xaa is A or G or is absent
KPTXAPTKLSNITVQIMXXXXXXXXXIGEMSNMVVRSXGX

SEQ ID NO: 56122 - protein, 38 aa, Artificial Sequence; identical to SEQ ID NO: 17043
  GFR-binding peptide
  MOD_RES (5)..(5): Xaa is C or S
  MOD_RES (19)..(20)..(21)..(22)..(23): Xaa is A or G
  MOD_RES (24)..(25)..(26)..(27): Xaa is A or G or is absent

SEQ ID NO: 56123 - protein, 41 aa, Artificial Sequence; identical to SEQ ID NO: 20144
  GFR-binding peptide
  MOD_RES (7)..(41): Xaa is C or S
  MOD_RES (21)..(22)..(23)..(24)..(25): Xaa is A or G
  MOD_RES (26)..(27)..(28)..(29): Xaa is A or G or is absent

SEQ ID NO: 56124 - protein, 32 aa, Artificial Sequence
  GFR-binding peptide
  MOD_RES (1)..(2): Xaa is C or S
XXVPTELRPVQMRKIDENEKVVKKATVDMVVE

SEQ ID NO: 56125 - protein, 40 aa, Artificial Sequence
  GFR-binding peptide
  MOD_RES (3)..(4)..(37)..(39): Xaa is C or S
  MOD_RES (18)..(19)..(20)..(21)..(22): Xaa is A or G
  MOD_RES (23)..(24)..(25)..(26): Xaa is A or G or is absent
APXXVPQALRPVQIRKIXXXXXXXXXKKATVMIVRSXKXS

SEQ ID NO: 56126 - protein, 38 aa, Artificial Sequence; identical to SEQ ID NO: 17044
  GFR-binding peptide
  MOD_RES (3)..(4)..(36)..(38): Xaa is C or S

SEQ ID NO: 56127 - protein, 39 aa, Artificial Sequence; identical to SEQ ID NO: 20147
  GFR-binding peptide
  MOD_RES (5)..(39): Xaa is C or S
  MOD_RES (19)..(20)..(21)..(22)..(23): Xaa is A or G
  MOD_RES (24)..(25)..(26)..(27): Xaa is A or G or is absent

SEQ ID NO: 56128 - protein, 38 aa, Artificial Sequence; identical to SEQ ID NO: 20148
  GFR-binding peptide
  MOD_RES (4)..(4): Xaa is C or S
  MOD_RES (20)..(21)..(22)..(23)..(24): Xaa is A or G
  MOD_RES (25)..(26)..(27)..(28): Xaa is A or G or is absent

SEQ ID NO: 56129 - protein, 38 aa, Artificial Sequence; identical to SEQ ID NO: 20150
  GFR-binding peptide
  MOD_RES (37)..(37): Xaa is C or S
  MOD_RES (16)..(17)..(18)..(19)..(20): Xaa is A or G
  MOD_RES (21)..(22)..(23)..(24): Xaa is A or G or is absent

SEQ ID NO: 56130 - protein, 34 aa, Artificial Sequence; identical to SEQ ID NO: 26309
  GFR-binding peptide
  MOD_RES (2)..(34): Xaa is C or S

SEQ ID NO: 56131 - protein, 38 aa, Artificial Sequence; identical to SEQ ID NO: 2269
  GFR-binding peptide
  MOD_RES (32)..(33): Xaa is C or S

SEQ ID NO: 56132 - protein, 38 aa, Artificial Sequence; identical to SEQ ID NO: 3274
  GFR-binding peptide
  MOD_RES (1)..(3)..(37)..(38): Xaa is C or S
  MOD_RES (15)..(16)..(17)..(18)..(19): Xaa is A or G
  MOD_RES (20)..(21)..(22)..(23): Xaa is A or G or is absent

SEQ ID NO: 56133 - protein, 34 aa, Artificial Sequence; identical to SEQ ID NO: 2272
  GFR-binding peptide
  MOD_RES (13)..(14)..(15)..(16)..(17): Xaa is A or G
  MOD_RES (18)..(19)..(20)..(21): Xaa is A or G or is absent

SEQ ID NO: 56134 - protein, 42 aa, Artificial Sequence; identical to SEQ ID NO: 2274
  GFR-binding peptide
  MOD_RES (1)..(3)..(38)..(39): Xaa is C or S
  MOD_RES (16)..(17)..(18)..(19)..(20): Xaa is A or G
  MOD_RES (21)..(22)..(23)..(24): Xaa is A or G or is absent

SEQ ID NO: 56135 - protein, 36 aa, Artificial Sequence; identical to SEQ ID NO: 5201
  GFR-binding peptide
  MOD_RES (33)..(34): Xaa is C or S

SEQ ID NO: 56136 - protein, 41 aa, Artificial Sequence; identical to SEQ ID NO: 3278
  GFR-binding peptide
  MOD_RES (2)..(35)..(36): Xaa is C or S

SEQ ID NO: 56137 - protein, 36 aa, Artificial Sequence; identical to SEQ ID NO: 4228
  GFR-binding peptide
  MOD_RES (1)..(33)..(34): Xaa is C or S

SEQ ID NO: 56138 - protein, 39 aa, Artificial Sequence; identical to SEQ ID NO: 4229
  GFR-binding peptide
  MOD_RES (1)..(33)..(34): Xaa is C or S

SEQ ID NO: 56139 - protein, 32 aa, Artificial Sequence; identical to SEQ ID NO: 3280
  GFR-binding peptide
  MOD_RES (1)..(1): Xaa is C or S

SEQ ID NO: 56140 - protein, 33 aa, Artificial Sequence; identical to SEQ ID NO: 2277
  GFR-binding peptide
  MOD_RES (2)..(2): Xaa is C or S

SEQ ID NO: 56141 - protein, 44 aa, Artificial Sequence
  GFR-binding peptide
  MOD_RES (2)..(4)..(38)..(39): Xaa is C or S
  MOD_RES (16)..(17)..(18)..(19)..(20): Xaa is A or G
  MOD_RES (21)..(22)..(23)..(24): Xaa is A or G or is absent
HXGXSRVVMNRYKKLXXXXXXXXXFYLVSIANLKTPAXXPKPVH

SEQ ID NO: 56142 - protein, 38 aa, Artificial Sequence
  GFR-binding peptide
  MOD_RES (1)..(3)..(37)..(38): Xaa is C or S
  MOD_RES (15)..(16)..(17)..(18)..(19): Xaa is A or G
  MOD_RES (20)..(21)..(22)..(23): Xaa is A or G or is absent
XGXRDVVMGRYKKLXXXXXXXXXFYLMSIANMKTPTXX

SEQ ID NO: 56143 - protein, 38 aa, Artificial Sequence; identical to SEQ ID NO: 25289
  GFR-binding peptide
  MOD_RES (2)..(4)..(38): Xaa is C or S
  MOD_RES (16)..(17)..(18)..(19)..(20): Xaa is A or G
  MOD_RES (21)..(22)..(23)..(24): Xaa is A or G or is absent

SEQ ID NO: 56144 - protein, 38 aa, Artificial Sequence
  GFR-binding peptide
  MOD_RES (32)..(33): Xaa is C or S
RDVVMGRYKKLIIQQKDNFYLMSIANMKTPTXXPGASG

SEQ ID NO: 56145 - protein, 35 aa, Artificial Sequence; identical to SEQ ID NO: 3283
  GFR-binding peptide
  MOD_RES (1)..(35): Xaa is C or S
  MOD_RES (13)..(14)..(15)..(16)..(17): Xaa is A or G
  MOD_RES (18)..(19)..(20)..(21): Xaa is A or G or is absent

SEQ ID NO: 56146 - protein, 38 aa, Artificial Sequence; identical to SEQ ID NO: 4236
  GFR-binding peptide
  MOD_RES (1)..(33)..(34): Xaa is C or S

SEQ ID NO: 56147 - protein, 36 aa, Artificial Sequence
  GFR-binding peptide
  MOD_RES (33)..(34): Xaa is C or S
  MOD_RES (11)..(12)..(13)..(14)..(15): Xaa is A or G
  MOD_RES (16)..(17)..(18)..(19): Xaa is A or G or is absent
EEVIMRYKKLXXXXXXXXXFYLMSIANTKVPAXXTS

SEQ ID NO: 56148 - protein, 41 aa, Artificial Sequence
  GFR-binding peptide
  MOD_RES (2)..(36)..(37): Xaa is C or S
  MOD_RES (14)..(15)..(16)..(17)..(18): Xaa is A or G
  MOD_RES (19)..(20)..(21)..(22): Xaa is A or G or is absent
GXRDVVMGRYKKLXXXXXXXXXFYLMSIANMKTPTXXPGAS

SEQ ID NO: 56149 - protein, 39 aa, Artificial Sequence
  GFR-binding peptide
  MOD_RES (1)..(3)..(36)..(37): Xaa is C or S
  MOD_RES (14)..(15)..(16)..(17)..(18): Xaa is A or G
  MOD_RES (19)..(20)..(21)..(22): Xaa is A or G or is absent
XGXEEVIMRYKKLXXXXXXXXXFYLMSIANTKVPAXXTS

SEQ ID NO: 56150 - protein, 35 aa, Artificial Sequence; identical to SEQ ID NO: 5219
  GFR-binding peptide
  MOD_RES (2)..(34)..(35): Xaa is C or S

SEQ ID NO: 56151 - protein, 42 aa, Artificial Sequence; identical to SEQ ID NO: 2293
  GFR-binding peptide
  MOD_RES (2)..(4)..(36)..(37): Xaa is C or S

SEQ ID NO: 56152 - protein, 36 aa, Artificial Sequence; identical to SEQ ID NO: 26332
  GFR-binding peptide
  MOD_RES (31)..(32): Xaa is C or S

SEQ ID NO: 56153 - protein, 35 aa, Artificial Sequence; identical to SEQ ID NO: 3299
  GFR-binding peptide
  MOD_RES (2)..(2): Xaa is C or S
  MOD_RES (14)..(15)..(16)..(17)..(18): Xaa is A or G
  MOD_RES (19)..(20)..(21)..(22): Xaa is A or G or is absent

SEQ ID NO: 56154 - protein, 42 aa, Artificial Sequence; identical to SEQ ID NO: 5224
  GFR-binding peptide
  MOD_RES (2)..(37)..(38): Xaa is C or S
  MOD_RES (15)..(16)..(17)..(18)..(19): Xaa is A or G
  MOD_RES (20)..(21)..(22)..(23): Xaa is A or G or is absent

SEQ ID NO: 56155 - protein, 40 aa, Artificial Sequence; identical to SEQ ID NO: 24290
  GFR-binding peptide
  MOD_RES (34)..(35): Xaa is C or S
  MOD_RES (12)..(13)..(14)..(15)..(16): Xaa is A or G
  MOD_RES (17)..(18)..(19)..(20): Xaa is A or G or is absent

SEQ ID NO: 56156 - protein, 34 aa, Artificial Sequence; identical to SEQ ID NO: 5225
  GFR-binding peptide
  MOD_RES (33)..(33): Xaa is C or S
  MOD_RES (11)..(12)..(13)..(14)..(15): Xaa is A or G
  MOD_RES (16)..(17)..(18)..(19): Xaa is A or G or is absent

SEQ ID NO: 56157 - protein, 38 aa, Artificial Sequence; identical to SEQ ID NO: 2298
  GFR-binding peptide
  MOD_RES (1)..(35)..(36): Xaa is C or S
  MOD_RES (13)..(14)..(15)..(16)..(17): Xaa is A or G
  MOD_RES (18)..(19)..(20)..(21): Xaa is A or G or is absent

SEQ ID NO: 56158 - protein, 37 aa, Artificial Sequence; identical to SEQ ID NO: 4250
  GFR-binding peptide
  MOD_RES (2)..(36): Xaa is C or S
  MOD_RES (14)..(15)..(16)..(17)..(18): Xaa is A or G
  MOD_RES (19)..(20)..(21)..(22): Xaa is A or G or is absent

SEQ ID NO: 56159 - protein, 31 aa, Artificial Sequence
  GFR-binding peptide
  MOD_RES (1)..(1): Xaa is C or S
XEEVIMRYKKLLLVRGNDFYLMSIANTKVPA

SEQ ID NO: 56160 - protein, 39 aa, Artificial Sequence; identical to SEQ ID NO: 2299
  GFR-binding peptide
  MOD_RES (1)..(3)..(35)..(36): Xaa is C or S

SEQ ID NO: 56161 - protein, 38 aa, Artificial Sequence; identical to SEQ ID NO: 2301
  GFR-binding peptide
  MOD_RES (1)..(33): Xaa is C or S

SEQ ID NO: 56162 - protein, 35 aa, Artificial Sequence; identical to SEQ ID NO: 23287
  GFR-binding peptide
  MOD_RES (33)..(34): Xaa is C or S
  MOD_RES (11)..(12)..(13)..(14)..(15): Xaa is A or G
  MOD_RES (16)..(17)..(18)..(19): Xaa is A or G or is absent

SEQ ID NO: 56163 - protein, 35 aa, Artificial Sequence; identical to SEQ ID NO: 25301
  GFR-binding peptide
  MOD_RES (1)..(3)..(35): Xaa is C or S

SEQ ID NO: 56164 - protein, 35 aa, Artificial Sequence; identical to SEQ ID NO: 26339
  GFR-binding peptide
  MOD_RES (2)..(34)..(35): Xaa is C or S

SEQ ID NO: 56165 - protein, 39 aa, Artificial Sequence
  GFR-binding peptide
  MOD_RES (2)..(35)..(36): Xaa is C or S
  MOD_RES (13)..(14)..(15)..(16)..(17): Xaa is A or G
  MOD_RES (18)..(19)..(20)..(21): Xaa is A or G or is absent
GXEEVIMRYKKLXXXXXXXXXFYLMSIANTKVPAXXTSP

SEQ ID NO: 56166 - protein, 37 aa, Artificial Sequence
  GFR-binding peptide
  MOD_RES (2)..(4)..(36)..(37): Xaa is C or S
SXGXRDVVMGRYKKLIIQQKDNFYLMSIANMKTPTXX

SEQ ID NO: 56167 - protein, 34 aa, Artificial Sequence; identical to SEQ ID NO: 25303
  GFR-binding peptide
  MOD_RES (1)..(33)..(34): Xaa is C or S

SEQ ID NO: 56168 - protein, 37 aa, Artificial Sequence
  GFR-binding peptide
  MOD_RES (2)..(34)..(35): Xaa is C or S
GXRDVVMGRYKKLIIQQKDNFYLMSIANMKTPTXXPG

SEQ ID NO: 56169 - protein, 36 aa, Artificial Sequence; identical to SEQ ID NO: 9808
  GFR-binding peptide
  MOD_RES (2)..(36): Xaa is C or S
  MOD_RES (14)..(15)..(16)..(17)..(18): Xaa is A or G
  MOD_RES (19)..(20)..(21)..(22): Xaa is A or G or is absent

SEQ ID NO: 56170 - protein, 39 aa, Artificial Sequence; identical to SEQ ID NO: 25305
  GFR-binding peptide
  MOD_RES (1)..(3)..(37)..(38): Xaa is C or S
  MOD_RES (15)..(16)..(17)..(18)..(19): Xaa is A or G
  MOD_RES (20)..(21)..(22)..(23): Xaa is A or G or is absent

SEQ ID NO: 56171 - protein, 30 aa, Artificial Sequence; identical to SEQ ID NO: 24301
  GFR-binding peptide

SEQ ID NO: 56172 - protein, 41 aa, Artificial Sequence; identical to SEQ ID NO: 4256
  GFR-binding peptide
  MOD_RES (2)..(4)..(36)..(37): Xaa is C or S

SEQ ID NO: 56173 - protein, 32 aa, Artificial Sequence; identical to SEQ ID NO: 25312
  GFR-binding peptide
  MOD_RES (11)..(12)..(13)..(14)..(15): Xaa is A or G
  MOD_RES (16)..(17)..(18)..(19): Xaa is A or G or is absent

SEQ ID NO: 56174 - protein, 41 aa, Artificial Sequence; identical to SEQ ID NO: 4257
  GFR-binding peptide
  MOD_RES (1)..(3)..(35): Xaa is C or S

SEQ ID NO: 56175 - protein, 37 aa, Artificial Sequence; identical to SEQ ID NO: 12669
  GFR-binding peptide
  MOD_RES (1)..(3)..(35)..(36): Xaa is C or S

SEQ ID NO: 56176 - protein, 31 aa, Artificial Sequence; identical to SEQ ID NO: 23296
  GFR-binding peptide
  MOD_RES (31)..(31): Xaa is C or S

SEQ ID NO: 56177 - protein, 34 aa, Artificial Sequence; identical to SEQ ID NO: 3316
  GFR-binding peptide
  MOD_RES (2)..(2): Xaa is C or S

SEQ ID NO: 56178 - protein, 43 aa, Artificial Sequence; identical to SEQ ID NO: 3317
  GFR-binding peptide
  MOD_RES (1)..(3)..(37): Xaa is C or S
  MOD_RES (15)..(16)..(17)..(18)..(19): Xaa is A or G
  MOD_RES (20)..(21)..(22)..(23): Xaa is A or G or is absent

SEQ ID NO: 56179 - protein, 40 aa, Artificial Sequence
  GFR-binding peptide
  MOD_RES (2)..(4)..(36)..(37): Xaa is C or S
SXGXRDVVMGRYKKLIIQQKDNFYLMSIANMKTPTXXPGA

SEQ ID NO: 56180 - protein, 33 aa, Artificial Sequence; identical to SEQ ID NO: 11675
  GFR-binding peptide
  MOD_RES (1)..(33): Xaa is C or S

SEQ ID NO: 56181 - protein, 40 aa, Artificial Sequence; identical to SEQ ID NO: 23297
  GFR-binding peptide
  MOD_RES (1)..(35)..(36): Xaa is C or S
  MOD_RES (13)..(14)..(15)..(16)..(17): Xaa is A or G
  MOD_RES (18)..(19)..(20)..(21): Xaa is A or G or is absent

SEQ ID NO: 56182 - protein, 41 aa, Artificial Sequence
  GFR-binding peptide
  MOD_RES (1)..(3)..(35)..(36): Xaa is C or S
XGXSRVVMNRYKKLIVNSSDDFYLVSIANLKTPAXXPKPVH

SEQ ID NO: 56183 - protein, 41 aa, Artificial Sequence
  GFR-binding peptide
  MOD_RES (1)..(3)..(35)..(36): Xaa is C or S
XGXRDVVMGRYKKLIIQQKDNFYLMSIANMKTPTXXPGASG

SEQ ID NO: 56184 - protein, 37 aa, Artificial Sequence; identical to SEQ ID NO: 2323
  GFR-binding peptide
  MOD_RES (2)..(4): Xaa is C or S
  MOD_RES (16)..(17)..(18)..(19)..(20): Xaa is A or G
  MOD_RES (21)..(22)..(23)..(24): Xaa is A or G or is absent

SEQ ID NO: 56185 - protein, 40 aa, Artificial Sequence; identical to SEQ ID NO: 3321
  GFR-binding peptide
  MOD_RES (1)..(3)..(37)..(38): Xaa is C or S
  MOD_RES (15)..(16)..(17)..(18)..(19): Xaa is A or G
  MOD_RES (20)..(21)..(22)..(23): Xaa is A or G or is absent

SEQ ID NO: 56186 - protein, 43 aa, Artificial Sequence; identical to SEQ ID NO: 26358
  GFR-binding peptide
  MOD_RES (1)..(3)..(37)..(38): Xaa is C or S
  MOD_RES (15)..(16)..(17)..(18)..(19): Xaa is A or G
  MOD_RES (20)..(21)..(22)..(23): Xaa is A or G or is absent

SEQ ID NO: 56187 - protein, 32 aa, Artificial Sequence; identical to SEQ ID NO: 2327
  GFR-binding peptide
  MOD_RES (31)..(32): Xaa is C or S

SEQ ID NO: 56188 - protein, 36 aa, Artificial Sequence; identical to SEQ ID NO: 11684
  GFR-binding peptide
  MOD_RES (1)..(3)..(35)..(36): Xaa is C or S

SEQ ID NO: 56189 - protein, 39 aa, Artificial Sequence; identical to SEQ ID NO: 3330
  GFR-binding peptide
  MOD_RES (1)..(33)..(34): Xaa is C or S

SEQ ID NO: 56190 - protein, 34 aa, Artificial Sequence; identical to SEQ ID NO: 26365
  GFR-binding peptide
  MOD_RES (32)..(33): Xaa is C or S

SEQ ID NO: 56191 - protein, 36 aa, Artificial Sequence; identical to SEQ ID NO: 12680
  GFR-binding peptide
  MOD_RES (1)..(3): Xaa is C or S
  MOD_RES (15)..(16)..(17)..(18)..(19): Xaa is A or G
  MOD_RES (20)..(21)..(22)..(23): Xaa is A or G or is absent

SEQ ID NO: 56192 - protein, 34 aa, Artificial Sequence
  GFR-binding peptide
  MOD_RES (1)..(32)..(33): Xaa is C or S
XEEVIMRYKKLLLVRGNDFYLMSIANTKVPAXXT

SEQ ID NO: 56193 - protein, 40 aa, Artificial Sequence; identical to SEQ ID NO: 5247
  GFR-binding peptide
  MOD_RES (2)..(4)..(36): Xaa is C or S

SEQ ID NO: 56194 - protein, 40 aa, Artificial Sequence; identical to SEQ ID NO: 25322
  GFR-binding peptide
  MOD_RES (2)..(4)..(38)..(39): Xaa is C or S
  MOD_RES (16)..(17)..(18)..(19)..(20): Xaa is A or G
  MOD_RES (21)..(22)..(23)..(24): Xaa is A or G or is absent

SEQ ID NO: 56195 - protein, 33 aa, Artificial Sequence; identical to SEQ ID NO: 12682
  GFR-binding peptide
  MOD_RES (2)..(2): Xaa is C or S

SEQ ID NO: 56196 - protein, 35 aa, Artificial Sequence; identical to SEQ ID NO: 11686
  GFR-binding peptide
  MOD_RES (33)..(34): Xaa is C or S
  MOD_RES (11)..(12)..(13)..(14)..(15): Xaa is A or G
  MOD_RES (16)..(17)..(18)..(19): Xaa is A or G or is absent

SEQ ID NO: 56197 - protein, 35 aa, Artificial Sequence
  GFR-binding peptide
  MOD_RES (2)..(34)..(35): Xaa is C or S
GXRDVVMGRYKKLIIQQKDNFYLMSIANMKTPTXX

SEQ ID NO: 56198 - protein, 40 aa, Artificial Sequence; identical to SEQ ID NO: 2333
  GFR-binding peptide
  MOD_RES (1)..(3)..(36)..(37): Xaa is C or S

SEQ ID NO: 56199 - protein, 37 aa, Artificial Sequence; identical to SEQ ID NO: 23318
  GFR-binding peptide
  MOD_RES (1)..(33)..(34): Xaa is C or S

SEQ ID NO: 56200 - protein, 39 aa, Artificial Sequence; identical to SEQ ID NO: 5249
  GFR-binding peptide
  MOD_RES (2)..(4)..(37)..(38): Xaa is C or S

SEQ ID NO: 56201 - protein, 40 aa, Artificial Sequence; identical to SEQ ID NO: 2334
  GFR-binding peptide
  MOD_RES (1)..(3)..(35): Xaa is C or S

SEQ ID NO: 56202 - protein, 35 aa, Artificial Sequence
  GFR-binding peptide
  MOD_RES (1)..(34)..(35): Xaa is C or S
  MOD_RES (12)..(13)..(14)..(15)..(16): Xaa is A or G
  MOD_RES (17)..(18)..(19)..(20): Xaa is A or G or is absent
XEEVIMRYKKLXXXXXXXXXFYLMSIANTKVPAXX

SEQ ID NO: 56203 - protein, 38 aa, Artificial Sequence; identical to SEQ ID NO: 5250
  GFR-binding peptide
  MOD_RES (1)..(3)..(35)..(36): Xaa is C or S

SEQ ID NO: 56204 - protein, 45 aa, Artificial Sequence; identical to SEQ ID NO: 5252
  GFR-binding peptide
  MOD_RES (2)..(4)..(39)..(40): Xaa is C or S
  MOD_RES (17)..(18)..(19)..(20)..(21): Xaa is A or G
  MOD_RES (22)..(23)..(24)..(25): Xaa is A or G or is absent

SEQ ID NO: 56205 - protein, 37 aa, Artificial Sequence; identical to SEQ ID NO: 5253
  GFR-binding peptide
  MOD_RES (1)..(34)..(35): Xaa is C or S

SEQ ID NO: 56206 - protein, 33 aa, Artificial Sequence; identical to SEQ ID NO: 5255
  GFR-binding peptide
  MOD_RES (33)..(33): Xaa is C or S
  MOD_RES (11)..(12)..(13)..(14)..(15): Xaa is A or G
  MOD_RES (16)..(17)..(18)..(19): Xaa is A or G or is absent

SEQ ID NO: 56207 - protein, 40 aa, Artificial Sequence; identical to SEQ ID NO: 5256
  GFR-binding peptide
  MOD_RES (1)..(3)..(35)..(36): Xaa is C or S

SEQ ID NO: 56208 - protein, 42 aa, Artificial Sequence; identical to SEQ ID NO: 4274
  GFR-binding peptide
  MOD_RES (2)..(4)..(37)..(38): Xaa is C or S

SEQ ID NO: 56209 - protein, 34 aa, Artificial Sequence; identical to SEQ ID NO: 4277
  GFR-binding peptide
  MOD_RES (1)..(1): Xaa is C or S
  MOD_RES (13)..(14)..(15)..(16)..(17): Xaa is A or G
  MOD_RES (18)..(19)..(20)..(21): Xaa is A or G or is absent

SEQ ID NO: 56210 - protein, 31 aa, Artificial Sequence; identical to SEQ ID NO: 11698
  GFR-binding peptide
  MOD_RES (31)..(31): Xaa is C or S

SEQ ID NO: 56211 - protein, 32 aa, Artificial Sequence
  GFR-binding peptide
  MOD_RES (32)..(32): Xaa is C or S
RDVVMGRYKKLIIQQKDNFYLMSIANMKTPTX

SEQ ID NO: 56212 - protein, 35 aa, Artificial Sequence; identical to SEQ ID NO: 24332
  GFR-binding peptide
  MOD_RES (34)..(35): Xaa is C or S
  MOD_RES (12)..(13)..(14)..(15)..(16): Xaa is A or G
  MOD_RES (17)..(18)..(19)..(20): Xaa is A or G or is absent

SEQ ID NO: 56213 - protein, 42 aa, Artificial Sequence; identical to SEQ ID NO: 3348
  GFR-binding peptide
  MOD_RES (2)..(4)..(38)..(39): Xaa is C or S
  MOD_RES (16)..(17)..(18)..(19)..(20): Xaa is A or G
  MOD_RES (21)..(22)..(23)..(24): Xaa is A or G or is absent

SEQ ID NO: 56214 - protein, 40 aa, Artificial Sequence; identical to SEQ ID NO: 5268
  GFR-binding peptide
  MOD_RES (34)..(35): Xaa is C or S
  MOD_RES (12)..(13)..(14)..(15)..(16): Xaa is A or G
  MOD_RES (17)..(18)..(19)..(20): Xaa is A or G or is absent

SEQ ID NO: 56215 - protein, 37 aa, Artificial Sequence; identical to SEQ ID NO: 5269
  GFR-binding peptide
  MOD_RES (35)..(36): Xaa is C or S
  MOD_RES (13)..(14)..(15)..(16)..(17): Xaa is A or G
  MOD_RES (18)..(19)..(20)..(21): Xaa is A or G or is absent

SEQ ID NO: 56216 - protein, 38 aa, Artificial Sequence; identical to SEQ ID NO: 25331
  GFR-binding peptide
  MOD_RES (32)..(33): Xaa is C or S

SEQ ID NO: 56217 - protein, 39 aa, Artificial Sequence; identical to SEQ ID NO: 5274
  GFR-binding peptide
  MOD_RES (2)..(4)..(38)..(39): Xaa is C or S
  MOD_RES (16)..(17)..(18)..(19)..(20): Xaa is A or G
  MOD_RES (21)..(22)..(23)..(24): Xaa is A or G or is absent

SEQ ID NO: 56218 - protein, 43 aa, Artificial Sequence; identical to SEQ ID NO: 3356
  GFR-binding peptide
  MOD_RES (1)..(3)..(37)..(38): Xaa is C or S
  MOD_RES (15)..(16)..(17)..(18)..(19): Xaa is A or G
  MOD_RES (20)..(21)..(22)..(23): Xaa is A or G or is absent

SEQ ID NO: 56219 - protein, 35 aa, Artificial Sequence; identical to SEQ ID NO: 24338
  GFR-binding peptide
  MOD_RES (31)..(32): Xaa is C or S

SEQ ID NO: 56220 - protein, 33 aa, Artificial Sequence; identical to SEQ ID NO: 5275
  GFR-binding peptide
  MOD_RES (32)..(32): Xaa is C or S

SEQ ID NO: 56221 - protein, 37 aa, Artificial Sequence
  GFR-binding peptide
  MOD_RES (34)..(35): Xaa is C or S
  MOD_RES (12)..(13)..(14)..(15)..(16): Xaa is A or G
  MOD_RES (17)..(18)..(19)..(20): Xaa is A or G or is absent
RDVVMGRYKKLXXXXXXXXXFYLMSIANMKTPTXXPG

SEQ ID NO: 56222 - protein, 38 aa, Artificial Sequence; identical to SEQ ID NO: 2351
  GFR-binding peptide
  MOD_RES (1)..(3)..(35)..(36): Xaa is C or S

SEQ ID NO: 56223 - protein, 39 aa, Artificial Sequence; identical to SEQ ID NO: 24342
  GFR-binding peptide
  MOD_RES (1)..(33)..(34): Xaa is C or S

SEQ ID NO: 56224 - protein, 38 aa, Artificial Sequence; identical to SEQ ID NO: 5276
  GFR-binding peptide
  MOD_RES (32)..(33): Xaa is C or S

SEQ ID NO: 56225 - protein, 33 aa, Artificial Sequence; identical to SEQ ID NO: 3364
  GFR-binding peptide
  MOD_RES (31)..(32): Xaa is C or S

SEQ ID NO: 56226 - protein, 43 aa, Artificial Sequence; identical to SEQ ID NO: 2357
  GFR-binding peptide
  MOD_RES (2)..(4)..(38)..(39): Xaa is C or S
  MOD_RES (16)..(17)..(18)..(19)..(20): Xaa is A or G
  MOD_RES (21)..(22)..(23)..(24): Xaa is A or G or is absent

SEQ ID NO: 56227 - protein, 42 aa, Artificial Sequence
  GFR-binding peptide
  MOD_RES (2)..(36)..(37): Xaa is C or S
  MOD_RES (14)..(15)..(16)..(17)..(18): Xaa is A or G
  MOD_RES (19)..(20)..(21)..(22): Xaa is A or G or is absent
GXRDVVMGRYKKLXXXXXXXXXFYLMSIANMKTPTXXPGASG

SEQ ID NO: 56228 - protein, 37 aa, Artificial Sequence; identical to SEQ ID NO: 2360
  GFR-binding peptide
  MOD_RES (1)..(3)..(37): Xaa is C or S
  MOD_RES (15)..(16)..(17)..(18)..(19): Xaa is A or G
  MOD_RES (20)..(21)..(22)..(23): Xaa is A or G or is absent

SEQ ID NO: 56229 - protein, 34 aa, Artificial Sequence
  GFR-binding peptide
  MOD_RES (2)..(4): Xaa is C or S
LXGXEEVIMRYKKLLLVRGNDFYLMSIANTKVPA

SEQ ID NO: 56230 - protein, 37 aa, Artificial Sequence; identical to SEQ ID NO: 3368
  GFR-binding peptide
  MOD_RES (2)..(4)..(36)..(37): Xaa is C or S

SEQ ID NO: 56231 - protein, 36 aa, Artificial Sequence; identical to SEQ ID NO: 3370
  GFR-binding peptide
  MOD_RES (1)..(35)..(36): Xaa is C or S
  MOD_RES (13)..(14)..(15)..(16)..(17): Xaa is A or G
  MOD_RES (18)..(19)..(20)..(21): Xaa is A or G or is absent

SEQ ID NO: 56232 - protein, 38 aa, Artificial Sequence; identical to SEQ ID NO: 4294
  GFR-binding peptide
  MOD_RES (33)..(34): Xaa is C or S
  MOD_RES (11)..(12)..(13)..(14)..(15): Xaa is A or G
  MOD_RES (16)..(17)..(18)..(19): Xaa is A or G or is absent

SEQ ID NO: 56233 - protein, 41 aa, Artificial Sequence; identical to SEQ ID NO: 3371
  GFR-binding peptide
  MOD_RES (1)..(3)..(37): Xaa is C or S
  MOD_RES (15)..(16)..(17)..(18)..(19): Xaa is A or G
  MOD_RES (20)..(21)..(22)..(23): Xaa is A or G or is absent

SEQ ID NO: 56234 - protein, 41 aa, Artificial Sequence; identical to SEQ ID NO: 24352
  GFR-binding peptide
  MOD_RES (1)..(3)..(35)..(36): Xaa is C or S

SEQ ID NO: 56235 - protein, 39 aa, Artificial Sequence
  GFR-binding peptide
  MOD_RES (2)..(36)..(37): Xaa is C or S
  MOD_RES (14)..(15)..(16)..(17)..(18): Xaa is A or G
  MOD_RES (19)..(20)..(21)..(22): Xaa is A or G or is absent
GXRDVVMGRYKKLXXXXXXXXXFYLMSIANMKTPTXXPG

SEQ ID NO: 56236 - protein, 37 aa, Artificial Sequence; identical to SEQ ID NO: 3372
  GFR-binding peptide
  MOD_RES (1)..(3)..(37): Xaa is C or S
  MOD_RES (15)..(16)..(17)..(18)..(19): Xaa is A or G
  MOD_RES (20)..(21)..(22)..(23): Xaa is A or G or is absent

SEQ ID NO: 56237 - protein, 35 aa, Artificial Sequence; identical to SEQ ID NO: 5290
  GFR-binding peptide
  MOD_RES (1)..(3)..(35): Xaa is C or S

SEQ ID NO: 56238 - protein, 39 aa, Artificial Sequence; identical to SEQ ID NO: 4297
  GFR-binding peptide
  MOD_RES (2)..(4)..(38)..(39): Xaa is C or S
  MOD_RES (16)..(17)..(18)..(19)..(20): Xaa is A or G
  MOD_RES (21)..(22)..(23)..(24): Xaa is A or G or is absent

SEQ ID NO: 56239 - protein, 37 aa, Artificial Sequence; identical to SEQ ID NO: 4299
  GFR-binding peptide
  MOD_RES (2)..(36)..(37): Xaa is C or S
  MOD_RES (14)..(15)..(16)..(17)..(18): Xaa is A or G
  MOD_RES (19)..(20)..(21)..(22): Xaa is A or G or is absent

SEQ ID NO: 56240 - protein, 42 aa, Artificial Sequence; identical to SEQ ID NO: 3378
  GFR-binding peptide
  MOD_RES (1)..(3)..(37)..(38): Xaa is C or S
  MOD_RES (15)..(16)..(17)..(18)..(19): Xaa is A or G
  MOD_RES (20)..(21)..(22)..(23): Xaa is A or G or is absent

SEQ ID NO: 56241 - protein, 36 aa, Artificial Sequence; identical to SEQ ID NO: 26419
  GFR-binding peptide
  MOD_RES (1)..(33)..(34): Xaa is C or S

SEQ ID NO: 56242 - protein, 40 aa, Artificial Sequence; identical to SEQ ID NO: 4305
  GFR-binding peptide
  MOD_RES (2)..(4)..(36)..(37): Xaa is C or S

SEQ ID NO: 56243 - protein, 35 aa, Artificial Sequence; identical to SEQ ID NO: 5301
  GFR-binding peptide
  MOD_RES (2)..(4): Xaa is C or S

SEQ ID NO: 56244 - protein, 39 aa, Artificial Sequence; identical to SEQ ID NO: 2381
  GFR-binding peptide
  MOD_RES (2)..(36)..(37): Xaa is C or S
  MOD_RES (14)..(15)..(16)..(17)..(18): Xaa is A or G
  MOD_RES (19)..(20)..(21)..(22): Xaa is A or G or is absent

SEQ ID NO: 56245 - protein, 32 aa, Artificial Sequence; identical to SEQ ID NO: 4308
  GFR-binding peptide
  MOD_RES (31)..(32): Xaa is C or S

SEQ ID NO: 56246 - protein, 32 aa, Artificial Sequence; identical to SEQ ID NO: 4313
  GFR-binding peptide
  MOD_RES (1)..(1): Xaa is C or S

SEQ ID NO: 56247 - protein, 40 aa, Artificial Sequence
  GFR-binding peptide
  MOD_RES (1)..(3)..(35)..(36): Xaa is C or S
XGXRDVVMGRYKKLIIQQKDNFYLMSIANMKTPTXXPGAS

SEQ ID NO: 56248 - protein, 40 aa, Artificial Sequence; identical to SEQ ID NO: 10810
  GFR-binding peptide
  MOD_RES (1)..(3)..(35)..(36): Xaa is C or S

SEQ ID NO: 56249 - protein, 36 aa, Artificial Sequence; identical to SEQ ID NO: 3388
  GFR-binding peptide
  MOD_RES (2)..(4)..(36): Xaa is C or S

SEQ ID NO: 56250 - protein, 44 aa, Artificial Sequence; identical to SEQ ID NO: 2388
  GFR-binding peptide
  MOD_RES (1)..(3)..(38)..(39): Xaa is C or S
  MOD_RES (16)..(17)..(18)..(19)..(20): Xaa is A or G
  MOD_RES (21)..(22)..(23)..(24): Xaa is A or G or is absent

SEQ ID NO: 56251 - protein, 37 aa, Artificial Sequence
  GFR-binding peptide
  MOD_RES (1)..(3)..(37): Xaa is C or S
  MOD_RES (15)..(16)..(17)..(18)..(19): Xaa is A or G
  MOD_RES (20)..(21)..(22)..(23): Xaa is A or G or is absent
XGXRDVVMGRYKKLXXXXXXXXXFYLMSIANMKTPTX

SEQ ID NO: 56252 - protein, 33 aa, Artificial Sequence
  GFR-binding peptide
  MOD_RES (12)..(13)..(14)..(15)..(16): Xaa is A or G
  MOD_RES (17)..(18)..(19)..(20): Xaa is A or G or is absent
RDVVMGRYKKLXXXXXXXXXFYLMSIANMKTPT

SEQ ID NO: 56253 - protein, 39 aa, Artificial Sequence; identical to SEQ ID NO: 10812
  GFR-binding peptide
  MOD_RES (2)..(4)..(38)..(39): Xaa is C or S
  MOD_RES (16)..(17)..(18)..(19)..(20): Xaa is A or G
  MOD_RES (21)..(22)..(23)..(24): Xaa is A or G or is absent

SEQ ID NO: 56254 - protein, 44 aa, Artificial Sequence; identical to SEQ ID NO: 5309
  GFR-binding peptide
  MOD_RES (2)..(4)..(39)..(40): Xaa is C or S
  MOD_RES (17)..(18)..(19)..(20)..(21): Xaa is A or G
  MOD_RES (22)..(23)..(24)..(25): Xaa is A or G or is absent

SEQ ID NO: 56255 - protein, 39 aa, Artificial Sequence; identical to SEQ ID NO: 5310
  GFR-binding peptide
  MOD_RES (2)..(4)..(36)..(37): Xaa is C or S

SEQ ID NO: 56256 - protein, 39 aa, Artificial Sequence; identical to SEQ ID NO: 2389
  GFR-binding peptide
  MOD_RES (1)..(3)..(37)..(38): Xaa is C or S
  MOD_RES (15)..(16)..(17)..(18)..(19): Xaa is A or G
  MOD_RES (20)..(21)..(22)..(23): Xaa is A or G or is absent

SEQ ID NO: 56257 - protein, 38 aa, Artificial Sequence; identical to SEQ ID NO: 5313
  GFR-binding peptide
  MOD_RES (1)..(33)..(34): Xaa is C or S

SEQ ID NO: 56258 - protein, 41 aa, Artificial Sequence; identical to SEQ ID NO: 2394
  GFR-binding peptide
  MOD_RES (2)..(36)..(37): Xaa is C or S
  MOD_RES (14)..(15)..(16)..(17)..(18): Xaa is A or G
  MOD_RES (19)..(20)..(21)..(22): Xaa is A or G or is absent

SEQ ID NO: 56259 - protein, 36 aa, Artificial Sequence; identical to SEQ ID NO: 4320
  GFR-binding peptide
  MOD_RES (2)..(36): Xaa is C or S
  MOD_RES (14)..(15)..(16)..(17)..(18): Xaa is A or G
  MOD_RES (19)..(20)..(21)..(22): Xaa is A or G or is absent

SEQ ID NO: 56260 - protein, 39 aa, Artificial Sequence
  GFR-binding peptide
  MOD_RES (1)..(3)..(37)..(38): Xaa is C or S
  MOD_RES (15)..(16)..(17)..(18)..(19): Xaa is A or G
  MOD_RES (20)..(21)..(22)..(23): Xaa is A or G or is absent
XGXRDVVMGRYKKLXXXXXXXXXFYLMSIANMKTPTXXP

SEQ ID NO: 56261 - protein, 37 aa, Artificial Sequence; identical to SEQ ID NO: 2399
  GFR-binding peptide
  MOD_RES (1)..(3)..(37): Xaa is C or S
  MOD_RES (15)..(16)..(17)..(18)..(19): Xaa is A or G
  MOD_RES (20)..(21)..(22)..(23): Xaa is A or G or is absent

SEQ ID NO: 56262 - protein, 36 aa, Artificial Sequence; identical to SEQ ID NO: 12744
  GFR-binding peptide
  MOD_RES (33)..(34): Xaa is C or S
  MOD_RES (11)..(12)..(13)..(14)..(15): Xaa is A or G
  MOD_RES (16)..(17)..(18)..(19): Xaa is A or G or is absent

SEQ ID NO: 56263 - protein, 38 aa, Artificial Sequence; identical to SEQ ID NO: 4324
  GFR-binding peptide
  MOD_RES (2)..(34)..(35): Xaa is C or S

SEQ ID NO: 56264 - protein, 30 aa, Artificial Sequence; identical to SEQ ID NO: 12746
  GFR-binding peptide

SEQ ID NO: 56265 - protein, 40 aa, Artificial Sequence
  GFR-binding peptide
  MOD_RES (2)..(34)..(35): Xaa is C or S
GXSRVVMNRYKKLIVNSSDDFYLVSIANLKTPAXXPKPVH

SEQ ID NO: 56266 - protein, 35 aa, Artificial Sequence; identical to SEQ ID NO: 26447
  GFR-binding peptide
  MOD_RES (2)..(2): Xaa is C or S
  MOD_RES (14)..(15)..(16)..(17)..(18): Xaa is A or G
  MOD_RES (19)..(20)..(21)..(22): Xaa is A or G or is absent

SEQ ID NO: 56267 - protein, 38 aa, Artificial Sequence; identical to SEQ ID NO: 4329
  GFR-binding peptide
  MOD_RES (1)..(33)..(34): Xaa is C or S

SEQ ID NO: 56268 - protein, 38 aa, Artificial Sequence; identical to SEQ ID NO: 2402
  GFR-binding peptide
  MOD_RES (2)..(4)..(36)..(37): Xaa is C or S

SEQ ID NO: 56269 - protein, 35 aa, Artificial Sequence; identical to SEQ ID NO: 4331
  GFR-binding peptide
  MOD_RES (34)..(35): Xaa is C or S
  MOD_RES (12)..(13)..(14)..(15)..(16): Xaa is A or G
  MOD_RES (17)..(18)..(19)..(20): Xaa is A or G or is absent

SEQ ID NO: 56270 - protein, 35 aa, Artificial Sequence; identical to SEQ ID NO: 3404
  GFR-binding peptide
  MOD_RES (2)..(34)..(35): Xaa is C or S

SEQ ID NO: 56271 - protein, 39 aa, Artificial Sequence; identical to SEQ ID NO: 5323
  GFR-binding peptide
  MOD_RES (2)..(4)..(39): Xaa is C or S
  MOD_RES (17)..(18)..(19)..(20)..(21): Xaa is A or G
  MOD_RES (22)..(23)..(24)..(25): Xaa is A or G or is absent

SEQ ID NO: 56272 - protein, 39 aa, Artificial Sequence; identical to SEQ ID NO: 2406
  GFR-binding peptide
  MOD_RES (2)..(4)..(38)..(39): Xaa is C or S
  MOD_RES (16)..(17)..(18)..(19)..(20): Xaa is A or G
  MOD_RES (21)..(22)..(23)..(24): Xaa is A or G or is absent

SEQ ID NO: 56273 - protein, 33 aa, Artificial Sequence; identical to SEQ ID NO: 5330
  GFR-binding peptide
  MOD_RES (1)..(33): Xaa is C or S

SEQ ID NO: 56274 - protein, 34 aa, Artificial Sequence; identical to SEQ ID NO: 24385
  GFR-binding peptide
  MOD_RES (1)..(1): Xaa is C or S
  MOD_RES (13)..(14)..(15)..(16)..(17): Xaa is A or G
  MOD_RES (18)..(19)..(20)..(21): Xaa is A or G or is absent

SEQ ID NO: 56275 - protein, 38 aa, Artificial Sequence
  GFR-binding peptide
  MOD_RES (2)..(36)..(37): Xaa is C or S
  MOD_RES (14)..(15)..(16)..(17)..(18): Xaa is A or G
  MOD_RES (19)..(20)..(21)..(22): Xaa is A or G or is absent
GXRDVVMGRYKKLXXXXXXXXXFYLMSIANMKTPTXXP

SEQ ID NO: 56276 - protein, 34 aa, Artificial Sequence
  GFR-binding peptide
  MOD_RES (31)..(32): Xaa is C or S
DVVMGRYKKLIIQQKDNFYLMSIANMKTPTXXPG

SEQ ID NO: 56277 - protein, 40 aa, Artificial Sequence; identical to SEQ ID NO: 9911
  GFR-binding peptide
  MOD_RES (2)..(34)..(35): Xaa is C or S

SEQ ID NO: 56278 - protein, 36 aa, Artificial Sequence; identical to SEQ ID NO: 5334
  GFR-binding peptide
  MOD_RES (34)..(35): Xaa is C or S
  MOD_RES (12)..(13)..(14)..(15)..(16): Xaa is A or G
  MOD_RES (17)..(18)..(19)..(20): Xaa is A or G or is absent

SEQ ID NO: 56279 - protein, 37 aa, Artificial Sequence; identical to SEQ ID NO: 23395
  GFR-binding peptide
  MOD_RES (2)..(34)..(35): Xaa is C or S

SEQ ID NO: 56280 - protein, 38 aa, Artificial Sequence; identical to SEQ ID NO: 23400
  GFR-binding peptide
  MOD_RES (2)..(34)..(35): Xaa is C or S

SEQ ID NO: 56281 - protein, 33 aa, Artificial Sequence; identical to SEQ ID NO: 4350
  GFR-binding peptide
  MOD_RES (33)..(33): Xaa is C or S
  MOD_RES (11)..(12)..(13)..(14)..(15): Xaa is A or G
  MOD_RES (16)..(17)..(18)..(19): Xaa is A or G or is absent

SEQ ID NO: 56282 - protein, 39 aa, Artificial Sequence; identical to SEQ ID NO: 3413
  GFR-binding peptide
  MOD_RES (33)..(34): Xaa is C or S
  MOD_RES (11)..(12)..(13)..(14)..(15): Xaa is A or G
  MOD_RES (16)..(17)..(18)..(19): Xaa is A or G or is absent

SEQ ID NO: 56283 - protein, 40 aa, Artificial Sequence; identical to SEQ ID NO: 3417
  GFR-binding peptide
  MOD_RES (2)..(34)..(35): Xaa is C or S

SEQ ID NO: 56284 - protein, 37 aa, Artificial Sequence
  GFR-binding peptide
  MOD_RES (1)..(34)..(35): Xaa is C or S
  MOD_RES (12)..(13)..(14)..(15)..(16): Xaa is A or G
  MOD_RES (17)..(18)..(19)..(20): Xaa is A or G or is absent
XEEVIMRYKKLXXXXXXXXXFYLMSIANTKVPAXXTS

SEQ ID NO: 56285 - protein, 36 aa, Artificial Sequence; identical to SEQ ID NO: 4355
  GFR-binding peptide
  MOD_RES (31)..(32): Xaa is C or S

SEQ ID NO: 56286 - protein, 35 aa, Artificial Sequence; identical to SEQ ID NO: 2426
  GFR-binding peptide
  MOD_RES (2)..(2): Xaa is C or S
  MOD_RES (14)..(15)..(16)..(17)..(18): Xaa is A or G
  MOD_RES (19)..(20)..(21)..(22): Xaa is A or G or is absent

SEQ ID NO: 56287 - protein, 37 aa, Artificial Sequence; identical to SEQ ID NO: 4357
  GFR-binding peptide
  MOD_RES (2)..(4): Xaa is C or S
  MOD_RES (16)..(17)..(18)..(19)..(20): Xaa is A or G
  MOD_RES (21)..(22)..(23)..(24): Xaa is A or G or is absent

SEQ ID NO: 56288 - protein, 38 aa, Artificial Sequence
  GFR-binding peptide
  MOD_RES (2)..(34)..(35): Xaa is C or S
GXRDVVMGRYKKLIIQQKDNFYLMSIANMKTPTXXPGA

SEQ ID NO: 56289 - protein, 38 aa, Artificial Sequence; identical to SEQ ID NO: 5338
  GFR-binding peptide
  MOD_RES (1)..(3)..(35)..(36): Xaa is C or S

SEQ ID NO: 56290 - protein, 42 aa, Artificial Sequence; identical to SEQ ID NO: 4359
  GFR-binding peptide
  MOD_RES (2)..(4)..(38)..(39): Xaa is C or S
  MOD_RES (16)..(17)..(18)..(19)..(20): Xaa is A or G
  MOD_RES (21)..(22)..(23)..(24): Xaa is A or G or is absent

SEQ ID NO: 56291 - protein, 42 aa, Artificial Sequence; identical to SEQ ID NO: 4360
  GFR-binding peptide
  MOD_RES (2)..(36)..(37): Xaa is C or S
  MOD_RES (14)..(15)..(16)..(17)..(18): Xaa is A or G
  MOD_RES (19)..(20)..(21)..(22): Xaa is A or G or is absent

SEQ ID NO: 56292 - protein, 42 aa, Artificial Sequence; identical to SEQ ID NO: 12770
  GFR-binding peptide
  MOD_RES (2)..(4)..(38)..(39): Xaa is C or S
  MOD_RES (16)..(17)..(18)..(19)..(20): Xaa is A or G
  MOD_RES (21)..(22)..(23)..(24): Xaa is A or G or is absent

SEQ ID NO: 56293 - protein, 36 aa, Artificial Sequence
  GFR-binding peptide
  MOD_RES (31)..(32): Xaa is C or S
EEVIMRYKKLLLVRGNDFYLMSIANTKVPAXXTSPV

SEQ ID NO: 56294 - protein, 36 aa, Artificial Sequence; identical to SEQ ID NO: 25421
  GFR-binding peptide
  MOD_RES (2)..(34)..(35): Xaa is C or S

SEQ ID NO: 56295 - protein, 41 aa, Artificial Sequence
  GFR-binding peptide
  MOD_RES (1)..(3)..(36)..(37): Xaa is C or S
  MOD_RES (14)..(15)..(16)..(17)..(18): Xaa is A or G
  MOD_RES (19)..(20)..(21)..(22): Xaa is A or G or is absent
XGXEEVIMRYKKLXXXXXXXXXFYLMSIANTKVPAXXTSPV

SEQ ID NO: 56296 - protein, 34 aa, Artificial Sequence; identical to SEQ ID NO: 4364
  GFR-binding peptide
  MOD_RES (1)..(1): Xaa is C or S
  MOD_RES (13)..(14)..(15)..(16)..(17): Xaa is A or G
  MOD_RES (18)..(19)..(20)..(21): Xaa is A or G or is absent

SEQ ID NO: 56297 - protein, 31 aa, Artificial Sequence; identical to SEQ ID NO: 12773
  GFR-binding peptide

SEQ ID NO: 56298 - protein, 33 aa, Artificial Sequence; identical to SEQ ID NO: 23412
  GFR-binding peptide
  MOD_RES (31)..(32): Xaa is C or S

SEQ ID NO: 56299 - protein, 33 aa, Artificial Sequence; identical to SEQ ID NO: 5346
  GFR-binding peptide
  MOD_RES (32)..(33): Xaa is C or S

SEQ ID NO: 56300 - protein, 38 aa, Artificial Sequence; identical to SEQ ID NO: 25425
  GFR-binding peptide
  MOD_RES (1)..(3)..(35)..(36): Xaa is C or S

SEQ ID NO: 56301 - protein, 44 aa, Artificial Sequence; identical to SEQ ID NO: 5349
  GFR-binding peptide
  MOD_RES (2)..(4)..(38)..(39): Xaa is C or S
  MOD_RES (16)..(17)..(18)..(19)..(20): Xaa is A or G
  MOD_RES (21)..(22)..(23)..(24): Xaa is A or G or is absent

SEQ ID NO: 56302 - protein, 42 aa, Artificial Sequence; identical to SEQ ID NO: 2435
  GFR-binding peptide
  MOD_RES (1)..(3)..(37)..(38): Xaa is C or S
  MOD_RES (15)..(16)..(17)..(18)..(19): Xaa is A or G
  MOD_RES (20)..(21)..(22)..(23): Xaa is A or G or is absent

SEQ ID NO: 56303 - protein, 37 aa, Artificial Sequence
  GFR-binding peptide
  MOD_RES (1)..(35)..(36): Xaa is C or S
  MOD_RES (13)..(14)..(15)..(16)..(17): Xaa is A or G
  MOD_RES (18)..(19)..(20)..(21): Xaa is A or G or is absent
XRDVVMGRYKKLXXXXXXXXXFYLMSIANMKTPTXXP

SEQ ID NO: 56304 - protein, 36 aa, Artificial Sequence
  GFR-binding peptide
  MOD_RES (2)..(4): Xaa is C or S
  MOD_RES (15)..(16)..(17)..(18)..(19): Xaa is A or G
  MOD_RES (20)..(21)..(22)..(23): Xaa is A or G or is absent
LXGXEEVIMRYKKLXXXXXXXXXFYLMSIANTKVPA

SEQ ID NO: 56305 - protein, 43 aa, Artificial Sequence; identical to SEQ ID NO: 3427
  GFR-binding peptide
  MOD_RES (2)..(4)..(38)..(39): Xaa is C or S
  MOD_RES (16)..(17)..(18)..(19)..(20): Xaa is A or G
  MOD_RES (21)..(22)..(23)..(24): Xaa is A or G or is absent

SEQ ID NO: 56306 - protein, 40 aa, Artificial Sequence; identical to SEQ ID NO: 5355
  GFR-binding peptide
  MOD_RES (1)..(35)..(36): Xaa is C or S
  MOD_RES (13)..(14)..(15)..(16)..(17): Xaa is A or G
  MOD_RES (18)..(19)..(20)..(21): Xaa is A or G or is absent

SEQ ID NO: 56307 - protein, 33 aa, Artificial Sequence; identical to SEQ ID NO: 2439
  GFR-binding peptide
  MOD_RES (31)..(32): Xaa is C or S

SEQ ID NO: 56308 - protein, 41 aa, Artificial Sequence; identical to SEQ ID NO: 5357
  GFR-binding peptide
  MOD_RES (1)..(3)..(35)..(36): Xaa is C or S

SEQ ID NO: 56309 - protein, 42 aa, Artificial Sequence; identical to SEQ ID NO: 25430
  GFR-binding peptide
  MOD_RES (2)..(4)..(36)..(37): Xaa is C or S

SEQ ID NO: 56310 - protein, 35 aa, Artificial Sequence; identical to SEQ ID NO: 4369
  GFR-binding peptide
  MOD_RES (33)..(34): Xaa is C or S
  MOD_RES (11)..(12)..(13)..(14)..(15): Xaa is A or G
  MOD_RES (16)..(17)..(18)..(19): Xaa is A or G or is absent

SEQ ID NO: 56311 - protein, 38 aa, Artificial Sequence; identical to SEQ ID NO: 9939
  GFR-binding peptide
  MOD_RES (33)..(34): Xaa is C or S
  MOD_RES (11)..(12)..(13)..(14)..(15): Xaa is A or G
  MOD_RES (16)..(17)..(18)..(19): Xaa is A or G or is absent

SEQ ID NO: 56312 - protein, 36 aa, Artificial Sequence
  GFR-binding peptide
  MOD_RES (31)..(32): Xaa is C or S
DVVMGRYKKLIIQQKDNFYLMSIANMKTPTXXPGAS

SEQ ID NO: 56313 - protein, 40 aa, Artificial Sequence; identical to SEQ ID NO: 24427
  GFR-binding peptide
  MOD_RES (1)..(3)..(35)..(36): Xaa is C or S

SEQ ID NO: 56314 - protein, 44 aa, Artificial Sequence; identical to SEQ ID NO: 10856
  GFR-binding peptide
  MOD_RES (2)..(4)..(38)..(39): Xaa is C or S
  MOD_RES (16)..(17)..(18)..(19)..(20): Xaa is A or G
  MOD_RES (21)..(22)..(23)..(24): Xaa is A or G or is absent

SEQ ID NO: 56315 - protein, 35 aa, Artificial Sequence; identical to SEQ ID NO: 11800
  GFR-binding peptide
  MOD_RES (2)..(4): Xaa is C or S

SEQ ID NO: 56316 - protein, 40 aa, Artificial Sequence; identical to SEQ ID NO: 3440
  GFR-binding peptide
  MOD_RES (2)..(36)..(37): Xaa is C or S
  MOD_RES (14)..(15)..(16)..(17)..(18): Xaa is A or G
  MOD_RES (19)..(20)..(21)..(22): Xaa is A or G or is absent

SEQ ID NO: 56317 - protein, 35 aa, Artificial Sequence; identical to SEQ ID NO: 4372
  GFR-binding peptide
  MOD_RES (35)..(35): Xaa is C or S
  MOD_RES (13)..(14)..(15)..(16)..(17): Xaa is A or G
  MOD_RES (18)..(19)..(20)..(21): Xaa is A or G or is absent

SEQ ID NO: 56318 - protein, 41 aa, Artificial Sequence; identical to SEQ ID NO: 5365
  GFR-binding peptide
  MOD_RES (1)..(35)..(36): Xaa is C or S
  MOD_RES (13)..(14)..(15)..(16)..(17): Xaa is A or G
  MOD_RES (18)..(19)..(20)..(21): Xaa is A or G or is absent

SEQ ID NO: 56319 - protein, 31 aa, Artificial Sequence; identical to SEQ ID NO: 2448
  GFR-binding peptide
  MOD_RES (31)..(31): Xaa is C or S

SEQ ID NO: 56320 - protein, 39 aa, Artificial Sequence; identical to SEQ ID NO: 12801
  GFR-binding peptide
  MOD_RES (34)..(35): Xaa is C or S
  MOD_RES (12)..(13)..(14)..(15)..(16): Xaa is A or G
  MOD_RES (17)..(18)..(19)..(20): Xaa is A or G or is absent

SEQ ID NO: 56321 - protein, 34 aa, Artificial Sequence; identical to SEQ ID NO: 9950
  GFR-binding peptide
  MOD_RES (32)..(33): Xaa is C or S

SEQ ID NO: 56322 - protein, 40 aa, Artificial Sequence; identical to SEQ ID NO: 4376
  GFR-binding peptide
  MOD_RES (2)..(34)..(35): Xaa is C or S

SEQ ID NO: 56323 - protein, 34 aa, Artificial Sequence; identical to SEQ ID NO: 3444
  GFR-binding peptide
  MOD_RES (1)..(33): Xaa is C or S

SEQ ID NO: 56324 - protein, 38 aa, Artificial Sequence; identical to SEQ ID NO: 11805
  GFR-binding peptide
  MOD_RES (34)..(35): Xaa is C or S
  MOD_RES (12)..(13)..(14)..(15)..(16): Xaa is A or G
  MOD_RES (17)..(18)..(19)..(20): Xaa is A or G or is absent

SEQ ID NO: 56325 - protein, 37 aa, Artificial Sequence; identical to SEQ ID NO: 26499
  GFR-binding peptide
  MOD_RES (2)..(36)..(37): Xaa is C or S
  MOD_RES (14)..(15)..(16)..(17)..(18): Xaa is A or G
  MOD_RES (19)..(20)..(21)..(22): Xaa is A or G or is absent

SEQ ID NO: 56326 - protein, 41 aa, Artificial Sequence; identical to SEQ ID NO: 4378
  GFR-binding peptide
  MOD_RES (2)..(4)..(38): Xaa is C or S
  MOD_RES (16)..(17)..(18)..(19)..(20): Xaa is A or G
  MOD_RES (21)..(22)..(23)..(24): Xaa is A or G or is absent

SEQ ID NO: 56327 - protein, 35 aa, Artificial Sequence; identical to SEQ ID NO: 5369
  GFR-binding peptide
  MOD_RES (33)..(34): Xaa is C or S

SEQ ID NO: 56328 - protein, 37 aa, Artificial Sequence; identical to SEQ ID NO: 4380
  GFR-binding peptide
  MOD_RES (2)..(34)..(35): Xaa is C or S

SEQ ID NO: 56329 - protein, 33 aa, Artificial Sequence; identical to SEQ ID NO: 5370
  GFR-binding peptide
  MOD_RES (1)..(33): Xaa is C or S

SEQ ID NO: 56330 - protein, 40 aa, Artificial Sequence; identical to SEQ ID NO: 5371
  GFR-binding peptide
  MOD_RES (34)..(35): Xaa is C or S
  MOD_RES (12)..(13)..(14)..(15)..(16): Xaa is A or G
  MOD_RES (17)..(18)..(19)..(20): Xaa is A or G or is absent

SEQ ID NO: 56331 - protein, 44 aa, Artificial Sequence
  GFR-binding peptide
  MOD_RES (2)..(4)..(38)..(39): Xaa is C or S
  MOD_RES (16)..(17)..(18)..(19)..(20): Xaa is A or G
  MOD_RES (21)..(22)..(23)..(24): Xaa is A or G or is absent
SXGXRDVVMGRYKKLXXXXXXXXXFYLMSIANMKTPTXXPGASG

SEQ ID NO: 56332 - protein, 40 aa, Artificial Sequence; identical to SEQ ID NO: 2454
  GFR-binding peptide
  MOD_RES (2)..(4)..(36)..(37): Xaa is C or S

SEQ ID NO: 56333 - protein, 30 aa, Artificial Sequence; identical to SEQ ID NO: 25446
  GFR-binding peptide

SEQ ID NO: 56334 - protein, 42 aa, Artificial Sequence; identical to SEQ ID NO: 4388
  GFR-binding peptide
  MOD_RES (2)..(4)..(38)..(39): Xaa is C or S
  MOD_RES (16)..(17)..(18)..(19)..(20): Xaa is A or G
  MOD_RES (21)..(22)..(23)..(24): Xaa is A or G or is absent

SEQ ID NO: 56335 - protein, 36 aa, Artificial Sequence; identical to SEQ ID NO: 11819
  GFR-binding peptide
  MOD_RES (34)..(35): Xaa is C or S
  MOD_RES (12)..(13)..(14)..(15)..(16): Xaa is A or G
  MOD_RES (17)..(18)..(19)..(20): Xaa is A or G or is absent

SEQ ID NO: 56336 - protein, 33 aa, Artificial Sequence; identical to SEQ ID NO: 2458
  GFR-binding peptide
  MOD_RES (33)..(33): Xaa is C or S
  MOD_RES (11)..(12)..(13)..(14)..(15): Xaa is A or G
  MOD_RES (16)..(17)..(18)..(19): Xaa is A or G or is absent

SEQ ID NO: 56337 - protein, 35 aa, Artificial Sequence; identical to SEQ ID NO: 26511
  GFR-binding peptide
  MOD_RES (31)..(32): Xaa is C or S

SEQ ID NO: 56338 - protein, 41 aa, Artificial Sequence; identical to SEQ ID NO: 23439
  GFR-binding peptide
  MOD_RES (1)..(3)..(37)..(38): Xaa is C or S
  MOD_RES (15)..(16)..(17)..(18)..(19): Xaa is A or G
  MOD_RES (20)..(21)..(22)..(23): Xaa is A or G or is absent

SEQ ID NO: 56339 - protein, 32 aa, Artificial Sequence; identical to SEQ ID NO: 24438
  GFR-binding peptide
  MOD_RES (1)..(1): Xaa is C or S

SEQ ID NO: 56340 - protein, 40 aa, Artificial Sequence; identical to SEQ ID NO: 24440
  GFR-binding peptide
  MOD_RES (2)..(36)..(37): Xaa is C or S
  MOD_RES (14)..(15)..(16)..(17)..(18): Xaa is A or G
  MOD_RES (19)..(20)..(21)..(22): Xaa is A or G or is absent

SEQ ID NO: 56341 - protein, 39 aa, Artificial Sequence; identical to SEQ ID NO: 3462
  GFR-binding peptide
  MOD_RES (1)..(33)..(34): Xaa is C or S

SEQ ID NO: 56342 - protein, 42 aa, Artificial Sequence; identical to SEQ ID NO: 23444
  GFR-binding peptide
  MOD_RES (1)..(3)..(37)..(38): Xaa is C or S
  MOD_RES (15)..(16)..(17)..(18)..(19): Xaa is A or G
  MOD_RES (20)..(21)..(22)..(23): Xaa is A or G or is absent

SEQ ID NO: 56343 - protein, 37 aa, Artificial Sequence; identical to SEQ ID NO: 23446
  GFR-binding peptide
  MOD_RES (1)..(3)..(37): Xaa is C or S
  MOD_RES (15)..(16)..(17)..(18)..(19): Xaa is A or G
  MOD_RES (20)..(21)..(22)..(23): Xaa is A or G or is absent

SEQ ID NO: 56344 - protein, 37 aa, Artificial Sequence; identical to SEQ ID NO: 5383
  GFR-binding peptide
  MOD_RES (2)..(34)..(35): Xaa is C or S

SEQ ID NO: 56345 - protein, 34 aa, Artificial Sequence; identical to SEQ ID NO: 4402
  GFR-binding peptide
  MOD_RES (1)..(3): Xaa is C or S

SEQ ID NO: 56346 - protein, 40 aa, Artificial Sequence; identical to SEQ ID NO: 23447
  GFR-binding peptide
  MOD_RES (1)..(3)..(37)..(38): Xaa is C or S
  MOD_RES (15)..(16)..(17)..(18)..(19): Xaa is A or G
  MOD_RES (20)..(21)..(22)..(23): Xaa is A or G or is absent

SEQ ID NO: 56347 - protein, 34 aa, Artificial Sequence; identical to SEQ ID NO: 3465
  GFR-binding peptide
  MOD_RES (31)..(32): Xaa is C or S

SEQ ID NO: 56348 - protein, 35 aa, Artificial Sequence; identical to SEQ ID NO: 4403
  GFR-binding peptide
  MOD_RES (2)..(34)..(35): Xaa is C or S

SEQ ID NO: 56349 - protein, 32 aa, Artificial Sequence; identical to SEQ ID NO: 2470
  GFR-binding peptide
  MOD_RES (11)..(12)..(13)..(14)..(15): Xaa is A or G
  MOD_RES (16)..(17)..(18)..(19): Xaa is A or G or is absent

SEQ ID NO: 56350 - protein, 43 aa, Artificial Sequence; identical to SEQ ID NO: 2473
  GFR-binding peptide
  MOD_RES (2)..(4)..(39)..(40): Xaa is C or S
  MOD_RES (17)..(18)..(19)..(20)..(21): Xaa is A or G
  MOD_RES (22)..(23)..(24)..(25): Xaa is A or G or is absent

SEQ ID NO: 56351 - protein, 39 aa, Artificial Sequence; identical to SEQ ID NO: 3468
  GFR-binding peptide
  MOD_RES (2)..(34)..(35): Xaa is C or S

SEQ ID NO: 56352 - protein, 43 aa, Artificial Sequence; identical to SEQ ID NO: 5393
  GFR-binding peptide
  MOD_RES (2)..(4)..(38)..(39): Xaa is C or S
  MOD_RES (16)..(17)..(18)..(19)..(20): Xaa is A or G
  MOD_RES (21)..(22)..(23)..(24): Xaa is A or G or is absent

SEQ ID NO: 56353 - protein, 42 aa, Artificial Sequence; identical to SEQ ID NO: 5396
  GFR-binding peptide
  MOD_RES (2)..(36)..(37): Xaa is C or S
  MOD_RES (14)..(15)..(16)..(17)..(18): Xaa is A or G
  MOD_RES (19)..(20)..(21)..(22): Xaa is A or G or is absent

SEQ ID NO: 56354 - protein, 39 aa, Artificial Sequence; identical to SEQ ID NO: 2476
  GFR-binding peptide
  MOD_RES (2)..(36)..(37): Xaa is C or S
  MOD_RES (14)..(15)..(16)..(17)..(18): Xaa is A or G
  MOD_RES (19)..(20)..(21)..(22): Xaa is A or G or is absent

SEQ ID NO: 56355 - protein, 42 aa, Artificial Sequence; identical to SEQ ID NO: 12830
  GFR-binding peptide
  MOD_RES (2)..(4)..(36)..(37): Xaa is C or S

SEQ ID NO: 56356 - protein, 38 aa, Artificial Sequence; identical to SEQ ID NO: 2477
  GFR-binding peptide
  MOD_RES (2)..(4): Xaa is C or S
  MOD_RES (17)..(18)..(19)..(20)..(21): Xaa is A or G
  MOD_RES (22)..(23)..(24)..(25): Xaa is A or G or is absent

SEQ ID NO: 56357 - protein, 42 aa, Artificial Sequence; identical to SEQ ID NO: 10888
  GFR-binding peptide
  MOD_RES (1)..(3)..(37)..(38): Xaa is C or S
  MOD_RES (15)..(16)..(17)..(18)..(19): Xaa is A or G
  MOD_RES (20)..(21)..(22)..(23): Xaa is A or G or is absent

SEQ ID NO: 56358 - protein, 40 aa, Artificial Sequence; identical to SEQ ID NO: 4406
  GFR-binding peptide
  MOD_RES (2)..(4)..(36)..(37): Xaa is C or S

SEQ ID NO: 56359 - protein, 43 aa, Artificial Sequence; identical to SEQ ID NO: 4407
  GFR-binding peptide
  MOD_RES (2)..(37)..(38): Xaa is C or S
  MOD_RES (15)..(16)..(17)..(18)..(19): Xaa is A or G
  MOD_RES (20)..(21)..(22)..(23): Xaa is A or G or is absent

SEQ ID NO: 56360 - protein, 34 aa, Artificial Sequence; identical to SEQ ID NO: 24452
  GFR-binding peptide
  MOD_RES (32)..(33): Xaa is C or S

SEQ ID NO: 56361 - protein, 33 aa, Artificial Sequence; identical to SEQ ID NO: 3472
  GFR-binding peptide
  MOD_RES (2)..(2): Xaa is C or S

SEQ ID NO: 56362 - protein, 35 aa, Artificial Sequence
  GFR-binding peptide
  MOD_RES (2)..(4): Xaa is C or S
SXGXRDVVMGRYKKLIIQQKDNFYLMSIANMKTPT

SEQ ID NO: 56363 - protein, 34 aa, Artificial Sequence; identical to SEQ ID NO: 4409
  GFR-binding peptide
  MOD_RES (2)..(34): Xaa is C or S

SEQ ID NO: 56364 - protein, 33 aa, Artificial Sequence; identical to SEQ ID NO: 26525
  GFR-binding peptide
  MOD_RES (2)..(2): Xaa is C or S

SEQ ID NO: 56365 - protein, 35 aa, Artificial Sequence; identical to SEQ ID NO: 2482
  GFR-binding peptide
  MOD_RES (1)..(1): Xaa is C or S
  MOD_RES (14)..(15)..(16)..(17)..(18): Xaa is A or G
  MOD_RES (19)..(20)..(21)..(22): Xaa is A or G or is absent

SEQ ID NO: 56366 - protein, 37 aa, Artificial Sequence; identical to SEQ ID NO: 3475
  GFR-binding peptide
  MOD_RES (34)..(35): Xaa is C or S
  MOD_RES (12)..(13)..(14)..(15)..(16): Xaa is A or G
  MOD_RES (17)..(18)..(19)..(20): Xaa is A or G or is absent

SEQ ID NO: 56367 - protein, 33 aa, Artificial Sequence; identical to SEQ ID NO: 24456
  GFR-binding peptide
  MOD_RES (12)..(13)..(14)..(15)..(16): Xaa is A or G
  MOD_RES (17)..(18)..(19)..(20): Xaa is A or G or is absent

SEQ ID NO: 56368 - protein, 41 aa, Artificial Sequence; identical to SEQ ID NO: 2483
  GFR-binding peptide
  MOD_RES (2)..(4)..(36)..(37): Xaa is C or S

SEQ ID NO: 56369 - protein, 42 aa, Artificial Sequence; identical to SEQ ID NO: 3476
  GFR-binding peptide
  MOD_RES (1)..(3)..(37)..(38): Xaa is C or S
  MOD_RES (15)..(16)..(17)..(18)..(19): Xaa is A or G
  MOD_RES (20)..(21)..(22)..(23): Xaa is A or G or is absent

SEQ ID NO: 56370 - protein, 35 aa, Artificial Sequence
  GFR-binding peptide
  MOD_RES (32)..(33): Xaa is C or S
RDVVMGRYKKLIIQQKDNFYLMSIANMKTPTXXPG

SEQ ID NO: 56371 - protein, 41 aa, Artificial Sequence; identical to SEQ ID NO: 25475
  GFR-binding peptide
  MOD_RES (2)..(4)..(36)..(37): Xaa is C or S

SEQ ID NO: 56372 - protein, 33 aa, Artificial Sequence; identical to SEQ ID NO: 2486
  GFR-binding peptide
  MOD_RES (1)..(33): Xaa is C or S

SEQ ID NO: 56373 - protein, 35 aa, Artificial Sequence; identical to SEQ ID NO: 4415
  GFR-binding peptide
  MOD_RES (31)..(32): Xaa is C or S

SEQ ID NO: 56374 - protein, 42 aa, Artificial Sequence; identical to SEQ ID NO: 10896
  GFR-binding peptide
  MOD_RES (2)..(36)..(37): Xaa is C or S
  MOD_RES (14)..(15)..(16)..(17)..(18): Xaa is A or G
  MOD_RES (19)..(20)..(21)..(22): Xaa is A or G or is absent

SEQ ID NO: 56375 - protein, 37 aa, Artificial Sequence; identical to SEQ ID NO: 2488
  GFR-binding peptide
  MOD_RES (34)..(34): Xaa is C or S
  MOD_RES (12)..(13)..(14)..(15)..(16): Xaa is A or G
  MOD_RES (17)..(18)..(19)..(20): Xaa is A or G or is absent

SEQ ID NO: 56376 - protein, 35 aa, Artificial Sequence; identical to SEQ ID NO: 3481
  GFR-binding peptide
  MOD_RES (31)..(32): Xaa is C or S

SEQ ID NO: 56377 - protein, 34 aa, Artificial Sequence
  GFR-binding peptide
  MOD_RES (31)..(32): Xaa is C or S
EEVIMRYKKLLLVRGNDFYLMSIANTKVPAXXTS

SEQ ID NO: 56378 - protein, 39 aa, Artificial Sequence; identical to SEQ ID NO: 2489
  GFR-binding peptide
  MOD_RES (34)..(35): Xaa is C or S
  MOD_RES (12)..(13)..(14)..(15)..(16): Xaa is A or G
  MOD_RES (17)..(18)..(19)..(20): Xaa is A or G or is absent

SEQ ID NO: 56379 - protein, 35 aa, Artificial Sequence
  GFR-binding peptide
  MOD_RES (2)..(35): Xaa is C or S
  MOD_RES (13)..(14)..(15)..(16)..(17): Xaa is A or G
  MOD_RES (18)..(19)..(20)..(21): Xaa is A or G or is absent
GXEEVIMRYKKLXXXXXXXXXFYLMSIANTKVPAX

SEQ ID NO: 56380 - protein, 41 aa, Artificial Sequence
  GFR-binding peptide
  MOD_RES (2)..(35)..(36): Xaa is C or S
  MOD_RES (13)..(14)..(15)..(16)..(17): Xaa is A or G
  MOD_RES (18)..(19)..(20)..(21): Xaa is A or G or is absent
GXEEVIMRYKKLXXXXXXXXXFYLMSIANTKVPAXXTSPVR

SEQ ID NO: 56381 - protein, 34 aa, Artificial Sequence; identical to SEQ ID NO: 3483
  GFR-binding peptide
  MOD_RES (31)..(31): Xaa is C or S

SEQ ID NO: 56382 - protein, 37 aa, Artificial Sequence; identical to SEQ ID NO: 3486
  GFR-binding peptide
  MOD_RES (1)..(33): Xaa is C or S

SEQ ID NO: 56383 - protein, 35 aa, Artificial Sequence; identical to SEQ ID NO: 3487
  GFR-binding peptide
  MOD_RES (34)..(35): Xaa is C or S
  MOD_RES (12)..(13)..(14)..(15)..(16): Xaa is A or G
  MOD_RES (17)..(18)..(19)..(20): Xaa is A or G or is absent

SEQ ID NO: 56384 - protein, 30 aa, Artificial Sequence
  GFR-binding peptide
EEVIMRYKKLLLVRGNDFYLMSIANTKVPA

SEQ ID NO: 56385 - protein, 32 aa, Artificial Sequence; identical to SEQ ID NO: 10902
  GFR-binding peptide
  MOD_RES (1)..(1): Xaa is C or S

SEQ ID NO: 56386 - protein, 36 aa, Artificial Sequence; identical to SEQ ID NO: 4425
  GFR-binding peptide
  MOD_RES (2)..(4): Xaa is C or S

SEQ ID NO: 56387 - protein, 35 aa, Artificial Sequence; identical to SEQ ID NO: 5413
  GFR-binding peptide
  MOD_RES (1)..(35): Xaa is C or S
  MOD_RES (13)..(14)..(15)..(16)..(17): Xaa is A or G
  MOD_RES (18)..(19)..(20)..(21): Xaa is A or G or is absent

SEQ ID NO: 56388 - protein, 39 aa, Artificial Sequence; identical to SEQ ID NO: 3490
  GFR-binding peptide
  MOD_RES (1)..(3)..(35)..(36): Xaa is C or S

SEQ ID NO: 56389 - protein, 41 aa, Artificial Sequence; identical to SEQ ID NO: 10000
  GFR-binding peptide
  MOD_RES (2)..(4)..(36)..(37): Xaa is C or S

SEQ ID NO: 56390 - protein, 40 aa, Artificial Sequence
  GFR-binding peptide
  MOD_RES (2)..(35)..(36): Xaa is C or S
  MOD_RES (13)..(14)..(15)..(16)..(17): Xaa is A or G
  MOD_RES (18)..(19)..(20)..(21): Xaa is A or G or is absent
GXEEVIMRYKKLXXXXXXXXXFYLMSIANTKVPAXXTSPV

SEQ ID NO: 56391 - protein, 36 aa, Artificial Sequence; identical to SEQ ID NO: 4430
  GFR-binding peptide
  MOD_RES (33)..(34): Xaa is C or S
  MOD_RES (11)..(12)..(13)..(14)..(15): Xaa is A or G
  MOD_RES (16)..(17)..(18)..(19): Xaa is A or G or is absent

SEQ ID NO: 56392 - protein, 37 aa, Artificial Sequence; identical to SEQ ID NO: 23481
  GFR-binding peptide
  MOD_RES (2)..(36)..(37): Xaa is C or S
  MOD_RES (14)..(15)..(16)..(17)..(18): Xaa is A or G
  MOD_RES (19)..(20)..(21)..(22): Xaa is A or G or is absent

SEQ ID NO: 56393 - protein, 39 aa, Artificial Sequence
  GFR-binding peptide
  MOD_RES (1)..(35)..(36): Xaa is C or S
  MOD_RES (13)..(14)..(15)..(16)..(17): Xaa is A or G
  MOD_RES (18)..(19)..(20)..(21): Xaa is A or G or is absent
XRDVVMGRYKKLXXXXXXXXXFYLMSIANMKTPTXXPGA

SEQ ID NO: 56394 - protein, 42 aa, Artificial Sequence; identical to SEQ ID NO: 26544
  GFR-binding peptide
  MOD_RES (2)..(36)..(37): Xaa is C or S
  MOD_RES (14)..(15)..(16)..(17)..(18): Xaa is A or G
  MOD_RES (19)..(20)..(21)..(22): Xaa is A or G or is absent

SEQ ID NO: 56395 - protein, 35 aa, Artificial Sequence; identical to SEQ ID NO: 24481
  GFR-binding peptide
  MOD_RES (1)..(33)..(34): Xaa is C or S

SEQ ID NO: 56396 - protein, 31 aa, Artificial Sequence; identical to SEQ ID NO: 5422
  GFR-binding peptide
  MOD_RES (31)..(31): Xaa is C or S

SEQ ID NO: 56397 - protein, 37 aa, Artificial Sequence
  GFR-binding peptide
  MOD_RES (1)..(33)..(34): Xaa is C or S
XRDVVMGRYKKLIIQQKDNFYLMSIANMKTPTXXPGA

SEQ ID NO: 56398 - protein, 38 aa, Artificial Sequence; identical to SEQ ID NO: 4437
  GFR-binding peptide
  MOD_RES (1)..(3)..(36)..(37): Xaa is C or S

SEQ ID NO: 56399 - protein, 34 aa, Artificial Sequence
  GFR-binding peptide
  MOD_RES (32)..(33): Xaa is C or S
RDVVMGRYKKLIIQQKDNFYLMSIANMKTPTXXP

SEQ ID NO: 56400 - protein, 42 aa, Artificial Sequence; identical to SEQ ID NO: 25516
  GFR-binding peptide
  MOD_RES (2)..(36)..(37): Xaa is C or S
  MOD_RES (14)..(15)..(16)..(17)..(18): Xaa is A or G
  MOD_RES (19)..(20)..(21)..(22): Xaa is A or G or is absent

SEQ ID NO: 56401 - protein, 40 aa, Artificial Sequence; identical to SEQ ID NO: 3503
  GFR-binding peptide
  MOD_RES (1)..(3)..(35)..(36): Xaa is C or S

SEQ ID NO: 56402 - protein, 43 aa, Artificial Sequence; identical to SEQ ID NO: 26554
  GFR-binding peptide
  MOD_RES (1)..(3)..(37)..(38): Xaa is C or S
  MOD_RES (15)..(16)..(17)..(18)..(19): Xaa is A or G
  MOD_RES (20)..(21)..(22)..(23): Xaa is A or G or is absent

SEQ ID NO: 56403 - protein, 41 aa, Artificial Sequence; identical to SEQ ID NO: 25518
  GFR-binding peptide
  MOD_RES (2)..(4)..(38)..(39): Xaa is C or S
  MOD_RES (16)..(17)..(18)..(19)..(20): Xaa is A or G
  MOD_RES (21)..(22)..(23)..(24): Xaa is A or G or is absent

SEQ ID NO: 56404 - protein, 39 aa, Artificial Sequence; identical to SEQ ID NO: 2514
  GFR-binding peptide
  MOD_RES (35)..(36): Xaa is C or S
  MOD_RES (13)..(14)..(15)..(16)..(17): Xaa is A or G
  MOD_RES (18)..(19)..(20)..(21): Xaa is A or G or is absent

SEQ ID NO: 56405 - protein, 35 aa, Artificial Sequence; identical to SEQ ID NO: 10917
  GFR-binding peptide
  MOD_RES (31)..(32): Xaa is C or S

SEQ ID NO: 56406 - protein, 44 aa, Artificial Sequence; identical to SEQ ID NO: 25519
  GFR-binding peptide
  MOD_RES (2)..(4)..(38)..(39): Xaa is C or S
  MOD_RES (16)..(17)..(18)..(19)..(20): Xaa is A or G
  MOD_RES (21)..(22)..(23)..(24): Xaa is A or G or is absent

SEQ ID NO: 56407 - protein, 34 aa, Artificial Sequence
  GFR-binding peptide
  MOD_RES (33)..(34): Xaa is C or S
  MOD_RES (11)..(12)..(13)..(14)..(15): Xaa is A or G
  MOD_RES (16)..(17)..(18)..(19): Xaa is A or G or is absent
DVVMGRYKKLXXXXXXXXXFYLMSIANMKTPTXX

SEQ ID NO: 56408 - protein, 38 aa, Artificial Sequence
  GFR-binding peptide
  MOD_RES (34)..(35): Xaa is C or S
  MOD_RES (12)..(13)..(14)..(15)..(16): Xaa is A or G
  MOD_RES (17)..(18)..(19)..(20): Xaa is A or G or is absent
RDVVMGRYKKLXXXXXXXXXFYLMSIANMKTPTXXPGA

SEQ ID NO: 56409 - protein, 39 aa, Artificial Sequence; identical to SEQ ID NO: 3508
  GFR-binding peptide
  MOD_RES (1)..(35): Xaa is C or S
  MOD_RES (13)..(14)..(15)..(16)..(17): Xaa is A or G
  MOD_RES (18)..(19)..(20)..(21): Xaa is A or G or is absent

SEQ ID NO: 56410 - protein, 38 aa, Artificial Sequence; identical to SEQ ID NO: 4446
  GFR-binding peptide
  MOD_RES (34)..(35): Xaa is C or S
  MOD_RES (12)..(13)..(14)..(15)..(16): Xaa is A or G
  MOD_RES (17)..(18)..(19)..(20): Xaa is A or G or is absent

SEQ ID NO: 56411 - protein, 38 aa, Artificial Sequence
  GFR-binding peptide
  MOD_RES (1)..(3)..(35)..(36): Xaa is C or S
XGXRDVVMGRYKKLIIQQKDNFYLMSIANMKTPTXXPG

SEQ ID NO: 56412 - protein, 35 aa, Artificial Sequence
  GFR-binding peptide
  MOD_RES (33)..(34): Xaa is C or S
  MOD_RES (11)..(12)..(13)..(14)..(15): Xaa is A or G
  MOD_RES (16)..(17)..(18)..(19): Xaa is A or G or is absent
EEVIMRYKKLXXXXXXXXXFYLMSIANTKVPAXXT

SEQ ID NO: 56413 - protein, 40 aa, Artificial Sequence; identical to SEQ ID NO: 5439
  GFR-binding peptide
  MOD_RES (1)..(3)..(37): Xaa is C or S
  MOD_RES (15)..(16)..(17)..(18)..(19): Xaa is A or G
  MOD_RES (20)..(21)..(22)..(23): Xaa is A or G or is absent

SEQ ID NO: 56414 - protein, 35 aa, Artificial Sequence; identical to SEQ ID NO: 4451
  GFR-binding peptide
  MOD_RES (33)..(34): Xaa is C or S
  MOD_RES (11)..(12)..(13)..(14)..(15): Xaa is A or G
  MOD_RES (16)..(17)..(18)..(19): Xaa is A or G or is absent

SEQ ID NO: 56415 - protein, 36 aa, Artificial Sequence; identical to SEQ ID NO: 24497
  GFR-binding peptide
  MOD_RES (1)..(3): Xaa is C or S
  MOD_RES (15)..(16)..(17)..(18)..(19): Xaa is A or G
  MOD_RES (20)..(21)..(22)..(23): Xaa is A or G or is absent

SEQ ID NO: 56416 - protein, 39 aa, Artificial Sequence; identical to SEQ ID NO: 24498
  GFR-binding peptide
  MOD_RES (1)..(35)..(36): Xaa is C or S
  MOD_RES (13)..(14)..(15)..(16)..(17): Xaa is A or G
  MOD_RES (18)..(19)..(20)..(21): Xaa is A or G or is absent

SEQ ID NO: 56417 - protein, 34 aa, Artificial Sequence; identical to SEQ ID NO: 3514
  GFR-binding peptide
  MOD_RES (34)..(34): Xaa is C or S
  MOD_RES (12)..(13)..(14)..(15)..(16): Xaa is A or G
  MOD_RES (17)..(18)..(19)..(20): Xaa is A or G or is absent

SEQ ID NO: 56418 - protein, 43 aa, Artificial Sequence
  GFR-binding peptide
  MOD_RES (1)..(3)..(37)..(38): Xaa is C or S
  MOD_RES (15)..(16)..(17)..(18)..(19): Xaa is A or G
  MOD_RES (20)..(21)..(22)..(23): Xaa is A or G or is absent
XGXSRVVMNRYKKLXXXXXXXXXFYLVSIANLKTPAXXPKPVH

SEQ ID NO: 56419 - protein, 37 aa, Artificial Sequence; identical to SEQ ID NO: 3518
  GFR-binding peptide
  MOD_RES (1)..(35): Xaa is C or S
  MOD_RES (13)..(14)..(15)..(16)..(17): Xaa is A or G
  MOD_RES (18)..(19)..(20)..(21): Xaa is A or G or is absent

SEQ ID NO: 56420 - protein, 34 aa, Artificial Sequence; identical to SEQ ID NO: 10019
  GFR-binding peptide
  MOD_RES (1)..(3): Xaa is C or S

SEQ ID NO: 56421 - protein, 32 aa, Artificial Sequence; identical to SEQ ID NO: 4453
  GFR-binding peptide
  MOD_RES (11)..(12)..(13)..(14)..(15): Xaa is A or G
  MOD_RES (16)..(17)..(18)..(19): Xaa is A or G or is absent

SEQ ID NO: 56422 - protein, 32 aa, Artificial Sequence; identical to SEQ ID NO: 3520
  GFR-binding peptide
  MOD_RES (1)..(1): Xaa is C or S

SEQ ID NO: 56423 - protein, 42 aa, Artificial Sequence; identical to SEQ ID NO: 3521
  GFR-binding peptide
  MOD_RES (2)..(4)..(36): Xaa is C or S

SEQ ID NO: 56424 - protein, 40 aa, Artificial Sequence; identical to SEQ ID NO: 3523
  GFR-binding peptide
  MOD_RES (2)..(34)..(35): Xaa is C or S

SEQ ID NO: 56425 - protein, 33 aa, Artificial Sequence; identical to SEQ ID NO: 12868
  GFR-binding peptide
  MOD_RES (12)..(13)..(14)..(15)..(16): Xaa is A or G
  MOD_RES (17)..(18)..(19)..(20): Xaa is A or G or is absent

SEQ ID NO: 56426 - protein, 33 aa, Artificial Sequence; identical to SEQ ID NO: 5451
  GFR-binding peptide
  MOD_RES (12)..(13)..(14)..(15)..(16): Xaa is A or G
  MOD_RES (17)..(18)..(19)..(20): Xaa is A or G or is absent

SEQ ID NO: 56427 - protein, 35 aa, Artificial Sequence; identical to SEQ ID NO: 10025
  GFR-binding peptide
  MOD_RES (1)..(33)..(34): Xaa is C or S

SEQ ID NO: 56428 - protein, 38 aa, Artificial Sequence; identical to SEQ ID NO: 24513
  GFR-binding peptide
  MOD_RES (2)..(4)..(36)..(37): Xaa is C or S

SEQ ID NO: 56429 - protein, 36 aa, Artificial Sequence; identical to SEQ ID NO: 5454
  GFR-binding peptide
  MOD_RES (32)..(33): Xaa is C or S

SEQ ID NO: 56430 - protein, 35 aa, Artificial Sequence; identical to SEQ ID NO: 24517
  GFR-binding peptide
  MOD_RES (1)..(33)..(34): Xaa is C or S

SEQ ID NO: 56431 - protein, 34 aa, Artificial Sequence
  GFR-binding peptide
  MOD_RES (1)..(33)..(34): Xaa is C or S
XRDVVMGRYKKLIIQQKDNFYLMSIANMKTPTXX

SEQ ID NO: 56432 - protein, 32 aa, Artificial Sequence
  GFR-binding peptide
  MOD_RES (11)..(12)..(13)..(14)..(15): Xaa is A or G
  MOD_RES (16)..(17)..(18)..(19): Xaa is A or G or is absent
EEVIMRYKKLXXXXXXXXXFYLMSIANTKVPA

SEQ ID NO: 56433 - protein, 38 aa, Artificial Sequence; identical to SEQ ID NO: 25549
  GFR-binding peptide
  MOD_RES (32)..(33): Xaa is C or S

SEQ ID NO: 56434 - protein, 38 aa, Artificial Sequence; identical to SEQ ID NO: 3532
  GFR-binding peptide
  MOD_RES (34)..(35): Xaa is C or S
  MOD_RES (12)..(13)..(14)..(15)..(16): Xaa is A or G
  MOD_RES (17)..(18)..(19)..(20): Xaa is A or G or is absent

SEQ ID NO: 56435 - protein, 33 aa, Artificial Sequence; identical to SEQ ID NO: 2537
  GFR-binding peptide
  MOD_RES (2)..(2): Xaa is C or S

SEQ ID NO: 56436 - protein, 34 aa, Artificial Sequence; identical to SEQ ID NO: 24523
  GFR-binding peptide
  MOD_RES (31)..(32): Xaa is C or S

SEQ ID NO: 56437 - protein, 38 aa, Artificial Sequence
  GFR-binding peptide
  MOD_RES (2)..(4)..(35)..(36): Xaa is C or S
LXGXEEVIMRYKKLLLVRGNDFYLMSIANTKVPAXXTS

SEQ ID NO: 56438 - protein, 36 aa, Artificial Sequence; identical to SEQ ID NO: 2538
  GFR-binding peptide
  MOD_RES (1)..(3)..(35)..(36): Xaa is C or S

SEQ ID NO: 56439 - protein, 38 aa, Artificial Sequence; identical to SEQ ID NO: 24526
  GFR-binding peptide
  MOD_RES (2)..(34)..(35): Xaa is C or S

SEQ ID NO: 56440 - protein, 34 aa, Artificial Sequence
  GFR-binding peptide
  MOD_RES (1)..(1): Xaa is C or S
  MOD_RES (13)..(14)..(15)..(16)..(17): Xaa is A or G
  MOD_RES (18)..(19)..(20)..(21): Xaa is A or G or is absent
XRDVVMGRYKKLXXXXXXXXXFYLMSIANMKTPT

SEQ ID NO: 56441 - protein, 32 aa, Artificial Sequence; identical to SEQ ID NO: 10038
  GFR-binding peptide
  MOD_RES (31)..(32): Xaa is C or S

SEQ ID NO: 56442 - protein, 39 aa, Artificial Sequence
  GFR-binding peptide
  MOD_RES (2)..(4)..(35)..(36): Xaa is C or S
LXGXEEVIMRYKKLLLVRGNDFYLMSIANTKVPAXXTSP

SEQ ID NO: 56443 - protein, 31 aa, Artificial Sequence
  GFR-binding peptide
RDVVMGRYKKLIIQQKDNFYLMSIANMKTPT

SEQ ID NO: 56444 - protein, 41 aa, Artificial Sequence; identical to SEQ ID NO: 2543
  GFR-binding peptide
  MOD_RES (1)..(3)..(37)..(38): Xaa is C or S
  MOD_RES (15)..(16)..(17)..(18)..(19): Xaa is A or G
  MOD_RES (20)..(21)..(22)..(23): Xaa is A or G or is absent

SEQ ID NO: 56445 - protein, 41 aa, Artificial Sequence; identical to SEQ ID NO: 2544
  GFR-binding peptide
  MOD_RES (2)..(4)..(36)..(37): Xaa is C or S

SEQ ID NO: 56446 - protein, 40 aa, Artificial Sequence; identical to SEQ ID NO: 12885
  GFR-binding peptide
  MOD_RES (34)..(35): Xaa is C or S
  MOD_RES (12)..(13)..(14)..(15)..(16): Xaa is A or G
  MOD_RES (17)..(18)..(19)..(20): Xaa is A or G or is absent

SEQ ID NO: 56447 - protein, 39 aa, Artificial Sequence; identical to SEQ ID NO: 5471
  GFR-binding peptide
  MOD_RES (1)..(36)..(37): Xaa is C or S
  MOD_RES (14)..(15)..(16)..(17)..(18): Xaa is A or G
  MOD_RES (19)..(20)..(21)..(22): Xaa is A or G or is absent

SEQ ID NO: 56448 - protein, 38 aa, Artificial Sequence; identical to SEQ ID NO: 24531
  GFR-binding peptide
  MOD_RES (1)..(3)..(37)..(38): Xaa is C or S
  MOD_RES (15)..(16)..(17)..(18)..(19): Xaa is A or G
  MOD_RES (20)..(21)..(22)..(23): Xaa is A or G or is absent

SEQ ID NO: 56449 - protein, 34 aa, Artificial Sequence; identical to SEQ ID NO: 26585
  GFR-binding peptide
  MOD_RES (33)..(34): Xaa is C or S
  MOD_RES (11)..(12)..(13)..(14)..(15): Xaa is A or G
  MOD_RES (16)..(17)..(18)..(19): Xaa is A or G or is absent

SEQ ID NO: 56450 - protein, 43 aa, Artificial Sequence; identical to SEQ ID NO: 10947
  GFR-binding peptide
  MOD_RES (1)..(3)..(37)..(38): Xaa is C or S
  MOD_RES (15)..(16)..(17)..(18)..(19): Xaa is A or G
  MOD_RES (20)..(21)..(22)..(23): Xaa is A or G or is absent

SEQ ID NO: 56451 - protein, 40 aa, Artificial Sequence; identical to SEQ ID NO: 4474
  GFR-binding peptide
  MOD_RES (2)..(4)..(39)..(40): Xaa is C or S
  MOD_RES (17)..(18)..(19)..(20)..(21): Xaa is A or G
  MOD_RES (22)..(23)..(24)..(25): Xaa is A or G or is absent

SEQ ID NO: 56452 - protein, 32 aa, Artificial Sequence; identical to SEQ ID NO: 25563
  GFR-binding peptide
  MOD_RES (31)..(32): Xaa is C or S

SEQ ID NO: 56453 - protein, 44 aa, Artificial Sequence; identical to SEQ ID NO: 5477
  GFR-binding peptide
  MOD_RES (2)..(4)..(38)..(39): Xaa is C or S
  MOD_RES (16)..(17)..(18)..(19)..(20): Xaa is A or G
  MOD_RES (21)..(22)..(23)..(24): Xaa is A or G or is absent

SEQ ID NO: 56454 - protein, 41 aa, Artificial Sequence; identical to SEQ ID NO: 2551
  GFR-binding peptide
  MOD_RES (2)..(4)..(38)..(39): Xaa is C or S
  MOD_RES (16)..(17)..(18)..(19)..(20): Xaa is A or G
  MOD_RES (21)..(22)..(23)..(24): Xaa is A or G or is absent

SEQ ID NO: 56455 - protein, 33 aa, Artificial Sequence
  GFR-binding peptide
  MOD_RES (1)..(3): Xaa is C or S
XGXEEVIMRYKKLLLVRGNDFYLMSIANTKVPA

SEQ ID NO: 56456 - protein, 33 aa, Artificial Sequence
  GFR-binding peptide
  MOD_RES (31)..(32): Xaa is C or S
DVVMGRYKKLIIQQKDNFYLMSIANMKTPTXXP

SEQ ID NO: 56457 - protein, 38 aa, Artificial Sequence; identical to SEQ ID NO: 3543
  GFR-binding peptide
  MOD_RES (1)..(3)..(35)..(36): Xaa is C or S

SEQ ID NO: 56458 - protein, 36 aa, Artificial Sequence
  GFR-binding peptide
  MOD_RES (33)..(34): Xaa is C or S
  MOD_RES (11)..(12)..(13)..(14)..(15): Xaa is A or G
  MOD_RES (16)..(17)..(18)..(19): Xaa is A or G or is absent
DVVMGRYKKLXXXXXXXXXFYLMSIANMKTPTXXPG

SEQ ID NO: 56459 - protein, 36 aa, Artificial Sequence; identical to SEQ ID NO: 2554
  GFR-binding peptide
  MOD_RES (32)..(33): Xaa is C or S

SEQ ID NO: 56460 - protein, 38 aa, Artificial Sequence; identical to SEQ ID NO: 11913
  GFR-binding peptide
  MOD_RES (1)..(3)..(35)..(36): Xaa is C or S

SEQ ID NO: 56461 - protein, 38 aa, Artificial Sequence
  GFR-binding peptide
  MOD_RES (2)..(4)..(37)..(38): Xaa is C or S
  MOD_RES (15)..(16)..(17)..(18)..(19): Xaa is A or G
  MOD_RES (20)..(21)..(22)..(23): Xaa is A or G or is absent
LXGXEEVIMRYKKLXXXXXXXXXFYLMSIANTKVPAXX

SEQ ID NO: 56462 - protein, 36 aa, Artificial Sequence; identical to SEQ ID NO: 11916
  GFR-binding peptide
  MOD_RES (2)..(4)..(36): Xaa is C or S

SEQ ID NO: 56463 - protein, 43 aa, Artificial Sequence; identical to SEQ ID NO: 5487
  GFR-binding peptide
  MOD_RES (2)..(4)..(38)..(39): Xaa is C or S
  MOD_RES (16)..(17)..(18)..(19)..(20): Xaa is A or G
  MOD_RES (21)..(22)..(23)..(24): Xaa is A or G or is absent

SEQ ID NO: 56464 - protein, 38 aa, Artificial Sequence; identical to SEQ ID NO: 26596
  GFR-binding peptide
  MOD_RES (1)..(33)..(34): Xaa is C or S

SEQ ID NO: 56465 - protein, 40 aa, Artificial Sequence; identical to SEQ ID NO: 2563
  GFR-binding peptide
  MOD_RES (1)..(3)..(35)..(36): Xaa is C or S

SEQ ID NO: 56466 - protein, 36 aa, Artificial Sequence
  GFR-binding peptide
  MOD_RES (1)..(33)..(34): Xaa is C or S
XRDVVMGRYKKLIIQQKDNFYLMSIANMKTPTXXPG

SEQ ID NO: 56467 - protein, 40 aa, Artificial Sequence; identical to SEQ ID NO: 25580
  GFR-binding peptide
  MOD_RES (2)..(36)..(37): Xaa is C or S
  MOD_RES (14)..(15)..(16)..(17)..(18): Xaa is A or G
  MOD_RES (19)..(20)..(21)..(22): Xaa is A or G or is absent

SEQ ID NO: 56468 - protein, 40 aa, Artificial Sequence; identical to SEQ ID NO: 3550
  GFR-binding peptide
  MOD_RES (2)..(4)..(38)..(39): Xaa is C or S
  MOD_RES (16)..(17)..(18)..(19)..(20): Xaa is A or G
  MOD_RES (21)..(22)..(23)..(24): Xaa is A or G or is absent

SEQ ID NO: 56469 - protein, 34 aa, Artificial Sequence; identical to SEQ ID NO: 26599
  GFR-binding peptide
  MOD_RES (1)..(3): Xaa is C or S

SEQ ID NO: 56470 - protein, 35 aa, Artificial Sequence; identical to SEQ ID NO: 2569
  GFR-binding peptide
  MOD_RES (1)..(33)..(34): Xaa is C or S

SEQ ID NO: 56471 - protein, 37 aa, Artificial Sequence; identical to SEQ ID NO: 23565
  GFR-binding peptide
  MOD_RES (1)..(3)..(37): Xaa is C or S
  MOD_RES (15)..(16)..(17)..(18)..(19): Xaa is A or G
  MOD_RES (20)..(21)..(22)..(23): Xaa is A or G or is absent

SEQ ID NO: 56472 - protein, 39 aa, Artificial Sequence; identical to SEQ ID NO: 24554
  GFR-binding peptide
  MOD_RES (2)..(36)..(37): Xaa is C or S
  MOD_RES (14)..(15)..(16)..(17)..(18): Xaa is A or G
  MOD_RES (19)..(20)..(21)..(22): Xaa is A or G or is absent

SEQ ID NO: 56473 - protein, 39 aa, Artificial Sequence; identical to SEQ ID NO: 5501
  GFR-binding peptide
  MOD_RES (1)..(35)..(36): Xaa is C or S
  MOD_RES (13)..(14)..(15)..(16)..(17): Xaa is A or G
  MOD_RES (18)..(19)..(20)..(21): Xaa is A or G or is absent

SEQ ID NO: 56474 - protein, 38 aa, Artificial Sequence; identical to SEQ ID NO: 25584
  GFR-binding peptide
  MOD_RES (2)..(36)..(37): Xaa is C or S
  MOD_RES (14)..(15)..(16)..(17)..(18): Xaa is A or G
  MOD_RES (19)..(20)..(21)..(22): Xaa is A or G or is absent

SEQ ID NO: 56475 - protein, 35 aa, Artificial Sequence; identical to SEQ ID NO: 2572
  GFR-binding peptide
  MOD_RES (31)..(31): Xaa is C or S

SEQ ID NO: 56476 - protein, 37 aa, Artificial Sequence; identical to SEQ ID NO: 3552
  GFR-binding peptide
  MOD_RES (2)..(4)..(37): Xaa is C or S

SEQ ID NO: 56477 - protein, 40 aa, Artificial Sequence; identical to SEQ ID NO: 5502
  GFR-binding peptide
  MOD_RES (1)..(3)..(38)..(39): Xaa is C or S
  MOD_RES (16)..(17)..(18)..(19)..(20): Xaa is A or G
  MOD_RES (21)..(22)..(23)..(24): Xaa is A or G or is absent

SEQ ID NO: 56478 - protein, 35 aa, Artificial Sequence; identical to SEQ ID NO: 5503
  GFR-binding peptide
  MOD_RES (2)..(2): Xaa is C or S
  MOD_RES (14)..(15)..(16)..(17)..(18): Xaa is A or G
  MOD_RES (19)..(20)..(21)..(22): Xaa is A or G or is absent

SEQ ID NO: 56479 - protein, 37 aa, Artificial Sequence
  GFR-binding peptide
  MOD_RES (1)..(3)..(35)..(36): Xaa is C or S
XGXRDVVMGRYKKLIIQQKDNFYLMSIANMKTPTXXP

SEQ ID NO: 56480 - protein, 37 aa, Artificial Sequence; identical to SEQ ID NO: 4499
  GFR-binding peptide
  MOD_RES (2)..(34)..(35): Xaa is C or S

SEQ ID NO: 56481 - protein, 37 aa, Artificial Sequence; identical to SEQ ID NO: 23574
  GFR-binding peptide
  MOD_RES (34)..(35): Xaa is C or S
  MOD_RES (12)..(13)..(14)..(15)..(16): Xaa is A or G
  MOD_RES (17)..(18)..(19)..(20): Xaa is A or G or is absent

SEQ ID NO: 56482 - protein, 35 aa, Artificial Sequence; identical to SEQ ID NO: 24568
  GFR-binding peptide
  MOD_RES (34)..(35): Xaa is C or S
  MOD_RES (12)..(13)..(14)..(15)..(16): Xaa is A or G
  MOD_RES (17)..(18)..(19)..(20): Xaa is A or G or is absent

SEQ ID NO: 56483 - protein, 35 aa, Artificial Sequence; identical to SEQ ID NO: 3562
  GFR-binding peptide
  MOD_RES (2)..(4): Xaa is C or S

SEQ ID NO: 56484 - protein, 35 aa, Artificial Sequence; identical to SEQ ID NO: 23578
  GFR-binding peptide
  MOD_RES (1)..(35): Xaa is C or S
  MOD_RES (13)..(14)..(15)..(16)..(17): Xaa is A or G
  MOD_RES (18)..(19)..(20)..(21): Xaa is A or G or is absent

SEQ ID NO: 56485 - protein, 36 aa, Artificial Sequence; identical to SEQ ID NO: 26616
  GFR-binding peptide
  MOD_RES (1)..(33)..(34): Xaa is C or S

SEQ ID NO: 56486 - protein, 36 aa, Artificial Sequence; identical to SEQ ID NO: 2582
  GFR-binding peptide
  MOD_RES (1)..(3): Xaa is C or S
  MOD_RES (15)..(16)..(17)..(18)..(19): Xaa is A or G
  MOD_RES (20)..(21)..(22)..(23): Xaa is A or G or is absent

SEQ ID NO: 56487 - protein, 39 aa, Artificial Sequence; identical to SEQ ID NO: 23580
  GFR-binding peptide
  MOD_RES (1)..(3)..(37)..(38): Xaa is C or S
  MOD_RES (15)..(16)..(17)..(18)..(19): Xaa is A or G
  MOD_RES (20)..(21)..(22)..(23): Xaa is A or G or is absent

SEQ ID NO: 56488 - protein, 33 aa, Artificial Sequence; identical to SEQ ID NO: 10982
  GFR-binding peptide
  MOD_RES (32)..(33): Xaa is C or S

SEQ ID NO: 56489 - protein, 42 aa, Artificial Sequence; identical to SEQ ID NO: 3565
  GFR-binding peptide
  MOD_RES (2)..(4)..(38): Xaa is C or S
  MOD_RES (16)..(17)..(18)..(19)..(20): Xaa is A or G
  MOD_RES (21)..(22)..(23)..(24): Xaa is A or G or is absent

SEQ ID NO: 56490 - protein, 36 aa, Artificial Sequence
  GFR-binding peptide
  MOD_RES (1)..(32)..(33): Xaa is C or S
XEEVIMRYKKLLLVRGNDFYLMSIANTKVPAXXTSP

SEQ ID NO: 56491 - protein, 38 aa, Artificial Sequence
  GFR-binding peptide
  MOD_RES (33)..(34): Xaa is C or S
  MOD_RES (11)..(12)..(13)..(14)..(15): Xaa is A or G
  MOD_RES (16)..(17)..(18)..(19): Xaa is A or G or is absent
DVVMGRYKKLXXXXXXXXXFYLMSIANMKTPTXXPGAS

SEQ ID NO: 56492 - protein, 35 aa, Artificial Sequence; identical to SEQ ID NO: 5518
  GFR-binding peptide
  MOD_RES (32)..(32): Xaa is C or S

SEQ ID NO: 56493 - protein, 32 aa, Artificial Sequence
  GFR-binding peptide
  MOD_RES (31)..(32): Xaa is C or S
DVVMGRYKKLIIQQKDNFYLMSIANMKTPTXX

SEQ ID NO: 56494 - protein, 37 aa, Artificial Sequence; identical to SEQ ID NO: 11946
  GFR-binding peptide
  MOD_RES (2)..(4)..(36)..(37): Xaa is C or S

SEQ ID NO: 56495 - protein, 35 aa, Artificial Sequence; identical to SEQ ID NO: 5519
  GFR-binding peptide
  MOD_RES (31)..(32): Xaa is C or S

SEQ ID NO: 56496 - protein, 39 aa, Artificial Sequence
  GFR-binding peptide
  MOD_RES (1)..(3)..(35)..(36): Xaa is C or S
XGXRDVVMGRYKKLIIQQKDNFYLMSIANMKTPTXXPGA

SEQ ID NO: 56497 - protein, 37 aa, Artificial Sequence; identical to SEQ ID NO: 5520
  GFR-binding peptide
  MOD_RES (1)..(35)..(36): Xaa is C or S
  MOD_RES (13)..(14)..(15)..(16)..(17): Xaa is A or G
  MOD_RES (18)..(19)..(20)..(21): Xaa is A or G or is absent

SEQ ID NO: 56498 - protein, 39 aa, Artificial Sequence; identical to SEQ ID NO: 5522
  GFR-binding peptide
  MOD_RES (1)..(3)..(36)..(37): Xaa is C or S

SEQ ID NO: 56499 - protein, 36 aa, Artificial Sequence; identical to SEQ ID NO: 2596
  GFR-binding peptide
  MOD_RES (1)..(35): Xaa is C or S
  MOD_RES (13)..(14)..(15)..(16)..(17): Xaa is A or G
  MOD_RES (18)..(19)..(20)..(21): Xaa is A or G or is absent

SEQ ID NO: 56500 - protein, 41 aa, Artificial Sequence; identical to SEQ ID NO: 2597
  GFR-binding peptide
  MOD_RES (2)..(36)..(37): Xaa is C or S
  MOD_RES (14)..(15)..(16)..(17)..(18): Xaa is A or G
  MOD_RES (19)..(20)..(21)..(22): Xaa is A or G or is absent

SEQ ID NO: 56501 - protein, 40 aa, Artificial Sequence; identical to SEQ ID NO: 24582
  GFR-binding peptide
  MOD_RES (2)..(34)..(35): Xaa is C or S

SEQ ID NO: 56502 - protein, 35 aa, Artificial Sequence; identical to SEQ ID NO: 4513
  GFR-binding peptide
  MOD_RES (34)..(35): Xaa is C or S
  MOD_RES (12)..(13)..(14)..(15)..(16): Xaa is A or G
  MOD_RES (17)..(18)..(19)..(20): Xaa is A or G or is absent

SEQ ID NO: 56503 - protein, 39 aa, Artificial Sequence; identical to SEQ ID NO: 4514
  GFR-binding peptide
  MOD_RES (2)..(36)..(37): Xaa is C or S
  MOD_RES (14)..(15)..(16)..(17)..(18): Xaa is A or G
  MOD_RES (19)..(20)..(21)..(22): Xaa is A or G or is absent

SEQ ID NO: 56504 - protein, 40 aa, Artificial Sequence; identical to SEQ ID NO: 3576
  GFR-binding peptide
  MOD_RES (2)..(36)..(37): Xaa is C or S
  MOD_RES (14)..(15)..(16)..(17)..(18): Xaa is A or G
  MOD_RES (19)..(20)..(21)..(22): Xaa is A or G or is absent

SEQ ID NO: 56505 - protein, 37 aa, Artificial Sequence
  GFR-binding peptide
  MOD_RES (31)..(32): Xaa is C or S
EEVIMRYKKLLLVRGNDFYLMSIANTKVPAXXTSPVR

SEQ ID NO: 56506 - protein, 38 aa, Artificial Sequence; identical to SEQ ID NO: 12943
  GFR-binding peptide
  MOD_RES (2)..(34)..(35): Xaa is C or S

SEQ ID NO: 56507 - protein, 37 aa, Artificial Sequence; identical to SEQ ID NO: 3582
  GFR-binding peptide
  MOD_RES (34)..(35): Xaa is C or S
  MOD_RES (12)..(13)..(14)..(15)..(16): Xaa is A or G
  MOD_RES (17)..(18)..(19)..(20): Xaa is A or G or is absent

SEQ ID NO: 56508 - protein, 32 aa, Artificial Sequence
  GFR-binding peptide
  MOD_RES (1)..(1): Xaa is C or S
XRDVVMGRYKKLIIQQKDNFYLMSIANMKTPT

SEQ ID NO: 56509 - protein, 39 aa, Artificial Sequence; identical to SEQ ID NO: 26642
  GFR-binding peptide
  MOD_RES (33)..(34): Xaa is C or S
  MOD_RES (11)..(12)..(13)..(14)..(15): Xaa is A or G
  MOD_RES (16)..(17)..(18)..(19): Xaa is A or G or is absent

SEQ ID NO: 56510 - protein, 41 aa, Artificial Sequence; identical to SEQ ID NO: 3593
  GFR-binding peptide
  MOD_RES (1)..(3)..(36)..(37): Xaa is C or S

SEQ ID NO: 56511 - protein, 32 aa, Artificial Sequence; identical to SEQ ID NO: 2604
  GFR-binding peptide
  MOD_RES (11)..(12)..(13)..(14)..(15): Xaa is A or G
  MOD_RES (16)..(17)..(18)..(19): Xaa is A or G or is absent

SEQ ID NO: 56512 - protein, 37 aa, Artificial Sequence; identical to SEQ ID NO: 2605
  GFR-binding peptide
  MOD_RES (1)..(3)..(35)..(36): Xaa is C or S

SEQ ID NO: 56513 - protein, 38 aa, Artificial Sequence; identical to SEQ ID NO: 5532
  GFR-binding peptide
  MOD_RES (33)..(34): Xaa is C or S
  MOD_RES (11)..(12)..(13)..(14)..(15): Xaa is A or G
  MOD_RES (16)..(17)..(18)..(19): Xaa is A or G or is absent

SEQ ID NO: 56514 - protein, 33 aa, Artificial Sequence; identical to SEQ ID NO: 23612
  GFR-binding peptide
  MOD_RES (33)..(33): Xaa is C or S
  MOD_RES (11)..(12)..(13)..(14)..(15): Xaa is A or G
  MOD_RES (16)..(17)..(18)..(19): Xaa is A or G or is absent

SEQ ID NO: 56515 - protein, 39 aa, Artificial Sequence; identical to SEQ ID NO: 2606
  GFR-binding peptide
  MOD_RES (1)..(3)..(37): Xaa is C or S
  MOD_RES (15)..(16)..(17)..(18)..(19): Xaa is A or G
  MOD_RES (20)..(21)..(22)..(23): Xaa is A or G or is absent

SEQ ID NO: 56516 - protein, 41 aa, Artificial Sequence
  GFR-binding peptide
  MOD_RES (2)..(4)..(37)..(38): Xaa is C or S
  MOD_RES (15)..(16)..(17)..(18)..(19): Xaa is A or G
  MOD_RES (20)..(21)..(22)..(23): Xaa is A or G or is absent
LXGXEEVIMRYKKLXXXXXXXXXFYLMSIANTKVPAXXTSP

SEQ ID NO: 56517 - protein, 36 aa, Artificial Sequence; identical to SEQ ID NO: 24607
  GFR-binding peptide
  MOD_RES (32)..(33): Xaa is C or S

SEQ ID NO: 56518 - protein, 32 aa, Artificial Sequence; identical to SEQ ID NO: 2610
  GFR-binding peptide
  MOD_RES (11)..(12)..(13)..(14)..(15): Xaa is A or G
  MOD_RES (16)..(17)..(18)..(19): Xaa is A or G or is absent

SEQ ID NO: 56519 - protein, 36 aa, Artificial Sequence; identical to SEQ ID NO: 4534
  GFR-binding peptide
  MOD_RES (32)..(33): Xaa is C or S

SEQ ID NO: 56520 - protein, 35 aa, Artificial Sequence; identical to SEQ ID NO: 5540
  GFR-binding peptide
  MOD_RES (2)..(2): Xaa is C or S
  MOD_RES (14)..(15)..(16)..(17)..(18): Xaa is A or G
  MOD_RES (19)..(20)..(21)..(22): Xaa is A or G or is absent

SEQ ID NO: 56521 - protein, 34 aa, Artificial Sequence; identical to SEQ ID NO: 24613
  GFR-binding peptide
  MOD_RES (1)..(1): Xaa is C or S
  MOD_RES (13)..(14)..(15)..(16)..(17): Xaa is A or G
  MOD_RES (18)..(19)..(20)..(21): Xaa is A or G or is absent

SEQ ID NO: 56522 - protein, 41 aa, Artificial Sequence
  GFR-binding peptide
  MOD_RES (2)..(4)..(35)..(36): Xaa is C or S
LXGXEEVIMRYKKLLLVRGNDFYLMSIANTKVPAXXTSPVR

SEQ ID NO: 56523 - protein, 34 aa, Artificial Sequence; identical to SEQ ID NO: 4540
  GFR-binding peptide
  MOD_RES (2)..(34): Xaa is C or S

SEQ ID NO: 56524 - protein, 36 aa, Artificial Sequence
  GFR-binding peptide
  MOD_RES (1)..(34)..(35): Xaa is C or S
  MOD_RES (12)..(13)..(14)..(15)..(16): Xaa is A or G
  MOD_RES (17)..(18)..(19)..(20): Xaa is A or G or is absent
XEEVIMRYKKLXXXXXXXXXFYLMSIANTKVPAXXT

SEQ ID NO: 56525 - protein, 37 aa, Artificial Sequence; identical to SEQ ID NO: 25637
  GFR-binding peptide
  MOD_RES (2)..(4)..(36)..(37): Xaa is C or S

SEQ ID NO: 56526 - protein, 40 aa, Artificial Sequence; identical to SEQ ID NO: 5544
  GFR-binding peptide
  MOD_RES (1)..(3)..(37)..(38): Xaa is C or S
  MOD_RES (15)..(16)..(17)..(18)..(19): Xaa is A or G
  MOD_RES (20)..(21)..(22)..(23): Xaa is A or G or is absent

SEQ ID NO: 56527 - protein, 34 aa, Artificial Sequence; identical to SEQ ID NO: 24615
  GFR-binding peptide
  MOD_RES (34)..(34): Xaa is C or S
  MOD_RES (12)..(13)..(14)..(15)..(16): Xaa is A or G
  MOD_RES (17)..(18)..(19)..(20): Xaa is A or G or is absent

SEQ ID NO: 56528 - protein, 34 aa, Artificial Sequence; identical to SEQ ID NO: 2621
  GFR-binding peptide
  MOD_RES (31)..(32): Xaa is C or S

SEQ ID NO: 56529 - protein, 38 aa, Artificial Sequence; identical to SEQ ID NO: 3607
  GFR-binding peptide
  MOD_RES (1)..(34)..(35): Xaa is C or S

SEQ ID NO: 56530 - protein, 41 aa, Artificial Sequence; identical to SEQ ID NO: 3608
  GFR-binding peptide
  MOD_RES (1)..(3)..(35)..(36): Xaa is C or S

SEQ ID NO: 56531 - protein, 34 aa, Artificial Sequence; identical to SEQ ID NO: 4544
  GFR-binding peptide
  MOD_RES (32)..(32): Xaa is C or S

SEQ ID NO: 56532 - protein, 37 aa, Artificial Sequence; identical to SEQ ID NO: 23627
  GFR-binding peptide
  MOD_RES (1)..(35)..(36): Xaa is C or S
  MOD_RES (13)..(14)..(15)..(16)..(17): Xaa is A or G
  MOD_RES (18)..(19)..(20)..(21): Xaa is A or G or is absent

SEQ ID NO: 56533 - protein, 39 aa, Artificial Sequence; identical to SEQ ID NO: 25644
  GFR-binding peptide
  MOD_RES (1)..(3)..(35)..(36): Xaa is C or S

SEQ ID NO: 56534 - protein, 31 aa, Artificial Sequence; identical to SEQ ID NO: 2628
  GFR-binding peptide
  MOD_RES (31)..(31): Xaa is C or S

SEQ ID NO: 56535 - protein, 31 aa, Artificial Sequence; identical to SEQ ID NO: 3611
  GFR-binding peptide

SEQ ID NO: 56536 - protein, 34 aa, Artificial Sequence
  GFR-binding peptide
  MOD_RES (1)..(3)..(34): Xaa is C or S
XGXEEVIMRYKKLLLVRGNDFYLMSIANTKVPAX

SEQ ID NO: 56537 - protein, 36 aa, Artificial Sequence; identical to SEQ ID NO: 26665
  GFR-binding peptide
  MOD_RES (32)..(33): Xaa is C or S

SEQ ID NO: 56538 - protein, 37 aa, Artificial Sequence; identical to SEQ ID NO: 26666
  GFR-binding peptide
  MOD_RES (2)..(4): Xaa is C or S
  MOD_RES (16)..(17)..(18)..(19)..(20): Xaa is A or G
  MOD_RES (21)..(22)..(23)..(24): Xaa is A or G or is absent

SEQ ID NO: 56539 - protein, 40 aa, Artificial Sequence; identical to SEQ ID NO: 4553
  GFR-binding peptide
  MOD_RES (34)..(35): Xaa is C or S
  MOD_RES (12)..(13)..(14)..(15)..(16): Xaa is A or G
  MOD_RES (17)..(18)..(19)..(20): Xaa is A or G or is absent

SEQ ID NO: 56540 - protein, 36 aa, Artificial Sequence; identical to SEQ ID NO: 4555
  GFR-binding peptide
  MOD_RES (2)..(34): Xaa is C or S

SEQ ID NO: 56541 - protein, 32 aa, Artificial Sequence; identical to SEQ ID NO: 26668
  GFR-binding peptide
  MOD_RES (32)..(32): Xaa is C or S

SEQ ID NO: 56542 - protein, 36 aa, Artificial Sequence; identical to SEQ ID NO: 4556
  GFR-binding peptide
  MOD_RES (1)..(33)..(34): Xaa is C or S

SEQ ID NO: 56543 - protein, 35 aa, Artificial Sequence; identical to SEQ ID NO: 4558
  GFR-binding peptide
  MOD_RES (2)..(2): Xaa is C or S
  MOD_RES (14)..(15)..(16)..(17)..(18): Xaa is A or G
  MOD_RES (19)..(20)..(21)..(22): Xaa is A or G or is absent

SEQ ID NO: 56544 - protein, 37 aa, Artificial Sequence; identical to SEQ ID NO: 23636
  GFR-binding peptide
  MOD_RES (34)..(35): Xaa is C or S
  MOD_RES (12)..(13)..(14)..(15)..(16): Xaa is A or G
  MOD_RES (17)..(18)..(19)..(20): Xaa is A or G or is absent

SEQ ID NO: 56545 - protein, 38 aa, Artificial Sequence; identical to SEQ ID NO: 24625
  GFR-binding peptide
  MOD_RES (1)..(3)..(37)..(38): Xaa is C or S
  MOD_RES (15)..(16)..(17)..(18)..(19): Xaa is A or G
  MOD_RES (20)..(21)..(22)..(23): Xaa is A or G or is absent

SEQ ID NO: 56546 - protein, 37 aa, Artificial Sequence; identical to SEQ ID NO: 11036
  GFR-binding peptide
  MOD_RES (1)..(35)..(36): Xaa is C or S
  MOD_RES (13)..(14)..(15)..(16)..(17): Xaa is A or G
  MOD_RES (18)..(19)..(20)..(21): Xaa is A or G or is absent

SEQ ID NO: 56547 - protein, 42 aa, Artificial Sequence; identical to SEQ ID NO: 5559
  GFR-binding peptide
  MOD_RES (2)..(4)..(39)..(40): Xaa is C or S
  MOD_RES (17)..(18)..(19)..(20)..(21): Xaa is A or G
  MOD_RES (22)..(23)..(24)..(25): Xaa is A or G or is absent

SEQ ID NO: 56548 - protein, 31 aa, Artificial Sequence; identical to SEQ ID NO: 23644
  GFR-binding peptide

SEQ ID NO: 56549 - protein, 36 aa, Artificial Sequence; identical to SEQ ID NO: 24629
  GFR-binding peptide
  MOD_RES (31)..(32): Xaa is C or S

SEQ ID NO: 56550 - protein, 36 aa, Artificial Sequence; identical to SEQ ID NO: 5563
  GFR-binding peptide
  MOD_RES (2)..(36): Xaa is C or S
  MOD_RES (14)..(15)..(16)..(17)..(18): Xaa is A or G
  MOD_RES (19)..(20)..(21)..(22): Xaa is A or G or is absent

SEQ ID NO: 56551 - protein, 37 aa, Artificial Sequence
  GFR-binding peptide
  MOD_RES (2)..(4)..(35)..(36): Xaa is C or S
LXGXEEVIMRYKKLLLVRGNDFYLMSIANTKVPAXXT

SEQ ID NO: 56552 - protein, 37 aa, Artificial Sequence; identical to SEQ ID NO: 2642
  GFR-binding peptide
  MOD_RES (31)..(32): Xaa is C or S

SEQ ID NO: 56553 - protein, 35 aa, Artificial Sequence
  GFR-binding peptide
  MOD_RES (1)..(3)..(34)..(35): Xaa is C or S
XGXEEVIMRYKKLLLVRGNDFYLMSIANTKVPAXX

SEQ ID NO: 56554 - protein, 35 aa, Artificial Sequence; identical to SEQ ID NO: 3622
  GFR-binding peptide
  MOD_RES (2)..(35): Xaa is C or S

SEQ ID NO: 56555 - protein, 33 aa, Artificial Sequence; identical to SEQ ID NO: 3626
  GFR-binding peptide
  MOD_RES (1)..(33): Xaa is C or S

SEQ ID NO: 56556 - protein, 39 aa, Artificial Sequence; identical to SEQ ID NO: 4570
  GFR-binding peptide
  MOD_RES (1)..(3)..(35)..(36): Xaa is C or S

SEQ ID NO: 56557 - protein, 43 aa, Artificial Sequence; identical to SEQ ID NO: 3628
  GFR-binding peptide
  MOD_RES (1)..(3)..(37)..(38): Xaa is C or S
  MOD_RES (15)..(16)..(17)..(18)..(19): Xaa is A or G
  MOD_RES (20)..(21)..(22)..(23): Xaa is A or G or is absent

SEQ ID NO: 56558 - protein, 36 aa, Artificial Sequence
  GFR-binding peptide
  MOD_RES (2)..(4)..(35)..(36): Xaa is C or S
LXGXEEVIMRYKKLLLVRGNDFYLMSIANTKVPAXX

SEQ ID NO: 56559 - protein, 40 aa, Artificial Sequence; identical to SEQ ID NO: 4576
  GFR-binding peptide
  MOD_RES (2)..(4)..(38): Xaa is C or S
  MOD_RES (16)..(17)..(18)..(19)..(20): Xaa is A or G
  MOD_RES (21)..(22)..(23)..(24): Xaa is A or G or is absent

SEQ ID NO: 56560 - protein, 38 aa, Artificial Sequence; identical to SEQ ID NO: 3630
  GFR-binding peptide
  MOD_RES (33)..(34): Xaa is C or S
  MOD_RES (11)..(12)..(13)..(14)..(15): Xaa is A or G
  MOD_RES (16)..(17)..(18)..(19): Xaa is A or G or is absent

SEQ ID NO: 56561 - protein, 36 aa, Artificial Sequence; identical to SEQ ID NO: 10135
  GFR-binding peptide
  MOD_RES (2)..(34)..(35): Xaa is C or S

SEQ ID NO: 56562 - protein, 34 aa, Artificial Sequence; identical to SEQ ID NO: 3631
  GFR-binding peptide
  MOD_RES (1)..(33)..(34): Xaa is C or S

SEQ ID NO: 56563 - protein, 36 aa, Artificial Sequence
  GFR-binding peptide
  MOD_RES (1)..(3): Xaa is C or S
  MOD_RES (15)..(16)..(17)..(18)..(19): Xaa is A or G
  MOD_RES (20)..(21)..(22)..(23): Xaa is A or G or is absent
XGXRDVVMGRYKKLXXXXXXXXXFYLMSIANMKTPT

SEQ ID NO: 56564 - protein, 39 aa, Artificial Sequence; identical to SEQ ID NO: 3632
  GFR-binding peptide
  MOD_RES (33)..(34): Xaa is C or S

SEQ ID NO: 56565 - protein, 33 aa, Artificial Sequence; identical to SEQ ID NO: 5571
  GFR-binding peptide
  MOD_RES (12)..(13)..(14)..(15)..(16): Xaa is A or G
  MOD_RES (17)..(18)..(19)..(20): Xaa is A or G or is absent

SEQ ID NO: 56566 - protein, 38 aa, Artificial Sequence; identical to SEQ ID NO: 2658
  GFR-binding peptide
  MOD_RES (1)..(3)..(37)..(38): Xaa is C or S
  MOD_RES (15)..(16)..(17)..(18)..(19): Xaa is A or G
  MOD_RES (20)..(21)..(22)..(23): Xaa is A or G or is absent

SEQ ID NO: 56567 - protein, 36 aa, Artificial Sequence
  GFR-binding peptide
  MOD_RES (2)..(35)..(36): Xaa is C or S
  MOD_RES (13)..(14)..(15)..(16)..(17): Xaa is A or G
  MOD_RES (18)..(19)..(20)..(21): Xaa is A or G or is absent
GXEEVIMRYKKLXXXXXXXXXFYLMSIANTKVPAXX

SEQ ID NO: 56568 - protein, 36 aa, Artificial Sequence; identical to SEQ ID NO: 5573
  GFR-binding peptide
  MOD_RES (34)..(35): Xaa is C or S
  MOD_RES (12)..(13)..(14)..(15)..(16): Xaa is A or G
  MOD_RES (17)..(18)..(19)..(20): Xaa is A or G or is absent

SEQ ID NO: 56569 - protein, 42 aa, Artificial Sequence; identical to SEQ ID NO: 5575
  GFR-binding peptide
  MOD_RES (1)..(3)..(37)..(38): Xaa is C or S
  MOD_RES (15)..(16)..(17)..(18)..(19): Xaa is A or G
  MOD_RES (20)..(21)..(22)..(23): Xaa is A or G or is absent

SEQ ID NO: 56570 - protein, 42 aa, Artificial Sequence; identical to SEQ ID NO: 25670
  GFR-binding peptide
  MOD_RES (2)..(4)..(38)..(39): Xaa is C or S
  MOD_RES (16)..(17)..(18)..(19)..(20): Xaa is A or G
  MOD_RES (21)..(22)..(23)..(24): Xaa is A or G or is absent

SEQ ID NO: 56571 - protein, 38 aa, Artificial Sequence; identical to SEQ ID NO: 2662
  GFR-binding peptide
  MOD_RES (1)..(3)..(37)..(38): Xaa is C or S
  MOD_RES (15)..(16)..(17)..(18)..(19): Xaa is A or G
  MOD_RES (20)..(21)..(22)..(23): Xaa is A or G or is absent

SEQ ID NO: 56572 - protein, 35 aa, Artificial Sequence; identical to SEQ ID NO: 4582
  GFR-binding peptide
  MOD_RES (34)..(34): Xaa is C or S
  MOD_RES (12)..(13)..(14)..(15)..(16): Xaa is A or G
  MOD_RES (17)..(18)..(19)..(20): Xaa is A or G or is absent

SEQ ID NO: 56573 - protein, 34 aa, Artificial Sequence; identical to SEQ ID NO: 25672
  GFR-binding peptide
  MOD_RES (34)..(34): Xaa is C or S
  MOD_RES (12)..(13)..(14)..(15)..(16): Xaa is A or G
  MOD_RES (17)..(18)..(19)..(20): Xaa is A or G or is absent

SEQ ID NO: 56574 - protein, 38 aa, Artificial Sequence; identical to SEQ ID NO: 5578
  GFR-binding peptide
  MOD_RES (1)..(3)..(37)..(38): Xaa is C or S
  MOD_RES (15)..(16)..(17)..(18)..(19): Xaa is A or G
  MOD_RES (20)..(21)..(22)..(23): Xaa is A or G or is absent

SEQ ID NO: 56575 - protein, 37 aa, Artificial Sequence; identical to SEQ ID NO: 2663
  GFR-binding peptide
  MOD_RES (33)..(34): Xaa is C or S
  MOD_RES (11)..(12)..(13)..(14)..(15): Xaa is A or G
  MOD_RES (16)..(17)..(18)..(19): Xaa is A or G or is absent

SEQ ID NO: 56576 - protein, 36 aa, Artificial Sequence; identical to SEQ ID NO: 2664
  GFR-binding peptide
  MOD_RES (2)..(36): Xaa is C or S
  MOD_RES (14)..(15)..(16)..(17)..(18): Xaa is A or G
  MOD_RES (19)..(20)..(21)..(22): Xaa is A or G or is absent

SEQ ID NO: 56577 - protein, 38 aa, Artificial Sequence
  GFR-binding peptide
  MOD_RES (1)..(33)..(34): Xaa is C or S
XRDVVMGRYKKLIIQQKDNFYLMSIANMKTPTXXPGAS

SEQ ID NO: 56578 - protein, 35 aa, Artificial Sequence; identical to SEQ ID NO: 10150
  GFR-binding peptide
  MOD_RES (1)..(35): Xaa is C or S
  MOD_RES (13)..(14)..(15)..(16)..(17): Xaa is A or G
  MOD_RES (18)..(19)..(20)..(21): Xaa is A or G or is absent

SEQ ID NO: 56579 - protein, 40 aa, Artificial Sequence
  GFR-binding peptide
  MOD_RES (2)..(36)..(37): Xaa is C or S
  MOD_RES (14)..(15)..(16)..(17)..(18): Xaa is A or G
  MOD_RES (19)..(20)..(21)..(22): Xaa is A or G or is absent
GXRDVVMGRYKKLXXXXXXXXXFYLMSIANMKTPTXXPGA

SEQ ID NO: 56580 - protein, 36 aa, Artificial Sequence; identical to SEQ ID NO: 3640
  GFR-binding peptide
  MOD_RES (1)..(35)..(36): Xaa is C or S
  MOD_RES (13)..(14)..(15)..(16)..(17): Xaa is A or G
  MOD_RES (18)..(19)..(20)..(21): Xaa is A or G or is absent

SEQ ID NO: 56581 - protein, 39 aa, Artificial Sequence; identical to SEQ ID NO: 23667
  GFR-binding peptide
  MOD_RES (33)..(34): Xaa is C or S
  MOD_RES (11)..(12)..(13)..(14)..(15): Xaa is A or G
  MOD_RES (16)..(17)..(18)..(19): Xaa is A or G or is absent

SEQ ID NO: 56582 - protein, 34 aa, Artificial Sequence
  GFR-binding peptide
  MOD_RES (2)..(34): Xaa is C or S
GXRDVVMGRYKKLIIQQKDNFYLMSIANMKTPTX

SEQ ID NO: 56583 - protein, 37 aa, Artificial Sequence; identical to SEQ ID NO: 4589
  GFR-binding peptide
  MOD_RES (1)..(35)..(36): Xaa is C or S
  MOD_RES (13)..(14)..(15)..(16)..(17): Xaa is A or G
  MOD_RES (18)..(19)..(20)..(21): Xaa is A or G or is absent

SEQ ID NO: 56584 - protein, 38 aa, Artificial Sequence; identical to SEQ ID NO: 3644
  GFR-binding peptide
  MOD_RES (1)..(33)..(34): Xaa is C or S

SEQ ID NO: 56585 - protein, 39 aa, Artificial Sequence; identical to SEQ ID NO: 5593
  GFR-binding peptide
  MOD_RES (1)..(3)..(37)..(38): Xaa is C or S
  MOD_RES (15)..(16)..(17)..(18)..(19): Xaa is A or G
  MOD_RES (20)..(21)..(22)..(23): Xaa is A or G or is absent

SEQ ID NO: 56586 - protein, 38 aa, Artificial Sequence; identical to SEQ ID NO: 3648
  GFR-binding peptide
  MOD_RES (2)..(36)..(37): Xaa is C or S
  MOD_RES (14)..(15)..(16)..(17)..(18): Xaa is A or G
  MOD_RES (19)..(20)..(21)..(22): Xaa is A or G or is absent

SEQ ID NO: 56587 - protein, 38 aa, Artificial Sequence; identical to SEQ ID NO: 2675
  GFR-binding peptide
  MOD_RES (2)..(4)..(38): Xaa is C or S
  MOD_RES (16)..(17)..(18)..(19)..(20): Xaa is A or G
  MOD_RES (21)..(22)..(23)..(24): Xaa is A or G or is absent

SEQ ID NO: 56588 - protein, 37 aa, Artificial Sequence
  GFR-binding peptide
  MOD_RES (2)..(33)..(34): Xaa is C or S
GXEEVIMRYKKLLLVRGNDFYLMSIANTKVPAXXTSP

SEQ ID NO: 56589 - protein, 42 aa, Artificial Sequence
  GFR-binding peptide
  MOD_RES (2)..(4)..(38)..(39): Xaa is C or S
  MOD_RES (16)..(17)..(18)..(19)..(20): Xaa is A or G
  MOD_RES (21)..(22)..(23)..(24): Xaa is A or G or is absent
SXGXRDVVMGRYKKLXXXXXXXXXFYLMSIANMKTPTXXPGA

SEQ ID NO: 56590 - protein, 37 aa, Artificial Sequence
  GFR-binding peptide
  MOD_RES (2)..(36)..(37): Xaa is C or S
  MOD_RES (14)..(15)..(16)..(17)..(18): Xaa is A or G
  MOD_RES (19)..(20)..(21)..(22): Xaa is A or G or is absent
GXRDVVMGRYKKLXXXXXXXXXFYLMSIANMKTPTXX

SEQ ID NO: 56591 - protein, 36 aa, Artificial Sequence; identical to SEQ ID NO: 4597
  GFR-binding peptide
  MOD_RES (33)..(34): Xaa is C or S
  MOD_RES (11)..(12)..(13)..(14)..(15): Xaa is A or G
  MOD_RES (16)..(17)..(18)..(19): Xaa is A or G or is absent

SEQ ID NO: 56592 - protein, 34 aa, Artificial Sequence; identical to SEQ ID NO: 13009
  GFR-binding peptide
  MOD_RES (2)..(34): Xaa is C or S

SEQ ID NO: 56593 - protein, 41 aa, Artificial Sequence; identical to SEQ ID NO: 5597
  GFR-binding peptide
  MOD_RES (1)..(3)..(38)..(39): Xaa is C or S
  MOD_RES (16)..(17)..(18)..(19)..(20): Xaa is A or G
  MOD_RES (21)..(22)..(23)..(24): Xaa is A or G or is absent

SEQ ID NO: 56594 - protein, 38 aa, Artificial Sequence; identical to SEQ ID NO: 4600
  GFR-binding peptide
  MOD_RES (2)..(4)..(36)..(37): Xaa is C or S

SEQ ID NO: 56595 - protein, 40 aa, Artificial Sequence
  GFR-binding peptide
  MOD_RES (34)..(35): Xaa is C or S
  MOD_RES (12)..(13)..(14)..(15)..(16): Xaa is A or G
  MOD_RES (17)..(18)..(19)..(20): Xaa is A or G or is absent
SRVVMNRYKKLXXXXXXXXXFYLVSIANLKTPAXXPKPVH

SEQ ID NO: 56596 - protein, 34 aa, Artificial Sequence
  GFR-binding peptide
  MOD_RES (34)..(34): Xaa is C or S
  MOD_RES (12)..(13)..(14)..(15)..(16): Xaa is A or G
  MOD_RES (17)..(18)..(19)..(20): Xaa is A or G or is absent
RDVVMGRYKKLXXXXXXXXXFYLMSIANMKTPTX

SEQ ID NO: 56597 - protein, 39 aa, Artificial Sequence; identical to SEQ ID NO: 4606
  GFR-binding peptide
  MOD_RES (2)..(34)..(35): Xaa is C or S

SEQ ID NO: 56598 - protein, 34 aa, Artificial Sequence
  GFR-binding peptide
  MOD_RES (2)..(33)..(34): Xaa is C or S
GXEEVIMRYKKLLLVRGNDFYLMSIANTKVPAXX

SEQ ID NO: 56599 - protein, 39 aa, Artificial Sequence; identical to SEQ ID NO: 4608
  GFR-binding peptide
  MOD_RES (1)..(3)..(35): Xaa is C or S

SEQ ID NO: 56600 - protein, 40 aa, Artificial Sequence; identical to SEQ ID NO: 2688
  GFR-binding peptide
  MOD_RES (2)..(34): Xaa is C or S

SEQ ID NO: 56601 - protein, 37 aa, Artificial Sequence; identical to SEQ ID NO: 2690
  GFR-binding peptide
  MOD_RES (2)..(4)..(36)..(37): Xaa is C or S

SEQ ID NO: 56602 - protein, 33 aa, Artificial Sequence
  GFR-binding peptide
  MOD_RES (32)..(33): Xaa is C or S
RDVVMGRYKKLIIQQKDNFYLMSIANMKTPTXX

SEQ ID NO: 56603 - protein, 36 aa, Artificial Sequence; identical to SEQ ID NO: 5606
  GFR-binding peptide
  MOD_RES (34)..(35): Xaa is C or S
  MOD_RES (12)..(13)..(14)..(15)..(16): Xaa is A or G
  MOD_RES (17)..(18)..(19)..(20): Xaa is A or G or is absent

SEQ ID NO: 56604 - protein, 36 aa, Artificial Sequence
  GFR-binding peptide
  MOD_RES (32)..(33): Xaa is C or S
RDVVMGRYKKLIIQQKDNFYLMSIANMKTPTXXPGA

SEQ ID NO: 56605 - protein, 43 aa, Artificial Sequence; identical to SEQ ID NO: 23694
  GFR-binding peptide
  MOD_RES (2)..(4)..(38)..(39): Xaa is C or S
  MOD_RES (16)..(17)..(18)..(19)..(20): Xaa is A or G
  MOD_RES (21)..(22)..(23)..(24): Xaa is A or G or is absent

SEQ ID NO: 56606 - protein, 41 aa, Artificial Sequence; identical to SEQ ID NO: 26720
  GFR-binding peptide
  MOD_RES (1)..(35)..(36): Xaa is C or S
  MOD_RES (13)..(14)..(15)..(16)..(17): Xaa is A or G
  MOD_RES (18)..(19)..(20)..(21): Xaa is A or G or is absent

SEQ ID NO: 56607 - protein, 36 aa, Artificial Sequence; identical to SEQ ID NO: 2695
  GFR-binding peptide
  MOD_RES (32)..(33): Xaa is C or S

SEQ ID NO: 56608 - protein, 33 aa, Artificial Sequence; identical to SEQ ID NO: 12037
  GFR-binding peptide
  MOD_RES (33)..(33): Xaa is C or S
  MOD_RES (11)..(12)..(13)..(14)..(15): Xaa is A or G
  MOD_RES (16)..(17)..(18)..(19): Xaa is A or G or is absent

SEQ ID NO: 56609 - protein, 34 aa, Artificial Sequence; identical to SEQ ID NO: 3662
  GFR-binding peptide
  MOD_RES (33)..(34): Xaa is C or S
  MOD_RES (11)..(12)..(13)..(14)..(15): Xaa is A or G
  MOD_RES (16)..(17)..(18)..(19): Xaa is A or G or is absent

SEQ ID NO: 56610 - protein, 37 aa, Artificial Sequence; identical to SEQ ID NO: 25707
  GFR-binding peptide
  MOD_RES (2)..(4): Xaa is C or S
  MOD_RES (16)..(17)..(18)..(19)..(20): Xaa is A or G
  MOD_RES (21)..(22)..(23)..(24): Xaa is A or G or is absent

SEQ ID NO: 56611 - protein, 36 aa, Artificial Sequence; identical to SEQ ID NO: 5609
  GFR-binding peptide
  MOD_RES (2)..(4)..(36): Xaa is C or S

SEQ ID NO: 56612 - protein, 40 aa, Artificial Sequence; identical to SEQ ID NO: 24684
  GFR-binding peptide
  MOD_RES (2)..(34)..(35): Xaa is C or S

SEQ ID NO: 56613 - protein, 43 aa, Artificial Sequence; identical to SEQ ID NO: 2696
  GFR-binding peptide
  MOD_RES (1)..(3)..(38)..(39): Xaa is C or S
  MOD_RES (16)..(17)..(18)..(19)..(20): Xaa is A or G
  MOD_RES (21)..(22)..(23)..(24): Xaa is A or G or is absent

SEQ ID NO: 56614 - protein, 39 aa, Artificial Sequence
  GFR-binding peptide
  MOD_RES (34)..(35): Xaa is C or S
  MOD_RES (12)..(13)..(14)..(15)..(16): Xaa is A or G
  MOD_RES (17)..(18)..(19)..(20): Xaa is A or G or is absent
RDVVMGRYKKLXXXXXXXXXFYLMSIANMKTPTXXPGAS

SEQ ID NO: 56615 - protein, 37 aa, Artificial Sequence; identical to SEQ ID NO: 5614
  GFR-binding peptide
  MOD_RES (31)..(32): Xaa is C or S

SEQ ID NO: 56616 - protein, 41 aa, Artificial Sequence; identical to SEQ ID NO: 3668
  GFR-binding peptide
  MOD_RES (1)..(3)..(35)..(36): Xaa is C or S

SEQ ID NO: 56617 - protein, 34 aa, Artificial Sequence; identical to SEQ ID NO: 3669
  GFR-binding peptide
  MOD_RES (33)..(34): Xaa is C or S
  MOD_RES (11)..(12)..(13)..(14)..(15): Xaa is A or G
  MOD_RES (16)..(17)..(18)..(19): Xaa is A or G or is absent

SEQ ID NO: 56618 - protein, 37 aa, Artificial Sequence; identical to SEQ ID NO: 3672
  GFR-binding peptide
  MOD_RES (2)..(4)..(36): Xaa is C or S

SEQ ID NO: 56619 - protein, 32 aa, Artificial Sequence; identical to SEQ ID NO: 26737
  GFR-binding peptide
  MOD_RES (11)..(12)..(13)..(14)..(15): Xaa is A or G
  MOD_RES (16)..(17)..(18)..(19): Xaa is A or G or is absent

SEQ ID NO: 56620 - protein, 38 aa, Artificial Sequence
  GFR-binding peptide
  MOD_RES (1)..(34)..(35): Xaa is C or S
  MOD_RES (12)..(13)..(14)..(15)..(16): Xaa is A or G
  MOD_RES (17)..(18)..(19)..(20): Xaa is A or G or is absent
XEEVIMRYKKLXXXXXXXXXFYLMSIANTKVPAXXTSP

SEQ ID NO: 56621 - protein, 33 aa, Artificial Sequence
  GFR-binding peptide
  MOD_RES (1)..(33): Xaa is C or S
XRDVVMGRYKKLIIQQKDNFYLMSIANMKTPTX

SEQ ID NO: 56622 - protein, 36 aa, Artificial Sequence; identical to SEQ ID NO: 24701
  GFR-binding peptide
  MOD_RES (33)..(34): Xaa is C or S
  MOD_RES (11)..(12)..(13)..(14)..(15): Xaa is A or G
  MOD_RES (16)..(17)..(18)..(19): Xaa is A or G or is absent

SEQ ID NO: 56623 - protein, 34 aa, Artificial Sequence
  GFR-binding peptide
  MOD_RES (33)..(34): Xaa is C or S
  MOD_RES (11)..(12)..(13)..(14)..(15): Xaa is A or G
  MOD_RES (16)..(17)..(18)..(19): Xaa is A or G or is absent
EEVIMRYKKLXXXXXXXXXFYLMSIANTKVPAXX

SEQ ID NO: 56624 - protein, 42 aa, Artificial Sequence; identical to SEQ ID NO: 4632
  GFR-binding peptide
  MOD_RES (1)..(3)..(37)..(38): Xaa is C or S
  MOD_RES (15)..(16)..(17)..(18)..(19): Xaa is A or G
  MOD_RES (20)..(21)..(22)..(23): Xaa is A or G or is absent

SEQ ID NO: 56625 - protein, 41 aa, Artificial Sequence; identical to SEQ ID NO: 25720
  GFR-binding peptide
  MOD_RES (2)..(36)..(37): Xaa is C or S
  MOD_RES (14)..(15)..(16)..(17)..(18): Xaa is A or G
  MOD_RES (19)..(20)..(21)..(22): Xaa is A or G or is absent

SEQ ID NO: 56626 - protein, 34 aa, Artificial Sequence; identical to SEQ ID NO: 25721
  GFR-binding peptide
  MOD_RES (33)..(34): Xaa is C or S
  MOD_RES (11)..(12)..(13)..(14)..(15): Xaa is A or G
  MOD_RES (16)..(17)..(18)..(19): Xaa is A or G or is absent

SEQ ID NO: 56627 - protein, 33 aa, Artificial Sequence; identical to SEQ ID NO: 26745
  GFR-binding peptide
  MOD_RES (33)..(33): Xaa is C or S
  MOD_RES (11)..(12)..(13)..(14)..(15): Xaa is A or G
  MOD_RES (16)..(17)..(18)..(19): Xaa is A or G or is absent

SEQ ID NO: 56628 - protein, 38 aa, Artificial Sequence; identical to SEQ ID NO: 3687
  GFR-binding peptide
  MOD_RES (1)..(3)..(37)..(38): Xaa is C or S
  MOD_RES (15)..(16)..(17)..(18)..(19): Xaa is A or G
  MOD_RES (20)..(21)..(22)..(23): Xaa is A or G or is absent

SEQ ID NO: 56629 - protein, 39 aa, Artificial Sequence
  GFR-binding peptide
  MOD_RES (2)..(4)..(36)..(37): Xaa is C or S
SXGXRDVVMGRYKKLIIQQKDNFYLMSIANMKTPTXXPG

SEQ ID NO: 56630 - protein, 37 aa, Artificial Sequence; identical to SEQ ID NO: 5633
  GFR-binding peptide
  MOD_RES (2)..(36)..(37): Xaa is C or S
  MOD_RES (14)..(15)..(16)..(17)..(18): Xaa is A or G
  MOD_RES (19)..(20)..(21)..(22): Xaa is A or G or is absent

SEQ ID NO: 56631 - protein, 42 aa, Artificial Sequence; identical to SEQ ID NO: 5634
  GFR-binding peptide
  MOD_RES (2)..(36)..(37): Xaa is C or S
  MOD_RES (14)..(15)..(16)..(17)..(18): Xaa is A or G
  MOD_RES (19)..(20)..(21)..(22): Xaa is A or G or is absent

SEQ ID NO: 56632 - protein, 34 aa, Artificial Sequence; identical to SEQ ID NO: 3692
  GFR-binding peptide
  MOD_RES (2)..(34): Xaa is C or S

SEQ ID NO: 56633 - protein, 32 aa, Artificial Sequence; identical to SEQ ID NO: 10203
  GFR-binding peptide
  MOD_RES (32)..(32): Xaa is C or S

SEQ ID NO: 56634 - protein, 41 aa, Artificial Sequence; identical to SEQ ID NO: 4639
  GFR-binding peptide
  MOD_RES (2)..(4)..(36)..(37): Xaa is C or S

SEQ ID NO: 56635 - protein, 34 aa, Artificial Sequence; identical to SEQ ID NO: 3696
  GFR-binding peptide
  MOD_RES (1)..(33)..(34): Xaa is C or S

SEQ ID NO: 56636 - protein, 36 aa, Artificial Sequence; identical to SEQ ID NO: 3698
  GFR-binding peptide
  MOD_RES (1)..(36): Xaa is C or S
  MOD_RES (14)..(15)..(16)..(17)..(18): Xaa is A or G
  MOD_RES (19)..(20)..(21)..(22): Xaa is A or G or is absent

SEQ ID NO: 56637 - protein, 41 aa, Artificial Sequence; identical to SEQ ID NO: 3699
  GFR-binding peptide
  MOD_RES (2)..(4)..(37)..(38): Xaa is C or S

SEQ ID NO: 56638 - protein, 37 aa, Artificial Sequence
  GFR-binding peptide
  MOD_RES (31)..(32): Xaa is C or S
DVVMGRYKKLIIQQKDNFYLMSIANMKTPTXXPGASG

SEQ ID NO: 56639 - protein, 33 aa, Artificial Sequence; identical to SEQ ID NO: 2723
  GFR-binding peptide
  MOD_RES (32)..(33): Xaa is C or S

SEQ ID NO: 56640 - protein, 38 aa, Artificial Sequence
  GFR-binding peptide
  MOD_RES (2)..(33)..(34): Xaa is C or S
GXEEVIMRYKKLLLVRGNDFYLMSIANTKVPAXXTSPV

SEQ ID NO: 56641 - protein, 34 aa, Artificial Sequence
  GFR-binding peptide
  MOD_RES (1)..(34): Xaa is C or S
  MOD_RES (12)..(13)..(14)..(15)..(16): Xaa is A or G
  MOD_RES (17)..(18)..(19)..(20): Xaa is A or G or is absent
XEEVIMRYKKLXXXXXXXXXFYLMSIANTKVPAX

SEQ ID NO: 56642 - protein, 38 aa, Artificial Sequence
  GFR-binding peptide
  MOD_RES (1)..(35)..(36): Xaa is C or S
  MOD_RES (13)..(14)..(15)..(16)..(17): Xaa is A or G
  MOD_RES (18)..(19)..(20)..(21): Xaa is A or G or is absent
XRDVVMGRYKKLXXXXXXXXXFYLMSIANMKTPTXXPG

SEQ ID NO: 56643 - protein, 34 aa, Artificial Sequence; identical to SEQ ID NO: 25734
  GFR-binding peptide
  MOD_RES (31)..(32): Xaa is C or S

SEQ ID NO: 56644 - protein, 37 aa, Artificial Sequence; identical to SEQ ID NO: 5638
  GFR-binding peptide
  MOD_RES (33)..(34): Xaa is C or S
  MOD_RES (11)..(12)..(13)..(14)..(15): Xaa is A or G
  MOD_RES (16)..(17)..(18)..(19): Xaa is A or G or is absent

SEQ ID NO: 56645 - protein, 33 aa, Artificial Sequence; identical to SEQ ID NO: 25738
  GFR-binding peptide
  MOD_RES (1)..(33): Xaa is C or S

SEQ ID NO: 56646 - protein, 40 aa, Artificial Sequence; identical to SEQ ID NO: 11129
  GFR-binding peptide
  MOD_RES (2)..(4)..(38)..(39): Xaa is C or S
  MOD_RES (16)..(17)..(18)..(19)..(20): Xaa is A or G
  MOD_RES (21)..(22)..(23)..(24): Xaa is A or G or is absent

SEQ ID NO: 56647 - protein, 33 aa, Artificial Sequence; identical to SEQ ID NO: 3706
  GFR-binding peptide
  MOD_RES (32)..(33): Xaa is C or S

SEQ ID NO: 56648 - protein, 39 aa, Artificial Sequence
  GFR-binding peptide
  MOD_RES (1)..(33)..(34): Xaa is C or S
XRDVVMGRYKKLIIQQKDNFYLMSIANMKTPTXXPGASG

SEQ ID NO: 56649 - protein, 40 aa, Artificial Sequence; identical to SEQ ID NO: 5640
  GFR-binding peptide
  MOD_RES (1)..(3)..(35)..(36): Xaa is C or S

SEQ ID NO: 56650 - protein, 35 aa, Artificial Sequence; identical to SEQ ID NO: 23722
  GFR-binding peptide
  MOD_RES (1)..(3)..(35): Xaa is C or S

SEQ ID NO: 56651 - protein, 41 aa, Artificial Sequence; identical to SEQ ID NO: 24728
  GFR-binding peptide
  MOD_RES (1)..(3)..(37)..(38): Xaa is C or S
  MOD_RES (15)..(16)..(17)..(18)..(19): Xaa is A or G
  MOD_RES (20)..(21)..(22)..(23): Xaa is A or G or is absent

SEQ ID NO: 56652 - protein, 34 aa, Artificial Sequence; identical to SEQ ID NO: 13069
  GFR-binding peptide
  MOD_RES (1)..(1): Xaa is C or S
  MOD_RES (13)..(14)..(15)..(16)..(17): Xaa is A or G
  MOD_RES (18)..(19)..(20)..(21): Xaa is A or G or is absent

SEQ ID NO: 56653 - protein, 35 aa, Artificial Sequence; identical to SEQ ID NO: 4652
  GFR-binding peptide
  MOD_RES (33)..(34): Xaa is C or S
  MOD_RES (11)..(12)..(13)..(14)..(15): Xaa is A or G
  MOD_RES (16)..(17)..(18)..(19): Xaa is A or G or is absent

SEQ ID NO: 56654 - protein, 37 aa, Artificial Sequence; identical to SEQ ID NO: 2733
  GFR-binding peptide
  MOD_RES (33)..(34): Xaa is C or S
  MOD_RES (11)..(12)..(13)..(14)..(15): Xaa is A or G
  MOD_RES (16)..(17)..(18)..(19): Xaa is A or G or is absent

SEQ ID NO: 56655 - protein, 37 aa, Artificial Sequence; identical to SEQ ID NO: 11136
  GFR-binding peptide
  MOD_RES (2)..(36)..(37): Xaa is C or S
  MOD_RES (14)..(15)..(16)..(17)..(18): Xaa is A or G
  MOD_RES (19)..(20)..(21)..(22): Xaa is A or G or is absent

SEQ ID NO: 56656 - protein, 37 aa, Artificial Sequence; identical to SEQ ID NO: 3710
  GFR-binding peptide
  MOD_RES (2)..(4)..(36)..(37): Xaa is C or S

SEQ ID NO: 56657 - protein, 40 aa, Artificial Sequence
  GFR-binding peptide
  MOD_RES (2)..(4)..(38)..(39): Xaa is C or S
  MOD_RES (16)..(17)..(18)..(19)..(20): Xaa is A or G
  MOD_RES (21)..(22)..(23)..(24): Xaa is A or G or is absent
SXGXRDVVMGRYKKLXXXXXXXXXFYLMSIANMKTPTXXP

SEQ ID NO: 56658 - protein, 36 aa, Artificial Sequence; identical to SEQ ID NO: 25749
  GFR-binding peptide
  MOD_RES (1)..(35)..(36): Xaa is C or S
  MOD_RES (13)..(14)..(15)..(16)..(17): Xaa is A or G
  MOD_RES (18)..(19)..(20)..(21): Xaa is A or G or is absent

SEQ ID NO: 56659 - protein, 44 aa, Artificial Sequence; identical to SEQ ID NO: 5647
  GFR-binding peptide
  MOD_RES (2)..(4)..(38)..(39): Xaa is C or S
  MOD_RES (16)..(17)..(18)..(19)..(20): Xaa is A or G
  MOD_RES (21)..(22)..(23)..(24): Xaa is A or G or is absent

SEQ ID NO: 56660 - protein, 31 aa, Artificial Sequence; identical to SEQ ID NO: 26778
  GFR-binding peptide
  MOD_RES (31)..(31): Xaa is C or S

SEQ ID NO: 56661 - protein, 34 aa, Artificial Sequence; identical to SEQ ID NO: 4658
  GFR-binding peptide
  MOD_RES (34)..(34): Xaa is C or S
  MOD_RES (12)..(13)..(14)..(15)..(16): Xaa is A or G
  MOD_RES (17)..(18)..(19)..(20): Xaa is A or G or is absent

SEQ ID NO: 56662 - protein, 39 aa, Artificial Sequence; identical to SEQ ID NO: 5651
  GFR-binding peptide
  MOD_RES (1)..(3)..(38)..(39): Xaa is C or S
  MOD_RES (16)..(17)..(18)..(19)..(20): Xaa is A or G
  MOD_RES (21)..(22)..(23)..(24): Xaa is A or G or is absent

SEQ ID NO: 56663 - protein, 41 aa, Artificial Sequence; identical to SEQ ID NO: 5652
  GFR-binding peptide
  MOD_RES (1)..(3)..(37)..(38): Xaa is C or S
  MOD_RES (15)..(16)..(17)..(18)..(19): Xaa is A or G
  MOD_RES (20)..(21)..(22)..(23): Xaa is A or G or is absent

SEQ ID NO: 56664 - protein, 39 aa, Artificial Sequence; identical to SEQ ID NO: 4659
  GFR-binding peptide
  MOD_RES (2)..(37)..(38): Xaa is C or S
  MOD_RES (15)..(16)..(17)..(18)..(19): Xaa is A or G
  MOD_RES (20)..(21)..(22)..(23): Xaa is A or G or is absent

SEQ ID NO: 56665 - protein, 40 aa, Artificial Sequence; identical to SEQ ID NO: 26780
  GFR-binding peptide
  MOD_RES (1)..(35)..(36): Xaa is C or S
  MOD_RES (13)..(14)..(15)..(16)..(17): Xaa is A or G
  MOD_RES (18)..(19)..(20)..(21): Xaa is A or G or is absent

SEQ ID NO: 56666 - protein, 32 aa, Artificial Sequence; identical to SEQ ID NO: 10224
  GFR-binding peptide
  MOD_RES (11)..(12)..(13)..(14)..(15): Xaa is A or G
  MOD_RES (16)..(17)..(18)..(19): Xaa is A or G or is absent

SEQ ID NO: 56667 - protein, 31 aa, Artificial Sequence; identical to SEQ ID NO: 4662
  GFR-binding peptide

SEQ ID NO: 56668 - protein, 40 aa, Artificial Sequence; identical to SEQ ID NO: 26784
  GFR-binding peptide
  MOD_RES (1)..(3)..(35)..(36): Xaa is C or S

SEQ ID NO: 56669 - protein, 35 aa, Artificial Sequence; identical to SEQ ID NO: 2745
  GFR-binding peptide
  MOD_RES (1)..(33)..(34): Xaa is C or S

SEQ ID NO: 56670 - protein, 36 aa, Artificial Sequence
  GFR-binding peptide
  MOD_RES (1)..(3)..(34)..(35): Xaa is C or S
XGXEEVIMRYKKLLLVRGNDFYLMSIANTKVPAXXT

SEQ ID NO: 56671 - protein, 39 aa, Artificial Sequence; identical to SEQ ID NO: 26789
  GFR-binding peptide
  MOD_RES (2)..(4)..(36)..(37): Xaa is C or S

SEQ ID NO: 56672 - protein, 42 aa, Artificial Sequence; identical to SEQ ID NO: 4672
  GFR-binding peptide
  MOD_RES (1)..(3)..(37): Xaa is C or S
  MOD_RES (15)..(16)..(17)..(18)..(19): Xaa is A or G
  MOD_RES (20)..(21)..(22)..(23): Xaa is A or G or is absent

SEQ ID NO: 56673 - protein, 38 aa, Artificial Sequence
  GFR-binding peptide
  MOD_RES (2)..(35)..(36): Xaa is C or S
  MOD_RES (13)..(14)..(15)..(16)..(17): Xaa is A or G
  MOD_RES (18)..(19)..(20)..(21): Xaa is A or G or is absent
GXEEVIMRYKKLXXXXXXXXXFYLMSIANTKVPAXXTS

SEQ ID NO: 56674 - protein, 39 aa, Artificial Sequence
  GFR-binding peptide
  MOD_RES (2)..(4)..(38)..(39): Xaa is C or S
  MOD_RES (16)..(17)..(18)..(19)..(20): Xaa is A or G
  MOD_RES (21)..(22)..(23)..(24): Xaa is A or G or is absent
SXGXRDVVMGRYKKLXXXXXXXXXFYLMSIANMKTPTXX

SEQ ID NO: 56675 - protein, 40 aa, Artificial Sequence
  GFR-binding peptide
  MOD_RES (1)..(3)..(37)..(38): Xaa is C or S
  MOD_RES (15)..(16)..(17)..(18)..(19): Xaa is A or G
  MOD_RES (20)..(21)..(22)..(23): Xaa is A or G or is absent
XGXRDVVMGRYKKLXXXXXXXXXFYLMSIANMKTPTXXPG

SEQ ID NO: 56676 - protein, 38 aa, Artificial Sequence; identical to SEQ ID NO: 4676
  GFR-binding peptide
  MOD_RES (34)..(34): Xaa is C or S
  MOD_RES (12)..(13)..(14)..(15)..(16): Xaa is A or G
  MOD_RES (17)..(18)..(19)..(20): Xaa is A or G or is absent

SEQ ID NO: 56677 - protein, 38 aa, Artificial Sequence; identical to SEQ ID NO: 26796
  GFR-binding peptide
  MOD_RES (1)..(3)..(35)..(36): Xaa is C or S

SEQ ID NO: 56678 - protein, 37 aa, Artificial Sequence; identical to SEQ ID NO: 2755
  GFR-binding peptide
  MOD_RES (1)..(33)..(34): Xaa is C or S

SEQ ID NO: 56679 - protein, 37 aa, Artificial Sequence; identical to SEQ ID NO: 2756
  GFR-binding peptide
  MOD_RES (2)..(35)..(36): Xaa is C or S

SEQ ID NO: 56680 - protein, 36 aa, Artificial Sequence; identical to SEQ ID NO: 4678
  GFR-binding peptide
  MOD_RES (1)..(33): Xaa is C or S

SEQ ID NO: 56681 - protein, 33 aa, Artificial Sequence; identical to SEQ ID NO: 2757
  GFR-binding peptide
  MOD_RES (1)..(33): Xaa is C or S

SEQ ID NO: 56682 - protein, 36 aa, Artificial Sequence; identical to SEQ ID NO: 3728
  GFR-binding peptide
  MOD_RES (1)..(3)..(35)..(36): Xaa is C or S

SEQ ID NO: 56683 - protein, 38 aa, Artificial Sequence; identical to SEQ ID NO: 5666
  GFR-binding peptide
  MOD_RES (1)..(3)..(37): Xaa is C or S
  MOD_RES (15)..(16)..(17)..(18)..(19): Xaa is A or G
  MOD_RES (20)..(21)..(22)..(23): Xaa is A or G or is absent

SEQ ID NO: 56684 - protein, 38 aa, Artificial Sequence; identical to SEQ ID NO: 3731
  GFR-binding peptide
  MOD_RES (1)..(35)..(36): Xaa is C or S
  MOD_RES (13)..(14)..(15)..(16)..(17): Xaa is A or G
  MOD_RES (18)..(19)..(20)..(21): Xaa is A or G or is absent

SEQ ID NO: 56685 - protein, 39 aa, Artificial Sequence; identical to SEQ ID NO: 3732
  GFR-binding peptide
  MOD_RES (33)..(34): Xaa is C or S
  MOD_RES (11)..(12)..(13)..(14)..(15): Xaa is A or G
  MOD_RES (16)..(17)..(18)..(19): Xaa is A or G or is absent

SEQ ID NO: 56686 - protein, 37 aa, Artificial Sequence; identical to SEQ ID NO: 3734
  GFR-binding peptide
  MOD_RES (1)..(3)..(35): Xaa is C or S

SEQ ID NO: 56687 - protein, 40 aa, Artificial Sequence; identical to SEQ ID NO: 3735
  GFR-binding peptide
  MOD_RES (2)..(36)..(37): Xaa is C or S
  MOD_RES (14)..(15)..(16)..(17)..(18): Xaa is A or G
  MOD_RES (19)..(20)..(21)..(22): Xaa is A or G or is absent

SEQ ID NO: 56688 - protein, 38 aa, Artificial Sequence
  GFR-binding peptide
  MOD_RES (1)..(32)..(33): Xaa is C or S
XEEVIMRYKKLLLVRGNDFYLMSIANTKVPAXXTSPVR

SEQ ID NO: 56689 - protein, 33 aa, Artificial Sequence; identical to SEQ ID NO: 3737
  GFR-binding peptide
  MOD_RES (1)..(1): Xaa is C or S

SEQ ID NO: 56690 - protein, 39 aa, Artificial Sequence; identical to SEQ ID NO: 3738
  GFR-binding peptide
  MOD_RES (34)..(35): Xaa is C or S
  MOD_RES (12)..(13)..(14)..(15)..(16): Xaa is A or G
  MOD_RES (17)..(18)..(19)..(20): Xaa is A or G or is absent

SEQ ID NO: 56691 - protein, 31 aa, Artificial Sequence; identical to SEQ ID NO: 5672
  GFR-binding peptide
  MOD_RES (31)..(31): Xaa is C or S

SEQ ID NO: 56692 - protein, 33 aa, Artificial Sequence; identical to SEQ ID NO: 2763
  GFR-binding peptide
  MOD_RES (31)..(32): Xaa is C or S

SEQ ID NO: 56693 - protein, 37 aa, Artificial Sequence; identical to SEQ ID NO: 24770
  GFR-binding peptide
  MOD_RES (31)..(32): Xaa is C or S

SEQ ID NO: 56694 - protein, 32 aa, Artificial Sequence; identical to SEQ ID NO: 4688
  GFR-binding peptide
  MOD_RES (31)..(32): Xaa is C or S

SEQ ID NO: 56695 - protein, 37 aa, Artificial Sequence; identical to SEQ ID NO: 12118
  GFR-binding peptide
  MOD_RES (1)..(3)..(37): Xaa is C or S
  MOD_RES (15)..(16)..(17)..(18)..(19): Xaa is A or G
  MOD_RES (20)..(21)..(22)..(23): Xaa is A or G or is absent

SEQ ID NO: 56696 - protein, 40 aa, Artificial Sequence
  GFR-binding peptide
  MOD_RES (34)..(35): Xaa is C or S
  MOD_RES (12)..(13)..(14)..(15)..(16): Xaa is A or G
  MOD_RES (17)..(18)..(19)..(20): Xaa is A or G or is absent
RDVVMGRYKKLXXXXXXXXXFYLMSIANMKTPTXXPGASG

SEQ ID NO: 56697 - protein, 35 aa, Artificial Sequence; identical to SEQ ID NO: 5679
  GFR-binding peptide
  MOD_RES (1)..(3)..(35): Xaa is C or S

SEQ ID NO: 56698 - protein, 38 aa, Artificial Sequence; identical to SEQ ID NO: 4689
  GFR-binding peptide
  MOD_RES (1)..(33)..(34): Xaa is C or S

SEQ ID NO: 56699 - protein, 39 aa, Artificial Sequence; identical to SEQ ID NO: 5680
  GFR-binding peptide
  MOD_RES (34)..(35): Xaa is C or S
  MOD_RES (12)..(13)..(14)..(15)..(16): Xaa is A or G
  MOD_RES (17)..(18)..(19)..(20): Xaa is A or G or is absent

SEQ ID NO: 56700 - protein, 35 aa, Artificial Sequence
  GFR-binding peptide
  MOD_RES (31)..(32): Xaa is C or S
DVVMGRYKKLIIQQKDNFYLMSIANMKTPTXXPGA

SEQ ID NO: 56701 - protein, 36 aa, Artificial Sequence; identical to SEQ ID NO: 4691
  GFR-binding peptide
  MOD_RES (1)..(35)..(36): Xaa is C or S
  MOD_RES (13)..(14)..(15)..(16)..(17): Xaa is A or G
  MOD_RES (18)..(19)..(20)..(21): Xaa is A or G or is absent

SEQ ID NO: 56702 - protein, 31 aa, Artificial Sequence; identical to SEQ ID NO: 24774
  GFR-binding peptide

SEQ ID NO: 56703 - protein, 37 aa, Artificial Sequence; identical to SEQ ID NO: 5683
  GFR-binding peptide
  MOD_RES (2)..(34)..(35): Xaa is C or S

SEQ ID NO: 56704 - protein, 37 aa, Artificial Sequence; identical to SEQ ID NO: 2766
  GFR-binding peptide
  MOD_RES (1)..(35)..(36): Xaa is C or S
  MOD_RES (13)..(14)..(15)..(16)..(17): Xaa is A or G
  MOD_RES (18)..(19)..(20)..(21): Xaa is A or G or is absent

SEQ ID NO: 56705 - protein, 38 aa, Artificial Sequence; identical to SEQ ID NO: 3748
  GFR-binding peptide
  MOD_RES (35)..(36): Xaa is C or S
  MOD_RES (13)..(14)..(15)..(16)..(17): Xaa is A or G
  MOD_RES (18)..(19)..(20)..(21): Xaa is A or G or is absent

SEQ ID NO: 56706 - protein, 35 aa, Artificial Sequence
  GFR-binding peptide
  MOD_RES (33)..(34): Xaa is C or S
  MOD_RES (11)..(12)..(13)..(14)..(15): Xaa is A or G
  MOD_RES (16)..(17)..(18)..(19): Xaa is A or G or is absent
DVVMGRYKKLXXXXXXXXXFYLMSIANMKTPTXXP

SEQ ID NO: 56707 - protein, 36 aa, Artificial Sequence; identical to SEQ ID NO: 5685
  GFR-binding peptide
  MOD_RES (1)..(3): Xaa is C or S
  MOD_RES (15)..(16)..(17)..(18)..(19): Xaa is A or G
  MOD_RES (20)..(21)..(22)..(23): Xaa is A or G or is absent

SEQ ID NO: 56708 - protein, 33 aa, Artificial Sequence
  GFR-binding peptide
  MOD_RES (2)..(33): Xaa is C or S
GXEEVIMRYKKLLLVRGNDFYLMSIANTKVPAX

SEQ ID NO: 56709 - protein, 33 aa, Artificial Sequence; identical to SEQ ID NO: 4697
  GFR-binding peptide
  MOD_RES (33)..(33): Xaa is C or S
  MOD_RES (11)..(12)..(13)..(14)..(15): Xaa is A or G
  MOD_RES (16)..(17)..(18)..(19): Xaa is A or G or is absent

SEQ ID NO: 56710 - protein, 35 aa, Artificial Sequence; identical to SEQ ID NO: 24780
  GFR-binding peptide
  MOD_RES (33)..(34): Xaa is C or S
  MOD_RES (11)..(12)..(13)..(14)..(15): Xaa is A or G
  MOD_RES (16)..(17)..(18)..(19): Xaa is A or G or is absent

SEQ ID NO: 56711 - protein, 39 aa, Artificial Sequence; identical to SEQ ID NO: 4698
  GFR-binding peptide
  MOD_RES (1)..(33)..(34): Xaa is C or S

SEQ ID NO: 56712 - protein, 33 aa, Artificial Sequence; identical to SEQ ID NO: 23765
  GFR-binding peptide
  MOD_RES (12)..(13)..(14)..(15)..(16): Xaa is A or G
  MOD_RES (17)..(18)..(19)..(20): Xaa is A or G or is absent

SEQ ID NO: 56713 - protein, 30 aa, Artificial Sequence
  GFR-binding peptide
DVVMGRYKKLIIQQKDNFYLMSIANMKTPT

SEQ ID NO: 56714 - protein, 37 aa, Artificial Sequence; identical to SEQ ID NO: 13132
  GFR-binding peptide
  MOD_RES (31)..(32): Xaa is C or S

SEQ ID NO: 56715 - protein, 38 aa, Artificial Sequence; identical to SEQ ID NO: 3755
  GFR-binding peptide
  MOD_RES (2)..(36)..(37): Xaa is C or S
  MOD_RES (14)..(15)..(16)..(17)..(18): Xaa is A or G
  MOD_RES (19)..(20)..(21)..(22): Xaa is A or G or is absent

SEQ ID NO: 56716 - protein, 43 aa, Artificial Sequence; identical to SEQ ID NO: 4703
  GFR-binding peptide
  MOD_RES (1)..(3)..(37)..(38): Xaa is C or S
  MOD_RES (15)..(16)..(17)..(18)..(19): Xaa is A or G
  MOD_RES (20)..(21)..(22)..(23): Xaa is A or G or is absent

SEQ ID NO: 56717 - protein, 34 aa, Artificial Sequence
  GFR-binding peptide
  MOD_RES (1)..(3): Xaa is C or S
XGXRDVVMGRYKKLIIQQKDNFYLMSIANMKTPT

SEQ ID NO: 56718 - protein, 40 aa, Artificial Sequence
  GFR-binding peptide
  MOD_RES (1)..(3)..(36)..(37): Xaa is C or S
  MOD_RES (14)..(15)..(16)..(17)..(18): Xaa is A or G
  MOD_RES (19)..(20)..(21)..(22): Xaa is A or G or is absent
XGXEEVIMRYKKLXXXXXXXXXFYLMSIANTKVPAXXTSP

SEQ ID NO: 56719 - protein, 40 aa, Artificial Sequence; identical to SEQ ID NO: 3757
  GFR-binding peptide
  MOD_RES (1)..(3)..(37)..(38): Xaa is C or S
  MOD_RES (15)..(16)..(17)..(18)..(19): Xaa is A or G
  MOD_RES (20)..(21)..(22)..(23): Xaa is A or G or is absent

SEQ ID NO: 56720 - protein, 37 aa, Artificial Sequence; identical to SEQ ID NO: 24788
  GFR-binding peptide
  MOD_RES (32)..(33): Xaa is C or S

SEQ ID NO: 56721 - protein, 38 aa, Artificial Sequence; identical to SEQ ID NO: 3758
  GFR-binding peptide
  MOD_RES (2)..(4)..(38): Xaa is C or S
  MOD_RES (16)..(17)..(18)..(19)..(20): Xaa is A or G
  MOD_RES (21)..(22)..(23)..(24): Xaa is A or G or is absent

SEQ ID NO: 56722 - protein, 37 aa, Artificial Sequence; identical to SEQ ID NO: 3761
  GFR-binding peptide
  MOD_RES (31)..(32): Xaa is C or S

SEQ ID NO: 56723 - protein, 37 aa, Artificial Sequence; identical to SEQ ID NO: 3762
  GFR-binding peptide
  MOD_RES (34)..(35): Xaa is C or S
  MOD_RES (12)..(13)..(14)..(15)..(16): Xaa is A or G
  MOD_RES (17)..(18)..(19)..(20): Xaa is A or G or is absent

SEQ ID NO: 56724 - protein, 33 aa, Artificial Sequence; identical to SEQ ID NO: 5699
  GFR-binding peptide
  MOD_RES (12)..(13)..(14)..(15)..(16): Xaa is A or G
  MOD_RES (17)..(18)..(19)..(20): Xaa is A or G or is absent

SEQ ID NO: 56725 - protein, 35 aa, Artificial Sequence; identical to SEQ ID NO: 3763
  GFR-binding peptide
  MOD_RES (2)..(4): Xaa is C or S

SEQ ID NO: 56726 - protein, 40 aa, Artificial Sequence
  GFR-binding peptide
  MOD_RES (1)..(35)..(36): Xaa is C or S
  MOD_RES (13)..(14)..(15)..(16)..(17): Xaa is A or G
  MOD_RES (18)..(19)..(20)..(21): Xaa is A or G or is absent
XRDVVMGRYKKLXXXXXXXXXFYLMSIANMKTPTXXPGAS

SEQ ID NO: 56727 - protein, 36 aa, Artificial Sequence; identical to SEQ ID NO: 4708
  GFR-binding peptide
  MOD_RES (1)..(35)..(36): Xaa is C or S
  MOD_RES (13)..(14)..(15)..(16)..(17): Xaa is A or G
  MOD_RES (18)..(19)..(20)..(21): Xaa is A or G or is absent

SEQ ID NO: 56728 - protein, 41 aa, Artificial Sequence; identical to SEQ ID NO: 3765
  GFR-binding peptide
  MOD_RES (2)..(36)..(37): Xaa is C or S
  MOD_RES (14)..(15)..(16)..(17)..(18): Xaa is A or G
  MOD_RES (19)..(20)..(21)..(22): Xaa is A or G or is absent

SEQ ID NO: 56729 - protein, 34 aa, Artificial Sequence; identical to SEQ ID NO: 4712
  GFR-binding peptide
  MOD_RES (1)..(33)..(34): Xaa is C or S

SEQ ID NO: 56730 - protein, 32 aa, Artificial Sequence; identical to SEQ ID NO: 2782
  GFR-binding peptide
  MOD_RES (32)..(32): Xaa is C or S

SEQ ID NO: 56731 - protein, 31 aa, Artificial Sequence; identical to SEQ ID NO: 5701
  GFR-binding peptide

SEQ ID NO: 56732 - protein, 39 aa, Artificial Sequence
  GFR-binding peptide
  MOD_RES (2)..(4)..(37)..(38): Xaa is C or S
  MOD_RES (15)..(16)..(17)..(18)..(19): Xaa is A or G
  MOD_RES (20)..(21)..(22)..(23): Xaa is A or G or is absent
LXGXEEVIMRYKKLXXXXXXXXXFYLMSIANTKVPAXXT

SEQ ID NO: 56733 - protein, 31 aa, Artificial Sequence
  GFR-binding peptide
  MOD_RES (31)..(31): Xaa is C or S
DVVMGRYKKLIIQQKDNFYLMSIANMKTPTX

SEQ ID NO: 56734 - protein, 41 aa, Artificial Sequence; identical to SEQ ID NO: 26827
  GFR-binding peptide
  MOD_RES (1)..(35)..(36): Xaa is C or S
  MOD_RES (13)..(14)..(15)..(16)..(17): Xaa is A or G
  MOD_RES (18)..(19)..(20)..(21): Xaa is A or G or is absent

SEQ ID NO: 56735 - protein, 35 aa, Artificial Sequence; identical to SEQ ID NO: 2785
  GFR-binding peptide
  MOD_RES (2)..(4): Xaa is C or S

SEQ ID NO: 56736 - protein, 38 aa, Artificial Sequence; identical to SEQ ID NO: 4716
  GFR-binding peptide
  MOD_RES (2)..(37)..(38): Xaa is C or S
  MOD_RES (15)..(16)..(17)..(18)..(19): Xaa is A or G
  MOD_RES (20)..(21)..(22)..(23): Xaa is A or G or is absent

SEQ ID NO: 56737 - protein, 35 aa, Artificial Sequence; identical to SEQ ID NO: 25797
  GFR-binding peptide
  MOD_RES (2)..(4): Xaa is C or S

SEQ ID NO: 56738 - protein, 32 aa, Artificial Sequence; identical to SEQ ID NO: 25798
  GFR-binding peptide
  MOD_RES (31)..(32): Xaa is C or S

SEQ ID NO: 56739 - protein, 36 aa, Artificial Sequence; identical to SEQ ID NO: 4719
  GFR-binding peptide
  MOD_RES (1)..(3)..(35)..(36): Xaa is C or S

SEQ ID NO: 56740 - protein, 35 aa, Artificial Sequence; identical to SEQ ID NO: 26829
  GFR-binding peptide
  MOD_RES (2)..(4): Xaa is C or S

SEQ ID NO: 56741 - protein, 36 aa, Artificial Sequence; identical to SEQ ID NO: 2792
  GFR-binding peptide
  MOD_RES (32)..(33): Xaa is C or S

SEQ ID NO: 56742 - protein, 41 aa, Artificial Sequence; identical to SEQ ID NO: 4720
  GFR-binding peptide
  MOD_RES (1)..(3)..(37)..(38): Xaa is C or S
  MOD_RES (15)..(16)..(17)..(18)..(19): Xaa is A or G
  MOD_RES (20)..(21)..(22)..(23): Xaa is A or G or is absent

SEQ ID NO: 56743 - protein, 38 aa, Artificial Sequence; identical to SEQ ID NO: 4722
  GFR-binding peptide
  MOD_RES (2)..(4)..(38): Xaa is C or S
  MOD_RES (16)..(17)..(18)..(19)..(20): Xaa is A or G
  MOD_RES (21)..(22)..(23)..(24): Xaa is A or G or is absent

SEQ ID NO: 56744 - protein, 37 aa, Artificial Sequence; identical to SEQ ID NO: 25802
  GFR-binding peptide
  MOD_RES (31)..(32): Xaa is C or S

SEQ ID NO: 56745 - protein, 43 aa, Artificial Sequence; identical to SEQ ID NO: 2795
  GFR-binding peptide
  MOD_RES (2)..(4)..(38)..(39): Xaa is C or S
  MOD_RES (16)..(17)..(18)..(19)..(20): Xaa is A or G
  MOD_RES (21)..(22)..(23)..(24): Xaa is A or G or is absent

SEQ ID NO: 56746 - protein, 33 aa, Artificial Sequence; identical to SEQ ID NO: 4724
  GFR-binding peptide
  MOD_RES (33)..(33): Xaa is C or S
  MOD_RES (11)..(12)..(13)..(14)..(15): Xaa is A or G
  MOD_RES (16)..(17)..(18)..(19): Xaa is A or G or is absent

SEQ ID NO: 56747 - protein, 37 aa, Artificial Sequence; identical to SEQ ID NO: 25806
  GFR-binding peptide
  MOD_RES (1)..(3)..(35)..(36): Xaa is C or S

SEQ ID NO: 56748 - protein, 36 aa, Artificial Sequence; identical to SEQ ID NO: 25809
  GFR-binding peptide
  MOD_RES (2)..(36): Xaa is C or S
  MOD_RES (14)..(15)..(16)..(17)..(18): Xaa is A or G
  MOD_RES (19)..(20)..(21)..(22): Xaa is A or G or is absent

SEQ ID NO: 56749 - protein, 34 aa, Artificial Sequence; identical to SEQ ID NO: 3783
  GFR-binding peptide
  MOD_RES (1)..(34): Xaa is C or S

SEQ ID NO: 56750 - protein, 34 aa, Artificial Sequence; identical to SEQ ID NO: 2801
  GFR-binding peptide
  MOD_RES (2)..(34): Xaa is C or S

SEQ ID NO: 56751 - protein, 39 aa, Artificial Sequence; identical to SEQ ID NO: 5712
  GFR-binding peptide
  MOD_RES (2)..(34)..(35): Xaa is C or S

SEQ ID NO: 56752 - protein, 37 aa, Artificial Sequence; identical to SEQ ID NO: 2802
  GFR-binding peptide
  MOD_RES (33)..(34): Xaa is C or S

SEQ ID NO: 56753 - protein, 33 aa, Artificial Sequence; identical to SEQ ID NO: 25813
  GFR-binding peptide
  MOD_RES (32)..(33): Xaa is C or S

SEQ ID NO: 56754 - protein, 36 aa, Artificial Sequence; identical to SEQ ID NO: 3786
  GFR-binding peptide
  MOD_RES (1)..(3): Xaa is C or S
  MOD_RES (15)..(16)..(17)..(18)..(19): Xaa is A or G
  MOD_RES (20)..(21)..(22)..(23): Xaa is A or G or is absent

SEQ ID NO: 56755 - protein, 38 aa, Artificial Sequence
  GFR-binding peptide
  MOD_RES (1)..(3)..(36)..(37): Xaa is C or S
  MOD_RES (14)..(15)..(16)..(17)..(18): Xaa is A or G
  MOD_RES (19)..(20)..(21)..(22): Xaa is A or G or is absent
XGXEEVIMRYKKLXXXXXXXXXFYLMSIANTKVPAXXT

SEQ ID NO: 56756 - protein, 40 aa, Artificial Sequence; identical to SEQ ID NO: 11215
  GFR-binding peptide
  MOD_RES (1)..(35)..(36): Xaa is C or S
  MOD_RES (13)..(14)..(15)..(16)..(17): Xaa is A or G
  MOD_RES (18)..(19)..(20)..(21): Xaa is A or G or is absent

SEQ ID NO: 56757 - protein, 38 aa, Artificial Sequence; identical to SEQ ID NO: 3790
  GFR-binding peptide
  MOD_RES (2)..(36): Xaa is C or S
  MOD_RES (14)..(15)..(16)..(17)..(18): Xaa is A or G
  MOD_RES (19)..(20)..(21)..(22): Xaa is A or G or is absent

SEQ ID NO: 56758 - protein, 32 aa, Artificial Sequence; identical to SEQ ID NO: 4735
  GFR-binding peptide
  MOD_RES (31)..(32): Xaa is C or S

SEQ ID NO: 56759 - protein, 34 aa, Artificial Sequence; identical to SEQ ID NO: 4737
  GFR-binding peptide
  MOD_RES (1)..(3): Xaa is C or S

SEQ ID NO: 56760 - protein, 40 aa, Artificial Sequence; identical to SEQ ID NO: 2809
  GFR-binding peptide
  MOD_RES (1)..(35)..(36): Xaa is C or S
  MOD_RES (13)..(14)..(15)..(16)..(17): Xaa is A or G
  MOD_RES (18)..(19)..(20)..(21): Xaa is A or G or is absent

SEQ ID NO: 56761 - protein, 38 aa, Artificial Sequence; identical to SEQ ID NO: 5721
  GFR-binding peptide
  MOD_RES (1)..(35)..(36): Xaa is C or S
  MOD_RES (13)..(14)..(15)..(16)..(17): Xaa is A or G
  MOD_RES (18)..(19)..(20)..(21): Xaa is A or G or is absent

SEQ ID NO: 56762 - protein, 34 aa, Artificial Sequence; identical to SEQ ID NO: 4738
  GFR-binding peptide
  MOD_RES (34)..(34): Xaa is C or S
  MOD_RES (12)..(13)..(14)..(15)..(16): Xaa is A or G
  MOD_RES (17)..(18)..(19)..(20): Xaa is A or G or is absent

SEQ ID NO: 56763 - protein, 35 aa, Artificial Sequence; identical to SEQ ID NO: 2810
  GFR-binding peptide
  MOD_RES (32)..(33): Xaa is C or S

SEQ ID NO: 56764 - protein, 38 aa, Artificial Sequence; identical to SEQ ID NO: 3793
  GFR-binding peptide
  MOD_RES (33)..(34): Xaa is C or S
  MOD_RES (11)..(12)..(13)..(14)..(15): Xaa is A or G
  MOD_RES (16)..(17)..(18)..(19): Xaa is A or G or is absent

SEQ ID NO: 56765 - protein, 38 aa, Artificial Sequence; identical to SEQ ID NO: 12169
  GFR-binding peptide
  MOD_RES (1)..(35)..(36): Xaa is C or S
  MOD_RES (13)..(14)..(15)..(16)..(17): Xaa is A or G
  MOD_RES (18)..(19)..(20)..(21): Xaa is A or G or is absent

SEQ ID NO: 56766 - protein, 36 aa, Artificial Sequence; identical to SEQ ID NO: 2811
  GFR-binding peptide
  MOD_RES (2)..(36): Xaa is C or S
  MOD_RES (14)..(15)..(16)..(17)..(18): Xaa is A or G
  MOD_RES (19)..(20)..(21)..(22): Xaa is A or G or is absent

SEQ ID NO: 56767 - protein, 40 aa, Artificial Sequence; identical to SEQ ID NO: 3795
  GFR-binding peptide
  MOD_RES (2)..(36)..(37): Xaa is C or S
  MOD_RES (14)..(15)..(16)..(17)..(18): Xaa is A or G
  MOD_RES (19)..(20)..(21)..(22): Xaa is A or G or is absent

SEQ ID NO: 56768 - protein, 37 aa, Artificial Sequence; identical to SEQ ID NO: 26850
  GFR-binding peptide
  MOD_RES (1)..(35)..(36): Xaa is C or S
  MOD_RES (13)..(14)..(15)..(16)..(17): Xaa is A or G
  MOD_RES (18)..(19)..(20)..(21): Xaa is A or G or is absent

SEQ ID NO: 56769 - protein, 39 aa, Artificial Sequence; identical to SEQ ID NO: 4744
  GFR-binding peptide
  MOD_RES (2)..(34)..(35): Xaa is C or S

SEQ ID NO: 56770 - protein, 39 aa, Artificial Sequence; identical to SEQ ID NO: 23807
  GFR-binding peptide
  MOD_RES (1)..(35)..(36): Xaa is C or S
  MOD_RES (13)..(14)..(15)..(16)..(17): Xaa is A or G
  MOD_RES (18)..(19)..(20)..(21): Xaa is A or G or is absent

SEQ ID NO: 56771 - protein, 37 aa, Artificial Sequence; identical to SEQ ID NO: 11220
  GFR-binding peptide
  MOD_RES (33)..(34): Xaa is C or S
  MOD_RES (11)..(12)..(13)..(14)..(15): Xaa is A or G
  MOD_RES (16)..(17)..(18)..(19): Xaa is A or G or is absent

SEQ ID NO: 56772 - protein, 40 aa, Artificial Sequence; identical to SEQ ID NO: 26856
  GFR-binding peptide
  MOD_RES (1)..(3)..(37)..(38): Xaa is C or S
  MOD_RES (15)..(16)..(17)..(18)..(19): Xaa is A or G
  MOD_RES (20)..(21)..(22)..(23): Xaa is A or G or is absent

SEQ ID NO: 56773 - protein, 36 aa, Artificial Sequence
  GFR-binding peptide
  MOD_RES (34)..(35): Xaa is C or S
  MOD_RES (12)..(13)..(14)..(15)..(16): Xaa is A or G
  MOD_RES (17)..(18)..(19)..(20): Xaa is A or G or is absent
RDVVMGRYKKLXXXXXXXXXFYLMSIANMKTPTXXP

SEQ ID NO: 56774 - protein, 39 aa, Artificial Sequence; identical to SEQ ID NO: 3801
  GFR-binding peptide
  MOD_RES (33)..(34): Xaa is C or S
  MOD_RES (11)..(12)..(13)..(14)..(15): Xaa is A or G
  MOD_RES (16)..(17)..(18)..(19): Xaa is A or G or is absent

SEQ ID NO: 56775 - protein, 33 aa, Artificial Sequence; identical to SEQ ID NO: 2819
  GFR-binding peptide
  MOD_RES (32)..(33): Xaa is C or S

SEQ ID NO: 56776 - protein, 35 aa, Artificial Sequence
  GFR-binding peptide
  MOD_RES (1)..(3): Xaa is C or S
  MOD_RES (14)..(15)..(16)..(17)..(18): Xaa is A or G
  MOD_RES (19)..(20)..(21)..(22): Xaa is A or G or is absent
XGXEEVIMRYKKLXXXXXXXXXFYLMSIANTKVPA

SEQ ID NO: 56777 - protein, 39 aa, Artificial Sequence; identical to SEQ ID NO: 25827
  GFR-binding peptide
  MOD_RES (2)..(4)..(38)..(39): Xaa is C or S
  MOD_RES (16)..(17)..(18)..(19)..(20): Xaa is A or G
  MOD_RES (21)..(22)..(23)..(24): Xaa is A or G or is absent

SEQ ID NO: 56778 - protein, 41 aa, Artificial Sequence; identical to SEQ ID NO: 5731
  GFR-binding peptide
  MOD_RES (1)..(3)..(35)..(36): Xaa is C or S

SEQ ID NO: 56779 - protein, 38 aa, Artificial Sequence; identical to SEQ ID NO: 5734
  GFR-binding peptide
  MOD_RES (2)..(4)..(36)..(37): Xaa is C or S

SEQ ID NO: 56780 - protein, 39 aa, Artificial Sequence; identical to SEQ ID NO: 4751
  GFR-binding peptide
  MOD_RES (1)..(3)..(37)..(38): Xaa is C or S
  MOD_RES (15)..(16)..(17)..(18)..(19): Xaa is A or G
  MOD_RES (20)..(21)..(22)..(23): Xaa is A or G or is absent

SEQ ID NO: 56781 - protein, 37 aa, Artificial Sequence
  GFR-binding peptide
  MOD_RES (33)..(34): Xaa is C or S
  MOD_RES (11)..(12)..(13)..(14)..(15): Xaa is A or G
  MOD_RES (16)..(17)..(18)..(19): Xaa is A or G or is absent
DVVMGRYKKLXXXXXXXXXFYLMSIANMKTPTXXPGA

SEQ ID NO: 56782 - protein, 37 aa, Artificial Sequence; identical to SEQ ID NO: 4757
  GFR-binding peptide
  MOD_RES (1)..(3)..(35)..(36): Xaa is C or S

SEQ ID NO: 56783 - protein, 34 aa, Artificial Sequence; identical to SEQ ID NO: 4758
  GFR-binding peptide
  MOD_RES (1)..(3): Xaa is C or S

SEQ ID NO: 56784 - protein, 35 aa, Artificial Sequence; identical to SEQ ID NO: 5742
  GFR-binding peptide
  MOD_RES (2)..(4): Xaa is C or S

SEQ ID NO: 56785 - protein, 36 aa, Artificial Sequence; identical to SEQ ID NO: 25841
  GFR-binding peptide
  MOD_RES (2)..(4)..(36): Xaa is C or S

SEQ ID NO: 56786 - protein, 38 aa, Artificial Sequence; identical to SEQ ID NO: 25842
  GFR-binding peptide
  MOD_RES (33)..(34): Xaa is C or S
  MOD_RES (11)..(12)..(13)..(14)..(15): Xaa is A or G
  MOD_RES (16)..(17)..(18)..(19): Xaa is A or G or is absent

SEQ ID NO: 56787 - protein, 34 aa, Artificial Sequence; identical to SEQ ID NO: 4761
  GFR-binding peptide
  MOD_RES (31)..(32): Xaa is C or S

SEQ ID NO: 56788 - protein, 40 aa, Artificial Sequence; identical to SEQ ID NO: 2847
  GFR-binding peptide
  MOD_RES (2)..(36): Xaa is C or S
  MOD_RES (14)..(15)..(16)..(17)..(18): Xaa is A or G
  MOD_RES (19)..(20)..(21)..(22): Xaa is A or G or is absent

SEQ ID NO: 56789 - protein, 31 aa, Artificial Sequence; identical to SEQ ID NO: 3821
  GFR-binding peptide

SEQ ID NO: 56790 - protein, 40 aa, Artificial Sequence; identical to SEQ ID NO: 2850
  GFR-binding peptide
  MOD_RES (1)..(3)..(37)..(38): Xaa is C or S
  MOD_RES (15)..(16)..(17)..(18)..(19): Xaa is A or G
  MOD_RES (20)..(21)..(22)..(23): Xaa is A or G or is absent

SEQ ID NO: 56791 - protein, 39 aa, Artificial Sequence; identical to SEQ ID NO: 5750
  GFR-binding peptide
  MOD_RES (1)..(35)..(36): Xaa is C or S
  MOD_RES (13)..(14)..(15)..(16)..(17): Xaa is A or G
  MOD_RES (18)..(19)..(20)..(21): Xaa is A or G or is absent

SEQ ID NO: 56792 - protein, 36 aa, Artificial Sequence; identical to SEQ ID NO: 3823
  GFR-binding peptide
  MOD_RES (2)..(4)..(36): Xaa is C or S

SEQ ID NO: 56793 - protein, 42 aa, Artificial Sequence
  GFR-binding peptide
  MOD_RES (2)..(4)..(36)..(37): Xaa is C or S
SXGXRDVVMGRYKKLIIQQKDNFYLMSIANMKTPTXXPGASG

SEQ ID NO: 56794 - protein, 35 aa, Artificial Sequence; identical to SEQ ID NO: 3825
  GFR-binding peptide
  MOD_RES (31)..(32): Xaa is C or S

SEQ ID NO: 56795 - protein, 43 aa, Artificial Sequence; identical to SEQ ID NO: 2853
  GFR-binding peptide
  MOD_RES (1)..(3)..(37)..(38): Xaa is C or S
  MOD_RES (15)..(16)..(17)..(18)..(19): Xaa is A or G
  MOD_RES (20)..(21)..(22)..(23): Xaa is A or G or is absent

SEQ ID NO: 56796 - protein, 36 aa, Artificial Sequence
  GFR-binding peptide
  MOD_RES (1)..(3)..(36): Xaa is C or S
  MOD_RES (14)..(15)..(16)..(17)..(18): Xaa is A or G
  MOD_RES (19)..(20)..(21)..(22): Xaa is A or G or is absent
XGXEEVIMRYKKLXXXXXXXXXFYLMSIANTKVPAX

SEQ ID NO: 56797 - protein, 36 aa, Artificial Sequence
  GFR-binding peptide
  MOD_RES (2)..(33)..(34): Xaa is C or S
GXEEVIMRYKKLLLVRGNDFYLMSIANTKVPAXXTS

SEQ ID NO: 56798 - protein, 38 aa, Artificial Sequence; identical to SEQ ID NO: 10322
  GFR-binding peptide
  MOD_RES (2)..(4)..(38): Xaa is C or S
  MOD_RES (16)..(17)..(18)..(19)..(20): Xaa is A or G
  MOD_RES (21)..(22)..(23)..(24): Xaa is A or G or is absent

SEQ ID NO: 56799 - protein, 42 aa, Artificial Sequence
  GFR-binding peptide
  MOD_RES (2)..(36)..(37): Xaa is C or S
  MOD_RES (14)..(15)..(16)..(17)..(18): Xaa is A or G
  MOD_RES (19)..(20)..(21)..(22): Xaa is A or G or is absent
GXSRVVMNRYKKLXXXXXXXXXFYLVSIANLKTPAXXPKPVH

SEQ ID NO: 56800 - protein, 37 aa, Artificial Sequence; identical to SEQ ID NO: 5758
  GFR-binding peptide
  MOD_RES (1)..(3): Xaa is C or S
  MOD_RES (16)..(17)..(18)..(19)..(20): Xaa is A or G
  MOD_RES (21)..(22)..(23)..(24): Xaa is A or G or is absent

SEQ ID NO: 56801 - protein, 38 aa, Artificial Sequence; identical to SEQ ID NO: 5759
  GFR-binding peptide
  MOD_RES (1)..(35)..(36): Xaa is C or S
  MOD_RES (13)..(14)..(15)..(16)..(17): Xaa is A or G
  MOD_RES (18)..(19)..(20)..(21): Xaa is A or G or is absent

SEQ ID NO: 56802 - protein, 33 aa, Artificial Sequence; identical to SEQ ID NO: 5760
  GFR-binding peptide
  MOD_RES (31)..(31): Xaa is C or S

SEQ ID NO: 56803 - protein, 38 aa, Artificial Sequence; identical to SEQ ID NO: 2855
  GFR-binding peptide
  MOD_RES (2)..(4)..(36)..(37): Xaa is C or S

SEQ ID NO: 56804 - protein, 37 aa, Artificial Sequence; identical to SEQ ID NO: 12213
  GFR-binding peptide
  MOD_RES (2)..(34)..(35): Xaa is C or S

SEQ ID NO: 56805 - protein, 32 aa, Artificial Sequence; identical to SEQ ID NO: 3829
  GFR-binding peptide
  MOD_RES (1)..(1): Xaa is C or S

SEQ ID NO: 56806 - protein, 37 aa, Artificial Sequence
  GFR-binding peptide
  MOD_RES (2)..(35)..(36): Xaa is C or S
  MOD_RES (13)..(14)..(15)..(16)..(17): Xaa is A or G
  MOD_RES (18)..(19)..(20)..(21): Xaa is A or G or is absent
GXEEVIMRYKKLXXXXXXXXXFYLMSIANTKVPAXXT

SEQ ID NO: 56807 - protein, 35 aa, Artificial Sequence
  GFR-binding peptide
  MOD_RES (2)..(2): Xaa is C or S
  MOD_RES (14)..(15)..(16)..(17)..(18): Xaa is A or G
  MOD_RES (19)..(20)..(21)..(22): Xaa is A or G or is absent
GXRDVVMGRYKKLXXXXXXXXXFYLMSIANMKTPT

SEQ ID NO: 56808 - protein, 40 aa, Artificial Sequence
  GFR-binding peptide
  MOD_RES (2)..(34)..(35): Xaa is C or S
GXRDVVMGRYKKLIIQQKDNFYLMSIANMKTPTXXPGASG

SEQ ID NO: 56809 - protein, 39 aa, Artificial Sequence; identical to SEQ ID NO: 26901
  GFR-binding peptide
  MOD_RES (2)..(34)..(35): Xaa is C or S

SEQ ID NO: 56810 - protein, 33 aa, Artificial Sequence
  GFR-binding peptide
  MOD_RES (33)..(33): Xaa is C or S
  MOD_RES (11)..(12)..(13)..(14)..(15): Xaa is A or G
  MOD_RES (16)..(17)..(18)..(19): Xaa is A or G or is absent
EEVIMRYKKLXXXXXXXXXFYLMSIANTKVPAX

SEQ ID NO: 56811 - protein, 40 aa, Artificial Sequence; identical to SEQ ID NO: 2862
  GFR-binding peptide
  MOD_RES (1)..(3)..(37)..(38): Xaa is C or S
  MOD_RES (15)..(16)..(17)..(18)..(19): Xaa is A or G
  MOD_RES (20)..(21)..(22)..(23): Xaa is A or G or is absent

SEQ ID NO: 56812 - protein, 44 aa, Artificial Sequence; identical to SEQ ID NO: 2864
  GFR-binding peptide
  MOD_RES (2)..(4)..(38): Xaa is C or S
  MOD_RES (16)..(17)..(18)..(19)..(20): Xaa is A or G
  MOD_RES (21)..(22)..(23)..(24): Xaa is A or G or is absent

SEQ ID NO: 56813 - protein, 35 aa, Artificial Sequence; identical to SEQ ID NO: 4789
  GFR-binding peptide
  MOD_RES (1)..(35): Xaa is C or S
  MOD_RES (13)..(14)..(15)..(16)..(17): Xaa is A or G
  MOD_RES (18)..(19)..(20)..(21): Xaa is A or G or is absent

SEQ ID NO: 56814 - protein, 34 aa, Artificial Sequence; identical to SEQ ID NO: 5769
  GFR-binding peptide
  MOD_RES (1)..(33)..(34): Xaa is C or S

SEQ ID NO: 56815 - protein, 34 aa, Artificial Sequence; identical to SEQ ID NO: 12224
  GFR-binding peptide
  MOD_RES (31)..(32): Xaa is C or S

SEQ ID NO: 56816 - protein, 37 aa, Artificial Sequence; identical to SEQ ID NO: 5772
  GFR-binding peptide
  MOD_RES (33)..(33): Xaa is C or S
  MOD_RES (11)..(12)..(13)..(14)..(15): Xaa is A or G
  MOD_RES (16)..(17)..(18)..(19): Xaa is A or G or is absent

SEQ ID NO: 56817 - protein, 35 aa, Artificial Sequence
  GFR-binding peptide
  MOD_RES (34)..(35): Xaa is C or S
  MOD_RES (12)..(13)..(14)..(15)..(16): Xaa is A or G
  MOD_RES (17)..(18)..(19)..(20): Xaa is A or G or is absent
RDVVMGRYKKLXXXXXXXXXFYLMSIANMKTPTXX

SEQ ID NO: 56818 - protein, 39 aa, Artificial Sequence; identical to SEQ ID NO: 4798
  GFR-binding peptide
  MOD_RES (34)..(34): Xaa is C or S
  MOD_RES (12)..(13)..(14)..(15)..(16): Xaa is A or G
  MOD_RES (17)..(18)..(19)..(20): Xaa is A or G or is absent

SEQ ID NO: 56819 - protein, 39 aa, Artificial Sequence; identical to SEQ ID NO: 23864
  GFR-binding peptide
  MOD_RES (1)..(33)..(34): Xaa is C or S

SEQ ID NO: 56820 - protein, 36 aa, Artificial Sequence; identical to SEQ ID NO: 5774
  GFR-binding peptide
  MOD_RES (2)..(35)..(36): Xaa is C or S

SEQ ID NO: 56821 - protein, 34 aa, Artificial Sequence; identical to SEQ ID NO: 2876
  GFR-binding peptide
  MOD_RES (32)..(33): Xaa is C or S

SEQ ID NO: 56822 - protein, 42 aa, Artificial Sequence; identical to SEQ ID NO: 23866
  GFR-binding peptide
  MOD_RES (2)..(4)..(38)..(39): Xaa is C or S
  MOD_RES (16)..(17)..(18)..(19)..(20): Xaa is A or G
  MOD_RES (21)..(22)..(23)..(24): Xaa is A or G or is absent

SEQ ID NO: 56823 - protein, 38 aa, Artificial Sequence; identical to SEQ ID NO: 24894
  GFR-binding peptide
  MOD_RES (33)..(34): Xaa is C or S
  MOD_RES (11)..(12)..(13)..(14)..(15): Xaa is A or G
  MOD_RES (16)..(17)..(18)..(19): Xaa is A or G or is absent

SEQ ID NO: 56824 - protein, 37 aa, Artificial Sequence
  GFR-binding peptide
  MOD_RES (31)..(32): Xaa is C or S
RVVMNRYKKLIVNSSDDFYLVSIANLKTPAXXPKPVH

SEQ ID NO: 56825 - protein, 38 aa, Artificial Sequence; identical to SEQ ID NO: 24899
  GFR-binding peptide
  MOD_RES (1)..(35)..(36): Xaa is C or S
  MOD_RES (13)..(14)..(15)..(16)..(17): Xaa is A or G
  MOD_RES (18)..(19)..(20)..(21): Xaa is A or G or is absent

SEQ ID NO: 56826 - protein, 39 aa, Artificial Sequence; identical to SEQ ID NO: 25890
  GFR-binding peptide
  MOD_RES (2)..(36)..(37): Xaa is C or S
  MOD_RES (14)..(15)..(16)..(17)..(18): Xaa is A or G
  MOD_RES (19)..(20)..(21)..(22): Xaa is A or G or is absent

SEQ ID NO: 56827 - protein, 32 aa, Artificial Sequence; identical to SEQ ID NO: 5781
  GFR-binding peptide
  MOD_RES (31)..(31): Xaa is C or S

SEQ ID NO: 56828 - protein, 36 aa, Artificial Sequence
  GFR-binding peptide
  MOD_RES (1)..(3)..(35)..(36): Xaa is C or S
XGXRDVVMGRYKKLIIQQKDNFYLMSIANMKTPTXX

SEQ ID NO: 56829 - protein, 36 aa, Artificial Sequence; identical to SEQ ID NO: 3849
  GFR-binding peptide
  MOD_RES (33)..(34): Xaa is C or S
  MOD_RES (11)..(12)..(13)..(14)..(15): Xaa is A or G
  MOD_RES (16)..(17)..(18)..(19): Xaa is A or G or is absent

SEQ ID NO: 56830 - protein, 42 aa, Artificial Sequence; identical to SEQ ID NO: 5785
  GFR-binding peptide
  MOD_RES (2)..(36): Xaa is C or S
  MOD_RES (14)..(15)..(16)..(17)..(18): Xaa is A or G
  MOD_RES (19)..(20)..(21)..(22): Xaa is A or G or is absent

SEQ ID NO: 56831 - protein, 37 aa, Artificial Sequence; identical to SEQ ID NO: 4813
  GFR-binding peptide
  MOD_RES (1)..(3)..(35)..(36): Xaa is C or S

SEQ ID NO: 56832 - protein, 40 aa, Artificial Sequence; identical to SEQ ID NO: 2883
  GFR-binding peptide
  MOD_RES (2)..(4)..(38)..(39): Xaa is C or S
  MOD_RES (16)..(17)..(18)..(19)..(20): Xaa is A or G
  MOD_RES (21)..(22)..(23)..(24): Xaa is A or G or is absent

SEQ ID NO: 56833 - protein, 36 aa, Artificial Sequence; identical to SEQ ID NO: 5788
  GFR-binding peptide
  MOD_RES (34)..(35): Xaa is C or S
  MOD_RES (12)..(13)..(14)..(15)..(16): Xaa is A or G
  MOD_RES (17)..(18)..(19)..(20): Xaa is A or G or is absent

SEQ ID NO: 56834 - protein, 36 aa, Artificial Sequence; identical to SEQ ID NO: 2886
  GFR-binding peptide
  MOD_RES (1)..(3)..(35)..(36): Xaa is C or S

SEQ ID NO: 56835 - protein, 38 aa, Artificial Sequence; identical to SEQ ID NO: 11278
  GFR-binding peptide
  MOD_RES (2)..(36)..(37): Xaa is C or S
  MOD_RES (14)..(15)..(16)..(17)..(18): Xaa is A or G
  MOD_RES (19)..(20)..(21)..(22): Xaa is A or G or is absent

SEQ ID NO: 56836 - protein, 36 aa, Artificial Sequence; identical to SEQ ID NO: 2889
  GFR-binding peptide
  MOD_RES (1)..(3)..(35): Xaa is C or S

SEQ ID NO: 56837 - protein, 40 aa, Artificial Sequence; identical to SEQ ID NO: 4824
  GFR-binding peptide
  MOD_RES (1)..(36)..(37): Xaa is C or S
  MOD_RES (14)..(15)..(16)..(17)..(18): Xaa is A or G
  MOD_RES (19)..(20)..(21)..(22): Xaa is A or G or is absent

SEQ ID NO: 56838 - protein, 37 aa, Artificial Sequence; identical to SEQ ID NO: 4825
  GFR-binding peptide
  MOD_RES (32)..(33): Xaa is C or S

SEQ ID NO: 56839 - protein, 39 aa, Artificial Sequence; identical to SEQ ID NO: 4826
  GFR-binding peptide
  MOD_RES (2)..(35)..(36): Xaa is C or S

SEQ ID NO: 56840 - protein, 37 aa, Artificial Sequence; identical to SEQ ID NO: 3854
  GFR-binding peptide
  MOD_RES (1)..(35)..(36): Xaa is C or S
  MOD_RES (13)..(14)..(15)..(16)..(17): Xaa is A or G
  MOD_RES (18)..(19)..(20)..(21): Xaa is A or G or is absent

SEQ ID NO: 56841 - protein, 36 aa, Artificial Sequence; identical to SEQ ID NO: 4829
  GFR-binding peptide
  MOD_RES (2)..(34)..(35): Xaa is C or S

SEQ ID NO: 56842 - protein, 41 aa, Artificial Sequence
  GFR-binding peptide
  MOD_RES (1)..(35)..(36): Xaa is C or S
  MOD_RES (13)..(14)..(15)..(16)..(17): Xaa is A or G
  MOD_RES (18)..(19)..(20)..(21): Xaa is A or G or is absent
XSRVVMNRYKKLXXXXXXXXXFYLVSIANLKTPAXXPKPVH

SEQ ID NO: 56843 - protein, 36 aa, Artificial Sequence; identical to SEQ ID NO: 2897
  GFR-binding peptide
  MOD_RES (1)..(35)..(36): Xaa is C or S
  MOD_RES (13)..(14)..(15)..(16)..(17): Xaa is A or G
  MOD_RES (18)..(19)..(20)..(21): Xaa is A or G or is absent

SEQ ID NO: 56844 - protein, 39 aa, Artificial Sequence
  GFR-binding peptide
  MOD_RES (2)..(33)..(34): Xaa is C or S
GXEEVIMRYKKLLLVRGNDFYLMSIANTKVPAXXTSPVR

SEQ ID NO: 56845 - protein, 38 aa, Artificial Sequence; identical to SEQ ID NO: 3859
  GFR-binding peptide
  MOD_RES (34)..(35): Xaa is C or S
  MOD_RES (12)..(13)..(14)..(15)..(16): Xaa is A or G
  MOD_RES (17)..(18)..(19)..(20): Xaa is A or G or is absent

SEQ ID NO: 56846 - protein, 41 aa, Artificial Sequence; identical to SEQ ID NO: 3860
  GFR-binding peptide
  MOD_RES (2)..(4)..(38)..(39): Xaa is C or S
  MOD_RES (16)..(17)..(18)..(19)..(20): Xaa is A or G
  MOD_RES (21)..(22)..(23)..(24): Xaa is A or G or is absent

SEQ ID NO: 56847 - protein, 38 aa, Artificial Sequence; identical to SEQ ID NO: 10361
  GFR-binding peptide
  MOD_RES (32)..(33): Xaa is C or S

SEQ ID NO: 56848 - protein, 40 aa, Artificial Sequence; identical to SEQ ID NO: 3861
  GFR-binding peptide
  MOD_RES (34)..(35): Xaa is C or S
  MOD_RES (12)..(13)..(14)..(15)..(16): Xaa is A or G
  MOD_RES (17)..(18)..(19)..(20): Xaa is A or G or is absent

SEQ ID NO: 56849 - protein, 41 aa, Artificial Sequence; identical to SEQ ID NO: 2899
  GFR-binding peptide
  MOD_RES (2)..(4)..(36): Xaa is C or S

SEQ ID NO: 56850 - protein, 35 aa, Artificial Sequence; identical to SEQ ID NO: 3863
  GFR-binding peptide
  MOD_RES (1)..(33): Xaa is C or S

SEQ ID NO: 56851 - protein, 42 aa, Artificial Sequence; identical to SEQ ID NO: 3864
  GFR-binding peptide
  MOD_RES (2)..(36)..(37): Xaa is C or S
  MOD_RES (14)..(15)..(16)..(17)..(18): Xaa is A or G
  MOD_RES (19)..(20)..(21)..(22): Xaa is A or G or is absent

SEQ ID NO: 56852 - protein, 41 aa, Artificial Sequence; identical to SEQ ID NO: 13238
  GFR-binding peptide
  MOD_RES (1)..(3)..(35)..(36): Xaa is C or S

SEQ ID NO: 56853 - protein, 38 aa, Artificial Sequence
  GFR-binding peptide
  MOD_RES (33)..(34): Xaa is C or S
  MOD_RES (11)..(12)..(13)..(14)..(15): Xaa is A or G
  MOD_RES (16)..(17)..(18)..(19): Xaa is A or G or is absent
EEVIMRYKKLXXXXXXXXXFYLMSIANTKVPAXXTSPV

SEQ ID NO: 56854 - protein, 39 aa, Artificial Sequence
  GFR-binding peptide
  MOD_RES (33)..(34): Xaa is C or S
  MOD_RES (11)..(12)..(13)..(14)..(15): Xaa is A or G
  MOD_RES (16)..(17)..(18)..(19): Xaa is A or G or is absent
DVVMGRYKKLXXXXXXXXXFYLMSIANMKTPTXXPGASG

SEQ ID NO: 56855 - protein, 32 aa, Artificial Sequence; identical to SEQ ID NO: 2906
  GFR-binding peptide
  MOD_RES (32)..(32): Xaa is C or S

SEQ ID NO: 56856 - protein, 41 aa, Artificial Sequence; identical to SEQ ID NO: 3872
  GFR-binding peptide
  MOD_RES (2)..(36)..(37): Xaa is C or S
  MOD_RES (14)..(15)..(16)..(17)..(18): Xaa is A or G
  MOD_RES (19)..(20)..(21)..(22): Xaa is A or G or is absent

SEQ ID NO: 56857 - protein, 36 aa, Artificial Sequence; identical to SEQ ID NO: 25924
  GFR-binding peptide
  MOD_RES (1)..(3): Xaa is C or S
  MOD_RES (15)..(16)..(17)..(18)..(19): Xaa is A or G
  MOD_RES (20)..(21)..(22)..(23): Xaa is A or G or is absent

SEQ ID NO: 56858 - protein, 41 aa, Artificial Sequence; identical to SEQ ID NO: 5815
  GFR-binding peptide
  MOD_RES (2)..(4)..(38)..(39): Xaa is C or S
  MOD_RES (16)..(17)..(18)..(19)..(20): Xaa is A or G
  MOD_RES (21)..(22)..(23)..(24): Xaa is A or G or is absent

SEQ ID NO: 56859 - protein, 32 aa, Artificial Sequence; identical to SEQ ID NO: 4852
  GFR-binding peptide
  MOD_RES (32)..(32): Xaa is C or S

SEQ ID NO: 56860 - protein, 36 aa, Artificial Sequence; identical to SEQ ID NO: 3875
  GFR-binding peptide
  MOD_RES (2)..(4)..(36): Xaa is C or S

SEQ ID NO: 56861 - protein, 39 aa, Artificial Sequence
  GFR-binding peptide
  MOD_RES (1)..(33)..(34): Xaa is C or S
XSRVVMNRYKKLIVNSSDDFYLVSIANLKTPAXXPKPVH

SEQ ID NO: 56862 - protein, 33 aa, Artificial Sequence; identical to SEQ ID NO: 3877
  GFR-binding peptide
  MOD_RES (32)..(33): Xaa is C or S

SEQ ID NO: 56863 - protein, 38 aa, Artificial Sequence; identical to SEQ ID NO: 25927
  GFR-binding peptide
  MOD_RES (1)..(33)..(34): Xaa is C or S

SEQ ID NO: 56864 - protein, 36 aa, Artificial Sequence; identical to SEQ ID NO: 10376
  GFR-binding peptide
  MOD_RES (31)..(32): Xaa is C or S

SEQ ID NO: 56865 - protein, 39 aa, Artificial Sequence; identical to SEQ ID NO: 5820
  GFR-binding peptide
  MOD_RES (2)..(36)..(37): Xaa is C or S
  MOD_RES (14)..(15)..(16)..(17)..(18): Xaa is A or G
  MOD_RES (19)..(20)..(21)..(22): Xaa is A or G or is absent

SEQ ID NO: 56866 - protein, 37 aa, Artificial Sequence
  GFR-binding peptide
  MOD_RES (1)..(3)..(34)..(35): Xaa is C or S
XGXEEVIMRYKKLLLVRGNDFYLMSIANTKVPAXXTS

SEQ ID NO: 56867 - protein, 41 aa, Artificial Sequence; identical to SEQ ID NO: 4860
  GFR-binding peptide
  MOD_RES (1)..(35)..(36): Xaa is C or S
  MOD_RES (13)..(14)..(15)..(16)..(17): Xaa is A or G
  MOD_RES (18)..(19)..(20)..(21): Xaa is A or G or is absent

SEQ ID NO: 56868 - protein, 35 aa, Artificial Sequence; identical to SEQ ID NO: 10383
  GFR-binding peptide
  MOD_RES (2)..(2): Xaa is C or S
  MOD_RES (14)..(15)..(16)..(17)..(18): Xaa is A or G
  MOD_RES (19)..(20)..(21)..(22): Xaa is A or G or is absent

SEQ ID NO: 56869 - protein, 33 aa, Artificial Sequence; identical to SEQ ID NO: 2917
  GFR-binding peptide
  MOD_RES (33)..(33): Xaa is C or S

SEQ ID NO: 56870 - protein, 32 aa, Artificial Sequence; identical to SEQ ID NO: 4862
  GFR-binding peptide
  MOD_RES (32)..(32): Xaa is C or S

SEQ ID NO: 56871 - protein, 35 aa, Artificial Sequence; identical to SEQ ID NO: 2918
  GFR-binding peptide
  MOD_RES (33)..(34): Xaa is C or S
  MOD_RES (11)..(12)..(13)..(14)..(15): Xaa is A or G
  MOD_RES (16)..(17)..(18)..(19): Xaa is A or G or is absent

SEQ ID NO: 56872 - protein, 40 aa, Artificial Sequence
  GFR-binding peptide
  MOD_RES (2)..(4)..(37)..(38): Xaa is C or S
  MOD_RES (15)..(16)..(17)..(18)..(19): Xaa is A or G
  MOD_RES (20)..(21)..(22)..(23): Xaa is A or G or is absent
LXGXEEVIMRYKKLXXXXXXXXXFYLMSIANTKVPAXXTS

SEQ ID NO: 56873 - protein, 36 aa, Artificial Sequence; identical to SEQ ID NO: 3882
  GFR-binding peptide
  MOD_RES (31)..(32): Xaa is C or S

SEQ ID NO: 56874 - protein, 34 aa, Artificial Sequence; identical to SEQ ID NO: 5826
  GFR-binding peptide
  MOD_RES (32)..(33): Xaa is C or S

SEQ ID NO: 56875 - protein, 33 aa, Artificial Sequence
  GFR-binding peptide
  MOD_RES (31)..(32): Xaa is C or S
EEVIMRYKKLLLVRGNDFYLMSIANTKVPAXXT

SEQ ID NO: 56876 - protein, 40 aa, Artificial Sequence; identical to SEQ ID NO: 2919
  GFR-binding peptide
  MOD_RES (1)..(35)..(36): Xaa is C or S
  MOD_RES (13)..(14)..(15)..(16)..(17): Xaa is A or G
  MOD_RES (18)..(19)..(20)..(21): Xaa is A or G or is absent

SEQ ID NO: 56877 - protein, 37 aa, Artificial Sequence; identical to SEQ ID NO: 2920
  GFR-binding peptide
  MOD_RES (32)..(33): Xaa is C or S

SEQ ID NO: 56878 - protein, 37 aa, Artificial Sequence; identical to SEQ ID NO: 4867
  GFR-binding peptide
  MOD_RES (2)..(4): Xaa is C or S
  MOD_RES (16)..(17)..(18)..(19)..(20): Xaa is A or G
  MOD_RES (21)..(22)..(23)..(24): Xaa is A or G or is absent

SEQ ID NO: 56879 - protein, 36 aa, Artificial Sequence; identical to SEQ ID NO: 4869
  GFR-binding peptide
  MOD_RES (1)..(3)..(36): Xaa is C or S

SEQ ID NO: 56880 - protein, 39 aa, Artificial Sequence; identical to SEQ ID NO: 2922
  GFR-binding peptide
  MOD_RES (2)..(4)..(38)..(39): Xaa is C or S
  MOD_RES (16)..(17)..(18)..(19)..(20): Xaa is A or G
  MOD_RES (21)..(22)..(23)..(24): Xaa is A or G or is absent

SEQ ID NO: 56881 - protein, 39 aa, Artificial Sequence; identical to SEQ ID NO: 23921
  GFR-binding peptide
  MOD_RES (34)..(35): Xaa is C or S
  MOD_RES (12)..(13)..(14)..(15)..(16): Xaa is A or G
  MOD_RES (17)..(18)..(19)..(20): Xaa is A or G or is absent

SEQ ID NO: 56882 - protein, 40 aa, Artificial Sequence; identical to SEQ ID NO: 4870
  GFR-binding peptide
  MOD_RES (2)..(34)..(35): Xaa is C or S

SEQ ID NO: 56883 - protein, 39 aa, Artificial Sequence; identical to SEQ ID NO: 4871
  GFR-binding peptide
  MOD_RES (2)..(4)..(36)..(37): Xaa is C or S

SEQ ID NO: 56884 - protein, 43 aa, Artificial Sequence
  GFR-binding peptide
  MOD_RES (2)..(4)..(38)..(39): Xaa is C or S
  MOD_RES (16)..(17)..(18)..(19)..(20): Xaa is A or G
  MOD_RES (21)..(22)..(23)..(24): Xaa is A or G or is absent
SXGXRDVVMGRYKKLXXXXXXXXXFYLMSIANMKTPTXXPGAS

SEQ ID NO: 56885 - protein, 36 aa, Artificial Sequence; identical to SEQ ID NO: 5831
  GFR-binding peptide
  MOD_RES (2)..(2): Xaa is C or S
  MOD_RES (15)..(16)..(17)..(18)..(19): Xaa is A or G
  MOD_RES (20)..(21)..(22)..(23): Xaa is A or G or is absent

SEQ ID NO: 56886 - protein, 36 aa, Artificial Sequence; identical to SEQ ID NO: 23928
  GFR-binding peptide
  MOD_RES (1)..(3)..(35)..(36): Xaa is C or S

SEQ ID NO: 56887 - protein, 33 aa, Artificial Sequence; identical to SEQ ID NO: 3886
  GFR-binding peptide
  MOD_RES (2)..(2): Xaa is C or S

SEQ ID NO: 56888 - protein, 35 aa, Artificial Sequence
  GFR-binding peptide
  MOD_RES (1)..(35): Xaa is C or S
  MOD_RES (13)..(14)..(15)..(16)..(17): Xaa is A or G
  MOD_RES (18)..(19)..(20)..(21): Xaa is A or G or is absent
XRDVVMGRYKKLXXXXXXXXXFYLMSIANMKTPTX

SEQ ID NO: 56889 - protein, 40 aa, Artificial Sequence; identical to SEQ ID NO: 3887
  GFR-binding peptide
  MOD_RES (35)..(36): Xaa is C or S
  MOD_RES (13)..(14)..(15)..(16)..(17): Xaa is A or G
  MOD_RES (18)..(19)..(20)..(21): Xaa is A or G or is absent

SEQ ID NO: 56890 - protein, 36 aa, Artificial Sequence; identical to SEQ ID NO: 5835
  GFR-binding peptide
  MOD_RES (31)..(31): Xaa is C or S

SEQ ID NO: 56891 - protein, 41 aa, Artificial Sequence; identical to SEQ ID NO: 26962
  GFR-binding peptide
  MOD_RES (1)..(3)..(35)..(36): Xaa is C or S

SEQ ID NO: 56892 - protein, 41 aa, Artificial Sequence; identical to SEQ ID NO: 25946
  GFR-binding peptide
  MOD_RES (2)..(4)..(36)..(37): Xaa is C or S

SEQ ID NO: 56893 - protein, 34 aa, Artificial Sequence; identical to SEQ ID NO: 13270
  GFR-binding peptide
  MOD_RES (34)..(34): Xaa is C or S
  MOD_RES (12)..(13)..(14)..(15)..(16): Xaa is A or G
  MOD_RES (17)..(18)..(19)..(20): Xaa is A or G or is absent

SEQ ID NO: 56894 - protein, 37 aa, Artificial Sequence; identical to SEQ ID NO: 2931
  GFR-binding peptide
  MOD_RES (2)..(4): Xaa is C or S
  MOD_RES (16)..(17)..(18)..(19)..(20): Xaa is A or G
  MOD_RES (21)..(22)..(23)..(24): Xaa is A or G or is absent

SEQ ID NO: 56895 - protein, 38 aa, Artificial Sequence
  GFR-binding peptide
  MOD_RES (1)..(3)..(34)..(35): Xaa is C or S
XGXEEVIMRYKKLLLVRGNDFYLMSIANTKVPAXXTSP

SEQ ID NO: 56896 - protein, 34 aa, Artificial Sequence; identical to SEQ ID NO: 3896
  GFR-binding peptide
  MOD_RES (1)..(3): Xaa is C or S

SEQ ID NO: 56897 - protein, 39 aa, Artificial Sequence; identical to SEQ ID NO: 13275
  GFR-binding peptide
  MOD_RES (1)..(33)..(34): Xaa is C or S

SEQ ID NO: 56898 - protein, 36 aa, Artificial Sequence; identical to SEQ ID NO: 2936
  GFR-binding peptide
  MOD_RES (34)..(35): Xaa is C or S
  MOD_RES (12)..(13)..(14)..(15)..(16): Xaa is A or G
  MOD_RES (17)..(18)..(19)..(20): Xaa is A or G or is absent

SEQ ID NO: 56899 - protein, 37 aa, Artificial Sequence; identical to SEQ ID NO: 2938
  GFR-binding peptide
  MOD_RES (1)..(33)..(34): Xaa is C or S

SEQ ID NO: 56900 - protein, 42 aa, Artificial Sequence; identical to SEQ ID NO: 3898
  GFR-binding peptide
  MOD_RES (2)..(4)..(36)..(37): Xaa is C or S

SEQ ID NO: 56901 - protein, 39 aa, Artificial Sequence; identical to SEQ ID NO: 5846
  GFR-binding peptide
  MOD_RES (2)..(4)..(38): Xaa is C or S
  MOD_RES (16)..(17)..(18)..(19)..(20): Xaa is A or G
  MOD_RES (21)..(22)..(23)..(24): Xaa is A or G or is absent

SEQ ID NO: 56902 - protein, 39 aa, Artificial Sequence; identical to SEQ ID NO: 5849
  GFR-binding peptide
  MOD_RES (2)..(34)..(35): Xaa is C or S

SEQ ID NO: 56903 - protein, 36 aa, Artificial Sequence; identical to SEQ ID NO: 3899
  GFR-binding peptide
  MOD_RES (2)..(34)..(35): Xaa is C or S

SEQ ID NO: 56904 - protein, 41 aa, Artificial Sequence; identical to SEQ ID NO: 4876
  GFR-binding peptide
  MOD_RES (1)..(3)..(35)..(36): Xaa is C or S

SEQ ID NO: 56905 - protein, 40 aa, Artificial Sequence; identical to SEQ ID NO: 4878
  GFR-binding peptide
  MOD_RES (2)..(4)..(36)..(37): Xaa is C or S

SEQ ID NO: 56906 - protein, 34 aa, Artificial Sequence
  GFR-binding peptide
  MOD_RES (2)..(2): Xaa is C or S
  MOD_RES (13)..(14)..(15)..(16)..(17): Xaa is A or G
  MOD_RES (18)..(19)..(20)..(21): Xaa is A or G or is absent
GXEEVIMRYKKLXXXXXXXXXFYLMSIANTKVPA

SEQ ID NO: 56907 - protein, 37 aa, Artificial Sequence
  GFR-binding peptide
  MOD_RES (1)..(32)..(33): Xaa is C or S
XEEVIMRYKKLLLVRGNDFYLMSIANTKVPAXXTSPV

SEQ ID NO: 56908 - protein, 32 aa, Artificial Sequence; identical to SEQ ID NO: 24983
  GFR-binding peptide
  MOD_RES (1)..(1): Xaa is C or S

SEQ ID NO: 56909 - protein, 34 aa, Artificial Sequence; identical to SEQ ID NO: 2947
  GFR-binding peptide
  MOD_RES (1)..(1): Xaa is C or S
  MOD_RES (13)..(14)..(15)..(16)..(17): Xaa is A or G
  MOD_RES (18)..(19)..(20)..(21): Xaa is A or G or is absent

SEQ ID NO: 56910 - protein, 37 aa, Artificial Sequence; identical to SEQ ID NO: 5853
  GFR-binding peptide
  MOD_RES (32)..(33): Xaa is C or S

SEQ ID NO: 56911 - protein, 37 aa, Artificial Sequence; identical to SEQ ID NO: 26986
  GFR-binding peptide
  MOD_RES (32)..(33): Xaa is C or S

SEQ ID NO: 56912 - protein, 35 aa, Artificial Sequence; identical to SEQ ID NO: 2950
  GFR-binding peptide
  MOD_RES (1)..(33)..(34): Xaa is C or S

SEQ ID NO: 56913 - protein, 39 aa, Artificial Sequence; identical to SEQ ID NO: 4885
  GFR-binding peptide
  MOD_RES (2)..(4)..(36)..(37): Xaa is C or S

SEQ ID NO: 56914 - protein, 39 aa, Artificial Sequence; identical to SEQ ID NO: 2951
  GFR-binding peptide
  MOD_RES (2)..(36): Xaa is C or S
  MOD_RES (14)..(15)..(16)..(17)..(18): Xaa is A or G
  MOD_RES (19)..(20)..(21)..(22): Xaa is A or G or is absent

SEQ ID NO: 56915 - protein, 41 aa, Artificial Sequence; identical to SEQ ID NO: 5860
  GFR-binding peptide
  MOD_RES (2)..(4)..(38)..(39): Xaa is C or S
  MOD_RES (16)..(17)..(18)..(19)..(20): Xaa is A or G
  MOD_RES (21)..(22)..(23)..(24): Xaa is A or G or is absent

SEQ ID NO: 56916 - protein, 37 aa, Artificial Sequence; identical to SEQ ID NO: 5861
  GFR-binding peptide
  MOD_RES (31)..(32): Xaa is C or S

SEQ ID NO: 56917 - protein, 35 aa, Artificial Sequence; identical to SEQ ID NO: 4888
  GFR-binding peptide
  MOD_RES (1)..(35): Xaa is C or S
  MOD_RES (13)..(14)..(15)..(16)..(17): Xaa is A or G
  MOD_RES (18)..(19)..(20)..(21): Xaa is A or G or is absent

SEQ ID NO: 56918 - protein, 37 aa, Artificial Sequence; identical to SEQ ID NO: 3907
  GFR-binding peptide
  MOD_RES (1)..(3)..(37): Xaa is C or S
  MOD_RES (15)..(16)..(17)..(18)..(19): Xaa is A or G
  MOD_RES (20)..(21)..(22)..(23): Xaa is A or G or is absent

SEQ ID NO: 56919 - protein, 31 aa, Artificial Sequence; identical to SEQ ID NO: 5867
  GFR-binding peptide

SEQ ID NO: 56920 - protein, 37 aa, Artificial Sequence; identical to SEQ ID NO: 26993
  GFR-binding peptide
  MOD_RES (33)..(34): Xaa is C or S
  MOD_RES (11)..(12)..(13)..(14)..(15): Xaa is A or G
  MOD_RES (16)..(17)..(18)..(19): Xaa is A or G or is absent

SEQ ID NO: 56921 - protein, 40 aa, Artificial Sequence; identical to SEQ ID NO: 5868
  GFR-binding peptide
  MOD_RES (2)..(4)..(38)..(39): Xaa is C or S
  MOD_RES (16)..(17)..(18)..(19)..(20): Xaa is A or G
  MOD_RES (21)..(22)..(23)..(24): Xaa is A or G or is absent

SEQ ID NO: 56922 - protein, 34 aa, Artificial Sequence; identical to SEQ ID NO: 3908
  GFR-binding peptide
  MOD_RES (32)..(33): Xaa is C or S

SEQ ID NO: 56923 - protein, 41 aa, Artificial Sequence
  GFR-binding peptide
  MOD_RES (2)..(4)..(36)..(37): Xaa is C or S
SXGXRDVVMGRYKKLIIQQKDNFYLMSIANMKTPTXXPGAS

SEQ ID NO: 56924 - protein, 33 aa, Artificial Sequence
  GFR-binding peptide
  MOD_RES (2)..(2): Xaa is C or S
GXRDVVMGRYKKLIIQQKDNFYLMSIANMKTPT

SEQ ID NO: 56925 - protein, 37 aa, Artificial Sequence
  GFR-binding peptide
  MOD_RES (32)..(33): Xaa is C or S
RDVVMGRYKKLIIQQKDNFYLMSIANMKTPTXXPGAS

SEQ ID NO: 56926 - protein, 41 aa, Artificial Sequence; identical to SEQ ID NO: 11333
  GFR-binding peptide
  MOD_RES (2)..(4)..(38)..(39): Xaa is C or S
  MOD_RES (16)..(17)..(18)..(19)..(20): Xaa is A or G
  MOD_RES (21)..(22)..(23)..(24): Xaa is A or G or is absent

SEQ ID NO: 56927 - protein, 40 aa, Artificial Sequence; identical to SEQ ID NO: 3914
  GFR-binding peptide
  MOD_RES (2)..(35)..(36): Xaa is C or S

SEQ ID NO: 56928 - protein, 37 aa, Artificial Sequence; identical to SEQ ID NO: 5871
  GFR-binding peptide
  MOD_RES (1)..(33)..(34): Xaa is C or S

SEQ ID NO: 56929 - protein, 39 aa, Artificial Sequence; identical to SEQ ID NO: 5872
  GFR-binding peptide
  MOD_RES (1)..(33): Xaa is C or S

SEQ ID NO: 56930 - protein, 32 aa, Artificial Sequence; identical to SEQ ID NO: 5873
  GFR-binding peptide
  MOD_RES (31)..(32): Xaa is C or S

SEQ ID NO: 56931 - protein, 37 aa, Artificial Sequence; identical to SEQ ID NO: 3920
  GFR-binding peptide
  MOD_RES (32)..(32): Xaa is C or S

SEQ ID NO: 56932 - protein, 43 aa, Artificial Sequence; identical to SEQ ID NO: 3922
  GFR-binding peptide
  MOD_RES (2)..(4)..(38): Xaa is C or S
  MOD_RES (16)..(17)..(18)..(19)..(20): Xaa is A or G
  MOD_RES (21)..(22)..(23)..(24): Xaa is A or G or is absent

SEQ ID NO: 56933 - protein, 34 aa, Artificial Sequence; identical to SEQ ID NO: 5878
  GFR-binding peptide
  MOD_RES (1)..(1): Xaa is C or S
  MOD_RES (13)..(14)..(15)..(16)..(17): Xaa is A or G
  MOD_RES (18)..(19)..(20)..(21): Xaa is A or G or is absent

SEQ ID NO: 56934 - protein, 37 aa, Artificial Sequence; identical to SEQ ID NO: 25985
  GFR-binding peptide
  MOD_RES (1)..(33)..(34): Xaa is C or S

SEQ ID NO: 56935 - protein, 38 aa, Artificial Sequence; identical to SEQ ID NO: 3927
  GFR-binding peptide
  MOD_RES (33)..(34): Xaa is C or S
  MOD_RES (11)..(12)..(13)..(14)..(15): Xaa is A or G
  MOD_RES (16)..(17)..(18)..(19): Xaa is A or G or is absent

SEQ ID NO: 56936 - protein, 35 aa, Artificial Sequence; identical to SEQ ID NO: 5885
  GFR-binding peptide
  MOD_RES (2)..(34)..(35): Xaa is C or S

SEQ ID NO: 56937 - protein, 32 aa, Artificial Sequence
  GFR-binding peptide
  MOD_RES (2)..(2): Xaa is C or S
GXEEVIMRYKKLLLVRGNDFYLMSIANTKVPA

SEQ ID NO: 56938 - protein, 41 aa, Artificial Sequence; identical to SEQ ID NO: 3928
  GFR-binding peptide
  MOD_RES (2)..(36): Xaa is C or S
  MOD_RES (14)..(15)..(16)..(17)..(18): Xaa is A or G
  MOD_RES (19)..(20)..(21)..(22): Xaa is A or G or is absent

SEQ ID NO: 56939 - protein, 36 aa, Artificial Sequence; identical to SEQ ID NO: 5886
  GFR-binding peptide
  MOD_RES (2)..(4)..(36): Xaa is C or S

SEQ ID NO: 56940 - protein, 35 aa, Artificial Sequence; identical to SEQ ID NO: 3930
  GFR-binding peptide
  MOD_RES (1)..(33)..(34): Xaa is C or S

SEQ ID NO: 56941 - protein, 35 aa, Artificial Sequence; identical to SEQ ID NO: 3931
  GFR-binding peptide
  MOD_RES (33)..(34): Xaa is C or S
  MOD_RES (11)..(12)..(13)..(14)..(15): Xaa is A or G
  MOD_RES (16)..(17)..(18)..(19): Xaa is A or G or is absent

SEQ ID NO: 56942 - protein, 36 aa, Artificial Sequence; identical to SEQ ID NO: 23971
  GFR-binding peptide
  MOD_RES (34)..(35): Xaa is C or S
  MOD_RES (12)..(13)..(14)..(15)..(16): Xaa is A or G
  MOD_RES (17)..(18)..(19)..(20): Xaa is A or G or is absent

SEQ ID NO: 56943 - protein, 36 aa, Artificial Sequence; identical to SEQ ID NO: 25010
  GFR-binding peptide
  MOD_RES (2)..(4)..(36): Xaa is C or S

SEQ ID NO: 56944 - protein, 35 aa, Artificial Sequence; identical to SEQ ID NO: 25995
  GFR-binding peptide
  MOD_RES (1)..(35): Xaa is C or S
  MOD_RES (13)..(14)..(15)..(16)..(17): Xaa is A or G
  MOD_RES (18)..(19)..(20)..(21): Xaa is A or G or is absent

SEQ ID NO: 56945 - protein, 36 aa, Artificial Sequence; identical to SEQ ID NO: 10433
  GFR-binding peptide
  MOD_RES (32)..(33): Xaa is C or S

SEQ ID NO: 56946 - protein, 35 aa, Artificial Sequence; identical to SEQ ID NO: 11350
  GFR-binding peptide
  MOD_RES (32)..(33): Xaa is C or S

SEQ ID NO: 56947 - protein, 41 aa, Artificial Sequence; identical to SEQ ID NO: 13317
  GFR-binding peptide
  MOD_RES (1)..(3)..(37)..(38): Xaa is C or S
  MOD_RES (15)..(16)..(17)..(18)..(19): Xaa is A or G
  MOD_RES (20)..(21)..(22)..(23): Xaa is A or G or is absent

SEQ ID NO: 56948 - protein, 42 aa, Artificial Sequence
  GFR-binding peptide
  MOD_RES (1)..(3)..(37)..(38): Xaa is C or S
  MOD_RES (15)..(16)..(17)..(18)..(19): Xaa is A or G
  MOD_RES (20)..(21)..(22)..(23): Xaa is A or G or is absent
XGXRDVVMGRYKKLXXXXXXXXXFYLMSIANMKTPTXXPGAS

SEQ ID NO: 56949 - protein, 40 aa, Artificial Sequence
  GFR-binding peptide
  MOD_RES (1)..(34)..(35): Xaa is C or S
  MOD_RES (12)..(13)..(14)..(15)..(16): Xaa is A or G
  MOD_RES (17)..(18)..(19)..(20): Xaa is A or G or is absent
XEEVIMRYKKLXXXXXXXXXFYLMSIANTKVPAXXTSPVR

SEQ ID NO: 56950 - protein, 44 aa, Artificial Sequence; identical to SEQ ID NO: 26002
  GFR-binding peptide
  MOD_RES (2)..(4)..(38)..(39): Xaa is C or S
  MOD_RES (16)..(17)..(18)..(19)..(20): Xaa is A or G
  MOD_RES (21)..(22)..(23)..(24): Xaa is A or G or is absent

SEQ ID NO: 56951 - protein, 30 aa, Artificial Sequence; identical to SEQ ID NO: 2986
  GFR-binding peptide

SEQ ID NO: 56952 - protein, 39 aa, Artificial Sequence; identical to SEQ ID NO: 25023
  GFR-binding peptide
  MOD_RES (34)..(35): Xaa is C or S
  MOD_RES (12)..(13)..(14)..(15)..(16): Xaa is A or G
  MOD_RES (17)..(18)..(19)..(20): Xaa is A or G or is absent

SEQ ID NO: 56953 - protein, 40 aa, Artificial Sequence; identical to SEQ ID NO: 2989
  GFR-binding peptide
  MOD_RES (1)..(35)..(36): Xaa is C or S
  MOD_RES (13)..(14)..(15)..(16)..(17): Xaa is A or G
  MOD_RES (18)..(19)..(20)..(21): Xaa is A or G or is absent

SEQ ID NO: 56954 - protein, 42 aa, Artificial Sequence; identical to SEQ ID NO: 5901
  GFR-binding peptide
  MOD_RES (2)..(4)..(38)..(39): Xaa is C or S
  MOD_RES (16)..(17)..(18)..(19)..(20): Xaa is A or G
  MOD_RES (21)..(22)..(23)..(24): Xaa is A or G or is absent

SEQ ID NO: 56955 - protein, 39 aa, Artificial Sequence; identical to SEQ ID NO: 4920
  GFR-binding peptide
  MOD_RES (2)..(4)..(38)..(39): Xaa is C or S
  MOD_RES (16)..(17)..(18)..(19)..(20): Xaa is A or G
  MOD_RES (21)..(22)..(23)..(24): Xaa is A or G or is absent

SEQ ID NO: 56956 - protein, 36 aa, Artificial Sequence; identical to SEQ ID NO: 10446
  GFR-binding peptide
  MOD_RES (1)..(35)..(36): Xaa is C or S
  MOD_RES (13)..(14)..(15)..(16)..(17): Xaa is A or G
  MOD_RES (18)..(19)..(20)..(21): Xaa is A or G or is absent

SEQ ID NO: 56957 - protein, 36 aa, Artificial Sequence
  GFR-binding peptide
  MOD_RES (2)..(34)..(35): Xaa is C or S
GXRDVVMGRYKKLIIQQKDNFYLMSIANMKTPTXXP

SEQ ID NO: 56958 - protein, 37 aa, Artificial Sequence; identical to SEQ ID NO: 26017
  GFR-binding peptide
  MOD_RES (33)..(34): Xaa is C or S
  MOD_RES (11)..(12)..(13)..(14)..(15): Xaa is A or G
  MOD_RES (16)..(17)..(18)..(19): Xaa is A or G or is absent

SEQ ID NO: 56959 - protein, 34 aa, Artificial Sequence; identical to SEQ ID NO: 10448
  GFR-binding peptide
  MOD_RES (33)..(34): Xaa is C or S
  MOD_RES (11)..(12)..(13)..(14)..(15): Xaa is A or G
  MOD_RES (16)..(17)..(18)..(19): Xaa is A or G or is absent

SEQ ID NO: 56960 - protein, 39 aa, Artificial Sequence; identical to SEQ ID NO: 5907
  GFR-binding peptide
  MOD_RES (2)..(4)..(36)..(37): Xaa is C or S

SEQ ID NO: 56961 - protein, 37 aa, Artificial Sequence; identical to SEQ ID NO: 27026
  GFR-binding peptide
  MOD_RES (2)..(4)..(36)..(37): Xaa is C or S

SEQ ID NO: 56962 - protein, 39 aa, Artificial Sequence; identical to SEQ ID NO: 3949
  GFR-binding peptide
  MOD_RES (2)..(36)..(37): Xaa is C or S
  MOD_RES (14)..(15)..(16)..(17)..(18): Xaa is A or G
  MOD_RES (19)..(20)..(21)..(22): Xaa is A or G or is absent

SEQ ID NO: 56963 - protein, 34 aa, Artificial Sequence; identical to SEQ ID NO: 3950
  GFR-binding peptide
  MOD_RES (1)..(3): Xaa is C or S

SEQ ID NO: 56964 - protein, 40 aa, Artificial Sequence; identical to SEQ ID NO: 5912
  GFR-binding peptide
  MOD_RES (2)..(4)..(38)..(39): Xaa is C or S
  MOD_RES (16)..(17)..(18)..(19)..(20): Xaa is A or G
  MOD_RES (21)..(22)..(23)..(24): Xaa is A or G or is absent

SEQ ID NO: 56965 - protein, 37 aa, Artificial Sequence; identical to SEQ ID NO: 23996
  GFR-binding peptide
  MOD_RES (2)..(34)..(35): Xaa is C or S

SEQ ID NO: 56966 - protein, 37 aa, Artificial Sequence
  GFR-binding peptide
  MOD_RES (2)..(4)..(37): Xaa is C or S
  MOD_RES (15)..(16)..(17)..(18)..(19): Xaa is A or G
  MOD_RES (20)..(21)..(22)..(23): Xaa is A or G or is absent
LXGXEEVIMRYKKLXXXXXXXXXFYLMSIANTKVPAX

SEQ ID NO: 56967 - protein, 38 aa, Artificial Sequence; identical to SEQ ID NO: 26024
  GFR-binding peptide
  MOD_RES (2)..(4)..(38): Xaa is C or S
  MOD_RES (16)..(17)..(18)..(19)..(20): Xaa is A or G
  MOD_RES (21)..(22)..(23)..(24): Xaa is A or G or is absent

SEQ ID NO: 56968 - protein, 39 aa, Artificial Sequence; identical to SEQ ID NO: 3955
  GFR-binding peptide
  MOD_RES (2)..(4)..(36)..(37): Xaa is C or S

SEQ ID NO: 56969 - protein, 38 aa, Artificial Sequence; identical to SEQ ID NO: 5916
  GFR-binding peptide
  MOD_RES (32)..(33): Xaa is C or S

SEQ ID NO: 56970 - protein, 39 aa, Artificial Sequence; identical to SEQ ID NO: 5917
  GFR-binding peptide
  MOD_RES (34)..(35): Xaa is C or S
  MOD_RES (12)..(13)..(14)..(15)..(16): Xaa is A or G
  MOD_RES (17)..(18)..(19)..(20): Xaa is A or G or is absent

SEQ ID NO: 56971 - protein, 40 aa, Artificial Sequence
  GFR-binding peptide
  MOD_RES (2)..(4)..(35)..(36): Xaa is C or S
LXGXEEVIMRYKKLLLVRGNDFYLMSIANTKVPAXXTSPV

SEQ ID NO: 56972 - protein, 37 aa, Artificial Sequence; identical to SEQ ID NO: 11377
  GFR-binding peptide
  MOD_RES (2)..(4): Xaa is C or S
  MOD_RES (16)..(17)..(18)..(19)..(20): Xaa is A or G
  MOD_RES (21)..(22)..(23)..(24): Xaa is A or G or is absent

SEQ ID NO: 56973 - protein, 38 aa, Artificial Sequence
  GFR-binding peptide
  MOD_RES (2)..(4)..(38): Xaa is C or S
  MOD_RES (16)..(17)..(18)..(19)..(20): Xaa is A or G
  MOD_RES (21)..(22)..(23)..(24): Xaa is A or G or is absent
SXGXRDVVMGRYKKLXXXXXXXXXFYLMSIANMKTPTX

SEQ ID NO: 56974 - protein, 38 aa, Artificial Sequence; identical to SEQ ID NO: 4934
  GFR-binding peptide
  MOD_RES (1)..(3)..(38): Xaa is C or S
  MOD_RES (16)..(17)..(18)..(19)..(20): Xaa is A or G
  MOD_RES (21)..(22)..(23)..(24): Xaa is A or G or is absent

SEQ ID NO: 56975 - protein, 36 aa, Artificial Sequence; identical to SEQ ID NO: 4935
  GFR-binding peptide
  MOD_RES (1)..(3): Xaa is C or S
  MOD_RES (15)..(16)..(17)..(18)..(19): Xaa is A or G
  MOD_RES (20)..(21)..(22)..(23): Xaa is A or G or is absent

SEQ ID NO: 56976 - protein, 38 aa, Artificial Sequence; identical to SEQ ID NO: 3959
  GFR-binding peptide
  MOD_RES (2)..(4)..(36): Xaa is C or S

SEQ ID NO: 56977 - protein, 40 aa, Artificial Sequence; identical to SEQ ID NO: 5921
  GFR-binding peptide
  MOD_RES (2)..(36)..(37): Xaa is C or S
  MOD_RES (14)..(15)..(16)..(17)..(18): Xaa is A or G
  MOD_RES (19)..(20)..(21)..(22): Xaa is A or G or is absent

SEQ ID NO: 56978 - protein, 38 aa, Artificial Sequence; identical to SEQ ID NO: 25048
  GFR-binding peptide
  MOD_RES (34)..(35): Xaa is C or S
  MOD_RES (12)..(13)..(14)..(15)..(16): Xaa is A or G
  MOD_RES (17)..(18)..(19)..(20): Xaa is A or G or is absent

SEQ ID NO: 56979 - protein, 34 aa, Artificial Sequence; identical to SEQ ID NO: 3969
  GFR-binding peptide
  MOD_RES (1)..(33)..(34): Xaa is C or S

SEQ ID NO: 56980 - protein, 33 aa, Artificial Sequence; identical to SEQ ID NO: 3013
  GFR-binding peptide
  MOD_RES (2)..(2): Xaa is C or S

SEQ ID NO: 56981 - protein, 41 aa, Artificial Sequence; identical to SEQ ID NO: 11391
  GFR-binding peptide
  MOD_RES (1)..(35)..(36): Xaa is C or S
  MOD_RES (13)..(14)..(15)..(16)..(17): Xaa is A or G
  MOD_RES (18)..(19)..(20)..(21): Xaa is A or G or is absent

SEQ ID NO: 56982 - protein, 35 aa, Artificial Sequence; identical to SEQ ID NO: 27041
  GFR-binding peptide
  MOD_RES (2)..(34)..(35): Xaa is C or S

SEQ ID NO: 56983 - protein, 37 aa, Artificial Sequence; identical to SEQ ID NO: 5928
  GFR-binding peptide
  MOD_RES (1)..(3)..(36)..(37): Xaa is C or S

SEQ ID NO: 56984 - protein, 39 aa, Artificial Sequence
  GFR-binding peptide
  MOD_RES (33)..(34): Xaa is C or S
  MOD_RES (11)..(12)..(13)..(14)..(15): Xaa is A or G
  MOD_RES (16)..(17)..(18)..(19): Xaa is A or G or is absent
EEVIMRYKKLXXXXXXXXXFYLMSIANTKVPAXXTSPVR

SEQ ID NO: 56985 - protein, 38 aa, Artificial Sequence; identical to SEQ ID NO: 3973
  GFR-binding peptide
  MOD_RES (2)..(34): Xaa is C or S

SEQ ID NO: 56986 - protein, 36 aa, Artificial Sequence; identical to SEQ ID NO: 13356
  GFR-binding peptide
  MOD_RES (1)..(33)..(34): Xaa is C or S

SEQ ID NO: 56987 - protein, 41 aa, Artificial Sequence; identical to SEQ ID NO: 5932
  GFR-binding peptide
  MOD_RES (2)..(4)..(36)..(37): Xaa is C or S

SEQ ID NO: 56988 - protein, 40 aa, Artificial Sequence; identical to SEQ ID NO: 5934
  GFR-binding peptide
  MOD_RES (1)..(34)..(35): Xaa is C or S

SEQ ID NO: 56989 - protein, 37 aa, Artificial Sequence; identical to SEQ ID NO: 5936
  GFR-binding peptide
  MOD_RES (1)..(36)..(37): Xaa is C or S
  MOD_RES (14)..(15)..(16)..(17)..(18): Xaa is A or G
  MOD_RES (19)..(20)..(21)..(22): Xaa is A or G or is absent

SEQ ID NO: 56990 - protein, 32 aa, Artificial Sequence; identical to SEQ ID NO: 5937
  GFR-binding peptide
  MOD_RES (32)..(32): Xaa is C or S

SEQ ID NO: 56991 - protein, 40 aa, Artificial Sequence; identical to SEQ ID NO: 12387
  GFR-binding peptide
  MOD_RES (2)..(36)..(37): Xaa is C or S
  MOD_RES (14)..(15)..(16)..(17)..(18): Xaa is A or G
  MOD_RES (19)..(20)..(21)..(22): Xaa is A or G or is absent

SEQ ID NO: 56992 - protein, 39 aa, Artificial Sequence
  GFR-binding peptide
  MOD_RES (2)..(34)..(35): Xaa is C or S
GXRDVVMGRYKKLIIQQKDNFYLMSIANMKTPTXXPGAS

SEQ ID NO: 56993 - protein, 37 aa, Artificial Sequence; identical to SEQ ID NO: 4955
  GFR-binding peptide
  MOD_RES (2)..(34)..(35): Xaa is C or S

SEQ ID NO: 56994 - protein, 41 aa, Artificial Sequence; identical to SEQ ID NO: 3981
  GFR-binding peptide
  MOD_RES (1)..(3)..(37)..(38): Xaa is C or S
  MOD_RES (15)..(16)..(17)..(18)..(19): Xaa is A or G
  MOD_RES (20)..(21)..(22)..(23): Xaa is A or G or is absent

SEQ ID NO: 56995 - protein, 33 aa, Artificial Sequence
  GFR-binding peptide
  MOD_RES (1)..(1): Xaa is C or S
  MOD_RES (12)..(13)..(14)..(15)..(16): Xaa is A or G
  MOD_RES (17)..(18)..(19)..(20): Xaa is A or G or is absent
XEEVIMRYKKLXXXXXXXXXFYLMSIANTKVPA

SEQ ID NO: 56996 - protein, 39 aa, Artificial Sequence
  GFR-binding peptide
  MOD_RES (1)..(3)..(34)..(35): Xaa is C or S
XGXEEVIMRYKKLLLVRGNDFYLMSIANTKVPAXXTSPV

SEQ ID NO: 56997 - protein, 36 aa, Artificial Sequence; identical to SEQ ID NO: 24023
  GFR-binding peptide
  MOD_RES (1)..(35)..(36): Xaa is C or S
  MOD_RES (13)..(14)..(15)..(16)..(17): Xaa is A or G
  MOD_RES (18)..(19)..(20)..(21): Xaa is A or G or is absent

SEQ ID NO: 56998 - protein, 41 aa, Artificial Sequence
  GFR-binding peptide
  MOD_RES (1)..(35)..(36): Xaa is C or S
  MOD_RES (13)..(14)..(15)..(16)..(17): Xaa is A or G
  MOD_RES (18)..(19)..(20)..(21): Xaa is A or G or is absent
XRDVVMGRYKKLXXXXXXXXXFYLMSIANMKTPTXXPGASG

SEQ ID NO: 56999 - protein, 35 aa, Artificial Sequence; identical to SEQ ID NO: 12395
  GFR-binding peptide
  MOD_RES (2)..(34)..(35): Xaa is C or S

SEQ ID NO: 57000 - protein, 43 aa, Artificial Sequence; identical to SEQ ID NO: 13372
  GFR-binding peptide
  MOD_RES (2)..(4)..(38)..(39): Xaa is C or S
  MOD_RES (16)..(17)..(18)..(19)..(20): Xaa is A or G
  MOD_RES (21)..(22)..(23)..(24): Xaa is A or G or is absent

SEQ ID NO: 57001 - protein, 35 aa, Artificial Sequence; identical to SEQ ID NO: 5948
  GFR-binding peptide
  MOD_RES (2)..(34): Xaa is C or S

SEQ ID NO: 57002 - protein, 38 aa, Artificial Sequence; identical to SEQ ID NO: 4964
  GFR-binding peptide
  MOD_RES (34)..(35): Xaa is C or S
  MOD_RES (12)..(13)..(14)..(15)..(16): Xaa is A or G
  MOD_RES (17)..(18)..(19)..(20): Xaa is A or G or is absent

SEQ ID NO: 57003 - protein, 30 aa, Artificial Sequence; identical to SEQ ID NO: 4966
  GFR-binding peptide

SEQ ID NO: 57004 - protein, 37 aa, Artificial Sequence
  GFR-binding peptide
  MOD_RES (2)..(4): Xaa is C or S
  MOD_RES (16)..(17)..(18)..(19)..(20): Xaa is A or G
  MOD_RES (21)..(22)..(23)..(24): Xaa is A or G or is absent
SXGXRDVVMGRYKKLXXXXXXXXXFYLMSIANMKTPT

SEQ ID NO: 57005 - protein, 35 aa, Artificial Sequence
  GFR-binding peptide
  MOD_RES (1)..(33)..(34): Xaa is C or S
XRDVVMGRYKKLIIQQKDNFYLMSIANMKTPTXXP

SEQ ID NO: 57006 - protein, 42 aa, Artificial Sequence; identical to SEQ ID NO: 25076
  GFR-binding peptide
  MOD_RES (2)..(4)..(36)..(37): Xaa is C or S

SEQ ID NO: 57007 - protein, 35 aa, Artificial Sequence; identical to SEQ ID NO: 3035
  GFR-binding peptide
  MOD_RES (33)..(33): Xaa is C or S
  MOD_RES (11)..(12)..(13)..(14)..(15): Xaa is A or G
  MOD_RES (16)..(17)..(18)..(19): Xaa is A or G or is absent

SEQ ID NO: 57008 - protein, 36 aa, Artificial Sequence; identical to SEQ ID NO: 26069
  GFR-binding peptide
  MOD_RES (34)..(35): Xaa is C or S
  MOD_RES (12)..(13)..(14)..(15)..(16): Xaa is A or G
  MOD_RES (17)..(18)..(19)..(20): Xaa is A or G or is absent

SEQ ID NO: 57009 - protein, 38 aa, Artificial Sequence; identical to SEQ ID NO: 4980
  GFR-binding peptide
  MOD_RES (32)..(33): Xaa is C or S

SEQ ID NO: 57010 - protein, 43 aa, Artificial Sequence; identical to SEQ ID NO: 4981
  GFR-binding peptide
  MOD_RES (1)..(3)..(37)..(38): Xaa is C or S
  MOD_RES (15)..(16)..(17)..(18)..(19): Xaa is A or G
  MOD_RES (20)..(21)..(22)..(23): Xaa is A or G or is absent

SEQ ID NO: 57011 - protein, 35 aa, Artificial Sequence
  GFR-binding peptide
  MOD_RES (2)..(33)..(34): Xaa is C or S
GXEEVIMRYKKLLLVRGNDFYLMSIANTKVPAXXT

SEQ ID NO: 57012 - protein, 38 aa, Artificial Sequence; identical to SEQ ID NO: 13382
  GFR-binding peptide
  MOD_RES (1)..(33)..(34): Xaa is C or S

SEQ ID NO: 57013 - protein, 36 aa, Artificial Sequence; identical to SEQ ID NO: 4000
  GFR-binding peptide
  MOD_RES (31)..(32): Xaa is C or S

SEQ ID NO: 57014 - protein, 35 aa, Artificial Sequence; identical to SEQ ID NO: 3042
  GFR-binding peptide
  MOD_RES (32)..(33): Xaa is C or S

SEQ ID NO: 57015 - protein, 36 aa, Artificial Sequence; identical to SEQ ID NO: 5961
  GFR-binding peptide
  MOD_RES (32)..(32): Xaa is C or S

SEQ ID NO: 57016 - protein, 38 aa, Artificial Sequence; identical to SEQ ID NO: 27078
  GFR-binding peptide
  MOD_RES (1)..(35)..(36): Xaa is C or S
  MOD_RES (13)..(14)..(15)..(16)..(17): Xaa is A or G
  MOD_RES (18)..(19)..(20)..(21): Xaa is A or G or is absent

SEQ ID NO: 57017 - protein, 38 aa, Artificial Sequence; identical to SEQ ID NO: 5963
  GFR-binding peptide
  MOD_RES (1)..(3)..(35): Xaa is C or S

SEQ ID NO: 57018 - protein, 38 aa, Artificial Sequence; identical to SEQ ID NO: 5964
  GFR-binding peptide
  MOD_RES (2)..(34)..(35): Xaa is C or S

SEQ ID NO: 57019 - protein, 38 aa, Artificial Sequence; identical to SEQ ID NO: 4984
  GFR-binding peptide
  MOD_RES (2)..(36)..(37): Xaa is C or S
  MOD_RES (14)..(15)..(16)..(17)..(18): Xaa is A or G
  MOD_RES (19)..(20)..(21)..(22): Xaa is A or G or is absent

SEQ ID NO: 57020 - protein, 34 aa, Artificial Sequence; identical to SEQ ID NO: 5966
  GFR-binding peptide
  MOD_RES (31)..(32): Xaa is C or S

SEQ ID NO: 57021 - protein, 41 aa, Artificial Sequence; identical to SEQ ID NO: 5967
  GFR-binding peptide
  MOD_RES (1)..(35)..(36): Xaa is C or S
  MOD_RES (13)..(14)..(15)..(16)..(17): Xaa is A or G
  MOD_RES (18)..(19)..(20)..(21): Xaa is A or G or is absent

SEQ ID NO: 57022 - protein, 37 aa, Artificial Sequence; identical to SEQ ID NO: 5968
  GFR-binding peptide
  MOD_RES (33)..(34): Xaa is C or S
  MOD_RES (11)..(12)..(13)..(14)..(15): Xaa is A or G
  MOD_RES (16)..(17)..(18)..(19): Xaa is A or G or is absent

SEQ ID NO: 57023 - protein, 32 aa, Artificial Sequence
  GFR-binding peptide
  MOD_RES (1)..(32): Xaa is C or S
XEEVIMRYKKLLLVRGNDFYLMSIANTKVPAX

SEQ ID NO: 57024 - protein, 39 aa, Artificial Sequence; identical to SEQ ID NO: 25087
  GFR-binding peptide
  MOD_RES (2)..(34)..(35): Xaa is C or S

SEQ ID NO: 57025 - protein, 36 aa, Artificial Sequence
  GFR-binding peptide
  MOD_RES (2)..(36): Xaa is C or S
  MOD_RES (14)..(15)..(16)..(17)..(18): Xaa is A or G
  MOD_RES (19)..(20)..(21)..(22): Xaa is A or G or is absent
GXRDVVMGRYKKLXXXXXXXXXFYLMSIANMKTPTX

SEQ ID NO: 57026 - protein, 39 aa, Artificial Sequence; identical to SEQ ID NO: 5973
  GFR-binding peptide
  MOD_RES (1)..(34)..(35): Xaa is C or S

SEQ ID NO: 57027 - protein, 38 aa, Artificial Sequence; identical to SEQ ID NO: 26081
  GFR-binding peptide
  MOD_RES (34)..(35): Xaa is C or S
  MOD_RES (12)..(13)..(14)..(15)..(16): Xaa is A or G
  MOD_RES (17)..(18)..(19)..(20): Xaa is A or G or is absent

SEQ ID NO: 57028 - protein, 36 aa, Artificial Sequence; identical to SEQ ID NO: 4988
  GFR-binding peptide
  MOD_RES (35)..(36): Xaa is C or S
  MOD_RES (13)..(14)..(15)..(16)..(17): Xaa is A or G
  MOD_RES (18)..(19)..(20)..(21): Xaa is A or G or is absent

SEQ ID NO: 57029 - protein, 38 aa, Artificial Sequence
  GFR-binding peptide
  MOD_RES (32)..(33): Xaa is C or S
SRVVMNRYKKLIVNSSDDFYLVSIANLKTPAXXPKPVH

SEQ ID NO: 57030 - protein, 40 aa, Artificial Sequence; identical to SEQ ID NO: 5981
  GFR-binding peptide
  MOD_RES (1)..(35)..(36): Xaa is C or S
  MOD_RES (13)..(14)..(15)..(16)..(17): Xaa is A or G
  MOD_RES (18)..(19)..(20)..(21): Xaa is A or G or is absent

SEQ ID NO: 57031 - protein, 35 aa, Artificial Sequence; identical to SEQ ID NO: 24056
  GFR-binding peptide
  MOD_RES (32)..(33): Xaa is C or S

SEQ ID NO: 57032 - protein, 40 aa, Artificial Sequence; identical to SEQ ID NO: 5982
  GFR-binding peptide
  MOD_RES (1)..(35): Xaa is C or S
  MOD_RES (13)..(14)..(15)..(16)..(17): Xaa is A or G
  MOD_RES (18)..(19)..(20)..(21): Xaa is A or G or is absent

SEQ ID NO: 57033 - protein, 41 aa, Artificial Sequence; identical to SEQ ID NO: 4010
  GFR-binding peptide
  MOD_RES (2)..(4)..(39)..(40): Xaa is C or S
  MOD_RES (17)..(18)..(19)..(20)..(21): Xaa is A or G
  MOD_RES (22)..(23)..(24)..(25): Xaa is A or G or is absent

SEQ ID NO: 57034 - protein, 39 aa, Artificial Sequence; identical to SEQ ID NO: 12430
  GFR-binding peptide
  MOD_RES (2)..(36)..(37): Xaa is C or S
  MOD_RES (14)..(15)..(16)..(17)..(18): Xaa is A or G
  MOD_RES (19)..(20)..(21)..(22): Xaa is A or G or is absent

SEQ ID NO: 57035 - protein, 37 aa, Artificial Sequence; identical to SEQ ID NO: 27099
  GFR-binding peptide
  MOD_RES (1)..(3)..(35)..(36): Xaa is C or S

SEQ ID NO: 57036 - protein, 36 aa, Artificial Sequence; identical to SEQ ID NO: 4011
  GFR-binding peptide
  MOD_RES (2)..(34)..(35): Xaa is C or S

SEQ ID NO: 57037 - protein, 37 aa, Artificial Sequence; identical to SEQ ID NO: 3057
  GFR-binding peptide
  MOD_RES (34)..(35): Xaa is C or S
  MOD_RES (12)..(13)..(14)..(15)..(16): Xaa is A or G
  MOD_RES (17)..(18)..(19)..(20): Xaa is A or G or is absent

SEQ ID NO: 57038 - protein, 40 aa, Artificial Sequence; identical to SEQ ID NO: 3058
  GFR-binding peptide
  MOD_RES (2)..(4)..(38)..(39): Xaa is C or S
  MOD_RES (16)..(17)..(18)..(19)..(20): Xaa is A or G
  MOD_RES (21)..(22)..(23)..(24): Xaa is A or G or is absent

SEQ ID NO: 57039 - protein, 41 aa, Artificial Sequence; identical to SEQ ID NO: 25094
  GFR-binding peptide
  MOD_RES (2)..(4)..(38)..(39): Xaa is C or S
  MOD_RES (16)..(17)..(18)..(19)..(20): Xaa is A or G
  MOD_RES (21)..(22)..(23)..(24): Xaa is A or G or is absent

SEQ ID NO: 57040 - protein, 39 aa, Artificial Sequence; identical to SEQ ID NO: 12433
  GFR-binding peptide
  MOD_RES (1)..(3)..(35)..(36): Xaa is C or S

SEQ ID NO: 57041 - protein, 34 aa, Artificial Sequence; identical to SEQ ID NO: 4992
  GFR-binding peptide
  MOD_RES (31)..(32): Xaa is C or S

SEQ ID NO: 57042 - protein, 42 aa, Artificial Sequence
  GFR-binding peptide
  MOD_RES (1)..(3)..(36)..(37): Xaa is C or S
  MOD_RES (14)..(15)..(16)..(17)..(18): Xaa is A or G
  MOD_RES (19)..(20)..(21)..(22): Xaa is A or G or is absent
XGXEEVIMRYKKLXXXXXXXXXFYLMSIANTKVPAXXTSPVR

SEQ ID NO: 57043 - protein, 32 aa, Artificial Sequence; identical to SEQ ID NO: 3061
  GFR-binding peptide
  MOD_RES (11)..(12)..(13)..(14)..(15): Xaa is A or G
  MOD_RES (16)..(17)..(18)..(19): Xaa is A or G or is absent

SEQ ID NO: 57044 - protein, 39 aa, Artificial Sequence; identical to SEQ ID NO: 4017
  GFR-binding peptide
  MOD_RES (1)..(35)..(36): Xaa is C or S
  MOD_RES (13)..(14)..(15)..(16)..(17): Xaa is A or G
  MOD_RES (18)..(19)..(20)..(21): Xaa is A or G or is absent

SEQ ID NO: 57045 - protein, 39 aa, Artificial Sequence; identical to SEQ ID NO: 11445
  GFR-binding peptide
  MOD_RES (2)..(4)..(36)..(37): Xaa is C or S

SEQ ID NO: 57046 - protein, 35 aa, Artificial Sequence; identical to SEQ ID NO: 3064
  GFR-binding peptide
  MOD_RES (32)..(33): Xaa is C or S

SEQ ID NO: 57047 - protein, 35 aa, Artificial Sequence; identical to SEQ ID NO: 5992
  GFR-binding peptide
  MOD_RES (31)..(32): Xaa is C or S

SEQ ID NO: 57048 - protein, 35 aa, Artificial Sequence
  GFR-binding peptide
  MOD_RES (2)..(4)..(35): Xaa is C or S
LXGXEEVIMRYKKLLLVRGNDFYLMSIANTKVPAX

SEQ ID NO: 57049 - protein, 33 aa, Artificial Sequence; identical to SEQ ID NO: 27106
  GFR-binding peptide
  MOD_RES (2)..(2): Xaa is C or S

SEQ ID NO: 57050 - protein, 41 aa, Artificial Sequence
  GFR-binding peptide
  MOD_RES (1)..(3)..(37)..(38): Xaa is C or S
  MOD_RES (15)..(16)..(17)..(18)..(19): Xaa is A or G
  MOD_RES (20)..(21)..(22)..(23): Xaa is A or G or is absent
XGXRDVVMGRYKKLXXXXXXXXXFYLMSIANMKTPTXXPGA

SEQ ID NO: 57051 - protein, 33 aa, Artificial Sequence; identical to SEQ ID NO: 26093
  GFR-binding peptide
  MOD_RES (1)..(33): Xaa is C or S

SEQ ID NO: 57052 - protein, 37 aa, Artificial Sequence; identical to SEQ ID NO: 4024
  GFR-binding peptide
  MOD_RES (1)..(3)..(35)..(36): Xaa is C or S

SEQ ID NO: 57053 - protein, 35 aa, Artificial Sequence; identical to SEQ ID NO: 5000
  GFR-binding peptide
  MOD_RES (2)..(34)..(35): Xaa is C or S

SEQ ID NO: 57054 - protein, 37 aa, Artificial Sequence; identical to SEQ ID NO: 4025
  GFR-binding peptide
  MOD_RES (2)..(36)..(37): Xaa is C or S
  MOD_RES (14)..(15)..(16)..(17)..(18): Xaa is A or G
  MOD_RES (19)..(20)..(21)..(22): Xaa is A or G or is absent

SEQ ID NO: 57055 - protein, 36 aa, Artificial Sequence; identical to SEQ ID NO: 3070
  GFR-binding peptide
  MOD_RES (2)..(34)..(35): Xaa is C or S

SEQ ID NO: 57056 - protein, 39 aa, Artificial Sequence; identical to SEQ ID NO: 5004
  GFR-binding peptide
  MOD_RES (1)..(3)..(35)..(36): Xaa is C or S

SEQ ID NO: 57057 - protein, 37 aa, Artificial Sequence; identical to SEQ ID NO: 10532
  GFR-binding peptide
  MOD_RES (34)..(35): Xaa is C or S
  MOD_RES (12)..(13)..(14)..(15)..(16): Xaa is A or G
  MOD_RES (17)..(18)..(19)..(20): Xaa is A or G or is absent

SEQ ID NO: 57058 - protein, 41 aa, Artificial Sequence; identical to SEQ ID NO: 3075
  GFR-binding peptide
  MOD_RES (2)..(37)..(38): Xaa is C or S
  MOD_RES (15)..(16)..(17)..(18)..(19): Xaa is A or G
  MOD_RES (20)..(21)..(22)..(23): Xaa is A or G or is absent

SEQ ID NO: 57059 - protein, 36 aa, Artificial Sequence; identical to SEQ ID NO: 26101
  GFR-binding peptide
  MOD_RES (33)..(34): Xaa is C or S
  MOD_RES (11)..(12)..(13)..(14)..(15): Xaa is A or G
  MOD_RES (16)..(17)..(18)..(19): Xaa is A or G or is absent

SEQ ID NO: 57060 - protein, 39 aa, Artificial Sequence; identical to SEQ ID NO: 6002
  GFR-binding peptide
  MOD_RES (2)..(34): Xaa is C or S

SEQ ID NO: 57061 - protein, 41 aa, Artificial Sequence; identical to SEQ ID NO: 4033
  GFR-binding peptide
  MOD_RES (1)..(3)..(37)..(38): Xaa is C or S
  MOD_RES (15)..(16)..(17)..(18)..(19): Xaa is A or G
  MOD_RES (20)..(21)..(22)..(23): Xaa is A or G or is absent

SEQ ID NO: 57062 - protein, 38 aa, Artificial Sequence; identical to SEQ ID NO: 11464
  GFR-binding peptide
  MOD_RES (2)..(4)..(36)..(37): Xaa is C or S

SEQ ID NO: 57063 - protein, 42 aa, Artificial Sequence
  GFR-binding peptide
  MOD_RES (2)..(4)..(36)..(37): Xaa is C or S
HXGXSRVVMNRYKKLIVNSSDDFYLVSIANLKTPAXXPKPVH

SEQ ID NO: 57064 - protein, 42 aa, Artificial Sequence; identical to SEQ ID NO: 6005
  GFR-binding peptide
  MOD_RES (2)..(36)..(37): Xaa is C or S
  MOD_RES (14)..(15)..(16)..(17)..(18): Xaa is A or G
  MOD_RES (19)..(20)..(21)..(22): Xaa is A or G or is absent

SEQ ID NO: 57065 - protein, 35 aa, Artificial Sequence; identical to SEQ ID NO: 13417
  GFR-binding peptide
  MOD_RES (34)..(35): Xaa is C or S
  MOD_RES (12)..(13)..(14)..(15)..(16): Xaa is A or G
  MOD_RES (17)..(18)..(19)..(20): Xaa is A or G or is absent

SEQ ID NO: 57066 - protein, 35 aa, Artificial Sequence; identical to SEQ ID NO: 6008
  GFR-binding peptide
  MOD_RES (1)..(3)..(35): Xaa is C or S

SEQ ID NO: 57067 - protein, 39 aa, Artificial Sequence; identical to SEQ ID NO: 5016
  GFR-binding peptide
  MOD_RES (1)..(35)..(36): Xaa is C or S
  MOD_RES (13)..(14)..(15)..(16)..(17): Xaa is A or G
  MOD_RES (18)..(19)..(20)..(21): Xaa is A or G or is absent

SEQ ID NO: 57068 - protein, 35 aa, Artificial Sequence
  GFR-binding peptide
  MOD_RES (31)..(32): Xaa is C or S
EEVIMRYKKLLLVRGNDFYLMSIANTKVPAXXTSP

SEQ ID NO: 57069 - protein, 43 aa, Artificial Sequence; identical to SEQ ID NO: 26109
  GFR-binding peptide
  MOD_RES (2)..(4)..(38)..(39): Xaa is C or S
  MOD_RES (16)..(17)..(18)..(19)..(20): Xaa is A or G
  MOD_RES (21)..(22)..(23)..(24): Xaa is A or G or is absent

SEQ ID NO: 57070 - protein, 43 aa, Artificial Sequence
  GFR-binding peptide
  MOD_RES (1)..(3)..(37)..(38): Xaa is C or S
  MOD_RES (15)..(16)..(17)..(18)..(19): Xaa is A or G
  MOD_RES (20)..(21)..(22)..(23): Xaa is A or G or is absent
XGXRDVVMGRYKKLXXXXXXXXXFYLMSIANMKTPTXXPGASG

SEQ ID NO: 57071 - protein, 40 aa, Artificial Sequence; identical to SEQ ID NO: 26111
  GFR-binding peptide
  MOD_RES (2)..(4)..(36)..(37): Xaa is C or S

SEQ ID NO: 57072 - protein, 35 aa, Artificial Sequence; identical to SEQ ID NO: 6013
  GFR-binding peptide
  MOD_RES (34)..(35): Xaa is C or S
  MOD_RES (12)..(13)..(14)..(15)..(16): Xaa is A or G
  MOD_RES (17)..(18)..(19)..(20): Xaa is A or G or is absent

SEQ ID NO: 57073 - protein, 36 aa, Artificial Sequence; identical to SEQ ID NO: 25118
  GFR-binding peptide
  MOD_RES (2)..(36): Xaa is C or S
  MOD_RES (14)..(15)..(16)..(17)..(18): Xaa is A or G
  MOD_RES (19)..(20)..(21)..(22): Xaa is A or G or is absent

SEQ ID NO: 57074 - protein, 39 aa, Artificial Sequence; identical to SEQ ID NO: 25121
  GFR-binding peptide
  MOD_RES (1)..(3)..(35)..(36): Xaa is C or S

SEQ ID NO: 57075 - protein, 39 aa, Artificial Sequence; identical to SEQ ID NO: 13426
  GFR-binding peptide
  MOD_RES (1)..(35)..(36): Xaa is C or S
  MOD_RES (13)..(14)..(15)..(16)..(17): Xaa is A or G
  MOD_RES (18)..(19)..(20)..(21): Xaa is A or G or is absent

SEQ ID NO: 57076 - protein, 39 aa, Artificial Sequence; identical to SEQ ID NO: 3096
  GFR-binding peptide
  MOD_RES (2)..(4)..(36): Xaa is C or S

SEQ ID NO: 57077 - protein, 36 aa, Artificial Sequence; identical to SEQ ID NO: 5030
  GFR-binding peptide
  MOD_RES (33)..(34): Xaa is C or S
  MOD_RES (11)..(12)..(13)..(14)..(15): Xaa is A or G
  MOD_RES (16)..(17)..(18)..(19): Xaa is A or G or is absent

SEQ ID NO: 57078 - protein, 42 aa, Artificial Sequence
  GFR-binding peptide
  MOD_RES (2)..(4)..(37)..(38): Xaa is C or S
  MOD_RES (15)..(16)..(17)..(18)..(19): Xaa is A or G
  MOD_RES (20)..(21)..(22)..(23): Xaa is A or G or is absent
LXGXEEVIMRYKKLXXXXXXXXXFYLMSIANTKVPAXXTSPV

SEQ ID NO: 57079 - protein, 37 aa, Artificial Sequence; identical to SEQ ID NO: 3099
  GFR-binding peptide
  MOD_RES (31)..(31): Xaa is C or S

SEQ ID NO: 57080 - protein, 37 aa, Artificial Sequence; identical to SEQ ID NO: 3101
  GFR-binding peptide
  MOD_RES (1)..(3)..(35)..(36): Xaa is C or S

SEQ ID NO: 57081 - protein, 41 aa, Artificial Sequence; identical to SEQ ID NO: 5035
  GFR-binding peptide
  MOD_RES (2)..(4)..(38)..(39): Xaa is C or S
  MOD_RES (16)..(17)..(18)..(19)..(20): Xaa is A or G
  MOD_RES (21)..(22)..(23)..(24): Xaa is A or G or is absent

SEQ ID NO: 57082 - protein, 39 aa, Artificial Sequence; identical to SEQ ID NO: 4054
  GFR-binding peptide
  MOD_RES (33)..(34): Xaa is C or S
  MOD_RES (11)..(12)..(13)..(14)..(15): Xaa is A or G
  MOD_RES (16)..(17)..(18)..(19): Xaa is A or G or is absent

SEQ ID NO: 57083 - protein, 42 aa, Artificial Sequence; identical to SEQ ID NO: 4055
  GFR-binding peptide
  MOD_RES (1)..(36)..(37): Xaa is C or S
  MOD_RES (14)..(15)..(16)..(17)..(18): Xaa is A or G
  MOD_RES (19)..(20)..(21)..(22): Xaa is A or G or is absent

SEQ ID NO: 57084 - protein, 43 aa, Artificial Sequence
  GFR-binding peptide
  MOD_RES (2)..(4)..(37)..(38): Xaa is C or S
  MOD_RES (15)..(16)..(17)..(18)..(19): Xaa is A or G
  MOD_RES (20)..(21)..(22)..(23): Xaa is A or G or is absent
LXGXEEVIMRYKKLXXXXXXXXXFYLMSIANTKVPAXXTSPVR

SEQ ID NO: 57085 - protein, 37 aa, Artificial Sequence; identical to SEQ ID NO: 3104
  GFR-binding peptide
  MOD_RES (31)..(32): Xaa is C or S

SEQ ID NO: 57086 - protein, 38 aa, Artificial Sequence; identical to SEQ ID NO: 4058
  GFR-binding peptide
  MOD_RES (2)..(4)..(36)..(37): Xaa is C or S

SEQ ID NO: 57087 - protein, 38 aa, Artificial Sequence; identical to SEQ ID NO: 5040
  GFR-binding peptide
  MOD_RES (2)..(4)..(37)..(38): Xaa is C or S

SEQ ID NO: 57088 - protein, 39 aa, Artificial Sequence; identical to SEQ ID NO: 3110
  GFR-binding peptide
  MOD_RES (1)..(3)..(35)..(36): Xaa is C or S

SEQ ID NO: 57089 - protein, 34 aa, Artificial Sequence; identical to SEQ ID NO: 6037
  GFR-binding peptide
  MOD_RES (34)..(34): Xaa is C or S
  MOD_RES (12)..(13)..(14)..(15)..(16): Xaa is A or G
  MOD_RES (17)..(18)..(19)..(20): Xaa is A or G or is absent

SEQ ID NO: 57090 - protein, 41 aa, Artificial Sequence; identical to SEQ ID NO: 6038
  GFR-binding peptide
  MOD_RES (1)..(35): Xaa is C or S
  MOD_RES (13)..(14)..(15)..(16)..(17): Xaa is A or G
  MOD_RES (18)..(19)..(20)..(21): Xaa is A or G or is absent

SEQ ID NO: 57091 - protein, 37 aa, Artificial Sequence; identical to SEQ ID NO: 5044
  GFR-binding peptide
  MOD_RES (32)..(33): Xaa is C or S

SEQ ID NO: 57092 - protein, 39 aa, Artificial Sequence; identical to SEQ ID NO: 6040
  GFR-binding peptide
  MOD_RES (1)..(3)..(37)..(38): Xaa is C or S
  MOD_RES (15)..(16)..(17)..(18)..(19): Xaa is A or G
  MOD_RES (20)..(21)..(22)..(23): Xaa is A or G or is absent

SEQ ID NO: 57093 - protein, 38 aa, Artificial Sequence; identical to SEQ ID NO: 5046
  GFR-binding peptide
  MOD_RES (33)..(33): Xaa is C or S
  MOD_RES (11)..(12)..(13)..(14)..(15): Xaa is A or G
  MOD_RES (16)..(17)..(18)..(19): Xaa is A or G or is absent

SEQ ID NO: 57094 - protein, 35 aa, Artificial Sequence
  GFR-binding peptide
  MOD_RES (1)..(32)..(33): Xaa is C or S
XEEVIMRYKKLLLVRGNDFYLMSIANTKVPAXXTS

SEQ ID NO: 57095 - protein, 42 aa, Artificial Sequence; identical to SEQ ID NO: 26139
  GFR-binding peptide
  MOD_RES (1)..(3)..(37)..(38): Xaa is C or S
  MOD_RES (15)..(16)..(17)..(18)..(19): Xaa is A or G
  MOD_RES (20)..(21)..(22)..(23): Xaa is A or G or is absent

SEQ ID NO: 57096 - protein, 37 aa, Artificial Sequence; identical to SEQ ID NO: 13448
  GFR-binding peptide
  MOD_RES (1)..(33)..(34): Xaa is C or S

SEQ ID NO: 57097 - protein, 39 aa, Artificial Sequence; identical to SEQ ID NO: 4073
  GFR-binding peptide
  MOD_RES (1)..(35)..(36): Xaa is C or S
  MOD_RES (13)..(14)..(15)..(16)..(17): Xaa is A or G
  MOD_RES (18)..(19)..(20)..(21): Xaa is A or G or is absent

SEQ ID NO: 57098 - protein, 41 aa, Artificial Sequence; identical to SEQ ID NO: 6049
  GFR-binding peptide
  MOD_RES (1)..(35)..(36): Xaa is C or S
  MOD_RES (13)..(14)..(15)..(16)..(17): Xaa is A or G
  MOD_RES (18)..(19)..(20)..(21): Xaa is A or G or is absent

SEQ ID NO: 57099 - protein, 38 aa, Artificial Sequence; identical to SEQ ID NO: 3132
  GFR-binding peptide
  MOD_RES (1)..(35): Xaa is C or S
  MOD_RES (13)..(14)..(15)..(16)..(17): Xaa is A or G
  MOD_RES (18)..(19)..(20)..(21): Xaa is A or G or is absent

SEQ ID NO: 57100 - protein, 33 aa, Artificial Sequence; identical to SEQ ID NO: 27171
  GFR-binding peptide
  MOD_RES (32)..(33): Xaa is C or S

SEQ ID NO: 57101 - protein, 38 aa, Artificial Sequence; identical to SEQ ID NO: 25154
  GFR-binding peptide
  MOD_RES (2)..(36)..(37): Xaa is C or S
  MOD_RES (14)..(15)..(16)..(17)..(18): Xaa is A or G
  MOD_RES (19)..(20)..(21)..(22): Xaa is A or G or is absent

SEQ ID NO: 57102 - protein, 36 aa, Artificial Sequence; identical to SEQ ID NO: 6055
  GFR-binding peptide
  MOD_RES (1)..(33)..(34): Xaa is C or S

SEQ ID NO: 57103 - protein, 39 aa, Artificial Sequence
  GFR-binding peptide
  MOD_RES (1)..(34)..(35): Xaa is C or S
  MOD_RES (12)..(13)..(14)..(15)..(16): Xaa is A or G
  MOD_RES (17)..(18)..(19)..(20): Xaa is A or G or is absent
XEEVIMRYKKLXXXXXXXXXFYLMSIANTKVPAXXTSPV

SEQ ID NO: 57104 - protein, 41 aa, Artificial Sequence; identical to SEQ ID NO: 25157
  GFR-binding peptide
  MOD_RES (2)..(36)..(37): Xaa is C or S
  MOD_RES (14)..(15)..(16)..(17)..(18): Xaa is A or G
  MOD_RES (19)..(20)..(21)..(22): Xaa is A or G or is absent

SEQ ID NO: 57105 - protein, 41 aa, Artificial Sequence; identical to SEQ ID NO: 4080
  GFR-binding peptide
  MOD_RES (35)..(36): Xaa is C or S
  MOD_RES (13)..(14)..(15)..(16)..(17): Xaa is A or G
  MOD_RES (18)..(19)..(20)..(21): Xaa is A or G or is absent

SEQ ID NO: 57106 - protein, 40 aa, Artificial Sequence; identical to SEQ ID NO: 4081
  GFR-binding peptide
  MOD_RES (2)..(4)..(36)..(37): Xaa is C or S

SEQ ID NO: 57107 - protein, 38 aa, Artificial Sequence; identical to SEQ ID NO: 3138
  GFR-binding peptide
  MOD_RES (34)..(35): Xaa is C or S
  MOD_RES (12)..(13)..(14)..(15)..(16): Xaa is A or G
  MOD_RES (17)..(18)..(19)..(20): Xaa is A or G or is absent

SEQ ID NO: 57108 - protein, 40 aa, Artificial Sequence; identical to SEQ ID NO: 12488
  GFR-binding peptide
  MOD_RES (2)..(4)..(36)..(37): Xaa is C or S

SEQ ID NO: 57109 - protein, 36 aa, Artificial Sequence; identical to SEQ ID NO: 5060
  GFR-binding peptide
  MOD_RES (31)..(32): Xaa is C or S

SEQ ID NO: 57110 - protein, 36 aa, Artificial Sequence; identical to SEQ ID NO: 4086
  GFR-binding peptide
  MOD_RES (1)..(3): Xaa is C or S
  MOD_RES (15)..(16)..(17)..(18)..(19): Xaa is A or G
  MOD_RES (20)..(21)..(22)..(23): Xaa is A or G or is absent

SEQ ID NO: 57111 - protein, 36 aa, Artificial Sequence
  GFR-binding peptide
  MOD_RES (2)..(4)..(36): Xaa is C or S
SXGXRDVVMGRYKKLIIQQKDNFYLMSIANMKTPTX

SEQ ID NO: 57112 - protein, 36 aa, Artificial Sequence; identical to SEQ ID NO: 5069
  GFR-binding peptide
  MOD_RES (1)..(33)..(34): Xaa is C or S

SEQ ID NO: 57113 - protein, 32 aa, Artificial Sequence
  GFR-binding peptide
  MOD_RES (31)..(32): Xaa is C or S
EEVIMRYKKLLLVRGNDFYLMSIANTKVPAXX

SEQ ID NO: 57114 - protein, 34 aa, Artificial Sequence; identical to SEQ ID NO: 12502
  GFR-binding peptide
  MOD_RES (1)..(33)..(34): Xaa is C or S

SEQ ID NO: 57115 - protein, 37 aa, Artificial Sequence; identical to SEQ ID NO: 6068
  GFR-binding peptide
  MOD_RES (2)..(4): Xaa is C or S
  MOD_RES (16)..(17)..(18)..(19)..(20): Xaa is A or G
  MOD_RES (21)..(22)..(23)..(24): Xaa is A or G or is absent

SEQ ID NO: 57116 - protein, 37 aa, Artificial Sequence; identical to SEQ ID NO: 4102
  GFR-binding peptide
  MOD_RES (2)..(37): Xaa is C or S
  MOD_RES (15)..(16)..(17)..(18)..(19): Xaa is A or G
  MOD_RES (20)..(21)..(22)..(23): Xaa is A or G or is absent

SEQ ID NO: 57117 - protein, 41 aa, Artificial Sequence; identical to SEQ ID NO: 5070
  GFR-binding peptide
  MOD_RES (1)..(36)..(37): Xaa is C or S
  MOD_RES (14)..(15)..(16)..(17)..(18): Xaa is A or G
  MOD_RES (19)..(20)..(21)..(22): Xaa is A or G or is absent

SEQ ID NO: 57118 - protein, 38 aa, Artificial Sequence; identical to SEQ ID NO: 4105
  GFR-binding peptide
  MOD_RES (2)..(35)..(36): Xaa is C or S

SEQ ID NO: 57119 - protein, 36 aa, Artificial Sequence; identical to SEQ ID NO: 6072
  GFR-binding peptide
  MOD_RES (34)..(34): Xaa is C or S
  MOD_RES (12)..(13)..(14)..(15)..(16): Xaa is A or G
  MOD_RES (17)..(18)..(19)..(20): Xaa is A or G or is absent

SEQ ID NO: 57120 - protein, 40 aa, Artificial Sequence; identical to SEQ ID NO: 24141
  GFR-binding peptide
  MOD_RES (34)..(35): Xaa is C or S
  MOD_RES (12)..(13)..(14)..(15)..(16): Xaa is A or G
  MOD_RES (17)..(18)..(19)..(20): Xaa is A or G or is absent

SEQ ID NO: 57121 - protein, 35 aa, Artificial Sequence; identical to SEQ ID NO: 26177
  GFR-binding peptide
  MOD_RES (32)..(33): Xaa is C or S

SEQ ID NO: 57122 - protein, 41 aa, Artificial Sequence; identical to SEQ ID NO: 4111
  GFR-binding peptide
  MOD_RES (2)..(36)..(37): Xaa is C or S
  MOD_RES (14)..(15)..(16)..(17)..(18): Xaa is A or G
  MOD_RES (19)..(20)..(21)..(22): Xaa is A or G or is absent

SEQ ID NO: 57123 - protein, 38 aa, Artificial Sequence; identical to SEQ ID NO: 5081
  GFR-binding peptide
  MOD_RES (32)..(33): Xaa is C or S

SEQ ID NO: 57124 - protein, 36 aa, Artificial Sequence; identical to SEQ ID NO: 6078
  GFR-binding peptide
  MOD_RES (31)..(32): Xaa is C or S

SEQ ID NO: 57125 - protein, 38 aa, Artificial Sequence; identical to SEQ ID NO: 6079
  GFR-binding peptide
  MOD_RES (2)..(34)..(35): Xaa is C or S

SEQ ID NO: 57126 - protein, 38 aa, Artificial Sequence; identical to SEQ ID NO: 13487
  GFR-binding peptide
  MOD_RES (1)..(3)..(37)..(38): Xaa is C or S
  MOD_RES (15)..(16)..(17)..(18)..(19): Xaa is A or G
  MOD_RES (20)..(21)..(22)..(23): Xaa is A or G or is absent

SEQ ID NO: 57127 - protein, 34 aa, Artificial Sequence; identical to SEQ ID NO: 26189
  GFR-binding peptide
  MOD_RES (1)..(33)..(34): Xaa is C or S

SEQ ID NO: 57128 - protein, 36 aa, Artificial Sequence; identical to SEQ ID NO: 4120
  GFR-binding peptide
  MOD_RES (1)..(33)..(34): Xaa is C or S

SEQ ID NO: 57129 - protein, 35 aa, Artificial Sequence
  GFR-binding peptide
  MOD_RES (1)..(3)..(35): Xaa is C or S
XGXRDVVMGRYKKLIIQQKDNFYLMSIANMKTPTX

SEQ ID NO: 57130 - protein, 37 aa, Artificial Sequence; identical to SEQ ID NO: 4134
  GFR-binding peptide
  MOD_RES (1)..(33)..(34): Xaa is C or S

SEQ ID NO: 57131 - protein, 37 aa, Artificial Sequence; identical to SEQ ID NO: 4136
  GFR-binding peptide
  MOD_RES (2)..(36)..(37): Xaa is C or S
  MOD_RES (14)..(15)..(16)..(17)..(18): Xaa is A or G
  MOD_RES (19)..(20)..(21)..(22): Xaa is A or G or is absent

SEQ ID NO: 57132 - protein, 36 aa, Artificial Sequence; identical to SEQ ID NO: 4138
  GFR-binding peptide
  MOD_RES (33)..(33): Xaa is C or S
  MOD_RES (11)..(12)..(13)..(14)..(15): Xaa is A or G
  MOD_RES (16)..(17)..(18)..(19): Xaa is A or G or is absent

SEQ ID NO: 57133 - protein, 42 aa, Artificial Sequence; identical to SEQ ID NO: 6088
  GFR-binding peptide
  MOD_RES (1)..(3)..(36)..(37): Xaa is C or S

SEQ ID NO: 57134 - protein, 40 aa, Artificial Sequence; identical to SEQ ID NO: 3172
  GFR-binding peptide
  MOD_RES (2)..(4)..(37)..(38): Xaa is C or S

SEQ ID NO: 57135 - protein, 40 aa, Artificial Sequence; identical to SEQ ID NO: 4140
  GFR-binding peptide
  MOD_RES (2)..(37)..(38): Xaa is C or S
  MOD_RES (15)..(16)..(17)..(18)..(19): Xaa is A or G
  MOD_RES (20)..(21)..(22)..(23): Xaa is A or G or is absent

SEQ ID NO: 57136 - protein, 40 aa, Artificial Sequence
  GFR-binding peptide
  MOD_RES (1)..(3)..(34)..(35): Xaa is C or S
XGXEEVIMRYKKLLLVRGNDFYLMSIANTKVPAXXTSPVR

SEQ ID NO: 57137 - protein, 38 aa, Artificial Sequence; identical to SEQ ID NO: 5102
  GFR-binding peptide
  MOD_RES (1)..(35)..(36): Xaa is C or S
  MOD_RES (13)..(14)..(15)..(16)..(17): Xaa is A or G
  MOD_RES (18)..(19)..(20)..(21): Xaa is A or G or is absent

SEQ ID NO: 57138 - protein, 35 aa, Artificial Sequence; identical to SEQ ID NO: 25198
  GFR-binding peptide
  MOD_RES (2)..(2): Xaa is C or S
  MOD_RES (14)..(15)..(16)..(17)..(18): Xaa is A or G
  MOD_RES (19)..(20)..(21)..(22): Xaa is A or G or is absent

SEQ ID NO: 57139 - protein, 30 aa, Artificial Sequence; identical to SEQ ID NO: 5105
  GFR-binding peptide

SEQ ID NO: 57140 - protein, 30 aa, Artificial Sequence; identical to SEQ ID NO: 6091
  GFR-binding peptide

SEQ ID NO: 57141 - protein, 31 aa, Artificial Sequence; identical to SEQ ID NO: 6093
  GFR-binding peptide
  MOD_RES (31)..(31): Xaa is C or S

SEQ ID NO: 57142 - protein, 37 aa, Artificial Sequence; identical to SEQ ID NO: 13509
  GFR-binding peptide
  MOD_RES (32)..(33): Xaa is C or S

SEQ ID NO: 57143 - protein, 37 aa, Artificial Sequence; identical to SEQ ID NO: 3181
  GFR-binding peptide
  MOD_RES (2)..(4)..(36)..(37): Xaa is C or S

SEQ ID NO: 57144 - protein, 44 aa, Artificial Sequence; identical to SEQ ID NO: 6096
  GFR-binding peptide
  MOD_RES (2)..(4)..(38)..(39): Xaa is C or S
  MOD_RES (16)..(17)..(18)..(19)..(20): Xaa is A or G
  MOD_RES (21)..(22)..(23)..(24): Xaa is A or G or is absent

SEQ ID NO: 57145 - protein, 36 aa, Artificial Sequence; identical to SEQ ID NO: 26210
  GFR-binding peptide
  MOD_RES (2)..(34)..(35): Xaa is C or S

SEQ ID NO: 57146 - protein, 36 aa, Artificial Sequence; identical to SEQ ID NO: 3182
  GFR-binding peptide
  MOD_RES (1)..(34)..(35): Xaa is C or S

SEQ ID NO: 57147 - protein, 34 aa, Artificial Sequence; identical to SEQ ID NO: 24177
  GFR-binding peptide
  MOD_RES (2)..(34): Xaa is C or S

SEQ ID NO: 57148 - protein, 37 aa, Artificial Sequence; identical to SEQ ID NO: 6099
  GFR-binding peptide
  MOD_RES (33)..(34): Xaa is C or S
  MOD_RES (11)..(12)..(13)..(14)..(15): Xaa is A or G
  MOD_RES (16)..(17)..(18)..(19): Xaa is A or G or is absent

SEQ ID NO: 57149 - protein, 38 aa, Artificial Sequence; identical to SEQ ID NO: 27230
  GFR-binding peptide
  MOD_RES (2)..(4)..(36)..(37): Xaa is C or S

SEQ ID NO: 57150 - protein, 35 aa, Artificial Sequence; identical to SEQ ID NO: 5113
  GFR-binding peptide
  MOD_RES (1)..(3): Xaa is C or S

SEQ ID NO: 57151 - protein, 34 aa, Artificial Sequence; identical to SEQ ID NO: 3184
  GFR-binding peptide
  MOD_RES (1)..(1): Xaa is C or S
  MOD_RES (13)..(14)..(15)..(16)..(17): Xaa is A or G
  MOD_RES (18)..(19)..(20)..(21): Xaa is A or G or is absent

SEQ ID NO: 57152 - protein, 35 aa, Artificial Sequence; identical to SEQ ID NO: 5116
  GFR-binding peptide
  MOD_RES (32)..(33): Xaa is C or S

SEQ ID NO: 57153 - protein, 35 aa, Artificial Sequence; identical to SEQ ID NO: 4151
  GFR-binding peptide
  MOD_RES (1)..(3)..(35): Xaa is C or S

SEQ ID NO: 57154 - protein, 38 aa, Artificial Sequence; identical to SEQ ID NO: 6102
  GFR-binding peptide
  MOD_RES (1)..(36)..(37): Xaa is C or S
  MOD_RES (14)..(15)..(16)..(17)..(18): Xaa is A or G
  MOD_RES (19)..(20)..(21)..(22): Xaa is A or G or is absent

SEQ ID NO: 57155 - protein, 36 aa, Artificial Sequence; identical to SEQ ID NO: 3187
  GFR-binding peptide
  MOD_RES (2)..(36): Xaa is C or S
  MOD_RES (14)..(15)..(16)..(17)..(18): Xaa is A or G
  MOD_RES (19)..(20)..(21)..(22): Xaa is A or G or is absent

SEQ ID NO: 57156 - protein, 39 aa, Artificial Sequence; identical to SEQ ID NO: 12547
  GFR-binding peptide
  MOD_RES (2)..(34)..(35): Xaa is C or S

SEQ ID NO: 57157 - protein, 36 aa, Artificial Sequence; identical to SEQ ID NO: 3189
  GFR-binding peptide
  MOD_RES (1)..(3)..(35)..(36): Xaa is C or S

SEQ ID NO: 57158 - protein, 42 aa, Artificial Sequence; identical to SEQ ID NO: 3190
  GFR-binding peptide
  MOD_RES (2)..(4)..(38)..(39): Xaa is C or S
  MOD_RES (16)..(17)..(18)..(19)..(20): Xaa is A or G
  MOD_RES (21)..(22)..(23)..(24): Xaa is A or G or is absent

SEQ ID NO: 57159 - protein, 39 aa, Artificial Sequence; identical to SEQ ID NO: 6107
  GFR-binding peptide
  MOD_RES (33)..(34): Xaa is C or S
  MOD_RES (11)..(12)..(13)..(14)..(15): Xaa is A or G
  MOD_RES (16)..(17)..(18)..(19): Xaa is A or G or is absent

SEQ ID NO: 57160 - protein, 35 aa, Artificial Sequence; identical to SEQ ID NO: 6108
  GFR-binding peptide
  MOD_RES (1)..(3)..(35): Xaa is C or S

SEQ ID NO: 57161 - protein, 33 aa, Artificial Sequence; identical to SEQ ID NO: 4158
  GFR-binding peptide
  MOD_RES (31)..(32): Xaa is C or S

SEQ ID NO: 57162 - protein, 36 aa, Artificial Sequence; identical to SEQ ID NO: 5122
  GFR-binding peptide
  MOD_RES (33)..(34): Xaa is C or S
  MOD_RES (11)..(12)..(13)..(14)..(15): Xaa is A or G
  MOD_RES (16)..(17)..(18)..(19): Xaa is A or G or is absent

SEQ ID NO: 57163 - protein, 39 aa, Artificial Sequence; identical to SEQ ID NO: 26225
  GFR-binding peptide
  MOD_RES (2)..(4)..(36)..(37): Xaa is C or S

SEQ ID NO: 57164 - protein, 38 aa, Artificial Sequence; identical to SEQ ID NO: 4160
  GFR-binding peptide
  MOD_RES (2)..(36)..(37): Xaa is C or S
  MOD_RES (14)..(15)..(16)..(17)..(18): Xaa is A or G
  MOD_RES (19)..(20)..(21)..(22): Xaa is A or G or is absent

SEQ ID NO: 57165 - protein, 38 aa, Artificial Sequence; identical to SEQ ID NO: 3203
  GFR-binding peptide
  MOD_RES (33)..(34): Xaa is C or S

SEQ ID NO: 57166 - protein, 44 aa, Artificial Sequence; identical to SEQ ID NO: 5130
  GFR-binding peptide
  MOD_RES (2)..(4)..(38)..(39): Xaa is C or S
  MOD_RES (16)..(17)..(18)..(19)..(20): Xaa is A or G
  MOD_RES (21)..(22)..(23)..(24): Xaa is A or G or is absent

SEQ ID NO: 57167 - protein, 34 aa, Artificial Sequence; identical to SEQ ID NO: 6120
  GFR-binding peptide
  MOD_RES (32)..(33): Xaa is C or S

SEQ ID NO: 57168 - protein, 37 aa, Artificial Sequence; identical to SEQ ID NO: 5133
  GFR-binding peptide
  MOD_RES (32)..(33): Xaa is C or S

SEQ ID NO: 57169 - protein, 39 aa, Artificial Sequence; identical to SEQ ID NO: 3207
  GFR-binding peptide
  MOD_RES (34)..(35): Xaa is C or S
  MOD_RES (12)..(13)..(14)..(15)..(16): Xaa is A or G
  MOD_RES (17)..(18)..(19)..(20): Xaa is A or G or is absent

SEQ ID NO: 57170 - protein, 34 aa, Artificial Sequence; identical to SEQ ID NO: 3208
  GFR-binding peptide
  MOD_RES (33)..(34): Xaa is C or S
  MOD_RES (11)..(12)..(13)..(14)..(15): Xaa is A or G
  MOD_RES (16)..(17)..(18)..(19): Xaa is A or G or is absent

SEQ ID NO: 57171 - protein, 40 aa, Artificial Sequence; identical to SEQ ID NO: 5134
  GFR-binding peptide
  MOD_RES (34)..(35): Xaa is C or S
  MOD_RES (12)..(13)..(14)..(15)..(16): Xaa is A or G
  MOD_RES (17)..(18)..(19)..(20): Xaa is A or G or is absent

SEQ ID NO: 57172 - protein, 34 aa, Artificial Sequence; identical to SEQ ID NO: 4170
  GFR-binding peptide
  MOD_RES (33)..(34): Xaa is C or S

SEQ ID NO: 57173 - protein, 33 aa, Artificial Sequence; identical to SEQ ID NO: 27252
  GFR-binding peptide
  MOD_RES (31)..(32): Xaa is C or S

SEQ ID NO: 57174 - protein, 37 aa, Artificial Sequence; identical to SEQ ID NO: 6123
  GFR-binding peptide
  MOD_RES (1)..(33)..(34): Xaa is C or S

SEQ ID NO: 57175 - protein, 40 aa, Artificial Sequence; identical to SEQ ID NO: 26238
  GFR-binding peptide
  MOD_RES (2)..(4)..(38)..(39): Xaa is C or S
  MOD_RES (16)..(17)..(18)..(19)..(20): Xaa is A or G
  MOD_RES (21)..(22)..(23)..(24): Xaa is A or G or is absent

SEQ ID NO: 57176 - protein, 35 aa, Artificial Sequence; identical to SEQ ID NO: 4171
  GFR-binding peptide
  MOD_RES (32)..(33): Xaa is C or S

SEQ ID NO: 57177 - protein, 38 aa, Artificial Sequence; identical to SEQ ID NO: 6126
  GFR-binding peptide
  MOD_RES (32)..(32): Xaa is C or S

SEQ ID NO: 57178 - protein, 38 aa, Artificial Sequence; identical to SEQ ID NO: 5139
  GFR-binding peptide
  MOD_RES (2)..(34)..(35): Xaa is C or S

SEQ ID NO: 57179 - protein, 33 aa, Artificial Sequence; identical to SEQ ID NO: 5140
  GFR-binding peptide
  MOD_RES (12)..(13)..(14)..(15)..(16): Xaa is A or G
  MOD_RES (17)..(18)..(19)..(20): Xaa is A or G or is absent

SEQ ID NO: 57180 - protein, 34 aa, Artificial Sequence; identical to SEQ ID NO: 6127
  GFR-binding peptide
  MOD_RES (33)..(34): Xaa is C or S
  MOD_RES (11)..(12)..(13)..(14)..(15): Xaa is A or G
  MOD_RES (16)..(17)..(18)..(19): Xaa is A or G or is absent

SEQ ID NO: 57181 - protein, 40 aa, Artificial Sequence; identical to SEQ ID NO: 4173
  GFR-binding peptide
  MOD_RES (34)..(34): Xaa is C or S
  MOD_RES (12)..(13)..(14)..(15)..(16): Xaa is A or G
  MOD_RES (17)..(18)..(19)..(20): Xaa is A or G or is absent

SEQ ID NO: 57182 - protein, 32 aa, Artificial Sequence; identical to SEQ ID NO: 5141
  GFR-binding peptide
  MOD_RES (1)..(1): Xaa is C or S

SEQ ID NO: 57183 - protein, 38 aa, Artificial Sequence; identical to SEQ ID NO: 4174
  GFR-binding peptide
  MOD_RES (2)..(4)..(38): Xaa is C or S
  MOD_RES (16)..(17)..(18)..(19)..(20): Xaa is A or G
  MOD_RES (21)..(22)..(23)..(24): Xaa is A or G or is absent

SEQ ID NO: 57184 - protein, 39 aa, Artificial Sequence; identical to SEQ ID NO: 10657
  GFR-binding peptide
  MOD_RES (33)..(34): Xaa is C or S
  MOD_RES (11)..(12)..(13)..(14)..(15): Xaa is A or G
  MOD_RES (16)..(17)..(18)..(19): Xaa is A or G or is absent

SEQ ID NO: 57185 - protein, 32 aa, Artificial Sequence; identical to SEQ ID NO: 24211
  GFR-binding peptide
  MOD_RES (32)..(32): Xaa is C or S

SEQ ID NO: 57186 - protein, 36 aa, Artificial Sequence
  GFR-binding peptide
  MOD_RES (1)..(35)..(36): Xaa is C or S
  MOD_RES (13)..(14)..(15)..(16)..(17): Xaa is A or G
  MOD_RES (18)..(19)..(20)..(21): Xaa is A or G or is absent
XRDVVMGRYKKLXXXXXXXXXFYLMSIANMKTPTXX

SEQ ID NO: 57187 - protein, 35 aa, Artificial Sequence; identical to SEQ ID NO: 3218
  GFR-binding peptide
  MOD_RES (1)..(34)..(35): Xaa is C or S

SEQ ID NO: 57188 - protein, 40 aa, Artificial Sequence; identical to SEQ ID NO: 3219
  GFR-binding peptide
  MOD_RES (1)..(3)..(35)..(36): Xaa is C or S

SEQ ID NO: 57189 - protein, 41 aa, Artificial Sequence; identical to SEQ ID NO: 4180
  GFR-binding peptide
  MOD_RES (1)..(35)..(36): Xaa is C or S
  MOD_RES (13)..(14)..(15)..(16)..(17): Xaa is A or G
  MOD_RES (18)..(19)..(20)..(21): Xaa is A or G or is absent

SEQ ID NO: 57190 - protein, 37 aa, Artificial Sequence; identical to SEQ ID NO: 3223
  GFR-binding peptide
  MOD_RES (2)..(4)..(36)..(37): Xaa is C or S

SEQ ID NO: 57191 - protein, 40 aa, Artificial Sequence; identical to SEQ ID NO: 6134
  GFR-binding peptide
  MOD_RES (2)..(34)..(35): Xaa is C or S

SEQ ID NO: 57192 - protein, 35 aa, Artificial Sequence; identical to SEQ ID NO: 4183
  GFR-binding peptide
  MOD_RES (1)..(33)..(34): Xaa is C or S

SEQ ID NO: 57193 - protein, 37 aa, Artificial Sequence; identical to SEQ ID NO: 4185
  GFR-binding peptide
  MOD_RES (2)..(34): Xaa is C or S

SEQ ID NO: 57194 - protein, 40 aa, Artificial Sequence; identical to SEQ ID NO: 12587
  GFR-binding peptide
  MOD_RES (1)..(3)..(37)..(38): Xaa is C or S
  MOD_RES (15)..(16)..(17)..(18)..(19): Xaa is A or G
  MOD_RES (20)..(21)..(22)..(23): Xaa is A or G or is absent

SEQ ID NO: 57195 - protein, 39 aa, Artificial Sequence; identical to SEQ ID NO: 5147
  GFR-binding peptide
  MOD_RES (1)..(33)..(34): Xaa is C or S

SEQ ID NO: 57196 - protein, 34 aa, Artificial Sequence; identical to SEQ ID NO: 4189
  GFR-binding peptide
  MOD_RES (32)..(33): Xaa is C or S

SEQ ID NO: 57197 - protein, 42 aa, Artificial Sequence; identical to SEQ ID NO: 3231
  GFR-binding peptide
  MOD_RES (2)..(4)..(36)..(37): Xaa is C or S

SEQ ID NO: 57198 - protein, 33 aa, Artificial Sequence; identical to SEQ ID NO: 12596
  GFR-binding peptide
  MOD_RES (31)..(32): Xaa is C or S

SEQ ID NO: 57199 - protein, 34 aa, Artificial Sequence; identical to SEQ ID NO: 6149
  GFR-binding peptide
  MOD_RES (34)..(34): Xaa is C or S
  MOD_RES (12)..(13)..(14)..(15)..(16): Xaa is A or G
  MOD_RES (17)..(18)..(19)..(20): Xaa is A or G or is absent

SEQ ID NO: 57200 - protein, 36 aa, Artificial Sequence; identical to SEQ ID NO: 5154
  GFR-binding peptide
  MOD_RES (2)..(34)..(35): Xaa is C or S

SEQ ID NO: 57201 - protein, 39 aa, Artificial Sequence; identical to SEQ ID NO: 5156
  GFR-binding peptide
  MOD_RES (33)..(33): Xaa is C or S
  MOD_RES (11)..(12)..(13)..(14)..(15): Xaa is A or G
  MOD_RES (16)..(17)..(18)..(19): Xaa is A or G or is absent

SEQ ID NO: 57202 - protein, 34 aa, Artificial Sequence; identical to SEQ ID NO: 5159
  GFR-binding peptide
  MOD_RES (2)..(34): Xaa is C or S

SEQ ID NO: 57203 - protein, 36 aa, Artificial Sequence; identical to SEQ ID NO: 26269
  GFR-binding peptide
  MOD_RES (1)..(3)..(35)..(36): Xaa is C or S

SEQ ID NO: 57204 - protein, 33 aa, Artificial Sequence
  GFR-binding peptide
  MOD_RES (33)..(33): Xaa is C or S
  MOD_RES (11)..(12)..(13)..(14)..(15): Xaa is A or G
  MOD_RES (16)..(17)..(18)..(19): Xaa is A or G or is absent
DVVMGRYKKLXXXXXXXXXFYLMSIANMKTPTX

SEQ ID NO: 57205 - protein, 40 aa, Artificial Sequence; identical to SEQ ID NO: 27290
  GFR-binding peptide
  MOD_RES (2)..(4)..(36)..(37): Xaa is C or S

SEQ ID NO: 57206 - protein, 37 aa, Artificial Sequence
  GFR-binding peptide
  MOD_RES (1)..(3)..(36)..(37): Xaa is C or S
  MOD_RES (14)..(15)..(16)..(17)..(18): Xaa is A or G
  MOD_RES (19)..(20)..(21)..(22): Xaa is A or G or is absent
XGXEEVIMRYKKLXXXXXXXXXFYLMSIANTKVPAXX

SEQ ID NO: 57207 - protein, 38 aa, Artificial Sequence; identical to SEQ ID NO: 6159
  GFR-binding peptide
  MOD_RES (2)..(4)..(38): Xaa is C or S
  MOD_RES (16)..(17)..(18)..(19)..(20): Xaa is A or G
  MOD_RES (21)..(22)..(23)..(24): Xaa is A or G or is absent

SEQ ID NO: 57208 - protein, 37 aa, Artificial Sequence; identical to SEQ ID NO: 5168
  GFR-binding peptide
  MOD_RES (34)..(35): Xaa is C or S
  MOD_RES (12)..(13)..(14)..(15)..(16): Xaa is A or G
  MOD_RES (17)..(18)..(19)..(20): Xaa is A or G or is absent

SEQ ID NO: 57209 - protein, 38 aa, Artificial Sequence
  GFR-binding peptide
  MOD_RES (2)..(4)..(36)..(37): Xaa is C or S
SXGXRDVVMGRYKKLIIQQKDNFYLMSIANMKTPTXXP

SEQ ID NO: 57210 - protein, 33 aa, Artificial Sequence
  GFR-binding peptide
  MOD_RES (1)..(32)..(33): Xaa is C or S
XEEVIMRYKKLLLVRGNDFYLMSIANTKVPAXX

SEQ ID NO: 57211 - protein, 39 aa, Artificial Sequence
  GFR-binding peptide
  MOD_RES (33)..(34): Xaa is C or S
  MOD_RES (11)..(12)..(13)..(14)..(15): Xaa is A or G
  MOD_RES (16)..(17)..(18)..(19): Xaa is A or G or is absent
RVVMNRYKKLXXXXXXXXXFYLVSIANLKTPAXXPKPVH

SEQ ID NO: 57212 - protein, 39 aa, Artificial Sequence; identical to SEQ ID NO: 27298
  GFR-binding peptide
  MOD_RES (2)..(4)..(38)..(39): Xaa is C or S
  MOD_RES (16)..(17)..(18)..(19)..(20): Xaa is A or G
  MOD_RES (21)..(22)..(23)..(24): Xaa is A or G or is absent

SEQ ID NO: 57213 - protein, 37 aa, Artificial Sequence; identical to SEQ ID NO: 4205
  GFR-binding peptide
  MOD_RES (1)..(3)..(37): Xaa is C or S
  MOD_RES (15)..(16)..(17)..(18)..(19): Xaa is A or G
  MOD_RES (20)..(21)..(22)..(23): Xaa is A or G or is absent

SEQ ID NO: 57214 - protein, 38 aa, Artificial Sequence; identical to SEQ ID NO: 4207
  GFR-binding peptide
  MOD_RES (2)..(36)..(37): Xaa is C or S
  MOD_RES (14)..(15)..(16)..(17)..(18): Xaa is A or G
  MOD_RES (19)..(20)..(21)..(22): Xaa is A or G or is absent

SEQ ID NO: 57215 - protein, 34 aa, Artificial Sequence; identical to SEQ ID NO: 27299
  GFR-binding peptide
  MOD_RES (1)..(3): Xaa is C or S

SEQ ID NO: 57216 - protein, 41 aa, Artificial Sequence; identical to SEQ ID NO: 13560
  GFR-binding peptide
  MOD_RES (2)..(36)..(37): Xaa is C or S
  MOD_RES (14)..(15)..(16)..(17)..(18): Xaa is A or G
  MOD_RES (19)..(20)..(21)..(22): Xaa is A or G or is absent

SEQ ID NO: 57217 - protein, 35 aa, Artificial Sequence; identical to SEQ ID NO: 3257
  GFR-binding peptide
  MOD_RES (1)..(35): Xaa is C or S
  MOD_RES (13)..(14)..(15)..(16)..(17): Xaa is A or G
  MOD_RES (18)..(19)..(20)..(21): Xaa is A or G or is absent

SEQ ID NO: 57218 - protein, 39 aa, Artificial Sequence; identical to SEQ ID NO: 11618
  GFR-binding peptide
  MOD_RES (1)..(3)..(37)..(38): Xaa is C or S
  MOD_RES (15)..(16)..(17)..(18)..(19): Xaa is A or G
  MOD_RES (20)..(21)..(22)..(23): Xaa is A or G or is absent

SEQ ID NO: 57219 - protein, 35 aa, Artificial Sequence; identical to SEQ ID NO: 11621
  GFR-binding peptide
  MOD_RES (1)..(3)..(35): Xaa is C or S

SEQ ID NO: 57220 - protein, 38 aa, Artificial Sequence; identical to SEQ ID NO: 3260
  GFR-binding peptide
  MOD_RES (1)..(3)..(35)..(36): Xaa is C or S

SEQ ID NO: 57221 - protein, 34 aa, Artificial Sequence; identical to SEQ ID NO: 5177
  GFR-binding peptide
  MOD_RES (33)..(34): Xaa is C or S
  MOD_RES (11)..(12)..(13)..(14)..(15): Xaa is A or G
  MOD_RES (16)..(17)..(18)..(19): Xaa is A or G or is absent

SEQ ID NO: 57222 - protein, 37 aa, Artificial Sequence
  GFR-binding peptide
  MOD_RES (33)..(34): Xaa is C or S
  MOD_RES (11)..(12)..(13)..(14)..(15): Xaa is A or G
  MOD_RES (16)..(17)..(18)..(19): Xaa is A or G or is absent
EEVIMRYKKLXXXXXXXXXFYLMSIANTKVPAXXTSP

SEQ ID NO: 57223 - protein, 33 aa, Artificial Sequence; identical to SEQ ID NO: 5180
  GFR-binding peptide
  MOD_RES (12)..(13)..(14)..(15)..(16): Xaa is A or G
  MOD_RES (17)..(18)..(19)..(20): Xaa is A or G or is absent

SEQ ID NO: 57224 - protein, 37 aa, Artificial Sequence; identical to SEQ ID NO: 4215
  GFR-binding peptide
  MOD_RES (1)..(35)..(36): Xaa is C or S
  MOD_RES (13)..(14)..(15)..(16)..(17): Xaa is A or G
  MOD_RES (18)..(19)..(20)..(21): Xaa is A or G or is absent

SEQ ID NO: 57225 - protein, 38 aa, Artificial Sequence; identical to SEQ ID NO: 6167
  GFR-binding peptide
  MOD_RES (2)..(34)..(35): Xaa is C or S

SEQ ID NO: 57226 - protein, 32 aa, Artificial Sequence
  GFR-binding peptide
  MOD_RES (11)..(12)..(13)..(14)..(15): Xaa is A or G
  MOD_RES (16)..(17)..(18)..(19): Xaa is A or G or is absent
DVVMGRYKKLXXXXXXXXXFYLMSIANMKTPT

SEQ ID NO: 57227 - protein, 35 aa, Artificial Sequence; identical to SEQ ID NO: 6171
  GFR-binding peptide
  MOD_RES (34)..(35): Xaa is C or S
  MOD_RES (12)..(13)..(14)..(15)..(16): Xaa is A or G
  MOD_RES (17)..(18)..(19)..(20): Xaa is A or G or is absent

SEQ ID NO: 57228 - protein, 41 aa, Artificial Sequence
  GFR-binding peptide
  MOD_RES (2)..(4)..(38)..(39): Xaa is C or S
  MOD_RES (16)..(17)..(18)..(19)..(20): Xaa is A or G
  MOD_RES (21)..(22)..(23)..(24): Xaa is A or G or is absent
SXGXRDVVMGRYKKLXXXXXXXXXFYLMSIANMKTPTXXPG

SEQ ID NO: 57229 - protein, 37 aa, Artificial Sequence; identical to SEQ ID NO: 4223
  GFR-binding peptide
  MOD_RES (2)..(36)..(37): Xaa is C or S
  MOD_RES (14)..(15)..(16)..(17)..(18): Xaa is A or G
  MOD_RES (19)..(20)..(21)..(22): Xaa is A or G or is absent

SEQ ID NO: 57230 - protein, 33 aa, Artificial Sequence; identical to SEQ ID NO: 6179
  GFR-binding peptide
  MOD_RES (31)..(32): Xaa is C or S

SEQ ID NO: 57231 - protein, 31 aa, Artificial Sequence
  GFR-binding peptide
  MOD_RES (31)..(31): Xaa is C or S
EEVIMRYKKLLLVRGNDFYLMSIANTKVPAX

SEQ ID NO: 57232 - protein, 42 aa, Artificial Sequence; identical to SEQ ID NO: 3272
  GFR-binding peptide
  MOD_RES (2)..(4)..(36)..(37): Xaa is C or S

SEQ ID NO: 57233 - protein, 39 aa, Artificial Sequence; identical to SEQ ID NO: 5197
  GFR-binding peptide
  MOD_RES (1)..(3)..(37)..(38): Xaa is C or S
  MOD_RES (15)..(16)..(17)..(18)..(19): Xaa is A or G
  MOD_RES (20)..(21)..(22)..(23): Xaa is A or G or is absent

SEQ ID NO: 57234 - protein, 34 aa, Artificial Sequence; identical to SEQ ID NO: 30234
  GFR-binding peptide
  MOD_RES (1)..(33): Xaa is C or S

SEQ ID NO: 57235 - protein, 38 aa, Artificial Sequence; identical to SEQ ID NO: 6181
  GFR-binding peptide
  MOD_RES (6)..(7): Xaa is C or S

SEQ ID NO: 57236 - protein, 38 aa, Artificial Sequence; identical to SEQ ID NO: 7104
  GFR-binding peptide
  MOD_RES (1)..(2)..(36)..(38): Xaa is C or S
  MOD_RES (16)..(17)..(18)..(19)..(20): Xaa is A or G
  MOD_RES (21)..(22)..(23)..(24): Xaa is A or G or is absent

SEQ ID NO: 57237 - protein, 34 aa, Artificial Sequence; identical to SEQ ID NO: 6184
  GFR-binding peptide
  MOD_RES (14)..(15)..(16)..(17)..(18): Xaa is A or G
  MOD_RES (19)..(20)..(21)..(22): Xaa is A or G or is absent

SEQ ID NO: 57238 - protein, 42 aa, Artificial Sequence; identical to SEQ ID NO: 6186
  GFR-binding peptide
  MOD_RES (4)..(5)..(40)..(42): Xaa is C or S
  MOD_RES (19)..(20)..(21)..(22)..(23): Xaa is A or G
  MOD_RES (24)..(25)..(26)..(27): Xaa is A or G or is absent

SEQ ID NO: 57239 - protein, 36 aa, Artificial Sequence; identical to SEQ ID NO: 8874
  GFR-binding peptide
  MOD_RES (3)..(4): Xaa is C or S

SEQ ID NO: 57240 - protein, 41 aa, Artificial Sequence; identical to SEQ ID NO: 7108
  GFR-binding peptide
  MOD_RES (6)..(7)..(40): Xaa is C or S

SEQ ID NO: 57241 - protein, 33 aa, Artificial Sequence; identical to SEQ ID NO: 6189
  GFR-binding peptide
  MOD_RES (32)..(32): Xaa is C or S

SEQ ID NO: 57242 - protein, 44 aa, Artificial Sequence
  GFR-binding peptide
  MOD_RES (6)..(7)..(41)..(43): Xaa is C or S
  MOD_RES (21)..(22)..(23)..(24)..(25): Xaa is A or G
  MOD_RES (26)..(27)..(28)..(29): Xaa is A or G or is absent
HVPKPXXAPTKLNAISVLYFXXXXXXXXXLKKYRNMVVRSXGXH

SEQ ID NO: 57243 - protein, 38 aa, Artificial Sequence
  GFR-binding peptide
  MOD_RES (1)..(2)..(36)..(38): Xaa is C or S
  MOD_RES (16)..(17)..(18)..(19)..(20): Xaa is A or G
  MOD_RES (21)..(22)..(23)..(24): Xaa is A or G or is absent
XXTPTKMNAISMLYFXXXXXXXXXLKKYRGMVVDRXGX

SEQ ID NO: 57244 - protein, 38 aa, Artificial Sequence; identical to SEQ ID NO: 29257
  GFR-binding peptide
  MOD_RES (1)..(35)..(37): Xaa is C or S
  MOD_RES (15)..(16)..(17)..(18)..(19): Xaa is A or G
  MOD_RES (20)..(21)..(22)..(23): Xaa is A or G or is absent

SEQ ID NO: 57245 - protein, 38 aa, Artificial Sequence
  GFR-binding peptide
  MOD_RES (6)..(7): Xaa is C or S
GSAGPXXTPTKMNAISMLYFNDKQQIILKKYRGMVVDR

SEQ ID NO: 57246 - protein, 35 aa, Artificial Sequence; identical to SEQ ID NO: 7112
  GFR-binding peptide
  MOD_RES (1)..(35): Xaa is C or S
  MOD_RES (15)..(16)..(17)..(18)..(19): Xaa is A or G
  MOD_RES (20)..(21)..(22)..(23): Xaa is A or G or is absent

SEQ ID NO: 57247 - protein, 38 aa, Artificial Sequence; identical to SEQ ID NO: 7979
  GFR-binding peptide
  MOD_RES (5)..(6)..(38): Xaa is C or S

SEQ ID NO: 57248 - protein, 36 aa, Artificial Sequence
  GFR-binding peptide
  MOD_RES (3)..(4): Xaa is C or S
  MOD_RES (18)..(19)..(20)..(21)..(22): Xaa is A or G
  MOD_RES (23)..(24)..(25)..(26): Xaa is A or G or is absent
STXXAPVKTNAISMLYFXXXXXXXXXLKKYRMIVEE

SEQ ID NO: 57249 - protein, 41 aa, Artificial Sequence
  GFR-binding peptide
  MOD_RES (5)..(6)..(40): Xaa is C or S
  MOD_RES (20)..(21)..(22)..(23)..(24): Xaa is A or G
  MOD_RES (25)..(26)..(27)..(28): Xaa is A or G or is absent
SAGPXXTPTKMNAISMLYFXXXXXXXXXLKKYRGMVVDRXG

SEQ ID NO: 57250 - protein, 39 aa, Artificial Sequence
  GFR-binding peptide
  MOD_RES (3)..(4)..(37)..(39): Xaa is C or S
  MOD_RES (18)..(19)..(20)..(21)..(22): Xaa is A or G
  MOD_RES (23)..(24)..(25)..(26): Xaa is A or G or is absent
STXXAPVKTNAISMLYFXXXXXXXXXLKKYRMIVEEXGX

SEQ ID NO: 57251 - protein, 35 aa, Artificial Sequence; identical to SEQ ID NO: 8891
  GFR-binding peptide
  MOD_RES (1)..(2)..(34): Xaa is C or S

SEQ ID NO: 57252 - protein, 36 aa, Artificial Sequence; identical to SEQ ID NO: 30257
  GFR-binding peptide
  MOD_RES (5)..(6): Xaa is C or S

SEQ ID NO: 57253 - protein, 35 aa, Artificial Sequence; identical to SEQ ID NO: 7128
  GFR-binding peptide
  MOD_RES (34)..(34): Xaa is C or S
  MOD_RES (14)..(15)..(16)..(17)..(18): Xaa is A or G
  MOD_RES (19)..(20)..(21)..(22): Xaa is A or G or is absent

SEQ ID NO: 57254 - protein, 42 aa, Artificial Sequence; identical to SEQ ID NO: 8896
  GFR-binding peptide
  MOD_RES (5)..(6)..(41): Xaa is C or S
  MOD_RES (20)..(21)..(22)..(23)..(24): Xaa is A or G
  MOD_RES (25)..(26)..(27)..(28): Xaa is A or G or is absent

SEQ ID NO: 57255 - protein, 40 aa, Artificial Sequence; identical to SEQ ID NO: 28306
  GFR-binding peptide
  MOD_RES (6)..(7): Xaa is C or S
  MOD_RES (21)..(22)..(23)..(24)..(25): Xaa is A or G
  MOD_RES (26)..(27)..(28)..(29): Xaa is A or G or is absent

SEQ ID NO: 57256 - protein, 34 aa, Artificial Sequence; identical to SEQ ID NO: 8897
  GFR-binding peptide
  MOD_RES (2)..(2): Xaa is C or S
  MOD_RES (16)..(17)..(18)..(19)..(20): Xaa is A or G
  MOD_RES (21)..(22)..(23)..(24): Xaa is A or G or is absent

SEQ ID NO: 57257 - protein, 38 aa, Artificial Sequence; identical to SEQ ID NO: 6207
  GFR-binding peptide
  MOD_RES (3)..(4)..(38): Xaa is C or S
  MOD_RES (18)..(19)..(20)..(21)..(22): Xaa is A or G
  MOD_RES (23)..(24)..(25)..(26): Xaa is A or G or is absent

SEQ ID NO: 57258 - protein, 37 aa, Artificial Sequence; identical to SEQ ID NO: 7993
  GFR-binding peptide
  MOD_RES (2)..(36): Xaa is C or S
  MOD_RES (16)..(17)..(18)..(19)..(20): Xaa is A or G
  MOD_RES (21)..(22)..(23)..(24): Xaa is A or G or is absent

SEQ ID NO: 57259 - protein, 31 aa, Artificial Sequence
  GFR-binding peptide
  MOD_RES (31)..(31): Xaa is C or S
APVKTNAISMLYFDNGRVLLLKKYRMIVEEX

SEQ ID NO: 57260 - protein, 39 aa, Artificial Sequence; identical to SEQ ID NO: 6208
  GFR-binding peptide
  MOD_RES (4)..(5)..(37)..(39): Xaa is C or S

SEQ ID NO: 57261 - protein, 35 aa, Artificial Sequence; identical to SEQ ID NO: 27350
  GFR-binding peptide
  MOD_RES (2)..(3): Xaa is C or S
  MOD_RES (17)..(18)..(19)..(20)..(21): Xaa is A or G
  MOD_RES (22)..(23)..(24)..(25): Xaa is A or G or is absent

SEQ ID NO: 57262 - protein, 35 aa, Artificial Sequence; identical to SEQ ID NO: 29269
  GFR-binding peptide
  MOD_RES (1)..(33)..(35): Xaa is C or S

SEQ ID NO: 57263 - protein, 35 aa, Artificial Sequence; identical to SEQ ID NO: 30264
  GFR-binding peptide
  MOD_RES (1)..(2)..(34): Xaa is C or S

SEQ ID NO: 57264 - protein, 39 aa, Artificial Sequence
  GFR-binding peptide
  MOD_RES (4)..(5)..(38): Xaa is C or S
  MOD_RES (19)..(20)..(21)..(22)..(23): Xaa is A or G
  MOD_RES (24)..(25)..(26)..(27): Xaa is A or G or is absent
PSTXXAPVKTNAISMLYFXXXXXXXXXLKKYRMIVEEXG

SEQ ID NO: 57265 - protein, 37 aa, Artificial Sequence
  GFR-binding peptide
  MOD_RES (1)..(2)..(34)..(36): Xaa is C or S
XXTPTKMNAISMLYFNDKQQIILKKYRGMVVDRXGXS

SEQ ID NO: 57266 - protein, 34 aa, Artificial Sequence; identical to SEQ ID NO: 29271
  GFR-binding peptide
  MOD_RES (1)..(2)..(34): Xaa is C or S

SEQ ID NO: 57267 - protein, 37 aa, Artificial Sequence
  GFR-binding peptide
  MOD_RES (3)..(4)..(36): Xaa is C or S
GPXXTPTKMNAISMLYFNDKQQIILKKYRGMVVDRXG

SEQ ID NO: 57268 - protein, 36 aa, Artificial Sequence; identical to SEQ ID NO: 13601
  GFR-binding peptide
  MOD_RES (1)..(35): Xaa is C or S
  MOD_RES (15)..(16)..(17)..(18)..(19): Xaa is A or G
  MOD_RES (20)..(21)..(22)..(23): Xaa is A or G or is absent

SEQ ID NO: 57269 - protein, 39 aa, Artificial Sequence; identical to SEQ ID NO: 29273
  GFR-binding peptide
  MOD_RES (2)..(3)..(37)..(39): Xaa is C or S
  MOD_RES (17)..(18)..(19)..(20)..(21): Xaa is A or G
  MOD_RES (22)..(23)..(24)..(25): Xaa is A or G or is absent

SEQ ID NO: 57270 - protein, 30 aa, Artificial Sequence; identical to SEQ ID NO: 28317
  GFR-binding peptide

SEQ ID NO: 57271 - protein, 41 aa, Artificial Sequence; identical to SEQ ID NO: 7999
  GFR-binding peptide
  MOD_RES (5)..(6)..(38)..(40): Xaa is C or S

SEQ ID NO: 57272 - protein, 32 aa, Artificial Sequence; identical to SEQ ID NO: 29279
  GFR-binding peptide
  MOD_RES (14)..(15)..(16)..(17)..(18): Xaa is A or G
  MOD_RES (19)..(20)..(21)..(22): Xaa is A or G or is absent

SEQ ID NO: 57273 - protein, 37 aa, Artificial Sequence; identical to SEQ ID NO: 16207
  GFR-binding peptide
  MOD_RES (2)..(3)..(35)..(37): Xaa is C or S

SEQ ID NO: 57274 - protein, 31 aa, Artificial Sequence; identical to SEQ ID NO: 27359
  GFR-binding peptide
  MOD_RES (1)..(1): Xaa is C or S

SEQ ID NO: 57275 - protein, 34 aa, Artificial Sequence; identical to SEQ ID NO: 7145
  GFR-binding peptide
  MOD_RES (33)..(33): Xaa is C or S

SEQ ID NO: 57276 - protein, 43 aa, Artificial Sequence; identical to SEQ ID NO: 7146
  GFR-binding peptide
  MOD_RES (7)..(41)..(43): Xaa is C or S
  MOD_RES (21)..(22)..(23)..(24)..(25): Xaa is A or G
  MOD_RES (26)..(27)..(28)..(29): Xaa is A or G or is absent

SEQ ID NO: 57277 - protein, 40 aa, Artificial Sequence
  GFR-binding peptide
  MOD_RES (4)..(5)..(37)..(39): Xaa is C or S
AGPXXTPTKMNAISMLYFNDKQQIILKKYRGMVVDRXGXS

SEQ ID NO: 57278 - protein, 33 aa, Artificial Sequence; identical to SEQ ID NO: 15294
  GFR-binding peptide
  MOD_RES (1)..(33): Xaa is C or S

SEQ ID NO: 57279 - protein, 40 aa, Artificial Sequence; identical to SEQ ID NO: 27360
  GFR-binding peptide
  MOD_RES (5)..(6)..(40): Xaa is C or S
  MOD_RES (20)..(21)..(22)..(23)..(24): Xaa is A or G
  MOD_RES (25)..(26)..(27)..(28): Xaa is A or G or is absent

SEQ ID NO: 57280 - protein, 41 aa, Artificial Sequence
  GFR-binding peptide
  MOD_RES (6)..(7)..(39)..(41): Xaa is C or S
GSAGPXXTPTKMNAISMLYFNDKQQIILKKYRGMVVDRXGX

SEQ ID NO: 57281 - protein, 37 aa, Artificial Sequence; identical to SEQ ID NO: 6230
  GFR-binding peptide
  MOD_RES (34)..(36): Xaa is C or S
  MOD_RES (14)..(15)..(16)..(17)..(18): Xaa is A or G
  MOD_RES (19)..(20)..(21)..(22): Xaa is A or G or is absent

SEQ ID NO: 57282 - protein, 40 aa, Artificial Sequence; identical to SEQ ID NO: 7150
  GFR-binding peptide
  MOD_RES (3)..(4)..(38)..(40): Xaa is C or S
  MOD_RES (18)..(19)..(20)..(21)..(22): Xaa is A or G
  MOD_RES (23)..(24)..(25)..(26): Xaa is A or G or is absent

SEQ ID NO: 57283 - protein, 43 aa, Artificial Sequence; identical to SEQ ID NO: 30282
  GFR-binding peptide
  MOD_RES (6)..(7)..(41)..(43): Xaa is C or S
  MOD_RES (21)..(22)..(23)..(24)..(25): Xaa is A or G
  MOD_RES (26)..(27)..(28)..(29): Xaa is A or G or is absent

SEQ ID NO: 57284 - protein, 36 aa, Artificial Sequence; identical to SEQ ID NO: 15303
  GFR-binding peptide
  MOD_RES (1)..(2)..(34)..(36): Xaa is C or S

SEQ ID NO: 57285 - protein, 39 aa, Artificial Sequence; identical to SEQ ID NO: 7159
  GFR-binding peptide
  MOD_RES (6)..(7)..(39): Xaa is C or S

SEQ ID NO: 57286 - protein, 34 aa, Artificial Sequence; identical to SEQ ID NO: 30289
  GFR-binding peptide
  MOD_RES (2)..(3): Xaa is C or S

SEQ ID NO: 57287 - protein, 36 aa, Artificial Sequence; identical to SEQ ID NO: 16218
  GFR-binding peptide
  MOD_RES (34)..(36): Xaa is C or S
  MOD_RES (14)..(15)..(16)..(17)..(18): Xaa is A or G
  MOD_RES (19)..(20)..(21)..(22): Xaa is A or G or is absent

SEQ ID NO: 57288 - protein, 34 aa, Artificial Sequence
  GFR-binding peptide
  MOD_RES (2)..(3)..(34): Xaa is C or S
TXXAPVKTNAISMLYFDNGRVLLLKKYRMIVEEX

SEQ ID NO: 57289 - protein, 40 aa, Artificial Sequence; identical to SEQ ID NO: 29289
  GFR-binding peptide
  MOD_RES (2)..(3)..(37)..(39): Xaa is C or S
  MOD_RES (17)..(18)..(19)..(20)..(21): Xaa is A or G
  MOD_RES (22)..(23)..(24)..(25): Xaa is A or G or is absent

SEQ ID NO: 57290 - protein, 33 aa, Artificial Sequence; identical to SEQ ID NO: 16220
  GFR-binding peptide
  MOD_RES (32)..(32): Xaa is C or S

SEQ ID NO: 57291 - protein, 35 aa, Artificial Sequence; identical to SEQ ID NO: 15305
  GFR-binding peptide
  MOD_RES (2)..(3): Xaa is C or S
  MOD_RES (17)..(18)..(19)..(20)..(21): Xaa is A or G
  MOD_RES (22)..(23)..(24)..(25): Xaa is A or G or is absent

SEQ ID NO: 57292 - protein, 35 aa, Artificial Sequence
  GFR-binding peptide
  MOD_RES (1)..(2)..(34): Xaa is C or S
XXTPTKMNAISMLYFNDKQQIILKKYRGMVVDRXG

SEQ ID NO: 57293 - protein, 40 aa, Artificial Sequence; identical to SEQ ID NO: 6239
  GFR-binding peptide
  MOD_RES (4)..(5)..(38)..(40): Xaa is C or S

SEQ ID NO: 57294 - protein, 37 aa, Artificial Sequence; identical to SEQ ID NO: 27379
  GFR-binding peptide
  MOD_RES (4)..(5)..(37): Xaa is C or S

SEQ ID NO: 57295 - protein, 39 aa, Artificial Sequence; identical to SEQ ID NO: 8919
  GFR-binding peptide
  MOD_RES (2)..(3)..(36)..(38): Xaa is C or S

SEQ ID NO: 57296 - protein, 35 aa, Artificial Sequence
  GFR-binding peptide
  MOD_RES (1)..(2)..(35): Xaa is C or S
  MOD_RES (16)..(17)..(18)..(19)..(20): Xaa is A or G
  MOD_RES (21)..(22)..(23)..(24): Xaa is A or G or is absent
XXAPVKTNAISMLYFXXXXXXXXXLKKYRMIVEEX

SEQ ID NO: 57297 - protein, 38 aa, Artificial Sequence; identical to SEQ ID NO: 8920
  GFR-binding peptide
  MOD_RES (3)..(4)..(36)..(38): Xaa is C or S

SEQ ID NO: 57298 - protein, 45 aa, Artificial Sequence; identical to SEQ ID NO: 8922
  GFR-binding peptide
  MOD_RES (6)..(7)..(42)..(44): Xaa is C or S
  MOD_RES (21)..(22)..(23)..(24)..(25): Xaa is A or G
  MOD_RES (26)..(27)..(28)..(29): Xaa is A or G or is absent

SEQ ID NO: 57299 - protein, 37 aa, Artificial Sequence; identical to SEQ ID NO: 8923
  GFR-binding peptide
  MOD_RES (3)..(4)..(37): Xaa is C or S

SEQ ID NO: 57300 - protein, 33 aa, Artificial Sequence; identical to SEQ ID NO: 8925
  GFR-binding peptide
  MOD_RES (1)..(1): Xaa is C or S
  MOD_RES (15)..(16)..(17)..(18)..(19): Xaa is A or G
  MOD_RES (20)..(21)..(22)..(23): Xaa is A or G or is absent

SEQ ID NO: 57301 - protein, 40 aa, Artificial Sequence; identical to SEQ ID NO: 8926
  GFR-binding peptide
  MOD_RES (5)..(6)..(38)..(40): Xaa is C or S

SEQ ID NO: 57302 - protein, 42 aa, Artificial Sequence; identical to SEQ ID NO: 8016
  GFR-binding peptide
  MOD_RES (5)..(6)..(39)..(41): Xaa is C or S

SEQ ID NO: 57303 - protein, 34 aa, Artificial Sequence; identical to SEQ ID NO: 8019
  GFR-binding peptide
  MOD_RES (34)..(34): Xaa is C or S
  MOD_RES (14)..(15)..(16)..(17)..(18): Xaa is A or G
  MOD_RES (19)..(20)..(21)..(22): Xaa is A or G or is absent

SEQ ID NO: 57304 - protein, 31 aa, Artificial Sequence; identical to SEQ ID NO: 15316
  GFR-binding peptide
  MOD_RES (1)..(1): Xaa is C or S

SEQ ID NO: 57305 - protein, 32 aa, Artificial Sequence
  GFR-binding peptide
  MOD_RES (1)..(1): Xaa is C or S
XTPTKMNAISMLYFNDKQQIILKKYRGMVVDR

SEQ ID NO: 57306 - protein, 35 aa, Artificial Sequence; identical to SEQ ID NO: 28346
  GFR-binding peptide
  MOD_RES (1)..(2): Xaa is C or S
  MOD_RES (16)..(17)..(18)..(19)..(20): Xaa is A or G
  MOD_RES (21)..(22)..(23)..(24): Xaa is A or G or is absent

SEQ ID NO: 57307 - protein, 42 aa, Artificial Sequence; identical to SEQ ID NO: 7177
  GFR-binding peptide
  MOD_RES (4)..(5)..(39)..(41): Xaa is C or S
  MOD_RES (19)..(20)..(21)..(22)..(23): Xaa is A or G
  MOD_RES (24)..(25)..(26)..(27): Xaa is A or G or is absent

SEQ ID NO: 57308 - protein, 40 aa, Artificial Sequence; identical to SEQ ID NO: 8938
  GFR-binding peptide
  MOD_RES (6)..(7): Xaa is C or S
  MOD_RES (21)..(22)..(23)..(24)..(25): Xaa is A or G
  MOD_RES (26)..(27)..(28)..(29): Xaa is A or G or is absent

SEQ ID NO: 57309 - protein, 37 aa, Artificial Sequence; identical to SEQ ID NO: 8939
  GFR-binding peptide
  MOD_RES (2)..(3): Xaa is C or S
  MOD_RES (17)..(18)..(19)..(20)..(21): Xaa is A or G
  MOD_RES (22)..(23)..(24)..(25): Xaa is A or G or is absent

SEQ ID NO: 57310 - protein, 38 aa, Artificial Sequence; identical to SEQ ID NO: 29297
  GFR-binding peptide
  MOD_RES (6)..(7): Xaa is C or S

SEQ ID NO: 57311 - protein, 39 aa, Artificial Sequence; identical to SEQ ID NO: 8944
  GFR-binding peptide
  MOD_RES (1)..(2)..(36)..(38): Xaa is C or S
  MOD_RES (16)..(17)..(18)..(19)..(20): Xaa is A or G
  MOD_RES (21)..(22)..(23)..(24): Xaa is A or G or is absent

SEQ ID NO: 57312 - protein, 43 aa, Artificial Sequence; identical to SEQ ID NO: 7185
  GFR-binding peptide
  MOD_RES (6)..(7)..(41)..(43): Xaa is C or S
  MOD_RES (21)..(22)..(23)..(24)..(25): Xaa is A or G
  MOD_RES (26)..(27)..(28)..(29): Xaa is A or G or is absent

SEQ ID NO: 57313 - protein, 35 aa, Artificial Sequence; identical to SEQ ID NO: 28352
  GFR-binding peptide
  MOD_RES (4)..(5): Xaa is C or S

SEQ ID NO: 57314 - protein, 37 aa, Artificial Sequence
  GFR-binding peptide
  MOD_RES (3)..(4): Xaa is C or S
  MOD_RES (18)..(19)..(20)..(21)..(22): Xaa is A or G
  MOD_RES (23)..(24)..(25)..(26): Xaa is A or G or is absent
GPXXTPTKMNAISMLYFXXXXXXXXXLKKYRGMVVDR

SEQ ID NO: 57315 - protein, 39 aa, Artificial Sequence; identical to SEQ ID NO: 28356
  GFR-binding peptide
  MOD_RES (6)..(7)..(39): Xaa is C or S

SEQ ID NO: 57316 - protein, 33 aa, Artificial Sequence; identical to SEQ ID NO: 7193
  GFR-binding peptide
  MOD_RES (2)..(3): Xaa is C or S

SEQ ID NO: 57317 - protein, 43 aa, Artificial Sequence; identical to SEQ ID NO: 6260
  GFR-binding peptide
  MOD_RES (5)..(6)..(40)..(42): Xaa is C or S
  MOD_RES (20)..(21)..(22)..(23)..(24): Xaa is A or G
  MOD_RES (25)..(26)..(27)..(28): Xaa is A or G or is absent

SEQ ID NO: 57318 - protein, 42 aa, Artificial Sequence
  GFR-binding peptide
  MOD_RES (6)..(7)..(41): Xaa is C or S
  MOD_RES (21)..(22)..(23)..(24)..(25): Xaa is A or G
  MOD_RES (26)..(27)..(28)..(29): Xaa is A or G or is absent
GSAGPXXTPTKMNAISMLYFXXXXXXXXXLKKYRGMVVDRXG

SEQ ID NO: 57319 - protein, 37 aa, Artificial Sequence; identical to SEQ ID NO: 6263
  GFR-binding peptide
  MOD_RES (1)..(35)..(37): Xaa is C or S
  MOD_RES (15)..(16)..(17)..(18)..(19): Xaa is A or G
  MOD_RES (20)..(21)..(22)..(23): Xaa is A or G or is absent

SEQ ID NO: 57320 - protein, 34 aa, Artificial Sequence
  GFR-binding peptide
  MOD_RES (31)..(33): Xaa is C or S
APVKTNAISMLYFDNGRVLLLKKYRMIVEEXGXL

SEQ ID NO: 57321 - protein, 37 aa, Artificial Sequence; identical to SEQ ID NO: 7195
  GFR-binding peptide
  MOD_RES (1)..(2)..(34)..(36): Xaa is C or S

SEQ ID NO: 57322 - protein, 36 aa, Artificial Sequence; identical to SEQ ID NO: 7197
  GFR-binding peptide
  MOD_RES (1)..(2)..(36): Xaa is C or S
  MOD_RES (16)..(17)..(18)..(19)..(20): Xaa is A or G
  MOD_RES (21)..(22)..(23)..(24): Xaa is A or G or is absent

SEQ ID NO: 57323 - protein, 38 aa, Artificial Sequence; identical to SEQ ID NO: 8036
  GFR-binding peptide
  MOD_RES (5)..(6): Xaa is C or S
  MOD_RES (20)..(21)..(22)..(23)..(24): Xaa is A or G
  MOD_RES (25)..(26)..(27)..(28): Xaa is A or G or is absent

SEQ ID NO: 57324 - protein, 41 aa, Artificial Sequence; identical to SEQ ID NO: 7198
  GFR-binding peptide
  MOD_RES (5)..(39)..(41): Xaa is C or S
  MOD_RES (19)..(20)..(21)..(22)..(23): Xaa is A or G
  MOD_RES (24)..(25)..(26)..(27): Xaa is A or G or is absent

SEQ ID NO: 57325 - protein, 41 aa, Artificial Sequence; identical to SEQ ID NO: 28366
  GFR-binding peptide
  MOD_RES (6)..(7)..(39)..(41): Xaa is C or S

SEQ ID NO: 57326 - protein, 39 aa, Artificial Sequence
  GFR-binding peptide
  MOD_RES (3)..(4)..(38): Xaa is C or S
  MOD_RES (18)..(19)..(20)..(21)..(22): Xaa is A or G
  MOD_RES (23)..(24)..(25)..(26): Xaa is A or G or is absent
GPXXTPTKMNAISMLYFXXXXXXXXXLKKYRGMVVDRXG

SEQ ID NO: 57327 - protein, 37 aa, Artificial Sequence; identical to SEQ ID NO: 7199
  GFR-binding peptide
  MOD_RES (1)..(35)..(37): Xaa is C or S
  MOD_RES (15)..(16)..(17)..(18)..(19): Xaa is A or G
  MOD_RES (20)..(21)..(22)..(23): Xaa is A or G or is absent

SEQ ID NO: 57328 - protein, 35 aa, Artificial Sequence; identical to SEQ ID NO: 8957
  GFR-binding peptide
  MOD_RES (1)..(33)..(35): Xaa is C or S

SEQ ID NO: 57329 - protein, 39 aa, Artificial Sequence; identical to SEQ ID NO: 8038
  GFR-binding peptide
  MOD_RES (1)..(2)..(36)..(38): Xaa is C or S
  MOD_RES (16)..(17)..(18)..(19)..(20): Xaa is A or G
  MOD_RES (21)..(22)..(23)..(24): Xaa is A or G or is absent

SEQ ID NO: 57330 - protein, 37 aa, Artificial Sequence; identical to SEQ ID NO: 8040
  GFR-binding peptide
  MOD_RES (1)..(2)..(36): Xaa is C or S
  MOD_RES (16)..(17)..(18)..(19)..(20): Xaa is A or G
  MOD_RES (21)..(22)..(23)..(24): Xaa is A or G or is absent

SEQ ID NO: 57331 - protein, 42 aa, Artificial Sequence; identical to SEQ ID NO: 7204
  GFR-binding peptide
  MOD_RES (5)..(6)..(40)..(42): Xaa is C or S
  MOD_RES (20)..(21)..(22)..(23)..(24): Xaa is A or G
  MOD_RES (25)..(26)..(27)..(28): Xaa is A or G or is absent

SEQ ID NO: 57332 - protein, 36 aa, Artificial Sequence; identical to SEQ ID NO: 30338
  GFR-binding peptide
  MOD_RES (3)..(4)..(36): Xaa is C or S

SEQ ID NO: 57333 - protein, 40 aa, Artificial Sequence; identical to SEQ ID NO: 8045
  GFR-binding peptide
  MOD_RES (4)..(5)..(37)..(39): Xaa is C or S

SEQ ID NO: 57334 - protein, 35 aa, Artificial Sequence; identical to SEQ ID NO: 8968
  GFR-binding peptide
  MOD_RES (32)..(34): Xaa is C or S

SEQ ID NO: 57335 - protein, 39 aa, Artificial Sequence; identical to SEQ ID NO: 6282
  GFR-binding peptide
  MOD_RES (3)..(4)..(38): Xaa is C or S
  MOD_RES (18)..(19)..(20)..(21)..(22): Xaa is A or G
  MOD_RES (23)..(24)..(25)..(26): Xaa is A or G or is absent

SEQ ID NO: 57336 - protein, 32 aa, Artificial Sequence; identical to SEQ ID NO: 8048
  GFR-binding peptide
  MOD_RES (1)..(2): Xaa is C or S

SEQ ID NO: 57337 - protein, 32 aa, Artificial Sequence; identical to SEQ ID NO: 8053
  GFR-binding peptide
  MOD_RES (32)..(32): Xaa is C or S

SEQ ID NO: 57338 - protein, 40 aa, Artificial Sequence
  GFR-binding peptide
  MOD_RES (5)..(6)..(38)..(40): Xaa is C or S
SAGPXXTPTKMNAISMLYFNDKQQIILKKYRGMVVDRXGX

SEQ ID NO: 57339 - protein, 40 aa, Artificial Sequence; identical to SEQ ID NO: 14516
  GFR-binding peptide
  MOD_RES (5)..(6)..(38)..(40): Xaa is C or S

SEQ ID NO: 57340 - protein, 36 aa, Artificial Sequence; identical to SEQ ID NO: 7214
  GFR-binding peptide
  MOD_RES (1)..(33)..(35): Xaa is C or S

SEQ ID NO: 57341 - protein, 44 aa, Artificial Sequence; identical to SEQ ID NO: 6288
  GFR-binding peptide
  MOD_RES (6)..(7)..(42)..(44): Xaa is C or S
  MOD_RES (21)..(22)..(23)..(24)..(25): Xaa is A or G
  MOD_RES (26)..(27)..(28)..(29): Xaa is A or G or is absent

SEQ ID NO: 57342 - protein, 37 aa, Artificial Sequence
  GFR-binding peptide
  MOD_RES (1)..(35)..(37): Xaa is C or S
  MOD_RES (15)..(16)..(17)..(18)..(19): Xaa is A or G
  MOD_RES (20)..(21)..(22)..(23): Xaa is A or G or is absent
XTPTKMNAISMLYFXXXXXXXXXLKKYRGMVVDRXGX

SEQ ID NO: 57343 - protein, 33 aa, Artificial Sequence
  GFR-binding peptide
  MOD_RES (14)..(15)..(16)..(17)..(18): Xaa is A or G
  MOD_RES (19)..(20)..(21)..(22): Xaa is A or G or is absent
TPTKMNAISMLYFXXXXXXXXXLKKYRGMVVDR

SEQ ID NO: 57344 - protein, 39 aa, Artificial Sequence; identical to SEQ ID NO: 14518
  GFR-binding peptide
  MOD_RES (1)..(2)..(36)..(38): Xaa is C or S
  MOD_RES (16)..(17)..(18)..(19)..(20): Xaa is A or G
  MOD_RES (21)..(22)..(23)..(24): Xaa is A or G or is absent

SEQ ID NO: 57345 - protein, 44 aa, Artificial Sequence; identical to SEQ ID NO: 8976
  GFR-binding peptide
  MOD_RES (5)..(6)..(41)..(43): Xaa is C or S
  MOD_RES (20)..(21)..(22)..(23)..(24): Xaa is A or G
  MOD_RES (25)..(26)..(27)..(28): Xaa is A or G or is absent

SEQ ID NO: 57346 - protein, 39 aa, Artificial Sequence; identical to SEQ ID NO: 8977
  GFR-binding peptide
  MOD_RES (3)..(4)..(36)..(38): Xaa is C or S

SEQ ID NO: 57347 - protein, 39 aa, Artificial Sequence; identical to SEQ ID NO: 6289
  GFR-binding peptide
  MOD_RES (2)..(3)..(37)..(39): Xaa is C or S
  MOD_RES (17)..(18)..(19)..(20)..(21): Xaa is A or G
  MOD_RES (22)..(23)..(24)..(25): Xaa is A or G or is absent

SEQ ID NO: 57348 - protein, 38 aa, Artificial Sequence; identical to SEQ ID NO: 8980
  GFR-binding peptide
  MOD_RES (5)..(6)..(38): Xaa is C or S

SEQ ID NO: 57349 - protein, 41 aa, Artificial Sequence; identical to SEQ ID NO: 6294
  GFR-binding peptide
  MOD_RES (5)..(6)..(40): Xaa is C or S
  MOD_RES (20)..(21)..(22)..(23)..(24): Xaa is A or G
  MOD_RES (25)..(26)..(27)..(28): Xaa is A or G or is absent

SEQ ID NO: 57350 - protein, 36 aa, Artificial Sequence; identical to SEQ ID NO: 8059
  GFR-binding peptide
  MOD_RES (1)..(35): Xaa is C or S
  MOD_RES (15)..(16)..(17)..(18)..(19): Xaa is A or G
  MOD_RES (20)..(21)..(22)..(23): Xaa is A or G or is absent

SEQ ID NO: 57351 - protein, 39 aa, Artificial Sequence
  GFR-binding peptide
  MOD_RES (2)..(3)..(37)..(39): Xaa is C or S
  MOD_RES (17)..(18)..(19)..(20)..(21): Xaa is A or G
  MOD_RES (22)..(23)..(24)..(25): Xaa is A or G or is absent
PXXTPTKMNAISMLYFXXXXXXXXXLKKYRGMVVDRXGX

SEQ ID NO: 57352 - protein, 37 aa, Artificial Sequence; identical to SEQ ID NO: 6299
  GFR-binding peptide
  MOD_RES (1)..(35)..(37): Xaa is C or S
  MOD_RES (15)..(16)..(17)..(18)..(19): Xaa is A or G
  MOD_RES (20)..(21)..(22)..(23): Xaa is A or G or is absent

SEQ ID NO: 57353 - protein, 36 aa, Artificial Sequence; identical to SEQ ID NO: 16277
  GFR-binding peptide
  MOD_RES (3)..(4): Xaa is C or S
  MOD_RES (18)..(19)..(20)..(21)..(22): Xaa is A or G
  MOD_RES (23)..(24)..(25)..(26): Xaa is A or G or is absent

SEQ ID NO: 57354 - protein, 38 aa, Artificial Sequence; identical to SEQ ID NO: 8063
  GFR-binding peptide
  MOD_RES (4)..(5)..(37): Xaa is C or S

SEQ ID NO: 57355 - protein, 30 aa, Artificial Sequence; identical to SEQ ID NO: 16279
  GFR-binding peptide

SEQ ID NO: 57356 - protein, 35 aa, Artificial Sequence; identical to SEQ ID NO: 30366
  GFR-binding peptide
  MOD_RES (34)..(34): Xaa is C or S
  MOD_RES (14)..(15)..(16)..(17)..(18): Xaa is A or G
  MOD_RES (19)..(20)..(21)..(22): Xaa is A or G or is absent

SEQ ID NO: 57357 - protein, 38 aa, Artificial Sequence; identical to SEQ ID NO: 6302
  GFR-binding peptide
  MOD_RES (2)..(3)..(35)..(37): Xaa is C or S

SEQ ID NO: 57358 - protein, 35 aa, Artificial Sequence; identical to SEQ ID NO: 8069
  GFR-binding peptide
  MOD_RES (1)..(2): Xaa is C or S
  MOD_RES (16)..(17)..(18)..(19)..(20): Xaa is A or G
  MOD_RES (21)..(22)..(23)..(24): Xaa is A or G or is absent

SEQ ID NO: 57359 - protein, 39 aa, Artificial Sequence; identical to SEQ ID NO: 8990
  GFR-binding peptide
  MOD_RES (1)..(36)..(38): Xaa is C or S
  MOD_RES (15)..(16)..(17)..(18)..(19): Xaa is A or G
  MOD_RES (20)..(21)..(22)..(23): Xaa is A or G or is absent

SEQ ID NO: 57360 - protein, 39 aa, Artificial Sequence; identical to SEQ ID NO: 6306
  GFR-binding peptide
  MOD_RES (1)..(2)..(36)..(38): Xaa is C or S
  MOD_RES (16)..(17)..(18)..(19)..(20): Xaa is A or G
  MOD_RES (21)..(22)..(23)..(24): Xaa is A or G or is absent

SEQ ID NO: 57361 - protein, 33 aa, Artificial Sequence; identical to SEQ ID NO: 8997
  GFR-binding peptide
  MOD_RES (1)..(33): Xaa is C or S

SEQ ID NO: 57362 - protein, 34 aa, Artificial Sequence; identical to SEQ ID NO: 28397
  GFR-binding peptide
  MOD_RES (34)..(34): Xaa is C or S
  MOD_RES (14)..(15)..(16)..(17)..(18): Xaa is A or G
  MOD_RES (19)..(20)..(21)..(22): Xaa is A or G or is absent

SEQ ID NO: 57363 - protein, 38 aa, Artificial Sequence
  GFR-binding peptide
  MOD_RES (2)..(3)..(37): Xaa is C or S
  MOD_RES (17)..(18)..(19)..(20)..(21): Xaa is A or G
  MOD_RES (22)..(23)..(24)..(25): Xaa is A or G or is absent
PXXTPTKMNAISMLYFXXXXXXXXXLKKYRGMVVDRXG

SEQ ID NO: 57364 - protein, 34 aa, Artificial Sequence
  GFR-binding peptide
  MOD_RES (3)..(4): Xaa is C or S
GPXXTPTKMNAISMLYFNDKQQIILKKYRGMVVD

SEQ ID NO: 57365 - protein, 40 aa, Artificial Sequence; identical to SEQ ID NO: 13695
  GFR-binding peptide
  MOD_RES (6)..(7)..(39): Xaa is C or S

SEQ ID NO: 57366 - protein, 36 aa, Artificial Sequence; identical to SEQ ID NO: 9001
  GFR-binding peptide
  MOD_RES (2)..(3): Xaa is C or S
  MOD_RES (17)..(18)..(19)..(20)..(21): Xaa is A or G
  MOD_RES (22)..(23)..(24)..(25): Xaa is A or G or is absent

SEQ ID NO: 57367 - protein, 37 aa, Artificial Sequence; identical to SEQ ID NO: 27454
  GFR-binding peptide
  MOD_RES (3)..(4)..(36): Xaa is C or S

SEQ ID NO: 57368 - protein, 38 aa, Artificial Sequence; identical to SEQ ID NO: 27459
  GFR-binding peptide
  MOD_RES (4)..(5)..(37): Xaa is C or S

SEQ ID NO: 57369 - protein, 33 aa, Artificial Sequence; identical to SEQ ID NO: 8088
  GFR-binding peptide
  MOD_RES (1)..(1): Xaa is C or S
  MOD_RES (15)..(16)..(17)..(18)..(19): Xaa is A or G
  MOD_RES (20)..(21)..(22)..(23): Xaa is A or G or is absent

SEQ ID NO: 57370 - protein, 39 aa, Artificial Sequence; identical to SEQ ID NO: 7236
  GFR-binding peptide
  MOD_RES (6)..(7): Xaa is C or S
  MOD_RES (21)..(22)..(23)..(24)..(25): Xaa is A or G
  MOD_RES (26)..(27)..(28)..(29): Xaa is A or G or is absent

SEQ ID NO: 57371 - protein, 37 aa, Artificial Sequence
  GFR-binding peptide
  MOD_RES (3)..(4)..(37): Xaa is C or S
  MOD_RES (18)..(19)..(20)..(21)..(22): Xaa is A or G
  MOD_RES (23)..(24)..(25)..(26): Xaa is A or G or is absent
STXXAPVKTNAISMLYFXXXXXXXXXLKKYRMIVEEX

SEQ ID NO: 57372 - protein, 35 aa, Artificial Sequence; identical to SEQ ID NO: 6325
  GFR-binding peptide
  MOD_RES (34)..(34): Xaa is C or S
  MOD_RES (14)..(15)..(16)..(17)..(18): Xaa is A or G
  MOD_RES (19)..(20)..(21)..(22): Xaa is A or G or is absent

SEQ ID NO: 57373 - protein, 37 aa, Artificial Sequence; identical to SEQ ID NO: 8094
  GFR-binding peptide
  MOD_RES (34)..(36): Xaa is C or S
  MOD_RES (14)..(15)..(16)..(17)..(18): Xaa is A or G
  MOD_RES (19)..(20)..(21)..(22): Xaa is A or G or is absent

SEQ ID NO: 57374 - protein, 38 aa, Artificial Sequence
  GFR-binding peptide
  MOD_RES (4)..(5)..(37): Xaa is C or S
AGPXXTPTKMNAISMLYFNDKQQIILKKYRGMVVDRXG

SEQ ID NO: 57375 - protein, 38 aa, Artificial Sequence; identical to SEQ ID NO: 9005
  GFR-binding peptide
  MOD_RES (3)..(4)..(36)..(38): Xaa is C or S

SEQ ID NO: 57376 - protein, 42 aa, Artificial Sequence; identical to SEQ ID NO: 8096
  GFR-binding peptide
  MOD_RES (4)..(5)..(39)..(41): Xaa is C or S
  MOD_RES (19)..(20)..(21)..(22)..(23): Xaa is A or G
  MOD_RES (24)..(25)..(26)..(27): Xaa is A or G or is absent

SEQ ID NO: 57377 - protein, 42 aa, Artificial Sequence; identical to SEQ ID NO: 8097
  GFR-binding peptide
  MOD_RES (6)..(7)..(41): Xaa is C or S
  MOD_RES (21)..(22)..(23)..(24)..(25): Xaa is A or G
  MOD_RES (26)..(27)..(28)..(29): Xaa is A or G or is absent

SEQ ID NO: 57378 - protein, 42 aa, Artificial Sequence; identical to SEQ ID NO: 16301
  GFR-binding peptide
  MOD_RES (4)..(5)..(39)..(41): Xaa is C or S
  MOD_RES (19)..(20)..(21)..(22)..(23): Xaa is A or G
  MOD_RES (24)..(25)..(26)..(27): Xaa is A or G or is absent

SEQ ID NO: 57379 - protein, 36 aa, Artificial Sequence
  GFR-binding peptide
  MOD_RES (5)..(6): Xaa is C or S
VPSTXXAPVKTNAISMLYFDNGRVLLLKKYRMIVEE

SEQ ID NO: 57380 - protein, 36 aa, Artificial Sequence; identical to SEQ ID NO: 29383
  GFR-binding peptide
  MOD_RES (2)..(3)..(35): Xaa is C or S

SEQ ID NO: 57381 - protein, 41 aa, Artificial Sequence
  GFR-binding peptide
  MOD_RES (5)..(6)..(39)..(41): Xaa is C or S
  MOD_RES (20)..(21)..(22)..(23)..(24): Xaa is A or G
  MOD_RES (25)..(26)..(27)..(28): Xaa is A or G or is absent
VPSTXXAPVKTNAISMLYFXXXXXXXXXLKKYRMIVEEXGX

SEQ ID NO: 57382 - protein, 34 aa, Artificial Sequence; identical to SEQ ID NO: 8101
  GFR-binding peptide
  MOD_RES (34)..(34): Xaa is C or S
  MOD_RES (14)..(15)..(16)..(17)..(18): Xaa is A or G
  MOD_RES (19)..(20)..(21)..(22): Xaa is A or G or is absent

SEQ ID NO: 57383 - protein, 31 aa, Artificial Sequence; identical to SEQ ID NO: 16304
  GFR-binding peptide

SEQ ID NO: 57384 - protein, 33 aa, Artificial Sequence; identical to SEQ ID NO: 27471
  GFR-binding peptide
  MOD_RES (2)..(3): Xaa is C or S

SEQ ID NO: 57385 - protein, 33 aa, Artificial Sequence; identical to SEQ ID NO: 9011
  GFR-binding peptide
  MOD_RES (1)..(2): Xaa is C or S

SEQ ID NO: 57386 - protein, 38 aa, Artificial Sequence; identical to SEQ ID NO: 29387
  GFR-binding peptide
  MOD_RES (3)..(4)..(36)..(38): Xaa is C or S

SEQ ID NO: 57387 - protein, 44 aa, Artificial Sequence; identical to SEQ ID NO: 9014
  GFR-binding peptide
  MOD_RES (6)..(7)..(41)..(43): Xaa is C or S
  MOD_RES (21)..(22)..(23)..(24)..(25): Xaa is A or G
  MOD_RES (26)..(27)..(28)..(29): Xaa is A or G or is absent

SEQ ID NO: 57388 - protein, 42 aa, Artificial Sequence; identical to SEQ ID NO: 6334
  GFR-binding peptide
  MOD_RES (5)..(6)..(40)..(42): Xaa is C or S
  MOD_RES (20)..(21)..(22)..(23)..(24): Xaa is A or G
  MOD_RES (25)..(26)..(27)..(28): Xaa is A or G or is absent

SEQ ID NO: 57389 - protein, 37 aa, Artificial Sequence
  GFR-binding peptide
  MOD_RES (2)..(3)..(37): Xaa is C or S
  MOD_RES (17)..(18)..(19)..(20)..(21): Xaa is A or G
  MOD_RES (22)..(23)..(24)..(25): Xaa is A or G or is absent
PXXTPTKMNAISMLYFXXXXXXXXXLKKYRGMVVDRX

SEQ ID NO: 57390 - protein, 36 aa, Artificial Sequence
  GFR-binding peptide
  MOD_RES (33)..(35): Xaa is C or S
  MOD_RES (14)..(15)..(16)..(17)..(18): Xaa is A or G
  MOD_RES (19)..(20)..(21)..(22): Xaa is A or G or is absent
APVKTNAISMLYFXXXXXXXXXLKKYRMIVEEXGXL

SEQ ID NO: 57391 - protein, 43 aa, Artificial Sequence; identical to SEQ ID NO: 7248
  GFR-binding peptide
  MOD_RES (5)..(6)..(40)..(42): Xaa is C or S
  MOD_RES (20)..(21)..(22)..(23)..(24): Xaa is A or G
  MOD_RES (25)..(26)..(27)..(28): Xaa is A or G or is absent

SEQ ID NO: 57392 - protein, 40 aa, Artificial Sequence; identical to SEQ ID NO: 9020
  GFR-binding peptide
  MOD_RES (5)..(6)..(40): Xaa is C or S
  MOD_RES (20)..(21)..(22)..(23)..(24): Xaa is A or G
  MOD_RES (25)..(26)..(27)..(28): Xaa is A or G or is absent

SEQ ID NO: 57393 - protein, 33 aa, Artificial Sequence; identical to SEQ ID NO: 6338
  GFR-binding peptide
  MOD_RES (2)..(3): Xaa is C or S

SEQ ID NO: 57394 - protein, 42 aa, Artificial Sequence; identical to SEQ ID NO: 29392
  GFR-binding peptide
  MOD_RES (6)..(7)..(39)..(41): Xaa is C or S

SEQ ID NO: 57395 - protein, 35 aa, Artificial Sequence; identical to SEQ ID NO: 8106
  GFR-binding peptide
  MOD_RES (2)..(3): Xaa is C or S
  MOD_RES (17)..(18)..(19)..(20)..(21): Xaa is A or G
  MOD_RES (22)..(23)..(24)..(25): Xaa is A or G or is absent

SEQ ID NO: 57396 - protein, 38 aa, Artificial Sequence; identical to SEQ ID NO: 13721
  GFR-binding peptide
  MOD_RES (5)..(6): Xaa is C or S
  MOD_RES (20)..(21)..(22)..(23)..(24): Xaa is A or G
  MOD_RES (25)..(26)..(27)..(28): Xaa is A or G or is absent

SEQ ID NO: 57397 - protein, 36 aa, Artificial Sequence
  GFR-binding peptide
  MOD_RES (5)..(6): Xaa is C or S
SAGPXXTPTKMNAISMLYFNDKQQIILKKYRGMVVD

SEQ ID NO: 57398 - protein, 40 aa, Artificial Sequence; identical to SEQ ID NO: 28438
  GFR-binding peptide
  MOD_RES (5)..(6)..(38)..(40): Xaa is C or S

SEQ ID NO: 57399 - protein, 44 aa, Artificial Sequence; identical to SEQ ID NO: 14555
  GFR-binding peptide
  MOD_RES (6)..(7)..(41)..(43): Xaa is C or S
  MOD_RES (21)..(22)..(23)..(24)..(25): Xaa is A or G
  MOD_RES (26)..(27)..(28)..(29): Xaa is A or G or is absent

SEQ ID NO: 57400 - protein, 35 aa, Artificial Sequence; identical to SEQ ID NO: 15410
  GFR-binding peptide
  MOD_RES (32)..(34): Xaa is C or S

SEQ ID NO: 57401 - protein, 40 aa, Artificial Sequence; identical to SEQ ID NO: 7257
  GFR-binding peptide
  MOD_RES (4)..(5)..(39): Xaa is C or S
  MOD_RES (19)..(20)..(21)..(22)..(23): Xaa is A or G
  MOD_RES (24)..(25)..(26)..(27): Xaa is A or G or is absent

SEQ ID NO: 57402 - protein, 35 aa, Artificial Sequence; identical to SEQ ID NO: 8109
  GFR-binding peptide
  MOD_RES (1)..(1): Xaa is C or S
  MOD_RES (15)..(16)..(17)..(18)..(19): Xaa is A or G
  MOD_RES (20)..(21)..(22)..(23): Xaa is A or G or is absent

SEQ ID NO: 57403 - protein, 41 aa, Artificial Sequence; identical to SEQ ID NO: 9027
  GFR-binding peptide
  MOD_RES (6)..(7)..(41): Xaa is C or S
  MOD_RES (21)..(22)..(23)..(24)..(25): Xaa is A or G
  MOD_RES (26)..(27)..(28)..(29): Xaa is A or G or is absent

SEQ ID NO: 57404 - protein, 31 aa, Artificial Sequence; identical to SEQ ID NO: 6347
  GFR-binding peptide
  MOD_RES (1)..(1): Xaa is C or S

SEQ ID NO: 57405 - protein, 39 aa, Artificial Sequence; identical to SEQ ID NO: 16329
  GFR-binding peptide
  MOD_RES (5)..(6): Xaa is C or S
  MOD_RES (20)..(21)..(22)..(23)..(24): Xaa is A or G
  MOD_RES (25)..(26)..(27)..(28): Xaa is A or G or is absent

SEQ ID NO: 57406 - protein, 34 aa, Artificial Sequence; identical to SEQ ID NO: 13732
  GFR-binding peptide
  MOD_RES (2)..(3): Xaa is C or S

SEQ ID NO: 57407 - protein, 38 aa, Artificial Sequence; identical to SEQ ID NO: 15413
  GFR-binding peptide
  MOD_RES (4)..(5): Xaa is C or S
  MOD_RES (19)..(20)..(21)..(22)..(23): Xaa is A or G
  MOD_RES (24)..(25)..(26)..(27): Xaa is A or G or is absent

SEQ ID NO: 57408 - protein, 37 aa, Artificial Sequence; identical to SEQ ID NO: 30415
  GFR-binding peptide
  MOD_RES (1)..(2)..(36): Xaa is C or S
  MOD_RES (16)..(17)..(18)..(19)..(20): Xaa is A or G
  MOD_RES (21)..(22)..(23)..(24): Xaa is A or G or is absent

SEQ ID NO: 57409 - protein, 41 aa, Artificial Sequence; identical to SEQ ID NO: 8114
  GFR-binding peptide
  MOD_RES (4)..(38)..(40): Xaa is C or S
  MOD_RES (18)..(19)..(20)..(21)..(22): Xaa is A or G
  MOD_RES (23)..(24)..(25)..(26): Xaa is A or G or is absent

SEQ ID NO: 57410 - protein, 35 aa, Artificial Sequence; identical to SEQ ID NO: 9031
  GFR-binding peptide
  MOD_RES (2)..(3): Xaa is C or S

SEQ ID NO: 57411 - protein, 33 aa, Artificial Sequence; identical to SEQ ID NO: 9032
  GFR-binding peptide
  MOD_RES (1)..(33): Xaa is C or S

SEQ ID NO: 57412 - protein, 40 aa, Artificial Sequence; identical to SEQ ID NO: 9033
  GFR-binding peptide
  MOD_RES (6)..(7): Xaa is C or S
  MOD_RES (21)..(22)..(23)..(24)..(25): Xaa is A or G
  MOD_RES (26)..(27)..(28)..(29): Xaa is A or G or is absent

SEQ ID NO: 57413 - protein, 44 aa, Artificial Sequence
  GFR-binding peptide
  MOD_RES (6)..(7)..(41)..(43): Xaa is C or S
  MOD_RES (21)..(22)..(23)..(24)..(25): Xaa is A or G
  MOD_RES (26)..(27)..(28)..(29): Xaa is A or G or is absent
GSAGPXXTPTKMNAISMLYFXXXXXXXXXLKKYRGMVVDRXGXS

SEQ ID NO: 57414 - protein, 40 aa, Artificial Sequence; identical to SEQ ID NO: 6352
  GFR-binding peptide
  MOD_RES (4)..(5)..(37)..(39): Xaa is C or S

SEQ ID NO: 57415 - protein, 30 aa, Artificial Sequence; identical to SEQ ID NO: 29405
  GFR-binding peptide

SEQ ID NO: 57416 - protein, 42 aa, Artificial Sequence; identical to SEQ ID NO: 8123
  GFR-binding peptide
  MOD_RES (4)..(5)..(39)..(41): Xaa is C or S
  MOD_RES (19)..(20)..(21)..(22)..(23): Xaa is A or G
  MOD_RES (24)..(25)..(26)..(27): Xaa is A or G or is absent

SEQ ID NO: 57417 - protein, 36 aa, Artificial Sequence; identical to SEQ ID NO: 15425
  GFR-binding peptide
  MOD_RES (2)..(3): Xaa is C or S
  MOD_RES (17)..(18)..(19)..(20)..(21): Xaa is A or G
  MOD_RES (22)..(23)..(24)..(25): Xaa is A or G or is absent

SEQ ID NO: 57418 - protein, 33 aa, Artificial Sequence; identical to SEQ ID NO: 6355
  GFR-binding peptide
  MOD_RES (1)..(1): Xaa is C or S
  MOD_RES (15)..(16)..(17)..(18)..(19): Xaa is A or G
  MOD_RES (20)..(21)..(22)..(23): Xaa is A or G or is absent

SEQ ID NO: 57419 - protein, 35 aa, Artificial Sequence; identical to SEQ ID NO: 30427
  GFR-binding peptide
  MOD_RES (4)..(5): Xaa is C or S

SEQ ID NO: 57420 - protein, 41 aa, Artificial Sequence; identical to SEQ ID NO: 27494
  GFR-binding peptide
  MOD_RES (4)..(5)..(39)..(41): Xaa is C or S
  MOD_RES (19)..(20)..(21)..(22)..(23): Xaa is A or G
  MOD_RES (24)..(25)..(26)..(27): Xaa is A or G or is absent

SEQ ID NO: 57421 - protein, 32 aa, Artificial Sequence; identical to SEQ ID NO: 28449
  GFR-binding peptide
  MOD_RES (32)..(32): Xaa is C or S

SEQ ID NO: 57422 - protein, 40 aa, Artificial Sequence; identical to SEQ ID NO: 28451
  GFR-binding peptide
  MOD_RES (4)..(5)..(39): Xaa is C or S
  MOD_RES (19)..(20)..(21)..(22)..(23): Xaa is A or G
  MOD_RES (24)..(25)..(26)..(27): Xaa is A or G or is absent

SEQ ID NO: 57423 - protein, 42 aa, Artificial Sequence; identical to SEQ ID NO: 27499
  GFR-binding peptide
  MOD_RES (5)..(6)..(40)..(42): Xaa is C or S
  MOD_RES (20)..(21)..(22)..(23)..(24): Xaa is A or G
  MOD_RES (25)..(26)..(27)..(28): Xaa is A or G or is absent

SEQ ID NO: 57424 - protein, 37 aa, Artificial Sequence; identical to SEQ ID NO: 27501
  GFR-binding peptide
  MOD_RES (1)..(35)..(37): Xaa is C or S
  MOD_RES (15)..(16)..(17)..(18)..(19): Xaa is A or G
  MOD_RES (20)..(21)..(22)..(23): Xaa is A or G or is absent

SEQ ID NO: 57425 - protein, 34 aa, Artificial Sequence; identical to SEQ ID NO: 8137
  GFR-binding peptide
  MOD_RES (32)..(34): Xaa is C or S

SEQ ID NO: 57426 - protein, 40 aa, Artificial Sequence; identical to SEQ ID NO: 27502
  GFR-binding peptide
  MOD_RES (3)..(4)..(38)..(40): Xaa is C or S
  MOD_RES (18)..(19)..(20)..(21)..(22): Xaa is A or G
  MOD_RES (23)..(24)..(25)..(26): Xaa is A or G or is absent

SEQ ID NO: 57427 - protein, 34 aa, Artificial Sequence; identical to SEQ ID NO: 7279
  GFR-binding peptide
  MOD_RES (3)..(4): Xaa is C or S

SEQ ID NO: 57428 - protein, 32 aa, Artificial Sequence; identical to SEQ ID NO: 6367
  GFR-binding peptide
  MOD_RES (14)..(15)..(16)..(17)..(18): Xaa is A or G
  MOD_RES (19)..(20)..(21)..(22): Xaa is A or G or is absent

SEQ ID NO: 57429 - protein, 43 aa, Artificial Sequence; identical to SEQ ID NO: 6370
  GFR-binding peptide
  MOD_RES (4)..(5)..(40)..(42): Xaa is C or S
  MOD_RES (19)..(20)..(21)..(22)..(23): Xaa is A or G
  MOD_RES (24)..(25)..(26)..(27): Xaa is A or G or is absent

SEQ ID NO: 57430 - protein, 39 aa, Artificial Sequence; identical to SEQ ID NO: 7281
  GFR-binding peptide
  MOD_RES (5)..(6)..(38): Xaa is C or S

SEQ ID NO: 57431 - protein, 43 aa, Artificial Sequence; identical to SEQ ID NO: 9053
  GFR-binding peptide
  MOD_RES (5)..(6)..(40)..(42): Xaa is C or S
  MOD_RES (20)..(21)..(22)..(23)..(24): Xaa is A or G
  MOD_RES (25)..(26)..(27)..(28): Xaa is A or G or is absent

SEQ ID NO: 57432 - protein, 42 aa, Artificial Sequence; identical to SEQ ID NO: 9056
  GFR-binding peptide
  MOD_RES (6)..(7)..(41): Xaa is C or S
  MOD_RES (21)..(22)..(23)..(24)..(25): Xaa is A or G
  MOD_RES (26)..(27)..(28)..(29): Xaa is A or G or is absent

SEQ ID NO: 57433 - protein, 39 aa, Artificial Sequence; identical to SEQ ID NO: 6373
  GFR-binding peptide
  MOD_RES (3)..(4)..(38): Xaa is C or S
  MOD_RES (18)..(19)..(20)..(21)..(22): Xaa is A or G
  MOD_RES (23)..(24)..(25)..(26): Xaa is A or G or is absent

SEQ ID NO: 57434 - protein, 42 aa, Artificial Sequence; identical to SEQ ID NO: 16356
  GFR-binding peptide
  MOD_RES (6)..(7)..(39)..(41): Xaa is C or S

SEQ ID NO: 57435 - protein, 38 aa, Artificial Sequence; identical to SEQ ID NO: 6374
  GFR-binding peptide
  MOD_RES (35)..(37): Xaa is C or S
  MOD_RES (14)..(15)..(16)..(17)..(18): Xaa is A or G
  MOD_RES (19)..(20)..(21)..(22): Xaa is A or G or is absent

SEQ ID NO: 57436 - protein, 42 aa, Artificial Sequence; identical to SEQ ID NO: 14584
  GFR-binding peptide
  MOD_RES (5)..(6)..(40)..(42): Xaa is C or S
  MOD_RES (20)..(21)..(22)..(23)..(24): Xaa is A or G
  MOD_RES (25)..(26)..(27)..(28): Xaa is A or G or is absent

SEQ ID NO: 57437 - protein, 43 aa, Artificial Sequence; identical to SEQ ID NO: 8140
  GFR-binding peptide
  MOD_RES (6)..(7)..(42): Xaa is C or S
  MOD_RES (21)..(22)..(23)..(24)..(25): Xaa is A or G
  MOD_RES (26)..(27)..(28)..(29): Xaa is A or G or is absent

SEQ ID NO: 57438 - protein, 34 aa, Artificial Sequence; identical to SEQ ID NO: 28462
  GFR-binding peptide
  MOD_RES (2)..(3): Xaa is C or S

SEQ ID NO: 57439 - protein, 35 aa, Artificial Sequence
  GFR-binding peptide
  MOD_RES (32)..(34): Xaa is C or S
TPTKMNAISMLYFNDKQQIILKKYRGMVVDRXGXS

SEQ ID NO: 57440 - protein, 34 aa, Artificial Sequence; identical to SEQ ID NO: 8142
  GFR-binding peptide
  MOD_RES (1)..(33): Xaa is C or S

SEQ ID NO: 57441 - protein, 33 aa, Artificial Sequence; identical to SEQ ID NO: 30438
  GFR-binding peptide
  MOD_RES (32)..(32): Xaa is C or S

SEQ ID NO: 57442 - protein, 35 aa, Artificial Sequence; identical to SEQ ID NO: 6378
  GFR-binding peptide
  MOD_RES (35)..(35): Xaa is C or S
  MOD_RES (14)..(15)..(16)..(17)..(18): Xaa is A or G
  MOD_RES (19)..(20)..(21)..(22): Xaa is A or G or is absent

SEQ ID NO: 57443 - protein, 37 aa, Artificial Sequence; identical to SEQ ID NO: 7287
  GFR-binding peptide
  MOD_RES (3)..(4): Xaa is C or S
  MOD_RES (18)..(19)..(20)..(21)..(22): Xaa is A or G
  MOD_RES (23)..(24)..(25)..(26): Xaa is A or G or is absent

SEQ ID NO: 57444 - protein, 33 aa, Artificial Sequence; identical to SEQ ID NO: 28466
  GFR-binding peptide
  MOD_RES (14)..(15)..(16)..(17)..(18): Xaa is A or G
  MOD_RES (19)..(20)..(21)..(22): Xaa is A or G or is absent

SEQ ID NO: 57445 - protein, 42 aa, Artificial Sequence; identical to SEQ ID NO: 7288
  GFR-binding peptide
  MOD_RES (5)..(6)..(40)..(42): Xaa is C or S
  MOD_RES (20)..(21)..(22)..(23)..(24): Xaa is A or G
  MOD_RES (25)..(26)..(27)..(28): Xaa is A or G or is absent

SEQ ID NO: 57446 - protein, 35 aa, Artificial Sequence
  GFR-binding peptide
  MOD_RES (3)..(4): Xaa is C or S
GPXXTPTKMNAISMLYFNDKQQIILKKYRGMVVDR

SEQ ID NO: 57447 - protein, 41 aa, Artificial Sequence; identical to SEQ ID NO: 29433
  GFR-binding peptide
  MOD_RES (5)..(6)..(38)..(40): Xaa is C or S

SEQ ID NO: 57448 - protein, 35 aa, Artificial Sequence; identical to SEQ ID NO: 8148
  GFR-binding peptide
  MOD_RES (4)..(5): Xaa is C or S

SEQ ID NO: 57449 - protein, 42 aa, Artificial Sequence; identical to SEQ ID NO: 14591
  GFR-binding peptide
  MOD_RES (6)..(7)..(41): Xaa is C or S
  MOD_RES (21)..(22)..(23)..(24)..(25): Xaa is A or G
  MOD_RES (26)..(27)..(28)..(29): Xaa is A or G or is absent

SEQ ID NO: 57450 - protein, 37 aa, Artificial Sequence; identical to SEQ ID NO: 6382
  GFR-binding peptide
  MOD_RES (4)..(4): Xaa is C or S
  MOD_RES (18)..(19)..(20)..(21)..(22): Xaa is A or G
  MOD_RES (23)..(24)..(25)..(26): Xaa is A or G or is absent

SEQ ID NO: 57451 - protein, 35 aa, Artificial Sequence; identical to SEQ ID NO: 7293
  GFR-binding peptide
  MOD_RES (4)..(5): Xaa is C or S

SEQ ID NO: 57452 - protein, 34 aa, Artificial Sequence
  GFR-binding peptide
  MOD_RES (3)..(4): Xaa is C or S
STXXAPVKTNAISMLYFDNGRVLLLKKYRMIVEE

SEQ ID NO: 57453 - protein, 39 aa, Artificial Sequence; identical to SEQ ID NO: 6383
  GFR-binding peptide
  MOD_RES (5)..(6): Xaa is C or S
  MOD_RES (20)..(21)..(22)..(23)..(24): Xaa is A or G
  MOD_RES (25)..(26)..(27)..(28): Xaa is A or G or is absent

SEQ ID NO: 57454 - protein, 35 aa, Artificial Sequence
  GFR-binding peptide
  MOD_RES (1)..(34): Xaa is C or S
  MOD_RES (15)..(16)..(17)..(18)..(19): Xaa is A or G
  MOD_RES (20)..(21)..(22)..(23): Xaa is A or G or is absent
XAPVKTNAISMLYFXXXXXXXXXLKKYRMIVEEXG

SEQ ID NO: 57455 - protein, 41 aa, Artificial Sequence
  GFR-binding peptide
  MOD_RES (6)..(7)..(40): Xaa is C or S
  MOD_RES (21)..(22)..(23)..(24)..(25): Xaa is A or G
  MOD_RES (26)..(27)..(28)..(29): Xaa is A or G or is absent
RVPSTXXAPVKTNAISMLYFXXXXXXXXXLKKYRMIVEEXG

SEQ ID NO: 57456 - protein, 35 aa, Artificial Sequence; identical to SEQ ID NO: 7297
  GFR-binding peptide
  MOD_RES (1)..(2): Xaa is C or S
  MOD_RES (16)..(17)..(18)..(19)..(20): Xaa is A or G
  MOD_RES (21)..(22)..(23)..(24): Xaa is A or G or is absent

SEQ ID NO: 57457 - protein, 30 aa, Artificial Sequence
  GFR-binding peptide
APVKTNAISMLYFDNGRVLLLKKYRMIVEE

SEQ ID NO: 57458 - protein, 32 aa, Artificial Sequence; identical to SEQ ID NO: 14597
  GFR-binding peptide
  MOD_RES (32)..(32): Xaa is C or S

SEQ ID NO: 57459 - protein, 36 aa, Artificial Sequence; identical to SEQ ID NO: 8158
  GFR-binding peptide
  MOD_RES (33)..(35): Xaa is C or S

SEQ ID NO: 57460 - protein, 35 aa, Artificial Sequence; identical to SEQ ID NO: 9072
  GFR-binding peptide
  MOD_RES (1)..(35): Xaa is C or S
  MOD_RES (15)..(16)..(17)..(18)..(19): Xaa is A or G
  MOD_RES (20)..(21)..(22)..(23): Xaa is A or G or is absent

SEQ ID NO: 57461 - protein, 41 aa, Artificial Sequence; identical to SEQ ID NO: 13777
  GFR-binding peptide
  MOD_RES (5)..(6)..(38)..(40): Xaa is C or S

SEQ ID NO: 57462 - protein, 40 aa, Artificial Sequence
  GFR-binding peptide
  MOD_RES (5)..(6)..(39): Xaa is C or S
  MOD_RES (20)..(21)..(22)..(23)..(24): Xaa is A or G
  MOD_RES (25)..(26)..(27)..(28): Xaa is A or G or is absent
VPSTXXAPVKTNAISMLYFXXXXXXXXXLKKYRMIVEEXG

SEQ ID NO: 57463 - protein, 36 aa, Artificial Sequence; identical to SEQ ID NO: 8163
  GFR-binding peptide
  MOD_RES (3)..(4): Xaa is C or S
  MOD_RES (18)..(19)..(20)..(21)..(22): Xaa is A or G
  MOD_RES (23)..(24)..(25)..(26): Xaa is A or G or is absent

SEQ ID NO: 57464 - protein, 37 aa, Artificial Sequence; identical to SEQ ID NO: 27536
  GFR-binding peptide
  MOD_RES (1)..(2)..(36): Xaa is C or S
  MOD_RES (16)..(17)..(18)..(19)..(20): Xaa is A or G
  MOD_RES (21)..(22)..(23)..(24): Xaa is A or G or is absent

SEQ ID NO: 57465 - protein, 39 aa, Artificial Sequence
  GFR-binding peptide
  MOD_RES (4)..(5)..(39): Xaa is C or S
  MOD_RES (19)..(20)..(21)..(22)..(23): Xaa is A or G
  MOD_RES (24)..(25)..(26)..(27): Xaa is A or G or is absent
AGPXXTPTKMNAISMLYFXXXXXXXXXLKKYRGMVVDRX

SEQ ID NO: 57466 - protein, 42 aa, Artificial Sequence; identical to SEQ ID NO: 30456
  GFR-binding peptide
  MOD_RES (6)..(7)..(41): Xaa is C or S
  MOD_RES (21)..(22)..(23)..(24)..(25): Xaa is A or G
  MOD_RES (26)..(27)..(28)..(29): Xaa is A or G or is absent

SEQ ID NO: 57467 - protein, 35 aa, Artificial Sequence; identical to SEQ ID NO: 28490
  GFR-binding peptide
  MOD_RES (2)..(3)..(35): Xaa is C or S

SEQ ID NO: 57468 - protein, 31 aa, Artificial Sequence; identical to SEQ ID NO: 9080
  GFR-binding peptide
  MOD_RES (1)..(1): Xaa is C or S

SEQ ID NO: 57469 - protein, 37 aa, Artificial Sequence
  GFR-binding peptide
  MOD_RES (4)..(5)..(37): Xaa is C or S
AGPXXTPTKMNAISMLYFNDKQQIILKKYRGMVVDRX

SEQ ID NO: 57470 - protein, 38 aa, Artificial Sequence; identical to SEQ ID NO: 8170
  GFR-binding peptide
  MOD_RES (2)..(3)..(36)..(38): Xaa is C or S

SEQ ID NO: 57471 - protein, 34 aa, Artificial Sequence
  GFR-binding peptide
  MOD_RES (2)..(3): Xaa is C or S
PXXTPTKMNAISMLYFNDKQQIILKKYRGMVVDR

SEQ ID NO: 57472 - protein, 42 aa, Artificial Sequence; identical to SEQ ID NO: 29473
  GFR-binding peptide
  MOD_RES (6)..(7)..(41): Xaa is C or S
  MOD_RES (21)..(22)..(23)..(24)..(25): Xaa is A or G
  MOD_RES (26)..(27)..(28)..(29): Xaa is A or G or is absent

SEQ ID NO: 57473 - protein, 43 aa, Artificial Sequence; identical to SEQ ID NO: 30466
  GFR-binding peptide
  MOD_RES (6)..(7)..(41)..(43): Xaa is C or S
  MOD_RES (21)..(22)..(23)..(24)..(25): Xaa is A or G
  MOD_RES (26)..(27)..(28)..(29): Xaa is A or G or is absent

SEQ ID NO: 57474 - protein, 41 aa, Artificial Sequence; identical to SEQ ID NO: 29474
  GFR-binding peptide
  MOD_RES (3)..(4)..(38)..(40): Xaa is C or S
  MOD_RES (18)..(19)..(20)..(21)..(22): Xaa is A or G
  MOD_RES (23)..(24)..(25)..(26): Xaa is A or G or is absent

SEQ ID NO: 57475 - protein, 39 aa, Artificial Sequence; identical to SEQ ID NO: 6408
  GFR-binding peptide
  MOD_RES (4)..(5): Xaa is C or S
  MOD_RES (19)..(20)..(21)..(22)..(23): Xaa is A or G
  MOD_RES (24)..(25)..(26)..(27): Xaa is A or G or is absent

SEQ ID NO: 57476 - protein, 35 aa, Artificial Sequence; identical to SEQ ID NO: 14610
  GFR-binding peptide
  MOD_RES (4)..(5): Xaa is C or S

SEQ ID NO: 57477 - protein, 44 aa, Artificial Sequence; identical to SEQ ID NO: 29475
  GFR-binding peptide
  MOD_RES (6)..(7)..(41)..(43): Xaa is C or S
  MOD_RES (21)..(22)..(23)..(24)..(25): Xaa is A or G
  MOD_RES (26)..(27)..(28)..(29): Xaa is A or G or is absent

SEQ ID NO: 57478 - protein, 34 aa, Artificial Sequence
  GFR-binding peptide
  MOD_RES (1)..(2): Xaa is C or S
  MOD_RES (16)..(17)..(18)..(19)..(20): Xaa is A or G
  MOD_RES (21)..(22)..(23)..(24): Xaa is A or G or is absent
XXTPTKMNAISMLYFXXXXXXXXXLKKYRGMVVD

SEQ ID NO: 57479 - protein, 38 aa, Artificial Sequence
  GFR-binding peptide
  MOD_RES (4)..(5): Xaa is C or S
  MOD_RES (19)..(20)..(21)..(22)..(23): Xaa is A or G
  MOD_RES (24)..(25)..(26)..(27): Xaa is A or G or is absent
AGPXXTPTKMNAISMLYFXXXXXXXXXLKKYRGMVVDR

SEQ ID NO: 57480 - protein, 39 aa, Artificial Sequence; identical to SEQ ID NO: 7315
  GFR-binding peptide
  MOD_RES (5)..(39): Xaa is C or S
  MOD_RES (19)..(20)..(21)..(22)..(23): Xaa is A or G
  MOD_RES (24)..(25)..(26)..(27): Xaa is A or G or is absent

SEQ ID NO: 57481 - protein, 38 aa, Artificial Sequence; identical to SEQ ID NO: 8178
  GFR-binding peptide
  MOD_RES (4)..(5): Xaa is C or S
  MOD_RES (19)..(20)..(21)..(22)..(23): Xaa is A or G
  MOD_RES (24)..(25)..(26)..(27): Xaa is A or G or is absent

SEQ ID NO: 57482 - protein, 38 aa, Artificial Sequence
  GFR-binding peptide
  MOD_RES (3)..(4)..(36)..(38): Xaa is C or S
GPXXTPTKMNAISMLYFNDKQQIILKKYRGMVVDRXGX

SEQ ID NO: 57483 - protein, 35 aa, Artificial Sequence
  GFR-binding peptide
  MOD_RES (2)..(3): Xaa is C or S
  MOD_RES (17)..(18)..(19)..(20)..(21): Xaa is A or G
  MOD_RES (22)..(23)..(24)..(25): Xaa is A or G or is absent
TXXAPVKTNAISMLYFXXXXXXXXXLKKYRMIVEE

SEQ ID NO: 57484 - protein, 40 aa, Artificial Sequence; identical to SEQ ID NO: 9096
  GFR-binding peptide
  MOD_RES (4)..(38)..(40): Xaa is C or S
  MOD_RES (18)..(19)..(20)..(21)..(22): Xaa is A or G
  MOD_RES (23)..(24)..(25)..(26): Xaa is A or G or is absent

SEQ ID NO: 57485 - protein, 35 aa, Artificial Sequence; identical to SEQ ID NO: 8183
  GFR-binding peptide
  MOD_RES (2)..(3): Xaa is C or S
  MOD_RES (17)..(18)..(19)..(20)..(21): Xaa is A or G
  MOD_RES (22)..(23)..(24)..(25): Xaa is A or G or is absent

SEQ ID NO: 57486 - protein, 36 aa, Artificial Sequence; identical to SEQ ID NO: 28506
  GFR-binding peptide
  MOD_RES (34)..(36): Xaa is C or S
  MOD_RES (14)..(15)..(16)..(17)..(18): Xaa is A or G
  MOD_RES (19)..(20)..(21)..(22): Xaa is A or G or is absent

SEQ ID NO: 57487 - protein, 39 aa, Artificial Sequence; identical to SEQ ID NO: 28507
  GFR-binding peptide
  MOD_RES (4)..(5)..(39): Xaa is C or S
  MOD_RES (19)..(20)..(21)..(22)..(23): Xaa is A or G
  MOD_RES (24)..(25)..(26)..(27): Xaa is A or G or is absent

SEQ ID NO: 57488 - protein, 34 aa, Artificial Sequence; identical to SEQ ID NO: 7321
  GFR-binding peptide
  MOD_RES (1)..(1): Xaa is C or S
  MOD_RES (15)..(16)..(17)..(18)..(19): Xaa is A or G
  MOD_RES (20)..(21)..(22)..(23): Xaa is A or G or is absent

SEQ ID NO: 57489 - protein, 43 aa, Artificial Sequence
  GFR-binding peptide
  MOD_RES (6)..(7)..(41)..(43): Xaa is C or S
  MOD_RES (21)..(22)..(23)..(24)..(25): Xaa is A or G
  MOD_RES (26)..(27)..(28)..(29): Xaa is A or G or is absent
HVPKPXXAPTKLNAISVLYFXXXXXXXXXLKKYRNMVVRSXGX

SEQ ID NO: 57490 - protein, 37 aa, Artificial Sequence; identical to SEQ ID NO: 7325
  GFR-binding peptide
  MOD_RES (3)..(37): Xaa is C or S
  MOD_RES (17)..(18)..(19)..(20)..(21): Xaa is A or G
  MOD_RES (22)..(23)..(24)..(25): Xaa is A or G or is absent

SEQ ID NO: 57491 - protein, 34 aa, Artificial Sequence; identical to SEQ ID NO: 13795
  GFR-binding peptide
  MOD_RES (32)..(34): Xaa is C or S

SEQ ID NO: 57492 - protein, 32 aa, Artificial Sequence; identical to SEQ ID NO: 8185
  GFR-binding peptide
  MOD_RES (14)..(15)..(16)..(17)..(18): Xaa is A or G
  MOD_RES (19)..(20)..(21)..(22): Xaa is A or G or is absent

SEQ ID NO: 57493 - protein, 40 aa, Artificial Sequence; identical to SEQ ID NO: 7328
  GFR-binding peptide
  MOD_RES (6)..(7)..(39): Xaa is C or S

SEQ ID NO: 57494 - protein, 33 aa, Artificial Sequence; identical to SEQ ID NO: 16389
  GFR-binding peptide
  MOD_RES (14)..(15)..(16)..(17)..(18): Xaa is A or G
  MOD_RES (19)..(20)..(21)..(22): Xaa is A or G or is absent

SEQ ID NO: 57495 - protein, 33 aa, Artificial Sequence; identical to SEQ ID NO: 9107
  GFR-binding peptide
  MOD_RES (14)..(15)..(16)..(17)..(18): Xaa is A or G
  MOD_RES (19)..(20)..(21)..(22): Xaa is A or G or is absent

SEQ ID NO: 57496 - protein, 35 aa, Artificial Sequence; identical to SEQ ID NO: 13800
  GFR-binding peptide
  MOD_RES (2)..(3)..(35): Xaa is C or S

SEQ ID NO: 57497 - protein, 38 aa, Artificial Sequence; identical to SEQ ID NO: 28520
  GFR-binding peptide
  MOD_RES (2)..(3)..(35)..(37): Xaa is C or S

SEQ ID NO: 57498 - protein, 35 aa, Artificial Sequence; identical to SEQ ID NO: 28524
  GFR-binding peptide
  MOD_RES (2)..(3)..(35): Xaa is C or S

SEQ ID NO: 57499 - protein, 34 aa, Artificial Sequence
  GFR-binding peptide
  MOD_RES (1)..(2)..(34): Xaa is C or S
XXTPTKMNAISMLYFNDKQQIILKKYRGMVVDRX

SEQ ID NO: 57500 - protein, 32 aa, Artificial Sequence
  GFR-binding peptide
  MOD_RES (14)..(15)..(16)..(17)..(18): Xaa is A or G
  MOD_RES (19)..(20)..(21)..(22): Xaa is A or G or is absent
APVKTNAISMLYFXXXXXXXXXLKKYRMIVEE

SEQ ID NO: 57501 - protein, 38 aa, Artificial Sequence; identical to SEQ ID NO: 29504
  GFR-binding peptide
  MOD_RES (6)..(7): Xaa is C or S

SEQ ID NO: 57502 - protein, 38 aa, Artificial Sequence; identical to SEQ ID NO: 7336
  GFR-binding peptide
  MOD_RES (4)..(5): Xaa is C or S
  MOD_RES (19)..(20)..(21)..(22)..(23): Xaa is A or G
  MOD_RES (24)..(25)..(26)..(27): Xaa is A or G or is absent

SEQ ID NO: 57503 - protein, 33 aa, Artificial Sequence; identical to SEQ ID NO: 6430
  GFR-binding peptide
  MOD_RES (32)..(32): Xaa is C or S

SEQ ID NO: 57504 - protein, 34 aa, Artificial Sequence; identical to SEQ ID NO: 28529
  GFR-binding peptide
  MOD_RES (3)..(4): Xaa is C or S

SEQ ID NO: 57505 - protein, 38 aa, Artificial Sequence
  GFR-binding peptide
  MOD_RES (3)..(4)..(35)..(37): Xaa is C or S
STXXAPVKTNAISMLYFDNGRVLLLKKYRMIVEEXGXL

SEQ ID NO: 57506 - protein, 36 aa, Artificial Sequence; identical to SEQ ID NO: 6431
  GFR-binding peptide
  MOD_RES (1)..(2)..(34)..(36): Xaa is C or S

SEQ ID NO: 57507 - protein, 38 aa, Artificial Sequence; identical to SEQ ID NO: 28532
  GFR-binding peptide
  MOD_RES (4)..(5)..(37): Xaa is C or S

SEQ ID NO: 57508 - protein, 34 aa, Artificial Sequence
  GFR-binding peptide
  MOD_RES (34)..(34): Xaa is C or S
  MOD_RES (14)..(15)..(16)..(17)..(18): Xaa is A or G
  MOD_RES (19)..(20)..(21)..(22): Xaa is A or G or is absent
TPTKMNAISMLYFXXXXXXXXXLKKYRGMVVDRX

SEQ ID NO: 57509 - protein, 32 aa, Artificial Sequence; identical to SEQ ID NO: 13813
  GFR-binding peptide
  MOD_RES (1)..(2): Xaa is C or S

SEQ ID NO: 57510 - protein, 39 aa, Artificial Sequence
  GFR-binding peptide
  MOD_RES (4)..(5)..(36)..(38): Xaa is C or S
PSTXXAPVKTNAISMLYFDNGRVLLLKKYRMIVEEXGXL

SEQ ID NO: 57511 - protein, 31 aa, Artificial Sequence
  GFR-binding peptide
TPTKMNAISMLYFNDKQQIILKKYRGMVVDR

SEQ ID NO: 57512 - protein, 41 aa, Artificial Sequence; identical to SEQ ID NO: 6435
  GFR-binding peptide
  MOD_RES (4)..(5)..(39)..(41): Xaa is C or S
  MOD_RES (19)..(20)..(21)..(22)..(23): Xaa is A or G
  MOD_RES (24)..(25)..(26)..(27): Xaa is A or G or is absent

SEQ ID NO: 57513 - protein, 41 aa, Artificial Sequence; identical to SEQ ID NO: 6436
  GFR-binding peptide
  MOD_RES (5)..(6)..(38)..(40): Xaa is C or S

SEQ ID NO: 57514 - protein, 40 aa, Artificial Sequence; identical to SEQ ID NO: 16402
  GFR-binding peptide
  MOD_RES (6)..(7): Xaa is C or S
  MOD_RES (21)..(22)..(23)..(24)..(25): Xaa is A or G
  MOD_RES (26)..(27)..(28)..(29): Xaa is A or G or is absent

SEQ ID NO: 57515 - protein, 39 aa, Artificial Sequence; identical to SEQ ID NO: 9125
  GFR-binding peptide
  MOD_RES (3)..(4)..(39): Xaa is C or S
  MOD_RES (18)..(19)..(20)..(21)..(22): Xaa is A or G
  MOD_RES (23)..(24)..(25)..(26): Xaa is A or G or is absent

SEQ ID NO: 57516 - protein, 38 aa, Artificial Sequence; identical to SEQ ID NO: 28537
  GFR-binding peptide
  MOD_RES (1)..(2)..(36)..(38): Xaa is C or S
  MOD_RES (16)..(17)..(18)..(19)..(20): Xaa is A or G
  MOD_RES (21)..(22)..(23)..(24): Xaa is A or G or is absent

SEQ ID NO: 57517 - protein, 34 aa, Artificial Sequence; identical to SEQ ID NO: 30496
  GFR-binding peptide
  MOD_RES (1)..(2): Xaa is C or S
  MOD_RES (16)..(17)..(18)..(19)..(20): Xaa is A or G
  MOD_RES (21)..(22)..(23)..(24): Xaa is A or G or is absent

SEQ ID NO: 57518 - protein, 43 aa, Artificial Sequence; identical to SEQ ID NO: 14637
  GFR-binding peptide
  MOD_RES (6)..(7)..(41)..(43): Xaa is C or S
  MOD_RES (21)..(22)..(23)..(24)..(25): Xaa is A or G
  MOD_RES (26)..(27)..(28)..(29): Xaa is A or G or is absent

SEQ ID NO: 57519 - protein, 40 aa, Artificial Sequence; identical to SEQ ID NO: 8203
  GFR-binding peptide
  MOD_RES (1)..(2)..(37)..(39): Xaa is C or S
  MOD_RES (16)..(17)..(18)..(19)..(20): Xaa is A or G
  MOD_RES (21)..(22)..(23)..(24): Xaa is A or G or is absent

SEQ ID NO: 57520 - protein, 32 aa, Artificial Sequence; identical to SEQ ID NO: 29518
  GFR-binding peptide
  MOD_RES (1)..(2): Xaa is C or S

SEQ ID NO: 57521 - protein, 44 aa, Artificial Sequence; identical to SEQ ID NO: 9131
  GFR-binding peptide
  MOD_RES (6)..(7)..(41)..(43): Xaa is C or S
  MOD_RES (21)..(22)..(23)..(24)..(25): Xaa is A or G
  MOD_RES (26)..(27)..(28)..(29): Xaa is A or G or is absent

SEQ ID NO: 57522 - protein, 41 aa, Artificial Sequence; identical to SEQ ID NO: 6443
  GFR-binding peptide
  MOD_RES (3)..(4)..(38)..(40): Xaa is C or S
  MOD_RES (18)..(19)..(20)..(21)..(22): Xaa is A or G
  MOD_RES (23)..(24)..(25)..(26): Xaa is A or G or is absent

SEQ ID NO: 57523 - protein, 33 aa, Artificial Sequence
  GFR-binding peptide
  MOD_RES (31)..(33): Xaa is C or S
APVKTNAISMLYFDNGRVLLLKKYRMIVEEXGX

SEQ ID NO: 57524 - protein, 33 aa, Artificial Sequence
  GFR-binding peptide
  MOD_RES (2)..(3): Xaa is C or S
PXXTPTKMNAISMLYFNDKQQIILKKYRGMVVD

SEQ ID NO: 57525 - protein, 38 aa, Artificial Sequence; identical to SEQ ID NO: 7347
  GFR-binding peptide
  MOD_RES (3)..(4)..(36)..(38): Xaa is C or S

SEQ ID NO: 57526 - protein, 36 aa, Artificial Sequence
  GFR-binding peptide
  MOD_RES (3)..(4): Xaa is C or S
  MOD_RES (18)..(19)..(20)..(21)..(22): Xaa is A or G
  MOD_RES (23)..(24)..(25)..(26): Xaa is A or G or is absent
GPXXTPTKMNAISMLYFXXXXXXXXXLKKYRGMVVD

SEQ ID NO: 57527 - protein, 36 aa, Artificial Sequence; identical to SEQ ID NO: 6445
  GFR-binding peptide
  MOD_RES (4)..(5): Xaa is C or S

SEQ ID NO: 57528 - protein, 38 aa, Artificial Sequence; identical to SEQ ID NO: 15515
  GFR-binding peptide
  MOD_RES (3)..(4)..(36)..(38): Xaa is C or S

SEQ ID NO: 57529 - protein, 38 aa, Artificial Sequence
  GFR-binding peptide
  MOD_RES (1)..(2)..(35)..(37): Xaa is C or S
  MOD_RES (16)..(17)..(18)..(19)..(20): Xaa is A or G
  MOD_RES (21)..(22)..(23)..(24): Xaa is A or G or is absent
XXAPVKTNAISMLYFXXXXXXXXXLKKYRMIVEEXGXL

SEQ ID NO: 57530 - protein, 36 aa, Artificial Sequence; identical to SEQ ID NO: 15518
  GFR-binding peptide
  MOD_RES (1)..(33)..(35): Xaa is C or S

SEQ ID NO: 57531 - protein, 43 aa, Artificial Sequence; identical to SEQ ID NO: 9141
  GFR-binding peptide
  MOD_RES (5)..(6)..(40)..(42): Xaa is C or S
  MOD_RES (20)..(21)..(22)..(23)..(24): Xaa is A or G
  MOD_RES (25)..(26)..(27)..(28): Xaa is A or G or is absent

SEQ ID NO: 57532 - protein, 38 aa, Artificial Sequence; identical to SEQ ID NO: 30507
  GFR-binding peptide
  MOD_RES (5)..(6)..(38): Xaa is C or S

SEQ ID NO: 57533 - protein, 36 aa, Artificial Sequence
  GFR-binding peptide
  MOD_RES (3)..(4)..(36): Xaa is C or S
GPXXTPTKMNAISMLYFNDKQQIILKKYRGMVVDRX

SEQ ID NO: 57534 - protein, 40 aa, Artificial Sequence; identical to SEQ ID NO: 29535
  GFR-binding peptide
  MOD_RES (4)..(5)..(39): Xaa is C or S
  MOD_RES (19)..(20)..(21)..(22)..(23): Xaa is A or G
  MOD_RES (24)..(25)..(26)..(27): Xaa is A or G or is absent

SEQ ID NO: 57535 - protein, 40 aa, Artificial Sequence; identical to SEQ ID NO: 7353
  GFR-binding peptide
  MOD_RES (2)..(3)..(37)..(39): Xaa is C or S
  MOD_RES (17)..(18)..(19)..(20)..(21): Xaa is A or G
  MOD_RES (22)..(23)..(24)..(25): Xaa is A or G or is absent

SEQ ID NO: 57536 - protein, 34 aa, Artificial Sequence; identical to SEQ ID NO: 30510
  GFR-binding peptide
  MOD_RES (32)..(34): Xaa is C or S

SEQ ID NO: 57537 - protein, 35 aa, Artificial Sequence; identical to SEQ ID NO: 6458
  GFR-binding peptide
  MOD_RES (2)..(3)..(35): Xaa is C or S

SEQ ID NO: 57538 - protein, 37 aa, Artificial Sequence; identical to SEQ ID NO: 27612
  GFR-binding peptide
  MOD_RES (1)..(35)..(37): Xaa is C or S
  MOD_RES (15)..(16)..(17)..(18)..(19): Xaa is A or G
  MOD_RES (20)..(21)..(22)..(23): Xaa is A or G or is absent

SEQ ID NO: 57539 - protein, 39 aa, Artificial Sequence; identical to SEQ ID NO: 28559
  GFR-binding peptide
  MOD_RES (3)..(4)..(38): Xaa is C or S
  MOD_RES (18)..(19)..(20)..(21)..(22): Xaa is A or G
  MOD_RES (23)..(24)..(25)..(26): Xaa is A or G or is absent

SEQ ID NO: 57540 - protein, 39 aa, Artificial Sequence; identical to SEQ ID NO: 9155
  GFR-binding peptide
  MOD_RES (4)..(5)..(39): Xaa is C or S
  MOD_RES (19)..(20)..(21)..(22)..(23): Xaa is A or G
  MOD_RES (24)..(25)..(26)..(27): Xaa is A or G or is absent

SEQ ID NO: 57541 - protein, 38 aa, Artificial Sequence; identical to SEQ ID NO: 29539
  GFR-binding peptide
  MOD_RES (2)..(3)..(37): Xaa is C or S
  MOD_RES (17)..(18)..(19)..(20)..(21): Xaa is A or G
  MOD_RES (22)..(23)..(24)..(25): Xaa is A or G or is absent

SEQ ID NO: 57542 - protein, 37 aa, Artificial Sequence; identical to SEQ ID NO: 7355
  GFR-binding peptide
  MOD_RES (1)..(34)..(36): Xaa is C or S

SEQ ID NO: 57543 - protein, 40 aa, Artificial Sequence; identical to SEQ ID NO: 9156
  GFR-binding peptide
  MOD_RES (2)..(3)..(38)..(40): Xaa is C or S
  MOD_RES (17)..(18)..(19)..(20)..(21): Xaa is A or G
  MOD_RES (22)..(23)..(24)..(25): Xaa is A or G or is absent

SEQ ID NO: 57544 - protein, 35 aa, Artificial Sequence; identical to SEQ ID NO: 9157
  GFR-binding peptide
  MOD_RES (34)..(34): Xaa is C or S
  MOD_RES (14)..(15)..(16)..(17)..(18): Xaa is A or G
  MOD_RES (19)..(20)..(21)..(22): Xaa is A or G or is absent

SEQ ID NO: 57545 - protein, 37 aa, Artificial Sequence
  GFR-binding peptide
  MOD_RES (2)..(3)..(35)..(37): Xaa is C or S
PXXTPTKMNAISMLYFNDKQQIILKKYRGMVVDRXGX

SEQ ID NO: 57546 - protein, 37 aa, Artificial Sequence; identical to SEQ ID NO: 8227
  GFR-binding peptide
  MOD_RES (3)..(4)..(36): Xaa is C or S

SEQ ID NO: 57547 - protein, 37 aa, Artificial Sequence; identical to SEQ ID NO: 27620
  GFR-binding peptide
  MOD_RES (3)..(4): Xaa is C or S
  MOD_RES (18)..(19)..(20)..(21)..(22): Xaa is A or G
  MOD_RES (23)..(24)..(25)..(26): Xaa is A or G or is absent

SEQ ID NO: 57548 - protein, 35 aa, Artificial Sequence; identical to SEQ ID NO: 28572
  GFR-binding peptide
  MOD_RES (1)..(2): Xaa is C or S
  MOD_RES (16)..(17)..(18)..(19)..(20): Xaa is A or G
  MOD_RES (21)..(22)..(23)..(24): Xaa is A or G or is absent

SEQ ID NO: 57549 - protein, 35 aa, Artificial Sequence; identical to SEQ ID NO: 7365
  GFR-binding peptide
  MOD_RES (32)..(34): Xaa is C or S

SEQ ID NO: 57550 - protein, 35 aa, Artificial Sequence; identical to SEQ ID NO: 27624
  GFR-binding peptide
  MOD_RES (1)..(35): Xaa is C or S
  MOD_RES (15)..(16)..(17)..(18)..(19): Xaa is A or G
  MOD_RES (20)..(21)..(22)..(23): Xaa is A or G or is absent

SEQ ID NO: 57551 - protein, 36 aa, Artificial Sequence; identical to SEQ ID NO: 30526
  GFR-binding peptide
  MOD_RES (3)..(4)..(36): Xaa is C or S

SEQ ID NO: 57552 - protein, 36 aa, Artificial Sequence; identical to SEQ ID NO: 6470
  GFR-binding peptide
  MOD_RES (34)..(36): Xaa is C or S
  MOD_RES (14)..(15)..(16)..(17)..(18): Xaa is A or G
  MOD_RES (19)..(20)..(21)..(22): Xaa is A or G or is absent

SEQ ID NO: 57553 - protein, 39 aa, Artificial Sequence; identical to SEQ ID NO: 27626
  GFR-binding peptide
  MOD_RES (2)..(3)..(37)..(39): Xaa is C or S
  MOD_RES (17)..(18)..(19)..(20)..(21): Xaa is A or G
  MOD_RES (22)..(23)..(24)..(25): Xaa is A or G or is absent

SEQ ID NO: 57554 - protein, 33 aa, Artificial Sequence; identical to SEQ ID NO: 14670
  GFR-binding peptide
  MOD_RES (1)..(2): Xaa is C or S

SEQ ID NO: 57555 - protein, 42 aa, Artificial Sequence; identical to SEQ ID NO: 7368
  GFR-binding peptide
  MOD_RES (5)..(39)..(41): Xaa is C or S
  MOD_RES (19)..(20)..(21)..(22)..(23): Xaa is A or G
  MOD_RES (24)..(25)..(26)..(27): Xaa is A or G or is absent

SEQ ID NO: 57556 - protein, 36 aa, Artificial Sequence
  GFR-binding peptide
  MOD_RES (4)..(5)..(36): Xaa is C or S
PSTXXAPVKTNAISMLYFDNGRVLLLKKYRMIVEEX

SEQ ID NO: 57557 - protein, 38 aa, Artificial Sequence
  GFR-binding peptide
  MOD_RES (5)..(6): Xaa is C or S
  MOD_RES (20)..(21)..(22)..(23)..(24): Xaa is A or G
  MOD_RES (25)..(26)..(27)..(28): Xaa is A or G or is absent
SAGPXXTPTKMNAISMLYFXXXXXXXXXLKKYRGMVVD

SEQ ID NO: 57558 - protein, 32 aa, Artificial Sequence
  GFR-binding peptide
  MOD_RES (1)..(2): Xaa is C or S
XXTPTKMNAISMLYFNDKQQIILKKYRGMVVD

SEQ ID NO: 57559 - protein, 37 aa, Artificial Sequence; identical to SEQ ID NO: 15547
  GFR-binding peptide
  MOD_RES (1)..(2)..(34)..(36): Xaa is C or S

SEQ ID NO: 57560 - protein, 39 aa, Artificial Sequence
  GFR-binding peptide
  MOD_RES (4)..(5)..(37)..(39): Xaa is C or S
AGPXXTPTKMNAISMLYFNDKQQIILKKYRGMVVDRXGX

SEQ ID NO: 57561 - protein, 37 aa, Artificial Sequence; identical to SEQ ID NO: 9172
  GFR-binding peptide
  MOD_RES (2)..(3)..(37): Xaa is C or S
  MOD_RES (17)..(18)..(19)..(20)..(21): Xaa is A or G
  MOD_RES (22)..(23)..(24)..(25): Xaa is A or G or is absent

SEQ ID NO: 57562 - protein, 39 aa, Artificial Sequence; identical to SEQ ID NO: 9174
  GFR-binding peptide
  MOD_RES (3)..(4)..(37)..(39): Xaa is C or S

SEQ ID NO: 57563 - protein, 36 aa, Artificial Sequence; identical to SEQ ID NO: 6484
  GFR-binding peptide
  MOD_RES (2)..(36): Xaa is C or S
  MOD_RES (16)..(17)..(18)..(19)..(20): Xaa is A or G
  MOD_RES (21)..(22)..(23)..(24): Xaa is A or G or is absent

SEQ ID NO: 57564 - protein, 41 aa, Artificial Sequence; identical to SEQ ID NO: 6485
  GFR-binding peptide
  MOD_RES (5)..(6)..(40): Xaa is C or S
  MOD_RES (20)..(21)..(22)..(23)..(24): Xaa is A or G
  MOD_RES (25)..(26)..(27)..(28): Xaa is A or G or is absent

SEQ ID NO: 57565 - protein, 40 aa, Artificial Sequence; identical to SEQ ID NO: 28585
  GFR-binding peptide
  MOD_RES (6)..(7)..(39): Xaa is C or S

SEQ ID NO: 57566 - protein, 35 aa, Artificial Sequence; identical to SEQ ID NO: 8240
  GFR-binding peptide
  MOD_RES (1)..(2): Xaa is C or S
  MOD_RES (16)..(17)..(18)..(19)..(20): Xaa is A or G
  MOD_RES (21)..(22)..(23)..(24): Xaa is A or G or is absent

SEQ ID NO: 57567 - protein, 39 aa, Artificial Sequence; identical to SEQ ID NO: 8241
  GFR-binding peptide
  MOD_RES (3)..(4)..(38): Xaa is C or S
  MOD_RES (18)..(19)..(20)..(21)..(22): Xaa is A or G
  MOD_RES (23)..(24)..(25)..(26): Xaa is A or G or is absent

SEQ ID NO: 57568 - protein, 40 aa, Artificial Sequence; identical to SEQ ID NO: 7378
  GFR-binding peptide
  MOD_RES (4)..(5)..(39): Xaa is C or S
  MOD_RES (19)..(20)..(21)..(22)..(23): Xaa is A or G
  MOD_RES (24)..(25)..(26)..(27): Xaa is A or G or is absent

SEQ ID NO: 57569 - protein, 37 aa, Artificial Sequence
  GFR-binding peptide
  MOD_RES (6)..(7): Xaa is C or S
RVPSTXXAPVKTNAISMLYFDNGRVLLLKKYRMIVEE

SEQ ID NO: 57570 - protein, 38 aa, Artificial Sequence; identical to SEQ ID NO: 16459
  GFR-binding peptide
  MOD_RES (4)..(5)..(37): Xaa is C or S

SEQ ID NO: 57571 - protein, 37 aa, Artificial Sequence; identical to SEQ ID NO: 7383
  GFR-binding peptide
  MOD_RES (3)..(4): Xaa is C or S
  MOD_RES (18)..(19)..(20)..(21)..(22): Xaa is A or G
  MOD_RES (23)..(24)..(25)..(26): Xaa is A or G or is absent

SEQ ID NO: 57572 - protein, 32 aa, Artificial Sequence
  GFR-binding peptide
  MOD_RES (32)..(32): Xaa is C or S
TPTKMNAISMLYFNDKQQIILKKYRGMVVDRX

SEQ ID NO: 57573 - protein, 39 aa, Artificial Sequence; identical to SEQ ID NO: 30552
  GFR-binding peptide
  MOD_RES (6)..(7): Xaa is C or S
  MOD_RES (21)..(22)..(23)..(24)..(25): Xaa is A or G
  MOD_RES (26)..(27)..(28)..(29): Xaa is A or G or is absent

SEQ ID NO: 57574 - protein, 41 aa, Artificial Sequence; identical to SEQ ID NO: 7394
  GFR-binding peptide
  MOD_RES (5)..(6)..(39)..(41): Xaa is C or S

SEQ ID NO: 57575 - protein, 32 aa, Artificial Sequence; identical to SEQ ID NO: 6491
  GFR-binding peptide
  MOD_RES (14)..(15)..(16)..(17)..(18): Xaa is A or G
  MOD_RES (19)..(20)..(21)..(22): Xaa is A or G or is absent

SEQ ID NO: 57576 - protein, 38 aa, Artificial Sequence; identical to SEQ ID NO: 9184
  GFR-binding peptide
  MOD_RES (5)..(6): Xaa is C or S
  MOD_RES (20)..(21)..(22)..(23)..(24): Xaa is A or G
  MOD_RES (25)..(26)..(27)..(28): Xaa is A or G or is absent

SEQ ID NO: 57577 - protein, 33 aa, Artificial Sequence; identical to SEQ ID NO: 27656
  GFR-binding peptide
  MOD_RES (1)..(1): Xaa is C or S
  MOD_RES (15)..(16)..(17)..(18)..(19): Xaa is A or G
  MOD_RES (20)..(21)..(22)..(23): Xaa is A or G or is absent

SEQ ID NO: 57578 - protein, 39 aa, Artificial Sequence; identical to SEQ ID NO: 6492
  GFR-binding peptide
  MOD_RES (3)..(37)..(39): Xaa is C or S
  MOD_RES (17)..(18)..(19)..(20)..(21): Xaa is A or G
  MOD_RES (22)..(23)..(24)..(25): Xaa is A or G or is absent

SEQ ID NO: 57579 - protein, 41 aa, Artificial Sequence
  GFR-binding peptide
  MOD_RES (4)..(5)..(38)..(40): Xaa is C or S
  MOD_RES (19)..(20)..(21)..(22)..(23): Xaa is A or G
  MOD_RES (24)..(25)..(26)..(27): Xaa is A or G or is absent
PSTXXAPVKTNAISMLYFXXXXXXXXXLKKYRMIVEEXGXL

SEQ ID NO: 57580 - protein, 36 aa, Artificial Sequence; identical to SEQ ID NO: 28609
  GFR-binding peptide
  MOD_RES (4)..(5): Xaa is C or S

SEQ ID NO: 57581 - protein, 32 aa, Artificial Sequence; identical to SEQ ID NO: 6496
  GFR-binding peptide
  MOD_RES (14)..(15)..(16)..(17)..(18): Xaa is A or G
  MOD_RES (19)..(20)..(21)..(22): Xaa is A or G or is absent

SEQ ID NO: 57582 - protein, 35 aa, Artificial Sequence; identical to SEQ ID NO: 9191
  GFR-binding peptide
  MOD_RES (34)..(34): Xaa is C or S
  MOD_RES (14)..(15)..(16)..(17)..(18): Xaa is A or G
  MOD_RES (19)..(20)..(21)..(22): Xaa is A or G or is absent

SEQ ID NO: 57583 - protein, 34 aa, Artificial Sequence; identical to SEQ ID NO: 28615
  GFR-binding peptide
  MOD_RES (34)..(34): Xaa is C or S
  MOD_RES (14)..(15)..(16)..(17)..(18): Xaa is A or G
  MOD_RES (19)..(20)..(21)..(22): Xaa is A or G or is absent

SEQ ID NO: 57584 - protein, 41 aa, Artificial Sequence
  GFR-binding peptide
  MOD_RES (6)..(7)..(38)..(40): Xaa is C or S
RVPSTXXAPVKTNAISMLYFDNGRVLLLKKYRMIVEEXGXL

SEQ ID NO: 57585 - protein, 34 aa, Artificial Sequence; identical to SEQ ID NO: 8264
  GFR-binding peptide
  MOD_RES (1)..(33): Xaa is C or S

SEQ ID NO: 57586 - protein, 36 aa, Artificial Sequence
  GFR-binding peptide
  MOD_RES (2)..(3)..(36): Xaa is C or S
  MOD_RES (17)..(18)..(19)..(20)..(21): Xaa is A or G
  MOD_RES (22)..(23)..(24)..(25): Xaa is A or G or is absent
TXXAPVKTNAISMLYFXXXXXXXXXLKKYRMIVEEX

SEQ ID NO: 57587 - protein, 37 aa, Artificial Sequence; identical to SEQ ID NO: 29588
  GFR-binding peptide
  MOD_RES (1)..(2)..(34)..(36): Xaa is C or S

SEQ ID NO: 57588 - protein, 40 aa, Artificial Sequence; identical to SEQ ID NO: 9195
  GFR-binding peptide
  MOD_RES (3)..(4)..(38)..(40): Xaa is C or S
  MOD_RES (18)..(19)..(20)..(21)..(22): Xaa is A or G
  MOD_RES (23)..(24)..(25)..(26): Xaa is A or G or is absent

SEQ ID NO: 57589 - protein, 34 aa, Artificial Sequence; identical to SEQ ID NO: 28617
  GFR-binding peptide
  MOD_RES (1)..(1): Xaa is C or S
  MOD_RES (15)..(16)..(17)..(18)..(19): Xaa is A or G
  MOD_RES (20)..(21)..(22)..(23): Xaa is A or G or is absent

SEQ ID NO: 57590 - protein, 38 aa, Artificial Sequence; identical to SEQ ID NO: 7407
  GFR-binding peptide
  MOD_RES (4)..(5)..(38): Xaa is C or S

SEQ ID NO: 57591 - protein, 37 aa, Artificial Sequence; identical to SEQ ID NO: 27670
  GFR-binding peptide
  MOD_RES (2)..(3)..(37): Xaa is C or S
  MOD_RES (17)..(18)..(19)..(20)..(21): Xaa is A or G
  MOD_RES (22)..(23)..(24)..(25): Xaa is A or G or is absent

SEQ ID NO: 57592 - protein, 39 aa, Artificial Sequence; identical to SEQ ID NO: 29595
  GFR-binding peptide
  MOD_RES (4)..(5)..(37)..(39): Xaa is C or S

SEQ ID NO: 57593 - protein, 31 aa, Artificial Sequence; identical to SEQ ID NO: 6513
  GFR-binding peptide
  MOD_RES (1)..(1): Xaa is C or S

SEQ ID NO: 57594 - protein, 34 aa, Artificial Sequence
  GFR-binding peptide
  MOD_RES (1)..(32)..(34): Xaa is C or S
XAPVKTNAISMLYFDNGRVLLLKKYRMIVEEXGX

SEQ ID NO: 57595 - protein, 36 aa, Artificial Sequence; identical to SEQ ID NO: 30575
  GFR-binding peptide
  MOD_RES (4)..(5): Xaa is C or S

SEQ ID NO: 57596 - protein, 37 aa, Artificial Sequence; identical to SEQ ID NO: 30576
  GFR-binding peptide
  MOD_RES (34)..(36): Xaa is C or S
  MOD_RES (14)..(15)..(16)..(17)..(18): Xaa is A or G
  MOD_RES (19)..(20)..(21)..(22): Xaa is A or G or is absent

SEQ ID NO: 57597 - protein, 40 aa, Artificial Sequence; identical to SEQ ID NO: 8275
  GFR-binding peptide
  MOD_RES (6)..(7): Xaa is C or S
  MOD_RES (21)..(22)..(23)..(24)..(25): Xaa is A or G
  MOD_RES (26)..(27)..(28)..(29): Xaa is A or G or is absent

SEQ ID NO: 57598 - protein, 32 aa, Artificial Sequence; identical to SEQ ID NO: 30578
  GFR-binding peptide
  MOD_RES (1)..(1): Xaa is C or S

SEQ ID NO: 57599 - protein, 35 aa, Artificial Sequence; identical to SEQ ID NO: 8278
  GFR-binding peptide
  MOD_RES (34)..(34): Xaa is C or S
  MOD_RES (14)..(15)..(16)..(17)..(18): Xaa is A or G
  MOD_RES (19)..(20)..(21)..(22): Xaa is A or G or is absent

SEQ ID NO: 57600 - protein, 37 aa, Artificial Sequence; identical to SEQ ID NO: 27679
  GFR-binding peptide
  MOD_RES (3)..(4): Xaa is C or S
  MOD_RES (18)..(19)..(20)..(21)..(22): Xaa is A or G
  MOD_RES (23)..(24)..(25)..(26): Xaa is A or G or is absent

SEQ ID NO: 57601 - protein, 38 aa, Artificial Sequence; identical to SEQ ID NO: 28627
  GFR-binding peptide
  MOD_RES (1)..(2)..(36)..(38): Xaa is C or S
  MOD_RES (16)..(17)..(18)..(19)..(20): Xaa is A or G
  MOD_RES (21)..(22)..(23)..(24): Xaa is A or G or is absent

SEQ ID NO: 57602 - protein, 37 aa, Artificial Sequence; identical to SEQ ID NO: 14715
  GFR-binding peptide
  MOD_RES (2)..(3)..(37): Xaa is C or S
  MOD_RES (17)..(18)..(19)..(20)..(21): Xaa is A or G
  MOD_RES (22)..(23)..(24)..(25): Xaa is A or G or is absent

SEQ ID NO: 57603 - protein, 42 aa, Artificial Sequence; identical to SEQ ID NO: 9210
  GFR-binding peptide
  MOD_RES (3)..(4)..(39)..(41): Xaa is C or S
  MOD_RES (18)..(19)..(20)..(21)..(22): Xaa is A or G
  MOD_RES (23)..(24)..(25)..(26): Xaa is A or G or is absent

SEQ ID NO: 57604 - protein, 31 aa, Artificial Sequence; identical to SEQ ID NO: 27687
  GFR-binding peptide

SEQ ID NO: 57605 - protein, 36 aa, Artificial Sequence; identical to SEQ ID NO: 28631
  GFR-binding peptide
  MOD_RES (5)..(6): Xaa is C or S

SEQ ID NO: 57606 - protein, 36 aa, Artificial Sequence; identical to SEQ ID NO: 9213
  GFR-binding peptide
  MOD_RES (1)..(35): Xaa is C or S
  MOD_RES (15)..(16)..(17)..(18)..(19): Xaa is A or G
  MOD_RES (20)..(21)..(22)..(23): Xaa is A or G or is absent

SEQ ID NO: 57607 - protein, 37 aa, Artificial Sequence
  GFR-binding peptide
  MOD_RES (2)..(3)..(34)..(36): Xaa is C or S
TXXAPVKTNAISMLYFDNGRVLLLKKYRMIVEEXGXL

SEQ ID NO: 57608 - protein, 37 aa, Artificial Sequence; identical to SEQ ID NO: 6526
  GFR-binding peptide
  MOD_RES (6)..(7): Xaa is C or S

SEQ ID NO: 57609 - protein, 35 aa, Artificial Sequence
  GFR-binding peptide
  MOD_RES (1)..(2)..(33)..(35): Xaa is C or S
XXAPVKTNAISMLYFDNGRVLLLKKYRMIVEEXGX

SEQ ID NO: 57610 - protein, 35 aa, Artificial Sequence; identical to SEQ ID NO: 7420
  GFR-binding peptide
  MOD_RES (1)..(34): Xaa is C or S

SEQ ID NO: 57611 - protein, 33 aa, Artificial Sequence; identical to SEQ ID NO: 7423
  GFR-binding peptide
  MOD_RES (1)..(33): Xaa is C or S

SEQ ID NO: 57612 - protein, 39 aa, Artificial Sequence; identical to SEQ ID NO: 8290
  GFR-binding peptide
  MOD_RES (4)..(5)..(37)..(39): Xaa is C or S

SEQ ID NO: 57613 - protein, 43 aa, Artificial Sequence; identical to SEQ ID NO: 7425
  GFR-binding peptide
  MOD_RES (6)..(7)..(41)..(43): Xaa is C or S
  MOD_RES (21)..(22)..(23)..(24)..(25): Xaa is A or G
  MOD_RES (26)..(27)..(28)..(29): Xaa is A or G or is absent

SEQ ID NO: 57614 - protein, 36 aa, Artificial Sequence
  GFR-binding peptide
  MOD_RES (1)..(2)..(33)..(35): Xaa is C or S
XXAPVKTNAISMLYFDNGRVLLLKKYRMIVEEXGXL

SEQ ID NO: 57615 - protein, 40 aa, Artificial Sequence; identical to SEQ ID NO: 8296
  GFR-binding peptide
  MOD_RES (3)..(37)..(39): Xaa is C or S
  MOD_RES (17)..(18)..(19)..(20)..(21): Xaa is A or G
  MOD_RES (22)..(23)..(24)..(25): Xaa is A or G or is absent

SEQ ID NO: 57616 - protein, 38 aa, Artificial Sequence; identical to SEQ ID NO: 7427
  GFR-binding peptide
  MOD_RES (5)..(6): Xaa is C or S
  MOD_RES (20)..(21)..(22)..(23)..(24): Xaa is A or G
  MOD_RES (25)..(26)..(27)..(28): Xaa is A or G or is absent

SEQ ID NO: 57617 - protein, 36 aa, Artificial Sequence; identical to SEQ ID NO: 13902
  GFR-binding peptide
  MOD_RES (2)..(3)..(35): Xaa is C or S

SEQ ID NO: 57618 - protein, 34 aa, Artificial Sequence; identical to SEQ ID NO: 7428
  GFR-binding peptide
  MOD_RES (1)..(2)..(34): Xaa is C or S

SEQ ID NO: 57619 - protein, 36 aa, Artificial Sequence
  GFR-binding peptide
  MOD_RES (34)..(36): Xaa is C or S
  MOD_RES (14)..(15)..(16)..(17)..(18): Xaa is A or G
  MOD_RES (19)..(20)..(21)..(22): Xaa is A or G or is absent
TPTKMNAISMLYFXXXXXXXXXLKKYRGMVVDRXGX

SEQ ID NO: 57620 - protein, 39 aa, Artificial Sequence; identical to SEQ ID NO: 7429
  GFR-binding peptide
  MOD_RES (6)..(7): Xaa is C or S

SEQ ID NO: 57621 - protein, 33 aa, Artificial Sequence; identical to SEQ ID NO: 9221
  GFR-binding peptide
  MOD_RES (14)..(15)..(16)..(17)..(18): Xaa is A or G
  MOD_RES (19)..(20)..(21)..(22): Xaa is A or G or is absent

SEQ ID NO: 57622 - protein, 38 aa, Artificial Sequence; identical to SEQ ID NO: 6541
  GFR-binding peptide
  MOD_RES (1)..(2)..(36)..(38): Xaa is C or S
  MOD_RES (16)..(17)..(18)..(19)..(20): Xaa is A or G
  MOD_RES (21)..(22)..(23)..(24): Xaa is A or G or is absent

SEQ ID NO: 57623 - protein, 36 aa, Artificial Sequence
  GFR-binding peptide
  MOD_RES (1)..(2)..(35): Xaa is C or S
  MOD_RES (16)..(17)..(18)..(19)..(20): Xaa is A or G
  MOD_RES (21)..(22)..(23)..(24): Xaa is A or G or is absent
XXAPVKTNAISMLYFXXXXXXXXXLKKYRMIVEEXG

SEQ ID NO: 57624 - protein, 36 aa, Artificial Sequence; identical to SEQ ID NO: 9223
  GFR-binding peptide
  MOD_RES (2)..(3): Xaa is C or S
  MOD_RES (17)..(18)..(19)..(20)..(21): Xaa is A or G
  MOD_RES (22)..(23)..(24)..(25): Xaa is A or G or is absent

SEQ ID NO: 57625 - protein, 42 aa, Artificial Sequence; identical to SEQ ID NO: 9225
  GFR-binding peptide
  MOD_RES (5)..(6)..(40)..(42): Xaa is C or S
  MOD_RES (20)..(21)..(22)..(23)..(24): Xaa is A or G
  MOD_RES (25)..(26)..(27)..(28): Xaa is A or G or is absent

SEQ ID NO: 57626 - protein, 42 aa, Artificial Sequence; identical to SEQ ID NO: 29618
  GFR-binding peptide
  MOD_RES (4)..(5)..(39)..(41): Xaa is C or S
  MOD_RES (19)..(20)..(21)..(22)..(23): Xaa is A or G
  MOD_RES (24)..(25)..(26)..(27): Xaa is A or G or is absent

SEQ ID NO: 57627 - protein, 38 aa, Artificial Sequence; identical to SEQ ID NO: 6545
  GFR-binding peptide
  MOD_RES (1)..(2)..(36)..(38): Xaa is C or S
  MOD_RES (16)..(17)..(18)..(19)..(20): Xaa is A or G
  MOD_RES (21)..(22)..(23)..(24): Xaa is A or G or is absent

SEQ ID NO: 57628 - protein, 35 aa, Artificial Sequence; identical to SEQ ID NO: 8302
  GFR-binding peptide
  MOD_RES (2)..(2): Xaa is C or S
  MOD_RES (16)..(17)..(18)..(19)..(20): Xaa is A or G
  MOD_RES (21)..(22)..(23)..(24): Xaa is A or G or is absent

SEQ ID NO: 57629 - protein, 34 aa, Artificial Sequence; identical to SEQ ID NO: 29620
  GFR-binding peptide
  MOD_RES (1)..(1): Xaa is C or S
  MOD_RES (15)..(16)..(17)..(18)..(19): Xaa is A or G
  MOD_RES (20)..(21)..(22)..(23): Xaa is A or G or is absent

SEQ ID NO: 57630 - protein, 38 aa, Artificial Sequence; identical to SEQ ID NO: 9228
  GFR-binding peptide
  MOD_RES (1)..(2)..(36)..(38): Xaa is C or S
  MOD_RES (16)..(17)..(18)..(19)..(20): Xaa is A or G
  MOD_RES (21)..(22)..(23)..(24): Xaa is A or G or is absent

SEQ ID NO: 57631 - protein, 37 aa, Artificial Sequence; identical to SEQ ID NO: 6546
  GFR-binding peptide
  MOD_RES (4)..(5): Xaa is C or S
  MOD_RES (19)..(20)..(21)..(22)..(23): Xaa is A or G
  MOD_RES (24)..(25)..(26)..(27): Xaa is A or G or is absent

SEQ ID NO: 57632 - protein, 36 aa, Artificial Sequence; identical to SEQ ID NO: 6547
  GFR-binding peptide
  MOD_RES (1)..(35): Xaa is C or S
  MOD_RES (15)..(16)..(17)..(18)..(19): Xaa is A or G
  MOD_RES (20)..(21)..(22)..(23): Xaa is A or G or is absent

SEQ ID NO: 57633 - protein, 38 aa, Artificial Sequence
  GFR-binding peptide
  MOD_RES (5)..(6)..(38): Xaa is C or S
SAGPXXTPTKMNAISMLYFNDKQQIILKKYRGMVVDRX

SEQ ID NO: 57634 - protein, 35 aa, Artificial Sequence; identical to SEQ ID NO: 13917
  GFR-binding peptide
  MOD_RES (1)..(35): Xaa is C or S
  MOD_RES (15)..(16)..(17)..(18)..(19): Xaa is A or G
  MOD_RES (20)..(21)..(22)..(23): Xaa is A or G or is absent

SEQ ID NO: 57635 - protein, 40 aa, Artificial Sequence
  GFR-binding peptide
  MOD_RES (4)..(5)..(39): Xaa is C or S
  MOD_RES (19)..(20)..(21)..(22)..(23): Xaa is A or G
  MOD_RES (24)..(25)..(26)..(27): Xaa is A or G or is absent
AGPXXTPTKMNAISMLYFXXXXXXXXXLKKYRGMVVDRXG

SEQ ID NO: 57636 - protein, 36 aa, Artificial Sequence; identical to SEQ ID NO: 7437
  GFR-binding peptide
  MOD_RES (1)..(2)..(36): Xaa is C or S
  MOD_RES (16)..(17)..(18)..(19)..(20): Xaa is A or G
  MOD_RES (21)..(22)..(23)..(24): Xaa is A or G or is absent

SEQ ID NO: 57637 - protein, 39 aa, Artificial Sequence; identical to SEQ ID NO: 27710
  GFR-binding peptide
  MOD_RES (6)..(7): Xaa is C or S
  MOD_RES (21)..(22)..(23)..(24)..(25): Xaa is A or G
  MOD_RES (26)..(27)..(28)..(29): Xaa is A or G or is absent

SEQ ID NO: 57638 - protein, 34 aa, Artificial Sequence
  GFR-binding peptide
  MOD_RES (1)..(33): Xaa is C or S
XTPTKMNAISMLYFNDKQQIILKKYRGMVVDRXG

SEQ ID NO: 57639 - protein, 37 aa, Artificial Sequence; identical to SEQ ID NO: 8309
  GFR-binding peptide
  MOD_RES (2)..(3)..(37): Xaa is C or S
  MOD_RES (17)..(18)..(19)..(20)..(21): Xaa is A or G
  MOD_RES (22)..(23)..(24)..(25): Xaa is A or G or is absent

SEQ ID NO: 57640 - protein, 38 aa, Artificial Sequence; identical to SEQ ID NO: 7441
  GFR-binding peptide
  MOD_RES (5)..(6)..(38): Xaa is C or S

SEQ ID NO: 57641 - protein, 39 aa, Artificial Sequence; identical to SEQ ID NO: 9242
  GFR-binding peptide
  MOD_RES (2)..(3)..(37)..(39): Xaa is C or S
  MOD_RES (17)..(18)..(19)..(20)..(21): Xaa is A or G
  MOD_RES (22)..(23)..(24)..(25): Xaa is A or G or is absent

SEQ ID NO: 57642 - protein, 38 aa, Artificial Sequence; identical to SEQ ID NO: 7445
  GFR-binding peptide
  MOD_RES (2)..(3)..(37): Xaa is C or S
  MOD_RES (17)..(18)..(19)..(20)..(21): Xaa is A or G
  MOD_RES (22)..(23)..(24)..(25): Xaa is A or G or is absent

SEQ ID NO: 57643 - protein, 38 aa, Artificial Sequence; identical to SEQ ID NO: 6556
  GFR-binding peptide
  MOD_RES (1)..(35)..(37): Xaa is C or S
  MOD_RES (15)..(16)..(17)..(18)..(19): Xaa is A or G
  MOD_RES (20)..(21)..(22)..(23): Xaa is A or G or is absent

SEQ ID NO: 57644 - protein, 37 aa, Artificial Sequence
  GFR-binding peptide
  MOD_RES (4)..(5)..(36): Xaa is C or S
PSTXXAPVKTNAISMLYFDNGRVLLLKKYRMIVEEXG

SEQ ID NO: 57645 - protein, 42 aa, Artificial Sequence
  GFR-binding peptide
  MOD_RES (4)..(5)..(39)..(41): Xaa is C or S
  MOD_RES (19)..(20)..(21)..(22)..(23): Xaa is A or G
  MOD_RES (24)..(25)..(26)..(27): Xaa is A or G or is absent
AGPXXTPTKMNAISMLYFXXXXXXXXXLKKYRGMVVDRXGXS

SEQ ID NO: 57646 - protein, 37 aa, Artificial Sequence
  GFR-binding peptide
  MOD_RES (1)..(2)..(36): Xaa is C or S
  MOD_RES (16)..(17)..(18)..(19)..(20): Xaa is A or G
  MOD_RES (21)..(22)..(23)..(24): Xaa is A or G or is absent
XXTPTKMNAISMLYFXXXXXXXXXLKKYRGMVVDRXG

SEQ ID NO: 57647 - protein, 36 aa, Artificial Sequence; identical to SEQ ID NO: 8317
  GFR-binding peptide
  MOD_RES (3)..(4): Xaa is C or S
  MOD_RES (18)..(19)..(20)..(21)..(22): Xaa is A or G
  MOD_RES (23)..(24)..(25)..(26): Xaa is A or G or is absent

SEQ ID NO: 57648 - protein, 34 aa, Artificial Sequence; identical to SEQ ID NO: 16520
  GFR-binding peptide
  MOD_RES (1)..(33): Xaa is C or S

SEQ ID NO: 57649 - protein, 41 aa, Artificial Sequence; identical to SEQ ID NO: 9245
  GFR-binding peptide
  MOD_RES (3)..(4)..(39)..(41): Xaa is C or S
  MOD_RES (18)..(19)..(20)..(21)..(22): Xaa is A or G
  MOD_RES (23)..(24)..(25)..(26): Xaa is A or G or is absent

SEQ ID NO: 57650 - protein, 40 aa, Artificial Sequence
  GFR-binding peptide
  MOD_RES (6)..(7): Xaa is C or S
  MOD_RES (21)..(22)..(23)..(24)..(25): Xaa is A or G
  MOD_RES (26)..(27)..(28)..(29): Xaa is A or G or is absent
HVPKPXXAPTKLNAISVLYFXXXXXXXXXLKKYRNMVVRS

SEQ ID NO: 57651 - protein, 34 aa, Artificial Sequence
  GFR-binding peptide
  MOD_RES (1)..(1): Xaa is C or S
  MOD_RES (15)..(16)..(17)..(18)..(19): Xaa is A or G
  MOD_RES (20)..(21)..(22)..(23): Xaa is A or G or is absent
XTPTKMNAISMLYFXXXXXXXXXLKKYRGMVVDR

SEQ ID NO: 57652 - protein, 34 aa, Artificial Sequence
  GFR-binding peptide
  MOD_RES (1)..(2)..(33): Xaa is C or S
XXAPVKTNAISMLYFDNGRVLLLKKYRMIVEEXG

SEQ ID NO: 57653 - protein, 33 aa, Artificial Sequence
  GFR-binding peptide
  MOD_RES (1)..(2): Xaa is C or S
XXTPTKMNAISMLYFNDKQQIILKKYRGMVVDR

SEQ ID NO: 57654 - protein, 36 aa, Artificial Sequence; identical to SEQ ID NO: 9254
  GFR-binding peptide
  MOD_RES (2)..(3): Xaa is C or S
  MOD_RES (17)..(18)..(19)..(20)..(21): Xaa is A or G
  MOD_RES (22)..(23)..(24)..(25): Xaa is A or G or is absent

SEQ ID NO: 57655 - protein, 36 aa, Artificial Sequence
  GFR-binding peptide
  MOD_RES (4)..(5): Xaa is C or S
AGPXXTPTKMNAISMLYFNDKQQIILKKYRGMVVDR

SEQ ID NO: 57656 - protein, 43 aa, Artificial Sequence; identical to SEQ ID NO: 27735
  GFR-binding peptide
  MOD_RES (5)..(6)..(40)..(42): Xaa is C or S
  MOD_RES (20)..(21)..(22)..(23)..(24): Xaa is A or G
  MOD_RES (25)..(26)..(27)..(28): Xaa is A or G or is absent

SEQ ID NO: 57657 - protein, 41 aa, Artificial Sequence; identical to SEQ ID NO: 30628
  GFR-binding peptide
  MOD_RES (6)..(7)..(41): Xaa is C or S
  MOD_RES (21)..(22)..(23)..(24)..(25): Xaa is A or G
  MOD_RES (26)..(27)..(28)..(29): Xaa is A or G or is absent

SEQ ID NO: 57658 - protein, 36 aa, Artificial Sequence; identical to SEQ ID NO: 6572
  GFR-binding peptide
  MOD_RES (4)..(5): Xaa is C or S

SEQ ID NO: 57659 - protein, 33 aa, Artificial Sequence; identical to SEQ ID NO: 15627
  GFR-binding peptide
  MOD_RES (1)..(1): Xaa is C or S
  MOD_RES (15)..(16)..(17)..(18)..(19): Xaa is A or G
  MOD_RES (20)..(21)..(22)..(23): Xaa is A or G or is absent

SEQ ID NO: 57660 - protein, 34 aa, Artificial Sequence; identical to SEQ ID NO: 7456
  GFR-binding peptide
  MOD_RES (1)..(2): Xaa is C or S
  MOD_RES (16)..(17)..(18)..(19)..(20): Xaa is A or G
  MOD_RES (21)..(22)..(23)..(24): Xaa is A or G or is absent

SEQ ID NO: 57661 - protein, 37 aa, Artificial Sequence; identical to SEQ ID NO: 29652
  GFR-binding peptide
  MOD_RES (34)..(36): Xaa is C or S
  MOD_RES (14)..(15)..(16)..(17)..(18): Xaa is A or G
  MOD_RES (19)..(20)..(21)..(22): Xaa is A or G or is absent

SEQ ID NO: 57662 - protein, 36 aa, Artificial Sequence; identical to SEQ ID NO: 9257
  GFR-binding peptide
  MOD_RES (1)..(33)..(35): Xaa is C or S

SEQ ID NO: 57663 - protein, 40 aa, Artificial Sequence; identical to SEQ ID NO: 28684
  GFR-binding peptide
  MOD_RES (6)..(7)..(39): Xaa is C or S

SEQ ID NO: 57664 - protein, 43 aa, Artificial Sequence; identical to SEQ ID NO: 6573
  GFR-binding peptide
  MOD_RES (5)..(6)..(41)..(43): Xaa is C or S
  MOD_RES (20)..(21)..(22)..(23)..(24): Xaa is A or G
  MOD_RES (25)..(26)..(27)..(28): Xaa is A or G or is absent

SEQ ID NO: 57665 - protein, 39 aa, Artificial Sequence
  GFR-binding peptide
  MOD_RES (5)..(6): Xaa is C or S
  MOD_RES (20)..(21)..(22)..(23)..(24): Xaa is A or G
  MOD_RES (25)..(26)..(27)..(28): Xaa is A or G or is absent
SAGPXXTPTKMNAISMLYFXXXXXXXXXLKKYRGMVVDR

SEQ ID NO: 57666 - protein, 41 aa, Artificial Sequence; identical to SEQ ID NO: 7462
  GFR-binding peptide
  MOD_RES (6)..(7)..(39)..(41): Xaa is C or S

SEQ ID NO: 57667 - protein, 34 aa, Artificial Sequence; identical to SEQ ID NO: 7463
  GFR-binding peptide
  MOD_RES (1)..(2): Xaa is C or S
  MOD_RES (16)..(17)..(18)..(19)..(20): Xaa is A or G
  MOD_RES (21)..(22)..(23)..(24): Xaa is A or G or is absent

SEQ ID NO: 57668 - protein, 32 aa, Artificial Sequence; identical to SEQ ID NO: 30644
  GFR-binding peptide
  MOD_RES (14)..(15)..(16)..(17)..(18): Xaa is A or G
  MOD_RES (19)..(20)..(21)..(22): Xaa is A or G or is absent

SEQ ID NO: 57669 - protein, 38 aa, Artificial Sequence
  GFR-binding peptide
  MOD_RES (4)..(5)..(38): Xaa is C or S
  MOD_RES (19)..(20)..(21)..(22)..(23): Xaa is A or G
  MOD_RES (24)..(25)..(26)..(27): Xaa is A or G or is absent
PSTXXAPVKTNAISMLYFXXXXXXXXXLKKYRMIVEEX

SEQ ID NO: 57670 - protein, 33 aa, Artificial Sequence
  GFR-binding peptide
  MOD_RES (1)..(33): Xaa is C or S
XTPTKMNAISMLYFNDKQQIILKKYRGMVVDRX

SEQ ID NO: 57671 - protein, 36 aa, Artificial Sequence; identical to SEQ ID NO: 28701
  GFR-binding peptide
  MOD_RES (3)..(4): Xaa is C or S
  MOD_RES (18)..(19)..(20)..(21)..(22): Xaa is A or G
  MOD_RES (23)..(24)..(25)..(26): Xaa is A or G or is absent

SEQ ID NO: 57672 - protein, 34 aa, Artificial Sequence
  GFR-binding peptide
  MOD_RES (1)..(2): Xaa is C or S
  MOD_RES (16)..(17)..(18)..(19)..(20): Xaa is A or G
  MOD_RES (21)..(22)..(23)..(24): Xaa is A or G or is absent
XXAPVKTNAISMLYFXXXXXXXXXLKKYRMIVEE

SEQ ID NO: 57673 - protein, 42 aa, Artificial Sequence; identical to SEQ ID NO: 8349
  GFR-binding peptide
  MOD_RES (5)..(6)..(40)..(42): Xaa is C or S
  MOD_RES (20)..(21)..(22)..(23)..(24): Xaa is A or G
  MOD_RES (25)..(26)..(27)..(28): Xaa is A or G or is absent

SEQ ID NO: 57674 - protein, 41 aa, Artificial Sequence; identical to SEQ ID NO: 29665
  GFR-binding peptide
  MOD_RES (5)..(6)..(40): Xaa is C or S
  MOD_RES (20)..(21)..(22)..(23)..(24): Xaa is A or G
  MOD_RES (25)..(26)..(27)..(28): Xaa is A or G or is absent

SEQ ID NO: 57675 - protein, 34 aa, Artificial Sequence; identical to SEQ ID NO: 29666
  GFR-binding peptide
  MOD_RES (1)..(2): Xaa is C or S
  MOD_RES (16)..(17)..(18)..(19)..(20): Xaa is A or G
  MOD_RES (21)..(22)..(23)..(24): Xaa is A or G or is absent

SEQ ID NO: 57676 - protein, 33 aa, Artificial Sequence; identical to SEQ ID NO: 30652
  GFR-binding peptide
  MOD_RES (1)..(1): Xaa is C or S
  MOD_RES (15)..(16)..(17)..(18)..(19): Xaa is A or G
  MOD_RES (20)..(21)..(22)..(23): Xaa is A or G or is absent

SEQ ID NO: 57677 - protein, 38 aa, Artificial Sequence; identical to SEQ ID NO: 7480
  GFR-binding peptide
  MOD_RES (1)..(2)..(36)..(38): Xaa is C or S
  MOD_RES (16)..(17)..(18)..(19)..(20): Xaa is A or G
  MOD_RES (21)..(22)..(23)..(24): Xaa is A or G or is absent

SEQ ID NO: 57678 - protein, 39 aa, Artificial Sequence
  GFR-binding peptide
  MOD_RES (3)..(4)..(36)..(38): Xaa is C or S
GPXXTPTKMNAISMLYFNDKQQIILKKYRGMVVDRXGXS

SEQ ID NO: 57679 - protein, 37 aa, Artificial Sequence; identical to SEQ ID NO: 9280
  GFR-binding peptide
  MOD_RES (1)..(2)..(36): Xaa is C or S
  MOD_RES (16)..(17)..(18)..(19)..(20): Xaa is A or G
  MOD_RES (21)..(22)..(23)..(24): Xaa is A or G or is absent

SEQ ID NO: 57680 - protein, 42 aa, Artificial Sequence; identical to SEQ ID NO: 9281
  GFR-binding peptide
  MOD_RES (6)..(7)..(41): Xaa is C or S
  MOD_RES (21)..(22)..(23)..(24)..(25): Xaa is A or G
  MOD_RES (26)..(27)..(28)..(29): Xaa is A or G or is absent

SEQ ID NO: 57681 - protein, 34 aa, Artificial Sequence; identical to SEQ ID NO: 7485
  GFR-binding peptide
  MOD_RES (1)..(33): Xaa is C or S

SEQ ID NO: 57682 - protein, 32 aa, Artificial Sequence; identical to SEQ ID NO: 13962
  GFR-binding peptide
  MOD_RES (1)..(1): Xaa is C or S

SEQ ID NO: 57683 - protein, 41 aa, Artificial Sequence; identical to SEQ ID NO: 8355
  GFR-binding peptide
  MOD_RES (5)..(6)..(38)..(40): Xaa is C or S

SEQ ID NO: 57684 - protein, 36 aa, Artificial Sequence; identical to SEQ ID NO: 7490
  GFR-binding peptide
  MOD_RES (1)..(36): Xaa is C or S
  MOD_RES (15)..(16)..(17)..(18)..(19): Xaa is A or G
  MOD_RES (20)..(21)..(22)..(23): Xaa is A or G or is absent

SEQ ID NO: 57685 - protein, 41 aa, Artificial Sequence; identical to SEQ ID NO: 7491
  GFR-binding peptide
  MOD_RES (4)..(5)..(38)..(40): Xaa is C or S

SEQ ID NO: 57686 - protein, 37 aa, Artificial Sequence
  GFR-binding peptide
  MOD_RES (6)..(7): Xaa is C or S
GSAGPXXTPTKMNAISMLYFNDKQQIILKKYRGMVVD

SEQ ID NO: 57687 - protein, 38 aa, Artificial Sequence
  GFR-binding peptide
  MOD_RES (5)..(6)..(37): Xaa is C or S
VPSTXXAPVKTNAISMLYFDNGRVLLLKKYRMIVEEXG

SEQ ID NO: 57688 - protein, 34 aa, Artificial Sequence
  GFR-binding peptide
  MOD_RES (1)..(34): Xaa is C or S
  MOD_RES (15)..(16)..(17)..(18)..(19): Xaa is A or G
  MOD_RES (20)..(21)..(22)..(23): Xaa is A or G or is absent
XAPVKTNAISMLYFXXXXXXXXXLKKYRMIVEEX

SEQ ID NO: 57689 - protein, 38 aa, Artificial Sequence
  GFR-binding peptide
  MOD_RES (3)..(4)..(38): Xaa is C or S
  MOD_RES (18)..(19)..(20)..(21)..(22): Xaa is A or G
  MOD_RES (23)..(24)..(25)..(26): Xaa is A or G or is absent
GPXXTPTKMNAISMLYFXXXXXXXXXLKKYRGMVVDRX

SEQ ID NO: 57690 - protein, 34 aa, Artificial Sequence; identical to SEQ ID NO: 29678
  GFR-binding peptide
  MOD_RES (3)..(4): Xaa is C or S

SEQ ID NO: 57691 - protein, 37 aa, Artificial Sequence; identical to SEQ ID NO: 9285
  GFR-binding peptide
  MOD_RES (4)..(5): Xaa is C or S
  MOD_RES (19)..(20)..(21)..(22)..(23): Xaa is A or G
  MOD_RES (24)..(25)..(26)..(27): Xaa is A or G or is absent

SEQ ID NO: 57692 - protein, 33 aa, Artificial Sequence; identical to SEQ ID NO: 29682
  GFR-binding peptide
  MOD_RES (1)..(33): Xaa is C or S

SEQ ID NO: 57693 - protein, 40 aa, Artificial Sequence; identical to SEQ ID NO: 14802
  GFR-binding peptide
  MOD_RES (2)..(3)..(37)..(39): Xaa is C or S
  MOD_RES (17)..(18)..(19)..(20)..(21): Xaa is A or G
  MOD_RES (22)..(23)..(24)..(25): Xaa is A or G or is absent

SEQ ID NO: 57694 - protein, 33 aa, Artificial Sequence; identical to SEQ ID NO: 7497
  GFR-binding peptide
  MOD_RES (1)..(2): Xaa is C or S

SEQ ID NO: 57695 - protein, 39 aa, Artificial Sequence
  GFR-binding peptide
  MOD_RES (6)..(7)..(39): Xaa is C or S
GSAGPXXTPTKMNAISMLYFNDKQQIILKKYRGMVVDRX

SEQ ID NO: 57696 - protein, 40 aa, Artificial Sequence; identical to SEQ ID NO: 9287
  GFR-binding peptide
  MOD_RES (5)..(6)..(38)..(40): Xaa is C or S

SEQ ID NO: 57697 - protein, 35 aa, Artificial Sequence; identical to SEQ ID NO: 27762
  GFR-binding peptide
  MOD_RES (1)..(33)..(35): Xaa is C or S

SEQ ID NO: 57698 - protein, 41 aa, Artificial Sequence; identical to SEQ ID NO: 28727
  GFR-binding peptide
  MOD_RES (4)..(5)..(39)..(41): Xaa is C or S
  MOD_RES (19)..(20)..(21)..(22)..(23): Xaa is A or G
  MOD_RES (24)..(25)..(26)..(27): Xaa is A or G or is absent

SEQ ID NO: 57699 - protein, 34 aa, Artificial Sequence; identical to SEQ ID NO: 16578
  GFR-binding peptide
  MOD_RES (34)..(34): Xaa is C or S
  MOD_RES (14)..(15)..(16)..(17)..(18): Xaa is A or G
  MOD_RES (19)..(20)..(21)..(22): Xaa is A or G or is absent

SEQ ID NO: 57700 - protein, 35 aa, Artificial Sequence; identical to SEQ ID NO: 8368
  GFR-binding peptide
  MOD_RES (2)..(3): Xaa is C or S
  MOD_RES (17)..(18)..(19)..(20)..(21): Xaa is A or G
  MOD_RES (22)..(23)..(24)..(25): Xaa is A or G or is absent

SEQ ID NO: 57701 - protein, 37 aa, Artificial Sequence; identical to SEQ ID NO: 6607
  GFR-binding peptide
  MOD_RES (4)..(5): Xaa is C or S
  MOD_RES (19)..(20)..(21)..(22)..(23): Xaa is A or G
  MOD_RES (24)..(25)..(26)..(27): Xaa is A or G or is absent

SEQ ID NO: 57702 - protein, 37 aa, Artificial Sequence; identical to SEQ ID NO: 14808
  GFR-binding peptide
  MOD_RES (1)..(2)..(36): Xaa is C or S
  MOD_RES (16)..(17)..(18)..(19)..(20): Xaa is A or G
  MOD_RES (21)..(22)..(23)..(24): Xaa is A or G or is absent

SEQ ID NO: 57703 - protein, 37 aa, Artificial Sequence; identical to SEQ ID NO: 7501
  GFR-binding peptide
  MOD_RES (1)..(2)..(34)..(36): Xaa is C or S

SEQ ID NO: 57704 - protein, 40 aa, Artificial Sequence
  GFR-binding peptide
  MOD_RES (2)..(3)..(37)..(39): Xaa is C or S
  MOD_RES (17)..(18)..(19)..(20)..(21): Xaa is A or G
  MOD_RES (22)..(23)..(24)..(25): Xaa is A or G or is absent
PXXTPTKMNAISMLYFXXXXXXXXXLKKYRGMVVDRXGXS

SEQ ID NO: 57705 - protein, 36 aa, Artificial Sequence; identical to SEQ ID NO: 29693
  GFR-binding peptide
  MOD_RES (1)..(2)..(36): Xaa is C or S
  MOD_RES (16)..(17)..(18)..(19)..(20): Xaa is A or G
  MOD_RES (21)..(22)..(23)..(24): Xaa is A or G or is absent

SEQ ID NO: 57706 - protein, 44 aa, Artificial Sequence; identical to SEQ ID NO: 9294
  GFR-binding peptide
  MOD_RES (6)..(7)..(41)..(43): Xaa is C or S
  MOD_RES (21)..(22)..(23)..(24)..(25): Xaa is A or G
  MOD_RES (26)..(27)..(28)..(29): Xaa is A or G or is absent

SEQ ID NO: 57707 - protein, 31 aa, Artificial Sequence; identical to SEQ ID NO: 30685
  GFR-binding peptide
  MOD_RES (1)..(1): Xaa is C or S

SEQ ID NO: 57708 - protein, 34 aa, Artificial Sequence; identical to SEQ ID NO: 8374
  GFR-binding peptide
  MOD_RES (1)..(1): Xaa is C or S
  MOD_RES (15)..(16)..(17)..(18)..(19): Xaa is A or G
  MOD_RES (20)..(21)..(22)..(23): Xaa is A or G or is absent

SEQ ID NO: 57709 - protein, 39 aa, Artificial Sequence; identical to SEQ ID NO: 9298
  GFR-binding peptide
  MOD_RES (1)..(2)..(37)..(39): Xaa is C or S
  MOD_RES (16)..(17)..(18)..(19)..(20): Xaa is A or G
  MOD_RES (21)..(22)..(23)..(24): Xaa is A or G or is absent

SEQ ID NO: 57710 - protein, 41 aa, Artificial Sequence; identical to SEQ ID NO: 9299
  GFR-binding peptide
  MOD_RES (4)..(5)..(39)..(41): Xaa is C or S
  MOD_RES (19)..(20)..(21)..(22)..(23): Xaa is A or G
  MOD_RES (24)..(25)..(26)..(27): Xaa is A or G or is absent

SEQ ID NO: 57711 - protein, 39 aa, Artificial Sequence; identical to SEQ ID NO: 8375
  GFR-binding peptide
  MOD_RES (2)..(3)..(38): Xaa is C or S
  MOD_RES (17)..(18)..(19)..(20)..(21): Xaa is A or G
  MOD_RES (22)..(23)..(24)..(25): Xaa is A or G or is absent

SEQ ID NO: 57712 - protein, 40 aa, Artificial Sequence; identical to SEQ ID NO: 30687
  GFR-binding peptide
  MOD_RES (5)..(6)..(40): Xaa is C or S
  MOD_RES (20)..(21)..(22)..(23)..(24): Xaa is A or G
  MOD_RES (25)..(26)..(27)..(28): Xaa is A or G or is absent

SEQ ID NO: 57713 - protein, 32 aa, Artificial Sequence; identical to SEQ ID NO: 13978
  GFR-binding peptide
  MOD_RES (14)..(15)..(16)..(17)..(18): Xaa is A or G
  MOD_RES (19)..(20)..(21)..(22): Xaa is A or G or is absent

SEQ ID NO: 57714 - protein, 31 aa, Artificial Sequence; identical to SEQ ID NO: 8378
  GFR-binding peptide

SEQ ID NO: 57715 - protein, 40 aa, Artificial Sequence; identical to SEQ ID NO: 30691
  GFR-binding peptide
  MOD_RES (5)..(6)..(38)..(40): Xaa is C or S

SEQ ID NO: 57716 - protein, 35 aa, Artificial Sequence; identical to SEQ ID NO: 6615
  GFR-binding peptide
  MOD_RES (2)..(3)..(35): Xaa is C or S

SEQ ID NO: 57717 - protein, 36 aa, Artificial Sequence
  GFR-binding peptide
  MOD_RES (2)..(3)..(34)..(36): Xaa is C or S
TXXAPVKTNAISMLYFDNGRVLLLKKYRMIVEEXGX

SEQ ID NO: 57718 - protein, 39 aa, Artificial Sequence; identical to SEQ ID NO: 30696
  GFR-binding peptide
  MOD_RES (3)..(4)..(36)..(38): Xaa is C or S

SEQ ID NO: 57719 - protein, 42 aa, Artificial Sequence; identical to SEQ ID NO: 8388
  GFR-binding peptide
  MOD_RES (6)..(40)..(42): Xaa is C or S
  MOD_RES (20)..(21)..(22)..(23)..(24): Xaa is A or G
  MOD_RES (25)..(26)..(27)..(28): Xaa is A or G or is absent

SEQ ID NO: 57720 - protein, 38 aa, Artificial Sequence
  GFR-binding peptide
  MOD_RES (3)..(4)..(37): Xaa is C or S
  MOD_RES (18)..(19)..(20)..(21)..(22): Xaa is A or G
  MOD_RES (23)..(24)..(25)..(26): Xaa is A or G or is absent
STXXAPVKTNAISMLYFXXXXXXXXXLKKYRMIVEEXG

SEQ ID NO: 57721 - protein, 39 aa, Artificial Sequence
  GFR-binding peptide
  MOD_RES (1)..(2)..(36)..(38): Xaa is C or S
  MOD_RES (16)..(17)..(18)..(19)..(20): Xaa is A or G
  MOD_RES (21)..(22)..(23)..(24): Xaa is A or G or is absent
XXTPTKMNAISMLYFXXXXXXXXXLKKYRGMVVDRXGXS

SEQ ID NO: 57722 - protein, 40 aa, Artificial Sequence
  GFR-binding peptide
  MOD_RES (3)..(4)..(38)..(40): Xaa is C or S
  MOD_RES (18)..(19)..(20)..(21)..(22): Xaa is A or G
  MOD_RES (23)..(24)..(25)..(26): Xaa is A or G or is absent
GPXXTPTKMNAISMLYFXXXXXXXXXLKKYRGMVVDRXGX

SEQ ID NO: 57723 - protein, 38 aa, Artificial Sequence; identical to SEQ ID NO: 8392
  GFR-binding peptide
  MOD_RES (5)..(5): Xaa is C or S
  MOD_RES (19)..(20)..(21)..(22)..(23): Xaa is A or G
  MOD_RES (24)..(25)..(26)..(27): Xaa is A or G or is absent

SEQ ID NO: 57724 - protein, 38 aa, Artificial Sequence; identical to SEQ ID NO: 30702
  GFR-binding peptide
  MOD_RES (3)..(4)..(36)..(38): Xaa is C or S

SEQ ID NO: 57725 - protein, 37 aa, Artificial Sequence; identical to SEQ ID NO: 6625
  GFR-binding peptide
  MOD_RES (2)..(3)..(36): Xaa is C or S

SEQ ID NO: 57726 - protein, 38 aa, Artificial Sequence; identical to SEQ ID NO: 9312
  GFR-binding peptide
  MOD_RES (2)..(36)..(38): Xaa is C or S
  MOD_RES (16)..(17)..(18)..(19)..(20): Xaa is A or G
  MOD_RES (21)..(22)..(23)..(24): Xaa is A or G or is absent

SEQ ID NO: 57727 - protein, 38 aa, Artificial Sequence; identical to SEQ ID NO: 7521
  GFR-binding peptide
  MOD_RES (3)..(4)..(38): Xaa is C or S
  MOD_RES (18)..(19)..(20)..(21)..(22): Xaa is A or G
  MOD_RES (23)..(24)..(25)..(26): Xaa is A or G or is absent

SEQ ID NO: 57728 - protein, 39 aa, Artificial Sequence; identical to SEQ ID NO: 7522
  GFR-binding peptide
  MOD_RES (6)..(7): Xaa is C or S
  MOD_RES (21)..(22)..(23)..(24)..(25): Xaa is A or G
  MOD_RES (26)..(27)..(28)..(29): Xaa is A or G or is absent

SEQ ID NO: 57729 - protein, 40 aa, Artificial Sequence; identical to SEQ ID NO: 7524
  GFR-binding peptide
  MOD_RES (4)..(5)..(39): Xaa is C or S
  MOD_RES (19)..(20)..(21)..(22)..(23): Xaa is A or G
  MOD_RES (24)..(25)..(26)..(27): Xaa is A or G or is absent

SEQ ID NO: 57730 - protein, 38 aa, Artificial Sequence
  GFR-binding peptide
  MOD_RES (6)..(7)..(38): Xaa is C or S
RVPSTXXAPVKTNAISMLYFDNGRVLLLKKYRMIVEEX

SEQ ID NO: 57731 - protein, 33 aa, Artificial Sequence; identical to SEQ ID NO: 7526
  GFR-binding peptide
  MOD_RES (33)..(33): Xaa is C or S

SEQ ID NO: 57732 - protein, 39 aa, Artificial Sequence; identical to SEQ ID NO: 7527
  GFR-binding peptide
  MOD_RES (5)..(6): Xaa is C or S
  MOD_RES (20)..(21)..(22)..(23)..(24): Xaa is A or G
  MOD_RES (25)..(26)..(27)..(28): Xaa is A or G or is absent

SEQ ID NO: 57733 - protein, 37 aa, Artificial Sequence; identical to SEQ ID NO: 28767
  GFR-binding peptide
  MOD_RES (6)..(7): Xaa is C or S

SEQ ID NO: 57734 - protein, 37 aa, Artificial Sequence; identical to SEQ ID NO: 15702
  GFR-binding peptide
  MOD_RES (1)..(35)..(37): Xaa is C or S
  MOD_RES (15)..(16)..(17)..(18)..(19): Xaa is A or G
  MOD_RES (20)..(21)..(22)..(23): Xaa is A or G or is absent

SEQ ID NO: 57735 - protein, 40 aa, Artificial Sequence
  GFR-binding peptide
  MOD_RES (6)..(7): Xaa is C or S
  MOD_RES (21)..(22)..(23)..(24)..(25): Xaa is A or G
  MOD_RES (26)..(27)..(28)..(29): Xaa is A or G or is absent
GSAGPXXTPTKMNAISMLYFXXXXXXXXXLKKYRGMVVDR

SEQ ID NO: 57736 - protein, 35 aa, Artificial Sequence; identical to SEQ ID NO: 9324
  GFR-binding peptide
  MOD_RES (1)..(33)..(35): Xaa is C or S

SEQ ID NO: 57737 - protein, 39 aa, Artificial Sequence; identical to SEQ ID NO: 9325
  GFR-binding peptide
  MOD_RES (5)..(6): Xaa is C or S
  MOD_RES (20)..(21)..(22)..(23)..(24): Xaa is A or G
  MOD_RES (25)..(26)..(27)..(28): Xaa is A or G or is absent

SEQ ID NO: 57738 - protein, 35 aa, Artificial Sequence
  GFR-binding peptide
  MOD_RES (4)..(5): Xaa is C or S
AGPXXTPTKMNAISMLYFNDKQQIILKKYRGMVVD

SEQ ID NO: 57739 - protein, 36 aa, Artificial Sequence; identical to SEQ ID NO: 8404
  GFR-binding peptide
  MOD_RES (1)..(2)..(36): Xaa is C or S
  MOD_RES (16)..(17)..(18)..(19)..(20): Xaa is A or G
  MOD_RES (21)..(22)..(23)..(24): Xaa is A or G or is absent

SEQ ID NO: 57740 - protein, 31 aa, Artificial Sequence; identical to SEQ ID NO: 28771
  GFR-binding peptide

SEQ ID NO: 57741 - protein, 37 aa, Artificial Sequence; identical to SEQ ID NO: 9328
  GFR-binding peptide
  MOD_RES (3)..(4)..(36): Xaa is C or S

SEQ ID NO: 57742 - protein, 37 aa, Artificial Sequence; identical to SEQ ID NO: 6632
  GFR-binding peptide
  MOD_RES (2)..(3)..(37): Xaa is C or S
  MOD_RES (17)..(18)..(19)..(20)..(21): Xaa is A or G
  MOD_RES (22)..(23)..(24)..(25): Xaa is A or G or is absent

SEQ ID NO: 57743 - protein, 38 aa, Artificial Sequence; identical to SEQ ID NO: 7536
  GFR-binding peptide
  MOD_RES (3)..(4): Xaa is C or S
  MOD_RES (18)..(19)..(20)..(21)..(22): Xaa is A or G
  MOD_RES (23)..(24)..(25)..(26): Xaa is A or G or is absent

SEQ ID NO: 57744 - protein, 35 aa, Artificial Sequence
  GFR-binding peptide
  MOD_RES (2)..(3): Xaa is C or S
  MOD_RES (17)..(18)..(19)..(20)..(21): Xaa is A or G
  MOD_RES (22)..(23)..(24)..(25): Xaa is A or G or is absent
PXXTPTKMNAISMLYFXXXXXXXXXLKKYRGMVVD

SEQ ID NO: 57745 - protein, 36 aa, Artificial Sequence; identical to SEQ ID NO: 9330
  GFR-binding peptide
  MOD_RES (34)..(36): Xaa is C or S
  MOD_RES (14)..(15)..(16)..(17)..(18): Xaa is A or G
  MOD_RES (19)..(20)..(21)..(22): Xaa is A or G or is absent

SEQ ID NO: 57746 - protein, 33 aa, Artificial Sequence
  GFR-binding peptide
  MOD_RES (1)..(32): Xaa is C or S
XAPVKTNAISMLYFDNGRVLLLKKYRMIVEEXG

SEQ ID NO: 57747 - protein, 33 aa, Artificial Sequence; identical to SEQ ID NO: 8409
  GFR-binding peptide
  MOD_RES (1)..(1): Xaa is C or S
  MOD_RES (15)..(16)..(17)..(18)..(19): Xaa is A or G
  MOD_RES (20)..(21)..(22)..(23): Xaa is A or G or is absent

SEQ ID NO: 57748 - protein, 35 aa, Artificial Sequence; identical to SEQ ID NO: 28777
  GFR-binding peptide
  MOD_RES (2)..(3): Xaa is C or S
  MOD_RES (17)..(18)..(19)..(20)..(21): Xaa is A or G
  MOD_RES (22)..(23)..(24)..(25): Xaa is A or G or is absent

SEQ ID NO: 57749 - protein, 39 aa, Artificial Sequence; identical to SEQ ID NO: 8410
  GFR-binding peptide
  MOD_RES (6)..(7)..(39): Xaa is C or S

SEQ ID NO: 57750 - protein, 33 aa, Artificial Sequence; identical to SEQ ID NO: 27803
  GFR-binding peptide
  MOD_RES (14)..(15)..(16)..(17)..(18): Xaa is A or G
  MOD_RES (19)..(20)..(21)..(22): Xaa is A or G or is absent

SEQ ID NO: 57751 - protein, 30 aa, Artificial Sequence
  GFR-binding peptide
TPTKMNAISMLYFNDKQQIILKKYRGMVVD

SEQ ID NO: 57752 - protein, 37 aa, Artificial Sequence; identical to SEQ ID NO: 16639
  GFR-binding peptide
  MOD_RES (6)..(7): Xaa is C or S

SEQ ID NO: 57753 - protein, 38 aa, Artificial Sequence; identical to SEQ ID NO: 7543
  GFR-binding peptide
  MOD_RES (2)..(3)..(37): Xaa is C or S
  MOD_RES (17)..(18)..(19)..(20)..(21): Xaa is A or G
  MOD_RES (22)..(23)..(24)..(25): Xaa is A or G or is absent

SEQ ID NO: 57754 - protein, 43 aa, Artificial Sequence; identical to SEQ ID NO: 8414
  GFR-binding peptide
  MOD_RES (6)..(7)..(41)..(43): Xaa is C or S
  MOD_RES (21)..(22)..(23)..(24)..(25): Xaa is A or G
  MOD_RES (26)..(27)..(28)..(29): Xaa is A or G or is absent

SEQ ID NO: 57755 - protein, 34 aa, Artificial Sequence
  GFR-binding peptide
  MOD_RES (32)..(34): Xaa is C or S
TPTKMNAISMLYFNDKQQIILKKYRGMVVDRXGX

SEQ ID NO: 57756 - protein, 40 aa, Artificial Sequence
  GFR-binding peptide
  MOD_RES (4)..(5)..(38)..(40): Xaa is C or S
  MOD_RES (19)..(20)..(21)..(22)..(23): Xaa is A or G
  MOD_RES (24)..(25)..(26)..(27): Xaa is A or G or is absent
PSTXXAPVKTNAISMLYFXXXXXXXXXLKKYRMIVEEXGX

SEQ ID NO: 57757 - protein, 40 aa, Artificial Sequence; identical to SEQ ID NO: 7545
  GFR-binding peptide
  MOD_RES (3)..(4)..(38)..(40): Xaa is C or S
  MOD_RES (18)..(19)..(20)..(21)..(22): Xaa is A or G
  MOD_RES (23)..(24)..(25)..(26): Xaa is A or G or is absent

SEQ ID NO: 57758 - protein, 37 aa, Artificial Sequence; identical to SEQ ID NO: 28785
  GFR-binding peptide
  MOD_RES (5)..(6): Xaa is C or S

SEQ ID NO: 57759 - protein, 38 aa, Artificial Sequence; identical to SEQ ID NO: 7546
  GFR-binding peptide
  MOD_RES (1)..(35)..(37): Xaa is C or S
  MOD_RES (15)..(16)..(17)..(18)..(19): Xaa is A or G
  MOD_RES (20)..(21)..(22)..(23): Xaa is A or G or is absent

SEQ ID NO: 57760 - protein, 37 aa, Artificial Sequence; identical to SEQ ID NO: 7549
  GFR-binding peptide
  MOD_RES (6)..(7): Xaa is C or S

SEQ ID NO: 57761 - protein, 37 aa, Artificial Sequence; identical to SEQ ID NO: 7550
  GFR-binding peptide
  MOD_RES (3)..(4): Xaa is C or S
  MOD_RES (18)..(19)..(20)..(21)..(22): Xaa is A or G
  MOD_RES (23)..(24)..(25)..(26): Xaa is A or G or is absent

SEQ ID NO: 57762 - protein, 33 aa, Artificial Sequence; identical to SEQ ID NO: 9341
  GFR-binding peptide
  MOD_RES (14)..(15)..(16)..(17)..(18): Xaa is A or G
  MOD_RES (19)..(20)..(21)..(22): Xaa is A or G or is absent

SEQ ID NO: 57763 - protein, 35 aa, Artificial Sequence; identical to SEQ ID NO: 7551
  GFR-binding peptide
  MOD_RES (32)..(34): Xaa is C or S

SEQ ID NO: 57764 - protein, 40 aa, Artificial Sequence
  GFR-binding peptide
  MOD_RES (5)..(6)..(40): Xaa is C or S
  MOD_RES (20)..(21)..(22)..(23)..(24): Xaa is A or G
  MOD_RES (25)..(26)..(27)..(28): Xaa is A or G or is absent
SAGPXXTPTKMNAISMLYFXXXXXXXXXLKKYRGMVVDRX

SEQ ID NO: 57765 - protein, 36 aa, Artificial Sequence; identical to SEQ ID NO: 8417
  GFR-binding peptide
  MOD_RES (1)..(2)..(36): Xaa is C or S
  MOD_RES (16)..(17)..(18)..(19)..(20): Xaa is A or G
  MOD_RES (21)..(22)..(23)..(24): Xaa is A or G or is absent

SEQ ID NO: 57766 - protein, 41 aa, Artificial Sequence; identical to SEQ ID NO: 7553
  GFR-binding peptide
  MOD_RES (5)..(6)..(40): Xaa is C or S
  MOD_RES (20)..(21)..(22)..(23)..(24): Xaa is A or G
  MOD_RES (25)..(26)..(27)..(28): Xaa is A or G or is absent

SEQ ID NO: 57767 - protein, 34 aa, Artificial Sequence; identical to SEQ ID NO: 8421
  GFR-binding peptide
  MOD_RES (1)..(2)..(34): Xaa is C or S

SEQ ID NO: 57768 - protein, 31 aa, Artificial Sequence; identical to SEQ ID NO: 9343
  GFR-binding peptide

SEQ ID NO: 57769 - protein, 39 aa, Artificial Sequence
  GFR-binding peptide
  MOD_RES (2)..(3)..(36)..(38): Xaa is C or S
  MOD_RES (17)..(18)..(19)..(20)..(21): Xaa is A or G
  MOD_RES (22)..(23)..(24)..(25): Xaa is A or G or is absent
TXXAPVKTNAISMLYFXXXXXXXXXLKKYRMIVEEXGXL

SEQ ID NO: 57770 - protein, 31 aa, Artificial Sequence
  GFR-binding peptide
  MOD_RES (1)..(1): Xaa is C or S
XTPTKMNAISMLYFNDKQQIILKKYRGMVVD

SEQ ID NO: 57771 - protein, 41 aa, Artificial Sequence; identical to SEQ ID NO: 30733
  GFR-binding peptide
  MOD_RES (6)..(7)..(41): Xaa is C or S
  MOD_RES (21)..(22)..(23)..(24)..(25): Xaa is A or G
  MOD_RES (26)..(27)..(28)..(29): Xaa is A or G or is absent

SEQ ID NO: 57772 - protein, 38 aa, Artificial Sequence; identical to SEQ ID NO: 8425
  GFR-binding peptide
  MOD_RES (1)..(2)..(37): Xaa is C or S
  MOD_RES (16)..(17)..(18)..(19)..(20): Xaa is A or G
  MOD_RES (21)..(22)..(23)..(24): Xaa is A or G or is absent

SEQ ID NO: 57773 - protein, 35 aa, Artificial Sequence; identical to SEQ ID NO: 29739
  GFR-binding peptide
  MOD_RES (32)..(34): Xaa is C or S

SEQ ID NO: 57774 - protein, 32 aa, Artificial Sequence; identical to SEQ ID NO: 29740
  GFR-binding peptide
  MOD_RES (1)..(2): Xaa is C or S

SEQ ID NO: 57775 - protein, 36 aa, Artificial Sequence; identical to SEQ ID NO: 8428
  GFR-binding peptide
  MOD_RES (1)..(2)..(34)..(36): Xaa is C or S

SEQ ID NO: 57776 - protein, 35 aa, Artificial Sequence; identical to SEQ ID NO: 30735
  GFR-binding peptide
  MOD_RES (32)..(34): Xaa is C or S

SEQ ID NO: 57777 - protein, 36 aa, Artificial Sequence; identical to SEQ ID NO: 6655
  GFR-binding peptide
  MOD_RES (4)..(5): Xaa is C or S

SEQ ID NO: 57778 - protein, 41 aa, Artificial Sequence; identical to SEQ ID NO: 8429
  GFR-binding peptide
  MOD_RES (4)..(5)..(39)..(41): Xaa is C or S
  MOD_RES (19)..(20)..(21)..(22)..(23): Xaa is A or G
  MOD_RES (24)..(25)..(26)..(27): Xaa is A or G or is absent

SEQ ID NO: 57779 - protein, 38 aa, Artificial Sequence; identical to SEQ ID NO: 8431
  GFR-binding peptide
  MOD_RES (1)..(35)..(37): Xaa is C or S
  MOD_RES (15)..(16)..(17)..(18)..(19): Xaa is A or G
  MOD_RES (20)..(21)..(22)..(23): Xaa is A or G or is absent

SEQ ID NO: 57780 - protein, 37 aa, Artificial Sequence; identical to SEQ ID NO: 29744
  GFR-binding peptide
  MOD_RES (6)..(7): Xaa is C or S

SEQ ID NO: 57781 - protein, 43 aa, Artificial Sequence; identical to SEQ ID NO: 6658
  GFR-binding peptide
  MOD_RES (5)..(6)..(40)..(42): Xaa is C or S
  MOD_RES (20)..(21)..(22)..(23)..(24): Xaa is A or G
  MOD_RES (25)..(26)..(27)..(28): Xaa is A or G or is absent

SEQ ID NO: 57782 - protein, 33 aa, Artificial Sequence; identical to SEQ ID NO: 8433
  GFR-binding peptide
  MOD_RES (1)..(1): Xaa is C or S
  MOD_RES (15)..(16)..(17)..(18)..(19): Xaa is A or G
  MOD_RES (20)..(21)..(22)..(23): Xaa is A or G or is absent

SEQ ID NO: 57783 - protein, 37 aa, Artificial Sequence; identical to SEQ ID NO: 29748
  GFR-binding peptide
  MOD_RES (2)..(3)..(35)..(37): Xaa is C or S

SEQ ID NO: 57784 - protein, 36 aa, Artificial Sequence; identical to SEQ ID NO: 29751
  GFR-binding peptide
  MOD_RES (1)..(35): Xaa is C or S
  MOD_RES (15)..(16)..(17)..(18)..(19): Xaa is A or G
  MOD_RES (20)..(21)..(22)..(23): Xaa is A or G or is absent

SEQ ID NO: 57785 - protein, 34 aa, Artificial Sequence; identical to SEQ ID NO: 7569
  GFR-binding peptide
  MOD_RES (1)..(34): Xaa is C or S

SEQ ID NO: 57786 - protein, 39 aa, Artificial Sequence; identical to SEQ ID NO: 9352
  GFR-binding peptide
  MOD_RES (5)..(6)..(38): Xaa is C or S

SEQ ID NO: 57787 - protein, 37 aa, Artificial Sequence; identical to SEQ ID NO: 6664
  GFR-binding peptide
  MOD_RES (4)..(5): Xaa is C or S

SEQ ID NO: 57788 - protein, 33 aa, Artificial Sequence; identical to SEQ ID NO: 29755
  GFR-binding peptide
  MOD_RES (1)..(2): Xaa is C or S

SEQ ID NO: 57789 - protein, 36 aa, Artificial Sequence; identical to SEQ ID NO: 7572
  GFR-binding peptide
  MOD_RES (34)..(36): Xaa is C or S
  MOD_RES (14)..(15)..(16)..(17)..(18): Xaa is A or G
  MOD_RES (19)..(20)..(21)..(22): Xaa is A or G or is absent

SEQ ID NO: 57790 - protein, 38 aa, Artificial Sequence
  GFR-binding peptide
  MOD_RES (2)..(3)..(36)..(38): Xaa is C or S
  MOD_RES (17)..(18)..(19)..(20)..(21): Xaa is A or G
  MOD_RES (22)..(23)..(24)..(25): Xaa is A or G or is absent
TXXAPVKTNAISMLYFXXXXXXXXXLKKYRMIVEEXGX

SEQ ID NO: 57791 - protein, 40 aa, Artificial Sequence; identical to SEQ ID NO: 14884
  GFR-binding peptide
  MOD_RES (5)..(6)..(40): Xaa is C or S
  MOD_RES (20)..(21)..(22)..(23)..(24): Xaa is A or G
  MOD_RES (25)..(26)..(27)..(28): Xaa is A or G or is absent

SEQ ID NO: 57792 - protein, 38 aa, Artificial Sequence; identical to SEQ ID NO: 7575
  GFR-binding peptide
  MOD_RES (3)..(37): Xaa is C or S
  MOD_RES (17)..(18)..(19)..(20)..(21): Xaa is A or G
  MOD_RES (22)..(23)..(24)..(25): Xaa is A or G or is absent

SEQ ID NO: 57793 - protein, 32 aa, Artificial Sequence; identical to SEQ ID NO: 8444
  GFR-binding peptide
  MOD_RES (1)..(2): Xaa is C or S

SEQ ID NO: 57794 - protein, 40 aa, Artificial Sequence; identical to SEQ ID NO: 6669
  GFR-binding peptide
  MOD_RES (5)..(6)..(40): Xaa is C or S
  MOD_RES (20)..(21)..(22)..(23)..(24): Xaa is A or G
  MOD_RES (25)..(26)..(27)..(28): Xaa is A or G or is absent

SEQ ID NO: 57795 - protein, 38 aa, Artificial Sequence; identical to SEQ ID NO: 9361
  GFR-binding peptide
  MOD_RES (3)..(4)..(38): Xaa is C or S
  MOD_RES (18)..(19)..(20)..(21)..(22): Xaa is A or G
  MOD_RES (23)..(24)..(25)..(26): Xaa is A or G or is absent

SEQ ID NO: 57796 - protein, 34 aa, Artificial Sequence; identical to SEQ ID NO: 8446
  GFR-binding peptide
  MOD_RES (1)..(1): Xaa is C or S
  MOD_RES (15)..(16)..(17)..(18)..(19): Xaa is A or G
  MOD_RES (20)..(21)..(22)..(23): Xaa is A or G or is absent

SEQ ID NO: 57797 - protein, 35 aa, Artificial Sequence; identical to SEQ ID NO: 6670
  GFR-binding peptide
  MOD_RES (3)..(4): Xaa is C or S

SEQ ID NO: 57798 - protein, 38 aa, Artificial Sequence; identical to SEQ ID NO: 7578
  GFR-binding peptide
  MOD_RES (5)..(6): Xaa is C or S
  MOD_RES (20)..(21)..(22)..(23)..(24): Xaa is A or G
  MOD_RES (25)..(26)..(27)..(28): Xaa is A or G or is absent

SEQ ID NO: 57799 - protein, 38 aa, Artificial Sequence; identical to SEQ ID NO: 15745
  GFR-binding peptide
  MOD_RES (3)..(4)..(38): Xaa is C or S
  MOD_RES (18)..(19)..(20)..(21)..(22): Xaa is A or G
  MOD_RES (23)..(24)..(25)..(26): Xaa is A or G or is absent

SEQ ID NO: 57800 - protein, 36 aa, Artificial Sequence; identical to SEQ ID NO: 6671
  GFR-binding peptide
  MOD_RES (1)..(35): Xaa is C or S
  MOD_RES (15)..(16)..(17)..(18)..(19): Xaa is A or G
  MOD_RES (20)..(21)..(22)..(23): Xaa is A or G or is absent

SEQ ID NO: 57801 - protein, 40 aa, Artificial Sequence; identical to SEQ ID NO: 7580
  GFR-binding peptide
  MOD_RES (4)..(5)..(39): Xaa is C or S
  MOD_RES (19)..(20)..(21)..(22)..(23): Xaa is A or G
  MOD_RES (24)..(25)..(26)..(27): Xaa is A or G or is absent

SEQ ID NO: 57802 - protein, 37 aa, Artificial Sequence; identical to SEQ ID NO: 30756
  GFR-binding peptide
  MOD_RES (2)..(3)..(37): Xaa is C or S
  MOD_RES (17)..(18)..(19)..(20)..(21): Xaa is A or G
  MOD_RES (22)..(23)..(24)..(25): Xaa is A or G or is absent

SEQ ID NO: 57803 - protein, 39 aa, Artificial Sequence; identical to SEQ ID NO: 27841
  GFR-binding peptide
  MOD_RES (4)..(5)..(39): Xaa is C or S
  MOD_RES (19)..(20)..(21)..(22)..(23): Xaa is A or G
  MOD_RES (24)..(25)..(26)..(27): Xaa is A or G or is absent

SEQ ID NO: 57804 - protein, 37 aa, Artificial Sequence; identical to SEQ ID NO: 14888
  GFR-binding peptide
  MOD_RES (4)..(5): Xaa is C or S
  MOD_RES (19)..(20)..(21)..(22)..(23): Xaa is A or G
  MOD_RES (24)..(25)..(26)..(27): Xaa is A or G or is absent

SEQ ID NO: 57805 - protein, 40 aa, Artificial Sequence; identical to SEQ ID NO: 30762
  GFR-binding peptide
  MOD_RES (3)..(4)..(38)..(40): Xaa is C or S
  MOD_RES (18)..(19)..(20)..(21)..(22): Xaa is A or G
  MOD_RES (23)..(24)..(25)..(26): Xaa is A or G or is absent

SEQ ID NO: 57806 - protein, 36 aa, Artificial Sequence
  GFR-binding peptide
  MOD_RES (2)..(3): Xaa is C or S
  MOD_RES (17)..(18)..(19)..(20)..(21): Xaa is A or G
  MOD_RES (22)..(23)..(24)..(25): Xaa is A or G or is absent
PXXTPTKMNAISMLYFXXXXXXXXXLKKYRGMVVDR

SEQ ID NO: 57807 - protein, 39 aa, Artificial Sequence; identical to SEQ ID NO: 7585
  GFR-binding peptide
  MOD_RES (6)..(7): Xaa is C or S
  MOD_RES (21)..(22)..(23)..(24)..(25): Xaa is A or G
  MOD_RES (26)..(27)..(28)..(29): Xaa is A or G or is absent

SEQ ID NO: 57808 - protein, 33 aa, Artificial Sequence; identical to SEQ ID NO: 6679
  GFR-binding peptide
  MOD_RES (1)..(2): Xaa is C or S

SEQ ID NO: 57809 - protein, 35 aa, Artificial Sequence
  GFR-binding peptide
  MOD_RES (33)..(35): Xaa is C or S
  MOD_RES (14)..(15)..(16)..(17)..(18): Xaa is A or G
  MOD_RES (19)..(20)..(21)..(22): Xaa is A or G or is absent
APVKTNAISMLYFXXXXXXXXXLKKYRMIVEEXGX

SEQ ID NO: 57810 - protein, 39 aa, Artificial Sequence; identical to SEQ ID NO: 29767
  GFR-binding peptide
  MOD_RES (1)..(2)..(36)..(38): Xaa is C or S
  MOD_RES (16)..(17)..(18)..(19)..(20): Xaa is A or G
  MOD_RES (21)..(22)..(23)..(24): Xaa is A or G or is absent

SEQ ID NO: 57811 - protein, 41 aa, Artificial Sequence; identical to SEQ ID NO: 9371
  GFR-binding peptide
  MOD_RES (6)..(7)..(39)..(41): Xaa is C or S

SEQ ID NO: 57812 - protein, 39 aa, Artificial Sequence; identical to SEQ ID NO: 8457
  GFR-binding peptide
  MOD_RES (2)..(3)..(37)..(39): Xaa is C or S
  MOD_RES (17)..(18)..(19)..(20)..(21): Xaa is A or G
  MOD_RES (22)..(23)..(24)..(25): Xaa is A or G or is absent

SEQ ID NO: 57813 - protein, 37 aa, Artificial Sequence
  GFR-binding peptide
  MOD_RES (4)..(5): Xaa is C or S
  MOD_RES (19)..(20)..(21)..(22)..(23): Xaa is A or G
  MOD_RES (24)..(25)..(26)..(27): Xaa is A or G or is absent
AGPXXTPTKMNAISMLYFXXXXXXXXXLKKYRGMVVD

SEQ ID NO: 57814 - protein, 37 aa, Artificial Sequence; identical to SEQ ID NO: 8462
  GFR-binding peptide
  MOD_RES (2)..(3)..(35)..(37): Xaa is C or S

SEQ ID NO: 57815 - protein, 36 aa, Artificial Sequence; identical to SEQ ID NO: 29781
  GFR-binding peptide
  MOD_RES (1)..(33)..(35): Xaa is C or S

SEQ ID NO: 57816 - protein, 38 aa, Artificial Sequence; identical to SEQ ID NO: 29782
  GFR-binding peptide
  MOD_RES (5)..(6): Xaa is C or S
  MOD_RES (20)..(21)..(22)..(23)..(24): Xaa is A or G
  MOD_RES (25)..(26)..(27)..(28): Xaa is A or G or is absent

SEQ ID NO: 57817 - protein, 34 aa, Artificial Sequence; identical to SEQ ID NO: 8464
  GFR-binding peptide
  MOD_RES (3)..(4): Xaa is C or S

SEQ ID NO: 57818 - protein, 40 aa, Artificial Sequence; identical to SEQ ID NO: 6705
  GFR-binding peptide
  MOD_RES (5)..(39): Xaa is C or S
  MOD_RES (19)..(20)..(21)..(22)..(23): Xaa is A or G
  MOD_RES (24)..(25)..(26)..(27): Xaa is A or G or is absent

SEQ ID NO: 57819 - protein, 31 aa, Artificial Sequence; identical to SEQ ID NO: 7604
  GFR-binding peptide

SEQ ID NO: 57820 - protein, 40 aa, Artificial Sequence; identical to SEQ ID NO: 6708
  GFR-binding peptide
  MOD_RES (3)..(4)..(38)..(40): Xaa is C or S
  MOD_RES (18)..(19)..(20)..(21)..(22): Xaa is A or G
  MOD_RES (23)..(24)..(25)..(26): Xaa is A or G or is absent

SEQ ID NO: 57821 - protein, 39 aa, Artificial Sequence; identical to SEQ ID NO: 9387
  GFR-binding peptide
  MOD_RES (4)..(5)..(39): Xaa is C or S
  MOD_RES (19)..(20)..(21)..(22)..(23): Xaa is A or G
  MOD_RES (24)..(25)..(26)..(27): Xaa is A or G or is absent

SEQ ID NO: 57822 - protein, 42 aa, Artificial Sequence
  GFR-binding peptide
  MOD_RES (6)..(7)..(39)..(41): Xaa is C or S
GSAGPXXTPTKMNAISMLYFNDKQQIILKKYRGMVVDRXGXS

SEQ ID NO: 57823 - protein, 35 aa, Artificial Sequence; identical to SEQ ID NO: 7607
  GFR-binding peptide
  MOD_RES (4)..(5): Xaa is C or S

SEQ ID NO: 57824 - protein, 43 aa, Artificial Sequence; identical to SEQ ID NO: 6711
  GFR-binding peptide
  MOD_RES (6)..(7)..(41)..(43): Xaa is C or S
  MOD_RES (21)..(22)..(23)..(24)..(25): Xaa is A or G
  MOD_RES (26)..(27)..(28)..(29): Xaa is A or G or is absent

SEQ ID NO: 57825 - protein, 36 aa, Artificial Sequence
  GFR-binding peptide
  MOD_RES (1)..(34)..(36): Xaa is C or S
  MOD_RES (15)..(16)..(17)..(18)..(19): Xaa is A or G
  MOD_RES (20)..(21)..(22)..(23): Xaa is A or G or is absent
XAPVKTNAISMLYFXXXXXXXXXLKKYRMIVEEXGX

SEQ ID NO: 57826 - protein, 36 aa, Artificial Sequence
  GFR-binding peptide
  MOD_RES (3)..(4)..(35): Xaa is C or S
STXXAPVKTNAISMLYFDNGRVLLLKKYRMIVEEXG

SEQ ID NO: 57827 - protein, 38 aa, Artificial Sequence; identical to SEQ ID NO: 14066
  GFR-binding peptide
  MOD_RES (1)..(35)..(37): Xaa is C or S
  MOD_RES (15)..(16)..(17)..(18)..(19): Xaa is A or G
  MOD_RES (20)..(21)..(22)..(23): Xaa is A or G or is absent

SEQ ID NO: 57828 - protein, 42 aa, Artificial Sequence
  GFR-binding peptide
  MOD_RES (6)..(7)..(41): Xaa is C or S
  MOD_RES (21)..(22)..(23)..(24)..(25): Xaa is A or G
  MOD_RES (26)..(27)..(28)..(29): Xaa is A or G or is absent
HVPKPXXAPTKLNAISVLYFXXXXXXXXXLKKYRNMVVRSXG

SEQ ID NO: 57829 - protein, 37 aa, Artificial Sequence; identical to SEQ ID NO: 9394
  GFR-binding peptide
  MOD_RES (35)..(37): Xaa is C or S
  MOD_RES (14)..(15)..(16)..(17)..(18): Xaa is A or G
  MOD_RES (19)..(20)..(21)..(22): Xaa is A or G or is absent

SEQ ID NO: 57830 - protein, 38 aa, Artificial Sequence; identical to SEQ ID NO: 9395
  GFR-binding peptide
  MOD_RES (3)..(4)..(38): Xaa is C or S
  MOD_RES (18)..(19)..(20)..(21)..(22): Xaa is A or G
  MOD_RES (23)..(24)..(25)..(26): Xaa is A or G or is absent

SEQ ID NO: 57831 - protein, 38 aa, Artificial Sequence; identical to SEQ ID NO: 6713
  GFR-binding peptide
  MOD_RES (2)..(3)..(35)..(37): Xaa is C or S

SEQ ID NO: 57832 - protein, 37 aa, Artificial Sequence; identical to SEQ ID NO: 15783
  GFR-binding peptide
  MOD_RES (3)..(4)..(36): Xaa is C or S

SEQ ID NO: 57833 - protein, 32 aa, Artificial Sequence; identical to SEQ ID NO: 7611
  GFR-binding peptide
  MOD_RES (32)..(32): Xaa is C or S

SEQ ID NO: 57834 - protein, 37 aa, Artificial Sequence
  GFR-binding peptide
  MOD_RES (2)..(3)..(36): Xaa is C or S
  MOD_RES (17)..(18)..(19)..(20)..(21): Xaa is A or G
  MOD_RES (22)..(23)..(24)..(25): Xaa is A or G or is absent
TXXAPVKTNAISMLYFXXXXXXXXXLKKYRMIVEEXG

SEQ ID NO: 57835 - protein, 35 aa, Artificial Sequence
  GFR-binding peptide
  MOD_RES (34)..(34): Xaa is C or S
  MOD_RES (14)..(15)..(16)..(17)..(18): Xaa is A or G
  MOD_RES (19)..(20)..(21)..(22): Xaa is A or G or is absent
TPTKMNAISMLYFXXXXXXXXXLKKYRGMVVDRXG

SEQ ID NO: 57836 - protein, 40 aa, Artificial Sequence
  GFR-binding peptide
  MOD_RES (6)..(7)..(39): Xaa is C or S
GSAGPXXTPTKMNAISMLYFNDKQQIILKKYRGMVVDRXG

SEQ ID NO: 57837 - protein, 39 aa, Artificial Sequence; identical to SEQ ID NO: 30804
  GFR-binding peptide
  MOD_RES (5)..(6)..(38): Xaa is C or S

SEQ ID NO: 57838 - protein, 33 aa, Artificial Sequence
  GFR-binding peptide
  MOD_RES (1)..(1): Xaa is C or S
  MOD_RES (15)..(16)..(17)..(18)..(19): Xaa is A or G
  MOD_RES (20)..(21)..(22)..(23): Xaa is A or G or is absent
XAPVKTNAISMLYFXXXXXXXXXLKKYRMIVEE

SEQ ID NO: 57839 - protein, 40 aa, Artificial Sequence; identical to SEQ ID NO: 6718
  GFR-binding peptide
  MOD_RES (3)..(4)..(38)..(40): Xaa is C or S
  MOD_RES (18)..(19)..(20)..(21)..(22): Xaa is A or G
  MOD_RES (23)..(24)..(25)..(26): Xaa is A or G or is absent

SEQ ID NO: 57840 - protein, 44 aa, Artificial Sequence; identical to SEQ ID NO: 6720
  GFR-binding peptide
  MOD_RES (7)..(41)..(43): Xaa is C or S
  MOD_RES (21)..(22)..(23)..(24)..(25): Xaa is A or G
  MOD_RES (26)..(27)..(28)..(29): Xaa is A or G or is absent

SEQ ID NO: 57841 - protein, 35 aa, Artificial Sequence; identical to SEQ ID NO: 8490
  GFR-binding peptide
  MOD_RES (1)..(35): Xaa is C or S
  MOD_RES (15)..(16)..(17)..(18)..(19): Xaa is A or G
  MOD_RES (20)..(21)..(22)..(23): Xaa is A or G or is absent

SEQ ID NO: 57842 - protein, 34 aa, Artificial Sequence; identical to SEQ ID NO: 9404
  GFR-binding peptide
  MOD_RES (1)..(2)..(34): Xaa is C or S

SEQ ID NO: 57843 - protein, 34 aa, Artificial Sequence; identical to SEQ ID NO: 15792
  GFR-binding peptide
  MOD_RES (3)..(4): Xaa is C or S

SEQ ID NO: 57844 - protein, 37 aa, Artificial Sequence; identical to SEQ ID NO: 9407
  GFR-binding peptide
  MOD_RES (5)..(5): Xaa is C or S
  MOD_RES (19)..(20)..(21)..(22)..(23): Xaa is A or G
  MOD_RES (24)..(25)..(26)..(27): Xaa is A or G or is absent

SEQ ID NO: 57845 - protein, 35 aa, Artificial Sequence
  GFR-binding peptide
  MOD_RES (1)..(2): Xaa is C or S
  MOD_RES (16)..(17)..(18)..(19)..(20): Xaa is A or G
  MOD_RES (21)..(22)..(23)..(24): Xaa is A or G or is absent
XXTPTKMNAISMLYFXXXXXXXXXLKKYRGMVVDR

SEQ ID NO: 57846 - protein, 39 aa, Artificial Sequence; identical to SEQ ID NO: 8499
  GFR-binding peptide
  MOD_RES (6)..(6): Xaa is C or S
  MOD_RES (20)..(21)..(22)..(23)..(24): Xaa is A or G
  MOD_RES (25)..(26)..(27)..(28): Xaa is A or G or is absent

SEQ ID NO: 57847 - protein, 39 aa, Artificial Sequence; identical to SEQ ID NO: 27895
  GFR-binding peptide
  MOD_RES (6)..(7)..(39): Xaa is C or S

SEQ ID NO: 57848 - protein, 36 aa, Artificial Sequence; identical to SEQ ID NO: 9409
  GFR-binding peptide
  MOD_RES (1)..(2)..(35): Xaa is C or S

SEQ ID NO: 57849 - protein, 34 aa, Artificial Sequence; identical to SEQ ID NO: 6732
  GFR-binding peptide
  MOD_RES (2)..(3): Xaa is C or S

SEQ ID NO: 57850 - protein, 42 aa, Artificial Sequence; identical to SEQ ID NO: 27897
  GFR-binding peptide
  MOD_RES (4)..(5)..(39)..(41): Xaa is C or S
  MOD_RES (19)..(20)..(21)..(22)..(23): Xaa is A or G
  MOD_RES (24)..(25)..(26)..(27): Xaa is A or G or is absent

SEQ ID NO: 57851 - protein, 38 aa, Artificial Sequence; identical to SEQ ID NO: 28887
  GFR-binding peptide
  MOD_RES (5)..(6): Xaa is C or S
  MOD_RES (20)..(21)..(22)..(23)..(24): Xaa is A or G
  MOD_RES (25)..(26)..(27)..(28): Xaa is A or G or is absent

SEQ ID NO: 57852 - protein, 38 aa, Artificial Sequence; identical to SEQ ID NO: 28892
  GFR-binding peptide
  MOD_RES (3)..(4)..(38): Xaa is C or S
  MOD_RES (18)..(19)..(20)..(21)..(22): Xaa is A or G
  MOD_RES (23)..(24)..(25)..(26): Xaa is A or G or is absent

SEQ ID NO: 57853 - protein, 39 aa, Artificial Sequence; identical to SEQ ID NO: 29828
  GFR-binding peptide
  MOD_RES (3)..(4)..(38): Xaa is C or S
  MOD_RES (18)..(19)..(20)..(21)..(22): Xaa is A or G
  MOD_RES (23)..(24)..(25)..(26): Xaa is A or G or is absent

SEQ ID NO: 57854 - protein, 36 aa, Artificial Sequence
  GFR-binding peptide
  MOD_RES (1)..(2)..(34)..(36): Xaa is C or S
XXTPTKMNAISMLYFNDKQQIILKKYRGMVVDRXGX

SEQ ID NO: 57855 - protein, 36 aa, Artificial Sequence; identical to SEQ ID NO: 7629
  GFR-binding peptide
  MOD_RES (3)..(4): Xaa is C or S
  MOD_RES (18)..(19)..(20)..(21)..(22): Xaa is A or G
  MOD_RES (23)..(24)..(25)..(26): Xaa is A or G or is absent

SEQ ID NO: 57856 - protein, 42 aa, Artificial Sequence; identical to SEQ ID NO: 9417
  GFR-binding peptide
  MOD_RES (7)..(41): Xaa is C or S
  MOD_RES (21)..(22)..(23)..(24)..(25): Xaa is A or G
  MOD_RES (26)..(27)..(28)..(29): Xaa is A or G or is absent

SEQ ID NO: 57857 - protein, 37 aa, Artificial Sequence; identical to SEQ ID NO: 8513
  GFR-binding peptide
  MOD_RES (2)..(3)..(35)..(37): Xaa is C or S

SEQ ID NO: 57858 - protein, 40 aa, Artificial Sequence; identical to SEQ ID NO: 6739
  GFR-binding peptide
  MOD_RES (2)..(3)..(37)..(39): Xaa is C or S
  MOD_RES (17)..(18)..(19)..(20)..(21): Xaa is A or G
  MOD_RES (22)..(23)..(24)..(25): Xaa is A or G or is absent

SEQ ID NO: 57859 - protein, 36 aa, Artificial Sequence; identical to SEQ ID NO: 9420
  GFR-binding peptide
  MOD_RES (2)..(3): Xaa is C or S
  MOD_RES (17)..(18)..(19)..(20)..(21): Xaa is A or G
  MOD_RES (22)..(23)..(24)..(25): Xaa is A or G or is absent

SEQ ID NO: 57860 - protein, 38 aa, Artificial Sequence; identical to SEQ ID NO: 14940
  GFR-binding peptide
  MOD_RES (2)..(3)..(37): Xaa is C or S
  MOD_RES (17)..(18)..(19)..(20)..(21): Xaa is A or G
  MOD_RES (22)..(23)..(24)..(25): Xaa is A or G or is absent

SEQ ID NO: 57861 - protein, 40 aa, Artificial Sequence; identical to SEQ ID NO: 8523
  GFR-binding peptide
  MOD_RES (4)..(5)..(40): Xaa is C or S
  MOD_RES (19)..(20)..(21)..(22)..(23): Xaa is A or G
  MOD_RES (24)..(25)..(26)..(27): Xaa is A or G or is absent

SEQ ID NO: 57862 - protein, 37 aa, Artificial Sequence; identical to SEQ ID NO: 8524
  GFR-binding peptide
  MOD_RES (5)..(6): Xaa is C or S

SEQ ID NO: 57863 - protein, 39 aa, Artificial Sequence; identical to SEQ ID NO: 8525
  GFR-binding peptide
  MOD_RES (4)..(5)..(38): Xaa is C or S

SEQ ID NO: 57864 - protein, 37 aa, Artificial Sequence; identical to SEQ ID NO: 7634
  GFR-binding peptide
  MOD_RES (2)..(3)..(37): Xaa is C or S
  MOD_RES (17)..(18)..(19)..(20)..(21): Xaa is A or G
  MOD_RES (22)..(23)..(24)..(25): Xaa is A or G or is absent

SEQ ID NO: 57865 - protein, 41 aa, Artificial Sequence
  GFR-binding peptide
  MOD_RES (6)..(7)..(41): Xaa is C or S
  MOD_RES (21)..(22)..(23)..(24)..(25): Xaa is A or G
  MOD_RES (26)..(27)..(28)..(29): Xaa is A or G or is absent
HVPKPXXAPTKLNAISVLYFXXXXXXXXXLKKYRNMVVRSX

SEQ ID NO: 57866 - protein, 36 aa, Artificial Sequence; identical to SEQ ID NO: 6751
  GFR-binding peptide
  MOD_RES (1)..(2)..(36): Xaa is C or S
  MOD_RES (16)..(17)..(18)..(19)..(20): Xaa is A or G
  MOD_RES (21)..(22)..(23)..(24): Xaa is A or G or is absent

SEQ ID NO: 57867 - protein, 39 aa, Artificial Sequence
  GFR-binding peptide
  MOD_RES (6)..(7)..(38): Xaa is C or S
RVPSTXXAPVKTNAISMLYFDNGRVLLLKKYRMIVEEXG

SEQ ID NO: 57868 - protein, 38 aa, Artificial Sequence; identical to SEQ ID NO: 7639
  GFR-binding peptide
  MOD_RES (4)..(5): Xaa is C or S
  MOD_RES (19)..(20)..(21)..(22)..(23): Xaa is A or G
  MOD_RES (24)..(25)..(26)..(27): Xaa is A or G or is absent

SEQ ID NO: 57869 - protein, 41 aa, Artificial Sequence; identical to SEQ ID NO: 7640
  GFR-binding peptide
  MOD_RES (3)..(4)..(38)..(40): Xaa is C or S
  MOD_RES (18)..(19)..(20)..(21)..(22): Xaa is A or G
  MOD_RES (23)..(24)..(25)..(26): Xaa is A or G or is absent

SEQ ID NO: 57870 - protein, 38 aa, Artificial Sequence; identical to SEQ ID NO: 14102
  GFR-binding peptide
  MOD_RES (6)..(7): Xaa is C or S

SEQ ID NO: 57871 - protein, 40 aa, Artificial Sequence; identical to SEQ ID NO: 7641
  GFR-binding peptide
  MOD_RES (6)..(7): Xaa is C or S
  MOD_RES (21)..(22)..(23)..(24)..(25): Xaa is A or G
  MOD_RES (26)..(27)..(28)..(29): Xaa is A or G or is absent

SEQ ID NO: 57872 - protein, 42 aa, Artificial Sequence; identical to SEQ ID NO: 7643
  GFR-binding peptide
  MOD_RES (6)..(7)..(41): Xaa is C or S
  MOD_RES (21)..(22)..(23)..(24)..(25): Xaa is A or G
  MOD_RES (26)..(27)..(28)..(29): Xaa is A or G or is absent

SEQ ID NO: 57873 - protein, 41 aa, Artificial Sequence; identical to SEQ ID NO: 16738
  GFR-binding peptide
  MOD_RES (6)..(7)..(39)..(41): Xaa is C or S

SEQ ID NO: 57874 - protein, 38 aa, Artificial Sequence
  GFR-binding peptide
  MOD_RES (5)..(6): Xaa is C or S
  MOD_RES (20)..(21)..(22)..(23)..(24): Xaa is A or G
  MOD_RES (25)..(26)..(27)..(28): Xaa is A or G or is absent
VPSTXXAPVKTNAISMLYFXXXXXXXXXLKKYRMIVEE

SEQ ID NO: 57875 - protein, 39 aa, Artificial Sequence
  GFR-binding peptide
  MOD_RES (6)..(7): Xaa is C or S
  MOD_RES (21)..(22)..(23)..(24)..(25): Xaa is A or G
  MOD_RES (26)..(27)..(28)..(29): Xaa is A or G or is absent
GSAGPXXTPTKMNAISMLYFXXXXXXXXXLKKYRGMVVD

SEQ ID NO: 57876 - protein, 41 aa, Artificial Sequence; identical to SEQ ID NO: 7651
  GFR-binding peptide
  MOD_RES (5)..(6)..(40): Xaa is C or S
  MOD_RES (20)..(21)..(22)..(23)..(24): Xaa is A or G
  MOD_RES (25)..(26)..(27)..(28): Xaa is A or G or is absent

SEQ ID NO: 57877 - protein, 36 aa, Artificial Sequence; identical to SEQ ID NO: 29861
  GFR-binding peptide
  MOD_RES (34)..(36): Xaa is C or S
  MOD_RES (14)..(15)..(16)..(17)..(18): Xaa is A or G
  MOD_RES (19)..(20)..(21)..(22): Xaa is A or G or is absent

SEQ ID NO: 57878 - protein, 41 aa, Artificial Sequence; identical to SEQ ID NO: 9445
  GFR-binding peptide
  MOD_RES (3)..(4)..(38)..(40): Xaa is C or S
  MOD_RES (18)..(19)..(20)..(21)..(22): Xaa is A or G
  MOD_RES (23)..(24)..(25)..(26): Xaa is A or G or is absent

SEQ ID NO: 57879 - protein, 32 aa, Artificial Sequence; identical to SEQ ID NO: 8549
  GFR-binding peptide
  MOD_RES (1)..(1): Xaa is C or S

SEQ ID NO: 57880 - protein, 38 aa, Artificial Sequence; identical to SEQ ID NO: 29864
  GFR-binding peptide
  MOD_RES (5)..(6)..(38): Xaa is C or S

SEQ ID NO: 57881 - protein, 36 aa, Artificial Sequence; identical to SEQ ID NO: 14116
  GFR-binding peptide
  MOD_RES (5)..(6): Xaa is C or S

SEQ ID NO: 57882 - protein, 39 aa, Artificial Sequence; identical to SEQ ID NO: 9450
  GFR-binding peptide
  MOD_RES (3)..(4)..(38): Xaa is C or S
  MOD_RES (18)..(19)..(20)..(21)..(22): Xaa is A or G
  MOD_RES (23)..(24)..(25)..(26): Xaa is A or G or is absent

SEQ ID NO: 57883 - protein, 37 aa, Artificial Sequence
  GFR-binding peptide
  MOD_RES (3)..(4)..(35)..(37): Xaa is C or S
STXXAPVKTNAISMLYFDNGRVLLLKKYRMIVEEXGX

SEQ ID NO: 57884 - protein, 41 aa, Artificial Sequence; identical to SEQ ID NO: 8556
  GFR-binding peptide
  MOD_RES (6)..(7)..(41): Xaa is C or S
  MOD_RES (21)..(22)..(23)..(24)..(25): Xaa is A or G
  MOD_RES (26)..(27)..(28)..(29): Xaa is A or G or is absent

SEQ ID NO: 57885 - protein, 35 aa, Artificial Sequence; identical to SEQ ID NO: 14123
  GFR-binding peptide
  MOD_RES (34)..(34): Xaa is C or S
  MOD_RES (14)..(15)..(16)..(17)..(18): Xaa is A or G
  MOD_RES (19)..(20)..(21)..(22): Xaa is A or G or is absent

SEQ ID NO: 57886 - protein, 33 aa, Artificial Sequence; identical to SEQ ID NO: 6769
  GFR-binding peptide
  MOD_RES (1)..(1): Xaa is C or S

SEQ ID NO: 57887 - protein, 32 aa, Artificial Sequence; identical to SEQ ID NO: 8558
  GFR-binding peptide
  MOD_RES (1)..(1): Xaa is C or S

SEQ ID NO: 57888 - protein, 35 aa, Artificial Sequence; identical to SEQ ID NO: 6770
  GFR-binding peptide
  MOD_RES (2)..(3): Xaa is C or S
  MOD_RES (17)..(18)..(19)..(20)..(21): Xaa is A or G
  MOD_RES (22)..(23)..(24)..(25): Xaa is A or G or is absent

SEQ ID NO: 57889 - protein, 40 aa, Artificial Sequence
  GFR-binding peptide
  MOD_RES (3)..(4)..(37)..(39): Xaa is C or S
  MOD_RES (18)..(19)..(20)..(21)..(22): Xaa is A or G
  MOD_RES (23)..(24)..(25)..(26): Xaa is A or G or is absent
STXXAPVKTNAISMLYFXXXXXXXXXLKKYRMIVEEXGXL

SEQ ID NO: 57890 - protein, 36 aa, Artificial Sequence; identical to SEQ ID NO: 7658
  GFR-binding peptide
  MOD_RES (5)..(6): Xaa is C or S

SEQ ID NO: 57891 - protein, 33 aa, Artificial Sequence
  GFR-binding peptide
  MOD_RES (2)..(3): Xaa is C or S
TXXAPVKTNAISMLYFDNGRVLLLKKYRMIVEE

SEQ ID NO: 57892 - protein, 40 aa, Artificial Sequence; identical to SEQ ID NO: 6771
  GFR-binding peptide
  MOD_RES (5)..(6)..(40): Xaa is C or S
  MOD_RES (20)..(21)..(22)..(23)..(24): Xaa is A or G
  MOD_RES (25)..(26)..(27)..(28): Xaa is A or G or is absent

SEQ ID NO: 57893 - protein, 37 aa, Artificial Sequence; identical to SEQ ID NO: 8563
  GFR-binding peptide
  MOD_RES (34)..(36): Xaa is C or S
  MOD_RES (14)..(15)..(16)..(17)..(18): Xaa is A or G
  MOD_RES (19)..(20)..(21)..(22): Xaa is A or G or is absent

SEQ ID NO: 57894 - protein, 36 aa, Artificial Sequence; identical to SEQ ID NO: 8565
  GFR-binding peptide
  MOD_RES (1)..(34)..(36): Xaa is C or S

SEQ ID NO: 57895 - protein, 39 aa, Artificial Sequence; identical to SEQ ID NO: 6773
  GFR-binding peptide
  MOD_RES (1)..(2)..(36)..(38): Xaa is C or S
  MOD_RES (16)..(17)..(18)..(19)..(20): Xaa is A or G
  MOD_RES (21)..(22)..(23)..(24): Xaa is A or G or is absent

SEQ ID NO: 57896 - protein, 39 aa, Artificial Sequence; identical to SEQ ID NO: 27951
  GFR-binding peptide
  MOD_RES (5)..(6): Xaa is C or S
  MOD_RES (20)..(21)..(22)..(23)..(24): Xaa is A or G
  MOD_RES (25)..(26)..(27)..(28): Xaa is A or G or is absent

SEQ ID NO: 57897 - protein, 40 aa, Artificial Sequence; identical to SEQ ID NO: 8566
  GFR-binding peptide
  MOD_RES (6)..(7)..(39): Xaa is C or S

SEQ ID NO: 57898 - protein, 43 aa, Artificial Sequence
  GFR-binding peptide
  MOD_RES (5)..(6)..(40)..(42): Xaa is C or S
  MOD_RES (20)..(21)..(22)..(23)..(24): Xaa is A or G
  MOD_RES (25)..(26)..(27)..(28): Xaa is A or G or is absent
SAGPXXTPTKMNAISMLYFXXXXXXXXXLKKYRGMVVDRXGXS

SEQ ID NO: 57899 - protein, 36 aa, Artificial Sequence; identical to SEQ ID NO: 9460
  GFR-binding peptide
  MOD_RES (35)..(35): Xaa is C or S
  MOD_RES (14)..(15)..(16)..(17)..(18): Xaa is A or G
  MOD_RES (19)..(20)..(21)..(22): Xaa is A or G or is absent

SEQ ID NO: 57900 - protein, 36 aa, Artificial Sequence; identical to SEQ ID NO: 27958
  GFR-binding peptide
  MOD_RES (1)..(2)..(34)..(36): Xaa is C or S

SEQ ID NO: 57901 - protein, 35 aa, Artificial Sequence
  GFR-binding peptide
  MOD_RES (1)..(35): Xaa is C or S
  MOD_RES (15)..(16)..(17)..(18)..(19): Xaa is A or G
  MOD_RES (20)..(21)..(22)..(23): Xaa is A or G or is absent
XTPTKMNAISMLYFXXXXXXXXXLKKYRGMVVDRX

SEQ ID NO: 57902 - protein, 40 aa, Artificial Sequence; identical to SEQ ID NO: 7662
  GFR-binding peptide
  MOD_RES (5)..(6): Xaa is C or S
  MOD_RES (20)..(21)..(22)..(23)..(24): Xaa is A or G
  MOD_RES (25)..(26)..(27)..(28): Xaa is A or G or is absent

SEQ ID NO: 57903 - protein, 41 aa, Artificial Sequence; identical to SEQ ID NO: 30862
  GFR-binding peptide
  MOD_RES (6)..(7)..(39)..(41): Xaa is C or S

SEQ ID NO: 57904 - protein, 41 aa, Artificial Sequence; identical to SEQ ID NO: 29883
  GFR-binding peptide
  MOD_RES (5)..(6)..(38)..(40): Xaa is C or S

SEQ ID NO: 57905 - protein, 34 aa, Artificial Sequence; identical to SEQ ID NO: 16767
  GFR-binding peptide
  MOD_RES (1)..(1): Xaa is C or S
  MOD_RES (15)..(16)..(17)..(18)..(19): Xaa is A or G
  MOD_RES (20)..(21)..(22)..(23): Xaa is A or G or is absent

SEQ ID NO: 57906 - protein, 37 aa, Artificial Sequence; identical to SEQ ID NO: 6782
  GFR-binding peptide
  MOD_RES (34)..(36): Xaa is C or S
  MOD_RES (14)..(15)..(16)..(17)..(18): Xaa is A or G
  MOD_RES (19)..(20)..(21)..(22): Xaa is A or G or is absent

SEQ ID NO: 57907 - protein, 38 aa, Artificial Sequence
  GFR-binding peptide
  MOD_RES (4)..(5)..(36)..(38): Xaa is C or S
PSTXXAPVKTNAISMLYFDNGRVLLLKKYRMIVEEXGX

SEQ ID NO: 57908 - protein, 34 aa, Artificial Sequence; identical to SEQ ID NO: 7671
  GFR-binding peptide
  MOD_RES (32)..(34): Xaa is C or S

SEQ ID NO: 57909 - protein, 39 aa, Artificial Sequence; identical to SEQ ID NO: 16772
  GFR-binding peptide
  MOD_RES (6)..(7)..(39): Xaa is C or S

SEQ ID NO: 57910 - protein, 36 aa, Artificial Sequence; identical to SEQ ID NO: 6787
  GFR-binding peptide
  MOD_RES (2)..(3): Xaa is C or S
  MOD_RES (17)..(18)..(19)..(20)..(21): Xaa is A or G
  MOD_RES (22)..(23)..(24)..(25): Xaa is A or G or is absent

SEQ ID NO: 57911 - protein, 37 aa, Artificial Sequence; identical to SEQ ID NO: 6789
  GFR-binding peptide
  MOD_RES (4)..(5)..(37): Xaa is C or S

SEQ ID NO: 57912 - protein, 39 aa, Artificial Sequence; identical to SEQ ID NO: 9472
  GFR-binding peptide
  MOD_RES (2)..(36)..(38): Xaa is C or S
  MOD_RES (16)..(17)..(18)..(19)..(20): Xaa is A or G
  MOD_RES (21)..(22)..(23)..(24): Xaa is A or G or is absent

SEQ ID NO: 57913 - protein, 39 aa, Artificial Sequence; identical to SEQ ID NO: 9475
  GFR-binding peptide
  MOD_RES (5)..(6)..(38): Xaa is C or S

SEQ ID NO: 57914 - protein, 36 aa, Artificial Sequence; identical to SEQ ID NO: 7673
  GFR-binding peptide
  MOD_RES (2)..(3)..(35): Xaa is C or S

SEQ ID NO: 57915 - protein, 41 aa, Artificial Sequence; identical to SEQ ID NO: 8571
  GFR-binding peptide
  MOD_RES (6)..(7)..(39)..(41): Xaa is C or S

SEQ ID NO: 57916 - protein, 40 aa, Artificial Sequence; identical to SEQ ID NO: 8573
  GFR-binding peptide
  MOD_RES (4)..(5)..(37)..(39): Xaa is C or S

SEQ ID NO: 57917 - protein, 34 aa, Artificial Sequence
  GFR-binding peptide
  MOD_RES (33)..(33): Xaa is C or S
  MOD_RES (14)..(15)..(16)..(17)..(18): Xaa is A or G
  MOD_RES (19)..(20)..(21)..(22): Xaa is A or G or is absent
APVKTNAISMLYFXXXXXXXXXLKKYRMIVEEXG

SEQ ID NO: 57918 - protein, 37 aa, Artificial Sequence
  GFR-binding peptide
  MOD_RES (5)..(6)..(37): Xaa is C or S
VPSTXXAPVKTNAISMLYFDNGRVLLLKKYRMIVEEX

SEQ ID NO: 57919 - protein, 32 aa, Artificial Sequence; identical to SEQ ID NO: 28970
  GFR-binding peptide
  MOD_RES (32)..(32): Xaa is C or S

SEQ ID NO: 57920 - protein, 34 aa, Artificial Sequence; identical to SEQ ID NO: 6797
  GFR-binding peptide
  MOD_RES (34)..(34): Xaa is C or S
  MOD_RES (14)..(15)..(16)..(17)..(18): Xaa is A or G
  MOD_RES (19)..(20)..(21)..(22): Xaa is A or G or is absent

SEQ ID NO: 57921 - protein, 37 aa, Artificial Sequence; identical to SEQ ID NO: 9479
  GFR-binding peptide
  MOD_RES (5)..(6): Xaa is C or S

SEQ ID NO: 57922 - protein, 37 aa, Artificial Sequence; identical to SEQ ID NO: 30885
  GFR-binding peptide
  MOD_RES (5)..(6): Xaa is C or S

SEQ ID NO: 57923 - protein, 39 aa, Artificial Sequence; identical to SEQ ID NO: 8580
  GFR-binding peptide
  MOD_RES (3)..(4)..(36)..(38): Xaa is C or S

SEQ ID NO: 57924 - protein, 39 aa, Artificial Sequence; identical to SEQ ID NO: 6800
  GFR-binding peptide
  MOD_RES (4)..(38): Xaa is C or S
  MOD_RES (18)..(19)..(20)..(21)..(22): Xaa is A or G
  MOD_RES (23)..(24)..(25)..(26): Xaa is A or G or is absent

SEQ ID NO: 57925 - protein, 41 aa, Artificial Sequence; identical to SEQ ID NO: 9485
  GFR-binding peptide
  MOD_RES (3)..(4)..(38)..(40): Xaa is C or S
  MOD_RES (18)..(19)..(20)..(21)..(22): Xaa is A or G
  MOD_RES (23)..(24)..(25)..(26): Xaa is A or G or is absent

SEQ ID NO: 57926 - protein, 37 aa, Artificial Sequence; identical to SEQ ID NO: 9486
  GFR-binding peptide
  MOD_RES (6)..(7): Xaa is C or S

SEQ ID NO: 57927 - protein, 35 aa, Artificial Sequence; identical to SEQ ID NO: 8583
  GFR-binding peptide
  MOD_RES (1)..(35): Xaa is C or S
  MOD_RES (15)..(16)..(17)..(18)..(19): Xaa is A or G
  MOD_RES (20)..(21)..(22)..(23): Xaa is A or G or is absent

SEQ ID NO: 57928 - protein, 37 aa, Artificial Sequence; identical to SEQ ID NO: 7680
  GFR-binding peptide
  MOD_RES (1)..(35)..(37): Xaa is C or S
  MOD_RES (15)..(16)..(17)..(18)..(19): Xaa is A or G
  MOD_RES (20)..(21)..(22)..(23): Xaa is A or G or is absent

SEQ ID NO: 57929 - protein, 37 aa, Artificial Sequence; identical to SEQ ID NO: 30891
  GFR-binding peptide
  MOD_RES (4)..(5): Xaa is C or S
  MOD_RES (19)..(20)..(21)..(22)..(23): Xaa is A or G
  MOD_RES (24)..(25)..(26)..(27): Xaa is A or G or is absent

SEQ ID NO: 57930 - protein, 40 aa, Artificial Sequence; identical to SEQ ID NO: 9492
  GFR-binding peptide
  MOD_RES (2)..(3)..(37)..(39): Xaa is C or S
  MOD_RES (17)..(18)..(19)..(20)..(21): Xaa is A or G
  MOD_RES (22)..(23)..(24)..(25): Xaa is A or G or is absent

SEQ ID NO: 57931 - protein, 41 aa, Artificial Sequence
  GFR-binding peptide
  MOD_RES (5)..(6)..(38)..(40): Xaa is C or S
SAGPXXTPTKMNAISMLYFNDKQQIILKKYRGMVVDRXGXS

SEQ ID NO: 57932 - protein, 33 aa, Artificial Sequence
  GFR-binding peptide
  MOD_RES (32)..(32): Xaa is C or S
TPTKMNAISMLYFNDKQQIILKKYRGMVVDRXG

SEQ ID NO: 57933 - protein, 37 aa, Artificial Sequence
  GFR-binding peptide
  MOD_RES (5)..(6): Xaa is C or S
SAGPXXTPTKMNAISMLYFNDKQQIILKKYRGMVVDR

SEQ ID NO: 57934 - protein, 41 aa, Artificial Sequence; identical to SEQ ID NO: 14986
  GFR-binding peptide
  MOD_RES (3)..(4)..(38)..(40): Xaa is C or S
  MOD_RES (18)..(19)..(20)..(21)..(22): Xaa is A or G
  MOD_RES (23)..(24)..(25)..(26): Xaa is A or G or is absent

SEQ ID NO: 57935 - protein, 40 aa, Artificial Sequence; identical to SEQ ID NO: 7686
  GFR-binding peptide
  MOD_RES (5)..(6)..(39): Xaa is C or S

SEQ ID NO: 57936 - protein, 32 aa, Artificial Sequence; identical to SEQ ID NO: 9495
  GFR-binding peptide
  MOD_RES (1)..(2): Xaa is C or S

SEQ ID NO: 57937 - protein, 43 aa, Artificial Sequence; identical to SEQ ID NO: 7693
  GFR-binding peptide
  MOD_RES (6)..(40)..(42): Xaa is C or S
  MOD_RES (20)..(21)..(22)..(23)..(24): Xaa is A or G
  MOD_RES (25)..(26)..(27)..(28): Xaa is A or G or is absent

SEQ ID NO: 57938 - protein, 34 aa, Artificial Sequence; identical to SEQ ID NO: 9499
  GFR-binding peptide
  MOD_RES (34)..(34): Xaa is C or S
  MOD_RES (14)..(15)..(16)..(17)..(18): Xaa is A or G
  MOD_RES (19)..(20)..(21)..(22): Xaa is A or G or is absent

SEQ ID NO: 57939 - protein, 37 aa, Artificial Sequence; identical to SEQ ID NO: 29922
  GFR-binding peptide
  MOD_RES (4)..(5)..(37): Xaa is C or S

SEQ ID NO: 57940 - protein, 38 aa, Artificial Sequence; identical to SEQ ID NO: 7698
  GFR-binding peptide
  MOD_RES (5)..(6): Xaa is C or S
  MOD_RES (20)..(21)..(22)..(23)..(24): Xaa is A or G
  MOD_RES (25)..(26)..(27)..(28): Xaa is A or G or is absent

SEQ ID NO: 57941 - protein, 35 aa, Artificial Sequence; identical to SEQ ID NO: 9506
  GFR-binding peptide
  MOD_RES (1)..(2)..(34): Xaa is C or S

SEQ ID NO: 57942 - protein, 32 aa, Artificial Sequence
  GFR-binding peptide
  MOD_RES (31)..(31): Xaa is C or S
APVKTNAISMLYFDNGRVLLLKKYRMIVEEXG

SEQ ID NO: 57943 - protein, 41 aa, Artificial Sequence; identical to SEQ ID NO: 7699
  GFR-binding peptide
  MOD_RES (6)..(40): Xaa is C or S
  MOD_RES (20)..(21)..(22)..(23)..(24): Xaa is A or G
  MOD_RES (25)..(26)..(27)..(28): Xaa is A or G or is absent

SEQ ID NO: 57944 - protein, 36 aa, Artificial Sequence; identical to SEQ ID NO: 9507
  GFR-binding peptide
  MOD_RES (1)..(33)..(35): Xaa is C or S

SEQ ID NO: 57945 - protein, 35 aa, Artificial Sequence; identical to SEQ ID NO: 7701
  GFR-binding peptide
  MOD_RES (2)..(3)..(35): Xaa is C or S

SEQ ID NO: 57946 - protein, 35 aa, Artificial Sequence; identical to SEQ ID NO: 7702
  GFR-binding peptide
  MOD_RES (2)..(3): Xaa is C or S
  MOD_RES (17)..(18)..(19)..(20)..(21): Xaa is A or G
  MOD_RES (22)..(23)..(24)..(25): Xaa is A or G or is absent

SEQ ID NO: 57947 - protein, 36 aa, Artificial Sequence; identical to SEQ ID NO: 28000
  GFR-binding peptide
  MOD_RES (2)..(3): Xaa is C or S
  MOD_RES (17)..(18)..(19)..(20)..(21): Xaa is A or G
  MOD_RES (22)..(23)..(24)..(25): Xaa is A or G or is absent

SEQ ID NO: 57948 - protein, 36 aa, Artificial Sequence; identical to SEQ ID NO: 28997
  GFR-binding peptide
  MOD_RES (1)..(33)..(35): Xaa is C or S

SEQ ID NO: 57949 - protein, 35 aa, Artificial Sequence; identical to SEQ ID NO: 29932
  GFR-binding peptide
  MOD_RES (1)..(35): Xaa is C or S
  MOD_RES (15)..(16)..(17)..(18)..(19): Xaa is A or G
  MOD_RES (20)..(21)..(22)..(23): Xaa is A or G or is absent

SEQ ID NO: 57950 - protein, 36 aa, Artificial Sequence; identical to SEQ ID NO: 14167
  GFR-binding peptide
  MOD_RES (4)..(5): Xaa is C or S

SEQ ID NO: 57951 - protein, 35 aa, Artificial Sequence; identical to SEQ ID NO: 15003
  GFR-binding peptide
  MOD_RES (3)..(4): Xaa is C or S

SEQ ID NO: 57952 - protein, 41 aa, Artificial Sequence; identical to SEQ ID NO: 16810
  GFR-binding peptide
  MOD_RES (4)..(5)..(39)..(41): Xaa is C or S
  MOD_RES (19)..(20)..(21)..(22)..(23): Xaa is A or G
  MOD_RES (24)..(25)..(26)..(27): Xaa is A or G or is absent

SEQ ID NO: 57953 - protein, 42 aa, Artificial Sequence
  GFR-binding peptide
  MOD_RES (5)..(6)..(40)..(42): Xaa is C or S
  MOD_RES (20)..(21)..(22)..(23)..(24): Xaa is A or G
  MOD_RES (25)..(26)..(27)..(28): Xaa is A or G or is absent
SAGPXXTPTKMNAISMLYFXXXXXXXXXLKKYRGMVVDRXGX

SEQ ID NO: 57954 - protein, 40 aa, Artificial Sequence
  GFR-binding peptide
  MOD_RES (6)..(7)..(40): Xaa is C or S
  MOD_RES (21)..(22)..(23)..(24)..(25): Xaa is A or G
  MOD_RES (26)..(27)..(28)..(29): Xaa is A or G or is absent
RVPSTXXAPVKTNAISMLYFXXXXXXXXXLKKYRMIVEEX

SEQ ID NO: 57955 - protein, 44 aa, Artificial Sequence; identical to SEQ ID NO: 29939
  GFR-binding peptide
  MOD_RES (6)..(7)..(41)..(43): Xaa is C or S
  MOD_RES (21)..(22)..(23)..(24)..(25): Xaa is A or G
  MOD_RES (26)..(27)..(28)..(29): Xaa is A or G or is absent

SEQ ID NO: 57956 - protein, 39 aa, Artificial Sequence; identical to SEQ ID NO: 29009
  GFR-binding peptide
  MOD_RES (5)..(6): Xaa is C or S
  MOD_RES (20)..(21)..(22)..(23)..(24): Xaa is A or G
  MOD_RES (25)..(26)..(27)..(28): Xaa is A or G or is absent

SEQ ID NO: 57957 - protein, 40 aa, Artificial Sequence; identical to SEQ ID NO: 6834
  GFR-binding peptide
  MOD_RES (5)..(6)..(40): Xaa is C or S
  MOD_RES (20)..(21)..(22)..(23)..(24): Xaa is A or G
  MOD_RES (25)..(26)..(27)..(28): Xaa is A or G or is absent

SEQ ID NO: 57958 - protein, 42 aa, Artificial Sequence; identical to SEQ ID NO: 9522
  GFR-binding peptide
  MOD_RES (4)..(5)..(39)..(41): Xaa is C or S
  MOD_RES (19)..(20)..(21)..(22)..(23): Xaa is A or G
  MOD_RES (24)..(25)..(26)..(27): Xaa is A or G or is absent

SEQ ID NO: 57959 - protein, 39 aa, Artificial Sequence; identical to SEQ ID NO: 8615
  GFR-binding peptide
  MOD_RES (1)..(2)..(36)..(38): Xaa is C or S
  MOD_RES (16)..(17)..(18)..(19)..(20): Xaa is A or G
  MOD_RES (21)..(22)..(23)..(24): Xaa is A or G or is absent

SEQ ID NO: 57960 - protein, 36 aa, Artificial Sequence; identical to SEQ ID NO: 14179
  GFR-binding peptide
  MOD_RES (1)..(2)..(36): Xaa is C or S
  MOD_RES (16)..(17)..(18)..(19)..(20): Xaa is A or G
  MOD_RES (21)..(22)..(23)..(24): Xaa is A or G or is absent

SEQ ID NO: 57961 - protein, 36 aa, Artificial Sequence
  GFR-binding peptide
  MOD_RES (2)..(3)..(35): Xaa is C or S
PXXTPTKMNAISMLYFNDKQQIILKKYRGMVVDRXG

SEQ ID NO: 57962 - protein, 37 aa, Artificial Sequence; identical to SEQ ID NO: 29954
  GFR-binding peptide
  MOD_RES (4)..(5): Xaa is C or S
  MOD_RES (19)..(20)..(21)..(22)..(23): Xaa is A or G
  MOD_RES (24)..(25)..(26)..(27): Xaa is A or G or is absent

SEQ ID NO: 57963 - protein, 34 aa, Artificial Sequence; identical to SEQ ID NO: 14180
  GFR-binding peptide
  MOD_RES (1)..(2): Xaa is C or S
  MOD_RES (16)..(17)..(18)..(19)..(20): Xaa is A or G
  MOD_RES (21)..(22)..(23)..(24): Xaa is A or G or is absent

SEQ ID NO: 57964 - protein, 37 aa, Artificial Sequence; identical to SEQ ID NO: 30922
  GFR-binding peptide
  MOD_RES (1)..(2)..(34)..(36): Xaa is C or S

SEQ ID NO: 57965 - protein, 39 aa, Artificial Sequence; identical to SEQ ID NO: 7720
  GFR-binding peptide
  MOD_RES (3)..(4)..(38): Xaa is C or S
  MOD_RES (18)..(19)..(20)..(21)..(22): Xaa is A or G
  MOD_RES (23)..(24)..(25)..(26): Xaa is A or G or is absent

SEQ ID NO: 57966 - protein, 34 aa, Artificial Sequence; identical to SEQ ID NO: 7721
  GFR-binding peptide
  MOD_RES (32)..(34): Xaa is C or S

SEQ ID NO: 57967 - protein, 40 aa, Artificial Sequence; identical to SEQ ID NO: 9532
  GFR-binding peptide
  MOD_RES (2)..(3)..(37)..(39): Xaa is C or S
  MOD_RES (17)..(18)..(19)..(20)..(21): Xaa is A or G
  MOD_RES (22)..(23)..(24)..(25): Xaa is A or G or is absent

SEQ ID NO: 57968 - protein, 37 aa, Artificial Sequence; identical to SEQ ID NO: 28022
  GFR-binding peptide
  MOD_RES (3)..(4)..(36): Xaa is C or S

SEQ ID NO: 57969 - protein, 37 aa, Artificial Sequence
  GFR-binding peptide
  MOD_RES (1)..(34)..(36): Xaa is C or S
  MOD_RES (15)..(16)..(17)..(18)..(19): Xaa is A or G
  MOD_RES (20)..(21)..(22)..(23): Xaa is A or G or is absent
XAPVKTNAISMLYFXXXXXXXXXLKKYRMIVEEXGXL

SEQ ID NO: 57970 - protein, 38 aa, Artificial Sequence; identical to SEQ ID NO: 29961
  GFR-binding peptide
  MOD_RES (1)..(35)..(37): Xaa is C or S
  MOD_RES (15)..(16)..(17)..(18)..(19): Xaa is A or G
  MOD_RES (20)..(21)..(22)..(23): Xaa is A or G or is absent

SEQ ID NO: 57971 - protein, 39 aa, Artificial Sequence; identical to SEQ ID NO: 7726
  GFR-binding peptide
  MOD_RES (3)..(4)..(36)..(38): Xaa is C or S

SEQ ID NO: 57972 - protein, 38 aa, Artificial Sequence; identical to SEQ ID NO: 9536
  GFR-binding peptide
  MOD_RES (6)..(7): Xaa is C or S

SEQ ID NO: 57973 - protein, 39 aa, Artificial Sequence; identical to SEQ ID NO: 9537
  GFR-binding peptide
  MOD_RES (5)..(6): Xaa is C or S
  MOD_RES (20)..(21)..(22)..(23)..(24): Xaa is A or G
  MOD_RES (25)..(26)..(27)..(28): Xaa is A or G or is absent

SEQ ID NO: 57974 - protein, 40 aa, Artificial Sequence
  GFR-binding peptide
  MOD_RES (5)..(6)..(37)..(39): Xaa is C or S
VPSTXXAPVKTNAISMLYFDNGRVLLLKKYRMIVEEXGXL

SEQ ID NO: 57975 - protein, 37 aa, Artificial Sequence; identical to SEQ ID NO: 15027
  GFR-binding peptide
  MOD_RES (34)..(36): Xaa is C or S
  MOD_RES (14)..(15)..(16)..(17)..(18): Xaa is A or G
  MOD_RES (19)..(20)..(21)..(22): Xaa is A or G or is absent

SEQ ID NO: 57976 - protein, 38 aa, Artificial Sequence
  GFR-binding peptide
  MOD_RES (1)..(35)..(37): Xaa is C or S
  MOD_RES (15)..(16)..(17)..(18)..(19): Xaa is A or G
  MOD_RES (20)..(21)..(22)..(23): Xaa is A or G or is absent
XTPTKMNAISMLYFXXXXXXXXXLKKYRGMVVDRXGXS

SEQ ID NO: 57977 - protein, 38 aa, Artificial Sequence; identical to SEQ ID NO: 8628
  GFR-binding peptide
  MOD_RES (1)..(36)..(38): Xaa is C or S
  MOD_RES (15)..(16)..(17)..(18)..(19): Xaa is A or G
  MOD_RES (20)..(21)..(22)..(23): Xaa is A or G or is absent

SEQ ID NO: 57978 - protein, 36 aa, Artificial Sequence; identical to SEQ ID NO: 8629
  GFR-binding peptide
  MOD_RES (34)..(36): Xaa is C or S
  MOD_RES (14)..(15)..(16)..(17)..(18): Xaa is A or G
  MOD_RES (19)..(20)..(21)..(22): Xaa is A or G or is absent

SEQ ID NO: 57979 - protein, 40 aa, Artificial Sequence; identical to SEQ ID NO: 9541
  GFR-binding peptide
  MOD_RES (4)..(5)..(39): Xaa is C or S
  MOD_RES (19)..(20)..(21)..(22)..(23): Xaa is A or G
  MOD_RES (24)..(25)..(26)..(27): Xaa is A or G or is absent

SEQ ID NO: 57980 - protein, 38 aa, Artificial Sequence; identical to SEQ ID NO: 29032
  GFR-binding peptide
  MOD_RES (4)..(5): Xaa is C or S
  MOD_RES (19)..(20)..(21)..(22)..(23): Xaa is A or G
  MOD_RES (24)..(25)..(26)..(27): Xaa is A or G or is absent

SEQ ID NO: 57981 - protein, 33 aa, Artificial Sequence; identical to SEQ ID NO: 6857
  GFR-binding peptide
  MOD_RES (32)..(32): Xaa is C or S

SEQ ID NO: 57982 - protein, 41 aa, Artificial Sequence; identical to SEQ ID NO: 15038
  GFR-binding peptide
  MOD_RES (6)..(7)..(41): Xaa is C or S
  MOD_RES (21)..(22)..(23)..(24)..(25): Xaa is A or G
  MOD_RES (26)..(27)..(28)..(29): Xaa is A or G or is absent

SEQ ID NO: 57983 - protein, 35 aa, Artificial Sequence; identical to SEQ ID NO: 30937
  GFR-binding peptide
  MOD_RES (1)..(2)..(34): Xaa is C or S

SEQ ID NO: 57984 - protein, 37 aa, Artificial Sequence; identical to SEQ ID NO: 9548
  GFR-binding peptide
  MOD_RES (1)..(2)..(35)..(37): Xaa is C or S

SEQ ID NO: 57985 - protein, 39 aa, Artificial Sequence
  GFR-binding peptide
  MOD_RES (6)..(7): Xaa is C or S
  MOD_RES (21)..(22)..(23)..(24)..(25): Xaa is A or G
  MOD_RES (26)..(27)..(28)..(29): Xaa is A or G or is absent
RVPSTXXAPVKTNAISMLYFXXXXXXXXXLKKYRMIVEE

SEQ ID NO: 57986 - protein, 36 aa, Artificial Sequence; identical to SEQ ID NO: 16846
  GFR-binding peptide
  MOD_RES (3)..(4)..(36): Xaa is C or S

SEQ ID NO: 57987 - protein, 40 aa, Artificial Sequence; identical to SEQ ID NO: 9553
  GFR-binding peptide
  MOD_RES (6)..(7)..(40): Xaa is C or S

SEQ ID NO: 57988 - protein, 37 aa, Artificial Sequence; identical to SEQ ID NO: 9555
  GFR-binding peptide
  MOD_RES (1)..(2)..(37): Xaa is C or S
  MOD_RES (16)..(17)..(18)..(19)..(20): Xaa is A or G
  MOD_RES (21)..(22)..(23)..(24): Xaa is A or G or is absent

SEQ ID NO: 57989 - protein, 32 aa, Artificial Sequence; identical to SEQ ID NO: 9556
  GFR-binding peptide
  MOD_RES (1)..(1): Xaa is C or S

SEQ ID NO: 57990 - protein, 40 aa, Artificial Sequence; identical to SEQ ID NO: 15943
  GFR-binding peptide
  MOD_RES (4)..(5)..(39): Xaa is C or S
  MOD_RES (19)..(20)..(21)..(22)..(23): Xaa is A or G
  MOD_RES (24)..(25)..(26)..(27): Xaa is A or G or is absent

SEQ ID NO: 57991 - protein, 39 aa, Artificial Sequence
  GFR-binding peptide
  MOD_RES (5)..(6)..(38): Xaa is C or S
SAGPXXTPTKMNAISMLYFNDKQQIILKKYRGMVVDRXG

SEQ ID NO: 57992 - protein, 37 aa, Artificial Sequence; identical to SEQ ID NO: 8647
  GFR-binding peptide
  MOD_RES (3)..(4)..(36): Xaa is C or S

SEQ ID NO: 57993 - protein, 41 aa, Artificial Sequence; identical to SEQ ID NO: 7748
  GFR-binding peptide
  MOD_RES (4)..(5)..(39)..(41): Xaa is C or S
  MOD_RES (19)..(20)..(21)..(22)..(23): Xaa is A or G
  MOD_RES (24)..(25)..(26)..(27): Xaa is A or G or is absent

SEQ ID NO: 57994 - protein, 33 aa, Artificial Sequence
  GFR-binding peptide
  MOD_RES (33)..(33): Xaa is C or S
  MOD_RES (14)..(15)..(16)..(17)..(18): Xaa is A or G
  MOD_RES (19)..(20)..(21)..(22): Xaa is A or G or is absent
APVKTNAISMLYFXXXXXXXXXLKKYRMIVEEX

SEQ ID NO: 57995 - protein, 39 aa, Artificial Sequence
  GFR-binding peptide
  MOD_RES (5)..(6)..(37)..(39): Xaa is C or S
VPSTXXAPVKTNAISMLYFDNGRVLLLKKYRMIVEEXGX

SEQ ID NO: 57996 - protein, 36 aa, Artificial Sequence; identical to SEQ ID NO: 28049
  GFR-binding peptide
  MOD_RES (1)..(2)..(36): Xaa is C or S
  MOD_RES (16)..(17)..(18)..(19)..(20): Xaa is A or G
  MOD_RES (21)..(22)..(23)..(24): Xaa is A or G or is absent

SEQ ID NO: 57997 - protein, 41 aa, Artificial Sequence
  GFR-binding peptide
  MOD_RES (6)..(7)..(41): Xaa is C or S
  MOD_RES (21)..(22)..(23)..(24)..(25): Xaa is A or G
  MOD_RES (26)..(27)..(28)..(29): Xaa is A or G or is absent
GSAGPXXTPTKMNAISMLYFXXXXXXXXXLKKYRGMVVDRX

SEQ ID NO: 57998 - protein, 35 aa, Artificial Sequence; identical to SEQ ID NO: 15950
  GFR-binding peptide
  MOD_RES (1)..(2)..(34): Xaa is C or S

SEQ ID NO: 57999 - protein, 43 aa, Artificial Sequence; identical to SEQ ID NO: 16861
  GFR-binding peptide
  MOD_RES (5)..(6)..(40)..(42): Xaa is C or S
  MOD_RES (20)..(21)..(22)..(23)..(24): Xaa is A or G
  MOD_RES (25)..(26)..(27)..(28): Xaa is A or G or is absent

SEQ ID NO: 58000 - protein, 38 aa, Artificial Sequence; identical to SEQ ID NO: 8656
  GFR-binding peptide
  MOD_RES (4)..(5): Xaa is C or S
  MOD_RES (19)..(20)..(21)..(22)..(23): Xaa is A or G
  MOD_RES (24)..(25)..(26)..(27): Xaa is A or G or is absent

SEQ ID NO: 58001 - protein, 37 aa, Artificial Sequence
  GFR-binding peptide
  MOD_RES (34)..(36): Xaa is C or S
  MOD_RES (14)..(15)..(16)..(17)..(18): Xaa is A or G
  MOD_RES (19)..(20)..(21)..(22): Xaa is A or G or is absent
TPTKMNAISMLYFXXXXXXXXXLKKYRGMVVDRXGXS

SEQ ID NO: 58002 - protein, 35 aa, Artificial Sequence
  GFR-binding peptide
  MOD_RES (2)..(3)..(35): Xaa is C or S
PXXTPTKMNAISMLYFNDKQQIILKKYRGMVVDRX

SEQ ID NO: 58003 - protein, 42 aa, Artificial Sequence; identical to SEQ ID NO: 29060
  GFR-binding peptide
  MOD_RES (6)..(7)..(39)..(41): Xaa is C or S

SEQ ID NO: 58004 - protein, 35 aa, Artificial Sequence; identical to SEQ ID NO: 6879
  GFR-binding peptide
  MOD_RES (3)..(3): Xaa is C or S
  MOD_RES (17)..(18)..(19)..(20)..(21): Xaa is A or G
  MOD_RES (22)..(23)..(24)..(25): Xaa is A or G or is absent

SEQ ID NO: 58005 - protein, 36 aa, Artificial Sequence; identical to SEQ ID NO: 30005
  GFR-binding peptide
  MOD_RES (2)..(3): Xaa is C or S
  MOD_RES (17)..(18)..(19)..(20)..(21): Xaa is A or G
  MOD_RES (22)..(23)..(24)..(25): Xaa is A or G or is absent

SEQ ID NO: 58006 - protein, 43 aa, Artificial Sequence; identical to SEQ ID NO: 8670
  GFR-binding peptide
  MOD_RES (6)..(7)..(41)..(43): Xaa is C or S
  MOD_RES (21)..(22)..(23)..(24)..(25): Xaa is A or G
  MOD_RES (26)..(27)..(28)..(29): Xaa is A or G or is absent

SEQ ID NO: 58007 - protein, 35 aa, Artificial Sequence
  GFR-binding peptide
  MOD_RES (2)..(3)..(34): Xaa is C or S
TXXAPVKTNAISMLYFDNGRVLLLKKYRMIVEEXG

SEQ ID NO: 58008 - protein, 38 aa, Artificial Sequence; identical to SEQ ID NO: 16870
  GFR-binding peptide
  MOD_RES (5)..(6)..(38): Xaa is C or S

SEQ ID NO: 58009 - protein, 35 aa, Artificial Sequence; identical to SEQ ID NO: 6886
  GFR-binding peptide
  MOD_RES (3)..(4): Xaa is C or S

SEQ ID NO: 58010 - protein, 38 aa, Artificial Sequence; identical to SEQ ID NO: 30971
  GFR-binding peptide
  MOD_RES (3)..(4)..(38): Xaa is C or S
  MOD_RES (18)..(19)..(20)..(21)..(22): Xaa is A or G
  MOD_RES (23)..(24)..(25)..(26): Xaa is A or G or is absent

SEQ ID NO: 58011 - protein, 38 aa, Artificial Sequence; identical to SEQ ID NO: 9577
  GFR-binding peptide
  MOD_RES (4)..(5)..(37): Xaa is C or S

SEQ ID NO: 58012 - protein, 38 aa, Artificial Sequence; identical to SEQ ID NO: 8673
  GFR-binding peptide
  MOD_RES (2)..(3)..(37): Xaa is C or S
  MOD_RES (17)..(18)..(19)..(20)..(21): Xaa is A or G
  MOD_RES (22)..(23)..(24)..(25): Xaa is A or G or is absent

SEQ ID NO: 58013 - protein, 34 aa, Artificial Sequence; identical to SEQ ID NO: 9579
  GFR-binding peptide
  MOD_RES (3)..(4): Xaa is C or S

SEQ ID NO: 58014 - protein, 41 aa, Artificial Sequence; identical to SEQ ID NO: 9580
  GFR-binding peptide
  MOD_RES (6)..(7)..(41): Xaa is C or S
  MOD_RES (21)..(22)..(23)..(24)..(25): Xaa is A or G
  MOD_RES (26)..(27)..(28)..(29): Xaa is A or G or is absent

SEQ ID NO: 58015 - protein, 37 aa, Artificial Sequence; identical to SEQ ID NO: 9581
  GFR-binding peptide
  MOD_RES (4)..(5): Xaa is C or S
  MOD_RES (19)..(20)..(21)..(22)..(23): Xaa is A or G
  MOD_RES (24)..(25)..(26)..(27): Xaa is A or G or is absent

SEQ ID NO: 58016 - protein, 32 aa, Artificial Sequence
  GFR-binding peptide
  MOD_RES (1)..(32): Xaa is C or S
XAPVKTNAISMLYFDNGRVLLLKKYRMIVEEX

SEQ ID NO: 58017 - protein, 39 aa, Artificial Sequence; identical to SEQ ID NO: 29070
  GFR-binding peptide
  MOD_RES (5)..(6)..(38): Xaa is C or S

SEQ ID NO: 58018 - protein, 36 aa, Artificial Sequence
  GFR-binding peptide
  MOD_RES (1)..(35): Xaa is C or S
  MOD_RES (15)..(16)..(17)..(18)..(19): Xaa is A or G
  MOD_RES (20)..(21)..(22)..(23): Xaa is A or G or is absent
XTPTKMNAISMLYFXXXXXXXXXLKKYRGMVVDRXG

SEQ ID NO: 58019 - protein, 39 aa, Artificial Sequence; identical to SEQ ID NO: 9585
  GFR-binding peptide
  MOD_RES (5)..(6)..(39): Xaa is C or S

SEQ ID NO: 58020 - protein, 38 aa, Artificial Sequence; identical to SEQ ID NO: 30015
  GFR-binding peptide
  MOD_RES (4)..(5): Xaa is C or S
  MOD_RES (19)..(20)..(21)..(22)..(23): Xaa is A or G
  MOD_RES (24)..(25)..(26)..(27): Xaa is A or G or is absent

SEQ ID NO: 58021 - protein, 36 aa, Artificial Sequence; identical to SEQ ID NO: 8677
  GFR-binding peptide
  MOD_RES (1)..(2): Xaa is C or S
  MOD_RES (16)..(17)..(18)..(19)..(20): Xaa is A or G
  MOD_RES (21)..(22)..(23)..(24): Xaa is A or G or is absent

SEQ ID NO: 58022 - protein, 40 aa, Artificial Sequence; identical to SEQ ID NO: 9593
  GFR-binding peptide
  MOD_RES (5)..(6)..(40): Xaa is C or S
  MOD_RES (20)..(21)..(22)..(23)..(24): Xaa is A or G
  MOD_RES (25)..(26)..(27)..(28): Xaa is A or G or is absent

SEQ ID NO: 58023 - protein, 35 aa, Artificial Sequence; identical to SEQ ID NO: 28082
  GFR-binding peptide
  MOD_RES (3)..(4): Xaa is C or S

SEQ ID NO: 58024 - protein, 40 aa, Artificial Sequence; identical to SEQ ID NO: 9594
  GFR-binding peptide
  MOD_RES (6)..(40): Xaa is C or S
  MOD_RES (20)..(21)..(22)..(23)..(24): Xaa is A or G
  MOD_RES (25)..(26)..(27)..(28): Xaa is A or G or is absent

SEQ ID NO: 58025 - protein, 41 aa, Artificial Sequence; identical to SEQ ID NO: 7774
  GFR-binding peptide
  MOD_RES (2)..(3)..(38)..(40): Xaa is C or S
  MOD_RES (17)..(18)..(19)..(20)..(21): Xaa is A or G
  MOD_RES (22)..(23)..(24)..(25): Xaa is A or G or is absent

SEQ ID NO: 58026 - protein, 39 aa, Artificial Sequence; identical to SEQ ID NO: 15982
  GFR-binding peptide
  MOD_RES (3)..(4)..(38): Xaa is C or S
  MOD_RES (18)..(19)..(20)..(21)..(22): Xaa is A or G
  MOD_RES (23)..(24)..(25)..(26): Xaa is A or G or is absent

SEQ ID NO: 58027 - protein, 37 aa, Artificial Sequence; identical to SEQ ID NO: 30992
  GFR-binding peptide
  MOD_RES (2)..(3)..(35)..(37): Xaa is C or S

SEQ ID NO: 58028 - protein, 36 aa, Artificial Sequence; identical to SEQ ID NO: 7775
  GFR-binding peptide
  MOD_RES (2)..(3)..(35): Xaa is C or S

SEQ ID NO: 58029 - protein, 37 aa, Artificial Sequence; identical to SEQ ID NO: 6901
  GFR-binding peptide
  MOD_RES (3)..(4): Xaa is C or S
  MOD_RES (18)..(19)..(20)..(21)..(22): Xaa is A or G
  MOD_RES (23)..(24)..(25)..(26): Xaa is A or G or is absent

SEQ ID NO: 58030 - protein, 40 aa, Artificial Sequence; identical to SEQ ID NO: 6902
  GFR-binding peptide
  MOD_RES (2)..(3)..(37)..(39): Xaa is C or S
  MOD_RES (17)..(18)..(19)..(20)..(21): Xaa is A or G
  MOD_RES (22)..(23)..(24)..(25): Xaa is A or G or is absent

SEQ ID NO: 58031 - protein, 41 aa, Artificial Sequence; identical to SEQ ID NO: 29077
  GFR-binding peptide
  MOD_RES (3)..(4)..(38)..(40): Xaa is C or S
  MOD_RES (18)..(19)..(20)..(21)..(22): Xaa is A or G
  MOD_RES (23)..(24)..(25)..(26): Xaa is A or G or is absent

SEQ ID NO: 58032 - protein, 39 aa, Artificial Sequence; identical to SEQ ID NO: 15985
  GFR-binding peptide
  MOD_RES (4)..(5)..(37)..(39): Xaa is C or S

SEQ ID NO: 58033 - protein, 42 aa, Artificial Sequence
  GFR-binding peptide
  MOD_RES (6)..(7)..(40)..(42): Xaa is C or S
  MOD_RES (21)..(22)..(23)..(24)..(25): Xaa is A or G
  MOD_RES (26)..(27)..(28)..(29): Xaa is A or G or is absent
RVPSTXXAPVKTNAISMLYFXXXXXXXXXLKKYRMIVEEXGX

SEQ ID NO: 58034 - protein, 32 aa, Artificial Sequence; identical to SEQ ID NO: 6905
  GFR-binding peptide
  MOD_RES (14)..(15)..(16)..(17)..(18): Xaa is A or G
  MOD_RES (19)..(20)..(21)..(22): Xaa is A or G or is absent

SEQ ID NO: 58035 - protein, 39 aa, Artificial Sequence; identical to SEQ ID NO: 7781
  GFR-binding peptide
  MOD_RES (4)..(5)..(39): Xaa is C or S
  MOD_RES (19)..(20)..(21)..(22)..(23): Xaa is A or G
  MOD_RES (24)..(25)..(26)..(27): Xaa is A or G or is absent

SEQ ID NO: 58036 - protein, 39 aa, Artificial Sequence; identical to SEQ ID NO: 15087
  GFR-binding peptide
  MOD_RES (3)..(4)..(36)..(38): Xaa is C or S

SEQ ID NO: 58037 - protein, 35 aa, Artificial Sequence
  GFR-binding peptide
  MOD_RES (1)..(32)..(34): Xaa is C or S
XAPVKTNAISMLYFDNGRVLLLKKYRMIVEEXGXL

SEQ ID NO: 58038 - protein, 33 aa, Artificial Sequence; identical to SEQ ID NO: 30998
  GFR-binding peptide
  MOD_RES (32)..(32): Xaa is C or S

SEQ ID NO: 58039 - protein, 41 aa, Artificial Sequence
  GFR-binding peptide
  MOD_RES (4)..(5)..(39)..(41): Xaa is C or S
  MOD_RES (19)..(20)..(21)..(22)..(23): Xaa is A or G
  MOD_RES (24)..(25)..(26)..(27): Xaa is A or G or is absent
AGPXXTPTKMNAISMLYFXXXXXXXXXLKKYRGMVVDRXGX

SEQ ID NO: 58040 - protein, 33 aa, Artificial Sequence; identical to SEQ ID NO: 30027
  GFR-binding peptide
  MOD_RES (1)..(33): Xaa is C or S

SEQ ID NO: 58041 - protein, 35 aa, Artificial Sequence; identical to SEQ ID NO: 8688
  GFR-binding peptide
  MOD_RES (1)..(2)..(34): Xaa is C or S

SEQ ID NO: 58042 - protein, 37 aa, Artificial Sequence; identical to SEQ ID NO: 7787
  GFR-binding peptide
  MOD_RES (1)..(2)..(36): Xaa is C or S
  MOD_RES (16)..(17)..(18)..(19)..(20): Xaa is A or G
  MOD_RES (21)..(22)..(23)..(24): Xaa is A or G or is absent

SEQ ID NO: 58043 - protein, 39 aa, Artificial Sequence; identical to SEQ ID NO: 8691
  GFR-binding peptide
  MOD_RES (4)..(5)..(37)..(39): Xaa is C or S

SEQ ID NO: 58044 - protein, 37 aa, Artificial Sequence; identical to SEQ ID NO: 14258
  GFR-binding peptide
  MOD_RES (3)..(4): Xaa is C or S
  MOD_RES (18)..(19)..(20)..(21)..(22): Xaa is A or G
  MOD_RES (23)..(24)..(25)..(26): Xaa is A or G or is absent

SEQ ID NO: 58045 - protein, 41 aa, Artificial Sequence; identical to SEQ ID NO: 6917
  GFR-binding peptide
  MOD_RES (4)..(5)..(40): Xaa is C or S
  MOD_RES (19)..(20)..(21)..(22)..(23): Xaa is A or G
  MOD_RES (24)..(25)..(26)..(27): Xaa is A or G or is absent

SEQ ID NO: 58046 - protein, 36 aa, Artificial Sequence; identical to SEQ ID NO: 30034
  GFR-binding peptide
  MOD_RES (3)..(4): Xaa is C or S
  MOD_RES (18)..(19)..(20)..(21)..(22): Xaa is A or G
  MOD_RES (23)..(24)..(25)..(26): Xaa is A or G or is absent

SEQ ID NO: 58047 - protein, 41 aa, Artificial Sequence; identical to SEQ ID NO: 7793
  GFR-binding peptide
  MOD_RES (4)..(5)..(39)..(41): Xaa is C or S
  MOD_RES (19)..(20)..(21)..(22)..(23): Xaa is A or G
  MOD_RES (24)..(25)..(26)..(27): Xaa is A or G or is absent

SEQ ID NO: 58048 - protein, 38 aa, Artificial Sequence; identical to SEQ ID NO: 15103
  GFR-binding peptide
  MOD_RES (2)..(3)..(35)..(37): Xaa is C or S

SEQ ID NO: 58049 - protein, 42 aa, Artificial Sequence; identical to SEQ ID NO: 9614
  GFR-binding peptide
  MOD_RES (6)..(7)..(41): Xaa is C or S
  MOD_RES (21)..(22)..(23)..(24)..(25): Xaa is A or G
  MOD_RES (26)..(27)..(28)..(29): Xaa is A or G or is absent

SEQ ID NO: 58050 - protein, 35 aa, Artificial Sequence; identical to SEQ ID NO: 16902
  GFR-binding peptide
  MOD_RES (1)..(2): Xaa is C or S
  MOD_RES (16)..(17)..(18)..(19)..(20): Xaa is A or G
  MOD_RES (21)..(22)..(23)..(24): Xaa is A or G or is absent

SEQ ID NO: 58051 - protein, 39 aa, Artificial Sequence; identical to SEQ ID NO: 8702
  GFR-binding peptide
  MOD_RES (4)..(5)..(39): Xaa is C or S
  MOD_RES (19)..(20)..(21)..(22)..(23): Xaa is A or G
  MOD_RES (24)..(25)..(26)..(27): Xaa is A or G or is absent

SEQ ID NO: 58052 - protein, 35 aa, Artificial Sequence
  GFR-binding peptide
  MOD_RES (4)..(5): Xaa is C or S
PSTXXAPVKTNAISMLYFDNGRVLLLKKYRMIVEE

SEQ ID NO: 58053 - protein, 43 aa, Artificial Sequence; identical to SEQ ID NO: 30042
  GFR-binding peptide
  MOD_RES (5)..(6)..(40)..(42): Xaa is C or S
  MOD_RES (20)..(21)..(22)..(23)..(24): Xaa is A or G
  MOD_RES (25)..(26)..(27)..(28): Xaa is A or G or is absent

SEQ ID NO: 58054 - protein, 43 aa, Artificial Sequence
  GFR-binding peptide
  MOD_RES (6)..(7)..(41)..(43): Xaa is C or S
  MOD_RES (21)..(22)..(23)..(24)..(25): Xaa is A or G
  MOD_RES (26)..(27)..(28)..(29): Xaa is A or G or is absent
GSAGPXXTPTKMNAISMLYFXXXXXXXXXLKKYRGMVVDRXGX

SEQ ID NO: 58055 - protein, 40 aa, Artificial Sequence; identical to SEQ ID NO: 30044
  GFR-binding peptide
  MOD_RES (4)..(5)..(37)..(39): Xaa is C or S

SEQ ID NO: 58056 - protein, 35 aa, Artificial Sequence; identical to SEQ ID NO: 9621
  GFR-binding peptide
  MOD_RES (1)..(2): Xaa is C or S
  MOD_RES (16)..(17)..(18)..(19)..(20): Xaa is A or G
  MOD_RES (21)..(22)..(23)..(24): Xaa is A or G or is absent

SEQ ID NO: 58057 - protein, 36 aa, Artificial Sequence; identical to SEQ ID NO: 29096
  GFR-binding peptide
  MOD_RES (1)..(35): Xaa is C or S
  MOD_RES (15)..(16)..(17)..(18)..(19): Xaa is A or G
  MOD_RES (20)..(21)..(22)..(23): Xaa is A or G or is absent

SEQ ID NO: 58058 - protein, 39 aa, Artificial Sequence; identical to SEQ ID NO: 29098
  GFR-binding peptide
  MOD_RES (4)..(5)..(37)..(39): Xaa is C or S

SEQ ID NO: 58059 - protein, 39 aa, Artificial Sequence; identical to SEQ ID NO: 16910
  GFR-binding peptide
  MOD_RES (4)..(5)..(39): Xaa is C or S
  MOD_RES (19)..(20)..(21)..(22)..(23): Xaa is A or G
  MOD_RES (24)..(25)..(26)..(27): Xaa is A or G or is absent

SEQ ID NO: 58060 - protein, 36 aa, Artificial Sequence; identical to SEQ ID NO: 8716
  GFR-binding peptide
  MOD_RES (3)..(4): Xaa is C or S
  MOD_RES (18)..(19)..(20)..(21)..(22): Xaa is A or G
  MOD_RES (23)..(24)..(25)..(26): Xaa is A or G or is absent

SEQ ID NO: 58061 - protein, 42 aa, Artificial Sequence
  GFR-binding peptide
  MOD_RES (5)..(6)..(39)..(41): Xaa is C or S
  MOD_RES (20)..(21)..(22)..(23)..(24): Xaa is A or G
  MOD_RES (25)..(26)..(27)..(28): Xaa is A or G or is absent
VPSTXXAPVKTNAISMLYFXXXXXXXXXLKKYRMIVEEXGXL

SEQ ID NO: 58062 - protein, 37 aa, Artificial Sequence; identical to SEQ ID NO: 6941
  GFR-binding peptide
  MOD_RES (2)..(3)..(35)..(37): Xaa is C or S

SEQ ID NO: 58063 - protein, 41 aa, Artificial Sequence; identical to SEQ ID NO: 8719
  GFR-binding peptide
  MOD_RES (3)..(4)..(38)..(40): Xaa is C or S
  MOD_RES (18)..(19)..(20)..(21)..(22): Xaa is A or G
  MOD_RES (23)..(24)..(25)..(26): Xaa is A or G or is absent

SEQ ID NO: 58064 - protein, 39 aa, Artificial Sequence; identical to SEQ ID NO: 7813
  GFR-binding peptide
  MOD_RES (6)..(7): Xaa is C or S
  MOD_RES (21)..(22)..(23)..(24)..(25): Xaa is A or G
  MOD_RES (26)..(27)..(28)..(29): Xaa is A or G or is absent

SEQ ID NO: 58065 - protein, 42 aa, Artificial Sequence; identical to SEQ ID NO: 7814
  GFR-binding peptide
  MOD_RES (6)..(7)..(42): Xaa is C or S
  MOD_RES (21)..(22)..(23)..(24)..(25): Xaa is A or G
  MOD_RES (26)..(27)..(28)..(29): Xaa is A or G or is absent

SEQ ID NO: 58066 - protein, 43 aa, Artificial Sequence
  GFR-binding peptide
  MOD_RES (6)..(7)..(40)..(42): Xaa is C or S
  MOD_RES (21)..(22)..(23)..(24)..(25): Xaa is A or G
  MOD_RES (26)..(27)..(28)..(29): Xaa is A or G or is absent
RVPSTXXAPVKTNAISMLYFXXXXXXXXXLKKYRMIVEEXGXL

SEQ ID NO: 58067 - protein, 38 aa, Artificial Sequence; identical to SEQ ID NO: 7817
  GFR-binding peptide
  MOD_RES (2)..(3)..(35)..(37): Xaa is C or S

SEQ ID NO: 58068 - protein, 38 aa, Artificial Sequence; identical to SEQ ID NO: 8724
  GFR-binding peptide
  MOD_RES (1)..(2)..(35)..(37): Xaa is C or S

SEQ ID NO: 58069 - protein, 34 aa, Artificial Sequence; identical to SEQ ID NO: 9643
  GFR-binding peptide
  MOD_RES (1)..(1): Xaa is C or S
  MOD_RES (15)..(16)..(17)..(18)..(19): Xaa is A or G
  MOD_RES (20)..(21)..(22)..(23): Xaa is A or G or is absent

SEQ ID NO: 58070 - protein, 41 aa, Artificial Sequence; identical to SEQ ID NO: 9644
  GFR-binding peptide
  MOD_RES (7)..(41): Xaa is C or S
  MOD_RES (21)..(22)..(23)..(24)..(25): Xaa is A or G
  MOD_RES (26)..(27)..(28)..(29): Xaa is A or G or is absent

SEQ ID NO: 58071 - protein, 37 aa, Artificial Sequence; identical to SEQ ID NO: 8728
  GFR-binding peptide
  MOD_RES (5)..(6): Xaa is C or S

SEQ ID NO: 58072 - protein, 39 aa, Artificial Sequence; identical to SEQ ID NO: 9646
  GFR-binding peptide
  MOD_RES (2)..(3)..(37)..(39): Xaa is C or S
  MOD_RES (17)..(18)..(19)..(20)..(21): Xaa is A or G
  MOD_RES (22)..(23)..(24)..(25): Xaa is A or G or is absent

SEQ ID NO: 58073 - protein, 38 aa, Artificial Sequence; identical to SEQ ID NO: 8730
  GFR-binding peptide
  MOD_RES (6)..(6): Xaa is C or S
  MOD_RES (20)..(21)..(22)..(23)..(24): Xaa is A or G
  MOD_RES (25)..(26)..(27)..(28): Xaa is A or G or is absent

SEQ ID NO: 58074 - protein, 35 aa, Artificial Sequence
  GFR-binding peptide
  MOD_RES (3)..(4)..(35): Xaa is C or S
STXXAPVKTNAISMLYFDNGRVLLLKKYRMIVEEX

SEQ ID NO: 58075 - protein, 42 aa, Artificial Sequence; identical to SEQ ID NO: 30070
  GFR-binding peptide
  MOD_RES (5)..(6)..(40)..(42): Xaa is C or S
  MOD_RES (20)..(21)..(22)..(23)..(24): Xaa is A or G
  MOD_RES (25)..(26)..(27)..(28): Xaa is A or G or is absent

SEQ ID NO: 58076 - protein, 37 aa, Artificial Sequence; identical to SEQ ID NO: 16930
  GFR-binding peptide
  MOD_RES (4)..(5)..(37): Xaa is C or S

SEQ ID NO: 58077 - protein, 39 aa, Artificial Sequence; identical to SEQ ID NO: 7832
  GFR-binding peptide
  MOD_RES (4)..(5)..(39): Xaa is C or S
  MOD_RES (19)..(20)..(21)..(22)..(23): Xaa is A or G
  MOD_RES (24)..(25)..(26)..(27): Xaa is A or G or is absent

SEQ ID NO: 58078 - protein, 41 aa, Artificial Sequence; identical to SEQ ID NO: 9655
  GFR-binding peptide
  MOD_RES (6)..(7)..(41): Xaa is C or S
  MOD_RES (21)..(22)..(23)..(24)..(25): Xaa is A or G
  MOD_RES (26)..(27)..(28)..(29): Xaa is A or G or is absent

SEQ ID NO: 58079 - protein, 38 aa, Artificial Sequence; identical to SEQ ID NO: 6969
  GFR-binding peptide
  MOD_RES (4)..(38): Xaa is C or S
  MOD_RES (18)..(19)..(20)..(21)..(22): Xaa is A or G
  MOD_RES (23)..(24)..(25)..(26): Xaa is A or G or is absent

SEQ ID NO: 58080 - protein, 33 aa, Artificial Sequence; identical to SEQ ID NO: 31061
  GFR-binding peptide
  MOD_RES (1)..(2): Xaa is C or S

SEQ ID NO: 58081 - protein, 38 aa, Artificial Sequence; identical to SEQ ID NO: 29130
  GFR-binding peptide
  MOD_RES (2)..(3)..(37): Xaa is C or S
  MOD_RES (17)..(18)..(19)..(20)..(21): Xaa is A or G
  MOD_RES (22)..(23)..(24)..(25): Xaa is A or G or is absent

SEQ ID NO: 58082 - protein, 36 aa, Artificial Sequence; identical to SEQ ID NO: 9661
  GFR-binding peptide
  MOD_RES (3)..(4)..(36): Xaa is C or S

SEQ ID NO: 58083 - protein, 39 aa, Artificial Sequence
  GFR-binding peptide
  MOD_RES (5)..(6)..(39): Xaa is C or S
  MOD_RES (20)..(21)..(22)..(23)..(24): Xaa is A or G
  MOD_RES (25)..(26)..(27)..(28): Xaa is A or G or is absent
VPSTXXAPVKTNAISMLYFXXXXXXXXXLKKYRMIVEEX

SEQ ID NO: 58084 - protein, 41 aa, Artificial Sequence; identical to SEQ ID NO: 29133
  GFR-binding peptide
  MOD_RES (5)..(6)..(40): Xaa is C or S
  MOD_RES (20)..(21)..(22)..(23)..(24): Xaa is A or G
  MOD_RES (25)..(26)..(27)..(28): Xaa is A or G or is absent

SEQ ID NO: 58085 - protein, 41 aa, Artificial Sequence; identical to SEQ ID NO: 7838
  GFR-binding peptide
  MOD_RES (6)..(7): Xaa is C or S
  MOD_RES (21)..(22)..(23)..(24)..(25): Xaa is A or G
  MOD_RES (26)..(27)..(28)..(29): Xaa is A or G or is absent

SEQ ID NO: 58086 - protein, 38 aa, Artificial Sequence; identical to SEQ ID NO: 6975
  GFR-binding peptide
  MOD_RES (4)..(5): Xaa is C or S
  MOD_RES (19)..(20)..(21)..(22)..(23): Xaa is A or G
  MOD_RES (24)..(25)..(26)..(27): Xaa is A or G or is absent

SEQ ID NO: 58087 - protein, 40 aa, Artificial Sequence; identical to SEQ ID NO: 16037
  GFR-binding peptide
  MOD_RES (4)..(5)..(37)..(39): Xaa is C or S

SEQ ID NO: 58088 - protein, 36 aa, Artificial Sequence; identical to SEQ ID NO: 8744
  GFR-binding peptide
  MOD_RES (5)..(6): Xaa is C or S

SEQ ID NO: 58089 - protein, 36 aa, Artificial Sequence; identical to SEQ ID NO: 7843
  GFR-binding peptide
  MOD_RES (34)..(36): Xaa is C or S
  MOD_RES (14)..(15)..(16)..(17)..(18): Xaa is A or G
  MOD_RES (19)..(20)..(21)..(22): Xaa is A or G or is absent

SEQ ID NO: 58090 - protein, 36 aa, Artificial Sequence
  GFR-binding peptide
  MOD_RES (1)..(33)..(35): Xaa is C or S
XTPTKMNAISMLYFNDKQQIILKKYRGMVVDRXGXS

SEQ ID NO: 58091 - protein, 36 aa, Artificial Sequence; identical to SEQ ID NO: 8752
  GFR-binding peptide
  MOD_RES (3)..(4)..(36): Xaa is C or S

SEQ ID NO: 58092 - protein, 32 aa, Artificial Sequence
  GFR-binding peptide
  MOD_RES (1)..(2): Xaa is C or S
XXAPVKTNAISMLYFDNGRVLLLKKYRMIVEE

SEQ ID NO: 58093 - protein, 34 aa, Artificial Sequence; identical to SEQ ID NO: 16051
  GFR-binding peptide
  MOD_RES (1)..(2)..(34): Xaa is C or S

SEQ ID NO: 58094 - protein, 37 aa, Artificial Sequence; identical to SEQ ID NO: 9673
  GFR-binding peptide
  MOD_RES (34)..(36): Xaa is C or S
  MOD_RES (14)..(15)..(16)..(17)..(18): Xaa is A or G
  MOD_RES (19)..(20)..(21)..(22): Xaa is A or G or is absent

SEQ ID NO: 58095 - protein, 37 aa, Artificial Sequence; identical to SEQ ID NO: 7858
  GFR-binding peptide
  MOD_RES (1)..(36): Xaa is C or S
  MOD_RES (15)..(16)..(17)..(18)..(19): Xaa is A or G
  MOD_RES (20)..(21)..(22)..(23): Xaa is A or G or is absent

SEQ ID NO: 58096 - protein, 41 aa, Artificial Sequence; identical to SEQ ID NO: 8753
  GFR-binding peptide
  MOD_RES (5)..(6)..(41): Xaa is C or S
  MOD_RES (20)..(21)..(22)..(23)..(24): Xaa is A or G
  MOD_RES (25)..(26)..(27)..(28): Xaa is A or G or is absent

SEQ ID NO: 58097 - protein, 38 aa, Artificial Sequence; identical to SEQ ID NO: 7861
  GFR-binding peptide
  MOD_RES (3)..(4)..(37): Xaa is C or S

SEQ ID NO: 58098 - protein, 36 aa, Artificial Sequence; identical to SEQ ID NO: 9677
  GFR-binding peptide
  MOD_RES (3)..(3): Xaa is C or S
  MOD_RES (17)..(18)..(19)..(20)..(21): Xaa is A or G
  MOD_RES (22)..(23)..(24)..(25): Xaa is A or G or is absent

SEQ ID NO: 58099 - protein, 40 aa, Artificial Sequence; identical to SEQ ID NO: 28163
  GFR-binding peptide
  MOD_RES (6)..(7): Xaa is C or S
  MOD_RES (21)..(22)..(23)..(24)..(25): Xaa is A or G
  MOD_RES (26)..(27)..(28)..(29): Xaa is A or G or is absent

SEQ ID NO: 58100 - protein, 35 aa, Artificial Sequence; identical to SEQ ID NO: 30107
  GFR-binding peptide
  MOD_RES (3)..(4): Xaa is C or S

SEQ ID NO: 58101 - protein, 41 aa, Artificial Sequence; identical to SEQ ID NO: 7866
  GFR-binding peptide
  MOD_RES (5)..(6)..(40): Xaa is C or S
  MOD_RES (20)..(21)..(22)..(23)..(24): Xaa is A or G
  MOD_RES (25)..(26)..(27)..(28): Xaa is A or G or is absent

SEQ ID NO: 58102 - protein, 38 aa, Artificial Sequence; identical to SEQ ID NO: 8763
  GFR-binding peptide
  MOD_RES (6)..(7): Xaa is C or S

SEQ ID NO: 58103 - protein, 36 aa, Artificial Sequence; identical to SEQ ID NO: 9683
  GFR-binding peptide
  MOD_RES (5)..(6): Xaa is C or S

SEQ ID NO: 58104 - protein, 38 aa, Artificial Sequence; identical to SEQ ID NO: 16967
  GFR-binding peptide
  MOD_RES (1)..(2)..(36)..(38): Xaa is C or S
  MOD_RES (16)..(17)..(18)..(19)..(20): Xaa is A or G
  MOD_RES (21)..(22)..(23)..(24): Xaa is A or G or is absent

SEQ ID NO: 58105 - protein, 34 aa, Artificial Sequence; identical to SEQ ID NO: 30119
  GFR-binding peptide
  MOD_RES (1)..(2)..(34): Xaa is C or S

SEQ ID NO: 58106 - protein, 36 aa, Artificial Sequence; identical to SEQ ID NO: 7875
  GFR-binding peptide
  MOD_RES (3)..(4)..(36): Xaa is C or S

SEQ ID NO: 58107 - protein, 35 aa, Artificial Sequence
  GFR-binding peptide
  MOD_RES (1)..(33)..(35): Xaa is C or S
XTPTKMNAISMLYFNDKQQIILKKYRGMVVDRXGX

SEQ ID NO: 58108 - protein, 37 aa, Artificial Sequence; identical to SEQ ID NO: 7888
  GFR-binding peptide
  MOD_RES (4)..(5)..(37): Xaa is C or S

SEQ ID NO: 58109 - protein, 37 aa, Artificial Sequence; identical to SEQ ID NO: 7890
  GFR-binding peptide
  MOD_RES (1)..(2)..(36): Xaa is C or S
  MOD_RES (16)..(17)..(18)..(19)..(20): Xaa is A or G
  MOD_RES (21)..(22)..(23)..(24): Xaa is A or G or is absent

SEQ ID NO: 58110 - protein, 36 aa, Artificial Sequence; identical to SEQ ID NO: 7892
  GFR-binding peptide
  MOD_RES (4)..(4): Xaa is C or S
  MOD_RES (18)..(19)..(20)..(21)..(22): Xaa is A or G
  MOD_RES (23)..(24)..(25)..(26): Xaa is A or G or is absent

SEQ ID NO: 58111 - protein, 42 aa, Artificial Sequence; identical to SEQ ID NO: 9692
  GFR-binding peptide
  MOD_RES (6)..(7)..(40)..(42): Xaa is C or S

SEQ ID NO: 58112 - protein, 40 aa, Artificial Sequence; identical to SEQ ID NO: 7008
  GFR-binding peptide
  MOD_RES (3)..(4)..(37)..(39): Xaa is C or S

SEQ ID NO: 58113 - protein, 40 aa, Artificial Sequence; identical to SEQ ID NO: 7894
  GFR-binding peptide
  MOD_RES (3)..(4)..(39): Xaa is C or S
  MOD_RES (18)..(19)..(20)..(21)..(22): Xaa is A or G
  MOD_RES (23)..(24)..(25)..(26): Xaa is A or G or is absent

SEQ ID NO: 58114 - protein, 40 aa, Artificial Sequence
  GFR-binding peptide
  MOD_RES (6)..(7)..(38)..(40): Xaa is C or S
RVPSTXXAPVKTNAISMLYFDNGRVLLLKKYRMIVEEXGX

SEQ ID NO: 58115 - protein, 38 aa, Artificial Sequence; identical to SEQ ID NO: 8782
  GFR-binding peptide
  MOD_RES (3)..(4)..(38): Xaa is C or S
  MOD_RES (18)..(19)..(20)..(21)..(22): Xaa is A or G
  MOD_RES (23)..(24)..(25)..(26): Xaa is A or G or is absent

SEQ ID NO: 58116 - protein, 35 aa, Artificial Sequence; identical to SEQ ID NO: 29172
  GFR-binding peptide
  MOD_RES (34)..(34): Xaa is C or S
  MOD_RES (14)..(15)..(16)..(17)..(18): Xaa is A or G
  MOD_RES (19)..(20)..(21)..(22): Xaa is A or G or is absent

SEQ ID NO: 58117 - protein, 30 aa, Artificial Sequence; identical to SEQ ID NO: 8785
  GFR-binding peptide

SEQ ID NO: 58118 - protein, 30 aa, Artificial Sequence; identical to SEQ ID NO: 9695
  GFR-binding peptide

SEQ ID NO: 58119 - protein, 37 aa, Artificial Sequence; identical to SEQ ID NO: 16987
  GFR-binding peptide
  MOD_RES (5)..(6): Xaa is C or S

SEQ ID NO: 58120 - protein, 37 aa, Artificial Sequence; identical to SEQ ID NO: 7017
  GFR-binding peptide
  MOD_RES (1)..(2)..(34)..(36): Xaa is C or S

SEQ ID NO: 58121 - protein, 44 aa, Artificial Sequence; identical to SEQ ID NO: 9699
  GFR-binding peptide
  MOD_RES (6)..(7)..(41)..(43): Xaa is C or S
  MOD_RES (21)..(22)..(23)..(24)..(25): Xaa is A or G
  MOD_RES (26)..(27)..(28)..(29): Xaa is A or G or is absent

SEQ ID NO: 58122 - protein, 36 aa, Artificial Sequence; identical to SEQ ID NO: 30139
  GFR-binding peptide
  MOD_RES (2)..(3)..(35): Xaa is C or S

SEQ ID NO: 58123 - protein, 36 aa, Artificial Sequence; identical to SEQ ID NO: 7018
  GFR-binding peptide
  MOD_RES (2)..(3)..(36): Xaa is C or S

SEQ ID NO: 58124 - protein, 34 aa, Artificial Sequence; identical to SEQ ID NO: 28197
  GFR-binding peptide
  MOD_RES (1)..(33): Xaa is C or S

SEQ ID NO: 58125 - protein, 37 aa, Artificial Sequence; identical to SEQ ID NO: 9702
  GFR-binding peptide
  MOD_RES (4)..(5): Xaa is C or S
  MOD_RES (19)..(20)..(21)..(22)..(23): Xaa is A or G
  MOD_RES (24)..(25)..(26)..(27): Xaa is A or G or is absent

SEQ ID NO: 58126 - protein, 38 aa, Artificial Sequence; identical to SEQ ID NO: 31114
  GFR-binding peptide
  MOD_RES (2)..(3)..(35)..(37): Xaa is C or S

SEQ ID NO: 58127 - protein, 35 aa, Artificial Sequence; identical to SEQ ID NO: 8792
  GFR-binding peptide
  MOD_RES (33)..(35): Xaa is C or S

SEQ ID NO: 58128 - protein, 34 aa, Artificial Sequence; identical to SEQ ID NO: 7020
  GFR-binding peptide
  MOD_RES (34)..(34): Xaa is C or S
  MOD_RES (14)..(15)..(16)..(17)..(18): Xaa is A or G
  MOD_RES (19)..(20)..(21)..(22): Xaa is A or G or is absent

SEQ ID NO: 58129 - protein, 35 aa, Artificial Sequence; identical to SEQ ID NO: 7905
  GFR-binding peptide
  MOD_RES (1)..(33)..(35): Xaa is C or S

SEQ ID NO: 58130 - protein, 38 aa, Artificial Sequence; identical to SEQ ID NO: 9704
  GFR-binding peptide
  MOD_RES (2)..(3)..(38): Xaa is C or S
  MOD_RES (17)..(18)..(19)..(20)..(21): Xaa is A or G
  MOD_RES (22)..(23)..(24)..(25): Xaa is A or G or is absent

SEQ ID NO: 58131 - protein, 36 aa, Artificial Sequence; identical to SEQ ID NO: 7023
  GFR-binding peptide
  MOD_RES (1)..(35): Xaa is C or S
  MOD_RES (15)..(16)..(17)..(18)..(19): Xaa is A or G
  MOD_RES (20)..(21)..(22)..(23): Xaa is A or G or is absent

SEQ ID NO: 58132 - protein, 39 aa, Artificial Sequence; identical to SEQ ID NO: 16090
  GFR-binding peptide
  MOD_RES (5)..(6)..(38): Xaa is C or S

SEQ ID NO: 58133 - protein, 36 aa, Artificial Sequence; identical to SEQ ID NO: 7025
  GFR-binding peptide
  MOD_RES (1)..(2)..(34)..(36): Xaa is C or S

SEQ ID NO: 58134 - protein, 42 aa, Artificial Sequence; identical to SEQ ID NO: 7026
  GFR-binding peptide
  MOD_RES (4)..(5)..(39)..(41): Xaa is C or S
  MOD_RES (19)..(20)..(21)..(22)..(23): Xaa is A or G
  MOD_RES (24)..(25)..(26)..(27): Xaa is A or G or is absent

SEQ ID NO: 58135 - protein, 39 aa, Artificial Sequence; identical to SEQ ID NO: 9708
  GFR-binding peptide
  MOD_RES (6)..(7): Xaa is C or S
  MOD_RES (21)..(22)..(23)..(24)..(25): Xaa is A or G
  MOD_RES (26)..(27)..(28)..(29): Xaa is A or G or is absent

SEQ ID NO: 58136 - protein, 36 aa, Artificial Sequence; identical to SEQ ID NO: 8800
  GFR-binding peptide
  MOD_RES (3)..(4): Xaa is C or S
  MOD_RES (18)..(19)..(20)..(21)..(22): Xaa is A or G
  MOD_RES (23)..(24)..(25)..(26): Xaa is A or G or is absent

SEQ ID NO: 58137 - protein, 39 aa, Artificial Sequence; identical to SEQ ID NO: 30153
  GFR-binding peptide
  MOD_RES (3)..(4)..(36)..(38): Xaa is C or S

SEQ ID NO: 58138 - protein, 38 aa, Artificial Sequence; identical to SEQ ID NO: 7912
  GFR-binding peptide
  MOD_RES (2)..(3)..(37): Xaa is C or S
  MOD_RES (17)..(18)..(19)..(20)..(21): Xaa is A or G
  MOD_RES (22)..(23)..(24)..(25): Xaa is A or G or is absent

SEQ ID NO: 58139 - protein, 38 aa, Artificial Sequence; identical to SEQ ID NO: 7039
  GFR-binding peptide
  MOD_RES (5)..(6): Xaa is C or S

SEQ ID NO: 58140 - protein, 44 aa, Artificial Sequence; identical to SEQ ID NO: 8808
  GFR-binding peptide
  MOD_RES (6)..(7)..(41)..(43): Xaa is C or S
  MOD_RES (21)..(22)..(23)..(24)..(25): Xaa is A or G
  MOD_RES (26)..(27)..(28)..(29): Xaa is A or G or is absent

SEQ ID NO: 58141 - protein, 34 aa, Artificial Sequence; identical to SEQ ID NO: 9718
  GFR-binding peptide
  MOD_RES (2)..(3): Xaa is C or S

SEQ ID NO: 58142 - protein, 39 aa, Artificial Sequence; identical to SEQ ID NO: 7043
  GFR-binding peptide
  MOD_RES (5)..(6): Xaa is C or S
  MOD_RES (20)..(21)..(22)..(23)..(24): Xaa is A or G
  MOD_RES (25)..(26)..(27)..(28): Xaa is A or G or is absent

SEQ ID NO: 58143 - protein, 34 aa, Artificial Sequence; identical to SEQ ID NO: 7044
  GFR-binding peptide
  MOD_RES (1)..(2): Xaa is C or S
  MOD_RES (16)..(17)..(18)..(19)..(20): Xaa is A or G
  MOD_RES (21)..(22)..(23)..(24): Xaa is A or G or is absent

SEQ ID NO: 58144 - protein, 40 aa, Artificial Sequence; identical to SEQ ID NO: 8811
  GFR-binding peptide
  MOD_RES (6)..(7): Xaa is C or S
  MOD_RES (21)..(22)..(23)..(24)..(25): Xaa is A or G
  MOD_RES (26)..(27)..(28)..(29): Xaa is A or G or is absent

SEQ ID NO: 58145 - protein, 34 aa, Artificial Sequence; identical to SEQ ID NO: 7922
  GFR-binding peptide
  MOD_RES (1)..(2): Xaa is C or S

SEQ ID NO: 58146 - protein, 33 aa, Artificial Sequence; identical to SEQ ID NO: 31134
  GFR-binding peptide
  MOD_RES (2)..(3): Xaa is C or S

SEQ ID NO: 58147 - protein, 37 aa, Artificial Sequence; identical to SEQ ID NO: 9721
  GFR-binding peptide
  MOD_RES (4)..(5)..(37): Xaa is C or S

SEQ ID NO: 58148 - protein, 40 aa, Artificial Sequence; identical to SEQ ID NO: 30166
  GFR-binding peptide
  MOD_RES (2)..(3)..(37)..(39): Xaa is C or S
  MOD_RES (17)..(18)..(19)..(20)..(21): Xaa is A or G
  MOD_RES (22)..(23)..(24)..(25): Xaa is A or G or is absent

SEQ ID NO: 58149 - protein, 35 aa, Artificial Sequence; identical to SEQ ID NO: 7923
  GFR-binding peptide
  MOD_RES (3)..(4): Xaa is C or S

SEQ ID NO: 58150 - protein, 38 aa, Artificial Sequence; identical to SEQ ID NO: 8816
  GFR-binding peptide
  MOD_RES (4)..(5)..(37): Xaa is C or S

SEQ ID NO: 58151 - protein, 33 aa, Artificial Sequence; identical to SEQ ID NO: 8817
  GFR-binding peptide
  MOD_RES (14)..(15)..(16)..(17)..(18): Xaa is A or G
  MOD_RES (19)..(20)..(21)..(22): Xaa is A or G or is absent

SEQ ID NO: 58152 - protein, 34 aa, Artificial Sequence; identical to SEQ ID NO: 9724
  GFR-binding peptide
  MOD_RES (1)..(2): Xaa is C or S
  MOD_RES (16)..(17)..(18)..(19)..(20): Xaa is A or G
  MOD_RES (21)..(22)..(23)..(24): Xaa is A or G or is absent

SEQ ID NO: 58153 - protein, 40 aa, Artificial Sequence; identical to SEQ ID NO: 7924
  GFR-binding peptide
  MOD_RES (7)..(7): Xaa is C or S
  MOD_RES (21)..(22)..(23)..(24)..(25): Xaa is A or G
  MOD_RES (26)..(27)..(28)..(29): Xaa is A or G or is absent

SEQ ID NO: 58154 - protein, 32 aa, Artificial Sequence; identical to SEQ ID NO: 8818
  GFR-binding peptide
  MOD_RES (32)..(32): Xaa is C or S

SEQ ID NO: 58155 - protein, 38 aa, Artificial Sequence; identical to SEQ ID NO: 7925
  GFR-binding peptide
  MOD_RES (1)..(35)..(37): Xaa is C or S
  MOD_RES (15)..(16)..(17)..(18)..(19): Xaa is A or G
  MOD_RES (20)..(21)..(22)..(23): Xaa is A or G or is absent

SEQ ID NO: 58156 - protein, 39 aa, Artificial Sequence; identical to SEQ ID NO: 14375
  GFR-binding peptide
  MOD_RES (6)..(7): Xaa is C or S
  MOD_RES (21)..(22)..(23)..(24)..(25): Xaa is A or G
  MOD_RES (26)..(27)..(28)..(29): Xaa is A or G or is absent

SEQ ID NO: 58157 - protein, 32 aa, Artificial Sequence; identical to SEQ ID NO: 28230
  GFR-binding peptide
  MOD_RES (1)..(1): Xaa is C or S

SEQ ID NO: 58158 - protein, 36 aa, Artificial Sequence
  GFR-binding peptide
  MOD_RES (1)..(2)..(36): Xaa is C or S
  MOD_RES (16)..(17)..(18)..(19)..(20): Xaa is A or G
  MOD_RES (21)..(22)..(23)..(24): Xaa is A or G or is absent
XXTPTKMNAISMLYFXXXXXXXXXLKKYRGMVVDRX

SEQ ID NO: 58159 - protein, 35 aa, Artificial Sequence; identical to SEQ ID NO: 7052
  GFR-binding peptide
  MOD_RES (1)..(2)..(35): Xaa is C or S

SEQ ID NO: 58160 - protein, 40 aa, Artificial Sequence; identical to SEQ ID NO: 7053
  GFR-binding peptide
  MOD_RES (5)..(6)..(38)..(40): Xaa is C or S

SEQ ID NO: 58161 - protein, 41 aa, Artificial Sequence; identical to SEQ ID NO: 7930
  GFR-binding peptide
  MOD_RES (6)..(7)..(41): Xaa is C or S
  MOD_RES (21)..(22)..(23)..(24)..(25): Xaa is A or G
  MOD_RES (26)..(27)..(28)..(29): Xaa is A or G or is absent

SEQ ID NO: 58162 - protein, 40 aa, Artificial Sequence; identical to SEQ ID NO: 9731
  GFR-binding peptide
  MOD_RES (6)..(7)..(39): Xaa is C or S

SEQ ID NO: 58163 - protein, 40 aa, Artificial Sequence; identical to SEQ ID NO: 16128
  GFR-binding peptide
  MOD_RES (3)..(4)..(38)..(40): Xaa is C or S
  MOD_RES (18)..(19)..(20)..(21)..(22): Xaa is A or G
  MOD_RES (23)..(24)..(25)..(26): Xaa is A or G or is absent

SEQ ID NO: 58164 - protein, 39 aa, Artificial Sequence; identical to SEQ ID NO: 8823
  GFR-binding peptide
  MOD_RES (6)..(7)..(39): Xaa is C or S

SEQ ID NO: 58165 - protein, 34 aa, Artificial Sequence; identical to SEQ ID NO: 7937
  GFR-binding peptide
  MOD_RES (2)..(3): Xaa is C or S

SEQ ID NO: 58166 - protein, 42 aa, Artificial Sequence; identical to SEQ ID NO: 7063
  GFR-binding peptide
  MOD_RES (6)..(7)..(39)..(41): Xaa is C or S

SEQ ID NO: 58167 - protein, 33 aa, Artificial Sequence; identical to SEQ ID NO: 16137
  GFR-binding peptide
  MOD_RES (2)..(3): Xaa is C or S

SEQ ID NO: 58168 - protein, 34 aa, Artificial Sequence; identical to SEQ ID NO: 9746
  GFR-binding peptide
  MOD_RES (1)..(1): Xaa is C or S
  MOD_RES (15)..(16)..(17)..(18)..(19): Xaa is A or G
  MOD_RES (20)..(21)..(22)..(23): Xaa is A or G or is absent

SEQ ID NO: 58169 - protein, 36 aa, Artificial Sequence; identical to SEQ ID NO: 8830
  GFR-binding peptide
  MOD_RES (2)..(3)..(35): Xaa is C or S

SEQ ID NO: 58170 - protein, 39 aa, Artificial Sequence; identical to SEQ ID NO: 8832
  GFR-binding peptide
  MOD_RES (7)..(7): Xaa is C or S
  MOD_RES (21)..(22)..(23)..(24)..(25): Xaa is A or G
  MOD_RES (26)..(27)..(28)..(29): Xaa is A or G or is absent

SEQ ID NO: 58171 - protein, 36 aa, Artificial Sequence; identical to SEQ ID NO: 30195
  GFR-binding peptide
  MOD_RES (1)..(2)..(34)..(36): Xaa is C or S

SEQ ID NO: 58172 - protein, 33 aa, Artificial Sequence
  GFR-binding peptide
  MOD_RES (1)..(1): Xaa is C or S
  MOD_RES (15)..(16)..(17)..(18)..(19): Xaa is A or G
  MOD_RES (20)..(21)..(22)..(23): Xaa is A or G or is absent
XTPTKMNAISMLYFXXXXXXXXXLKKYRGMVVD

SEQ ID NO: 58173 - protein, 40 aa, Artificial Sequence; identical to SEQ ID NO: 31170
  GFR-binding peptide
  MOD_RES (4)..(5)..(37)..(39): Xaa is C or S

SEQ ID NO: 58174 - protein, 37 aa, Artificial Sequence
  GFR-binding peptide
  MOD_RES (1)..(2)..(35)..(37): Xaa is C or S
  MOD_RES (16)..(17)..(18)..(19)..(20): Xaa is A or G
  MOD_RES (21)..(22)..(23)..(24): Xaa is A or G or is absent
XXAPVKTNAISMLYFXXXXXXXXXLKKYRMIVEEXGX

SEQ ID NO: 58175 - protein, 38 aa, Artificial Sequence; identical to SEQ ID NO: 9756
  GFR-binding peptide
  MOD_RES (1)..(35)..(37): Xaa is C or S
  MOD_RES (15)..(16)..(17)..(18)..(19): Xaa is A or G
  MOD_RES (20)..(21)..(22)..(23): Xaa is A or G or is absent

SEQ ID NO: 58176 - protein, 37 aa, Artificial Sequence; identical to SEQ ID NO: 8842
  GFR-binding peptide
  MOD_RES (3)..(4): Xaa is C or S
  MOD_RES (18)..(19)..(20)..(21)..(22): Xaa is A or G
  MOD_RES (23)..(24)..(25)..(26): Xaa is A or G or is absent

SEQ ID NO: 58177 - protein, 38 aa, Artificial Sequence
  GFR-binding peptide
  MOD_RES (2)..(3)..(35)..(37): Xaa is C or S
PXXTPTKMNAISMLYFNDKQQIILKKYRGMVVDRXGXS

SEQ ID NO: 58178 - protein, 33 aa, Artificial Sequence
  GFR-binding peptide
  MOD_RES (1)..(2)..(33): Xaa is C or S
XXAPVKTNAISMLYFDNGRVLLLKKYRMIVEEX

SEQ ID NO: 58179 - protein, 39 aa, Artificial Sequence
  GFR-binding peptide
  MOD_RES (6)..(7): Xaa is C or S
  MOD_RES (21)..(22)..(23)..(24)..(25): Xaa is A or G
  MOD_RES (26)..(27)..(28)..(29): Xaa is A or G or is absent
HVPKPXXAPTKLNAISVLYFXXXXXXXXXLKKYRNMVVR

SEQ ID NO: 58180 - protein, 39 aa, Artificial Sequence; identical to SEQ ID NO: 31178
  GFR-binding peptide
  MOD_RES (1)..(2)..(36)..(38): Xaa is C or S
  MOD_RES (16)..(17)..(18)..(19)..(20): Xaa is A or G
  MOD_RES (21)..(22)..(23)..(24): Xaa is A or G or is absent

SEQ ID NO: 58181 - protein, 37 aa, Artificial Sequence; identical to SEQ ID NO: 7952
  GFR-binding peptide
  MOD_RES (1)..(35)..(37): Xaa is C or S
  MOD_RES (15)..(16)..(17)..(18)..(19): Xaa is A or G
  MOD_RES (20)..(21)..(22)..(23): Xaa is A or G or is absent

SEQ ID NO: 58182 - protein, 38 aa, Artificial Sequence; identical to SEQ ID NO: 7954
  GFR-binding peptide
  MOD_RES (2)..(3)..(37): Xaa is C or S
  MOD_RES (17)..(18)..(19)..(20)..(21): Xaa is A or G
  MOD_RES (22)..(23)..(24)..(25): Xaa is A or G or is absent

SEQ ID NO: 58183 - protein, 34 aa, Artificial Sequence; identical to SEQ ID NO: 31179
  GFR-binding peptide
  MOD_RES (32)..(34): Xaa is C or S

SEQ ID NO: 58184 - protein, 41 aa, Artificial Sequence; identical to SEQ ID NO: 17035
  GFR-binding peptide
  MOD_RES (5)..(6)..(40): Xaa is C or S
  MOD_RES (20)..(21)..(22)..(23)..(24): Xaa is A or G
  MOD_RES (25)..(26)..(27)..(28): Xaa is A or G or is absent

SEQ ID NO: 58185 - protein, 35 aa, Artificial Sequence; identical to SEQ ID NO: 7088
  GFR-binding peptide
  MOD_RES (1)..(35): Xaa is C or S
  MOD_RES (15)..(16)..(17)..(18)..(19): Xaa is A or G
  MOD_RES (20)..(21)..(22)..(23): Xaa is A or G or is absent

SEQ ID NO: 58186 - protein, 39 aa, Artificial Sequence; identical to SEQ ID NO: 15243
  GFR-binding peptide
  MOD_RES (2)..(3)..(37)..(39): Xaa is C or S
  MOD_RES (17)..(18)..(19)..(20)..(21): Xaa is A or G
  MOD_RES (22)..(23)..(24)..(25): Xaa is A or G or is absent

SEQ ID NO: 58187 - protein, 35 aa, Artificial Sequence; identical to SEQ ID NO: 15246
  GFR-binding peptide
  MOD_RES (1)..(33)..(35): Xaa is C or S

SEQ ID NO: 58188 - protein, 34 aa, Artificial Sequence; identical to SEQ ID NO: 8851
  GFR-binding peptide
  MOD_RES (1)..(2): Xaa is C or S
  MOD_RES (16)..(17)..(18)..(19)..(20): Xaa is A or G
  MOD_RES (21)..(22)..(23)..(24): Xaa is A or G or is absent

SEQ ID NO: 58189 - protein, 37 aa, Artificial Sequence
  GFR-binding peptide
  MOD_RES (4)..(5): Xaa is C or S
  MOD_RES (19)..(20)..(21)..(22)..(23): Xaa is A or G
  MOD_RES (24)..(25)..(26)..(27): Xaa is A or G or is absent
PSTXXAPVKTNAISMLYFXXXXXXXXXLKKYRMIVEE

SEQ ID NO: 58190 - protein, 33 aa, Artificial Sequence; identical to SEQ ID NO: 8854
  GFR-binding peptide
  MOD_RES (14)..(15)..(16)..(17)..(18): Xaa is A or G
  MOD_RES (19)..(20)..(21)..(22): Xaa is A or G or is absent

SEQ ID NO: 58191 - protein, 37 aa, Artificial Sequence; identical to SEQ ID NO: 7962
  GFR-binding peptide
  MOD_RES (2)..(3)..(37): Xaa is C or S
  MOD_RES (17)..(18)..(19)..(20)..(21): Xaa is A or G
  MOD_RES (22)..(23)..(24)..(25): Xaa is A or G or is absent

SEQ ID NO: 58192 - protein, 32 aa, Artificial Sequence
  GFR-binding peptide
  MOD_RES (14)..(15)..(16)..(17)..(18): Xaa is A or G
  MOD_RES (19)..(20)..(21)..(22): Xaa is A or G or is absent
TPTKMNAISMLYFXXXXXXXXXLKKYRGMVVD

SEQ ID NO: 58193 - protein, 35 aa, Artificial Sequence; identical to SEQ ID NO: 9767
  GFR-binding peptide
  MOD_RES (1)..(2): Xaa is C or S
  MOD_RES (16)..(17)..(18)..(19)..(20): Xaa is A or G
  MOD_RES (21)..(22)..(23)..(24): Xaa is A or G or is absent

SEQ ID NO: 58194 - protein, 41 aa, Artificial Sequence
  GFR-binding peptide
  MOD_RES (3)..(4)..(38)..(40): Xaa is C or S
  MOD_RES (18)..(19)..(20)..(21)..(22): Xaa is A or G
  MOD_RES (23)..(24)..(25)..(26): Xaa is A or G or is absent
GPXXTPTKMNAISMLYFXXXXXXXXXLKKYRGMVVDRXGXS

SEQ ID NO: 58195 - protein, 37 aa, Artificial Sequence; identical to SEQ ID NO: 7969
  GFR-binding peptide
  MOD_RES (1)..(2)..(36): Xaa is C or S
  MOD_RES (16)..(17)..(18)..(19)..(20): Xaa is A or G
  MOD_RES (21)..(22)..(23)..(24): Xaa is A or G or is absent

SEQ ID NO: 58196 - protein, 33 aa, Artificial Sequence; identical to SEQ ID NO: 9775
  GFR-binding peptide
  MOD_RES (2)..(3): Xaa is C or S

SEQ ID NO: 58197 - protein, 31 aa, Artificial Sequence
  GFR-binding peptide
  MOD_RES (1)..(1): Xaa is C or S
XAPVKTNAISMLYFDNGRVLLLKKYRMIVEE

SEQ ID NO: 58198 - protein, 42 aa, Artificial Sequence; identical to SEQ ID NO: 7102
  GFR-binding peptide
  MOD_RES (6)..(7)..(39)..(41): Xaa is C or S

SEQ ID NO: 58199 - protein, 39 aa, Artificial Sequence; identical to SEQ ID NO: 8870
  GFR-binding peptide
  MOD_RES (2)..(3)..(37)..(39): Xaa is C or S
  MOD_RES (17)..(18)..(19)..(20)..(21): Xaa is A or G
  MOD_RES (22)..(23)..(24)..(25): Xaa is A or G or is absent

SEQ ID NO: 58200 - protein, 40 aa, Artificial Sequence; identical to SEQ ID NO: 31202
  GFR-binding peptide
  MOD_RES (34)..(35): Xaa is C or S
  MOD_RES (12)..(13)..(14)..(15)..(16): Xaa is A or G
  MOD_RES (17)..(18)..(19)..(20): Xaa is A or G or is absent

SEQ ID NO: 58201 - protein, 34 aa, Artificial Sequence; identical to SEQ ID NO: 2272
  GFR-binding peptide
  MOD_RES (13)..(14)..(15)..(16)..(17): Xaa is A or G
  MOD_RES (18)..(19)..(20)..(21): Xaa is A or G or is absent

SEQ ID NO: 58202 - protein, 31 aa, Artificial Sequence
  GFR-binding peptide
  MOD_RES (31)..(31): Xaa is C or S
SRVIMPIKGYVKPKRGVFYLINIPSLAQPVX

SEQ ID NO: 58203 - protein, 36 aa, Artificial Sequence
  GFR-binding peptide
  MOD_RES (31)..(32): Xaa is C or S
EVTMNEYKFKVVNKNEDLYLISIPEMKEPVXXPEPI

SEQ ID NO: 58204 - protein, 32 aa, Artificial Sequence
  GFR-binding peptide
  MOD_RES (31)..(32): Xaa is C or S
EVTMNRHKRLVVNKNEDYYLISTASMKEPVXX

SEQ ID NO: 58205 - protein, 42 aa, Artificial Sequence; identical to SEQ ID NO: 31207
  GFR-binding peptide
  MOD_RES (1)..(3)..(37)..(38): Xaa is C or S
  MOD_RES (15)..(16)..(17)..(18)..(19): Xaa is A or G
  MOD_RES (20)..(21)..(22)..(23): Xaa is A or G or is absent

SEQ ID NO: 58206 - protein, 38 aa, Artificial Sequence; identical to SEQ ID NO: 2278
  GFR-binding peptide
  MOD_RES (1)..(3)..(36)..(37): Xaa is C or S
  MOD_RES (14)..(15)..(16)..(17)..(18): Xaa is A or G
  MOD_RES (19)..(20)..(21)..(22): Xaa is A or G or is absent

SEQ ID NO: 58207 - protein, 40 aa, Artificial Sequence; identical to SEQ ID NO: 23263
  GFR-binding peptide
  MOD_RES (2)..(4)..(36)..(37): Xaa is C or S

SEQ ID NO: 58208 - protein, 38 aa, Artificial Sequence
  GFR-binding peptide
  MOD_RES (33)..(34): Xaa is C or S
  MOD_RES (11)..(12)..(13)..(14)..(15): Xaa is A or G
  MOD_RES (16)..(17)..(18)..(19): Xaa is A or G or is absent
SKVVMPIKGYXXXXXXXXXFYLINIPSLDQPVXXPSAS

SEQ ID NO: 58209 - protein, 39 aa, Artificial Sequence
  GFR-binding peptide
  MOD_RES (1)..(33)..(34): Xaa is C or S
XSEVTMNRYKKLVVNKNEDFYLISIANMKEPVXXPEPIG

SEQ ID NO: 58210 - protein, 36 aa, Artificial Sequence; identical to SEQ ID NO: 2280
  GFR-binding peptide
  MOD_RES (1)..(33)..(34): Xaa is C or S

SEQ ID NO: 58211 - protein, 39 aa, Artificial Sequence; identical to SEQ ID NO: 2281
  GFR-binding peptide
  MOD_RES (2)..(4)..(36)..(37): Xaa is C or S

SEQ ID NO: 58212 - protein, 32 aa, Artificial Sequence; identical to SEQ ID NO: 2282
  GFR-binding peptide
  MOD_RES (1)..(32): Xaa is C or S

SEQ ID NO: 58213 - protein, 37 aa, Artificial Sequence; identical to SEQ ID NO: 2283
  GFR-binding peptide
  MOD_RES (33)..(34): Xaa is C or S
  MOD_RES (11)..(12)..(13)..(14)..(15): Xaa is A or G
  MOD_RES (16)..(17)..(18)..(19): Xaa is A or G or is absent

SEQ ID NO: 58214 - protein, 35 aa, Artificial Sequence; identical to SEQ ID NO: 2285
  GFR-binding peptide
  MOD_RES (1)..(35): Xaa is C or S
  MOD_RES (13)..(14)..(15)..(16)..(17): Xaa is A or G
  MOD_RES (18)..(19)..(20)..(21): Xaa is A or G or is absent

SEQ ID NO: 58215 - protein, 39 aa, Artificial Sequence; identical to SEQ ID NO: 2286
  GFR-binding peptide
  MOD_RES (1)..(34)..(35): Xaa is C or S
  MOD_RES (12)..(13)..(14)..(15)..(16): Xaa is A or G
  MOD_RES (17)..(18)..(19)..(20): Xaa is A or G or is absent

SEQ ID NO: 58216 - protein, 33 aa, Artificial Sequence
  GFR-binding peptide
  MOD_RES (1)..(33): Xaa is C or S
XSEVVMDYHYKLVVNNASDKYLISIPSLRTPVX

SEQ ID NO: 58217 - protein, 32 aa, Artificial Sequence
  GFR-binding peptide
  MOD_RES (32)..(32): Xaa is C or S
SEVVMDEYKFKVVNNASDLYLISIPELRTPVX

SEQ ID NO: 58218 - protein, 35 aa, Artificial Sequence; identical to SEQ ID NO: 2288
  GFR-binding peptide
  MOD_RES (31)..(32): Xaa is C or S

SEQ ID NO: 58219 - protein, 35 aa, Artificial Sequence; identical to SEQ ID NO: 31225
  GFR-binding peptide
  MOD_RES (33)..(34): Xaa is C or S
  MOD_RES (11)..(12)..(13)..(14)..(15): Xaa is A or G
  MOD_RES (16)..(17)..(18)..(19): Xaa is A or G or is absent

SEQ ID NO: 58220 - protein, 36 aa, Artificial Sequence; identical to SEQ ID NO: 31228
  GFR-binding peptide
  MOD_RES (32)..(33): Xaa is C or S

SEQ ID NO: 58221 - protein, 42 aa, Artificial Sequence; identical to SEQ ID NO: 2293
  GFR-binding peptide
  MOD_RES (2)..(4)..(36)..(37): Xaa is C or S

SEQ ID NO: 58222 - protein, 37 aa, Artificial Sequence; identical to SEQ ID NO: 23277
  GFR-binding peptide
  MOD_RES (2)..(33)..(34): Xaa is C or S

SEQ ID NO: 58223 - protein, 33 aa, Artificial Sequence; identical to SEQ ID NO: 2296
  GFR-binding peptide
  MOD_RES (12)..(13)..(14)..(15)..(16): Xaa is A or G
  MOD_RES (17)..(18)..(19)..(20): Xaa is A or G or is absent

SEQ ID NO: 58224 - protein, 38 aa, Artificial Sequence; identical to SEQ ID NO: 2298
  GFR-binding peptide
  MOD_RES (1)..(35)..(36): Xaa is C or S
  MOD_RES (13)..(14)..(15)..(16)..(17): Xaa is A or G
  MOD_RES (18)..(19)..(20)..(21): Xaa is A or G or is absent

SEQ ID NO: 58225 - protein, 33 aa, Artificial Sequence
  GFR-binding peptide
  MOD_RES (1)..(32)..(33): Xaa is C or S
XSRVIMPIKGYVKPKRGVFYLINIPSLAQPVXX

SEQ ID NO: 58226 - protein, 39 aa, Artificial Sequence; identical to SEQ ID NO: 2299
  GFR-binding peptide
  MOD_RES (1)..(3)..(35)..(36): Xaa is C or S

SEQ ID NO: 58227 - protein, 34 aa, Artificial Sequence; identical to SEQ ID NO: 23285
  GFR-binding peptide
  MOD_RES (1)..(33)..(34): Xaa is C or S

SEQ ID NO: 58228 - protein, 32 aa, Artificial Sequence; identical to SEQ ID NO: 2302
  GFR-binding peptide
  MOD_RES (31)..(32): Xaa is C or S

SEQ ID NO: 58229 - protein, 41 aa, Artificial Sequence; identical to SEQ ID NO: 2304
  GFR-binding peptide
  MOD_RES (1)..(35)..(36): Xaa is C or S
  MOD_RES (13)..(14)..(15)..(16)..(17): Xaa is A or G
  MOD_RES (18)..(19)..(20)..(21): Xaa is A or G or is absent

SEQ ID NO: 58230 - protein, 43 aa, Artificial Sequence
  GFR-binding peptide
  MOD_RES (1)..(3)..(37)..(38): Xaa is C or S
  MOD_RES (15)..(16)..(17)..(18)..(19): Xaa is A or G
  MOD_RES (20)..(21)..(22)..(23): Xaa is A or G or is absent
XGXRDVVMGRHKRLXXXXXXXXXYYLMSTASMKTPTXXPGASG

SEQ ID NO: 58231 - protein, 43 aa, Artificial Sequence; identical to SEQ ID NO: 31238
  GFR-binding peptide
  MOD_RES (1)..(3)..(37)..(38): Xaa is C or S
  MOD_RES (15)..(16)..(17)..(18)..(19): Xaa is A or G
  MOD_RES (20)..(21)..(22)..(23): Xaa is A or G or is absent

SEQ ID NO: 58232 - protein, 39 aa, Artificial Sequence
  GFR-binding peptide
  MOD_RES (34)..(35): Xaa is C or S
  MOD_RES (12)..(13)..(14)..(15)..(16): Xaa is A or G
  MOD_RES (17)..(18)..(19)..(20): Xaa is A or G or is absent
ESVAMGRHKRLXXXXXXXXXYYLISTASLKTPVXXAKSA

SEQ ID NO: 58233 - protein, 35 aa, Artificial Sequence; identical to SEQ ID NO: 23291
  GFR-binding peptide
  MOD_RES (1)..(3)..(35): Xaa is C or S

SEQ ID NO: 58234 - protein, 44 aa, Artificial Sequence
  GFR-binding peptide
  MOD_RES (2)..(4)..(38)..(39): Xaa is C or S
  MOD_RES (16)..(17)..(18)..(19)..(20): Xaa is A or G
  MOD_RES (21)..(22)..(23)..(24): Xaa is A or G or is absent
SXGXRDVVMGEYKFKXXXXXXXXXLYLMSIPEMKTPTXXPGASG

SEQ ID NO: 58235 - protein, 36 aa, Artificial Sequence; identical to SEQ ID NO: 9808
  GFR-binding peptide
  MOD_RES (2)..(36): Xaa is C or S
  MOD_RES (14)..(15)..(16)..(17)..(18): Xaa is A or G
  MOD_RES (19)..(20)..(21)..(22): Xaa is A or G or is absent

SEQ ID NO: 58236 - protein, 40 aa, Artificial Sequence; identical to SEQ ID NO: 31240
  GFR-binding peptide
  MOD_RES (1)..(3)..(37): Xaa is C or S
  MOD_RES (15)..(16)..(17)..(18)..(19): Xaa is A or G
  MOD_RES (20)..(21)..(22)..(23): Xaa is A or G or is absent

SEQ ID NO: 58237 - protein, 43 aa, Artificial Sequence; identical to SEQ ID NO: 2309
  GFR-binding peptide
  MOD_RES (2)..(4)..(38)..(39): Xaa is C or S
  MOD_RES (16)..(17)..(18)..(19)..(20): Xaa is A or G
  MOD_RES (21)..(22)..(23)..(24): Xaa is A or G or is absent

SEQ ID NO: 58238 - protein, 38 aa, Artificial Sequence
  GFR-binding peptide
  MOD_RES (1)..(3)..(37)..(38): Xaa is C or S
  MOD_RES (15)..(16)..(17)..(18)..(19): Xaa is A or G
  MOD_RES (20)..(21)..(22)..(23): Xaa is A or G or is absent
XGXSEVVMDEYKFKXXXXXXXXXLYLISIPELRTPVXX

SEQ ID NO: 58239 - protein, 35 aa, Artificial Sequence; identical to SEQ ID NO: 2313
  GFR-binding peptide
  MOD_RES (1)..(33)..(34): Xaa is C or S

SEQ ID NO: 58240 - protein, 34 aa, Artificial Sequence
  GFR-binding peptide
  MOD_RES (1)..(32)..(33): Xaa is C or S
XSKVVMPIKGYVKPTRGVFYLINIPSLDQPVXXP

SEQ ID NO: 58241 - protein, 37 aa, Artificial Sequence
  GFR-binding peptide
  MOD_RES (32)..(33): Xaa is C or S
SEVTMNRYKKLVVNKNEDFYLISIANMKEPVXXPEPI

SEQ ID NO: 58242 - protein, 31 aa, Artificial Sequence; identical to SEQ ID NO: 23296
  GFR-binding peptide
  MOD_RES (31)..(31): Xaa is C or S

SEQ ID NO: 58243 - protein, 35 aa, Artificial Sequence
  GFR-binding peptide
  MOD_RES (32)..(33): Xaa is C or S
SEVTMNRHKRLVVNKNEDYYLISTASMKEPVXXPE

SEQ ID NO: 58244 - protein, 32 aa, Artificial Sequence; identical to SEQ ID NO: 2317
  GFR-binding peptide
  MOD_RES (1)..(1): Xaa is C or S

SEQ ID NO: 58245 - protein, 39 aa, Artificial Sequence; identical to SEQ ID NO: 2322
  GFR-binding peptide
  MOD_RES (2)..(4)..(38)..(39): Xaa is C or S
  MOD_RES (16)..(17)..(18)..(19)..(20): Xaa is A or G
  MOD_RES (21)..(22)..(23)..(24): Xaa is A or G or is absent

SEQ ID NO: 58246 - protein, 37 aa, Artificial Sequence; identical to SEQ ID NO: 2323
  GFR-binding peptide
  MOD_RES (2)..(4): Xaa is C or S
  MOD_RES (16)..(17)..(18)..(19)..(20): Xaa is A or G
  MOD_RES (21)..(22)..(23)..(24): Xaa is A or G or is absent

SEQ ID NO: 58247 - protein, 42 aa, Artificial Sequence; identical to SEQ ID NO: 31252
  GFR-binding peptide
  MOD_RES (2)..(4)..(38)..(39): Xaa is C or S
  MOD_RES (16)..(17)..(18)..(19)..(20): Xaa is A or G
  MOD_RES (21)..(22)..(23)..(24): Xaa is A or G or is absent

SEQ ID NO: 58248 - protein, 38 aa, Artificial Sequence; identical to SEQ ID NO: 2325
  GFR-binding peptide
  MOD_RES (2)..(34)..(35): Xaa is C or S

SEQ ID NO: 58249 - protein, 37 aa, Artificial Sequence; identical to SEQ ID NO: 31254
  GFR-binding peptide
  MOD_RES (31)..(32): Xaa is C or S

SEQ ID NO: 58250 - protein, 37 aa, Artificial Sequence
  GFR-binding peptide
  MOD_RES (31)..(32): Xaa is C or S
DVVMGYHYKLIIQQKDNKYLMSIPSMKTPTXXPGASG

SEQ ID NO: 58251 - protein, 35 aa, Artificial Sequence; identical to SEQ ID NO: 23306
  GFR-binding peptide
  MOD_RES (34)..(35): Xaa is C or S
  MOD_RES (12)..(13)..(14)..(15)..(16): Xaa is A or G
  MOD_RES (17)..(18)..(19)..(20): Xaa is A or G or is absent

SEQ ID NO: 58252 - protein, 37 aa, Artificial Sequence
  GFR-binding peptide
  MOD_RES (33)..(34): Xaa is C or S
  MOD_RES (11)..(12)..(13)..(14)..(15): Xaa is A or G
  MOD_RES (16)..(17)..(18)..(19): Xaa is A or G or is absent
EVVMDRHKRLXXXXXXXXXYYLISTASLRAPVXXSAP

SEQ ID NO: 58253 - protein, 36 aa, Artificial Sequence; identical to SEQ ID NO: 2329
  GFR-binding peptide
  MOD_RES (1)..(35)..(36): Xaa is C or S
  MOD_RES (13)..(14)..(15)..(16)..(17): Xaa is A or G
  MOD_RES (18)..(19)..(20)..(21): Xaa is A or G or is absent

SEQ ID NO: 58254 - protein, 39 aa, Artificial Sequence; identical to SEQ ID NO: 31259
  GFR-binding peptide
  MOD_RES (34)..(35): Xaa is C or S
  MOD_RES (12)..(13)..(14)..(15)..(16): Xaa is A or G
  MOD_RES (17)..(18)..(19)..(20): Xaa is A or G or is absent

SEQ ID NO: 58255 - protein, 34 aa, Artificial Sequence; identical to SEQ ID NO: 56192
  GFR-binding peptide
  MOD_RES (1)..(32)..(33): Xaa is C or S

SEQ ID NO: 58256 - protein, 40 aa, Artificial Sequence; identical to SEQ ID NO: 23316
  GFR-binding peptide
  MOD_RES (1)..(3)..(35)..(36): Xaa is C or S

SEQ ID NO: 58257 - protein, 40 aa, Artificial Sequence; identical to SEQ ID NO: 2333
  GFR-binding peptide
  MOD_RES (1)..(3)..(36)..(37): Xaa is C or S

SEQ ID NO: 58258 - protein, 36 aa, Artificial Sequence; identical to SEQ ID NO: 2335
  GFR-binding peptide
  MOD_RES (1)..(3): Xaa is C or S
  MOD_RES (15)..(16)..(17)..(18)..(19): Xaa is A or G
  MOD_RES (20)..(21)..(22)..(23): Xaa is A or G or is absent

SEQ ID NO: 58259 - protein, 43 aa, Artificial Sequence; identical to SEQ ID NO: 23320
  GFR-binding peptide
  MOD_RES (2)..(4)..(38)..(39): Xaa is C or S
  MOD_RES (16)..(17)..(18)..(19)..(20): Xaa is A or G
  MOD_RES (21)..(22)..(23)..(24): Xaa is A or G or is absent

SEQ ID NO: 58260 - protein, 37 aa, Artificial Sequence; identical to SEQ ID NO: 23322
  GFR-binding peptide
  MOD_RES (2)..(35)..(36): Xaa is C or S
  MOD_RES (13)..(14)..(15)..(16)..(17): Xaa is A or G
  MOD_RES (18)..(19)..(20)..(21): Xaa is A or G or is absent

SEQ ID NO: 58261 - protein, 38 aa, Artificial Sequence
  GFR-binding peptide
  MOD_RES (2)..(35)..(36): Xaa is C or S
  MOD_RES (13)..(14)..(15)..(16)..(17): Xaa is A or G
  MOD_RES (18)..(19)..(20)..(21): Xaa is A or G or is absent
GXEEVIMRHKRLXXXXXXXXXYYLMSTASTKVPAXXTS

SEQ ID NO: 58262 - protein, 37 aa, Artificial Sequence; identical to SEQ ID NO: 31275
  GFR-binding peptide
  MOD_RES (2)..(34)..(35): Xaa is C or S

SEQ ID NO: 58263 - protein, 36 aa, Artificial Sequence; identical to SEQ ID NO: 31276
  GFR-binding peptide
  MOD_RES (33)..(34): Xaa is C or S
  MOD_RES (11)..(12)..(13)..(14)..(15): Xaa is A or G
  MOD_RES (16)..(17)..(18)..(19): Xaa is A or G or is absent

SEQ ID NO: 58264 - protein, 37 aa, Artificial Sequence; identical to SEQ ID NO: 23325
  GFR-binding peptide
  MOD_RES (2)..(34)..(35): Xaa is C or S

SEQ ID NO: 58265 - protein, 30 aa, Artificial Sequence
  GFR-binding peptide
SKVIMPIKGYIKPTKGIFYLINIPSLDQSV

SEQ ID NO: 58266 - protein, 30 aa, Artificial Sequence; identical to SEQ ID NO: 2342
  GFR-binding peptide

SEQ ID NO: 58267 - protein, 34 aa, Artificial Sequence
  GFR-binding peptide
  MOD_RES (31)..(32): Xaa is C or S
SKVVMPIKGYVKPTRGVFYLINIPSLDQPVXXPS

SEQ ID NO: 58268 - protein, 37 aa, Artificial Sequence
  GFR-binding peptide
  MOD_RES (32)..(33): Xaa is C or S
SEVTMNEYKFKVVNKNEDLYLISIPEMKEPVXXPEPI

SEQ ID NO: 58269 - protein, 43 aa, Artificial Sequence; identical to SEQ ID NO: 2348
  GFR-binding peptide
  MOD_RES (2)..(4)..(38)..(39): Xaa is C or S
  MOD_RES (16)..(17)..(18)..(19)..(20): Xaa is A or G
  MOD_RES (21)..(22)..(23)..(24): Xaa is A or G or is absent

SEQ ID NO: 58270 - protein, 36 aa, Artificial Sequence; identical to SEQ ID NO: 23332
  GFR-binding peptide
  MOD_RES (34)..(35): Xaa is C or S
  MOD_RES (12)..(13)..(14)..(15)..(16): Xaa is A or G
  MOD_RES (17)..(18)..(19)..(20): Xaa is A or G or is absent

SEQ ID NO: 58271 - protein, 34 aa, Artificial Sequence
  GFR-binding peptide
  MOD_RES (1)..(34): Xaa is C or S
  MOD_RES (12)..(13)..(14)..(15)..(16): Xaa is A or G
  MOD_RES (17)..(18)..(19)..(20): Xaa is A or G or is absent
XEEVIMRHKRLXXXXXXXXXYYLMSTASTKVPAX

SEQ ID NO: 58272 - protein, 41 aa, Artificial Sequence
  GFR-binding peptide
  MOD_RES (2)..(36)..(37): Xaa is C or S
  MOD_RES (14)..(15)..(16)..(17)..(18): Xaa is A or G
  MOD_RES (19)..(20)..(21)..(22): Xaa is A or G or is absent
AXSEVTMNYHYKLXXXXXXXXXKYLISIPSMKEPVXXPEPI

SEQ ID NO: 58273 - protein, 33 aa, Artificial Sequence; identical to SEQ ID NO: 2358
  GFR-binding peptide
  MOD_RES (33)..(33): Xaa is C or S
  MOD_RES (11)..(12)..(13)..(14)..(15): Xaa is A or G
  MOD_RES (16)..(17)..(18)..(19): Xaa is A or G or is absent

SEQ ID NO: 58274 - protein, 38 aa, Artificial Sequence; identical to SEQ ID NO: 2359
  GFR-binding peptide
  MOD_RES (1)..(34)..(35): Xaa is C or S
  MOD_RES (12)..(13)..(14)..(15)..(16): Xaa is A or G
  MOD_RES (17)..(18)..(19)..(20): Xaa is A or G or is absent

SEQ ID NO: 58275 - protein, 37 aa, Artificial Sequence; identical to SEQ ID NO: 2360
  GFR-binding peptide
  MOD_RES (1)..(3)..(37): Xaa is C or S
  MOD_RES (15)..(16)..(17)..(18)..(19): Xaa is A or G
  MOD_RES (20)..(21)..(22)..(23): Xaa is A or G or is absent

SEQ ID NO: 58276 - protein, 34 aa, Artificial Sequence; identical to SEQ ID NO: 31305
  GFR-binding peptide
  MOD_RES (2)..(34): Xaa is C or S

SEQ ID NO: 58277 - protein, 39 aa, Artificial Sequence
  GFR-binding peptide
  MOD_RES (33)..(34): Xaa is C or S
  MOD_RES (11)..(12)..(13)..(14)..(15): Xaa is A or G
  MOD_RES (16)..(17)..(18)..(19): Xaa is A or G or is absent
EVVMDRHKRLXXXXXXXXXYYLISTASLRAPVXXSAPAA

SEQ ID NO: 58278 - protein, 39 aa, Artificial Sequence; identical to SEQ ID NO: 2361
  GFR-binding peptide
  MOD_RES (2)..(36)..(37): Xaa is C or S
  MOD_RES (14)..(15)..(16)..(17)..(18): Xaa is A or G
  MOD_RES (19)..(20)..(21)..(22): Xaa is A or G or is absent

SEQ ID NO: 58279 - protein, 34 aa, Artificial Sequence; identical to SEQ ID NO: 56229
  GFR-binding peptide
  MOD_RES (2)..(4): Xaa is C or S

SEQ ID NO: 58280 - protein, 40 aa, Artificial Sequence; identical to SEQ ID NO: 31309
  GFR-binding peptide
  MOD_RES (2)..(4)..(36)..(37): Xaa is C or S

SEQ ID NO: 58281 - protein, 39 aa, Artificial Sequence; identical to SEQ ID NO: 2363
  GFR-binding peptide
  MOD_RES (33)..(34): Xaa is C or S
  MOD_RES (11)..(12)..(13)..(14)..(15): Xaa is A or G
  MOD_RES (16)..(17)..(18)..(19): Xaa is A or G or is absent

SEQ ID NO: 58282 - protein, 39 aa, Artificial Sequence; identical to SEQ ID NO: 23346
  GFR-binding peptide
  MOD_RES (33)..(34): Xaa is C or S
  MOD_RES (11)..(12)..(13)..(14)..(15): Xaa is A or G
  MOD_RES (16)..(17)..(18)..(19): Xaa is A or G or is absent

SEQ ID NO: 58283 - protein, 33 aa, Artificial Sequence; identical to SEQ ID NO: 23347
  GFR-binding peptide
  MOD_RES (1)..(33): Xaa is C or S

SEQ ID NO: 58284 - protein, 39 aa, Artificial Sequence; identical to SEQ ID NO: 56235
  GFR-binding peptide
  MOD_RES (2)..(36)..(37): Xaa is C or S
  MOD_RES (14)..(15)..(16)..(17)..(18): Xaa is A or G
  MOD_RES (19)..(20)..(21)..(22): Xaa is A or G or is absent

SEQ ID NO: 58285 - protein, 36 aa, Artificial Sequence
  GFR-binding peptide
  MOD_RES (33)..(34): Xaa is C or S
  MOD_RES (11)..(12)..(13)..(14)..(15): Xaa is A or G
  MOD_RES (16)..(17)..(18)..(19): Xaa is A or G or is absent
EVTMNYHYKLXXXXXXXXXKYLISIPSMKEPVXXPE

SEQ ID NO: 58286 - protein, 32 aa, Artificial Sequence; identical to SEQ ID NO: 31316
  GFR-binding peptide
  MOD_RES (32)..(32): Xaa is C or S

SEQ ID NO: 58287 - protein, 33 aa, Artificial Sequence
  GFR-binding peptide
  MOD_RES (32)..(33): Xaa is C or S
SEVTMNRHKRLVVNKNEDYYLISTASMKEPVXX

SEQ ID NO: 58288 - protein, 36 aa, Artificial Sequence; identical to SEQ ID NO: 23348
  GFR-binding peptide
  MOD_RES (2)..(4)..(35)..(36): Xaa is C or S

SEQ ID NO: 58289 - protein, 37 aa, Artificial Sequence; identical to SEQ ID NO: 2370
  GFR-binding peptide
  MOD_RES (32)..(33): Xaa is C or S

SEQ ID NO: 58290 - protein, 41 aa, Artificial Sequence
  GFR-binding peptide
  MOD_RES (2)..(4)..(38)..(39): Xaa is C or S
  MOD_RES (16)..(17)..(18)..(19)..(20): Xaa is A or G
  MOD_RES (21)..(22)..(23)..(24): Xaa is A or G or is absent
RXAXSEVTMNRYKKLXXXXXXXXXFYLISIANMKEPVXXPE

SEQ ID NO: 58291 - protein, 38 aa, Artificial Sequence; identical to SEQ ID NO: 2374
  GFR-binding peptide
  MOD_RES (1)..(33)..(34): Xaa is C or S

SEQ ID NO: 58292 - protein, 39 aa, Artificial Sequence; identical to SEQ ID NO: 2376
  GFR-binding peptide
  MOD_RES (2)..(34)..(35): Xaa is C or S

SEQ ID NO: 58293 - protein, 42 aa, Artificial Sequence
  GFR-binding peptide
  MOD_RES (2)..(36)..(37): Xaa is C or S
  MOD_RES (14)..(15)..(16)..(17)..(18): Xaa is A or G
  MOD_RES (19)..(20)..(21)..(22): Xaa is A or G or is absent
AXSEVTMNPIKGYXXXXXXXXXFYLINIPSMKEPVXXPEPIG

SEQ ID NO: 58294 - protein, 37 aa, Artificial Sequence; identical to SEQ ID NO: 2378
  GFR-binding peptide
  MOD_RES (2)..(4)..(37): Xaa is C or S

SEQ ID NO: 58295 - protein, 35 aa, Artificial Sequence; identical to SEQ ID NO: 2384
  GFR-binding peptide
  MOD_RES (1)..(33)..(34): Xaa is C or S

SEQ ID NO: 58296 - protein, 40 aa, Artificial Sequence
  GFR-binding peptide
  MOD_RES (2)..(4)..(38)..(39): Xaa is C or S
  MOD_RES (16)..(17)..(18)..(19)..(20): Xaa is A or G
  MOD_RES (21)..(22)..(23)..(24): Xaa is A or G or is absent
RXAXSEVTMNRYKKLXXXXXXXXXFYLISIANMKEPVXXP

SEQ ID NO: 58297 - protein, 33 aa, Artificial Sequence
  GFR-binding peptide
  MOD_RES (12)..(13)..(14)..(15)..(16): Xaa is A or G
  MOD_RES (17)..(18)..(19)..(20): Xaa is A or G or is absent
SEVVMDYHYKLXXXXXXXXXKYLISIPSLRTPV

SEQ ID NO: 58298 - protein, 37 aa, Artificial Sequence; identical to SEQ ID NO: 2385
  GFR-binding peptide
  MOD_RES (31)..(32): Xaa is C or S

SEQ ID NO: 58299 - protein, 44 aa, Artificial Sequence; identical to SEQ ID NO: 2388
  GFR-binding peptide
  MOD_RES (1)..(3)..(38)..(39): Xaa is C or S
  MOD_RES (16)..(17)..(18)..(19)..(20): Xaa is A or G
  MOD_RES (21)..(22)..(23)..(24): Xaa is A or G or is absent

SEQ ID NO: 58300 - protein, 37 aa, Artificial Sequence
  GFR-binding peptide
  MOD_RES (2)..(33)..(34): Xaa is C or S
KXSKVVMPIKGYVKPTRGVFYLINIPSLDQPVXXPSA

SEQ ID NO: 58301 - protein, 39 aa, Artificial Sequence; identical to SEQ ID NO: 2389
  GFR-binding peptide
  MOD_RES (1)..(3)..(37)..(38): Xaa is C or S
  MOD_RES (15)..(16)..(17)..(18)..(19): Xaa is A or G
  MOD_RES (20)..(21)..(22)..(23): Xaa is A or G or is absent

SEQ ID NO: 58302 - protein, 40 aa, Artificial Sequence; identical to SEQ ID NO: 2391
  GFR-binding peptide
  MOD_RES (1)..(3)..(38)..(39): Xaa is C or S
  MOD_RES (16)..(17)..(18)..(19)..(20): Xaa is A or G
  MOD_RES (21)..(22)..(23)..(24): Xaa is A or G or is absent

SEQ ID NO: 58303 - protein, 35 aa, Artificial Sequence; identical to SEQ ID NO: 2393
  GFR-binding peptide
  MOD_RES (1)..(3)..(35): Xaa is C or S

SEQ ID NO: 58304 - protein, 41 aa, Artificial Sequence; identical to SEQ ID NO: 2394
  GFR-binding peptide
  MOD_RES (2)..(36)..(37): Xaa is C or S
  MOD_RES (14)..(15)..(16)..(17)..(18): Xaa is A or G
  MOD_RES (19)..(20)..(21)..(22): Xaa is A or G or is absent

SEQ ID NO: 58305 - protein, 41 aa, Artificial Sequence; identical to SEQ ID NO: 23366
  GFR-binding peptide
  MOD_RES (1)..(3)..(35)..(36): Xaa is C or S

SEQ ID NO: 58306 - protein, 44 aa, Artificial Sequence; identical to SEQ ID NO: 23367
  GFR-binding peptide
  MOD_RES (1)..(3)..(38)..(39): Xaa is C or S
  MOD_RES (16)..(17)..(18)..(19)..(20): Xaa is A or G
  MOD_RES (21)..(22)..(23)..(24): Xaa is A or G or is absent

SEQ ID NO: 58307 - protein, 39 aa, Artificial Sequence; identical to SEQ ID NO: 2395
  GFR-binding peptide
  MOD_RES (1)..(3)..(37)..(38): Xaa is C or S
  MOD_RES (15)..(16)..(17)..(18)..(19): Xaa is A or G
  MOD_RES (20)..(21)..(22)..(23): Xaa is A or G or is absent

SEQ ID NO: 58308 - protein, 35 aa, Artificial Sequence; identical to SEQ ID NO: 2397
  GFR-binding peptide
  MOD_RES (33)..(34): Xaa is C or S
  MOD_RES (11)..(12)..(13)..(14)..(15): Xaa is A or G
  MOD_RES (16)..(17)..(18)..(19): Xaa is A or G or is absent

SEQ ID NO: 58309 - protein, 39 aa, Artificial Sequence; identical to SEQ ID NO: 31343
  GFR-binding peptide
  MOD_RES (1)..(3)..(34)..(35): Xaa is C or S

SEQ ID NO: 58310 - protein, 36 aa, Artificial Sequence; identical to SEQ ID NO: 2398
  GFR-binding peptide
  MOD_RES (1)..(34)..(35): Xaa is C or S
  MOD_RES (12)..(13)..(14)..(15)..(16): Xaa is A or G
  MOD_RES (17)..(18)..(19)..(20): Xaa is A or G or is absent

SEQ ID NO: 58311 - protein, 42 aa, Artificial Sequence; identical to SEQ ID NO: 31346
  GFR-binding peptide
  MOD_RES (2)..(4)..(36)..(37): Xaa is C or S

SEQ ID NO: 58312 - protein, 37 aa, Artificial Sequence; identical to SEQ ID NO: 2399
  GFR-binding peptide
  MOD_RES (1)..(3)..(37): Xaa is C or S
  MOD_RES (15)..(16)..(17)..(18)..(19): Xaa is A or G
  MOD_RES (20)..(21)..(22)..(23): Xaa is A or G or is absent

SEQ ID NO: 58313 - protein, 34 aa, Artificial Sequence; identical to SEQ ID NO: 2400
  GFR-binding peptide
  MOD_RES (1)..(32)..(33): Xaa is C or S

SEQ ID NO: 58314 - protein, 38 aa, Artificial Sequence; identical to SEQ ID NO: 31350
  GFR-binding peptide
  MOD_RES (1)..(3)..(37)..(38): Xaa is C or S
  MOD_RES (15)..(16)..(17)..(18)..(19): Xaa is A or G
  MOD_RES (20)..(21)..(22)..(23): Xaa is A or G or is absent

SEQ ID NO: 58315 - protein, 36 aa, Artificial Sequence; identical to SEQ ID NO: 23372
  GFR-binding peptide
  MOD_RES (34)..(35): Xaa is C or S
  MOD_RES (12)..(13)..(14)..(15)..(16): Xaa is A or G
  MOD_RES (17)..(18)..(19)..(20): Xaa is A or G or is absent

SEQ ID NO: 58316 - protein, 37 aa, Artificial Sequence; identical to SEQ ID NO: 31359
  GFR-binding peptide
  MOD_RES (1)..(33)..(34): Xaa is C or S

SEQ ID NO: 58317 - protein, 34 aa, Artificial Sequence
  GFR-binding peptide
  MOD_RES (1)..(33)..(34): Xaa is C or S
XSEVTMNPIKGYVVNKNEDFYLINIPSMKEPVXX

SEQ ID NO: 58318 - protein, 40 aa, Artificial Sequence; identical to SEQ ID NO: 2405
  GFR-binding peptide
  MOD_RES (2)..(4)..(36)..(37): Xaa is C or S

SEQ ID NO: 58319 - protein, 37 aa, Artificial Sequence; identical to SEQ ID NO: 31365
  GFR-binding peptide
  MOD_RES (35)..(36): Xaa is C or S
  MOD_RES (13)..(14)..(15)..(16)..(17): Xaa is A or G
  MOD_RES (18)..(19)..(20)..(21): Xaa is A or G or is absent

SEQ ID NO: 58320 - protein, 38 aa, Artificial Sequence; identical to SEQ ID NO: 2407
  GFR-binding peptide
  MOD_RES (33)..(34): Xaa is C or S
  MOD_RES (11)..(12)..(13)..(14)..(15): Xaa is A or G
  MOD_RES (16)..(17)..(18)..(19): Xaa is A or G or is absent

SEQ ID NO: 58321 - protein, 31 aa, Artificial Sequence
  GFR-binding peptide
  MOD_RES (31)..(31): Xaa is C or S
DVVMGYHYKLIIQQKDNKYLMSIPSMKTPTX

SEQ ID NO: 58322 - protein, 42 aa, Artificial Sequence
  GFR-binding peptide
  MOD_RES (2)..(4)..(36)..(37): Xaa is C or S
RXGXSEVVMDRHKRLVVNNASDYYLISTASLRTPVXXTPPTS

SEQ ID NO: 58323 - protein, 42 aa, Artificial Sequence; identical to SEQ ID NO: 23389
  GFR-binding peptide
  MOD_RES (1)..(3)..(37)..(38): Xaa is C or S
  MOD_RES (15)..(16)..(17)..(18)..(19): Xaa is A or G
  MOD_RES (20)..(21)..(22)..(23): Xaa is A or G or is absent

SEQ ID NO: 58324 - protein, 34 aa, Artificial Sequence
  GFR-binding peptide
  MOD_RES (1)..(3)..(34): Xaa is C or S
XKXSRVIMPIKGYVKPKRGVFYLINIPSLAQPVX

SEQ ID NO: 58325 - protein, 40 aa, Artificial Sequence; identical to SEQ ID NO: 23391
  GFR-binding peptide
  MOD_RES (1)..(3)..(35)..(36): Xaa is C or S

SEQ ID NO: 58326 - protein, 38 aa, Artificial Sequence
  GFR-binding peptide
  MOD_RES (1)..(3)..(35)..(36): Xaa is C or S
XGXSEVVMDRHKRLVVNNASDYYLISTASLRTPVXXTP

SEQ ID NO: 58327 - protein, 38 aa, Artificial Sequence; identical to SEQ ID NO: 23393
  GFR-binding peptide
  MOD_RES (2)..(4)..(37)..(38): Xaa is C or S
  MOD_RES (15)..(16)..(17)..(18)..(19): Xaa is A or G
  MOD_RES (20)..(21)..(22)..(23): Xaa is A or G or is absent

SEQ ID NO: 58328 - protein, 40 aa, Artificial Sequence
  GFR-binding peptide
  MOD_RES (2)..(34)..(35): Xaa is C or S
GXRDVVMGYHYKLIIQQKDNKYLMSIPSMKTPTXXPGASG

SEQ ID NO: 58329 - protein, 40 aa, Artificial Sequence
  GFR-binding peptide
  MOD_RES (2)..(4)..(38)..(39): Xaa is C or S
  MOD_RES (16)..(17)..(18)..(19)..(20): Xaa is A or G
  MOD_RES (21)..(22)..(23)..(24): Xaa is A or G or is absent
RXAXSEVTMNEYKFKXXXXXXXXXLYLISIPEMKEPVXXP

SEQ ID NO: 58330 - protein, 43 aa, Artificial Sequence; identical to SEQ ID NO: 31372
  GFR-binding peptide
  MOD_RES (2)..(4)..(38)..(39): Xaa is C or S
  MOD_RES (16)..(17)..(18)..(19)..(20): Xaa is A or G
  MOD_RES (21)..(22)..(23)..(24): Xaa is A or G or is absent

SEQ ID NO: 58331 - protein, 37 aa, Artificial Sequence; identical to SEQ ID NO: 23395
  GFR-binding peptide
  MOD_RES (2)..(34)..(35): Xaa is C or S

SEQ ID NO: 58332 - protein, 38 aa, Artificial Sequence; identical to SEQ ID NO: 2417
  GFR-binding peptide
  MOD_RES (1)..(33)..(34): Xaa is C or S

SEQ ID NO: 58333 - protein, 37 aa, Artificial Sequence
  GFR-binding peptide
  MOD_RES (2)..(4)..(36)..(37): Xaa is C or S
RXAXSEVTMNEYKFKVVNKNEDLYLISIPEMKEPVXX

SEQ ID NO: 58334 - protein, 37 aa, Artificial Sequence; identical to SEQ ID NO: 2419
  GFR-binding peptide
  MOD_RES (1)..(3)..(34)..(35): Xaa is C or S

SEQ ID NO: 58335 - protein, 37 aa, Artificial Sequence
  GFR-binding peptide
  MOD_RES (1)..(3)..(35)..(36): Xaa is C or S
XGXSEVVMDEYKFKVVNNASDLYLISIPELRTPVXXT

SEQ ID NO: 58336 - protein, 38 aa, Artificial Sequence; identical to SEQ ID NO: 23400
  GFR-binding peptide
  MOD_RES (2)..(34)..(35): Xaa is C or S

SEQ ID NO: 58337 - protein, 34 aa, Artificial Sequence
  GFR-binding peptide
  MOD_RES (1)..(3)..(34): Xaa is C or S
XGXEEVIMYHYKLLLVRGNDKYLMSIPSTKVPAX

SEQ ID NO: 58338 - protein, 35 aa, Artificial Sequence; identical to SEQ ID NO: 2426
  GFR-binding peptide
  MOD_RES (2)..(2): Xaa is C or S
  MOD_RES (14)..(15)..(16)..(17)..(18): Xaa is A or G
  MOD_RES (19)..(20)..(21)..(22): Xaa is A or G or is absent

SEQ ID NO: 58339 - protein, 38 aa, Artificial Sequence; identical to SEQ ID NO: 56288
  GFR-binding peptide
  MOD_RES (2)..(34)..(35): Xaa is C or S

SEQ ID NO: 58340 - protein, 36 aa, Artificial Sequence; identical to SEQ ID NO: 2427
  GFR-binding peptide
  MOD_RES (1)..(33)..(34): Xaa is C or S

SEQ ID NO: 58341 - protein, 32 aa, Artificial Sequence; identical to SEQ ID NO: 2428
  GFR-binding peptide
  MOD_RES (32)..(32): Xaa is C or S

SEQ ID NO: 58342 - protein, 41 aa, Artificial Sequence; identical to SEQ ID NO: 56295
  GFR-binding peptide
  MOD_RES (1)..(3)..(36)..(37): Xaa is C or S
  MOD_RES (14)..(15)..(16)..(17)..(18): Xaa is A or G
  MOD_RES (19)..(20)..(21)..(22): Xaa is A or G or is absent

SEQ ID NO: 58343 - protein, 35 aa, Artificial Sequence; identical to SEQ ID NO: 2432
  GFR-binding peptide
  MOD_RES (1)..(33)..(34): Xaa is C or S

SEQ ID NO: 58344 - protein, 36 aa, Artificial Sequence
  GFR-binding peptide
  MOD_RES (1)..(32)..(33): Xaa is C or S
XSRVIMPIKGYVKPKRGVFYLINIPSLAQPVXXPAA

SEQ ID NO: 58345 - protein, 37 aa, Artificial Sequence; identical to SEQ ID NO: 2433
  GFR-binding peptide
  MOD_RES (2)..(36)..(37): Xaa is C or S
  MOD_RES (14)..(15)..(16)..(17)..(18): Xaa is A or G
  MOD_RES (19)..(20)..(21)..(22): Xaa is A or G or is absent

SEQ ID NO: 58346 - protein, 38 aa, Artificial Sequence
  GFR-binding peptide
  MOD_RES (32)..(33): Xaa is C or S
SRVVMNYHYKLIVNSSDDKYLVSIPSLKTPAXXPKPVH

SEQ ID NO: 58347 - protein, 40 aa, Artificial Sequence
  GFR-binding peptide
  MOD_RES (2)..(34)..(35): Xaa is C or S
AXSEVTMNRYKKLVVNKNEDFYLISIANMKEPVXXPEPIG

SEQ ID NO: 58348 - protein, 42 aa, Artificial Sequence; identical to SEQ ID NO: 2435
  GFR-binding peptide
  MOD_RES (1)..(3)..(37)..(38): Xaa is C or S
  MOD_RES (15)..(16)..(17)..(18)..(19): Xaa is A or G
  MOD_RES (20)..(21)..(22)..(23): Xaa is A or G or is absent

SEQ ID NO: 58349 - protein, 34 aa, Artificial Sequence
  GFR-binding peptide
  MOD_RES (32)..(33): Xaa is C or S
SEVVMDEYKFKVVNNASDLYLISIPELRTPVXXT

SEQ ID NO: 58350 - protein, 33 aa, Artificial Sequence; identical to SEQ ID NO: 2439
  GFR-binding peptide
  MOD_RES (31)..(32): Xaa is C or S

SEQ ID NO: 58351 - protein, 38 aa, Artificial Sequence; identical to SEQ ID NO: 23418
  GFR-binding peptide
  MOD_RES (1)..(35)..(36): Xaa is C or S
  MOD_RES (13)..(14)..(15)..(16)..(17): Xaa is A or G
  MOD_RES (18)..(19)..(20)..(21): Xaa is A or G or is absent

SEQ ID NO: 58352 - protein, 36 aa, Artificial Sequence
  GFR-binding peptide
  MOD_RES (2)..(4)..(36): Xaa is C or S
RXAXSEVTMNYHYKLVVNKNEDKYLISIPSMKEPVX

SEQ ID NO: 58353 - protein, 37 aa, Artificial Sequence; identical to SEQ ID NO: 23419
  GFR-binding peptide
  MOD_RES (33)..(34): Xaa is C or S
  MOD_RES (11)..(12)..(13)..(14)..(15): Xaa is A or G
  MOD_RES (16)..(17)..(18)..(19): Xaa is A or G or is absent

SEQ ID NO: 58354 - protein, 41 aa, Artificial Sequence
  GFR-binding peptide
  MOD_RES (2)..(36)..(37): Xaa is C or S
  MOD_RES (14)..(15)..(16)..(17)..(18): Xaa is A or G
  MOD_RES (19)..(20)..(21)..(22): Xaa is A or G or is absent
AXSEVTMNEYKFKXXXXXXXXXLYLISIPEMKEPVXXPEPI

SEQ ID NO: 58355 - protein, 36 aa, Artificial Sequence; identical to SEQ ID NO: 23420
  GFR-binding peptide
  MOD_RES (2)..(36): Xaa is C or S
  MOD_RES (14)..(15)..(16)..(17)..(18): Xaa is A or G
  MOD_RES (19)..(20)..(21)..(22): Xaa is A or G or is absent

SEQ ID NO: 58356 - protein, 36 aa, Artificial Sequence; identical to SEQ ID NO: 31408
  GFR-binding peptide
  MOD_RES (1)..(35)..(36): Xaa is C or S
  MOD_RES (13)..(14)..(15)..(16)..(17): Xaa is A or G
  MOD_RES (18)..(19)..(20)..(21): Xaa is A or G or is absent

SEQ ID NO: 58357 - protein, 38 aa, Artificial Sequence; identical to SEQ ID NO: 9939
  GFR-binding peptide
  MOD_RES (33)..(34): Xaa is C or S
  MOD_RES (11)..(12)..(13)..(14)..(15): Xaa is A or G
  MOD_RES (16)..(17)..(18)..(19): Xaa is A or G or is absent

SEQ ID NO: 58358 - protein, 43 aa, Artificial Sequence; identical to SEQ ID NO: 2443
  GFR-binding peptide
  MOD_RES (2)..(4)..(37)..(38): Xaa is C or S
  MOD_RES (15)..(16)..(17)..(18)..(19): Xaa is A or G
  MOD_RES (20)..(21)..(22)..(23): Xaa is A or G or is absent

SEQ ID NO: 58359 - protein, 34 aa, Artificial Sequence
  GFR-binding peptide
  MOD_RES (2)..(4): Xaa is C or S
SXKXSKVIMPIKGYIKPTKGIFYLINIPSLDQSV

SEQ ID NO: 58360 - protein, 35 aa, Artificial Sequence; identical to SEQ ID NO: 23421
  GFR-binding peptide
  MOD_RES (2)..(34)..(35): Xaa is C or S

SEQ ID NO: 58361 - protein, 37 aa, Artificial Sequence; identical to SEQ ID NO: 2445
  GFR-binding peptide
  MOD_RES (2)..(36): Xaa is C or S
  MOD_RES (14)..(15)..(16)..(17)..(18): Xaa is A or G
  MOD_RES (19)..(20)..(21)..(22): Xaa is A or G or is absent

SEQ ID NO: 58362 - protein, 39 aa, Artificial Sequence; identical to SEQ ID NO: 23423
  GFR-binding peptide
  MOD_RES (1)..(35)..(36): Xaa is C or S
  MOD_RES (13)..(14)..(15)..(16)..(17): Xaa is A or G
  MOD_RES (18)..(19)..(20)..(21): Xaa is A or G or is absent

SEQ ID NO: 58363 - protein, 37 aa, Artificial Sequence
  GFR-binding peptide
  MOD_RES (2)..(36)..(37): Xaa is C or S
  MOD_RES (14)..(15)..(16)..(17)..(18): Xaa is A or G
  MOD_RES (19)..(20)..(21)..(22): Xaa is A or G or is absent
AXSEVTMNEYKFKXXXXXXXXXLYLISIPEMKEPVXX

SEQ ID NO: 58364 - protein, 37 aa, Artificial Sequence; identical to SEQ ID NO: 23424
  GFR-binding peptide
  MOD_RES (2)..(36): Xaa is C or S
  MOD_RES (14)..(15)..(16)..(17)..(18): Xaa is A or G
  MOD_RES (19)..(20)..(21)..(22): Xaa is A or G or is absent

SEQ ID NO: 58365 - protein, 34 aa, Artificial Sequence; identical to SEQ ID NO: 9950
  GFR-binding peptide
  MOD_RES (32)..(33): Xaa is C or S

SEQ ID NO: 58366 - protein, 36 aa, Artificial Sequence; identical to SEQ ID NO: 2449
  GFR-binding peptide
  MOD_RES (1)..(3)..(36): Xaa is C or S

SEQ ID NO: 58367 - protein, 37 aa, Artificial Sequence; identical to SEQ ID NO: 23432
  GFR-binding peptide
  MOD_RES (1)..(3)..(35): Xaa is C or S

SEQ ID NO: 58368 - protein, 34 aa, Artificial Sequence
  GFR-binding peptide
  MOD_RES (1)..(3): Xaa is C or S
XGXRDVVMGRHKRLIIQQKDNYYLMSTASMKTPT

SEQ ID NO: 58369 - protein, 33 aa, Artificial Sequence; identical to SEQ ID NO: 2450
  GFR-binding peptide
  MOD_RES (32)..(32): Xaa is C or S

SEQ ID NO: 58370 - protein, 41 aa, Artificial Sequence; identical to SEQ ID NO: 2451
  GFR-binding peptide
  MOD_RES (1)..(3)..(37)..(38): Xaa is C or S
  MOD_RES (15)..(16)..(17)..(18)..(19): Xaa is A or G
  MOD_RES (20)..(21)..(22)..(23): Xaa is A or G or is absent

SEQ ID NO: 58371 - protein, 44 aa, Artificial Sequence; identical to SEQ ID NO: 56331
  GFR-binding peptide
  MOD_RES (2)..(4)..(38)..(39): Xaa is C or S
  MOD_RES (16)..(17)..(18)..(19)..(20): Xaa is A or G
  MOD_RES (21)..(22)..(23)..(24): Xaa is A or G or is absent

SEQ ID NO: 58372 - protein, 35 aa, Artificial Sequence; identical to SEQ ID NO: 2452
  GFR-binding peptide
  MOD_RES (2)..(2): Xaa is C or S
  MOD_RES (14)..(15)..(16)..(17)..(18): Xaa is A or G
  MOD_RES (19)..(20)..(21)..(22): Xaa is A or G or is absent

SEQ ID NO: 58373 - protein, 37 aa, Artificial Sequence
  GFR-binding peptide
  MOD_RES (2)..(34)..(35): Xaa is C or S
GXSEVVMDRHKRLVVNNASDYYLISTASLRTPVXXTP

SEQ ID NO: 58374 - protein, 40 aa, Artificial Sequence; identical to SEQ ID NO: 2454
  GFR-binding peptide
  MOD_RES (2)..(4)..(36)..(37): Xaa is C or S

SEQ ID NO: 58375 - protein, 37 aa, Artificial Sequence
  GFR-binding peptide
  MOD_RES (2)..(4)..(36)..(37): Xaa is C or S
SXGXRDVVMGRHKRLIIQQKDNYYLMSTASMKTPTXX

SEQ ID NO: 58376 - protein, 33 aa, Artificial Sequence; identical to SEQ ID NO: 2458
  GFR-binding peptide
  MOD_RES (33)..(33): Xaa is C or S
  MOD_RES (11)..(12)..(13)..(14)..(15): Xaa is A or G
  MOD_RES (16)..(17)..(18)..(19): Xaa is A or G or is absent

SEQ ID NO: 58377 - protein, 41 aa, Artificial Sequence; identical to SEQ ID NO: 23439
  GFR-binding peptide
  MOD_RES (1)..(3)..(37)..(38): Xaa is C or S
  MOD_RES (15)..(16)..(17)..(18)..(19): Xaa is A or G
  MOD_RES (20)..(21)..(22)..(23): Xaa is A or G or is absent

SEQ ID NO: 58378 - protein, 35 aa, Artificial Sequence; identical to SEQ ID NO: 2461
  GFR-binding peptide
  MOD_RES (35)..(35): Xaa is C or S
  MOD_RES (13)..(14)..(15)..(16)..(17): Xaa is A or G
  MOD_RES (18)..(19)..(20)..(21): Xaa is A or G or is absent

SEQ ID NO: 58379 - protein, 37 aa, Artificial Sequence
  GFR-binding peptide
  MOD_RES (1)..(3)..(34)..(35): Xaa is C or S
XGXEEVIMEYKFKLLVRGNDLYLMSIPETKVPAXXTS

SEQ ID NO: 58380 - protein, 36 aa, Artificial Sequence; identical to SEQ ID NO: 2463
  GFR-binding peptide
  MOD_RES (2)..(36): Xaa is C or S
  MOD_RES (14)..(15)..(16)..(17)..(18): Xaa is A or G
  MOD_RES (19)..(20)..(21)..(22): Xaa is A or G or is absent

SEQ ID NO: 58381 - protein, 39 aa, Artificial Sequence; identical to SEQ ID NO: 23443
  GFR-binding peptide
  MOD_RES (33)..(34): Xaa is C or S
  MOD_RES (11)..(12)..(13)..(14)..(15): Xaa is A or G
  MOD_RES (16)..(17)..(18)..(19): Xaa is A or G or is absent

SEQ ID NO: 58382 - protein, 44 aa, Artificial Sequence; identical to SEQ ID NO: 31431
  GFR-binding peptide
  MOD_RES (2)..(4)..(38)..(39): Xaa is C or S
  MOD_RES (16)..(17)..(18)..(19)..(20): Xaa is A or G
  MOD_RES (21)..(22)..(23)..(24): Xaa is A or G or is absent

SEQ ID NO: 58383 - protein, 41 aa, Artificial Sequence; identical to SEQ ID NO: 31434
  GFR-binding peptide
  MOD_RES (1)..(3)..(35)..(36): Xaa is C or S

SEQ ID NO: 58384 - protein, 33 aa, Artificial Sequence; identical to SEQ ID NO: 31435
  GFR-binding peptide
  MOD_RES (33)..(33): Xaa is C or S
  MOD_RES (11)..(12)..(13)..(14)..(15): Xaa is A or G
  MOD_RES (16)..(17)..(18)..(19): Xaa is A or G or is absent

SEQ ID NO: 58385 - protein, 38 aa, Artificial Sequence
  GFR-binding peptide
  MOD_RES (1)..(3)..(35)..(36): Xaa is C or S
XGXESVAMGRHKRLYTVVGKDYYLISTASLKTPVXXAK

SEQ ID NO: 58386 - protein, 38 aa, Artificial Sequence
  GFR-binding peptide
  MOD_RES (2)..(4)..(37)..(38): Xaa is C or S
  MOD_RES (15)..(16)..(17)..(18)..(19): Xaa is A or G
  MOD_RES (20)..(21)..(22)..(23): Xaa is A or G or is absent
LXGXEEVIMEYKFKXXXXXXXXXLYLMSIPETKVPAXX

SEQ ID NO: 58387 - protein, 40 aa, Artificial Sequence; identical to SEQ ID NO: 23447
  GFR-binding peptide
  MOD_RES (1)..(3)..(37)..(38): Xaa is C or S
  MOD_RES (15)..(16)..(17)..(18)..(19): Xaa is A or G
  MOD_RES (20)..(21)..(22)..(23): Xaa is A or G or is absent

SEQ ID NO: 58388 - protein, 39 aa, Artificial Sequence; identical to SEQ ID NO: 2468
  GFR-binding peptide
  MOD_RES (33)..(34): Xaa is C or S
  MOD_RES (11)..(12)..(13)..(14)..(15): Xaa is A or G
  MOD_RES (16)..(17)..(18)..(19): Xaa is A or G or is absent

SEQ ID NO: 58389 - protein, 37 aa, Artificial Sequence; identical to SEQ ID NO: 2472
  GFR-binding peptide
  MOD_RES (32)..(33): Xaa is C or S

SEQ ID NO: 58390 - protein, 40 aa, Artificial Sequence; identical to SEQ ID NO: 2475
  GFR-binding peptide
  MOD_RES (1)..(3)..(34)..(35): Xaa is C or S

SEQ ID NO: 58391 - protein, 33 aa, Artificial Sequence
  GFR-binding peptide
  MOD_RES (1)..(1): Xaa is C or S
  MOD_RES (12)..(13)..(14)..(15)..(16): Xaa is A or G
  MOD_RES (17)..(18)..(19)..(20): Xaa is A or G or is absent
XEEVIMEYKFKXXXXXXXXXLYLMSIPETKVPA

SEQ ID NO: 58392 - protein, 38 aa, Artificial Sequence; identical to SEQ ID NO: 2477
  GFR-binding peptide
  MOD_RES (2)..(4): Xaa is C or S
  MOD_RES (17)..(18)..(19)..(20)..(21): Xaa is A or G
  MOD_RES (22)..(23)..(24)..(25): Xaa is A or G or is absent

SEQ ID NO: 58393 - protein, 37 aa, Artificial Sequence; identical to SEQ ID NO: 2481
  GFR-binding peptide
  MOD_RES (1)..(3)..(35)..(36): Xaa is C or S

SEQ ID NO: 58394 - protein, 35 aa, Artificial Sequence; identical to SEQ ID NO: 2482
  GFR-binding peptide
  MOD_RES (1)..(1): Xaa is C or S
  MOD_RES (14)..(15)..(16)..(17)..(18): Xaa is A or G
  MOD_RES (19)..(20)..(21)..(22): Xaa is A or G or is absent

SEQ ID NO: 58395 - protein, 33 aa, Artificial Sequence
  GFR-binding peptide
  MOD_RES (12)..(13)..(14)..(15)..(16): Xaa is A or G
  MOD_RES (17)..(18)..(19)..(20): Xaa is A or G or is absent
SEVVMDEYKFKXXXXXXXXXLYLISIPELRTPV

SEQ ID NO: 58396 - protein, 39 aa, Artificial Sequence; identical to SEQ ID NO: 23463
  GFR-binding peptide
  MOD_RES (1)..(3)..(37)..(38): Xaa is C or S
  MOD_RES (15)..(16)..(17)..(18)..(19): Xaa is A or G
  MOD_RES (20)..(21)..(22)..(23): Xaa is A or G or is absent

SEQ ID NO: 58397 - protein, 41 aa, Artificial Sequence; identical to SEQ ID NO: 2483
  GFR-binding peptide
  MOD_RES (2)..(4)..(36)..(37): Xaa is C or S

SEQ ID NO: 58398 - protein, 37 aa, Artificial Sequence
  GFR-binding peptide
  MOD_RES (1)..(3)..(34)..(35): Xaa is C or S
XKXSRVIMPIKGYVKPKRGVFYLINIPSLAQPVXXPA

SEQ ID NO: 58399 - protein, 36 aa, Artificial Sequence
  GFR-binding peptide
  MOD_RES (31)..(32): Xaa is C or S
EEVIMEYKFKLLVRGNDLYLMSIPETKVPAXXTSPV

SEQ ID NO: 58400 - protein, 33 aa, Artificial Sequence; identical to SEQ ID NO: 2486
  GFR-binding peptide
  MOD_RES (1)..(33): Xaa is C or S

SEQ ID NO: 58401 - protein, 39 aa, Artificial Sequence; identical to SEQ ID NO: 2487
  GFR-binding peptide
  MOD_RES (2)..(4)..(35)..(36): Xaa is C or S

SEQ ID NO: 58402 - protein, 39 aa, Artificial Sequence; identical to SEQ ID NO: 2489
  GFR-binding peptide
  MOD_RES (34)..(35): Xaa is C or S
  MOD_RES (12)..(13)..(14)..(15)..(16): Xaa is A or G
  MOD_RES (17)..(18)..(19)..(20): Xaa is A or G or is absent

SEQ ID NO: 58403 - protein, 35 aa, Artificial Sequence; identical to SEQ ID NO: 56379
  GFR-binding peptide
  MOD_RES (2)..(35): Xaa is C or S
  MOD_RES (13)..(14)..(15)..(16)..(17): Xaa is A or G
  MOD_RES (18)..(19)..(20)..(21): Xaa is A or G or is absent

SEQ ID NO: 58404 - protein, 35 aa, Artificial Sequence
  GFR-binding peptide
  MOD_RES (1)..(33)..(34): Xaa is C or S
XSEVVMDRHKRLVVNNASDYYLISTASLRTPVXXT

SEQ ID NO: 58405 - protein, 40 aa, Artificial Sequence; identical to SEQ ID NO: 2491
  GFR-binding peptide
  MOD_RES (2)..(4)..(35)..(36): Xaa is C or S

SEQ ID NO: 58406 - protein, 36 aa, Artificial Sequence
  GFR-binding peptide
  MOD_RES (2)..(34)..(35): Xaa is C or S
GXSEVVMDEYKFKVVNNASDLYLISIPELRTPVXXT

SEQ ID NO: 58407 - protein, 43 aa, Artificial Sequence; identical to SEQ ID NO: 2492
  GFR-binding peptide
  MOD_RES (2)..(4)..(38)..(39): Xaa is C or S
  MOD_RES (16)..(17)..(18)..(19)..(20): Xaa is A or G
  MOD_RES (21)..(22)..(23)..(24): Xaa is A or G or is absent

SEQ ID NO: 58408 - protein, 39 aa, Artificial Sequence; identical to SEQ ID NO: 23471
  GFR-binding peptide
  MOD_RES (2)..(4)..(38)..(39): Xaa is C or S
  MOD_RES (16)..(17)..(18)..(19)..(20): Xaa is A or G
  MOD_RES (21)..(22)..(23)..(24): Xaa is A or G or is absent

SEQ ID NO: 58409 - protein, 41 aa, Artificial Sequence; identical to SEQ ID NO: 31461
  GFR-binding peptide
  MOD_RES (2)..(36)..(37): Xaa is C or S
  MOD_RES (14)..(15)..(16)..(17)..(18): Xaa is A or G
  MOD_RES (19)..(20)..(21)..(22): Xaa is A or G or is absent

SEQ ID NO: 58410 - protein, 36 aa, Artificial Sequence; identical to SEQ ID NO: 31464
  GFR-binding peptide
  MOD_RES (2)..(36): Xaa is C or S
  MOD_RES (14)..(15)..(16)..(17)..(18): Xaa is A or G
  MOD_RES (19)..(20)..(21)..(22): Xaa is A or G or is absent

SEQ ID NO: 58411 - protein, 38 aa, Artificial Sequence; identical to SEQ ID NO: 2496
  GFR-binding peptide
  MOD_RES (34)..(35): Xaa is C or S
  MOD_RES (12)..(13)..(14)..(15)..(16): Xaa is A or G
  MOD_RES (17)..(18)..(19)..(20): Xaa is A or G or is absent

SEQ ID NO: 58412 - protein, 38 aa, Artificial Sequence; identical to SEQ ID NO: 2497
  GFR-binding peptide
  MOD_RES (2)..(34)..(35): Xaa is C or S

SEQ ID NO: 58413 - protein, 37 aa, Artificial Sequence; identical to SEQ ID NO: 31465
  GFR-binding peptide
  MOD_RES (33)..(34): Xaa is C or S
  MOD_RES (11)..(12)..(13)..(14)..(15): Xaa is A or G
  MOD_RES (16)..(17)..(18)..(19): Xaa is A or G or is absent

SEQ ID NO: 58414 - protein, 31 aa, Artificial Sequence
  GFR-binding peptide
  MOD_RES (31)..(31): Xaa is C or S
DVVMGRHKRLIIQQKDNYYLMSTASMKTPTX

SEQ ID NO: 58415 - protein, 37 aa, Artificial Sequence; identical to SEQ ID NO: 2501
  GFR-binding peptide
  MOD_RES (33)..(34): Xaa is C or S
  MOD_RES (11)..(12)..(13)..(14)..(15): Xaa is A or G
  MOD_RES (16)..(17)..(18)..(19): Xaa is A or G or is absent

SEQ ID NO: 58416 - protein, 37 aa, Artificial Sequence; identical to SEQ ID NO: 23481
  GFR-binding peptide
  MOD_RES (2)..(36)..(37): Xaa is C or S
  MOD_RES (14)..(15)..(16)..(17)..(18): Xaa is A or G
  MOD_RES (19)..(20)..(21)..(22): Xaa is A or G or is absent

SEQ ID NO: 58417 - protein, 31 aa, Artificial Sequence; identical to SEQ ID NO: 31470
  GFR-binding peptide
  MOD_RES (1)..(1): Xaa is C or S

SEQ ID NO: 58418 - protein, 38 aa, Artificial Sequence; identical to SEQ ID NO: 2504
  GFR-binding peptide
  MOD_RES (2)..(4)..(38): Xaa is C or S
  MOD_RES (16)..(17)..(18)..(19)..(20): Xaa is A or G
  MOD_RES (21)..(22)..(23)..(24): Xaa is A or G or is absent

SEQ ID NO: 58419 - protein, 38 aa, Artificial Sequence; identical to SEQ ID NO: 2505
  GFR-binding peptide
  MOD_RES (2)..(35)..(36): Xaa is C or S
  MOD_RES (13)..(14)..(15)..(16)..(17): Xaa is A or G
  MOD_RES (18)..(19)..(20)..(21): Xaa is A or G or is absent

SEQ ID NO: 58420 - protein, 32 aa, Artificial Sequence; identical to SEQ ID NO: 2506
  GFR-binding peptide
  MOD_RES (31)..(31): Xaa is C or S

SEQ ID NO: 58421 - protein, 35 aa, Artificial Sequence; identical to SEQ ID NO: 2508
  GFR-binding peptide
  MOD_RES (33)..(33): Xaa is C or S
  MOD_RES (11)..(12)..(13)..(14)..(15): Xaa is A or G
  MOD_RES (16)..(17)..(18)..(19): Xaa is A or G or is absent

SEQ ID NO: 58422 - protein, 39 aa, Artificial Sequence; identical to SEQ ID NO: 31474
  GFR-binding peptide
  MOD_RES (1)..(3)..(35)..(36): Xaa is C or S

SEQ ID NO: 58423 - protein, 34 aa, Artificial Sequence; identical to SEQ ID NO: 23491
  GFR-binding peptide
  MOD_RES (1)..(1): Xaa is C or S
  MOD_RES (13)..(14)..(15)..(16)..(17): Xaa is A or G
  MOD_RES (18)..(19)..(20)..(21): Xaa is A or G or is absent

SEQ ID NO: 58424 - protein, 41 aa, Artificial Sequence
  GFR-binding peptide
  MOD_RES (2)..(36)..(37): Xaa is C or S
  MOD_RES (14)..(15)..(16)..(17)..(18): Xaa is A or G
  MOD_RES (19)..(20)..(21)..(22): Xaa is A or G or is absent
GXRDVVMGRHKRLXXXXXXXXXYYLMSTASMKTPTXXPGAS

SEQ ID NO: 58425 - protein, 35 aa, Artificial Sequence; identical to SEQ ID NO: 23493
  GFR-binding peptide
  MOD_RES (1)..(34)..(35): Xaa is C or S

SEQ ID NO: 58426 - protein, 39 aa, Artificial Sequence; identical to SEQ ID NO: 2512
  GFR-binding peptide
  MOD_RES (1)..(33)..(34): Xaa is C or S

SEQ ID NO: 58427 - protein, 34 aa, Artificial Sequence; identical to SEQ ID NO: 56399
  GFR-binding peptide
  MOD_RES (32)..(33): Xaa is C or S

SEQ ID NO: 58428 - protein, 38 aa, Artificial Sequence; identical to SEQ ID NO: 2513
  GFR-binding peptide
  MOD_RES (1)..(3)..(35)..(36): Xaa is C or S

SEQ ID NO: 58429 - protein, 39 aa, Artificial Sequence; identical to SEQ ID NO: 2514
  GFR-binding peptide
  MOD_RES (35)..(36): Xaa is C or S
  MOD_RES (13)..(14)..(15)..(16)..(17): Xaa is A or G
  MOD_RES (18)..(19)..(20)..(21): Xaa is A or G or is absent

SEQ ID NO: 58430 - protein, 37 aa, Artificial Sequence; identical to SEQ ID NO: 31481
  GFR-binding peptide
  MOD_RES (2)..(36)..(37): Xaa is C or S
  MOD_RES (14)..(15)..(16)..(17)..(18): Xaa is A or G
  MOD_RES (19)..(20)..(21)..(22): Xaa is A or G or is absent

SEQ ID NO: 58431 - protein, 37 aa, Artificial Sequence; identical to SEQ ID NO: 31483
  GFR-binding peptide
  MOD_RES (1)..(33)..(34): Xaa is C or S

SEQ ID NO: 58432 - protein, 41 aa, Artificial Sequence; identical to SEQ ID NO: 31484
  GFR-binding peptide
  MOD_RES (2)..(4)..(36)..(37): Xaa is C or S

SEQ ID NO: 58433 - protein, 39 aa, Artificial Sequence; identical to SEQ ID NO: 31485
  GFR-binding peptide
  MOD_RES (34)..(35): Xaa is C or S
  MOD_RES (12)..(13)..(14)..(15)..(16): Xaa is A or G
  MOD_RES (17)..(18)..(19)..(20): Xaa is A or G or is absent

SEQ ID NO: 58434 - protein, 42 aa, Artificial Sequence; identical to SEQ ID NO: 2517
  GFR-binding peptide
  MOD_RES (1)..(3)..(37): Xaa is C or S
  MOD_RES (15)..(16)..(17)..(18)..(19): Xaa is A or G
  MOD_RES (20)..(21)..(22)..(23): Xaa is A or G or is absent

SEQ ID NO: 58435 - protein, 36 aa, Artificial Sequence; identical to SEQ ID NO: 31486
  GFR-binding peptide
  MOD_RES (1)..(3): Xaa is C or S
  MOD_RES (15)..(16)..(17)..(18)..(19): Xaa is A or G
  MOD_RES (20)..(21)..(22)..(23): Xaa is A or G or is absent

SEQ ID NO: 58436 - protein, 38 aa, Artificial Sequence; identical to SEQ ID NO: 56408
  GFR-binding peptide
  MOD_RES (34)..(35): Xaa is C or S
  MOD_RES (12)..(13)..(14)..(15)..(16): Xaa is A or G
  MOD_RES (17)..(18)..(19)..(20): Xaa is A or G or is absent

SEQ ID NO: 58437 - protein, 41 aa, Artificial Sequence; identical to SEQ ID NO: 23500
  GFR-binding peptide
  MOD_RES (1)..(3)..(36)..(37): Xaa is C or S
  MOD_RES (14)..(15)..(16)..(17)..(18): Xaa is A or G
  MOD_RES (19)..(20)..(21)..(22): Xaa is A or G or is absent

SEQ ID NO: 58438 - protein, 33 aa, Artificial Sequence; identical to SEQ ID NO: 31488
  GFR-binding peptide
  MOD_RES (2)..(33): Xaa is C or S

SEQ ID NO: 58439 - protein, 37 aa, Artificial Sequence
  GFR-binding peptide
  MOD_RES (1)..(33)..(34): Xaa is C or S
XSEVVMDRHKRLVVNNASDYYLISTASLRTPVXXTPP

SEQ ID NO: 58440 - protein, 34 aa, Artificial Sequence; identical to SEQ ID NO: 31490
  GFR-binding peptide
  MOD_RES (1)..(1): Xaa is C or S
  MOD_RES (13)..(14)..(15)..(16)..(17): Xaa is A or G
  MOD_RES (18)..(19)..(20)..(21): Xaa is A or G or is absent

SEQ ID NO: 58441 - protein, 32 aa, Artificial Sequence; identical to SEQ ID NO: 2520
  GFR-binding peptide
  MOD_RES (2)..(2): Xaa is C or S

SEQ ID NO: 58442 - protein, 38 aa, Artificial Sequence
  GFR-binding peptide
  MOD_RES (1)..(33)..(34): Xaa is C or S
XSEVTMNYHYKLVVNKNEDKYLISIPSMKEPVXXPEPI

SEQ ID NO: 58443 - protein, 34 aa, Artificial Sequence; identical to SEQ ID NO: 2521
  GFR-binding peptide
  MOD_RES (34)..(34): Xaa is C or S
  MOD_RES (12)..(13)..(14)..(15)..(16): Xaa is A or G
  MOD_RES (17)..(18)..(19)..(20): Xaa is A or G or is absent

SEQ ID NO: 58444 - protein, 40 aa, Artificial Sequence; identical to SEQ ID NO: 23504
  GFR-binding peptide
  MOD_RES (34)..(35): Xaa is C or S
  MOD_RES (12)..(13)..(14)..(15)..(16): Xaa is A or G
  MOD_RES (17)..(18)..(19)..(20): Xaa is A or G or is absent

SEQ ID NO: 58445 - protein, 36 aa, Artificial Sequence
  GFR-binding peptide
  MOD_RES (33)..(34): Xaa is C or S
  MOD_RES (11)..(12)..(13)..(14)..(15): Xaa is A or G
  MOD_RES (16)..(17)..(18)..(19): Xaa is A or G or is absent
EVTMNRHKRLXXXXXXXXXYYLISTASMKEPVXXPE

SEQ ID NO: 58446 - protein, 35 aa, Artificial Sequence; identical to SEQ ID NO: 31495
  GFR-binding peptide
  MOD_RES (33)..(34): Xaa is C or S
  MOD_RES (11)..(12)..(13)..(14)..(15): Xaa is A or G
  MOD_RES (16)..(17)..(18)..(19): Xaa is A or G or is absent

SEQ ID NO: 58447 - protein, 35 aa, Artificial Sequence; identical to SEQ ID NO: 31497
  GFR-binding peptide
  MOD_RES (1)..(34)..(35): Xaa is C or S
  MOD_RES (12)..(13)..(14)..(15)..(16): Xaa is A or G
  MOD_RES (17)..(18)..(19)..(20): Xaa is A or G or is absent

SEQ ID NO: 58448 - protein, 37 aa, Artificial Sequence
  GFR-binding peptide
  MOD_RES (1)..(3)..(37): Xaa is C or S
  MOD_RES (15)..(16)..(17)..(18)..(19): Xaa is A or G
  MOD_RES (20)..(21)..(22)..(23): Xaa is A or G or is absent
XGXSEVVMDYHYKLXXXXXXXXXKYLISIPSLRTPVX

SEQ ID NO: 58449 - protein, 38 aa, Artificial Sequence
  GFR-binding peptide
  MOD_RES (2)..(36)..(37): Xaa is C or S
  MOD_RES (14)..(15)..(16)..(17)..(18): Xaa is A or G
  MOD_RES (19)..(20)..(21)..(22): Xaa is A or G or is absent
GXRDVVMGYHYKLXXXXXXXXXKYLMSIPSMKTPTXXP

SEQ ID NO: 58450 - protein, 39 aa, Artificial Sequence
  GFR-binding peptide
  MOD_RES (2)..(4)..(37)..(38): Xaa is C or S
  MOD_RES (15)..(16)..(17)..(18)..(19): Xaa is A or G
  MOD_RES (20)..(21)..(22)..(23): Xaa is A or G or is absent
SXKXSKVIMPIKGYXXXXXXXXXFYLINIPSLDQSVXXP

SEQ ID NO: 58451 - protein, 35 aa, Artificial Sequence; identical to SEQ ID NO: 2528
  GFR-binding peptide
  MOD_RES (2)..(34): Xaa is C or S

SEQ ID NO: 58452 - protein, 35 aa, Artificial Sequence; identical to SEQ ID NO: 10025
  GFR-binding peptide
  MOD_RES (1)..(33)..(34): Xaa is C or S

SEQ ID NO: 58453 - protein, 37 aa, Artificial Sequence; identical to SEQ ID NO: 23510
  GFR-binding peptide
  MOD_RES (2)..(4)..(36)..(37): Xaa is C or S

SEQ ID NO: 58454 - protein, 36 aa, Artificial Sequence; identical to SEQ ID NO: 2529
  GFR-binding peptide
  MOD_RES (1)..(33)..(34): Xaa is C or S

SEQ ID NO: 58455 - protein, 36 aa, Artificial Sequence; identical to SEQ ID NO: 2532
  GFR-binding peptide
  MOD_RES (34)..(35): Xaa is C or S
  MOD_RES (12)..(13)..(14)..(15)..(16): Xaa is A or G
  MOD_RES (17)..(18)..(19)..(20): Xaa is A or G or is absent

SEQ ID NO: 58456 - protein, 35 aa, Artificial Sequence; identical to SEQ ID NO: 23515
  GFR-binding peptide
  MOD_RES (1)..(3)..(34)..(35): Xaa is C or S

SEQ ID NO: 58457 - protein, 34 aa, Artificial Sequence; identical to SEQ ID NO: 2533
  GFR-binding peptide
  MOD_RES (32)..(33): Xaa is C or S

SEQ ID NO: 58458 - protein, 34 aa, Artificial Sequence
  GFR-binding peptide
  MOD_RES (1)..(33)..(34): Xaa is C or S
XRDVVMGYHYKLIIQQKDNKYLMSIPSMKTPTXX

SEQ ID NO: 58459 - protein, 33 aa, Artificial Sequence; identical to SEQ ID NO: 2537
  GFR-binding peptide
  MOD_RES (2)..(2): Xaa is C or S

SEQ ID NO: 58460 - protein, 36 aa, Artificial Sequence; identical to SEQ ID NO: 2538
  GFR-binding peptide
  MOD_RES (1)..(3)..(35)..(36): Xaa is C or S

SEQ ID NO: 58461 - protein, 34 aa, Artificial Sequence; identical to SEQ ID NO: 56440
  GFR-binding peptide
  MOD_RES (1)..(1): Xaa is C or S
  MOD_RES (13)..(14)..(15)..(16)..(17): Xaa is A or G
  MOD_RES (18)..(19)..(20)..(21): Xaa is A or G or is absent

SEQ ID NO: 58462 - protein, 37 aa, Artificial Sequence; identical to SEQ ID NO: 2539
  GFR-binding peptide
  MOD_RES (2)..(33)..(34): Xaa is C or S

SEQ ID NO: 58463 - protein, 38 aa, Artificial Sequence; identical to SEQ ID NO: 2546
  GFR-binding peptide
  MOD_RES (1)..(35)..(36): Xaa is C or S
  MOD_RES (13)..(14)..(15)..(16)..(17): Xaa is A or G
  MOD_RES (18)..(19)..(20)..(21): Xaa is A or G or is absent

SEQ ID NO: 58464 - protein, 36 aa, Artificial Sequence; identical to SEQ ID NO: 23532
  GFR-binding peptide
  MOD_RES (2)..(4)..(36): Xaa is C or S

SEQ ID NO: 58465 - protein, 41 aa, Artificial Sequence; identical to SEQ ID NO: 2551
  GFR-binding peptide
  MOD_RES (2)..(4)..(38)..(39): Xaa is C or S
  MOD_RES (16)..(17)..(18)..(19)..(20): Xaa is A or G
  MOD_RES (21)..(22)..(23)..(24): Xaa is A or G or is absent

SEQ ID NO: 58466 - protein, 33 aa, Artificial Sequence; identical to SEQ ID NO: 56455
  GFR-binding peptide
  MOD_RES (1)..(3): Xaa is C or S

SEQ ID NO: 58467 - protein, 35 aa, Artificial Sequence; identical to SEQ ID NO: 2552
  GFR-binding peptide
  MOD_RES (2)..(34)..(35): Xaa is C or S

SEQ ID NO: 58468 - protein, 38 aa, Artificial Sequence
  GFR-binding peptide
  MOD_RES (2)..(36)..(37): Xaa is C or S
  MOD_RES (14)..(15)..(16)..(17)..(18): Xaa is A or G
  MOD_RES (19)..(20)..(21)..(22): Xaa is A or G or is absent
AXSEVTMNYHYKLXXXXXXXXXKYLISIPSMKEPVXXP

SEQ ID NO: 58469 - protein, 33 aa, Artificial Sequence; identical to SEQ ID NO: 56456
  GFR-binding peptide
  MOD_RES (31)..(32): Xaa is C or S

SEQ ID NO: 58470 - protein, 36 aa, Artificial Sequence; identical to SEQ ID NO: 2554
  GFR-binding peptide
  MOD_RES (32)..(33): Xaa is C or S

SEQ ID NO: 58471 - protein, 33 aa, Artificial Sequence; identical to SEQ ID NO: 2555
  GFR-binding peptide
  MOD_RES (31)..(32): Xaa is C or S

SEQ ID NO: 58472 - protein, 39 aa, Artificial Sequence
  GFR-binding peptide
  MOD_RES (1)..(33)..(34): Xaa is C or S
XSEVTMNEYKFKVVNKNEDLYLISIPEMKEPVXXPEPIG

SEQ ID NO: 58473 - protein, 43 aa, Artificial Sequence; identical to SEQ ID NO: 23542
  GFR-binding peptide
  MOD_RES (1)..(3)..(38)..(39): Xaa is C or S
  MOD_RES (16)..(17)..(18)..(19)..(20): Xaa is A or G
  MOD_RES (21)..(22)..(23)..(24): Xaa is A or G or is absent

SEQ ID NO: 58474 - protein, 36 aa, Artificial Sequence; identical to SEQ ID NO: 23543
  GFR-binding peptide
  MOD_RES (2)..(4): Xaa is C or S
  MOD_RES (15)..(16)..(17)..(18)..(19): Xaa is A or G
  MOD_RES (20)..(21)..(22)..(23): Xaa is A or G or is absent

SEQ ID NO: 58475 - protein, 36 aa, Artificial Sequence; identical to SEQ ID NO: 2562
  GFR-binding peptide
  MOD_RES (2)..(4)..(36): Xaa is C or S

SEQ ID NO: 58476 - protein, 38 aa, Artificial Sequence; identical to SEQ ID NO: 31535
  GFR-binding peptide
  MOD_RES (2)..(36): Xaa is C or S
  MOD_RES (14)..(15)..(16)..(17)..(18): Xaa is A or G
  MOD_RES (19)..(20)..(21)..(22): Xaa is A or G or is absent

SEQ ID NO: 58477 - protein, 32 aa, Artificial Sequence
  GFR-binding peptide
  MOD_RES (31)..(32): Xaa is C or S
EVTMNEYKFKVVNKNEDLYLISIPEMKEPVXX

SEQ ID NO: 58478 - protein, 36 aa, Artificial Sequence; identical to SEQ ID NO: 23554
  GFR-binding peptide
  MOD_RES (34)..(35): Xaa is C or S
  MOD_RES (12)..(13)..(14)..(15)..(16): Xaa is A or G
  MOD_RES (17)..(18)..(19)..(20): Xaa is A or G or is absent

SEQ ID NO: 58479 - protein, 38 aa, Artificial Sequence; identical to SEQ ID NO: 2564
  GFR-binding peptide
  MOD_RES (1)..(34)..(35): Xaa is C or S

SEQ ID NO: 58480 - protein, 38 aa, Artificial Sequence
  GFR-binding peptide
  MOD_RES (33)..(34): Xaa is C or S
  MOD_RES (11)..(12)..(13)..(14)..(15): Xaa is A or G
  MOD_RES (16)..(17)..(18)..(19): Xaa is A or G or is absent
DVVMGEYKFKXXXXXXXXXLYLMSIPEMKTPTXXPGAS

SEQ ID NO: 58481 - protein, 40 aa, Artificial Sequence; identical to SEQ ID NO: 2565
  GFR-binding peptide
  MOD_RES (1)..(3)..(35)..(36): Xaa is C or S

SEQ ID NO: 58482 - protein, 34 aa, Artificial Sequence; identical to SEQ ID NO: 2567
  GFR-binding peptide
  MOD_RES (32)..(33): Xaa is C or S

SEQ ID NO: 58483 - protein, 39 aa, Artificial Sequence; identical to SEQ ID NO: 2568
  GFR-binding peptide
  MOD_RES (2)..(35)..(36): Xaa is C or S

SEQ ID NO: 58484 - protein, 35 aa, Artificial Sequence; identical to SEQ ID NO: 2569
  GFR-binding peptide
  MOD_RES (1)..(33)..(34): Xaa is C or S

SEQ ID NO: 58485 - protein, 39 aa, Artificial Sequence; identical to SEQ ID NO: 2571
  GFR-binding peptide
  MOD_RES (33)..(34): Xaa is C or S
  MOD_RES (11)..(12)..(13)..(14)..(15): Xaa is A or G
  MOD_RES (16)..(17)..(18)..(19): Xaa is A or G or is absent

SEQ ID NO: 58486 - protein, 37 aa, Artificial Sequence; identical to SEQ ID NO: 31552
  GFR-binding peptide
  MOD_RES (33)..(33): Xaa is C or S
  MOD_RES (11)..(12)..(13)..(14)..(15): Xaa is A or G
  MOD_RES (16)..(17)..(18)..(19): Xaa is A or G or is absent

SEQ ID NO: 58487 - protein, 37 aa, Artificial Sequence; identical to SEQ ID NO: 56479
  GFR-binding peptide
  MOD_RES (1)..(3)..(35)..(36): Xaa is C or S

SEQ ID NO: 58488 - protein, 40 aa, Artificial Sequence; identical to SEQ ID NO: 23570
  GFR-binding peptide
  MOD_RES (1)..(34)..(35): Xaa is C or S
  MOD_RES (12)..(13)..(14)..(15)..(16): Xaa is A or G
  MOD_RES (17)..(18)..(19)..(20): Xaa is A or G or is absent

SEQ ID NO: 58489 - protein, 42 aa, Artificial Sequence; identical to SEQ ID NO: 2575
  GFR-binding peptide
  MOD_RES (2)..(36)..(37): Xaa is C or S
  MOD_RES (14)..(15)..(16)..(17)..(18): Xaa is A or G
  MOD_RES (19)..(20)..(21)..(22): Xaa is A or G or is absent

SEQ ID NO: 58490 - protein, 39 aa, Artificial Sequence; identical to SEQ ID NO: 2576
  GFR-binding peptide
  MOD_RES (1)..(35)..(36): Xaa is C or S
  MOD_RES (13)..(14)..(15)..(16)..(17): Xaa is A or G
  MOD_RES (18)..(19)..(20)..(21): Xaa is A or G or is absent

SEQ ID NO: 58491 - protein, 36 aa, Artificial Sequence; identical to SEQ ID NO: 2577
  GFR-binding peptide
  MOD_RES (2)..(4): Xaa is C or S
  MOD_RES (15)..(16)..(17)..(18)..(19): Xaa is A or G
  MOD_RES (20)..(21)..(22)..(23): Xaa is A or G or is absent

SEQ ID NO: 58492 - protein, 36 aa, Artificial Sequence
  GFR-binding peptide
  MOD_RES (31)..(32): Xaa is C or S
EVTMNRHKRLVVNKNEDYYLISTASMKEPVXXPEPI

SEQ ID NO: 58493 - protein, 42 aa, Artificial Sequence; identical to SEQ ID NO: 2581
  GFR-binding peptide
  MOD_RES (1)..(3)..(37)..(38): Xaa is C or S
  MOD_RES (15)..(16)..(17)..(18)..(19): Xaa is A or G
  MOD_RES (20)..(21)..(22)..(23): Xaa is A or G or is absent

SEQ ID NO: 58494 - protein, 35 aa, Artificial Sequence; identical to SEQ ID NO: 23578
  GFR-binding peptide
  MOD_RES (1)..(35): Xaa is C or S
  MOD_RES (13)..(14)..(15)..(16)..(17): Xaa is A or G
  MOD_RES (18)..(19)..(20)..(21): Xaa is A or G or is absent

SEQ ID NO: 58495 - protein, 36 aa, Artificial Sequence; identical to SEQ ID NO: 2582
  GFR-binding peptide
  MOD_RES (1)..(3): Xaa is C or S
  MOD_RES (15)..(16)..(17)..(18)..(19): Xaa is A or G
  MOD_RES (20)..(21)..(22)..(23): Xaa is A or G or is absent

SEQ ID NO: 58496 - protein, 39 aa, Artificial Sequence; identical to SEQ ID NO: 23580
  GFR-binding peptide
  MOD_RES (1)..(3)..(37)..(38): Xaa is C or S
  MOD_RES (15)..(16)..(17)..(18)..(19): Xaa is A or G
  MOD_RES (20)..(21)..(22)..(23): Xaa is A or G or is absent

SEQ ID NO: 58497 - protein, 42 aa, Artificial Sequence; identical to SEQ ID NO: 23581
  GFR-binding peptide
  MOD_RES (2)..(36)..(37): Xaa is C or S
  MOD_RES (14)..(15)..(16)..(17)..(18): Xaa is A or G
  MOD_RES (19)..(20)..(21)..(22): Xaa is A or G or is absent

SEQ ID NO: 58498 - protein, 37 aa, Artificial Sequence; identical to SEQ ID NO: 23584
  GFR-binding peptide
  MOD_RES (1)..(35)..(36): Xaa is C or S
  MOD_RES (13)..(14)..(15)..(16)..(17): Xaa is A or G
  MOD_RES (18)..(19)..(20)..(21): Xaa is A or G or is absent

SEQ ID NO: 58499 - protein, 38 aa, Artificial Sequence; identical to SEQ ID NO: 2587
  GFR-binding peptide
  MOD_RES (2)..(4)..(35)..(36): Xaa is C or S

SEQ ID NO: 58500 - protein, 42 aa, Artificial Sequence; identical to SEQ ID NO: 23586
  GFR-binding peptide
  MOD_RES (2)..(36)..(37): Xaa is C or S
  MOD_RES (14)..(15)..(16)..(17)..(18): Xaa is A or G
  MOD_RES (19)..(20)..(21)..(22): Xaa is A or G or is absent

SEQ ID NO: 58501 - protein, 39 aa, Artificial Sequence
  GFR-binding peptide
  MOD_RES (1)..(35)..(36): Xaa is C or S
  MOD_RES (13)..(14)..(15)..(16)..(17): Xaa is A or G
  MOD_RES (18)..(19)..(20)..(21): Xaa is A or G or is absent
XRDVVMGRHKRLXXXXXXXXXYYLMSTASMKTPTXXPGA

SEQ ID NO: 58502 - protein, 33 aa, Artificial Sequence; identical to SEQ ID NO: 31566
  GFR-binding peptide
  MOD_RES (31)..(32): Xaa is C or S

SEQ ID NO: 58503 - protein, 41 aa, Artificial Sequence; identical to SEQ ID NO: 23587
  GFR-binding peptide
  MOD_RES (2)..(4)..(36)..(37): Xaa is C or S

SEQ ID NO: 58504 - protein, 41 aa, Artificial Sequence; identical to SEQ ID NO: 23588
  GFR-binding peptide
  MOD_RES (2)..(4)..(38)..(39): Xaa is C or S
  MOD_RES (16)..(17)..(18)..(19)..(20): Xaa is A or G
  MOD_RES (21)..(22)..(23)..(24): Xaa is A or G or is absent

SEQ ID NO: 58505 - protein, 38 aa, Artificial Sequence; identical to SEQ ID NO: 23590
  GFR-binding peptide
  MOD_RES (32)..(33): Xaa is C or S

SEQ ID NO: 58506 - protein, 43 aa, Artificial Sequence; identical to SEQ ID NO: 2591
  GFR-binding peptide
  MOD_RES (2)..(4)..(39)..(40): Xaa is C or S
  MOD_RES (17)..(18)..(19)..(20)..(21): Xaa is A or G
  MOD_RES (22)..(23)..(24)..(25): Xaa is A or G or is absent

SEQ ID NO: 58507 - protein, 35 aa, Artificial Sequence; identical to SEQ ID NO: 23596
  GFR-binding peptide
  MOD_RES (1)..(34)..(35): Xaa is C or S
  MOD_RES (12)..(13)..(14)..(15)..(16): Xaa is A or G
  MOD_RES (17)..(18)..(19)..(20): Xaa is A or G or is absent

SEQ ID NO: 58508 - protein, 41 aa, Artificial Sequence
  GFR-binding peptide
  MOD_RES (2)..(4)..(38)..(39): Xaa is C or S
  MOD_RES (16)..(17)..(18)..(19)..(20): Xaa is A or G
  MOD_RES (21)..(22)..(23)..(24): Xaa is A or G or is absent
RXAXSEVTMNEYKFKXXXXXXXXXLYLISIPEMKEPVXXPE

SEQ ID NO: 58509 - protein, 38 aa, Artificial Sequence; identical to SEQ ID NO: 31574
  GFR-binding peptide
  MOD_RES (1)..(3)..(35)..(36): Xaa is C or S

SEQ ID NO: 58510 - protein, 34 aa, Artificial Sequence; identical to SEQ ID NO: 2598
  GFR-binding peptide
  MOD_RES (2)..(4): Xaa is C or S

SEQ ID NO: 58511 - protein, 37 aa, Artificial Sequence; identical to SEQ ID NO: 23599
  GFR-binding peptide
  MOD_RES (33)..(34): Xaa is C or S
  MOD_RES (11)..(12)..(13)..(14)..(15): Xaa is A or G
  MOD_RES (16)..(17)..(18)..(19): Xaa is A or G or is absent

SEQ ID NO: 58512 - protein, 35 aa, Artificial Sequence
  GFR-binding peptide
  MOD_RES (33)..(34): Xaa is C or S
  MOD_RES (11)..(12)..(13)..(14)..(15): Xaa is A or G
  MOD_RES (16)..(17)..(18)..(19): Xaa is A or G or is absent
EVVMDRHKRLXXXXXXXXXYYLISTASLRAPVXXS

SEQ ID NO: 58513 - protein, 40 aa, Artificial Sequence
  GFR-binding peptide
  MOD_RES (2)..(34)..(35): Xaa is C or S
AXSEVTMNEYKFKVVNKNEDLYLISIPEMKEPVXXPEPIG

SEQ ID NO: 58514 - protein, 36 aa, Artificial Sequence; identical to SEQ ID NO: 23603
  GFR-binding peptide
  MOD_RES (2)..(34)..(35): Xaa is C or S

SEQ ID NO: 58515 - protein, 37 aa, Artificial Sequence; identical to SEQ ID NO: 56505
  GFR-binding peptide
  MOD_RES (31)..(32): Xaa is C or S

SEQ ID NO: 58516 - protein, 37 aa, Artificial Sequence; identical to SEQ ID NO: 23604
  GFR-binding peptide
  MOD_RES (2)..(4)..(35)..(36): Xaa is C or S

SEQ ID NO: 58517 - protein, 41 aa, Artificial Sequence
  GFR-binding peptide
  MOD_RES (1)..(3)..(35)..(36): Xaa is C or S
XAXSEVTMNEYKFKVVNKNEDLYLISIPEMKEPVXXPEPIG

SEQ ID NO: 58518 - protein, 35 aa, Artificial Sequence
  GFR-binding peptide
  MOD_RES (1)..(32)..(33): Xaa is C or S
XSRVIMPIKGYVKPKRGVFYLINIPSLAQPVXXPA

SEQ ID NO: 58519 - protein, 35 aa, Artificial Sequence; identical to SEQ ID NO: 2601
  GFR-binding peptide
  MOD_RES (1)..(3): Xaa is C or S

SEQ ID NO: 58520 - protein, 36 aa, Artificial Sequence; identical to SEQ ID NO: 2602
  GFR-binding peptide
  MOD_RES (1)..(34)..(35): Xaa is C or S
  MOD_RES (12)..(13)..(14)..(15)..(16): Xaa is A or G
  MOD_RES (17)..(18)..(19)..(20): Xaa is A or G or is absent

SEQ ID NO: 58521 - protein, 37 aa, Artificial Sequence
  GFR-binding peptide
  MOD_RES (34)..(35): Xaa is C or S
  MOD_RES (12)..(13)..(14)..(15)..(16): Xaa is A or G
  MOD_RES (17)..(18)..(19)..(20): Xaa is A or G or is absent
SEVTMNRYKKLXXXXXXXXXFYLISIANMKEPVXXPE

SEQ ID NO: 58522 - protein, 33 aa, Artificial Sequence; identical to SEQ ID NO: 23612
  GFR-binding peptide
  MOD_RES (33)..(33): Xaa is C or S
  MOD_RES (11)..(12)..(13)..(14)..(15): Xaa is A or G
  MOD_RES (16)..(17)..(18)..(19): Xaa is A or G or is absent

SEQ ID NO: 58523 - protein, 43 aa, Artificial Sequence; identical to SEQ ID NO: 2607
  GFR-binding peptide
  MOD_RES (1)..(3)..(37)..(38): Xaa is C or S
  MOD_RES (15)..(16)..(17)..(18)..(19): Xaa is A or G
  MOD_RES (20)..(21)..(22)..(23): Xaa is A or G or is absent

SEQ ID NO: 58524 - protein, 39 aa, Artificial Sequence
  GFR-binding peptide
  MOD_RES (2)..(34)..(35): Xaa is C or S
GXSEVVMDRHKRLVVNNASDYYLISTASLRTPVXXTPPT

SEQ ID NO: 58525 - protein, 33 aa, Artificial Sequence; identical to SEQ ID NO: 2612
  GFR-binding peptide
  MOD_RES (1)..(1): Xaa is C or S
  MOD_RES (12)..(13)..(14)..(15)..(16): Xaa is A or G
  MOD_RES (17)..(18)..(19)..(20): Xaa is A or G or is absent

SEQ ID NO: 58526 - protein, 38 aa, Artificial Sequence; identical to SEQ ID NO: 31599
  GFR-binding peptide
  MOD_RES (2)..(34)..(35): Xaa is C or S

SEQ ID NO: 58527 - protein, 36 aa, Artificial Sequence; identical to SEQ ID NO: 31600
  GFR-binding peptide
  MOD_RES (2)..(36): Xaa is C or S
  MOD_RES (14)..(15)..(16)..(17)..(18): Xaa is A or G
  MOD_RES (19)..(20)..(21)..(22): Xaa is A or G or is absent

SEQ ID NO: 58528 - protein, 35 aa, Artificial Sequence; identical to SEQ ID NO: 23621
  GFR-binding peptide
  MOD_RES (33)..(34): Xaa is C or S
  MOD_RES (11)..(12)..(13)..(14)..(15): Xaa is A or G
  MOD_RES (16)..(17)..(18)..(19): Xaa is A or G or is absent

SEQ ID NO: 58529 - protein, 39 aa, Artificial Sequence; identical to SEQ ID NO: 2619
  GFR-binding peptide
  MOD_RES (1)..(3)..(35)..(36): Xaa is C or S

SEQ ID NO: 58530 - protein, 37 aa, Artificial Sequence
  GFR-binding peptide
  MOD_RES (1)..(34)..(35): Xaa is C or S
  MOD_RES (12)..(13)..(14)..(15)..(16): Xaa is A or G
  MOD_RES (17)..(18)..(19)..(20): Xaa is A or G or is absent
XEEVIMYHYKLXXXXXXXXXKYLMSIPSTKVPAXXTS

SEQ ID NO: 58531 - protein, 41 aa, Artificial Sequence; identical to SEQ ID NO: 56522
  GFR-binding peptide
  MOD_RES (2)..(4)..(35)..(36): Xaa is C or S

SEQ ID NO: 58532 - protein, 36 aa, Artificial Sequence; identical to SEQ ID NO: 31602
  GFR-binding peptide
  MOD_RES (35)..(36): Xaa is C or S
  MOD_RES (13)..(14)..(15)..(16)..(17): Xaa is A or G
  MOD_RES (18)..(19)..(20)..(21): Xaa is A or G or is absent

SEQ ID NO: 58533 - protein, 40 aa, Artificial Sequence; identical to SEQ ID NO: 31604
  GFR-binding peptide
  MOD_RES (2)..(4)..(38)..(39): Xaa is C or S
  MOD_RES (16)..(17)..(18)..(19)..(20): Xaa is A or G
  MOD_RES (21)..(22)..(23)..(24): Xaa is A or G or is absent

SEQ ID NO: 58534 - protein, 34 aa, Artificial Sequence
  GFR-binding peptide
  MOD_RES (32)..(33): Xaa is C or S
RDVVMGEYKFKIIQQKDNLYLMSIPEMKTPTXXP

SEQ ID NO: 58535 - protein, 39 aa, Artificial Sequence
  GFR-binding peptide
  MOD_RES (1)..(35)..(36): Xaa is C or S
  MOD_RES (13)..(14)..(15)..(16)..(17): Xaa is A or G
  MOD_RES (18)..(19)..(20)..(21): Xaa is A or G or is absent
XSEVTMNEYKFKXXXXXXXXXLYLISIPEMKEPVXXPEP

SEQ ID NO: 58536 - protein, 37 aa, Artificial Sequence; identical to SEQ ID NO: 23627
  GFR-binding peptide
  MOD_RES (1)..(35)..(36): Xaa is C or S
  MOD_RES (13)..(14)..(15)..(16)..(17): Xaa is A or G
  MOD_RES (18)..(19)..(20)..(21): Xaa is A or G or is absent

SEQ ID NO: 58537 - protein, 35 aa, Artificial Sequence; identical to SEQ ID NO: 2626
  GFR-binding peptide
  MOD_RES (34)..(35): Xaa is C or S
  MOD_RES (12)..(13)..(14)..(15)..(16): Xaa is A or G
  MOD_RES (17)..(18)..(19)..(20): Xaa is A or G or is absent

SEQ ID NO: 58538 - protein, 40 aa, Artificial Sequence
  GFR-binding peptide
  MOD_RES (2)..(4)..(35)..(36): Xaa is C or S
SXKXSKVIMPIKGYIKPTKGIFYLINIPSLDQSVXXPSAS

SEQ ID NO: 58539 - protein, 41 aa, Artificial Sequence; identical to SEQ ID NO: 2627
  GFR-binding peptide
  MOD_RES (2)..(4)..(35)..(36): Xaa is C or S

SEQ ID NO: 58540 - protein, 31 aa, Artificial Sequence; identical to SEQ ID NO: 2628
  GFR-binding peptide
  MOD_RES (31)..(31): Xaa is C or S

SEQ ID NO: 58541 - protein, 38 aa, Artificial Sequence
  GFR-binding peptide
  MOD_RES (2)..(33)..(34): Xaa is C or S
GXEEVIMYHYKLLLVRGNDKYLMSIPSTKVPAXXTSPV

SEQ ID NO: 58542 - protein, 38 aa, Artificial Sequence; identical to SEQ ID NO: 31608
  GFR-binding peptide
  MOD_RES (2)..(4)..(35)..(36): Xaa is C or S

SEQ ID NO: 58543 - protein, 34 aa, Artificial Sequence; identical to SEQ ID NO: 56536
  GFR-binding peptide
  MOD_RES (1)..(3)..(34): Xaa is C or S

SEQ ID NO: 58544 - protein, 36 aa, Artificial Sequence; identical to SEQ ID NO: 31609
  GFR-binding peptide
  MOD_RES (33)..(34): Xaa is C or S
  MOD_RES (11)..(12)..(13)..(14)..(15): Xaa is A or G
  MOD_RES (16)..(17)..(18)..(19): Xaa is A or G or is absent

SEQ ID NO: 58545 - protein, 39 aa, Artificial Sequence
  GFR-binding peptide
  MOD_RES (1)..(33)..(34): Xaa is C or S
XRDVVMGEYKFKIIQQKDNLYLMSIPEMKTPTXXPGASG

SEQ ID NO: 58546 - protein, 40 aa, Artificial Sequence
  GFR-binding peptide
  MOD_RES (34)..(35): Xaa is C or S
  MOD_RES (12)..(13)..(14)..(15)..(16): Xaa is A or G
  MOD_RES (17)..(18)..(19)..(20): Xaa is A or G or is absent
SEVTMNPIKGYXXXXXXXXXFYLINIPSMKEPVXXPEPIG

SEQ ID NO: 58547 - protein, 39 aa, Artificial Sequence; identical to SEQ ID NO: 2636
  GFR-binding peptide
  MOD_RES (2)..(37)..(38): Xaa is C or S
  MOD_RES (15)..(16)..(17)..(18)..(19): Xaa is A or G
  MOD_RES (20)..(21)..(22)..(23): Xaa is A or G or is absent

SEQ ID NO: 58548 - protein, 32 aa, Artificial Sequence
  GFR-binding peptide
  MOD_RES (32)..(32): Xaa is C or S
ESVAMGRHKRLYTVVGKDYYLISTASLKTPVX

SEQ ID NO: 58549 - protein, 31 aa, Artificial Sequence; identical to SEQ ID NO: 23635
  GFR-binding peptide

SEQ ID NO: 58550 - protein, 33 aa, Artificial Sequence; identical to SEQ ID NO: 23643
  GFR-binding peptide
  MOD_RES (1)..(33): Xaa is C or S

SEQ ID NO: 58551 - protein, 31 aa, Artificial Sequence; identical to SEQ ID NO: 23644
  GFR-binding peptide

SEQ ID NO: 58552 - protein, 35 aa, Artificial Sequence; identical to SEQ ID NO: 56553
  GFR-binding peptide
  MOD_RES (1)..(3)..(34)..(35): Xaa is C or S

SEQ ID NO: 58553 - protein, 39 aa, Artificial Sequence; identical to SEQ ID NO: 31620
  GFR-binding peptide
  MOD_RES (34)..(35): Xaa is C or S
  MOD_RES (12)..(13)..(14)..(15)..(16): Xaa is A or G
  MOD_RES (17)..(18)..(19)..(20): Xaa is A or G or is absent

SEQ ID NO: 58554 - protein, 43 aa, Artificial Sequence; identical to SEQ ID NO: 2643
  GFR-binding peptide
  MOD_RES (2)..(4)..(37)..(38): Xaa is C or S
  MOD_RES (15)..(16)..(17)..(18)..(19): Xaa is A or G
  MOD_RES (20)..(21)..(22)..(23): Xaa is A or G or is absent

SEQ ID NO: 58555 - protein, 40 aa, Artificial Sequence
  GFR-binding peptide
  MOD_RES (1)..(3)..(36)..(37): Xaa is C or S
  MOD_RES (14)..(15)..(16)..(17)..(18): Xaa is A or G
  MOD_RES (19)..(20)..(21)..(22): Xaa is A or G or is absent
XGXEEVIMEYKFKXXXXXXXXXLYLMSIPETKVPAXXTSP

SEQ ID NO: 58556 - protein, 38 aa, Artificial Sequence; identical to SEQ ID NO: 31624
  GFR-binding peptide
  MOD_RES (1)..(3)..(35)..(36): Xaa is C or S

SEQ ID NO: 58557 - protein, 39 aa, Artificial Sequence; identical to SEQ ID NO: 23652
  GFR-binding peptide
  MOD_RES (2)..(36)..(37): Xaa is C or S
  MOD_RES (14)..(15)..(16)..(17)..(18): Xaa is A or G
  MOD_RES (19)..(20)..(21)..(22): Xaa is A or G or is absent

SEQ ID NO: 58558 - protein, 41 aa, Artificial Sequence; identical to SEQ ID NO: 31628
  GFR-binding peptide
  MOD_RES (2)..(4)..(38)..(39): Xaa is C or S
  MOD_RES (16)..(17)..(18)..(19)..(20): Xaa is A or G
  MOD_RES (21)..(22)..(23)..(24): Xaa is A or G or is absent

SEQ ID NO: 58559 - protein, 37 aa, Artificial Sequence; identical to SEQ ID NO: 2650
  GFR-binding peptide
  MOD_RES (1)..(3)..(35)..(36): Xaa is C or S

SEQ ID NO: 58560 - protein, 37 aa, Artificial Sequence; identical to SEQ ID NO: 2651
  GFR-binding peptide
  MOD_RES (1)..(36)..(37): Xaa is C or S
  MOD_RES (14)..(15)..(16)..(17)..(18): Xaa is A or G
  MOD_RES (19)..(20)..(21)..(22): Xaa is A or G or is absent

SEQ ID NO: 58561 - protein, 39 aa, Artificial Sequence; identical to SEQ ID NO: 2653
  GFR-binding peptide
  MOD_RES (34)..(34): Xaa is C or S
  MOD_RES (12)..(13)..(14)..(15)..(16): Xaa is A or G
  MOD_RES (17)..(18)..(19)..(20): Xaa is A or G or is absent

SEQ ID NO: 58562 - protein, 36 aa, Artificial Sequence; identical to SEQ ID NO: 10135
  GFR-binding peptide
  MOD_RES (2)..(34)..(35): Xaa is C or S

SEQ ID NO: 58563 - protein, 37 aa, Artificial Sequence; identical to SEQ ID NO: 2656
  GFR-binding peptide
  MOD_RES (1)..(3)..(36)..(37): Xaa is C or S
  MOD_RES (14)..(15)..(16)..(17)..(18): Xaa is A or G
  MOD_RES (19)..(20)..(21)..(22): Xaa is A or G or is absent

SEQ ID NO: 58564 - protein, 36 aa, Artificial Sequence; identical to SEQ ID NO: 56567
  GFR-binding peptide
  MOD_RES (2)..(35)..(36): Xaa is C or S
  MOD_RES (13)..(14)..(15)..(16)..(17): Xaa is A or G
  MOD_RES (18)..(19)..(20)..(21): Xaa is A or G or is absent

SEQ ID NO: 58565 - protein, 35 aa, Artificial Sequence; identical to SEQ ID NO: 31638
  GFR-binding peptide
  MOD_RES (1)..(35): Xaa is C or S
  MOD_RES (13)..(14)..(15)..(16)..(17): Xaa is A or G
  MOD_RES (18)..(19)..(20)..(21): Xaa is A or G or is absent

SEQ ID NO: 58566 - protein, 35 aa, Artificial Sequence; identical to SEQ ID NO: 2659
  GFR-binding peptide
  MOD_RES (2)..(4)..(35): Xaa is C or S

SEQ ID NO: 58567 - protein, 38 aa, Artificial Sequence; identical to SEQ ID NO: 2662
  GFR-binding peptide
  MOD_RES (1)..(3)..(37)..(38): Xaa is C or S
  MOD_RES (15)..(16)..(17)..(18)..(19): Xaa is A or G
  MOD_RES (20)..(21)..(22)..(23): Xaa is A or G or is absent

SEQ ID NO: 58568 - protein, 30 aa, Artificial Sequence
  GFR-binding peptide
EVTMNPIKGYVVNKNEDFYLINIPSMKEPV

SEQ ID NO: 58569 - protein, 36 aa, Artificial Sequence; identical to SEQ ID NO: 2664
  GFR-binding peptide
  MOD_RES (2)..(36): Xaa is C or S
  MOD_RES (14)..(15)..(16)..(17)..(18): Xaa is A or G
  MOD_RES (19)..(20)..(21)..(22): Xaa is A or G or is absent

SEQ ID NO: 58570 - protein, 38 aa, Artificial Sequence; identical to SEQ ID NO: 2666
  GFR-binding peptide
  MOD_RES (1)..(35)..(36): Xaa is C or S
  MOD_RES (13)..(14)..(15)..(16)..(17): Xaa is A or G
  MOD_RES (18)..(19)..(20)..(21): Xaa is A or G or is absent

SEQ ID NO: 58571 - protein, 37 aa, Artificial Sequence; identical to SEQ ID NO: 23665
  GFR-binding peptide
  MOD_RES (2)..(36)..(37): Xaa is C or S
  MOD_RES (14)..(15)..(16)..(17)..(18): Xaa is A or G
  MOD_RES (19)..(20)..(21)..(22): Xaa is A or G or is absent

SEQ ID NO: 58572 - protein, 38 aa, Artificial Sequence
  GFR-binding peptide
  MOD_RES (1)..(33)..(34): Xaa is C or S
XRDVVMGYHYKLIIQQKDNKYLMSIPSMKTPTXXPGAS

SEQ ID NO: 58573 - protein, 40 aa, Artificial Sequence; identical to SEQ ID NO: 2669
  GFR-binding peptide
  MOD_RES (2)..(4)..(38)..(39): Xaa is C or S
  MOD_RES (16)..(17)..(18)..(19)..(20): Xaa is A or G
  MOD_RES (21)..(22)..(23)..(24): Xaa is A or G or is absent

SEQ ID NO: 58574 - protein, 38 aa, Artificial Sequence; identical to SEQ ID NO: 2671
  GFR-binding peptide
  MOD_RES (35)..(36): Xaa is C or S
  MOD_RES (13)..(14)..(15)..(16)..(17): Xaa is A or G
  MOD_RES (18)..(19)..(20)..(21): Xaa is A or G or is absent

SEQ ID NO: 58575 - protein, 40 aa, Artificial Sequence; identical to SEQ ID NO: 31646
  GFR-binding peptide
  MOD_RES (1)..(3)..(36)..(37): Xaa is C or S

SEQ ID NO: 58576 - protein, 33 aa, Artificial Sequence; identical to SEQ ID NO: 2674
  GFR-binding peptide
  MOD_RES (1)..(1): Xaa is C or S

SEQ ID NO: 58577 - protein, 37 aa, Artificial Sequence; identical to SEQ ID NO: 2676
  GFR-binding peptide
  MOD_RES (31)..(32): Xaa is C or S

SEQ ID NO: 58578 - protein, 38 aa, Artificial Sequence; identical to SEQ ID NO: 2678
  GFR-binding peptide
  MOD_RES (34)..(35): Xaa is C or S
  MOD_RES (12)..(13)..(14)..(15)..(16): Xaa is A or G
  MOD_RES (17)..(18)..(19)..(20): Xaa is A or G or is absent

SEQ ID NO: 58579 - protein, 36 aa, Artificial Sequence; identical to SEQ ID NO: 31655
  GFR-binding peptide
  MOD_RES (1)..(3)..(35): Xaa is C or S

SEQ ID NO: 58580 - protein, 39 aa, Artificial Sequence
  GFR-binding peptide
  MOD_RES (1)..(3)..(35)..(36): Xaa is C or S
XGXSEVVMDEYKFKVVNNASDLYLISIPELRTPVXXTPP

SEQ ID NO: 58581 - protein, 37 aa, Artificial Sequence; identical to SEQ ID NO: 23678
  GFR-binding peptide
  MOD_RES (2)..(4): Xaa is C or S
  MOD_RES (16)..(17)..(18)..(19)..(20): Xaa is A or G
  MOD_RES (21)..(22)..(23)..(24): Xaa is A or G or is absent

SEQ ID NO: 58582 - protein, 37 aa, Artificial Sequence; identical to SEQ ID NO: 31659
  GFR-binding peptide
  MOD_RES (1)..(35)..(36): Xaa is C or S
  MOD_RES (13)..(14)..(15)..(16)..(17): Xaa is A or G
  MOD_RES (18)..(19)..(20)..(21): Xaa is A or G or is absent

SEQ ID NO: 58583 - protein, 39 aa, Artificial Sequence; identical to SEQ ID NO: 31661
  GFR-binding peptide
  MOD_RES (34)..(35): Xaa is C or S
  MOD_RES (12)..(13)..(14)..(15)..(16): Xaa is A or G
  MOD_RES (17)..(18)..(19)..(20): Xaa is A or G or is absent

SEQ ID NO: 58584 - protein, 35 aa, Artificial Sequence; identical to SEQ ID NO: 2682
  GFR-binding peptide
  MOD_RES (1)..(33)..(34): Xaa is C or S

SEQ ID NO: 58585 - protein, 38 aa, Artificial Sequence
  GFR-binding peptide
  MOD_RES (2)..(4)..(36)..(37): Xaa is C or S
RXGXSEVVMDYHYKLVVNNASDKYLISIPSLRTPVXXT

SEQ ID NO: 58586 - protein, 39 aa, Artificial Sequence; identical to SEQ ID NO: 31664
  GFR-binding peptide
  MOD_RES (1)..(34)..(35): Xaa is C or S

SEQ ID NO: 58587 - protein, 37 aa, Artificial Sequence; identical to SEQ ID NO: 23680
  GFR-binding peptide
  MOD_RES (33)..(34): Xaa is C or S
  MOD_RES (11)..(12)..(13)..(14)..(15): Xaa is A or G
  MOD_RES (16)..(17)..(18)..(19): Xaa is A or G or is absent

SEQ ID NO: 58588 - protein, 38 aa, Artificial Sequence
  GFR-binding peptide
  MOD_RES (1)..(35)..(36): Xaa is C or S
  MOD_RES (13)..(14)..(15)..(16)..(17): Xaa is A or G
  MOD_RES (18)..(19)..(20)..(21): Xaa is A or G or is absent
XSEVVMDYHYKLXXXXXXXXXKYLISIPSLRTPVXXTP

SEQ ID NO: 58589 - protein, 38 aa, Artificial Sequence; identical to SEQ ID NO: 2689
  GFR-binding peptide
  MOD_RES (1)..(33)..(34): Xaa is C or S

SEQ ID NO: 58590 - protein, 37 aa, Artificial Sequence; identical to SEQ ID NO: 2690
  GFR-binding peptide
  MOD_RES (2)..(4)..(36)..(37): Xaa is C or S

SEQ ID NO: 58591 - protein, 36 aa, Artificial Sequence; identical to SEQ ID NO: 2692
  GFR-binding peptide
  MOD_RES (2)..(4): Xaa is C or S
  MOD_RES (15)..(16)..(17)..(18)..(19): Xaa is A or G
  MOD_RES (20)..(21)..(22)..(23): Xaa is A or G or is absent

SEQ ID NO: 58592 - protein, 40 aa, Artificial Sequence; identical to SEQ ID NO: 23687
  GFR-binding peptide
  MOD_RES (2)..(37)..(38): Xaa is C or S
  MOD_RES (15)..(16)..(17)..(18)..(19): Xaa is A or G
  MOD_RES (20)..(21)..(22)..(23): Xaa is A or G or is absent

SEQ ID NO: 58593 - protein, 38 aa, Artificial Sequence; identical to SEQ ID NO: 23688
  GFR-binding peptide
  MOD_RES (2)..(34)..(35): Xaa is C or S

SEQ ID NO: 58594 - protein, 32 aa, Artificial Sequence; identical to SEQ ID NO: 2694
  GFR-binding peptide
  MOD_RES (31)..(32): Xaa is C or S

SEQ ID NO: 58595 - protein, 32 aa, Artificial Sequence; identical to SEQ ID NO: 23690
  GFR-binding peptide
  MOD_RES (31)..(32): Xaa is C or S

SEQ ID NO: 58596 - protein, 35 aa, Artificial Sequence
  GFR-binding peptide
  MOD_RES (1)..(3)..(34)..(35): Xaa is C or S
XKXSRVIMPIKGYVKPKRGVFYLINIPSLAQPVXX

SEQ ID NO: 58597 - protein, 43 aa, Artificial Sequence; identical to SEQ ID NO: 2696
  GFR-binding peptide
  MOD_RES (1)..(3)..(38)..(39): Xaa is C or S
  MOD_RES (16)..(17)..(18)..(19)..(20): Xaa is A or G
  MOD_RES (21)..(22)..(23)..(24): Xaa is A or G or is absent

SEQ ID NO: 58598 - protein, 38 aa, Artificial Sequence; identical to SEQ ID NO: 31671
  GFR-binding peptide
  MOD_RES (33)..(34): Xaa is C or S
  MOD_RES (11)..(12)..(13)..(14)..(15): Xaa is A or G
  MOD_RES (16)..(17)..(18)..(19): Xaa is A or G or is absent

SEQ ID NO: 58599 - protein, 35 aa, Artificial Sequence
  GFR-binding peptide
  MOD_RES (2)..(4): Xaa is C or S
RXAXSEVTMNYHYKLVVNKNEDKYLISIPSMKEPV

SEQ ID NO: 58600 - protein, 43 aa, Artificial Sequence; identical to SEQ ID NO: 23698
  GFR-binding peptide
  MOD_RES (1)..(3)..(37)..(38): Xaa is C or S
  MOD_RES (15)..(16)..(17)..(18)..(19): Xaa is A or G
  MOD_RES (20)..(21)..(22)..(23): Xaa is A or G or is absent

SEQ ID NO: 58601 - protein, 35 aa, Artificial Sequence; identical to SEQ ID NO: 2700
  GFR-binding peptide
  MOD_RES (33)..(34): Xaa is C or S
  MOD_RES (11)..(12)..(13)..(14)..(15): Xaa is A or G
  MOD_RES (16)..(17)..(18)..(19): Xaa is A or G or is absent

SEQ ID NO: 58602 - protein, 30 aa, Artificial Sequence; identical to SEQ ID NO: 2703
  GFR-binding peptide

SEQ ID NO: 58603 - protein, 39 aa, Artificial Sequence
  GFR-binding peptide
  MOD_RES (1)..(3)..(36)..(37): Xaa is C or S
  MOD_RES (14)..(15)..(16)..(17)..(18): Xaa is A or G
  MOD_RES (19)..(20)..(21)..(22): Xaa is A or G or is absent
XGXEEVIMEYKFKXXXXXXXXXLYLMSIPETKVPAXXTS

SEQ ID NO: 58604 - protein, 35 aa, Artificial Sequence; identical to SEQ ID NO: 2704
  GFR-binding peptide
  MOD_RES (33)..(33): Xaa is C or S
  MOD_RES (11)..(12)..(13)..(14)..(15): Xaa is A or G
  MOD_RES (16)..(17)..(18)..(19): Xaa is A or G or is absent

SEQ ID NO: 58605 - protein, 37 aa, Artificial Sequence; identical to SEQ ID NO: 23704
  GFR-binding peptide
  MOD_RES (1)..(3)..(36)..(37): Xaa is C or S
  MOD_RES (14)..(15)..(16)..(17)..(18): Xaa is A or G
  MOD_RES (19)..(20)..(21)..(22): Xaa is A or G or is absent

SEQ ID NO: 58606 - protein, 36 aa, Artificial Sequence
  GFR-binding peptide
  MOD_RES (1)..(3)..(35)..(36): Xaa is C or S
XGXSEVVMDRHKRLVVNNASDYYLISTASLRTPVXX

SEQ ID NO: 58607 - protein, 35 aa, Artificial Sequence; identical to SEQ ID NO: 23705
  GFR-binding peptide
  MOD_RES (2)..(2): Xaa is C or S
  MOD_RES (14)..(15)..(16)..(17)..(18): Xaa is A or G
  MOD_RES (19)..(20)..(21)..(22): Xaa is A or G or is absent

SEQ ID NO: 58608 - protein, 37 aa, Artificial Sequence; identical to SEQ ID NO: 2706
  GFR-binding peptide
  MOD_RES (34)..(35): Xaa is C or S
  MOD_RES (12)..(13)..(14)..(15)..(16): Xaa is A or G
  MOD_RES (17)..(18)..(19)..(20): Xaa is A or G or is absent

SEQ ID NO: 58609 - protein, 36 aa, Artificial Sequence
  GFR-binding peptide
  MOD_RES (2)..(4)..(36): Xaa is C or S
RXGXSEVVMDEYKFKVVNNASDLYLISIPELRTPVX

SEQ ID NO: 58610 - protein, 37 aa, Artificial Sequence; identical to SEQ ID NO: 2708
  GFR-binding peptide
  MOD_RES (1)..(3)..(36)..(37): Xaa is C or S
  MOD_RES (14)..(15)..(16)..(17)..(18): Xaa is A or G
  MOD_RES (19)..(20)..(21)..(22): Xaa is A or G or is absent

SEQ ID NO: 58611 - protein, 37 aa, Artificial Sequence; identical to SEQ ID NO: 2716
  GFR-binding peptide
  MOD_RES (33)..(34): Xaa is C or S
  MOD_RES (11)..(12)..(13)..(14)..(15): Xaa is A or G
  MOD_RES (16)..(17)..(18)..(19): Xaa is A or G or is absent

SEQ ID NO: 58612 - protein, 34 aa, Artificial Sequence; identical to SEQ ID NO: 2717
  GFR-binding peptide
  MOD_RES (31)..(31): Xaa is C or S

SEQ ID NO: 58613 - protein, 32 aa, Artificial Sequence; identical to SEQ ID NO: 10203
  GFR-binding peptide
  MOD_RES (32)..(32): Xaa is C or S

SEQ ID NO: 58614 - protein, 40 aa, Artificial Sequence; identical to SEQ ID NO: 2720
  GFR-binding peptide
  MOD_RES (2)..(4)..(38)..(39): Xaa is C or S
  MOD_RES (16)..(17)..(18)..(19)..(20): Xaa is A or G
  MOD_RES (21)..(22)..(23)..(24): Xaa is A or G or is absent

SEQ ID NO: 58615 - protein, 38 aa, Artificial Sequence; identical to SEQ ID NO: 31695
  GFR-binding peptide
  MOD_RES (2)..(34)..(35): Xaa is C or S

SEQ ID NO: 58616 - protein, 39 aa, Artificial Sequence
  GFR-binding peptide
  MOD_RES (2)..(36)..(37): Xaa is C or S
  MOD_RES (14)..(15)..(16)..(17)..(18): Xaa is A or G
  MOD_RES (19)..(20)..(21)..(22): Xaa is A or G or is absent
AXSEVTMNPIKGYXXXXXXXXXFYLINIPSMKEPVXXPE

SEQ ID NO: 58617 - protein, 37 aa, Artificial Sequence; identical to SEQ ID NO: 23714
  GFR-binding peptide
  MOD_RES (1)..(32)..(33): Xaa is C or S

SEQ ID NO: 58618 - protein, 34 aa, Artificial Sequence; identical to SEQ ID NO: 23715
  GFR-binding peptide
  MOD_RES (1)..(3): Xaa is C or S

SEQ ID NO: 58619 - protein, 36 aa, Artificial Sequence
  GFR-binding peptide
  MOD_RES (1)..(3)..(35)..(36): Xaa is C or S
XAXSEVTMNPIKGYVVNKNEDFYLINIPSMKEPVXX

SEQ ID NO: 58620 - protein, 38 aa, Artificial Sequence
  GFR-binding peptide
  MOD_RES (2)..(34)..(35): Xaa is C or S
GXRDVVMGEYKFKIIQQKDNLYLMSIPEMKTPTXXPGA

SEQ ID NO: 58621 - protein, 35 aa, Artificial Sequence
  GFR-binding peptide
  MOD_RES (32)..(33): Xaa is C or S
SEVVMDYHYKLVVNNASDKYLISIPSLRTPVXXTP

SEQ ID NO: 58622 - protein, 39 aa, Artificial Sequence; identical to SEQ ID NO: 2725
  GFR-binding peptide
  MOD_RES (2)..(4)..(37)..(38): Xaa is C or S
  MOD_RES (15)..(16)..(17)..(18)..(19): Xaa is A or G
  MOD_RES (20)..(21)..(22)..(23): Xaa is A or G or is absent

SEQ ID NO: 58623 - protein, 42 aa, Artificial Sequence; identical to SEQ ID NO: 2726
  GFR-binding peptide
  MOD_RES (2)..(4)..(38)..(39): Xaa is C or S
  MOD_RES (16)..(17)..(18)..(19)..(20): Xaa is A or G
  MOD_RES (21)..(22)..(23)..(24): Xaa is A or G or is absent

SEQ ID NO: 58624 - protein, 39 aa, Artificial Sequence; identical to SEQ ID NO: 56648
  GFR-binding peptide
  MOD_RES (1)..(33)..(34): Xaa is C or S

SEQ ID NO: 58625 - protein, 36 aa, Artificial Sequence; identical to SEQ ID NO: 2731
  GFR-binding peptide
  MOD_RES (1)..(3)..(35)..(36): Xaa is C or S

SEQ ID NO: 58626 - protein, 30 aa, Artificial Sequence; identical to SEQ ID NO: 23723
  GFR-binding peptide

SEQ ID NO: 58627 - protein, 35 aa, Artificial Sequence; identical to SEQ ID NO: 23724
  GFR-binding peptide
  MOD_RES (33)..(34): Xaa is C or S

SEQ ID NO: 58628 - protein, 37 aa, Artificial Sequence; identical to SEQ ID NO: 31719
  GFR-binding peptide
  MOD_RES (32)..(33): Xaa is C or S

SEQ ID NO: 58629 - protein, 39 aa, Artificial Sequence; identical to SEQ ID NO: 2737
  GFR-binding peptide
  MOD_RES (2)..(4)..(35)..(36): Xaa is C or S

SEQ ID NO: 58630 - protein, 35 aa, Artificial Sequence; identical to SEQ ID NO: 31721
  GFR-binding peptide
  MOD_RES (32)..(33): Xaa is C or S

SEQ ID NO: 58631 - protein, 38 aa, Artificial Sequence
  GFR-binding peptide
  MOD_RES (2)..(4)..(38): Xaa is C or S
  MOD_RES (16)..(17)..(18)..(19)..(20): Xaa is A or G
  MOD_RES (21)..(22)..(23)..(24): Xaa is A or G or is absent
RXAXSEVTMNRHKRLXXXXXXXXXYYLISTASMKEPVX

SEQ ID NO: 58632 - protein, 36 aa, Artificial Sequence
  GFR-binding peptide
  MOD_RES (1)..(32)..(33): Xaa is C or S
XEEVIMYHYKLLLVRGNDKYLMSIPSTKVPAXXTSP

SEQ ID NO: 58633 - protein, 35 aa, Artificial Sequence
  GFR-binding peptide
  MOD_RES (33)..(34): Xaa is C or S
  MOD_RES (11)..(12)..(13)..(14)..(15): Xaa is A or G
  MOD_RES (16)..(17)..(18)..(19): Xaa is A or G or is absent
EEVIMRHKRLXXXXXXXXXYYLMSTASTKVPAXXT

SEQ ID NO: 58634 - protein, 37 aa, Artificial Sequence
  GFR-binding peptide
  MOD_RES (1)..(3)..(37): Xaa is C or S
  MOD_RES (15)..(16)..(17)..(18)..(19): Xaa is A or G
  MOD_RES (20)..(21)..(22)..(23): Xaa is A or G or is absent
XAXSEVTMNPIKGYXXXXXXXXXFYLINIPSMKEPVX

SEQ ID NO: 58635 - protein, 38 aa, Artificial Sequence; identical to SEQ ID NO: 2742
  GFR-binding peptide
  MOD_RES (1)..(33)..(34): Xaa is C or S

SEQ ID NO: 58636 - protein, 41 aa, Artificial Sequence; identical to SEQ ID NO: 2744
  GFR-binding peptide
  MOD_RES (1)..(3)..(36)..(37): Xaa is C or S

SEQ ID NO: 58637 - protein, 35 aa, Artificial Sequence; identical to SEQ ID NO: 2745
  GFR-binding peptide
  MOD_RES (1)..(33)..(34): Xaa is C or S

SEQ ID NO: 58638 - protein, 36 aa, Artificial Sequence; identical to SEQ ID NO: 23730
  GFR-binding peptide
  MOD_RES (1)..(3)..(35)..(36): Xaa is C or S

SEQ ID NO: 58639 - protein, 40 aa, Artificial Sequence; identical to SEQ ID NO: 23731
  GFR-binding peptide
  MOD_RES (1)..(3)..(37)..(38): Xaa is C or S
  MOD_RES (15)..(16)..(17)..(18)..(19): Xaa is A or G
  MOD_RES (20)..(21)..(22)..(23): Xaa is A or G or is absent

SEQ ID NO: 58640 - protein, 41 aa, Artificial Sequence
  GFR-binding peptide
  MOD_RES (2)..(4)..(38)..(39): Xaa is C or S
  MOD_RES (16)..(17)..(18)..(19)..(20): Xaa is A or G
  MOD_RES (21)..(22)..(23)..(24): Xaa is A or G or is absent
RXGXSEVVMDYHYKLXXXXXXXXXKYLISIPSLRTPVXXTP

SEQ ID NO: 58641 - protein, 37 aa, Artificial Sequence
  GFR-binding peptide
  MOD_RES (2)..(4)..(37): Xaa is C or S
  MOD_RES (15)..(16)..(17)..(18)..(19): Xaa is A or G
  MOD_RES (20)..(21)..(22)..(23): Xaa is A or G or is absent
LXGXEEVIMYHYKLXXXXXXXXXKYLMSIPSTKVPAX

SEQ ID NO: 58642 - protein, 40 aa, Artificial Sequence; identical to SEQ ID NO: 56675
  GFR-binding peptide
  MOD_RES (1)..(3)..(37)..(38): Xaa is C or S
  MOD_RES (15)..(16)..(17)..(18)..(19): Xaa is A or G
  MOD_RES (20)..(21)..(22)..(23): Xaa is A or G or is absent

SEQ ID NO: 58643 - protein, 39 aa, Artificial Sequence; identical to SEQ ID NO: 2750
  GFR-binding peptide
  MOD_RES (33)..(34): Xaa is C or S

SEQ ID NO: 58644 - protein, 39 aa, Artificial Sequence; identical to SEQ ID NO: 2752
  GFR-binding peptide
  MOD_RES (2)..(4)..(35)..(36): Xaa is C or S

SEQ ID NO: 58645 - protein, 33 aa, Artificial Sequence; identical to SEQ ID NO: 23735
  GFR-binding peptide
  MOD_RES (1)..(3): Xaa is C or S

SEQ ID NO: 58646 - protein, 31 aa, Artificial Sequence
  GFR-binding peptide
  MOD_RES (1)..(1): Xaa is C or S
XSRVIMPIKGYVKPKRGVFYLINIPSLAQPV

SEQ ID NO: 58647 - protein, 34 aa, Artificial Sequence; identical to SEQ ID NO: 31742
  GFR-binding peptide
  MOD_RES (1)..(1): Xaa is C or S
  MOD_RES (13)..(14)..(15)..(16)..(17): Xaa is A or G
  MOD_RES (18)..(19)..(20)..(21): Xaa is A or G or is absent

SEQ ID NO: 58648 - protein, 40 aa, Artificial Sequence; identical to SEQ ID NO: 23739
  GFR-binding peptide
  MOD_RES (1)..(3)..(37)..(38): Xaa is C or S
  MOD_RES (15)..(16)..(17)..(18)..(19): Xaa is A or G
  MOD_RES (20)..(21)..(22)..(23): Xaa is A or G or is absent

SEQ ID NO: 58649 - protein, 33 aa, Artificial Sequence; identical to SEQ ID NO: 23740
  GFR-binding peptide
  MOD_RES (1)..(33): Xaa is C or S

SEQ ID NO: 58650 - protein, 44 aa, Artificial Sequence; identical to SEQ ID NO: 23744
  GFR-binding peptide
  MOD_RES (2)..(4)..(39)..(40): Xaa is C or S
  MOD_RES (17)..(18)..(19)..(20)..(21): Xaa is A or G
  MOD_RES (22)..(23)..(24)..(25): Xaa is A or G or is absent

SEQ ID NO: 58651 - protein, 37 aa, Artificial Sequence
  GFR-binding peptide
  MOD_RES (2)..(4): Xaa is C or S
  MOD_RES (16)..(17)..(18)..(19)..(20): Xaa is A or G
  MOD_RES (21)..(22)..(23)..(24): Xaa is A or G or is absent
RXAXSEVTMNYHYKLXXXXXXXXXKYLISIPSMKEPV

SEQ ID NO: 58652 - protein, 36 aa, Artificial Sequence; identical to SEQ ID NO: 31749
  GFR-binding peptide
  MOD_RES (34)..(35): Xaa is C or S
  MOD_RES (12)..(13)..(14)..(15)..(16): Xaa is A or G
  MOD_RES (17)..(18)..(19)..(20): Xaa is A or G or is absent

SEQ ID NO: 58653 - protein, 37 aa, Artificial Sequence; identical to SEQ ID NO: 31750
  GFR-binding peptide
  MOD_RES (34)..(35): Xaa is C or S
  MOD_RES (12)..(13)..(14)..(15)..(16): Xaa is A or G
  MOD_RES (17)..(18)..(19)..(20): Xaa is A or G or is absent

SEQ ID NO: 58654 - protein, 37 aa, Artificial Sequence
  GFR-binding peptide
  MOD_RES (2)..(34)..(35): Xaa is C or S
GXRDVVMGRHKRLIIQQKDNYYLMSTASMKTPTXXPG

SEQ ID NO: 58655 - protein, 40 aa, Artificial Sequence; identical to SEQ ID NO: 2764
  GFR-binding peptide
  MOD_RES (1)..(3)..(37): Xaa is C or S
  MOD_RES (15)..(16)..(17)..(18)..(19): Xaa is A or G
  MOD_RES (20)..(21)..(22)..(23): Xaa is A or G or is absent

SEQ ID NO: 58656 - protein, 37 aa, Artificial Sequence; identical to SEQ ID NO: 31759
  GFR-binding peptide
  MOD_RES (1)..(33)..(34): Xaa is C or S

SEQ ID NO: 58657 - protein, 36 aa, Artificial Sequence
  GFR-binding peptide
  MOD_RES (1)..(35)..(36): Xaa is C or S
  MOD_RES (13)..(14)..(15)..(16)..(17): Xaa is A or G
  MOD_RES (18)..(19)..(20)..(21): Xaa is A or G or is absent
XRDVVMGEYKFKXXXXXXXXXLYLMSIPEMKTPTXX

SEQ ID NO: 58658 - protein, 37 aa, Artificial Sequence; identical to SEQ ID NO: 23757
  GFR-binding peptide
  MOD_RES (33)..(34): Xaa is C or S
  MOD_RES (11)..(12)..(13)..(14)..(15): Xaa is A or G
  MOD_RES (16)..(17)..(18)..(19): Xaa is A or G or is absent

SEQ ID NO: 58659 - protein, 38 aa, Artificial Sequence
  GFR-binding peptide
  MOD_RES (1)..(3)..(35)..(36): Xaa is C or S
XAXSEVTMNEYKFKVVNKNEDLYLISIPEMKEPVXXPE

SEQ ID NO: 58660 - protein, 39 aa, Artificial Sequence
  GFR-binding peptide
  MOD_RES (2)..(4)..(38)..(39): Xaa is C or S
  MOD_RES (16)..(17)..(18)..(19)..(20): Xaa is A or G
  MOD_RES (21)..(22)..(23)..(24): Xaa is A or G or is absent
RXAXSEVTMNRYKKLXXXXXXXXXFYLISIANMKEPVXX

SEQ ID NO: 58661 - protein, 34 aa, Artificial Sequence; identical to SEQ ID NO: 23759
  GFR-binding peptide
  MOD_RES (34)..(34): Xaa is C or S
  MOD_RES (12)..(13)..(14)..(15)..(16): Xaa is A or G
  MOD_RES (17)..(18)..(19)..(20): Xaa is A or G or is absent

SEQ ID NO: 58662 - protein, 35 aa, Artificial Sequence; identical to SEQ ID NO: 23761
  GFR-binding peptide
  MOD_RES (2)..(34)..(35): Xaa is C or S

SEQ ID NO: 58663 - protein, 38 aa, Artificial Sequence; identical to SEQ ID NO: 23763
  GFR-binding peptide
  MOD_RES (1)..(3)..(34)..(35): Xaa is C or S

SEQ ID NO: 58664 - protein, 40 aa, Artificial Sequence; identical to SEQ ID NO: 2769
  GFR-binding peptide
  MOD_RES (1)..(34)..(35): Xaa is C or S
  MOD_RES (12)..(13)..(14)..(15)..(16): Xaa is A or G
  MOD_RES (17)..(18)..(19)..(20): Xaa is A or G or is absent

SEQ ID NO: 58665 - protein, 40 aa, Artificial Sequence
  GFR-binding peptide
  MOD_RES (1)..(35)..(36): Xaa is C or S
  MOD_RES (13)..(14)..(15)..(16)..(17): Xaa is A or G
  MOD_RES (18)..(19)..(20)..(21): Xaa is A or G or is absent
XSEVVMDEYKFKXXXXXXXXXLYLISIPELRTPVXXTPPT

SEQ ID NO: 58666 - protein, 40 aa, Artificial Sequence; identical to SEQ ID NO: 2776
  GFR-binding peptide
  MOD_RES (2)..(4)..(35)..(36): Xaa is C or S

SEQ ID NO: 58667 - protein, 35 aa, Artificial Sequence; identical to SEQ ID NO: 2777
  GFR-binding peptide
  MOD_RES (2)..(35): Xaa is C or S
  MOD_RES (13)..(14)..(15)..(16)..(17): Xaa is A or G
  MOD_RES (18)..(19)..(20)..(21): Xaa is A or G or is absent

SEQ ID NO: 58668 - protein, 37 aa, Artificial Sequence
  GFR-binding peptide
  MOD_RES (1)..(35)..(36): Xaa is C or S
  MOD_RES (13)..(14)..(15)..(16)..(17): Xaa is A or G
  MOD_RES (18)..(19)..(20)..(21): Xaa is A or G or is absent
XSEVTMNEYKFKXXXXXXXXXLYLISIPEMKEPVXXP

SEQ ID NO: 58669 - protein, 37 aa, Artificial Sequence; identical to SEQ ID NO: 31774
  GFR-binding peptide
  MOD_RES (2)..(4): Xaa is C or S
  MOD_RES (16)..(17)..(18)..(19)..(20): Xaa is A or G
  MOD_RES (21)..(22)..(23)..(24): Xaa is A or G or is absent

SEQ ID NO: 58670 - protein, 41 aa, Artificial Sequence; identical to SEQ ID NO: 2779
  GFR-binding peptide
  MOD_RES (1)..(35)..(36): Xaa is C or S
  MOD_RES (13)..(14)..(15)..(16)..(17): Xaa is A or G
  MOD_RES (18)..(19)..(20)..(21): Xaa is A or G or is absent

SEQ ID NO: 58671 - protein, 32 aa, Artificial Sequence
  GFR-binding peptide
  MOD_RES (11)..(12)..(13)..(14)..(15): Xaa is A or G
  MOD_RES (16)..(17)..(18)..(19): Xaa is A or G or is absent
EVVMDYHYKLXXXXXXXXXKYLISIPSLRTPV

SEQ ID NO: 58672 - protein, 34 aa, Artificial Sequence; identical to SEQ ID NO: 2781
  GFR-binding peptide
  MOD_RES (2)..(33)..(34): Xaa is C or S

SEQ ID NO: 58673 - protein, 32 aa, Artificial Sequence
  GFR-binding peptide
  MOD_RES (11)..(12)..(13)..(14)..(15): Xaa is A or G
  MOD_RES (16)..(17)..(18)..(19): Xaa is A or G or is absent
EVVMDEYKFKXXXXXXXXXLYLISIPELRTPV

SEQ ID NO: 58674 - protein, 39 aa, Artificial Sequence; identical to SEQ ID NO: 31782
  GFR-binding peptide
  MOD_RES (2)..(4)..(36)..(37): Xaa is C or S

SEQ ID NO: 58675 - protein, 37 aa, Artificial Sequence; identical to SEQ ID NO: 31785
  GFR-binding peptide
  MOD_RES (1)..(3)..(34)..(35): Xaa is C or S

SEQ ID NO: 58676 - protein, 38 aa, Artificial Sequence
  GFR-binding peptide
  MOD_RES (1)..(35)..(36): Xaa is C or S
  MOD_RES (13)..(14)..(15)..(16)..(17): Xaa is A or G
  MOD_RES (18)..(19)..(20)..(21): Xaa is A or G or is absent
XSEVTMNPIKGYXXXXXXXXXFYLINIPSMKEPVXXPE

SEQ ID NO: 58677 - protein, 35 aa, Artificial Sequence; identical to SEQ ID NO: 2789
  GFR-binding peptide
  MOD_RES (33)..(34): Xaa is C or S
  MOD_RES (11)..(12)..(13)..(14)..(15): Xaa is A or G
  MOD_RES (16)..(17)..(18)..(19): Xaa is A or G or is absent

SEQ ID NO: 58678 - protein, 35 aa, Artificial Sequence
  GFR-binding peptide
  MOD_RES (1)..(33)..(34): Xaa is C or S
XSEVVMDEYKFKVVNNASDLYLISIPELRTPVXXT

SEQ ID NO: 58679 - protein, 35 aa, Artificial Sequence; identical to SEQ ID NO: 2790
  GFR-binding peptide
  MOD_RES (2)..(4)..(35): Xaa is C or S

SEQ ID NO: 58680 - protein, 36 aa, Artificial Sequence; identical to SEQ ID NO: 31787
  GFR-binding peptide
  MOD_RES (34)..(35): Xaa is C or S
  MOD_RES (12)..(13)..(14)..(15)..(16): Xaa is A or G
  MOD_RES (17)..(18)..(19)..(20): Xaa is A or G or is absent

SEQ ID NO: 58681 - protein, 43 aa, Artificial Sequence; identical to SEQ ID NO: 2795
  GFR-binding peptide
  MOD_RES (2)..(4)..(38)..(39): Xaa is C or S
  MOD_RES (16)..(17)..(18)..(19)..(20): Xaa is A or G
  MOD_RES (21)..(22)..(23)..(24): Xaa is A or G or is absent

SEQ ID NO: 58682 - protein, 36 aa, Artificial Sequence; identical to SEQ ID NO: 23784
  GFR-binding peptide
  MOD_RES (1)..(3)..(35)..(36): Xaa is C or S

SEQ ID NO: 58683 - protein, 36 aa, Artificial Sequence
  GFR-binding peptide
  MOD_RES (2)..(35)..(36): Xaa is C or S
  MOD_RES (13)..(14)..(15)..(16)..(17): Xaa is A or G
  MOD_RES (18)..(19)..(20)..(21): Xaa is A or G or is absent
KXSKVVMPIKGYXXXXXXXXXFYLINIPSLDQPVXX

SEQ ID NO: 58684 - protein, 33 aa, Artificial Sequence; identical to SEQ ID NO: 2797
  GFR-binding peptide
  MOD_RES (1)..(33): Xaa is C or S

SEQ ID NO: 58685 - protein, 39 aa, Artificial Sequence; identical to SEQ ID NO: 31792
  GFR-binding peptide
  MOD_RES (2)..(34)..(35): Xaa is C or S

SEQ ID NO: 58686 - protein, 40 aa, Artificial Sequence; identical to SEQ ID NO: 23790
  GFR-binding peptide
  MOD_RES (2)..(34)..(35): Xaa is C or S

SEQ ID NO: 58687 - protein, 37 aa, Artificial Sequence; identical to SEQ ID NO: 31797
  GFR-binding peptide
  MOD_RES (2)..(4)..(37): Xaa is C or S
  MOD_RES (15)..(16)..(17)..(18)..(19): Xaa is A or G
  MOD_RES (20)..(21)..(22)..(23): Xaa is A or G or is absent

SEQ ID NO: 58688 - protein, 34 aa, Artificial Sequence; identical to SEQ ID NO: 2803
  GFR-binding peptide
  MOD_RES (1)..(3): Xaa is C or S

SEQ ID NO: 58689 - protein, 37 aa, Artificial Sequence
  GFR-binding peptide
  MOD_RES (2)..(36)..(37): Xaa is C or S
  MOD_RES (14)..(15)..(16)..(17)..(18): Xaa is A or G
  MOD_RES (19)..(20)..(21)..(22): Xaa is A or G or is absent
GXRDVVMGYHYKLXXXXXXXXXKYLMSIPSMKTPTXX

SEQ ID NO: 58690 - protein, 40 aa, Artificial Sequence; identical to SEQ ID NO: 2808
  GFR-binding peptide
  MOD_RES (2)..(4)..(36)..(37): Xaa is C or S

SEQ ID NO: 58691 - protein, 35 aa, Artificial Sequence; identical to SEQ ID NO: 23798
  GFR-binding peptide
  MOD_RES (33)..(34): Xaa is C or S
  MOD_RES (11)..(12)..(13)..(14)..(15): Xaa is A or G
  MOD_RES (16)..(17)..(18)..(19): Xaa is A or G or is absent

SEQ ID NO: 58692 - protein, 37 aa, Artificial Sequence; identical to SEQ ID NO: 23802
  GFR-binding peptide
  MOD_RES (2)..(34)..(35): Xaa is C or S

SEQ ID NO: 58693 - protein, 37 aa, Artificial Sequence
  GFR-binding peptide
  MOD_RES (31)..(32): Xaa is C or S
RVVMNEYKFKIVNSSDDLYLVSIPELKTPAXXPKPVH

SEQ ID NO: 58694 - protein, 40 aa, Artificial Sequence
  GFR-binding peptide
  MOD_RES (2)..(34)..(35): Xaa is C or S
GXSRVVMNYHYKLIVNSSDDKYLVSIPSLKTPAXXPKPVH

SEQ ID NO: 58695 - protein, 39 aa, Artificial Sequence; identical to SEQ ID NO: 2815
  GFR-binding peptide
  MOD_RES (2)..(4)..(38): Xaa is C or S
  MOD_RES (16)..(17)..(18)..(19)..(20): Xaa is A or G
  MOD_RES (21)..(22)..(23)..(24): Xaa is A or G or is absent

SEQ ID NO: 58696 - protein, 33 aa, Artificial Sequence
  GFR-binding peptide
  MOD_RES (1)..(3): Xaa is C or S
XGXEEVIMYHYKLLLVRGNDKYLMSIPSTKVPA

SEQ ID NO: 58697 - protein, 39 aa, Artificial Sequence
  GFR-binding peptide
  MOD_RES (34)..(35): Xaa is C or S
  MOD_RES (12)..(13)..(14)..(15)..(16): Xaa is A or G
  MOD_RES (17)..(18)..(19)..(20): Xaa is A or G or is absent
SEVTMNRHKRLXXXXXXXXXYYLISTASMKEPVXXPEPI

SEQ ID NO: 58698 - protein, 35 aa, Artificial Sequence
  GFR-binding peptide
  MOD_RES (2)..(35): Xaa is C or S
  MOD_RES (13)..(14)..(15)..(16)..(17): Xaa is A or G
  MOD_RES (18)..(19)..(20)..(21): Xaa is A or G or is absent
KXSKVVMPIKGYXXXXXXXXXFYLINIPSLDQPVX

SEQ ID NO: 58699 - protein, 38 aa, Artificial Sequence
  GFR-binding peptide
  MOD_RES (2)..(4)..(38): Xaa is C or S
  MOD_RES (16)..(17)..(18)..(19)..(20): Xaa is A or G
  MOD_RES (21)..(22)..(23)..(24): Xaa is A or G or is absent
SXGXRDVVMGYHYKLXXXXXXXXXKYLMSIPSMKTPTX

SEQ ID NO: 58700 - protein, 36 aa, Artificial Sequence; identical to SEQ ID NO: 2818
  GFR-binding peptide
  MOD_RES (2)..(4)..(36): Xaa is C or S

SEQ ID NO: 58701 - protein, 34 aa, Artificial Sequence; identical to SEQ ID NO: 31813
  GFR-binding peptide
  MOD_RES (32)..(33): Xaa is C or S

SEQ ID NO: 58702 - protein, 32 aa, Artificial Sequence; identical to SEQ ID NO: 2821
  GFR-binding peptide
  MOD_RES (11)..(12)..(13)..(14)..(15): Xaa is A or G
  MOD_RES (16)..(17)..(18)..(19): Xaa is A or G or is absent

SEQ ID NO: 58703 - protein, 40 aa, Artificial Sequence; identical to SEQ ID NO: 31819
  GFR-binding peptide
  MOD_RES (2)..(4)..(38): Xaa is C or S
  MOD_RES (16)..(17)..(18)..(19)..(20): Xaa is A or G
  MOD_RES (21)..(22)..(23)..(24): Xaa is A or G or is absent

SEQ ID NO: 58704 - protein, 39 aa, Artificial Sequence; identical to SEQ ID NO: 2823
  GFR-binding peptide
  MOD_RES (33)..(34): Xaa is C or S
  MOD_RES (11)..(12)..(13)..(14)..(15): Xaa is A or G
  MOD_RES (16)..(17)..(18)..(19): Xaa is A or G or is absent

SEQ ID NO: 58705 - protein, 34 aa, Artificial Sequence; identical to SEQ ID NO: 23816
  GFR-binding peptide
  MOD_RES (1)..(32)..(33): Xaa is C or S

SEQ ID NO: 58706 - protein, 40 aa, Artificial Sequence; identical to SEQ ID NO: 2825
  GFR-binding peptide
  MOD_RES (1)..(35)..(36): Xaa is C or S
  MOD_RES (13)..(14)..(15)..(16)..(17): Xaa is A or G
  MOD_RES (18)..(19)..(20)..(21): Xaa is A or G or is absent

SEQ ID NO: 58707 - protein, 33 aa, Artificial Sequence; identical to SEQ ID NO: 31822
  GFR-binding peptide
  MOD_RES (12)..(13)..(14)..(15)..(16): Xaa is A or G
  MOD_RES (17)..(18)..(19)..(20): Xaa is A or G or is absent

SEQ ID NO: 58708 - protein, 32 aa, Artificial Sequence; identical to SEQ ID NO: 2826
  GFR-binding peptide
  MOD_RES (11)..(12)..(13)..(14)..(15): Xaa is A or G
  MOD_RES (16)..(17)..(18)..(19): Xaa is A or G or is absent

SEQ ID NO: 58709 - protein, 39 aa, Artificial Sequence; identical to SEQ ID NO: 2831
  GFR-binding peptide
  MOD_RES (1)..(3)..(34)..(35): Xaa is C or S

SEQ ID NO: 58710 - protein, 38 aa, Artificial Sequence; identical to SEQ ID NO: 2832
  GFR-binding peptide
  MOD_RES (1)..(35)..(36): Xaa is C or S
  MOD_RES (13)..(14)..(15)..(16)..(17): Xaa is A or G
  MOD_RES (18)..(19)..(20)..(21): Xaa is A or G or is absent

SEQ ID NO: 58711 - protein, 35 aa, Artificial Sequence; identical to SEQ ID NO: 23823
  GFR-binding peptide
  MOD_RES (1)..(33)..(34): Xaa is C or S

SEQ ID NO: 58712 - protein, 39 aa, Artificial Sequence; identical to SEQ ID NO: 2834
  GFR-binding peptide
  MOD_RES (2)..(4)..(36)..(37): Xaa is C or S

SEQ ID NO: 58713 - protein, 34 aa, Artificial Sequence; identical to SEQ ID NO: 31830
  GFR-binding peptide
  MOD_RES (1)..(33): Xaa is C or S

SEQ ID NO: 58714 - protein, 37 aa, Artificial Sequence
  GFR-binding peptide
  MOD_RES (32)..(33): Xaa is C or S
RDVVMGRHKRLIIQQKDNYYLMSTASMKTPTXXPGAS

SEQ ID NO: 58715 - protein, 37 aa, Artificial Sequence
  GFR-binding peptide
  MOD_RES (34)..(35): Xaa is C or S
  MOD_RES (12)..(13)..(14)..(15)..(16): Xaa is A or G
  MOD_RES (17)..(18)..(19)..(20): Xaa is A or G or is absent
RDVVMGRHKRLXXXXXXXXXYYLMSTASMKTPTXXPG

SEQ ID NO: 58716 - protein, 35 aa, Artificial Sequence; identical to SEQ ID NO: 2836
  GFR-binding peptide
  MOD_RES (2)..(34)..(35): Xaa is C or S

SEQ ID NO: 58717 - protein, 36 aa, Artificial Sequence; identical to SEQ ID NO: 2838
  GFR-binding peptide
  MOD_RES (33)..(34): Xaa is C or S
  MOD_RES (11)..(12)..(13)..(14)..(15): Xaa is A or G
  MOD_RES (16)..(17)..(18)..(19): Xaa is A or G or is absent

SEQ ID NO: 58718 - protein, 38 aa, Artificial Sequence; identical to SEQ ID NO: 31831
  GFR-binding peptide
  MOD_RES (1)..(35)..(36): Xaa is C or S
  MOD_RES (13)..(14)..(15)..(16)..(17): Xaa is A or G
  MOD_RES (18)..(19)..(20)..(21): Xaa is A or G or is absent

SEQ ID NO: 58719 - protein, 38 aa, Artificial Sequence; identical to SEQ ID NO: 2840
  GFR-binding peptide
  MOD_RES (1)..(3)..(36)..(37): Xaa is C or S

SEQ ID NO: 58720 - protein, 33 aa, Artificial Sequence; identical to SEQ ID NO: 31832
  GFR-binding peptide
  MOD_RES (12)..(13)..(14)..(15)..(16): Xaa is A or G
  MOD_RES (17)..(18)..(19)..(20): Xaa is A or G or is absent

SEQ ID NO: 58721 - protein, 40 aa, Artificial Sequence; identical to SEQ ID NO: 31834
  GFR-binding peptide
  MOD_RES (1)..(3)..(35)..(36): Xaa is C or S

SEQ ID NO: 58722 - protein, 36 aa, Artificial Sequence; identical to SEQ ID NO: 31835
  GFR-binding peptide
  MOD_RES (1)..(3)..(35)..(36): Xaa is C or S

SEQ ID NO: 58723 - protein, 39 aa, Artificial Sequence; identical to SEQ ID NO: 2841
  GFR-binding peptide
  MOD_RES (1)..(3)..(34)..(35): Xaa is C or S

SEQ ID NO: 58724 - protein, 34 aa, Artificial Sequence; identical to SEQ ID NO: 2844
  GFR-binding peptide
  MOD_RES (34)..(34): Xaa is C or S
  MOD_RES (12)..(13)..(14)..(15)..(16): Xaa is A or G
  MOD_RES (17)..(18)..(19)..(20): Xaa is A or G or is absent

SEQ ID NO: 58725 - protein, 38 aa, Artificial Sequence; identical to SEQ ID NO: 2845
  GFR-binding peptide
  MOD_RES (2)..(4)..(36): Xaa is C or S

SEQ ID NO: 58726 - protein, 37 aa, Artificial Sequence; identical to SEQ ID NO: 2846
  GFR-binding peptide
  MOD_RES (1)..(32)..(33): Xaa is C or S

SEQ ID NO: 58727 - protein, 33 aa, Artificial Sequence; identical to SEQ ID NO: 31844
  GFR-binding peptide
  MOD_RES (12)..(13)..(14)..(15)..(16): Xaa is A or G
  MOD_RES (17)..(18)..(19)..(20): Xaa is A or G or is absent

SEQ ID NO: 58728 - protein, 33 aa, Artificial Sequence
  GFR-binding peptide
  MOD_RES (33)..(33): Xaa is C or S
  MOD_RES (11)..(12)..(13)..(14)..(15): Xaa is A or G
  MOD_RES (16)..(17)..(18)..(19): Xaa is A or G or is absent
SKVIMPIKGYXXXXXXXXXFYLINIPSLDQSVX

SEQ ID NO: 58729 - protein, 37 aa, Artificial Sequence; identical to SEQ ID NO: 31845
  GFR-binding peptide
  MOD_RES (2)..(4)..(36)..(37): Xaa is C or S

SEQ ID NO: 58730 - protein, 39 aa, Artificial Sequence; identical to SEQ ID NO: 2851
  GFR-binding peptide
  MOD_RES (1)..(35)..(36): Xaa is C or S
  MOD_RES (13)..(14)..(15)..(16)..(17): Xaa is A or G
  MOD_RES (18)..(19)..(20)..(21): Xaa is A or G or is absent

SEQ ID NO: 58731 - protein, 34 aa, Artificial Sequence
  GFR-binding peptide
  MOD_RES (1)..(34): Xaa is C or S
  MOD_RES (12)..(13)..(14)..(15)..(16): Xaa is A or G
  MOD_RES (17)..(18)..(19)..(20): Xaa is A or G or is absent
XSRVIMPIKGYXXXXXXXXXFYLINIPSLAQPVX

SEQ ID NO: 58732 - protein, 39 aa, Artificial Sequence; identical to SEQ ID NO: 23840
  GFR-binding peptide
  MOD_RES (33)..(34): Xaa is C or S
  MOD_RES (11)..(12)..(13)..(14)..(15): Xaa is A or G
  MOD_RES (16)..(17)..(18)..(19): Xaa is A or G or is absent

SEQ ID NO: 58733 - protein, 37 aa, Artificial Sequence
  GFR-binding peptide
  MOD_RES (2)..(36)..(37): Xaa is C or S
  MOD_RES (14)..(15)..(16)..(17)..(18): Xaa is A or G
  MOD_RES (19)..(20)..(21)..(22): Xaa is A or G or is absent
GXRDVVMGEYKFKXXXXXXXXXLYLMSIPEMKTPTXX

SEQ ID NO: 58734 - protein, 38 aa, Artificial Sequence; identical to SEQ ID NO: 2852
  GFR-binding peptide
  MOD_RES (32)..(33): Xaa is C or S

SEQ ID NO: 58735 - protein, 43 aa, Artificial Sequence; identical to SEQ ID NO: 2853
  GFR-binding peptide
  MOD_RES (1)..(3)..(37)..(38): Xaa is C or S
  MOD_RES (15)..(16)..(17)..(18)..(19): Xaa is A or G
  MOD_RES (20)..(21)..(22)..(23): Xaa is A or G or is absent

SEQ ID NO: 58736 - protein, 40 aa, Artificial Sequence; identical to SEQ ID NO: 31851
  GFR-binding peptide
  MOD_RES (2)..(4)..(38)..(39): Xaa is C or S
  MOD_RES (16)..(17)..(18)..(19)..(20): Xaa is A or G
  MOD_RES (21)..(22)..(23)..(24): Xaa is A or G or is absent

SEQ ID NO: 58737 - protein, 36 aa, Artificial Sequence
  GFR-binding peptide
  MOD_RES (1)..(3)..(34)..(35): Xaa is C or S
XGXEEVIMRHKRLLLVRGNDYYLMSTASTKVPAXXT

SEQ ID NO: 58738 - protein, 38 aa, Artificial Sequence; identical to SEQ ID NO: 10322
  GFR-binding peptide
  MOD_RES (2)..(4)..(38): Xaa is C or S
  MOD_RES (16)..(17)..(18)..(19)..(20): Xaa is A or G
  MOD_RES (21)..(22)..(23)..(24): Xaa is A or G or is absent

SEQ ID NO: 58739 - protein, 37 aa, Artificial Sequence
  GFR-binding peptide
  MOD_RES (32)..(33): Xaa is C or S
SEVTMNPIKGYVVNKNEDFYLINIPSMKEPVXXPEPI

SEQ ID NO: 58740 - protein, 35 aa, Artificial Sequence; identical to SEQ ID NO: 23844
  GFR-binding peptide
  MOD_RES (1)..(33)..(34): Xaa is C or S

SEQ ID NO: 58741 - protein, 35 aa, Artificial Sequence; identical to SEQ ID NO: 2856
  GFR-binding peptide
  MOD_RES (1)..(3)..(35): Xaa is C or S

SEQ ID NO: 58742 - protein, 41 aa, Artificial Sequence; identical to SEQ ID NO: 31853
  GFR-binding peptide
  MOD_RES (1)..(3)..(37)..(38): Xaa is C or S
  MOD_RES (15)..(16)..(17)..(18)..(19): Xaa is A or G
  MOD_RES (20)..(21)..(22)..(23): Xaa is A or G or is absent

SEQ ID NO: 58743 - protein, 35 aa, Artificial Sequence; identical to SEQ ID NO: 31855
  GFR-binding peptide
  MOD_RES (2)..(34)..(35): Xaa is C or S

SEQ ID NO: 58744 - protein, 31 aa, Artificial Sequence; identical to SEQ ID NO: 31856
  GFR-binding peptide

SEQ ID NO: 58745 - protein, 35 aa, Artificial Sequence; identical to SEQ ID NO: 31857
  GFR-binding peptide
  MOD_RES (31)..(32): Xaa is C or S

SEQ ID NO: 58746 - protein, 41 aa, Artificial Sequence; identical to SEQ ID NO: 23847
  GFR-binding peptide
  MOD_RES (2)..(4)..(36)..(37): Xaa is C or S

SEQ ID NO: 58747 - protein, 36 aa, Artificial Sequence; identical to SEQ ID NO: 31860
  GFR-binding peptide
  MOD_RES (1)..(3)..(35)..(36): Xaa is C or S

SEQ ID NO: 58748 - protein, 35 aa, Artificial Sequence; identical to SEQ ID NO: 56807
  GFR-binding peptide
  MOD_RES (2)..(2): Xaa is C or S
  MOD_RES (14)..(15)..(16)..(17)..(18): Xaa is A or G
  MOD_RES (19)..(20)..(21)..(22): Xaa is A or G or is absent

SEQ ID NO: 58749 - protein, 40 aa, Artificial Sequence; identical to SEQ ID NO: 2857
  GFR-binding peptide
  MOD_RES (2)..(35)..(36): Xaa is C or S
  MOD_RES (13)..(14)..(15)..(16)..(17): Xaa is A or G
  MOD_RES (18)..(19)..(20)..(21): Xaa is A or G or is absent

SEQ ID NO: 58750 - protein, 33 aa, Artificial Sequence; identical to SEQ ID NO: 31861
  GFR-binding peptide
  MOD_RES (31)..(32): Xaa is C or S

SEQ ID NO: 58751 - protein, 35 aa, Artificial Sequence; identical to SEQ ID NO: 23851
  GFR-binding peptide
  MOD_RES (1)..(33)..(34): Xaa is C or S

SEQ ID NO: 58752 - protein, 33 aa, Artificial Sequence; identical to SEQ ID NO: 56810
  GFR-binding peptide
  MOD_RES (33)..(33): Xaa is C or S
  MOD_RES (11)..(12)..(13)..(14)..(15): Xaa is A or G
  MOD_RES (16)..(17)..(18)..(19): Xaa is A or G or is absent

SEQ ID NO: 58753 - protein, 40 aa, Artificial Sequence; identical to SEQ ID NO: 2862
  GFR-binding peptide
  MOD_RES (1)..(3)..(37)..(38): Xaa is C or S
  MOD_RES (15)..(16)..(17)..(18)..(19): Xaa is A or G
  MOD_RES (20)..(21)..(22)..(23): Xaa is A or G or is absent

SEQ ID NO: 58754 - protein, 34 aa, Artificial Sequence
  GFR-binding peptide
  MOD_RES (1)..(3): Xaa is C or S
XGXRDVVMGYHYKLIIQQKDNKYLMSIPSMKTPT

SEQ ID NO: 58755 - protein, 41 aa, Artificial Sequence
  GFR-binding peptide
  MOD_RES (2)..(36)..(37): Xaa is C or S
  MOD_RES (14)..(15)..(16)..(17)..(18): Xaa is A or G
  MOD_RES (19)..(20)..(21)..(22): Xaa is A or G or is absent
GXSEVVMDYHYKLXXXXXXXXXKYLISIPSLRTPVXXTPPT

SEQ ID NO: 58756 - protein, 41 aa, Artificial Sequence
  GFR-binding peptide
  MOD_RES (1)..(3)..(35)..(36): Xaa is C or S
XGXESVAMGRHKRLYTVVGKDYYLISTASLKTPVXXAKSAK

SEQ ID NO: 58757 - protein, 44 aa, Artificial Sequence; identical to SEQ ID NO: 2864
  GFR-binding peptide
  MOD_RES (2)..(4)..(38): Xaa is C or S
  MOD_RES (16)..(17)..(18)..(19)..(20): Xaa is A or G
  MOD_RES (21)..(22)..(23)..(24): Xaa is A or G or is absent

SEQ ID NO: 58758 - protein, 36 aa, Artificial Sequence; identical to SEQ ID NO: 2865
  GFR-binding peptide
  MOD_RES (2)..(35)..(36): Xaa is C or S
  MOD_RES (13)..(14)..(15)..(16)..(17): Xaa is A or G
  MOD_RES (18)..(19)..(20)..(21): Xaa is A or G or is absent

SEQ ID NO: 58759 - protein, 38 aa, Artificial Sequence
  GFR-binding peptide
  MOD_RES (1)..(35)..(36): Xaa is C or S
  MOD_RES (13)..(14)..(15)..(16)..(17): Xaa is A or G
  MOD_RES (18)..(19)..(20)..(21): Xaa is A or G or is absent
XRDVVMGEYKFKXXXXXXXXXLYLMSIPEMKTPTXXPG

SEQ ID NO: 58760 - protein, 41 aa, Artificial Sequence
  GFR-binding peptide
  MOD_RES (1)..(3)..(35)..(36): Xaa is C or S
XGXSEVVMDYHYKLVVNNASDKYLISIPSLRTPVXXTPPTS

SEQ ID NO: 58761 - protein, 39 aa, Artificial Sequence
  GFR-binding peptide
  MOD_RES (1)..(3)..(37)..(38): Xaa is C or S
  MOD_RES (15)..(16)..(17)..(18)..(19): Xaa is A or G
  MOD_RES (20)..(21)..(22)..(23): Xaa is A or G or is absent
XGXRDVVMGEYKFKXXXXXXXXXLYLMSIPEMKTPTXXP

SEQ ID NO: 58762 - protein, 42 aa, Artificial Sequence; identical to SEQ ID NO: 2867
  GFR-binding peptide
  MOD_RES (1)..(36)..(37): Xaa is C or S
  MOD_RES (14)..(15)..(16)..(17)..(18): Xaa is A or G
  MOD_RES (19)..(20)..(21)..(22): Xaa is A or G or is absent

SEQ ID NO: 58763 - protein, 35 aa, Artificial Sequence; identical to SEQ ID NO: 2871
  GFR-binding peptide
  MOD_RES (1)..(34)..(35): Xaa is C or S
  MOD_RES (12)..(13)..(14)..(15)..(16): Xaa is A or G
  MOD_RES (17)..(18)..(19)..(20): Xaa is A or G or is absent

SEQ ID NO: 58764 - protein, 37 aa, Artificial Sequence
  GFR-binding peptide
  MOD_RES (32)..(33): Xaa is C or S
RDVVMGEYKFKIIQQKDNLYLMSIPEMKTPTXXPGAS

SEQ ID NO: 58765 - protein, 41 aa, Artificial Sequence; identical to SEQ ID NO: 31874
  GFR-binding peptide
  MOD_RES (1)..(35)..(36): Xaa is C or S
  MOD_RES (13)..(14)..(15)..(16)..(17): Xaa is A or G
  MOD_RES (18)..(19)..(20)..(21): Xaa is A or G or is absent

SEQ ID NO: 58766 - protein, 37 aa, Artificial Sequence; identical to SEQ ID NO: 23863
  GFR-binding peptide
  MOD_RES (31)..(32): Xaa is C or S

SEQ ID NO: 58767 - protein, 36 aa, Artificial Sequence
  GFR-binding peptide
  MOD_RES (33)..(34): Xaa is C or S
  MOD_RES (11)..(12)..(13)..(14)..(15): Xaa is A or G
  MOD_RES (16)..(17)..(18)..(19): Xaa is A or G or is absent
EEVIMEYKFKXXXXXXXXXLYLMSIPETKVPAXXTS

SEQ ID NO: 58768 - protein, 39 aa, Artificial Sequence; identical to SEQ ID NO: 23864
  GFR-binding peptide
  MOD_RES (1)..(33)..(34): Xaa is C or S

SEQ ID NO: 58769 - protein, 38 aa, Artificial Sequence
  GFR-binding peptide
  MOD_RES (1)..(33)..(34): Xaa is C or S
XSEVVMDEYKFKVVNNASDLYLISIPELRTPVXXTPPT

SEQ ID NO: 58770 - protein, 42 aa, Artificial Sequence; identical to SEQ ID NO: 23866
  GFR-binding peptide
  MOD_RES (2)..(4)..(38)..(39): Xaa is C or S
  MOD_RES (16)..(17)..(18)..(19)..(20): Xaa is A or G
  MOD_RES (21)..(22)..(23)..(24): Xaa is A or G or is absent

SEQ ID NO: 58771 - protein, 38 aa, Artificial Sequence
  GFR-binding peptide
  MOD_RES (1)..(35)..(36): Xaa is C or S
  MOD_RES (13)..(14)..(15)..(16)..(17): Xaa is A or G
  MOD_RES (18)..(19)..(20)..(21): Xaa is A or G or is absent
XAEVVMDRHKRLXXXXXXXXXYYLISTASLRAPVXXSA

SEQ ID NO: 58772 - protein, 35 aa, Artificial Sequence
  GFR-binding peptide
  MOD_RES (1)..(34)..(35): Xaa is C or S
  MOD_RES (12)..(13)..(14)..(15)..(16): Xaa is A or G
  MOD_RES (17)..(18)..(19)..(20): Xaa is A or G or is absent
XSKVIMPIKGYXXXXXXXXXFYLINIPSLDQSVXX

SEQ ID NO: 58773 - protein, 34 aa, Artificial Sequence; identical to SEQ ID NO: 31883
  GFR-binding peptide
  MOD_RES (32)..(33): Xaa is C or S

SEQ ID NO: 58774 - protein, 31 aa, Artificial Sequence; identical to SEQ ID NO: 2881
  GFR-binding peptide

SEQ ID NO: 58775 - protein, 40 aa, Artificial Sequence; identical to SEQ ID NO: 2883
  GFR-binding peptide
  MOD_RES (2)..(4)..(38)..(39): Xaa is C or S
  MOD_RES (16)..(17)..(18)..(19)..(20): Xaa is A or G
  MOD_RES (21)..(22)..(23)..(24): Xaa is A or G or is absent

SEQ ID NO: 58776 - protein, 33 aa, Artificial Sequence; identical to SEQ ID NO: 23875
  GFR-binding peptide
  MOD_RES (1)..(33): Xaa is C or S

SEQ ID NO: 58777 - protein, 40 aa, Artificial Sequence; identical to SEQ ID NO: 31891
  GFR-binding peptide
  MOD_RES (1)..(35)..(36): Xaa is C or S
  MOD_RES (13)..(14)..(15)..(16)..(17): Xaa is A or G
  MOD_RES (18)..(19)..(20)..(21): Xaa is A or G or is absent

SEQ ID NO: 58778 - protein, 38 aa, Artificial Sequence; identical to SEQ ID NO: 31892
  GFR-binding peptide
  MOD_RES (2)..(4): Xaa is C or S
  MOD_RES (17)..(18)..(19)..(20)..(21): Xaa is A or G
  MOD_RES (22)..(23)..(24)..(25): Xaa is A or G or is absent

SEQ ID NO: 58779 - protein, 36 aa, Artificial Sequence
  GFR-binding peptide
  MOD_RES (31)..(32): Xaa is C or S
EEVIMRHKRLLLVRGNDYYLMSTASTKVPAXXTSPV

SEQ ID NO: 58780 - protein, 30 aa, Artificial Sequence
  GFR-binding peptide
DVVMGEYKFKIIQQKDNLYLMSIPEMKTPT

SEQ ID NO: 58781 - protein, 41 aa, Artificial Sequence; identical to SEQ ID NO: 2890
  GFR-binding peptide
  MOD_RES (2)..(4)..(38)..(39): Xaa is C or S
  MOD_RES (16)..(17)..(18)..(19)..(20): Xaa is A or G
  MOD_RES (21)..(22)..(23)..(24): Xaa is A or G or is absent

SEQ ID NO: 58782 - protein, 37 aa, Artificial Sequence; identical to SEQ ID NO: 23885
  GFR-binding peptide
  MOD_RES (1)..(3)..(34)..(35): Xaa is C or S

SEQ ID NO: 58783 - protein, 36 aa, Artificial Sequence
  GFR-binding peptide
  MOD_RES (32)..(33): Xaa is C or S
SEVVMDEYKFKVVNNASDLYLISIPELRTPVXXTPP

SEQ ID NO: 58784 - protein, 40 aa, Artificial Sequence; identical to SEQ ID NO: 23886
  GFR-binding peptide
  MOD_RES (34)..(35): Xaa is C or S
  MOD_RES (12)..(13)..(14)..(15)..(16): Xaa is A or G
  MOD_RES (17)..(18)..(19)..(20): Xaa is A or G or is absent

SEQ ID NO: 58785 - protein, 31 aa, Artificial Sequence
  GFR-binding peptide
  MOD_RES (31)..(31): Xaa is C or S
EVTMNPIKGYVVNKNEDFYLINIPSMKEPVX

SEQ ID NO: 58786 - protein, 37 aa, Artificial Sequence
  GFR-binding peptide
  MOD_RES (1)..(35)..(36): Xaa is C or S
  MOD_RES (13)..(14)..(15)..(16)..(17): Xaa is A or G
  MOD_RES (18)..(19)..(20)..(21): Xaa is A or G or is absent
XSEVVMDYHYKLXXXXXXXXXKYLISIPSLRTPVXXT

SEQ ID NO: 58787 - protein, 33 aa, Artificial Sequence; identical to SEQ ID NO: 31902
  GFR-binding peptide
  MOD_RES (32)..(33): Xaa is C or S

SEQ ID NO: 58788 - protein, 32 aa, Artificial Sequence
  GFR-binding peptide
  MOD_RES (11)..(12)..(13)..(14)..(15): Xaa is A or G
  MOD_RES (16)..(17)..(18)..(19): Xaa is A or G or is absent
EVVMDRHKRLXXXXXXXXXYYLISTASLRTPV

SEQ ID NO: 58789 - protein, 37 aa, Artificial Sequence; identical to SEQ ID NO: 31906
  GFR-binding peptide
  MOD_RES (1)..(3)..(35)..(36): Xaa is C or S

SEQ ID NO: 58790 - protein, 37 aa, Artificial Sequence; identical to SEQ ID NO: 2896
  GFR-binding peptide
  MOD_RES (2)..(4)..(35)..(36): Xaa is C or S

SEQ ID NO: 58791 - protein, 38 aa, Artificial Sequence; identical to SEQ ID NO: 10361
  GFR-binding peptide
  MOD_RES (32)..(33): Xaa is C or S

SEQ ID NO: 58792 - protein, 37 aa, Artificial Sequence; identical to SEQ ID NO: 31910
  GFR-binding peptide
  MOD_RES (1)..(3)..(37): Xaa is C or S
  MOD_RES (15)..(16)..(17)..(18)..(19): Xaa is A or G
  MOD_RES (20)..(21)..(22)..(23): Xaa is A or G or is absent

SEQ ID NO: 58793 - protein, 36 aa, Artificial Sequence
  GFR-binding peptide
  MOD_RES (1)..(32)..(33): Xaa is C or S
XEEVIMEYKFKLLVRGNDLYLMSIPETKVPAXXTSP

SEQ ID NO: 58794 - protein, 35 aa, Artificial Sequence; identical to SEQ ID NO: 2901
  GFR-binding peptide
  MOD_RES (1)..(35): Xaa is C or S
  MOD_RES (13)..(14)..(15)..(16)..(17): Xaa is A or G
  MOD_RES (18)..(19)..(20)..(21): Xaa is A or G or is absent

SEQ ID NO: 58795 - protein, 32 aa, Artificial Sequence; identical to SEQ ID NO: 31914
  GFR-binding peptide
  MOD_RES (32)..(32): Xaa is C or S

SEQ ID NO: 58796 - protein, 38 aa, Artificial Sequence; identical to SEQ ID NO: 56853
  GFR-binding peptide
  MOD_RES (33)..(34): Xaa is C or S
  MOD_RES (11)..(12)..(13)..(14)..(15): Xaa is A or G
  MOD_RES (16)..(17)..(18)..(19): Xaa is A or G or is absent

SEQ ID NO: 58797 - protein, 36 aa, Artificial Sequence; identical to SEQ ID NO: 23899
  GFR-binding peptide
  MOD_RES (2)..(36): Xaa is C or S
  MOD_RES (14)..(15)..(16)..(17)..(18): Xaa is A or G
  MOD_RES (19)..(20)..(21)..(22): Xaa is A or G or is absent

SEQ ID NO: 58798 - protein, 41 aa, Artificial Sequence; identical to SEQ ID NO: 23900
  GFR-binding peptide
  MOD_RES (1)..(3)..(35)..(36): Xaa is C or S

SEQ ID NO: 58799 - protein, 44 aa, Artificial Sequence; identical to SEQ ID NO: 2905
  GFR-binding peptide
  MOD_RES (2)..(4)..(38)..(39): Xaa is C or S
  MOD_RES (16)..(17)..(18)..(19)..(20): Xaa is A or G
  MOD_RES (21)..(22)..(23)..(24): Xaa is A or G or is absent

SEQ ID NO: 58800 - protein, 32 aa, Artificial Sequence; identical to SEQ ID NO: 2906
  GFR-binding peptide
  MOD_RES (32)..(32): Xaa is C or S

SEQ ID NO: 58801 - protein, 39 aa, Artificial Sequence; identical to SEQ ID NO: 23901
  GFR-binding peptide
  MOD_RES (2)..(4)..(35)..(36): Xaa is C or S

SEQ ID NO: 58802 - protein, 38 aa, Artificial Sequence; identical to SEQ ID NO: 2908
  GFR-binding peptide
  MOD_RES (2)..(4)..(36)..(37): Xaa is C or S

SEQ ID NO: 58803 - protein, 38 aa, Artificial Sequence; identical to SEQ ID NO: 2909
  GFR-binding peptide
  MOD_RES (2)..(4)..(37)..(38): Xaa is C or S
  MOD_RES (15)..(16)..(17)..(18)..(19): Xaa is A or G
  MOD_RES (20)..(21)..(22)..(23): Xaa is A or G or is absent

SEQ ID NO: 58804 - protein, 35 aa, Artificial Sequence; identical to SEQ ID NO: 23909
  GFR-binding peptide
  MOD_RES (32)..(33): Xaa is C or S

SEQ ID NO: 58805 - protein, 36 aa, Artificial Sequence; identical to SEQ ID NO: 10376
  GFR-binding peptide
  MOD_RES (31)..(32): Xaa is C or S

SEQ ID NO: 58806 - protein, 42 aa, Artificial Sequence; identical to SEQ ID NO: 2913
  GFR-binding peptide
  MOD_RES (2)..(4)..(37)..(38): Xaa is C or S
  MOD_RES (15)..(16)..(17)..(18)..(19): Xaa is A or G
  MOD_RES (20)..(21)..(22)..(23): Xaa is A or G or is absent

SEQ ID NO: 58807 - protein, 38 aa, Artificial Sequence; identical to SEQ ID NO: 23911
  GFR-binding peptide
  MOD_RES (1)..(33)..(34): Xaa is C or S

SEQ ID NO: 58808 - protein, 38 aa, Artificial Sequence
  GFR-binding peptide
  MOD_RES (34)..(35): Xaa is C or S
  MOD_RES (12)..(13)..(14)..(15)..(16): Xaa is A or G
  MOD_RES (17)..(18)..(19)..(20): Xaa is A or G or is absent
AEVVMDRHKRLXXXXXXXXXYYLISTASLRAPVXXSAP

SEQ ID NO: 58809 - protein, 33 aa, Artificial Sequence; identical to SEQ ID NO: 2917
  GFR-binding peptide
  MOD_RES (33)..(33): Xaa is C or S

SEQ ID NO: 58810 - protein, 40 aa, Artificial Sequence; identical to SEQ ID NO: 2919
  GFR-binding peptide
  MOD_RES (1)..(35)..(36): Xaa is C or S
  MOD_RES (13)..(14)..(15)..(16)..(17): Xaa is A or G
  MOD_RES (18)..(19)..(20)..(21): Xaa is A or G or is absent

SEQ ID NO: 58811 - protein, 35 aa, Artificial Sequence
  GFR-binding peptide
  MOD_RES (1)..(3)..(35): Xaa is C or S
XGXAEVVMDRHKRLVVNNAADYYLISTASLRAPVX

SEQ ID NO: 58812 - protein, 40 aa, Artificial Sequence; identical to SEQ ID NO: 2924
  GFR-binding peptide
  MOD_RES (2)..(4)..(37)..(38): Xaa is C or S
  MOD_RES (15)..(16)..(17)..(18)..(19): Xaa is A or G
  MOD_RES (20)..(21)..(22)..(23): Xaa is A or G or is absent

SEQ ID NO: 58813 - protein, 37 aa, Artificial Sequence; identical to SEQ ID NO: 2925
  GFR-binding peptide
  MOD_RES (1)..(3): Xaa is C or S
  MOD_RES (16)..(17)..(18)..(19)..(20): Xaa is A or G
  MOD_RES (21)..(22)..(23)..(24): Xaa is A or G or is absent

SEQ ID NO: 58814 - protein, 35 aa, Artificial Sequence; identical to SEQ ID NO: 56888
  GFR-binding peptide
  MOD_RES (1)..(35): Xaa is C or S
  MOD_RES (13)..(14)..(15)..(16)..(17): Xaa is A or G
  MOD_RES (18)..(19)..(20)..(21): Xaa is A or G or is absent

SEQ ID NO: 58815 - protein, 41 aa, Artificial Sequence; identical to SEQ ID NO: 31942
  GFR-binding peptide
  MOD_RES (1)..(3)..(35)..(36): Xaa is C or S

SEQ ID NO: 58816 - protein, 36 aa, Artificial Sequence; identical to SEQ ID NO: 31944
  GFR-binding peptide
  MOD_RES (32)..(32): Xaa is C or S

SEQ ID NO: 58817 - protein, 37 aa, Artificial Sequence; identical to SEQ ID NO: 31947
  GFR-binding peptide
  MOD_RES (34)..(35): Xaa is C or S
  MOD_RES (12)..(13)..(14)..(15)..(16): Xaa is A or G
  MOD_RES (17)..(18)..(19)..(20): Xaa is A or G or is absent

SEQ ID NO: 58818 - protein, 35 aa, Artificial Sequence
  GFR-binding peptide
  MOD_RES (1)..(3)..(35): Xaa is C or S
XAXSEVTMNEYKFKVVNKNEDLYLISIPEMKEPVX

SEQ ID NO: 58819 - protein, 41 aa, Artificial Sequence; identical to SEQ ID NO: 31954
  GFR-binding peptide
  MOD_RES (2)..(4)..(38)..(39): Xaa is C or S
  MOD_RES (16)..(17)..(18)..(19)..(20): Xaa is A or G
  MOD_RES (21)..(22)..(23)..(24): Xaa is A or G or is absent

SEQ ID NO: 58820 - protein, 38 aa, Artificial Sequence; identical to SEQ ID NO: 2944
  GFR-binding peptide
  MOD_RES (34)..(35): Xaa is C or S
  MOD_RES (12)..(13)..(14)..(15)..(16): Xaa is A or G
  MOD_RES (17)..(18)..(19)..(20): Xaa is A or G or is absent

SEQ ID NO: 58821 - protein, 39 aa, Artificial Sequence; identical to SEQ ID NO: 31956
  GFR-binding peptide
  MOD_RES (34)..(35): Xaa is C or S
  MOD_RES (12)..(13)..(14)..(15)..(16): Xaa is A or G
  MOD_RES (17)..(18)..(19)..(20): Xaa is A or G or is absent

SEQ ID NO: 58822 - protein, 34 aa, Artificial Sequence; identical to SEQ ID NO: 56906
  GFR-binding peptide
  MOD_RES (2)..(2): Xaa is C or S
  MOD_RES (13)..(14)..(15)..(16)..(17): Xaa is A or G
  MOD_RES (18)..(19)..(20)..(21): Xaa is A or G or is absent

SEQ ID NO: 58823 - protein, 39 aa, Artificial Sequence; identical to SEQ ID NO: 31959
  GFR-binding peptide
  MOD_RES (1)..(33)..(34): Xaa is C or S

SEQ ID NO: 58824 - protein, 34 aa, Artificial Sequence; identical to SEQ ID NO: 2948
  GFR-binding peptide
  MOD_RES (2)..(4): Xaa is C or S

SEQ ID NO: 58825 - protein, 35 aa, Artificial Sequence; identical to SEQ ID NO: 2950
  GFR-binding peptide
  MOD_RES (1)..(33)..(34): Xaa is C or S

SEQ ID NO: 58826 - protein, 31 aa, Artificial Sequence; identical to SEQ ID NO: 31967
  GFR-binding peptide

SEQ ID NO: 58827 - protein, 32 aa, Artificial Sequence; identical to SEQ ID NO: 2953
  GFR-binding peptide
  MOD_RES (11)..(12)..(13)..(14)..(15): Xaa is A or G
  MOD_RES (16)..(17)..(18)..(19): Xaa is A or G or is absent

SEQ ID NO: 58828 - protein, 40 aa, Artificial Sequence; identical to SEQ ID NO: 2955
  GFR-binding peptide
  MOD_RES (1)..(34)..(35): Xaa is C or S
  MOD_RES (12)..(13)..(14)..(15)..(16): Xaa is A or G
  MOD_RES (17)..(18)..(19)..(20): Xaa is A or G or is absent

SEQ ID NO: 58829 - protein, 37 aa, Artificial Sequence; identical to SEQ ID NO: 23957
  GFR-binding peptide
  MOD_RES (1)..(33)..(34): Xaa is C or S

SEQ ID NO: 58830 - protein, 35 aa, Artificial Sequence
  GFR-binding peptide
  MOD_RES (33)..(34): Xaa is C or S
  MOD_RES (11)..(12)..(13)..(14)..(15): Xaa is A or G
  MOD_RES (16)..(17)..(18)..(19): Xaa is A or G or is absent
EEVIMEYKFKXXXXXXXXXLYLMSIPETKVPAXXT

SEQ ID NO: 58831 - protein, 41 aa, Artificial Sequence; identical to SEQ ID NO: 56923
  GFR-binding peptide
  MOD_RES (2)..(4)..(36)..(37): Xaa is C or S

SEQ ID NO: 58832 - protein, 39 aa, Artificial Sequence; identical to SEQ ID NO: 2958
  GFR-binding peptide
  MOD_RES (2)..(34): Xaa is C or S

SEQ ID NO: 58833 - protein, 37 aa, Artificial Sequence; identical to SEQ ID NO: 56925
  GFR-binding peptide
  MOD_RES (32)..(33): Xaa is C or S

SEQ ID NO: 58834 - protein, 39 aa, Artificial Sequence; identical to SEQ ID NO: 2962
  GFR-binding peptide
  MOD_RES (1)..(3)..(36)..(37): Xaa is C or S
  MOD_RES (14)..(15)..(16)..(17)..(18): Xaa is A or G
  MOD_RES (19)..(20)..(21)..(22): Xaa is A or G or is absent

SEQ ID NO: 58835 - protein, 35 aa, Artificial Sequence; identical to SEQ ID NO: 2964
  GFR-binding peptide
  MOD_RES (2)..(4): Xaa is C or S

SEQ ID NO: 58836 - protein, 37 aa, Artificial Sequence; identical to SEQ ID NO: 31979
  GFR-binding peptide
  MOD_RES (2)..(33)..(34): Xaa is C or S

SEQ ID NO: 58837 - protein, 35 aa, Artificial Sequence
  GFR-binding peptide
  MOD_RES (1)..(35): Xaa is C or S
  MOD_RES (13)..(14)..(15)..(16)..(17): Xaa is A or G
  MOD_RES (18)..(19)..(20)..(21): Xaa is A or G or is absent
XRDVVMGEYKFKXXXXXXXXXLYLMSIPEMKTPTX

SEQ ID NO: 58838 - protein, 32 aa, Artificial Sequence; identical to SEQ ID NO: 2969
  GFR-binding peptide
  MOD_RES (11)..(12)..(13)..(14)..(15): Xaa is A or G
  MOD_RES (16)..(17)..(18)..(19): Xaa is A or G or is absent

SEQ ID NO: 58839 - protein, 33 aa, Artificial Sequence; identical to SEQ ID NO: 23966
  GFR-binding peptide
  MOD_RES (2)..(2): Xaa is C or S

SEQ ID NO: 58840 - protein, 41 aa, Artificial Sequence
  GFR-binding peptide
  MOD_RES (1)..(35)..(36): Xaa is C or S
  MOD_RES (13)..(14)..(15)..(16)..(17): Xaa is A or G
  MOD_RES (18)..(19)..(20)..(21): Xaa is A or G or is absent
XSEVTMNYHYKLXXXXXXXXXKYLISIPSMKEPVXXPEPIG

SEQ ID NO: 58841 - protein, 37 aa, Artificial Sequence; identical to SEQ ID NO: 2970
  GFR-binding peptide
  MOD_RES (2)..(36)..(37): Xaa is C or S
  MOD_RES (14)..(15)..(16)..(17)..(18): Xaa is A or G
  MOD_RES (19)..(20)..(21)..(22): Xaa is A or G or is absent

SEQ ID NO: 58842 - protein, 37 aa, Artificial Sequence; identical to SEQ ID NO: 31981
  GFR-binding peptide
  MOD_RES (1)..(32)..(33): Xaa is C or S

SEQ ID NO: 58843 - protein, 37 aa, Artificial Sequence; identical to SEQ ID NO: 31982
  GFR-binding peptide
  MOD_RES (34)..(35): Xaa is C or S
  MOD_RES (12)..(13)..(14)..(15)..(16): Xaa is A or G
  MOD_RES (17)..(18)..(19)..(20): Xaa is A or G or is absent

SEQ ID NO: 58844 - protein, 37 aa, Artificial Sequence; identical to SEQ ID NO: 2971
  GFR-binding peptide
  MOD_RES (1)..(34)..(35): Xaa is C or S

SEQ ID NO: 58845 - protein, 36 aa, Artificial Sequence
  GFR-binding peptide
  MOD_RES (1)..(3): Xaa is C or S
  MOD_RES (15)..(16)..(17)..(18)..(19): Xaa is A or G
  MOD_RES (20)..(21)..(22)..(23): Xaa is A or G or is absent
XAXSEVTMNEYKFKXXXXXXXXXLYLISIPEMKEPV

SEQ ID NO: 58846 - protein, 41 aa, Artificial Sequence
  GFR-binding peptide
  MOD_RES (1)..(3)..(37)..(38): Xaa is C or S
  MOD_RES (15)..(16)..(17)..(18)..(19): Xaa is A or G
  MOD_RES (20)..(21)..(22)..(23): Xaa is A or G or is absent
XGXSEVVMDRHKRLXXXXXXXXXYYLISTASLRTPVXXTPP

SEQ ID NO: 58847 - protein, 32 aa, Artificial Sequence; identical to SEQ ID NO: 31986
  GFR-binding peptide
  MOD_RES (1)..(1): Xaa is C or S

SEQ ID NO: 58848 - protein, 40 aa, Artificial Sequence; identical to SEQ ID NO: 2974
  GFR-binding peptide
  MOD_RES (2)..(34)..(35): Xaa is C or S

SEQ ID NO: 58849 - protein, 37 aa, Artificial Sequence; identical to SEQ ID NO: 23974
  GFR-binding peptide
  MOD_RES (1)..(3)..(36)..(37): Xaa is C or S
  MOD_RES (14)..(15)..(16)..(17)..(18): Xaa is A or G
  MOD_RES (19)..(20)..(21)..(22): Xaa is A or G or is absent

SEQ ID NO: 58850 - protein, 35 aa, Artificial Sequence; identical to SEQ ID NO: 2977
  GFR-binding peptide
  MOD_RES (33)..(34): Xaa is C or S

SEQ ID NO: 58851 - protein, 36 aa, Artificial Sequence; identical to SEQ ID NO: 2978
  GFR-binding peptide
  MOD_RES (33)..(34): Xaa is C or S
  MOD_RES (11)..(12)..(13)..(14)..(15): Xaa is A or G
  MOD_RES (16)..(17)..(18)..(19): Xaa is A or G or is absent

SEQ ID NO: 58852 - protein, 35 aa, Artificial Sequence; identical to SEQ ID NO: 31990
  GFR-binding peptide
  MOD_RES (1)..(33)..(34): Xaa is C or S

SEQ ID NO: 58853 - protein, 36 aa, Artificial Sequence; identical to SEQ ID NO: 10433
  GFR-binding peptide
  MOD_RES (32)..(33): Xaa is C or S

SEQ ID NO: 58854 - protein, 39 aa, Artificial Sequence; identical to SEQ ID NO: 23978
  GFR-binding peptide
  MOD_RES (1)..(3)..(37)..(38): Xaa is C or S
  MOD_RES (15)..(16)..(17)..(18)..(19): Xaa is A or G
  MOD_RES (20)..(21)..(22)..(23): Xaa is A or G or is absent

SEQ ID NO: 58855 - protein, 35 aa, Artificial Sequence
  GFR-binding peptide
  MOD_RES (1)..(3): Xaa is C or S
  MOD_RES (14)..(15)..(16)..(17)..(18): Xaa is A or G
  MOD_RES (19)..(20)..(21)..(22): Xaa is A or G or is absent
XKXSRVIMPIKGYXXXXXXXXXFYLINIPSLAQPV

SEQ ID NO: 58856 - protein, 40 aa, Artificial Sequence; identical to SEQ ID NO: 2980
  GFR-binding peptide
  MOD_RES (34)..(35): Xaa is C or S
  MOD_RES (12)..(13)..(14)..(15)..(16): Xaa is A or G
  MOD_RES (17)..(18)..(19)..(20): Xaa is A or G or is absent

SEQ ID NO: 58857 - protein, 37 aa, Artificial Sequence; identical to SEQ ID NO: 23981
  GFR-binding peptide
  MOD_RES (32)..(33): Xaa is C or S

SEQ ID NO: 58858 - protein, 40 aa, Artificial Sequence; identical to SEQ ID NO: 2983
  GFR-binding peptide
  MOD_RES (1)..(3)..(34)..(35): Xaa is C or S

SEQ ID NO: 58859 - protein, 36 aa, Artificial Sequence; identical to SEQ ID NO: 2984
  GFR-binding peptide
  MOD_RES (2)..(34)..(35): Xaa is C or S

SEQ ID NO: 58860 - protein, 37 aa, Artificial Sequence; identical to SEQ ID NO: 31996
  GFR-binding peptide
  MOD_RES (2)..(34)..(35): Xaa is C or S

SEQ ID NO: 58861 - protein, 40 aa, Artificial Sequence
  GFR-binding peptide
  MOD_RES (2)..(4)..(36)..(37): Xaa is C or S
RXAXSEVTMNYHYKLVVNKNEDKYLISIPSMKEPVXXPEP

SEQ ID NO: 58862 - protein, 36 aa, Artificial Sequence
  GFR-binding peptide
  MOD_RES (2)..(36): Xaa is C or S
  MOD_RES (14)..(15)..(16)..(17)..(18): Xaa is A or G
  MOD_RES (19)..(20)..(21)..(22): Xaa is A or G or is absent
GXRDVVMGRHKRLXXXXXXXXXYYLMSTASMKTPTX

SEQ ID NO: 58863 - protein, 37 aa, Artificial Sequence; identical to SEQ ID NO: 31997
  GFR-binding peptide
  MOD_RES (31)..(32): Xaa is C or S

SEQ ID NO: 58864 - protein, 42 aa, Artificial Sequence
  GFR-binding peptide
  MOD_RES (1)..(3)..(37)..(38): Xaa is C or S
  MOD_RES (15)..(16)..(17)..(18)..(19): Xaa is A or G
  MOD_RES (20)..(21)..(22)..(23): Xaa is A or G or is absent
XAXSEVTMNEYKFKXXXXXXXXXLYLISIPEMKEPVXXPEPI

SEQ ID NO: 58865 - protein, 37 aa, Artificial Sequence; identical to SEQ ID NO: 2990
  GFR-binding peptide
  MOD_RES (2)..(4): Xaa is C or S
  MOD_RES (16)..(17)..(18)..(19)..(20): Xaa is A or G
  MOD_RES (21)..(22)..(23)..(24): Xaa is A or G or is absent

SEQ ID NO: 58866 - protein, 32 aa, Artificial Sequence; identical to SEQ ID NO: 32000
  GFR-binding peptide
  MOD_RES (31)..(32): Xaa is C or S

SEQ ID NO: 58867 - protein, 37 aa, Artificial Sequence
  GFR-binding peptide
  MOD_RES (2)..(4): Xaa is C or S
  MOD_RES (16)..(17)..(18)..(19)..(20): Xaa is A or G
  MOD_RES (21)..(22)..(23)..(24): Xaa is A or G or is absent
SXGXRDVVMGRHKRLXXXXXXXXXYYLMSTASMKTPT

SEQ ID NO: 58868 - protein, 40 aa, Artificial Sequence; identical to SEQ ID NO: 2991
  GFR-binding peptide
  MOD_RES (1)..(3)..(37)..(38): Xaa is C or S
  MOD_RES (15)..(16)..(17)..(18)..(19): Xaa is A or G
  MOD_RES (20)..(21)..(22)..(23): Xaa is A or G or is absent

SEQ ID NO: 58869 - protein, 39 aa, Artificial Sequence
  GFR-binding peptide
  MOD_RES (2)..(4)..(37)..(38): Xaa is C or S
  MOD_RES (15)..(16)..(17)..(18)..(19): Xaa is A or G
  MOD_RES (20)..(21)..(22)..(23): Xaa is A or G or is absent
LXGXEEVIMRHKRLXXXXXXXXXYYLMSTASTKVPAXXT

SEQ ID NO: 58870 - protein, 39 aa, Artificial Sequence
  GFR-binding peptide
  MOD_RES (1)..(35)..(36): Xaa is C or S
  MOD_RES (13)..(14)..(15)..(16)..(17): Xaa is A or G
  MOD_RES (18)..(19)..(20)..(21): Xaa is A or G or is absent
XRDVVMGYHYKLXXXXXXXXXKYLMSIPSMKTPTXXPGA

SEQ ID NO: 58871 - protein, 37 aa, Artificial Sequence
  GFR-binding peptide
  MOD_RES (2)..(4): Xaa is C or S
  MOD_RES (16)..(17)..(18)..(19)..(20): Xaa is A or G
  MOD_RES (21)..(22)..(23)..(24): Xaa is A or G or is absent
RXGXAEVVMDRHKRLXXXXXXXXXYYLISTASLRAPV

SEQ ID NO: 58872 - protein, 32 aa, Artificial Sequence; identical to SEQ ID NO: 2994
  GFR-binding peptide
  MOD_RES (32)..(32): Xaa is C or S

SEQ ID NO: 58873 - protein, 35 aa, Artificial Sequence; identical to SEQ ID NO: 23995
  GFR-binding peptide
  MOD_RES (33)..(34): Xaa is C or S
  MOD_RES (11)..(12)..(13)..(14)..(15): Xaa is A or G
  MOD_RES (16)..(17)..(18)..(19): Xaa is A or G or is absent

SEQ ID NO: 58874 - protein, 37 aa, Artificial Sequence; identical to SEQ ID NO: 23996
  GFR-binding peptide
  MOD_RES (2)..(34)..(35): Xaa is C or S

SEQ ID NO: 58875 - protein, 34 aa, Artificial Sequence
  GFR-binding peptide
  MOD_RES (33)..(34): Xaa is C or S
  MOD_RES (11)..(12)..(13)..(14)..(15): Xaa is A or G
  MOD_RES (16)..(17)..(18)..(19): Xaa is A or G or is absent
DVVMGEYKFKXXXXXXXXXLYLMSIPEMKTPTXX

SEQ ID NO: 58876 - protein, 37 aa, Artificial Sequence; identical to SEQ ID NO: 3001
  GFR-binding peptide
  MOD_RES (2)..(4)..(35)..(36): Xaa is C or S

SEQ ID NO: 58877 - protein, 37 aa, Artificial Sequence; identical to SEQ ID NO: 32016
  GFR-binding peptide
  MOD_RES (34)..(35): Xaa is C or S
  MOD_RES (12)..(13)..(14)..(15)..(16): Xaa is A or G
  MOD_RES (17)..(18)..(19)..(20): Xaa is A or G or is absent

SEQ ID NO: 58878 - protein, 33 aa, Artificial Sequence; identical to SEQ ID NO: 32017
  GFR-binding peptide
  MOD_RES (31)..(32): Xaa is C or S

SEQ ID NO: 58879 - protein, 41 aa, Artificial Sequence; identical to SEQ ID NO: 23997
  GFR-binding peptide
  MOD_RES (2)..(4)..(36)..(37): Xaa is C or S

SEQ ID NO: 58880 - protein, 40 aa, Artificial Sequence; identical to SEQ ID NO: 56971
  GFR-binding peptide
  MOD_RES (2)..(4)..(35)..(36): Xaa is C or S

SEQ ID NO: 58881 - protein, 38 aa, Artificial Sequence; identical to SEQ ID NO: 32019
  GFR-binding peptide
  MOD_RES (2)..(37)..(38): Xaa is C or S
  MOD_RES (15)..(16)..(17)..(18)..(19): Xaa is A or G
  MOD_RES (20)..(21)..(22)..(23): Xaa is A or G or is absent

SEQ ID NO: 58882 - protein, 35 aa, Artificial Sequence
  GFR-binding peptide
  MOD_RES (2)..(34)..(35): Xaa is C or S
GXRDVVMGYHYKLIIQQKDNKYLMSIPSMKTPTXX

SEQ ID NO: 58883 - protein, 43 aa, Artificial Sequence
  GFR-binding peptide
  MOD_RES (1)..(3)..(37)..(38): Xaa is C or S
  MOD_RES (15)..(16)..(17)..(18)..(19): Xaa is A or G
  MOD_RES (20)..(21)..(22)..(23): Xaa is A or G or is absent
XGXSRVVMNRHKRLXXXXXXXXXYYLVSTASLKTPAXXPKPVH

SEQ ID NO: 58884 - protein, 36 aa, Artificial Sequence; identical to SEQ ID NO: 32031
  GFR-binding peptide
  MOD_RES (2)..(36): Xaa is C or S
  MOD_RES (14)..(15)..(16)..(17)..(18): Xaa is A or G
  MOD_RES (19)..(20)..(21)..(22): Xaa is A or G or is absent

SEQ ID NO: 58885 - protein, 39 aa, Artificial Sequence; identical to SEQ ID NO: 3012
  GFR-binding peptide
  MOD_RES (2)..(36)..(37): Xaa is C or S
  MOD_RES (14)..(15)..(16)..(17)..(18): Xaa is A or G
  MOD_RES (19)..(20)..(21)..(22): Xaa is A or G or is absent

SEQ ID NO: 58886 - protein, 33 aa, Artificial Sequence; identical to SEQ ID NO: 3013
  GFR-binding peptide
  MOD_RES (2)..(2): Xaa is C or S

SEQ ID NO: 58887 - protein, 38 aa, Artificial Sequence; identical to SEQ ID NO: 3022
  GFR-binding peptide
  MOD_RES (2)..(34): Xaa is C or S

SEQ ID NO: 58888 - protein, 33 aa, Artificial Sequence; identical to SEQ ID NO: 3023
  GFR-binding peptide
  MOD_RES (31)..(32): Xaa is C or S

SEQ ID NO: 58889 - protein, 39 aa, Artificial Sequence; identical to SEQ ID NO: 56996
  GFR-binding peptide
  MOD_RES (1)..(3)..(34)..(35): Xaa is C or S

SEQ ID NO: 58890 - protein, 35 aa, Artificial Sequence; identical to SEQ ID NO: 24022
  GFR-binding peptide
  MOD_RES (1)..(3)..(34)..(35): Xaa is C or S

SEQ ID NO: 58891 - protein, 36 aa, Artificial Sequence; identical to SEQ ID NO: 24023
  GFR-binding peptide
  MOD_RES (1)..(35)..(36): Xaa is C or S
  MOD_RES (13)..(14)..(15)..(16)..(17): Xaa is A or G
  MOD_RES (18)..(19)..(20)..(21): Xaa is A or G or is absent

SEQ ID NO: 58892 - protein, 37 aa, Artificial Sequence; identical to SEQ ID NO: 24025
  GFR-binding peptide
  MOD_RES (31)..(32): Xaa is C or S

SEQ ID NO: 58893 - protein, 38 aa, Artificial Sequence; identical to SEQ ID NO: 32060
  GFR-binding peptide
  MOD_RES (34)..(34): Xaa is C or S
  MOD_RES (12)..(13)..(14)..(15)..(16): Xaa is A or G
  MOD_RES (17)..(18)..(19)..(20): Xaa is A or G or is absent

SEQ ID NO: 58894 - protein, 43 aa, Artificial Sequence; identical to SEQ ID NO: 32061
  GFR-binding peptide
  MOD_RES (2)..(4)..(38)..(39): Xaa is C or S
  MOD_RES (16)..(17)..(18)..(19)..(20): Xaa is A or G
  MOD_RES (21)..(22)..(23)..(24): Xaa is A or G or is absent

SEQ ID NO: 58895 - protein, 40 aa, Artificial Sequence; identical to SEQ ID NO: 3032
  GFR-binding peptide
  MOD_RES (2)..(4)..(35)..(36): Xaa is C or S

SEQ ID NO: 58896 - protein, 37 aa, Artificial Sequence; identical to SEQ ID NO: 32066
  GFR-binding peptide
  MOD_RES (34)..(35): Xaa is C or S
  MOD_RES (12)..(13)..(14)..(15)..(16): Xaa is A or G
  MOD_RES (17)..(18)..(19)..(20): Xaa is A or G or is absent

SEQ ID NO: 58897 - protein, 39 aa, Artificial Sequence; identical to SEQ ID NO: 24027
  GFR-binding peptide
  MOD_RES (2)..(34): Xaa is C or S

SEQ ID NO: 58898 - protein, 36 aa, Artificial Sequence; identical to SEQ ID NO: 24028
  GFR-binding peptide
  MOD_RES (1)..(34)..(35): Xaa is C or S
  MOD_RES (12)..(13)..(14)..(15)..(16): Xaa is A or G
  MOD_RES (17)..(18)..(19)..(20): Xaa is A or G or is absent

SEQ ID NO: 58899 - protein, 42 aa, Artificial Sequence; identical to SEQ ID NO: 32072
  GFR-binding peptide
  MOD_RES (1)..(3)..(36)..(37): Xaa is C or S
  MOD_RES (14)..(15)..(16)..(17)..(18): Xaa is A or G
  MOD_RES (19)..(20)..(21)..(22): Xaa is A or G or is absent

SEQ ID NO: 58900 - protein, 34 aa, Artificial Sequence
  GFR-binding peptide
  MOD_RES (1)..(1): Xaa is C or S
  MOD_RES (13)..(14)..(15)..(16)..(17): Xaa is A or G
  MOD_RES (18)..(19)..(20)..(21): Xaa is A or G or is absent
XRDVVMGEYKFKXXXXXXXXXLYLMSIPEMKTPT

SEQ ID NO: 58901 - protein, 37 aa, Artificial Sequence; identical to SEQ ID NO: 32075
  GFR-binding peptide
  MOD_RES (33)..(34): Xaa is C or S
  MOD_RES (11)..(12)..(13)..(14)..(15): Xaa is A or G
  MOD_RES (16)..(17)..(18)..(19): Xaa is A or G or is absent

SEQ ID NO: 58902 - protein, 41 aa, Artificial Sequence; identical to SEQ ID NO: 3036
  GFR-binding peptide
  MOD_RES (2)..(4)..(36)..(37): Xaa is C or S

SEQ ID NO: 58903 - protein, 37 aa, Artificial Sequence; identical to SEQ ID NO: 24033
  GFR-binding peptide
  MOD_RES (1)..(3)..(35)..(36): Xaa is C or S

SEQ ID NO: 58904 - protein, 38 aa, Artificial Sequence; identical to SEQ ID NO: 24038
  GFR-binding peptide
  MOD_RES (2)..(4)..(36)..(37): Xaa is C or S

SEQ ID NO: 58905 - protein, 35 aa, Artificial Sequence; identical to SEQ ID NO: 3042
  GFR-binding peptide
  MOD_RES (32)..(33): Xaa is C or S

SEQ ID NO: 58906 - protein, 35 aa, Artificial Sequence; identical to SEQ ID NO: 24040
  GFR-binding peptide
  MOD_RES (2)..(4): Xaa is C or S

SEQ ID NO: 58907 - protein, 35 aa, Artificial Sequence
  GFR-binding peptide
  MOD_RES (2)..(33)..(34): Xaa is C or S
GXEEVIMYHYKLLLVRGNDKYLMSIPSTKVPAXXT

SEQ ID NO: 58908 - protein, 39 aa, Artificial Sequence; identical to SEQ ID NO: 24046
  GFR-binding peptide
  MOD_RES (33)..(34): Xaa is C or S

SEQ ID NO: 58909 - protein, 35 aa, Artificial Sequence; identical to SEQ ID NO: 3048
  GFR-binding peptide
  MOD_RES (34)..(35): Xaa is C or S
  MOD_RES (12)..(13)..(14)..(15)..(16): Xaa is A or G
  MOD_RES (17)..(18)..(19)..(20): Xaa is A or G or is absent

SEQ ID NO: 58910 - protein, 38 aa, Artificial Sequence; identical to SEQ ID NO: 24049
  GFR-binding peptide
  MOD_RES (34)..(35): Xaa is C or S
  MOD_RES (12)..(13)..(14)..(15)..(16): Xaa is A or G
  MOD_RES (17)..(18)..(19)..(20): Xaa is A or G or is absent

SEQ ID NO: 58911 - protein, 40 aa, Artificial Sequence; identical to SEQ ID NO: 32091
  GFR-binding peptide
  MOD_RES (2)..(36)..(37): Xaa is C or S
  MOD_RES (14)..(15)..(16)..(17)..(18): Xaa is A or G
  MOD_RES (19)..(20)..(21)..(22): Xaa is A or G or is absent

SEQ ID NO: 58912 - protein, 37 aa, Artificial Sequence; identical to SEQ ID NO: 24054
  GFR-binding peptide
  MOD_RES (1)..(35): Xaa is C or S
  MOD_RES (13)..(14)..(15)..(16)..(17): Xaa is A or G
  MOD_RES (18)..(19)..(20)..(21): Xaa is A or G or is absent

SEQ ID NO: 58913 - protein, 39 aa, Artificial Sequence; identical to SEQ ID NO: 32092
  GFR-binding peptide
  MOD_RES (2)..(36)..(37): Xaa is C or S
  MOD_RES (14)..(15)..(16)..(17)..(18): Xaa is A or G
  MOD_RES (19)..(20)..(21)..(22): Xaa is A or G or is absent

SEQ ID NO: 58914 - protein, 37 aa, Artificial Sequence; identical to SEQ ID NO: 32093
  GFR-binding peptide
  MOD_RES (1)..(33)..(34): Xaa is C or S

SEQ ID NO: 58915 - protein, 37 aa, Artificial Sequence; identical to SEQ ID NO: 32094
  GFR-binding peptide
  MOD_RES (1)..(33)..(34): Xaa is C or S

SEQ ID NO: 58916 - protein, 38 aa, Artificial Sequence; identical to SEQ ID NO: 3056
  GFR-binding peptide
  MOD_RES (1)..(3)..(37)..(38): Xaa is C or S
  MOD_RES (15)..(16)..(17)..(18)..(19): Xaa is A or G
  MOD_RES (20)..(21)..(22)..(23): Xaa is A or G or is absent

SEQ ID NO: 58917 - protein, 33 aa, Artificial Sequence; identical to SEQ ID NO: 24062
  GFR-binding peptide
  MOD_RES (32)..(33): Xaa is C or S

SEQ ID NO: 58918 - protein, 44 aa, Artificial Sequence; identical to SEQ ID NO: 32104
  GFR-binding peptide
  MOD_RES (2)..(4)..(38)..(39): Xaa is C or S
  MOD_RES (16)..(17)..(18)..(19)..(20): Xaa is A or G
  MOD_RES (21)..(22)..(23)..(24): Xaa is A or G or is absent

SEQ ID NO: 58919 - protein, 36 aa, Artificial Sequence; identical to SEQ ID NO: 3060
  GFR-binding peptide
  MOD_RES (2)..(34): Xaa is C or S

SEQ ID NO: 58920 - protein, 37 aa, Artificial Sequence; identical to SEQ ID NO: 3062
  GFR-binding peptide
  MOD_RES (33)..(34): Xaa is C or S
  MOD_RES (11)..(12)..(13)..(14)..(15): Xaa is A or G
  MOD_RES (16)..(17)..(18)..(19): Xaa is A or G or is absent

SEQ ID NO: 58921 - protein, 39 aa, Artificial Sequence; identical to SEQ ID NO: 3066
  GFR-binding peptide
  MOD_RES (2)..(33)..(34): Xaa is C or S

SEQ ID NO: 58922 - protein, 34 aa, Artificial Sequence
  GFR-binding peptide
  MOD_RES (32)..(33): Xaa is C or S
RDVVMGRHKRLIIQQKDNYYLMSTASMKTPTXXP

SEQ ID NO: 58923 - protein, 42 aa, Artificial Sequence; identical to SEQ ID NO: 24074
  GFR-binding peptide
  MOD_RES (2)..(4)..(36)..(37): Xaa is C or S

SEQ ID NO: 58924 - protein, 38 aa, Artificial Sequence; identical to SEQ ID NO: 24075
  GFR-binding peptide
  MOD_RES (2)..(4)..(36)..(37): Xaa is C or S

SEQ ID NO: 58925 - protein, 38 aa, Artificial Sequence; identical to SEQ ID NO: 3071
  GFR-binding peptide
  MOD_RES (34)..(34): Xaa is C or S
  MOD_RES (12)..(13)..(14)..(15)..(16): Xaa is A or G
  MOD_RES (17)..(18)..(19)..(20): Xaa is A or G or is absent

SEQ ID NO: 58926 - protein, 36 aa, Artificial Sequence
  GFR-binding peptide
  MOD_RES (31)..(32): Xaa is C or S
EEVIMYHYKLLLVRGNDKYLMSIPSTKVPAXXTSPV

SEQ ID NO: 58927 - protein, 41 aa, Artificial Sequence; identical to SEQ ID NO: 3075
  GFR-binding peptide
  MOD_RES (2)..(37)..(38): Xaa is C or S
  MOD_RES (15)..(16)..(17)..(18)..(19): Xaa is A or G
  MOD_RES (20)..(21)..(22)..(23): Xaa is A or G or is absent

SEQ ID NO: 58928 - protein, 39 aa, Artificial Sequence; identical to SEQ ID NO: 32120
  GFR-binding peptide
  MOD_RES (1)..(3)..(35)..(36): Xaa is C or S

SEQ ID NO: 58929 - protein, 39 aa, Artificial Sequence
  GFR-binding peptide
  MOD_RES (2)..(36)..(37): Xaa is C or S
  MOD_RES (14)..(15)..(16)..(17)..(18): Xaa is A or G
  MOD_RES (19)..(20)..(21)..(22): Xaa is A or G or is absent
AXSEVTMNRHKRLXXXXXXXXXYYLISTASMKEPVXXPE

SEQ ID NO: 58930 - protein, 41 aa, Artificial Sequence
  GFR-binding peptide
  MOD_RES (1)..(35)..(36): Xaa is C or S
  MOD_RES (13)..(14)..(15)..(16)..(17): Xaa is A or G
  MOD_RES (18)..(19)..(20)..(21): Xaa is A or G or is absent
XSRVVMNRHKRLXXXXXXXXXYYLVSTASLKTPAXXPKPVH

SEQ ID NO: 58931 - protein, 37 aa, Artificial Sequence; identical to SEQ ID NO: 32125
  GFR-binding peptide
  MOD_RES (31)..(32): Xaa is C or S

SEQ ID NO: 58932 - protein, 32 aa, Artificial Sequence; identical to SEQ ID NO: 3077
  GFR-binding peptide
  MOD_RES (31)..(32): Xaa is C or S

SEQ ID NO: 58933 - protein, 34 aa, Artificial Sequence; identical to SEQ ID NO: 3078
  GFR-binding peptide
  MOD_RES (33)..(34): Xaa is C or S
  MOD_RES (11)..(12)..(13)..(14)..(15): Xaa is A or G
  MOD_RES (16)..(17)..(18)..(19): Xaa is A or G or is absent

SEQ ID NO: 58934 - protein, 41 aa, Artificial Sequence; identical to SEQ ID NO: 3079
  GFR-binding peptide
  MOD_RES (2)..(36)..(37): Xaa is C or S
  MOD_RES (14)..(15)..(16)..(17)..(18): Xaa is A or G
  MOD_RES (19)..(20)..(21)..(22): Xaa is A or G or is absent

SEQ ID NO: 58935 - protein, 35 aa, Artificial Sequence; identical to SEQ ID NO: 57068
  GFR-binding peptide
  MOD_RES (31)..(32): Xaa is C or S

SEQ ID NO: 58936 - protein, 35 aa, Artificial Sequence; identical to SEQ ID NO: 3085
  GFR-binding peptide
  MOD_RES (31)..(32): Xaa is C or S

SEQ ID NO: 58937 - protein, 43 aa, Artificial Sequence; identical to SEQ ID NO: 24086
  GFR-binding peptide
  MOD_RES (2)..(4)..(38)..(39): Xaa is C or S
  MOD_RES (16)..(17)..(18)..(19)..(20): Xaa is A or G
  MOD_RES (21)..(22)..(23)..(24): Xaa is A or G or is absent

SEQ ID NO: 58938 - protein, 38 aa, Artificial Sequence; identical to SEQ ID NO: 32135
  GFR-binding peptide
  MOD_RES (1)..(3)..(37)..(38): Xaa is C or S
  MOD_RES (15)..(16)..(17)..(18)..(19): Xaa is A or G
  MOD_RES (20)..(21)..(22)..(23): Xaa is A or G or is absent

SEQ ID NO: 58939 - protein, 34 aa, Artificial Sequence; identical to SEQ ID NO: 24087
  GFR-binding peptide
  MOD_RES (1)..(33)..(34): Xaa is C or S

SEQ ID NO: 58940 - protein, 34 aa, Artificial Sequence; identical to SEQ ID NO: 3086
  GFR-binding peptide
  MOD_RES (1)..(3): Xaa is C or S

SEQ ID NO: 58941 - protein, 40 aa, Artificial Sequence; identical to SEQ ID NO: 24089
  GFR-binding peptide
  MOD_RES (2)..(4)..(36)..(37): Xaa is C or S

SEQ ID NO: 58942 - protein, 34 aa, Artificial Sequence; identical to SEQ ID NO: 3087
  GFR-binding peptide
  MOD_RES (1)..(32)..(33): Xaa is C or S

SEQ ID NO: 58943 - protein, 34 aa, Artificial Sequence
  GFR-binding peptide
  MOD_RES (2)..(34): Xaa is C or S
AXSEVTMNPIKGYVVNKNEDFYLINIPSMKEPVX

SEQ ID NO: 58944 - protein, 34 aa, Artificial Sequence; identical to SEQ ID NO: 32141
  GFR-binding peptide
  MOD_RES (31)..(31): Xaa is C or S

SEQ ID NO: 58945 - protein, 40 aa, Artificial Sequence; identical to SEQ ID NO: 3091
  GFR-binding peptide
  MOD_RES (1)..(3)..(36)..(37): Xaa is C or S
  MOD_RES (14)..(15)..(16)..(17)..(18): Xaa is A or G
  MOD_RES (19)..(20)..(21)..(22): Xaa is A or G or is absent

SEQ ID NO: 58946 - protein, 40 aa, Artificial Sequence; identical to SEQ ID NO: 3095
  GFR-binding peptide
  MOD_RES (2)..(36)..(37): Xaa is C or S
  MOD_RES (14)..(15)..(16)..(17)..(18): Xaa is A or G
  MOD_RES (19)..(20)..(21)..(22): Xaa is A or G or is absent

SEQ ID NO: 58947 - protein, 32 aa, Artificial Sequence
  GFR-binding peptide
  MOD_RES (11)..(12)..(13)..(14)..(15): Xaa is A or G
  MOD_RES (16)..(17)..(18)..(19): Xaa is A or G or is absent
SKVVMPIKGYXXXXXXXXXFYLINIPSLDQPV

SEQ ID NO: 58948 - protein, 38 aa, Artificial Sequence
  GFR-binding peptide
  MOD_RES (2)..(4)..(35)..(36): Xaa is C or S
SXKXSKVVMPIKGYVKPTRGVFYLINIPSLDQPVXXPS

SEQ ID NO: 58949 - protein, 32 aa, Artificial Sequence; identical to SEQ ID NO: 24103
  GFR-binding peptide
  MOD_RES (32)..(32): Xaa is C or S

SEQ ID NO: 58950 - protein, 37 aa, Artificial Sequence
  GFR-binding peptide
  MOD_RES (1)..(34)..(35): Xaa is C or S
  MOD_RES (12)..(13)..(14)..(15)..(16): Xaa is A or G
  MOD_RES (17)..(18)..(19)..(20): Xaa is A or G or is absent
XSKVVMPIKGYXXXXXXXXXFYLINIPSLDQPVXXPS

SEQ ID NO: 58951 - protein, 43 aa, Artificial Sequence; identical to SEQ ID NO: 57084
  GFR-binding peptide
  MOD_RES (2)..(4)..(37)..(38): Xaa is C or S
  MOD_RES (15)..(16)..(17)..(18)..(19): Xaa is A or G
  MOD_RES (20)..(21)..(22)..(23): Xaa is A or G or is absent

SEQ ID NO: 58952 - protein, 37 aa, Artificial Sequence; identical to SEQ ID NO: 3104
  GFR-binding peptide
  MOD_RES (31)..(32): Xaa is C or S

SEQ ID NO: 58953 - protein, 40 aa, Artificial Sequence
  GFR-binding peptide
  MOD_RES (1)..(34)..(35): Xaa is C or S
  MOD_RES (12)..(13)..(14)..(15)..(16): Xaa is A or G
  MOD_RES (17)..(18)..(19)..(20): Xaa is A or G or is absent
XEEVIMRHKRLXXXXXXXXXYYLMSTASTKVPAXXTSPVR

SEQ ID NO: 58954 - protein, 37 aa, Artificial Sequence; identical to SEQ ID NO: 3105
  GFR-binding peptide
  MOD_RES (33)..(34): Xaa is C or S
  MOD_RES (11)..(12)..(13)..(14)..(15): Xaa is A or G
  MOD_RES (16)..(17)..(18)..(19): Xaa is A or G or is absent

SEQ ID NO: 58955 - protein, 36 aa, Artificial Sequence; identical to SEQ ID NO: 3106
  GFR-binding peptide
  MOD_RES (1)..(3)..(35)..(36): Xaa is C or S

SEQ ID NO: 58956 - protein, 36 aa, Artificial Sequence; identical to SEQ ID NO: 24105
  GFR-binding peptide
  MOD_RES (2)..(34)..(35): Xaa is C or S

SEQ ID NO: 58957 - protein, 37 aa, Artificial Sequence; identical to SEQ ID NO: 24107
  GFR-binding peptide
  MOD_RES (33)..(34): Xaa is C or S
  MOD_RES (11)..(12)..(13)..(14)..(15): Xaa is A or G
  MOD_RES (16)..(17)..(18)..(19): Xaa is A or G or is absent

SEQ ID NO: 58958 - protein, 38 aa, Artificial Sequence; identical to SEQ ID NO: 24109
  GFR-binding peptide
  MOD_RES (1)..(34)..(35): Xaa is C or S
  MOD_RES (12)..(13)..(14)..(15)..(16): Xaa is A or G
  MOD_RES (17)..(18)..(19)..(20): Xaa is A or G or is absent

SEQ ID NO: 58959 - protein, 39 aa, Artificial Sequence; identical to SEQ ID NO: 3110
  GFR-binding peptide
  MOD_RES (1)..(3)..(35)..(36): Xaa is C or S

SEQ ID NO: 58960 - protein, 36 aa, Artificial Sequence; identical to SEQ ID NO: 3111
  GFR-binding peptide
  MOD_RES (32)..(33): Xaa is C or S

SEQ ID NO: 58961 - protein, 38 aa, Artificial Sequence; identical to SEQ ID NO: 32158
  GFR-binding peptide
  MOD_RES (2)..(4)..(36)..(37): Xaa is C or S

SEQ ID NO: 58962 - protein, 34 aa, Artificial Sequence; identical to SEQ ID NO: 24112
  GFR-binding peptide
  MOD_RES (13)..(14)..(15)..(16)..(17): Xaa is A or G
  MOD_RES (18)..(19)..(20)..(21): Xaa is A or G or is absent

SEQ ID NO: 58963 - protein, 38 aa, Artificial Sequence; identical to SEQ ID NO: 3114
  GFR-binding peptide
  MOD_RES (2)..(36): Xaa is C or S
  MOD_RES (14)..(15)..(16)..(17)..(18): Xaa is A or G
  MOD_RES (19)..(20)..(21)..(22): Xaa is A or G or is absent

SEQ ID NO: 58964 - protein, 35 aa, Artificial Sequence; identical to SEQ ID NO: 3115
  GFR-binding peptide
  MOD_RES (33)..(34): Xaa is C or S

SEQ ID NO: 58965 - protein, 41 aa, Artificial Sequence; identical to SEQ ID NO: 32162
  GFR-binding peptide
  MOD_RES (1)..(35)..(36): Xaa is C or S
  MOD_RES (13)..(14)..(15)..(16)..(17): Xaa is A or G
  MOD_RES (18)..(19)..(20)..(21): Xaa is A or G or is absent

SEQ ID NO: 58966 - protein, 37 aa, Artificial Sequence; identical to SEQ ID NO: 3120
  GFR-binding peptide
  MOD_RES (33)..(34): Xaa is C or S
  MOD_RES (11)..(12)..(13)..(14)..(15): Xaa is A or G
  MOD_RES (16)..(17)..(18)..(19): Xaa is A or G or is absent

SEQ ID NO: 58967 - protein, 36 aa, Artificial Sequence; identical to SEQ ID NO: 24119
  GFR-binding peptide
  MOD_RES (31)..(32): Xaa is C or S

SEQ ID NO: 58968 - protein, 38 aa, Artificial Sequence; identical to SEQ ID NO: 3126
  GFR-binding peptide
  MOD_RES (1)..(34)..(35): Xaa is C or S
  MOD_RES (12)..(13)..(14)..(15)..(16): Xaa is A or G
  MOD_RES (17)..(18)..(19)..(20): Xaa is A or G or is absent

SEQ ID NO: 58969 - protein, 38 aa, Artificial Sequence
  GFR-binding peptide
  MOD_RES (2)..(34)..(35): Xaa is C or S
AXSEVTMNRHKRLVVNKNEDYYLISTASMKEPVXXPEP

SEQ ID NO: 58970 - protein, 35 aa, Artificial Sequence; identical to SEQ ID NO: 3129
  GFR-binding peptide
  MOD_RES (33)..(34): Xaa is C or S
  MOD_RES (11)..(12)..(13)..(14)..(15): Xaa is A or G
  MOD_RES (16)..(17)..(18)..(19): Xaa is A or G or is absent

SEQ ID NO: 58971 - protein, 35 aa, Artificial Sequence
  GFR-binding peptide
  MOD_RES (33)..(34): Xaa is C or S
  MOD_RES (11)..(12)..(13)..(14)..(15): Xaa is A or G
  MOD_RES (16)..(17)..(18)..(19): Xaa is A or G or is absent
EEVIMYHYKLXXXXXXXXXKYLMSIPSTKVPAXXT

SEQ ID NO: 58972 - protein, 32 aa, Artificial Sequence; identical to SEQ ID NO: 3135
  GFR-binding peptide
  MOD_RES (31)..(32): Xaa is C or S

SEQ ID NO: 58973 - protein, 38 aa, Artificial Sequence
  GFR-binding peptide
  MOD_RES (2)..(36)..(37): Xaa is C or S
  MOD_RES (14)..(15)..(16)..(17)..(18): Xaa is A or G
  MOD_RES (19)..(20)..(21)..(22): Xaa is A or G or is absent
GXRDVVMGEYKFKXXXXXXXXXLYLMSIPEMKTPTXXP

SEQ ID NO: 58974 - protein, 38 aa, Artificial Sequence; identical to SEQ ID NO: 32171
  GFR-binding peptide
  MOD_RES (1)..(34)..(35): Xaa is C or S
  MOD_RES (12)..(13)..(14)..(15)..(16): Xaa is A or G
  MOD_RES (17)..(18)..(19)..(20): Xaa is A or G or is absent

SEQ ID NO: 58975 - protein, 38 aa, Artificial Sequence; identical to SEQ ID NO: 3138
  GFR-binding peptide
  MOD_RES (34)..(35): Xaa is C or S
  MOD_RES (12)..(13)..(14)..(15)..(16): Xaa is A or G
  MOD_RES (17)..(18)..(19)..(20): Xaa is A or G or is absent

SEQ ID NO: 58976 - protein, 37 aa, Artificial Sequence
  GFR-binding peptide
  MOD_RES (2)..(4): Xaa is C or S
  MOD_RES (16)..(17)..(18)..(19)..(20): Xaa is A or G
  MOD_RES (21)..(22)..(23)..(24): Xaa is A or G or is absent
SXGXRDVVMGEYKFKXXXXXXXXXLYLMSIPEMKTPT

SEQ ID NO: 58977 - protein, 40 aa, Artificial Sequence
  GFR-binding peptide
  MOD_RES (2)..(4)..(36)..(37): Xaa is C or S
RXGXESVAMGRHKRLYTVVGKDYYLISTASLKTPVXXAKS

SEQ ID NO: 58978 - protein, 37 aa, Artificial Sequence; identical to SEQ ID NO: 24137
  GFR-binding peptide
  MOD_RES (33)..(34): Xaa is C or S
  MOD_RES (11)..(12)..(13)..(14)..(15): Xaa is A or G
  MOD_RES (16)..(17)..(18)..(19): Xaa is A or G or is absent

SEQ ID NO: 58979 - protein, 41 aa, Artificial Sequence; identical to SEQ ID NO: 32174
  GFR-binding peptide
  MOD_RES (2)..(4)..(38)..(39): Xaa is C or S
  MOD_RES (16)..(17)..(18)..(19)..(20): Xaa is A or G
  MOD_RES (21)..(22)..(23)..(24): Xaa is A or G or is absent

SEQ ID NO: 58980 - protein, 39 aa, Artificial Sequence; identical to SEQ ID NO: 32175
  GFR-binding peptide
  MOD_RES (33)..(34): Xaa is C or S
  MOD_RES (11)..(12)..(13)..(14)..(15): Xaa is A or G
  MOD_RES (16)..(17)..(18)..(19): Xaa is A or G or is absent

SEQ ID NO: 58981 - protein, 37 aa, Artificial Sequence
  GFR-binding peptide
  MOD_RES (1)..(3)..(37): Xaa is C or S
  MOD_RES (15)..(16)..(17)..(18)..(19): Xaa is A or G
  MOD_RES (20)..(21)..(22)..(23): Xaa is A or G or is absent
XGXRDVVMGEYKFKXXXXXXXXXLYLMSIPEMKTPTX

SEQ ID NO: 58982 - protein, 35 aa, Artificial Sequence
  GFR-binding peptide
  MOD_RES (1)..(3)..(35): Xaa is C or S
XGXSEVVMDYHYKLVVNNASDKYLISIPSLRTPVX

SEQ ID NO: 58983 - protein, 32 aa, Artificial Sequence; identical to SEQ ID NO: 3145
  GFR-binding peptide
  MOD_RES (1)..(32): Xaa is C or S

SEQ ID NO: 58984 - protein, 32 aa, Artificial Sequence; identical to SEQ ID NO: 3146
  GFR-binding peptide
  MOD_RES (31)..(32): Xaa is C or S

SEQ ID NO: 58985 - protein, 40 aa, Artificial Sequence; identical to SEQ ID NO: 24141
  GFR-binding peptide
  MOD_RES (34)..(35): Xaa is C or S
  MOD_RES (12)..(13)..(14)..(15)..(16): Xaa is A or G
  MOD_RES (17)..(18)..(19)..(20): Xaa is A or G or is absent

SEQ ID NO: 58986 - protein, 38 aa, Artificial Sequence; identical to SEQ ID NO: 24142
  GFR-binding peptide
  MOD_RES (1)..(3)..(34)..(35): Xaa is C or S

SEQ ID NO: 58987 - protein, 31 aa, Artificial Sequence; identical to SEQ ID NO: 32185
  GFR-binding peptide

SEQ ID NO: 58988 - protein, 39 aa, Artificial Sequence; identical to SEQ ID NO: 3150
  GFR-binding peptide
  MOD_RES (1)..(3)..(36)..(37): Xaa is C or S

SEQ ID NO: 58989 - protein, 36 aa, Artificial Sequence; identical to SEQ ID NO: 3151
  GFR-binding peptide
  MOD_RES (2)..(4)..(35)..(36): Xaa is C or S

SEQ ID NO: 58990 - protein, 38 aa, Artificial Sequence; identical to SEQ ID NO: 3152
  GFR-binding peptide
  MOD_RES (2)..(4)..(38): Xaa is C or S
  MOD_RES (16)..(17)..(18)..(19)..(20): Xaa is A or G
  MOD_RES (21)..(22)..(23)..(24): Xaa is A or G or is absent

SEQ ID NO: 58991 - protein, 38 aa, Artificial Sequence; identical to SEQ ID NO: 32187
  GFR-binding peptide
  MOD_RES (2)..(4)..(38): Xaa is C or S
  MOD_RES (16)..(17)..(18)..(19)..(20): Xaa is A or G
  MOD_RES (21)..(22)..(23)..(24): Xaa is A or G or is absent

SEQ ID NO: 58992 - protein, 39 aa, Artificial Sequence; identical to SEQ ID NO: 32188
  GFR-binding peptide
  MOD_RES (2)..(4)..(36)..(37): Xaa is C or S

SEQ ID NO: 58993 - protein, 38 aa, Artificial Sequence; identical to SEQ ID NO: 3154
  GFR-binding peptide
  MOD_RES (1)..(3)..(37)..(38): Xaa is C or S
  MOD_RES (15)..(16)..(17)..(18)..(19): Xaa is A or G
  MOD_RES (20)..(21)..(22)..(23): Xaa is A or G or is absent

SEQ ID NO: 58994 - protein, 34 aa, Artificial Sequence; identical to SEQ ID NO: 3155
  GFR-binding peptide
  MOD_RES (31)..(32): Xaa is C or S

SEQ ID NO: 58995 - protein, 38 aa, Artificial Sequence; identical to SEQ ID NO: 3156
  GFR-binding peptide
  MOD_RES (1)..(32)..(33): Xaa is C or S

SEQ ID NO: 58996 - protein, 38 aa, Artificial Sequence; identical to SEQ ID NO: 3158
  GFR-binding peptide
  MOD_RES (2)..(35)..(36): Xaa is C or S
  MOD_RES (13)..(14)..(15)..(16)..(17): Xaa is A or G
  MOD_RES (18)..(19)..(20)..(21): Xaa is A or G or is absent

SEQ ID NO: 58997 - protein, 42 aa, Artificial Sequence; identical to SEQ ID NO: 24152
  GFR-binding peptide
  MOD_RES (2)..(4)..(36)..(37): Xaa is C or S

SEQ ID NO: 58998 - protein, 37 aa, Artificial Sequence; identical to SEQ ID NO: 24153
  GFR-binding peptide
  MOD_RES (1)..(35)..(36): Xaa is C or S
  MOD_RES (13)..(14)..(15)..(16)..(17): Xaa is A or G
  MOD_RES (18)..(19)..(20)..(21): Xaa is A or G or is absent

SEQ ID NO: 58999 - protein, 37 aa, Artificial Sequence
  GFR-binding peptide
  MOD_RES (31)..(32): Xaa is C or S
DVVMGEYKFKIIQQKDNLYLMSIPEMKTPTXXPGASG

SEQ ID NO: 59000 - protein, 36 aa, Artificial Sequence; identical to SEQ ID NO: 3160
  GFR-binding peptide
  MOD_RES (1)..(3): Xaa is C or S
  MOD_RES (15)..(16)..(17)..(18)..(19): Xaa is A or G
  MOD_RES (20)..(21)..(22)..(23): Xaa is A or G or is absent

SEQ ID NO: 59001 - protein, 37 aa, Artificial Sequence; identical to SEQ ID NO: 3163
  GFR-binding peptide
  MOD_RES (33)..(34): Xaa is C or S
  MOD_RES (11)..(12)..(13)..(14)..(15): Xaa is A or G
  MOD_RES (16)..(17)..(18)..(19): Xaa is A or G or is absent

SEQ ID NO: 59002 - protein, 38 aa, Artificial Sequence; identical to SEQ ID NO: 3164
  GFR-binding peptide
  MOD_RES (2)..(4)..(36)..(37): Xaa is C or S

SEQ ID NO: 59003 - protein, 37 aa, Artificial Sequence; identical to SEQ ID NO: 24157
  GFR-binding peptide
  MOD_RES (1)..(3)..(36)..(37): Xaa is C or S

SEQ ID NO: 59004 - protein, 40 aa, Artificial Sequence; identical to SEQ ID NO: 3166
  GFR-binding peptide
  MOD_RES (2)..(36)..(37): Xaa is C or S
  MOD_RES (14)..(15)..(16)..(17)..(18): Xaa is A or G
  MOD_RES (19)..(20)..(21)..(22): Xaa is A or G or is absent

SEQ ID NO: 59005 - protein, 37 aa, Artificial Sequence; identical to SEQ ID NO: 3169
  GFR-binding peptide
  MOD_RES (2)..(4)..(36): Xaa is C or S

SEQ ID NO: 59006 - protein, 35 aa, Artificial Sequence; identical to SEQ ID NO: 3170
  GFR-binding peptide
  MOD_RES (1)..(3): Xaa is C or S
  MOD_RES (14)..(15)..(16)..(17)..(18): Xaa is A or G
  MOD_RES (19)..(20)..(21)..(22): Xaa is A or G or is absent

SEQ ID NO: 59007 - protein, 33 aa, Artificial Sequence; identical to SEQ ID NO: 32210
  GFR-binding peptide
  MOD_RES (32)..(33): Xaa is C or S

SEQ ID NO: 59008 - protein, 36 aa, Artificial Sequence; identical to SEQ ID NO: 3171
  GFR-binding peptide
  MOD_RES (2)..(4)..(35)..(36): Xaa is C or S

SEQ ID NO: 59009 - protein, 32 aa, Artificial Sequence; identical to SEQ ID NO: 24167
  GFR-binding peptide
  MOD_RES (32)..(32): Xaa is C or S

SEQ ID NO: 59010 - protein, 40 aa, Artificial Sequence; identical to SEQ ID NO: 3172
  GFR-binding peptide
  MOD_RES (2)..(4)..(37)..(38): Xaa is C or S

SEQ ID NO: 59011 - protein, 33 aa, Artificial Sequence; identical to SEQ ID NO: 3173
  GFR-binding peptide
  MOD_RES (2)..(33): Xaa is C or S

SEQ ID NO: 59012 - protein, 34 aa, Artificial Sequence; identical to SEQ ID NO: 32215
  GFR-binding peptide
  MOD_RES (31)..(32): Xaa is C or S

SEQ ID NO: 59013 - protein, 34 aa, Artificial Sequence; identical to SEQ ID NO: 3177
  GFR-binding peptide
  MOD_RES (2)..(34): Xaa is C or S

SEQ ID NO: 59014 - protein, 42 aa, Artificial Sequence; identical to SEQ ID NO: 32216
  GFR-binding peptide
  MOD_RES (2)..(36)..(37): Xaa is C or S
  MOD_RES (14)..(15)..(16)..(17)..(18): Xaa is A or G
  MOD_RES (19)..(20)..(21)..(22): Xaa is A or G or is absent

SEQ ID NO: 59015 - protein, 30 aa, Artificial Sequence
  GFR-binding peptide
EVTMNYHYKLVVNKNEDKYLISIPSMKEPV

SEQ ID NO: 59016 - protein, 37 aa, Artificial Sequence; identical to SEQ ID NO: 3181
  GFR-binding peptide
  MOD_RES (2)..(4)..(36)..(37): Xaa is C or S

SEQ ID NO: 59017 - protein, 36 aa, Artificial Sequence; identical to SEQ ID NO: 3182
  GFR-binding peptide
  MOD_RES (1)..(34)..(35): Xaa is C or S

SEQ ID NO: 59018 - protein, 35 aa, Artificial Sequence
  GFR-binding peptide
  MOD_RES (1)..(3)..(34)..(35): Xaa is C or S
XGXEEVIMYHYKLLLVRGNDKYLMSIPSTKVPAXX

SEQ ID NO: 59019 - protein, 38 aa, Artificial Sequence
  GFR-binding peptide
  MOD_RES (2)..(36)..(37): Xaa is C or S
  MOD_RES (14)..(15)..(16)..(17)..(18): Xaa is A or G
  MOD_RES (19)..(20)..(21)..(22): Xaa is A or G or is absent
GXAEVVMDRHKRLXXXXXXXXXYYLISTASLRAPVXXS

SEQ ID NO: 59020 - protein, 38 aa, Artificial Sequence; identical to SEQ ID NO: 32221
  GFR-binding peptide
  MOD_RES (1)..(3)..(35)..(36): Xaa is C or S

SEQ ID NO: 59021 - protein, 37 aa, Artificial Sequence; identical to SEQ ID NO: 32222
  GFR-binding peptide
  MOD_RES (31)..(32): Xaa is C or S

SEQ ID NO: 59022 - protein, 36 aa, Artificial Sequence; identical to SEQ ID NO: 3186
  GFR-binding peptide
  MOD_RES (1)..(3): Xaa is C or S
  MOD_RES (15)..(16)..(17)..(18)..(19): Xaa is A or G
  MOD_RES (20)..(21)..(22)..(23): Xaa is A or G or is absent

SEQ ID NO: 59023 - protein, 34 aa, Artificial Sequence
  GFR-binding peptide
  MOD_RES (1)..(33)..(34): Xaa is C or S
XSEVVMDYHYKLVVNNASDKYLISIPSLRTPVXX

SEQ ID NO: 59024 - protein, 35 aa, Artificial Sequence
  GFR-binding peptide
  MOD_RES (2)..(2): Xaa is C or S
  MOD_RES (14)..(15)..(16)..(17)..(18): Xaa is A or G
  MOD_RES (19)..(20)..(21)..(22): Xaa is A or G or is absent
AXSEVTMNRYKKLXXXXXXXXXFYLISIANMKEPV

SEQ ID NO: 59025 - protein, 38 aa, Artificial Sequence; identical to SEQ ID NO: 3194
  GFR-binding peptide
  MOD_RES (34)..(35): Xaa is C or S
  MOD_RES (12)..(13)..(14)..(15)..(16): Xaa is A or G
  MOD_RES (17)..(18)..(19)..(20): Xaa is A or G or is absent

SEQ ID NO: 59026 - protein, 33 aa, Artificial Sequence
  GFR-binding peptide
  MOD_RES (12)..(13)..(14)..(15)..(16): Xaa is A or G
  MOD_RES (17)..(18)..(19)..(20): Xaa is A or G or is absent
RDVVMGRHKRLXXXXXXXXXYYLMSTASMKTPT

SEQ ID NO: 59027 - protein, 34 aa, Artificial Sequence; identical to SEQ ID NO: 3200
  GFR-binding peptide
  MOD_RES (2)..(2): Xaa is C or S
  MOD_RES (13)..(14)..(15)..(16)..(17): Xaa is A or G
  MOD_RES (18)..(19)..(20)..(21): Xaa is A or G or is absent

SEQ ID NO: 59028 - protein, 36 aa, Artificial Sequence; identical to SEQ ID NO: 3202
  GFR-binding peptide
  MOD_RES (2)..(33)..(34): Xaa is C or S

SEQ ID NO: 59029 - protein, 38 aa, Artificial Sequence; identical to SEQ ID NO: 3203
  GFR-binding peptide
  MOD_RES (33)..(34): Xaa is C or S

SEQ ID NO: 59030 - protein, 39 aa, Artificial Sequence; identical to SEQ ID NO: 32234
  GFR-binding peptide
  MOD_RES (2)..(34)..(35): Xaa is C or S

SEQ ID NO: 59031 - protein, 39 aa, Artificial Sequence; identical to SEQ ID NO: 32235
  GFR-binding peptide
  MOD_RES (34)..(35): Xaa is C or S
  MOD_RES (12)..(13)..(14)..(15)..(16): Xaa is A or G
  MOD_RES (17)..(18)..(19)..(20): Xaa is A or G or is absent

SEQ ID NO: 59032 - protein, 39 aa, Artificial Sequence; identical to SEQ ID NO: 24199
  GFR-binding peptide
  MOD_RES (2)..(35)..(36): Xaa is C or S
  MOD_RES (13)..(14)..(15)..(16)..(17): Xaa is A or G
  MOD_RES (18)..(19)..(20)..(21): Xaa is A or G or is absent

SEQ ID NO: 59033 - protein, 34 aa, Artificial Sequence; identical to SEQ ID NO: 3210
  GFR-binding peptide
  MOD_RES (33)..(34): Xaa is C or S

SEQ ID NO: 59034 - protein, 37 aa, Artificial Sequence
  GFR-binding peptide
  MOD_RES (2)..(36)..(37): Xaa is C or S
  MOD_RES (14)..(15)..(16)..(17)..(18): Xaa is A or G
  MOD_RES (19)..(20)..(21)..(22): Xaa is A or G or is absent
AXSEVTMNYHYKLXXXXXXXXXKYLISIPSMKEPVXX

SEQ ID NO: 59035 - protein, 39 aa, Artificial Sequence
  GFR-binding peptide
  MOD_RES (1)..(3)..(37)..(38): Xaa is C or S
  MOD_RES (15)..(16)..(17)..(18)..(19): Xaa is A or G
  MOD_RES (20)..(21)..(22)..(23): Xaa is A or G or is absent
XGXSEVVMDRHKRLXXXXXXXXXYYLISTASLRTPVXXT

SEQ ID NO: 59036 - protein, 38 aa, Artificial Sequence; identical to SEQ ID NO: 24206
  GFR-binding peptide
  MOD_RES (1)..(3)..(36)..(37): Xaa is C or S
  MOD_RES (14)..(15)..(16)..(17)..(18): Xaa is A or G
  MOD_RES (19)..(20)..(21)..(22): Xaa is A or G or is absent

SEQ ID NO: 59037 - protein, 34 aa, Artificial Sequence; identical to SEQ ID NO: 24207
  GFR-binding peptide
  MOD_RES (2)..(4): Xaa is C or S

SEQ ID NO: 59038 - protein, 43 aa, Artificial Sequence; identical to SEQ ID NO: 3213
  GFR-binding peptide
  MOD_RES (2)..(37)..(38): Xaa is C or S
  MOD_RES (15)..(16)..(17)..(18)..(19): Xaa is A or G
  MOD_RES (20)..(21)..(22)..(23): Xaa is A or G or is absent

SEQ ID NO: 59039 - protein, 34 aa, Artificial Sequence; identical to SEQ ID NO: 3216
  GFR-binding peptide
  MOD_RES (34)..(34): Xaa is C or S
  MOD_RES (12)..(13)..(14)..(15)..(16): Xaa is A or G
  MOD_RES (17)..(18)..(19)..(20): Xaa is A or G or is absent

SEQ ID NO: 59040 - protein, 41 aa, Artificial Sequence; identical to SEQ ID NO: 3217
  GFR-binding peptide
  MOD_RES (2)..(35)..(36): Xaa is C or S
  MOD_RES (13)..(14)..(15)..(16)..(17): Xaa is A or G
  MOD_RES (18)..(19)..(20)..(21): Xaa is A or G or is absent

SEQ ID NO: 59041 - protein, 32 aa, Artificial Sequence; identical to SEQ ID NO: 24211
  GFR-binding peptide
  MOD_RES (32)..(32): Xaa is C or S

SEQ ID NO: 59042 - protein, 38 aa, Artificial Sequence
  GFR-binding peptide
  MOD_RES (2)..(4)..(36)..(37): Xaa is C or S
RXAXSEVTMNPIKGYVVNKNEDFYLINIPSMKEPVXXP

SEQ ID NO: 59043 - protein, 36 aa, Artificial Sequence; identical to SEQ ID NO: 57186
  GFR-binding peptide
  MOD_RES (1)..(35)..(36): Xaa is C or S
  MOD_RES (13)..(14)..(15)..(16)..(17): Xaa is A or G
  MOD_RES (18)..(19)..(20)..(21): Xaa is A or G or is absent

SEQ ID NO: 59044 - protein, 35 aa, Artificial Sequence; identical to SEQ ID NO: 3218
  GFR-binding peptide
  MOD_RES (1)..(34)..(35): Xaa is C or S

SEQ ID NO: 59045 - protein, 40 aa, Artificial Sequence; identical to SEQ ID NO: 3219
  GFR-binding peptide
  MOD_RES (1)..(3)..(35)..(36): Xaa is C or S

SEQ ID NO: 59046 - protein, 38 aa, Artificial Sequence
  GFR-binding peptide
  MOD_RES (2)..(34)..(35): Xaa is C or S
GXSEVVMDRHKRLVVNNASDYYLISTASLRTPVXXTPP

SEQ ID NO: 59047 - protein, 41 aa, Artificial Sequence
  GFR-binding peptide
  MOD_RES (2)..(36)..(37): Xaa is C or S
  MOD_RES (14)..(15)..(16)..(17)..(18): Xaa is A or G
  MOD_RES (19)..(20)..(21)..(22): Xaa is A or G or is absent
GXSEVVMDEYKFKXXXXXXXXXLYLISIPELRTPVXXTPPT

SEQ ID NO: 59048 - protein, 35 aa, Artificial Sequence; identical to SEQ ID NO: 32253
  GFR-binding peptide
  MOD_RES (2)..(4)..(35): Xaa is C or S

SEQ ID NO: 59049 - protein, 40 aa, Artificial Sequence; identical to SEQ ID NO: 24223
  GFR-binding peptide
  MOD_RES (2)..(4)..(37)..(38): Xaa is C or S
  MOD_RES (15)..(16)..(17)..(18)..(19): Xaa is A or G
  MOD_RES (20)..(21)..(22)..(23): Xaa is A or G or is absent

SEQ ID NO: 59050 - protein, 40 aa, Artificial Sequence
  GFR-binding peptide
  MOD_RES (1)..(35)..(36): Xaa is C or S
  MOD_RES (13)..(14)..(15)..(16)..(17): Xaa is A or G
  MOD_RES (18)..(19)..(20)..(21): Xaa is A or G or is absent
XSEVTMNPIKGYXXXXXXXXXFYLINIPSMKEPVXXPEPI

SEQ ID NO: 59051 - protein, 39 aa, Artificial Sequence; identical to SEQ ID NO: 32260
  GFR-binding peptide
  MOD_RES (2)..(34)..(35): Xaa is C or S

SEQ ID NO: 59052 - protein, 31 aa, Artificial Sequence
  GFR-binding peptide
RDVVMGRHKRLIIQQKDNYYLMSTASMKTPT

SEQ ID NO: 59053 - protein, 36 aa, Artificial Sequence; identical to SEQ ID NO: 3230
  GFR-binding peptide
  MOD_RES (31)..(32): Xaa is C or S

SEQ ID NO: 59054 - protein, 42 aa, Artificial Sequence; identical to SEQ ID NO: 3231
  GFR-binding peptide
  MOD_RES (2)..(4)..(36)..(37): Xaa is C or S

SEQ ID NO: 59055 - protein, 38 aa, Artificial Sequence
  GFR-binding peptide
  MOD_RES (2)..(36)..(37): Xaa is C or S
  MOD_RES (14)..(15)..(16)..(17)..(18): Xaa is A or G
  MOD_RES (19)..(20)..(21)..(22): Xaa is A or G or is absent
AXSEVTMNEYKFKXXXXXXXXXLYLISIPEMKEPVXXP

SEQ ID NO: 59056 - protein, 35 aa, Artificial Sequence; identical to SEQ ID NO: 3240
  GFR-binding peptide
  MOD_RES (34)..(35): Xaa is C or S
  MOD_RES (12)..(13)..(14)..(15)..(16): Xaa is A or G
  MOD_RES (17)..(18)..(19)..(20): Xaa is A or G or is absent

SEQ ID NO: 59057 - protein, 36 aa, Artificial Sequence; identical to SEQ ID NO: 32265
  GFR-binding peptide
  MOD_RES (1)..(3): Xaa is C or S
  MOD_RES (15)..(16)..(17)..(18)..(19): Xaa is A or G
  MOD_RES (20)..(21)..(22)..(23): Xaa is A or G or is absent

SEQ ID NO: 59058 - protein, 38 aa, Artificial Sequence; identical to SEQ ID NO: 3243
  GFR-binding peptide
  MOD_RES (1)..(32)..(33): Xaa is C or S

SEQ ID NO: 59059 - protein, 33 aa, Artificial Sequence; identical to SEQ ID NO: 57204
  GFR-binding peptide
  MOD_RES (33)..(33): Xaa is C or S
  MOD_RES (11)..(12)..(13)..(14)..(15): Xaa is A or G
  MOD_RES (16)..(17)..(18)..(19): Xaa is A or G or is absent

SEQ ID NO: 59060 - protein, 38 aa, Artificial Sequence
  GFR-binding peptide
  MOD_RES (2)..(35)..(36): Xaa is C or S
  MOD_RES (13)..(14)..(15)..(16)..(17): Xaa is A or G
  MOD_RES (18)..(19)..(20)..(21): Xaa is A or G or is absent
GXEEVIMYHYKLXXXXXXXXXKYLMSIPSTKVPAXXTS

SEQ ID NO: 59061 - protein, 35 aa, Artificial Sequence; identical to SEQ ID NO: 32274
  GFR-binding peptide
  MOD_RES (33)..(34): Xaa is C or S
  MOD_RES (11)..(12)..(13)..(14)..(15): Xaa is A or G
  MOD_RES (16)..(17)..(18)..(19): Xaa is A or G or is absent

SEQ ID NO: 59062 - protein, 39 aa, Artificial Sequence; identical to SEQ ID NO: 24236
  GFR-binding peptide
  MOD_RES (2)..(35)..(36): Xaa is C or S
  MOD_RES (13)..(14)..(15)..(16)..(17): Xaa is A or G
  MOD_RES (18)..(19)..(20)..(21): Xaa is A or G or is absent

SEQ ID NO: 59063 - protein, 37 aa, Artificial Sequence; identical to SEQ ID NO: 57206
  GFR-binding peptide
  MOD_RES (1)..(3)..(36)..(37): Xaa is C or S
  MOD_RES (14)..(15)..(16)..(17)..(18): Xaa is A or G
  MOD_RES (19)..(20)..(21)..(22): Xaa is A or G or is absent

SEQ ID NO: 59064 - protein, 41 aa, Artificial Sequence; identical to SEQ ID NO: 3246
  GFR-binding peptide
  MOD_RES (2)..(35)..(36): Xaa is C or S
  MOD_RES (13)..(14)..(15)..(16)..(17): Xaa is A or G
  MOD_RES (18)..(19)..(20)..(21): Xaa is A or G or is absent

SEQ ID NO: 59065 - protein, 40 aa, Artificial Sequence; identical to SEQ ID NO: 3247
  GFR-binding peptide
  MOD_RES (2)..(4)..(38)..(39): Xaa is C or S
  MOD_RES (16)..(17)..(18)..(19)..(20): Xaa is A or G
  MOD_RES (21)..(22)..(23)..(24): Xaa is A or G or is absent

SEQ ID NO: 59066 - protein, 31 aa, Artificial Sequence; identical to SEQ ID NO: 32275
  GFR-binding peptide

SEQ ID NO: 59067 - protein, 33 aa, Artificial Sequence; identical to SEQ ID NO: 3250
  GFR-binding peptide
  MOD_RES (31)..(32): Xaa is C or S

SEQ ID NO: 59068 - protein, 36 aa, Artificial Sequence; identical to SEQ ID NO: 32279
  GFR-binding peptide
  MOD_RES (1)..(3): Xaa is C or S
  MOD_RES (15)..(16)..(17)..(18)..(19): Xaa is A or G
  MOD_RES (20)..(21)..(22)..(23): Xaa is A or G or is absent

SEQ ID NO: 59069 - protein, 32 aa, Artificial Sequence; identical to SEQ ID NO: 3253
  GFR-binding peptide
  MOD_RES (1)..(1): Xaa is C or S

SEQ ID NO: 59070 - protein, 41 aa, Artificial Sequence; identical to SEQ ID NO: 3255
  GFR-binding peptide
  MOD_RES (1)..(3)..(37)..(38): Xaa is C or S
  MOD_RES (15)..(16)..(17)..(18)..(19): Xaa is A or G
  MOD_RES (20)..(21)..(22)..(23): Xaa is A or G or is absent

SEQ ID NO: 59071 - protein, 40 aa, Artificial Sequence; identical to SEQ ID NO: 24246
  GFR-binding peptide
  MOD_RES (2)..(34)..(35): Xaa is C or S

SEQ ID NO: 59072 - protein, 38 aa, Artificial Sequence; identical to SEQ ID NO: 32285
  GFR-binding peptide
  MOD_RES (1)..(32)..(33): Xaa is C or S

SEQ ID NO: 59073 - protein, 38 aa, Artificial Sequence; identical to SEQ ID NO: 3260
  GFR-binding peptide
  MOD_RES (1)..(3)..(35)..(36): Xaa is C or S

SEQ ID NO: 59074 - protein, 42 aa, Artificial Sequence; identical to SEQ ID NO: 24250
  GFR-binding peptide
  MOD_RES (2)..(4)..(39)..(40): Xaa is C or S
  MOD_RES (17)..(18)..(19)..(20)..(21): Xaa is A or G
  MOD_RES (22)..(23)..(24)..(25): Xaa is A or G or is absent

SEQ ID NO: 59075 - protein, 32 aa, Artificial Sequence; identical to SEQ ID NO: 3262
  GFR-binding peptide
  MOD_RES (2)..(2): Xaa is C or S

SEQ ID NO: 59076 - protein, 36 aa, Artificial Sequence; identical to SEQ ID NO: 3263
  GFR-binding peptide
  MOD_RES (1)..(33)..(34): Xaa is C or S

SEQ ID NO: 59077 - protein, 37 aa, Artificial Sequence; identical to SEQ ID NO: 3265
  GFR-binding peptide
  MOD_RES (1)..(3)..(37): Xaa is C or S
  MOD_RES (15)..(16)..(17)..(18)..(19): Xaa is A or G
  MOD_RES (20)..(21)..(22)..(23): Xaa is A or G or is absent

SEQ ID NO: 59078 - protein, 35 aa, Artificial Sequence; identical to SEQ ID NO: 32290
  GFR-binding peptide
  MOD_RES (2)..(2): Xaa is C or S
  MOD_RES (14)..(15)..(16)..(17)..(18): Xaa is A or G
  MOD_RES (19)..(20)..(21)..(22): Xaa is A or G or is absent

SEQ ID NO: 59079 - protein, 32 aa, Artificial Sequence; identical to SEQ ID NO: 24257
  GFR-binding peptide
  MOD_RES (2)..(2): Xaa is C or S

SEQ ID NO: 59080 - protein, 40 aa, Artificial Sequence; identical to SEQ ID NO: 3267
  GFR-binding peptide
  MOD_RES (1)..(35)..(36): Xaa is C or S
  MOD_RES (13)..(14)..(15)..(16)..(17): Xaa is A or G
  MOD_RES (18)..(19)..(20)..(21): Xaa is A or G or is absent

SEQ ID NO: 59081 - protein, 37 aa, Artificial Sequence
  GFR-binding peptide
  MOD_RES (1)..(33)..(34): Xaa is C or S
XSEVVMDEYKFKVVNNASDLYLISIPELRTPVXXTPP

SEQ ID NO: 59082 - protein, 37 aa, Artificial Sequence; identical to SEQ ID NO: 24259
  GFR-binding peptide
  MOD_RES (1)..(36)..(37): Xaa is C or S
  MOD_RES (14)..(15)..(16)..(17)..(18): Xaa is A or G
  MOD_RES (19)..(20)..(21)..(22): Xaa is A or G or is absent

SEQ ID NO: 59083 - protein, 36 aa, Artificial Sequence
  GFR-binding peptide
  MOD_RES (2)..(35)..(36): Xaa is C or S
  MOD_RES (13)..(14)..(15)..(16)..(17): Xaa is A or G
  MOD_RES (18)..(19)..(20)..(21): Xaa is A or G or is absent
KXSKVIMPIKGYXXXXXXXXXFYLINIPSLDQSVXX

SEQ ID NO: 59084 - protein, 38 aa, Artificial Sequence; identical to SEQ ID NO: 32299
  GFR-binding peptide
  MOD_RES (33)..(34): Xaa is C or S
  MOD_RES (11)..(12)..(13)..(14)..(15): Xaa is A or G
  MOD_RES (16)..(17)..(18)..(19): Xaa is A or G or is absent

SEQ ID NO: 59085 - protein, 31 aa, Artificial Sequence; identical to SEQ ID NO: 24264
  GFR-binding peptide

SEQ ID NO: 59086 - protein, 31 aa, Artificial Sequence; identical to SEQ ID NO: 57231
  GFR-binding peptide
  MOD_RES (31)..(31): Xaa is C or S

SEQ ID NO: 59087 - protein, 36 aa, Artificial Sequence; identical to SEQ ID NO: 24265
  GFR-binding peptide
  MOD_RES (2)..(34)..(35): Xaa is C or S

SEQ ID NO: 59088 - protein, 35 aa, Artificial Sequence; identical to SEQ ID NO: 31200
  GFR-binding peptide
  MOD_RES (31)..(32): Xaa is C or S

SEQ ID NO: 59089 - protein, 38 aa, Artificial Sequence; identical to SEQ ID NO: 3274
  GFR-binding peptide
  MOD_RES (1)..(3)..(37)..(38): Xaa is C or S
  MOD_RES (15)..(16)..(17)..(18)..(19): Xaa is A or G
  MOD_RES (20)..(21)..(22)..(23): Xaa is A or G or is absent

SEQ ID NO: 59090 - protein, 32 aa, Artificial Sequence
  GFR-binding peptide
  MOD_RES (32)..(32): Xaa is C or S
SEVVMDRHKRLVVNNASDYYLISTASLRTPVX

SEQ ID NO: 59091 - protein, 33 aa, Artificial Sequence; identical to SEQ ID NO: 3275
  GFR-binding peptide
  MOD_RES (12)..(13)..(14)..(15)..(16): Xaa is A or G
  MOD_RES (17)..(18)..(19)..(20): Xaa is A or G or is absent

SEQ ID NO: 59092 - protein, 39 aa, Artificial Sequence; identical to SEQ ID NO: 3277
  GFR-binding peptide
  MOD_RES (1)..(33)..(34): Xaa is C or S

SEQ ID NO: 59093 - protein, 40 aa, Artificial Sequence; identical to SEQ ID NO: 31204
  GFR-binding peptide
  MOD_RES (1)..(3)..(37)..(38): Xaa is C or S
  MOD_RES (15)..(16)..(17)..(18)..(19): Xaa is A or G
  MOD_RES (20)..(21)..(22)..(23): Xaa is A or G or is absent

SEQ ID NO: 59094 - protein, 39 aa, Artificial Sequence
  GFR-binding peptide
  MOD_RES (2)..(4)..(36)..(37): Xaa is C or S
RXGXAEVVMDRHKRLVVNNAADYYLISTASLRAPVXXSA

SEQ ID NO: 59095 - protein, 35 aa, Artificial Sequence; identical to SEQ ID NO: 31206
  GFR-binding peptide
  MOD_RES (32)..(33): Xaa is C or S

SEQ ID NO: 59096 - protein, 39 aa, Artificial Sequence; identical to SEQ ID NO: 31208
  GFR-binding peptide
  MOD_RES (2)..(4)..(36)..(37): Xaa is C or S

SEQ ID NO: 59097 - protein, 40 aa, Artificial Sequence; identical to SEQ ID NO: 31209
  GFR-binding peptide
  MOD_RES (1)..(3)..(35)..(36): Xaa is C or S

SEQ ID NO: 59098 - protein, 41 aa, Artificial Sequence; identical to SEQ ID NO: 3282
  GFR-binding peptide
  MOD_RES (2)..(35)..(36): Xaa is C or S
  MOD_RES (13)..(14)..(15)..(16)..(17): Xaa is A or G
  MOD_RES (18)..(19)..(20)..(21): Xaa is A or G or is absent

SEQ ID NO: 59099 - protein, 30 aa, Artificial Sequence
  GFR-binding peptide
SRVIMPIKGYVKPKRGVFYLINIPSLAQPV

SEQ ID NO: 59100 - protein, 33 aa, Artificial Sequence; identical to SEQ ID NO: 31212
  GFR-binding peptide
  MOD_RES (1)..(33): Xaa is C or S

SEQ ID NO: 59101 - protein, 34 aa, Artificial Sequence; identical to SEQ ID NO: 3284
  GFR-binding peptide
  MOD_RES (31)..(32): Xaa is C or S

SEQ ID NO: 59102 - protein, 37 aa, Artificial Sequence; identical to SEQ ID NO: 3285
  GFR-binding peptide
  MOD_RES (1)..(3)..(36)..(37): Xaa is C or S
  MOD_RES (14)..(15)..(16)..(17)..(18): Xaa is A or G
  MOD_RES (19)..(20)..(21)..(22): Xaa is A or G or is absent

SEQ ID NO: 59103 - protein, 40 aa, Artificial Sequence; identical to SEQ ID NO: 31216
  GFR-binding peptide
  MOD_RES (34)..(34): Xaa is C or S
  MOD_RES (12)..(13)..(14)..(15)..(16): Xaa is A or G
  MOD_RES (17)..(18)..(19)..(20): Xaa is A or G or is absent

SEQ ID NO: 59104 - protein, 35 aa, Artificial Sequence; identical to SEQ ID NO: 3286
  GFR-binding peptide
  MOD_RES (1)..(3)..(34)..(35): Xaa is C or S

SEQ ID NO: 59105 - protein, 39 aa, Artificial Sequence; identical to SEQ ID NO: 3287
  GFR-binding peptide
  MOD_RES (1)..(35)..(36): Xaa is C or S
  MOD_RES (13)..(14)..(15)..(16)..(17): Xaa is A or G
  MOD_RES (18)..(19)..(20)..(21): Xaa is A or G or is absent

SEQ ID NO: 59106 - protein, 34 aa, Artificial Sequence; identical to SEQ ID NO: 31218
  GFR-binding peptide
  MOD_RES (2)..(34): Xaa is C or S

SEQ ID NO: 59107 - protein, 41 aa, Artificial Sequence; identical to SEQ ID NO: 31219
  GFR-binding peptide
  MOD_RES (1)..(3)..(37)..(38): Xaa is C or S
  MOD_RES (15)..(16)..(17)..(18)..(19): Xaa is A or G
  MOD_RES (20)..(21)..(22)..(23): Xaa is A or G or is absent

SEQ ID NO: 59108 - protein, 32 aa, Artificial Sequence; identical to SEQ ID NO: 3291
  GFR-binding peptide
  MOD_RES (1)..(1): Xaa is C or S

SEQ ID NO: 59109 - protein, 42 aa, Artificial Sequence; identical to SEQ ID NO: 3293
  GFR-binding peptide
  MOD_RES (2)..(4)..(38)..(39): Xaa is C or S
  MOD_RES (16)..(17)..(18)..(19)..(20): Xaa is A or G
  MOD_RES (21)..(22)..(23)..(24): Xaa is A or G or is absent

SEQ ID NO: 59110 - protein, 36 aa, Artificial Sequence; identical to SEQ ID NO: 3296
  GFR-binding peptide
  MOD_RES (1)..(35)..(36): Xaa is C or S
  MOD_RES (13)..(14)..(15)..(16)..(17): Xaa is A or G
  MOD_RES (18)..(19)..(20)..(21): Xaa is A or G or is absent

SEQ ID NO: 59111 - protein, 39 aa, Artificial Sequence; identical to SEQ ID NO: 24288
  GFR-binding peptide
  MOD_RES (2)..(4)..(38)..(39): Xaa is C or S
  MOD_RES (16)..(17)..(18)..(19)..(20): Xaa is A or G
  MOD_RES (21)..(22)..(23)..(24): Xaa is A or G or is absent

SEQ ID NO: 59112 - protein, 37 aa, Artificial Sequence; identical to SEQ ID NO: 31229
  GFR-binding peptide
  MOD_RES (33)..(34): Xaa is C or S
  MOD_RES (11)..(12)..(13)..(14)..(15): Xaa is A or G
  MOD_RES (16)..(17)..(18)..(19): Xaa is A or G or is absent

SEQ ID NO: 59113 - protein, 39 aa, Artificial Sequence
  GFR-binding peptide
  MOD_RES (2)..(4)..(38)..(39): Xaa is C or S
  MOD_RES (16)..(17)..(18)..(19)..(20): Xaa is A or G
  MOD_RES (21)..(22)..(23)..(24): Xaa is A or G or is absent
SXGXRDVVMGYHYKLXXXXXXXXXKYLMSIPSMKTPTXX

SEQ ID NO: 59114 - protein, 35 aa, Artificial Sequence; identical to SEQ ID NO: 3299
  GFR-binding peptide
  MOD_RES (2)..(2): Xaa is C or S
  MOD_RES (14)..(15)..(16)..(17)..(18): Xaa is A or G
  MOD_RES (19)..(20)..(21)..(22): Xaa is A or G or is absent

SEQ ID NO: 59115 - protein, 41 aa, Artificial Sequence; identical to SEQ ID NO: 3300
  GFR-binding peptide
  MOD_RES (1)..(3)..(37)..(38): Xaa is C or S
  MOD_RES (15)..(16)..(17)..(18)..(19): Xaa is A or G
  MOD_RES (20)..(21)..(22)..(23): Xaa is A or G or is absent

SEQ ID NO: 59116 - protein, 34 aa, Artificial Sequence; identical to SEQ ID NO: 24292
  GFR-binding peptide
  MOD_RES (31)..(31): Xaa is C or S

SEQ ID NO: 59117 - protein, 37 aa, Artificial Sequence
  GFR-binding peptide
  MOD_RES (2)..(34)..(35): Xaa is C or S
GXRDVVMGEYKFKIIQQKDNLYLMSIPEMKTPTXXPG

SEQ ID NO: 59118 - protein, 32 aa, Artificial Sequence; identical to SEQ ID NO: 3304
  GFR-binding peptide
  MOD_RES (11)..(12)..(13)..(14)..(15): Xaa is A or G
  MOD_RES (16)..(17)..(18)..(19): Xaa is A or G or is absent

SEQ ID NO: 59119 - protein, 37 aa, Artificial Sequence; identical to SEQ ID NO: 56168
  GFR-binding peptide
  MOD_RES (2)..(34)..(35): Xaa is C or S

SEQ ID NO: 59120 - protein, 30 aa, Artificial Sequence; identical to SEQ ID NO: 24301
  GFR-binding peptide

SEQ ID NO: 59121 - protein, 41 aa, Artificial Sequence; identical to SEQ ID NO: 3308
  GFR-binding peptide
  MOD_RES (2)..(4)..(38)..(39): Xaa is C or S
  MOD_RES (16)..(17)..(18)..(19)..(20): Xaa is A or G
  MOD_RES (21)..(22)..(23)..(24): Xaa is A or G or is absent

SEQ ID NO: 59122 - protein, 33 aa, Artificial Sequence; identical to SEQ ID NO: 24303
  GFR-binding peptide
  MOD_RES (1)..(32)..(33): Xaa is C or S

SEQ ID NO: 59123 - protein, 39 aa, Artificial Sequence
  GFR-binding peptide
  MOD_RES (33)..(34): Xaa is C or S
  MOD_RES (11)..(12)..(13)..(14)..(15): Xaa is A or G
  MOD_RES (16)..(17)..(18)..(19): Xaa is A or G or is absent
EVTMNYHYKLXXXXXXXXXKYLISIPSMKEPVXXPEPIG

SEQ ID NO: 59124 - protein, 44 aa, Artificial Sequence; identical to SEQ ID NO: 31241
  GFR-binding peptide
  MOD_RES (2)..(4)..(38)..(39): Xaa is C or S
  MOD_RES (16)..(17)..(18)..(19)..(20): Xaa is A or G
  MOD_RES (21)..(22)..(23)..(24): Xaa is A or G or is absent

SEQ ID NO: 59125 - protein, 43 aa, Artificial Sequence; identical to SEQ ID NO: 3314
  GFR-binding peptide
  MOD_RES (1)..(3)..(37)..(38): Xaa is C or S
  MOD_RES (15)..(16)..(17)..(18)..(19): Xaa is A or G
  MOD_RES (20)..(21)..(22)..(23): Xaa is A or G or is absent

SEQ ID NO: 59126 - protein, 37 aa, Artificial Sequence; identical to SEQ ID NO: 3315
  GFR-binding peptide
  MOD_RES (32)..(33): Xaa is C or S

SEQ ID NO: 59127 - protein, 33 aa, Artificial Sequence
  GFR-binding peptide
  MOD_RES (12)..(13)..(14)..(15)..(16): Xaa is A or G
  MOD_RES (17)..(18)..(19)..(20): Xaa is A or G or is absent
SEVTMNEYKFKXXXXXXXXXLYLISIPEMKEPV

SEQ ID NO: 59128 - protein, 35 aa, Artificial Sequence; identical to SEQ ID NO: 24309
  GFR-binding peptide
  MOD_RES (33)..(34): Xaa is C or S
  MOD_RES (11)..(12)..(13)..(14)..(15): Xaa is A or G
  MOD_RES (16)..(17)..(18)..(19): Xaa is A or G or is absent

SEQ ID NO: 59129 - protein, 34 aa, Artificial Sequence; identical to SEQ ID NO: 31251
  GFR-binding peptide
  MOD_RES (1)..(3)..(34): Xaa is C or S

SEQ ID NO: 59130 - protein, 36 aa, Artificial Sequence; identical to SEQ ID NO: 24313
  GFR-binding peptide
  MOD_RES (1)..(33)..(34): Xaa is C or S

SEQ ID NO: 59131 - protein, 30 aa, Artificial Sequence; identical to SEQ ID NO: 3320
  GFR-binding peptide

SEQ ID NO: 59132 - protein, 38 aa, Artificial Sequence
  GFR-binding peptide
  MOD_RES (1)..(32)..(33): Xaa is C or S
XSKVVMPIKGYVKPTRGVFYLINIPSLDQPVXXPSASA

SEQ ID NO: 59133 - protein, 37 aa, Artificial Sequence
  GFR-binding peptide
  MOD_RES (2)..(34)..(35): Xaa is C or S
AXSEVTMNRHKRLVVNKNEDYYLISTASMKEPVXXPE

SEQ ID NO: 59134 - protein, 38 aa, Artificial Sequence; identical to SEQ ID NO: 24318
  GFR-binding peptide
  MOD_RES (2)..(36)..(37): Xaa is C or S
  MOD_RES (14)..(15)..(16)..(17)..(18): Xaa is A or G
  MOD_RES (19)..(20)..(21)..(22): Xaa is A or G or is absent

SEQ ID NO: 59135 - protein, 38 aa, Artificial Sequence; identical to SEQ ID NO: 3324
  GFR-binding peptide
  MOD_RES (2)..(36)..(37): Xaa is C or S
  MOD_RES (14)..(15)..(16)..(17)..(18): Xaa is A or G
  MOD_RES (19)..(20)..(21)..(22): Xaa is A or G or is absent

SEQ ID NO: 59136 - protein, 38 aa, Artificial Sequence; identical to SEQ ID NO: 24320
  GFR-binding peptide
  MOD_RES (2)..(33)..(34): Xaa is C or S

SEQ ID NO: 59137 - protein, 40 aa, Artificial Sequence; identical to SEQ ID NO: 3327
  GFR-binding peptide
  MOD_RES (1)..(3)..(36)..(37): Xaa is C or S
  MOD_RES (14)..(15)..(16)..(17)..(18): Xaa is A or G
  MOD_RES (19)..(20)..(21)..(22): Xaa is A or G or is absent

SEQ ID NO: 59138 - protein, 33 aa, Artificial Sequence
  GFR-binding peptide
  MOD_RES (32)..(33): Xaa is C or S
RDVVMGEYKFKIIQQKDNLYLMSIPEMKTPTXX

SEQ ID NO: 59139 - protein, 40 aa, Artificial Sequence; identical to SEQ ID NO: 3331
  GFR-binding peptide
  MOD_RES (2)..(4)..(37)..(38): Xaa is C or S
  MOD_RES (15)..(16)..(17)..(18)..(19): Xaa is A or G
  MOD_RES (20)..(21)..(22)..(23): Xaa is A or G or is absent

SEQ ID NO: 59140 - protein, 35 aa, Artificial Sequence; identical to SEQ ID NO: 24326
  GFR-binding peptide
  MOD_RES (34)..(35): Xaa is C or S
  MOD_RES (12)..(13)..(14)..(15)..(16): Xaa is A or G
  MOD_RES (17)..(18)..(19)..(20): Xaa is A or G or is absent

SEQ ID NO: 59141 - protein, 35 aa, Artificial Sequence
  GFR-binding peptide
  MOD_RES (1)..(35): Xaa is C or S
  MOD_RES (13)..(14)..(15)..(16)..(17): Xaa is A or G
  MOD_RES (18)..(19)..(20)..(21): Xaa is A or G or is absent
XSEVTMNEYKFKXXXXXXXXXLYLISIPEMKEPVX

SEQ ID NO: 59142 - protein, 40 aa, Artificial Sequence
  GFR-binding peptide
  MOD_RES (2)..(36)..(37): Xaa is C or S
  MOD_RES (14)..(15)..(16)..(17)..(18): Xaa is A or G
  MOD_RES (19)..(20)..(21)..(22): Xaa is A or G or is absent
GXRDVVMGRHKRLXXXXXXXXXYYLMSTASMKTPTXXPGA

SEQ ID NO: 59143 - protein, 41 aa, Artificial Sequence; identical to SEQ ID NO: 3333
  GFR-binding peptide
  MOD_RES (2)..(4)..(35)..(36): Xaa is C or S

SEQ ID NO: 59144 - protein, 42 aa, Artificial Sequence; identical to SEQ ID NO: 31265
  GFR-binding peptide
  MOD_RES (2)..(4)..(38)..(39): Xaa is C or S
  MOD_RES (16)..(17)..(18)..(19)..(20): Xaa is A or G
  MOD_RES (21)..(22)..(23)..(24): Xaa is A or G or is absent

SEQ ID NO: 59145 - protein, 41 aa, Artificial Sequence; identical to SEQ ID NO: 3336
  GFR-binding peptide
  MOD_RES (35)..(36): Xaa is C or S
  MOD_RES (13)..(14)..(15)..(16)..(17): Xaa is A or G
  MOD_RES (18)..(19)..(20)..(21): Xaa is A or G or is absent

SEQ ID NO: 59146 - protein, 36 aa, Artificial Sequence; identical to SEQ ID NO: 3337
  GFR-binding peptide
  MOD_RES (2)..(36): Xaa is C or S
  MOD_RES (14)..(15)..(16)..(17)..(18): Xaa is A or G
  MOD_RES (19)..(20)..(21)..(22): Xaa is A or G or is absent

SEQ ID NO: 59147 - protein, 41 aa, Artificial Sequence; identical to SEQ ID NO: 3338
  GFR-binding peptide
  MOD_RES (2)..(4)..(38): Xaa is C or S
  MOD_RES (16)..(17)..(18)..(19)..(20): Xaa is A or G
  MOD_RES (21)..(22)..(23)..(24): Xaa is A or G or is absent

SEQ ID NO: 59148 - protein, 35 aa, Artificial Sequence; identical to SEQ ID NO: 56202
  GFR-binding peptide
  MOD_RES (1)..(34)..(35): Xaa is C or S
  MOD_RES (12)..(13)..(14)..(15)..(16): Xaa is A or G
  MOD_RES (17)..(18)..(19)..(20): Xaa is A or G or is absent

SEQ ID NO: 59149 - protein, 39 aa, Artificial Sequence
  GFR-binding peptide
  MOD_RES (33)..(34): Xaa is C or S
  MOD_RES (11)..(12)..(13)..(14)..(15): Xaa is A or G
  MOD_RES (16)..(17)..(18)..(19): Xaa is A or G or is absent
EVTMNEYKFKXXXXXXXXXLYLISIPEMKEPVXXPEPIG

SEQ ID NO: 59150 - protein, 37 aa, Artificial Sequence; identical to SEQ ID NO: 3341
  GFR-binding peptide
  MOD_RES (2)..(35)..(36): Xaa is C or S
  MOD_RES (13)..(14)..(15)..(16)..(17): Xaa is A or G
  MOD_RES (18)..(19)..(20)..(21): Xaa is A or G or is absent

SEQ ID NO: 59151 - protein, 32 aa, Artificial Sequence; identical to SEQ ID NO: 31274
  GFR-binding peptide
  MOD_RES (32)..(32): Xaa is C or S

SEQ ID NO: 59152 - protein, 41 aa, Artificial Sequence
  GFR-binding peptide
  MOD_RES (1)..(3)..(35)..(36): Xaa is C or S
XGXSRVVMNEYKFKIVNSSDDLYLVSIPELKTPAXXPKPVH

SEQ ID NO: 59153 - protein, 41 aa, Artificial Sequence
  GFR-binding peptide
  MOD_RES (1)..(3)..(36)..(37): Xaa is C or S
  MOD_RES (14)..(15)..(16)..(17)..(18): Xaa is A or G
  MOD_RES (19)..(20)..(21)..(22): Xaa is A or G or is absent
XKXSKVVMPIKGYXXXXXXXXXFYLINIPSLDQPVXXPSAS

SEQ ID NO: 59154 - protein, 37 aa, Artificial Sequence; identical to SEQ ID NO: 3342
  GFR-binding peptide
  MOD_RES (1)..(32)..(33): Xaa is C or S

SEQ ID NO: 59155 - protein, 35 aa, Artificial Sequence; identical to SEQ ID NO: 24330
  GFR-binding peptide
  MOD_RES (1)..(33)..(34): Xaa is C or S

SEQ ID NO: 59156 - protein, 35 aa, Artificial Sequence; identical to SEQ ID NO: 31282
  GFR-binding peptide
  MOD_RES (2)..(4): Xaa is C or S

SEQ ID NO: 59157 - protein, 34 aa, Artificial Sequence
  GFR-binding peptide
  MOD_RES (31)..(32): Xaa is C or S
DVVMGEYKFKIIQQKDNLYLMSIPEMKTPTXXPG

SEQ ID NO: 59158 - protein, 35 aa, Artificial Sequence; identical to SEQ ID NO: 24332
  GFR-binding peptide
  MOD_RES (34)..(35): Xaa is C or S
  MOD_RES (12)..(13)..(14)..(15)..(16): Xaa is A or G
  MOD_RES (17)..(18)..(19)..(20): Xaa is A or G or is absent

SEQ ID NO: 59159 - protein, 35 aa, Artificial Sequence
  GFR-binding peptide
  MOD_RES (1)..(33)..(34): Xaa is C or S
XAEVVMDRHKRLVVNNAADYYLISTASLRAPVXXS

SEQ ID NO: 59160 - protein, 36 aa, Artificial Sequence
  GFR-binding peptide
  MOD_RES (1)..(34)..(35): Xaa is C or S
  MOD_RES (12)..(13)..(14)..(15)..(16): Xaa is A or G
  MOD_RES (17)..(18)..(19)..(20): Xaa is A or G or is absent
XEEVIMRHKRLXXXXXXXXXYYLMSTASTKVPAXXT

SEQ ID NO: 59161 - protein, 42 aa, Artificial Sequence; identical to SEQ ID NO: 3348
  GFR-binding peptide
  MOD_RES (2)..(4)..(38)..(39): Xaa is C or S
  MOD_RES (16)..(17)..(18)..(19)..(20): Xaa is A or G
  MOD_RES (21)..(22)..(23)..(24): Xaa is A or G or is absent

SEQ ID NO: 59162 - protein, 41 aa, Artificial Sequence; identical to SEQ ID NO: 31288
  GFR-binding peptide
  MOD_RES (1)..(3)..(35)..(36): Xaa is C or S

SEQ ID NO: 59163 - protein, 38 aa, Artificial Sequence; identical to SEQ ID NO: 31290
  GFR-binding peptide
  MOD_RES (1)..(3)..(37)..(38): Xaa is C or S
  MOD_RES (15)..(16)..(17)..(18)..(19): Xaa is A or G
  MOD_RES (20)..(21)..(22)..(23): Xaa is A or G or is absent

SEQ ID NO: 59164 - protein, 36 aa, Artificial Sequence; identical to SEQ ID NO: 3353
  GFR-binding peptide
  MOD_RES (2)..(34)..(35): Xaa is C or S

SEQ ID NO: 59165 - protein, 36 aa, Artificial Sequence
  GFR-binding peptide
  MOD_RES (1)..(3)..(35)..(36): Xaa is C or S
XGXSEVVMDYHYKLVVNNASDKYLISIPSLRTPVXX

SEQ ID NO: 59166 - protein, 38 aa, Artificial Sequence; identical to SEQ ID NO: 3355
  GFR-binding peptide
  MOD_RES (2)..(4)..(37)..(38): Xaa is C or S
  MOD_RES (15)..(16)..(17)..(18)..(19): Xaa is A or G
  MOD_RES (20)..(21)..(22)..(23): Xaa is A or G or is absent

SEQ ID NO: 59167 - protein, 37 aa, Artificial Sequence; identical to SEQ ID NO: 31292
  GFR-binding peptide
  MOD_RES (1)..(34)..(35): Xaa is C or S
  MOD_RES (12)..(13)..(14)..(15)..(16): Xaa is A or G
  MOD_RES (17)..(18)..(19)..(20): Xaa is A or G or is absent

SEQ ID NO: 59168 - protein, 31 aa, Artificial Sequence; identical to SEQ ID NO: 3357
  GFR-binding peptide
  MOD_RES (31)..(31): Xaa is C or S

SEQ ID NO: 59169 - protein, 35 aa, Artificial Sequence; identical to SEQ ID NO: 24338
  GFR-binding peptide
  MOD_RES (31)..(32): Xaa is C or S

SEQ ID NO: 59170 - protein, 41 aa, Artificial Sequence; identical to SEQ ID NO: 31294
  GFR-binding peptide
  MOD_RES (2)..(4)..(38): Xaa is C or S
  MOD_RES (16)..(17)..(18)..(19)..(20): Xaa is A or G
  MOD_RES (21)..(22)..(23)..(24): Xaa is A or G or is absent

SEQ ID NO: 59171 - protein, 37 aa, Artificial Sequence; identical to SEQ ID NO: 56221
  GFR-binding peptide
  MOD_RES (34)..(35): Xaa is C or S
  MOD_RES (12)..(13)..(14)..(15)..(16): Xaa is A or G
  MOD_RES (17)..(18)..(19)..(20): Xaa is A or G or is absent

SEQ ID NO: 59172 - protein, 39 aa, Artificial Sequence; identical to SEQ ID NO: 3359
  GFR-binding peptide
  MOD_RES (34)..(35): Xaa is C or S
  MOD_RES (12)..(13)..(14)..(15)..(16): Xaa is A or G
  MOD_RES (17)..(18)..(19)..(20): Xaa is A or G or is absent

SEQ ID NO: 59173 - protein, 42 aa, Artificial Sequence; identical to SEQ ID NO: 3362
  GFR-binding peptide
  MOD_RES (2)..(4)..(37)..(38): Xaa is C or S
  MOD_RES (15)..(16)..(17)..(18)..(19): Xaa is A or G
  MOD_RES (20)..(21)..(22)..(23): Xaa is A or G or is absent

SEQ ID NO: 59174 - protein, 31 aa, Artificial Sequence; identical to SEQ ID NO: 3363
  GFR-binding peptide

SEQ ID NO: 59175 - protein, 38 aa, Artificial Sequence
  GFR-binding peptide
  MOD_RES (1)..(3)..(34)..(35): Xaa is C or S
XKXSKVIMPIKGYIKPTKGIFYLINIPSLDQSVXXPSA

SEQ ID NO: 59176 - protein, 38 aa, Artificial Sequence; identical to SEQ ID NO: 3365
  GFR-binding peptide
  MOD_RES (2)..(4)..(36)..(37): Xaa is C or S

SEQ ID NO: 59177 - protein, 39 aa, Artificial Sequence
  GFR-binding peptide
  MOD_RES (34)..(35): Xaa is C or S
  MOD_RES (12)..(13)..(14)..(15)..(16): Xaa is A or G
  MOD_RES (17)..(18)..(19)..(20): Xaa is A or G or is absent
SEVTMNRYKKLXXXXXXXXXFYLISIANMKEPVXXPEPI

SEQ ID NO: 59178 - protein, 32 aa, Artificial Sequence
  GFR-binding peptide
  MOD_RES (11)..(12)..(13)..(14)..(15): Xaa is A or G
  MOD_RES (16)..(17)..(18)..(19): Xaa is A or G or is absent
DVVMGYHYKLXXXXXXXXXKYLMSIPSMKTPT

SEQ ID NO: 59179 - protein, 38 aa, Artificial Sequence
  GFR-binding peptide
  MOD_RES (2)..(4)..(38): Xaa is C or S
  MOD_RES (16)..(17)..(18)..(19)..(20): Xaa is A or G
  MOD_RES (21)..(22)..(23)..(24): Xaa is A or G or is absent
RXAXSEVTMNRYKKLXXXXXXXXXFYLISIANMKEPVX

SEQ ID NO: 59180 - protein, 37 aa, Artificial Sequence; identical to SEQ ID NO: 3368
  GFR-binding peptide
  MOD_RES (2)..(4)..(36)..(37): Xaa is C or S

SEQ ID NO: 59181 - protein, 40 aa, Artificial Sequence; identical to SEQ ID NO: 31311
  GFR-binding peptide
  MOD_RES (2)..(34)..(35): Xaa is C or S

SEQ ID NO: 59182 - protein, 36 aa, Artificial Sequence; identical to SEQ ID NO: 31312
  GFR-binding peptide
  MOD_RES (2)..(34)..(35): Xaa is C or S

SEQ ID NO: 59183 - protein, 36 aa, Artificial Sequence
  GFR-binding peptide
  MOD_RES (2)..(4)..(36): Xaa is C or S
SXGXRDVVMGYHYKLIIQQKDNKYLMSIPSMKTPTX

SEQ ID NO: 59184 - protein, 41 aa, Artificial Sequence; identical to SEQ ID NO: 24352
  GFR-binding peptide
  MOD_RES (1)..(3)..(35)..(36): Xaa is C or S

SEQ ID NO: 59185 - protein, 33 aa, Artificial Sequence
  GFR-binding peptide
  MOD_RES (31)..(32): Xaa is C or S
EVTMNRHKRLVVNKNEDYYLISTASMKEPVXXP

SEQ ID NO: 59186 - protein, 34 aa, Artificial Sequence; identical to SEQ ID NO: 31313
  GFR-binding peptide
  MOD_RES (1)..(3): Xaa is C or S

SEQ ID NO: 59187 - protein, 39 aa, Artificial Sequence; identical to SEQ ID NO: 31315
  GFR-binding peptide
  MOD_RES (2)..(34)..(35): Xaa is C or S

SEQ ID NO: 59188 - protein, 37 aa, Artificial Sequence; identical to SEQ ID NO: 3373
  GFR-binding peptide
  MOD_RES (1)..(3)..(34)..(35): Xaa is C or S

SEQ ID NO: 59189 - protein, 37 aa, Artificial Sequence; identical to SEQ ID NO: 3374
  GFR-binding peptide
  MOD_RES (1)..(3)..(37): Xaa is C or S
  MOD_RES (15)..(16)..(17)..(18)..(19): Xaa is A or G
  MOD_RES (20)..(21)..(22)..(23): Xaa is A or G or is absent

SEQ ID NO: 59190 - protein, 40 aa, Artificial Sequence; identical to SEQ ID NO: 3379
  GFR-binding peptide
  MOD_RES (2)..(34)..(35): Xaa is C or S

SEQ ID NO: 59191 - protein, 34 aa, Artificial Sequence; identical to SEQ ID NO: 24360
  GFR-binding peptide
  MOD_RES (1)..(1): Xaa is C or S
  MOD_RES (13)..(14)..(15)..(16)..(17): Xaa is A or G
  MOD_RES (18)..(19)..(20)..(21): Xaa is A or G or is absent

SEQ ID NO: 59192 - protein, 37 aa, Artificial Sequence; identical to SEQ ID NO: 24361
  GFR-binding peptide
  MOD_RES (31)..(32): Xaa is C or S

SEQ ID NO: 59193 - protein, 34 aa, Artificial Sequence
  GFR-binding peptide
  MOD_RES (2)..(34): Xaa is C or S
AXSEVTMNRHKRLVVNKNEDYYLISTASMKEPVX

SEQ ID NO: 59194 - protein, 32 aa, Artificial Sequence; identical to SEQ ID NO: 31329
  GFR-binding peptide
  MOD_RES (31)..(32): Xaa is C or S

SEQ ID NO: 59195 - protein, 40 aa, Artificial Sequence; identical to SEQ ID NO: 10810
  GFR-binding peptide
  MOD_RES (1)..(3)..(35)..(36): Xaa is C or S

SEQ ID NO: 59196 - protein, 37 aa, Artificial Sequence; identical to SEQ ID NO: 3387
  GFR-binding peptide
  MOD_RES (31)..(32): Xaa is C or S

SEQ ID NO: 59197 - protein, 36 aa, Artificial Sequence; identical to SEQ ID NO: 3388
  GFR-binding peptide
  MOD_RES (2)..(4)..(36): Xaa is C or S

SEQ ID NO: 59198 - protein, 38 aa, Artificial Sequence; identical to SEQ ID NO: 24368
  GFR-binding peptide
  MOD_RES (33)..(34): Xaa is C or S
  MOD_RES (11)..(12)..(13)..(14)..(15): Xaa is A or G
  MOD_RES (16)..(17)..(18)..(19): Xaa is A or G or is absent

SEQ ID NO: 59199 - protein, 34 aa, Artificial Sequence; identical to SEQ ID NO: 31333
  GFR-binding peptide
  MOD_RES (1)..(1): Xaa is C or S
  MOD_RES (13)..(14)..(15)..(16)..(17): Xaa is A or G
  MOD_RES (18)..(19)..(20)..(21): Xaa is A or G or is absent

SEQ ID NO: 59200 - protein, 39 aa, Artificial Sequence; identical to SEQ ID NO: 10812
  GFR-binding peptide
  MOD_RES (2)..(4)..(38)..(39): Xaa is C or S
  MOD_RES (16)..(17)..(18)..(19)..(20): Xaa is A or G
  MOD_RES (21)..(22)..(23)..(24): Xaa is A or G or is absent

SEQ ID NO: 59201 - protein, 37 aa, Artificial Sequence; identical to SEQ ID NO: 31340
  GFR-binding peptide
  MOD_RES (32)..(33): Xaa is C or S

SEQ ID NO: 59202 - protein, 32 aa, Artificial Sequence; identical to SEQ ID NO: 24370
  GFR-binding peptide
  MOD_RES (32)..(32): Xaa is C or S

SEQ ID NO: 59203 - protein, 37 aa, Artificial Sequence
  GFR-binding peptide
  MOD_RES (32)..(33): Xaa is C or S
SEVTMNRHKRLVVNKNEDYYLISTASMKEPVXXPEPI

SEQ ID NO: 59204 - protein, 35 aa, Artificial Sequence
  GFR-binding peptide
  MOD_RES (32)..(33): Xaa is C or S
SEVTMNEYKFKVVNKNEDLYLISIPEMKEPVXXPE

SEQ ID NO: 59205 - protein, 34 aa, Artificial Sequence; identical to SEQ ID NO: 31344
  GFR-binding peptide
  MOD_RES (31)..(32): Xaa is C or S

SEQ ID NO: 59206 - protein, 43 aa, Artificial Sequence; identical to SEQ ID NO: 24371
  GFR-binding peptide
  MOD_RES (2)..(4)..(38)..(39): Xaa is C or S
  MOD_RES (16)..(17)..(18)..(19)..(20): Xaa is A or G
  MOD_RES (21)..(22)..(23)..(24): Xaa is A or G or is absent

SEQ ID NO: 59207 - protein, 36 aa, Artificial Sequence
  GFR-binding peptide
  MOD_RES (1)..(33)..(34): Xaa is C or S
XSEVVMDEYKFKVVNNASDLYLISIPELRTPVXXTP

SEQ ID NO: 59208 - protein, 41 aa, Artificial Sequence; identical to SEQ ID NO: 3394
  GFR-binding peptide
  MOD_RES (2)..(4)..(37)..(38): Xaa is C or S
  MOD_RES (15)..(16)..(17)..(18)..(19): Xaa is A or G
  MOD_RES (20)..(21)..(22)..(23): Xaa is A or G or is absent

SEQ ID NO: 59209 - protein, 34 aa, Artificial Sequence; identical to SEQ ID NO: 3396
  GFR-binding peptide
  MOD_RES (1)..(33)..(34): Xaa is C or S

SEQ ID NO: 59210 - protein, 37 aa, Artificial Sequence; identical to SEQ ID NO: 3399
  GFR-binding peptide
  MOD_RES (1)..(34)..(35): Xaa is C or S
  MOD_RES (12)..(13)..(14)..(15)..(16): Xaa is A or G
  MOD_RES (17)..(18)..(19)..(20): Xaa is A or G or is absent

SEQ ID NO: 59211 - protein, 34 aa, Artificial Sequence
  GFR-binding peptide
  MOD_RES (2)..(33)..(34): Xaa is C or S
KXSRVIMPIKGYVKPKRGVFYLINIPSLAQPVXX

SEQ ID NO: 59212 - protein, 40 aa, Artificial Sequence; identical to SEQ ID NO: 3401
  GFR-binding peptide
  MOD_RES (2)..(35)..(36): Xaa is C or S
  MOD_RES (13)..(14)..(15)..(16)..(17): Xaa is A or G
  MOD_RES (18)..(19)..(20)..(21): Xaa is A or G or is absent

SEQ ID NO: 59213 - protein, 36 aa, Artificial Sequence
  GFR-binding peptide
  MOD_RES (2)..(36): Xaa is C or S
  MOD_RES (14)..(15)..(16)..(17)..(18): Xaa is A or G
  MOD_RES (19)..(20)..(21)..(22): Xaa is A or G or is absent
AXSEVTMNRHKRLXXXXXXXXXYYLISTASMKEPVX

SEQ ID NO: 59214 - protein, 36 aa, Artificial Sequence; identical to SEQ ID NO: 31362
  GFR-binding peptide
  MOD_RES (34)..(35): Xaa is C or S
  MOD_RES (12)..(13)..(14)..(15)..(16): Xaa is A or G
  MOD_RES (17)..(18)..(19)..(20): Xaa is A or G or is absent

SEQ ID NO: 59215 - protein, 38 aa, Artificial Sequence
  GFR-binding peptide
  MOD_RES (2)..(4)..(38): Xaa is C or S
  MOD_RES (16)..(17)..(18)..(19)..(20): Xaa is A or G
  MOD_RES (21)..(22)..(23)..(24): Xaa is A or G or is absent
RXGXESVAMGRHKRLXXXXXXXXXYYLISTASLKTPVX

SEQ ID NO: 59216 - protein, 36 aa, Artificial Sequence; identical to SEQ ID NO: 24384
  GFR-binding peptide
  MOD_RES (2)..(35)..(36): Xaa is C or S

SEQ ID NO: 59217 - protein, 34 aa, Artificial Sequence; identical to SEQ ID NO: 24385
  GFR-binding peptide
  MOD_RES (1)..(1): Xaa is C or S
  MOD_RES (13)..(14)..(15)..(16)..(17): Xaa is A or G
  MOD_RES (18)..(19)..(20)..(21): Xaa is A or G or is absent

SEQ ID NO: 59218 - protein, 37 aa, Artificial Sequence; identical to SEQ ID NO: 31366
  GFR-binding peptide
  MOD_RES (2)..(36)..(37): Xaa is C or S
  MOD_RES (14)..(15)..(16)..(17)..(18): Xaa is A or G
  MOD_RES (19)..(20)..(21)..(22): Xaa is A or G or is absent

SEQ ID NO: 59219 - protein, 39 aa, Artificial Sequence; identical to SEQ ID NO: 3406
  GFR-binding peptide
  MOD_RES (2)..(34)..(35): Xaa is C or S

SEQ ID NO: 59220 - protein, 32 aa, Artificial Sequence; identical to SEQ ID NO: 31367
  GFR-binding peptide
  MOD_RES (31)..(32): Xaa is C or S

SEQ ID NO: 59221 - protein, 38 aa, Artificial Sequence; identical to SEQ ID NO: 24388
  GFR-binding peptide
  MOD_RES (1)..(3)..(35)..(36): Xaa is C or S

SEQ ID NO: 59222 - protein, 37 aa, Artificial Sequence; identical to SEQ ID NO: 3408
  GFR-binding peptide
  MOD_RES (31)..(32): Xaa is C or S

SEQ ID NO: 59223 - protein, 34 aa, Artificial Sequence; identical to SEQ ID NO: 3409
  GFR-binding peptide
  MOD_RES (1)..(33): Xaa is C or S

SEQ ID NO: 59224 - protein, 39 aa, Artificial Sequence; identical to SEQ ID NO: 24392
  GFR-binding peptide
  MOD_RES (2)..(4)..(37)..(38): Xaa is C or S
  MOD_RES (15)..(16)..(17)..(18)..(19): Xaa is A or G
  MOD_RES (20)..(21)..(22)..(23): Xaa is A or G or is absent

SEQ ID NO: 59225 - protein, 35 aa, Artificial Sequence; identical to SEQ ID NO: 3410
  GFR-binding peptide
  MOD_RES (2)..(2): Xaa is C or S
  MOD_RES (14)..(15)..(16)..(17)..(18): Xaa is A or G
  MOD_RES (19)..(20)..(21)..(22): Xaa is A or G or is absent

SEQ ID NO: 59226 - protein, 33 aa, Artificial Sequence
  GFR-binding peptide
  MOD_RES (32)..(33): Xaa is C or S
SEVTMNEYKFKVVNKNEDLYLISIPEMKEPVXX

SEQ ID NO: 59227 - protein, 37 aa, Artificial Sequence; identical to SEQ ID NO: 24395
  GFR-binding peptide
  MOD_RES (2)..(33)..(34): Xaa is C or S

SEQ ID NO: 59228 - protein, 38 aa, Artificial Sequence; identical to SEQ ID NO: 24398
  GFR-binding peptide
  MOD_RES (1)..(33)..(34): Xaa is C or S

SEQ ID NO: 59229 - protein, 38 aa, Artificial Sequence; identical to SEQ ID NO: 31377
  GFR-binding peptide
  MOD_RES (1)..(33)..(34): Xaa is C or S

SEQ ID NO: 59230 - protein, 35 aa, Artificial Sequence; identical to SEQ ID NO: 3420
  GFR-binding peptide
  MOD_RES (32)..(33): Xaa is C or S

SEQ ID NO: 59231 - protein, 34 aa, Artificial Sequence
  GFR-binding peptide
  MOD_RES (2)..(34): Xaa is C or S
GXSEVVMDEYKFKVVNNASDLYLISIPELRTPVX

SEQ ID NO: 59232 - protein, 42 aa, Artificial Sequence; identical to SEQ ID NO: 31388
  GFR-binding peptide
  MOD_RES (1)..(3)..(38)..(39): Xaa is C or S
  MOD_RES (16)..(17)..(18)..(19)..(20): Xaa is A or G
  MOD_RES (21)..(22)..(23)..(24): Xaa is A or G or is absent

SEQ ID NO: 59233 - protein, 34 aa, Artificial Sequence
  GFR-binding peptide
  MOD_RES (33)..(34): Xaa is C or S
  MOD_RES (11)..(12)..(13)..(14)..(15): Xaa is A or G
  MOD_RES (16)..(17)..(18)..(19): Xaa is A or G or is absent
EVVMDYHYKLXXXXXXXXXKYLISIPSLRTPVXX

SEQ ID NO: 59234 - protein, 35 aa, Artificial Sequence; identical to SEQ ID NO: 24407
  GFR-binding peptide
  MOD_RES (32)..(32): Xaa is C or S

SEQ ID NO: 59235 - protein, 37 aa, Artificial Sequence; identical to SEQ ID NO: 24408
  GFR-binding peptide
  MOD_RES (2)..(4): Xaa is C or S
  MOD_RES (16)..(17)..(18)..(19)..(20): Xaa is A or G
  MOD_RES (21)..(22)..(23)..(24): Xaa is A or G or is absent

SEQ ID NO: 59236 - protein, 33 aa, Artificial Sequence; identical to SEQ ID NO: 31394
  GFR-binding peptide
  MOD_RES (31)..(32): Xaa is C or S

SEQ ID NO: 59237 - protein, 35 aa, Artificial Sequence; identical to SEQ ID NO: 24409
  GFR-binding peptide
  MOD_RES (34)..(35): Xaa is C or S
  MOD_RES (12)..(13)..(14)..(15)..(16): Xaa is A or G
  MOD_RES (17)..(18)..(19)..(20): Xaa is A or G or is absent

SEQ ID NO: 59238 - protein, 38 aa, Artificial Sequence; identical to SEQ ID NO: 24412
  GFR-binding peptide
  MOD_RES (33)..(34): Xaa is C or S
  MOD_RES (11)..(12)..(13)..(14)..(15): Xaa is A or G
  MOD_RES (16)..(17)..(18)..(19): Xaa is A or G or is absent

SEQ ID NO: 59239 - protein, 36 aa, Artificial Sequence; identical to SEQ ID NO: 3423
  GFR-binding peptide
  MOD_RES (1)..(34)..(35): Xaa is C or S
  MOD_RES (12)..(13)..(14)..(15)..(16): Xaa is A or G
  MOD_RES (17)..(18)..(19)..(20): Xaa is A or G or is absent

SEQ ID NO: 59240 - protein, 35 aa, Artificial Sequence; identical to SEQ ID NO: 24416
  GFR-binding peptide
  MOD_RES (2)..(4): Xaa is C or S

SEQ ID NO: 59241 - protein, 38 aa, Artificial Sequence; identical to SEQ ID NO: 31395
  GFR-binding peptide
  MOD_RES (2)..(4)..(38): Xaa is C or S
  MOD_RES (16)..(17)..(18)..(19)..(20): Xaa is A or G
  MOD_RES (21)..(22)..(23)..(24): Xaa is A or G or is absent

SEQ ID NO: 59242 - protein, 35 aa, Artificial Sequence
  GFR-binding peptide
  MOD_RES (2)..(4): Xaa is C or S
RXGXSEVVMDRHKRLVVNNASDYYLISTASLRTPV

SEQ ID NO: 59243 - protein, 40 aa, Artificial Sequence; identical to SEQ ID NO: 3426
  GFR-binding peptide
  MOD_RES (2)..(4)..(36): Xaa is C or S

SEQ ID NO: 59244 - protein, 43 aa, Artificial Sequence; identical to SEQ ID NO: 3427
  GFR-binding peptide
  MOD_RES (2)..(4)..(38)..(39): Xaa is C or S
  MOD_RES (16)..(17)..(18)..(19)..(20): Xaa is A or G
  MOD_RES (21)..(22)..(23)..(24): Xaa is A or G or is absent

SEQ ID NO: 59245 - protein, 35 aa, Artificial Sequence; identical to SEQ ID NO: 31403
  GFR-binding peptide
  MOD_RES (2)..(2): Xaa is C or S
  MOD_RES (14)..(15)..(16)..(17)..(18): Xaa is A or G
  MOD_RES (19)..(20)..(21)..(22): Xaa is A or G or is absent

SEQ ID NO: 59246 - protein, 37 aa, Artificial Sequence; identical to SEQ ID NO: 3430
  GFR-binding peptide
  MOD_RES (1)..(33): Xaa is C or S

SEQ ID NO: 59247 - protein, 34 aa, Artificial Sequence
  GFR-binding peptide
  MOD_RES (2)..(34): Xaa is C or S
GXRDVVMGRHKRLIIQQKDNYYLMSTASMKTPTX

SEQ ID NO: 59248 - protein, 38 aa, Artificial Sequence; identical to SEQ ID NO: 3431
  GFR-binding peptide
  MOD_RES (2)..(35)..(36): Xaa is C or S
  MOD_RES (13)..(14)..(15)..(16)..(17): Xaa is A or G
  MOD_RES (18)..(19)..(20)..(21): Xaa is A or G or is absent

SEQ ID NO: 59249 - protein, 37 aa, Artificial Sequence; identical to SEQ ID NO: 31406
  GFR-binding peptide
  MOD_RES (1)..(35)..(36): Xaa is C or S
  MOD_RES (13)..(14)..(15)..(16)..(17): Xaa is A or G
  MOD_RES (18)..(19)..(20)..(21): Xaa is A or G or is absent

SEQ ID NO: 59250 - protein, 37 aa, Artificial Sequence; identical to SEQ ID NO: 24426
  GFR-binding peptide
  MOD_RES (2)..(4)..(37): Xaa is C or S
  MOD_RES (15)..(16)..(17)..(18)..(19): Xaa is A or G
  MOD_RES (20)..(21)..(22)..(23): Xaa is A or G or is absent

SEQ ID NO: 59251 - protein, 40 aa, Artificial Sequence; identical to SEQ ID NO: 24427
  GFR-binding peptide
  MOD_RES (1)..(3)..(35)..(36): Xaa is C or S

SEQ ID NO: 59252 - protein, 37 aa, Artificial Sequence
  GFR-binding peptide
  MOD_RES (2)..(4)..(37): Xaa is C or S
  MOD_RES (15)..(16)..(17)..(18)..(19): Xaa is A or G
  MOD_RES (20)..(21)..(22)..(23): Xaa is A or G or is absent
LXGXEEVIMEYKFKXXXXXXXXXLYLMSIPETKVPAX

SEQ ID NO: 59253 - protein, 39 aa, Artificial Sequence
  GFR-binding peptide
  MOD_RES (1)..(3)..(35)..(36): Xaa is C or S
XGXSEVVMDRHKRLVVNNASDYYLISTASLRTPVXXTPP

SEQ ID NO: 59254 - protein, 40 aa, Artificial Sequence; identical to SEQ ID NO: 3439
  GFR-binding peptide
  MOD_RES (2)..(4)..(35)..(36): Xaa is C or S

SEQ ID NO: 59255 - protein, 32 aa, Artificial Sequence
  GFR-binding peptide
  MOD_RES (31)..(32): Xaa is C or S
EVTMNPIKGYVVNKNEDFYLINIPSMKEPVXX

SEQ ID NO: 59256 - protein, 38 aa, Artificial Sequence; identical to SEQ ID NO: 31415
  GFR-binding peptide
  MOD_RES (34)..(35): Xaa is C or S
  MOD_RES (12)..(13)..(14)..(15)..(16): Xaa is A or G
  MOD_RES (17)..(18)..(19)..(20): Xaa is A or G or is absent

SEQ ID NO: 59257 - protein, 42 aa, Artificial Sequence
  GFR-binding peptide
  MOD_RES (2)..(4)..(38)..(39): Xaa is C or S
  MOD_RES (16)..(17)..(18)..(19)..(20): Xaa is A or G
  MOD_RES (21)..(22)..(23)..(24): Xaa is A or G or is absent
SXGXRDVVMGYHYKLXXXXXXXXXKYLMSIPSMKTPTXXPGA

SEQ ID NO: 59258 - protein, 42 aa, Artificial Sequence; identical to SEQ ID NO: 31419
  GFR-binding peptide
  MOD_RES (2)..(4)..(36)..(37): Xaa is C or S

SEQ ID NO: 59259 - protein, 32 aa, Artificial Sequence; identical to SEQ ID NO: 3446
  GFR-binding peptide
  MOD_RES (11)..(12)..(13)..(14)..(15): Xaa is A or G
  MOD_RES (16)..(17)..(18)..(19): Xaa is A or G or is absent

SEQ ID NO: 59260 - protein, 40 aa, Artificial Sequence; identical to SEQ ID NO: 3448
  GFR-binding peptide
  MOD_RES (2)..(36)..(37): Xaa is C or S
  MOD_RES (14)..(15)..(16)..(17)..(18): Xaa is A or G
  MOD_RES (19)..(20)..(21)..(22): Xaa is A or G or is absent

SEQ ID NO: 59261 - protein, 38 aa, Artificial Sequence; identical to SEQ ID NO: 3453
  GFR-binding peptide
  MOD_RES (1)..(3)..(36)..(37): Xaa is C or S
  MOD_RES (14)..(15)..(16)..(17)..(18): Xaa is A or G
  MOD_RES (19)..(20)..(21)..(22): Xaa is A or G or is absent

SEQ ID NO: 59262 - protein, 38 aa, Artificial Sequence
  GFR-binding peptide
  MOD_RES (2)..(4)..(36)..(37): Xaa is C or S
RXGXESVAMGRHKRLYTVVGKDYYLISTASLKTPVXXA

SEQ ID NO: 59263 - protein, 37 aa, Artificial Sequence
  GFR-binding peptide
  MOD_RES (2)..(4)..(36)..(37): Xaa is C or S
SXGXRDVVMGEYKFKIIQQKDNLYLMSIPEMKTPTXX

SEQ ID NO: 59264 - protein, 33 aa, Artificial Sequence; identical to SEQ ID NO: 3456
  GFR-binding peptide
  MOD_RES (12)..(13)..(14)..(15)..(16): Xaa is A or G
  MOD_RES (17)..(18)..(19)..(20): Xaa is A or G or is absent

SEQ ID NO: 59265 - protein, 32 aa, Artificial Sequence
  GFR-binding peptide
  MOD_RES (1)..(32): Xaa is C or S
XEEVIMRHKRLLLVRGNDYYLMSTASTKVPAX

SEQ ID NO: 59266 - protein, 32 aa, Artificial Sequence; identical to SEQ ID NO: 24438
  GFR-binding peptide
  MOD_RES (1)..(1): Xaa is C or S

SEQ ID NO: 59267 - protein, 38 aa, Artificial Sequence; identical to SEQ ID NO: 3460
  GFR-binding peptide
  MOD_RES (2)..(35)..(36): Xaa is C or S
  MOD_RES (13)..(14)..(15)..(16)..(17): Xaa is A or G
  MOD_RES (18)..(19)..(20)..(21): Xaa is A or G or is absent

SEQ ID NO: 59268 - protein, 39 aa, Artificial Sequence; identical to SEQ ID NO: 3462
  GFR-binding peptide
  MOD_RES (1)..(33)..(34): Xaa is C or S

SEQ ID NO: 59269 - protein, 36 aa, Artificial Sequence; identical to SEQ ID NO: 24442
  GFR-binding peptide
  MOD_RES (2)..(34)..(35): Xaa is C or S

SEQ ID NO: 59270 - protein, 42 aa, Artificial Sequence
  GFR-binding peptide
  MOD_RES (2)..(4)..(37)..(38): Xaa is C or S
  MOD_RES (15)..(16)..(17)..(18)..(19): Xaa is A or G
  MOD_RES (20)..(21)..(22)..(23): Xaa is A or G or is absent
SXKXSRVIMPIKGYXXXXXXXXXFYLINIPSLAQPVXXPAAS

SEQ ID NO: 59271 - protein, 35 aa, Artificial Sequence
  GFR-binding peptide
  MOD_RES (34)..(35): Xaa is C or S
  MOD_RES (12)..(13)..(14)..(15)..(16): Xaa is A or G
  MOD_RES (17)..(18)..(19)..(20): Xaa is A or G or is absent
RDVVMGYHYKLXXXXXXXXXKYLMSIPSMKTPTXX

SEQ ID NO: 59272 - protein, 44 aa, Artificial Sequence; identical to SEQ ID NO: 3463
  GFR-binding peptide
  MOD_RES (2)..(4)..(38)..(39): Xaa is C or S
  MOD_RES (16)..(17)..(18)..(19)..(20): Xaa is A or G
  MOD_RES (21)..(22)..(23)..(24): Xaa is A or G or is absent

SEQ ID NO: 59273 - protein, 32 aa, Artificial Sequence
  GFR-binding peptide
  MOD_RES (11)..(12)..(13)..(14)..(15): Xaa is A or G
  MOD_RES (16)..(17)..(18)..(19): Xaa is A or G or is absent
DVVMGRHKRLXXXXXXXXXYYLMSTASMKTPT

SEQ ID NO: 59274 - protein, 43 aa, Artificial Sequence
  GFR-binding peptide
  MOD_RES (1)..(3)..(37)..(38): Xaa is C or S
  MOD_RES (15)..(16)..(17)..(18)..(19): Xaa is A or G
  MOD_RES (20)..(21)..(22)..(23): Xaa is A or G or is absent
XGXESVAMGRHKRLXXXXXXXXXYYLISTASLKTPVXXAKSAK

SEQ ID NO: 59275 - protein, 36 aa, Artificial Sequence; identical to SEQ ID NO: 3467
  GFR-binding peptide
  MOD_RES (2)..(4)..(36): Xaa is C or S

SEQ ID NO: 59276 - protein, 32 aa, Artificial Sequence; identical to SEQ ID NO: 24449
  GFR-binding peptide
  MOD_RES (11)..(12)..(13)..(14)..(15): Xaa is A or G
  MOD_RES (16)..(17)..(18)..(19): Xaa is A or G or is absent

SEQ ID NO: 59277 - protein, 33 aa, Artificial Sequence; identical to SEQ ID NO: 3471
  GFR-binding peptide
  MOD_RES (2)..(2): Xaa is C or S

SEQ ID NO: 59278 - protein, 42 aa, Artificial Sequence; identical to SEQ ID NO: 10888
  GFR-binding peptide
  MOD_RES (1)..(3)..(37)..(38): Xaa is C or S
  MOD_RES (15)..(16)..(17)..(18)..(19): Xaa is A or G
  MOD_RES (20)..(21)..(22)..(23): Xaa is A or G or is absent

SEQ ID NO: 59279 - protein, 38 aa, Artificial Sequence; identical to SEQ ID NO: 31444
  GFR-binding peptide
  MOD_RES (33)..(33): Xaa is C or S
  MOD_RES (11)..(12)..(13)..(14)..(15): Xaa is A or G
  MOD_RES (16)..(17)..(18)..(19): Xaa is A or G or is absent

SEQ ID NO: 59280 - protein, 32 aa, Artificial Sequence; identical to SEQ ID NO: 24453
  GFR-binding peptide
  MOD_RES (1)..(1): Xaa is C or S

SEQ ID NO: 59281 - protein, 38 aa, Artificial Sequence; identical to SEQ ID NO: 31446
  GFR-binding peptide
  MOD_RES (2)..(34)..(35): Xaa is C or S

SEQ ID NO: 59282 - protein, 38 aa, Artificial Sequence; identical to SEQ ID NO: 3473
  GFR-binding peptide
  MOD_RES (1)..(3)..(35)..(36): Xaa is C or S

SEQ ID NO: 59283 - protein, 39 aa, Artificial Sequence; identical to SEQ ID NO: 31447
  GFR-binding peptide
  MOD_RES (35)..(36): Xaa is C or S
  MOD_RES (13)..(14)..(15)..(16)..(17): Xaa is A or G
  MOD_RES (18)..(19)..(20)..(21): Xaa is A or G or is absent

SEQ ID NO: 59284 - protein, 34 aa, Artificial Sequence; identical to SEQ ID NO: 3474
  GFR-binding peptide
  MOD_RES (2)..(33)..(34): Xaa is C or S

SEQ ID NO: 59285 - protein, 37 aa, Artificial Sequence; identical to SEQ ID NO: 3475
  GFR-binding peptide
  MOD_RES (34)..(35): Xaa is C or S
  MOD_RES (12)..(13)..(14)..(15)..(16): Xaa is A or G
  MOD_RES (17)..(18)..(19)..(20): Xaa is A or G or is absent

SEQ ID NO: 59286 - protein, 33 aa, Artificial Sequence; identical to SEQ ID NO: 24456
  GFR-binding peptide
  MOD_RES (12)..(13)..(14)..(15)..(16): Xaa is A or G
  MOD_RES (17)..(18)..(19)..(20): Xaa is A or G or is absent

SEQ ID NO: 59287 - protein, 35 aa, Artificial Sequence; identical to SEQ ID NO: 56370
  GFR-binding peptide
  MOD_RES (32)..(33): Xaa is C or S

SEQ ID NO: 59288 - protein, 34 aa, Artificial Sequence; identical to SEQ ID NO: 31451
  GFR-binding peptide
  MOD_RES (1)..(1): Xaa is C or S
  MOD_RES (13)..(14)..(15)..(16)..(17): Xaa is A or G
  MOD_RES (18)..(19)..(20)..(21): Xaa is A or G or is absent

SEQ ID NO: 59289 - protein, 37 aa, Artificial Sequence; identical to SEQ ID NO: 3479
  GFR-binding peptide
  MOD_RES (31)..(32): Xaa is C or S

SEQ ID NO: 59290 - protein, 42 aa, Artificial Sequence; identical to SEQ ID NO: 10896
  GFR-binding peptide
  MOD_RES (2)..(36)..(37): Xaa is C or S
  MOD_RES (14)..(15)..(16)..(17)..(18): Xaa is A or G
  MOD_RES (19)..(20)..(21)..(22): Xaa is A or G or is absent

SEQ ID NO: 59291 - protein, 36 aa, Artificial Sequence; identical to SEQ ID NO: 24463
  GFR-binding peptide
  MOD_RES (2)..(35)..(36): Xaa is C or S
  MOD_RES (13)..(14)..(15)..(16)..(17): Xaa is A or G
  MOD_RES (18)..(19)..(20)..(21): Xaa is A or G or is absent

SEQ ID NO: 59292 - protein, 34 aa, Artificial Sequence; identical to SEQ ID NO: 24465
  GFR-binding peptide
  MOD_RES (2)..(2): Xaa is C or S
  MOD_RES (13)..(14)..(15)..(16)..(17): Xaa is A or G
  MOD_RES (18)..(19)..(20)..(21): Xaa is A or G or is absent

SEQ ID NO: 59293 - protein, 38 aa, Artificial Sequence; identical to SEQ ID NO: 31458
  GFR-binding peptide
  MOD_RES (33)..(34): Xaa is C or S
  MOD_RES (11)..(12)..(13)..(14)..(15): Xaa is A or G
  MOD_RES (16)..(17)..(18)..(19): Xaa is A or G or is absent

SEQ ID NO: 59294 - protein, 31 aa, Artificial Sequence; identical to SEQ ID NO: 24467
  GFR-binding peptide
  MOD_RES (31)..(31): Xaa is C or S

SEQ ID NO: 59295 - protein, 40 aa, Artificial Sequence
  GFR-binding peptide
  MOD_RES (1)..(34)..(35): Xaa is C or S
  MOD_RES (12)..(13)..(14)..(15)..(16): Xaa is A or G
  MOD_RES (17)..(18)..(19)..(20): Xaa is A or G or is absent
XEEVIMEYKFKXXXXXXXXXLYLMSIPETKVPAXXTSPVR

SEQ ID NO: 59296 - protein, 40 aa, Artificial Sequence; identical to SEQ ID NO: 3489
  GFR-binding peptide
  MOD_RES (1)..(35)..(36): Xaa is C or S
  MOD_RES (13)..(14)..(15)..(16)..(17): Xaa is A or G
  MOD_RES (18)..(19)..(20)..(21): Xaa is A or G or is absent

SEQ ID NO: 59297 - protein, 34 aa, Artificial Sequence
  GFR-binding peptide
  MOD_RES (31)..(32): Xaa is C or S
DVVMGRHKRLIIQQKDNYYLMSTASMKTPTXXPG

SEQ ID NO: 59298 - protein, 38 aa, Artificial Sequence; identical to SEQ ID NO: 3491
  GFR-binding peptide
  MOD_RES (2)..(4)..(37)..(38): Xaa is C or S
  MOD_RES (15)..(16)..(17)..(18)..(19): Xaa is A or G
  MOD_RES (20)..(21)..(22)..(23): Xaa is A or G or is absent

SEQ ID NO: 59299 - protein, 41 aa, Artificial Sequence; identical to SEQ ID NO: 3493
  GFR-binding peptide
  MOD_RES (1)..(3)..(36)..(37): Xaa is C or S
  MOD_RES (14)..(15)..(16)..(17)..(18): Xaa is A or G
  MOD_RES (19)..(20)..(21)..(22): Xaa is A or G or is absent

SEQ ID NO: 59300 - protein, 34 aa, Artificial Sequence; identical to SEQ ID NO: 3496
  GFR-binding peptide
  MOD_RES (33)..(34): Xaa is C or S
  MOD_RES (11)..(12)..(13)..(14)..(15): Xaa is A or G
  MOD_RES (16)..(17)..(18)..(19): Xaa is A or G or is absent

SEQ ID NO: 59301 - protein, 35 aa, Artificial Sequence; identical to SEQ ID NO: 24481
  GFR-binding peptide
  MOD_RES (1)..(33)..(34): Xaa is C or S

SEQ ID NO: 59302 - protein, 44 aa, Artificial Sequence
  GFR-binding peptide
  MOD_RES (2)..(4)..(38)..(39): Xaa is C or S
  MOD_RES (16)..(17)..(18)..(19)..(20): Xaa is A or G
  MOD_RES (21)..(22)..(23)..(24): Xaa is A or G or is absent
RXAXSEVTMNYHYKLXXXXXXXXXKYLISIPSMKEPVXXPEPIG

SEQ ID NO: 59303 - protein, 35 aa, Artificial Sequence
  GFR-binding peptide
  MOD_RES (33)..(34): Xaa is C or S
  MOD_RES (11)..(12)..(13)..(14)..(15): Xaa is A or G
  MOD_RES (16)..(17)..(18)..(19): Xaa is A or G or is absent
DVVMGYHYKLXXXXXXXXXKYLMSIPSMKTPTXXP

SEQ ID NO: 59304 - protein, 37 aa, Artificial Sequence; identical to SEQ ID NO: 56397
  GFR-binding peptide
  MOD_RES (1)..(33)..(34): Xaa is C or S

SEQ ID NO: 59305 - protein, 40 aa, Artificial Sequence
  GFR-binding peptide
  MOD_RES (2)..(34)..(35): Xaa is C or S
GXAEVVMDRHKRLVVNNAADYYLISTASLRAPVXXSAPAA

SEQ ID NO: 59306 - protein, 36 aa, Artificial Sequence; identical to SEQ ID NO: 3500
  GFR-binding peptide
  MOD_RES (34)..(35): Xaa is C or S
  MOD_RES (12)..(13)..(14)..(15)..(16): Xaa is A or G
  MOD_RES (17)..(18)..(19)..(20): Xaa is A or G or is absent

SEQ ID NO: 59307 - protein, 37 aa, Artificial Sequence; identical to SEQ ID NO: 3501
  GFR-binding peptide
  MOD_RES (1)..(3)..(34)..(35): Xaa is C or S

SEQ ID NO: 59308 - protein, 37 aa, Artificial Sequence; identical to SEQ ID NO: 24486
  GFR-binding peptide
  MOD_RES (1)..(3)..(37): Xaa is C or S
  MOD_RES (15)..(16)..(17)..(18)..(19): Xaa is A or G
  MOD_RES (20)..(21)..(22)..(23): Xaa is A or G or is absent

SEQ ID NO: 59309 - protein, 35 aa, Artificial Sequence; identical to SEQ ID NO: 24488
  GFR-binding peptide
  MOD_RES (2)..(4): Xaa is C or S

SEQ ID NO: 59310 - protein, 34 aa, Artificial Sequence
  GFR-binding peptide
  MOD_RES (34)..(34): Xaa is C or S
  MOD_RES (12)..(13)..(14)..(15)..(16): Xaa is A or G
  MOD_RES (17)..(18)..(19)..(20): Xaa is A or G or is absent
RDVVMGEYKFKXXXXXXXXXLYLMSIPEMKTPTX

SEQ ID NO: 59311 - protein, 35 aa, Artificial Sequence; identical to SEQ ID NO: 10917
  GFR-binding peptide
  MOD_RES (31)..(32): Xaa is C or S

SEQ ID NO: 59312 - protein, 40 aa, Artificial Sequence; identical to SEQ ID NO: 3506
  GFR-binding peptide
  MOD_RES (2)..(4)..(36)..(37): Xaa is C or S

SEQ ID NO: 59313 - protein, 33 aa, Artificial Sequence
  GFR-binding peptide
  MOD_RES (12)..(13)..(14)..(15)..(16): Xaa is A or G
  MOD_RES (17)..(18)..(19)..(20): Xaa is A or G or is absent
SEVTMNYHYKLXXXXXXXXXKYLISIPSMKEPV

SEQ ID NO: 59314 - protein, 37 aa, Artificial Sequence; identical to SEQ ID NO: 31487
  GFR-binding peptide
  MOD_RES (1)..(3)..(35)..(36): Xaa is C or S

SEQ ID NO: 59315 - protein, 42 aa, Artificial Sequence; identical to SEQ ID NO: 3507
  GFR-binding peptide
  MOD_RES (2)..(4)..(38)..(39): Xaa is C or S
  MOD_RES (16)..(17)..(18)..(19)..(20): Xaa is A or G
  MOD_RES (21)..(22)..(23)..(24): Xaa is A or G or is absent

SEQ ID NO: 59316 - protein, 34 aa, Artificial Sequence
  GFR-binding peptide
  MOD_RES (33)..(34): Xaa is C or S
  MOD_RES (11)..(12)..(13)..(14)..(15): Xaa is A or G
  MOD_RES (16)..(17)..(18)..(19): Xaa is A or G or is absent
EVVMDEYKFKXXXXXXXXXLYLISIPELRTPVXX

SEQ ID NO: 59317 - protein, 39 aa, Artificial Sequence; identical to SEQ ID NO: 24498
  GFR-binding peptide
  MOD_RES (1)..(35)..(36): Xaa is C or S
  MOD_RES (13)..(14)..(15)..(16)..(17): Xaa is A or G
  MOD_RES (18)..(19)..(20)..(21): Xaa is A or G or is absent

SEQ ID NO: 59318 - protein, 40 aa, Artificial Sequence
  GFR-binding peptide
  MOD_RES (2)..(4)..(35)..(36): Xaa is C or S
LXGXEEVIMRHKRLLLVRGNDYYLMSTASTKVPAXXTSPV

SEQ ID NO: 59319 - protein, 40 aa, Artificial Sequence
  GFR-binding peptide
  MOD_RES (34)..(35): Xaa is C or S
  MOD_RES (12)..(13)..(14)..(15)..(16): Xaa is A or G
  MOD_RES (17)..(18)..(19)..(20): Xaa is A or G or is absent
SEVVMDRHKRLXXXXXXXXXYYLISTASLRTPVXXTPPTS

SEQ ID NO: 59320 - protein, 41 aa, Artificial Sequence
  GFR-binding peptide
  MOD_RES (1)..(3)..(36)..(37): Xaa is C or S
  MOD_RES (14)..(15)..(16)..(17)..(18): Xaa is A or G
  MOD_RES (19)..(20)..(21)..(22): Xaa is A or G or is absent
XKXSRVIMPIKGYXXXXXXXXXFYLINIPSLAQPVXXPAAS

SEQ ID NO: 59321 - protein, 34 aa, Artificial Sequence
  GFR-binding peptide
  MOD_RES (2)..(2): Xaa is C or S
  MOD_RES (13)..(14)..(15)..(16)..(17): Xaa is A or G
  MOD_RES (18)..(19)..(20)..(21): Xaa is A or G or is absent
GXEEVIMRHKRLXXXXXXXXXYYLMSTASTKVPA

SEQ ID NO: 59322 - protein, 38 aa, Artificial Sequence
  GFR-binding peptide
  MOD_RES (2)..(34)..(35): Xaa is C or S
GXESVAMGRHKRLYTVVGKDYYLISTASLKTPVXXAKS

SEQ ID NO: 59323 - protein, 42 aa, Artificial Sequence; identical to SEQ ID NO: 3521
  GFR-binding peptide
  MOD_RES (2)..(4)..(36): Xaa is C or S

SEQ ID NO: 59324 - protein, 41 aa, Artificial Sequence; identical to SEQ ID NO: 3522
  GFR-binding peptide
  MOD_RES (2)..(4)..(37)..(38): Xaa is C or S
  MOD_RES (15)..(16)..(17)..(18)..(19): Xaa is A or G
  MOD_RES (20)..(21)..(22)..(23): Xaa is A or G or is absent

SEQ ID NO: 59325 - protein, 42 aa, Artificial Sequence; identical to SEQ ID NO: 24509
  GFR-binding peptide
  MOD_RES (2)..(36)..(37): Xaa is C or S
  MOD_RES (14)..(15)..(16)..(17)..(18): Xaa is A or G
  MOD_RES (19)..(20)..(21)..(22): Xaa is A or G or is absent

SEQ ID NO: 59326 - protein, 42 aa, Artificial Sequence
  GFR-binding peptide
  MOD_RES (2)..(4)..(38)..(39): Xaa is C or S
  MOD_RES (16)..(17)..(18)..(19)..(20): Xaa is A or G
  MOD_RES (21)..(22)..(23)..(24): Xaa is A or G or is absent
RXGXESVAMGRHKRLXXXXXXXXXYYLISTASLKTPVXXAKS

SEQ ID NO: 59327 - protein, 34 aa, Artificial Sequence
  GFR-binding peptide
  MOD_RES (33)..(34): Xaa is C or S
  MOD_RES (11)..(12)..(13)..(14)..(15): Xaa is A or G
  MOD_RES (16)..(17)..(18)..(19): Xaa is A or G or is absent
EVVMDRHKRLXXXXXXXXXYYLISTASLRAPVXX

SEQ ID NO: 59328 - protein, 36 aa, Artificial Sequence; identical to SEQ ID NO: 24511
  GFR-binding peptide
  MOD_RES (2)..(34)..(35): Xaa is C or S

SEQ ID NO: 59329 - protein, 34 aa, Artificial Sequence
  GFR-binding peptide
  MOD_RES (33)..(34): Xaa is C or S
  MOD_RES (11)..(12)..(13)..(14)..(15): Xaa is A or G
  MOD_RES (16)..(17)..(18)..(19): Xaa is A or G or is absent
EVVMDRHKRLXXXXXXXXXYYLISTASLRTPVXX

SEQ ID NO: 59330 - protein, 32 aa, Artificial Sequence; identical to SEQ ID NO: 3526
  GFR-binding peptide
  MOD_RES (1)..(1): Xaa is C or S

SEQ ID NO: 59331 - protein, 38 aa, Artificial Sequence; identical to SEQ ID NO: 24513
  GFR-binding peptide
  MOD_RES (2)..(4)..(36)..(37): Xaa is C or S

SEQ ID NO: 59332 - protein, 41 aa, Artificial Sequence; identical to SEQ ID NO: 24515
  GFR-binding peptide
  MOD_RES (1)..(35): Xaa is C or S
  MOD_RES (13)..(14)..(15)..(16)..(17): Xaa is A or G
  MOD_RES (18)..(19)..(20)..(21): Xaa is A or G or is absent

SEQ ID NO: 59333 - protein, 35 aa, Artificial Sequence; identical to SEQ ID NO: 24517
  GFR-binding peptide
  MOD_RES (1)..(33)..(34): Xaa is C or S

SEQ ID NO: 59334 - protein, 32 aa, Artificial Sequence; identical to SEQ ID NO: 56432
  GFR-binding peptide
  MOD_RES (11)..(12)..(13)..(14)..(15): Xaa is A or G
  MOD_RES (16)..(17)..(18)..(19): Xaa is A or G or is absent

SEQ ID NO: 59335 - protein, 39 aa, Artificial Sequence; identical to SEQ ID NO: 3531
  GFR-binding peptide
  MOD_RES (2)..(35)..(36): Xaa is C or S

SEQ ID NO: 59336 - protein, 35 aa, Artificial Sequence; identical to SEQ ID NO: 24520
  GFR-binding peptide
  MOD_RES (32)..(33): Xaa is C or S

SEQ ID NO: 59337 - protein, 38 aa, Artificial Sequence; identical to SEQ ID NO: 3532
  GFR-binding peptide
  MOD_RES (34)..(35): Xaa is C or S
  MOD_RES (12)..(13)..(14)..(15)..(16): Xaa is A or G
  MOD_RES (17)..(18)..(19)..(20): Xaa is A or G or is absent

SEQ ID NO: 59338 - protein, 37 aa, Artificial Sequence; identical to SEQ ID NO: 31511
  GFR-binding peptide
  MOD_RES (1)..(3)..(37): Xaa is C or S
  MOD_RES (15)..(16)..(17)..(18)..(19): Xaa is A or G
  MOD_RES (20)..(21)..(22)..(23): Xaa is A or G or is absent

SEQ ID NO: 59339 - protein, 34 aa, Artificial Sequence; identical to SEQ ID NO: 3536
  GFR-binding peptide
  MOD_RES (1)..(34): Xaa is C or S
  MOD_RES (12)..(13)..(14)..(15)..(16): Xaa is A or G
  MOD_RES (17)..(18)..(19)..(20): Xaa is A or G or is absent

SEQ ID NO: 59340 - protein, 36 aa, Artificial Sequence
  GFR-binding peptide
  MOD_RES (2)..(33)..(34): Xaa is C or S
GXEEVIMRHKRLLLVRGNDYYLMSTASTKVPAXXTS

SEQ ID NO: 59341 - protein, 39 aa, Artificial Sequence
  GFR-binding peptide
  MOD_RES (2)..(35)..(36): Xaa is C or S
  MOD_RES (13)..(14)..(15)..(16)..(17): Xaa is A or G
  MOD_RES (18)..(19)..(20)..(21): Xaa is A or G or is absent
KXSKVVMPIKGYXXXXXXXXXFYLINIPSLDQPVXXPSA

SEQ ID NO: 59342 - protein, 31 aa, Artificial Sequence; identical to SEQ ID NO: 56443
  GFR-binding peptide

SEQ ID NO: 59343 - protein, 38 aa, Artificial Sequence
  GFR-binding peptide
  MOD_RES (33)..(34): Xaa is C or S
  MOD_RES (11)..(12)..(13)..(14)..(15): Xaa is A or G
  MOD_RES (16)..(17)..(18)..(19): Xaa is A or G or is absent
EVVMDRHKRLXXXXXXXXXYYLISTASLRAPVXXSAPA

SEQ ID NO: 59344 - protein, 36 aa, Artificial Sequence
  GFR-binding peptide
  MOD_RES (1)..(3)..(36): Xaa is C or S
  MOD_RES (14)..(15)..(16)..(17)..(18): Xaa is A or G
  MOD_RES (19)..(20)..(21)..(22): Xaa is A or G or is absent
XKXSKVIMPIKGYXXXXXXXXXFYLINIPSLDQSVX

SEQ ID NO: 59345 - protein, 36 aa, Artificial Sequence; identical to SEQ ID NO: 31519
  GFR-binding peptide
  MOD_RES (33)..(34): Xaa is C or S
  MOD_RES (11)..(12)..(13)..(14)..(15): Xaa is A or G
  MOD_RES (16)..(17)..(18)..(19): Xaa is A or G or is absent

SEQ ID NO: 59346 - protein, 41 aa, Artificial Sequence; identical to SEQ ID NO: 3540
  GFR-binding peptide
  MOD_RES (1)..(3)..(37): Xaa is C or S
  MOD_RES (15)..(16)..(17)..(18)..(19): Xaa is A or G
  MOD_RES (20)..(21)..(22)..(23): Xaa is A or G or is absent

SEQ ID NO: 59347 - protein, 34 aa, Artificial Sequence; identical to SEQ ID NO: 24534
  GFR-binding peptide
  MOD_RES (32)..(33): Xaa is C or S

SEQ ID NO: 59348 - protein, 31 aa, Artificial Sequence
  GFR-binding peptide
SEVVMDYHYKLVVNNASDKYLISIPSLRTPV

SEQ ID NO: 59349 - protein, 37 aa, Artificial Sequence; identical to SEQ ID NO: 3544
  GFR-binding peptide
  MOD_RES (2)..(36)..(37): Xaa is C or S
  MOD_RES (14)..(15)..(16)..(17)..(18): Xaa is A or G
  MOD_RES (19)..(20)..(21)..(22): Xaa is A or G or is absent

SEQ ID NO: 59350 - protein, 39 aa, Artificial Sequence
  GFR-binding peptide
  MOD_RES (2)..(34)..(35): Xaa is C or S
GXRDVVMGRHKRLIIQQKDNYYLMSTASMKTPTXXPGAS

SEQ ID NO: 59351 - protein, 40 aa, Artificial Sequence; identical to SEQ ID NO: 3546
  GFR-binding peptide
  MOD_RES (2)..(34)..(35): Xaa is C or S

SEQ ID NO: 59352 - protein, 35 aa, Artificial Sequence; identical to SEQ ID NO: 24539
  GFR-binding peptide
  MOD_RES (1)..(3)..(35): Xaa is C or S

SEQ ID NO: 59353 - protein, 32 aa, Artificial Sequence; identical to SEQ ID NO: 24541
  GFR-binding peptide
  MOD_RES (32)..(32): Xaa is C or S

SEQ ID NO: 59354 - protein, 33 aa, Artificial Sequence; identical to SEQ ID NO: 24542
  GFR-binding peptide
  MOD_RES (2)..(2): Xaa is C or S

SEQ ID NO: 59355 - protein, 42 aa, Artificial Sequence; identical to SEQ ID NO: 24544
  GFR-binding peptide
  MOD_RES (2)..(36)..(37): Xaa is C or S
  MOD_RES (14)..(15)..(16)..(17)..(18): Xaa is A or G
  MOD_RES (19)..(20)..(21)..(22): Xaa is A or G or is absent

SEQ ID NO: 59356 - protein, 37 aa, Artificial Sequence; identical to SEQ ID NO: 31541
  GFR-binding peptide
  MOD_RES (34)..(35): Xaa is C or S
  MOD_RES (12)..(13)..(14)..(15)..(16): Xaa is A or G
  MOD_RES (17)..(18)..(19)..(20): Xaa is A or G or is absent

SEQ ID NO: 59357 - protein, 34 aa, Artificial Sequence
  GFR-binding peptide
  MOD_RES (34)..(34): Xaa is C or S
  MOD_RES (12)..(13)..(14)..(15)..(16): Xaa is A or G
  MOD_RES (17)..(18)..(19)..(20): Xaa is A or G or is absent
RDVVMGYHYKLXXXXXXXXXKYLMSIPSMKTPTX

SEQ ID NO: 59358 - protein, 38 aa, Artificial Sequence; identical to SEQ ID NO: 31544
  GFR-binding peptide
  MOD_RES (2)..(4)..(38): Xaa is C or S
  MOD_RES (16)..(17)..(18)..(19)..(20): Xaa is A or G
  MOD_RES (21)..(22)..(23)..(24): Xaa is A or G or is absent

SEQ ID NO: 59359 - protein, 40 aa, Artificial Sequence; identical to SEQ ID NO: 3550
  GFR-binding peptide
  MOD_RES (2)..(4)..(38)..(39): Xaa is C or S
  MOD_RES (16)..(17)..(18)..(19)..(20): Xaa is A or G
  MOD_RES (21)..(22)..(23)..(24): Xaa is A or G or is absent

SEQ ID NO: 59360 - protein, 36 aa, Artificial Sequence; identical to SEQ ID NO: 31548
  GFR-binding peptide
  MOD_RES (2)..(4)..(35)..(36): Xaa is C or S

SEQ ID NO: 59361 - protein, 39 aa, Artificial Sequence; identical to SEQ ID NO: 24554
  GFR-binding peptide
  MOD_RES (2)..(36)..(37): Xaa is C or S
  MOD_RES (14)..(15)..(16)..(17)..(18): Xaa is A or G
  MOD_RES (19)..(20)..(21)..(22): Xaa is A or G or is absent

SEQ ID NO: 59362 - protein, 37 aa, Artificial Sequence; identical to SEQ ID NO: 3552
  GFR-binding peptide
  MOD_RES (2)..(4)..(37): Xaa is C or S

SEQ ID NO: 59363 - protein, 33 aa, Artificial Sequence; identical to SEQ ID NO: 3553
  GFR-binding peptide
  MOD_RES (2)..(2): Xaa is C or S

SEQ ID NO: 59364 - protein, 40 aa, Artificial Sequence; identical to SEQ ID NO: 24559
  GFR-binding peptide
  MOD_RES (1)..(3)..(37)..(38): Xaa is C or S
  MOD_RES (15)..(16)..(17)..(18)..(19): Xaa is A or G
  MOD_RES (20)..(21)..(22)..(23): Xaa is A or G or is absent

SEQ ID NO: 59365 - protein, 35 aa, Artificial Sequence; identical to SEQ ID NO: 24561
  GFR-binding peptide
  MOD_RES (1)..(33)..(34): Xaa is C or S

SEQ ID NO: 59366 - protein, 41 aa, Artificial Sequence
  GFR-binding peptide
  MOD_RES (2)..(4)..(35)..(36): Xaa is C or S
LXGXEEVIMYHYKLLLVRGNDKYLMSIPSTKVPAXXTSPVR

SEQ ID NO: 59367 - protein, 35 aa, Artificial Sequence; identical to SEQ ID NO: 3557
  GFR-binding peptide
  MOD_RES (32)..(33): Xaa is C or S

SEQ ID NO: 59368 - protein, 39 aa, Artificial Sequence; identical to SEQ ID NO: 3559
  GFR-binding peptide
  MOD_RES (2)..(4)..(36)..(37): Xaa is C or S

SEQ ID NO: 59369 - protein, 36 aa, Artificial Sequence; identical to SEQ ID NO: 3563
  GFR-binding peptide
  MOD_RES (31)..(32): Xaa is C or S

SEQ ID NO: 59370 - protein, 36 aa, Artificial Sequence; identical to SEQ ID NO: 24574
  GFR-binding peptide
  MOD_RES (1)..(36): Xaa is C or S
  MOD_RES (14)..(15)..(16)..(17)..(18): Xaa is A or G
  MOD_RES (19)..(20)..(21)..(22): Xaa is A or G or is absent

SEQ ID NO: 59371 - protein, 35 aa, Artificial Sequence
  GFR-binding peptide
  MOD_RES (1)..(3): Xaa is C or S
  MOD_RES (14)..(15)..(16)..(17)..(18): Xaa is A or G
  MOD_RES (19)..(20)..(21)..(22): Xaa is A or G or is absent
XGXEEVIMEYKFKXXXXXXXXXLYLMSIPETKVPA

SEQ ID NO: 59372 - protein, 39 aa, Artificial Sequence; identical to SEQ ID NO: 24578
  GFR-binding peptide
  MOD_RES (2)..(33)..(34): Xaa is C or S

SEQ ID NO: 59373 - protein, 35 aa, Artificial Sequence; identical to SEQ ID NO: 3566
  GFR-binding peptide
  MOD_RES (1)..(33): Xaa is C or S

SEQ ID NO: 59374 - protein, 34 aa, Artificial Sequence; identical to SEQ ID NO: 3569
  GFR-binding peptide
  MOD_RES (33)..(33): Xaa is C or S
  MOD_RES (11)..(12)..(13)..(14)..(15): Xaa is A or G
  MOD_RES (16)..(17)..(18)..(19): Xaa is A or G or is absent

SEQ ID NO: 59375 - protein, 32 aa, Artificial Sequence
  GFR-binding peptide
  MOD_RES (1)..(1): Xaa is C or S
XSEVTMNRHKRLVVNKNEDYYLISTASMKEPV

SEQ ID NO: 59376 - protein, 38 aa, Artificial Sequence; identical to SEQ ID NO: 3573
  GFR-binding peptide
  MOD_RES (2)..(4)..(35)..(36): Xaa is C or S

SEQ ID NO: 59377 - protein, 40 aa, Artificial Sequence; identical to SEQ ID NO: 24582
  GFR-binding peptide
  MOD_RES (2)..(34)..(35): Xaa is C or S

SEQ ID NO: 59378 - protein, 36 aa, Artificial Sequence; identical to SEQ ID NO: 31579
  GFR-binding peptide
  MOD_RES (33)..(34): Xaa is C or S

SEQ ID NO: 59379 - protein, 40 aa, Artificial Sequence; identical to SEQ ID NO: 3576
  GFR-binding peptide
  MOD_RES (2)..(36)..(37): Xaa is C or S
  MOD_RES (14)..(15)..(16)..(17)..(18): Xaa is A or G
  MOD_RES (19)..(20)..(21)..(22): Xaa is A or G or is absent

SEQ ID NO: 59380 - protein, 39 aa, Artificial Sequence; identical to SEQ ID NO: 31580
  GFR-binding peptide
  MOD_RES (2)..(4)..(38)..(39): Xaa is C or S
  MOD_RES (16)..(17)..(18)..(19)..(20): Xaa is A or G
  MOD_RES (21)..(22)..(23)..(24): Xaa is A or G or is absent

SEQ ID NO: 59381 - protein, 39 aa, Artificial Sequence; identical to SEQ ID NO: 31581
  GFR-binding peptide
  MOD_RES (1)..(3)..(35): Xaa is C or S

SEQ ID NO: 59382 - protein, 38 aa, Artificial Sequence; identical to SEQ ID NO: 31582
  GFR-binding peptide
  MOD_RES (34)..(35): Xaa is C or S
  MOD_RES (12)..(13)..(14)..(15)..(16): Xaa is A or G
  MOD_RES (17)..(18)..(19)..(20): Xaa is A or G or is absent

SEQ ID NO: 59383 - protein, 42 aa, Artificial Sequence; identical to SEQ ID NO: 24589
  GFR-binding peptide
  MOD_RES (1)..(3)..(37)..(38): Xaa is C or S
  MOD_RES (15)..(16)..(17)..(18)..(19): Xaa is A or G
  MOD_RES (20)..(21)..(22)..(23): Xaa is A or G or is absent

SEQ ID NO: 59384 - protein, 42 aa, Artificial Sequence
  GFR-binding peptide
  MOD_RES (2)..(36)..(37): Xaa is C or S
  MOD_RES (14)..(15)..(16)..(17)..(18): Xaa is A or G
  MOD_RES (19)..(20)..(21)..(22): Xaa is A or G or is absent
GXSRVVMNEYKFKXXXXXXXXXLYLVSIPELKTPAXXPKPVH

SEQ ID NO: 59385 - protein, 38 aa, Artificial Sequence; identical to SEQ ID NO: 3587
  GFR-binding peptide
  MOD_RES (1)..(3)..(37)..(38): Xaa is C or S
  MOD_RES (15)..(16)..(17)..(18)..(19): Xaa is A or G
  MOD_RES (20)..(21)..(22)..(23): Xaa is A or G or is absent

SEQ ID NO: 59386 - protein, 39 aa, Artificial Sequence; identical to SEQ ID NO: 24598
  GFR-binding peptide
  MOD_RES (2)..(4)..(36)..(37): Xaa is C or S

SEQ ID NO: 59387 - protein, 40 aa, Artificial Sequence
  GFR-binding peptide
  MOD_RES (2)..(36)..(37): Xaa is C or S
  MOD_RES (14)..(15)..(16)..(17)..(18): Xaa is A or G
  MOD_RES (19)..(20)..(21)..(22): Xaa is A or G or is absent
AXSEVTMNPIKGYXXXXXXXXXFYLINIPSMKEPVXXPEP

SEQ ID NO: 59388 - protein, 37 aa, Artificial Sequence
  GFR-binding peptide
  MOD_RES (32)..(33): Xaa is C or S
SEVVMDYHYKLVVNNASDKYLISIPSLRTPVXXTPPT

SEQ ID NO: 59389 - protein, 33 aa, Artificial Sequence
  GFR-binding peptide
  MOD_RES (2)..(33): Xaa is C or S
KXSRVIMPIKGYVKPKRGVFYLINIPSLAQPVX

SEQ ID NO: 59390 - protein, 35 aa, Artificial Sequence
  GFR-binding peptide
  MOD_RES (34)..(35): Xaa is C or S
  MOD_RES (12)..(13)..(14)..(15)..(16): Xaa is A or G
  MOD_RES (17)..(18)..(19)..(20): Xaa is A or G or is absent
SEVVMDRHKRLXXXXXXXXXYYLISTASLRTPVXX

SEQ ID NO: 59391 - protein, 42 aa, Artificial Sequence; identical to SEQ ID NO: 3595
  GFR-binding peptide
  MOD_RES (1)..(3)..(36)..(37): Xaa is C or S
  MOD_RES (14)..(15)..(16)..(17)..(18): Xaa is A or G
  MOD_RES (19)..(20)..(21)..(22): Xaa is A or G or is absent

SEQ ID NO: 59392 - protein, 38 aa, Artificial Sequence
  GFR-binding peptide
  MOD_RES (1)..(3)..(37)..(38): Xaa is C or S
  MOD_RES (15)..(16)..(17)..(18)..(19): Xaa is A or G
  MOD_RES (20)..(21)..(22)..(23): Xaa is A or G or is absent
XAXSEVTMNEYKFKXXXXXXXXXLYLISIPEMKEPVXX

SEQ ID NO: 59393 - protein, 36 aa, Artificial Sequence
  GFR-binding peptide
  MOD_RES (31)..(32): Xaa is C or S
EVTMNPIKGYVVNKNEDFYLINIPSMKEPVXXPEPI

SEQ ID NO: 59394 - protein, 36 aa, Artificial Sequence; identical to SEQ ID NO: 3597
  GFR-binding peptide
  MOD_RES (1)..(3)..(35)..(36): Xaa is C or S

SEQ ID NO: 59395 - protein, 31 aa, Artificial Sequence
  GFR-binding peptide
SEVVMDEYKFKVVNNASDLYLISIPELRTPV

SEQ ID NO: 59396 - protein, 37 aa, Artificial Sequence
  GFR-binding peptide
  MOD_RES (1)..(33)..(34): Xaa is C or S
XRDVVMGEYKFKIIQQKDNLYLMSIPEMKTPTXXPGA

SEQ ID NO: 59397 - protein, 34 aa, Artificial Sequence; identical to SEQ ID NO: 24613
  GFR-binding peptide
  MOD_RES (1)..(1): Xaa is C or S
  MOD_RES (13)..(14)..(15)..(16)..(17): Xaa is A or G
  MOD_RES (18)..(19)..(20)..(21): Xaa is A or G or is absent

SEQ ID NO: 59398 - protein, 39 aa, Artificial Sequence; identical to SEQ ID NO: 3605
  GFR-binding peptide
  MOD_RES (2)..(4)..(38)..(39): Xaa is C or S
  MOD_RES (16)..(17)..(18)..(19)..(20): Xaa is A or G
  MOD_RES (21)..(22)..(23)..(24): Xaa is A or G or is absent

SEQ ID NO: 59399 - protein, 37 aa, Artificial Sequence; identical to SEQ ID NO: 3606
  GFR-binding peptide
  MOD_RES (1)..(3)..(37): Xaa is C or S
  MOD_RES (15)..(16)..(17)..(18)..(19): Xaa is A or G
  MOD_RES (20)..(21)..(22)..(23): Xaa is A or G or is absent

SEQ ID NO: 59400 - protein, 39 aa, Artificial Sequence
  GFR-binding peptide
  MOD_RES (2)..(34)..(35): Xaa is C or S
GXSEVVMDEYKFKVVNNASDLYLISIPELRTPVXXTPPT

SEQ ID NO: 59401 - protein, 36 aa, Artificial Sequence; identical to SEQ ID NO: 56524
  GFR-binding peptide
  MOD_RES (1)..(34)..(35): Xaa is C or S
  MOD_RES (12)..(13)..(14)..(15)..(16): Xaa is A or G
  MOD_RES (17)..(18)..(19)..(20): Xaa is A or G or is absent

SEQ ID NO: 59402 - protein, 37 aa, Artificial Sequence
  GFR-binding peptide
  MOD_RES (1)..(3)..(37): Xaa is C or S
  MOD_RES (15)..(16)..(17)..(18)..(19): Xaa is A or G
  MOD_RES (20)..(21)..(22)..(23): Xaa is A or G or is absent
XAXSEVTMNYHYKLXXXXXXXXXKYLISIPSMKEPVX

SEQ ID NO: 59403 - protein, 32 aa, Artificial Sequence; identical to SEQ ID NO: 31603
  GFR-binding peptide
  MOD_RES (1)..(1): Xaa is C or S

SEQ ID NO: 59404 - protein, 34 aa, Artificial Sequence; identical to SEQ ID NO: 24615
  GFR-binding peptide
  MOD_RES (34)..(34): Xaa is C or S
  MOD_RES (12)..(13)..(14)..(15)..(16): Xaa is A or G
  MOD_RES (17)..(18)..(19)..(20): Xaa is A or G or is absent

SEQ ID NO: 59405 - protein, 38 aa, Artificial Sequence; identical to SEQ ID NO: 3607
  GFR-binding peptide
  MOD_RES (1)..(34)..(35): Xaa is C or S

SEQ ID NO: 59406 - protein, 41 aa, Artificial Sequence; identical to SEQ ID NO: 3608
  GFR-binding peptide
  MOD_RES (1)..(3)..(35)..(36): Xaa is C or S

SEQ ID NO: 59407 - protein, 39 aa, Artificial Sequence; identical to SEQ ID NO: 3609
  GFR-binding peptide
  MOD_RES (1)..(3)..(34)..(35): Xaa is C or S

SEQ ID NO: 59408 - protein, 38 aa, Artificial Sequence; identical to SEQ ID NO: 31607
  GFR-binding peptide
  MOD_RES (34)..(35): Xaa is C or S
  MOD_RES (12)..(13)..(14)..(15)..(16): Xaa is A or G
  MOD_RES (17)..(18)..(19)..(20): Xaa is A or G or is absent

SEQ ID NO: 59409 - protein, 44 aa, Artificial Sequence
  GFR-binding peptide
  MOD_RES (2)..(4)..(38)..(39): Xaa is C or S
  MOD_RES (16)..(17)..(18)..(19)..(20): Xaa is A or G
  MOD_RES (21)..(22)..(23)..(24): Xaa is A or G or is absent
HXGXSRVVMNYHYKLXXXXXXXXXKYLVSIPSLKTPAXXPKPVH

SEQ ID NO: 59410 - protein, 36 aa, Artificial Sequence; identical to SEQ ID NO: 3610
  GFR-binding peptide
  MOD_RES (31)..(32): Xaa is C or S

SEQ ID NO: 59411 - protein, 31 aa, Artificial Sequence; identical to SEQ ID NO: 3611
  GFR-binding peptide

SEQ ID NO: 59412 - protein, 35 aa, Artificial Sequence; identical to SEQ ID NO: 3612
  GFR-binding peptide
  MOD_RES (31)..(32): Xaa is C or S

SEQ ID NO: 59413 - protein, 39 aa, Artificial Sequence; identical to SEQ ID NO: 31611
  GFR-binding peptide
  MOD_RES (1)..(35)..(36): Xaa is C or S
  MOD_RES (13)..(14)..(15)..(16)..(17): Xaa is A or G
  MOD_RES (18)..(19)..(20)..(21): Xaa is A or G or is absent

SEQ ID NO: 59414 - protein, 42 aa, Artificial Sequence; identical to SEQ ID NO: 3617
  GFR-binding peptide
  MOD_RES (2)..(4)..(36)..(37): Xaa is C or S

SEQ ID NO: 59415 - protein, 38 aa, Artificial Sequence
  GFR-binding peptide
  MOD_RES (2)..(4)..(38): Xaa is C or S
  MOD_RES (16)..(17)..(18)..(19)..(20): Xaa is A or G
  MOD_RES (21)..(22)..(23)..(24): Xaa is A or G or is absent
RXAXSEVTMNEYKFKXXXXXXXXXLYLISIPEMKEPVX

SEQ ID NO: 59416 - protein, 40 aa, Artificial Sequence; identical to SEQ ID NO: 31615
  GFR-binding peptide
  MOD_RES (2)..(4)..(38)..(39): Xaa is C or S
  MOD_RES (16)..(17)..(18)..(19)..(20): Xaa is A or G
  MOD_RES (21)..(22)..(23)..(24): Xaa is A or G or is absent

SEQ ID NO: 59417 - protein, 36 aa, Artificial Sequence
  GFR-binding peptide
  MOD_RES (1)..(32)..(33): Xaa is C or S
XEEVIMRHKRLLLVRGNDYYLMSTASTKVPAXXTSP

SEQ ID NO: 59418 - protein, 34 aa, Artificial Sequence
  GFR-binding peptide
  MOD_RES (34)..(34): Xaa is C or S
  MOD_RES (12)..(13)..(14)..(15)..(16): Xaa is A or G
  MOD_RES (17)..(18)..(19)..(20): Xaa is A or G or is absent
SEVVMDRHKRLXXXXXXXXXYYLISTASLRTPVX

SEQ ID NO: 59419 - protein, 33 aa, Artificial Sequence
  GFR-binding peptide
  MOD_RES (1)..(33): Xaa is C or S
XRDVVMGYHYKLIIQQKDNKYLMSIPSMKTPTX

SEQ ID NO: 59420 - protein, 43 aa, Artificial Sequence; identical to SEQ ID NO: 3623
  GFR-binding peptide
  MOD_RES (2)..(4)..(37)..(38): Xaa is C or S

SEQ ID NO: 59421 - protein, 36 aa, Artificial Sequence; identical to SEQ ID NO: 31623
  GFR-binding peptide
  MOD_RES (34)..(35): Xaa is C or S
  MOD_RES (12)..(13)..(14)..(15)..(16): Xaa is A or G
  MOD_RES (17)..(18)..(19)..(20): Xaa is A or G or is absent

SEQ ID NO: 59422 - protein, 33 aa, Artificial Sequence; identical to SEQ ID NO: 24635
  GFR-binding peptide
  MOD_RES (31)..(32): Xaa is C or S

SEQ ID NO: 59423 - protein, 33 aa, Artificial Sequence; identical to SEQ ID NO: 3626
  GFR-binding peptide
  MOD_RES (1)..(33): Xaa is C or S

SEQ ID NO: 59424 - protein, 37 aa, Artificial Sequence; identical to SEQ ID NO: 3627
  GFR-binding peptide
  MOD_RES (1)..(3)..(36)..(37): Xaa is C or S
  MOD_RES (14)..(15)..(16)..(17)..(18): Xaa is A or G
  MOD_RES (19)..(20)..(21)..(22): Xaa is A or G or is absent

SEQ ID NO: 59425 - protein, 37 aa, Artificial Sequence
  GFR-binding peptide
  MOD_RES (31)..(32): Xaa is C or S
SVAMGRHKRLYTVVGKDYYLISTASLKTPVXXAKSAK

SEQ ID NO: 59426 - protein, 38 aa, Artificial Sequence; identical to SEQ ID NO: 3630
  GFR-binding peptide
  MOD_RES (33)..(34): Xaa is C or S
  MOD_RES (11)..(12)..(13)..(14)..(15): Xaa is A or G
  MOD_RES (16)..(17)..(18)..(19): Xaa is A or G or is absent

SEQ ID NO: 59427 - protein, 34 aa, Artificial Sequence; identical to SEQ ID NO: 3631
  GFR-binding peptide
  MOD_RES (1)..(33)..(34): Xaa is C or S

SEQ ID NO: 59428 - protein, 34 aa, Artificial Sequence; identical to SEQ ID NO: 24645
  GFR-binding peptide
  MOD_RES (32)..(33): Xaa is C or S

SEQ ID NO: 59429 - protein, 33 aa, Artificial Sequence; identical to SEQ ID NO: 31637
  GFR-binding peptide
  MOD_RES (1)..(3): Xaa is C or S

SEQ ID NO: 59430 - protein, 37 aa, Artificial Sequence; identical to SEQ ID NO: 31640
  GFR-binding peptide
  MOD_RES (32)..(33): Xaa is C or S

SEQ ID NO: 59431 - protein, 37 aa, Artificial Sequence; identical to SEQ ID NO: 3634
  GFR-binding peptide
  MOD_RES (1)..(3)..(34)..(35): Xaa is C or S

SEQ ID NO: 59432 - protein, 36 aa, Artificial Sequence
  GFR-binding peptide
  MOD_RES (34)..(35): Xaa is C or S
  MOD_RES (12)..(13)..(14)..(15)..(16): Xaa is A or G
  MOD_RES (17)..(18)..(19)..(20): Xaa is A or G or is absent
SEVTMNYHYKLXXXXXXXXXKYLISIPSMKEPVXXP

SEQ ID NO: 59433 - protein, 34 aa, Artificial Sequence; identical to SEQ ID NO: 24653
  GFR-binding peptide
  MOD_RES (34)..(34): Xaa is C or S
  MOD_RES (12)..(13)..(14)..(15)..(16): Xaa is A or G
  MOD_RES (17)..(18)..(19)..(20): Xaa is A or G or is absent

SEQ ID NO: 59434 - protein, 42 aa, Artificial Sequence
  GFR-binding peptide
  MOD_RES (2)..(4)..(36)..(37): Xaa is C or S
SXGXRDVVMGRHKRLIIQQKDNYYLMSTASMKTPTXXPGASG

SEQ ID NO: 59435 - protein, 43 aa, Artificial Sequence
  GFR-binding peptide
  MOD_RES (2)..(4)..(38)..(39): Xaa is C or S
  MOD_RES (16)..(17)..(18)..(19)..(20): Xaa is A or G
  MOD_RES (21)..(22)..(23)..(24): Xaa is A or G or is absent
RXAXSEVTMNPIKGYXXXXXXXXXFYLINIPSMKEPVXXPEPI

SEQ ID NO: 59436 - protein, 38 aa, Artificial Sequence; identical to SEQ ID NO: 3641
  GFR-binding peptide
  MOD_RES (1)..(3)..(38): Xaa is C or S
  MOD_RES (16)..(17)..(18)..(19)..(20): Xaa is A or G
  MOD_RES (21)..(22)..(23)..(24): Xaa is A or G or is absent

SEQ ID NO: 59437 - protein, 35 aa, Artificial Sequence
  GFR-binding peptide
  MOD_RES (33)..(34): Xaa is C or S
  MOD_RES (11)..(12)..(13)..(14)..(15): Xaa is A or G
  MOD_RES (16)..(17)..(18)..(19): Xaa is A or G or is absent
EVTMNRHKRLXXXXXXXXXYYLISTASMKEPVXXP

SEQ ID NO: 59438 - protein, 36 aa, Artificial Sequence
  GFR-binding peptide
  MOD_RES (32)..(33): Xaa is C or S
SEVVMDRHKRLVVNNASDYYLISTASLRTPVXXTPP

SEQ ID NO: 59439 - protein, 38 aa, Artificial Sequence; identical to SEQ ID NO: 3644
  GFR-binding peptide
  MOD_RES (1)..(33)..(34): Xaa is C or S

SEQ ID NO: 59440 - protein, 38 aa, Artificial Sequence; identical to SEQ ID NO: 3648
  GFR-binding peptide
  MOD_RES (2)..(36)..(37): Xaa is C or S
  MOD_RES (14)..(15)..(16)..(17)..(18): Xaa is A or G
  MOD_RES (19)..(20)..(21)..(22): Xaa is A or G or is absent

SEQ ID NO: 59441 - protein, 37 aa, Artificial Sequence
  GFR-binding peptide
  MOD_RES (1)..(3)..(35)..(36): Xaa is C or S
XGXSEVVMDRHKRLVVNNASDYYLISTASLRTPVXXT

SEQ ID NO: 59442 - protein, 33 aa, Artificial Sequence; identical to SEQ ID NO: 24669
  GFR-binding peptide
  MOD_RES (1)..(33): Xaa is C or S

SEQ ID NO: 59443 - protein, 33 aa, Artificial Sequence; identical to SEQ ID NO: 24670
  GFR-binding peptide
  MOD_RES (31)..(32): Xaa is C or S

SEQ ID NO: 59444 - protein, 37 aa, Artificial Sequence
  GFR-binding peptide
  MOD_RES (2)..(33)..(34): Xaa is C or S
GXEEVIMYHYKLLLVRGNDKYLMSIPSTKVPAXXTSP

SEQ ID NO: 59445 - protein, 37 aa, Artificial Sequence; identical to SEQ ID NO: 31662
  GFR-binding peptide
  MOD_RES (1)..(33)..(34): Xaa is C or S

SEQ ID NO: 59446 - protein, 37 aa, Artificial Sequence; identical to SEQ ID NO: 31663
  GFR-binding peptide
  MOD_RES (1)..(3)..(37): Xaa is C or S
  MOD_RES (15)..(16)..(17)..(18)..(19): Xaa is A or G
  MOD_RES (20)..(21)..(22)..(23): Xaa is A or G or is absent

SEQ ID NO: 59447 - protein, 42 aa, Artificial Sequence; identical to SEQ ID NO: 24676
  GFR-binding peptide
  MOD_RES (2)..(4)..(38)..(39): Xaa is C or S
  MOD_RES (16)..(17)..(18)..(19)..(20): Xaa is A or G
  MOD_RES (21)..(22)..(23)..(24): Xaa is A or G or is absent

SEQ ID NO: 59448 - protein, 39 aa, Artificial Sequence; identical to SEQ ID NO: 24677
  GFR-binding peptide
  MOD_RES (1)..(35)..(36): Xaa is C or S
  MOD_RES (13)..(14)..(15)..(16)..(17): Xaa is A or G
  MOD_RES (18)..(19)..(20)..(21): Xaa is A or G or is absent

SEQ ID NO: 59449 - protein, 40 aa, Artificial Sequence; identical to SEQ ID NO: 3657
  GFR-binding peptide
  MOD_RES (1)..(3)..(34)..(35): Xaa is C or S

SEQ ID NO: 59450 - protein, 32 aa, Artificial Sequence; identical to SEQ ID NO: 3660
  GFR-binding peptide
  MOD_RES (32)..(32): Xaa is C or S

SEQ ID NO: 59451 - protein, 43 aa, Artificial Sequence
  GFR-binding peptide
  MOD_RES (1)..(3)..(37)..(38): Xaa is C or S
  MOD_RES (15)..(16)..(17)..(18)..(19): Xaa is A or G
  MOD_RES (20)..(21)..(22)..(23): Xaa is A or G or is absent
XGXAEVVMDRHKRLXXXXXXXXXYYLISTASLRAPVXXSAPAA

SEQ ID NO: 59452 - protein, 35 aa, Artificial Sequence
  GFR-binding peptide
  MOD_RES (31)..(32): Xaa is C or S
EVTMNRYKKLVVNKNEDFYLISIANMKEPVXXPEP

SEQ ID NO: 59453 - protein, 38 aa, Artificial Sequence; identical to SEQ ID NO: 31669
  GFR-binding peptide
  MOD_RES (2)..(4)..(36)..(37): Xaa is C or S

SEQ ID NO: 59454 - protein, 40 aa, Artificial Sequence; identical to SEQ ID NO: 24684
  GFR-binding peptide
  MOD_RES (2)..(34)..(35): Xaa is C or S

SEQ ID NO: 59455 - protein, 35 aa, Artificial Sequence; identical to SEQ ID NO: 3665
  GFR-binding peptide
  MOD_RES (1)..(34)..(35): Xaa is C or S
  MOD_RES (12)..(13)..(14)..(15)..(16): Xaa is A or G
  MOD_RES (17)..(18)..(19)..(20): Xaa is A or G or is absent

SEQ ID NO: 59456 - protein, 36 aa, Artificial Sequence; identical to SEQ ID NO: 3666
  GFR-binding peptide
  MOD_RES (32)..(32): Xaa is C or S

SEQ ID NO: 59457 - protein, 34 aa, Artificial Sequence; identical to SEQ ID NO: 24689
  GFR-binding peptide
  MOD_RES (32)..(33): Xaa is C or S

SEQ ID NO: 59458 - protein, 35 aa, Artificial Sequence; identical to SEQ ID NO: 24692
  GFR-binding peptide
  MOD_RES (2)..(34)..(35): Xaa is C or S

SEQ ID NO: 59459 - protein, 32 aa, Artificial Sequence
  GFR-binding peptide
  MOD_RES (2)..(2): Xaa is C or S
GXEEVIMEYKFKLLVRGNDLYLMSIPETKVPA

SEQ ID NO: 59460 - protein, 40 aa, Artificial Sequence; identical to SEQ ID NO: 3676
  GFR-binding peptide
  MOD_RES (1)..(3)..(35)..(36): Xaa is C or S

SEQ ID NO: 59461 - protein, 39 aa, Artificial Sequence; identical to SEQ ID NO: 3677
  GFR-binding peptide
  MOD_RES (1)..(3)..(37)..(38): Xaa is C or S
  MOD_RES (15)..(16)..(17)..(18)..(19): Xaa is A or G
  MOD_RES (20)..(21)..(22)..(23): Xaa is A or G or is absent

SEQ ID NO: 59462 - protein, 43 aa, Artificial Sequence
  GFR-binding peptide
  MOD_RES (2)..(4)..(38)..(39): Xaa is C or S
  MOD_RES (16)..(17)..(18)..(19)..(20): Xaa is A or G
  MOD_RES (21)..(22)..(23)..(24): Xaa is A or G or is absent
RXAXSEVTMNRHKRLXXXXXXXXXYYLISTASMKEPVXXPEPI

SEQ ID NO: 59463 - protein, 37 aa, Artificial Sequence
  GFR-binding peptide
  MOD_RES (2)..(4): Xaa is C or S
  MOD_RES (16)..(17)..(18)..(19)..(20): Xaa is A or G
  MOD_RES (21)..(22)..(23)..(24): Xaa is A or G or is absent
RXGXSEVVMDYHYKLXXXXXXXXXKYLISIPSLRTPV

SEQ ID NO: 59464 - protein, 32 aa, Artificial Sequence; identical to SEQ ID NO: 31680
  GFR-binding peptide
  MOD_RES (31)..(31): Xaa is C or S

SEQ ID NO: 59465 - protein, 36 aa, Artificial Sequence; identical to SEQ ID NO: 3680
  GFR-binding peptide
  MOD_RES (34)..(35): Xaa is C or S
  MOD_RES (12)..(13)..(14)..(15)..(16): Xaa is A or G
  MOD_RES (17)..(18)..(19)..(20): Xaa is A or G or is absent

SEQ ID NO: 59466 - protein, 39 aa, Artificial Sequence; identical to SEQ ID NO: 3681
  GFR-binding peptide
  MOD_RES (1)..(35)..(36): Xaa is C or S
  MOD_RES (13)..(14)..(15)..(16)..(17): Xaa is A or G
  MOD_RES (18)..(19)..(20)..(21): Xaa is A or G or is absent

SEQ ID NO: 59467 - protein, 36 aa, Artificial Sequence; identical to SEQ ID NO: 24701
  GFR-binding peptide
  MOD_RES (33)..(34): Xaa is C or S
  MOD_RES (11)..(12)..(13)..(14)..(15): Xaa is A or G
  MOD_RES (16)..(17)..(18)..(19): Xaa is A or G or is absent

SEQ ID NO: 59468 - protein, 35 aa, Artificial Sequence
  GFR-binding peptide
  MOD_RES (33)..(34): Xaa is C or S
  MOD_RES (11)..(12)..(13)..(14)..(15): Xaa is A or G
  MOD_RES (16)..(17)..(18)..(19): Xaa is A or G or is absent
DVVMGRHKRLXXXXXXXXXYYLMSTASMKTPTXXP

SEQ ID NO: 59469 - protein, 37 aa, Artificial Sequence; identical to SEQ ID NO: 3686
  GFR-binding peptide
  MOD_RES (33)..(34): Xaa is C or S
  MOD_RES (11)..(12)..(13)..(14)..(15): Xaa is A or G
  MOD_RES (16)..(17)..(18)..(19): Xaa is A or G or is absent

SEQ ID NO: 59470 - protein, 33 aa, Artificial Sequence
  GFR-binding peptide
  MOD_RES (31)..(32): Xaa is C or S
EVTMNEYKFKVVNKNEDLYLISIPEMKEPVXXP

SEQ ID NO: 59471 - protein, 39 aa, Artificial Sequence
  GFR-binding peptide
  MOD_RES (2)..(4)..(36)..(37): Xaa is C or S
RXGXSEVVMDYHYKLVVNNASDKYLISIPSLRTPVXXTP

SEQ ID NO: 59472 - protein, 38 aa, Artificial Sequence; identical to SEQ ID NO: 3687
  GFR-binding peptide
  MOD_RES (1)..(3)..(37)..(38): Xaa is C or S
  MOD_RES (15)..(16)..(17)..(18)..(19): Xaa is A or G
  MOD_RES (20)..(21)..(22)..(23): Xaa is A or G or is absent

SEQ ID NO: 59473 - protein, 36 aa, Artificial Sequence
  GFR-binding peptide
  MOD_RES (2)..(34)..(35): Xaa is C or S
GXSEVVMDYHYKLVVNNASDKYLISIPSLRTPVXXT

SEQ ID NO: 59474 - protein, 40 aa, Artificial Sequence; identical to SEQ ID NO: 31691
  GFR-binding peptide
  MOD_RES (2)..(34)..(35): Xaa is C or S

SEQ ID NO: 59475 - protein, 41 aa, Artificial Sequence; identical to SEQ ID NO: 3690
  GFR-binding peptide
  MOD_RES (1)..(35)..(36): Xaa is C or S
  MOD_RES (13)..(14)..(15)..(16)..(17): Xaa is A or G
  MOD_RES (18)..(19)..(20)..(21): Xaa is A or G or is absent

SEQ ID NO: 59476 - protein, 33 aa, Artificial Sequence; identical to SEQ ID NO: 3694
  GFR-binding peptide
  MOD_RES (12)..(13)..(14)..(15)..(16): Xaa is A or G
  MOD_RES (17)..(18)..(19)..(20): Xaa is A or G or is absent

SEQ ID NO: 59477 - protein, 35 aa, Artificial Sequence
  GFR-binding peptide
  MOD_RES (1)..(32)..(33): Xaa is C or S
XSKVVMPIKGYVKPTRGVFYLINIPSLDQPVXXPS

SEQ ID NO: 59478 - protein, 37 aa, Artificial Sequence; identical to SEQ ID NO: 31698
  GFR-binding peptide
  MOD_RES (2)..(34)..(35): Xaa is C or S

SEQ ID NO: 59479 - protein, 37 aa, Artificial Sequence; identical to SEQ ID NO: 3697
  GFR-binding peptide
  MOD_RES (31)..(32): Xaa is C or S

SEQ ID NO: 59480 - protein, 42 aa, Artificial Sequence
  GFR-binding peptide
  MOD_RES (2)..(4)..(38)..(39): Xaa is C or S
  MOD_RES (16)..(17)..(18)..(19)..(20): Xaa is A or G
  MOD_RES (21)..(22)..(23)..(24): Xaa is A or G or is absent
RXAXSEVTMNRYKKLXXXXXXXXXFYLISIANMKEPVXXPEP

SEQ ID NO: 59481 - protein, 41 aa, Artificial Sequence; identical to SEQ ID NO: 3699
  GFR-binding peptide
  MOD_RES (2)..(4)..(37)..(38): Xaa is C or S

SEQ ID NO: 59482 - protein, 34 aa, Artificial Sequence; identical to SEQ ID NO: 24717
  GFR-binding peptide
  MOD_RES (1)..(3)..(34): Xaa is C or S

SEQ ID NO: 59483 - protein, 31 aa, Artificial Sequence; identical to SEQ ID NO: 3703
  GFR-binding peptide

SEQ ID NO: 59484 - protein, 36 aa, Artificial Sequence; identical to SEQ ID NO: 24719
  GFR-binding peptide
  MOD_RES (32)..(32): Xaa is C or S

SEQ ID NO: 59485 - protein, 34 aa, Artificial Sequence; identical to SEQ ID NO: 24720
  GFR-binding peptide
  MOD_RES (32)..(33): Xaa is C or S

SEQ ID NO: 59486 - protein, 39 aa, Artificial Sequence; identical to SEQ ID NO: 31709
  GFR-binding peptide
  MOD_RES (1)..(3)..(35)..(36): Xaa is C or S

SEQ ID NO: 59487 - protein, 33 aa, Artificial Sequence; identical to SEQ ID NO: 3706
  GFR-binding peptide
  MOD_RES (32)..(33): Xaa is C or S

SEQ ID NO: 59488 - protein, 33 aa, Artificial Sequence; identical to SEQ ID NO: 3708
  GFR-binding peptide
  MOD_RES (33)..(33): Xaa is C or S
  MOD_RES (11)..(12)..(13)..(14)..(15): Xaa is A or G
  MOD_RES (16)..(17)..(18)..(19): Xaa is A or G or is absent

SEQ ID NO: 59489 - protein, 41 aa, Artificial Sequence; identical to SEQ ID NO: 24728
  GFR-binding peptide
  MOD_RES (1)..(3)..(37)..(38): Xaa is C or S
  MOD_RES (15)..(16)..(17)..(18)..(19): Xaa is A or G
  MOD_RES (20)..(21)..(22)..(23): Xaa is A or G or is absent

SEQ ID NO: 59490 - protein, 42 aa, Artificial Sequence; identical to SEQ ID NO: 3709
  GFR-binding peptide
  MOD_RES (2)..(4)..(39)..(40): Xaa is C or S
  MOD_RES (17)..(18)..(19)..(20)..(21): Xaa is A or G
  MOD_RES (22)..(23)..(24)..(25): Xaa is A or G or is absent

SEQ ID NO: 59491 - protein, 37 aa, Artificial Sequence; identical to SEQ ID NO: 11136
  GFR-binding peptide
  MOD_RES (2)..(36)..(37): Xaa is C or S
  MOD_RES (14)..(15)..(16)..(17)..(18): Xaa is A or G
  MOD_RES (19)..(20)..(21)..(22): Xaa is A or G or is absent

SEQ ID NO: 59492 - protein, 34 aa, Artificial Sequence; identical to SEQ ID NO: 24732
  GFR-binding peptide
  MOD_RES (32)..(33): Xaa is C or S

SEQ ID NO: 59493 - protein, 45 aa, Artificial Sequence; identical to SEQ ID NO: 3713
  GFR-binding peptide
  MOD_RES (2)..(4)..(39)..(40): Xaa is C or S
  MOD_RES (17)..(18)..(19)..(20)..(21): Xaa is A or G
  MOD_RES (22)..(23)..(24)..(25): Xaa is A or G or is absent

SEQ ID NO: 59494 - protein, 36 aa, Artificial Sequence; identical to SEQ ID NO: 24735
  GFR-binding peptide
  MOD_RES (33)..(34): Xaa is C or S
  MOD_RES (11)..(12)..(13)..(14)..(15): Xaa is A or G
  MOD_RES (16)..(17)..(18)..(19): Xaa is A or G or is absent

SEQ ID NO: 59495 - protein, 33 aa, Artificial Sequence
  GFR-binding peptide
  MOD_RES (33)..(33): Xaa is C or S
  MOD_RES (11)..(12)..(13)..(14)..(15): Xaa is A or G
  MOD_RES (16)..(17)..(18)..(19): Xaa is A or G or is absent
EVVMDEYKFKXXXXXXXXXLYLISIPELRTPVX

SEQ ID NO: 59496 - protein, 38 aa, Artificial Sequence
  GFR-binding peptide
  MOD_RES (2)..(4)..(38): Xaa is C or S
  MOD_RES (16)..(17)..(18)..(19)..(20): Xaa is A or G
  MOD_RES (21)..(22)..(23)..(24): Xaa is A or G or is absent
RXGXSEVVMDRHKRLXXXXXXXXXYYLISTASLRTPVX

SEQ ID NO: 59497 - protein, 35 aa, Artificial Sequence; identical to SEQ ID NO: 3717
  GFR-binding peptide
  MOD_RES (2)..(4)..(35): Xaa is C or S

SEQ ID NO: 59498 - protein, 36 aa, Artificial Sequence
  GFR-binding peptide
  MOD_RES (1)..(35)..(36): Xaa is C or S
  MOD_RES (13)..(14)..(15)..(16)..(17): Xaa is A or G
  MOD_RES (18)..(19)..(20)..(21): Xaa is A or G or is absent
XSEVTMNPIKGYXXXXXXXXXFYLINIPSMKEPVXX

SEQ ID NO: 59499 - protein, 42 aa, Artificial Sequence; identical to SEQ ID NO: 31730
  GFR-binding peptide
  MOD_RES (2)..(4)..(38)..(39): Xaa is C or S
  MOD_RES (16)..(17)..(18)..(19)..(20): Xaa is A or G
  MOD_RES (21)..(22)..(23)..(24): Xaa is A or G or is absent

SEQ ID NO: 59500 - protein, 35 aa, Artificial Sequence; identical to SEQ ID NO: 3718
  GFR-binding peptide
  MOD_RES (1)..(3)..(35): Xaa is C or S

SEQ ID NO: 59501 - protein, 35 aa, Artificial Sequence
  GFR-binding peptide
  MOD_RES (31)..(32): Xaa is C or S
SKVVMPIKGYVKPTRGVFYLINIPSLDQPVXXPSA

SEQ ID NO: 59502 - protein, 35 aa, Artificial Sequence; identical to SEQ ID NO: 3719
  GFR-binding peptide
  MOD_RES (2)..(4)..(35): Xaa is C or S

SEQ ID NO: 59503 - protein, 40 aa, Artificial Sequence
  GFR-binding peptide
  MOD_RES (1)..(3)..(34)..(35): Xaa is C or S
XKXSRVIMPIKGYVKPKRGVFYLINIPSLAQPVXXPAASA

SEQ ID NO: 59504 - protein, 39 aa, Artificial Sequence; identical to SEQ ID NO: 3720
  GFR-binding peptide
  MOD_RES (2)..(4)..(38)..(39): Xaa is C or S
  MOD_RES (16)..(17)..(18)..(19)..(20): Xaa is A or G
  MOD_RES (21)..(22)..(23)..(24): Xaa is A or G or is absent

SEQ ID NO: 59505 - protein, 39 aa, Artificial Sequence; identical to SEQ ID NO: 3722
  GFR-binding peptide
  MOD_RES (2)..(34)..(35): Xaa is C or S

SEQ ID NO: 59506 - protein, 32 aa, Artificial Sequence; identical to SEQ ID NO: 31739
  GFR-binding peptide
  MOD_RES (1)..(1): Xaa is C or S

SEQ ID NO: 59507 - protein, 42 aa, Artificial Sequence
  GFR-binding peptide
  MOD_RES (2)..(4)..(37)..(38): Xaa is C or S
  MOD_RES (15)..(16)..(17)..(18)..(19): Xaa is A or G
  MOD_RES (20)..(21)..(22)..(23): Xaa is A or G or is absent
SXKXSKVVMPIKGYXXXXXXXXXFYLINIPSLDQPVXXPSAS

SEQ ID NO: 59508 - protein, 34 aa, Artificial Sequence
  GFR-binding peptide
  MOD_RES (1)..(1): Xaa is C or S
  MOD_RES (13)..(14)..(15)..(16)..(17): Xaa is A or G
  MOD_RES (18)..(19)..(20)..(21): Xaa is A or G or is absent
XSEVTMNEYKFKXXXXXXXXXLYLISIPEMKEPV

SEQ ID NO: 59509 - protein, 40 aa, Artificial Sequence; identical to SEQ ID NO: 3727
  GFR-binding peptide
  MOD_RES (1)..(3)..(35): Xaa is C or S

SEQ ID NO: 59510 - protein, 39 aa, Artificial Sequence; identical to SEQ ID NO: 31741
  GFR-binding peptide
  MOD_RES (2)..(4)..(35)..(36): Xaa is C or S

SEQ ID NO: 59511 - protein, 34 aa, Artificial Sequence; identical to SEQ ID NO: 24750
  GFR-binding peptide
  MOD_RES (1)..(33)..(34): Xaa is C or S

SEQ ID NO: 59512 - protein, 40 aa, Artificial Sequence
  GFR-binding peptide
  MOD_RES (1)..(3)..(34)..(35): Xaa is C or S
XGXEEVIMEYKFKLLVRGNDLYLMSIPETKVPAXXTSPVR

SEQ ID NO: 59513 - protein, 41 aa, Artificial Sequence
  GFR-binding peptide
  MOD_RES (1)..(3)..(37)..(38): Xaa is C or S
  MOD_RES (15)..(16)..(17)..(18)..(19): Xaa is A or G
  MOD_RES (20)..(21)..(22)..(23): Xaa is A or G or is absent
XGXAEVVMDRHKRLXXXXXXXXXYYLISTASLRAPVXXSAP

SEQ ID NO: 59514 - protein, 40 aa, Artificial Sequence; identical to SEQ ID NO: 3730
  GFR-binding peptide
  MOD_RES (2)..(4)..(36)..(37): Xaa is C or S

SEQ ID NO: 59515 - protein, 42 aa, Artificial Sequence
  GFR-binding peptide
  MOD_RES (2)..(4)..(38)..(39): Xaa is C or S
  MOD_RES (16)..(17)..(18)..(19)..(20): Xaa is A or G
  MOD_RES (21)..(22)..(23)..(24): Xaa is A or G or is absent
RXAXSEVTMNEYKFKXXXXXXXXXLYLISIPEMKEPVXXPEP

SEQ ID NO: 59516 - protein, 37 aa, Artificial Sequence; identical to SEQ ID NO: 3733
  GFR-binding peptide
  MOD_RES (2)..(36)..(37): Xaa is C or S
  MOD_RES (14)..(15)..(16)..(17)..(18): Xaa is A or G
  MOD_RES (19)..(20)..(21)..(22): Xaa is A or G or is absent

SEQ ID NO: 59517 - protein, 34 aa, Artificial Sequence
  GFR-binding peptide
  MOD_RES (2)..(2): Xaa is C or S
  MOD_RES (13)..(14)..(15)..(16)..(17): Xaa is A or G
  MOD_RES (18)..(19)..(20)..(21): Xaa is A or G or is absent
KXSKVVMPIKGYXXXXXXXXXFYLINIPSLDQPV

SEQ ID NO: 59518 - protein, 39 aa, Artificial Sequence
  GFR-binding peptide
  MOD_RES (34)..(35): Xaa is C or S
  MOD_RES (12)..(13)..(14)..(15)..(16): Xaa is A or G
  MOD_RES (17)..(18)..(19)..(20): Xaa is A or G or is absent
RDVVMGYHYKLXXXXXXXXXKYLMSIPSMKTPTXXPGAS

SEQ ID NO: 59519 - protein, 38 aa, Artificial Sequence
  GFR-binding peptide
  MOD_RES (2)..(4)..(37)..(38): Xaa is C or S
  MOD_RES (15)..(16)..(17)..(18)..(19): Xaa is A or G
  MOD_RES (20)..(21)..(22)..(23): Xaa is A or G or is absent
SXKXSKVIMPIKGYXXXXXXXXXFYLINIPSLDQSVXX

SEQ ID NO: 59520 - protein, 37 aa, Artificial Sequence; identical to SEQ ID NO: 3736
  GFR-binding peptide
  MOD_RES (31)..(31): Xaa is C or S

SEQ ID NO: 59521 - protein, 33 aa, Artificial Sequence; identical to SEQ ID NO: 3737
  GFR-binding peptide
  MOD_RES (1)..(1): Xaa is C or S

SEQ ID NO: 59522 - protein, 38 aa, Artificial Sequence; identical to SEQ ID NO: 31752
  GFR-binding peptide
  MOD_RES (2)..(36)..(37): Xaa is C or S
  MOD_RES (14)..(15)..(16)..(17)..(18): Xaa is A or G
  MOD_RES (19)..(20)..(21)..(22): Xaa is A or G or is absent

SEQ ID NO: 59523 - protein, 37 aa, Artificial Sequence; identical to SEQ ID NO: 3739
  GFR-binding peptide
  MOD_RES (35)..(36): Xaa is C or S
  MOD_RES (13)..(14)..(15)..(16)..(17): Xaa is A or G
  MOD_RES (18)..(19)..(20)..(21): Xaa is A or G or is absent

SEQ ID NO: 59524 - protein, 38 aa, Artificial Sequence; identical to SEQ ID NO: 3740
  GFR-binding peptide
  MOD_RES (2)..(35)..(36): Xaa is C or S

SEQ ID NO: 59525 - protein, 41 aa, Artificial Sequence
  GFR-binding peptide
  MOD_RES (2)..(4)..(38)..(39): Xaa is C or S
  MOD_RES (16)..(17)..(18)..(19)..(20): Xaa is A or G
  MOD_RES (21)..(22)..(23)..(24): Xaa is A or G or is absent
RXAXSEVTMNRHKRLXXXXXXXXXYYLISTASMKEPVXXPE

SEQ ID NO: 59526 - protein, 32 aa, Artificial Sequence; identical to SEQ ID NO: 24768
  GFR-binding peptide
  MOD_RES (31)..(32): Xaa is C or S

SEQ ID NO: 59527 - protein, 39 aa, Artificial Sequence; identical to SEQ ID NO: 31760
  GFR-binding peptide
  MOD_RES (1)..(3)..(37)..(38): Xaa is C or S
  MOD_RES (15)..(16)..(17)..(18)..(19): Xaa is A or G
  MOD_RES (20)..(21)..(22)..(23): Xaa is A or G or is absent

SEQ ID NO: 59528 - protein, 33 aa, Artificial Sequence; identical to SEQ ID NO: 24777
  GFR-binding peptide
  MOD_RES (1)..(1): Xaa is C or S

SEQ ID NO: 59529 - protein, 34 aa, Artificial Sequence
  GFR-binding peptide
  MOD_RES (31)..(32): Xaa is C or S
DVVMGYHYKLIIQQKDNKYLMSIPSMKTPTXXPG

SEQ ID NO: 59530 - protein, 34 aa, Artificial Sequence
  GFR-binding peptide
  MOD_RES (2)..(34): Xaa is C or S
GXESVAMGRHKRLYTVVGKDYYLISTASLKTPVX

SEQ ID NO: 59531 - protein, 35 aa, Artificial Sequence
  GFR-binding peptide
  MOD_RES (2)..(35): Xaa is C or S
  MOD_RES (13)..(14)..(15)..(16)..(17): Xaa is A or G
  MOD_RES (18)..(19)..(20)..(21): Xaa is A or G or is absent
GXEEVIMRHKRLXXXXXXXXXYYLMSTASTKVPAX

SEQ ID NO: 59532 - protein, 42 aa, Artificial Sequence; identical to SEQ ID NO: 31771
  GFR-binding peptide
  MOD_RES (1)..(3)..(37)..(38): Xaa is C or S
  MOD_RES (15)..(16)..(17)..(18)..(19): Xaa is A or G
  MOD_RES (20)..(21)..(22)..(23): Xaa is A or G or is absent

SEQ ID NO: 59533 - protein, 35 aa, Artificial Sequence; identical to SEQ ID NO: 31772
  GFR-binding peptide
  MOD_RES (1)..(35): Xaa is C or S
  MOD_RES (13)..(14)..(15)..(16)..(17): Xaa is A or G
  MOD_RES (18)..(19)..(20)..(21): Xaa is A or G or is absent

SEQ ID NO: 59534 - protein, 34 aa, Artificial Sequence; identical to SEQ ID NO: 3753
  GFR-binding peptide
  MOD_RES (1)..(3): Xaa is C or S

SEQ ID NO: 59535 - protein, 36 aa, Artificial Sequence; identical to SEQ ID NO: 31773
  GFR-binding peptide
  MOD_RES (2)..(34)..(35): Xaa is C or S

SEQ ID NO: 59536 - protein, 35 aa, Artificial Sequence
  GFR-binding peptide
  MOD_RES (2)..(2): Xaa is C or S
  MOD_RES (14)..(15)..(16)..(17)..(18): Xaa is A or G
  MOD_RES (19)..(20)..(21)..(22): Xaa is A or G or is absent
GXRDVVMGEYKFKXXXXXXXXXLYLMSIPEMKTPT

SEQ ID NO: 59537 - protein, 35 aa, Artificial Sequence; identical to SEQ ID NO: 24785
  GFR-binding peptide
  MOD_RES (1)..(33)..(34): Xaa is C or S

SEQ ID NO: 59538 - protein, 37 aa, Artificial Sequence; identical to SEQ ID NO: 24786
  GFR-binding peptide
  MOD_RES (34)..(35): Xaa is C or S
  MOD_RES (12)..(13)..(14)..(15)..(16): Xaa is A or G
  MOD_RES (17)..(18)..(19)..(20): Xaa is A or G or is absent

SEQ ID NO: 59539 - protein, 34 aa, Artificial Sequence; identical to SEQ ID NO: 56717
  GFR-binding peptide
  MOD_RES (1)..(3): Xaa is C or S

SEQ ID NO: 59540 - protein, 38 aa, Artificial Sequence; identical to SEQ ID NO: 3758
  GFR-binding peptide
  MOD_RES (2)..(4)..(38): Xaa is C or S
  MOD_RES (16)..(17)..(18)..(19)..(20): Xaa is A or G
  MOD_RES (21)..(22)..(23)..(24): Xaa is A or G or is absent

SEQ ID NO: 59541 - protein, 37 aa, Artificial Sequence; identical to SEQ ID NO: 3761
  GFR-binding peptide
  MOD_RES (31)..(32): Xaa is C or S

SEQ ID NO: 59542 - protein, 37 aa, Artificial Sequence; identical to SEQ ID NO: 3768
  GFR-binding peptide
  MOD_RES (33)..(34): Xaa is C or S
  MOD_RES (11)..(12)..(13)..(14)..(15): Xaa is A or G
  MOD_RES (16)..(17)..(18)..(19): Xaa is A or G or is absent

SEQ ID NO: 59543 - protein, 40 aa, Artificial Sequence; identical to SEQ ID NO: 3769
  GFR-binding peptide
  MOD_RES (35)..(36): Xaa is C or S
  MOD_RES (13)..(14)..(15)..(16)..(17): Xaa is A or G
  MOD_RES (18)..(19)..(20)..(21): Xaa is A or G or is absent

SEQ ID NO: 59544 - protein, 38 aa, Artificial Sequence; identical to SEQ ID NO: 3773
  GFR-binding peptide
  MOD_RES (2)..(35)..(36): Xaa is C or S
  MOD_RES (13)..(14)..(15)..(16)..(17): Xaa is A or G
  MOD_RES (18)..(19)..(20)..(21): Xaa is A or G or is absent

SEQ ID NO: 59545 - protein, 38 aa, Artificial Sequence; identical to SEQ ID NO: 3774
  GFR-binding peptide
  MOD_RES (2)..(34)..(35): Xaa is C or S

SEQ ID NO: 59546 - protein, 40 aa, Artificial Sequence; identical to SEQ ID NO: 3776
  GFR-binding peptide
  MOD_RES (1)..(3)..(35)..(36): Xaa is C or S

SEQ ID NO: 59547 - protein, 38 aa, Artificial Sequence
  GFR-binding peptide
  MOD_RES (34)..(35): Xaa is C or S
  MOD_RES (12)..(13)..(14)..(15)..(16): Xaa is A or G
  MOD_RES (17)..(18)..(19)..(20): Xaa is A or G or is absent
SEVVMDRHKRLXXXXXXXXXYYLISTASLRTPVXXTPP

SEQ ID NO: 59548 - protein, 36 aa, Artificial Sequence; identical to SEQ ID NO: 3778
  GFR-binding peptide
  MOD_RES (2)..(4)..(36): Xaa is C or S

SEQ ID NO: 59549 - protein, 33 aa, Artificial Sequence; identical to SEQ ID NO: 24806
  GFR-binding peptide
  MOD_RES (31)..(32): Xaa is C or S

SEQ ID NO: 59550 - protein, 32 aa, Artificial Sequence; identical to SEQ ID NO: 24810
  GFR-binding peptide
  MOD_RES (11)..(12)..(13)..(14)..(15): Xaa is A or G
  MOD_RES (16)..(17)..(18)..(19): Xaa is A or G or is absent

SEQ ID NO: 59551 - protein, 41 aa, Artificial Sequence; identical to SEQ ID NO: 3784
  GFR-binding peptide
  MOD_RES (2)..(4)..(36)..(37): Xaa is C or S

SEQ ID NO: 59552 - protein, 36 aa, Artificial Sequence; identical to SEQ ID NO: 3786
  GFR-binding peptide
  MOD_RES (1)..(3): Xaa is C or S
  MOD_RES (15)..(16)..(17)..(18)..(19): Xaa is A or G
  MOD_RES (20)..(21)..(22)..(23): Xaa is A or G or is absent

SEQ ID NO: 59553 - protein, 38 aa, Artificial Sequence; identical to SEQ ID NO: 56755
  GFR-binding peptide
  MOD_RES (1)..(3)..(36)..(37): Xaa is C or S
  MOD_RES (14)..(15)..(16)..(17)..(18): Xaa is A or G
  MOD_RES (19)..(20)..(21)..(22): Xaa is A or G or is absent

SEQ ID NO: 59554 - protein, 35 aa, Artificial Sequence; identical to SEQ ID NO: 3787
  GFR-binding peptide
  MOD_RES (1)..(3)..(35): Xaa is C or S

SEQ ID NO: 59555 - protein, 40 aa, Artificial Sequence; identical to SEQ ID NO: 11215
  GFR-binding peptide
  MOD_RES (1)..(35)..(36): Xaa is C or S
  MOD_RES (13)..(14)..(15)..(16)..(17): Xaa is A or G
  MOD_RES (18)..(19)..(20)..(21): Xaa is A or G or is absent

SEQ ID NO: 59556 - protein, 41 aa, Artificial Sequence; identical to SEQ ID NO: 31798
  GFR-binding peptide
  MOD_RES (2)..(4)..(36): Xaa is C or S

SEQ ID NO: 59557 - protein, 33 aa, Artificial Sequence; identical to SEQ ID NO: 24819
  GFR-binding peptide
  MOD_RES (33)..(33): Xaa is C or S
  MOD_RES (11)..(12)..(13)..(14)..(15): Xaa is A or G
  MOD_RES (16)..(17)..(18)..(19): Xaa is A or G or is absent

SEQ ID NO: 59558 - protein, 33 aa, Artificial Sequence
  GFR-binding peptide
  MOD_RES (33)..(33): Xaa is C or S
  MOD_RES (11)..(12)..(13)..(14)..(15): Xaa is A or G
  MOD_RES (16)..(17)..(18)..(19): Xaa is A or G or is absent
EVTMNRYKKLXXXXXXXXXFYLISIANMKEPVX

SEQ ID NO: 59559 - protein, 37 aa, Artificial Sequence; identical to SEQ ID NO: 3791
  GFR-binding peptide
  MOD_RES (1)..(3)..(35)..(36): Xaa is C or S

SEQ ID NO: 59560 - protein, 33 aa, Artificial Sequence
  GFR-binding peptide
  MOD_RES (32)..(33): Xaa is C or S
RDVVMGYHYKLIIQQKDNKYLMSIPSMKTPTXX

SEQ ID NO: 59561 - protein, 38 aa, Artificial Sequence; identical to SEQ ID NO: 3793
  GFR-binding peptide
  MOD_RES (33)..(34): Xaa is C or S
  MOD_RES (11)..(12)..(13)..(14)..(15): Xaa is A or G
  MOD_RES (16)..(17)..(18)..(19): Xaa is A or G or is absent

SEQ ID NO: 59562 - protein, 37 aa, Artificial Sequence; identical to SEQ ID NO: 24822
  GFR-binding peptide
  MOD_RES (1)..(3)..(35)..(36): Xaa is C or S

SEQ ID NO: 59563 - protein, 38 aa, Artificial Sequence
  GFR-binding peptide
  MOD_RES (2)..(4)..(38): Xaa is C or S
  MOD_RES (16)..(17)..(18)..(19)..(20): Xaa is A or G
  MOD_RES (21)..(22)..(23)..(24): Xaa is A or G or is absent
RXGXSEVVMDEYKFKXXXXXXXXXLYLISIPELRTPVX

SEQ ID NO: 59564 - protein, 43 aa, Artificial Sequence; identical to SEQ ID NO: 3796
  GFR-binding peptide
  MOD_RES (1)..(3)..(37)..(38): Xaa is C or S
  MOD_RES (15)..(16)..(17)..(18)..(19): Xaa is A or G
  MOD_RES (20)..(21)..(22)..(23): Xaa is A or G or is absent

SEQ ID NO: 59565 - protein, 32 aa, Artificial Sequence; identical to SEQ ID NO: 31805
  GFR-binding peptide
  MOD_RES (1)..(1): Xaa is C or S

SEQ ID NO: 59566 - protein, 37 aa, Artificial Sequence; identical to SEQ ID NO: 11220
  GFR-binding peptide
  MOD_RES (33)..(34): Xaa is C or S
  MOD_RES (11)..(12)..(13)..(14)..(15): Xaa is A or G
  MOD_RES (16)..(17)..(18)..(19): Xaa is A or G or is absent

SEQ ID NO: 59567 - protein, 34 aa, Artificial Sequence
  GFR-binding peptide
  MOD_RES (2)..(34): Xaa is C or S
GXSEVVMDYHYKLVVNNASDKYLISIPSLRTPVX

SEQ ID NO: 59568 - protein, 38 aa, Artificial Sequence; identical to SEQ ID NO: 31808
  GFR-binding peptide
  MOD_RES (33)..(34): Xaa is C or S
  MOD_RES (11)..(12)..(13)..(14)..(15): Xaa is A or G
  MOD_RES (16)..(17)..(18)..(19): Xaa is A or G or is absent

SEQ ID NO: 59569 - protein, 39 aa, Artificial Sequence
  GFR-binding peptide
  MOD_RES (34)..(35): Xaa is C or S
  MOD_RES (12)..(13)..(14)..(15)..(16): Xaa is A or G
  MOD_RES (17)..(18)..(19)..(20): Xaa is A or G or is absent
RDVVMGEYKFKXXXXXXXXXLYLMSIPEMKTPTXXPGAS

SEQ ID NO: 59570 - protein, 40 aa, Artificial Sequence; identical to SEQ ID NO: 3798
  GFR-binding peptide
  MOD_RES (2)..(4)..(35)..(36): Xaa is C or S

SEQ ID NO: 59571 - protein, 35 aa, Artificial Sequence
  GFR-binding peptide
  MOD_RES (1)..(34)..(35): Xaa is C or S
  MOD_RES (12)..(13)..(14)..(15)..(16): Xaa is A or G
  MOD_RES (17)..(18)..(19)..(20): Xaa is A or G or is absent
XSKVVMPIKGYXXXXXXXXXFYLINIPSLDQPVXX

SEQ ID NO: 59572 - protein, 37 aa, Artificial Sequence
  GFR-binding peptide
  MOD_RES (2)..(4)..(36)..(37): Xaa is C or S
RXGXSEVVMDYHYKLVVNNASDKYLISIPSLRTPVXX

SEQ ID NO: 59573 - protein, 33 aa, Artificial Sequence; identical to SEQ ID NO: 3799
  GFR-binding peptide
  MOD_RES (33)..(33): Xaa is C or S
  MOD_RES (11)..(12)..(13)..(14)..(15): Xaa is A or G
  MOD_RES (16)..(17)..(18)..(19): Xaa is A or G or is absent

SEQ ID NO: 59574 - protein, 36 aa, Artificial Sequence
  GFR-binding peptide
  MOD_RES (1)..(33)..(34): Xaa is C or S
XESVAMGRHKRLYTVVGKDYYLISTASLKTPVXXAK

SEQ ID NO: 59575 - protein, 34 aa, Artificial Sequence; identical to SEQ ID NO: 3800
  GFR-binding peptide
  MOD_RES (33)..(33): Xaa is C or S
  MOD_RES (11)..(12)..(13)..(14)..(15): Xaa is A or G
  MOD_RES (16)..(17)..(18)..(19): Xaa is A or G or is absent

SEQ ID NO: 59576 - protein, 35 aa, Artificial Sequence; identical to SEQ ID NO: 3802
  GFR-binding peptide
  MOD_RES (2)..(4): Xaa is C or S

SEQ ID NO: 59577 - protein, 43 aa, Artificial Sequence
  GFR-binding peptide
  MOD_RES (2)..(4)..(37)..(38): Xaa is C or S
  MOD_RES (15)..(16)..(17)..(18)..(19): Xaa is A or G
  MOD_RES (20)..(21)..(22)..(23): Xaa is A or G or is absent
SXKXSKVIMPIKGYXXXXXXXXXFYLINIPSLDQSVXXPSASA

SEQ ID NO: 59578 - protein, 39 aa, Artificial Sequence; identical to SEQ ID NO: 24832
  GFR-binding peptide
  MOD_RES (2)..(36)..(37): Xaa is C or S
  MOD_RES (14)..(15)..(16)..(17)..(18): Xaa is A or G
  MOD_RES (19)..(20)..(21)..(22): Xaa is A or G or is absent

SEQ ID NO: 59579 - protein, 38 aa, Artificial Sequence; identical to SEQ ID NO: 24833
  GFR-binding peptide
  MOD_RES (2)..(34)..(35): Xaa is C or S

SEQ ID NO: 59580 - protein, 36 aa, Artificial Sequence; identical to SEQ ID NO: 24834
  GFR-binding peptide
  MOD_RES (2)..(2): Xaa is C or S
  MOD_RES (15)..(16)..(17)..(18)..(19): Xaa is A or G
  MOD_RES (20)..(21)..(22)..(23): Xaa is A or G or is absent

SEQ ID NO: 59581 - protein, 34 aa, Artificial Sequence; identical to SEQ ID NO: 31815
  GFR-binding peptide
  MOD_RES (32)..(33): Xaa is C or S

SEQ ID NO: 59582 - protein, 38 aa, Artificial Sequence; identical to SEQ ID NO: 31823
  GFR-binding peptide
  MOD_RES (32)..(33): Xaa is C or S

SEQ ID NO: 59583 - protein, 35 aa, Artificial Sequence; identical to SEQ ID NO: 3809
  GFR-binding peptide
  MOD_RES (1)..(34)..(35): Xaa is C or S
  MOD_RES (12)..(13)..(14)..(15)..(16): Xaa is A or G
  MOD_RES (17)..(18)..(19)..(20): Xaa is A or G or is absent

SEQ ID NO: 59584 - protein, 35 aa, Artificial Sequence
  GFR-binding peptide
  MOD_RES (2)..(34)..(35): Xaa is C or S
AXSEVTMNYHYKLVVNKNEDKYLISIPSMKEPVXX

SEQ ID NO: 59585 - protein, 39 aa, Artificial Sequence; identical to SEQ ID NO: 24839
  GFR-binding peptide
  MOD_RES (2)..(36)..(37): Xaa is C or S
  MOD_RES (14)..(15)..(16)..(17)..(18): Xaa is A or G
  MOD_RES (19)..(20)..(21)..(22): Xaa is A or G or is absent

SEQ ID NO: 59586 - protein, 35 aa, Artificial Sequence; identical to SEQ ID NO: 24840
  GFR-binding peptide
  MOD_RES (2)..(35): Xaa is C or S
  MOD_RES (13)..(14)..(15)..(16)..(17): Xaa is A or G
  MOD_RES (18)..(19)..(20)..(21): Xaa is A or G or is absent

SEQ ID NO: 59587 - protein, 38 aa, Artificial Sequence; identical to SEQ ID NO: 3813
  GFR-binding peptide
  MOD_RES (2)..(33)..(34): Xaa is C or S

SEQ ID NO: 59588 - protein, 36 aa, Artificial Sequence; identical to SEQ ID NO: 24841
  GFR-binding peptide
  MOD_RES (1)..(32)..(33): Xaa is C or S

SEQ ID NO: 59589 - protein, 40 aa, Artificial Sequence; identical to SEQ ID NO: 3814
  GFR-binding peptide
  MOD_RES (1)..(3)..(35)..(36): Xaa is C or S

SEQ ID NO: 59590 - protein, 41 aa, Artificial Sequence
  GFR-binding peptide
  MOD_RES (2)..(4)..(35)..(36): Xaa is C or S
SXKXSRVIMPIKGYVKPKRGVFYLINIPSLAQPVXXPAASA

SEQ ID NO: 59591 - protein, 41 aa, Artificial Sequence; identical to SEQ ID NO: 24846
  GFR-binding peptide
  MOD_RES (1)..(3)..(35)..(36): Xaa is C or S

SEQ ID NO: 59592 - protein, 34 aa, Artificial Sequence; identical to SEQ ID NO: 31840
  GFR-binding peptide
  MOD_RES (1)..(3): Xaa is C or S

SEQ ID NO: 59593 - protein, 37 aa, Artificial Sequence; identical to SEQ ID NO: 24847
  GFR-binding peptide
  MOD_RES (31)..(32): Xaa is C or S

SEQ ID NO: 59594 - protein, 39 aa, Artificial Sequence; identical to SEQ ID NO: 24849
  GFR-binding peptide
  MOD_RES (2)..(34)..(35): Xaa is C or S

SEQ ID NO: 59595 - protein, 35 aa, Artificial Sequence; identical to SEQ ID NO: 24854
  GFR-binding peptide
  MOD_RES (2)..(34)..(35): Xaa is C or S

SEQ ID NO: 59596 - protein, 40 aa, Artificial Sequence
  GFR-binding peptide
  MOD_RES (1)..(34)..(35): Xaa is C or S
  MOD_RES (12)..(13)..(14)..(15)..(16): Xaa is A or G
  MOD_RES (17)..(18)..(19)..(20): Xaa is A or G or is absent
XSKVVMPIKGYXXXXXXXXXFYLINIPSLDQPVXXPSASA

SEQ ID NO: 59597 - protein, 38 aa, Artificial Sequence; identical to SEQ ID NO: 3822
  GFR-binding peptide
  MOD_RES (1)..(32)..(33): Xaa is C or S

SEQ ID NO: 59598 - protein, 41 aa, Artificial Sequence; identical to SEQ ID NO: 31847
  GFR-binding peptide
  MOD_RES (1)..(3)..(35)..(36): Xaa is C or S

SEQ ID NO: 59599 - protein, 39 aa, Artificial Sequence
  GFR-binding peptide
  MOD_RES (34)..(35): Xaa is C or S
  MOD_RES (12)..(13)..(14)..(15)..(16): Xaa is A or G
  MOD_RES (17)..(18)..(19)..(20): Xaa is A or G or is absent
SEVVMDRHKRLXXXXXXXXXYYLISTASLRTPVXXTPPT

SEQ ID NO: 59600 - protein, 35 aa, Artificial Sequence; identical to SEQ ID NO: 3825
  GFR-binding peptide
  MOD_RES (31)..(32): Xaa is C or S

SEQ ID NO: 59601 - protein, 36 aa, Artificial Sequence; identical to SEQ ID NO: 56797
  GFR-binding peptide
  MOD_RES (2)..(33)..(34): Xaa is C or S

SEQ ID NO: 59602 - protein, 36 aa, Artificial Sequence
  GFR-binding peptide
  MOD_RES (2)..(36): Xaa is C or S
  MOD_RES (14)..(15)..(16)..(17)..(18): Xaa is A or G
  MOD_RES (19)..(20)..(21)..(22): Xaa is A or G or is absent
AXSEVTMNPIKGYXXXXXXXXXFYLINIPSMKEPVX

SEQ ID NO: 59603 - protein, 43 aa, Artificial Sequence; identical to SEQ ID NO: 24863
  GFR-binding peptide
  MOD_RES (2)..(4)..(38)..(39): Xaa is C or S
  MOD_RES (16)..(17)..(18)..(19)..(20): Xaa is A or G
  MOD_RES (21)..(22)..(23)..(24): Xaa is A or G or is absent

SEQ ID NO: 59604 - protein, 39 aa, Artificial Sequence; identical to SEQ ID NO: 31854
  GFR-binding peptide
  MOD_RES (2)..(34)..(35): Xaa is C or S

SEQ ID NO: 59605 - protein, 37 aa, Artificial Sequence; identical to SEQ ID NO: 31858
  GFR-binding peptide
  MOD_RES (2)..(4)..(36)..(37): Xaa is C or S

SEQ ID NO: 59606 - protein, 37 aa, Artificial Sequence; identical to SEQ ID NO: 24869
  GFR-binding peptide
  MOD_RES (34)..(35): Xaa is C or S
  MOD_RES (12)..(13)..(14)..(15)..(16): Xaa is A or G
  MOD_RES (17)..(18)..(19)..(20): Xaa is A or G or is absent

SEQ ID NO: 59607 - protein, 34 aa, Artificial Sequence; identical to SEQ ID NO: 24870
  GFR-binding peptide
  MOD_RES (33)..(33): Xaa is C or S
  MOD_RES (11)..(12)..(13)..(14)..(15): Xaa is A or G
  MOD_RES (16)..(17)..(18)..(19): Xaa is A or G or is absent

SEQ ID NO: 59608 - protein, 43 aa, Artificial Sequence; identical to SEQ ID NO: 31862
  GFR-binding peptide
  MOD_RES (2)..(4)..(37)..(38): Xaa is C or S
  MOD_RES (15)..(16)..(17)..(18)..(19): Xaa is A or G
  MOD_RES (20)..(21)..(22)..(23): Xaa is A or G or is absent

SEQ ID NO: 59609 - protein, 33 aa, Artificial Sequence
  GFR-binding peptide
  MOD_RES (31)..(32): Xaa is C or S
EVTMNYHYKLVVNKNEDKYLISIPSMKEPVXXP

SEQ ID NO: 59610 - protein, 34 aa, Artificial Sequence; identical to SEQ ID NO: 31863
  GFR-binding peptide
  MOD_RES (1)..(33)..(34): Xaa is C or S

SEQ ID NO: 59611 - protein, 40 aa, Artificial Sequence; identical to SEQ ID NO: 24877
  GFR-binding peptide
  MOD_RES (2)..(36): Xaa is C or S
  MOD_RES (14)..(15)..(16)..(17)..(18): Xaa is A or G
  MOD_RES (19)..(20)..(21)..(22): Xaa is A or G or is absent

SEQ ID NO: 59612 - protein, 41 aa, Artificial Sequence; identical to SEQ ID NO: 31867
  GFR-binding peptide
  MOD_RES (2)..(4)..(38)..(39): Xaa is C or S
  MOD_RES (16)..(17)..(18)..(19)..(20): Xaa is A or G
  MOD_RES (21)..(22)..(23)..(24): Xaa is A or G or is absent

SEQ ID NO: 59613 - protein, 36 aa, Artificial Sequence; identical to SEQ ID NO: 3833
  GFR-binding peptide
  MOD_RES (1)..(35)..(36): Xaa is C or S
  MOD_RES (13)..(14)..(15)..(16)..(17): Xaa is A or G
  MOD_RES (18)..(19)..(20)..(21): Xaa is A or G or is absent

SEQ ID NO: 59614 - protein, 33 aa, Artificial Sequence; identical to SEQ ID NO: 31868
  GFR-binding peptide
  MOD_RES (31)..(32): Xaa is C or S

SEQ ID NO: 59615 - protein, 39 aa, Artificial Sequence; identical to SEQ ID NO: 3834
  GFR-binding peptide
  MOD_RES (33)..(34): Xaa is C or S
  MOD_RES (11)..(12)..(13)..(14)..(15): Xaa is A or G
  MOD_RES (16)..(17)..(18)..(19): Xaa is A or G or is absent

SEQ ID NO: 59616 - protein, 40 aa, Artificial Sequence; identical to SEQ ID NO: 24879
  GFR-binding peptide
  MOD_RES (2)..(4)..(38)..(39): Xaa is C or S
  MOD_RES (16)..(17)..(18)..(19)..(20): Xaa is A or G
  MOD_RES (21)..(22)..(23)..(24): Xaa is A or G or is absent

SEQ ID NO: 59617 - protein, 36 aa, Artificial Sequence; identical to SEQ ID NO: 31869
  GFR-binding peptide
  MOD_RES (2)..(4)..(36): Xaa is C or S

SEQ ID NO: 59618 - protein, 36 aa, Artificial Sequence; identical to SEQ ID NO: 31870
  GFR-binding peptide
  MOD_RES (1)..(3)..(36): Xaa is C or S
  MOD_RES (14)..(15)..(16)..(17)..(18): Xaa is A or G
  MOD_RES (19)..(20)..(21)..(22): Xaa is A or G or is absent

SEQ ID NO: 59619 - protein, 35 aa, Artificial Sequence
  GFR-binding peptide
  MOD_RES (33)..(34): Xaa is C or S
  MOD_RES (11)..(12)..(13)..(14)..(15): Xaa is A or G
  MOD_RES (16)..(17)..(18)..(19): Xaa is A or G or is absent
EVTMNYHYKLXXXXXXXXXKYLISIPSMKEPVXXP

SEQ ID NO: 59620 - protein, 38 aa, Artificial Sequence; identical to SEQ ID NO: 31872
  GFR-binding peptide
  MOD_RES (2)..(4)..(38): Xaa is C or S
  MOD_RES (16)..(17)..(18)..(19)..(20): Xaa is A or G
  MOD_RES (21)..(22)..(23)..(24): Xaa is A or G or is absent

SEQ ID NO: 59621 - protein, 38 aa, Artificial Sequence; identical to SEQ ID NO: 3839
  GFR-binding peptide
  MOD_RES (1)..(33)..(34): Xaa is C or S

SEQ ID NO: 59622 - protein, 37 aa, Artificial Sequence
  GFR-binding peptide
  MOD_RES (2)..(35)..(36): Xaa is C or S
  MOD_RES (13)..(14)..(15)..(16)..(17): Xaa is A or G
  MOD_RES (18)..(19)..(20)..(21): Xaa is A or G or is absent
GXEEVIMEYKFKXXXXXXXXXLYLMSIPETKVPAXXT

SEQ ID NO: 59623 - protein, 35 aa, Artificial Sequence; identical to SEQ ID NO: 3844
  GFR-binding peptide
  MOD_RES (1)..(33): Xaa is C or S

SEQ ID NO: 59624 - protein, 40 aa, Artificial Sequence
  GFR-binding peptide
  MOD_RES (2)..(4)..(36)..(37): Xaa is C or S
RXGXAEVVMDRHKRLVVNNAADYYLISTASLRAPVXXSAP

SEQ ID NO: 59625 - protein, 39 aa, Artificial Sequence; identical to SEQ ID NO: 31887
  GFR-binding peptide
  MOD_RES (1)..(3)..(37)..(38): Xaa is C or S
  MOD_RES (15)..(16)..(17)..(18)..(19): Xaa is A or G
  MOD_RES (20)..(21)..(22)..(23): Xaa is A or G or is absent

SEQ ID NO: 59626 - protein, 36 aa, Artificial Sequence; identical to SEQ ID NO: 3849
  GFR-binding peptide
  MOD_RES (33)..(34): Xaa is C or S
  MOD_RES (11)..(12)..(13)..(14)..(15): Xaa is A or G
  MOD_RES (16)..(17)..(18)..(19): Xaa is A or G or is absent

SEQ ID NO: 59627 - protein, 31 aa, Artificial Sequence; identical to SEQ ID NO: 24908
  GFR-binding peptide

SEQ ID NO: 59628 - protein, 34 aa, Artificial Sequence
  GFR-binding peptide
  MOD_RES (33)..(34): Xaa is C or S
  MOD_RES (11)..(12)..(13)..(14)..(15): Xaa is A or G
  MOD_RES (16)..(17)..(18)..(19): Xaa is A or G or is absent
DVVMGYHYKLXXXXXXXXXKYLMSIPSMKTPTXX

SEQ ID NO: 59629 - protein, 41 aa, Artificial Sequence; identical to SEQ ID NO: 3850
  GFR-binding peptide
  MOD_RES (2)..(36)..(37): Xaa is C or S
  MOD_RES (14)..(15)..(16)..(17)..(18): Xaa is A or G
  MOD_RES (19)..(20)..(21)..(22): Xaa is A or G or is absent

SEQ ID NO: 59630 - protein, 41 aa, Artificial Sequence
  GFR-binding peptide
  MOD_RES (2)..(4)..(38)..(39): Xaa is C or S
  MOD_RES (16)..(17)..(18)..(19)..(20): Xaa is A or G
  MOD_RES (21)..(22)..(23)..(24): Xaa is A or G or is absent
SXGXRDVVMGRHKRLXXXXXXXXXYYLMSTASMKTPTXXPG

SEQ ID NO: 59631 - protein, 37 aa, Artificial Sequence
  GFR-binding peptide
  MOD_RES (1)..(35)..(36): Xaa is C or S
  MOD_RES (13)..(14)..(15)..(16)..(17): Xaa is A or G
  MOD_RES (18)..(19)..(20)..(21): Xaa is A or G or is absent
XSEVTMNRYKKLXXXXXXXXXFYLISIANMKEPVXXP

SEQ ID NO: 59632 - protein, 38 aa, Artificial Sequence; identical to SEQ ID NO: 24915
  GFR-binding peptide
  MOD_RES (2)..(4)..(36)..(37): Xaa is C or S

SEQ ID NO: 59633 - protein, 42 aa, Artificial Sequence; identical to SEQ ID NO: 24916
  GFR-binding peptide
  MOD_RES (2)..(4)..(38)..(39): Xaa is C or S
  MOD_RES (16)..(17)..(18)..(19)..(20): Xaa is A or G
  MOD_RES (21)..(22)..(23)..(24): Xaa is A or G or is absent

SEQ ID NO: 59634 - protein, 38 aa, Artificial Sequence; identical to SEQ ID NO: 31899
  GFR-binding peptide
  MOD_RES (1)..(33)..(34): Xaa is C or S

SEQ ID NO: 59635 - protein, 39 aa, Artificial Sequence
  GFR-binding peptide
  MOD_RES (2)..(4)..(36)..(37): Xaa is C or S
SXGXRDVVMGYHYKLIIQQKDNKYLMSIPSMKTPTXXPG

SEQ ID NO: 59636 - protein, 31 aa, Artificial Sequence; identical to SEQ ID NO: 24919
  GFR-binding peptide
  MOD_RES (1)..(1): Xaa is C or S

SEQ ID NO: 59637 - protein, 37 aa, Artificial Sequence; identical to SEQ ID NO: 3856
  GFR-binding peptide
  MOD_RES (2)..(34)..(35): Xaa is C or S

SEQ ID NO: 59638 - protein, 38 aa, Artificial Sequence; identical to SEQ ID NO: 3857
  GFR-binding peptide
  MOD_RES (2)..(36)..(37): Xaa is C or S
  MOD_RES (14)..(15)..(16)..(17)..(18): Xaa is A or G
  MOD_RES (19)..(20)..(21)..(22): Xaa is A or G or is absent

SEQ ID NO: 59639 - protein, 36 aa, Artificial Sequence
  GFR-binding peptide
  MOD_RES (1)..(3)..(34)..(35): Xaa is C or S
XKXSRVIMPIKGYVKPKRGVFYLINIPSLAQPVXXP

SEQ ID NO: 59640 - protein, 40 aa, Artificial Sequence; identical to SEQ ID NO: 3861
  GFR-binding peptide
  MOD_RES (34)..(35): Xaa is C or S
  MOD_RES (12)..(13)..(14)..(15)..(16): Xaa is A or G
  MOD_RES (17)..(18)..(19)..(20): Xaa is A or G or is absent

SEQ ID NO: 59641 - protein, 37 aa, Artificial Sequence; identical to SEQ ID NO: 24929
  GFR-binding peptide
  MOD_RES (1)..(3)..(37): Xaa is C or S
  MOD_RES (15)..(16)..(17)..(18)..(19): Xaa is A or G
  MOD_RES (20)..(21)..(22)..(23): Xaa is A or G or is absent

SEQ ID NO: 59642 - protein, 36 aa, Artificial Sequence
  GFR-binding peptide
  MOD_RES (34)..(35): Xaa is C or S
  MOD_RES (12)..(13)..(14)..(15)..(16): Xaa is A or G
  MOD_RES (17)..(18)..(19)..(20): Xaa is A or G or is absent
RDVVMGEYKFKXXXXXXXXXLYLMSIPEMKTPTXXP

SEQ ID NO: 59643 - protein, 42 aa, Artificial Sequence; identical to SEQ ID NO: 3866
  GFR-binding peptide
  MOD_RES (2)..(4)..(37)..(38): Xaa is C or S
  MOD_RES (15)..(16)..(17)..(18)..(19): Xaa is A or G
  MOD_RES (20)..(21)..(22)..(23): Xaa is A or G or is absent

SEQ ID NO: 59644 - protein, 40 aa, Artificial Sequence; identical to SEQ ID NO: 24935
  GFR-binding peptide
  MOD_RES (2)..(4)..(38)..(39): Xaa is C or S
  MOD_RES (16)..(17)..(18)..(19)..(20): Xaa is A or G
  MOD_RES (21)..(22)..(23)..(24): Xaa is A or G or is absent

SEQ ID NO: 59645 - protein, 40 aa, Artificial Sequence; identical to SEQ ID NO: 24936
  GFR-binding peptide
  MOD_RES (2)..(4)..(39)..(40): Xaa is C or S
  MOD_RES (17)..(18)..(19)..(20)..(21): Xaa is A or G
  MOD_RES (22)..(23)..(24)..(25): Xaa is A or G or is absent

SEQ ID NO: 59646 - protein, 35 aa, Artificial Sequence
  GFR-binding peptide
  MOD_RES (34)..(35): Xaa is C or S
  MOD_RES (12)..(13)..(14)..(15)..(16): Xaa is A or G
  MOD_RES (17)..(18)..(19)..(20): Xaa is A or G or is absent
RDVVMGEYKFKXXXXXXXXXLYLMSIPEMKTPTXX

SEQ ID NO: 59647 - protein, 33 aa, Artificial Sequence; identical to SEQ ID NO: 3869
  GFR-binding peptide
  MOD_RES (2)..(33): Xaa is C or S

SEQ ID NO: 59648 - protein, 43 aa, Artificial Sequence
  GFR-binding peptide
  MOD_RES (2)..(4)..(37)..(38): Xaa is C or S
  MOD_RES (15)..(16)..(17)..(18)..(19): Xaa is A or G
  MOD_RES (20)..(21)..(22)..(23): Xaa is A or G or is absent
LXGXEEVIMYHYKLXXXXXXXXXKYLMSIPSTKVPAXXTSPVR

SEQ ID NO: 59649 - protein, 39 aa, Artificial Sequence; identical to SEQ ID NO: 3870
  GFR-binding peptide
  MOD_RES (1)..(3)..(35)..(36): Xaa is C or S

SEQ ID NO: 59650 - protein, 41 aa, Artificial Sequence; identical to SEQ ID NO: 3872
  GFR-binding peptide
  MOD_RES (2)..(36)..(37): Xaa is C or S
  MOD_RES (14)..(15)..(16)..(17)..(18): Xaa is A or G
  MOD_RES (19)..(20)..(21)..(22): Xaa is A or G or is absent

SEQ ID NO: 59651 - protein, 37 aa, Artificial Sequence; identical to SEQ ID NO: 3874
  GFR-binding peptide
  MOD_RES (1)..(3)..(36)..(37): Xaa is C or S
  MOD_RES (14)..(15)..(16)..(17)..(18): Xaa is A or G
  MOD_RES (19)..(20)..(21)..(22): Xaa is A or G or is absent

SEQ ID NO: 59652 - protein, 35 aa, Artificial Sequence; identical to SEQ ID NO: 24945
  GFR-binding peptide
  MOD_RES (2)..(4): Xaa is C or S

SEQ ID NO: 59653 - protein, 33 aa, Artificial Sequence; identical to SEQ ID NO: 24946
  GFR-binding peptide
  MOD_RES (2)..(2): Xaa is C or S

SEQ ID NO: 59654 - protein, 36 aa, Artificial Sequence; identical to SEQ ID NO: 31922
  GFR-binding peptide
  MOD_RES (31)..(32): Xaa is C or S

SEQ ID NO: 59655 - protein, 39 aa, Artificial Sequence
  GFR-binding peptide
  MOD_RES (2)..(35)..(36): Xaa is C or S
  MOD_RES (13)..(14)..(15)..(16)..(17): Xaa is A or G
  MOD_RES (18)..(19)..(20)..(21): Xaa is A or G or is absent
GXEEVIMYHYKLXXXXXXXXXKYLMSIPSTKVPAXXTSP

SEQ ID NO: 59656 - protein, 40 aa, Artificial Sequence; identical to SEQ ID NO: 24951
  GFR-binding peptide
  MOD_RES (1)..(3)..(37): Xaa is C or S
  MOD_RES (15)..(16)..(17)..(18)..(19): Xaa is A or G
  MOD_RES (20)..(21)..(22)..(23): Xaa is A or G or is absent

SEQ ID NO: 59657 - protein, 40 aa, Artificial Sequence
  GFR-binding peptide
  MOD_RES (2)..(35)..(36): Xaa is C or S
  MOD_RES (13)..(14)..(15)..(16)..(17): Xaa is A or G
  MOD_RES (18)..(19)..(20)..(21): Xaa is A or G or is absent
GXEEVIMRHKRLXXXXXXXXXYYLMSTASTKVPAXXTSPV

SEQ ID NO: 59658 - protein, 33 aa, Artificial Sequence; identical to SEQ ID NO: 3881
  GFR-binding peptide
  MOD_RES (31)..(32): Xaa is C or S

SEQ ID NO: 59659 - protein, 36 aa, Artificial Sequence; identical to SEQ ID NO: 3882
  GFR-binding peptide
  MOD_RES (31)..(32): Xaa is C or S

SEQ ID NO: 59660 - protein, 40 aa, Artificial Sequence; identical to SEQ ID NO: 3884
  GFR-binding peptide
  MOD_RES (1)..(3)..(37)..(38): Xaa is C or S
  MOD_RES (15)..(16)..(17)..(18)..(19): Xaa is A or G
  MOD_RES (20)..(21)..(22)..(23): Xaa is A or G or is absent

SEQ ID NO: 59661 - protein, 36 aa, Artificial Sequence; identical to SEQ ID NO: 24957
  GFR-binding peptide
  MOD_RES (33)..(34): Xaa is C or S
  MOD_RES (11)..(12)..(13)..(14)..(15): Xaa is A or G
  MOD_RES (16)..(17)..(18)..(19): Xaa is A or G or is absent

SEQ ID NO: 59662 - protein, 35 aa, Artificial Sequence
  GFR-binding peptide
  MOD_RES (1)..(3)..(34)..(35): Xaa is C or S
XGXEEVIMEYKFKLLVRGNDLYLMSIPETKVPAXX

SEQ ID NO: 59663 - protein, 38 aa, Artificial Sequence; identical to SEQ ID NO: 31937
  GFR-binding peptide
  MOD_RES (2)..(34): Xaa is C or S

SEQ ID NO: 59664 - protein, 34 aa, Artificial Sequence; identical to SEQ ID NO: 3889
  GFR-binding peptide
  MOD_RES (1)..(1): Xaa is C or S
  MOD_RES (13)..(14)..(15)..(16)..(17): Xaa is A or G
  MOD_RES (18)..(19)..(20)..(21): Xaa is A or G or is absent

SEQ ID NO: 59665 - protein, 38 aa, Artificial Sequence; identical to SEQ ID NO: 3890
  GFR-binding peptide
  MOD_RES (1)..(35): Xaa is C or S
  MOD_RES (13)..(14)..(15)..(16)..(17): Xaa is A or G
  MOD_RES (18)..(19)..(20)..(21): Xaa is A or G or is absent

SEQ ID NO: 59666 - protein, 37 aa, Artificial Sequence; identical to SEQ ID NO: 3891
  GFR-binding peptide
  MOD_RES (2)..(4)..(35)..(36): Xaa is C or S

SEQ ID NO: 59667 - protein, 39 aa, Artificial Sequence; identical to SEQ ID NO: 24967
  GFR-binding peptide
  MOD_RES (2)..(4)..(35)..(36): Xaa is C or S

SEQ ID NO: 59668 - protein, 42 aa, Artificial Sequence; identical to SEQ ID NO: 3893
  GFR-binding peptide
  MOD_RES (2)..(4)..(39)..(40): Xaa is C or S
  MOD_RES (17)..(18)..(19)..(20)..(21): Xaa is A or G
  MOD_RES (22)..(23)..(24)..(25): Xaa is A or G or is absent

SEQ ID NO: 59669 - protein, 35 aa, Artificial Sequence; identical to SEQ ID NO: 24968
  GFR-binding peptide
  MOD_RES (1)..(33)..(34): Xaa is C or S

SEQ ID NO: 59670 - protein, 42 aa, Artificial Sequence; identical to SEQ ID NO: 31943
  GFR-binding peptide
  MOD_RES (1)..(3)..(37): Xaa is C or S
  MOD_RES (15)..(16)..(17)..(18)..(19): Xaa is A or G
  MOD_RES (20)..(21)..(22)..(23): Xaa is A or G or is absent

SEQ ID NO: 59671 - protein, 37 aa, Artificial Sequence; identical to SEQ ID NO: 24970
  GFR-binding peptide
  MOD_RES (35)..(36): Xaa is C or S
  MOD_RES (13)..(14)..(15)..(16)..(17): Xaa is A or G
  MOD_RES (18)..(19)..(20)..(21): Xaa is A or G or is absent

SEQ ID NO: 59672 - protein, 36 aa, Artificial Sequence; identical to SEQ ID NO: 31945
  GFR-binding peptide
  MOD_RES (2)..(36): Xaa is C or S
  MOD_RES (14)..(15)..(16)..(17)..(18): Xaa is A or G
  MOD_RES (19)..(20)..(21)..(22): Xaa is A or G or is absent

SEQ ID NO: 59673 - protein, 36 aa, Artificial Sequence; identical to SEQ ID NO: 24974
  GFR-binding peptide
  MOD_RES (2)..(36): Xaa is C or S
  MOD_RES (14)..(15)..(16)..(17)..(18): Xaa is A or G
  MOD_RES (19)..(20)..(21)..(22): Xaa is A or G or is absent

SEQ ID NO: 59674 - protein, 34 aa, Artificial Sequence; identical to SEQ ID NO: 31948
  GFR-binding peptide
  MOD_RES (1)..(33)..(34): Xaa is C or S

SEQ ID NO: 59675 - protein, 38 aa, Artificial Sequence; identical to SEQ ID NO: 31953
  GFR-binding peptide
  MOD_RES (1)..(35)..(36): Xaa is C or S
  MOD_RES (13)..(14)..(15)..(16)..(17): Xaa is A or G
  MOD_RES (18)..(19)..(20)..(21): Xaa is A or G or is absent

SEQ ID NO: 59676 - protein, 44 aa, Artificial Sequence; identical to SEQ ID NO: 24978
  GFR-binding peptide
  MOD_RES (2)..(4)..(38): Xaa is C or S
  MOD_RES (16)..(17)..(18)..(19)..(20): Xaa is A or G
  MOD_RES (21)..(22)..(23)..(24): Xaa is A or G or is absent

SEQ ID NO: 59677 - protein, 42 aa, Artificial Sequence; identical to SEQ ID NO: 24979
  GFR-binding peptide
  MOD_RES (1)..(3)..(37)..(38): Xaa is C or S
  MOD_RES (15)..(16)..(17)..(18)..(19): Xaa is A or G
  MOD_RES (20)..(21)..(22)..(23): Xaa is A or G or is absent

SEQ ID NO: 59678 - protein, 36 aa, Artificial Sequence; identical to SEQ ID NO: 3899
  GFR-binding peptide
  MOD_RES (2)..(34)..(35): Xaa is C or S

SEQ ID NO: 59679 - protein, 36 aa, Artificial Sequence; identical to SEQ ID NO: 3902
  GFR-binding peptide
  MOD_RES (1)..(33)..(34): Xaa is C or S

SEQ ID NO: 59680 - protein, 32 aa, Artificial Sequence; identical to SEQ ID NO: 31958
  GFR-binding peptide
  MOD_RES (1)..(1): Xaa is C or S

SEQ ID NO: 59681 - protein, 37 aa, Artificial Sequence
  GFR-binding peptide
  MOD_RES (1)..(3)..(35)..(36): Xaa is C or S
XGXAEVVMDRHKRLVVNNAADYYLISTASLRAPVXXS

SEQ ID NO: 59682 - protein, 39 aa, Artificial Sequence; identical to SEQ ID NO: 31960
  GFR-binding peptide
  MOD_RES (34)..(35): Xaa is C or S
  MOD_RES (12)..(13)..(14)..(15)..(16): Xaa is A or G
  MOD_RES (17)..(18)..(19)..(20): Xaa is A or G or is absent

SEQ ID NO: 59683 - protein, 40 aa, Artificial Sequence; identical to SEQ ID NO: 31963
  GFR-binding peptide
  MOD_RES (1)..(3)..(37)..(38): Xaa is C or S
  MOD_RES (15)..(16)..(17)..(18)..(19): Xaa is A or G
  MOD_RES (20)..(21)..(22)..(23): Xaa is A or G or is absent

SEQ ID NO: 59684 - protein, 33 aa, Artificial Sequence; identical to SEQ ID NO: 31964
  GFR-binding peptide
  MOD_RES (1)..(33): Xaa is C or S

SEQ ID NO: 59685 - protein, 32 aa, Artificial Sequence; identical to SEQ ID NO: 3905
  GFR-binding peptide
  MOD_RES (1)..(1): Xaa is C or S

SEQ ID NO: 59686 - protein, 39 aa, Artificial Sequence; identical to SEQ ID NO: 3906
  GFR-binding peptide
  MOD_RES (1)..(3)..(36)..(37): Xaa is C or S
  MOD_RES (14)..(15)..(16)..(17)..(18): Xaa is A or G
  MOD_RES (19)..(20)..(21)..(22): Xaa is A or G or is absent

SEQ ID NO: 59687 - protein, 35 aa, Artificial Sequence; identical to SEQ ID NO: 3910
  GFR-binding peptide
  MOD_RES (31)..(32): Xaa is C or S

SEQ ID NO: 59688 - protein, 41 aa, Artificial Sequence; identical to SEQ ID NO: 3911
  GFR-binding peptide
  MOD_RES (2)..(35)..(36): Xaa is C or S
  MOD_RES (13)..(14)..(15)..(16)..(17): Xaa is A or G
  MOD_RES (18)..(19)..(20)..(21): Xaa is A or G or is absent

SEQ ID NO: 59689 - protein, 36 aa, Artificial Sequence
  GFR-binding peptide
  MOD_RES (2)..(33)..(34): Xaa is C or S
GXEEVIMYHYKLLLVRGNDKYLMSIPSTKVPAXXTS

SEQ ID NO: 59690 - protein, 41 aa, Artificial Sequence; identical to SEQ ID NO: 3912
  GFR-binding peptide
  MOD_RES (2)..(35)..(36): Xaa is C or S
  MOD_RES (13)..(14)..(15)..(16)..(17): Xaa is A or G
  MOD_RES (18)..(19)..(20)..(21): Xaa is A or G or is absent

SEQ ID NO: 59691 - protein, 33 aa, Artificial Sequence; identical to SEQ ID NO: 3913
  GFR-binding peptide
  MOD_RES (31)..(32): Xaa is C or S

SEQ ID NO: 59692 - protein, 36 aa, Artificial Sequence
  GFR-binding peptide
  MOD_RES (32)..(33): Xaa is C or S
RDVVMGEYKFKIIQQKDNLYLMSIPEMKTPTXXPGA

SEQ ID NO: 59693 - protein, 37 aa, Artificial Sequence
  GFR-binding peptide
  MOD_RES (1)..(33)..(34): Xaa is C or S
XSEVTMNPIKGYVVNKNEDFYLINIPSMKEPVXXPEP

SEQ ID NO: 59694 - protein, 35 aa, Artificial Sequence; identical to SEQ ID NO: 3916
  GFR-binding peptide
  MOD_RES (1)..(34)..(35): Xaa is C or S

SEQ ID NO: 59695 - protein, 37 aa, Artificial Sequence; identical to SEQ ID NO: 3917
  GFR-binding peptide
  MOD_RES (33)..(34): Xaa is C or S
  MOD_RES (11)..(12)..(13)..(14)..(15): Xaa is A or G
  MOD_RES (16)..(17)..(18)..(19): Xaa is A or G or is absent

SEQ ID NO: 59696 - protein, 39 aa, Artificial Sequence; identical to SEQ ID NO: 3918
  GFR-binding peptide
  MOD_RES (33)..(34): Xaa is C or S
  MOD_RES (11)..(12)..(13)..(14)..(15): Xaa is A or G
  MOD_RES (16)..(17)..(18)..(19): Xaa is A or G or is absent

SEQ ID NO: 59697 - protein, 36 aa, Artificial Sequence; identical to SEQ ID NO: 3924
  GFR-binding peptide
  MOD_RES (1)..(35)..(36): Xaa is C or S
  MOD_RES (13)..(14)..(15)..(16)..(17): Xaa is A or G
  MOD_RES (18)..(19)..(20)..(21): Xaa is A or G or is absent

SEQ ID NO: 59698 - protein, 36 aa, Artificial Sequence; identical to SEQ ID NO: 3925
  GFR-binding peptide
  MOD_RES (31)..(32): Xaa is C or S

SEQ ID NO: 59699 - protein, 40 aa, Artificial Sequence; identical to SEQ ID NO: 3926
  GFR-binding peptide
  MOD_RES (2)..(4)..(38)..(39): Xaa is C or S
  MOD_RES (16)..(17)..(18)..(19)..(20): Xaa is A or G
  MOD_RES (21)..(22)..(23)..(24): Xaa is A or G or is absent

SEQ ID NO: 59700 - protein, 32 aa, Artificial Sequence
  GFR-binding peptide
  MOD_RES (31)..(32): Xaa is C or S
SRVIMPIKGYVKPKRGVFYLINIPSLAQPVXX

SEQ ID NO: 59701 - protein, 35 aa, Artificial Sequence; identical to SEQ ID NO: 3930
  GFR-binding peptide
  MOD_RES (1)..(33)..(34): Xaa is C or S

SEQ ID NO: 59702 - protein, 38 aa, Artificial Sequence; identical to SEQ ID NO: 31988
  GFR-binding peptide
  MOD_RES (32)..(33): Xaa is C or S

SEQ ID NO: 59703 - protein, 35 aa, Artificial Sequence; identical to SEQ ID NO: 3931
  GFR-binding peptide
  MOD_RES (33)..(34): Xaa is C or S
  MOD_RES (11)..(12)..(13)..(14)..(15): Xaa is A or G
  MOD_RES (16)..(17)..(18)..(19): Xaa is A or G or is absent

SEQ ID NO: 59704 - protein, 35 aa, Artificial Sequence; identical to SEQ ID NO: 3932
  GFR-binding peptide
  MOD_RES (1)..(33)..(34): Xaa is C or S

SEQ ID NO: 59705 - protein, 35 aa, Artificial Sequence; identical to SEQ ID NO: 3933
  GFR-binding peptide
  MOD_RES (1)..(3)..(34)..(35): Xaa is C or S

SEQ ID NO: 59706 - protein, 34 aa, Artificial Sequence; identical to SEQ ID NO: 31989
  GFR-binding peptide
  MOD_RES (1)..(33)..(34): Xaa is C or S

SEQ ID NO: 59707 - protein, 35 aa, Artificial Sequence; identical to SEQ ID NO: 11350
  GFR-binding peptide
  MOD_RES (32)..(33): Xaa is C or S

SEQ ID NO: 59708 - protein, 34 aa, Artificial Sequence; identical to SEQ ID NO: 3934
  GFR-binding peptide
  MOD_RES (1)..(1): Xaa is C or S
  MOD_RES (13)..(14)..(15)..(16)..(17): Xaa is A or G
  MOD_RES (18)..(19)..(20)..(21): Xaa is A or G or is absent

SEQ ID NO: 59709 - protein, 44 aa, Artificial Sequence; identical to SEQ ID NO: 3935
  GFR-binding peptide
  MOD_RES (2)..(4)..(38): Xaa is C or S
  MOD_RES (16)..(17)..(18)..(19)..(20): Xaa is A or G
  MOD_RES (21)..(22)..(23)..(24): Xaa is A or G or is absent

SEQ ID NO: 59710 - protein, 36 aa, Artificial Sequence; identical to SEQ ID NO: 25019
  GFR-binding peptide
  MOD_RES (1)..(35): Xaa is C or S
  MOD_RES (13)..(14)..(15)..(16)..(17): Xaa is A or G
  MOD_RES (18)..(19)..(20)..(21): Xaa is A or G or is absent

SEQ ID NO: 59711 - protein, 34 aa, Artificial Sequence; identical to SEQ ID NO: 3938
  GFR-binding peptide
  MOD_RES (33)..(34): Xaa is C or S
  MOD_RES (11)..(12)..(13)..(14)..(15): Xaa is A or G
  MOD_RES (16)..(17)..(18)..(19): Xaa is A or G or is absent

SEQ ID NO: 59712 - protein, 39 aa, Artificial Sequence; identical to SEQ ID NO: 25023
  GFR-binding peptide
  MOD_RES (34)..(35): Xaa is C or S
  MOD_RES (12)..(13)..(14)..(15)..(16): Xaa is A or G
  MOD_RES (17)..(18)..(19)..(20): Xaa is A or G or is absent

SEQ ID NO: 59713 - protein, 35 aa, Artificial Sequence; identical to SEQ ID NO: 3943
  GFR-binding peptide
  MOD_RES (1)..(3)..(34)..(35): Xaa is C or S

SEQ ID NO: 59714 - protein, 36 aa, Artificial Sequence
  GFR-binding peptide
  MOD_RES (31)..(32): Xaa is C or S
EVVMDEYKFKVVNNASDLYLISIPELRTPVXXTPPT

SEQ ID NO: 59715 - protein, 35 aa, Artificial Sequence
  GFR-binding peptide
  MOD_RES (2)..(2): Xaa is C or S
  MOD_RES (14)..(15)..(16)..(17)..(18): Xaa is A or G
  MOD_RES (19)..(20)..(21)..(22): Xaa is A or G or is absent
GXRDVVMGYHYKLXXXXXXXXXKYLMSIPSMKTPT

SEQ ID NO: 59716 - protein, 36 aa, Artificial Sequence; identical to SEQ ID NO: 32001
  GFR-binding peptide
  MOD_RES (32)..(33): Xaa is C or S

SEQ ID NO: 59717 - protein, 32 aa, Artificial Sequence; identical to SEQ ID NO: 25027
  GFR-binding peptide
  MOD_RES (32)..(32): Xaa is C or S

SEQ ID NO: 59718 - protein, 35 aa, Artificial Sequence
  GFR-binding peptide
  MOD_RES (33)..(34): Xaa is C or S
  MOD_RES (11)..(12)..(13)..(14)..(15): Xaa is A or G
  MOD_RES (16)..(17)..(18)..(19): Xaa is A or G or is absent
EVTMNEYKFKXXXXXXXXXLYLISIPEMKEPVXXP

SEQ ID NO: 59719 - protein, 36 aa, Artificial Sequence
  GFR-binding peptide
  MOD_RES (2)..(33)..(34): Xaa is C or S
KXSKVVMPIKGYVKPTRGVFYLINIPSLDQPVXXPS

SEQ ID NO: 59720 - protein, 39 aa, Artificial Sequence; identical to SEQ ID NO: 25028
  GFR-binding peptide
  MOD_RES (2)..(36): Xaa is C or S
  MOD_RES (14)..(15)..(16)..(17)..(18): Xaa is A or G
  MOD_RES (19)..(20)..(21)..(22): Xaa is A or G or is absent

SEQ ID NO: 59721 - protein, 39 aa, Artificial Sequence; identical to SEQ ID NO: 25029
  GFR-binding peptide
  MOD_RES (35)..(36): Xaa is C or S
  MOD_RES (13)..(14)..(15)..(16)..(17): Xaa is A or G
  MOD_RES (18)..(19)..(20)..(21): Xaa is A or G or is absent

SEQ ID NO: 59722 - protein, 37 aa, Artificial Sequence; identical to SEQ ID NO: 25030
  GFR-binding peptide
  MOD_RES (31)..(31): Xaa is C or S

SEQ ID NO: 59723 - protein, 34 aa, Artificial Sequence; identical to SEQ ID NO: 3950
  GFR-binding peptide
  MOD_RES (1)..(3): Xaa is C or S

SEQ ID NO: 59724 - protein, 40 aa, Artificial Sequence; identical to SEQ ID NO: 25036
  GFR-binding peptide
  MOD_RES (2)..(34)..(35): Xaa is C or S

SEQ ID NO: 59725 - protein, 35 aa, Artificial Sequence; identical to SEQ ID NO: 32012
  GFR-binding peptide
  MOD_RES (1)..(35): Xaa is C or S
  MOD_RES (13)..(14)..(15)..(16)..(17): Xaa is A or G
  MOD_RES (18)..(19)..(20)..(21): Xaa is A or G or is absent

SEQ ID NO: 59726 - protein, 43 aa, Artificial Sequence; identical to SEQ ID NO: 32015
  GFR-binding peptide
  MOD_RES (1)..(3)..(37)..(38): Xaa is C or S
  MOD_RES (15)..(16)..(17)..(18)..(19): Xaa is A or G
  MOD_RES (20)..(21)..(22)..(23): Xaa is A or G or is absent

SEQ ID NO: 59727 - protein, 39 aa, Artificial Sequence; identical to SEQ ID NO: 3955
  GFR-binding peptide
  MOD_RES (2)..(4)..(36)..(37): Xaa is C or S

SEQ ID NO: 59728 - protein, 42 aa, Artificial Sequence; identical to SEQ ID NO: 32018
  GFR-binding peptide
  MOD_RES (1)..(3)..(37)..(38): Xaa is C or S
  MOD_RES (15)..(16)..(17)..(18)..(19): Xaa is A or G
  MOD_RES (20)..(21)..(22)..(23): Xaa is A or G or is absent

SEQ ID NO: 59729 - protein, 40 aa, Artificial Sequence; identical to SEQ ID NO: 25040
  GFR-binding peptide
  MOD_RES (2)..(4)..(35)..(36): Xaa is C or S

SEQ ID NO: 59730 - protein, 36 aa, Artificial Sequence; identical to SEQ ID NO: 25041
  GFR-binding peptide
  MOD_RES (2)..(4)..(36): Xaa is C or S

SEQ ID NO: 59731 - protein, 36 aa, Artificial Sequence; identical to SEQ ID NO: 3962
  GFR-binding peptide
  MOD_RES (1)..(3): Xaa is C or S
  MOD_RES (15)..(16)..(17)..(18)..(19): Xaa is A or G
  MOD_RES (20)..(21)..(22)..(23): Xaa is A or G or is absent

SEQ ID NO: 59732 - protein, 37 aa, Artificial Sequence; identical to SEQ ID NO: 3963
  GFR-binding peptide
  MOD_RES (2)..(34)..(35): Xaa is C or S

SEQ ID NO: 59733 - protein, 34 aa, Artificial Sequence; identical to SEQ ID NO: 3965
  GFR-binding peptide
  MOD_RES (1)..(34): Xaa is C or S
  MOD_RES (12)..(13)..(14)..(15)..(16): Xaa is A or G
  MOD_RES (17)..(18)..(19)..(20): Xaa is A or G or is absent

SEQ ID NO: 59734 - protein, 35 aa, Artificial Sequence; identical to SEQ ID NO: 3966
  GFR-binding peptide
  MOD_RES (1)..(35): Xaa is C or S
  MOD_RES (13)..(14)..(15)..(16)..(17): Xaa is A or G
  MOD_RES (18)..(19)..(20)..(21): Xaa is A or G or is absent

SEQ ID NO: 59735 - protein, 38 aa, Artificial Sequence; identical to SEQ ID NO: 25048
  GFR-binding peptide
  MOD_RES (34)..(35): Xaa is C or S
  MOD_RES (12)..(13)..(14)..(15)..(16): Xaa is A or G
  MOD_RES (17)..(18)..(19)..(20): Xaa is A or G or is absent

SEQ ID NO: 59736 - protein, 39 aa, Artificial Sequence; identical to SEQ ID NO: 25050
  GFR-binding peptide
  MOD_RES (2)..(4)..(38)..(39): Xaa is C or S
  MOD_RES (16)..(17)..(18)..(19)..(20): Xaa is A or G
  MOD_RES (21)..(22)..(23)..(24): Xaa is A or G or is absent

SEQ ID NO: 59737 - protein, 36 aa, Artificial Sequence; identical to SEQ ID NO: 25051
  GFR-binding peptide
  MOD_RES (31)..(32): Xaa is C or S

SEQ ID NO: 59738 - protein, 34 aa, Artificial Sequence; identical to SEQ ID NO: 3969
  GFR-binding peptide
  MOD_RES (1)..(33)..(34): Xaa is C or S

SEQ ID NO: 59739 - protein, 42 aa, Artificial Sequence; identical to SEQ ID NO: 25053
  GFR-binding peptide
  MOD_RES (1)..(3)..(36)..(37): Xaa is C or S
  MOD_RES (14)..(15)..(16)..(17)..(18): Xaa is A or G
  MOD_RES (19)..(20)..(21)..(22): Xaa is A or G or is absent

SEQ ID NO: 59740 - protein, 41 aa, Artificial Sequence; identical to SEQ ID NO: 11391
  GFR-binding peptide
  MOD_RES (1)..(35)..(36): Xaa is C or S
  MOD_RES (13)..(14)..(15)..(16)..(17): Xaa is A or G
  MOD_RES (18)..(19)..(20)..(21): Xaa is A or G or is absent

SEQ ID NO: 59741 - protein, 39 aa, Artificial Sequence; identical to SEQ ID NO: 32039
  GFR-binding peptide
  MOD_RES (1)..(33)..(34): Xaa is C or S

SEQ ID NO: 59742 - protein, 34 aa, Artificial Sequence; identical to SEQ ID NO: 3976
  GFR-binding peptide
  MOD_RES (31)..(32): Xaa is C or S

SEQ ID NO: 59743 - protein, 41 aa, Artificial Sequence; identical to SEQ ID NO: 3981
  GFR-binding peptide
  MOD_RES (1)..(3)..(37)..(38): Xaa is C or S
  MOD_RES (15)..(16)..(17)..(18)..(19): Xaa is A or G
  MOD_RES (20)..(21)..(22)..(23): Xaa is A or G or is absent

SEQ ID NO: 59744 - protein, 33 aa, Artificial Sequence; identical to SEQ ID NO: 56995
  GFR-binding peptide
  MOD_RES (1)..(1): Xaa is C or S
  MOD_RES (12)..(13)..(14)..(15)..(16): Xaa is A or G
  MOD_RES (17)..(18)..(19)..(20): Xaa is A or G or is absent

SEQ ID NO: 59745 - protein, 38 aa, Artificial Sequence; identical to SEQ ID NO: 32053
  GFR-binding peptide
  MOD_RES (2)..(35)..(36): Xaa is C or S

SEQ ID NO: 59746 - protein, 39 aa, Artificial Sequence; identical to SEQ ID NO: 32055
  GFR-binding peptide
  MOD_RES (33)..(33): Xaa is C or S
  MOD_RES (11)..(12)..(13)..(14)..(15): Xaa is A or G
  MOD_RES (16)..(17)..(18)..(19): Xaa is A or G or is absent

SEQ ID NO: 59747 - protein, 40 aa, Artificial Sequence
  GFR-binding peptide
  MOD_RES (34)..(35): Xaa is C or S
  MOD_RES (12)..(13)..(14)..(15)..(16): Xaa is A or G
  MOD_RES (17)..(18)..(19)..(20): Xaa is A or G or is absent
SRVVMNRHKRLXXXXXXXXXYYLVSTASLKTPAXXPKPVH

SEQ ID NO: 59748 - protein, 36 aa, Artificial Sequence
  GFR-binding peptide
  MOD_RES (1)..(33)..(34): Xaa is C or S
XSEVTMNPIKGYVVNKNEDFYLINIPSMKEPVXXPE

SEQ ID NO: 59749 - protein, 32 aa, Artificial Sequence; identical to SEQ ID NO: 3987
  GFR-binding peptide
  MOD_RES (32)..(32): Xaa is C or S

SEQ ID NO: 59750 - protein, 39 aa, Artificial Sequence; identical to SEQ ID NO: 25069
  GFR-binding peptide
  MOD_RES (34)..(35): Xaa is C or S
  MOD_RES (12)..(13)..(14)..(15)..(16): Xaa is A or G
  MOD_RES (17)..(18)..(19)..(20): Xaa is A or G or is absent

SEQ ID NO: 59751 - protein, 40 aa, Artificial Sequence
  GFR-binding peptide
  MOD_RES (2)..(4)..(36)..(37): Xaa is C or S
SXGXRDVVMGYHYKLIIQQKDNKYLMSIPSMKTPTXXPGA

SEQ ID NO: 59752 - protein, 34 aa, Artificial Sequence; identical to SEQ ID NO: 25072
  GFR-binding peptide
  MOD_RES (2)..(33)..(34): Xaa is C or S

SEQ ID NO: 59753 - protein, 37 aa, Artificial Sequence; identical to SEQ ID NO: 57004
  GFR-binding peptide
  MOD_RES (2)..(4): Xaa is C or S
  MOD_RES (16)..(17)..(18)..(19)..(20): Xaa is A or G
  MOD_RES (21)..(22)..(23)..(24): Xaa is A or G or is absent

SEQ ID NO: 59754 - protein, 37 aa, Artificial Sequence; identical to SEQ ID NO: 3992
  GFR-binding peptide
  MOD_RES (33)..(34): Xaa is C or S
  MOD_RES (11)..(12)..(13)..(14)..(15): Xaa is A or G
  MOD_RES (16)..(17)..(18)..(19): Xaa is A or G or is absent

SEQ ID NO: 59755 - protein, 33 aa, Artificial Sequence; identical to SEQ ID NO: 32069
  GFR-binding peptide
  MOD_RES (1)..(33): Xaa is C or S

SEQ ID NO: 59756 - protein, 42 aa, Artificial Sequence; identical to SEQ ID NO: 25076
  GFR-binding peptide
  MOD_RES (2)..(4)..(36)..(37): Xaa is C or S

SEQ ID NO: 59757 - protein, 37 aa, Artificial Sequence
  GFR-binding peptide
  MOD_RES (1)..(3)..(37): Xaa is C or S
  MOD_RES (15)..(16)..(17)..(18)..(19): Xaa is A or G
  MOD_RES (20)..(21)..(22)..(23): Xaa is A or G or is absent
XAXSEVTMNRYKKLXXXXXXXXXFYLISIANMKEPVX

SEQ ID NO: 59758 - protein, 39 aa, Artificial Sequence; identical to SEQ ID NO: 3994
  GFR-binding peptide
  MOD_RES (2)..(4)..(37)..(38): Xaa is C or S

SEQ ID NO: 59759 - protein, 37 aa, Artificial Sequence
  GFR-binding peptide
  MOD_RES (1)..(3)..(35)..(36): Xaa is C or S
XAXSEVTMNPIKGYVVNKNEDFYLINIPSMKEPVXXP

SEQ ID NO: 59760 - protein, 34 aa, Artificial Sequence
  GFR-binding peptide
  MOD_RES (2)..(2): Xaa is C or S
  MOD_RES (13)..(14)..(15)..(16)..(17): Xaa is A or G
  MOD_RES (18)..(19)..(20)..(21): Xaa is A or G or is absent
KXSRVIMPIKGYXXXXXXXXXFYLINIPSLAQPV

SEQ ID NO: 59761 - protein, 32 aa, Artificial Sequence; identical to SEQ ID NO: 3995
  GFR-binding peptide
  MOD_RES (32)..(32): Xaa is C or S

SEQ ID NO: 59762 - protein, 35 aa, Artificial Sequence; identical to SEQ ID NO: 3996
  GFR-binding peptide
  MOD_RES (34)..(34): Xaa is C or S
  MOD_RES (12)..(13)..(14)..(15)..(16): Xaa is A or G
  MOD_RES (17)..(18)..(19)..(20): Xaa is A or G or is absent

SEQ ID NO: 59763 - protein, 36 aa, Artificial Sequence; identical to SEQ ID NO: 3998
  GFR-binding peptide
  MOD_RES (34)..(35): Xaa is C or S
  MOD_RES (12)..(13)..(14)..(15)..(16): Xaa is A or G
  MOD_RES (17)..(18)..(19)..(20): Xaa is A or G or is absent

SEQ ID NO: 59764 - protein, 35 aa, Artificial Sequence
  GFR-binding peptide
  MOD_RES (2)..(2): Xaa is C or S
  MOD_RES (14)..(15)..(16)..(17)..(18): Xaa is A or G
  MOD_RES (19)..(20)..(21)..(22): Xaa is A or G or is absent
GXESVAMGRHKRLXXXXXXXXXYYLISTASLKTPV

SEQ ID NO: 59765 - protein, 36 aa, Artificial Sequence; identical to SEQ ID NO: 32082
  GFR-binding peptide
  MOD_RES (2)..(4)..(36): Xaa is C or S

SEQ ID NO: 59766 - protein, 37 aa, Artificial Sequence; identical to SEQ ID NO: 4006
  GFR-binding peptide
  MOD_RES (1)..(3)..(34)..(35): Xaa is C or S

SEQ ID NO: 59767 - protein, 39 aa, Artificial Sequence; identical to SEQ ID NO: 25087
  GFR-binding peptide
  MOD_RES (2)..(34)..(35): Xaa is C or S

SEQ ID NO: 59768 - protein, 36 aa, Artificial Sequence; identical to SEQ ID NO: 4009
  GFR-binding peptide
  MOD_RES (1)..(35)..(36): Xaa is C or S
  MOD_RES (13)..(14)..(15)..(16)..(17): Xaa is A or G
  MOD_RES (18)..(19)..(20)..(21): Xaa is A or G or is absent

SEQ ID NO: 59769 - protein, 34 aa, Artificial Sequence; identical to SEQ ID NO: 25089
  GFR-binding peptide
  MOD_RES (31)..(32): Xaa is C or S

SEQ ID NO: 59770 - protein, 41 aa, Artificial Sequence; identical to SEQ ID NO: 4010
  GFR-binding peptide
  MOD_RES (2)..(4)..(39)..(40): Xaa is C or S
  MOD_RES (17)..(18)..(19)..(20)..(21): Xaa is A or G
  MOD_RES (22)..(23)..(24)..(25): Xaa is A or G or is absent

SEQ ID NO: 59771 - protein, 41 aa, Artificial Sequence
  GFR-binding peptide
  MOD_RES (1)..(3)..(35)..(36): Xaa is C or S
XGXAEVVMDRHKRLVVNNAADYYLISTASLRAPVXXSAPAA

SEQ ID NO: 59772 - protein, 36 aa, Artificial Sequence; identical to SEQ ID NO: 4011
  GFR-binding peptide
  MOD_RES (2)..(34)..(35): Xaa is C or S

SEQ ID NO: 59773 - protein, 38 aa, Artificial Sequence; identical to SEQ ID NO: 4012
  GFR-binding peptide
  MOD_RES (2)..(33)..(34): Xaa is C or S

SEQ ID NO: 59774 - protein, 39 aa, Artificial Sequence; identical to SEQ ID NO: 4017
  GFR-binding peptide
  MOD_RES (1)..(35)..(36): Xaa is C or S
  MOD_RES (13)..(14)..(15)..(16)..(17): Xaa is A or G
  MOD_RES (18)..(19)..(20)..(21): Xaa is A or G or is absent

SEQ ID NO: 59775 - protein, 39 aa, Artificial Sequence; identical to SEQ ID NO: 11445
  GFR-binding peptide
  MOD_RES (2)..(4)..(36)..(37): Xaa is C or S

SEQ ID NO: 59776 - protein, 40 aa, Artificial Sequence; identical to SEQ ID NO: 25095
  GFR-binding peptide
  MOD_RES (2)..(4)..(36)..(37): Xaa is C or S

SEQ ID NO: 59777 - protein, 42 aa, Artificial Sequence; identical to SEQ ID NO: 4018
  GFR-binding peptide
  MOD_RES (2)..(4)..(37)..(38): Xaa is C or S
  MOD_RES (15)..(16)..(17)..(18)..(19): Xaa is A or G
  MOD_RES (20)..(21)..(22)..(23): Xaa is A or G or is absent

SEQ ID NO: 59778 - protein, 41 aa, Artificial Sequence; identical to SEQ ID NO: 25096
  GFR-binding peptide
  MOD_RES (1)..(3)..(37)..(38): Xaa is C or S
  MOD_RES (15)..(16)..(17)..(18)..(19): Xaa is A or G
  MOD_RES (20)..(21)..(22)..(23): Xaa is A or G or is absent

SEQ ID NO: 59779 - protein, 37 aa, Artificial Sequence; identical to SEQ ID NO: 4021
  GFR-binding peptide
  MOD_RES (1)..(3)..(34)..(35): Xaa is C or S

SEQ ID NO: 59780 - protein, 35 aa, Artificial Sequence
  GFR-binding peptide
  MOD_RES (2)..(4): Xaa is C or S
RXGXSEVVMDEYKFKVVNNASDLYLISIPELRTPV

SEQ ID NO: 59781 - protein, 38 aa, Artificial Sequence; identical to SEQ ID NO: 32116
  GFR-binding peptide
  MOD_RES (1)..(3)..(35): Xaa is C or S

SEQ ID NO: 59782 - protein, 36 aa, Artificial Sequence; identical to SEQ ID NO: 4030
  GFR-binding peptide
  MOD_RES (1)..(36): Xaa is C or S
  MOD_RES (14)..(15)..(16)..(17)..(18): Xaa is A or G
  MOD_RES (19)..(20)..(21)..(22): Xaa is A or G or is absent

SEQ ID NO: 59783 - protein, 38 aa, Artificial Sequence; identical to SEQ ID NO: 32118
  GFR-binding peptide
  MOD_RES (32)..(33): Xaa is C or S

SEQ ID NO: 59784 - protein, 31 aa, Artificial Sequence; identical to SEQ ID NO: 32121
  GFR-binding peptide
  MOD_RES (31)..(31): Xaa is C or S

SEQ ID NO: 59785 - protein, 38 aa, Artificial Sequence; identical to SEQ ID NO: 32124
  GFR-binding peptide
  MOD_RES (1)..(33)..(34): Xaa is C or S

SEQ ID NO: 59786 - protein, 41 aa, Artificial Sequence; identical to SEQ ID NO: 25108
  GFR-binding peptide
  MOD_RES (2)..(4)..(36)..(37): Xaa is C or S

SEQ ID NO: 59787 - protein, 38 aa, Artificial Sequence; identical to SEQ ID NO: 11464
  GFR-binding peptide
  MOD_RES (2)..(4)..(36)..(37): Xaa is C or S

SEQ ID NO: 59788 - protein, 37 aa, Artificial Sequence
  GFR-binding peptide
  MOD_RES (2)..(4)..(36)..(37): Xaa is C or S
RXAXSEVTMNPIKGYVVNKNEDFYLINIPSMKEPVXX

SEQ ID NO: 59789 - protein, 40 aa, Artificial Sequence; identical to SEQ ID NO: 25110
  GFR-binding peptide
  MOD_RES (1)..(35)..(36): Xaa is C or S
  MOD_RES (13)..(14)..(15)..(16)..(17): Xaa is A or G
  MOD_RES (18)..(19)..(20)..(21): Xaa is A or G or is absent

SEQ ID NO: 59790 - protein, 33 aa, Artificial Sequence; identical to SEQ ID NO: 4034
  GFR-binding peptide
  MOD_RES (1)..(1): Xaa is C or S
  MOD_RES (12)..(13)..(14)..(15)..(16): Xaa is A or G
  MOD_RES (17)..(18)..(19)..(20): Xaa is A or G or is absent

SEQ ID NO: 59791 - protein, 35 aa, Artificial Sequence; identical to SEQ ID NO: 4036
  GFR-binding peptide
  MOD_RES (33)..(34): Xaa is C or S
  MOD_RES (11)..(12)..(13)..(14)..(15): Xaa is A or G
  MOD_RES (16)..(17)..(18)..(19): Xaa is A or G or is absent

SEQ ID NO: 59792 - protein, 31 aa, Artificial Sequence; identical to SEQ ID NO: 32133
  GFR-binding peptide
  MOD_RES (31)..(31): Xaa is C or S

SEQ ID NO: 59793 - protein, 37 aa, Artificial Sequence; identical to SEQ ID NO: 25117
  GFR-binding peptide
  MOD_RES (2)..(4)..(36)..(37): Xaa is C or S

SEQ ID NO: 59794 - protein, 43 aa, Artificial Sequence; identical to SEQ ID NO: 4040
  GFR-binding peptide
  MOD_RES (1)..(3)..(37)..(38): Xaa is C or S
  MOD_RES (15)..(16)..(17)..(18)..(19): Xaa is A or G
  MOD_RES (20)..(21)..(22)..(23): Xaa is A or G or is absent

SEQ ID NO: 59795 - protein, 36 aa, Artificial Sequence; identical to SEQ ID NO: 25118
  GFR-binding peptide
  MOD_RES (2)..(36): Xaa is C or S
  MOD_RES (14)..(15)..(16)..(17)..(18): Xaa is A or G
  MOD_RES (19)..(20)..(21)..(22): Xaa is A or G or is absent

SEQ ID NO: 59796 - protein, 38 aa, Artificial Sequence; identical to SEQ ID NO: 4041
  GFR-binding peptide
  MOD_RES (1)..(34)..(35): Xaa is C or S
  MOD_RES (12)..(13)..(14)..(15)..(16): Xaa is A or G
  MOD_RES (17)..(18)..(19)..(20): Xaa is A or G or is absent

SEQ ID NO: 59797 - protein, 39 aa, Artificial Sequence; identical to SEQ ID NO: 25121
  GFR-binding peptide
  MOD_RES (1)..(3)..(35)..(36): Xaa is C or S

SEQ ID NO: 59798 - protein, 36 aa, Artificial Sequence; identical to SEQ ID NO: 4045
  GFR-binding peptide
  MOD_RES (2)..(2): Xaa is C or S
  MOD_RES (15)..(16)..(17)..(18)..(19): Xaa is A or G
  MOD_RES (20)..(21)..(22)..(23): Xaa is A or G or is absent

SEQ ID NO: 59799 - protein, 37 aa, Artificial Sequence; identical to SEQ ID NO: 4046
  GFR-binding peptide
  MOD_RES (1)..(3)..(36)..(37): Xaa is C or S

SEQ ID NO: 59800 - protein, 36 aa, Artificial Sequence
  GFR-binding peptide
  MOD_RES (34)..(35): Xaa is C or S
  MOD_RES (12)..(13)..(14)..(15)..(16): Xaa is A or G
  MOD_RES (17)..(18)..(19)..(20): Xaa is A or G or is absent
RDVVMGYHYKLXXXXXXXXXKYLMSIPSMKTPTXXP

SEQ ID NO: 59801 - protein, 40 aa, Artificial Sequence; identical to SEQ ID NO: 4050
  GFR-binding peptide
  MOD_RES (2)..(35)..(36): Xaa is C or S
  MOD_RES (13)..(14)..(15)..(16)..(17): Xaa is A or G
  MOD_RES (18)..(19)..(20)..(21): Xaa is A or G or is absent

SEQ ID NO: 59802 - protein, 35 aa, Artificial Sequence; identical to SEQ ID NO: 4052
  GFR-binding peptide
  MOD_RES (34)..(35): Xaa is C or S
  MOD_RES (12)..(13)..(14)..(15)..(16): Xaa is A or G
  MOD_RES (17)..(18)..(19)..(20): Xaa is A or G or is absent

SEQ ID NO: 59803 - protein, 36 aa, Artificial Sequence; identical to SEQ ID NO: 32148
  GFR-binding peptide
  MOD_RES (32)..(33): Xaa is C or S

SEQ ID NO: 59804 - protein, 37 aa, Artificial Sequence; identical to SEQ ID NO: 25126
  GFR-binding peptide
  MOD_RES (2)..(34)..(35): Xaa is C or S

SEQ ID NO: 59805 - protein, 36 aa, Artificial Sequence; identical to SEQ ID NO: 4053
  GFR-binding peptide
  MOD_RES (2)..(36): Xaa is C or S
  MOD_RES (14)..(15)..(16)..(17)..(18): Xaa is A or G
  MOD_RES (19)..(20)..(21)..(22): Xaa is A or G or is absent

SEQ ID NO: 59806 - protein, 39 aa, Artificial Sequence; identical to SEQ ID NO: 4054
  GFR-binding peptide
  MOD_RES (33)..(34): Xaa is C or S
  MOD_RES (11)..(12)..(13)..(14)..(15): Xaa is A or G
  MOD_RES (16)..(17)..(18)..(19): Xaa is A or G or is absent

SEQ ID NO: 59807 - protein, 37 aa, Artificial Sequence; identical to SEQ ID NO: 25130
  GFR-binding peptide
  MOD_RES (2)..(35)..(36): Xaa is C or S
  MOD_RES (13)..(14)..(15)..(16)..(17): Xaa is A or G
  MOD_RES (18)..(19)..(20)..(21): Xaa is A or G or is absent

SEQ ID NO: 59808 - protein, 38 aa, Artificial Sequence; identical to SEQ ID NO: 4058
  GFR-binding peptide
  MOD_RES (2)..(4)..(36)..(37): Xaa is C or S

SEQ ID NO: 59809 - protein, 37 aa, Artificial Sequence
  GFR-binding peptide
  MOD_RES (1)..(33)..(34): Xaa is C or S
XRDVVMGRHKRLIIQQKDNYYLMSTASMKTPTXXPGA

SEQ ID NO: 59810 - protein, 34 aa, Artificial Sequence; identical to SEQ ID NO: 4061
  GFR-binding peptide
  MOD_RES (31)..(31): Xaa is C or S

SEQ ID NO: 59811 - protein, 40 aa, Artificial Sequence; identical to SEQ ID NO: 4062
  GFR-binding peptide
  MOD_RES (1)..(3)..(37)..(38): Xaa is C or S
  MOD_RES (15)..(16)..(17)..(18)..(19): Xaa is A or G
  MOD_RES (20)..(21)..(22)..(23): Xaa is A or G or is absent

SEQ ID NO: 59812 - protein, 37 aa, Artificial Sequence
  GFR-binding peptide
  MOD_RES (1)..(35)..(36): Xaa is C or S
  MOD_RES (13)..(14)..(15)..(16)..(17): Xaa is A or G
  MOD_RES (18)..(19)..(20)..(21): Xaa is A or G or is absent
XRDVVMGRHKRLXXXXXXXXXYYLMSTASMKTPTXXP

SEQ ID NO: 59813 - protein, 36 aa, Artificial Sequence; identical to SEQ ID NO: 25135
  GFR-binding peptide
  MOD_RES (34)..(35): Xaa is C or S
  MOD_RES (12)..(13)..(14)..(15)..(16): Xaa is A or G
  MOD_RES (17)..(18)..(19)..(20): Xaa is A or G or is absent

SEQ ID NO: 59814 - protein, 37 aa, Artificial Sequence; identical to SEQ ID NO: 25136
  GFR-binding peptide
  MOD_RES (31)..(32): Xaa is C or S

SEQ ID NO: 59815 - protein, 32 aa, Artificial Sequence; identical to SEQ ID NO: 4064
  GFR-binding peptide
  MOD_RES (2)..(2): Xaa is C or S

SEQ ID NO: 59816 - protein, 40 aa, Artificial Sequence
  GFR-binding peptide
  MOD_RES (2)..(4)..(37)..(38): Xaa is C or S
  MOD_RES (15)..(16)..(17)..(18)..(19): Xaa is A or G
  MOD_RES (20)..(21)..(22)..(23): Xaa is A or G or is absent
SXKXSKVIMPIKGYXXXXXXXXXFYLINIPSLDQSVXXPS

SEQ ID NO: 59817 - protein, 35 aa, Artificial Sequence; identical to SEQ ID NO: 4066
  GFR-binding peptide
  MOD_RES (1)..(32)..(33): Xaa is C or S

SEQ ID NO: 59818 - protein, 35 aa, Artificial Sequence
  GFR-binding peptide
  MOD_RES (1)..(33)..(34): Xaa is C or S
XRDVVMGYHYKLIIQQKDNKYLMSIPSMKTPTXXP

SEQ ID NO: 59819 - protein, 35 aa, Artificial Sequence; identical to SEQ ID NO: 25142
  GFR-binding peptide
  MOD_RES (33)..(34): Xaa is C or S
  MOD_RES (11)..(12)..(13)..(14)..(15): Xaa is A or G
  MOD_RES (16)..(17)..(18)..(19): Xaa is A or G or is absent

SEQ ID NO: 59820 - protein, 34 aa, Artificial Sequence; identical to SEQ ID NO: 4068
  GFR-binding peptide
  MOD_RES (34)..(34): Xaa is C or S
  MOD_RES (12)..(13)..(14)..(15)..(16): Xaa is A or G
  MOD_RES (17)..(18)..(19)..(20): Xaa is A or G or is absent

SEQ ID NO: 59821 - protein, 35 aa, Artificial Sequence; identical to SEQ ID NO: 57094
  GFR-binding peptide
  MOD_RES (1)..(32)..(33): Xaa is C or S

SEQ ID NO: 59822 - protein, 36 aa, Artificial Sequence
  GFR-binding peptide
  MOD_RES (32)..(33): Xaa is C or S
RDVVMGRHKRLIIQQKDNYYLMSTASMKTPTXXPGA

SEQ ID NO: 59823 - protein, 37 aa, Artificial Sequence; identical to SEQ ID NO: 25147
  GFR-binding peptide
  MOD_RES (2)..(4): Xaa is C or S
  MOD_RES (16)..(17)..(18)..(19)..(20): Xaa is A or G
  MOD_RES (21)..(22)..(23)..(24): Xaa is A or G or is absent

SEQ ID NO: 59824 - protein, 32 aa, Artificial Sequence; identical to SEQ ID NO: 25148
  GFR-binding peptide
  MOD_RES (1)..(32): Xaa is C or S

SEQ ID NO: 59825 - protein, 37 aa, Artificial Sequence; identical to SEQ ID NO: 4077
  GFR-binding peptide
  MOD_RES (1)..(32)..(33): Xaa is C or S

SEQ ID NO: 59826 - protein, 38 aa, Artificial Sequence; identical to SEQ ID NO: 25150
  GFR-binding peptide
  MOD_RES (32)..(33): Xaa is C or S

SEQ ID NO: 59827 - protein, 41 aa, Artificial Sequence
  GFR-binding peptide
  MOD_RES (1)..(3)..(35)..(36): Xaa is C or S
XGXSEVVMDRHKRLVVNNASDYYLISTASLRTPVXXTPPTS

SEQ ID NO: 59828 - protein, 42 aa, Artificial Sequence
  GFR-binding peptide
  MOD_RES (2)..(36)..(37): Xaa is C or S
  MOD_RES (14)..(15)..(16)..(17)..(18): Xaa is A or G
  MOD_RES (19)..(20)..(21)..(22): Xaa is A or G or is absent
AXSEVTMNYHYKLXXXXXXXXXKYLISIPSMKEPVXXPEPIG

SEQ ID NO: 59829 - protein, 33 aa, Artificial Sequence; identical to SEQ ID NO: 25152
  GFR-binding peptide
  MOD_RES (2)..(2): Xaa is C or S

SEQ ID NO: 59830 - protein, 36 aa, Artificial Sequence; identical to SEQ ID NO: 25156
  GFR-binding peptide
  MOD_RES (33)..(34): Xaa is C or S
  MOD_RES (11)..(12)..(13)..(14)..(15): Xaa is A or G
  MOD_RES (16)..(17)..(18)..(19): Xaa is A or G or is absent

SEQ ID NO: 59831 - protein, 39 aa, Artificial Sequence; identical to SEQ ID NO: 4079
  GFR-binding peptide
  MOD_RES (2)..(4)..(38)..(39): Xaa is C or S
  MOD_RES (16)..(17)..(18)..(19)..(20): Xaa is A or G
  MOD_RES (21)..(22)..(23)..(24): Xaa is A or G or is absent

SEQ ID NO: 59832 - protein, 32 aa, Artificial Sequence
  GFR-binding peptide
  MOD_RES (11)..(12)..(13)..(14)..(15): Xaa is A or G
  MOD_RES (16)..(17)..(18)..(19): Xaa is A or G or is absent
EVVMDRHKRLXXXXXXXXXYYLISTASLRAPV

SEQ ID NO: 59833 - protein, 36 aa, Artificial Sequence; identical to SEQ ID NO: 4086
  GFR-binding peptide
  MOD_RES (1)..(3): Xaa is C or S
  MOD_RES (15)..(16)..(17)..(18)..(19): Xaa is A or G
  MOD_RES (20)..(21)..(22)..(23): Xaa is A or G or is absent

SEQ ID NO: 59834 - protein, 36 aa, Artificial Sequence; identical to SEQ ID NO: 4090
  GFR-binding peptide
  MOD_RES (33)..(34): Xaa is C or S
  MOD_RES (11)..(12)..(13)..(14)..(15): Xaa is A or G
  MOD_RES (16)..(17)..(18)..(19): Xaa is A or G or is absent

SEQ ID NO: 59835 - protein, 35 aa, Artificial Sequence; identical to SEQ ID NO: 4092
  GFR-binding peptide
  MOD_RES (32)..(32): Xaa is C or S

SEQ ID NO: 59836 - protein, 34 aa, Artificial Sequence; identical to SEQ ID NO: 4100
  GFR-binding peptide
  MOD_RES (1)..(34): Xaa is C or S
  MOD_RES (12)..(13)..(14)..(15)..(16): Xaa is A or G
  MOD_RES (17)..(18)..(19)..(20): Xaa is A or G or is absent

SEQ ID NO: 59837 - protein, 38 aa, Artificial Sequence; identical to SEQ ID NO: 4105
  GFR-binding peptide
  MOD_RES (2)..(35)..(36): Xaa is C or S

SEQ ID NO: 59838 - protein, 32 aa, Artificial Sequence
  GFR-binding peptide
  MOD_RES (1)..(1): Xaa is C or S
XSEVTMNEYKFKVVNKNEDLYLISIPEMKEPV

SEQ ID NO: 59839 - protein, 37 aa, Artificial Sequence; identical to SEQ ID NO: 4115
  GFR-binding peptide
  MOD_RES (1)..(33)..(34): Xaa is C or S

SEQ ID NO: 59840 - protein, 36 aa, Artificial Sequence
  GFR-binding peptide
  MOD_RES (1)..(3)..(35)..(36): Xaa is C or S
XGXSEVVMDEYKFKVVNNASDLYLISIPELRTPVXX

SEQ ID NO: 59841 - protein, 41 aa, Artificial Sequence; identical to SEQ ID NO: 32190
  GFR-binding peptide
  MOD_RES (2)..(36)..(37): Xaa is C or S
  MOD_RES (14)..(15)..(16)..(17)..(18): Xaa is A or G
  MOD_RES (19)..(20)..(21)..(22): Xaa is A or G or is absent

SEQ ID NO: 59842 - protein, 39 aa, Artificial Sequence
  GFR-binding peptide
  MOD_RES (1)..(35)..(36): Xaa is C or S
  MOD_RES (13)..(14)..(15)..(16)..(17): Xaa is A or G
  MOD_RES (18)..(19)..(20)..(21): Xaa is A or G or is absent
XAEVVMDRHKRLXXXXXXXXXYYLISTASLRAPVXXSAP

SEQ ID NO: 59843 - protein, 31 aa, Artificial Sequence; identical to SEQ ID NO: 32192
  GFR-binding peptide
  MOD_RES (31)..(31): Xaa is C or S

SEQ ID NO: 59844 - protein, 36 aa, Artificial Sequence; identical to SEQ ID NO: 4120
  GFR-binding peptide
  MOD_RES (1)..(33)..(34): Xaa is C or S

SEQ ID NO: 59845 - protein, 34 aa, Artificial Sequence; identical to SEQ ID NO: 32200
  GFR-binding peptide
  MOD_RES (1)..(1): Xaa is C or S
  MOD_RES (13)..(14)..(15)..(16)..(17): Xaa is A or G
  MOD_RES (18)..(19)..(20)..(21): Xaa is A or G or is absent

SEQ ID NO: 59846 - protein, 37 aa, Artificial Sequence; identical to SEQ ID NO: 4124
  GFR-binding peptide
  MOD_RES (2)..(4)..(36)..(37): Xaa is C or S

SEQ ID NO: 59847 - protein, 42 aa, Artificial Sequence
  GFR-binding peptide
  MOD_RES (1)..(3)..(37)..(38): Xaa is C or S
  MOD_RES (15)..(16)..(17)..(18)..(19): Xaa is A or G
  MOD_RES (20)..(21)..(22)..(23): Xaa is A or G or is absent
XAXSEVTMNYHYKLXXXXXXXXXKYLISIPSMKEPVXXPEPI

SEQ ID NO: 59848 - protein, 40 aa, Artificial Sequence
  GFR-binding peptide
  MOD_RES (1)..(3)..(37)..(38): Xaa is C or S
  MOD_RES (15)..(16)..(17)..(18)..(19): Xaa is A or G
  MOD_RES (20)..(21)..(22)..(23): Xaa is A or G or is absent
XGXSEVVMDRHKRLXXXXXXXXXYYLISTASLRTPVXXTP

SEQ ID NO: 59849 - protein, 37 aa, Artificial Sequence
  GFR-binding peptide
  MOD_RES (31)..(32): Xaa is C or S
EVTMNRYKKLVVNKNEDFYLISIANMKEPVXXPEPIG

SEQ ID NO: 59850 - protein, 37 aa, Artificial Sequence; identical to SEQ ID NO: 4136
  GFR-binding peptide
  MOD_RES (2)..(36)..(37): Xaa is C or S
  MOD_RES (14)..(15)..(16)..(17)..(18): Xaa is A or G
  MOD_RES (19)..(20)..(21)..(22): Xaa is A or G or is absent

SEQ ID NO: 59851 - protein, 38 aa, Artificial Sequence; identical to SEQ ID NO: 4137
  GFR-binding peptide
  MOD_RES (2)..(34)..(35): Xaa is C or S

SEQ ID NO: 59852 - protein, 36 aa, Artificial Sequence
  GFR-binding peptide
  MOD_RES (1)..(3): Xaa is C or S
  MOD_RES (15)..(16)..(17)..(18)..(19): Xaa is A or G
  MOD_RES (20)..(21)..(22)..(23): Xaa is A or G or is absent
XGXSEVVMDEYKFKXXXXXXXXXLYLISIPELRTPV

SEQ ID NO: 59853 - protein, 39 aa, Artificial Sequence; identical to SEQ ID NO: 4139
  GFR-binding peptide
  MOD_RES (2)..(34)..(35): Xaa is C or S

SEQ ID NO: 59854 - protein, 43 aa, Artificial Sequence; identical to SEQ ID NO: 4141
  GFR-binding peptide
  MOD_RES (2)..(4)..(38)..(39): Xaa is C or S
  MOD_RES (16)..(17)..(18)..(19)..(20): Xaa is A or G
  MOD_RES (21)..(22)..(23)..(24): Xaa is A or G or is absent

SEQ ID NO: 59855 - protein, 35 aa, Artificial Sequence
  GFR-binding peptide
  MOD_RES (1)..(3)..(34)..(35): Xaa is C or S
XKXSKVIMPIKGYIKPTKGIFYLINIPSLDQSVXX

SEQ ID NO: 59856 - protein, 37 aa, Artificial Sequence; identical to SEQ ID NO: 25197
  GFR-binding peptide
  MOD_RES (31)..(32): Xaa is C or S

SEQ ID NO: 59857 - protein, 39 aa, Artificial Sequence
  GFR-binding peptide
  MOD_RES (2)..(4)..(35)..(36): Xaa is C or S
SXKXSKVIMPIKGYIKPTKGIFYLINIPSLDQSVXXPSA

SEQ ID NO: 59858 - protein, 36 aa, Artificial Sequence; identical to SEQ ID NO: 4143
  GFR-binding peptide
  MOD_RES (2)..(35)..(36): Xaa is C or S
  MOD_RES (13)..(14)..(15)..(16)..(17): Xaa is A or G
  MOD_RES (18)..(19)..(20)..(21): Xaa is A or G or is absent

SEQ ID NO: 59859 - protein, 35 aa, Artificial Sequence; identical to SEQ ID NO: 25198
  GFR-binding peptide
  MOD_RES (2)..(2): Xaa is C or S
  MOD_RES (14)..(15)..(16)..(17)..(18): Xaa is A or G
  MOD_RES (19)..(20)..(21)..(22): Xaa is A or G or is absent

SEQ ID NO: 59860 - protein, 35 aa, Artificial Sequence; identical to SEQ ID NO: 4145
  GFR-binding peptide
  MOD_RES (1)..(32)..(33): Xaa is C or S

SEQ ID NO: 59861 - protein, 34 aa, Artificial Sequence
  GFR-binding peptide
  MOD_RES (33)..(34): Xaa is C or S
  MOD_RES (11)..(12)..(13)..(14)..(15): Xaa is A or G
  MOD_RES (16)..(17)..(18)..(19): Xaa is A or G or is absent
EEVIMYHYKLXXXXXXXXXKYLMSIPSTKVPAXX

SEQ ID NO: 59862 - protein, 35 aa, Artificial Sequence; identical to SEQ ID NO: 25202
  GFR-binding peptide
  MOD_RES (1)..(3)..(35): Xaa is C or S

SEQ ID NO: 59863 - protein, 32 aa, Artificial Sequence
  GFR-binding peptide
  MOD_RES (11)..(12)..(13)..(14)..(15): Xaa is A or G
  MOD_RES (16)..(17)..(18)..(19): Xaa is A or G or is absent
EVTMNRYKKLXXXXXXXXXFYLISIANMKEPV

SEQ ID NO: 59864 - protein, 38 aa, Artificial Sequence
  GFR-binding peptide
  MOD_RES (2)..(36)..(37): Xaa is C or S
  MOD_RES (14)..(15)..(16)..(17)..(18): Xaa is A or G
  MOD_RES (19)..(20)..(21)..(22): Xaa is A or G or is absent
AXSEVTMNRYKKLXXXXXXXXXFYLISIANMKEPVXXP

SEQ ID NO: 59865 - protein, 44 aa, Artificial Sequence; identical to SEQ ID NO: 25203
  GFR-binding peptide
  MOD_RES (2)..(4)..(38)..(39): Xaa is C or S
  MOD_RES (16)..(17)..(18)..(19)..(20): Xaa is A or G
  MOD_RES (21)..(22)..(23)..(24): Xaa is A or G or is absent

SEQ ID NO: 59866 - protein, 39 aa, Artificial Sequence
  GFR-binding peptide
  MOD_RES (33)..(34): Xaa is C or S
  MOD_RES (11)..(12)..(13)..(14)..(15): Xaa is A or G
  MOD_RES (16)..(17)..(18)..(19): Xaa is A or G or is absent
EVTMNRHKRLXXXXXXXXXYYLISTASMKEPVXXPEPIG

SEQ ID NO: 59867 - protein, 38 aa, Artificial Sequence; identical to SEQ ID NO: 25205
  GFR-binding peptide
  MOD_RES (2)..(4)..(38): Xaa is C or S
  MOD_RES (16)..(17)..(18)..(19)..(20): Xaa is A or G
  MOD_RES (21)..(22)..(23)..(24): Xaa is A or G or is absent

SEQ ID NO: 59868 - protein, 34 aa, Artificial Sequence; identical to SEQ ID NO: 25206
  GFR-binding peptide
  MOD_RES (1)..(3)..(34): Xaa is C or S

SEQ ID NO: 59869 - protein, 40 aa, Artificial Sequence; identical to SEQ ID NO: 4150
  GFR-binding peptide
  MOD_RES (1)..(34)..(35): Xaa is C or S
  MOD_RES (12)..(13)..(14)..(15)..(16): Xaa is A or G
  MOD_RES (17)..(18)..(19)..(20): Xaa is A or G or is absent

SEQ ID NO: 59870 - protein, 35 aa, Artificial Sequence; identical to SEQ ID NO: 4151
  GFR-binding peptide
  MOD_RES (1)..(3)..(35): Xaa is C or S

SEQ ID NO: 59871 - protein, 32 aa, Artificial Sequence; identical to SEQ ID NO: 4153
  GFR-binding peptide
  MOD_RES (2)..(2): Xaa is C or S

SEQ ID NO: 59872 - protein, 39 aa, Artificial Sequence; identical to SEQ ID NO: 32224
  GFR-binding peptide
  MOD_RES (33)..(34): Xaa is C or S
  MOD_RES (11)..(12)..(13)..(14)..(15): Xaa is A or G
  MOD_RES (16)..(17)..(18)..(19): Xaa is A or G or is absent

SEQ ID NO: 59873 - protein, 35 aa, Artificial Sequence; identical to SEQ ID NO: 4157
  GFR-binding peptide
  MOD_RES (1)..(33)..(34): Xaa is C or S

SEQ ID NO: 59874 - protein, 41 aa, Artificial Sequence; identical to SEQ ID NO: 32230
  GFR-binding peptide
  MOD_RES (2)..(35)..(36): Xaa is C or S
  MOD_RES (13)..(14)..(15)..(16)..(17): Xaa is A or G
  MOD_RES (18)..(19)..(20)..(21): Xaa is A or G or is absent

SEQ ID NO: 59875 - protein, 38 aa, Artificial Sequence; identical to SEQ ID NO: 4160
  GFR-binding peptide
  MOD_RES (2)..(36)..(37): Xaa is C or S
  MOD_RES (14)..(15)..(16)..(17)..(18): Xaa is A or G
  MOD_RES (19)..(20)..(21)..(22): Xaa is A or G or is absent

SEQ ID NO: 59876 - protein, 37 aa, Artificial Sequence; identical to SEQ ID NO: 4162
  GFR-binding peptide
  MOD_RES (2)..(4)..(36)..(37): Xaa is C or S

SEQ ID NO: 59877 - protein, 40 aa, Artificial Sequence
  GFR-binding peptide
  MOD_RES (2)..(34)..(35): Xaa is C or S
GXSRVVMNEYKFKIVNSSDDLYLVSIPELKTPAXXPKPVH

SEQ ID NO: 59878 - protein, 35 aa, Artificial Sequence
  GFR-binding peptide
  MOD_RES (1)..(34)..(35): Xaa is C or S
  MOD_RES (12)..(13)..(14)..(15)..(16): Xaa is A or G
  MOD_RES (17)..(18)..(19)..(20): Xaa is A or G or is absent
XEEVIMYHYKLXXXXXXXXXKYLMSIPSTKVPAXX

SEQ ID NO: 59879 - protein, 40 aa, Artificial Sequence; identical to SEQ ID NO: 4164
  GFR-binding peptide
  MOD_RES (2)..(36): Xaa is C or S
  MOD_RES (14)..(15)..(16)..(17)..(18): Xaa is A or G
  MOD_RES (19)..(20)..(21)..(22): Xaa is A or G or is absent

SEQ ID NO: 59880 - protein, 37 aa, Artificial Sequence; identical to SEQ ID NO: 4166
  GFR-binding peptide
  MOD_RES (1)..(32)..(33): Xaa is C or S

SEQ ID NO: 59881 - protein, 36 aa, Artificial Sequence; identical to SEQ ID NO: 32240
  GFR-binding peptide
  MOD_RES (1)..(35)..(36): Xaa is C or S
  MOD_RES (13)..(14)..(15)..(16)..(17): Xaa is A or G
  MOD_RES (18)..(19)..(20)..(21): Xaa is A or G or is absent

SEQ ID NO: 59882 - protein, 36 aa, Artificial Sequence
  GFR-binding peptide
  MOD_RES (34)..(35): Xaa is C or S
  MOD_RES (12)..(13)..(14)..(15)..(16): Xaa is A or G
  MOD_RES (17)..(18)..(19)..(20): Xaa is A or G or is absent
SEVTMNEYKFKXXXXXXXXXLYLISIPEMKEPVXXP

SEQ ID NO: 59883 - protein, 34 aa, Artificial Sequence; identical to SEQ ID NO: 4170
  GFR-binding peptide
  MOD_RES (33)..(34): Xaa is C or S

SEQ ID NO: 59884 - protein, 38 aa, Artificial Sequence
  GFR-binding peptide
  MOD_RES (1)..(34)..(35): Xaa is C or S
  MOD_RES (12)..(13)..(14)..(15)..(16): Xaa is A or G
  MOD_RES (17)..(18)..(19)..(20): Xaa is A or G or is absent
XSKVIMPIKGYXXXXXXXXXFYLINIPSLDQSVXXPSA

SEQ ID NO: 59885 - protein, 34 aa, Artificial Sequence; identical to SEQ ID NO: 25230
  GFR-binding peptide
  MOD_RES (1)..(3)..(34): Xaa is C or S

SEQ ID NO: 59886 - protein, 40 aa, Artificial Sequence; identical to SEQ ID NO: 25235
  GFR-binding peptide
  MOD_RES (2)..(4)..(36)..(37): Xaa is C or S

SEQ ID NO: 59887 - protein, 42 aa, Artificial Sequence
  GFR-binding peptide
  MOD_RES (1)..(3)..(37)..(38): Xaa is C or S
  MOD_RES (15)..(16)..(17)..(18)..(19): Xaa is A or G
  MOD_RES (20)..(21)..(22)..(23): Xaa is A or G or is absent
XGXSEVVMDYHYKLXXXXXXXXXKYLISIPSLRTPVXXTPPT

SEQ ID NO: 59888 - protein, 38 aa, Artificial Sequence; identical to SEQ ID NO: 4184
  GFR-binding peptide
  MOD_RES (1)..(35)..(36): Xaa is C or S
  MOD_RES (13)..(14)..(15)..(16)..(17): Xaa is A or G
  MOD_RES (18)..(19)..(20)..(21): Xaa is A or G or is absent

SEQ ID NO: 59889 - protein, 34 aa, Artificial Sequence; identical to SEQ ID NO: 32254
  GFR-binding peptide
  MOD_RES (34)..(34): Xaa is C or S
  MOD_RES (12)..(13)..(14)..(15)..(16): Xaa is A or G
  MOD_RES (17)..(18)..(19)..(20): Xaa is A or G or is absent

SEQ ID NO: 59890 - protein, 44 aa, Artificial Sequence; identical to SEQ ID NO: 4188
  GFR-binding peptide
  MOD_RES (2)..(4)..(39)..(40): Xaa is C or S
  MOD_RES (17)..(18)..(19)..(20)..(21): Xaa is A or G
  MOD_RES (22)..(23)..(24)..(25): Xaa is A or G or is absent

SEQ ID NO: 59891 - protein, 42 aa, Artificial Sequence
  GFR-binding peptide
  MOD_RES (2)..(4)..(36)..(37): Xaa is C or S
HXGXSRVVMNEYKFKIVNSSDDLYLVSIPELKTPAXXPKPVH

SEQ ID NO: 59892 - protein, 42 aa, Artificial Sequence
  GFR-binding peptide
  MOD_RES (2)..(36)..(37): Xaa is C or S
  MOD_RES (14)..(15)..(16)..(17)..(18): Xaa is A or G
  MOD_RES (19)..(20)..(21)..(22): Xaa is A or G or is absent
GXSRVVMNYHYKLXXXXXXXXXKYLVSIPSLKTPAXXPKPVH

SEQ ID NO: 59893 - protein, 34 aa, Artificial Sequence
  GFR-binding peptide
  MOD_RES (33)..(34): Xaa is C or S
  MOD_RES (11)..(12)..(13)..(14)..(15): Xaa is A or G
  MOD_RES (16)..(17)..(18)..(19): Xaa is A or G or is absent
DVVMGRHKRLXXXXXXXXXYYLMSTASMKTPTXX

SEQ ID NO: 59894 - protein, 31 aa, Artificial Sequence; identical to SEQ ID NO: 25244
  GFR-binding peptide
  MOD_RES (1)..(1): Xaa is C or S

SEQ ID NO: 59895 - protein, 40 aa, Artificial Sequence; identical to SEQ ID NO: 4192
  GFR-binding peptide
  MOD_RES (34)..(35): Xaa is C or S
  MOD_RES (12)..(13)..(14)..(15)..(16): Xaa is A or G
  MOD_RES (17)..(18)..(19)..(20): Xaa is A or G or is absent

SEQ ID NO: 59896 - protein, 35 aa, Artificial Sequence
  GFR-binding peptide
  MOD_RES (1)..(3)..(34)..(35): Xaa is C or S
XKXSKVVMPIKGYVKPTRGVFYLINIPSLDQPVXX

SEQ ID NO: 59897 - protein, 33 aa, Artificial Sequence; identical to SEQ ID NO: 25246
  GFR-binding peptide
  MOD_RES (1)..(3): Xaa is C or S

SEQ ID NO: 59898 - protein, 37 aa, Artificial Sequence; identical to SEQ ID NO: 4194
  GFR-binding peptide
  MOD_RES (2)..(34)..(35): Xaa is C or S

SEQ ID NO: 59899 - protein, 42 aa, Artificial Sequence; identical to SEQ ID NO: 4195
  GFR-binding peptide
  MOD_RES (1)..(3)..(36)..(37): Xaa is C or S
  MOD_RES (14)..(15)..(16)..(17)..(18): Xaa is A or G
  MOD_RES (19)..(20)..(21)..(22): Xaa is A or G or is absent

SEQ ID NO: 59900 - protein, 37 aa, Artificial Sequence; identical to SEQ ID NO: 25250
  GFR-binding peptide
  MOD_RES (1)..(35)..(36): Xaa is C or S
  MOD_RES (13)..(14)..(15)..(16)..(17): Xaa is A or G
  MOD_RES (18)..(19)..(20)..(21): Xaa is A or G or is absent

SEQ ID NO: 59901 - protein, 33 aa, Artificial Sequence
  GFR-binding peptide
  MOD_RES (31)..(32): Xaa is C or S
EVTMNRYKKLVVNKNEDFYLISIANMKEPVXXP

SEQ ID NO: 59902 - protein, 35 aa, Artificial Sequence; identical to SEQ ID NO: 4199
  GFR-binding peptide
  MOD_RES (1)..(33)..(34): Xaa is C or S

SEQ ID NO: 59903 - protein, 33 aa, Artificial Sequence; identical to SEQ ID NO: 4200
  GFR-binding peptide
  MOD_RES (31)..(32): Xaa is C or S

SEQ ID NO: 59904 - protein, 39 aa, Artificial Sequence
  GFR-binding peptide
  MOD_RES (33)..(34): Xaa is C or S
  MOD_RES (11)..(12)..(13)..(14)..(15): Xaa is A or G
  MOD_RES (16)..(17)..(18)..(19): Xaa is A or G or is absent
SRVIMPIKGYXXXXXXXXXFYLINIPSLAQPVXXPAASA

SEQ ID NO: 59905 - protein, 42 aa, Artificial Sequence
  GFR-binding peptide
  MOD_RES (2)..(4)..(38)..(39): Xaa is C or S
  MOD_RES (16)..(17)..(18)..(19)..(20): Xaa is A or G
  MOD_RES (21)..(22)..(23)..(24): Xaa is A or G or is absent
RXGXAEVVMDRHKRLXXXXXXXXXYYLISTASLRAPVXXSAP

SEQ ID NO: 59906 - protein, 37 aa, Artificial Sequence
  GFR-binding peptide
  MOD_RES (33)..(34): Xaa is C or S
  MOD_RES (11)..(12)..(13)..(14)..(15): Xaa is A or G
  MOD_RES (16)..(17)..(18)..(19): Xaa is A or G or is absent
EEVIMEYKFKXXXXXXXXXLYLMSIPETKVPAXXTSP

SEQ ID NO: 59907 - protein, 32 aa, Artificial Sequence; identical to SEQ ID NO: 4202
  GFR-binding peptide
  MOD_RES (11)..(12)..(13)..(14)..(15): Xaa is A or G
  MOD_RES (16)..(17)..(18)..(19): Xaa is A or G or is absent

SEQ ID NO: 59908 - protein, 38 aa, Artificial Sequence; identical to SEQ ID NO: 25258
  GFR-binding peptide
  MOD_RES (33)..(34): Xaa is C or S
  MOD_RES (11)..(12)..(13)..(14)..(15): Xaa is A or G
  MOD_RES (16)..(17)..(18)..(19): Xaa is A or G or is absent

SEQ ID NO: 59909 - protein, 42 aa, Artificial Sequence
  GFR-binding peptide
  MOD_RES (1)..(3)..(37)..(38): Xaa is C or S
  MOD_RES (15)..(16)..(17)..(18)..(19): Xaa is A or G
  MOD_RES (20)..(21)..(22)..(23): Xaa is A or G or is absent
XAXSEVTMNPIKGYXXXXXXXXXFYLINIPSMKEPVXXPEPI

SEQ ID NO: 59910 - protein, 34 aa, Artificial Sequence; identical to SEQ ID NO: 4204
  GFR-binding peptide
  MOD_RES (31)..(32): Xaa is C or S

SEQ ID NO: 59911 - protein, 36 aa, Artificial Sequence
  GFR-binding peptide
  MOD_RES (2)..(35)..(36): Xaa is C or S
  MOD_RES (13)..(14)..(15)..(16)..(17): Xaa is A or G
  MOD_RES (18)..(19)..(20)..(21): Xaa is A or G or is absent
GXEEVIMEYKFKXXXXXXXXXLYLMSIPETKVPAXX

SEQ ID NO: 59912 - protein, 33 aa, Artificial Sequence; identical to SEQ ID NO: 25263
  GFR-binding peptide
  MOD_RES (1)..(3): Xaa is C or S

SEQ ID NO: 59913 - protein, 37 aa, Artificial Sequence; identical to SEQ ID NO: 4205
  GFR-binding peptide
  MOD_RES (1)..(3)..(37): Xaa is C or S
  MOD_RES (15)..(16)..(17)..(18)..(19): Xaa is A or G
  MOD_RES (20)..(21)..(22)..(23): Xaa is A or G or is absent

SEQ ID NO: 59914 - protein, 33 aa, Artificial Sequence; identical to SEQ ID NO: 25267
  GFR-binding peptide
  MOD_RES (32)..(32): Xaa is C or S

SEQ ID NO: 59915 - protein, 38 aa, Artificial Sequence; identical to SEQ ID NO: 32281
  GFR-binding peptide
  MOD_RES (1)..(3)..(34)..(35): Xaa is C or S

SEQ ID NO: 59916 - protein, 39 aa, Artificial Sequence; identical to SEQ ID NO: 11618
  GFR-binding peptide
  MOD_RES (1)..(3)..(37)..(38): Xaa is C or S
  MOD_RES (15)..(16)..(17)..(18)..(19): Xaa is A or G
  MOD_RES (20)..(21)..(22)..(23): Xaa is A or G or is absent

SEQ ID NO: 59917 - protein, 37 aa, Artificial Sequence; identical to SEQ ID NO: 25269
  GFR-binding peptide
  MOD_RES (34)..(35): Xaa is C or S
  MOD_RES (12)..(13)..(14)..(15)..(16): Xaa is A or G
  MOD_RES (17)..(18)..(19)..(20): Xaa is A or G or is absent

SEQ ID NO: 59918 - protein, 37 aa, Artificial Sequence; identical to SEQ ID NO: 32284
  GFR-binding peptide
  MOD_RES (2)..(4)..(36)..(37): Xaa is C or S

SEQ ID NO: 59919 - protein, 38 aa, Artificial Sequence; identical to SEQ ID NO: 4210
  GFR-binding peptide
  MOD_RES (1)..(35)..(36): Xaa is C or S
  MOD_RES (13)..(14)..(15)..(16)..(17): Xaa is A or G
  MOD_RES (18)..(19)..(20)..(21): Xaa is A or G or is absent

SEQ ID NO: 59920 - protein, 35 aa, Artificial Sequence; identical to SEQ ID NO: 11621
  GFR-binding peptide
  MOD_RES (1)..(3)..(35): Xaa is C or S

SEQ ID NO: 59921 - protein, 41 aa, Artificial Sequence
  GFR-binding peptide
  MOD_RES (2)..(4)..(38)..(39): Xaa is C or S
  MOD_RES (16)..(17)..(18)..(19)..(20): Xaa is A or G
  MOD_RES (21)..(22)..(23)..(24): Xaa is A or G or is absent
SXGXRDVVMGEYKFKXXXXXXXXXLYLMSIPEMKTPTXXPG

SEQ ID NO: 59922 - protein, 38 aa, Artificial Sequence; identical to SEQ ID NO: 4212
  GFR-binding peptide
  MOD_RES (2)..(36)..(37): Xaa is C or S
  MOD_RES (14)..(15)..(16)..(17)..(18): Xaa is A or G
  MOD_RES (19)..(20)..(21)..(22): Xaa is A or G or is absent

SEQ ID NO: 59923 - protein, 36 aa, Artificial Sequence
  GFR-binding peptide
  MOD_RES (1)..(35)..(36): Xaa is C or S
  MOD_RES (13)..(14)..(15)..(16)..(17): Xaa is A or G
  MOD_RES (18)..(19)..(20)..(21): Xaa is A or G or is absent
XAEVVMDRHKRLXXXXXXXXXYYLISTASLRAPVXX

SEQ ID NO: 59924 - protein, 37 aa, Artificial Sequence; identical to SEQ ID NO: 4215
  GFR-binding peptide
  MOD_RES (1)..(35)..(36): Xaa is C or S
  MOD_RES (13)..(14)..(15)..(16)..(17): Xaa is A or G
  MOD_RES (18)..(19)..(20)..(21): Xaa is A or G or is absent

SEQ ID NO: 59925 - protein, 38 aa, Artificial Sequence; identical to SEQ ID NO: 4216
  GFR-binding peptide
  MOD_RES (1)..(32)..(33): Xaa is C or S

SEQ ID NO: 59926 - protein, 36 aa, Artificial Sequence; identical to SEQ ID NO: 25276
  GFR-binding peptide
  MOD_RES (1)..(35)..(36): Xaa is C or S
  MOD_RES (13)..(14)..(15)..(16)..(17): Xaa is A or G
  MOD_RES (18)..(19)..(20)..(21): Xaa is A or G or is absent

SEQ ID NO: 59927 - protein, 30 aa, Artificial Sequence; identical to SEQ ID NO: 4217
  GFR-binding peptide

SEQ ID NO: 59928 - protein, 39 aa, Artificial Sequence
  GFR-binding peptide
  MOD_RES (33)..(34): Xaa is C or S
  MOD_RES (11)..(12)..(13)..(14)..(15): Xaa is A or G
  MOD_RES (16)..(17)..(18)..(19): Xaa is A or G or is absent
DVVMGRHKRLXXXXXXXXXYYLMSTASMKTPTXXPGASG

SEQ ID NO: 59929 - protein, 37 aa, Artificial Sequence; identical to SEQ ID NO: 4223
  GFR-binding peptide
  MOD_RES (2)..(36)..(37): Xaa is C or S
  MOD_RES (14)..(15)..(16)..(17)..(18): Xaa is A or G
  MOD_RES (19)..(20)..(21)..(22): Xaa is A or G or is absent

SEQ ID NO: 59930 - protein, 36 aa, Artificial Sequence; identical to SEQ ID NO: 4224
  GFR-binding peptide
  MOD_RES (2)..(4)..(35)..(36): Xaa is C or S

SEQ ID NO: 59931 - protein, 35 aa, Artificial Sequence; identical to SEQ ID NO: 32298
  GFR-binding peptide
  MOD_RES (34)..(35): Xaa is C or S
  MOD_RES (12)..(13)..(14)..(15)..(16): Xaa is A or G
  MOD_RES (17)..(18)..(19)..(20): Xaa is A or G or is absent

SEQ ID NO: 59932 - protein, 39 aa, Artificial Sequence; identical to SEQ ID NO: 25284
  GFR-binding peptide
  MOD_RES (33)..(34): Xaa is C or S
  MOD_RES (11)..(12)..(13)..(14)..(15): Xaa is A or G
  MOD_RES (16)..(17)..(18)..(19): Xaa is A or G or is absent

SEQ ID NO: 59933 - protein, 38 aa, Artificial Sequence
  GFR-binding peptide
  MOD_RES (33)..(34): Xaa is C or S
  MOD_RES (11)..(12)..(13)..(14)..(15): Xaa is A or G
  MOD_RES (16)..(17)..(18)..(19): Xaa is A or G or is absent
SRVIMPIKGYXXXXXXXXXFYLINIPSLAQPVXXPAAS

SEQ ID NO: 59934 - protein, 35 aa, Artificial Sequence; identical to SEQ ID NO: 4225
  GFR-binding peptide
  MOD_RES (2)..(4)..(35): Xaa is C or S

SEQ ID NO: 59935 - protein, 32 aa, Artificial Sequence
  GFR-binding peptide
  MOD_RES (11)..(12)..(13)..(14)..(15): Xaa is A or G
  MOD_RES (16)..(17)..(18)..(19): Xaa is A or G or is absent
DVVMGEYKFKXXXXXXXXXLYLMSIPEMKTPT

SEQ ID NO: 59936 - protein, 40 aa, Artificial Sequence
  GFR-binding peptide
  MOD_RES (1)..(3)..(36)..(37): Xaa is C or S
  MOD_RES (14)..(15)..(16)..(17)..(18): Xaa is A or G
  MOD_RES (19)..(20)..(21)..(22): Xaa is A or G or is absent
XGXEEVIMRHKRLXXXXXXXXXYYLMSTASTKVPAXXTSP

SEQ ID NO: 59937 - protein, 38 aa, Artificial Sequence; identical to SEQ ID NO: 4227
  GFR-binding peptide
  MOD_RES (1)..(34)..(35): Xaa is C or S
  MOD_RES (12)..(13)..(14)..(15)..(16): Xaa is A or G
  MOD_RES (17)..(18)..(19)..(20): Xaa is A or G or is absent

SEQ ID NO: 59938 - protein, 36 aa, Artificial Sequence; identical to SEQ ID NO: 4228
  GFR-binding peptide
  MOD_RES (1)..(33)..(34): Xaa is C or S

SEQ ID NO: 59939 - protein, 41 aa, Artificial Sequence
  GFR-binding peptide
  MOD_RES (2)..(36)..(37): Xaa is C or S
  MOD_RES (14)..(15)..(16)..(17)..(18): Xaa is A or G
  MOD_RES (19)..(20)..(21)..(22): Xaa is A or G or is absent
AXSEVTMNPIKGYXXXXXXXXXFYLINIPSMKEPVXXPEPI

SEQ ID NO: 59940 - protein, 41 aa, Artificial Sequence; identical to SEQ ID NO: 31210
  GFR-binding peptide
  MOD_RES (1)..(3)..(37)..(38): Xaa is C or S
  MOD_RES (15)..(16)..(17)..(18)..(19): Xaa is A or G
  MOD_RES (20)..(21)..(22)..(23): Xaa is A or G or is absent

SEQ ID NO: 59941 - protein, 37 aa, Artificial Sequence; identical to SEQ ID NO: 4230
  GFR-binding peptide
  MOD_RES (2)..(4)..(35)..(36): Xaa is C or S

SEQ ID NO: 59942 - protein, 40 aa, Artificial Sequence; identical to SEQ ID NO: 31214
  GFR-binding peptide
  MOD_RES (1)..(3)..(35)..(36): Xaa is C or S

SEQ ID NO: 59943 - protein, 37 aa, Artificial Sequence; identical to SEQ ID NO: 31215
  GFR-binding peptide
  MOD_RES (2)..(34): Xaa is C or S

SEQ ID NO: 59944 - protein, 40 aa, Artificial Sequence; identical to SEQ ID NO: 25293
  GFR-binding peptide
  MOD_RES (34)..(35): Xaa is C or S
  MOD_RES (12)..(13)..(14)..(15)..(16): Xaa is A or G
  MOD_RES (17)..(18)..(19)..(20): Xaa is A or G or is absent

SEQ ID NO: 59945 - protein, 35 aa, Artificial Sequence; identical to SEQ ID NO: 4233
  GFR-binding peptide
  MOD_RES (1)..(3)..(34)..(35): Xaa is C or S

SEQ ID NO: 59946 - protein, 35 aa, Artificial Sequence
  GFR-binding peptide
  MOD_RES (1)..(35): Xaa is C or S
  MOD_RES (13)..(14)..(15)..(16)..(17): Xaa is A or G
  MOD_RES (18)..(19)..(20)..(21): Xaa is A or G or is absent
XSEVVMDYHYKLXXXXXXXXXKYLISIPSLRTPVX

SEQ ID NO: 59947 - protein, 42 aa, Artificial Sequence; identical to SEQ ID NO: 4234
  GFR-binding peptide
  MOD_RES (2)..(4)..(37)..(38): Xaa is C or S
  MOD_RES (15)..(16)..(17)..(18)..(19): Xaa is A or G
  MOD_RES (20)..(21)..(22)..(23): Xaa is A or G or is absent

SEQ ID NO: 59948 - protein, 38 aa, Artificial Sequence; identical to SEQ ID NO: 4236
  GFR-binding peptide
  MOD_RES (1)..(33)..(34): Xaa is C or S

SEQ ID NO: 59949 - protein, 35 aa, Artificial Sequence
  GFR-binding peptide
  MOD_RES (2)..(33)..(34): Xaa is C or S
GXEEVIMEYKFKLLVRGNDLYLMSIPETKVPAXXT

SEQ ID NO: 59950 - protein, 41 aa, Artificial Sequence; identical to SEQ ID NO: 25297
  GFR-binding peptide
  MOD_RES (2)..(4)..(38): Xaa is C or S
  MOD_RES (16)..(17)..(18)..(19)..(20): Xaa is A or G
  MOD_RES (21)..(22)..(23)..(24): Xaa is A or G or is absent

SEQ ID NO: 59951 - protein, 39 aa, Artificial Sequence
  GFR-binding peptide
  MOD_RES (2)..(4)..(36)..(37): Xaa is C or S
RXGXESVAMGRHKRLYTVVGKDYYLISTASLKTPVXXAK

SEQ ID NO: 59952 - protein, 37 aa, Artificial Sequence; identical to SEQ ID NO: 4240
  GFR-binding peptide
  MOD_RES (1)..(3)..(35)..(36): Xaa is C or S

SEQ ID NO: 59953 - protein, 39 aa, Artificial Sequence
  GFR-binding peptide
  MOD_RES (1)..(33)..(34): Xaa is C or S
XSEVTMNYHYKLVVNKNEDKYLISIPSMKEPVXXPEPIG

SEQ ID NO: 59954 - protein, 40 aa, Artificial Sequence
  GFR-binding peptide
  MOD_RES (2)..(34)..(35): Xaa is C or S
AXSEVTMNPIKGYVVNKNEDFYLINIPSMKEPVXXPEPIG

SEQ ID NO: 59955 - protein, 39 aa, Artificial Sequence; identical to SEQ ID NO: 31226
  GFR-binding peptide
  MOD_RES (2)..(4)..(37)..(38): Xaa is C or S

SEQ ID NO: 59956 - protein, 38 aa, Artificial Sequence; identical to SEQ ID NO: 4245
  GFR-binding peptide
  MOD_RES (2)..(35)..(36): Xaa is C or S

SEQ ID NO: 59957 - protein, 37 aa, Artificial Sequence; identical to SEQ ID NO: 4246
  GFR-binding peptide
  MOD_RES (2)..(35)..(36): Xaa is C or S
  MOD_RES (13)..(14)..(15)..(16)..(17): Xaa is A or G
  MOD_RES (18)..(19)..(20)..(21): Xaa is A or G or is absent

SEQ ID NO: 59958 - protein, 33 aa, Artificial Sequence; identical to SEQ ID NO: 31232
  GFR-binding peptide
  MOD_RES (32)..(33): Xaa is C or S

SEQ ID NO: 59959 - protein, 39 aa, Artificial Sequence; identical to SEQ ID NO: 4247
  GFR-binding peptide
  MOD_RES (2)..(36)..(37): Xaa is C or S
  MOD_RES (14)..(15)..(16)..(17)..(18): Xaa is A or G
  MOD_RES (19)..(20)..(21)..(22): Xaa is A or G or is absent

SEQ ID NO: 59960 - protein, 39 aa, Artificial Sequence; identical to SEQ ID NO: 31234
  GFR-binding peptide
  MOD_RES (2)..(4)..(36)..(37): Xaa is C or S

SEQ ID NO: 59961 - protein, 31 aa, Artificial Sequence; identical to SEQ ID NO: 56159
  GFR-binding peptide
  MOD_RES (1)..(1): Xaa is C or S

SEQ ID NO: 59962 - protein, 39 aa, Artificial Sequence
  GFR-binding peptide
  MOD_RES (34)..(35): Xaa is C or S
  MOD_RES (12)..(13)..(14)..(15)..(16): Xaa is A or G
  MOD_RES (17)..(18)..(19)..(20): Xaa is A or G or is absent
SEVVMDEYKFKXXXXXXXXXLYLISIPELRTPVXXTPPT

SEQ ID NO: 59963 - protein, 35 aa, Artificial Sequence; identical to SEQ ID NO: 4251
  GFR-binding peptide
  MOD_RES (2)..(4)..(35): Xaa is C or S

SEQ ID NO: 59964 - protein, 37 aa, Artificial Sequence; identical to SEQ ID NO: 4254
  GFR-binding peptide
  MOD_RES (31)..(32): Xaa is C or S

SEQ ID NO: 59965 - protein, 36 aa, Artificial Sequence
  GFR-binding peptide
  MOD_RES (1)..(33)..(34): Xaa is C or S
XRDVVMGEYKFKIIQQKDNLYLMSIPEMKTPTXXPG

SEQ ID NO: 59966 - protein, 36 aa, Artificial Sequence
  GFR-binding peptide
  MOD_RES (32)..(33): Xaa is C or S
SEVTMNEYKFKVVNKNEDLYLISIPEMKEPVXXPEP

SEQ ID NO: 59967 - protein, 40 aa, Artificial Sequence
  GFR-binding peptide
  MOD_RES (2)..(4)..(36)..(37): Xaa is C or S
RXAXSEVTMNPIKGYVVNKNEDFYLINIPSMKEPVXXPEP

SEQ ID NO: 59968 - protein, 40 aa, Artificial Sequence
  GFR-binding peptide
  MOD_RES (1)..(3)..(37)..(38): Xaa is C or S
  MOD_RES (15)..(16)..(17)..(18)..(19): Xaa is A or G
  MOD_RES (20)..(21)..(22)..(23): Xaa is A or G or is absent
XGXAEVVMDRHKRLXXXXXXXXXYYLISTASLRAPVXXSA

SEQ ID NO: 59969 - protein, 39 aa, Artificial Sequence; identical to SEQ ID NO: 31243
  GFR-binding peptide
  MOD_RES (1)..(33)..(34): Xaa is C or S

SEQ ID NO: 59970 - protein, 39 aa, Artificial Sequence; identical to SEQ ID NO: 4258
  GFR-binding peptide
  MOD_RES (34)..(35): Xaa is C or S
  MOD_RES (12)..(13)..(14)..(15)..(16): Xaa is A or G
  MOD_RES (17)..(18)..(19)..(20): Xaa is A or G or is absent

SEQ ID NO: 59971 - protein, 37 aa, Artificial Sequence; identical to SEQ ID NO: 4259
  GFR-binding peptide
  MOD_RES (2)..(4)..(35)..(36): Xaa is C or S

SEQ ID NO: 59972 - protein, 39 aa, Artificial Sequence
  GFR-binding peptide
  MOD_RES (2)..(36)..(37): Xaa is C or S
  MOD_RES (14)..(15)..(16)..(17)..(18): Xaa is A or G
  MOD_RES (19)..(20)..(21)..(22): Xaa is A or G or is absent
GXRDVVMGEYKFKXXXXXXXXXLYLMSIPEMKTPTXXPG

SEQ ID NO: 59973 - protein, 37 aa, Artificial Sequence
  GFR-binding peptide
  MOD_RES (1)..(35)..(36): Xaa is C or S
  MOD_RES (13)..(14)..(15)..(16)..(17): Xaa is A or G
  MOD_RES (18)..(19)..(20)..(21): Xaa is A or G or is absent
XESVAMGRHKRLXXXXXXXXXYYLISTASLKTPVXXA

SEQ ID NO: 59974 - protein, 32 aa, Artificial Sequence
  GFR-binding peptide
  MOD_RES (1)..(32): Xaa is C or S
XEEVIMYHYKLLLVRGNDKYLMSIPSTKVPAX

SEQ ID NO: 59975 - protein, 36 aa, Artificial Sequence; identical to SEQ ID NO: 11684
  GFR-binding peptide
  MOD_RES (1)..(3)..(35)..(36): Xaa is C or S

SEQ ID NO: 59976 - protein, 40 aa, Artificial Sequence; identical to SEQ ID NO: 31257
  GFR-binding peptide
  MOD_RES (2)..(36)..(37): Xaa is C or S
  MOD_RES (14)..(15)..(16)..(17)..(18): Xaa is A or G
  MOD_RES (19)..(20)..(21)..(22): Xaa is A or G or is absent

SEQ ID NO: 59977 - protein, 37 aa, Artificial Sequence
  GFR-binding peptide
  MOD_RES (2)..(36)..(37): Xaa is C or S
  MOD_RES (14)..(15)..(16)..(17)..(18): Xaa is A or G
  MOD_RES (19)..(20)..(21)..(22): Xaa is A or G or is absent
AXSEVTMNPIKGYXXXXXXXXXFYLINIPSMKEPVXX

SEQ ID NO: 59978 - protein, 35 aa, Artificial Sequence; identical to SEQ ID NO: 31261
  GFR-binding peptide
  MOD_RES (2)..(2): Xaa is C or S
  MOD_RES (14)..(15)..(16)..(17)..(18): Xaa is A or G
  MOD_RES (19)..(20)..(21)..(22): Xaa is A or G or is absent

SEQ ID NO: 59979 - protein, 35 aa, Artificial Sequence; identical to SEQ ID NO: 11686
  GFR-binding peptide
  MOD_RES (33)..(34): Xaa is C or S
  MOD_RES (11)..(12)..(13)..(14)..(15): Xaa is A or G
  MOD_RES (16)..(17)..(18)..(19): Xaa is A or G or is absent

SEQ ID NO: 59980 - protein, 37 aa, Artificial Sequence
  GFR-binding peptide
  MOD_RES (1)..(3)..(36)..(37): Xaa is C or S
  MOD_RES (14)..(15)..(16)..(17)..(18): Xaa is A or G
  MOD_RES (19)..(20)..(21)..(22): Xaa is A or G or is absent
XGXEEVIMYHYKLXXXXXXXXXKYLMSIPSTKVPAXX

SEQ ID NO: 59981 - protein, 41 aa, Artificial Sequence
  GFR-binding peptide
  MOD_RES (2)..(4)..(37)..(38): Xaa is C or S
  MOD_RES (15)..(16)..(17)..(18)..(19): Xaa is A or G
  MOD_RES (20)..(21)..(22)..(23): Xaa is A or G or is absent
SXKXSKVVMPIKGYXXXXXXXXXFYLINIPSLDQPVXXPSA

SEQ ID NO: 59982 - protein, 39 aa, Artificial Sequence; identical to SEQ ID NO: 31268
  GFR-binding peptide
  MOD_RES (2)..(35)..(36): Xaa is C or S
  MOD_RES (13)..(14)..(15)..(16)..(17): Xaa is A or G
  MOD_RES (18)..(19)..(20)..(21): Xaa is A or G or is absent

SEQ ID NO: 59983 - protein, 36 aa, Artificial Sequence
  GFR-binding peptide
  MOD_RES (2)..(34)..(35): Xaa is C or S
GXRDVVMGYHYKLIIQQKDNKYLMSIPSMKTPTXXP

SEQ ID NO: 59984 - protein, 40 aa, Artificial Sequence; identical to SEQ ID NO: 31271
  GFR-binding peptide
  MOD_RES (2)..(34)..(35): Xaa is C or S

SEQ ID NO: 59985 - protein, 42 aa, Artificial Sequence; identical to SEQ ID NO: 4274
  GFR-binding peptide
  MOD_RES (2)..(4)..(37)..(38): Xaa is C or S

SEQ ID NO: 59986 - protein, 38 aa, Artificial Sequence; identical to SEQ ID NO: 25324
  GFR-binding peptide
  MOD_RES (2)..(34)..(35): Xaa is C or S

SEQ ID NO: 59987 - protein, 38 aa, Artificial Sequence
  GFR-binding peptide
  MOD_RES (2)..(33)..(34): Xaa is C or S
GXEEVIMEYKFKLLVRGNDLYLMSIPETKVPAXXTSPV

SEQ ID NO: 59988 - protein, 36 aa, Artificial Sequence; identical to SEQ ID NO: 4276
  GFR-binding peptide
  MOD_RES (1)..(35): Xaa is C or S
  MOD_RES (13)..(14)..(15)..(16)..(17): Xaa is A or G
  MOD_RES (18)..(19)..(20)..(21): Xaa is A or G or is absent

SEQ ID NO: 59989 - protein, 34 aa, Artificial Sequence; identical to SEQ ID NO: 4277
  GFR-binding peptide
  MOD_RES (1)..(1): Xaa is C or S
  MOD_RES (13)..(14)..(15)..(16)..(17): Xaa is A or G
  MOD_RES (18)..(19)..(20)..(21): Xaa is A or G or is absent

SEQ ID NO: 59990 - protein, 36 aa, Artificial Sequence
  GFR-binding peptide
  MOD_RES (31)..(32): Xaa is C or S
SKVVMPIKGYVKPTRGVFYLINIPSLDQPVXXPSAS

SEQ ID NO: 59991 - protein, 40 aa, Artificial Sequence; identical to SEQ ID NO: 31278
  GFR-binding peptide
  MOD_RES (1)..(3)..(35)..(36): Xaa is C or S

SEQ ID NO: 59992 - protein, 39 aa, Artificial Sequence
  GFR-binding peptide
  MOD_RES (2)..(36)..(37): Xaa is C or S
  MOD_RES (14)..(15)..(16)..(17)..(18): Xaa is A or G
  MOD_RES (19)..(20)..(21)..(22): Xaa is A or G or is absent
GXRDVVMGYHYKLXXXXXXXXXKYLMSIPSMKTPTXXPG

SEQ ID NO: 59993 - protein, 32 aa, Artificial Sequence; identical to SEQ ID NO: 56211
  GFR-binding peptide
  MOD_RES (32)..(32): Xaa is C or S

SEQ ID NO: 59994 - protein, 41 aa, Artificial Sequence; identical to SEQ ID NO: 31283
  GFR-binding peptide
  MOD_RES (2)..(4)..(36)..(37): Xaa is C or S

SEQ ID NO: 59995 - protein, 34 aa, Artificial Sequence
  GFR-binding peptide
  MOD_RES (1)..(3): Xaa is C or S
XAXSEVTMNYHYKLVVNKNEDKYLISIPSMKEPV

SEQ ID NO: 59996 - protein, 33 aa, Artificial Sequence; identical to SEQ ID NO: 4281
  GFR-binding peptide
  MOD_RES (31)..(31): Xaa is C or S

SEQ ID NO: 59997 - protein, 44 aa, Artificial Sequence; identical to SEQ ID NO: 4282
  GFR-binding peptide
  MOD_RES (2)..(4)..(38)..(39): Xaa is C or S
  MOD_RES (16)..(17)..(18)..(19)..(20): Xaa is A or G
  MOD_RES (21)..(22)..(23)..(24): Xaa is A or G or is absent

SEQ ID NO: 59998 - protein, 36 aa, Artificial Sequence
  GFR-binding peptide
  MOD_RES (2)..(34)..(35): Xaa is C or S
AXSEVTMNYHYKLVVNKNEDKYLISIPSMKEPVXXP

SEQ ID NO: 59999 - protein, 38 aa, Artificial Sequence; identical to SEQ ID NO: 25331
  GFR-binding peptide
  MOD_RES (32)..(33): Xaa is C or S

SEQ ID NO: 60000 - protein, 32 aa, Artificial Sequence
  GFR-binding peptide
  MOD_RES (31)..(32): Xaa is C or S
EVVMDRHKRLVVNNASDYYLISTASLRTPVXX

SEQ ID NO: 60001 - protein, 32 aa, Artificial Sequence; identical to SEQ ID NO: 31297
  GFR-binding peptide
  MOD_RES (11)..(12)..(13)..(14)..(15): Xaa is A or G
  MOD_RES (16)..(17)..(18)..(19): Xaa is A or G or is absent

SEQ ID NO: 60002 - protein, 43 aa, Artificial Sequence; identical to SEQ ID NO: 31298
  GFR-binding peptide
  MOD_RES (2)..(4)..(38)..(39): Xaa is C or S
  MOD_RES (16)..(17)..(18)..(19)..(20): Xaa is A or G
  MOD_RES (21)..(22)..(23)..(24): Xaa is A or G or is absent

SEQ ID NO: 60003 - protein, 43 aa, Artificial Sequence; identical to SEQ ID NO: 4288
  GFR-binding peptide
  MOD_RES (1)..(3)..(37)..(38): Xaa is C or S
  MOD_RES (15)..(16)..(17)..(18)..(19): Xaa is A or G
  MOD_RES (20)..(21)..(22)..(23): Xaa is A or G or is absent

SEQ ID NO: 60004 - protein, 38 aa, Artificial Sequence; identical to SEQ ID NO: 31302
  GFR-binding peptide
  MOD_RES (1)..(3)..(35)..(36): Xaa is C or S

SEQ ID NO: 60005 - protein, 33 aa, Artificial Sequence; identical to SEQ ID NO: 31303
  GFR-binding peptide
  MOD_RES (33)..(33): Xaa is C or S
  MOD_RES (11)..(12)..(13)..(14)..(15): Xaa is A or G
  MOD_RES (16)..(17)..(18)..(19): Xaa is A or G or is absent

SEQ ID NO: 60006 - protein, 39 aa, Artificial Sequence
  GFR-binding peptide
  MOD_RES (2)..(34)..(35): Xaa is C or S
AXSEVTMNRHKRLVVNKNEDYYLISTASMKEPVXXPEPI

SEQ ID NO: 60007 - protein, 44 aa, Artificial Sequence; identical to SEQ ID NO: 25340
  GFR-binding peptide
  MOD_RES (2)..(4)..(38)..(39): Xaa is C or S
  MOD_RES (16)..(17)..(18)..(19)..(20): Xaa is A or G
  MOD_RES (21)..(22)..(23)..(24): Xaa is A or G or is absent

SEQ ID NO: 60008 - protein, 37 aa, Artificial Sequence; identical to SEQ ID NO: 25341
  GFR-binding peptide
  MOD_RES (33)..(34): Xaa is C or S
  MOD_RES (11)..(12)..(13)..(14)..(15): Xaa is A or G
  MOD_RES (16)..(17)..(18)..(19): Xaa is A or G or is absent

SEQ ID NO: 60009 - protein, 31 aa, Artificial Sequence; identical to SEQ ID NO: 31307
  GFR-binding peptide

SEQ ID NO: 60010 - protein, 33 aa, Artificial Sequence
  GFR-binding peptide
  MOD_RES (31)..(32): Xaa is C or S
EEVIMYHYKLLLVRGNDKYLMSIPSTKVPAXXT

SEQ ID NO: 60011 - protein, 41 aa, Artificial Sequence; identical to SEQ ID NO: 4293
  GFR-binding peptide
  MOD_RES (2)..(37)..(38): Xaa is C or S
  MOD_RES (15)..(16)..(17)..(18)..(19): Xaa is A or G
  MOD_RES (20)..(21)..(22)..(23): Xaa is A or G or is absent

SEQ ID NO: 60012 - protein, 36 aa, Artificial Sequence; identical to SEQ ID NO: 25345
  GFR-binding peptide
  MOD_RES (2)..(34)..(35): Xaa is C or S

SEQ ID NO: 60013 - protein, 38 aa, Artificial Sequence; identical to SEQ ID NO: 4294
  GFR-binding peptide
  MOD_RES (33)..(34): Xaa is C or S
  MOD_RES (11)..(12)..(13)..(14)..(15): Xaa is A or G
  MOD_RES (16)..(17)..(18)..(19): Xaa is A or G or is absent

SEQ ID NO: 60014 - protein, 33 aa, Artificial Sequence; identical to SEQ ID NO: 4295
  GFR-binding peptide
  MOD_RES (2)..(33): Xaa is C or S

SEQ ID NO: 60015 - protein, 36 aa, Artificial Sequence
  GFR-binding peptide
  MOD_RES (31)..(32): Xaa is C or S
EVTMNRYKKLVVNKNEDFYLISIANMKEPVXXPEPI

SEQ ID NO: 60016 - protein, 33 aa, Artificial Sequence; identical to SEQ ID NO: 4298
  GFR-binding peptide
  MOD_RES (2)..(33): Xaa is C or S

SEQ ID NO: 60017 - protein, 37 aa, Artificial Sequence; identical to SEQ ID NO: 4299
  GFR-binding peptide
  MOD_RES (2)..(36)..(37): Xaa is C or S
  MOD_RES (14)..(15)..(16)..(17)..(18): Xaa is A or G
  MOD_RES (19)..(20)..(21)..(22): Xaa is A or G or is absent

SEQ ID NO: 60018 - protein, 40 aa, Artificial Sequence; identical to SEQ ID NO: 31319
  GFR-binding peptide
  MOD_RES (2)..(36)..(37): Xaa is C or S
  MOD_RES (14)..(15)..(16)..(17)..(18): Xaa is A or G
  MOD_RES (19)..(20)..(21)..(22): Xaa is A or G or is absent

SEQ ID NO: 60019 - protein, 33 aa, Artificial Sequence
  GFR-binding peptide
  MOD_RES (32)..(33): Xaa is C or S
RDVVMGRHKRLIIQQKDNYYLMSTASMKTPTXX

SEQ ID NO: 60020 - protein, 40 aa, Artificial Sequence; identical to SEQ ID NO: 31323
  GFR-binding peptide
  MOD_RES (1)..(3)..(34)..(35): Xaa is C or S

SEQ ID NO: 60021 - protein, 40 aa, Artificial Sequence; identical to SEQ ID NO: 4307
  GFR-binding peptide
  MOD_RES (2)..(35)..(36): Xaa is C or S

SEQ ID NO: 60022 - protein, 36 aa, Artificial Sequence; identical to SEQ ID NO: 31325
  GFR-binding peptide
  MOD_RES (1)..(33)..(34): Xaa is C or S

SEQ ID NO: 60023 - protein, 41 aa, Artificial Sequence; identical to SEQ ID NO: 4311
  GFR-binding peptide
  MOD_RES (1)..(35)..(36): Xaa is C or S
  MOD_RES (13)..(14)..(15)..(16)..(17): Xaa is A or G
  MOD_RES (18)..(19)..(20)..(21): Xaa is A or G or is absent

SEQ ID NO: 60024 - protein, 40 aa, Artificial Sequence; identical to SEQ ID NO: 56247
  GFR-binding peptide
  MOD_RES (1)..(3)..(35)..(36): Xaa is C or S

SEQ ID NO: 60025 - protein, 39 aa, Artificial Sequence; identical to SEQ ID NO: 4315
  GFR-binding peptide
  MOD_RES (2)..(33)..(34): Xaa is C or S

SEQ ID NO: 60026 - protein, 36 aa, Artificial Sequence
  GFR-binding peptide
  MOD_RES (2)..(4)..(35)..(36): Xaa is C or S
SXKXSKVIMPIKGYIKPTKGIFYLINIPSLDQSVXX

SEQ ID NO: 60027 - protein, 39 aa, Artificial Sequence; identical to SEQ ID NO: 4317
  GFR-binding peptide
  MOD_RES (35)..(36): Xaa is C or S
  MOD_RES (13)..(14)..(15)..(16)..(17): Xaa is A or G
  MOD_RES (18)..(19)..(20)..(21): Xaa is A or G or is absent

SEQ ID NO: 60028 - protein, 36 aa, Artificial Sequence; identical to SEQ ID NO: 31336
  GFR-binding peptide
  MOD_RES (2)..(4): Xaa is C or S
  MOD_RES (15)..(16)..(17)..(18)..(19): Xaa is A or G
  MOD_RES (20)..(21)..(22)..(23): Xaa is A or G or is absent

SEQ ID NO: 60029 - protein, 39 aa, Artificial Sequence; identical to SEQ ID NO: 25372
  GFR-binding peptide
  MOD_RES (2)..(34)..(35): Xaa is C or S

SEQ ID NO: 60030 - protein, 36 aa, Artificial Sequence; identical to SEQ ID NO: 4319
  GFR-binding peptide
  MOD_RES (1)..(3)..(35)..(36): Xaa is C or S

SEQ ID NO: 60031 - protein, 36 aa, Artificial Sequence; identical to SEQ ID NO: 31348
  GFR-binding peptide
  MOD_RES (2)..(34)..(35): Xaa is C or S

SEQ ID NO: 60032 - protein, 38 aa, Artificial Sequence; identical to SEQ ID NO: 31349
  GFR-binding peptide
  MOD_RES (32)..(33): Xaa is C or S

SEQ ID NO: 60033 - protein, 38 aa, Artificial Sequence; identical to SEQ ID NO: 4324
  GFR-binding peptide
  MOD_RES (2)..(34)..(35): Xaa is C or S

SEQ ID NO: 60034 - protein, 37 aa, Artificial Sequence; identical to SEQ ID NO: 4325
  GFR-binding peptide
  MOD_RES (31)..(32): Xaa is C or S

SEQ ID NO: 60035 - protein, 33 aa, Artificial Sequence; identical to SEQ ID NO: 4326
  GFR-binding peptide
  MOD_RES (31)..(32): Xaa is C or S

SEQ ID NO: 60036 - protein, 36 aa, Artificial Sequence; identical to SEQ ID NO: 31351
  GFR-binding peptide
  MOD_RES (1)..(35)..(36): Xaa is C or S
  MOD_RES (13)..(14)..(15)..(16)..(17): Xaa is A or G
  MOD_RES (18)..(19)..(20)..(21): Xaa is A or G or is absent

SEQ ID NO: 60037 - protein, 38 aa, Artificial Sequence; identical to SEQ ID NO: 25387
  GFR-binding peptide
  MOD_RES (2)..(33)..(34): Xaa is C or S

SEQ ID NO: 60038 - protein, 35 aa, Artificial Sequence; identical to SEQ ID NO: 4327
  GFR-binding peptide
  MOD_RES (31)..(32): Xaa is C or S

SEQ ID NO: 60039 - protein, 36 aa, Artificial Sequence
  GFR-binding peptide
  MOD_RES (1)..(3)..(35)..(36): Xaa is C or S
XGXRDVVMGRHKRLIIQQKDNYYLMSTASMKTPTXX

SEQ ID NO: 60040 - protein, 34 aa, Artificial Sequence
  GFR-binding peptide
  MOD_RES (2)..(33)..(34): Xaa is C or S
KXSKVIMPIKGYIKPTKGIFYLINIPSLDQSVXX

SEQ ID NO: 60041 - protein, 43 aa, Artificial Sequence; identical to SEQ ID NO: 31353
  GFR-binding peptide
  MOD_RES (1)..(3)..(37)..(38): Xaa is C or S
  MOD_RES (15)..(16)..(17)..(18)..(19): Xaa is A or G
  MOD_RES (20)..(21)..(22)..(23): Xaa is A or G or is absent

SEQ ID NO: 60042 - protein, 38 aa, Artificial Sequence; identical to SEQ ID NO: 4328
  GFR-binding peptide
  MOD_RES (1)..(3)..(36)..(37): Xaa is C or S
  MOD_RES (14)..(15)..(16)..(17)..(18): Xaa is A or G
  MOD_RES (19)..(20)..(21)..(22): Xaa is A or G or is absent

SEQ ID NO: 60043 - protein, 34 aa, Artificial Sequence
  GFR-binding peptide
  MOD_RES (32)..(33): Xaa is C or S
ESVAMGRHKRLYTVVGKDYYLISTASLKTPVXXA

SEQ ID NO: 60044 - protein, 38 aa, Artificial Sequence; identical to SEQ ID NO: 25390
  GFR-binding peptide
  MOD_RES (33)..(34): Xaa is C or S
  MOD_RES (11)..(12)..(13)..(14)..(15): Xaa is A or G
  MOD_RES (16)..(17)..(18)..(19): Xaa is A or G or is absent

SEQ ID NO: 60045 - protein, 37 aa, Artificial Sequence; identical to SEQ ID NO: 4330
  GFR-binding peptide
  MOD_RES (2)..(4)..(35)..(36): Xaa is C or S

SEQ ID NO: 60046 - protein, 31 aa, Artificial Sequence; identical to SEQ ID NO: 31356
  GFR-binding peptide

SEQ ID NO: 60047 - protein, 34 aa, Artificial Sequence
  GFR-binding peptide
  MOD_RES (1)..(33)..(34): Xaa is C or S
XSEVVMDEYKFKVVNNASDLYLISIPELRTPVXX

SEQ ID NO: 60048 - protein, 35 aa, Artificial Sequence; identical to SEQ ID NO: 25397
  GFR-binding peptide
  MOD_RES (1)..(35): Xaa is C or S
  MOD_RES (13)..(14)..(15)..(16)..(17): Xaa is A or G
  MOD_RES (18)..(19)..(20)..(21): Xaa is A or G or is absent

SEQ ID NO: 60049 - protein, 37 aa, Artificial Sequence; identical to SEQ ID NO: 31360
  GFR-binding peptide
  MOD_RES (31)..(32): Xaa is C or S

SEQ ID NO: 60050 - protein, 37 aa, Artificial Sequence
  GFR-binding peptide
  MOD_RES (31)..(32): Xaa is C or S
EVVMDYHYKLVVNNASDKYLISIPSLRTPVXXTPPTS

SEQ ID NO: 60051 - protein, 39 aa, Artificial Sequence; identical to SEQ ID NO: 4340
  GFR-binding peptide
  MOD_RES (2)..(33)..(34): Xaa is C or S

SEQ ID NO: 60052 - protein, 38 aa, Artificial Sequence; identical to SEQ ID NO: 56275
  GFR-binding peptide
  MOD_RES (2)..(36)..(37): Xaa is C or S
  MOD_RES (14)..(15)..(16)..(17)..(18): Xaa is A or G
  MOD_RES (19)..(20)..(21)..(22): Xaa is A or G or is absent

SEQ ID NO: 60053 - protein, 39 aa, Artificial Sequence
  GFR-binding peptide
  MOD_RES (33)..(34): Xaa is C or S
  MOD_RES (11)..(12)..(13)..(14)..(15): Xaa is A or G
  MOD_RES (16)..(17)..(18)..(19): Xaa is A or G or is absent
DVVMGEYKFKXXXXXXXXXLYLMSIPEMKTPTXXPGASG

SEQ ID NO: 60054 - protein, 36 aa, Artificial Sequence; identical to SEQ ID NO: 4344
  GFR-binding peptide
  MOD_RES (1)..(32)..(33): Xaa is C or S

SEQ ID NO: 60055 - protein, 38 aa, Artificial Sequence; identical to SEQ ID NO: 31369
  GFR-binding peptide
  MOD_RES (1)..(3)..(36)..(37): Xaa is C or S

SEQ ID NO: 60056 - protein, 37 aa, Artificial Sequence; identical to SEQ ID NO: 4345
  GFR-binding peptide
  MOD_RES (1)..(3)..(37): Xaa is C or S
  MOD_RES (15)..(16)..(17)..(18)..(19): Xaa is A or G
  MOD_RES (20)..(21)..(22)..(23): Xaa is A or G or is absent

SEQ ID NO: 60057 - protein, 38 aa, Artificial Sequence; identical to SEQ ID NO: 25404
  GFR-binding peptide
  MOD_RES (2)..(34)..(35): Xaa is C or S

SEQ ID NO: 60058 - protein, 31 aa, Artificial Sequence; identical to SEQ ID NO: 25405
  GFR-binding peptide

SEQ ID NO: 60059 - protein, 40 aa, Artificial Sequence; identical to SEQ ID NO: 4347
  GFR-binding peptide
  MOD_RES (2)..(4)..(37)..(38): Xaa is C or S
  MOD_RES (15)..(16)..(17)..(18)..(19): Xaa is A or G
  MOD_RES (20)..(21)..(22)..(23): Xaa is A or G or is absent

SEQ ID NO: 60060 - protein, 42 aa, Artificial Sequence
  GFR-binding peptide
  MOD_RES (2)..(4)..(38)..(39): Xaa is C or S
  MOD_RES (16)..(17)..(18)..(19)..(20): Xaa is A or G
  MOD_RES (21)..(22)..(23)..(24): Xaa is A or G or is absent
RXGXSEVVMDYHYKLXXXXXXXXXKYLISIPSLRTPVXXTPP

SEQ ID NO: 60061 - protein, 43 aa, Artificial Sequence
  GFR-binding peptide
  MOD_RES (2)..(4)..(38)..(39): Xaa is C or S
  MOD_RES (16)..(17)..(18)..(19)..(20): Xaa is A or G
  MOD_RES (21)..(22)..(23)..(24): Xaa is A or G or is absent
RXGXSEVVMDRHKRLXXXXXXXXXYYLISTASLRTPVXXTPPT

SEQ ID NO: 60062 - protein, 34 aa, Artificial Sequence; identical to SEQ ID NO: 4351
  GFR-binding peptide
  MOD_RES (1)..(32)..(33): Xaa is C or S

SEQ ID NO: 60063 - protein, 37 aa, Artificial Sequence; identical to SEQ ID NO: 4353
  GFR-binding peptide
  MOD_RES (2)..(4)..(36)..(37): Xaa is C or S

SEQ ID NO: 60064 - protein, 39 aa, Artificial Sequence
  GFR-binding peptide
  MOD_RES (33)..(34): Xaa is C or S
  MOD_RES (11)..(12)..(13)..(14)..(15): Xaa is A or G
  MOD_RES (16)..(17)..(18)..(19): Xaa is A or G or is absent
DVVMGYHYKLXXXXXXXXXKYLMSIPSMKTPTXXPGASG

SEQ ID NO: 60065 - protein, 37 aa, Artificial Sequence; identical to SEQ ID NO: 56284
  GFR-binding peptide
  MOD_RES (1)..(34)..(35): Xaa is C or S
  MOD_RES (12)..(13)..(14)..(15)..(16): Xaa is A or G
  MOD_RES (17)..(18)..(19)..(20): Xaa is A or G or is absent

SEQ ID NO: 60066 - protein, 36 aa, Artificial Sequence; identical to SEQ ID NO: 4355
  GFR-binding peptide
  MOD_RES (31)..(32): Xaa is C or S

SEQ ID NO: 60067 - protein, 37 aa, Artificial Sequence; identical to SEQ ID NO: 25412
  GFR-binding peptide
  MOD_RES (32)..(33): Xaa is C or S

SEQ ID NO: 60068 - protein, 37 aa, Artificial Sequence; identical to SEQ ID NO: 4356
  GFR-binding peptide
  MOD_RES (2)..(4)..(36)..(37): Xaa is C or S

SEQ ID NO: 60069 - protein, 38 aa, Artificial Sequence; identical to SEQ ID NO: 31378
  GFR-binding peptide
  MOD_RES (1)..(35)..(36): Xaa is C or S
  MOD_RES (13)..(14)..(15)..(16)..(17): Xaa is A or G
  MOD_RES (18)..(19)..(20)..(21): Xaa is A or G or is absent

SEQ ID NO: 60070 - protein, 40 aa, Artificial Sequence
  GFR-binding peptide
  MOD_RES (1)..(35)..(36): Xaa is C or S
  MOD_RES (13)..(14)..(15)..(16)..(17): Xaa is A or G
  MOD_RES (18)..(19)..(20)..(21): Xaa is A or G or is absent
XRDVVMGYHYKLXXXXXXXXXKYLMSIPSMKTPTXXPGAS

SEQ ID NO: 60071 - protein, 39 aa, Artificial Sequence
  GFR-binding peptide
  MOD_RES (1)..(3)..(34)..(35): Xaa is C or S
XGXEEVIMRHKRLLLVRGNDYYLMSTASTKVPAXXTSPV

SEQ ID NO: 60072 - protein, 35 aa, Artificial Sequence; identical to SEQ ID NO: 31381
  GFR-binding peptide
  MOD_RES (34)..(35): Xaa is C or S
  MOD_RES (12)..(13)..(14)..(15)..(16): Xaa is A or G
  MOD_RES (17)..(18)..(19)..(20): Xaa is A or G or is absent

SEQ ID NO: 60073 - protein, 42 aa, Artificial Sequence; identical to SEQ ID NO: 4359
  GFR-binding peptide
  MOD_RES (2)..(4)..(38)..(39): Xaa is C or S
  MOD_RES (16)..(17)..(18)..(19)..(20): Xaa is A or G
  MOD_RES (21)..(22)..(23)..(24): Xaa is A or G or is absent

SEQ ID NO: 60074 - protein, 43 aa, Artificial Sequence
  GFR-binding peptide
  MOD_RES (1)..(3)..(37)..(38): Xaa is C or S
  MOD_RES (15)..(16)..(17)..(18)..(19): Xaa is A or G
  MOD_RES (20)..(21)..(22)..(23): Xaa is A or G or is absent
XGXSEVVMDYHYKLXXXXXXXXXKYLISIPSLRTPVXXTPPTS

SEQ ID NO: 60075 - protein, 42 aa, Artificial Sequence; identical to SEQ ID NO: 4360
  GFR-binding peptide
  MOD_RES (2)..(36)..(37): Xaa is C or S
  MOD_RES (14)..(15)..(16)..(17)..(18): Xaa is A or G
  MOD_RES (19)..(20)..(21)..(22): Xaa is A or G or is absent

SEQ ID NO: 60076 - protein, 35 aa, Artificial Sequence; identical to SEQ ID NO: 4361
  GFR-binding peptide
  MOD_RES (31)..(32): Xaa is C or S

SEQ ID NO: 60077 - protein, 32 aa, Artificial Sequence; identical to SEQ ID NO: 4362
  GFR-binding peptide
  MOD_RES (32)..(32): Xaa is C or S

SEQ ID NO: 60078 - protein, 34 aa, Artificial Sequence; identical to SEQ ID NO: 31383
  GFR-binding peptide
  MOD_RES (31)..(32): Xaa is C or S

SEQ ID NO: 60079 - protein, 31 aa, Artificial Sequence; identical to SEQ ID NO: 25420
  GFR-binding peptide

SEQ ID NO: 60080 - protein, 34 aa, Artificial Sequence; identical to SEQ ID NO: 31390
  GFR-binding peptide
  MOD_RES (33)..(34): Xaa is C or S
  MOD_RES (11)..(12)..(13)..(14)..(15): Xaa is A or G
  MOD_RES (16)..(17)..(18)..(19): Xaa is A or G or is absent

SEQ ID NO: 60081 - protein, 38 aa, Artificial Sequence; identical to SEQ ID NO: 25422
  GFR-binding peptide
  MOD_RES (32)..(33): Xaa is C or S

SEQ ID NO: 60082 - protein, 34 aa, Artificial Sequence; identical to SEQ ID NO: 4364
  GFR-binding peptide
  MOD_RES (1)..(1): Xaa is C or S
  MOD_RES (13)..(14)..(15)..(16)..(17): Xaa is A or G
  MOD_RES (18)..(19)..(20)..(21): Xaa is A or G or is absent

SEQ ID NO: 60083 - protein, 37 aa, Artificial Sequence
  GFR-binding peptide
  MOD_RES (1)..(3)..(37): Xaa is C or S
  MOD_RES (15)..(16)..(17)..(18)..(19): Xaa is A or G
  MOD_RES (20)..(21)..(22)..(23): Xaa is A or G or is absent
XAXSEVTMNEYKFKXXXXXXXXXLYLISIPEMKEPVX

SEQ ID NO: 60084 - protein, 38 aa, Artificial Sequence; identical to SEQ ID NO: 25425
  GFR-binding peptide
  MOD_RES (1)..(3)..(35)..(36): Xaa is C or S

SEQ ID NO: 60085 - protein, 33 aa, Artificial Sequence; identical to SEQ ID NO: 31396
  GFR-binding peptide
  MOD_RES (2)..(2): Xaa is C or S

SEQ ID NO: 60086 - protein, 40 aa, Artificial Sequence; identical to SEQ ID NO: 25427
  GFR-binding peptide
  MOD_RES (1)..(3)..(37)..(38): Xaa is C or S
  MOD_RES (15)..(16)..(17)..(18)..(19): Xaa is A or G
  MOD_RES (20)..(21)..(22)..(23): Xaa is A or G or is absent

SEQ ID NO: 60087 - protein, 40 aa, Artificial Sequence; identical to SEQ ID NO: 31400
  GFR-binding peptide
  MOD_RES (1)..(3)..(38)..(39): Xaa is C or S
  MOD_RES (16)..(17)..(18)..(19)..(20): Xaa is A or G
  MOD_RES (21)..(22)..(23)..(24): Xaa is A or G or is absent

SEQ ID NO: 60088 - protein, 42 aa, Artificial Sequence; identical to SEQ ID NO: 25430
  GFR-binding peptide
  MOD_RES (2)..(4)..(36)..(37): Xaa is C or S

SEQ ID NO: 60089 - protein, 33 aa, Artificial Sequence; identical to SEQ ID NO: 31407
  GFR-binding peptide
  MOD_RES (1)..(33): Xaa is C or S

SEQ ID NO: 60090 - protein, 39 aa, Artificial Sequence; identical to SEQ ID NO: 31411
  GFR-binding peptide
  MOD_RES (1)..(3)..(35)..(36): Xaa is C or S

SEQ ID NO: 60091 - protein, 33 aa, Artificial Sequence; identical to SEQ ID NO: 31412
  GFR-binding peptide
  MOD_RES (12)..(13)..(14)..(15)..(16): Xaa is A or G
  MOD_RES (17)..(18)..(19)..(20): Xaa is A or G or is absent

SEQ ID NO: 60092 - protein, 35 aa, Artificial Sequence; identical to SEQ ID NO: 25438
  GFR-binding peptide
  MOD_RES (1)..(35): Xaa is C or S
  MOD_RES (13)..(14)..(15)..(16)..(17): Xaa is A or G
  MOD_RES (18)..(19)..(20)..(21): Xaa is A or G or is absent

SEQ ID NO: 60093 - protein, 38 aa, Artificial Sequence; identical to SEQ ID NO: 11805
  GFR-binding peptide
  MOD_RES (34)..(35): Xaa is C or S
  MOD_RES (12)..(13)..(14)..(15)..(16): Xaa is A or G
  MOD_RES (17)..(18)..(19)..(20): Xaa is A or G or is absent

SEQ ID NO: 60094 - protein, 36 aa, Artificial Sequence; identical to SEQ ID NO: 25442
  GFR-binding peptide
  MOD_RES (1)..(3)..(34)..(35): Xaa is C or S

SEQ ID NO: 60095 - protein, 37 aa, Artificial Sequence; identical to SEQ ID NO: 4382
  GFR-binding peptide
  MOD_RES (1)..(3)..(37): Xaa is C or S
  MOD_RES (15)..(16)..(17)..(18)..(19): Xaa is A or G
  MOD_RES (20)..(21)..(22)..(23): Xaa is A or G or is absent

SEQ ID NO: 60096 - protein, 36 aa, Artificial Sequence; identical to SEQ ID NO: 25445
  GFR-binding peptide
  MOD_RES (1)..(3): Xaa is C or S
  MOD_RES (15)..(16)..(17)..(18)..(19): Xaa is A or G
  MOD_RES (20)..(21)..(22)..(23): Xaa is A or G or is absent

SEQ ID NO: 60097 - protein, 40 aa, Artificial Sequence; identical to SEQ ID NO: 4383
  GFR-binding peptide
  MOD_RES (2)..(4)..(37)..(38): Xaa is C or S
  MOD_RES (15)..(16)..(17)..(18)..(19): Xaa is A or G
  MOD_RES (20)..(21)..(22)..(23): Xaa is A or G or is absent

SEQ ID NO: 60098 - protein, 37 aa, Artificial Sequence
  GFR-binding peptide
  MOD_RES (1)..(34)..(35): Xaa is C or S
  MOD_RES (12)..(13)..(14)..(15)..(16): Xaa is A or G
  MOD_RES (17)..(18)..(19)..(20): Xaa is A or G or is absent
XEEVIMEYKFKXXXXXXXXXLYLMSIPETKVPAXXTS

SEQ ID NO: 60099 - protein, 38 aa, Artificial Sequence
  GFR-binding peptide
  MOD_RES (1)..(33)..(34): Xaa is C or S
XSEVTMNRYKKLVVNKNEDFYLISIANMKEPVXXPEPI

SEQ ID NO: 60100 - protein, 36 aa, Artificial Sequence; identical to SEQ ID NO: 4385
  GFR-binding peptide
  MOD_RES (2)..(36): Xaa is C or S
  MOD_RES (14)..(15)..(16)..(17)..(18): Xaa is A or G
  MOD_RES (19)..(20)..(21)..(22): Xaa is A or G or is absent

SEQ ID NO: 60101 - protein, 40 aa, Artificial Sequence; identical to SEQ ID NO: 31425
  GFR-binding peptide
  MOD_RES (2)..(4)..(36)..(37): Xaa is C or S

SEQ ID NO: 60102 - protein, 36 aa, Artificial Sequence; identical to SEQ ID NO: 4386
  GFR-binding peptide
  MOD_RES (2)..(4): Xaa is C or S
  MOD_RES (15)..(16)..(17)..(18)..(19): Xaa is A or G
  MOD_RES (20)..(21)..(22)..(23): Xaa is A or G or is absent

SEQ ID NO: 60103 - protein, 32 aa, Artificial Sequence
  GFR-binding peptide
  MOD_RES (31)..(32): Xaa is C or S
DVVMGYHYKLIIQQKDNKYLMSIPSMKTPTXX

SEQ ID NO: 60104 - protein, 36 aa, Artificial Sequence; identical to SEQ ID NO: 11819
  GFR-binding peptide
  MOD_RES (34)..(35): Xaa is C or S
  MOD_RES (12)..(13)..(14)..(15)..(16): Xaa is A or G
  MOD_RES (17)..(18)..(19)..(20): Xaa is A or G or is absent

SEQ ID NO: 60105 - protein, 40 aa, Artificial Sequence; identical to SEQ ID NO: 25451
  GFR-binding peptide
  MOD_RES (1)..(3)..(36)..(37): Xaa is C or S

SEQ ID NO: 60106 - protein, 33 aa, Artificial Sequence; identical to SEQ ID NO: 4393
  GFR-binding peptide
  MOD_RES (32)..(33): Xaa is C or S

SEQ ID NO: 60107 - protein, 35 aa, Artificial Sequence; identical to SEQ ID NO: 4395
  GFR-binding peptide
  MOD_RES (2)..(33)..(34): Xaa is C or S

SEQ ID NO: 60108 - protein, 40 aa, Artificial Sequence
  GFR-binding peptide
  MOD_RES (2)..(35)..(36): Xaa is C or S
  MOD_RES (13)..(14)..(15)..(16)..(17): Xaa is A or G
  MOD_RES (18)..(19)..(20)..(21): Xaa is A or G or is absent
GXEEVIMEYKFKXXXXXXXXXLYLMSIPETKVPAXXTSPV

SEQ ID NO: 60109 - protein, 40 aa, Artificial Sequence; identical to SEQ ID NO: 4396
  GFR-binding peptide
  MOD_RES (34)..(35): Xaa is C or S
  MOD_RES (12)..(13)..(14)..(15)..(16): Xaa is A or G
  MOD_RES (17)..(18)..(19)..(20): Xaa is A or G or is absent

SEQ ID NO: 60110 - protein, 38 aa, Artificial Sequence; identical to SEQ ID NO: 31430
  GFR-binding peptide
  MOD_RES (32)..(33): Xaa is C or S

SEQ ID NO: 60111 - protein, 33 aa, Artificial Sequence; identical to SEQ ID NO: 4399
  GFR-binding peptide
  MOD_RES (1)..(33): Xaa is C or S

SEQ ID NO: 60112 - protein, 34 aa, Artificial Sequence; identical to SEQ ID NO: 4402
  GFR-binding peptide
  MOD_RES (1)..(3): Xaa is C or S

SEQ ID NO: 60113 - protein, 35 aa, Artificial Sequence; identical to SEQ ID NO: 4403
  GFR-binding peptide
  MOD_RES (2)..(34)..(35): Xaa is C or S

SEQ ID NO: 60114 - protein, 34 aa, Artificial Sequence
  GFR-binding peptide
  MOD_RES (33)..(34): Xaa is C or S
  MOD_RES (11)..(12)..(13)..(14)..(15): Xaa is A or G
  MOD_RES (16)..(17)..(18)..(19): Xaa is A or G or is absent
EEVIMRHKRLXXXXXXXXXYYLMSTASTKVPAXX

SEQ ID NO: 60115 - protein, 35 aa, Artificial Sequence; identical to SEQ ID NO: 4404
  GFR-binding peptide
  MOD_RES (1)..(1): Xaa is C or S
  MOD_RES (14)..(15)..(16)..(17)..(18): Xaa is A or G
  MOD_RES (19)..(20)..(21)..(22): Xaa is A or G or is absent

SEQ ID NO: 60116 - protein, 40 aa, Artificial Sequence; identical to SEQ ID NO: 31441
  GFR-binding peptide
  MOD_RES (1)..(3)..(35)..(36): Xaa is C or S

SEQ ID NO: 60117 - protein, 34 aa, Artificial Sequence; identical to SEQ ID NO: 4405
  GFR-binding peptide
  MOD_RES (31)..(32): Xaa is C or S

SEQ ID NO: 60118 - protein, 34 aa, Artificial Sequence; identical to SEQ ID NO: 4409
  GFR-binding peptide
  MOD_RES (2)..(34): Xaa is C or S

SEQ ID NO: 60119 - protein, 38 aa, Artificial Sequence; identical to SEQ ID NO: 25473
  GFR-binding peptide
  MOD_RES (2)..(34): Xaa is C or S

SEQ ID NO: 60120 - protein, 40 aa, Artificial Sequence
  GFR-binding peptide
  MOD_RES (1)..(34)..(35): Xaa is C or S
  MOD_RES (12)..(13)..(14)..(15)..(16): Xaa is A or G
  MOD_RES (17)..(18)..(19)..(20): Xaa is A or G or is absent
XSRVIMPIKGYXXXXXXXXXFYLINIPSLAQPVXXPAASA

SEQ ID NO: 60121 - protein, 37 aa, Artificial Sequence
  GFR-binding peptide
  MOD_RES (1)..(3)..(37): Xaa is C or S
  MOD_RES (15)..(16)..(17)..(18)..(19): Xaa is A or G
  MOD_RES (20)..(21)..(22)..(23): Xaa is A or G or is absent
XGXAEVVMDRHKRLXXXXXXXXXYYLISTASLRAPVX

SEQ ID NO: 60122 - protein, 33 aa, Artificial Sequence; identical to SEQ ID NO: 4413
  GFR-binding peptide
  MOD_RES (1)..(32)..(33): Xaa is C or S

SEQ ID NO: 60123 - protein, 35 aa, Artificial Sequence; identical to SEQ ID NO: 31453
  GFR-binding peptide
  MOD_RES (2)..(4): Xaa is C or S

SEQ ID NO: 60124 - protein, 35 aa, Artificial Sequence; identical to SEQ ID NO: 4415
  GFR-binding peptide
  MOD_RES (31)..(32): Xaa is C or S

SEQ ID NO: 60125 - protein, 37 aa, Artificial Sequence
  GFR-binding peptide
  MOD_RES (33)..(34): Xaa is C or S
  MOD_RES (11)..(12)..(13)..(14)..(15): Xaa is A or G
  MOD_RES (16)..(17)..(18)..(19): Xaa is A or G or is absent
EEVIMRHKRLXXXXXXXXXYYLMSTASTKVPAXXTSP

SEQ ID NO: 60126 - protein, 33 aa, Artificial Sequence; identical to SEQ ID NO: 4417
  GFR-binding peptide
  MOD_RES (31)..(32): Xaa is C or S

SEQ ID NO: 60127 - protein, 38 aa, Artificial Sequence
  GFR-binding peptide
  MOD_RES (1)..(3)..(35)..(36): Xaa is C or S
XAXSEVTMNYHYKLVVNKNEDKYLISIPSMKEPVXXPE

SEQ ID NO: 60128 - protein, 35 aa, Artificial Sequence
  GFR-binding peptide
  MOD_RES (2)..(35): Xaa is C or S
  MOD_RES (13)..(14)..(15)..(16)..(17): Xaa is A or G
  MOD_RES (18)..(19)..(20)..(21): Xaa is A or G or is absent
GXEEVIMYHYKLXXXXXXXXXKYLMSIPSTKVPAX

SEQ ID NO: 60129 - protein, 34 aa, Artificial Sequence; identical to SEQ ID NO: 4423
  GFR-binding peptide
  MOD_RES (1)..(34): Xaa is C or S
  MOD_RES (12)..(13)..(14)..(15)..(16): Xaa is A or G
  MOD_RES (17)..(18)..(19)..(20): Xaa is A or G or is absent

SEQ ID NO: 60130 - protein, 38 aa, Artificial Sequence; identical to SEQ ID NO: 25491
  GFR-binding peptide
  MOD_RES (2)..(4)..(38): Xaa is C or S
  MOD_RES (16)..(17)..(18)..(19)..(20): Xaa is A or G
  MOD_RES (21)..(22)..(23)..(24): Xaa is A or G or is absent

SEQ ID NO: 60131 - protein, 36 aa, Artificial Sequence; identical to SEQ ID NO: 4425
  GFR-binding peptide
  MOD_RES (2)..(4): Xaa is C or S

SEQ ID NO: 60132 - protein, 38 aa, Artificial Sequence; identical to SEQ ID NO: 4428
  GFR-binding peptide
  MOD_RES (2)..(33)..(34): Xaa is C or S

SEQ ID NO: 60133 - protein, 39 aa, Artificial Sequence
  GFR-binding peptide
  MOD_RES (34)..(35): Xaa is C or S
  MOD_RES (12)..(13)..(14)..(15)..(16): Xaa is A or G
  MOD_RES (17)..(18)..(19)..(20): Xaa is A or G or is absent
AEVVMDRHKRLXXXXXXXXXYYLISTASLRAPVXXSAPA

SEQ ID NO: 60134 - protein, 44 aa, Artificial Sequence; identical to SEQ ID NO: 25501
  GFR-binding peptide
  MOD_RES (2)..(4)..(38)..(39): Xaa is C or S
  MOD_RES (16)..(17)..(18)..(19)..(20): Xaa is A or G
  MOD_RES (21)..(22)..(23)..(24): Xaa is A or G or is absent

SEQ ID NO: 60135 - protein, 34 aa, Artificial Sequence; identical to SEQ ID NO: 4433
  GFR-binding peptide
  MOD_RES (1)..(33)..(34): Xaa is C or S

SEQ ID NO: 60136 - protein, 35 aa, Artificial Sequence; identical to SEQ ID NO: 4434
  GFR-binding peptide
  MOD_RES (2)..(34)..(35): Xaa is C or S

SEQ ID NO: 60137 - protein, 36 aa, Artificial Sequence; identical to SEQ ID NO: 25509
  GFR-binding peptide
  MOD_RES (34)..(35): Xaa is C or S
  MOD_RES (12)..(13)..(14)..(15)..(16): Xaa is A or G
  MOD_RES (17)..(18)..(19)..(20): Xaa is A or G or is absent

SEQ ID NO: 60138 - protein, 39 aa, Artificial Sequence; identical to SEQ ID NO: 31473
  GFR-binding peptide
  MOD_RES (1)..(33)..(34): Xaa is C or S

SEQ ID NO: 60139 - protein, 40 aa, Artificial Sequence
  GFR-binding peptide
  MOD_RES (1)..(35)..(36): Xaa is C or S
  MOD_RES (13)..(14)..(15)..(16)..(17): Xaa is A or G
  MOD_RES (18)..(19)..(20)..(21): Xaa is A or G or is absent
XSEVVMDRHKRLXXXXXXXXXYYLISTASLRTPVXXTPPT

SEQ ID NO: 60140 - protein, 42 aa, Artificial Sequence; identical to SEQ ID NO: 25516
  GFR-binding peptide
  MOD_RES (2)..(36)..(37): Xaa is C or S
  MOD_RES (14)..(15)..(16)..(17)..(18): Xaa is A or G
  MOD_RES (19)..(20)..(21)..(22): Xaa is A or G or is absent

SEQ ID NO: 60141 - protein, 32 aa, Artificial Sequence
  GFR-binding peptide
  MOD_RES (31)..(32): Xaa is C or S
EVVMDEYKFKVVNNASDLYLISIPELRTPVXX

SEQ ID NO: 60142 - protein, 41 aa, Artificial Sequence; identical to SEQ ID NO: 31477
  GFR-binding peptide
  MOD_RES (2)..(4)..(36)..(37): Xaa is C or S

SEQ ID NO: 60143 - protein, 41 aa, Artificial Sequence; identical to SEQ ID NO: 25518
  GFR-binding peptide
  MOD_RES (2)..(4)..(38)..(39): Xaa is C or S
  MOD_RES (16)..(17)..(18)..(19)..(20): Xaa is A or G
  MOD_RES (21)..(22)..(23)..(24): Xaa is A or G or is absent

SEQ ID NO: 60144 - protein, 39 aa, Artificial Sequence
  GFR-binding peptide
  MOD_RES (2)..(4)..(38)..(39): Xaa is C or S
  MOD_RES (16)..(17)..(18)..(19)..(20): Xaa is A or G
  MOD_RES (21)..(22)..(23)..(24): Xaa is A or G or is absent
RXGXSEVVMDRHKRLXXXXXXXXXYYLISTASLRTPVXX

SEQ ID NO: 60145 - protein, 41 aa, Artificial Sequence
  GFR-binding peptide
  MOD_RES (2)..(36)..(37): Xaa is C or S
  MOD_RES (14)..(15)..(16)..(17)..(18): Xaa is A or G
  MOD_RES (19)..(20)..(21)..(22): Xaa is A or G or is absent
GXAEVVMDRHKRLXXXXXXXXXYYLISTASLRAPVXXSAPA

SEQ ID NO: 60146 - protein, 42 aa, Artificial Sequence; identical to SEQ ID NO: 31480
  GFR-binding peptide
  MOD_RES (2)..(36)..(37): Xaa is C or S
  MOD_RES (14)..(15)..(16)..(17)..(18): Xaa is A or G
  MOD_RES (19)..(20)..(21)..(22): Xaa is A or G or is absent

SEQ ID NO: 60147 - protein, 44 aa, Artificial Sequence; identical to SEQ ID NO: 25519
  GFR-binding peptide
  MOD_RES (2)..(4)..(38)..(39): Xaa is C or S
  MOD_RES (16)..(17)..(18)..(19)..(20): Xaa is A or G
  MOD_RES (21)..(22)..(23)..(24): Xaa is A or G or is absent

SEQ ID NO: 60148 - protein, 40 aa, Artificial Sequence
  GFR-binding peptide
  MOD_RES (34)..(35): Xaa is C or S
  MOD_RES (12)..(13)..(14)..(15)..(16): Xaa is A or G
  MOD_RES (17)..(18)..(19)..(20): Xaa is A or G or is absent
SEVTMNYHYKLXXXXXXXXXKYLISIPSMKEPVXXPEPIG

SEQ ID NO: 60149 - protein, 39 aa, Artificial Sequence; identical to SEQ ID NO: 4445
  GFR-binding peptide
  MOD_RES (33)..(33): Xaa is C or S
  MOD_RES (11)..(12)..(13)..(14)..(15): Xaa is A or G
  MOD_RES (16)..(17)..(18)..(19): Xaa is A or G or is absent

SEQ ID NO: 60150 - protein, 35 aa, Artificial Sequence
  GFR-binding peptide
  MOD_RES (2)..(2): Xaa is C or S
  MOD_RES (14)..(15)..(16)..(17)..(18): Xaa is A or G
  MOD_RES (19)..(20)..(21)..(22): Xaa is A or G or is absent
GXAEVVMDRHKRLXXXXXXXXXYYLISTASLRAPV

SEQ ID NO: 60151 - protein, 36 aa, Artificial Sequence
  GFR-binding peptide
  MOD_RES (1)..(35)..(36): Xaa is C or S
  MOD_RES (13)..(14)..(15)..(16)..(17): Xaa is A or G
  MOD_RES (18)..(19)..(20)..(21): Xaa is A or G or is absent
XSEVVMDYHYKLXXXXXXXXXKYLISIPSLRTPVXX

SEQ ID NO: 60152 - protein, 36 aa, Artificial Sequence; identical to SEQ ID NO: 4447
  GFR-binding peptide
  MOD_RES (31)..(32): Xaa is C or S

SEQ ID NO: 60153 - protein, 38 aa, Artificial Sequence; identical to SEQ ID NO: 56411
  GFR-binding peptide
  MOD_RES (1)..(3)..(35)..(36): Xaa is C or S

SEQ ID NO: 60154 - protein, 34 aa, Artificial Sequence
  GFR-binding peptide
  MOD_RES (1)..(1): Xaa is C or S
  MOD_RES (13)..(14)..(15)..(16)..(17): Xaa is A or G
  MOD_RES (18)..(19)..(20)..(21): Xaa is A or G or is absent
XRDVVMGRHKRLXXXXXXXXXYYLMSTASMKTPT

SEQ ID NO: 60155 - protein, 41 aa, Artificial Sequence; identical to SEQ ID NO: 4449
  GFR-binding peptide
  MOD_RES (1)..(3)..(38)..(39): Xaa is C or S
  MOD_RES (16)..(17)..(18)..(19)..(20): Xaa is A or G
  MOD_RES (21)..(22)..(23)..(24): Xaa is A or G or is absent

SEQ ID NO: 60156 - protein, 35 aa, Artificial Sequence; identical to SEQ ID NO: 4451
  GFR-binding peptide
  MOD_RES (33)..(34): Xaa is C or S
  MOD_RES (11)..(12)..(13)..(14)..(15): Xaa is A or G
  MOD_RES (16)..(17)..(18)..(19): Xaa is A or G or is absent

SEQ ID NO: 60157 - protein, 41 aa, Artificial Sequence; identical to SEQ ID NO: 25526
  GFR-binding peptide
  MOD_RES (2)..(4)..(38)..(39): Xaa is C or S
  MOD_RES (16)..(17)..(18)..(19)..(20): Xaa is A or G
  MOD_RES (21)..(22)..(23)..(24): Xaa is A or G or is absent

SEQ ID NO: 60158 - protein, 37 aa, Artificial Sequence
  GFR-binding peptide
  MOD_RES (31)..(32): Xaa is C or S
EVVMDRHKRLVVNNASDYYLISTASLRTPVXXTPPTS

SEQ ID NO: 60159 - protein, 36 aa, Artificial Sequence
  GFR-binding peptide
  MOD_RES (1)..(35)..(36): Xaa is C or S
  MOD_RES (13)..(14)..(15)..(16)..(17): Xaa is A or G
  MOD_RES (18)..(19)..(20)..(21): Xaa is A or G or is absent
XSEVTMNRYKKLXXXXXXXXXFYLISIANMKEPVXX

SEQ ID NO: 60160 - protein, 36 aa, Artificial Sequence; identical to SEQ ID NO: 31494
  GFR-binding peptide
  MOD_RES (1)..(33): Xaa is C or S

SEQ ID NO: 60161 - protein, 39 aa, Artificial Sequence; identical to SEQ ID NO: 25529
  GFR-binding peptide
  MOD_RES (1)..(35)..(36): Xaa is C or S
  MOD_RES (13)..(14)..(15)..(16)..(17): Xaa is A or G
  MOD_RES (18)..(19)..(20)..(21): Xaa is A or G or is absent

SEQ ID NO: 60162 - protein, 32 aa, Artificial Sequence; identical to SEQ ID NO: 31498
  GFR-binding peptide
  MOD_RES (11)..(12)..(13)..(14)..(15): Xaa is A or G
  MOD_RES (16)..(17)..(18)..(19): Xaa is A or G or is absent

SEQ ID NO: 60163 - protein, 39 aa, Artificial Sequence
  GFR-binding peptide
  MOD_RES (33)..(34): Xaa is C or S
  MOD_RES (11)..(12)..(13)..(14)..(15): Xaa is A or G
  MOD_RES (16)..(17)..(18)..(19): Xaa is A or G or is absent
RVVMNRHKRLXXXXXXXXXYYLVSTASLKTPAXXPKPVH

SEQ ID NO: 60164 - protein, 43 aa, Artificial Sequence; identical to SEQ ID NO: 4454
  GFR-binding peptide
  MOD_RES (2)..(4)..(37)..(38): Xaa is C or S
  MOD_RES (15)..(16)..(17)..(18)..(19): Xaa is A or G
  MOD_RES (20)..(21)..(22)..(23): Xaa is A or G or is absent

SEQ ID NO: 60165 - protein, 39 aa, Artificial Sequence; identical to SEQ ID NO: 25535
  GFR-binding peptide
  MOD_RES (1)..(3)..(36)..(37): Xaa is C or S
  MOD_RES (14)..(15)..(16)..(17)..(18): Xaa is A or G
  MOD_RES (19)..(20)..(21)..(22): Xaa is A or G or is absent

SEQ ID NO: 60166 - protein, 36 aa, Artificial Sequence; identical to SEQ ID NO: 4459
  GFR-binding peptide
  MOD_RES (2)..(4): Xaa is C or S
  MOD_RES (15)..(16)..(17)..(18)..(19): Xaa is A or G
  MOD_RES (20)..(21)..(22)..(23): Xaa is A or G or is absent

SEQ ID NO: 60167 - protein, 36 aa, Artificial Sequence; identical to SEQ ID NO: 4460
  GFR-binding peptide
  MOD_RES (1)..(34)..(35): Xaa is C or S
  MOD_RES (12)..(13)..(14)..(15)..(16): Xaa is A or G
  MOD_RES (17)..(18)..(19)..(20): Xaa is A or G or is absent

SEQ ID NO: 60168 - protein, 34 aa, Artificial Sequence; identical to SEQ ID NO: 56431
  GFR-binding peptide
  MOD_RES (1)..(33)..(34): Xaa is C or S

SEQ ID NO: 60169 - protein, 41 aa, Artificial Sequence
  GFR-binding peptide
  MOD_RES (2)..(4)..(36)..(37): Xaa is C or S
RXGXSEVVMDYHYKLVVNNASDKYLISIPSLRTPVXXTPPT

SEQ ID NO: 60170 - protein, 42 aa, Artificial Sequence; identical to SEQ ID NO: 31509
  GFR-binding peptide
  MOD_RES (2)..(4)..(36)..(37): Xaa is C or S

SEQ ID NO: 60171 - protein, 41 aa, Artificial Sequence
  GFR-binding peptide
  MOD_RES (1)..(3)..(37)..(38): Xaa is C or S
  MOD_RES (15)..(16)..(17)..(18)..(19): Xaa is A or G
  MOD_RES (20)..(21)..(22)..(23): Xaa is A or G or is absent
XAXSEVTMNYHYKLXXXXXXXXXKYLISIPSMKEPVXXPEP

SEQ ID NO: 60172 - protein, 35 aa, Artificial Sequence; identical to SEQ ID NO: 4465
  GFR-binding peptide
  MOD_RES (32)..(33): Xaa is C or S

SEQ ID NO: 60173 - protein, 33 aa, Artificial Sequence; identical to SEQ ID NO: 4468
  GFR-binding peptide
  MOD_RES (2)..(2): Xaa is C or S

SEQ ID NO: 60174 - protein, 36 aa, Artificial Sequence
  GFR-binding peptide
  MOD_RES (1)..(3)..(35)..(36): Xaa is C or S
XGXAEVVMDRHKRLVVNNAADYYLISTASLRAPVXX

SEQ ID NO: 60175 - protein, 33 aa, Artificial Sequence; identical to SEQ ID NO: 4473
  GFR-binding peptide
  MOD_RES (2)..(2): Xaa is C or S

SEQ ID NO: 60176 - protein, 39 aa, Artificial Sequence; identical to SEQ ID NO: 25557
  GFR-binding peptide
  MOD_RES (1)..(33)..(34): Xaa is C or S

SEQ ID NO: 60177 - protein, 39 aa, Artificial Sequence; identical to SEQ ID NO: 31520
  GFR-binding peptide
  MOD_RES (2)..(36)..(37): Xaa is C or S
  MOD_RES (14)..(15)..(16)..(17)..(18): Xaa is A or G
  MOD_RES (19)..(20)..(21)..(22): Xaa is A or G or is absent

SEQ ID NO: 60178 - protein, 33 aa, Artificial Sequence
  GFR-binding peptide
  MOD_RES (2)..(2): Xaa is C or S
GXRDVVMGYHYKLIIQQKDNKYLMSIPSMKTPT

SEQ ID NO: 60179 - protein, 34 aa, Artificial Sequence
  GFR-binding peptide
  MOD_RES (1)..(33)..(34): Xaa is C or S
XAEVVMDRHKRLVVNNAADYYLISTASLRAPVXX

SEQ ID NO: 60180 - protein, 35 aa, Artificial Sequence; identical to SEQ ID NO: 4480
  GFR-binding peptide
  MOD_RES (31)..(32): Xaa is C or S

SEQ ID NO: 60181 - protein, 34 aa, Artificial Sequence; identical to SEQ ID NO: 25568
  GFR-binding peptide
  MOD_RES (33)..(34): Xaa is C or S
  MOD_RES (11)..(12)..(13)..(14)..(15): Xaa is A or G
  MOD_RES (16)..(17)..(18)..(19): Xaa is A or G or is absent

SEQ ID NO: 60182 - protein, 36 aa, Artificial Sequence
  GFR-binding peptide
  MOD_RES (32)..(33): Xaa is C or S
RDVVMGYHYKLIIQQKDNKYLMSIPSMKTPTXXPGA

SEQ ID NO: 60183 - protein, 38 aa, Artificial Sequence; identical to SEQ ID NO: 4481
  GFR-binding peptide
  MOD_RES (1)..(3)..(37)..(38): Xaa is C or S
  MOD_RES (15)..(16)..(17)..(18)..(19): Xaa is A or G
  MOD_RES (20)..(21)..(22)..(23): Xaa is A or G or is absent

SEQ ID NO: 60184 - protein, 39 aa, Artificial Sequence; identical to SEQ ID NO: 4483
  GFR-binding peptide
  MOD_RES (1)..(34)..(35): Xaa is C or S
  MOD_RES (12)..(13)..(14)..(15)..(16): Xaa is A or G
  MOD_RES (17)..(18)..(19)..(20): Xaa is A or G or is absent

SEQ ID NO: 60185 - protein, 36 aa, Artificial Sequence; identical to SEQ ID NO: 11916
  GFR-binding peptide
  MOD_RES (2)..(4)..(36): Xaa is C or S

SEQ ID NO: 60186 - protein, 37 aa, Artificial Sequence; identical to SEQ ID NO: 4485
  GFR-binding peptide
  MOD_RES (2)..(33)..(34): Xaa is C or S

SEQ ID NO: 60187 - protein, 38 aa, Artificial Sequence; identical to SEQ ID NO: 31539
  GFR-binding peptide
  MOD_RES (2)..(36)..(37): Xaa is C or S
  MOD_RES (14)..(15)..(16)..(17)..(18): Xaa is A or G
  MOD_RES (19)..(20)..(21)..(22): Xaa is A or G or is absent

SEQ ID NO: 60188 - protein, 37 aa, Artificial Sequence; identical to SEQ ID NO: 31542
  GFR-binding peptide
  MOD_RES (1)..(35)..(36): Xaa is C or S
  MOD_RES (13)..(14)..(15)..(16)..(17): Xaa is A or G
  MOD_RES (18)..(19)..(20)..(21): Xaa is A or G or is absent

SEQ ID NO: 60189 - protein, 40 aa, Artificial Sequence; identical to SEQ ID NO: 25580
  GFR-binding peptide
  MOD_RES (2)..(36)..(37): Xaa is C or S
  MOD_RES (14)..(15)..(16)..(17)..(18): Xaa is A or G
  MOD_RES (19)..(20)..(21)..(22): Xaa is A or G or is absent

SEQ ID NO: 60190 - protein, 41 aa, Artificial Sequence
  GFR-binding peptide
  MOD_RES (1)..(3)..(36)..(37): Xaa is C or S
  MOD_RES (14)..(15)..(16)..(17)..(18): Xaa is A or G
  MOD_RES (19)..(20)..(21)..(22): Xaa is A or G or is absent
XGXEEVIMYHYKLXXXXXXXXXKYLMSIPSTKVPAXXTSPV

SEQ ID NO: 60191 - protein, 35 aa, Artificial Sequence; identical to SEQ ID NO: 4491
  GFR-binding peptide
  MOD_RES (1)..(33)..(34): Xaa is C or S

SEQ ID NO: 60192 - protein, 37 aa, Artificial Sequence
  GFR-binding peptide
  MOD_RES (1)..(3)..(35)..(36): Xaa is C or S
XAXSEVTMNEYKFKVVNKNEDLYLISIPEMKEPVXXP

SEQ ID NO: 60193 - protein, 38 aa, Artificial Sequence; identical to SEQ ID NO: 25584
  GFR-binding peptide
  MOD_RES (2)..(36)..(37): Xaa is C or S
  MOD_RES (14)..(15)..(16)..(17)..(18): Xaa is A or G
  MOD_RES (19)..(20)..(21)..(22): Xaa is A or G or is absent

SEQ ID NO: 60194 - protein, 38 aa, Artificial Sequence; identical to SEQ ID NO: 31550
  GFR-binding peptide
  MOD_RES (2)..(4)..(36)..(37): Xaa is C or S

SEQ ID NO: 60195 - protein, 41 aa, Artificial Sequence; identical to SEQ ID NO: 4493
  GFR-binding peptide
  MOD_RES (1)..(3)..(35)..(36): Xaa is C or S

SEQ ID NO: 60196 - protein, 34 aa, Artificial Sequence
  GFR-binding peptide
  MOD_RES (2)..(2): Xaa is C or S
  MOD_RES (13)..(14)..(15)..(16)..(17): Xaa is A or G
  MOD_RES (18)..(19)..(20)..(21): Xaa is A or G or is absent
GXEEVIMYHYKLXXXXXXXXXKYLMSIPSTKVPA

SEQ ID NO: 60197 - protein, 40 aa, Artificial Sequence; identical to SEQ ID NO: 25586
  GFR-binding peptide
  MOD_RES (2)..(35)..(36): Xaa is C or S
  MOD_RES (13)..(14)..(15)..(16)..(17): Xaa is A or G
  MOD_RES (18)..(19)..(20)..(21): Xaa is A or G or is absent

SEQ ID NO: 60198 - protein, 42 aa, Artificial Sequence; identical to SEQ ID NO: 4496
  GFR-binding peptide
  MOD_RES (1)..(3)..(36)..(37): Xaa is C or S
  MOD_RES (14)..(15)..(16)..(17)..(18): Xaa is A or G
  MOD_RES (19)..(20)..(21)..(22): Xaa is A or G or is absent

SEQ ID NO: 60199 - protein, 40 aa, Artificial Sequence; identical to SEQ ID NO: 4497
  GFR-binding peptide
  MOD_RES (2)..(36)..(37): Xaa is C or S
  MOD_RES (14)..(15)..(16)..(17)..(18): Xaa is A or G
  MOD_RES (19)..(20)..(21)..(22): Xaa is A or G or is absent

SEQ ID NO: 60200 - protein, 34 aa, Artificial Sequence; identical to SEQ ID NO: 31555
  GFR-binding peptide
  MOD_RES (34)..(34): Xaa is C or S
  MOD_RES (12)..(13)..(14)..(15)..(16): Xaa is A or G
  MOD_RES (17)..(18)..(19)..(20): Xaa is A or G or is absent

SEQ ID NO: 60201 - protein, 37 aa, Artificial Sequence; identical to SEQ ID NO: 31556
  GFR-binding peptide
  MOD_RES (32)..(33): Xaa is C or S

SEQ ID NO: 60202 - protein, 39 aa, Artificial Sequence; identical to SEQ ID NO: 31557
  GFR-binding peptide
  MOD_RES (1)..(3)..(38)..(39): Xaa is C or S
  MOD_RES (16)..(17)..(18)..(19)..(20): Xaa is A or G
  MOD_RES (21)..(22)..(23)..(24): Xaa is A or G or is absent

SEQ ID NO: 60203 - protein, 35 aa, Artificial Sequence; identical to SEQ ID NO: 31558
  GFR-binding peptide
  MOD_RES (2)..(35): Xaa is C or S

SEQ ID NO: 60204 - protein, 43 aa, Artificial Sequence; identical to SEQ ID NO: 31560
  GFR-binding peptide
  MOD_RES (2)..(4)..(37)..(38): Xaa is C or S

SEQ ID NO: 60205 - protein, 39 aa, Artificial Sequence; identical to SEQ ID NO: 4500
  GFR-binding peptide
  MOD_RES (34)..(35): Xaa is C or S
  MOD_RES (12)..(13)..(14)..(15)..(16): Xaa is A or G
  MOD_RES (17)..(18)..(19)..(20): Xaa is A or G or is absent

SEQ ID NO: 60206 - protein, 38 aa, Artificial Sequence; identical to SEQ ID NO: 25596
  GFR-binding peptide
  MOD_RES (1)..(32)..(33): Xaa is C or S

SEQ ID NO: 60207 - protein, 35 aa, Artificial Sequence; identical to SEQ ID NO: 25599
  GFR-binding peptide
  MOD_RES (2)..(34)..(35): Xaa is C or S

SEQ ID NO: 60208 - protein, 37 aa, Artificial Sequence; identical to SEQ ID NO: 4503
  GFR-binding peptide
  MOD_RES (31)..(32): Xaa is C or S

SEQ ID NO: 60209 - protein, 36 aa, Artificial Sequence; identical to SEQ ID NO: 56490
  GFR-binding peptide
  MOD_RES (1)..(32)..(33): Xaa is C or S

SEQ ID NO: 60210 - protein, 39 aa, Artificial Sequence
  GFR-binding peptide
  MOD_RES (1)..(3)..(37)..(38): Xaa is C or S
  MOD_RES (15)..(16)..(17)..(18)..(19): Xaa is A or G
  MOD_RES (20)..(21)..(22)..(23): Xaa is A or G or is absent
XAXSEVTMNEYKFKXXXXXXXXXLYLISIPEMKEPVXXP

SEQ ID NO: 60211 - protein, 39 aa, Artificial Sequence; identical to SEQ ID NO: 4504
  GFR-binding peptide
  MOD_RES (1)..(33)..(34): Xaa is C or S

SEQ ID NO: 60212 - protein, 37 aa, Artificial Sequence; identical to SEQ ID NO: 11946
  GFR-binding peptide
  MOD_RES (2)..(4)..(36)..(37): Xaa is C or S

SEQ ID NO: 60213 - protein, 37 aa, Artificial Sequence
  GFR-binding peptide
  MOD_RES (2)..(4)..(35)..(36): Xaa is C or S
LXGXEEVIMYHYKLLLVRGNDKYLMSIPSTKVPAXXT

SEQ ID NO: 60214 - protein, 40 aa, Artificial Sequence; identical to SEQ ID NO: 31571
  GFR-binding peptide
  MOD_RES (2)..(4)..(36)..(37): Xaa is C or S

SEQ ID NO: 60215 - protein, 37 aa, Artificial Sequence; identical to SEQ ID NO: 4511
  GFR-binding peptide
  MOD_RES (2)..(35)..(36): Xaa is C or S
  MOD_RES (13)..(14)..(15)..(16)..(17): Xaa is A or G
  MOD_RES (18)..(19)..(20)..(21): Xaa is A or G or is absent

SEQ ID NO: 60216 - protein, 41 aa, Artificial Sequence; identical to SEQ ID NO: 25606
  GFR-binding peptide
  MOD_RES (1)..(3)..(37)..(38): Xaa is C or S
  MOD_RES (15)..(16)..(17)..(18)..(19): Xaa is A or G
  MOD_RES (20)..(21)..(22)..(23): Xaa is A or G or is absent

SEQ ID NO: 60217 - protein, 40 aa, Artificial Sequence
  GFR-binding peptide
  MOD_RES (2)..(4)..(38)..(39): Xaa is C or S
  MOD_RES (16)..(17)..(18)..(19)..(20): Xaa is A or G
  MOD_RES (21)..(22)..(23)..(24): Xaa is A or G or is absent
RXGXSEVVMDRHKRLXXXXXXXXXYYLISTASLRTPVXXT

SEQ ID NO: 60218 - protein, 39 aa, Artificial Sequence; identical to SEQ ID NO: 4514
  GFR-binding peptide
  MOD_RES (2)..(36)..(37): Xaa is C or S
  MOD_RES (14)..(15)..(16)..(17)..(18): Xaa is A or G
  MOD_RES (19)..(20)..(21)..(22): Xaa is A or G or is absent

SEQ ID NO: 60219 - protein, 32 aa, Artificial Sequence; identical to SEQ ID NO: 56508
  GFR-binding peptide
  MOD_RES (1)..(1): Xaa is C or S

SEQ ID NO: 60220 - protein, 38 aa, Artificial Sequence; identical to SEQ ID NO: 4519
  GFR-binding peptide
  MOD_RES (32)..(33): Xaa is C or S

SEQ ID NO: 60221 - protein, 33 aa, Artificial Sequence; identical to SEQ ID NO: 4520
  GFR-binding peptide
  MOD_RES (31)..(32): Xaa is C or S

SEQ ID NO: 60222 - protein, 37 aa, Artificial Sequence; identical to SEQ ID NO: 4521
  GFR-binding peptide
  MOD_RES (34)..(35): Xaa is C or S
  MOD_RES (12)..(13)..(14)..(15)..(16): Xaa is A or G
  MOD_RES (17)..(18)..(19)..(20): Xaa is A or G or is absent

SEQ ID NO: 60223 - protein, 35 aa, Artificial Sequence; identical to SEQ ID NO: 4523
  GFR-binding peptide
  MOD_RES (33)..(34): Xaa is C or S
  MOD_RES (11)..(12)..(13)..(14)..(15): Xaa is A or G
  MOD_RES (16)..(17)..(18)..(19): Xaa is A or G or is absent

SEQ ID NO: 60224 - protein, 36 aa, Artificial Sequence; identical to SEQ ID NO: 4524
  GFR-binding peptide
  MOD_RES (1)..(3): Xaa is C or S
  MOD_RES (15)..(16)..(17)..(18)..(19): Xaa is A or G
  MOD_RES (20)..(21)..(22)..(23): Xaa is A or G or is absent

SEQ ID NO: 60225 - protein, 41 aa, Artificial Sequence
  GFR-binding peptide
  MOD_RES (2)..(4)..(36)..(37): Xaa is C or S
RXAXSEVTMNPIKGYVVNKNEDFYLINIPSMKEPVXXPEPI

SEQ ID NO: 60226 - protein, 36 aa, Artificial Sequence; identical to SEQ ID NO: 25623
  GFR-binding peptide
  MOD_RES (1)..(33): Xaa is C or S

SEQ ID NO: 60227 - protein, 38 aa, Artificial Sequence; identical to SEQ ID NO: 25627
  GFR-binding peptide
  MOD_RES (1)..(33)..(34): Xaa is C or S

SEQ ID NO: 60228 - protein, 41 aa, Artificial Sequence; identical to SEQ ID NO: 4532
  GFR-binding peptide
  MOD_RES (2)..(4)..(39)..(40): Xaa is C or S
  MOD_RES (17)..(18)..(19)..(20)..(21): Xaa is A or G
  MOD_RES (22)..(23)..(24)..(25): Xaa is A or G or is absent

SEQ ID NO: 60229 - protein, 43 aa, Artificial Sequence; identical to SEQ ID NO: 31601
  GFR-binding peptide
  MOD_RES (1)..(3)..(37): Xaa is C or S
  MOD_RES (15)..(16)..(17)..(18)..(19): Xaa is A or G
  MOD_RES (20)..(21)..(22)..(23): Xaa is A or G or is absent

SEQ ID NO: 60230 - protein, 39 aa, Artificial Sequence; identical to SEQ ID NO: 4533
  GFR-binding peptide
  MOD_RES (1)..(35)..(36): Xaa is C or S
  MOD_RES (13)..(14)..(15)..(16)..(17): Xaa is A or G
  MOD_RES (18)..(19)..(20)..(21): Xaa is A or G or is absent

SEQ ID NO: 60231 - protein, 38 aa, Artificial Sequence; identical to SEQ ID NO: 4535
  GFR-binding peptide
  MOD_RES (2)..(4)..(36): Xaa is C or S

SEQ ID NO: 60232 - protein, 34 aa, Artificial Sequence; identical to SEQ ID NO: 4538
  GFR-binding peptide
  MOD_RES (2)..(33)..(34): Xaa is C or S

SEQ ID NO: 60233 - protein, 34 aa, Artificial Sequence; identical to SEQ ID NO: 4540
  GFR-binding peptide
  MOD_RES (2)..(34): Xaa is C or S

SEQ ID NO: 60234 - protein, 37 aa, Artificial Sequence; identical to SEQ ID NO: 25637
  GFR-binding peptide
  MOD_RES (2)..(4)..(36)..(37): Xaa is C or S

SEQ ID NO: 60235 - protein, 40 aa, Artificial Sequence; identical to SEQ ID NO: 4543
  GFR-binding peptide
  MOD_RES (1)..(3)..(34)..(35): Xaa is C or S

SEQ ID NO: 60236 - protein, 34 aa, Artificial Sequence
  GFR-binding peptide
  MOD_RES (2)..(34): Xaa is C or S
GXAEVVMDRHKRLVVNNAADYYLISTASLRAPVX

SEQ ID NO: 60237 - protein, 38 aa, Artificial Sequence
  GFR-binding peptide
  MOD_RES (33)..(34): Xaa is C or S
  MOD_RES (11)..(12)..(13)..(14)..(15): Xaa is A or G
  MOD_RES (16)..(17)..(18)..(19): Xaa is A or G or is absent
SKVIMPIKGYXXXXXXXXXFYLINIPSLDQSVXXPSAS

SEQ ID NO: 60238 - protein, 41 aa, Artificial Sequence; identical to SEQ ID NO: 4547
  GFR-binding peptide
  MOD_RES (2)..(4)..(38)..(39): Xaa is C or S
  MOD_RES (16)..(17)..(18)..(19)..(20): Xaa is A or G
  MOD_RES (21)..(22)..(23)..(24): Xaa is A or G or is absent

SEQ ID NO: 60239 - protein, 33 aa, Artificial Sequence; identical to SEQ ID NO: 25642
  GFR-binding peptide
  MOD_RES (12)..(13)..(14)..(15)..(16): Xaa is A or G
  MOD_RES (17)..(18)..(19)..(20): Xaa is A or G or is absent

SEQ ID NO: 60240 - protein, 39 aa, Artificial Sequence; identical to SEQ ID NO: 25645
  GFR-binding peptide
  MOD_RES (2)..(34)..(35): Xaa is C or S

SEQ ID NO: 60241 - protein, 40 aa, Artificial Sequence; identical to SEQ ID NO: 4551
  GFR-binding peptide
  MOD_RES (1)..(35)..(36): Xaa is C or S
  MOD_RES (13)..(14)..(15)..(16)..(17): Xaa is A or G
  MOD_RES (18)..(19)..(20)..(21): Xaa is A or G or is absent

SEQ ID NO: 60242 - protein, 42 aa, Artificial Sequence
  GFR-binding peptide
  MOD_RES (2)..(4)..(38)..(39): Xaa is C or S
  MOD_RES (16)..(17)..(18)..(19)..(20): Xaa is A or G
  MOD_RES (21)..(22)..(23)..(24): Xaa is A or G or is absent
RXAXSEVTMNRHKRLXXXXXXXXXYYLISTASMKEPVXXPEP

SEQ ID NO: 60243 - protein, 37 aa, Artificial Sequence; identical to SEQ ID NO: 4562
  GFR-binding peptide
  MOD_RES (1)..(35)..(36): Xaa is C or S
  MOD_RES (13)..(14)..(15)..(16)..(17): Xaa is A or G
  MOD_RES (18)..(19)..(20)..(21): Xaa is A or G or is absent

SEQ ID NO: 60244 - protein, 38 aa, Artificial Sequence; identical to SEQ ID NO: 4566
  GFR-binding peptide
  MOD_RES (1)..(3)..(36)..(37): Xaa is C or S
  MOD_RES (14)..(15)..(16)..(17)..(18): Xaa is A or G
  MOD_RES (19)..(20)..(21)..(22): Xaa is A or G or is absent

SEQ ID NO: 60245 - protein, 39 aa, Artificial Sequence; identical to SEQ ID NO: 25658
  GFR-binding peptide
  MOD_RES (1)..(35)..(36): Xaa is C or S
  MOD_RES (13)..(14)..(15)..(16)..(17): Xaa is A or G
  MOD_RES (18)..(19)..(20)..(21): Xaa is A or G or is absent

SEQ ID NO: 60246 - protein, 37 aa, Artificial Sequence; identical to SEQ ID NO: 31621
  GFR-binding peptide
  MOD_RES (2)..(4)..(36)..(37): Xaa is C or S

SEQ ID NO: 60247 - protein, 37 aa, Artificial Sequence; identical to SEQ ID NO: 4567
  GFR-binding peptide
  MOD_RES (1)..(3)..(37): Xaa is C or S
  MOD_RES (15)..(16)..(17)..(18)..(19): Xaa is A or G
  MOD_RES (20)..(21)..(22)..(23): Xaa is A or G or is absent

SEQ ID NO: 60248 - protein, 37 aa, Artificial Sequence
  GFR-binding peptide
  MOD_RES (2)..(36)..(37): Xaa is C or S
  MOD_RES (14)..(15)..(16)..(17)..(18): Xaa is A or G
  MOD_RES (19)..(20)..(21)..(22): Xaa is A or G or is absent
AXSEVTMNRYKKLXXXXXXXXXFYLISIANMKEPVXX

SEQ ID NO: 60249 - protein, 39 aa, Artificial Sequence; identical to SEQ ID NO: 4570
  GFR-binding peptide
  MOD_RES (1)..(3)..(35)..(36): Xaa is C or S

SEQ ID NO: 60250 - protein, 41 aa, Artificial Sequence
  GFR-binding peptide
  MOD_RES (1)..(35)..(36): Xaa is C or S
  MOD_RES (13)..(14)..(15)..(16)..(17): Xaa is A or G
  MOD_RES (18)..(19)..(20)..(21): Xaa is A or G or is absent
XSRVVMNEYKFKXXXXXXXXXLYLVSIPELKTPAXXPKPVH

SEQ ID NO: 60251 - protein, 39 aa, Artificial Sequence
  GFR-binding peptide
  MOD_RES (1)..(35)..(36): Xaa is C or S
  MOD_RES (13)..(14)..(15)..(16)..(17): Xaa is A or G
  MOD_RES (18)..(19)..(20)..(21): Xaa is A or G or is absent
XSEVTMNPIKGYXXXXXXXXXFYLINIPSMKEPVXXPEP

SEQ ID NO: 60252 - protein, 37 aa, Artificial Sequence; identical to SEQ ID NO: 4573
  GFR-binding peptide
  MOD_RES (34)..(35): Xaa is C or S
  MOD_RES (12)..(13)..(14)..(15)..(16): Xaa is A or G
  MOD_RES (17)..(18)..(19)..(20): Xaa is A or G or is absent

SEQ ID NO: 60253 - protein, 36 aa, Artificial Sequence; identical to SEQ ID NO: 25663
  GFR-binding peptide
  MOD_RES (33)..(34): Xaa is C or S
  MOD_RES (11)..(12)..(13)..(14)..(15): Xaa is A or G
  MOD_RES (16)..(17)..(18)..(19): Xaa is A or G or is absent

SEQ ID NO: 60254 - protein, 37 aa, Artificial Sequence; identical to SEQ ID NO: 31632
  GFR-binding peptide
  MOD_RES (1)..(3)..(37): Xaa is C or S
  MOD_RES (15)..(16)..(17)..(18)..(19): Xaa is A or G
  MOD_RES (20)..(21)..(22)..(23): Xaa is A or G or is absent

SEQ ID NO: 60255 - protein, 36 aa, Artificial Sequence; identical to SEQ ID NO: 56558
  GFR-binding peptide
  MOD_RES (2)..(4)..(35)..(36): Xaa is C or S

SEQ ID NO: 60256 - protein, 41 aa, Artificial Sequence; identical to SEQ ID NO: 4575
  GFR-binding peptide
  MOD_RES (1)..(3)..(35)..(36): Xaa is C or S

SEQ ID NO: 60257 - protein, 40 aa, Artificial Sequence; identical to SEQ ID NO: 31634
  GFR-binding peptide
  MOD_RES (1)..(3)..(35)..(36): Xaa is C or S

SEQ ID NO: 60258 - protein, 38 aa, Artificial Sequence; identical to SEQ ID NO: 4579
  GFR-binding peptide
  MOD_RES (32)..(33): Xaa is C or S

SEQ ID NO: 60259 - protein, 37 aa, Artificial Sequence; identical to SEQ ID NO: 25669
  GFR-binding peptide
  MOD_RES (32)..(33): Xaa is C or S

SEQ ID NO: 60260 - protein, 33 aa, Artificial Sequence
  GFR-binding peptide
  MOD_RES (1)..(1): Xaa is C or S
  MOD_RES (12)..(13)..(14)..(15)..(16): Xaa is A or G
  MOD_RES (17)..(18)..(19)..(20): Xaa is A or G or is absent
XEEVIMYHYKLXXXXXXXXXKYLMSIPSTKVPA

SEQ ID NO: 60261 - protein, 41 aa, Artificial Sequence
  GFR-binding peptide
  MOD_RES (1)..(3)..(35)..(36): Xaa is C or S
XAXSEVTMNYHYKLVVNKNEDKYLISIPSMKEPVXXPEPIG

SEQ ID NO: 60262 - protein, 37 aa, Artificial Sequence; identical to SEQ ID NO: 31639
  GFR-binding peptide
  MOD_RES (31)..(32): Xaa is C or S

SEQ ID NO: 60263 - protein, 34 aa, Artificial Sequence; identical to SEQ ID NO: 25672
  GFR-binding peptide
  MOD_RES (34)..(34): Xaa is C or S
  MOD_RES (12)..(13)..(14)..(15)..(16): Xaa is A or G
  MOD_RES (17)..(18)..(19)..(20): Xaa is A or G or is absent

SEQ ID NO: 60264 - protein, 35 aa, Artificial Sequence; identical to SEQ ID NO: 4584
  GFR-binding peptide
  MOD_RES (2)..(2): Xaa is C or S
  MOD_RES (14)..(15)..(16)..(17)..(18): Xaa is A or G
  MOD_RES (19)..(20)..(21)..(22): Xaa is A or G or is absent

SEQ ID NO: 60265 - protein, 38 aa, Artificial Sequence; identical to SEQ ID NO: 56577
  GFR-binding peptide
  MOD_RES (1)..(33)..(34): Xaa is C or S

SEQ ID NO: 60266 - protein, 40 aa, Artificial Sequence
  GFR-binding peptide
  MOD_RES (1)..(3)..(37)..(38): Xaa is C or S
  MOD_RES (15)..(16)..(17)..(18)..(19): Xaa is A or G
  MOD_RES (20)..(21)..(22)..(23): Xaa is A or G or is absent
XGXRDVVMGEYKFKXXXXXXXXXLYLMSIPEMKTPTXXPG

SEQ ID NO: 60267 - protein, 32 aa, Artificial Sequence; identical to SEQ ID NO: 25681
  GFR-binding peptide
  MOD_RES (1)..(1): Xaa is C or S

SEQ ID NO: 60268 - protein, 40 aa, Artificial Sequence
  GFR-binding peptide
  MOD_RES (1)..(35)..(36): Xaa is C or S
  MOD_RES (13)..(14)..(15)..(16)..(17): Xaa is A or G
  MOD_RES (18)..(19)..(20)..(21): Xaa is A or G or is absent
XESVAMGRHKRLXXXXXXXXXYYLISTASLKTPVXXAKSA

SEQ ID NO: 60269 - protein, 37 aa, Artificial Sequence
  GFR-binding peptide
  MOD_RES (31)..(32): Xaa is C or S
SKVIMPIKGYIKPTKGIFYLINIPSLDQSVXXPSASA

SEQ ID NO: 60270 - protein, 33 aa, Artificial Sequence
  GFR-binding peptide
  MOD_RES (2)..(33): Xaa is C or S
KXSKVIMPIKGYIKPTKGIFYLINIPSLDQSVX

SEQ ID NO: 60271 - protein, 40 aa, Artificial Sequence; identical to SEQ ID NO: 25686
  GFR-binding peptide
  MOD_RES (1)..(3)..(36)..(37): Xaa is C or S
  MOD_RES (14)..(15)..(16)..(17)..(18): Xaa is A or G
  MOD_RES (19)..(20)..(21)..(22): Xaa is A or G or is absent

SEQ ID NO: 60272 - protein, 37 aa, Artificial Sequence; identical to SEQ ID NO: 4594
  GFR-binding peptide
  MOD_RES (1)..(35)..(36): Xaa is C or S
  MOD_RES (13)..(14)..(15)..(16)..(17): Xaa is A or G
  MOD_RES (18)..(19)..(20)..(21): Xaa is A or G or is absent

SEQ ID NO: 60273 - protein, 33 aa, Artificial Sequence; identical to SEQ ID NO: 25688
  GFR-binding peptide
  MOD_RES (12)..(13)..(14)..(15)..(16): Xaa is A or G
  MOD_RES (17)..(18)..(19)..(20): Xaa is A or G or is absent

SEQ ID NO: 60274 - protein, 38 aa, Artificial Sequence; identical to SEQ ID NO: 25689
  GFR-binding peptide
  MOD_RES (2)..(36)..(37): Xaa is C or S
  MOD_RES (14)..(15)..(16)..(17)..(18): Xaa is A or G
  MOD_RES (19)..(20)..(21)..(22): Xaa is A or G or is absent

SEQ ID NO: 60275 - protein, 40 aa, Artificial Sequence; identical to SEQ ID NO: 4598
  GFR-binding peptide
  MOD_RES (1)..(3)..(35)..(36): Xaa is C or S

SEQ ID NO: 60276 - protein, 40 aa, Artificial Sequence; identical to SEQ ID NO: 25693
  GFR-binding peptide
  MOD_RES (2)..(34)..(35): Xaa is C or S

SEQ ID NO: 60277 - protein, 34 aa, Artificial Sequence; identical to SEQ ID NO: 4599
  GFR-binding peptide
  MOD_RES (1)..(3)..(34): Xaa is C or S

SEQ ID NO: 60278 - protein, 37 aa, Artificial Sequence; identical to SEQ ID NO: 31660
  GFR-binding peptide
  MOD_RES (1)..(3)..(35): Xaa is C or S

SEQ ID NO: 60279 - protein, 34 aa, Artificial Sequence; identical to SEQ ID NO: 4601
  GFR-binding peptide
  MOD_RES (1)..(3)..(34): Xaa is C or S

SEQ ID NO: 60280 - protein, 42 aa, Artificial Sequence; identical to SEQ ID NO: 4605
  GFR-binding peptide
  MOD_RES (2)..(4)..(38): Xaa is C or S
  MOD_RES (16)..(17)..(18)..(19)..(20): Xaa is A or G
  MOD_RES (21)..(22)..(23)..(24): Xaa is A or G or is absent

SEQ ID NO: 60281 - protein, 34 aa, Artificial Sequence
  GFR-binding peptide
  MOD_RES (33)..(34): Xaa is C or S
  MOD_RES (11)..(12)..(13)..(14)..(15): Xaa is A or G
  MOD_RES (16)..(17)..(18)..(19): Xaa is A or G or is absent
EEVIMEYKFKXXXXXXXXXLYLMSIPETKVPAXX

SEQ ID NO: 60282 - protein, 37 aa, Artificial Sequence
  GFR-binding peptide
  MOD_RES (1)..(32)..(33): Xaa is C or S
XSKVVMPIKGYVKPTRGVFYLINIPSLDQPVXXPSAS

SEQ ID NO: 60283 - protein, 34 aa, Artificial Sequence; identical to SEQ ID NO: 31668
  GFR-binding peptide
  MOD_RES (1)..(1): Xaa is C or S
  MOD_RES (13)..(14)..(15)..(16)..(17): Xaa is A or G
  MOD_RES (18)..(19)..(20)..(21): Xaa is A or G or is absent

SEQ ID NO: 60284 - protein, 34 aa, Artificial Sequence; identical to SEQ ID NO: 25703
  GFR-binding peptide
  MOD_RES (2)..(4): Xaa is C or S

SEQ ID NO: 60285 - protein, 36 aa, Artificial Sequence; identical to SEQ ID NO: 25708
  GFR-binding peptide
  MOD_RES (2)..(4)..(36): Xaa is C or S

SEQ ID NO: 60286 - protein, 41 aa, Artificial Sequence; identical to SEQ ID NO: 4617
  GFR-binding peptide
  MOD_RES (1)..(3)..(37)..(38): Xaa is C or S
  MOD_RES (15)..(16)..(17)..(18)..(19): Xaa is A or G
  MOD_RES (20)..(21)..(22)..(23): Xaa is A or G or is absent

SEQ ID NO: 60287 - protein, 37 aa, Artificial Sequence; identical to SEQ ID NO: 25712
  GFR-binding peptide
  MOD_RES (1)..(3)..(37): Xaa is C or S
  MOD_RES (15)..(16)..(17)..(18)..(19): Xaa is A or G
  MOD_RES (20)..(21)..(22)..(23): Xaa is A or G or is absent

SEQ ID NO: 60288 - protein, 32 aa, Artificial Sequence; identical to SEQ ID NO: 31672
  GFR-binding peptide
  MOD_RES (11)..(12)..(13)..(14)..(15): Xaa is A or G
  MOD_RES (16)..(17)..(18)..(19): Xaa is A or G or is absent

SEQ ID NO: 60289 - protein, 33 aa, Artificial Sequence
  GFR-binding peptide
  MOD_RES (32)..(33): Xaa is C or S
SEVVMDYHYKLVVNNASDKYLISIPSLRTPVXX

SEQ ID NO: 60290 - protein, 34 aa, Artificial Sequence; identical to SEQ ID NO: 25714
  GFR-binding peptide
  MOD_RES (1)..(34): Xaa is C or S
  MOD_RES (12)..(13)..(14)..(15)..(16): Xaa is A or G
  MOD_RES (17)..(18)..(19)..(20): Xaa is A or G or is absent

SEQ ID NO: 60291 - protein, 40 aa, Artificial Sequence; identical to SEQ ID NO: 31677
  GFR-binding peptide
  MOD_RES (2)..(4)..(38)..(39): Xaa is C or S
  MOD_RES (16)..(17)..(18)..(19)..(20): Xaa is A or G
  MOD_RES (21)..(22)..(23)..(24): Xaa is A or G or is absent

SEQ ID NO: 60292 - protein, 39 aa, Artificial Sequence; identical to SEQ ID NO: 4630
  GFR-binding peptide
  MOD_RES (1)..(34)..(35): Xaa is C or S
  MOD_RES (12)..(13)..(14)..(15)..(16): Xaa is A or G
  MOD_RES (17)..(18)..(19)..(20): Xaa is A or G or is absent

SEQ ID NO: 60293 - protein, 37 aa, Artificial Sequence; identical to SEQ ID NO: 31684
  GFR-binding peptide
  MOD_RES (1)..(3)..(35)..(36): Xaa is C or S

SEQ ID NO: 60294 - protein, 33 aa, Artificial Sequence
  GFR-binding peptide
  MOD_RES (1)..(33): Xaa is C or S
XAEVVMDRHKRLVVNNAADYYLISTASLRAPVX

SEQ ID NO: 60295 - protein, 39 aa, Artificial Sequence; identical to SEQ ID NO: 25718
  GFR-binding peptide
  MOD_RES (1)..(3)..(37)..(38): Xaa is C or S
  MOD_RES (15)..(16)..(17)..(18)..(19): Xaa is A or G
  MOD_RES (20)..(21)..(22)..(23): Xaa is A or G or is absent

SEQ ID NO: 60296 - protein, 41 aa, Artificial Sequence; identical to SEQ ID NO: 31685
  GFR-binding peptide
  MOD_RES (2)..(4)..(36)..(37): Xaa is C or S

SEQ ID NO: 60297 - protein, 39 aa, Artificial Sequence; identical to SEQ ID NO: 31686
  GFR-binding peptide
  MOD_RES (2)..(4)..(38)..(39): Xaa is C or S
  MOD_RES (16)..(17)..(18)..(19)..(20): Xaa is A or G
  MOD_RES (21)..(22)..(23)..(24): Xaa is A or G or is absent

SEQ ID NO: 60298 - protein, 34 aa, Artificial Sequence; identical to SEQ ID NO: 56623
  GFR-binding peptide
  MOD_RES (33)..(34): Xaa is C or S
  MOD_RES (11)..(12)..(13)..(14)..(15): Xaa is A or G
  MOD_RES (16)..(17)..(18)..(19): Xaa is A or G or is absent

SEQ ID NO: 60299 - protein, 41 aa, Artificial Sequence; identical to SEQ ID NO: 25720
  GFR-binding peptide
  MOD_RES (2)..(36)..(37): Xaa is C or S
  MOD_RES (14)..(15)..(16)..(17)..(18): Xaa is A or G
  MOD_RES (19)..(20)..(21)..(22): Xaa is A or G or is absent

SEQ ID NO: 60300 - protein, 37 aa, Artificial Sequence; identical to SEQ ID NO: 25722
  GFR-binding peptide
  MOD_RES (1)..(32)..(33): Xaa is C or S

SEQ ID NO: 60301 - protein, 36 aa, Artificial Sequence; identical to SEQ ID NO: 4634
  GFR-binding peptide
  MOD_RES (1)..(3): Xaa is C or S
  MOD_RES (15)..(16)..(17)..(18)..(19): Xaa is A or G
  MOD_RES (20)..(21)..(22)..(23): Xaa is A or G or is absent

SEQ ID NO: 60302 - protein, 34 aa, Artificial Sequence; identical to SEQ ID NO: 31688
  GFR-binding peptide
  MOD_RES (2)..(34): Xaa is C or S

SEQ ID NO: 60303 - protein, 39 aa, Artificial Sequence
  GFR-binding peptide
  MOD_RES (1)..(33)..(34): Xaa is C or S
XRDVVMGYHYKLIIQQKDNKYLMSIPSMKTPTXXPGASG

SEQ ID NO: 60304 - protein, 31 aa, Artificial Sequence
  GFR-binding peptide
  MOD_RES (31)..(31): Xaa is C or S
SVAMGRHKRLYTVVGKDYYLISTASLKTPVX

SEQ ID NO: 60305 - protein, 39 aa, Artificial Sequence; identical to SEQ ID NO: 25727
  GFR-binding peptide
  MOD_RES (2)..(36)..(37): Xaa is C or S
  MOD_RES (14)..(15)..(16)..(17)..(18): Xaa is A or G
  MOD_RES (19)..(20)..(21)..(22): Xaa is A or G or is absent

SEQ ID NO: 60306 - protein, 32 aa, Artificial Sequence; identical to SEQ ID NO: 31696
  GFR-binding peptide
  MOD_RES (1)..(1): Xaa is C or S

SEQ ID NO: 60307 - protein, 34 aa, Artificial Sequence; identical to SEQ ID NO: 31701
  GFR-binding peptide
  MOD_RES (31)..(32): Xaa is C or S

SEQ ID NO: 60308 - protein, 38 aa, Artificial Sequence
  GFR-binding peptide
  MOD_RES (32)..(33): Xaa is C or S
SRVVMNEYKFKIVNSSDDLYLVSIPELKTPAXXPKPVH

SEQ ID NO: 60309 - protein, 37 aa, Artificial Sequence; identical to SEQ ID NO: 31704
  GFR-binding peptide
  MOD_RES (2)..(36): Xaa is C or S
  MOD_RES (14)..(15)..(16)..(17)..(18): Xaa is A or G
  MOD_RES (19)..(20)..(21)..(22): Xaa is A or G or is absent

SEQ ID NO: 60310 - protein, 34 aa, Artificial Sequence; identical to SEQ ID NO: 56641
  GFR-binding peptide
  MOD_RES (1)..(34): Xaa is C or S
  MOD_RES (12)..(13)..(14)..(15)..(16): Xaa is A or G
  MOD_RES (17)..(18)..(19)..(20): Xaa is A or G or is absent

SEQ ID NO: 60311 - protein, 36 aa, Artificial Sequence; identical to SEQ ID NO: 31706
  GFR-binding peptide
  MOD_RES (33)..(34): Xaa is C or S
  MOD_RES (11)..(12)..(13)..(14)..(15): Xaa is A or G
  MOD_RES (16)..(17)..(18)..(19): Xaa is A or G or is absent

SEQ ID NO: 60312 - protein, 39 aa, Artificial Sequence; identical to SEQ ID NO: 4642
  GFR-binding peptide
  MOD_RES (34)..(35): Xaa is C or S
  MOD_RES (12)..(13)..(14)..(15)..(16): Xaa is A or G
  MOD_RES (17)..(18)..(19)..(20): Xaa is A or G or is absent

SEQ ID NO: 60313 - protein, 38 aa, Artificial Sequence
  GFR-binding peptide
  MOD_RES (2)..(4)..(38): Xaa is C or S
  MOD_RES (16)..(17)..(18)..(19)..(20): Xaa is A or G
  MOD_RES (21)..(22)..(23)..(24): Xaa is A or G or is absent
RXAXSEVTMNPIKGYXXXXXXXXXFYLINIPSMKEPVX

SEQ ID NO: 60314 - protein, 39 aa, Artificial Sequence; identical to SEQ ID NO: 4643
  GFR-binding peptide
  MOD_RES (2)..(35)..(36): Xaa is C or S
  MOD_RES (13)..(14)..(15)..(16)..(17): Xaa is A or G
  MOD_RES (18)..(19)..(20)..(21): Xaa is A or G or is absent

SEQ ID NO: 60315 - protein, 38 aa, Artificial Sequence; identical to SEQ ID NO: 56642
  GFR-binding peptide
  MOD_RES (1)..(35)..(36): Xaa is C or S
  MOD_RES (13)..(14)..(15)..(16)..(17): Xaa is A or G
  MOD_RES (18)..(19)..(20)..(21): Xaa is A or G or is absent

SEQ ID NO: 60316 - protein, 38 aa, Artificial Sequence; identical to SEQ ID NO: 31708
  GFR-binding peptide
  MOD_RES (2)..(34)..(35): Xaa is C or S

SEQ ID NO: 60317 - protein, 40 aa, Artificial Sequence; identical to SEQ ID NO: 31711
  GFR-binding peptide
  MOD_RES (1)..(35)..(36): Xaa is C or S
  MOD_RES (13)..(14)..(15)..(16)..(17): Xaa is A or G
  MOD_RES (18)..(19)..(20)..(21): Xaa is A or G or is absent

SEQ ID NO: 60318 - protein, 41 aa, Artificial Sequence; identical to SEQ ID NO: 25739
  GFR-binding peptide
  MOD_RES (1)..(3)..(35)..(36): Xaa is C or S

SEQ ID NO: 60319 - protein, 37 aa, Artificial Sequence; identical to SEQ ID NO: 31712
  GFR-binding peptide
  MOD_RES (1)..(35): Xaa is C or S
  MOD_RES (13)..(14)..(15)..(16)..(17): Xaa is A or G
  MOD_RES (18)..(19)..(20)..(21): Xaa is A or G or is absent

SEQ ID NO: 60320 - protein, 38 aa, Artificial Sequence; identical to SEQ ID NO: 4649
  GFR-binding peptide
  MOD_RES (1)..(3)..(34)..(35): Xaa is C or S

SEQ ID NO: 60321 - protein, 31 aa, Artificial Sequence; identical to SEQ ID NO: 4655
  GFR-binding peptide
  MOD_RES (1)..(1): Xaa is C or S

SEQ ID NO: 60322 - protein, 34 aa, Artificial Sequence; identical to SEQ ID NO: 31717
  GFR-binding peptide
  MOD_RES (2)..(2): Xaa is C or S

SEQ ID NO: 60323 - protein, 38 aa, Artificial Sequence; identical to SEQ ID NO: 25747
  GFR-binding peptide
  MOD_RES (1)..(3)..(37)..(38): Xaa is C or S
  MOD_RES (15)..(16)..(17)..(18)..(19): Xaa is A or G
  MOD_RES (20)..(21)..(22)..(23): Xaa is A or G or is absent

SEQ ID NO: 60324 - protein, 38 aa, Artificial Sequence; identical to SEQ ID NO: 25751
  GFR-binding peptide
  MOD_RES (33)..(34): Xaa is C or S
  MOD_RES (11)..(12)..(13)..(14)..(15): Xaa is A or G
  MOD_RES (16)..(17)..(18)..(19): Xaa is A or G or is absent

SEQ ID NO: 60325 - protein, 41 aa, Artificial Sequence; identical to SEQ ID NO: 25752
  GFR-binding peptide
  MOD_RES (2)..(36)..(37): Xaa is C or S
  MOD_RES (14)..(15)..(16)..(17)..(18): Xaa is A or G
  MOD_RES (19)..(20)..(21)..(22): Xaa is A or G or is absent

SEQ ID NO: 60326 - protein, 43 aa, Artificial Sequence
  GFR-binding peptide
  MOD_RES (2)..(4)..(38)..(39): Xaa is C or S
  MOD_RES (16)..(17)..(18)..(19)..(20): Xaa is A or G
  MOD_RES (21)..(22)..(23)..(24): Xaa is A or G or is absent
RXAXSEVTMNEYKFKXXXXXXXXXLYLISIPEMKEPVXXPEPI

SEQ ID NO: 60327 - protein, 38 aa, Artificial Sequence
  GFR-binding peptide
  MOD_RES (2)..(34)..(35): Xaa is C or S
AXSEVTMNRYKKLVVNKNEDFYLISIANMKEPVXXPEP

SEQ ID NO: 60328 - protein, 36 aa, Artificial Sequence
  GFR-binding peptide
  MOD_RES (2)..(35)..(36): Xaa is C or S
  MOD_RES (13)..(14)..(15)..(16)..(17): Xaa is A or G
  MOD_RES (18)..(19)..(20)..(21): Xaa is A or G or is absent
GXEEVIMRHKRLXXXXXXXXXYYLMSTASTKVPAXX

SEQ ID NO: 60329 - protein, 32 aa, Artificial Sequence; identical to SEQ ID NO: 4657
  GFR-binding peptide
  MOD_RES (32)..(32): Xaa is C or S

SEQ ID NO: 60330 - protein, 38 aa, Artificial Sequence
  GFR-binding peptide
  MOD_RES (1)..(3)..(36)..(37): Xaa is C or S
  MOD_RES (14)..(15)..(16)..(17)..(18): Xaa is A or G
  MOD_RES (19)..(20)..(21)..(22): Xaa is A or G or is absent
XKXSRVIMPIKGYXXXXXXXXXFYLINIPSLAQPVXXP

SEQ ID NO: 60331 - protein, 31 aa, Artificial Sequence; identical to SEQ ID NO: 4662
  GFR-binding peptide

SEQ ID NO: 60332 - protein, 40 aa, Artificial Sequence; identical to SEQ ID NO: 31728
  GFR-binding peptide
  MOD_RES (2)..(4)..(38)..(39): Xaa is C or S
  MOD_RES (16)..(17)..(18)..(19)..(20): Xaa is A or G
  MOD_RES (21)..(22)..(23)..(24): Xaa is A or G or is absent

SEQ ID NO: 60333 - protein, 38 aa, Artificial Sequence; identical to SEQ ID NO: 4667
  GFR-binding peptide
  MOD_RES (33)..(34): Xaa is C or S
  MOD_RES (11)..(12)..(13)..(14)..(15): Xaa is A or G
  MOD_RES (16)..(17)..(18)..(19): Xaa is A or G or is absent

SEQ ID NO: 60334 - protein, 36 aa, Artificial Sequence; identical to SEQ ID NO: 56670
  GFR-binding peptide
  MOD_RES (1)..(3)..(34)..(35): Xaa is C or S

SEQ ID NO: 60335 - protein, 39 aa, Artificial Sequence; identical to SEQ ID NO: 4668
  GFR-binding peptide
  MOD_RES (1)..(3)..(34)..(35): Xaa is C or S

SEQ ID NO: 60336 - protein, 37 aa, Artificial Sequence; identical to SEQ ID NO: 4669
  GFR-binding peptide
  MOD_RES (32)..(33): Xaa is C or S

SEQ ID NO: 60337 - protein, 42 aa, Artificial Sequence; identical to SEQ ID NO: 31735
  GFR-binding peptide
  MOD_RES (2)..(4)..(38)..(39): Xaa is C or S
  MOD_RES (16)..(17)..(18)..(19)..(20): Xaa is A or G
  MOD_RES (21)..(22)..(23)..(24): Xaa is A or G or is absent

SEQ ID NO: 60338 - protein, 37 aa, Artificial Sequence
  GFR-binding peptide
  MOD_RES (31)..(32): Xaa is C or S
EVTMNEYKFKVVNKNEDLYLISIPEMKEPVXXPEPIG

SEQ ID NO: 60339 - protein, 37 aa, Artificial Sequence; identical to SEQ ID NO: 4670
  GFR-binding peptide
  MOD_RES (2)..(36)..(37): Xaa is C or S
  MOD_RES (14)..(15)..(16)..(17)..(18): Xaa is A or G
  MOD_RES (19)..(20)..(21)..(22): Xaa is A or G or is absent

SEQ ID NO: 60340 - protein, 38 aa, Artificial Sequence
  GFR-binding peptide
  MOD_RES (34)..(35): Xaa is C or S
  MOD_RES (12)..(13)..(14)..(15)..(16): Xaa is A or G
  MOD_RES (17)..(18)..(19)..(20): Xaa is A or G or is absent
SEVTMNRYKKLXXXXXXXXXFYLISIANMKEPVXXPEP

SEQ ID NO: 60341 - protein, 35 aa, Artificial Sequence; identical to SEQ ID NO: 4671
  GFR-binding peptide
  MOD_RES (33)..(34): Xaa is C or S
  MOD_RES (11)..(12)..(13)..(14)..(15): Xaa is A or G
  MOD_RES (16)..(17)..(18)..(19): Xaa is A or G or is absent

SEQ ID NO: 60342 - protein, 38 aa, Artificial Sequence; identical to SEQ ID NO: 56673
  GFR-binding peptide
  MOD_RES (2)..(35)..(36): Xaa is C or S
  MOD_RES (13)..(14)..(15)..(16)..(17): Xaa is A or G
  MOD_RES (18)..(19)..(20)..(21): Xaa is A or G or is absent

SEQ ID NO: 60343 - protein, 39 aa, Artificial Sequence; identical to SEQ ID NO: 25764
  GFR-binding peptide
  MOD_RES (1)..(34)..(35): Xaa is C or S

SEQ ID NO: 60344 - protein, 32 aa, Artificial Sequence; identical to SEQ ID NO: 4673
  GFR-binding peptide
  MOD_RES (11)..(12)..(13)..(14)..(15): Xaa is A or G
  MOD_RES (16)..(17)..(18)..(19): Xaa is A or G or is absent

SEQ ID NO: 60345 - protein, 38 aa, Artificial Sequence
  GFR-binding peptide
  MOD_RES (2)..(34)..(35): Xaa is C or S
GXRDVVMGRHKRLIIQQKDNYYLMSTASMKTPTXXPGA

SEQ ID NO: 60346 - protein, 37 aa, Artificial Sequence; identical to SEQ ID NO: 25767
  GFR-binding peptide
  MOD_RES (1)..(3)..(35)..(36): Xaa is C or S

SEQ ID NO: 60347 - protein, 40 aa, Artificial Sequence; identical to SEQ ID NO: 4679
  GFR-binding peptide
  MOD_RES (2)..(34)..(35): Xaa is C or S

SEQ ID NO: 60348 - protein, 37 aa, Artificial Sequence; identical to SEQ ID NO: 4681
  GFR-binding peptide
  MOD_RES (1)..(3)..(34)..(35): Xaa is C or S

SEQ ID NO: 60349 - protein, 37 aa, Artificial Sequence
  GFR-binding peptide
  MOD_RES (1)..(3)..(35)..(36): Xaa is C or S
XGXSEVVMDYHYKLVVNNASDKYLISIPSLRTPVXXT

SEQ ID NO: 60350 - protein, 38 aa, Artificial Sequence; identical to SEQ ID NO: 31744
  GFR-binding peptide
  MOD_RES (2)..(36)..(37): Xaa is C or S
  MOD_RES (14)..(15)..(16)..(17)..(18): Xaa is A or G
  MOD_RES (19)..(20)..(21)..(22): Xaa is A or G or is absent

SEQ ID NO: 60351 - protein, 36 aa, Artificial Sequence; identical to SEQ ID NO: 4682
  GFR-binding peptide
  MOD_RES (2)..(33)..(34): Xaa is C or S

SEQ ID NO: 60352 - protein, 38 aa, Artificial Sequence
  GFR-binding peptide
  MOD_RES (2)..(34)..(35): Xaa is C or S
GXAEVVMDRHKRLVVNNAADYYLISTASLRAPVXXSAP

SEQ ID NO: 60353 - protein, 32 aa, Artificial Sequence; identical to SEQ ID NO: 4685
  GFR-binding peptide
  MOD_RES (1)..(32): Xaa is C or S

SEQ ID NO: 60354 - protein, 32 aa, Artificial Sequence
  GFR-binding peptide
  MOD_RES (1)..(32): Xaa is C or S
XSRVIMPIKGYVKPKRGVFYLINIPSLAQPVX

SEQ ID NO: 60355 - protein, 38 aa, Artificial Sequence; identical to SEQ ID NO: 56688
  GFR-binding peptide
  MOD_RES (1)..(32)..(33): Xaa is C or S

SEQ ID NO: 60356 - protein, 36 aa, Artificial Sequence; identical to SEQ ID NO: 4686
  GFR-binding peptide
  MOD_RES (2)..(35)..(36): Xaa is C or S
  MOD_RES (13)..(14)..(15)..(16)..(17): Xaa is A or G
  MOD_RES (18)..(19)..(20)..(21): Xaa is A or G or is absent

SEQ ID NO: 60357 - protein, 43 aa, Artificial Sequence; identical to SEQ ID NO: 25774
  GFR-binding peptide
  MOD_RES (2)..(4)..(37)..(38): Xaa is C or S
  MOD_RES (15)..(16)..(17)..(18)..(19): Xaa is A or G
  MOD_RES (20)..(21)..(22)..(23): Xaa is A or G or is absent

SEQ ID NO: 60358 - protein, 36 aa, Artificial Sequence
  GFR-binding peptide
  MOD_RES (2)..(36): Xaa is C or S
  MOD_RES (14)..(15)..(16)..(17)..(18): Xaa is A or G
  MOD_RES (19)..(20)..(21)..(22): Xaa is A or G or is absent
GXRDVVMGYHYKLXXXXXXXXXKYLMSIPSMKTPTX

SEQ ID NO: 60359 - protein, 38 aa, Artificial Sequence; identical to SEQ ID NO: 4687
  GFR-binding peptide
  MOD_RES (1)..(3)..(37)..(38): Xaa is C or S
  MOD_RES (15)..(16)..(17)..(18)..(19): Xaa is A or G
  MOD_RES (20)..(21)..(22)..(23): Xaa is A or G or is absent

SEQ ID NO: 60360 - protein, 32 aa, Artificial Sequence; identical to SEQ ID NO: 4688
  GFR-binding peptide
  MOD_RES (31)..(32): Xaa is C or S

SEQ ID NO: 60361 - protein, 36 aa, Artificial Sequence
  GFR-binding peptide
  MOD_RES (2)..(36): Xaa is C or S
  MOD_RES (14)..(15)..(16)..(17)..(18): Xaa is A or G
  MOD_RES (19)..(20)..(21)..(22): Xaa is A or G or is absent
GXSEVVMDYHYKLXXXXXXXXXKYLISIPSLRTPVX

SEQ ID NO: 60362 - protein, 36 aa, Artificial Sequence; identical to SEQ ID NO: 4691
  GFR-binding peptide
  MOD_RES (1)..(35)..(36): Xaa is C or S
  MOD_RES (13)..(14)..(15)..(16)..(17): Xaa is A or G
  MOD_RES (18)..(19)..(20)..(21): Xaa is A or G or is absent

SEQ ID NO: 60363 - protein, 41 aa, Artificial Sequence; identical to SEQ ID NO: 4692
  GFR-binding peptide
  MOD_RES (1)..(3)..(36)..(37): Xaa is C or S

SEQ ID NO: 60364 - protein, 36 aa, Artificial Sequence; identical to SEQ ID NO: 31767
  GFR-binding peptide
  MOD_RES (1)..(3)..(35)..(36): Xaa is C or S

SEQ ID NO: 60365 - protein, 35 aa, Artificial Sequence; identical to SEQ ID NO: 25782
  GFR-binding peptide
  MOD_RES (1)..(35): Xaa is C or S
  MOD_RES (13)..(14)..(15)..(16)..(17): Xaa is A or G
  MOD_RES (18)..(19)..(20)..(21): Xaa is A or G or is absent

SEQ ID NO: 60366 - protein, 38 aa, Artificial Sequence; identical to SEQ ID NO: 25783
  GFR-binding peptide
  MOD_RES (2)..(36)..(37): Xaa is C or S
  MOD_RES (14)..(15)..(16)..(17)..(18): Xaa is A or G
  MOD_RES (19)..(20)..(21)..(22): Xaa is A or G or is absent

SEQ ID NO: 60367 - protein, 41 aa, Artificial Sequence; identical to SEQ ID NO: 4694
  GFR-binding peptide
  MOD_RES (2)..(36)..(37): Xaa is C or S
  MOD_RES (14)..(15)..(16)..(17)..(18): Xaa is A or G
  MOD_RES (19)..(20)..(21)..(22): Xaa is A or G or is absent

SEQ ID NO: 60368 - protein, 40 aa, Artificial Sequence
  GFR-binding peptide
  MOD_RES (34)..(35): Xaa is C or S
  MOD_RES (12)..(13)..(14)..(15)..(16): Xaa is A or G
  MOD_RES (17)..(18)..(19)..(20): Xaa is A or G or is absent
SRVVMNYHYKLXXXXXXXXXKYLVSIPSLKTPAXXPKPVH

SEQ ID NO: 60369 - protein, 34 aa, Artificial Sequence; identical to SEQ ID NO: 4699
  GFR-binding peptide
  MOD_RES (2)..(33)..(34): Xaa is C or S

SEQ ID NO: 60370 - protein, 43 aa, Artificial Sequence; identical to SEQ ID NO: 4703
  GFR-binding peptide
  MOD_RES (1)..(3)..(37)..(38): Xaa is C or S
  MOD_RES (15)..(16)..(17)..(18)..(19): Xaa is A or G
  MOD_RES (20)..(21)..(22)..(23): Xaa is A or G or is absent

SEQ ID NO: 60371 - protein, 36 aa, Artificial Sequence; identical to SEQ ID NO: 4706
  GFR-binding peptide
  MOD_RES (1)..(34)..(35): Xaa is C or S
  MOD_RES (12)..(13)..(14)..(15)..(16): Xaa is A or G
  MOD_RES (17)..(18)..(19)..(20): Xaa is A or G or is absent

SEQ ID NO: 60372 - protein, 36 aa, Artificial Sequence
  GFR-binding peptide
  MOD_RES (1)..(3)..(34)..(35): Xaa is C or S
XGXEEVIMYHYKLLLVRGNDKYLMSIPSTKVPAXXT

SEQ ID NO: 60373 - protein, 34 aa, Artificial Sequence
  GFR-binding peptide
  MOD_RES (34)..(34): Xaa is C or S
  MOD_RES (12)..(13)..(14)..(15)..(16): Xaa is A or G
  MOD_RES (17)..(18)..(19)..(20): Xaa is A or G or is absent
RDVVMGRHKRLXXXXXXXXXYYLMSTASMKTPTX

SEQ ID NO: 60374 - protein, 40 aa, Artificial Sequence; identical to SEQ ID NO: 4707
  GFR-binding peptide
  MOD_RES (2)..(4)..(38): Xaa is C or S
  MOD_RES (16)..(17)..(18)..(19)..(20): Xaa is A or G
  MOD_RES (21)..(22)..(23)..(24): Xaa is A or G or is absent

SEQ ID NO: 60375 - protein, 37 aa, Artificial Sequence
  GFR-binding peptide
  MOD_RES (34)..(35): Xaa is C or S
  MOD_RES (12)..(13)..(14)..(15)..(16): Xaa is A or G
  MOD_RES (17)..(18)..(19)..(20): Xaa is A or G or is absent
SEVVMDEYKFKXXXXXXXXXLYLISIPELRTPVXXTP

SEQ ID NO: 60376 - protein, 34 aa, Artificial Sequence; identical to SEQ ID NO: 4712
  GFR-binding peptide
  MOD_RES (1)..(33)..(34): Xaa is C or S

SEQ ID NO: 60377 - protein, 35 aa, Artificial Sequence
  GFR-binding peptide
  MOD_RES (1)..(33)..(34): Xaa is C or S
XSEVTMNYHYKLVVNKNEDKYLISIPSMKEPVXXP

SEQ ID NO: 60378 - protein, 35 aa, Artificial Sequence; identical to SEQ ID NO: 4713
  GFR-binding peptide
  MOD_RES (2)..(2): Xaa is C or S
  MOD_RES (14)..(15)..(16)..(17)..(18): Xaa is A or G
  MOD_RES (19)..(20)..(21)..(22): Xaa is A or G or is absent

SEQ ID NO: 60379 - protein, 42 aa, Artificial Sequence; identical to SEQ ID NO: 25794
  GFR-binding peptide
  MOD_RES (1)..(3)..(36)..(37): Xaa is C or S
  MOD_RES (14)..(15)..(16)..(17)..(18): Xaa is A or G
  MOD_RES (19)..(20)..(21)..(22): Xaa is A or G or is absent

SEQ ID NO: 60380 - protein, 40 aa, Artificial Sequence; identical to SEQ ID NO: 31781
  GFR-binding peptide
  MOD_RES (2)..(34): Xaa is C or S

SEQ ID NO: 60381 - protein, 37 aa, Artificial Sequence; identical to SEQ ID NO: 25795
  GFR-binding peptide
  MOD_RES (32)..(33): Xaa is C or S

SEQ ID NO: 60382 - protein, 38 aa, Artificial Sequence; identical to SEQ ID NO: 4716
  GFR-binding peptide
  MOD_RES (2)..(37)..(38): Xaa is C or S
  MOD_RES (15)..(16)..(17)..(18)..(19): Xaa is A or G
  MOD_RES (20)..(21)..(22)..(23): Xaa is A or G or is absent

SEQ ID NO: 60383 - protein, 36 aa, Artificial Sequence; identical to SEQ ID NO: 31784
  GFR-binding peptide
  MOD_RES (31)..(32): Xaa is C or S

SEQ ID NO: 60384 - protein, 35 aa, Artificial Sequence; identical to SEQ ID NO: 25797
  GFR-binding peptide
  MOD_RES (2)..(4): Xaa is C or S

SEQ ID NO: 60385 - protein, 32 aa, Artificial Sequence; identical to SEQ ID NO: 25798
  GFR-binding peptide
  MOD_RES (31)..(32): Xaa is C or S

SEQ ID NO: 60386 - protein, 36 aa, Artificial Sequence; identical to SEQ ID NO: 4719
  GFR-binding peptide
  MOD_RES (1)..(3)..(35)..(36): Xaa is C or S

SEQ ID NO: 60387 - protein, 33 aa, Artificial Sequence
  GFR-binding peptide
  MOD_RES (2)..(33): Xaa is C or S
GXEEVIMYHYKLLLVRGNDKYLMSIPSTKVPAX

SEQ ID NO: 60388 - protein, 33 aa, Artificial Sequence
  GFR-binding peptide
  MOD_RES (1)..(1): Xaa is C or S
  MOD_RES (12)..(13)..(14)..(15)..(16): Xaa is A or G
  MOD_RES (17)..(18)..(19)..(20): Xaa is A or G or is absent
XSRVIMPIKGYXXXXXXXXXFYLINIPSLAQPV

SEQ ID NO: 60389 - protein, 40 aa, Artificial Sequence
  GFR-binding peptide
  MOD_RES (2)..(34)..(35): Xaa is C or S
GXRDVVMGEYKFKIIQQKDNLYLMSIPEMKTPTXXPGASG

SEQ ID NO: 60390 - protein, 31 aa, Artificial Sequence
  GFR-binding peptide
  MOD_RES (31)..(31): Xaa is C or S
SKVVMPIKGYVKPTRGVFYLINIPSLDQPVX

SEQ ID NO: 60391 - protein, 37 aa, Artificial Sequence; identical to SEQ ID NO: 4723
  GFR-binding peptide
  MOD_RES (1)..(32)..(33): Xaa is C or S

SEQ ID NO: 60392 - protein, 37 aa, Artificial Sequence; identical to SEQ ID NO: 25806
  GFR-binding peptide
  MOD_RES (1)..(3)..(35)..(36): Xaa is C or S

SEQ ID NO: 60393 - protein, 33 aa, Artificial Sequence; identical to SEQ ID NO: 25807
  GFR-binding peptide
  MOD_RES (31)..(31): Xaa is C or S

SEQ ID NO: 60394 - protein, 34 aa, Artificial Sequence; identical to SEQ ID NO: 4725
  GFR-binding peptide
  MOD_RES (33)..(34): Xaa is C or S
  MOD_RES (11)..(12)..(13)..(14)..(15): Xaa is A or G
  MOD_RES (16)..(17)..(18)..(19): Xaa is A or G or is absent

SEQ ID NO: 60395 - protein, 32 aa, Artificial Sequence; identical to SEQ ID NO: 31790
  GFR-binding peptide
  MOD_RES (11)..(12)..(13)..(14)..(15): Xaa is A or G
  MOD_RES (16)..(17)..(18)..(19): Xaa is A or G or is absent

SEQ ID NO: 60396 - protein, 36 aa, Artificial Sequence; identical to SEQ ID NO: 31794
  GFR-binding peptide
  MOD_RES (31)..(32): Xaa is C or S

SEQ ID NO: 60397 - protein, 37 aa, Artificial Sequence
  GFR-binding peptide
  MOD_RES (1)..(35)..(36): Xaa is C or S
  MOD_RES (13)..(14)..(15)..(16)..(17): Xaa is A or G
  MOD_RES (18)..(19)..(20)..(21): Xaa is A or G or is absent
XSEVTMNPIKGYXXXXXXXXXFYLINIPSMKEPVXXP

SEQ ID NO: 60398 - protein, 33 aa, Artificial Sequence; identical to SEQ ID NO: 4732
  GFR-binding peptide
  MOD_RES (1)..(1): Xaa is C or S
  MOD_RES (12)..(13)..(14)..(15)..(16): Xaa is A or G
  MOD_RES (17)..(18)..(19)..(20): Xaa is A or G or is absent

SEQ ID NO: 60399 - protein, 40 aa, Artificial Sequence; identical to SEQ ID NO: 31796
  GFR-binding peptide
  MOD_RES (1)..(3)..(37)..(38): Xaa is C or S
  MOD_RES (15)..(16)..(17)..(18)..(19): Xaa is A or G
  MOD_RES (20)..(21)..(22)..(23): Xaa is A or G or is absent

SEQ ID NO: 60400 - protein, 32 aa, Artificial Sequence; identical to SEQ ID NO: 4735
  GFR-binding peptide
  MOD_RES (31)..(32): Xaa is C or S

SEQ ID NO: 60401 - protein, 38 aa, Artificial Sequence
  GFR-binding peptide
  MOD_RES (34)..(35): Xaa is C or S
  MOD_RES (12)..(13)..(14)..(15)..(16): Xaa is A or G
  MOD_RES (17)..(18)..(19)..(20): Xaa is A or G or is absent
RDVVMGYHYKLXXXXXXXXXKYLMSIPSMKTPTXXPGA

SEQ ID NO: 60402 - protein, 35 aa, Artificial Sequence; identical to SEQ ID NO: 31800
  GFR-binding peptide
  MOD_RES (34)..(35): Xaa is C or S
  MOD_RES (12)..(13)..(14)..(15)..(16): Xaa is A or G
  MOD_RES (17)..(18)..(19)..(20): Xaa is A or G or is absent

SEQ ID NO: 60403 - protein, 37 aa, Artificial Sequence; identical to SEQ ID NO: 25817
  GFR-binding peptide
  MOD_RES (1)..(3)..(37): Xaa is C or S
  MOD_RES (15)..(16)..(17)..(18)..(19): Xaa is A or G
  MOD_RES (20)..(21)..(22)..(23): Xaa is A or G or is absent

SEQ ID NO: 60404 - protein, 41 aa, Artificial Sequence; identical to SEQ ID NO: 4739
  GFR-binding peptide
  MOD_RES (2)..(36)..(37): Xaa is C or S
  MOD_RES (14)..(15)..(16)..(17)..(18): Xaa is A or G
  MOD_RES (19)..(20)..(21)..(22): Xaa is A or G or is absent

SEQ ID NO: 60405 - protein, 41 aa, Artificial Sequence; identical to SEQ ID NO: 4742
  GFR-binding peptide
  MOD_RES (1)..(3)..(36)..(37): Xaa is C or S
  MOD_RES (14)..(15)..(16)..(17)..(18): Xaa is A or G
  MOD_RES (19)..(20)..(21)..(22): Xaa is A or G or is absent

SEQ ID NO: 60406 - protein, 40 aa, Artificial Sequence; identical to SEQ ID NO: 4743
  GFR-binding peptide
  MOD_RES (1)..(3)..(34)..(35): Xaa is C or S

SEQ ID NO: 60407 - protein, 35 aa, Artificial Sequence
  GFR-binding peptide
  MOD_RES (33)..(34): Xaa is C or S
  MOD_RES (11)..(12)..(13)..(14)..(15): Xaa is A or G
  MOD_RES (16)..(17)..(18)..(19): Xaa is A or G or is absent
EVVMDYHYKLXXXXXXXXXKYLISIPSLRTPVXXT

SEQ ID NO: 60408 - protein, 39 aa, Artificial Sequence; identical to SEQ ID NO: 31807
  GFR-binding peptide
  MOD_RES (1)..(35)..(36): Xaa is C or S
  MOD_RES (13)..(14)..(15)..(16)..(17): Xaa is A or G
  MOD_RES (18)..(19)..(20)..(21): Xaa is A or G or is absent

SEQ ID NO: 60409 - protein, 35 aa, Artificial Sequence
  GFR-binding peptide
  MOD_RES (33)..(34): Xaa is C or S
  MOD_RES (11)..(12)..(13)..(14)..(15): Xaa is A or G
  MOD_RES (16)..(17)..(18)..(19): Xaa is A or G or is absent
EVVMDEYKFKXXXXXXXXXLYLISIPELRTPVXXT

SEQ ID NO: 60410 - protein, 41 aa, Artificial Sequence; identical to SEQ ID NO: 31817
  GFR-binding peptide
  MOD_RES (2)..(4)..(38)..(39): Xaa is C or S
  MOD_RES (16)..(17)..(18)..(19)..(20): Xaa is A or G
  MOD_RES (21)..(22)..(23)..(24): Xaa is A or G or is absent

SEQ ID NO: 60411 - protein, 39 aa, Artificial Sequence; identical to SEQ ID NO: 25827
  GFR-binding peptide
  MOD_RES (2)..(4)..(38)..(39): Xaa is C or S
  MOD_RES (16)..(17)..(18)..(19)..(20): Xaa is A or G
  MOD_RES (21)..(22)..(23)..(24): Xaa is A or G or is absent

SEQ ID NO: 60412 - protein, 39 aa, Artificial Sequence; identical to SEQ ID NO: 4749
  GFR-binding peptide
  MOD_RES (1)..(35)..(36): Xaa is C or S
  MOD_RES (13)..(14)..(15)..(16)..(17): Xaa is A or G
  MOD_RES (18)..(19)..(20)..(21): Xaa is A or G or is absent

SEQ ID NO: 60413 - protein, 34 aa, Artificial Sequence; identical to SEQ ID NO: 4750
  GFR-binding peptide
  MOD_RES (33)..(34): Xaa is C or S
  MOD_RES (11)..(12)..(13)..(14)..(15): Xaa is A or G
  MOD_RES (16)..(17)..(18)..(19): Xaa is A or G or is absent

SEQ ID NO: 60414 - protein, 38 aa, Artificial Sequence; identical to SEQ ID NO: 25829
  GFR-binding peptide
  MOD_RES (2)..(4)..(36)..(37): Xaa is C or S

SEQ ID NO: 60415 - protein, 39 aa, Artificial Sequence; identical to SEQ ID NO: 4751
  GFR-binding peptide
  MOD_RES (1)..(3)..(37)..(38): Xaa is C or S
  MOD_RES (15)..(16)..(17)..(18)..(19): Xaa is A or G
  MOD_RES (20)..(21)..(22)..(23): Xaa is A or G or is absent

SEQ ID NO: 60416 - protein, 37 aa, Artificial Sequence; identical to SEQ ID NO: 4752
  GFR-binding peptide
  MOD_RES (31)..(32): Xaa is C or S

SEQ ID NO: 60417 - protein, 33 aa, Artificial Sequence; identical to SEQ ID NO: 25835
  GFR-binding peptide
  MOD_RES (31)..(32): Xaa is C or S

SEQ ID NO: 60418 - protein, 36 aa, Artificial Sequence; identical to SEQ ID NO: 4756
  GFR-binding peptide
  MOD_RES (2)..(4): Xaa is C or S
  MOD_RES (15)..(16)..(17)..(18)..(19): Xaa is A or G
  MOD_RES (20)..(21)..(22)..(23): Xaa is A or G or is absent

SEQ ID NO: 60419 - protein, 37 aa, Artificial Sequence; identical to SEQ ID NO: 4757
  GFR-binding peptide
  MOD_RES (1)..(3)..(35)..(36): Xaa is C or S

SEQ ID NO: 60420 - protein, 38 aa, Artificial Sequence; identical to SEQ ID NO: 31839
  GFR-binding peptide
  MOD_RES (35)..(36): Xaa is C or S
  MOD_RES (13)..(14)..(15)..(16)..(17): Xaa is A or G
  MOD_RES (18)..(19)..(20)..(21): Xaa is A or G or is absent

SEQ ID NO: 60421 - protein, 36 aa, Artificial Sequence; identical to SEQ ID NO: 25841
  GFR-binding peptide
  MOD_RES (2)..(4)..(36): Xaa is C or S

SEQ ID NO: 60422 - protein, 37 aa, Artificial Sequence
  GFR-binding peptide
  MOD_RES (33)..(34): Xaa is C or S
  MOD_RES (11)..(12)..(13)..(14)..(15): Xaa is A or G
  MOD_RES (16)..(17)..(18)..(19): Xaa is A or G or is absent
EVTMNRHKRLXXXXXXXXXYYLISTASMKEPVXXPEP

SEQ ID NO: 60423 - protein, 35 aa, Artificial Sequence
  GFR-binding peptide
  MOD_RES (2)..(4): Xaa is C or S
RXGXAEVVMDRHKRLVVNNAADYYLISTASLRAPV

SEQ ID NO: 60424 - protein, 38 aa, Artificial Sequence; identical to SEQ ID NO: 25846
  GFR-binding peptide
  MOD_RES (32)..(33): Xaa is C or S

SEQ ID NO: 60425 - protein, 40 aa, Artificial Sequence; identical to SEQ ID NO: 31843
  GFR-binding peptide
  MOD_RES (1)..(35)..(36): Xaa is C or S
  MOD_RES (13)..(14)..(15)..(16)..(17): Xaa is A or G
  MOD_RES (18)..(19)..(20)..(21): Xaa is A or G or is absent

SEQ ID NO: 60426 - protein, 38 aa, Artificial Sequence; identical to SEQ ID NO: 25851
  GFR-binding peptide
  MOD_RES (2)..(34)..(35): Xaa is C or S

SEQ ID NO: 60427 - protein, 37 aa, Artificial Sequence; identical to SEQ ID NO: 31850
  GFR-binding peptide
  MOD_RES (1)..(35)..(36): Xaa is C or S
  MOD_RES (13)..(14)..(15)..(16)..(17): Xaa is A or G
  MOD_RES (18)..(19)..(20)..(21): Xaa is A or G or is absent

SEQ ID NO: 60428 - protein, 39 aa, Artificial Sequence; identical to SEQ ID NO: 4768
  GFR-binding peptide
  MOD_RES (2)..(36): Xaa is C or S
  MOD_RES (14)..(15)..(16)..(17)..(18): Xaa is A or G
  MOD_RES (19)..(20)..(21)..(22): Xaa is A or G or is absent

SEQ ID NO: 60429 - protein, 37 aa, Artificial Sequence; identical to SEQ ID NO: 4772
  GFR-binding peptide
  MOD_RES (34)..(35): Xaa is C or S
  MOD_RES (12)..(13)..(14)..(15)..(16): Xaa is A or G
  MOD_RES (17)..(18)..(19)..(20): Xaa is A or G or is absent

SEQ ID NO: 60430 - protein, 40 aa, Artificial Sequence
  GFR-binding peptide
  MOD_RES (2)..(4)..(35)..(36): Xaa is C or S
LXGXEEVIMEYKFKLLVRGNDLYLMSIPETKVPAXXTSPV

SEQ ID NO: 60431 - protein, 38 aa, Artificial Sequence
  GFR-binding peptide
  MOD_RES (2)..(4)..(35)..(36): Xaa is C or S
SXKXSRVIMPIKGYVKPKRGVFYLINIPSLAQPVXXPA

SEQ ID NO: 60432 - protein, 37 aa, Artificial Sequence; identical to SEQ ID NO: 12213
  GFR-binding peptide
  MOD_RES (2)..(34)..(35): Xaa is C or S

SEQ ID NO: 60433 - protein, 40 aa, Artificial Sequence
  GFR-binding peptide
  MOD_RES (2)..(4)..(38)..(39): Xaa is C or S
  MOD_RES (16)..(17)..(18)..(19)..(20): Xaa is A or G
  MOD_RES (21)..(22)..(23)..(24): Xaa is A or G or is absent
RXGXSEVVMDYHYKLXXXXXXXXXKYLISIPSLRTPVXXT

SEQ ID NO: 60434 - protein, 37 aa, Artificial Sequence
  GFR-binding peptide
  MOD_RES (1)..(3)..(37): Xaa is C or S
  MOD_RES (15)..(16)..(17)..(18)..(19): Xaa is A or G
  MOD_RES (20)..(21)..(22)..(23): Xaa is A or G or is absent
XAXSEVTMNRHKRLXXXXXXXXXYYLISTASMKEPVX

SEQ ID NO: 60435 - protein, 37 aa, Artificial Sequence; identical to SEQ ID NO: 56806
  GFR-binding peptide
  MOD_RES (2)..(35)..(36): Xaa is C or S
  MOD_RES (13)..(14)..(15)..(16)..(17): Xaa is A or G
  MOD_RES (18)..(19)..(20)..(21): Xaa is A or G or is absent

SEQ ID NO: 60436 - protein, 40 aa, Artificial Sequence; identical to SEQ ID NO: 25863
  GFR-binding peptide
  MOD_RES (2)..(4)..(38): Xaa is C or S
  MOD_RES (16)..(17)..(18)..(19)..(20): Xaa is A or G
  MOD_RES (21)..(22)..(23)..(24): Xaa is A or G or is absent

SEQ ID NO: 60437 - protein, 35 aa, Artificial Sequence
  GFR-binding peptide
  MOD_RES (1)..(3)..(35): Xaa is C or S
XAXSEVTMNYHYKLVVNKNEDKYLISIPSMKEPVX

SEQ ID NO: 60438 - protein, 40 aa, Artificial Sequence
  GFR-binding peptide
  MOD_RES (2)..(4)..(38)..(39): Xaa is C or S
  MOD_RES (16)..(17)..(18)..(19)..(20): Xaa is A or G
  MOD_RES (21)..(22)..(23)..(24): Xaa is A or G or is absent
SXGXRDVVMGRHKRLXXXXXXXXXYYLMSTASMKTPTXXP

SEQ ID NO: 60439 - protein, 34 aa, Artificial Sequence
  GFR-binding peptide
  MOD_RES (33)..(34): Xaa is C or S
  MOD_RES (11)..(12)..(13)..(14)..(15): Xaa is A or G
  MOD_RES (16)..(17)..(18)..(19): Xaa is A or G or is absent
EVTMNRYKKLXXXXXXXXXFYLISIANMKEPVXX

SEQ ID NO: 60440 - protein, 32 aa, Artificial Sequence
  GFR-binding peptide
  MOD_RES (2)..(2): Xaa is C or S
KXSKVIMPIKGYIKPTKGIFYLINIPSLDQSV

SEQ ID NO: 60441 - protein, 35 aa, Artificial Sequence; identical to SEQ ID NO: 4780
  GFR-binding peptide
  MOD_RES (32)..(32): Xaa is C or S

SEQ ID NO: 60442 - protein, 37 aa, Artificial Sequence; identical to SEQ ID NO: 31866
  GFR-binding peptide
  MOD_RES (33)..(34): Xaa is C or S
  MOD_RES (11)..(12)..(13)..(14)..(15): Xaa is A or G
  MOD_RES (16)..(17)..(18)..(19): Xaa is A or G or is absent

SEQ ID NO: 60443 - protein, 36 aa, Artificial Sequence; identical to SEQ ID NO: 4781
  GFR-binding peptide
  MOD_RES (2)..(4): Xaa is C or S

SEQ ID NO: 60444 - protein, 41 aa, Artificial Sequence; identical to SEQ ID NO: 4784
  GFR-binding peptide
  MOD_RES (2)..(4)..(38)..(39): Xaa is C or S
  MOD_RES (16)..(17)..(18)..(19)..(20): Xaa is A or G
  MOD_RES (21)..(22)..(23)..(24): Xaa is A or G or is absent

SEQ ID NO: 60445 - protein, 32 aa, Artificial Sequence; identical to SEQ ID NO: 25868
  GFR-binding peptide
  MOD_RES (32)..(32): Xaa is C or S

SEQ ID NO: 60446 - protein, 36 aa, Artificial Sequence; identical to SEQ ID NO: 4788
  GFR-binding peptide
  MOD_RES (34)..(34): Xaa is C or S
  MOD_RES (12)..(13)..(14)..(15)..(16): Xaa is A or G
  MOD_RES (17)..(18)..(19)..(20): Xaa is A or G or is absent

SEQ ID NO: 60447 - protein, 35 aa, Artificial Sequence; identical to SEQ ID NO: 4789
  GFR-binding peptide
  MOD_RES (1)..(35): Xaa is C or S
  MOD_RES (13)..(14)..(15)..(16)..(17): Xaa is A or G
  MOD_RES (18)..(19)..(20)..(21): Xaa is A or G or is absent

SEQ ID NO: 60448 - protein, 36 aa, Artificial Sequence; identical to SEQ ID NO: 4791
  GFR-binding peptide
  MOD_RES (31)..(32): Xaa is C or S

SEQ ID NO: 60449 - protein, 35 aa, Artificial Sequence
  GFR-binding peptide
  MOD_RES (1)..(32)..(33): Xaa is C or S
XEEVIMYHYKLLLVRGNDKYLMSIPSTKVPAXXTS

SEQ ID NO: 60450 - protein, 34 aa, Artificial Sequence; identical to SEQ ID NO: 12224
  GFR-binding peptide
  MOD_RES (31)..(32): Xaa is C or S

SEQ ID NO: 60451 - protein, 42 aa, Artificial Sequence; identical to SEQ ID NO: 4792
  GFR-binding peptide
  MOD_RES (2)..(4)..(36)..(37): Xaa is C or S

SEQ ID NO: 60452 - protein, 42 aa, Artificial Sequence; identical to SEQ ID NO: 25873
  GFR-binding peptide
  MOD_RES (2)..(36)..(37): Xaa is C or S
  MOD_RES (14)..(15)..(16)..(17)..(18): Xaa is A or G
  MOD_RES (19)..(20)..(21)..(22): Xaa is A or G or is absent

SEQ ID NO: 60453 - protein, 38 aa, Artificial Sequence; identical to SEQ ID NO: 4794
  GFR-binding peptide
  MOD_RES (2)..(33)..(34): Xaa is C or S

SEQ ID NO: 60454 - protein, 40 aa, Artificial Sequence
  GFR-binding peptide
  MOD_RES (2)..(36)..(37): Xaa is C or S
  MOD_RES (14)..(15)..(16)..(17)..(18): Xaa is A or G
  MOD_RES (19)..(20)..(21)..(22): Xaa is A or G or is absent
GXAEVVMDRHKRLXXXXXXXXXYYLISTASLRAPVXXSAP

SEQ ID NO: 60455 - protein, 35 aa, Artificial Sequence; identical to SEQ ID NO: 4797
  GFR-binding peptide
  MOD_RES (31)..(31): Xaa is C or S

SEQ ID NO: 60456 - protein, 33 aa, Artificial Sequence
  GFR-binding peptide
  MOD_RES (31)..(32): Xaa is C or S
EEVIMEYKFKLLVRGNDLYLMSIPETKVPAXXT

SEQ ID NO: 60457 - protein, 39 aa, Artificial Sequence
  GFR-binding peptide
  MOD_RES (1)..(3)..(37)..(38): Xaa is C or S
  MOD_RES (15)..(16)..(17)..(18)..(19): Xaa is A or G
  MOD_RES (20)..(21)..(22)..(23): Xaa is A or G or is absent
XGXRDVVMGYHYKLXXXXXXXXXKYLMSIPSMKTPTXXP

SEQ ID NO: 60458 - protein, 34 aa, Artificial Sequence; identical to SEQ ID NO: 31875
  GFR-binding peptide
  MOD_RES (34)..(34): Xaa is C or S
  MOD_RES (12)..(13)..(14)..(15)..(16): Xaa is A or G
  MOD_RES (17)..(18)..(19)..(20): Xaa is A or G or is absent

SEQ ID NO: 60459 - protein, 33 aa, Artificial Sequence; identical to SEQ ID NO: 4800
  GFR-binding peptide
  MOD_RES (33)..(33): Xaa is C or S
  MOD_RES (11)..(12)..(13)..(14)..(15): Xaa is A or G
  MOD_RES (16)..(17)..(18)..(19): Xaa is A or G or is absent

SEQ ID NO: 60460 - protein, 37 aa, Artificial Sequence; identical to SEQ ID NO: 4804
  GFR-binding peptide
  MOD_RES (1)..(3)..(36)..(37): Xaa is C or S
  MOD_RES (14)..(15)..(16)..(17)..(18): Xaa is A or G
  MOD_RES (19)..(20)..(21)..(22): Xaa is A or G or is absent

SEQ ID NO: 60461 - protein, 39 aa, Artificial Sequence; identical to SEQ ID NO: 31880
  GFR-binding peptide
  MOD_RES (34)..(35): Xaa is C or S
  MOD_RES (12)..(13)..(14)..(15)..(16): Xaa is A or G
  MOD_RES (17)..(18)..(19)..(20): Xaa is A or G or is absent

SEQ ID NO: 60462 - protein, 40 aa, Artificial Sequence; identical to SEQ ID NO: 4806
  GFR-binding peptide
  MOD_RES (2)..(4)..(39)..(40): Xaa is C or S
  MOD_RES (17)..(18)..(19)..(20)..(21): Xaa is A or G
  MOD_RES (22)..(23)..(24)..(25): Xaa is A or G or is absent

SEQ ID NO: 60463 - protein, 39 aa, Artificial Sequence; identical to SEQ ID NO: 4807
  GFR-binding peptide
  MOD_RES (1)..(3)..(37)..(38): Xaa is C or S
  MOD_RES (15)..(16)..(17)..(18)..(19): Xaa is A or G
  MOD_RES (20)..(21)..(22)..(23): Xaa is A or G or is absent

SEQ ID NO: 60464 - protein, 41 aa, Artificial Sequence; identical to SEQ ID NO: 4810
  GFR-binding peptide
  MOD_RES (2)..(36)..(37): Xaa is C or S
  MOD_RES (14)..(15)..(16)..(17)..(18): Xaa is A or G
  MOD_RES (19)..(20)..(21)..(22): Xaa is A or G or is absent

SEQ ID NO: 60465 - protein, 39 aa, Artificial Sequence; identical to SEQ ID NO: 4811
  GFR-binding peptide
  MOD_RES (2)..(4)..(35)..(36): Xaa is C or S

SEQ ID NO: 60466 - protein, 39 aa, Artificial Sequence; identical to SEQ ID NO: 25890
  GFR-binding peptide
  MOD_RES (2)..(36)..(37): Xaa is C or S
  MOD_RES (14)..(15)..(16)..(17)..(18): Xaa is A or G
  MOD_RES (19)..(20)..(21)..(22): Xaa is A or G or is absent

SEQ ID NO: 60467 - protein, 33 aa, Artificial Sequence; identical to SEQ ID NO: 4812
  GFR-binding peptide
  MOD_RES (1)..(3): Xaa is C or S

SEQ ID NO: 60468 - protein, 37 aa, Artificial Sequence; identical to SEQ ID NO: 4813
  GFR-binding peptide
  MOD_RES (1)..(3)..(35)..(36): Xaa is C or S

SEQ ID NO: 60469 - protein, 37 aa, Artificial Sequence; identical to SEQ ID NO: 25892
  GFR-binding peptide
  MOD_RES (1)..(34)..(35): Xaa is C or S
  MOD_RES (12)..(13)..(14)..(15)..(16): Xaa is A or G
  MOD_RES (17)..(18)..(19)..(20): Xaa is A or G or is absent

SEQ ID NO: 60470 - protein, 37 aa, Artificial Sequence; identical to SEQ ID NO: 31893
  GFR-binding peptide
  MOD_RES (1)..(3)..(35)..(36): Xaa is C or S

SEQ ID NO: 60471 - protein, 36 aa, Artificial Sequence
  GFR-binding peptide
  MOD_RES (33)..(34): Xaa is C or S
  MOD_RES (11)..(12)..(13)..(14)..(15): Xaa is A or G
  MOD_RES (16)..(17)..(18)..(19): Xaa is A or G or is absent
EVVMDRHKRLXXXXXXXXXYYLISTASLRAPVXXSA

SEQ ID NO: 60472 - protein, 32 aa, Artificial Sequence; identical to SEQ ID NO: 4815
  GFR-binding peptide
  MOD_RES (1)..(1): Xaa is C or S

SEQ ID NO: 60473 - protein, 40 aa, Artificial Sequence; identical to SEQ ID NO: 25897
  GFR-binding peptide
  MOD_RES (2)..(36)..(37): Xaa is C or S
  MOD_RES (14)..(15)..(16)..(17)..(18): Xaa is A or G
  MOD_RES (19)..(20)..(21)..(22): Xaa is A or G or is absent

SEQ ID NO: 60474 - protein, 40 aa, Artificial Sequence; identical to SEQ ID NO: 4816
  GFR-binding peptide
  MOD_RES (2)..(37)..(38): Xaa is C or S
  MOD_RES (15)..(16)..(17)..(18)..(19): Xaa is A or G
  MOD_RES (20)..(21)..(22)..(23): Xaa is A or G or is absent

SEQ ID NO: 60475 - protein, 33 aa, Artificial Sequence; identical to SEQ ID NO: 4817
  GFR-binding peptide
  MOD_RES (12)..(13)..(14)..(15)..(16): Xaa is A or G
  MOD_RES (17)..(18)..(19)..(20): Xaa is A or G or is absent

SEQ ID NO: 60476 - protein, 38 aa, Artificial Sequence; identical to SEQ ID NO: 31897
  GFR-binding peptide
  MOD_RES (2)..(4)..(36)..(37): Xaa is C or S

SEQ ID NO: 60477 - protein, 41 aa, Artificial Sequence; identical to SEQ ID NO: 25900
  GFR-binding peptide
  MOD_RES (1)..(3)..(35)..(36): Xaa is C or S

SEQ ID NO: 60478 - protein, 31 aa, Artificial Sequence; identical to SEQ ID NO: 4820
  GFR-binding peptide
  MOD_RES (31)..(31): Xaa is C or S

SEQ ID NO: 60479 - protein, 37 aa, Artificial Sequence; identical to SEQ ID NO: 4822
  GFR-binding peptide
  MOD_RES (1)..(33)..(34): Xaa is C or S

SEQ ID NO: 60480 - protein, 37 aa, Artificial Sequence; identical to SEQ ID NO: 4825
  GFR-binding peptide
  MOD_RES (32)..(33): Xaa is C or S

SEQ ID NO: 60481 - protein, 42 aa, Artificial Sequence; identical to SEQ ID NO: 31898
  GFR-binding peptide
  MOD_RES (2)..(4)..(38)..(39): Xaa is C or S
  MOD_RES (16)..(17)..(18)..(19)..(20): Xaa is A or G
  MOD_RES (21)..(22)..(23)..(24): Xaa is A or G or is absent

SEQ ID NO: 60482 - protein, 39 aa, Artificial Sequence; identical to SEQ ID NO: 4826
  GFR-binding peptide
  MOD_RES (2)..(35)..(36): Xaa is C or S

SEQ ID NO: 60483 - protein, 37 aa, Artificial Sequence; identical to SEQ ID NO: 4828
  GFR-binding peptide
  MOD_RES (31)..(32): Xaa is C or S

SEQ ID NO: 60484 - protein, 36 aa, Artificial Sequence
  GFR-binding peptide
  MOD_RES (2)..(34)..(35): Xaa is C or S
GXSEVVMDRHKRLVVNNASDYYLISTASLRTPVXXT

SEQ ID NO: 60485 - protein, 37 aa, Artificial Sequence
  GFR-binding peptide
  MOD_RES (2)..(34)..(35): Xaa is C or S
GXSEVVMDEYKFKVVNNASDLYLISIPELRTPVXXTP

SEQ ID NO: 60486 - protein, 38 aa, Artificial Sequence
  GFR-binding peptide
  MOD_RES (1)..(34)..(35): Xaa is C or S
  MOD_RES (12)..(13)..(14)..(15)..(16): Xaa is A or G
  MOD_RES (17)..(18)..(19)..(20): Xaa is A or G or is absent
XSRVIMPIKGYXXXXXXXXXFYLINIPSLAQPVXXPAA

SEQ ID NO: 60487 - protein, 39 aa, Artificial Sequence; identical to SEQ ID NO: 4830
  GFR-binding peptide
  MOD_RES (35)..(36): Xaa is C or S
  MOD_RES (13)..(14)..(15)..(16)..(17): Xaa is A or G
  MOD_RES (18)..(19)..(20)..(21): Xaa is A or G or is absent

SEQ ID NO: 60488 - protein, 39 aa, Artificial Sequence; identical to SEQ ID NO: 4834
  GFR-binding peptide
  MOD_RES (2)..(4)..(37)..(38): Xaa is C or S
  MOD_RES (15)..(16)..(17)..(18)..(19): Xaa is A or G
  MOD_RES (20)..(21)..(22)..(23): Xaa is A or G or is absent

SEQ ID NO: 60489 - protein, 38 aa, Artificial Sequence; identical to SEQ ID NO: 4837
  GFR-binding peptide
  MOD_RES (2)..(4)..(37)..(38): Xaa is C or S
  MOD_RES (15)..(16)..(17)..(18)..(19): Xaa is A or G
  MOD_RES (20)..(21)..(22)..(23): Xaa is A or G or is absent

SEQ ID NO: 60490 - protein, 42 aa, Artificial Sequence
  GFR-binding peptide
  MOD_RES (1)..(3)..(37)..(38): Xaa is C or S
  MOD_RES (15)..(16)..(17)..(18)..(19): Xaa is A or G
  MOD_RES (20)..(21)..(22)..(23): Xaa is A or G or is absent
XGXSEVVMDEYKFKXXXXXXXXXLYLISIPELRTPVXXTPPT

SEQ ID NO: 60491 - protein, 34 aa, Artificial Sequence; identical to SEQ ID NO: 25913
  GFR-binding peptide
  MOD_RES (1)..(3): Xaa is C or S

SEQ ID NO: 60492 - protein, 39 aa, Artificial Sequence
  GFR-binding peptide
  MOD_RES (1)..(33)..(34): Xaa is C or S
XSEVVMDRHKRLVVNNASDYYLISTASLRTPVXXTPPTS

SEQ ID NO: 60493 - protein, 37 aa, Artificial Sequence; identical to SEQ ID NO: 31911
  GFR-binding peptide
  MOD_RES (1)..(3)..(37): Xaa is C or S
  MOD_RES (15)..(16)..(17)..(18)..(19): Xaa is A or G
  MOD_RES (20)..(21)..(22)..(23): Xaa is A or G or is absent

SEQ ID NO: 60494 - protein, 41 aa, Artificial Sequence
  GFR-binding peptide
  MOD_RES (2)..(36)..(37): Xaa is C or S
  MOD_RES (14)..(15)..(16)..(17)..(18): Xaa is A or G
  MOD_RES (19)..(20)..(21)..(22): Xaa is A or G or is absent
AXSEVTMNRHKRLXXXXXXXXXYYLISTASMKEPVXXPEPI

SEQ ID NO: 60495 - protein, 35 aa, Artificial Sequence; identical to SEQ ID NO: 31912
  GFR-binding peptide
  MOD_RES (31)..(32): Xaa is C or S

SEQ ID NO: 60496 - protein, 36 aa, Artificial Sequence; identical to SEQ ID NO: 4842
  GFR-binding peptide
  MOD_RES (1)..(32)..(33): Xaa is C or S

SEQ ID NO: 60497 - protein, 34 aa, Artificial Sequence
  GFR-binding peptide
  MOD_RES (1)..(1): Xaa is C or S
  MOD_RES (13)..(14)..(15)..(16)..(17): Xaa is A or G
  MOD_RES (18)..(19)..(20)..(21): Xaa is A or G or is absent
XRDVVMGYHYKLXXXXXXXXXKYLMSIPSMKTPT

SEQ ID NO: 60498 - protein, 38 aa, Artificial Sequence; identical to SEQ ID NO: 25916
  GFR-binding peptide
  MOD_RES (2)..(36): Xaa is C or S
  MOD_RES (14)..(15)..(16)..(17)..(18): Xaa is A or G
  MOD_RES (19)..(20)..(21)..(22): Xaa is A or G or is absent

SEQ ID NO: 60499 - protein, 36 aa, Artificial Sequence; identical to SEQ ID NO: 4847
  GFR-binding peptide
  MOD_RES (33)..(34): Xaa is C or S
  MOD_RES (11)..(12)..(13)..(14)..(15): Xaa is A or G
  MOD_RES (16)..(17)..(18)..(19): Xaa is A or G or is absent

SEQ ID NO: 60500 - protein, 43 aa, Artificial Sequence
  GFR-binding peptide
  MOD_RES (1)..(3)..(37)..(38): Xaa is C or S
  MOD_RES (15)..(16)..(17)..(18)..(19): Xaa is A or G
  MOD_RES (20)..(21)..(22)..(23): Xaa is A or G or is absent
XAXSEVTMNEYKFKXXXXXXXXXLYLISIPEMKEPVXXPEPIG

SEQ ID NO: 60501 - protein, 39 aa, Artificial Sequence
  GFR-binding peptide
  MOD_RES (2)..(4)..(36)..(37): Xaa is C or S
RXAXSEVTMNRYKKLVVNKNEDFYLISIANMKEPVXXPE

SEQ ID NO: 60502 - protein, 37 aa, Artificial Sequence; identical to SEQ ID NO: 31919
  GFR-binding peptide
  MOD_RES (33)..(34): Xaa is C or S
  MOD_RES (11)..(12)..(13)..(14)..(15): Xaa is A or G
  MOD_RES (16)..(17)..(18)..(19): Xaa is A or G or is absent

SEQ ID NO: 60503 - protein, 37 aa, Artificial Sequence; identical to SEQ ID NO: 31921
  GFR-binding peptide
  MOD_RES (32)..(33): Xaa is C or S

SEQ ID NO: 60504 - protein, 35 aa, Artificial Sequence
  GFR-binding peptide
  MOD_RES (1)..(32)..(33): Xaa is C or S
XEEVIMRHKRLLLVRGNDYYLMSTASTKVPAXXTS

SEQ ID NO: 60505 - protein, 36 aa, Artificial Sequence; identical to SEQ ID NO: 25924
  GFR-binding peptide
  MOD_RES (1)..(3): Xaa is C or S
  MOD_RES (15)..(16)..(17)..(18)..(19): Xaa is A or G
  MOD_RES (20)..(21)..(22)..(23): Xaa is A or G or is absent

SEQ ID NO: 60506 - protein, 39 aa, Artificial Sequence
  GFR-binding peptide
  MOD_RES (2)..(36)..(37): Xaa is C or S
  MOD_RES (14)..(15)..(16)..(17)..(18): Xaa is A or G
  MOD_RES (19)..(20)..(21)..(22): Xaa is A or G or is absent
GXAEVVMDRHKRLXXXXXXXXXYYLISTASLRAPVXXSA

SEQ ID NO: 60507 - protein, 32 aa, Artificial Sequence; identical to SEQ ID NO: 4852
  GFR-binding peptide
  MOD_RES (32)..(32): Xaa is C or S

SEQ ID NO: 60508 - protein, 36 aa, Artificial Sequence; identical to SEQ ID NO: 4856
  GFR-binding peptide
  MOD_RES (33)..(33): Xaa is C or S
  MOD_RES (11)..(12)..(13)..(14)..(15): Xaa is A or G
  MOD_RES (16)..(17)..(18)..(19): Xaa is A or G or is absent

SEQ ID NO: 60509 - protein, 36 aa, Artificial Sequence; identical to SEQ ID NO: 4859
  GFR-binding peptide
  MOD_RES (33)..(34): Xaa is C or S
  MOD_RES (11)..(12)..(13)..(14)..(15): Xaa is A or G
  MOD_RES (16)..(17)..(18)..(19): Xaa is A or G or is absent

SEQ ID NO: 60510 - protein, 37 aa, Artificial Sequence; identical to SEQ ID NO: 56866
  GFR-binding peptide
  MOD_RES (1)..(3)..(34)..(35): Xaa is C or S

SEQ ID NO: 60511 - protein, 41 aa, Artificial Sequence; identical to SEQ ID NO: 4860
  GFR-binding peptide
  MOD_RES (1)..(35)..(36): Xaa is C or S
  MOD_RES (13)..(14)..(15)..(16)..(17): Xaa is A or G
  MOD_RES (18)..(19)..(20)..(21): Xaa is A or G or is absent

SEQ ID NO: 60512 - protein, 32 aa, Artificial Sequence; identical to SEQ ID NO: 4862
  GFR-binding peptide
  MOD_RES (32)..(32): Xaa is C or S

SEQ ID NO: 60513 - protein, 40 aa, Artificial Sequence; identical to SEQ ID NO: 56872
  GFR-binding peptide
  MOD_RES (2)..(4)..(37)..(38): Xaa is C or S
  MOD_RES (15)..(16)..(17)..(18)..(19): Xaa is A or G
  MOD_RES (20)..(21)..(22)..(23): Xaa is A or G or is absent

SEQ ID NO: 60514 - protein, 38 aa, Artificial Sequence; identical to SEQ ID NO: 4863
  GFR-binding peptide
  MOD_RES (2)..(36)..(37): Xaa is C or S
  MOD_RES (14)..(15)..(16)..(17)..(18): Xaa is A or G
  MOD_RES (19)..(20)..(21)..(22): Xaa is A or G or is absent

SEQ ID NO: 60515 - protein, 36 aa, Artificial Sequence
  GFR-binding peptide
  MOD_RES (1)..(3): Xaa is C or S
  MOD_RES (15)..(16)..(17)..(18)..(19): Xaa is A or G
  MOD_RES (20)..(21)..(22)..(23): Xaa is A or G or is absent
XGXSEVVMDYHYKLXXXXXXXXXKYLISIPSLRTPV

SEQ ID NO: 60516 - protein, 39 aa, Artificial Sequence; identical to SEQ ID NO: 4866
  GFR-binding peptide
  MOD_RES (1)..(35)..(36): Xaa is C or S
  MOD_RES (13)..(14)..(15)..(16)..(17): Xaa is A or G
  MOD_RES (18)..(19)..(20)..(21): Xaa is A or G or is absent

SEQ ID NO: 60517 - protein, 37 aa, Artificial Sequence; identical to SEQ ID NO: 4867
  GFR-binding peptide
  MOD_RES (2)..(4): Xaa is C or S
  MOD_RES (16)..(17)..(18)..(19)..(20): Xaa is A or G
  MOD_RES (21)..(22)..(23)..(24): Xaa is A or G or is absent

SEQ ID NO: 60518 - protein, 40 aa, Artificial Sequence; identical to SEQ ID NO: 25938
  GFR-binding peptide
  MOD_RES (1)..(35)..(36): Xaa is C or S
  MOD_RES (13)..(14)..(15)..(16)..(17): Xaa is A or G
  MOD_RES (18)..(19)..(20)..(21): Xaa is A or G or is absent

SEQ ID NO: 60519 - protein, 40 aa, Artificial Sequence
  GFR-binding peptide
  MOD_RES (2)..(34)..(35): Xaa is C or S
AXSEVTMNRHKRLVVNKNEDYYLISTASMKEPVXXPEPIG

SEQ ID NO: 60520 - protein, 40 aa, Artificial Sequence; identical to SEQ ID NO: 4870
  GFR-binding peptide
  MOD_RES (2)..(34)..(35): Xaa is C or S

SEQ ID NO: 60521 - protein, 39 aa, Artificial Sequence; identical to SEQ ID NO: 4871
  GFR-binding peptide
  MOD_RES (2)..(4)..(36)..(37): Xaa is C or S

SEQ ID NO: 60522 - protein, 30 aa, Artificial Sequence; identical to SEQ ID NO: 25942
  GFR-binding peptide

SEQ ID NO: 60523 - protein, 36 aa, Artificial Sequence
  GFR-binding peptide
  MOD_RES (1)..(33)..(34): Xaa is C or S
XRDVVMGRHKRLIIQQKDNYYLMSTASMKTPTXXPG

SEQ ID NO: 60524 - protein, 31 aa, Artificial Sequence; identical to SEQ ID NO: 25943
  GFR-binding peptide

SEQ ID NO: 60525 - protein, 40 aa, Artificial Sequence
  GFR-binding peptide
  MOD_RES (34)..(35): Xaa is C or S
  MOD_RES (12)..(13)..(14)..(15)..(16): Xaa is A or G
  MOD_RES (17)..(18)..(19)..(20): Xaa is A or G or is absent
RDVVMGEYKFKXXXXXXXXXLYLMSIPEMKTPTXXPGASG

SEQ ID NO: 60526 - protein, 39 aa, Artificial Sequence; identical to SEQ ID NO: 31935
  GFR-binding peptide
  MOD_RES (34)..(34): Xaa is C or S
  MOD_RES (12)..(13)..(14)..(15)..(16): Xaa is A or G
  MOD_RES (17)..(18)..(19)..(20): Xaa is A or G or is absent

SEQ ID NO: 60527 - protein, 35 aa, Artificial Sequence; identical to SEQ ID NO: 25945
  GFR-binding peptide
  MOD_RES (2)..(4): Xaa is C or S

SEQ ID NO: 60528 - protein, 41 aa, Artificial Sequence; identical to SEQ ID NO: 31939
  GFR-binding peptide
  MOD_RES (2)..(4)..(38)..(39): Xaa is C or S
  MOD_RES (16)..(17)..(18)..(19)..(20): Xaa is A or G
  MOD_RES (21)..(22)..(23)..(24): Xaa is A or G or is absent

SEQ ID NO: 60529 - protein, 37 aa, Artificial Sequence
  GFR-binding peptide
  MOD_RES (2)..(36)..(37): Xaa is C or S
  MOD_RES (14)..(15)..(16)..(17)..(18): Xaa is A or G
  MOD_RES (19)..(20)..(21)..(22): Xaa is A or G or is absent
AXSEVTMNRHKRLXXXXXXXXXYYLISTASMKEPVXX

SEQ ID NO: 60530 - protein, 34 aa, Artificial Sequence; identical to SEQ ID NO: 4873
  GFR-binding peptide
  MOD_RES (31)..(32): Xaa is C or S

SEQ ID NO: 60531 - protein, 33 aa, Artificial Sequence; identical to SEQ ID NO: 25949
  GFR-binding peptide
  MOD_RES (33)..(33): Xaa is C or S
  MOD_RES (11)..(12)..(13)..(14)..(15): Xaa is A or G
  MOD_RES (16)..(17)..(18)..(19): Xaa is A or G or is absent

SEQ ID NO: 60532 - protein, 35 aa, Artificial Sequence; identical to SEQ ID NO: 4874
  GFR-binding peptide
  MOD_RES (2)..(33)..(34): Xaa is C or S

SEQ ID NO: 60533 - protein, 44 aa, Artificial Sequence; identical to SEQ ID NO: 25952
  GFR-binding peptide
  MOD_RES (2)..(4)..(38)..(39): Xaa is C or S
  MOD_RES (16)..(17)..(18)..(19)..(20): Xaa is A or G
  MOD_RES (21)..(22)..(23)..(24): Xaa is A or G or is absent

SEQ ID NO: 60534 - protein, 35 aa, Artificial Sequence; identical to SEQ ID NO: 4875
  GFR-binding peptide
  MOD_RES (1)..(3): Xaa is C or S
  MOD_RES (14)..(15)..(16)..(17)..(18): Xaa is A or G
  MOD_RES (19)..(20)..(21)..(22): Xaa is A or G or is absent

SEQ ID NO: 60535 - protein, 38 aa, Artificial Sequence
  GFR-binding peptide
  MOD_RES (2)..(4)..(38): Xaa is C or S
  MOD_RES (16)..(17)..(18)..(19)..(20): Xaa is A or G
  MOD_RES (21)..(22)..(23)..(24): Xaa is A or G or is absent
RXGXSEVVMDYHYKLXXXXXXXXXKYLISIPSLRTPVX

SEQ ID NO: 60536 - protein, 38 aa, Artificial Sequence; identical to SEQ ID NO: 25955
  GFR-binding peptide
  MOD_RES (2)..(36)..(37): Xaa is C or S
  MOD_RES (14)..(15)..(16)..(17)..(18): Xaa is A or G
  MOD_RES (19)..(20)..(21)..(22): Xaa is A or G or is absent

SEQ ID NO: 60537 - protein, 39 aa, Artificial Sequence
  GFR-binding peptide
  MOD_RES (1)..(3)..(37)..(38): Xaa is C or S
  MOD_RES (15)..(16)..(17)..(18)..(19): Xaa is A or G
  MOD_RES (20)..(21)..(22)..(23): Xaa is A or G or is absent
XGXAEVVMDRHKRLXXXXXXXXXYYLISTASLRAPVXXS

SEQ ID NO: 60538 - protein, 44 aa, Artificial Sequence; identical to SEQ ID NO: 4882
  GFR-binding peptide
  MOD_RES (2)..(4)..(39)..(40): Xaa is C or S
  MOD_RES (17)..(18)..(19)..(20)..(21): Xaa is A or G
  MOD_RES (22)..(23)..(24)..(25): Xaa is A or G or is absent

SEQ ID NO: 60539 - protein, 39 aa, Artificial Sequence; identical to SEQ ID NO: 25960
  GFR-binding peptide
  MOD_RES (1)..(3)..(37): Xaa is C or S
  MOD_RES (15)..(16)..(17)..(18)..(19): Xaa is A or G
  MOD_RES (20)..(21)..(22)..(23): Xaa is A or G or is absent

SEQ ID NO: 60540 - protein, 39 aa, Artificial Sequence; identical to SEQ ID NO: 4885
  GFR-binding peptide
  MOD_RES (2)..(4)..(36)..(37): Xaa is C or S

SEQ ID NO: 60541 - protein, 39 aa, Artificial Sequence
  GFR-binding peptide
  MOD_RES (2)..(4)..(36)..(37): Xaa is C or S
RXGXSEVVMDEYKFKVVNNASDLYLISIPELRTPVXXTP

SEQ ID NO: 60542 - protein, 34 aa, Artificial Sequence; identical to SEQ ID NO: 25966
  GFR-binding peptide
  MOD_RES (34)..(34): Xaa is C or S
  MOD_RES (12)..(13)..(14)..(15)..(16): Xaa is A or G
  MOD_RES (17)..(18)..(19)..(20): Xaa is A or G or is absent

SEQ ID NO: 60543 - protein, 35 aa, Artificial Sequence; identical to SEQ ID NO: 4888
  GFR-binding peptide
  MOD_RES (1)..(35): Xaa is C or S
  MOD_RES (13)..(14)..(15)..(16)..(17): Xaa is A or G
  MOD_RES (18)..(19)..(20)..(21): Xaa is A or G or is absent

SEQ ID NO: 60544 - protein, 37 aa, Artificial Sequence; identical to SEQ ID NO: 31971
  GFR-binding peptide
  MOD_RES (2)..(4)..(36)..(37): Xaa is C or S

SEQ ID NO: 60545 - protein, 39 aa, Artificial Sequence; identical to SEQ ID NO: 25969
  GFR-binding peptide
  MOD_RES (2)..(4)..(38): Xaa is C or S
  MOD_RES (16)..(17)..(18)..(19)..(20): Xaa is A or G
  MOD_RES (21)..(22)..(23)..(24): Xaa is A or G or is absent

SEQ ID NO: 60546 - protein, 33 aa, Artificial Sequence; identical to SEQ ID NO: 25970
  GFR-binding peptide
  MOD_RES (32)..(33): Xaa is C or S

SEQ ID NO: 60547 - protein, 37 aa, Artificial Sequence; identical to SEQ ID NO: 31972
  GFR-binding peptide
  MOD_RES (2)..(4): Xaa is C or S
  MOD_RES (16)..(17)..(18)..(19)..(20): Xaa is A or G
  MOD_RES (21)..(22)..(23)..(24): Xaa is A or G or is absent

SEQ ID NO: 60548 - protein, 37 aa, Artificial Sequence; identical to SEQ ID NO: 4892
  GFR-binding peptide
  MOD_RES (31)..(32): Xaa is C or S

SEQ ID NO: 60549 - protein, 36 aa, Artificial Sequence; identical to SEQ ID NO: 25975
  GFR-binding peptide
  MOD_RES (31)..(32): Xaa is C or S

SEQ ID NO: 60550 - protein, 31 aa, Artificial Sequence
  GFR-binding peptide
RDVVMGEYKFKIIQQKDNLYLMSIPEMKTPT

SEQ ID NO: 60551 - protein, 38 aa, Artificial Sequence
  GFR-binding peptide
  MOD_RES (1)..(3)..(34)..(35): Xaa is C or S
XKXSKVVMPIKGYVKPTRGVFYLINIPSLDQPVXXPSA

SEQ ID NO: 60552 - protein, 36 aa, Artificial Sequence
  GFR-binding peptide
  MOD_RES (2)..(34)..(35): Xaa is C or S
AXSEVTMNPIKGYVVNKNEDFYLINIPSMKEPVXXP

SEQ ID NO: 60553 - protein, 33 aa, Artificial Sequence
  GFR-binding peptide
  MOD_RES (31)..(32): Xaa is C or S
DVVMGRHKRLIIQQKDNYYLMSTASMKTPTXXP

SEQ ID NO: 60554 - protein, 38 aa, Artificial Sequence; identical to SEQ ID NO: 25978
  GFR-binding peptide
  MOD_RES (1)..(3)..(37)..(38): Xaa is C or S
  MOD_RES (15)..(16)..(17)..(18)..(19): Xaa is A or G
  MOD_RES (20)..(21)..(22)..(23): Xaa is A or G or is absent

SEQ ID NO: 60555 - protein, 41 aa, Artificial Sequence; identical to SEQ ID NO: 25979
  GFR-binding peptide
  MOD_RES (2)..(4)..(38)..(39): Xaa is C or S
  MOD_RES (16)..(17)..(18)..(19)..(20): Xaa is A or G
  MOD_RES (21)..(22)..(23)..(24): Xaa is A or G or is absent

SEQ ID NO: 60556 - protein, 36 aa, Artificial Sequence; identical to SEQ ID NO: 31980
  GFR-binding peptide
  MOD_RES (1)..(3)..(35)..(36): Xaa is C or S

SEQ ID NO: 60557 - protein, 34 aa, Artificial Sequence; identical to SEQ ID NO: 4896
  GFR-binding peptide
  MOD_RES (1)..(33)..(34): Xaa is C or S

SEQ ID NO: 60558 - protein, 37 aa, Artificial Sequence; identical to SEQ ID NO: 25985
  GFR-binding peptide
  MOD_RES (1)..(33)..(34): Xaa is C or S

SEQ ID NO: 60559 - protein, 34 aa, Artificial Sequence; identical to SEQ ID NO: 4900
  GFR-binding peptide
  MOD_RES (32)..(33): Xaa is C or S

SEQ ID NO: 60560 - protein, 34 aa, Artificial Sequence; identical to SEQ ID NO: 4901
  GFR-binding peptide
  MOD_RES (1)..(3): Xaa is C or S

SEQ ID NO: 60561 - protein, 35 aa, Artificial Sequence
  GFR-binding peptide
  MOD_RES (2)..(4): Xaa is C or S
RXAXSEVTMNPIKGYVVNKNEDFYLINIPSMKEPV

SEQ ID NO: 60562 - protein, 38 aa, Artificial Sequence; identical to SEQ ID NO: 4903
  GFR-binding peptide
  MOD_RES (32)..(32): Xaa is C or S

SEQ ID NO: 60563 - protein, 35 aa, Artificial Sequence
  GFR-binding peptide
  MOD_RES (1)..(34)..(35): Xaa is C or S
  MOD_RES (12)..(13)..(14)..(15)..(16): Xaa is A or G
  MOD_RES (17)..(18)..(19)..(20): Xaa is A or G or is absent
XEEVIMEYKFKXXXXXXXXXLYLMSIPETKVPAXX

SEQ ID NO: 60564 - protein, 35 aa, Artificial Sequence; identical to SEQ ID NO: 25991
  GFR-binding peptide
  MOD_RES (31)..(31): Xaa is C or S

SEQ ID NO: 60565 - protein, 37 aa, Artificial Sequence; identical to SEQ ID NO: 25992
  GFR-binding peptide
  MOD_RES (2)..(34)..(35): Xaa is C or S

SEQ ID NO: 60566 - protein, 39 aa, Artificial Sequence
  GFR-binding peptide
  MOD_RES (33)..(34): Xaa is C or S
  MOD_RES (11)..(12)..(13)..(14)..(15): Xaa is A or G
  MOD_RES (16)..(17)..(18)..(19): Xaa is A or G or is absent
EEVIMRHKRLXXXXXXXXXYYLMSTASTKVPAXXTSPVR

SEQ ID NO: 60567 - protein, 36 aa, Artificial Sequence
  GFR-binding peptide
  MOD_RES (2)..(36): Xaa is C or S
  MOD_RES (14)..(15)..(16)..(17)..(18): Xaa is A or G
  MOD_RES (19)..(20)..(21)..(22): Xaa is A or G or is absent
AXSEVTMNEYKFKXXXXXXXXXLYLISIPEMKEPVX

SEQ ID NO: 60568 - protein, 32 aa, Artificial Sequence; identical to SEQ ID NO: 25999
  GFR-binding peptide
  MOD_RES (1)..(1): Xaa is C or S

SEQ ID NO: 60569 - protein, 40 aa, Artificial Sequence
  GFR-binding peptide
  MOD_RES (2)..(34)..(35): Xaa is C or S
GXSEVVMDYHYKLVVNNASDKYLISIPSLRTPVXXTPPTS

SEQ ID NO: 60570 - protein, 41 aa, Artificial Sequence; identical to SEQ ID NO: 26000
  GFR-binding peptide
  MOD_RES (2)..(4)..(38)..(39): Xaa is C or S
  MOD_RES (16)..(17)..(18)..(19)..(20): Xaa is A or G
  MOD_RES (21)..(22)..(23)..(24): Xaa is A or G or is absent

SEQ ID NO: 60571 - protein, 35 aa, Artificial Sequence; identical to SEQ ID NO: 31992
  GFR-binding peptide
  MOD_RES (2)..(4): Xaa is C or S

SEQ ID NO: 60572 - protein, 41 aa, Artificial Sequence
  GFR-binding peptide
  MOD_RES (1)..(3)..(36)..(37): Xaa is C or S
  MOD_RES (14)..(15)..(16)..(17)..(18): Xaa is A or G
  MOD_RES (19)..(20)..(21)..(22): Xaa is A or G or is absent
XGXEEVIMRHKRLXXXXXXXXXYYLMSTASTKVPAXXTSPV

SEQ ID NO: 60573 - protein, 33 aa, Artificial Sequence; identical to SEQ ID NO: 26001
  GFR-binding peptide
  MOD_RES (1)..(1): Xaa is C or S
  MOD_RES (12)..(13)..(14)..(15)..(16): Xaa is A or G
  MOD_RES (17)..(18)..(19)..(20): Xaa is A or G or is absent

SEQ ID NO: 60574 - protein, 32 aa, Artificial Sequence; identical to SEQ ID NO: 31994
  GFR-binding peptide
  MOD_RES (1)..(32): Xaa is C or S

SEQ ID NO: 60575 - protein, 44 aa, Artificial Sequence; identical to SEQ ID NO: 26002
  GFR-binding peptide
  MOD_RES (2)..(4)..(38)..(39): Xaa is C or S
  MOD_RES (16)..(17)..(18)..(19)..(20): Xaa is A or G
  MOD_RES (21)..(22)..(23)..(24): Xaa is A or G or is absent

SEQ ID NO: 60576 - protein, 33 aa, Artificial Sequence; identical to SEQ ID NO: 4911
  GFR-binding peptide
  MOD_RES (1)..(33): Xaa is C or S

SEQ ID NO: 60577 - protein, 37 aa, Artificial Sequence; identical to SEQ ID NO: 26003
  GFR-binding peptide
  MOD_RES (2)..(35)..(36): Xaa is C or S
  MOD_RES (13)..(14)..(15)..(16)..(17): Xaa is A or G
  MOD_RES (18)..(19)..(20)..(21): Xaa is A or G or is absent

SEQ ID NO: 60578 - protein, 39 aa, Artificial Sequence; identical to SEQ ID NO: 26004
  GFR-binding peptide
  MOD_RES (2)..(36)..(37): Xaa is C or S
  MOD_RES (14)..(15)..(16)..(17)..(18): Xaa is A or G
  MOD_RES (19)..(20)..(21)..(22): Xaa is A or G or is absent

SEQ ID NO: 60579 - protein, 35 aa, Artificial Sequence; identical to SEQ ID NO: 26005
  GFR-binding peptide
  MOD_RES (34)..(35): Xaa is C or S
  MOD_RES (12)..(13)..(14)..(15)..(16): Xaa is A or G
  MOD_RES (17)..(18)..(19)..(20): Xaa is A or G or is absent

SEQ ID NO: 60580 - protein, 37 aa, Artificial Sequence
  GFR-binding peptide
  MOD_RES (2)..(4)..(35)..(36): Xaa is C or S
SXKXSKVVMPIKGYVKPTRGVFYLINIPSLDQPVXXP

SEQ ID NO: 60581 - protein, 37 aa, Artificial Sequence
  GFR-binding peptide
  MOD_RES (1)..(32)..(33): Xaa is C or S
XEEVIMRHKRLLLVRGNDYYLMSTASTKVPAXXTSPV

SEQ ID NO: 60582 - protein, 41 aa, Artificial Sequence; identical to SEQ ID NO: 4916
  GFR-binding peptide
  MOD_RES (2)..(4)..(35)..(36): Xaa is C or S

SEQ ID NO: 60583 - protein, 39 aa, Artificial Sequence; identical to SEQ ID NO: 4920
  GFR-binding peptide
  MOD_RES (2)..(4)..(38)..(39): Xaa is C or S
  MOD_RES (16)..(17)..(18)..(19)..(20): Xaa is A or G
  MOD_RES (21)..(22)..(23)..(24): Xaa is A or G or is absent

SEQ ID NO: 60584 - protein, 35 aa, Artificial Sequence; identical to SEQ ID NO: 4923
  GFR-binding peptide
  MOD_RES (1)..(35): Xaa is C or S
  MOD_RES (13)..(14)..(15)..(16)..(17): Xaa is A or G
  MOD_RES (18)..(19)..(20)..(21): Xaa is A or G or is absent

SEQ ID NO: 60585 - protein, 33 aa, Artificial Sequence
  GFR-binding peptide
  MOD_RES (1)..(32)..(33): Xaa is C or S
XSKVVMPIKGYVKPTRGVFYLINIPSLDQPVXX

SEQ ID NO: 60586 - protein, 36 aa, Artificial Sequence; identical to SEQ ID NO: 4925
  GFR-binding peptide
  MOD_RES (33)..(34): Xaa is C or S
  MOD_RES (11)..(12)..(13)..(14)..(15): Xaa is A or G
  MOD_RES (16)..(17)..(18)..(19): Xaa is A or G or is absent

SEQ ID NO: 60587 - protein, 40 aa, Artificial Sequence; identical to SEQ ID NO: 4927
  GFR-binding peptide
  MOD_RES (1)..(35)..(36): Xaa is C or S
  MOD_RES (13)..(14)..(15)..(16)..(17): Xaa is A or G
  MOD_RES (18)..(19)..(20)..(21): Xaa is A or G or is absent

SEQ ID NO: 60588 - protein, 33 aa, Artificial Sequence; identical to SEQ ID NO: 4928
  GFR-binding peptide
  MOD_RES (32)..(33): Xaa is C or S

SEQ ID NO: 60589 - protein, 45 aa, Artificial Sequence; identical to SEQ ID NO: 4930
  GFR-binding peptide
  MOD_RES (2)..(4)..(39)..(40): Xaa is C or S
  MOD_RES (17)..(18)..(19)..(20)..(21): Xaa is A or G
  MOD_RES (22)..(23)..(24)..(25): Xaa is A or G or is absent

SEQ ID NO: 60590 - protein, 33 aa, Artificial Sequence
  GFR-binding peptide
  MOD_RES (1)..(3): Xaa is C or S
XGXEEVIMRHKRLLLVRGNDYYLMSTASTKVPA

SEQ ID NO: 60591 - protein, 38 aa, Artificial Sequence; identical to SEQ ID NO: 32008
  GFR-binding peptide
  MOD_RES (32)..(33): Xaa is C or S

SEQ ID NO: 60592 - protein, 36 aa, Artificial Sequence; identical to SEQ ID NO: 26023
  GFR-binding peptide
  MOD_RES (1)..(33)..(34): Xaa is C or S

SEQ ID NO: 60593 - protein, 38 aa, Artificial Sequence; identical to SEQ ID NO: 26024
  GFR-binding peptide
  MOD_RES (2)..(4)..(38): Xaa is C or S
  MOD_RES (16)..(17)..(18)..(19)..(20): Xaa is A or G
  MOD_RES (21)..(22)..(23)..(24): Xaa is A or G or is absent

SEQ ID NO: 60594 - protein, 32 aa, Artificial Sequence; identical to SEQ ID NO: 26026
  GFR-binding peptide
  MOD_RES (1)..(1): Xaa is C or S

SEQ ID NO: 60595 - protein, 34 aa, Artificial Sequence
  GFR-binding peptide
  MOD_RES (1)..(3): Xaa is C or S
XGXSEVVMDRHKRLVVNNASDYYLISTASLRTPV

SEQ ID NO: 60596 - protein, 32 aa, Artificial Sequence
  GFR-binding peptide
  MOD_RES (31)..(32): Xaa is C or S
DVVMGRHKRLIIQQKDNYYLMSTASMKTPTXX

SEQ ID NO: 60597 - protein, 39 aa, Artificial Sequence; identical to SEQ ID NO: 32024
  GFR-binding peptide
  MOD_RES (2)..(4)..(36)..(37): Xaa is C or S

SEQ ID NO: 60598 - protein, 40 aa, Artificial Sequence
  GFR-binding peptide
  MOD_RES (2)..(35)..(36): Xaa is C or S
  MOD_RES (13)..(14)..(15)..(16)..(17): Xaa is A or G
  MOD_RES (18)..(19)..(20)..(21): Xaa is A or G or is absent
GXEEVIMYHYKLXXXXXXXXXKYLMSIPSTKVPAXXTSPV

SEQ ID NO: 60599 - protein, 41 aa, Artificial Sequence; identical to SEQ ID NO: 32026
  GFR-binding peptide
  MOD_RES (2)..(36)..(37): Xaa is C or S
  MOD_RES (14)..(15)..(16)..(17)..(18): Xaa is A or G
  MOD_RES (19)..(20)..(21)..(22): Xaa is A or G or is absent

SEQ ID NO: 60600 - protein, 36 aa, Artificial Sequence; identical to SEQ ID NO: 4939
  GFR-binding peptide
  MOD_RES (1)..(35): Xaa is C or S
  MOD_RES (13)..(14)..(15)..(16)..(17): Xaa is A or G
  MOD_RES (18)..(19)..(20)..(21): Xaa is A or G or is absent

SEQ ID NO: 60601 - protein, 36 aa, Artificial Sequence; identical to SEQ ID NO: 32029
  GFR-binding peptide
  MOD_RES (1)..(35)..(36): Xaa is C or S
  MOD_RES (13)..(14)..(15)..(16)..(17): Xaa is A or G
  MOD_RES (18)..(19)..(20)..(21): Xaa is A or G or is absent

SEQ ID NO: 60602 - protein, 36 aa, Artificial Sequence; identical to SEQ ID NO: 26037
  GFR-binding peptide
  MOD_RES (1)..(33)..(34): Xaa is C or S

SEQ ID NO: 60603 - protein, 35 aa, Artificial Sequence
  GFR-binding peptide
  MOD_RES (34)..(35): Xaa is C or S
  MOD_RES (12)..(13)..(14)..(15)..(16): Xaa is A or G
  MOD_RES (17)..(18)..(19)..(20): Xaa is A or G or is absent
ESVAMGRHKRLXXXXXXXXXYYLISTASLKTPVXX

SEQ ID NO: 60604 - protein, 34 aa, Artificial Sequence; identical to SEQ ID NO: 26038
  GFR-binding peptide
  MOD_RES (1)..(3): Xaa is C or S

SEQ ID NO: 60605 - protein, 33 aa, Artificial Sequence; identical to SEQ ID NO: 26040
  GFR-binding peptide
  MOD_RES (2)..(33): Xaa is C or S

SEQ ID NO: 60606 - protein, 42 aa, Artificial Sequence; identical to SEQ ID NO: 32040
  GFR-binding peptide
  MOD_RES (1)..(3)..(36)..(37): Xaa is C or S

SEQ ID NO: 60607 - protein, 39 aa, Artificial Sequence; identical to SEQ ID NO: 56984
  GFR-binding peptide
  MOD_RES (33)..(34): Xaa is C or S
  MOD_RES (11)..(12)..(13)..(14)..(15): Xaa is A or G
  MOD_RES (16)..(17)..(18)..(19): Xaa is A or G or is absent

SEQ ID NO: 60608 - protein, 35 aa, Artificial Sequence; identical to SEQ ID NO: 26041
  GFR-binding peptide
  MOD_RES (31)..(32): Xaa is C or S

SEQ ID NO: 60609 - protein, 40 aa, Artificial Sequence; identical to SEQ ID NO: 32043
  GFR-binding peptide
  MOD_RES (2)..(34)..(35): Xaa is C or S

SEQ ID NO: 60610 - protein, 38 aa, Artificial Sequence; identical to SEQ ID NO: 4952
  GFR-binding peptide
  MOD_RES (1)..(3)..(35): Xaa is C or S

SEQ ID NO: 60611 - protein, 39 aa, Artificial Sequence; identical to SEQ ID NO: 26046
  GFR-binding peptide
  MOD_RES (1)..(33)..(34): Xaa is C or S

SEQ ID NO: 60612 - protein, 39 aa, Artificial Sequence; identical to SEQ ID NO: 26048
  GFR-binding peptide
  MOD_RES (2)..(4)..(37)..(38): Xaa is C or S

SEQ ID NO: 60613 - protein, 34 aa, Artificial Sequence; identical to SEQ ID NO: 4958
  GFR-binding peptide
  MOD_RES (2)..(4): Xaa is C or S

SEQ ID NO: 60614 - protein, 34 aa, Artificial Sequence
  GFR-binding peptide
  MOD_RES (1)..(1): Xaa is C or S
  MOD_RES (13)..(14)..(15)..(16)..(17): Xaa is A or G
  MOD_RES (18)..(19)..(20)..(21): Xaa is A or G or is absent
XSEVVMDEYKFKXXXXXXXXXLYLISIPELRTPV

SEQ ID NO: 60615 - protein, 33 aa, Artificial Sequence; identical to SEQ ID NO: 32065
  GFR-binding peptide
  MOD_RES (33)..(33): Xaa is C or S
  MOD_RES (11)..(12)..(13)..(14)..(15): Xaa is A or G
  MOD_RES (16)..(17)..(18)..(19): Xaa is A or G or is absent

SEQ ID NO: 60616 - protein, 40 aa, Artificial Sequence; identical to SEQ ID NO: 26062
  GFR-binding peptide
  MOD_RES (2)..(4)..(37)..(38): Xaa is C or S
  MOD_RES (15)..(16)..(17)..(18)..(19): Xaa is A or G
  MOD_RES (20)..(21)..(22)..(23): Xaa is A or G or is absent

SEQ ID NO: 60617 - protein, 39 aa, Artificial Sequence; identical to SEQ ID NO: 26063
  GFR-binding peptide
  MOD_RES (2)..(35)..(36): Xaa is C or S
  MOD_RES (13)..(14)..(15)..(16)..(17): Xaa is A or G
  MOD_RES (18)..(19)..(20)..(21): Xaa is A or G or is absent

SEQ ID NO: 60618 - protein, 36 aa, Artificial Sequence; identical to SEQ ID NO: 4973
  GFR-binding peptide
  MOD_RES (2)..(4)..(36): Xaa is C or S

SEQ ID NO: 60619 - protein, 35 aa, Artificial Sequence; identical to SEQ ID NO: 4976
  GFR-binding peptide
  MOD_RES (2)..(2): Xaa is C or S
  MOD_RES (14)..(15)..(16)..(17)..(18): Xaa is A or G
  MOD_RES (19)..(20)..(21)..(22): Xaa is A or G or is absent

SEQ ID NO: 60620 - protein, 32 aa, Artificial Sequence; identical to SEQ ID NO: 4978
  GFR-binding peptide
  MOD_RES (11)..(12)..(13)..(14)..(15): Xaa is A or G
  MOD_RES (16)..(17)..(18)..(19): Xaa is A or G or is absent

SEQ ID NO: 60621 - protein, 42 aa, Artificial Sequence
  GFR-binding peptide
  MOD_RES (2)..(4)..(38)..(39): Xaa is C or S
  MOD_RES (16)..(17)..(18)..(19)..(20): Xaa is A or G
  MOD_RES (21)..(22)..(23)..(24): Xaa is A or G or is absent
RXAXSEVTMNYHYKLXXXXXXXXXKYLISIPSMKEPVXXPEP

SEQ ID NO: 60622 - protein, 41 aa, Artificial Sequence; identical to SEQ ID NO: 32073
  GFR-binding peptide
  MOD_RES (1)..(3)..(37)..(38): Xaa is C or S
  MOD_RES (15)..(16)..(17)..(18)..(19): Xaa is A or G
  MOD_RES (20)..(21)..(22)..(23): Xaa is A or G or is absent

SEQ ID NO: 60623 - protein, 40 aa, Artificial Sequence; identical to SEQ ID NO: 32074
  GFR-binding peptide
  MOD_RES (35)..(36): Xaa is C or S
  MOD_RES (13)..(14)..(15)..(16)..(17): Xaa is A or G
  MOD_RES (18)..(19)..(20)..(21): Xaa is A or G or is absent

SEQ ID NO: 60624 - protein, 40 aa, Artificial Sequence; identical to SEQ ID NO: 4979
  GFR-binding peptide
  MOD_RES (2)..(4)..(37)..(38): Xaa is C or S
  MOD_RES (15)..(16)..(17)..(18)..(19): Xaa is A or G
  MOD_RES (20)..(21)..(22)..(23): Xaa is A or G or is absent

SEQ ID NO: 60625 - protein, 38 aa, Artificial Sequence
  GFR-binding peptide
  MOD_RES (2)..(34)..(35): Xaa is C or S
AXSEVTMNEYKFKVVNKNEDLYLISIPEMKEPVXXPEP

SEQ ID NO: 60626 - protein, 42 aa, Artificial Sequence
  GFR-binding peptide
  MOD_RES (2)..(36)..(37): Xaa is C or S
  MOD_RES (14)..(15)..(16)..(17)..(18): Xaa is A or G
  MOD_RES (19)..(20)..(21)..(22): Xaa is A or G or is absent
GXRDVVMGRHKRLXXXXXXXXXYYLMSTASMKTPTXXPGASG

SEQ ID NO: 60627 - protein, 40 aa, Artificial Sequence; identical to SEQ ID NO: 26073
  GFR-binding peptide
  MOD_RES (2)..(36)..(37): Xaa is C or S
  MOD_RES (14)..(15)..(16)..(17)..(18): Xaa is A or G
  MOD_RES (19)..(20)..(21)..(22): Xaa is A or G or is absent

SEQ ID NO: 60628 - protein, 40 aa, Artificial Sequence; identical to SEQ ID NO: 4982
  GFR-binding peptide
  MOD_RES (34)..(34): Xaa is C or S
  MOD_RES (12)..(13)..(14)..(15)..(16): Xaa is A or G
  MOD_RES (17)..(18)..(19)..(20): Xaa is A or G or is absent

SEQ ID NO: 60629 - protein, 35 aa, Artificial Sequence; identical to SEQ ID NO: 26075
  GFR-binding peptide
  MOD_RES (33)..(34): Xaa is C or S
  MOD_RES (11)..(12)..(13)..(14)..(15): Xaa is A or G
  MOD_RES (16)..(17)..(18)..(19): Xaa is A or G or is absent

SEQ ID NO: 60630 - protein, 34 aa, Artificial Sequence; identical to SEQ ID NO: 26076
  GFR-binding peptide
  MOD_RES (1)..(1): Xaa is C or S
  MOD_RES (13)..(14)..(15)..(16)..(17): Xaa is A or G
  MOD_RES (18)..(19)..(20)..(21): Xaa is A or G or is absent

SEQ ID NO: 60631 - protein, 38 aa, Artificial Sequence
  GFR-binding peptide
  MOD_RES (1)..(3)..(37)..(38): Xaa is C or S
  MOD_RES (15)..(16)..(17)..(18)..(19): Xaa is A or G
  MOD_RES (20)..(21)..(22)..(23): Xaa is A or G or is absent
XGXSEVVMDYHYKLXXXXXXXXXKYLISIPSLRTPVXX

SEQ ID NO: 60632 - protein, 41 aa, Artificial Sequence
  GFR-binding peptide
  MOD_RES (2)..(36)..(37): Xaa is C or S
  MOD_RES (14)..(15)..(16)..(17)..(18): Xaa is A or G
  MOD_RES (19)..(20)..(21)..(22): Xaa is A or G or is absent
GXSEVVMDRHKRLXXXXXXXXXYYLISTASLRTPVXXTPPT

SEQ ID NO: 60633 - protein, 36 aa, Artificial Sequence; identical to SEQ ID NO: 32088
  GFR-binding peptide
  MOD_RES (2)..(36): Xaa is C or S
  MOD_RES (14)..(15)..(16)..(17)..(18): Xaa is A or G
  MOD_RES (19)..(20)..(21)..(22): Xaa is A or G or is absent

SEQ ID NO: 60634 - protein, 40 aa, Artificial Sequence; identical to SEQ ID NO: 32089
  GFR-binding peptide
  MOD_RES (2)..(4)..(38)..(39): Xaa is C or S
  MOD_RES (16)..(17)..(18)..(19)..(20): Xaa is A or G
  MOD_RES (21)..(22)..(23)..(24): Xaa is A or G or is absent

SEQ ID NO: 60635 - protein, 38 aa, Artificial Sequence; identical to SEQ ID NO: 4989
  GFR-binding peptide
  MOD_RES (33)..(34): Xaa is C or S
  MOD_RES (11)..(12)..(13)..(14)..(15): Xaa is A or G
  MOD_RES (16)..(17)..(18)..(19): Xaa is A or G or is absent

SEQ ID NO: 60636 - protein, 44 aa, Artificial Sequence; identical to SEQ ID NO: 4990
  GFR-binding peptide
  MOD_RES (2)..(4)..(38)..(39): Xaa is C or S
  MOD_RES (16)..(17)..(18)..(19)..(20): Xaa is A or G
  MOD_RES (21)..(22)..(23)..(24): Xaa is A or G or is absent

SEQ ID NO: 60637 - protein, 32 aa, Artificial Sequence; identical to SEQ ID NO: 26084
  GFR-binding peptide
  MOD_RES (11)..(12)..(13)..(14)..(15): Xaa is A or G
  MOD_RES (16)..(17)..(18)..(19): Xaa is A or G or is absent

SEQ ID NO: 60638 - protein, 32 aa, Artificial Sequence
  GFR-binding peptide
  MOD_RES (1)..(1): Xaa is C or S
XAEVVMDRHKRLVVNNAADYYLISTASLRAPV

SEQ ID NO: 60639 - protein, 42 aa, Artificial Sequence; identical to SEQ ID NO: 26086
  GFR-binding peptide
  MOD_RES (1)..(36)..(37): Xaa is C or S
  MOD_RES (14)..(15)..(16)..(17)..(18): Xaa is A or G
  MOD_RES (19)..(20)..(21)..(22): Xaa is A or G or is absent

SEQ ID NO: 60640 - protein, 38 aa, Artificial Sequence; identical to SEQ ID NO: 26087
  GFR-binding peptide
  MOD_RES (1)..(35)..(36): Xaa is C or S
  MOD_RES (13)..(14)..(15)..(16)..(17): Xaa is A or G
  MOD_RES (18)..(19)..(20)..(21): Xaa is A or G or is absent

SEQ ID NO: 60641 - protein, 34 aa, Artificial Sequence; identical to SEQ ID NO: 26088
  GFR-binding peptide
  MOD_RES (33)..(34): Xaa is C or S
  MOD_RES (11)..(12)..(13)..(14)..(15): Xaa is A or G
  MOD_RES (16)..(17)..(18)..(19): Xaa is A or G or is absent

SEQ ID NO: 60642 - protein, 40 aa, Artificial Sequence; identical to SEQ ID NO: 32099
  GFR-binding peptide
  MOD_RES (1)..(35): Xaa is C or S
  MOD_RES (13)..(14)..(15)..(16)..(17): Xaa is A or G
  MOD_RES (18)..(19)..(20)..(21): Xaa is A or G or is absent

SEQ ID NO: 60643 - protein, 38 aa, Artificial Sequence; identical to SEQ ID NO: 4991
  GFR-binding peptide
  MOD_RES (2)..(33)..(34): Xaa is C or S

SEQ ID NO: 60644 - protein, 42 aa, Artificial Sequence; identical to SEQ ID NO: 57042
  GFR-binding peptide
  MOD_RES (1)..(3)..(36)..(37): Xaa is C or S
  MOD_RES (14)..(15)..(16)..(17)..(18): Xaa is A or G
  MOD_RES (19)..(20)..(21)..(22): Xaa is A or G or is absent

SEQ ID NO: 60645 - protein, 36 aa, Artificial Sequence; identical to SEQ ID NO: 4996
  GFR-binding peptide
  MOD_RES (1)..(3)..(35)..(36): Xaa is C or S

SEQ ID NO: 60646 - protein, 33 aa, Artificial Sequence; identical to SEQ ID NO: 26093
  GFR-binding peptide
  MOD_RES (1)..(33): Xaa is C or S

SEQ ID NO: 60647 - protein, 31 aa, Artificial Sequence; identical to SEQ ID NO: 5002
  GFR-binding peptide
  MOD_RES (31)..(31): Xaa is C or S

SEQ ID NO: 60648 - protein, 39 aa, Artificial Sequence; identical to SEQ ID NO: 5004
  GFR-binding peptide
  MOD_RES (1)..(3)..(35)..(36): Xaa is C or S

SEQ ID NO: 60649 - protein, 33 aa, Artificial Sequence; identical to SEQ ID NO: 5005
  GFR-binding peptide
  MOD_RES (31)..(32): Xaa is C or S

SEQ ID NO: 60650 - protein, 38 aa, Artificial Sequence; identical to SEQ ID NO: 32114
  GFR-binding peptide
  MOD_RES (1)..(3)..(37): Xaa is C or S
  MOD_RES (15)..(16)..(17)..(18)..(19): Xaa is A or G
  MOD_RES (20)..(21)..(22)..(23): Xaa is A or G or is absent

SEQ ID NO: 60651 - protein, 33 aa, Artificial Sequence
  GFR-binding peptide
  MOD_RES (32)..(33): Xaa is C or S
AEVVMDRHKRLVVNNAADYYLISTASLRAPVXX

SEQ ID NO: 60652 - protein, 37 aa, Artificial Sequence; identical to SEQ ID NO: 5006
  GFR-binding peptide
  MOD_RES (1)..(3)..(34)..(35): Xaa is C or S

SEQ ID NO: 60653 - protein, 36 aa, Artificial Sequence; identical to SEQ ID NO: 26101
  GFR-binding peptide
  MOD_RES (33)..(34): Xaa is C or S
  MOD_RES (11)..(12)..(13)..(14)..(15): Xaa is A or G
  MOD_RES (16)..(17)..(18)..(19): Xaa is A or G or is absent

SEQ ID NO: 60654 - protein, 38 aa, Artificial Sequence; identical to SEQ ID NO: 32123
  GFR-binding peptide
  MOD_RES (34)..(35): Xaa is C or S
  MOD_RES (12)..(13)..(14)..(15)..(16): Xaa is A or G
  MOD_RES (17)..(18)..(19)..(20): Xaa is A or G or is absent

SEQ ID NO: 60655 - protein, 30 aa, Artificial Sequence; identical to SEQ ID NO: 32131
  GFR-binding peptide

SEQ ID NO: 60656 - protein, 32 aa, Artificial Sequence
  GFR-binding peptide
  MOD_RES (1)..(32): Xaa is C or S
XEEVIMEYKFKLLVRGNDLYLMSIPETKVPAX

SEQ ID NO: 60657 - protein, 39 aa, Artificial Sequence
  GFR-binding peptide
  MOD_RES (1)..(35)..(36): Xaa is C or S
  MOD_RES (13)..(14)..(15)..(16)..(17): Xaa is A or G
  MOD_RES (18)..(19)..(20)..(21): Xaa is A or G or is absent
XESVAMGRHKRLXXXXXXXXXYYLISTASLKTPVXXAKS

SEQ ID NO: 60658 - protein, 33 aa, Artificial Sequence
  GFR-binding peptide
  MOD_RES (33)..(33): Xaa is C or S
  MOD_RES (11)..(12)..(13)..(14)..(15): Xaa is A or G
  MOD_RES (16)..(17)..(18)..(19): Xaa is A or G or is absent
EVVMDYHYKLXXXXXXXXXKYLISIPSLRTPVX

SEQ ID NO: 60659 - protein, 37 aa, Artificial Sequence; identical to SEQ ID NO: 5014
  GFR-binding peptide
  MOD_RES (31)..(32): Xaa is C or S

SEQ ID NO: 60660 - protein, 39 aa, Artificial Sequence; identical to SEQ ID NO: 5015
  GFR-binding peptide
  MOD_RES (1)..(3)..(37)..(38): Xaa is C or S
  MOD_RES (15)..(16)..(17)..(18)..(19): Xaa is A or G
  MOD_RES (20)..(21)..(22)..(23): Xaa is A or G or is absent

SEQ ID NO: 60661 - protein, 39 aa, Artificial Sequence; identical to SEQ ID NO: 5016
  GFR-binding peptide
  MOD_RES (1)..(35)..(36): Xaa is C or S
  MOD_RES (13)..(14)..(15)..(16)..(17): Xaa is A or G
  MOD_RES (18)..(19)..(20)..(21): Xaa is A or G or is absent

SEQ ID NO: 60662 - protein, 36 aa, Artificial Sequence; identical to SEQ ID NO: 5017
  GFR-binding peptide
  MOD_RES (2)..(34)..(35): Xaa is C or S

SEQ ID NO: 60663 - protein, 39 aa, Artificial Sequence; identical to SEQ ID NO: 32136
  GFR-binding peptide
  MOD_RES (2)..(33)..(34): Xaa is C or S

SEQ ID NO: 60664 - protein, 43 aa, Artificial Sequence; identical to SEQ ID NO: 57070
  GFR-binding peptide
  MOD_RES (1)..(3)..(37)..(38): Xaa is C or S
  MOD_RES (15)..(16)..(17)..(18)..(19): Xaa is A or G
  MOD_RES (20)..(21)..(22)..(23): Xaa is A or G or is absent

SEQ ID NO: 60665 - protein, 40 aa, Artificial Sequence; identical to SEQ ID NO: 26111
  GFR-binding peptide
  MOD_RES (2)..(4)..(36)..(37): Xaa is C or S

SEQ ID NO: 60666 - protein, 44 aa, Artificial Sequence
  GFR-binding peptide
  MOD_RES (2)..(4)..(38)..(39): Xaa is C or S
  MOD_RES (16)..(17)..(18)..(19)..(20): Xaa is A or G
  MOD_RES (21)..(22)..(23)..(24): Xaa is A or G or is absent
RXGXESVAMGRHKRLXXXXXXXXXYYLISTASLKTPVXXAKSAK

SEQ ID NO: 60667 - protein, 34 aa, Artificial Sequence; identical to SEQ ID NO: 26114
  GFR-binding peptide
  MOD_RES (1)..(1): Xaa is C or S
  MOD_RES (13)..(14)..(15)..(16)..(17): Xaa is A or G
  MOD_RES (18)..(19)..(20)..(21): Xaa is A or G or is absent

SEQ ID NO: 60668 - protein, 33 aa, Artificial Sequence; identical to SEQ ID NO: 5027
  GFR-binding peptide
  MOD_RES (31)..(32): Xaa is C or S

SEQ ID NO: 60669 - protein, 40 aa, Artificial Sequence; identical to SEQ ID NO: 5028
  GFR-binding peptide
  MOD_RES (2)..(4)..(37)..(38): Xaa is C or S

SEQ ID NO: 60670 - protein, 36 aa, Artificial Sequence; identical to SEQ ID NO: 5030
  GFR-binding peptide
  MOD_RES (33)..(34): Xaa is C or S
  MOD_RES (11)..(12)..(13)..(14)..(15): Xaa is A or G
  MOD_RES (16)..(17)..(18)..(19): Xaa is A or G or is absent

SEQ ID NO: 60671 - protein, 37 aa, Artificial Sequence
  GFR-binding peptide
  MOD_RES (2)..(4)..(36)..(37): Xaa is C or S
RXAXSEVTMNRYKKLVVNKNEDFYLISIANMKEPVXX

SEQ ID NO: 60672 - protein, 36 aa, Artificial Sequence; identical to SEQ ID NO: 5031
  GFR-binding peptide
  MOD_RES (1)..(34)..(35): Xaa is C or S

SEQ ID NO: 60673 - protein, 36 aa, Artificial Sequence
  GFR-binding peptide
  MOD_RES (2)..(33)..(34): Xaa is C or S
KXSRVIMPIKGYVKPKRGVFYLINIPSLAQPVXXPA

SEQ ID NO: 60674 - protein, 40 aa, Artificial Sequence
  GFR-binding peptide
  MOD_RES (1)..(35)..(36): Xaa is C or S
  MOD_RES (13)..(14)..(15)..(16)..(17): Xaa is A or G
  MOD_RES (18)..(19)..(20)..(21): Xaa is A or G or is absent
XRDVVMGRHKRLXXXXXXXXXYYLMSTASMKTPTXXPGAS

SEQ ID NO: 60675 - protein, 36 aa, Artificial Sequence; identical to SEQ ID NO: 32149
  GFR-binding peptide
  MOD_RES (1)..(33)..(34): Xaa is C or S

SEQ ID NO: 60676 - protein, 34 aa, Artificial Sequence; identical to SEQ ID NO: 26126
  GFR-binding peptide
  MOD_RES (2)..(34): Xaa is C or S

SEQ ID NO: 60677 - protein, 37 aa, Artificial Sequence; identical to SEQ ID NO: 5037
  GFR-binding peptide
  MOD_RES (31)..(32): Xaa is C or S

SEQ ID NO: 60678 - protein, 38 aa, Artificial Sequence; identical to SEQ ID NO: 32153
  GFR-binding peptide
  MOD_RES (1)..(33)..(34): Xaa is C or S

SEQ ID NO: 60679 - protein, 38 aa, Artificial Sequence; identical to SEQ ID NO: 5040
  GFR-binding peptide
  MOD_RES (2)..(4)..(37)..(38): Xaa is C or S

SEQ ID NO: 60680 - protein, 34 aa, Artificial Sequence; identical to SEQ ID NO: 5042
  GFR-binding peptide
  MOD_RES (32)..(33): Xaa is C or S

SEQ ID NO: 60681 - protein, 34 aa, Artificial Sequence
  GFR-binding peptide
  MOD_RES (32)..(33): Xaa is C or S
SEVTMNPIKGYVVNKNEDFYLINIPSMKEPVXXP

SEQ ID NO: 60682 - protein, 41 aa, Artificial Sequence; identical to SEQ ID NO: 32159
  GFR-binding peptide
  MOD_RES (2)..(37)..(38): Xaa is C or S
  MOD_RES (15)..(16)..(17)..(18)..(19): Xaa is A or G
  MOD_RES (20)..(21)..(22)..(23): Xaa is A or G or is absent

SEQ ID NO: 60683 - protein, 37 aa, Artificial Sequence; identical to SEQ ID NO: 5044
  GFR-binding peptide
  MOD_RES (32)..(33): Xaa is C or S

SEQ ID NO: 60684 - protein, 42 aa, Artificial Sequence; identical to SEQ ID NO: 26135
  GFR-binding peptide
  MOD_RES (2)..(36)..(37): Xaa is C or S
  MOD_RES (14)..(15)..(16)..(17)..(18): Xaa is A or G
  MOD_RES (19)..(20)..(21)..(22): Xaa is A or G or is absent

SEQ ID NO: 60685 - protein, 37 aa, Artificial Sequence; identical to SEQ ID NO: 26137
  GFR-binding peptide
  MOD_RES (1)..(35)..(36): Xaa is C or S
  MOD_RES (13)..(14)..(15)..(16)..(17): Xaa is A or G
  MOD_RES (18)..(19)..(20)..(21): Xaa is A or G or is absent

SEQ ID NO: 60686 - protein, 36 aa, Artificial Sequence
  GFR-binding peptide
  MOD_RES (33)..(34): Xaa is C or S
  MOD_RES (11)..(12)..(13)..(14)..(15): Xaa is A or G
  MOD_RES (16)..(17)..(18)..(19): Xaa is A or G or is absent
EVVMDRHKRLXXXXXXXXXYYLISTASLRTPVXXTP

SEQ ID NO: 60687 - protein, 40 aa, Artificial Sequence; identical to SEQ ID NO: 26142
  GFR-binding peptide
  MOD_RES (1)..(3)..(35)..(36): Xaa is C or S

SEQ ID NO: 60688 - protein, 38 aa, Artificial Sequence; identical to SEQ ID NO: 5048
  GFR-binding peptide
  MOD_RES (2)..(4)..(38): Xaa is C or S
  MOD_RES (16)..(17)..(18)..(19)..(20): Xaa is A or G
  MOD_RES (21)..(22)..(23)..(24): Xaa is A or G or is absent

SEQ ID NO: 60689 - protein, 39 aa, Artificial Sequence; identical to SEQ ID NO: 5052
  GFR-binding peptide
  MOD_RES (2)..(4)..(38)..(39): Xaa is C or S
  MOD_RES (16)..(17)..(18)..(19)..(20): Xaa is A or G
  MOD_RES (21)..(22)..(23)..(24): Xaa is A or G or is absent

SEQ ID NO: 60690 - protein, 41 aa, Artificial Sequence; identical to SEQ ID NO: 26147
  GFR-binding peptide
  MOD_RES (2)..(4)..(37)..(38): Xaa is C or S
  MOD_RES (15)..(16)..(17)..(18)..(19): Xaa is A or G
  MOD_RES (20)..(21)..(22)..(23): Xaa is A or G or is absent

SEQ ID NO: 60691 - protein, 42 aa, Artificial Sequence
  GFR-binding peptide
  MOD_RES (2)..(4)..(37)..(38): Xaa is C or S
  MOD_RES (15)..(16)..(17)..(18)..(19): Xaa is A or G
  MOD_RES (20)..(21)..(22)..(23): Xaa is A or G or is absent
LXGXEEVIMEYKFKXXXXXXXXXLYLMSIPETKVPAXXTSPV

SEQ ID NO: 60692 - protein, 36 aa, Artificial Sequence; identical to SEQ ID NO: 26148
  GFR-binding peptide
  MOD_RES (32)..(33): Xaa is C or S

SEQ ID NO: 60693 - protein, 38 aa, Artificial Sequence; identical to SEQ ID NO: 5054
  GFR-binding peptide
  MOD_RES (33)..(33): Xaa is C or S
  MOD_RES (11)..(12)..(13)..(14)..(15): Xaa is A or G
  MOD_RES (16)..(17)..(18)..(19): Xaa is A or G or is absent

SEQ ID NO: 60694 - protein, 37 aa, Artificial Sequence
  GFR-binding peptide
  MOD_RES (2)..(35)..(36): Xaa is C or S
  MOD_RES (13)..(14)..(15)..(16)..(17): Xaa is A or G
  MOD_RES (18)..(19)..(20)..(21): Xaa is A or G or is absent
KXSKVIMPIKGYXXXXXXXXXFYLINIPSLDQSVXXP

SEQ ID NO: 60695 - protein, 32 aa, Artificial Sequence; identical to SEQ ID NO: 26149
  GFR-binding peptide

SEQ ID NO: 60696 - protein, 39 aa, Artificial Sequence; identical to SEQ ID NO: 57103
  GFR-binding peptide
  MOD_RES (1)..(34)..(35): Xaa is C or S
  MOD_RES (12)..(13)..(14)..(15)..(16): Xaa is A or G
  MOD_RES (17)..(18)..(19)..(20): Xaa is A or G or is absent

SEQ ID NO: 60697 - protein, 39 aa, Artificial Sequence
  GFR-binding peptide
  MOD_RES (1)..(3)..(35)..(36): Xaa is C or S
XAXSEVTMNYHYKLVVNKNEDKYLISIPSMKEPVXXPEP

SEQ ID NO: 60698 - protein, 38 aa, Artificial Sequence
  GFR-binding peptide
  MOD_RES (32)..(33): Xaa is C or S
RDVVMGYHYKLIIQQKDNKYLMSIPSMKTPTXXPGASG

SEQ ID NO: 60699 - protein, 33 aa, Artificial Sequence; identical to SEQ ID NO: 26157
  GFR-binding peptide
  MOD_RES (2)..(2): Xaa is C or S

SEQ ID NO: 60700 - protein, 37 aa, Artificial Sequence
  GFR-binding peptide
  MOD_RES (1)..(35)..(36): Xaa is C or S
  MOD_RES (13)..(14)..(15)..(16)..(17): Xaa is A or G
  MOD_RES (18)..(19)..(20)..(21): Xaa is A or G or is absent
XAEVVMDRHKRLXXXXXXXXXYYLISTASLRAPVXXS

SEQ ID NO: 60701 - protein, 34 aa, Artificial Sequence
  GFR-binding peptide
  MOD_RES (33)..(34): Xaa is C or S
  MOD_RES (11)..(12)..(13)..(14)..(15): Xaa is A or G
  MOD_RES (16)..(17)..(18)..(19): Xaa is A or G or is absent
EVTMNRHKRLXXXXXXXXXYYLISTASMKEPVXX

SEQ ID NO: 60702 - protein, 35 aa, Artificial Sequence
  GFR-binding peptide
  MOD_RES (32)..(33): Xaa is C or S
SEVVMDRHKRLVVNNASDYYLISTASLRTPVXXTP

SEQ ID NO: 60703 - protein, 43 aa, Artificial Sequence
  GFR-binding peptide
  MOD_RES (2)..(4)..(37)..(38): Xaa is C or S
  MOD_RES (15)..(16)..(17)..(18)..(19): Xaa is A or G
  MOD_RES (20)..(21)..(22)..(23): Xaa is A or G or is absent
SXKXSRVIMPIKGYXXXXXXXXXFYLINIPSLAQPVXXPAASA

SEQ ID NO: 60704 - protein, 36 aa, Artificial Sequence; identical to SEQ ID NO: 5066
  GFR-binding peptide
  MOD_RES (31)..(32): Xaa is C or S

SEQ ID NO: 60705 - protein, 34 aa, Artificial Sequence; identical to SEQ ID NO: 26168
  GFR-binding peptide
  MOD_RES (2)..(34): Xaa is C or S

SEQ ID NO: 60706 - protein, 39 aa, Artificial Sequence; identical to SEQ ID NO: 26170
  GFR-binding peptide
  MOD_RES (1)..(34)..(35): Xaa is C or S
  MOD_RES (12)..(13)..(14)..(15)..(16): Xaa is A or G
  MOD_RES (17)..(18)..(19)..(20): Xaa is A or G or is absent

SEQ ID NO: 60707 - protein, 40 aa, Artificial Sequence; identical to SEQ ID NO: 32177
  GFR-binding peptide
  MOD_RES (2)..(34)..(35): Xaa is C or S

SEQ ID NO: 60708 - protein, 34 aa, Artificial Sequence; identical to SEQ ID NO: 32178
  GFR-binding peptide
  MOD_RES (32)..(33): Xaa is C or S

SEQ ID NO: 60709 - protein, 40 aa, Artificial Sequence; identical to SEQ ID NO: 32179
  GFR-binding peptide
  MOD_RES (2)..(36)..(37): Xaa is C or S
  MOD_RES (14)..(15)..(16)..(17)..(18): Xaa is A or G
  MOD_RES (19)..(20)..(21)..(22): Xaa is A or G or is absent

SEQ ID NO: 60710 - protein, 37 aa, Artificial Sequence; identical to SEQ ID NO: 32180
  GFR-binding peptide
  MOD_RES (32)..(32): Xaa is C or S

SEQ ID NO: 60711 - protein, 33 aa, Artificial Sequence
  GFR-binding peptide
  MOD_RES (12)..(13)..(14)..(15)..(16): Xaa is A or G
  MOD_RES (17)..(18)..(19)..(20): Xaa is A or G or is absent
ESVAMGRHKRLXXXXXXXXXYYLISTASLKTPV

SEQ ID NO: 60712 - protein, 36 aa, Artificial Sequence; identical to SEQ ID NO: 32181
  GFR-binding peptide
  MOD_RES (33)..(33): Xaa is C or S
  MOD_RES (11)..(12)..(13)..(14)..(15): Xaa is A or G
  MOD_RES (16)..(17)..(18)..(19): Xaa is A or G or is absent

SEQ ID NO: 60713 - protein, 36 aa, Artificial Sequence; identical to SEQ ID NO: 5069
  GFR-binding peptide
  MOD_RES (1)..(33)..(34): Xaa is C or S

SEQ ID NO: 60714 - protein, 32 aa, Artificial Sequence; identical to SEQ ID NO: 57113
  GFR-binding peptide
  MOD_RES (31)..(32): Xaa is C or S

SEQ ID NO: 60715 - protein, 41 aa, Artificial Sequence
  GFR-binding peptide
  MOD_RES (1)..(3)..(35)..(36): Xaa is C or S
XGXRDVVMGEYKFKIIQQKDNLYLMSIPEMKTPTXXPGASG

SEQ ID NO: 60716 - protein, 37 aa, Artificial Sequence; identical to SEQ ID NO: 26173
  GFR-binding peptide
  MOD_RES (2)..(35)..(36): Xaa is C or S

SEQ ID NO: 60717 - protein, 41 aa, Artificial Sequence; identical to SEQ ID NO: 5070
  GFR-binding peptide
  MOD_RES (1)..(36)..(37): Xaa is C or S
  MOD_RES (14)..(15)..(16)..(17)..(18): Xaa is A or G
  MOD_RES (19)..(20)..(21)..(22): Xaa is A or G or is absent

SEQ ID NO: 60718 - protein, 36 aa, Artificial Sequence; identical to SEQ ID NO: 5071
  GFR-binding peptide
  MOD_RES (33)..(34): Xaa is C or S
  MOD_RES (11)..(12)..(13)..(14)..(15): Xaa is A or G
  MOD_RES (16)..(17)..(18)..(19): Xaa is A or G or is absent

SEQ ID NO: 60719 - protein, 35 aa, Artificial Sequence; identical to SEQ ID NO: 5072
  GFR-binding peptide
  MOD_RES (31)..(31): Xaa is C or S

SEQ ID NO: 60720 - protein, 35 aa, Artificial Sequence
  GFR-binding peptide
  MOD_RES (34)..(35): Xaa is C or S
  MOD_RES (12)..(13)..(14)..(15)..(16): Xaa is A or G
  MOD_RES (17)..(18)..(19)..(20): Xaa is A or G or is absent
SEVTMNYHYKLXXXXXXXXXKYLISIPSMKEPVXX

SEQ ID NO: 60721 - protein, 35 aa, Artificial Sequence; identical to SEQ ID NO: 26177
  GFR-binding peptide
  MOD_RES (32)..(33): Xaa is C or S

SEQ ID NO: 60722 - protein, 37 aa, Artificial Sequence; identical to SEQ ID NO: 5075
  GFR-binding peptide
  MOD_RES (2)..(4)..(36)..(37): Xaa is C or S

SEQ ID NO: 60723 - protein, 36 aa, Artificial Sequence
  GFR-binding peptide
  MOD_RES (34)..(35): Xaa is C or S
  MOD_RES (12)..(13)..(14)..(15)..(16): Xaa is A or G
  MOD_RES (17)..(18)..(19)..(20): Xaa is A or G or is absent
SEVTMNRHKRLXXXXXXXXXYYLISTASMKEPVXXP

SEQ ID NO: 60724 - protein, 36 aa, Artificial Sequence; identical to SEQ ID NO: 5076
  GFR-binding peptide
  MOD_RES (2)..(34)..(35): Xaa is C or S

SEQ ID NO: 60725 - protein, 37 aa, Artificial Sequence; identical to SEQ ID NO: 26181
  GFR-binding peptide
  MOD_RES (1)..(3): Xaa is C or S
  MOD_RES (16)..(17)..(18)..(19)..(20): Xaa is A or G
  MOD_RES (21)..(22)..(23)..(24): Xaa is A or G or is absent

SEQ ID NO: 60726 - protein, 41 aa, Artificial Sequence; identical to SEQ ID NO: 5077
  GFR-binding peptide
  MOD_RES (1)..(35)..(36): Xaa is C or S
  MOD_RES (13)..(14)..(15)..(16)..(17): Xaa is A or G
  MOD_RES (18)..(19)..(20)..(21): Xaa is A or G or is absent

SEQ ID NO: 60727 - protein, 34 aa, Artificial Sequence
  GFR-binding peptide
  MOD_RES (1)..(3): Xaa is C or S
XAXSEVTMNRYKKLVVNKNEDFYLISIANMKEPV

SEQ ID NO: 60728 - protein, 32 aa, Artificial Sequence; identical to SEQ ID NO: 5082
  GFR-binding peptide
  MOD_RES (1)..(1): Xaa is C or S

SEQ ID NO: 60729 - protein, 34 aa, Artificial Sequence; identical to SEQ ID NO: 26189
  GFR-binding peptide
  MOD_RES (1)..(33)..(34): Xaa is C or S

SEQ ID NO: 60730 - protein, 35 aa, Artificial Sequence; identical to SEQ ID NO: 5085
  GFR-binding peptide
  MOD_RES (1)..(3)..(35): Xaa is C or S

SEQ ID NO: 60731 - protein, 35 aa, Artificial Sequence; identical to SEQ ID NO: 26192
  GFR-binding peptide
  MOD_RES (2)..(33)..(34): Xaa is C or S

SEQ ID NO: 60732 - protein, 41 aa, Artificial Sequence; identical to SEQ ID NO: 32194
  GFR-binding peptide
  MOD_RES (1)..(35)..(36): Xaa is C or S
  MOD_RES (13)..(14)..(15)..(16)..(17): Xaa is A or G
  MOD_RES (18)..(19)..(20)..(21): Xaa is A or G or is absent

SEQ ID NO: 60733 - protein, 39 aa, Artificial Sequence
  GFR-binding peptide
  MOD_RES (2)..(4)..(37)..(38): Xaa is C or S
  MOD_RES (15)..(16)..(17)..(18)..(19): Xaa is A or G
  MOD_RES (20)..(21)..(22)..(23): Xaa is A or G or is absent
LXGXEEVIMYHYKLXXXXXXXXXKYLMSIPSTKVPAXXT

SEQ ID NO: 60734 - protein, 39 aa, Artificial Sequence; identical to SEQ ID NO: 5089
  GFR-binding peptide
  MOD_RES (2)..(4)..(36): Xaa is C or S

SEQ ID NO: 60735 - protein, 41 aa, Artificial Sequence; identical to SEQ ID NO: 5090
  GFR-binding peptide
  MOD_RES (2)..(36)..(37): Xaa is C or S
  MOD_RES (14)..(15)..(16)..(17)..(18): Xaa is A or G
  MOD_RES (19)..(20)..(21)..(22): Xaa is A or G or is absent

SEQ ID NO: 60736 - protein, 42 aa, Artificial Sequence; identical to SEQ ID NO: 26195
  GFR-binding peptide
  MOD_RES (2)..(4)..(37)..(38): Xaa is C or S
  MOD_RES (15)..(16)..(17)..(18)..(19): Xaa is A or G
  MOD_RES (20)..(21)..(22)..(23): Xaa is A or G or is absent

SEQ ID NO: 60737 - protein, 35 aa, Artificial Sequence
  GFR-binding peptide
  MOD_RES (32)..(33): Xaa is C or S
RDVVMGEYKFKIIQQKDNLYLMSIPEMKTPTXXPG

SEQ ID NO: 60738 - protein, 41 aa, Artificial Sequence; identical to SEQ ID NO: 5095
  GFR-binding peptide
  MOD_RES (2)..(35)..(36): Xaa is C or S

SEQ ID NO: 60739 - protein, 36 aa, Artificial Sequence; identical to SEQ ID NO: 26197
  GFR-binding peptide
  MOD_RES (2)..(36): Xaa is C or S
  MOD_RES (14)..(15)..(16)..(17)..(18): Xaa is A or G
  MOD_RES (19)..(20)..(21)..(22): Xaa is A or G or is absent

SEQ ID NO: 60740 - protein, 38 aa, Artificial Sequence
  GFR-binding peptide
  MOD_RES (2)..(33)..(34): Xaa is C or S
KXSRVIMPIKGYVKPKRGVFYLINIPSLAQPVXXPAAS

SEQ ID NO: 60741 - protein, 33 aa, Artificial Sequence; identical to SEQ ID NO: 5100
  GFR-binding peptide
  MOD_RES (33)..(33): Xaa is C or S
  MOD_RES (11)..(12)..(13)..(14)..(15): Xaa is A or G
  MOD_RES (16)..(17)..(18)..(19): Xaa is A or G or is absent

SEQ ID NO: 60742 - protein, 36 aa, Artificial Sequence; identical to SEQ ID NO: 32207
  GFR-binding peptide
  MOD_RES (33)..(34): Xaa is C or S
  MOD_RES (11)..(12)..(13)..(14)..(15): Xaa is A or G
  MOD_RES (16)..(17)..(18)..(19): Xaa is A or G or is absent

SEQ ID NO: 60743 - protein, 37 aa, Artificial Sequence; identical to SEQ ID NO: 5101
  GFR-binding peptide
  MOD_RES (2)..(4)..(36)..(37): Xaa is C or S

SEQ ID NO: 60744 - protein, 31 aa, Artificial Sequence; identical to SEQ ID NO: 26202
  GFR-binding peptide
  MOD_RES (31)..(31): Xaa is C or S

SEQ ID NO: 60745 - protein, 34 aa, Artificial Sequence
  GFR-binding peptide
  MOD_RES (32)..(33): Xaa is C or S
SEVTMNRHKRLVVNKNEDYYLISTASMKEPVXXP

SEQ ID NO: 60746 - protein, 39 aa, Artificial Sequence; identical to SEQ ID NO: 26205
  GFR-binding peptide
  MOD_RES (33)..(34): Xaa is C or S
  MOD_RES (11)..(12)..(13)..(14)..(15): Xaa is A or G
  MOD_RES (16)..(17)..(18)..(19): Xaa is A or G or is absent

SEQ ID NO: 60747 - protein, 30 aa, Artificial Sequence; identical to SEQ ID NO: 5105
  GFR-binding peptide

SEQ ID NO: 60748 - protein, 33 aa, Artificial Sequence; identical to SEQ ID NO: 26208
  GFR-binding peptide
  MOD_RES (31)..(32): Xaa is C or S

SEQ ID NO: 60749 - protein, 39 aa, Artificial Sequence
  GFR-binding peptide
  MOD_RES (2)..(36)..(37): Xaa is C or S
  MOD_RES (14)..(15)..(16)..(17)..(18): Xaa is A or G
  MOD_RES (19)..(20)..(21)..(22): Xaa is A or G or is absent
AXSEVTMNEYKFKXXXXXXXXXLYLISIPEMKEPVXXPE

SEQ ID NO: 60750 - protein, 41 aa, Artificial Sequence
  GFR-binding peptide
  MOD_RES (2)..(4)..(38)..(39): Xaa is C or S
  MOD_RES (16)..(17)..(18)..(19)..(20): Xaa is A or G
  MOD_RES (21)..(22)..(23)..(24): Xaa is A or G or is absent
RXGXESVAMGRHKRLXXXXXXXXXYYLISTASLKTPVXXAK

SEQ ID NO: 60751 - protein, 35 aa, Artificial Sequence
  GFR-binding peptide
  MOD_RES (1)..(3)..(34)..(35): Xaa is C or S
XGXEEVIMRHKRLLLVRGNDYYLMSTASTKVPAXX

SEQ ID NO: 60752 - protein, 39 aa, Artificial Sequence; identical to SEQ ID NO: 32219
  GFR-binding peptide
  MOD_RES (1)..(3)..(37)..(38): Xaa is C or S
  MOD_RES (15)..(16)..(17)..(18)..(19): Xaa is A or G
  MOD_RES (20)..(21)..(22)..(23): Xaa is A or G or is absent

SEQ ID NO: 60753 - protein, 34 aa, Artificial Sequence; identical to SEQ ID NO: 26212
  GFR-binding peptide
  MOD_RES (31)..(32): Xaa is C or S

SEQ ID NO: 60754 - protein, 33 aa, Artificial Sequence; identical to SEQ ID NO: 5109
  GFR-binding peptide
  MOD_RES (33)..(33): Xaa is C or S
  MOD_RES (11)..(12)..(13)..(14)..(15): Xaa is A or G
  MOD_RES (16)..(17)..(18)..(19): Xaa is A or G or is absent

SEQ ID NO: 60755 - protein, 34 aa, Artificial Sequence; identical to SEQ ID NO: 5111
  GFR-binding peptide
  MOD_RES (2)..(34): Xaa is C or S

SEQ ID NO: 60756 - protein, 31 aa, Artificial Sequence; identical to SEQ ID NO: 5112
  GFR-binding peptide
  MOD_RES (1)..(1): Xaa is C or S

SEQ ID NO: 60757 - protein, 37 aa, Artificial Sequence; identical to SEQ ID NO: 5115
  GFR-binding peptide
  MOD_RES (31)..(31): Xaa is C or S

SEQ ID NO: 60758 - protein, 32 aa, Artificial Sequence; identical to SEQ ID NO: 5117
  GFR-binding peptide
  MOD_RES (31)..(32): Xaa is C or S

SEQ ID NO: 60759 - protein, 36 aa, Artificial Sequence; identical to SEQ ID NO: 26219
  GFR-binding peptide
  MOD_RES (33)..(33): Xaa is C or S
  MOD_RES (11)..(12)..(13)..(14)..(15): Xaa is A or G
  MOD_RES (16)..(17)..(18)..(19): Xaa is A or G or is absent

SEQ ID NO: 60760 - protein, 36 aa, Artificial Sequence; identical to SEQ ID NO: 5118
  GFR-binding peptide
  MOD_RES (1)..(3)..(36): Xaa is C or S

SEQ ID NO: 60761 - protein, 37 aa, Artificial Sequence
  GFR-binding peptide
  MOD_RES (33)..(34): Xaa is C or S
  MOD_RES (11)..(12)..(13)..(14)..(15): Xaa is A or G
  MOD_RES (16)..(17)..(18)..(19): Xaa is A or G or is absent
DVVMGYHYKLXXXXXXXXXKYLMSIPSMKTPTXXPGA

SEQ ID NO: 60762 - protein, 35 aa, Artificial Sequence
  GFR-binding peptide
  MOD_RES (1)..(35): Xaa is C or S
  MOD_RES (13)..(14)..(15)..(16)..(17): Xaa is A or G
  MOD_RES (18)..(19)..(20)..(21): Xaa is A or G or is absent
XSEVVMDEYKFKXXXXXXXXXLYLISIPELRTPVX

SEQ ID NO: 60763 - protein, 39 aa, Artificial Sequence; identical to SEQ ID NO: 12547
  GFR-binding peptide
  MOD_RES (2)..(34)..(35): Xaa is C or S

SEQ ID NO: 60764 - protein, 33 aa, Artificial Sequence; identical to SEQ ID NO: 5119
  GFR-binding peptide
  MOD_RES (1)..(3): Xaa is C or S

SEQ ID NO: 60765 - protein, 40 aa, Artificial Sequence; identical to SEQ ID NO: 26223
  GFR-binding peptide
  MOD_RES (34)..(35): Xaa is C or S
  MOD_RES (12)..(13)..(14)..(15)..(16): Xaa is A or G
  MOD_RES (17)..(18)..(19)..(20): Xaa is A or G or is absent

SEQ ID NO: 60766 - protein, 35 aa, Artificial Sequence; identical to SEQ ID NO: 32229
  GFR-binding peptide
  MOD_RES (2)..(2): Xaa is C or S
  MOD_RES (14)..(15)..(16)..(17)..(18): Xaa is A or G
  MOD_RES (19)..(20)..(21)..(22): Xaa is A or G or is absent

SEQ ID NO: 60767 - protein, 39 aa, Artificial Sequence; identical to SEQ ID NO: 5123
  GFR-binding peptide
  MOD_RES (2)..(36)..(37): Xaa is C or S
  MOD_RES (14)..(15)..(16)..(17)..(18): Xaa is A or G
  MOD_RES (19)..(20)..(21)..(22): Xaa is A or G or is absent

SEQ ID NO: 60768 - protein, 34 aa, Artificial Sequence; identical to SEQ ID NO: 5124
  GFR-binding peptide
  MOD_RES (33)..(34): Xaa is C or S
  MOD_RES (11)..(12)..(13)..(14)..(15): Xaa is A or G
  MOD_RES (16)..(17)..(18)..(19): Xaa is A or G or is absent

SEQ ID NO: 60769 - protein, 41 aa, Artificial Sequence; identical to SEQ ID NO: 5126
  GFR-binding peptide
  MOD_RES (1)..(35)..(36): Xaa is C or S
  MOD_RES (13)..(14)..(15)..(16)..(17): Xaa is A or G
  MOD_RES (18)..(19)..(20)..(21): Xaa is A or G or is absent

SEQ ID NO: 60770 - protein, 36 aa, Artificial Sequence; identical to SEQ ID NO: 26228
  GFR-binding peptide
  MOD_RES (33)..(34): Xaa is C or S
  MOD_RES (11)..(12)..(13)..(14)..(15): Xaa is A or G
  MOD_RES (16)..(17)..(18)..(19): Xaa is A or G or is absent

SEQ ID NO: 60771 - protein, 32 aa, Artificial Sequence
  GFR-binding peptide
  MOD_RES (11)..(12)..(13)..(14)..(15): Xaa is A or G
  MOD_RES (16)..(17)..(18)..(19): Xaa is A or G or is absent
EEVIMRHKRLXXXXXXXXXYYLMSTASTKVPA

SEQ ID NO: 60772 - protein, 39 aa, Artificial Sequence; identical to SEQ ID NO: 32236
  GFR-binding peptide
  MOD_RES (1)..(33)..(34): Xaa is C or S

SEQ ID NO: 60773 - protein, 37 aa, Artificial Sequence; identical to SEQ ID NO: 5128
  GFR-binding peptide
  MOD_RES (34)..(35): Xaa is C or S
  MOD_RES (12)..(13)..(14)..(15)..(16): Xaa is A or G
  MOD_RES (17)..(18)..(19)..(20): Xaa is A or G or is absent

SEQ ID NO: 60774 - protein, 40 aa, Artificial Sequence; identical to SEQ ID NO: 5129
  GFR-binding peptide
  MOD_RES (2)..(4)..(36): Xaa is C or S

SEQ ID NO: 60775 - protein, 44 aa, Artificial Sequence; identical to SEQ ID NO: 5130
  GFR-binding peptide
  MOD_RES (2)..(4)..(38)..(39): Xaa is C or S
  MOD_RES (16)..(17)..(18)..(19)..(20): Xaa is A or G
  MOD_RES (21)..(22)..(23)..(24): Xaa is A or G or is absent

SEQ ID NO: 60776 - protein, 40 aa, Artificial Sequence; identical to SEQ ID NO: 32239
  GFR-binding peptide
  MOD_RES (2)..(4)..(37)..(38): Xaa is C or S

SEQ ID NO: 60777 - protein, 37 aa, Artificial Sequence; identical to SEQ ID NO: 32242
  GFR-binding peptide
  MOD_RES (32)..(33): Xaa is C or S

SEQ ID NO: 60778 - protein, 37 aa, Artificial Sequence; identical to SEQ ID NO: 26237
  GFR-binding peptide
  MOD_RES (31)..(32): Xaa is C or S

SEQ ID NO: 60779 - protein, 37 aa, Artificial Sequence; identical to SEQ ID NO: 5138
  GFR-binding peptide
  MOD_RES (2)..(36): Xaa is C or S
  MOD_RES (14)..(15)..(16)..(17)..(18): Xaa is A or G
  MOD_RES (19)..(20)..(21)..(22): Xaa is A or G or is absent

SEQ ID NO: 60780 - protein, 40 aa, Artificial Sequence; identical to SEQ ID NO: 26238
  GFR-binding peptide
  MOD_RES (2)..(4)..(38)..(39): Xaa is C or S
  MOD_RES (16)..(17)..(18)..(19)..(20): Xaa is A or G
  MOD_RES (21)..(22)..(23)..(24): Xaa is A or G or is absent

SEQ ID NO: 60781 - protein, 37 aa, Artificial Sequence
  GFR-binding peptide
  MOD_RES (1)..(3)..(34)..(35): Xaa is C or S
XKXSKVIMPIKGYIKPTKGIFYLINIPSLDQSVXXPS

SEQ ID NO: 60782 - protein, 37 aa, Artificial Sequence
  GFR-binding peptide
  MOD_RES (34)..(35): Xaa is C or S
  MOD_RES (12)..(13)..(14)..(15)..(16): Xaa is A or G
  MOD_RES (17)..(18)..(19)..(20): Xaa is A or G or is absent
ESVAMGRHKRLXXXXXXXXXYYLISTASLKTPVXXAK

SEQ ID NO: 60783 - protein, 35 aa, Artificial Sequence
  GFR-binding peptide
  MOD_RES (2)..(4): Xaa is C or S
RXGXESVAMGRHKRLYTVVGKDYYLISTASLKTPV

SEQ ID NO: 60784 - protein, 38 aa, Artificial Sequence; identical to SEQ ID NO: 5139
  GFR-binding peptide
  MOD_RES (2)..(34)..(35): Xaa is C or S

SEQ ID NO: 60785 - protein, 32 aa, Artificial Sequence; identical to SEQ ID NO: 5141
  GFR-binding peptide
  MOD_RES (1)..(1): Xaa is C or S

SEQ ID NO: 60786 - protein, 43 aa, Artificial Sequence
  GFR-binding peptide
  MOD_RES (2)..(4)..(38)..(39): Xaa is C or S
  MOD_RES (16)..(17)..(18)..(19)..(20): Xaa is A or G
  MOD_RES (21)..(22)..(23)..(24): Xaa is A or G or is absent
SXGXRDVVMGYHYKLXXXXXXXXXKYLMSIPSMKTPTXXPGAS

SEQ ID NO: 60787 - protein, 39 aa, Artificial Sequence; identical to SEQ ID NO: 26244
  GFR-binding peptide
  MOD_RES (1)..(33)..(34): Xaa is C or S

SEQ ID NO: 60788 - protein, 34 aa, Artificial Sequence; identical to SEQ ID NO: 32248
  GFR-binding peptide
  MOD_RES (31)..(32): Xaa is C or S

SEQ ID NO: 60789 - protein, 40 aa, Artificial Sequence
  GFR-binding peptide
  MOD_RES (2)..(36)..(37): Xaa is C or S
  MOD_RES (14)..(15)..(16)..(17)..(18): Xaa is A or G
  MOD_RES (19)..(20)..(21)..(22): Xaa is A or G or is absent
AXSEVTMNEYKFKXXXXXXXXXLYLISIPEMKEPVXXPEP

SEQ ID NO: 60790 - protein, 38 aa, Artificial Sequence; identical to SEQ ID NO: 26248
  GFR-binding peptide
  MOD_RES (1)..(3)..(35)..(36): Xaa is C or S

SEQ ID NO: 60791 - protein, 32 aa, Artificial Sequence; identical to SEQ ID NO: 5144
  GFR-binding peptide
  MOD_RES (1)..(32): Xaa is C or S

SEQ ID NO: 60792 - protein, 32 aa, Artificial Sequence; identical to SEQ ID NO: 32252
  GFR-binding peptide
  MOD_RES (31)..(32): Xaa is C or S

SEQ ID NO: 60793 - protein, 36 aa, Artificial Sequence
  GFR-binding peptide
  MOD_RES (33)..(34): Xaa is C or S
  MOD_RES (11)..(12)..(13)..(14)..(15): Xaa is A or G
  MOD_RES (16)..(17)..(18)..(19): Xaa is A or G or is absent
DVVMGYHYKLXXXXXXXXXKYLMSIPSMKTPTXXPG

SEQ ID NO: 60794 - protein, 33 aa, Artificial Sequence; identical to SEQ ID NO: 32256
  GFR-binding peptide
  MOD_RES (31)..(31): Xaa is C or S

SEQ ID NO: 60795 - protein, 40 aa, Artificial Sequence; identical to SEQ ID NO: 12587
  GFR-binding peptide
  MOD_RES (1)..(3)..(37)..(38): Xaa is C or S
  MOD_RES (15)..(16)..(17)..(18)..(19): Xaa is A or G
  MOD_RES (20)..(21)..(22)..(23): Xaa is A or G or is absent

SEQ ID NO: 60796 - protein, 38 aa, Artificial Sequence
  GFR-binding peptide
  MOD_RES (2)..(36)..(37): Xaa is C or S
  MOD_RES (14)..(15)..(16)..(17)..(18): Xaa is A or G
  MOD_RES (19)..(20)..(21)..(22): Xaa is A or G or is absent
GXRDVVMGRHKRLXXXXXXXXXYYLMSTASMKTPTXXP

SEQ ID NO: 60797 - protein, 39 aa, Artificial Sequence; identical to SEQ ID NO: 5147
  GFR-binding peptide
  MOD_RES (1)..(33)..(34): Xaa is C or S

SEQ ID NO: 60798 - protein, 42 aa, Artificial Sequence; identical to SEQ ID NO: 32261
  GFR-binding peptide
  MOD_RES (2)..(4)..(36)..(37): Xaa is C or S

SEQ ID NO: 60799 - protein, 39 aa, Artificial Sequence
  GFR-binding peptide
  MOD_RES (1)..(33)..(34): Xaa is C or S
XSEVVMDEYKFKVVNNASDLYLISIPELRTPVXXTPPTS

SEQ ID NO: 60800 - protein, 34 aa, Artificial Sequence
  GFR-binding peptide
  MOD_RES (34)..(34): Xaa is C or S
  MOD_RES (12)..(13)..(14)..(15)..(16): Xaa is A or G
  MOD_RES (17)..(18)..(19)..(20): Xaa is A or G or is absent
SEVTMNYHYKLXXXXXXXXXKYLISIPSMKEPVX

SEQ ID NO: 60801 - protein, 33 aa, Artificial Sequence; identical to SEQ ID NO: 12596
  GFR-binding peptide
  MOD_RES (31)..(32): Xaa is C or S

SEQ ID NO: 60802 - protein, 37 aa, Artificial Sequence; identical to SEQ ID NO: 26258
  GFR-binding peptide
  MOD_RES (33)..(34): Xaa is C or S
  MOD_RES (11)..(12)..(13)..(14)..(15): Xaa is A or G
  MOD_RES (16)..(17)..(18)..(19): Xaa is A or G or is absent

SEQ ID NO: 60803 - protein, 34 aa, Artificial Sequence; identical to SEQ ID NO: 26259
  GFR-binding peptide
  MOD_RES (2)..(4): Xaa is C or S

SEQ ID NO: 60804 - protein, 34 aa, Artificial Sequence; identical to SEQ ID NO: 26260
  GFR-binding peptide
  MOD_RES (33)..(34): Xaa is C or S
  MOD_RES (11)..(12)..(13)..(14)..(15): Xaa is A or G
  MOD_RES (16)..(17)..(18)..(19): Xaa is A or G or is absent

SEQ ID NO: 60805 - protein, 37 aa, Artificial Sequence; identical to SEQ ID NO: 26262
  GFR-binding peptide
  MOD_RES (2)..(4): Xaa is C or S
  MOD_RES (16)..(17)..(18)..(19)..(20): Xaa is A or G
  MOD_RES (21)..(22)..(23)..(24): Xaa is A or G or is absent

SEQ ID NO: 60806 - protein, 39 aa, Artificial Sequence; identical to SEQ ID NO: 32264
  GFR-binding peptide
  MOD_RES (1)..(36)..(37): Xaa is C or S
  MOD_RES (14)..(15)..(16)..(17)..(18): Xaa is A or G
  MOD_RES (19)..(20)..(21)..(22): Xaa is A or G or is absent

SEQ ID NO: 60807 - protein, 34 aa, Artificial Sequence; identical to SEQ ID NO: 32267
  GFR-binding peptide
  MOD_RES (34)..(34): Xaa is C or S
  MOD_RES (12)..(13)..(14)..(15)..(16): Xaa is A or G
  MOD_RES (17)..(18)..(19)..(20): Xaa is A or G or is absent

SEQ ID NO: 60808 - protein, 39 aa, Artificial Sequence; identical to SEQ ID NO: 26267
  GFR-binding peptide
  MOD_RES (1)..(33)..(34): Xaa is C or S

SEQ ID NO: 60809 - protein, 41 aa, Artificial Sequence; identical to SEQ ID NO: 5162
  GFR-binding peptide
  MOD_RES (2)..(4)..(36): Xaa is C or S

SEQ ID NO: 60810 - protein, 34 aa, Artificial Sequence
  GFR-binding peptide
  MOD_RES (1)..(1): Xaa is C or S
  MOD_RES (13)..(14)..(15)..(16)..(17): Xaa is A or G
  MOD_RES (18)..(19)..(20)..(21): Xaa is A or G or is absent
XSEVVMDYHYKLXXXXXXXXXKYLISIPSLRTPV

SEQ ID NO: 60811 - protein, 36 aa, Artificial Sequence; identical to SEQ ID NO: 5166
  GFR-binding peptide
  MOD_RES (1)..(33)..(34): Xaa is C or S

SEQ ID NO: 60812 - protein, 42 aa, Artificial Sequence; identical to SEQ ID NO: 26274
  GFR-binding peptide
  MOD_RES (2)..(4)..(36)..(37): Xaa is C or S

SEQ ID NO: 60813 - protein, 38 aa, Artificial Sequence; identical to SEQ ID NO: 26275
  GFR-binding peptide
  MOD_RES (2)..(4)..(38): Xaa is C or S
  MOD_RES (16)..(17)..(18)..(19)..(20): Xaa is A or G
  MOD_RES (21)..(22)..(23)..(24): Xaa is A or G or is absent

SEQ ID NO: 60814 - protein, 36 aa, Artificial Sequence; identical to SEQ ID NO: 26277
  GFR-binding peptide
  MOD_RES (1)..(3)..(36): Xaa is C or S
  MOD_RES (14)..(15)..(16)..(17)..(18): Xaa is A or G
  MOD_RES (19)..(20)..(21)..(22): Xaa is A or G or is absent

SEQ ID NO: 60815 - protein, 36 aa, Artificial Sequence; identical to SEQ ID NO: 5169
  GFR-binding peptide
  MOD_RES (1)..(35)..(36): Xaa is C or S
  MOD_RES (13)..(14)..(15)..(16)..(17): Xaa is A or G
  MOD_RES (18)..(19)..(20)..(21): Xaa is A or G or is absent

SEQ ID NO: 60816 - protein, 42 aa, Artificial Sequence; identical to SEQ ID NO: 5172
  GFR-binding peptide
  MOD_RES (1)..(3)..(36)..(37): Xaa is C or S
  MOD_RES (14)..(15)..(16)..(17)..(18): Xaa is A or G
  MOD_RES (19)..(20)..(21)..(22): Xaa is A or G or is absent

SEQ ID NO: 60817 - protein, 35 aa, Artificial Sequence
  GFR-binding peptide
  MOD_RES (31)..(32): Xaa is C or S
EVTMNEYKFKVVNKNEDLYLISIPEMKEPVXXPEP

SEQ ID NO: 60818 - protein, 34 aa, Artificial Sequence; identical to SEQ ID NO: 5175
  GFR-binding peptide
  MOD_RES (1)..(3)..(34): Xaa is C or S

SEQ ID NO: 60819 - protein, 38 aa, Artificial Sequence; identical to SEQ ID NO: 26286
  GFR-binding peptide
  MOD_RES (2)..(4)..(38): Xaa is C or S
  MOD_RES (16)..(17)..(18)..(19)..(20): Xaa is A or G
  MOD_RES (21)..(22)..(23)..(24): Xaa is A or G or is absent

SEQ ID NO: 60820 - protein, 32 aa, Artificial Sequence; identical to SEQ ID NO: 5178
  GFR-binding peptide
  MOD_RES (1)..(1): Xaa is C or S

SEQ ID NO: 60821 - protein, 37 aa, Artificial Sequence; identical to SEQ ID NO: 57222
  GFR-binding peptide
  MOD_RES (33)..(34): Xaa is C or S
  MOD_RES (11)..(12)..(13)..(14)..(15): Xaa is A or G
  MOD_RES (16)..(17)..(18)..(19): Xaa is A or G or is absent

SEQ ID NO: 60822 - protein, 37 aa, Artificial Sequence; identical to SEQ ID NO: 5179
  GFR-binding peptide
  MOD_RES (33)..(34): Xaa is C or S
  MOD_RES (11)..(12)..(13)..(14)..(15): Xaa is A or G
  MOD_RES (16)..(17)..(18)..(19): Xaa is A or G or is absent

SEQ ID NO: 60823 - protein, 33 aa, Artificial Sequence; identical to SEQ ID NO: 5180
  GFR-binding peptide
  MOD_RES (12)..(13)..(14)..(15)..(16): Xaa is A or G
  MOD_RES (17)..(18)..(19)..(20): Xaa is A or G or is absent

SEQ ID NO: 60824 - protein, 32 aa, Artificial Sequence; identical to SEQ ID NO: 57226
  GFR-binding peptide
  MOD_RES (11)..(12)..(13)..(14)..(15): Xaa is A or G
  MOD_RES (16)..(17)..(18)..(19): Xaa is A or G or is absent

SEQ ID NO: 60825 - protein, 38 aa, Artificial Sequence; identical to SEQ ID NO: 26294
  GFR-binding peptide
  MOD_RES (32)..(33): Xaa is C or S

SEQ ID NO: 60826 - protein, 39 aa, Artificial Sequence; identical to SEQ ID NO: 32288
  GFR-binding peptide
  MOD_RES (2)..(36)..(37): Xaa is C or S
  MOD_RES (14)..(15)..(16)..(17)..(18): Xaa is A or G
  MOD_RES (19)..(20)..(21)..(22): Xaa is A or G or is absent

SEQ ID NO: 60827 - protein, 36 aa, Artificial Sequence; identical to SEQ ID NO: 5185
  GFR-binding peptide
  MOD_RES (2)..(33)..(34): Xaa is C or S

SEQ ID NO: 60828 - protein, 39 aa, Artificial Sequence; identical to SEQ ID NO: 32291
  GFR-binding peptide
  MOD_RES (1)..(33): Xaa is C or S

SEQ ID NO: 60829 - protein, 37 aa, Artificial Sequence; identical to SEQ ID NO: 5187
  GFR-binding peptide
  MOD_RES (1)..(32)..(33): Xaa is C or S

SEQ ID NO: 60830 - protein, 33 aa, Artificial Sequence; identical to SEQ ID NO: 32295
  GFR-binding peptide
  MOD_RES (31)..(32): Xaa is C or S

SEQ ID NO: 60831 - protein, 38 aa, Artificial Sequence; identical to SEQ ID NO: 32297
  GFR-binding peptide
  MOD_RES (2)..(4)..(37)..(38): Xaa is C or S
  MOD_RES (15)..(16)..(17)..(18)..(19): Xaa is A or G
  MOD_RES (20)..(21)..(22)..(23): Xaa is A or G or is absent

SEQ ID NO: 60832 - protein, 39 aa, Artificial Sequence
  GFR-binding peptide
  MOD_RES (1)..(34)..(35): Xaa is C or S
  MOD_RES (12)..(13)..(14)..(15)..(16): Xaa is A or G
  MOD_RES (17)..(18)..(19)..(20): Xaa is A or G or is absent
XSKVVMPIKGYXXXXXXXXXFYLINIPSLDQPVXXPSAS

SEQ ID NO: 60833 - protein, 42 aa, Artificial Sequence; identical to SEQ ID NO: 5194
  GFR-binding peptide
  MOD_RES (2)..(4)..(38)..(39): Xaa is C or S
  MOD_RES (16)..(17)..(18)..(19)..(20): Xaa is A or G
  MOD_RES (21)..(22)..(23)..(24): Xaa is A or G or is absent

SEQ ID NO: 60834 - protein, 35 aa, Artificial Sequence; identical to SEQ ID NO: 5195
  GFR-binding peptide
  MOD_RES (1)..(32)..(33): Xaa is C or S

SEQ ID NO: 60835 - protein, 37 aa, Artificial Sequence; identical to SEQ ID NO: 32300
  GFR-binding peptide
  MOD_RES (1)..(3)..(36)..(37): Xaa is C or S
  MOD_RES (14)..(15)..(16)..(17)..(18): Xaa is A or G
  MOD_RES (19)..(20)..(21)..(22): Xaa is A or G or is absent

SEQ ID NO: 60836 - protein, 40 aa, Artificial Sequence; identical to SEQ ID NO: 26307
  GFR-binding peptide
  MOD_RES (2)..(4)..(36)..(37): Xaa is C or S

SEQ ID NO: 60837 - protein, 36 aa, Artificial Sequence; identical to SEQ ID NO: 5198
  GFR-binding peptide
  MOD_RES (32)..(33): Xaa is C or S

SEQ ID NO: 60838 - protein, 34 aa, Artificial Sequence; identical to SEQ ID NO: 26309
  GFR-binding peptide
  MOD_RES (2)..(34): Xaa is C or S

SEQ ID NO: 60839 - protein, 41 aa, Artificial Sequence; identical to SEQ ID NO: 5199
  GFR-binding peptide
  MOD_RES (1)..(3)..(35): Xaa is C or S

SEQ ID NO: 60840 - protein, 43 aa, Artificial Sequence; identical to SEQ ID NO: 31201
  GFR-binding peptide
  MOD_RES (1)..(3)..(37)..(38): Xaa is C or S
  MOD_RES (15)..(16)..(17)..(18)..(19): Xaa is A or G
  MOD_RES (20)..(21)..(22)..(23): Xaa is A or G or is absent

SEQ ID NO: 60841 - protein, 38 aa, Artificial Sequence; identical to SEQ ID NO: 5200
  GFR-binding peptide
  MOD_RES (1)..(33)..(34): Xaa is C or S

SEQ ID NO: 60842 - protein, 37 aa, Artificial Sequence; identical to SEQ ID NO: 26314
  GFR-binding peptide
  MOD_RES (1)..(34)..(35): Xaa is C or S

SEQ ID NO: 60843 - protein, 32 aa, Artificial Sequence; identical to SEQ ID NO: 31205
  GFR-binding peptide
  MOD_RES (2)..(2): Xaa is C or S

SEQ ID NO: 60844 - protein, 37 aa, Artificial Sequence; identical to SEQ ID NO: 5205
  GFR-binding peptide
  MOD_RES (2)..(34)..(35): Xaa is C or S

SEQ ID NO: 60845 - protein, 42 aa, Artificial Sequence
  GFR-binding peptide
  MOD_RES (2)..(36)..(37): Xaa is C or S
  MOD_RES (14)..(15)..(16)..(17)..(18): Xaa is A or G
  MOD_RES (19)..(20)..(21)..(22): Xaa is A or G or is absent
GXSEVVMDRHKRLXXXXXXXXXYYLISTASLRTPVXXTPPTS

SEQ ID NO: 60846 - protein, 35 aa, Artificial Sequence; identical to SEQ ID NO: 31211
  GFR-binding peptide
  MOD_RES (1)..(33)..(34): Xaa is C or S

SEQ ID NO: 60847 - protein, 40 aa, Artificial Sequence; identical to SEQ ID NO: 5212
  GFR-binding peptide
  MOD_RES (34)..(35): Xaa is C or S
  MOD_RES (12)..(13)..(14)..(15)..(16): Xaa is A or G
  MOD_RES (17)..(18)..(19)..(20): Xaa is A or G or is absent

SEQ ID NO: 60848 - protein, 40 aa, Artificial Sequence; identical to SEQ ID NO: 31220
  GFR-binding peptide
  MOD_RES (1)..(35)..(36): Xaa is C or S
  MOD_RES (13)..(14)..(15)..(16)..(17): Xaa is A or G
  MOD_RES (18)..(19)..(20)..(21): Xaa is A or G or is absent

SEQ ID NO: 60849 - protein, 35 aa, Artificial Sequence; identical to SEQ ID NO: 5215
  GFR-binding peptide
  MOD_RES (34)..(34): Xaa is C or S
  MOD_RES (12)..(13)..(14)..(15)..(16): Xaa is A or G
  MOD_RES (17)..(18)..(19)..(20): Xaa is A or G or is absent

SEQ ID NO: 60850 - protein, 31 aa, Artificial Sequence
  GFR-binding peptide
SEVTMNYHYKLVVNKNEDKYLISIPSMKEPV

SEQ ID NO: 60851 - protein, 34 aa, Artificial Sequence
  GFR-binding peptide
  MOD_RES (31)..(32): Xaa is C or S
EVTMNYHYKLVVNKNEDKYLISIPSMKEPVXXPE

SEQ ID NO: 60852 - protein, 39 aa, Artificial Sequence
  GFR-binding peptide
  MOD_RES (2)..(4)..(38)..(39): Xaa is C or S
  MOD_RES (16)..(17)..(18)..(19)..(20): Xaa is A or G
  MOD_RES (21)..(22)..(23)..(24): Xaa is A or G or is absent
RXGXSEVVMDEYKFKXXXXXXXXXLYLISIPELRTPVXX

SEQ ID NO: 60853 - protein, 37 aa, Artificial Sequence; identical to SEQ ID NO: 5217
  GFR-binding peptide
  MOD_RES (1)..(3)..(36)..(37): Xaa is C or S
  MOD_RES (14)..(15)..(16)..(17)..(18): Xaa is A or G
  MOD_RES (19)..(20)..(21)..(22): Xaa is A or G or is absent

SEQ ID NO: 60854 - protein, 36 aa, Artificial Sequence; identical to SEQ ID NO: 26327
  GFR-binding peptide
  MOD_RES (1)..(33)..(34): Xaa is C or S

SEQ ID NO: 60855 - protein, 35 aa, Artificial Sequence; identical to SEQ ID NO: 5219
  GFR-binding peptide
  MOD_RES (2)..(34)..(35): Xaa is C or S

SEQ ID NO: 60856 - protein, 37 aa, Artificial Sequence; identical to SEQ ID NO: 5221
  GFR-binding peptide
  MOD_RES (2)..(35)..(36): Xaa is C or S
  MOD_RES (13)..(14)..(15)..(16)..(17): Xaa is A or G
  MOD_RES (18)..(19)..(20)..(21): Xaa is A or G or is absent

SEQ ID NO: 60857 - protein, 36 aa, Artificial Sequence; identical to SEQ ID NO: 26332
  GFR-binding peptide
  MOD_RES (31)..(32): Xaa is C or S

SEQ ID NO: 60858 - protein, 40 aa, Artificial Sequence; identical to SEQ ID NO: 5222
  GFR-binding peptide
  MOD_RES (1)..(35)..(36): Xaa is C or S
  MOD_RES (13)..(14)..(15)..(16)..(17): Xaa is A or G
  MOD_RES (18)..(19)..(20)..(21): Xaa is A or G or is absent

SEQ ID NO: 60859 - protein, 42 aa, Artificial Sequence; identical to SEQ ID NO: 5224
  GFR-binding peptide
  MOD_RES (2)..(37)..(38): Xaa is C or S
  MOD_RES (15)..(16)..(17)..(18)..(19): Xaa is A or G
  MOD_RES (20)..(21)..(22)..(23): Xaa is A or G or is absent

SEQ ID NO: 60860 - protein, 40 aa, Artificial Sequence
  GFR-binding peptide
  MOD_RES (2)..(36)..(37): Xaa is C or S
  MOD_RES (14)..(15)..(16)..(17)..(18): Xaa is A or G
  MOD_RES (19)..(20)..(21)..(22): Xaa is A or G or is absent
AXSEVTMNRYKKLXXXXXXXXXFYLISIANMKEPVXXPEP

SEQ ID NO: 60861 - protein, 37 aa, Artificial Sequence
  GFR-binding peptide
  MOD_RES (33)..(34): Xaa is C or S
  MOD_RES (11)..(12)..(13)..(14)..(15): Xaa is A or G
  MOD_RES (16)..(17)..(18)..(19): Xaa is A or G or is absent
EVVMDYHYKLXXXXXXXXXKYLISIPSLRTPVXXTPP

SEQ ID NO: 60862 - protein, 38 aa, Artificial Sequence
  GFR-binding peptide
  MOD_RES (1)..(3)..(35)..(36): Xaa is C or S
XGXRDVVMGYHYKLIIQQKDNKYLMSIPSMKTPTXXPG

SEQ ID NO: 60863 - protein, 37 aa, Artificial Sequence
  GFR-binding peptide
  MOD_RES (1)..(3)..(37): Xaa is C or S
  MOD_RES (15)..(16)..(17)..(18)..(19): Xaa is A or G
  MOD_RES (20)..(21)..(22)..(23): Xaa is A or G or is absent
XGXSEVVMDEYKFKXXXXXXXXXLYLISIPELRTPVX

SEQ ID NO: 60864 - protein, 35 aa, Artificial Sequence; identical to SEQ ID NO: 26339
  GFR-binding peptide
  MOD_RES (2)..(34)..(35): Xaa is C or S

SEQ ID NO: 60865 - protein, 39 aa, Artificial Sequence; identical to SEQ ID NO: 26340
  GFR-binding peptide
  MOD_RES (1)..(3)..(35)..(36): Xaa is C or S

SEQ ID NO: 60866 - protein, 37 aa, Artificial Sequence; identical to SEQ ID NO: 56166
  GFR-binding peptide
  MOD_RES (2)..(4)..(36)..(37): Xaa is C or S

SEQ ID NO: 60867 - protein, 38 aa, Artificial Sequence; identical to SEQ ID NO: 5228
  GFR-binding peptide
  MOD_RES (2)..(37)..(38): Xaa is C or S
  MOD_RES (15)..(16)..(17)..(18)..(19): Xaa is A or G
  MOD_RES (20)..(21)..(22)..(23): Xaa is A or G or is absent

SEQ ID NO: 60868 - protein, 43 aa, Artificial Sequence; identical to SEQ ID NO: 31237
  GFR-binding peptide
  MOD_RES (2)..(4)..(38)..(39): Xaa is C or S
  MOD_RES (16)..(17)..(18)..(19)..(20): Xaa is A or G
  MOD_RES (21)..(22)..(23)..(24): Xaa is A or G or is absent

SEQ ID NO: 60869 - protein, 34 aa, Artificial Sequence
  GFR-binding peptide
  MOD_RES (1)..(1): Xaa is C or S
  MOD_RES (13)..(14)..(15)..(16)..(17): Xaa is A or G
  MOD_RES (18)..(19)..(20)..(21): Xaa is A or G or is absent
XAEVVMDRHKRLXXXXXXXXXYYLISTASLRAPV

SEQ ID NO: 60870 - protein, 37 aa, Artificial Sequence; identical to SEQ ID NO: 26342
  GFR-binding peptide
  MOD_RES (2)..(36)..(37): Xaa is C or S
  MOD_RES (14)..(15)..(16)..(17)..(18): Xaa is A or G
  MOD_RES (19)..(20)..(21)..(22): Xaa is A or G or is absent

SEQ ID NO: 60871 - protein, 35 aa, Artificial Sequence; identical to SEQ ID NO: 26344
  GFR-binding peptide
  MOD_RES (2)..(34)..(35): Xaa is C or S

SEQ ID NO: 60872 - protein, 35 aa, Artificial Sequence; identical to SEQ ID NO: 26345
  GFR-binding peptide
  MOD_RES (2)..(34)..(35): Xaa is C or S

SEQ ID NO: 60873 - protein, 35 aa, Artificial Sequence
  GFR-binding peptide
  MOD_RES (1)..(35): Xaa is C or S
  MOD_RES (13)..(14)..(15)..(16)..(17): Xaa is A or G
  MOD_RES (18)..(19)..(20)..(21): Xaa is A or G or is absent
XRDVVMGYHYKLXXXXXXXXXKYLMSIPSMKTPTX

SEQ ID NO: 60874 - protein, 32 aa, Artificial Sequence; identical to SEQ ID NO: 5233
  GFR-binding peptide
  MOD_RES (31)..(32): Xaa is C or S

SEQ ID NO: 60875 - protein, 37 aa, Artificial Sequence; identical to SEQ ID NO: 12669
  GFR-binding peptide
  MOD_RES (1)..(3)..(35)..(36): Xaa is C or S

SEQ ID NO: 60876 - protein, 35 aa, Artificial Sequence; identical to SEQ ID NO: 26347
  GFR-binding peptide
  MOD_RES (1)..(3)..(35): Xaa is C or S

SEQ ID NO: 60877 - protein, 35 aa, Artificial Sequence; identical to SEQ ID NO: 5235
  GFR-binding peptide
  MOD_RES (2)..(34)..(35): Xaa is C or S

SEQ ID NO: 60878 - protein, 37 aa, Artificial Sequence; identical to SEQ ID NO: 31246
  GFR-binding peptide
  MOD_RES (2)..(4)..(36): Xaa is C or S

SEQ ID NO: 60879 - protein, 41 aa, Artificial Sequence
  GFR-binding peptide
  MOD_RES (1)..(3)..(36)..(37): Xaa is C or S
  MOD_RES (14)..(15)..(16)..(17)..(18): Xaa is A or G
  MOD_RES (19)..(20)..(21)..(22): Xaa is A or G or is absent
XGXEEVIMEYKFKXXXXXXXXXLYLMSIPETKVPAXXTSPV

SEQ ID NO: 60880 - protein, 35 aa, Artificial Sequence; identical to SEQ ID NO: 5236
  GFR-binding peptide
  MOD_RES (2)..(4)..(35): Xaa is C or S

SEQ ID NO: 60881 - protein, 42 aa, Artificial Sequence
  GFR-binding peptide
  MOD_RES (1)..(3)..(37)..(38): Xaa is C or S
  MOD_RES (15)..(16)..(17)..(18)..(19): Xaa is A or G
  MOD_RES (20)..(21)..(22)..(23): Xaa is A or G or is absent
XGXSEVVMDRHKRLXXXXXXXXXYYLISTASLRTPVXXTPPT

SEQ ID NO: 60882 - protein, 31 aa, Artificial Sequence; identical to SEQ ID NO: 26352
  GFR-binding peptide
  MOD_RES (31)..(31): Xaa is C or S

SEQ ID NO: 60883 - protein, 35 aa, Artificial Sequence
  GFR-binding peptide
  MOD_RES (33)..(34): Xaa is C or S
  MOD_RES (11)..(12)..(13)..(14)..(15): Xaa is A or G
  MOD_RES (16)..(17)..(18)..(19): Xaa is A or G or is absent
DVVMGEYKFKXXXXXXXXXLYLMSIPEMKTPTXXP

SEQ ID NO: 60884 - protein, 33 aa, Artificial Sequence
  GFR-binding peptide
  MOD_RES (32)..(33): Xaa is C or S
SEVTMNRYKKLVVNKNEDFYLISIANMKEPVXX

SEQ ID NO: 60885 - protein, 37 aa, Artificial Sequence; identical to SEQ ID NO: 31249
  GFR-binding peptide
  MOD_RES (2)..(35)..(36): Xaa is C or S

SEQ ID NO: 60886 - protein, 36 aa, Artificial Sequence
  GFR-binding peptide
  MOD_RES (1)..(35)..(36): Xaa is C or S
  MOD_RES (13)..(14)..(15)..(16)..(17): Xaa is A or G
  MOD_RES (18)..(19)..(20)..(21): Xaa is A or G or is absent
XSEVTMNEYKFKXXXXXXXXXLYLISIPEMKEPVXX

SEQ ID NO: 60887 - protein, 42 aa, Artificial Sequence; identical to SEQ ID NO: 31250
  GFR-binding peptide
  MOD_RES (2)..(4)..(38)..(39): Xaa is C or S
  MOD_RES (16)..(17)..(18)..(19)..(20): Xaa is A or G
  MOD_RES (21)..(22)..(23)..(24): Xaa is A or G or is absent

SEQ ID NO: 60888 - protein, 36 aa, Artificial Sequence; identical to SEQ ID NO: 31253
  GFR-binding peptide
  MOD_RES (2)..(4)..(36): Xaa is C or S

SEQ ID NO: 60889 - protein, 41 aa, Artificial Sequence; identical to SEQ ID NO: 5242
  GFR-binding peptide
  MOD_RES (2)..(35)..(36): Xaa is C or S
  MOD_RES (13)..(14)..(15)..(16)..(17): Xaa is A or G
  MOD_RES (18)..(19)..(20)..(21): Xaa is A or G or is absent

SEQ ID NO: 60890 - protein, 38 aa, Artificial Sequence; identical to SEQ ID NO: 5243
  GFR-binding peptide
  MOD_RES (33)..(34): Xaa is C or S
  MOD_RES (11)..(12)..(13)..(14)..(15): Xaa is A or G
  MOD_RES (16)..(17)..(18)..(19): Xaa is A or G or is absent

SEQ ID NO: 60891 - protein, 41 aa, Artificial Sequence
  GFR-binding peptide
  MOD_RES (1)..(35)..(36): Xaa is C or S
  MOD_RES (13)..(14)..(15)..(16)..(17): Xaa is A or G
  MOD_RES (18)..(19)..(20)..(21): Xaa is A or G or is absent
XSRVVMNYHYKLXXXXXXXXXKYLVSIPSLKTPAXXPKPVH

SEQ ID NO: 60892 - protein, 35 aa, Artificial Sequence; identical to SEQ ID NO: 31258
  GFR-binding peptide
  MOD_RES (34)..(35): Xaa is C or S
  MOD_RES (12)..(13)..(14)..(15)..(16): Xaa is A or G
  MOD_RES (17)..(18)..(19)..(20): Xaa is A or G or is absent

SEQ ID NO: 60893 - protein, 34 aa, Artificial Sequence; identical to SEQ ID NO: 26365
  GFR-binding peptide
  MOD_RES (32)..(33): Xaa is C or S

SEQ ID NO: 60894 - protein, 39 aa, Artificial Sequence; identical to SEQ ID NO: 26366
  GFR-binding peptide
  MOD_RES (34)..(35): Xaa is C or S
  MOD_RES (12)..(13)..(14)..(15)..(16): Xaa is A or G
  MOD_RES (17)..(18)..(19)..(20): Xaa is A or G or is absent

SEQ ID NO: 60895 - protein, 35 aa, Artificial Sequence; identical to SEQ ID NO: 5248
  GFR-binding peptide
  MOD_RES (31)..(32): Xaa is C or S

SEQ ID NO: 60896 - protein, 39 aa, Artificial Sequence; identical to SEQ ID NO: 31269
  GFR-binding peptide
  MOD_RES (2)..(34): Xaa is C or S

SEQ ID NO: 60897 - protein, 42 aa, Artificial Sequence; identical to SEQ ID NO: 31270
  GFR-binding peptide
  MOD_RES (2)..(37)..(38): Xaa is C or S
  MOD_RES (15)..(16)..(17)..(18)..(19): Xaa is A or G
  MOD_RES (20)..(21)..(22)..(23): Xaa is A or G or is absent

SEQ ID NO: 60898 - protein, 37 aa, Artificial Sequence; identical to SEQ ID NO: 5253
  GFR-binding peptide
  MOD_RES (1)..(34)..(35): Xaa is C or S

SEQ ID NO: 60899 - protein, 36 aa, Artificial Sequence
  GFR-binding peptide
  MOD_RES (1)..(34)..(35): Xaa is C or S
  MOD_RES (12)..(13)..(14)..(15)..(16): Xaa is A or G
  MOD_RES (17)..(18)..(19)..(20): Xaa is A or G or is absent
XSKVIMPIKGYXXXXXXXXXFYLINIPSLDQSVXXP

SEQ ID NO: 60900 - protein, 44 aa, Artificial Sequence
  GFR-binding peptide
  MOD_RES (2)..(4)..(38)..(39): Xaa is C or S
  MOD_RES (16)..(17)..(18)..(19)..(20): Xaa is A or G
  MOD_RES (21)..(22)..(23)..(24): Xaa is A or G or is absent
SXGXRDVVMGRHKRLXXXXXXXXXYYLMSTASMKTPTXXPGASG

SEQ ID NO: 60901 - protein, 38 aa, Artificial Sequence
  GFR-binding peptide
  MOD_RES (32)..(33): Xaa is C or S
SEVTMNPIKGYVVNKNEDFYLINIPSMKEPVXXPEPIG

SEQ ID NO: 60902 - protein, 33 aa, Artificial Sequence; identical to SEQ ID NO: 5255
  GFR-binding peptide
  MOD_RES (33)..(33): Xaa is C or S
  MOD_RES (11)..(12)..(13)..(14)..(15): Xaa is A or G
  MOD_RES (16)..(17)..(18)..(19): Xaa is A or G or is absent

SEQ ID NO: 60903 - protein, 36 aa, Artificial Sequence; identical to SEQ ID NO: 31279
  GFR-binding peptide
  MOD_RES (1)..(3): Xaa is C or S
  MOD_RES (15)..(16)..(17)..(18)..(19): Xaa is A or G
  MOD_RES (20)..(21)..(22)..(23): Xaa is A or G or is absent

SEQ ID NO: 60904 - protein, 39 aa, Artificial Sequence; identical to SEQ ID NO: 5261
  GFR-binding peptide
  MOD_RES (1)..(3)..(37)..(38): Xaa is C or S
  MOD_RES (15)..(16)..(17)..(18)..(19): Xaa is A or G
  MOD_RES (20)..(21)..(22)..(23): Xaa is A or G or is absent

SEQ ID NO: 60905 - protein, 41 aa, Artificial Sequence; identical to SEQ ID NO: 26383
  GFR-binding peptide
  MOD_RES (1)..(3)..(35): Xaa is C or S

SEQ ID NO: 60906 - protein, 32 aa, Artificial Sequence; identical to SEQ ID NO: 5264
  GFR-binding peptide
  MOD_RES (2)..(2): Xaa is C or S

SEQ ID NO: 60907 - protein, 37 aa, Artificial Sequence; identical to SEQ ID NO: 5269
  GFR-binding peptide
  MOD_RES (35)..(36): Xaa is C or S
  MOD_RES (13)..(14)..(15)..(16)..(17): Xaa is A or G
  MOD_RES (18)..(19)..(20)..(21): Xaa is A or G or is absent

SEQ ID NO: 60908 - protein, 38 aa, Artificial Sequence; identical to SEQ ID NO: 31289
  GFR-binding peptide
  MOD_RES (2)..(36)..(37): Xaa is C or S
  MOD_RES (14)..(15)..(16)..(17)..(18): Xaa is A or G
  MOD_RES (19)..(20)..(21)..(22): Xaa is A or G or is absent

SEQ ID NO: 60909 - protein, 36 aa, Artificial Sequence; identical to SEQ ID NO: 5271
  GFR-binding peptide
  MOD_RES (1)..(32)..(33): Xaa is C or S

SEQ ID NO: 60910 - protein, 38 aa, Artificial Sequence; identical to SEQ ID NO: 31291
  GFR-binding peptide
  MOD_RES (1)..(33)..(34): Xaa is C or S

SEQ ID NO: 60911 - protein, 35 aa, Artificial Sequence; identical to SEQ ID NO: 31293
  GFR-binding peptide
  MOD_RES (31)..(32): Xaa is C or S

SEQ ID NO: 60912 - protein, 37 aa, Artificial Sequence
  GFR-binding peptide
  MOD_RES (33)..(34): Xaa is C or S
  MOD_RES (11)..(12)..(13)..(14)..(15): Xaa is A or G
  MOD_RES (16)..(17)..(18)..(19): Xaa is A or G or is absent
DVVMGEYKFKXXXXXXXXXLYLMSIPEMKTPTXXPGA

SEQ ID NO: 60913 - protein, 41 aa, Artificial Sequence
  GFR-binding peptide
  MOD_RES (2)..(4)..(38)..(39): Xaa is C or S
  MOD_RES (16)..(17)..(18)..(19)..(20): Xaa is A or G
  MOD_RES (21)..(22)..(23)..(24): Xaa is A or G or is absent
RXGXAEVVMDRHKRLXXXXXXXXXYYLISTASLRAPVXXSA

SEQ ID NO: 60914 - protein, 39 aa, Artificial Sequence; identical to SEQ ID NO: 31295
  GFR-binding peptide
  MOD_RES (33)..(34): Xaa is C or S

SEQ ID NO: 60915 - protein, 35 aa, Artificial Sequence; identical to SEQ ID NO: 26392
  GFR-binding peptide
  MOD_RES (2)..(2): Xaa is C or S
  MOD_RES (14)..(15)..(16)..(17)..(18): Xaa is A or G
  MOD_RES (19)..(20)..(21)..(22): Xaa is A or G or is absent

SEQ ID NO: 60916 - protein, 41 aa, Artificial Sequence
  GFR-binding peptide
  MOD_RES (1)..(3)..(35)..(36): Xaa is C or S
XAXSEVTMNRYKKLVVNKNEDFYLISIANMKEPVXXPEPIG

SEQ ID NO: 60917 - protein, 34 aa, Artificial Sequence; identical to SEQ ID NO: 26395
  GFR-binding peptide
  MOD_RES (32)..(33): Xaa is C or S

SEQ ID NO: 60918 - protein, 40 aa, Artificial Sequence; identical to SEQ ID NO: 5279
  GFR-binding peptide
  MOD_RES (2)..(34)..(35): Xaa is C or S

SEQ ID NO: 60919 - protein, 39 aa, Artificial Sequence; identical to SEQ ID NO: 31304
  GFR-binding peptide
  MOD_RES (2)..(4)..(38)..(39): Xaa is C or S
  MOD_RES (16)..(17)..(18)..(19)..(20): Xaa is A or G
  MOD_RES (21)..(22)..(23)..(24): Xaa is A or G or is absent

SEQ ID NO: 60920 - protein, 37 aa, Artificial Sequence; identical to SEQ ID NO: 26397
  GFR-binding peptide
  MOD_RES (1)..(3)..(35)..(36): Xaa is C or S

SEQ ID NO: 60921 - protein, 41 aa, Artificial Sequence; identical to SEQ ID NO: 26399
  GFR-binding peptide
  MOD_RES (1)..(36)..(37): Xaa is C or S
  MOD_RES (14)..(15)..(16)..(17)..(18): Xaa is A or G
  MOD_RES (19)..(20)..(21)..(22): Xaa is A or G or is absent

SEQ ID NO: 60922 - protein, 35 aa, Artificial Sequence
  GFR-binding peptide
  MOD_RES (31)..(32): Xaa is C or S
SRVIMPIKGYVKPKRGVFYLINIPSLAQPVXXPAA

SEQ ID NO: 60923 - protein, 38 aa, Artificial Sequence; identical to SEQ ID NO: 5280
  GFR-binding peptide
  MOD_RES (1)..(35)..(36): Xaa is C or S
  MOD_RES (13)..(14)..(15)..(16)..(17): Xaa is A or G
  MOD_RES (18)..(19)..(20)..(21): Xaa is A or G or is absent

SEQ ID NO: 60924 - protein, 37 aa, Artificial Sequence; identical to SEQ ID NO: 31310
  GFR-binding peptide
  MOD_RES (2)..(4): Xaa is C or S
  MOD_RES (16)..(17)..(18)..(19)..(20): Xaa is A or G
  MOD_RES (21)..(22)..(23)..(24): Xaa is A or G or is absent

SEQ ID NO: 60925 - protein, 38 aa, Artificial Sequence; identical to SEQ ID NO: 26406
  GFR-binding peptide
  MOD_RES (1)..(3)..(36)..(37): Xaa is C or S
  MOD_RES (14)..(15)..(16)..(17)..(18): Xaa is A or G
  MOD_RES (19)..(20)..(21)..(22): Xaa is A or G or is absent

SEQ ID NO: 60926 - protein, 40 aa, Artificial Sequence; identical to SEQ ID NO: 5287
  GFR-binding peptide
  MOD_RES (2)..(4)..(37)..(38): Xaa is C or S

SEQ ID NO: 60927 - protein, 39 aa, Artificial Sequence
  GFR-binding peptide
  MOD_RES (1)..(3)..(35)..(36): Xaa is C or S
XAXSEVTMNEYKFKVVNKNEDLYLISIPEMKEPVXXPEP

SEQ ID NO: 60928 - protein, 35 aa, Artificial Sequence; identical to SEQ ID NO: 5290
  GFR-binding peptide
  MOD_RES (1)..(3)..(35): Xaa is C or S

SEQ ID NO: 60929 - protein, 39 aa, Artificial Sequence; identical to SEQ ID NO: 26411
  GFR-binding peptide
  MOD_RES (1)..(3)..(34)..(35): Xaa is C or S

SEQ ID NO: 60930 - protein, 33 aa, Artificial Sequence; identical to SEQ ID NO: 5291
  GFR-binding peptide
  MOD_RES (31)..(32): Xaa is C or S

SEQ ID NO: 60931 - protein, 40 aa, Artificial Sequence; identical to SEQ ID NO: 5292
  GFR-binding peptide
  MOD_RES (2)..(4)..(37)..(38): Xaa is C or S
  MOD_RES (15)..(16)..(17)..(18)..(19): Xaa is A or G
  MOD_RES (20)..(21)..(22)..(23): Xaa is A or G or is absent

SEQ ID NO: 60932 - protein, 36 aa, Artificial Sequence; identical to SEQ ID NO: 5294
  GFR-binding peptide
  MOD_RES (1)..(3)..(35): Xaa is C or S

SEQ ID NO: 60933 - protein, 36 aa, Artificial Sequence; identical to SEQ ID NO: 31318
  GFR-binding peptide
  MOD_RES (32)..(33): Xaa is C or S

SEQ ID NO: 60934 - protein, 32 aa, Artificial Sequence; identical to SEQ ID NO: 5295
  GFR-binding peptide
  MOD_RES (31)..(32): Xaa is C or S

SEQ ID NO: 60935 - protein, 33 aa, Artificial Sequence; identical to SEQ ID NO: 26415
  GFR-binding peptide
  MOD_RES (2)..(2): Xaa is C or S

SEQ ID NO: 60936 - protein, 35 aa, Artificial Sequence; identical to SEQ ID NO: 5296
  GFR-binding peptide
  MOD_RES (34)..(35): Xaa is C or S
  MOD_RES (12)..(13)..(14)..(15)..(16): Xaa is A or G
  MOD_RES (17)..(18)..(19)..(20): Xaa is A or G or is absent

SEQ ID NO: 60937 - protein, 40 aa, Artificial Sequence; identical to SEQ ID NO: 26417
  GFR-binding peptide
  MOD_RES (1)..(3)..(37)..(38): Xaa is C or S
  MOD_RES (15)..(16)..(17)..(18)..(19): Xaa is A or G
  MOD_RES (20)..(21)..(22)..(23): Xaa is A or G or is absent

SEQ ID NO: 60938 - protein, 36 aa, Artificial Sequence; identical to SEQ ID NO: 26419
  GFR-binding peptide
  MOD_RES (1)..(33)..(34): Xaa is C or S

SEQ ID NO: 60939 - protein, 40 aa, Artificial Sequence; identical to SEQ ID NO: 5299
  GFR-binding peptide
  MOD_RES (1)..(3)..(37)..(38): Xaa is C or S
  MOD_RES (15)..(16)..(17)..(18)..(19): Xaa is A or G
  MOD_RES (20)..(21)..(22)..(23): Xaa is A or G or is absent

SEQ ID NO: 60940 - protein, 35 aa, Artificial Sequence; identical to SEQ ID NO: 5301
  GFR-binding peptide
  MOD_RES (2)..(4): Xaa is C or S

SEQ ID NO: 60941 - protein, 38 aa, Artificial Sequence; identical to SEQ ID NO: 5303
  GFR-binding peptide
  MOD_RES (2)..(4)..(35)..(36): Xaa is C or S

SEQ ID NO: 60942 - protein, 38 aa, Artificial Sequence
  GFR-binding peptide
  MOD_RES (1)..(33)..(34): Xaa is C or S
XAEVVMDRHKRLVVNNAADYYLISTASLRAPVXXSAPA

SEQ ID NO: 60943 - protein, 36 aa, Artificial Sequence; identical to SEQ ID NO: 5304
  GFR-binding peptide
  MOD_RES (31)..(32): Xaa is C or S

SEQ ID NO: 60944 - protein, 38 aa, Artificial Sequence; identical to SEQ ID NO: 5306
  GFR-binding peptide
  MOD_RES (2)..(34)..(35): Xaa is C or S

SEQ ID NO: 60945 - protein, 33 aa, Artificial Sequence; identical to SEQ ID NO: 5307
  GFR-binding peptide
  MOD_RES (32)..(33): Xaa is C or S

SEQ ID NO: 60946 - protein, 33 aa, Artificial Sequence; identical to SEQ ID NO: 56252
  GFR-binding peptide
  MOD_RES (12)..(13)..(14)..(15)..(16): Xaa is A or G
  MOD_RES (17)..(18)..(19)..(20): Xaa is A or G or is absent

SEQ ID NO: 60947 - protein, 32 aa, Artificial Sequence; identical to SEQ ID NO: 26430
  GFR-binding peptide
  MOD_RES (1)..(1): Xaa is C or S

SEQ ID NO: 60948 - protein, 38 aa, Artificial Sequence
  GFR-binding peptide
  MOD_RES (34)..(35): Xaa is C or S
  MOD_RES (12)..(13)..(14)..(15)..(16): Xaa is A or G
  MOD_RES (17)..(18)..(19)..(20): Xaa is A or G or is absent
SEVVMDEYKFKXXXXXXXXXLYLISIPELRTPVXXTPP

SEQ ID NO: 60949 - protein, 39 aa, Artificial Sequence; identical to SEQ ID NO: 5310
  GFR-binding peptide
  MOD_RES (2)..(4)..(36)..(37): Xaa is C or S

SEQ ID NO: 60950 - protein, 38 aa, Artificial Sequence; identical to SEQ ID NO: 5313
  GFR-binding peptide
  MOD_RES (1)..(33)..(34): Xaa is C or S

SEQ ID NO: 60951 - protein, 38 aa, Artificial Sequence; identical to SEQ ID NO: 31335
  GFR-binding peptide
  MOD_RES (34)..(35): Xaa is C or S
  MOD_RES (12)..(13)..(14)..(15)..(16): Xaa is A or G
  MOD_RES (17)..(18)..(19)..(20): Xaa is A or G or is absent

SEQ ID NO: 60952 - protein, 35 aa, Artificial Sequence; identical to SEQ ID NO: 31338
  GFR-binding peptide
  MOD_RES (1)..(3)..(35): Xaa is C or S

SEQ ID NO: 60953 - protein, 32 aa, Artificial Sequence; identical to SEQ ID NO: 5314
  GFR-binding peptide
  MOD_RES (2)..(2): Xaa is C or S

SEQ ID NO: 60954 - protein, 38 aa, Artificial Sequence; identical to SEQ ID NO: 5316
  GFR-binding peptide
  MOD_RES (2)..(33)..(34): Xaa is C or S

SEQ ID NO: 60955 - protein, 36 aa, Artificial Sequence; identical to SEQ ID NO: 26440
  GFR-binding peptide
  MOD_RES (1)..(3): Xaa is C or S
  MOD_RES (15)..(16)..(17)..(18)..(19): Xaa is A or G
  MOD_RES (20)..(21)..(22)..(23): Xaa is A or G or is absent

SEQ ID NO: 60956 - protein, 37 aa, Artificial Sequence; identical to SEQ ID NO: 31345
  GFR-binding peptide
  MOD_RES (1)..(3)..(37): Xaa is C or S
  MOD_RES (15)..(16)..(17)..(18)..(19): Xaa is A or G
  MOD_RES (20)..(21)..(22)..(23): Xaa is A or G or is absent

SEQ ID NO: 60957 - protein, 34 aa, Artificial Sequence; identical to SEQ ID NO: 26442
  GFR-binding peptide
  MOD_RES (33)..(34): Xaa is C or S

SEQ ID NO: 60958 - protein, 41 aa, Artificial Sequence
  GFR-binding peptide
  MOD_RES (1)..(35)..(36): Xaa is C or S
  MOD_RES (13)..(14)..(15)..(16)..(17): Xaa is A or G
  MOD_RES (18)..(19)..(20)..(21): Xaa is A or G or is absent
XSEVTMNRHKRLXXXXXXXXXYYLISTASMKEPVXXPEPIG

SEQ ID NO: 60959 - protein, 40 aa, Artificial Sequence; identical to SEQ ID NO: 5318
  GFR-binding peptide
  MOD_RES (1)..(35): Xaa is C or S
  MOD_RES (13)..(14)..(15)..(16)..(17): Xaa is A or G
  MOD_RES (18)..(19)..(20)..(21): Xaa is A or G or is absent

SEQ ID NO: 60960 - protein, 39 aa, Artificial Sequence; identical to SEQ ID NO: 26443
  GFR-binding peptide
  MOD_RES (2)..(36)..(37): Xaa is C or S
  MOD_RES (14)..(15)..(16)..(17)..(18): Xaa is A or G
  MOD_RES (19)..(20)..(21)..(22): Xaa is A or G or is absent

SEQ ID NO: 60961 - protein, 30 aa, Artificial Sequence; identical to SEQ ID NO: 12746
  GFR-binding peptide

SEQ ID NO: 60962 - protein, 35 aa, Artificial Sequence; identical to SEQ ID NO: 26447
  GFR-binding peptide
  MOD_RES (2)..(2): Xaa is C or S
  MOD_RES (14)..(15)..(16)..(17)..(18): Xaa is A or G
  MOD_RES (19)..(20)..(21)..(22): Xaa is A or G or is absent

SEQ ID NO: 60963 - protein, 34 aa, Artificial Sequence
  GFR-binding peptide
  MOD_RES (2)..(33)..(34): Xaa is C or S
GXEEVIMYHYKLLLVRGNDKYLMSIPSTKVPAXX

SEQ ID NO: 60964 - protein, 35 aa, Artificial Sequence; identical to SEQ ID NO: 31355
  GFR-binding peptide
  MOD_RES (34)..(35): Xaa is C or S
  MOD_RES (12)..(13)..(14)..(15)..(16): Xaa is A or G
  MOD_RES (17)..(18)..(19)..(20): Xaa is A or G or is absent

SEQ ID NO: 60965 - protein, 41 aa, Artificial Sequence; identical to SEQ ID NO: 31357
  GFR-binding peptide
  MOD_RES (2)..(4)..(38)..(39): Xaa is C or S
  MOD_RES (16)..(17)..(18)..(19)..(20): Xaa is A or G
  MOD_RES (21)..(22)..(23)..(24): Xaa is A or G or is absent

SEQ ID NO: 60966 - protein, 40 aa, Artificial Sequence; identical to SEQ ID NO: 31358
  GFR-binding peptide
  MOD_RES (1)..(3)..(35)..(36): Xaa is C or S

SEQ ID NO: 60967 - protein, 33 aa, Artificial Sequence; identical to SEQ ID NO: 5325
  GFR-binding peptide
  MOD_RES (1)..(33): Xaa is C or S

SEQ ID NO: 60968 - protein, 30 aa, Artificial Sequence; identical to SEQ ID NO: 5326
  GFR-binding peptide

SEQ ID NO: 60969 - protein, 39 aa, Artificial Sequence; identical to SEQ ID NO: 5329
  GFR-binding peptide
  MOD_RES (1)..(35)..(36): Xaa is C or S
  MOD_RES (13)..(14)..(15)..(16)..(17): Xaa is A or G
  MOD_RES (18)..(19)..(20)..(21): Xaa is A or G or is absent

SEQ ID NO: 60970 - protein, 39 aa, Artificial Sequence
  GFR-binding peptide
  MOD_RES (1)..(35)..(36): Xaa is C or S
  MOD_RES (13)..(14)..(15)..(16)..(17): Xaa is A or G
  MOD_RES (18)..(19)..(20)..(21): Xaa is A or G or is absent
XSEVTMNRHKRLXXXXXXXXXYYLISTASMKEPVXXPEP

SEQ ID NO: 60971 - protein, 38 aa, Artificial Sequence
  GFR-binding peptide
  MOD_RES (2)..(4)..(36)..(37): Xaa is C or S
RXGXSEVVMDRHKRLVVNNASDYYLISTASLRTPVXXT

SEQ ID NO: 60972 - protein, 32 aa, Artificial Sequence
  GFR-binding peptide
  MOD_RES (32)..(32): Xaa is C or S
RDVVMGRHKRLIIQQKDNYYLMSTASMKTPTX

SEQ ID NO: 60973 - protein, 38 aa, Artificial Sequence
  GFR-binding peptide
  MOD_RES (34)..(35): Xaa is C or S
  MOD_RES (12)..(13)..(14)..(15)..(16): Xaa is A or G
  MOD_RES (17)..(18)..(19)..(20): Xaa is A or G or is absent
SEVTMNEYKFKXXXXXXXXXLYLISIPEMKEPVXXPEP

SEQ ID NO: 60974 - protein, 41 aa, Artificial Sequence; identical to SEQ ID NO: 5331
  GFR-binding peptide
  MOD_RES (1)..(3)..(37)..(38): Xaa is C or S
  MOD_RES (15)..(16)..(17)..(18)..(19): Xaa is A or G
  MOD_RES (20)..(21)..(22)..(23): Xaa is A or G or is absent

SEQ ID NO: 60975 - protein, 35 aa, Artificial Sequence; identical to SEQ ID NO: 26455
  GFR-binding peptide
  MOD_RES (31)..(32): Xaa is C or S

SEQ ID NO: 60976 - protein, 36 aa, Artificial Sequence; identical to SEQ ID NO: 26456
  GFR-binding peptide
  MOD_RES (1)..(3): Xaa is C or S
  MOD_RES (15)..(16)..(17)..(18)..(19): Xaa is A or G
  MOD_RES (20)..(21)..(22)..(23): Xaa is A or G or is absent

SEQ ID NO: 60977 - protein, 34 aa, Artificial Sequence
  GFR-binding peptide
  MOD_RES (1)..(3)..(34): Xaa is C or S
XKXSKVIMPIKGYIKPTKGIFYLINIPSLDQSVX

SEQ ID NO: 60978 - protein, 37 aa, Artificial Sequence
  GFR-binding peptide
  MOD_RES (1)..(32)..(33): Xaa is C or S
XEEVIMYHYKLLLVRGNDKYLMSIPSTKVPAXXTSPV

SEQ ID NO: 60979 - protein, 31 aa, Artificial Sequence; identical to SEQ ID NO: 26460
  GFR-binding peptide

SEQ ID NO: 60980 - protein, 38 aa, Artificial Sequence
  GFR-binding peptide
  MOD_RES (33)..(34): Xaa is C or S
  MOD_RES (11)..(12)..(13)..(14)..(15): Xaa is A or G
  MOD_RES (16)..(17)..(18)..(19): Xaa is A or G or is absent
EEVIMEYKFKXXXXXXXXXLYLMSIPETKVPAXXTSPV

SEQ ID NO: 60981 - protein, 37 aa, Artificial Sequence; identical to SEQ ID NO: 31376
  GFR-binding peptide
  MOD_RES (34)..(34): Xaa is C or S
  MOD_RES (12)..(13)..(14)..(15)..(16): Xaa is A or G
  MOD_RES (17)..(18)..(19)..(20): Xaa is A or G or is absent

SEQ ID NO: 60982 - protein, 37 aa, Artificial Sequence
  GFR-binding peptide
  MOD_RES (1)..(3)..(35)..(36): Xaa is C or S
XGXRDVVMGEYKFKIIQQKDNLYLMSIPEMKTPTXXP

SEQ ID NO: 60983 - protein, 38 aa, Artificial Sequence; identical to SEQ ID NO: 5338
  GFR-binding peptide
  MOD_RES (1)..(3)..(35)..(36): Xaa is C or S

SEQ ID NO: 60984 - protein, 40 aa, Artificial Sequence; identical to SEQ ID NO: 26468
  GFR-binding peptide
  MOD_RES (2)..(34)..(35): Xaa is C or S

SEQ ID NO: 60985 - protein, 39 aa, Artificial Sequence; identical to SEQ ID NO: 5342
  GFR-binding peptide
  MOD_RES (2)..(4)..(36): Xaa is C or S

SEQ ID NO: 60986 - protein, 38 aa, Artificial Sequence; identical to SEQ ID NO: 5344
  GFR-binding peptide
  MOD_RES (1)..(3)..(35)..(36): Xaa is C or S

SEQ ID NO: 60987 - protein, 39 aa, Artificial Sequence; identical to SEQ ID NO: 31387
  GFR-binding peptide
  MOD_RES (1)..(3)..(35)..(36): Xaa is C or S

SEQ ID NO: 60988 - protein, 40 aa, Artificial Sequence
  GFR-binding peptide
  MOD_RES (1)..(3)..(36)..(37): Xaa is C or S
  MOD_RES (14)..(15)..(16)..(17)..(18): Xaa is A or G
  MOD_RES (19)..(20)..(21)..(22): Xaa is A or G or is absent
XGXEEVIMYHYKLXXXXXXXXXKYLMSIPSTKVPAXXTSP

SEQ ID NO: 60989 - protein, 37 aa, Artificial Sequence; identical to SEQ ID NO: 26473
  GFR-binding peptide
  MOD_RES (2)..(34)..(35): Xaa is C or S

SEQ ID NO: 60990 - protein, 34 aa, Artificial Sequence; identical to SEQ ID NO: 31392
  GFR-binding peptide
  MOD_RES (32)..(33): Xaa is C or S

SEQ ID NO: 60991 - protein, 36 aa, Artificial Sequence
  GFR-binding peptide
  MOD_RES (33)..(34): Xaa is C or S
  MOD_RES (11)..(12)..(13)..(14)..(15): Xaa is A or G
  MOD_RES (16)..(17)..(18)..(19): Xaa is A or G or is absent
SVAMGRHKRLXXXXXXXXXYYLISTASLKTPVXXAK

SEQ ID NO: 60992 - protein, 39 aa, Artificial Sequence; identical to SEQ ID NO: 5348
  GFR-binding peptide
  MOD_RES (1)..(3)..(35)..(36): Xaa is C or S

SEQ ID NO: 60993 - protein, 44 aa, Artificial Sequence; identical to SEQ ID NO: 5349
  GFR-binding peptide
  MOD_RES (2)..(4)..(38)..(39): Xaa is C or S
  MOD_RES (16)..(17)..(18)..(19)..(20): Xaa is A or G
  MOD_RES (21)..(22)..(23)..(24): Xaa is A or G or is absent

SEQ ID NO: 60994 - protein, 37 aa, Artificial Sequence; identical to SEQ ID NO: 56303
  GFR-binding peptide
  MOD_RES (1)..(35)..(36): Xaa is C or S
  MOD_RES (13)..(14)..(15)..(16)..(17): Xaa is A or G
  MOD_RES (18)..(19)..(20)..(21): Xaa is A or G or is absent

SEQ ID NO: 60995 - protein, 39 aa, Artificial Sequence; identical to SEQ ID NO: 31398
  GFR-binding peptide
  MOD_RES (2)..(4)..(38)..(39): Xaa is C or S
  MOD_RES (16)..(17)..(18)..(19)..(20): Xaa is A or G
  MOD_RES (21)..(22)..(23)..(24): Xaa is A or G or is absent

SEQ ID NO: 60996 - protein, 33 aa, Artificial Sequence; identical to SEQ ID NO: 5351
  GFR-binding peptide
  MOD_RES (31)..(32): Xaa is C or S

SEQ ID NO: 60997 - protein, 40 aa, Artificial Sequence; identical to SEQ ID NO: 5355
  GFR-binding peptide
  MOD_RES (1)..(35)..(36): Xaa is C or S
  MOD_RES (13)..(14)..(15)..(16)..(17): Xaa is A or G
  MOD_RES (18)..(19)..(20)..(21): Xaa is A or G or is absent

SEQ ID NO: 60998 - protein, 35 aa, Artificial Sequence; identical to SEQ ID NO: 5361
  GFR-binding peptide
  MOD_RES (32)..(33): Xaa is C or S

SEQ ID NO: 60999 - protein, 35 aa, Artificial Sequence
  GFR-binding peptide
  MOD_RES (1)..(33)..(34): Xaa is C or S
XSEVTMNPIKGYVVNKNEDFYLINIPSMKEPVXXP

SEQ ID NO: 61000 - protein, 35 aa, Artificial Sequence; identical to SEQ ID NO: 5362
  GFR-binding peptide
  MOD_RES (31)..(32): Xaa is C or S

SEQ ID NO: 61001 - protein, 35 aa, Artificial Sequence; identical to SEQ ID NO: 31409
  GFR-binding peptide
  MOD_RES (33)..(34): Xaa is C or S

SEQ ID NO: 61002 - protein, 40 aa, Artificial Sequence; identical to SEQ ID NO: 26489
  GFR-binding peptide
  MOD_RES (1)..(3)..(37)..(38): Xaa is C or S
  MOD_RES (15)..(16)..(17)..(18)..(19): Xaa is A or G
  MOD_RES (20)..(21)..(22)..(23): Xaa is A or G or is absent

SEQ ID NO: 61003 - protein, 42 aa, Artificial Sequence; identical to SEQ ID NO: 31410
  GFR-binding peptide
  MOD_RES (1)..(36)..(37): Xaa is C or S
  MOD_RES (14)..(15)..(16)..(17)..(18): Xaa is A or G
  MOD_RES (19)..(20)..(21)..(22): Xaa is A or G or is absent

SEQ ID NO: 61004 - protein, 38 aa, Artificial Sequence
  GFR-binding peptide
  MOD_RES (1)..(3)..(37)..(38): Xaa is C or S
  MOD_RES (15)..(16)..(17)..(18)..(19): Xaa is A or G
  MOD_RES (20)..(21)..(22)..(23): Xaa is A or G or is absent
XGXAEVVMDRHKRLXXXXXXXXXYYLISTASLRAPVXX

SEQ ID NO: 61005 - protein, 32 aa, Artificial Sequence; identical to SEQ ID NO: 26490
  GFR-binding peptide
  MOD_RES (11)..(12)..(13)..(14)..(15): Xaa is A or G
  MOD_RES (16)..(17)..(18)..(19): Xaa is A or G or is absent

SEQ ID NO: 61006 - protein, 38 aa, Artificial Sequence
  GFR-binding peptide
  MOD_RES (2)..(33)..(34): Xaa is C or S
KXSKVVMPIKGYVKPTRGVFYLINIPSLDQPVXXPSAS

SEQ ID NO: 61007 - protein, 37 aa, Artificial Sequence; identical to SEQ ID NO: 26492
  GFR-binding peptide
  MOD_RES (31)..(32): Xaa is C or S

SEQ ID NO: 61008 - protein, 39 aa, Artificial Sequence
  GFR-binding peptide
  MOD_RES (2)..(4)..(35)..(36): Xaa is C or S
SXKXSKVVMPIKGYVKPTRGVFYLINIPSLDQPVXXPSA

SEQ ID NO: 61009 - protein, 37 aa, Artificial Sequence; identical to SEQ ID NO: 26495
  GFR-binding peptide
  MOD_RES (1)..(35)..(36): Xaa is C or S
  MOD_RES (13)..(14)..(15)..(16)..(17): Xaa is A or G
  MOD_RES (18)..(19)..(20)..(21): Xaa is A or G or is absent

SEQ ID NO: 61010 - protein, 41 aa, Artificial Sequence; identical to SEQ ID NO: 5365
  GFR-binding peptide
  MOD_RES (1)..(35)..(36): Xaa is C or S
  MOD_RES (13)..(14)..(15)..(16)..(17): Xaa is A or G
  MOD_RES (18)..(19)..(20)..(21): Xaa is A or G or is absent

SEQ ID NO: 61011 - protein, 34 aa, Artificial Sequence; identical to SEQ ID NO: 5367
  GFR-binding peptide
  MOD_RES (33)..(34): Xaa is C or S
  MOD_RES (11)..(12)..(13)..(14)..(15): Xaa is A or G
  MOD_RES (16)..(17)..(18)..(19): Xaa is A or G or is absent

SEQ ID NO: 61012 - protein, 39 aa, Artificial Sequence; identical to SEQ ID NO: 12801
  GFR-binding peptide
  MOD_RES (34)..(35): Xaa is C or S
  MOD_RES (12)..(13)..(14)..(15)..(16): Xaa is A or G
  MOD_RES (17)..(18)..(19)..(20): Xaa is A or G or is absent

SEQ ID NO: 61013 - protein, 35 aa, Artificial Sequence; identical to SEQ ID NO: 31418
  GFR-binding peptide
  MOD_RES (1)..(3)..(34)..(35): Xaa is C or S

SEQ ID NO: 61014 - protein, 35 aa, Artificial Sequence; identical to SEQ ID NO: 5369
  GFR-binding peptide
  MOD_RES (33)..(34): Xaa is C or S

SEQ ID NO: 61015 - protein, 33 aa, Artificial Sequence; identical to SEQ ID NO: 5370
  GFR-binding peptide
  MOD_RES (1)..(33): Xaa is C or S

SEQ ID NO: 61016 - protein, 34 aa, Artificial Sequence; identical to SEQ ID NO: 5373
  GFR-binding peptide
  MOD_RES (33)..(34): Xaa is C or S
  MOD_RES (11)..(12)..(13)..(14)..(15): Xaa is A or G
  MOD_RES (16)..(17)..(18)..(19): Xaa is A or G or is absent

SEQ ID NO: 61017 - protein, 42 aa, Artificial Sequence
  GFR-binding peptide
  MOD_RES (1)..(3)..(37)..(38): Xaa is C or S
  MOD_RES (15)..(16)..(17)..(18)..(19): Xaa is A or G
  MOD_RES (20)..(21)..(22)..(23): Xaa is A or G or is absent
XAXSEVTMNRHKRLXXXXXXXXXYYLISTASMKEPVXXPEPI

SEQ ID NO: 61018 - protein, 40 aa, Artificial Sequence; identical to SEQ ID NO: 26506
  GFR-binding peptide
  MOD_RES (1)..(34)..(35): Xaa is C or S
  MOD_RES (12)..(13)..(14)..(15)..(16): Xaa is A or G
  MOD_RES (17)..(18)..(19)..(20): Xaa is A or G or is absent

SEQ ID NO: 61019 - protein, 33 aa, Artificial Sequence
  GFR-binding peptide
  MOD_RES (32)..(33): Xaa is C or S
SEVVMDEYKFKVVNNASDLYLISIPELRTPVXX

SEQ ID NO: 61020 - protein, 37 aa, Artificial Sequence
  GFR-binding peptide
  MOD_RES (2)..(33)..(34): Xaa is C or S
KXSRVIMPIKGYVKPKRGVFYLINIPSLAQPVXXPAA

SEQ ID NO: 61021 - protein, 39 aa, Artificial Sequence
  GFR-binding peptide
  MOD_RES (2)..(4)..(37)..(38): Xaa is C or S
  MOD_RES (15)..(16)..(17)..(18)..(19): Xaa is A or G
  MOD_RES (20)..(21)..(22)..(23): Xaa is A or G or is absent
SXKXSKVVMPIKGYXXXXXXXXXFYLINIPSLDQPVXXP

SEQ ID NO: 61022 - protein, 35 aa, Artificial Sequence; identical to SEQ ID NO: 26511
  GFR-binding peptide
  MOD_RES (31)..(32): Xaa is C or S

SEQ ID NO: 61023 - protein, 38 aa, Artificial Sequence; identical to SEQ ID NO: 31429
  GFR-binding peptide
  MOD_RES (1)..(3)..(35)..(36): Xaa is C or S

SEQ ID NO: 61024 - protein, 39 aa, Artificial Sequence
  GFR-binding peptide
  MOD_RES (1)..(3)..(36)..(37): Xaa is C or S
  MOD_RES (14)..(15)..(16)..(17)..(18): Xaa is A or G
  MOD_RES (19)..(20)..(21)..(22): Xaa is A or G or is absent
XKXSKVIMPIKGYXXXXXXXXXFYLINIPSLDQSVXXPS

SEQ ID NO: 61025 - protein, 34 aa, Artificial Sequence
  GFR-binding peptide
  MOD_RES (1)..(3)..(34): Xaa is C or S
XGXEEVIMRHKRLLLVRGNDYYLMSTASTKVPAX

SEQ ID NO: 61026 - protein, 31 aa, Artificial Sequence
  GFR-binding peptide
ESVAMGRHKRLYTVVGKDYYLISTASLKTPV

SEQ ID NO: 61027 - protein, 43 aa, Artificial Sequence; identical to SEQ ID NO: 26514
  GFR-binding peptide
  MOD_RES (2)..(4)..(38)..(39): Xaa is C or S
  MOD_RES (16)..(17)..(18)..(19)..(20): Xaa is A or G
  MOD_RES (21)..(22)..(23)..(24): Xaa is A or G or is absent

SEQ ID NO: 61028 - protein, 34 aa, Artificial Sequence; identical to SEQ ID NO: 5385
  GFR-binding peptide
  MOD_RES (1)..(1): Xaa is C or S
  MOD_RES (13)..(14)..(15)..(16)..(17): Xaa is A or G
  MOD_RES (18)..(19)..(20)..(21): Xaa is A or G or is absent

SEQ ID NO: 61029 - protein, 32 aa, Artificial Sequence; identical to SEQ ID NO: 5386
  GFR-binding peptide
  MOD_RES (11)..(12)..(13)..(14)..(15): Xaa is A or G
  MOD_RES (16)..(17)..(18)..(19): Xaa is A or G or is absent

SEQ ID NO: 61030 - protein, 39 aa, Artificial Sequence
  GFR-binding peptide
  MOD_RES (2)..(4)..(36)..(37): Xaa is C or S
RXAXSEVTMNYHYKLVVNKNEDKYLISIPSMKEPVXXPE

SEQ ID NO: 61031 - protein, 40 aa, Artificial Sequence
  GFR-binding peptide
  MOD_RES (1)..(3)..(37)..(38): Xaa is C or S
  MOD_RES (15)..(16)..(17)..(18)..(19): Xaa is A or G
  MOD_RES (20)..(21)..(22)..(23): Xaa is A or G or is absent
XGXRDVVMGYHYKLXXXXXXXXXKYLMSIPSMKTPTXXPG

SEQ ID NO: 61032 - protein, 35 aa, Artificial Sequence; identical to SEQ ID NO: 5388
  GFR-binding peptide
  MOD_RES (2)..(35): Xaa is C or S
  MOD_RES (13)..(14)..(15)..(16)..(17): Xaa is A or G
  MOD_RES (18)..(19)..(20)..(21): Xaa is A or G or is absent

SEQ ID NO: 61033 - protein, 40 aa, Artificial Sequence; identical to SEQ ID NO: 5389
  GFR-binding peptide
  MOD_RES (1)..(3)..(35)..(36): Xaa is C or S

SEQ ID NO: 61034 - protein, 37 aa, Artificial Sequence; identical to SEQ ID NO: 5392
  GFR-binding peptide
  MOD_RES (1)..(35)..(36): Xaa is C or S
  MOD_RES (13)..(14)..(15)..(16)..(17): Xaa is A or G
  MOD_RES (18)..(19)..(20)..(21): Xaa is A or G or is absent

SEQ ID NO: 61035 - protein, 39 aa, Artificial Sequence; identical to SEQ ID NO: 26522
  GFR-binding peptide
  MOD_RES (2)..(4)..(36)..(37): Xaa is C or S

SEQ ID NO: 61036 - protein, 42 aa, Artificial Sequence; identical to SEQ ID NO: 12830
  GFR-binding peptide
  MOD_RES (2)..(4)..(36)..(37): Xaa is C or S

SEQ ID NO: 61037 - protein, 43 aa, Artificial Sequence; identical to SEQ ID NO: 31440
  GFR-binding peptide
  MOD_RES (2)..(4)..(38)..(39): Xaa is C or S
  MOD_RES (16)..(17)..(18)..(19)..(20): Xaa is A or G
  MOD_RES (21)..(22)..(23)..(24): Xaa is A or G or is absent

SEQ ID NO: 61038 - protein, 41 aa, Artificial Sequence; identical to SEQ ID NO: 5399
  GFR-binding peptide
  MOD_RES (2)..(37)..(38): Xaa is C or S
  MOD_RES (15)..(16)..(17)..(18)..(19): Xaa is A or G
  MOD_RES (20)..(21)..(22)..(23): Xaa is A or G or is absent

SEQ ID NO: 61039 - protein, 40 aa, Artificial Sequence; identical to SEQ ID NO: 5400
  GFR-binding peptide
  MOD_RES (1)..(35)..(36): Xaa is C or S
  MOD_RES (13)..(14)..(15)..(16)..(17): Xaa is A or G
  MOD_RES (18)..(19)..(20)..(21): Xaa is A or G or is absent

SEQ ID NO: 61040 - protein, 36 aa, Artificial Sequence; identical to SEQ ID NO: 26524
  GFR-binding peptide
  MOD_RES (32)..(33): Xaa is C or S

SEQ ID NO: 61041 - protein, 33 aa, Artificial Sequence; identical to SEQ ID NO: 26525
  GFR-binding peptide
  MOD_RES (2)..(2): Xaa is C or S

SEQ ID NO: 61042 - protein, 37 aa, Artificial Sequence; identical to SEQ ID NO: 5404
  GFR-binding peptide
  MOD_RES (2)..(4)..(35)..(36): Xaa is C or S

SEQ ID NO: 61043 - protein, 37 aa, Artificial Sequence; identical to SEQ ID NO: 26529
  GFR-binding peptide
  MOD_RES (2)..(4)..(36)..(37): Xaa is C or S

SEQ ID NO: 61044 - protein, 44 aa, Artificial Sequence; identical to SEQ ID NO: 26532
  GFR-binding peptide
  MOD_RES (2)..(4)..(38)..(39): Xaa is C or S
  MOD_RES (16)..(17)..(18)..(19)..(20): Xaa is A or G
  MOD_RES (21)..(22)..(23)..(24): Xaa is A or G or is absent

SEQ ID NO: 61045 - protein, 33 aa, Artificial Sequence; identical to SEQ ID NO: 31452
  GFR-binding peptide
  MOD_RES (1)..(1): Xaa is C or S
  MOD_RES (12)..(13)..(14)..(15)..(16): Xaa is A or G
  MOD_RES (17)..(18)..(19)..(20): Xaa is A or G or is absent

SEQ ID NO: 61046 - protein, 41 aa, Artificial Sequence
  GFR-binding peptide
  MOD_RES (2)..(35)..(36): Xaa is C or S
  MOD_RES (13)..(14)..(15)..(16)..(17): Xaa is A or G
  MOD_RES (18)..(19)..(20)..(21): Xaa is A or G or is absent
GXEEVIMYHYKLXXXXXXXXXKYLMSIPSTKVPAXXTSPVR

SEQ ID NO: 61047 - protein, 34 aa, Artificial Sequence
  GFR-binding peptide
  MOD_RES (34)..(34): Xaa is C or S
  MOD_RES (12)..(13)..(14)..(15)..(16): Xaa is A or G
  MOD_RES (17)..(18)..(19)..(20): Xaa is A or G or is absent
ESVAMGRHKRLXXXXXXXXXYYLISTASLKTPVX

SEQ ID NO: 61048 - protein, 37 aa, Artificial Sequence
  GFR-binding peptide
  MOD_RES (2)..(4): Xaa is C or S
  MOD_RES (16)..(17)..(18)..(19)..(20): Xaa is A or G
  MOD_RES (21)..(22)..(23)..(24): Xaa is A or G or is absent
RXAXSEVTMNEYKFKXXXXXXXXXLYLISIPEMKEPV

SEQ ID NO: 61049 - protein, 36 aa, Artificial Sequence; identical to SEQ ID NO: 31460
  GFR-binding peptide
  MOD_RES (1)..(33)..(34): Xaa is C or S

SEQ ID NO: 61050 - protein, 39 aa, Artificial Sequence; identical to SEQ ID NO: 5411
  GFR-binding peptide
  MOD_RES (1)..(3)..(36)..(37): Xaa is C or S
  MOD_RES (14)..(15)..(16)..(17)..(18): Xaa is A or G
  MOD_RES (19)..(20)..(21)..(22): Xaa is A or G or is absent

SEQ ID NO: 61051 - protein, 38 aa, Artificial Sequence; identical to SEQ ID NO: 5412
  GFR-binding peptide
  MOD_RES (2)..(35)..(36): Xaa is C or S
  MOD_RES (13)..(14)..(15)..(16)..(17): Xaa is A or G
  MOD_RES (18)..(19)..(20)..(21): Xaa is A or G or is absent

SEQ ID NO: 61052 - protein, 38 aa, Artificial Sequence
  GFR-binding peptide
  MOD_RES (32)..(33): Xaa is C or S
RDVVMGEYKFKIIQQKDNLYLMSIPEMKTPTXXPGASG

SEQ ID NO: 61053 - protein, 34 aa, Artificial Sequence; identical to SEQ ID NO: 26539
  GFR-binding peptide
  MOD_RES (2)..(33)..(34): Xaa is C or S

SEQ ID NO: 61054 - protein, 32 aa, Artificial Sequence; identical to SEQ ID NO: 31466
  GFR-binding peptide
  MOD_RES (31)..(32): Xaa is C or S

SEQ ID NO: 61055 - protein, 40 aa, Artificial Sequence; identical to SEQ ID NO: 26542
  GFR-binding peptide
  MOD_RES (2)..(4)..(38)..(39): Xaa is C or S
  MOD_RES (16)..(17)..(18)..(19)..(20): Xaa is A or G
  MOD_RES (21)..(22)..(23)..(24): Xaa is A or G or is absent

SEQ ID NO: 61056 - protein, 38 aa, Artificial Sequence; identical to SEQ ID NO: 5416
  GFR-binding peptide
  MOD_RES (2)..(36)..(37): Xaa is C or S
  MOD_RES (14)..(15)..(16)..(17)..(18): Xaa is A or G
  MOD_RES (19)..(20)..(21)..(22): Xaa is A or G or is absent

SEQ ID NO: 61057 - protein, 42 aa, Artificial Sequence; identical to SEQ ID NO: 26544
  GFR-binding peptide
  MOD_RES (2)..(36)..(37): Xaa is C or S
  MOD_RES (14)..(15)..(16)..(17)..(18): Xaa is A or G
  MOD_RES (19)..(20)..(21)..(22): Xaa is A or G or is absent

SEQ ID NO: 61058 - protein, 35 aa, Artificial Sequence; identical to SEQ ID NO: 26545
  GFR-binding peptide
  MOD_RES (33)..(34): Xaa is C or S
  MOD_RES (11)..(12)..(13)..(14)..(15): Xaa is A or G
  MOD_RES (16)..(17)..(18)..(19): Xaa is A or G or is absent

SEQ ID NO: 61059 - protein, 36 aa, Artificial Sequence; identical to SEQ ID NO: 5418
  GFR-binding peptide
  MOD_RES (1)..(3)..(36): Xaa is C or S
  MOD_RES (14)..(15)..(16)..(17)..(18): Xaa is A or G
  MOD_RES (19)..(20)..(21)..(22): Xaa is A or G or is absent

SEQ ID NO: 61060 - protein, 35 aa, Artificial Sequence
  GFR-binding peptide
  MOD_RES (2)..(35): Xaa is C or S
  MOD_RES (13)..(14)..(15)..(16)..(17): Xaa is A or G
  MOD_RES (18)..(19)..(20)..(21): Xaa is A or G or is absent
GXEEVIMEYKFKXXXXXXXXXLYLMSIPETKVPAX

SEQ ID NO: 61061 - protein, 39 aa, Artificial Sequence; identical to SEQ ID NO: 5419
  GFR-binding peptide
  MOD_RES (33)..(34): Xaa is C or S
  MOD_RES (11)..(12)..(13)..(14)..(15): Xaa is A or G
  MOD_RES (16)..(17)..(18)..(19): Xaa is A or G or is absent

SEQ ID NO: 61062 - protein, 34 aa, Artificial Sequence; identical to SEQ ID NO: 31471
  GFR-binding peptide
  MOD_RES (2)..(4): Xaa is C or S

SEQ ID NO: 61063 - protein, 35 aa, Artificial Sequence; identical to SEQ ID NO: 26549
  GFR-binding peptide
  MOD_RES (2)..(4)..(35): Xaa is C or S

SEQ ID NO: 61064 - protein, 38 aa, Artificial Sequence; identical to SEQ ID NO: 5424
  GFR-binding peptide
  MOD_RES (2)..(4)..(37)..(38): Xaa is C or S

SEQ ID NO: 61065 - protein, 35 aa, Artificial Sequence
  GFR-binding peptide
  MOD_RES (2)..(35): Xaa is C or S
  MOD_RES (13)..(14)..(15)..(16)..(17): Xaa is A or G
  MOD_RES (18)..(19)..(20)..(21): Xaa is A or G or is absent
KXSKVIMPIKGYXXXXXXXXXFYLINIPSLDQSVX

SEQ ID NO: 61066 - protein, 36 aa, Artificial Sequence; identical to SEQ ID NO: 5428
  GFR-binding peptide
  MOD_RES (34)..(35): Xaa is C or S
  MOD_RES (12)..(13)..(14)..(15)..(16): Xaa is A or G
  MOD_RES (17)..(18)..(19)..(20): Xaa is A or G or is absent

SEQ ID NO: 61067 - protein, 34 aa, Artificial Sequence; identical to SEQ ID NO: 5429
  GFR-binding peptide
  MOD_RES (1)..(32)..(33): Xaa is C or S

SEQ ID NO: 61068 - protein, 40 aa, Artificial Sequence; identical to SEQ ID NO: 26553
  GFR-binding peptide
  MOD_RES (2)..(35)..(36): Xaa is C or S

SEQ ID NO: 61069 - protein, 43 aa, Artificial Sequence; identical to SEQ ID NO: 26554
  GFR-binding peptide
  MOD_RES (1)..(3)..(37)..(38): Xaa is C or S
  MOD_RES (15)..(16)..(17)..(18)..(19): Xaa is A or G
  MOD_RES (20)..(21)..(22)..(23): Xaa is A or G or is absent

SEQ ID NO: 61070 - protein, 44 aa, Artificial Sequence; identical to SEQ ID NO: 5431
  GFR-binding peptide
  MOD_RES (1)..(3)..(38)..(39): Xaa is C or S
  MOD_RES (16)..(17)..(18)..(19)..(20): Xaa is A or G
  MOD_RES (21)..(22)..(23)..(24): Xaa is A or G or is absent

SEQ ID NO: 61071 - protein, 40 aa, Artificial Sequence
  GFR-binding peptide
  MOD_RES (2)..(4)..(38)..(39): Xaa is C or S
  MOD_RES (16)..(17)..(18)..(19)..(20): Xaa is A or G
  MOD_RES (21)..(22)..(23)..(24): Xaa is A or G or is absent
RXAXSEVTMNRHKRLXXXXXXXXXYYLISTASMKEPVXXP

SEQ ID NO: 61072 - protein, 39 aa, Artificial Sequence; identical to SEQ ID NO: 31482
  GFR-binding peptide
  MOD_RES (2)..(36)..(37): Xaa is C or S
  MOD_RES (14)..(15)..(16)..(17)..(18): Xaa is A or G
  MOD_RES (19)..(20)..(21)..(22): Xaa is A or G or is absent

SEQ ID NO: 61073 - protein, 34 aa, Artificial Sequence; identical to SEQ ID NO: 56407
  GFR-binding peptide
  MOD_RES (33)..(34): Xaa is C or S
  MOD_RES (11)..(12)..(13)..(14)..(15): Xaa is A or G
  MOD_RES (16)..(17)..(18)..(19): Xaa is A or G or is absent

SEQ ID NO: 61074 - protein, 38 aa, Artificial Sequence; identical to SEQ ID NO: 5434
  GFR-binding peptide
  MOD_RES (2)..(36)..(37): Xaa is C or S
  MOD_RES (14)..(15)..(16)..(17)..(18): Xaa is A or G
  MOD_RES (19)..(20)..(21)..(22): Xaa is A or G or is absent

SEQ ID NO: 61075 - protein, 33 aa, Artificial Sequence; identical to SEQ ID NO: 5436
  GFR-binding peptide
  MOD_RES (1)..(33): Xaa is C or S

SEQ ID NO: 61076 - protein, 33 aa, Artificial Sequence; identical to SEQ ID NO: 5438
  GFR-binding peptide
  MOD_RES (33)..(33): Xaa is C or S
  MOD_RES (11)..(12)..(13)..(14)..(15): Xaa is A or G
  MOD_RES (16)..(17)..(18)..(19): Xaa is A or G or is absent

SEQ ID NO: 61077 - protein, 35 aa, Artificial Sequence; identical to SEQ ID NO: 31491
  GFR-binding peptide
  MOD_RES (2)..(34)..(35): Xaa is C or S

SEQ ID NO: 61078 - protein, 38 aa, Artificial Sequence
  GFR-binding peptide
  MOD_RES (33)..(34): Xaa is C or S
  MOD_RES (11)..(12)..(13)..(14)..(15): Xaa is A or G
  MOD_RES (16)..(17)..(18)..(19): Xaa is A or G or is absent
EEVIMYHYKLXXXXXXXXXKYLMSIPSTKVPAXXTSPV

SEQ ID NO: 61079 - protein, 41 aa, Artificial Sequence; identical to SEQ ID NO: 31492
  GFR-binding peptide
  MOD_RES (2)..(4)..(38)..(39): Xaa is C or S
  MOD_RES (16)..(17)..(18)..(19)..(20): Xaa is A or G
  MOD_RES (21)..(22)..(23)..(24): Xaa is A or G or is absent

SEQ ID NO: 61080 - protein, 35 aa, Artificial Sequence
  GFR-binding peptide
  MOD_RES (33)..(34): Xaa is C or S
  MOD_RES (11)..(12)..(13)..(14)..(15): Xaa is A or G
  MOD_RES (16)..(17)..(18)..(19): Xaa is A or G or is absent
EVTMNRYKKLXXXXXXXXXFYLISIANMKEPVXXP

SEQ ID NO: 61081 - protein, 40 aa, Artificial Sequence; identical to SEQ ID NO: 5446
  GFR-binding peptide
  MOD_RES (1)..(34)..(35): Xaa is C or S
  MOD_RES (12)..(13)..(14)..(15)..(16): Xaa is A or G
  MOD_RES (17)..(18)..(19)..(20): Xaa is A or G or is absent

SEQ ID NO: 61082 - protein, 35 aa, Artificial Sequence; identical to SEQ ID NO: 5448
  GFR-binding peptide
  MOD_RES (1)..(3): Xaa is C or S
  MOD_RES (14)..(15)..(16)..(17)..(18): Xaa is A or G
  MOD_RES (19)..(20)..(21)..(22): Xaa is A or G or is absent

SEQ ID NO: 61083 - protein, 34 aa, Artificial Sequence; identical to SEQ ID NO: 5449
  GFR-binding peptide
  MOD_RES (2)..(34): Xaa is C or S

SEQ ID NO: 61084 - protein, 33 aa, Artificial Sequence; identical to SEQ ID NO: 5450
  GFR-binding peptide
  MOD_RES (1)..(32)..(33): Xaa is C or S

SEQ ID NO: 61085 - protein, 36 aa, Artificial Sequence; identical to SEQ ID NO: 31502
  GFR-binding peptide
  MOD_RES (2)..(4)..(36): Xaa is C or S

SEQ ID NO: 61086 - protein, 34 aa, Artificial Sequence
  GFR-binding peptide
  MOD_RES (2)..(2): Xaa is C or S
  MOD_RES (13)..(14)..(15)..(16)..(17): Xaa is A or G
  MOD_RES (18)..(19)..(20)..(21): Xaa is A or G or is absent
KXSKVIMPIKGYXXXXXXXXXFYLINIPSLDQSV

SEQ ID NO: 61087 - protein, 39 aa, Artificial Sequence; identical to SEQ ID NO: 5453
  GFR-binding peptide
  MOD_RES (2)..(4)..(38)..(39): Xaa is C or S
  MOD_RES (16)..(17)..(18)..(19)..(20): Xaa is A or G
  MOD_RES (21)..(22)..(23)..(24): Xaa is A or G or is absent

SEQ ID NO: 61088 - protein, 36 aa, Artificial Sequence; identical to SEQ ID NO: 5454
  GFR-binding peptide
  MOD_RES (32)..(33): Xaa is C or S

SEQ ID NO: 61089 - protein, 39 aa, Artificial Sequence; identical to SEQ ID NO: 26568
  GFR-binding peptide
  MOD_RES (2)..(34)..(35): Xaa is C or S

SEQ ID NO: 61090 - protein, 40 aa, Artificial Sequence; identical to SEQ ID NO: 5458
  GFR-binding peptide
  MOD_RES (34)..(35): Xaa is C or S
  MOD_RES (12)..(13)..(14)..(15)..(16): Xaa is A or G
  MOD_RES (17)..(18)..(19)..(20): Xaa is A or G or is absent

SEQ ID NO: 61091 - protein, 30 aa, Artificial Sequence
  GFR-binding peptide
EEVIMEYKFKLLVRGNDLYLMSIPETKVPA

SEQ ID NO: 61092 - protein, 32 aa, Artificial Sequence
  GFR-binding peptide
  MOD_RES (32)..(32): Xaa is C or S
SEVTMNRHKRLVVNKNEDYYLISTASMKEPVX

SEQ ID NO: 61093 - protein, 38 aa, Artificial Sequence; identical to SEQ ID NO: 5461
  GFR-binding peptide
  MOD_RES (1)..(3)..(37): Xaa is C or S
  MOD_RES (15)..(16)..(17)..(18)..(19): Xaa is A or G
  MOD_RES (20)..(21)..(22)..(23): Xaa is A or G or is absent

SEQ ID NO: 61094 - protein, 40 aa, Artificial Sequence
  GFR-binding peptide
  MOD_RES (2)..(4)..(37)..(38): Xaa is C or S
  MOD_RES (15)..(16)..(17)..(18)..(19): Xaa is A or G
  MOD_RES (20)..(21)..(22)..(23): Xaa is A or G or is absent
LXGXEEVIMRHKRLXXXXXXXXXYYLMSTASTKVPAXXTS

SEQ ID NO: 61095 - protein, 37 aa, Artificial Sequence; identical to SEQ ID NO: 5462
  GFR-binding peptide
  MOD_RES (1)..(34)..(35): Xaa is C or S
  MOD_RES (12)..(13)..(14)..(15)..(16): Xaa is A or G
  MOD_RES (17)..(18)..(19)..(20): Xaa is A or G or is absent

SEQ ID NO: 61096 - protein, 35 aa, Artificial Sequence
  GFR-binding peptide
  MOD_RES (31)..(32): Xaa is C or S
EEVIMEYKFKLLVRGNDLYLMSIPETKVPAXXTSP

SEQ ID NO: 61097 - protein, 43 aa, Artificial Sequence; identical to SEQ ID NO: 5466
  GFR-binding peptide
  MOD_RES (2)..(4)..(37)..(38): Xaa is C or S
  MOD_RES (15)..(16)..(17)..(18)..(19): Xaa is A or G
  MOD_RES (20)..(21)..(22)..(23): Xaa is A or G or is absent

SEQ ID NO: 61098 - protein, 41 aa, Artificial Sequence; identical to SEQ ID NO: 5467
  GFR-binding peptide
  MOD_RES (2)..(35)..(36): Xaa is C or S
  MOD_RES (13)..(14)..(15)..(16)..(17): Xaa is A or G
  MOD_RES (18)..(19)..(20)..(21): Xaa is A or G or is absent

SEQ ID NO: 61099 - protein, 31 aa, Artificial Sequence; identical to SEQ ID NO: 5468
  GFR-binding peptide
  MOD_RES (31)..(31): Xaa is C or S

SEQ ID NO: 61100 - protein, 39 aa, Artificial Sequence
  GFR-binding peptide
  MOD_RES (33)..(34): Xaa is C or S
  MOD_RES (11)..(12)..(13)..(14)..(15): Xaa is A or G
  MOD_RES (16)..(17)..(18)..(19): Xaa is A or G or is absent
EVVMDRHKRLXXXXXXXXXYYLISTASLRTPVXXTPPTS

SEQ ID NO: 61101 - protein, 38 aa, Artificial Sequence; identical to SEQ ID NO: 31517
  GFR-binding peptide
  MOD_RES (2)..(34)..(35): Xaa is C or S

SEQ ID NO: 61102 - protein, 38 aa, Artificial Sequence; identical to SEQ ID NO: 5470
  GFR-binding peptide
  MOD_RES (33)..(34): Xaa is C or S
  MOD_RES (11)..(12)..(13)..(14)..(15): Xaa is A or G
  MOD_RES (16)..(17)..(18)..(19): Xaa is A or G or is absent

SEQ ID NO: 61103 - protein, 34 aa, Artificial Sequence; identical to SEQ ID NO: 26585
  GFR-binding peptide
  MOD_RES (33)..(34): Xaa is C or S
  MOD_RES (11)..(12)..(13)..(14)..(15): Xaa is A or G
  MOD_RES (16)..(17)..(18)..(19): Xaa is A or G or is absent

SEQ ID NO: 61104 - protein, 43 aa, Artificial Sequence; identical to SEQ ID NO: 5472
  GFR-binding peptide
  MOD_RES (1)..(3)..(37)..(38): Xaa is C or S
  MOD_RES (15)..(16)..(17)..(18)..(19): Xaa is A or G
  MOD_RES (20)..(21)..(22)..(23): Xaa is A or G or is absent

SEQ ID NO: 61105 - protein, 36 aa, Artificial Sequence; identical to SEQ ID NO: 5475
  GFR-binding peptide
  MOD_RES (1)..(33): Xaa is C or S

SEQ ID NO: 61106 - protein, 44 aa, Artificial Sequence; identical to SEQ ID NO: 5477
  GFR-binding peptide
  MOD_RES (2)..(4)..(38)..(39): Xaa is C or S
  MOD_RES (16)..(17)..(18)..(19)..(20): Xaa is A or G
  MOD_RES (21)..(22)..(23)..(24): Xaa is A or G or is absent

SEQ ID NO: 61107 - protein, 39 aa, Artificial Sequence; identical to SEQ ID NO: 26589
  GFR-binding peptide
  MOD_RES (1)..(3)..(37)..(38): Xaa is C or S
  MOD_RES (15)..(16)..(17)..(18)..(19): Xaa is A or G
  MOD_RES (20)..(21)..(22)..(23): Xaa is A or G or is absent

SEQ ID NO: 61108 - protein, 40 aa, Artificial Sequence; identical to SEQ ID NO: 31525
  GFR-binding peptide
  MOD_RES (2)..(34)..(35): Xaa is C or S

SEQ ID NO: 61109 - protein, 35 aa, Artificial Sequence
  GFR-binding peptide
  MOD_RES (1)..(3): Xaa is C or S
  MOD_RES (14)..(15)..(16)..(17)..(18): Xaa is A or G
  MOD_RES (19)..(20)..(21)..(22): Xaa is A or G or is absent
XKXSKVIMPIKGYXXXXXXXXXFYLINIPSLDQSV

SEQ ID NO: 61110 - protein, 40 aa, Artificial Sequence; identical to SEQ ID NO: 31528
  GFR-binding peptide
  MOD_RES (2)..(4)..(39)..(40): Xaa is C or S
  MOD_RES (17)..(18)..(19)..(20)..(21): Xaa is A or G
  MOD_RES (22)..(23)..(24)..(25): Xaa is A or G or is absent

SEQ ID NO: 61111 - protein, 40 aa, Artificial Sequence; identical to SEQ ID NO: 26590
  GFR-binding peptide
  MOD_RES (2)..(36)..(37): Xaa is C or S
  MOD_RES (14)..(15)..(16)..(17)..(18): Xaa is A or G
  MOD_RES (19)..(20)..(21)..(22): Xaa is A or G or is absent

SEQ ID NO: 61112 - protein, 36 aa, Artificial Sequence
  GFR-binding peptide
  MOD_RES (1)..(35)..(36): Xaa is C or S
  MOD_RES (13)..(14)..(15)..(16)..(17): Xaa is A or G
  MOD_RES (18)..(19)..(20)..(21): Xaa is A or G or is absent
XESVAMGRHKRLXXXXXXXXXYYLISTASLKTPVXX

SEQ ID NO: 61113 - protein, 34 aa, Artificial Sequence; identical to SEQ ID NO: 5483
  GFR-binding peptide
  MOD_RES (2)..(34): Xaa is C or S

SEQ ID NO: 61114 - protein, 36 aa, Artificial Sequence; identical to SEQ ID NO: 26593
  GFR-binding peptide
  MOD_RES (31)..(32): Xaa is C or S

SEQ ID NO: 61115 - protein, 36 aa, Artificial Sequence; identical to SEQ ID NO: 5486
  GFR-binding peptide
  MOD_RES (2)..(4)..(35)..(36): Xaa is C or S

SEQ ID NO: 61116 - protein, 43 aa, Artificial Sequence; identical to SEQ ID NO: 5487
  GFR-binding peptide
  MOD_RES (2)..(4)..(38)..(39): Xaa is C or S
  MOD_RES (16)..(17)..(18)..(19)..(20): Xaa is A or G
  MOD_RES (21)..(22)..(23)..(24): Xaa is A or G or is absent

SEQ ID NO: 61117 - protein, 41 aa, Artificial Sequence; identical to SEQ ID NO: 31533
  GFR-binding peptide
  MOD_RES (2)..(4)..(36)..(37): Xaa is C or S

SEQ ID NO: 61118 - protein, 38 aa, Artificial Sequence; identical to SEQ ID NO: 26596
  GFR-binding peptide
  MOD_RES (1)..(33)..(34): Xaa is C or S

SEQ ID NO: 61119 - protein, 37 aa, Artificial Sequence; identical to SEQ ID NO: 31536
  GFR-binding peptide
  MOD_RES (33)..(34): Xaa is C or S

SEQ ID NO: 61120 - protein, 43 aa, Artificial Sequence
  GFR-binding peptide
  MOD_RES (2)..(4)..(38)..(39): Xaa is C or S
  MOD_RES (16)..(17)..(18)..(19)..(20): Xaa is A or G
  MOD_RES (21)..(22)..(23)..(24): Xaa is A or G or is absent
RXGXAEVVMDRHKRLXXXXXXXXXYYLISTASLRAPVXXSAPA

SEQ ID NO: 61121 - protein, 36 aa, Artificial Sequence; identical to SEQ ID NO: 5491
  GFR-binding peptide
  MOD_RES (33)..(34): Xaa is C or S
  MOD_RES (11)..(12)..(13)..(14)..(15): Xaa is A or G
  MOD_RES (16)..(17)..(18)..(19): Xaa is A or G or is absent

SEQ ID NO: 61122 - protein, 33 aa, Artificial Sequence
  GFR-binding peptide
  MOD_RES (31)..(32): Xaa is C or S
SRVIMPIKGYVKPKRGVFYLINIPSLAQPVXXP

SEQ ID NO: 61123 - protein, 34 aa, Artificial Sequence; identical to SEQ ID NO: 31538
  GFR-binding peptide
  MOD_RES (34)..(34): Xaa is C or S
  MOD_RES (12)..(13)..(14)..(15)..(16): Xaa is A or G
  MOD_RES (17)..(18)..(19)..(20): Xaa is A or G or is absent

SEQ ID NO: 61124 - protein, 34 aa, Artificial Sequence; identical to SEQ ID NO: 5493
  GFR-binding peptide
  MOD_RES (1)..(3): Xaa is C or S

SEQ ID NO: 61125 - protein, 34 aa, Artificial Sequence; identical to SEQ ID NO: 26599
  GFR-binding peptide
  MOD_RES (1)..(3): Xaa is C or S

SEQ ID NO: 61126 - protein, 30 aa, Artificial Sequence; identical to SEQ ID NO: 31547
  GFR-binding peptide

SEQ ID NO: 61127 - protein, 37 aa, Artificial Sequence; identical to SEQ ID NO: 31549
  GFR-binding peptide
  MOD_RES (1)..(34)..(35): Xaa is C or S

SEQ ID NO: 61128 - protein, 37 aa, Artificial Sequence
  GFR-binding peptide
  MOD_RES (1)..(33)..(34): Xaa is C or S
XSEVTMNEYKFKVVNKNEDLYLISIPEMKEPVXXPEP

SEQ ID NO: 61129 - protein, 42 aa, Artificial Sequence
  GFR-binding peptide
  MOD_RES (2)..(4)..(36)..(37): Xaa is C or S
RXAXSEVTMNPIKGYVVNKNEDFYLINIPSMKEPVXXPEPIG

SEQ ID NO: 61130 - protein, 43 aa, Artificial Sequence; identical to SEQ ID NO: 31554
  GFR-binding peptide
  MOD_RES (1)..(3)..(38)..(39): Xaa is C or S
  MOD_RES (16)..(17)..(18)..(19)..(20): Xaa is A or G
  MOD_RES (21)..(22)..(23)..(24): Xaa is A or G or is absent

SEQ ID NO: 61131 - protein, 37 aa, Artificial Sequence; identical to SEQ ID NO: 5504
  GFR-binding peptide
  MOD_RES (1)..(33)..(34): Xaa is C or S

SEQ ID NO: 61132 - protein, 37 aa, Artificial Sequence; identical to SEQ ID NO: 26613
  GFR-binding peptide
  MOD_RES (34)..(34): Xaa is C or S
  MOD_RES (12)..(13)..(14)..(15)..(16): Xaa is A or G
  MOD_RES (17)..(18)..(19)..(20): Xaa is A or G or is absent

SEQ ID NO: 61133 - protein, 36 aa, Artificial Sequence; identical to SEQ ID NO: 26616
  GFR-binding peptide
  MOD_RES (1)..(33)..(34): Xaa is C or S

SEQ ID NO: 61134 - protein, 38 aa, Artificial Sequence; identical to SEQ ID NO: 26617
  GFR-binding peptide
  MOD_RES (35)..(36): Xaa is C or S
  MOD_RES (13)..(14)..(15)..(16)..(17): Xaa is A or G
  MOD_RES (18)..(19)..(20)..(21): Xaa is A or G or is absent

SEQ ID NO: 61135 - protein, 35 aa, Artificial Sequence; identical to SEQ ID NO: 5512
  GFR-binding peptide
  MOD_RES (2)..(4): Xaa is C or S

SEQ ID NO: 61136 - protein, 38 aa, Artificial Sequence; identical to SEQ ID NO: 5513
  GFR-binding peptide
  MOD_RES (33)..(34): Xaa is C or S
  MOD_RES (11)..(12)..(13)..(14)..(15): Xaa is A or G
  MOD_RES (16)..(17)..(18)..(19): Xaa is A or G or is absent

SEQ ID NO: 61137 - protein, 35 aa, Artificial Sequence; identical to SEQ ID NO: 31562
  GFR-binding peptide
  MOD_RES (2)..(4): Xaa is C or S

SEQ ID NO: 61138 - protein, 34 aa, Artificial Sequence; identical to SEQ ID NO: 5515
  GFR-binding peptide
  MOD_RES (32)..(32): Xaa is C or S

SEQ ID NO: 61139 - protein, 42 aa, Artificial Sequence; identical to SEQ ID NO: 5516
  GFR-binding peptide
  MOD_RES (2)..(36)..(37): Xaa is C or S
  MOD_RES (14)..(15)..(16)..(17)..(18): Xaa is A or G
  MOD_RES (19)..(20)..(21)..(22): Xaa is A or G or is absent

SEQ ID NO: 61140 - protein, 33 aa, Artificial Sequence; identical to SEQ ID NO: 26624
  GFR-binding peptide
  MOD_RES (1)..(33): Xaa is C or S

SEQ ID NO: 61141 - protein, 32 aa, Artificial Sequence; identical to SEQ ID NO: 5517
  GFR-binding peptide
  MOD_RES (31)..(32): Xaa is C or S

SEQ ID NO: 61142 - protein, 41 aa, Artificial Sequence
  GFR-binding peptide
  MOD_RES (2)..(4)..(38)..(39): Xaa is C or S
  MOD_RES (16)..(17)..(18)..(19)..(20): Xaa is A or G
  MOD_RES (21)..(22)..(23)..(24): Xaa is A or G or is absent
RXAXSEVTMNYHYKLXXXXXXXXXKYLISIPSMKEPVXXPE

SEQ ID NO: 61143 - protein, 37 aa, Artificial Sequence
  GFR-binding peptide
  MOD_RES (33)..(34): Xaa is C or S
  MOD_RES (11)..(12)..(13)..(14)..(15): Xaa is A or G
  MOD_RES (16)..(17)..(18)..(19): Xaa is A or G or is absent
SKVVMPIKGYXXXXXXXXXFYLINIPSLDQPVXXPSA

SEQ ID NO: 61144 - protein, 43 aa, Artificial Sequence; identical to SEQ ID NO: 26627
  GFR-binding peptide
  MOD_RES (2)..(4)..(38)..(39): Xaa is C or S
  MOD_RES (16)..(17)..(18)..(19)..(20): Xaa is A or G
  MOD_RES (21)..(22)..(23)..(24): Xaa is A or G or is absent

SEQ ID NO: 61145 - protein, 37 aa, Artificial Sequence; identical to SEQ ID NO: 5520
  GFR-binding peptide
  MOD_RES (1)..(35)..(36): Xaa is C or S
  MOD_RES (13)..(14)..(15)..(16)..(17): Xaa is A or G
  MOD_RES (18)..(19)..(20)..(21): Xaa is A or G or is absent

SEQ ID NO: 61146 - protein, 39 aa, Artificial Sequence; identical to SEQ ID NO: 5522
  GFR-binding peptide
  MOD_RES (1)..(3)..(36)..(37): Xaa is C or S

SEQ ID NO: 61147 - protein, 38 aa, Artificial Sequence; identical to SEQ ID NO: 26631
  GFR-binding peptide
  MOD_RES (2)..(35)..(36): Xaa is C or S

SEQ ID NO: 61148 - protein, 30 aa, Artificial Sequence
  GFR-binding peptide
EVTMNRHKRLVVNKNEDYYLISTASMKEPV

SEQ ID NO: 61149 - protein, 35 aa, Artificial Sequence; identical to SEQ ID NO: 31572
  GFR-binding peptide
  MOD_RES (2)..(34)..(35): Xaa is C or S

SEQ ID NO: 61150 - protein, 38 aa, Artificial Sequence
  GFR-binding peptide
  MOD_RES (1)..(3)..(34)..(35): Xaa is C or S
XGXEEVIMEYKFKLLVRGNDLYLMSIPETKVPAXXTSP

SEQ ID NO: 61151 - protein, 31 aa, Artificial Sequence; identical to SEQ ID NO: 26634
  GFR-binding peptide
  MOD_RES (31)..(31): Xaa is C or S

SEQ ID NO: 61152 - protein, 32 aa, Artificial Sequence; identical to SEQ ID NO: 5527
  GFR-binding peptide
  MOD_RES (32)..(32): Xaa is C or S

SEQ ID NO: 61153 - protein, 39 aa, Artificial Sequence; identical to SEQ ID NO: 26642
  GFR-binding peptide
  MOD_RES (33)..(34): Xaa is C or S
  MOD_RES (11)..(12)..(13)..(14)..(15): Xaa is A or G
  MOD_RES (16)..(17)..(18)..(19): Xaa is A or G or is absent

SEQ ID NO: 61154 - protein, 38 aa, Artificial Sequence; identical to SEQ ID NO: 26643
  GFR-binding peptide
  MOD_RES (33)..(34): Xaa is C or S
  MOD_RES (11)..(12)..(13)..(14)..(15): Xaa is A or G
  MOD_RES (16)..(17)..(18)..(19): Xaa is A or G or is absent

SEQ ID NO: 61155 - protein, 36 aa, Artificial Sequence; identical to SEQ ID NO: 5531
  GFR-binding peptide
  MOD_RES (1)..(35)..(36): Xaa is C or S
  MOD_RES (13)..(14)..(15)..(16)..(17): Xaa is A or G
  MOD_RES (18)..(19)..(20)..(21): Xaa is A or G or is absent

SEQ ID NO: 61156 - protein, 38 aa, Artificial Sequence; identical to SEQ ID NO: 5532
  GFR-binding peptide
  MOD_RES (33)..(34): Xaa is C or S
  MOD_RES (11)..(12)..(13)..(14)..(15): Xaa is A or G
  MOD_RES (16)..(17)..(18)..(19): Xaa is A or G or is absent

SEQ ID NO: 61157 - protein, 43 aa, Artificial Sequence; identical to SEQ ID NO: 26646
  GFR-binding peptide
  MOD_RES (2)..(4)..(37)..(38): Xaa is C or S
  MOD_RES (15)..(16)..(17)..(18)..(19): Xaa is A or G
  MOD_RES (20)..(21)..(22)..(23): Xaa is A or G or is absent

SEQ ID NO: 61158 - protein, 41 aa, Artificial Sequence
  GFR-binding peptide
  MOD_RES (1)..(35)..(36): Xaa is C or S
  MOD_RES (13)..(14)..(15)..(16)..(17): Xaa is A or G
  MOD_RES (18)..(19)..(20)..(21): Xaa is A or G or is absent
XESVAMGRHKRLXXXXXXXXXYYLISTASLKTPVXXAKSAK

SEQ ID NO: 61159 - protein, 38 aa, Artificial Sequence; identical to SEQ ID NO: 31586
  GFR-binding peptide
  MOD_RES (1)..(3)..(38): Xaa is C or S
  MOD_RES (16)..(17)..(18)..(19)..(20): Xaa is A or G
  MOD_RES (21)..(22)..(23)..(24): Xaa is A or G or is absent

SEQ ID NO: 61160 - protein, 34 aa, Artificial Sequence; identical to SEQ ID NO: 31589
  GFR-binding peptide
  MOD_RES (2)..(34): Xaa is C or S

SEQ ID NO: 61161 - protein, 35 aa, Artificial Sequence; identical to SEQ ID NO: 31592
  GFR-binding peptide
  MOD_RES (34)..(35): Xaa is C or S
  MOD_RES (12)..(13)..(14)..(15)..(16): Xaa is A or G
  MOD_RES (17)..(18)..(19)..(20): Xaa is A or G or is absent

SEQ ID NO: 61162 - protein, 35 aa, Artificial Sequence; identical to SEQ ID NO: 26649
  GFR-binding peptide
  MOD_RES (33)..(34): Xaa is C or S
  MOD_RES (11)..(12)..(13)..(14)..(15): Xaa is A or G
  MOD_RES (16)..(17)..(18)..(19): Xaa is A or G or is absent

SEQ ID NO: 61163 - protein, 38 aa, Artificial Sequence; identical to SEQ ID NO: 5537
  GFR-binding peptide
  MOD_RES (2)..(36)..(37): Xaa is C or S
  MOD_RES (14)..(15)..(16)..(17)..(18): Xaa is A or G
  MOD_RES (19)..(20)..(21)..(22): Xaa is A or G or is absent

SEQ ID NO: 61164 - protein, 39 aa, Artificial Sequence; identical to SEQ ID NO: 5538
  GFR-binding peptide
  MOD_RES (1)..(33)..(34): Xaa is C or S

SEQ ID NO: 61165 - protein, 39 aa, Artificial Sequence; identical to SEQ ID NO: 26651
  GFR-binding peptide
  MOD_RES (33)..(34): Xaa is C or S
  MOD_RES (11)..(12)..(13)..(14)..(15): Xaa is A or G
  MOD_RES (16)..(17)..(18)..(19): Xaa is A or G or is absent

SEQ ID NO: 61166 - protein, 39 aa, Artificial Sequence; identical to SEQ ID NO: 26653
  GFR-binding peptide
  MOD_RES (2)..(4)..(36)..(37): Xaa is C or S

SEQ ID NO: 61167 - protein, 32 aa, Artificial Sequence
  GFR-binding peptide
  MOD_RES (2)..(2): Xaa is C or S
GXEEVIMYHYKLLLVRGNDKYLMSIPSTKVPA

SEQ ID NO: 61168 - protein, 37 aa, Artificial Sequence
  GFR-binding peptide
  MOD_RES (1)..(3)..(35)..(36): Xaa is C or S
XGXRDVVMGYHYKLIIQQKDNKYLMSIPSMKTPTXXP

SEQ ID NO: 61169 - protein, 34 aa, Artificial Sequence; identical to SEQ ID NO: 26656
  GFR-binding peptide
  MOD_RES (1)..(3): Xaa is C or S

SEQ ID NO: 61170 - protein, 40 aa, Artificial Sequence; identical to SEQ ID NO: 5544
  GFR-binding peptide
  MOD_RES (1)..(3)..(37)..(38): Xaa is C or S
  MOD_RES (15)..(16)..(17)..(18)..(19): Xaa is A or G
  MOD_RES (20)..(21)..(22)..(23): Xaa is A or G or is absent

SEQ ID NO: 61171 - protein, 35 aa, Artificial Sequence; identical to SEQ ID NO: 5545
  GFR-binding peptide
  MOD_RES (33)..(34): Xaa is C or S
  MOD_RES (11)..(12)..(13)..(14)..(15): Xaa is A or G
  MOD_RES (16)..(17)..(18)..(19): Xaa is A or G or is absent

SEQ ID NO: 61172 - protein, 38 aa, Artificial Sequence; identical to SEQ ID NO: 26659
  GFR-binding peptide
  MOD_RES (33)..(34): Xaa is C or S
  MOD_RES (11)..(12)..(13)..(14)..(15): Xaa is A or G
  MOD_RES (16)..(17)..(18)..(19): Xaa is A or G or is absent

SEQ ID NO: 61173 - protein, 33 aa, Artificial Sequence; identical to SEQ ID NO: 5548
  GFR-binding peptide
  MOD_RES (1)..(33): Xaa is C or S

SEQ ID NO: 61174 - protein, 40 aa, Artificial Sequence; identical to SEQ ID NO: 26662
  GFR-binding peptide
  MOD_RES (2)..(35)..(36): Xaa is C or S
  MOD_RES (13)..(14)..(15)..(16)..(17): Xaa is A or G
  MOD_RES (18)..(19)..(20)..(21): Xaa is A or G or is absent

SEQ ID NO: 61175 - protein, 34 aa, Artificial Sequence; identical to SEQ ID NO: 5551
  GFR-binding peptide
  MOD_RES (2)..(4): Xaa is C or S

SEQ ID NO: 61176 - protein, 36 aa, Artificial Sequence; identical to SEQ ID NO: 26665
  GFR-binding peptide
  MOD_RES (32)..(33): Xaa is C or S

SEQ ID NO: 61177 - protein, 32 aa, Artificial Sequence; identical to SEQ ID NO: 26668
  GFR-binding peptide
  MOD_RES (32)..(32): Xaa is C or S

SEQ ID NO: 61178 - protein, 31 aa, Artificial Sequence
  GFR-binding peptide
RDVVMGYHYKLIIQQKDNKYLMSIPSMKTPT

SEQ ID NO: 61179 - protein, 37 aa, Artificial Sequence; identical to SEQ ID NO: 5554
  GFR-binding peptide
  MOD_RES (1)..(3)..(35)..(36): Xaa is C or S

SEQ ID NO: 61180 - protein, 36 aa, Artificial Sequence
  GFR-binding peptide
  MOD_RES (34)..(35): Xaa is C or S
  MOD_RES (12)..(13)..(14)..(15)..(16): Xaa is A or G
  MOD_RES (17)..(18)..(19)..(20): Xaa is A or G or is absent
SEVTMNRYKKLXXXXXXXXXFYLISIANMKEPVXXP

SEQ ID NO: 61181 - protein, 33 aa, Artificial Sequence
  GFR-binding peptide
  MOD_RES (1)..(3): Xaa is C or S
XKXSKVIMPIKGYIKPTKGIFYLINIPSLDQSV

SEQ ID NO: 61182 - protein, 32 aa, Artificial Sequence; identical to SEQ ID NO: 5556
  GFR-binding peptide
  MOD_RES (31)..(32): Xaa is C or S

SEQ ID NO: 61183 - protein, 38 aa, Artificial Sequence; identical to SEQ ID NO: 26673
  GFR-binding peptide
  MOD_RES (1)..(33)..(34): Xaa is C or S

SEQ ID NO: 61184 - protein, 33 aa, Artificial Sequence; identical to SEQ ID NO: 31614
  GFR-binding peptide
  MOD_RES (12)..(13)..(14)..(15)..(16): Xaa is A or G
  MOD_RES (17)..(18)..(19)..(20): Xaa is A or G or is absent

SEQ ID NO: 61185 - protein, 42 aa, Artificial Sequence; identical to SEQ ID NO: 5560
  GFR-binding peptide
  MOD_RES (1)..(3)..(37)..(38): Xaa is C or S
  MOD_RES (15)..(16)..(17)..(18)..(19): Xaa is A or G
  MOD_RES (20)..(21)..(22)..(23): Xaa is A or G or is absent

SEQ ID NO: 61186 - protein, 37 aa, Artificial Sequence; identical to SEQ ID NO: 56551
  GFR-binding peptide
  MOD_RES (2)..(4)..(35)..(36): Xaa is C or S

SEQ ID NO: 61187 - protein, 36 aa, Artificial Sequence
  GFR-binding peptide
  MOD_RES (2)..(4): Xaa is C or S
  MOD_RES (15)..(16)..(17)..(18)..(19): Xaa is A or G
  MOD_RES (20)..(21)..(22)..(23): Xaa is A or G or is absent
SXKXSRVIMPIKGYXXXXXXXXXFYLINIPSLAQPV

SEQ ID NO: 61188 - protein, 37 aa, Artificial Sequence
  GFR-binding peptide
  MOD_RES (31)..(32): Xaa is C or S
EVVMDRHKRLVVNNAADYYLISTASLRAPVXXSAPAA

SEQ ID NO: 61189 - protein, 38 aa, Artificial Sequence; identical to SEQ ID NO: 5566
  GFR-binding peptide
  MOD_RES (1)..(36)..(37): Xaa is C or S
  MOD_RES (14)..(15)..(16)..(17)..(18): Xaa is A or G
  MOD_RES (19)..(20)..(21)..(22): Xaa is A or G or is absent

SEQ ID NO: 61190 - protein, 38 aa, Artificial Sequence
  GFR-binding peptide
  MOD_RES (2)..(33)..(34): Xaa is C or S
GXEEVIMRHKRLLLVRGNDYYLMSTASTKVPAXXTSPV

SEQ ID NO: 61191 - protein, 44 aa, Artificial Sequence
  GFR-binding peptide
  MOD_RES (2)..(4)..(38)..(39): Xaa is C or S
  MOD_RES (16)..(17)..(18)..(19)..(20): Xaa is A or G
  MOD_RES (21)..(22)..(23)..(24): Xaa is A or G or is absent
HXGXSRVVMNRHKRLXXXXXXXXXYYLVSTASLKTPAXXPKPVH

SEQ ID NO: 61192 - protein, 33 aa, Artificial Sequence; identical to SEQ ID NO: 5571
  GFR-binding peptide
  MOD_RES (12)..(13)..(14)..(15)..(16): Xaa is A or G
  MOD_RES (17)..(18)..(19)..(20): Xaa is A or G or is absent

SEQ ID NO: 61193 - protein, 36 aa, Artificial Sequence; identical to SEQ ID NO: 5573
  GFR-binding peptide
  MOD_RES (34)..(35): Xaa is C or S
  MOD_RES (12)..(13)..(14)..(15)..(16): Xaa is A or G
  MOD_RES (17)..(18)..(19)..(20): Xaa is A or G or is absent

SEQ ID NO: 61194 - protein, 33 aa, Artificial Sequence; identical to SEQ ID NO: 26688
  GFR-binding peptide
  MOD_RES (12)..(13)..(14)..(15)..(16): Xaa is A or G
  MOD_RES (17)..(18)..(19)..(20): Xaa is A or G or is absent

SEQ ID NO: 61195 - protein, 34 aa, Artificial Sequence; identical to SEQ ID NO: 5577
  GFR-binding peptide
  MOD_RES (33)..(34): Xaa is C or S
  MOD_RES (11)..(12)..(13)..(14)..(15): Xaa is A or G
  MOD_RES (16)..(17)..(18)..(19): Xaa is A or G or is absent

SEQ ID NO: 61196 - protein, 40 aa, Artificial Sequence; identical to SEQ ID NO: 5580
  GFR-binding peptide
  MOD_RES (2)..(35)..(36): Xaa is C or S
  MOD_RES (13)..(14)..(15)..(16)..(17): Xaa is A or G
  MOD_RES (18)..(19)..(20)..(21): Xaa is A or G or is absent

SEQ ID NO: 61197 - protein, 36 aa, Artificial Sequence
  GFR-binding peptide
  MOD_RES (1)..(3)..(36): Xaa is C or S
  MOD_RES (14)..(15)..(16)..(17)..(18): Xaa is A or G
  MOD_RES (19)..(20)..(21)..(22): Xaa is A or G or is absent
XKXSRVIMPIKGYXXXXXXXXXFYLINIPSLAQPVX

SEQ ID NO: 61198 - protein, 37 aa, Artificial Sequence; identical to SEQ ID NO: 26696
  GFR-binding peptide
  MOD_RES (1)..(3)..(35)..(36): Xaa is C or S

SEQ ID NO: 61199 - protein, 35 aa, Artificial Sequence; identical to SEQ ID NO: 31649
  GFR-binding peptide
  MOD_RES (2)..(2): Xaa is C or S
  MOD_RES (14)..(15)..(16)..(17)..(18): Xaa is A or G
  MOD_RES (19)..(20)..(21)..(22): Xaa is A or G or is absent

SEQ ID NO: 61200 - protein, 41 aa, Artificial Sequence; identical to SEQ ID NO: 5591
  GFR-binding peptide
  MOD_RES (1)..(3)..(36)..(37): Xaa is C or S
  MOD_RES (14)..(15)..(16)..(17)..(18): Xaa is A or G
  MOD_RES (19)..(20)..(21)..(22): Xaa is A or G or is absent

SEQ ID NO: 61201 - protein, 36 aa, Artificial Sequence; identical to SEQ ID NO: 5592
  GFR-binding peptide
  MOD_RES (1)..(3)..(36): Xaa is C or S
  MOD_RES (14)..(15)..(16)..(17)..(18): Xaa is A or G
  MOD_RES (19)..(20)..(21)..(22): Xaa is A or G or is absent

SEQ ID NO: 61202 - protein, 41 aa, Artificial Sequence; identical to SEQ ID NO: 26702
  GFR-binding peptide
  MOD_RES (1)..(3)..(36)..(37): Xaa is C or S

SEQ ID NO: 61203 - protein, 32 aa, Artificial Sequence
  GFR-binding peptide
  MOD_RES (1)..(1): Xaa is C or S
XSEVVMDRHKRLVVNNASDYYLISTASLRTPV

SEQ ID NO: 61204 - protein, 40 aa, Artificial Sequence; identical to SEQ ID NO: 31654
  GFR-binding peptide
  MOD_RES (2)..(36)..(37): Xaa is C or S
  MOD_RES (14)..(15)..(16)..(17)..(18): Xaa is A or G
  MOD_RES (19)..(20)..(21)..(22): Xaa is A or G or is absent

SEQ ID NO: 61205 - protein, 34 aa, Artificial Sequence; identical to SEQ ID NO: 31656
  GFR-binding peptide
  MOD_RES (34)..(34): Xaa is C or S
  MOD_RES (12)..(13)..(14)..(15)..(16): Xaa is A or G
  MOD_RES (17)..(18)..(19)..(20): Xaa is A or G or is absent

SEQ ID NO: 61206 - protein, 37 aa, Artificial Sequence; identical to SEQ ID NO: 5596
  GFR-binding peptide
  MOD_RES (1)..(34)..(35): Xaa is C or S
  MOD_RES (12)..(13)..(14)..(15)..(16): Xaa is A or G
  MOD_RES (17)..(18)..(19)..(20): Xaa is A or G or is absent

SEQ ID NO: 61207 - protein, 34 aa, Artificial Sequence
  GFR-binding peptide
  MOD_RES (1)..(34): Xaa is C or S
  MOD_RES (12)..(13)..(14)..(15)..(16): Xaa is A or G
  MOD_RES (17)..(18)..(19)..(20): Xaa is A or G or is absent
XSKVVMPIKGYXXXXXXXXXFYLINIPSLDQPVX

SEQ ID NO: 61208 - protein, 34 aa, Artificial Sequence; identical to SEQ ID NO: 5601
  GFR-binding peptide
  MOD_RES (1)..(33)..(34): Xaa is C or S

SEQ ID NO: 61209 - protein, 43 aa, Artificial Sequence
  GFR-binding peptide
  MOD_RES (1)..(3)..(37)..(38): Xaa is C or S
  MOD_RES (15)..(16)..(17)..(18)..(19): Xaa is A or G
  MOD_RES (20)..(21)..(22)..(23): Xaa is A or G or is absent
XGXSEVVMDRHKRLXXXXXXXXXYYLISTASLRTPVXXTPPTS

SEQ ID NO: 61210 - protein, 34 aa, Artificial Sequence; identical to SEQ ID NO: 56598
  GFR-binding peptide
  MOD_RES (2)..(33)..(34): Xaa is C or S

SEQ ID NO: 61211 - protein, 33 aa, Artificial Sequence; identical to SEQ ID NO: 56602
  GFR-binding peptide
  MOD_RES (32)..(33): Xaa is C or S

SEQ ID NO: 61212 - protein, 35 aa, Artificial Sequence
  GFR-binding peptide
  MOD_RES (2)..(34)..(35): Xaa is C or S
GXESVAMGRHKRLYTVVGKDYYLISTASLKTPVXX

SEQ ID NO: 61213 - protein, 36 aa, Artificial Sequence; identical to SEQ ID NO: 5605
  GFR-binding peptide
  MOD_RES (1)..(3)..(36): Xaa is C or S
  MOD_RES (14)..(15)..(16)..(17)..(18): Xaa is A or G
  MOD_RES (19)..(20)..(21)..(22): Xaa is A or G or is absent

SEQ ID NO: 61214 - protein, 38 aa, Artificial Sequence; identical to SEQ ID NO: 5607
  GFR-binding peptide
  MOD_RES (2)..(33)..(34): Xaa is C or S

SEQ ID NO: 61215 - protein, 36 aa, Artificial Sequence; identical to SEQ ID NO: 56604
  GFR-binding peptide
  MOD_RES (32)..(33): Xaa is C or S

SEQ ID NO: 61216 - protein, 41 aa, Artificial Sequence; identical to SEQ ID NO: 26720
  GFR-binding peptide
  MOD_RES (1)..(35)..(36): Xaa is C or S
  MOD_RES (13)..(14)..(15)..(16)..(17): Xaa is A or G
  MOD_RES (18)..(19)..(20)..(21): Xaa is A or G or is absent

SEQ ID NO: 61217 - protein, 37 aa, Artificial Sequence; identical to SEQ ID NO: 5608
  GFR-binding peptide
  MOD_RES (2)..(4): Xaa is C or S
  MOD_RES (16)..(17)..(18)..(19)..(20): Xaa is A or G
  MOD_RES (21)..(22)..(23)..(24): Xaa is A or G or is absent

SEQ ID NO: 61218 - protein, 40 aa, Artificial Sequence; identical to SEQ ID NO: 26722
  GFR-binding peptide
  MOD_RES (2)..(34)..(35): Xaa is C or S

SEQ ID NO: 61219 - protein, 39 aa, Artificial Sequence
  GFR-binding peptide
  MOD_RES (2)..(4)..(37)..(38): Xaa is C or S
  MOD_RES (15)..(16)..(17)..(18)..(19): Xaa is A or G
  MOD_RES (20)..(21)..(22)..(23): Xaa is A or G or is absent
SXKXSRVIMPIKGYXXXXXXXXXFYLINIPSLAQPVXXP

SEQ ID NO: 61220 - protein, 31 aa, Artificial Sequence; identical to SEQ ID NO: 26724
  GFR-binding peptide

SEQ ID NO: 61221 - protein, 39 aa, Artificial Sequence; identical to SEQ ID NO: 56614
  GFR-binding peptide
  MOD_RES (34)..(35): Xaa is C or S
  MOD_RES (12)..(13)..(14)..(15)..(16): Xaa is A or G
  MOD_RES (17)..(18)..(19)..(20): Xaa is A or G or is absent

SEQ ID NO: 61222 - protein, 37 aa, Artificial Sequence; identical to SEQ ID NO: 5610
  GFR-binding peptide
  MOD_RES (2)..(33)..(34): Xaa is C or S

SEQ ID NO: 61223 - protein, 34 aa, Artificial Sequence; identical to SEQ ID NO: 5613
  GFR-binding peptide
  MOD_RES (31)..(32): Xaa is C or S

SEQ ID NO: 61224 - protein, 41 aa, Artificial Sequence
  GFR-binding peptide
  MOD_RES (1)..(35)..(36): Xaa is C or S
  MOD_RES (13)..(14)..(15)..(16)..(17): Xaa is A or G
  MOD_RES (18)..(19)..(20)..(21): Xaa is A or G or is absent
XRDVVMGYHYKLXXXXXXXXXKYLMSIPSMKTPTXXPGASG

SEQ ID NO: 61225 - protein, 32 aa, Artificial Sequence; identical to SEQ ID NO: 31676
  GFR-binding peptide
  MOD_RES (32)..(32): Xaa is C or S

SEQ ID NO: 61226 - protein, 34 aa, Artificial Sequence
  GFR-binding peptide
  MOD_RES (31)..(32): Xaa is C or S
EEVIMYHYKLLLVRGNDKYLMSIPSTKVPAXXTS

SEQ ID NO: 61227 - protein, 36 aa, Artificial Sequence
  GFR-binding peptide
  MOD_RES (2)..(4)..(36): Xaa is C or S
RXGXSEVVMDRHKRLVVNNASDYYLISTASLRTPVX

SEQ ID NO: 61228 - protein, 32 aa, Artificial Sequence; identical to SEQ ID NO: 5619
  GFR-binding peptide
  MOD_RES (1)..(32): Xaa is C or S

SEQ ID NO: 61229 - protein, 38 aa, Artificial Sequence
  GFR-binding peptide
  MOD_RES (1)..(3)..(35)..(36): Xaa is C or S
XGXRDVVMGEYKFKIIQQKDNLYLMSIPEMKTPTXXPG

SEQ ID NO: 61230 - protein, 43 aa, Artificial Sequence
  GFR-binding peptide
  MOD_RES (1)..(3)..(37)..(38): Xaa is C or S
  MOD_RES (15)..(16)..(17)..(18)..(19): Xaa is A or G
  MOD_RES (20)..(21)..(22)..(23): Xaa is A or G or is absent
XGXSEVVMDEYKFKXXXXXXXXXLYLISIPELRTPVXXTPPTS

SEQ ID NO: 61231 - protein, 32 aa, Artificial Sequence; identical to SEQ ID NO: 26737
  GFR-binding peptide
  MOD_RES (11)..(12)..(13)..(14)..(15): Xaa is A or G
  MOD_RES (16)..(17)..(18)..(19): Xaa is A or G or is absent

SEQ ID NO: 61232 - protein, 37 aa, Artificial Sequence
  GFR-binding peptide
  MOD_RES (1)..(33)..(34): Xaa is C or S
XSEVTMNRHKRLVVNKNEDYYLISTASMKEPVXXPEP

SEQ ID NO: 61233 - protein, 34 aa, Artificial Sequence; identical to SEQ ID NO: 26738
  GFR-binding peptide
  MOD_RES (1)..(33)..(34): Xaa is C or S

SEQ ID NO: 61234 - protein, 40 aa, Artificial Sequence
  GFR-binding peptide
  MOD_RES (2)..(4)..(38)..(39): Xaa is C or S
  MOD_RES (16)..(17)..(18)..(19)..(20): Xaa is A or G
  MOD_RES (21)..(22)..(23)..(24): Xaa is A or G or is absent
SXGXRDVVMGEYKFKXXXXXXXXXLYLMSIPEMKTPTXXP

SEQ ID NO: 61235 - protein, 40 aa, Artificial Sequence; identical to SEQ ID NO: 5624
  GFR-binding peptide
  MOD_RES (1)..(3)..(37)..(38): Xaa is C or S
  MOD_RES (15)..(16)..(17)..(18)..(19): Xaa is A or G
  MOD_RES (20)..(21)..(22)..(23): Xaa is A or G or is absent

SEQ ID NO: 61236 - protein, 39 aa, Artificial Sequence; identical to SEQ ID NO: 26744
  GFR-binding peptide
  MOD_RES (1)..(3)..(37)..(38): Xaa is C or S
  MOD_RES (15)..(16)..(17)..(18)..(19): Xaa is A or G
  MOD_RES (20)..(21)..(22)..(23): Xaa is A or G or is absent

SEQ ID NO: 61237 - protein, 38 aa, Artificial Sequence; identical to SEQ ID NO: 5625
  GFR-binding peptide
  MOD_RES (2)..(36)..(37): Xaa is C or S
  MOD_RES (14)..(15)..(16)..(17)..(18): Xaa is A or G
  MOD_RES (19)..(20)..(21)..(22): Xaa is A or G or is absent

SEQ ID NO: 61238 - protein, 35 aa, Artificial Sequence; identical to SEQ ID NO: 31687
  GFR-binding peptide
  MOD_RES (2)..(34): Xaa is C or S

SEQ ID NO: 61239 - protein, 36 aa, Artificial Sequence
  GFR-binding peptide
  MOD_RES (1)..(33)..(34): Xaa is C or S
XSEVTMNRHKRLVVNKNEDYYLISTASMKEPVXXPE

SEQ ID NO: 61240 - protein, 33 aa, Artificial Sequence; identical to SEQ ID NO: 26745
  GFR-binding peptide
  MOD_RES (33)..(33): Xaa is C or S
  MOD_RES (11)..(12)..(13)..(14)..(15): Xaa is A or G
  MOD_RES (16)..(17)..(18)..(19): Xaa is A or G or is absent

SEQ ID NO: 61241 - protein, 40 aa, Artificial Sequence; identical to SEQ ID NO: 5627
  GFR-binding peptide
  MOD_RES (2)..(4)..(38)..(39): Xaa is C or S
  MOD_RES (16)..(17)..(18)..(19)..(20): Xaa is A or G
  MOD_RES (21)..(22)..(23)..(24): Xaa is A or G or is absent

SEQ ID NO: 61242 - protein, 38 aa, Artificial Sequence; identical to SEQ ID NO: 26747
  GFR-binding peptide
  MOD_RES (1)..(35)..(36): Xaa is C or S
  MOD_RES (13)..(14)..(15)..(16)..(17): Xaa is A or G
  MOD_RES (18)..(19)..(20)..(21): Xaa is A or G or is absent

SEQ ID NO: 61243 - protein, 31 aa, Artificial Sequence; identical to SEQ ID NO: 5628
  GFR-binding peptide
  MOD_RES (1)..(1): Xaa is C or S

SEQ ID NO: 61244 - protein, 41 aa, Artificial Sequence; identical to SEQ ID NO: 5629
  GFR-binding peptide
  MOD_RES (2)..(4)..(35)..(36): Xaa is C or S

SEQ ID NO: 61245 - protein, 39 aa, Artificial Sequence; identical to SEQ ID NO: 5632
  GFR-binding peptide
  MOD_RES (2)..(4)..(35)..(36): Xaa is C or S

SEQ ID NO: 61246 - protein, 37 aa, Artificial Sequence; identical to SEQ ID NO: 5633
  GFR-binding peptide
  MOD_RES (2)..(36)..(37): Xaa is C or S
  MOD_RES (14)..(15)..(16)..(17)..(18): Xaa is A or G
  MOD_RES (19)..(20)..(21)..(22): Xaa is A or G or is absent

SEQ ID NO: 61247 - protein, 34 aa, Artificial Sequence; identical to SEQ ID NO: 5636
  GFR-binding peptide
  MOD_RES (1)..(1): Xaa is C or S
  MOD_RES (13)..(14)..(15)..(16)..(17): Xaa is A or G
  MOD_RES (18)..(19)..(20)..(21): Xaa is A or G or is absent

SEQ ID NO: 61248 - protein, 37 aa, Artificial Sequence
  GFR-binding peptide
  MOD_RES (2)..(4)..(36)..(37): Xaa is C or S
SXGXRDVVMGYHYKLIIQQKDNKYLMSIPSMKTPTXX

SEQ ID NO: 61249 - protein, 39 aa, Artificial Sequence; identical to SEQ ID NO: 31707
  GFR-binding peptide
  MOD_RES (1)..(3)..(37)..(38): Xaa is C or S
  MOD_RES (15)..(16)..(17)..(18)..(19): Xaa is A or G
  MOD_RES (20)..(21)..(22)..(23): Xaa is A or G or is absent

SEQ ID NO: 61250 - protein, 35 aa, Artificial Sequence; identical to SEQ ID NO: 31710
  GFR-binding peptide
  MOD_RES (2)..(2): Xaa is C or S
  MOD_RES (14)..(15)..(16)..(17)..(18): Xaa is A or G
  MOD_RES (19)..(20)..(21)..(22): Xaa is A or G or is absent

SEQ ID NO: 61251 - protein, 37 aa, Artificial Sequence; identical to SEQ ID NO: 5638
  GFR-binding peptide
  MOD_RES (33)..(34): Xaa is C or S
  MOD_RES (11)..(12)..(13)..(14)..(15): Xaa is A or G
  MOD_RES (16)..(17)..(18)..(19): Xaa is A or G or is absent

SEQ ID NO: 61252 - protein, 40 aa, Artificial Sequence; identical to SEQ ID NO: 26760
  GFR-binding peptide
  MOD_RES (1)..(3)..(34)..(35): Xaa is C or S

SEQ ID NO: 61253 - protein, 42 aa, Artificial Sequence; identical to SEQ ID NO: 26762
  GFR-binding peptide
  MOD_RES (2)..(4)..(38): Xaa is C or S
  MOD_RES (16)..(17)..(18)..(19)..(20): Xaa is A or G
  MOD_RES (21)..(22)..(23)..(24): Xaa is A or G or is absent

SEQ ID NO: 61254 - protein, 40 aa, Artificial Sequence; identical to SEQ ID NO: 5640
  GFR-binding peptide
  MOD_RES (1)..(3)..(35)..(36): Xaa is C or S

SEQ ID NO: 61255 - protein, 39 aa, Artificial Sequence; identical to SEQ ID NO: 5641
  GFR-binding peptide
  MOD_RES (1)..(34)..(35): Xaa is C or S

SEQ ID NO: 61256 - protein, 42 aa, Artificial Sequence; identical to SEQ ID NO: 26768
  GFR-binding peptide
  MOD_RES (1)..(3)..(37)..(38): Xaa is C or S
  MOD_RES (15)..(16)..(17)..(18)..(19): Xaa is A or G
  MOD_RES (20)..(21)..(22)..(23): Xaa is A or G or is absent

SEQ ID NO: 61257 - protein, 35 aa, Artificial Sequence; identical to SEQ ID NO: 26769
  GFR-binding peptide
  MOD_RES (2)..(34): Xaa is C or S

SEQ ID NO: 61258 - protein, 32 aa, Artificial Sequence; identical to SEQ ID NO: 31715
  GFR-binding peptide
  MOD_RES (32)..(32): Xaa is C or S

SEQ ID NO: 61259 - protein, 39 aa, Artificial Sequence
  GFR-binding peptide
  MOD_RES (33)..(34): Xaa is C or S
  MOD_RES (11)..(12)..(13)..(14)..(15): Xaa is A or G
  MOD_RES (16)..(17)..(18)..(19): Xaa is A or G or is absent
SKVVMPIKGYXXXXXXXXXFYLINIPSLDQPVXXPSASA

SEQ ID NO: 61260 - protein, 38 aa, Artificial Sequence; identical to SEQ ID NO: 31716
  GFR-binding peptide
  MOD_RES (32)..(33): Xaa is C or S

SEQ ID NO: 61261 - protein, 40 aa, Artificial Sequence; identical to SEQ ID NO: 26770
  GFR-binding peptide
  MOD_RES (2)..(36)..(37): Xaa is C or S
  MOD_RES (14)..(15)..(16)..(17)..(18): Xaa is A or G
  MOD_RES (19)..(20)..(21)..(22): Xaa is A or G or is absent

SEQ ID NO: 61262 - protein, 40 aa, Artificial Sequence; identical to SEQ ID NO: 56657
  GFR-binding peptide
  MOD_RES (2)..(4)..(38)..(39): Xaa is C or S
  MOD_RES (16)..(17)..(18)..(19)..(20): Xaa is A or G
  MOD_RES (21)..(22)..(23)..(24): Xaa is A or G or is absent

SEQ ID NO: 61263 - protein, 34 aa, Artificial Sequence; identical to SEQ ID NO: 5642
  GFR-binding peptide
  MOD_RES (31)..(32): Xaa is C or S

SEQ ID NO: 61264 - protein, 39 aa, Artificial Sequence; identical to SEQ ID NO: 5643
  GFR-binding peptide
  MOD_RES (2)..(34)..(35): Xaa is C or S

SEQ ID NO: 61265 - protein, 34 aa, Artificial Sequence; identical to SEQ ID NO: 5646
  GFR-binding peptide
  MOD_RES (33)..(34): Xaa is C or S
  MOD_RES (11)..(12)..(13)..(14)..(15): Xaa is A or G
  MOD_RES (16)..(17)..(18)..(19): Xaa is A or G or is absent

SEQ ID NO: 61266 - protein, 36 aa, Artificial Sequence
  GFR-binding peptide
  MOD_RES (2)..(4)..(35)..(36): Xaa is C or S
LXGXEEVIMYHYKLLLVRGNDKYLMSIPSTKVPAXX

SEQ ID NO: 61267 - protein, 39 aa, Artificial Sequence
  GFR-binding peptide
  MOD_RES (1)..(3)..(34)..(35): Xaa is C or S
XGXEEVIMEYKFKLLVRGNDLYLMSIPETKVPAXXTSPV

SEQ ID NO: 61268 - protein, 31 aa, Artificial Sequence; identical to SEQ ID NO: 26778
  GFR-binding peptide
  MOD_RES (31)..(31): Xaa is C or S

SEQ ID NO: 61269 - protein, 36 aa, Artificial Sequence; identical to SEQ ID NO: 31723
  GFR-binding peptide
  MOD_RES (31)..(32): Xaa is C or S

SEQ ID NO: 61270 - protein, 41 aa, Artificial Sequence; identical to SEQ ID NO: 5652
  GFR-binding peptide
  MOD_RES (1)..(3)..(37)..(38): Xaa is C or S
  MOD_RES (15)..(16)..(17)..(18)..(19): Xaa is A or G
  MOD_RES (20)..(21)..(22)..(23): Xaa is A or G or is absent

SEQ ID NO: 61271 - protein, 40 aa, Artificial Sequence; identical to SEQ ID NO: 26780
  GFR-binding peptide
  MOD_RES (1)..(35)..(36): Xaa is C or S
  MOD_RES (13)..(14)..(15)..(16)..(17): Xaa is A or G
  MOD_RES (18)..(19)..(20)..(21): Xaa is A or G or is absent

SEQ ID NO: 61272 - protein, 36 aa, Artificial Sequence; identical to SEQ ID NO: 5653
  GFR-binding peptide
  MOD_RES (31)..(32): Xaa is C or S

SEQ ID NO: 61273 - protein, 39 aa, Artificial Sequence
  GFR-binding peptide
  MOD_RES (2)..(4)..(36)..(37): Xaa is C or S
RXAXSEVTMNEYKFKVVNKNEDLYLISIPEMKEPVXXPE

SEQ ID NO: 61274 - protein, 33 aa, Artificial Sequence; identical to SEQ ID NO: 26783
  GFR-binding peptide
  MOD_RES (31)..(32): Xaa is C or S

SEQ ID NO: 61275 - protein, 39 aa, Artificial Sequence; identical to SEQ ID NO: 31726
  GFR-binding peptide
  MOD_RES (2)..(36)..(37): Xaa is C or S
  MOD_RES (14)..(15)..(16)..(17)..(18): Xaa is A or G
  MOD_RES (19)..(20)..(21)..(22): Xaa is A or G or is absent

SEQ ID NO: 61276 - protein, 40 aa, Artificial Sequence; identical to SEQ ID NO: 31729
  GFR-binding peptide
  MOD_RES (2)..(36)..(37): Xaa is C or S
  MOD_RES (14)..(15)..(16)..(17)..(18): Xaa is A or G
  MOD_RES (19)..(20)..(21)..(22): Xaa is A or G or is absent

SEQ ID NO: 61277 - protein, 37 aa, Artificial Sequence; identical to SEQ ID NO: 26786
  GFR-binding peptide
  MOD_RES (1)..(35)..(36): Xaa is C or S
  MOD_RES (13)..(14)..(15)..(16)..(17): Xaa is A or G
  MOD_RES (18)..(19)..(20)..(21): Xaa is A or G or is absent

SEQ ID NO: 61278 - protein, 42 aa, Artificial Sequence; identical to SEQ ID NO: 31731
  GFR-binding peptide
  MOD_RES (2)..(4)..(36): Xaa is C or S

SEQ ID NO: 61279 - protein, 33 aa, Artificial Sequence; identical to SEQ ID NO: 31733
  GFR-binding peptide
  MOD_RES (1)..(32)..(33): Xaa is C or S

SEQ ID NO: 61280 - protein, 33 aa, Artificial Sequence; identical to SEQ ID NO: 5657
  GFR-binding peptide
  MOD_RES (1)..(3): Xaa is C or S

SEQ ID NO: 61281 - protein, 36 aa, Artificial Sequence
  GFR-binding peptide
  MOD_RES (2)..(36): Xaa is C or S
  MOD_RES (14)..(15)..(16)..(17)..(18): Xaa is A or G
  MOD_RES (19)..(20)..(21)..(22): Xaa is A or G or is absent
GXAEVVMDRHKRLXXXXXXXXXYYLISTASLRAPVX

SEQ ID NO: 61282 - protein, 35 aa, Artificial Sequence; identical to SEQ ID NO: 26791
  GFR-binding peptide
  MOD_RES (1)..(3)..(35): Xaa is C or S

SEQ ID NO: 61283 - protein, 35 aa, Artificial Sequence
  GFR-binding peptide
  MOD_RES (32)..(33): Xaa is C or S
SEVTMNRYKKLVVNKNEDFYLISIANMKEPVXXPE

SEQ ID NO: 61284 - protein, 30 aa, Artificial Sequence; identical to SEQ ID NO: 26792
  GFR-binding peptide

SEQ ID NO: 61285 - protein, 41 aa, Artificial Sequence; identical to SEQ ID NO: 5660
  GFR-binding peptide
  MOD_RES (2)..(4)..(36)..(37): Xaa is C or S

SEQ ID NO: 61286 - protein, 35 aa, Artificial Sequence; identical to SEQ ID NO: 5661
  GFR-binding peptide
  MOD_RES (2)..(2): Xaa is C or S
  MOD_RES (14)..(15)..(16)..(17)..(18): Xaa is A or G
  MOD_RES (19)..(20)..(21)..(22): Xaa is A or G or is absent

SEQ ID NO: 61287 - protein, 39 aa, Artificial Sequence; identical to SEQ ID NO: 5662
  GFR-binding peptide
  MOD_RES (1)..(36)..(37): Xaa is C or S
  MOD_RES (14)..(15)..(16)..(17)..(18): Xaa is A or G
  MOD_RES (19)..(20)..(21)..(22): Xaa is A or G or is absent

SEQ ID NO: 61288 - protein, 35 aa, Artificial Sequence; identical to SEQ ID NO: 5665
  GFR-binding peptide
  MOD_RES (1)..(35): Xaa is C or S
  MOD_RES (13)..(14)..(15)..(16)..(17): Xaa is A or G
  MOD_RES (18)..(19)..(20)..(21): Xaa is A or G or is absent

SEQ ID NO: 61289 - protein, 34 aa, Artificial Sequence
  GFR-binding peptide
  MOD_RES (32)..(33): Xaa is C or S
SEVVMDRHKRLVVNNASDYYLISTASLRTPVXXT

SEQ ID NO: 61290 - protein, 36 aa, Artificial Sequence; identical to SEQ ID NO: 5669
  GFR-binding peptide
  MOD_RES (1)..(3)..(35)..(36): Xaa is C or S

SEQ ID NO: 61291 - protein, 42 aa, Artificial Sequence; identical to SEQ ID NO: 31747
  GFR-binding peptide
  MOD_RES (2)..(4)..(38)..(39): Xaa is C or S
  MOD_RES (16)..(17)..(18)..(19)..(20): Xaa is A or G
  MOD_RES (21)..(22)..(23)..(24): Xaa is A or G or is absent

SEQ ID NO: 61292 - protein, 39 aa, Artificial Sequence; identical to SEQ ID NO: 26803
  GFR-binding peptide
  MOD_RES (1)..(35)..(36): Xaa is C or S
  MOD_RES (13)..(14)..(15)..(16)..(17): Xaa is A or G
  MOD_RES (18)..(19)..(20)..(21): Xaa is A or G or is absent

SEQ ID NO: 61293 - protein, 31 aa, Artificial Sequence; identical to SEQ ID NO: 5672
  GFR-binding peptide
  MOD_RES (31)..(31): Xaa is C or S

SEQ ID NO: 61294 - protein, 43 aa, Artificial Sequence; identical to SEQ ID NO: 31756
  GFR-binding peptide
  MOD_RES (1)..(3)..(37)..(38): Xaa is C or S
  MOD_RES (15)..(16)..(17)..(18)..(19): Xaa is A or G
  MOD_RES (20)..(21)..(22)..(23): Xaa is A or G or is absent

SEQ ID NO: 61295 - protein, 37 aa, Artificial Sequence
  GFR-binding peptide
  MOD_RES (2)..(36)..(37): Xaa is C or S
  MOD_RES (14)..(15)..(16)..(17)..(18): Xaa is A or G
  MOD_RES (19)..(20)..(21)..(22): Xaa is A or G or is absent
GXESVAMGRHKRLXXXXXXXXXYYLISTASLKTPVXX

SEQ ID NO: 61296 - protein, 37 aa, Artificial Sequence; identical to SEQ ID NO: 5675
  GFR-binding peptide
  MOD_RES (1)..(3)..(35): Xaa is C or S

SEQ ID NO: 61297 - protein, 35 aa, Artificial Sequence; identical to SEQ ID NO: 31758
  GFR-binding peptide
  MOD_RES (2)..(35): Xaa is C or S
  MOD_RES (13)..(14)..(15)..(16)..(17): Xaa is A or G
  MOD_RES (18)..(19)..(20)..(21): Xaa is A or G or is absent

SEQ ID NO: 61298 - protein, 40 aa, Artificial Sequence; identical to SEQ ID NO: 56696
  GFR-binding peptide
  MOD_RES (34)..(35): Xaa is C or S
  MOD_RES (12)..(13)..(14)..(15)..(16): Xaa is A or G
  MOD_RES (17)..(18)..(19)..(20): Xaa is A or G or is absent

SEQ ID NO: 61299 - protein, 41 aa, Artificial Sequence; identical to SEQ ID NO: 31761
  GFR-binding peptide
  MOD_RES (1)..(3)..(37)..(38): Xaa is C or S
  MOD_RES (15)..(16)..(17)..(18)..(19): Xaa is A or G
  MOD_RES (20)..(21)..(22)..(23): Xaa is A or G or is absent

SEQ ID NO: 61300 - protein, 39 aa, Artificial Sequence; identical to SEQ ID NO: 5680
  GFR-binding peptide
  MOD_RES (34)..(35): Xaa is C or S
  MOD_RES (12)..(13)..(14)..(15)..(16): Xaa is A or G
  MOD_RES (17)..(18)..(19)..(20): Xaa is A or G or is absent

SEQ ID NO: 61301 - protein, 35 aa, Artificial Sequence; identical to SEQ ID NO: 31763
  GFR-binding peptide
  MOD_RES (1)..(35): Xaa is C or S
  MOD_RES (13)..(14)..(15)..(16)..(17): Xaa is A or G
  MOD_RES (18)..(19)..(20)..(21): Xaa is A or G or is absent

SEQ ID NO: 61302 - protein, 40 aa, Artificial Sequence; identical to SEQ ID NO: 5681
  GFR-binding peptide
  MOD_RES (2)..(36)..(37): Xaa is C or S
  MOD_RES (14)..(15)..(16)..(17)..(18): Xaa is A or G
  MOD_RES (19)..(20)..(21)..(22): Xaa is A or G or is absent

SEQ ID NO: 61303 - protein, 37 aa, Artificial Sequence; identical to SEQ ID NO: 5683
  GFR-binding peptide
  MOD_RES (2)..(34)..(35): Xaa is C or S

SEQ ID NO: 61304 - protein, 32 aa, Artificial Sequence
  GFR-binding peptide
  MOD_RES (11)..(12)..(13)..(14)..(15): Xaa is A or G
  MOD_RES (16)..(17)..(18)..(19): Xaa is A or G or is absent
EVTMNRHKRLXXXXXXXXXYYLISTASMKEPV

SEQ ID NO: 61305 - protein, 35 aa, Artificial Sequence; identical to SEQ ID NO: 56706
  GFR-binding peptide
  MOD_RES (33)..(34): Xaa is C or S
  MOD_RES (11)..(12)..(13)..(14)..(15): Xaa is A or G
  MOD_RES (16)..(17)..(18)..(19): Xaa is A or G or is absent

SEQ ID NO: 61306 - protein, 31 aa, Artificial Sequence; identical to SEQ ID NO: 5686
  GFR-binding peptide

SEQ ID NO: 61307 - protein, 41 aa, Artificial Sequence; identical to SEQ ID NO: 31770
  GFR-binding peptide
  MOD_RES (2)..(4)..(36)..(37): Xaa is C or S

SEQ ID NO: 61308 - protein, 43 aa, Artificial Sequence; identical to SEQ ID NO: 5689
  GFR-binding peptide
  MOD_RES (2)..(4)..(39)..(40): Xaa is C or S
  MOD_RES (17)..(18)..(19)..(20)..(21): Xaa is A or G
  MOD_RES (22)..(23)..(24)..(25): Xaa is A or G or is absent

SEQ ID NO: 61309 - protein, 35 aa, Artificial Sequence
  GFR-binding peptide
  MOD_RES (2)..(34)..(35): Xaa is C or S
GXAEVVMDRHKRLVVNNAADYYLISTASLRAPVXX

SEQ ID NO: 61310 - protein, 37 aa, Artificial Sequence; identical to SEQ ID NO: 26817
  GFR-binding peptide
  MOD_RES (2)..(4): Xaa is C or S
  MOD_RES (16)..(17)..(18)..(19)..(20): Xaa is A or G
  MOD_RES (21)..(22)..(23)..(24): Xaa is A or G or is absent

SEQ ID NO: 61311 - protein, 38 aa, Artificial Sequence
  GFR-binding peptide
  MOD_RES (2)..(35)..(36): Xaa is C or S
  MOD_RES (13)..(14)..(15)..(16)..(17): Xaa is A or G
  MOD_RES (18)..(19)..(20)..(21): Xaa is A or G or is absent
KXSKVIMPIKGYXXXXXXXXXFYLINIPSLDQSVXXPS

SEQ ID NO: 61312 - protein, 30 aa, Artificial Sequence; identical to SEQ ID NO: 56713
  GFR-binding peptide

SEQ ID NO: 61313 - protein, 39 aa, Artificial Sequence
  GFR-binding peptide
  MOD_RES (33)..(34): Xaa is C or S
  MOD_RES (11)..(12)..(13)..(14)..(15): Xaa is A or G
  MOD_RES (16)..(17)..(18)..(19): Xaa is A or G or is absent
EVTMNRYKKLXXXXXXXXXFYLISIANMKEPVXXPEPIG

SEQ ID NO: 61314 - protein, 40 aa, Artificial Sequence
  GFR-binding peptide
  MOD_RES (2)..(4)..(35)..(36): Xaa is C or S
LXGXEEVIMYHYKLLLVRGNDKYLMSIPSTKVPAXXTSPV

SEQ ID NO: 61315 - protein, 38 aa, Artificial Sequence; identical to SEQ ID NO: 26822
  GFR-binding peptide
  MOD_RES (2)..(34)..(35): Xaa is C or S

SEQ ID NO: 61316 - protein, 33 aa, Artificial Sequence; identical to SEQ ID NO: 5699
  GFR-binding peptide
  MOD_RES (12)..(13)..(14)..(15)..(16): Xaa is A or G
  MOD_RES (17)..(18)..(19)..(20): Xaa is A or G or is absent

SEQ ID NO: 61317 - protein, 41 aa, Artificial Sequence; identical to SEQ ID NO: 5700
  GFR-binding peptide
  MOD_RES (2)..(4)..(35)..(36): Xaa is C or S

SEQ ID NO: 61318 - protein, 39 aa, Artificial Sequence; identical to SEQ ID NO: 5702
  GFR-binding peptide
  MOD_RES (2)..(36)..(37): Xaa is C or S
  MOD_RES (14)..(15)..(16)..(17)..(18): Xaa is A or G
  MOD_RES (19)..(20)..(21)..(22): Xaa is A or G or is absent

SEQ ID NO: 61319 - protein, 38 aa, Artificial Sequence
  GFR-binding peptide
  MOD_RES (1)..(35)..(36): Xaa is C or S
  MOD_RES (13)..(14)..(15)..(16)..(17): Xaa is A or G
  MOD_RES (18)..(19)..(20)..(21): Xaa is A or G or is absent
XSEVTMNEYKFKXXXXXXXXXLYLISIPEMKEPVXXPE

SEQ ID NO: 61320 - protein, 35 aa, Artificial Sequence; identical to SEQ ID NO: 31783
  GFR-binding peptide
  MOD_RES (1)..(3): Xaa is C or S

SEQ ID NO: 61321 - protein, 41 aa, Artificial Sequence; identical to SEQ ID NO: 5706
  GFR-binding peptide
  MOD_RES (2)..(4)..(37)..(38): Xaa is C or S
  MOD_RES (15)..(16)..(17)..(18)..(19): Xaa is A or G
  MOD_RES (20)..(21)..(22)..(23): Xaa is A or G or is absent

SEQ ID NO: 61322 - protein, 38 aa, Artificial Sequence; identical to SEQ ID NO: 26832
  GFR-binding peptide
  MOD_RES (2)..(4)..(38): Xaa is C or S
  MOD_RES (16)..(17)..(18)..(19)..(20): Xaa is A or G
  MOD_RES (21)..(22)..(23)..(24): Xaa is A or G or is absent

SEQ ID NO: 61323 - protein, 41 aa, Artificial Sequence
  GFR-binding peptide
  MOD_RES (2)..(35)..(36): Xaa is C or S
  MOD_RES (13)..(14)..(15)..(16)..(17): Xaa is A or G
  MOD_RES (18)..(19)..(20)..(21): Xaa is A or G or is absent
GXEEVIMRHKRLXXXXXXXXXYYLMSTASTKVPAXXTSPVR

SEQ ID NO: 61324 - protein, 36 aa, Artificial Sequence; identical to SEQ ID NO: 31789
  GFR-binding peptide
  MOD_RES (2)..(36): Xaa is C or S
  MOD_RES (14)..(15)..(16)..(17)..(18): Xaa is A or G
  MOD_RES (19)..(20)..(21)..(22): Xaa is A or G or is absent

SEQ ID NO: 61325 - protein, 36 aa, Artificial Sequence
  GFR-binding peptide
  MOD_RES (2)..(4)..(36): Xaa is C or S
RXGXAEVVMDRHKRLVVNNAADYYLISTASLRAPVX

SEQ ID NO: 61326 - protein, 38 aa, Artificial Sequence; identical to SEQ ID NO: 5710
  GFR-binding peptide
  MOD_RES (2)..(34)..(35): Xaa is C or S

SEQ ID NO: 61327 - protein, 38 aa, Artificial Sequence; identical to SEQ ID NO: 26835
  GFR-binding peptide
  MOD_RES (1)..(3)..(37)..(38): Xaa is C or S
  MOD_RES (15)..(16)..(17)..(18)..(19): Xaa is A or G
  MOD_RES (20)..(21)..(22)..(23): Xaa is A or G or is absent

SEQ ID NO: 61328 - protein, 37 aa, Artificial Sequence; identical to SEQ ID NO: 26836
  GFR-binding peptide
  MOD_RES (31)..(32): Xaa is C or S

SEQ ID NO: 61329 - protein, 37 aa, Artificial Sequence; identical to SEQ ID NO: 5715
  GFR-binding peptide
  MOD_RES (1)..(33)..(34): Xaa is C or S

SEQ ID NO: 61330 - protein, 37 aa, Artificial Sequence; identical to SEQ ID NO: 26840
  GFR-binding peptide
  MOD_RES (2)..(4)..(37): Xaa is C or S

SEQ ID NO: 61331 - protein, 36 aa, Artificial Sequence; identical to SEQ ID NO: 5716
  GFR-binding peptide
  MOD_RES (1)..(3)..(35)..(36): Xaa is C or S

SEQ ID NO: 61332 - protein, 35 aa, Artificial Sequence
  GFR-binding peptide
  MOD_RES (1)..(33)..(34): Xaa is C or S
XSEVTMNRYKKLVVNKNEDFYLISIANMKEPVXXP

SEQ ID NO: 61333 - protein, 38 aa, Artificial Sequence
  GFR-binding peptide
  MOD_RES (2)..(34)..(35): Xaa is C or S
AXSEVTMNPIKGYVVNKNEDFYLINIPSMKEPVXXPEP

SEQ ID NO: 61334 - protein, 43 aa, Artificial Sequence
  GFR-binding peptide
  MOD_RES (2)..(4)..(38)..(39): Xaa is C or S
  MOD_RES (16)..(17)..(18)..(19)..(20): Xaa is A or G
  MOD_RES (21)..(22)..(23)..(24): Xaa is A or G or is absent
RXAXSEVTMNRYKKLXXXXXXXXXFYLISIANMKEPVXXPEPI

SEQ ID NO: 61335 - protein, 38 aa, Artificial Sequence; identical to SEQ ID NO: 5721
  GFR-binding peptide
  MOD_RES (1)..(35)..(36): Xaa is C or S
  MOD_RES (13)..(14)..(15)..(16)..(17): Xaa is A or G
  MOD_RES (18)..(19)..(20)..(21): Xaa is A or G or is absent

SEQ ID NO: 61336 - protein, 44 aa, Artificial Sequence; identical to SEQ ID NO: 26848
  GFR-binding peptide
  MOD_RES (2)..(4)..(38)..(39): Xaa is C or S
  MOD_RES (16)..(17)..(18)..(19)..(20): Xaa is A or G
  MOD_RES (21)..(22)..(23)..(24): Xaa is A or G or is absent

SEQ ID NO: 61337 - protein, 37 aa, Artificial Sequence; identical to SEQ ID NO: 5723
  GFR-binding peptide
  MOD_RES (2)..(4): Xaa is C or S
  MOD_RES (16)..(17)..(18)..(19)..(20): Xaa is A or G
  MOD_RES (21)..(22)..(23)..(24): Xaa is A or G or is absent

SEQ ID NO: 61338 - protein, 36 aa, Artificial Sequence; identical to SEQ ID NO: 26849
  GFR-binding peptide
  MOD_RES (32)..(33): Xaa is C or S

SEQ ID NO: 61339 - protein, 33 aa, Artificial Sequence; identical to SEQ ID NO: 31802
  GFR-binding peptide
  MOD_RES (32)..(33): Xaa is C or S

SEQ ID NO: 61340 - protein, 36 aa, Artificial Sequence
  GFR-binding peptide
  MOD_RES (33)..(34): Xaa is C or S
  MOD_RES (11)..(12)..(13)..(14)..(15): Xaa is A or G
  MOD_RES (16)..(17)..(18)..(19): Xaa is A or G or is absent
EEVIMYHYKLXXXXXXXXXKYLMSIPSTKVPAXXTS

SEQ ID NO: 61341 - protein, 39 aa, Artificial Sequence; identical to SEQ ID NO: 26852
  GFR-binding peptide
  MOD_RES (2)..(4)..(38)..(39): Xaa is C or S
  MOD_RES (16)..(17)..(18)..(19)..(20): Xaa is A or G
  MOD_RES (21)..(22)..(23)..(24): Xaa is A or G or is absent

SEQ ID NO: 61342 - protein, 43 aa, Artificial Sequence
  GFR-binding peptide
  MOD_RES (1)..(3)..(37)..(38): Xaa is C or S
  MOD_RES (15)..(16)..(17)..(18)..(19): Xaa is A or G
  MOD_RES (20)..(21)..(22)..(23): Xaa is A or G or is absent
XAXSEVTMNYHYKLXXXXXXXXXKYLISIPSMKEPVXXPEPIG

SEQ ID NO: 61343 - protein, 39 aa, Artificial Sequence; identical to SEQ ID NO: 5730
  GFR-binding peptide
  MOD_RES (33)..(34): Xaa is C or S
  MOD_RES (11)..(12)..(13)..(14)..(15): Xaa is A or G
  MOD_RES (16)..(17)..(18)..(19): Xaa is A or G or is absent

SEQ ID NO: 61344 - protein, 34 aa, Artificial Sequence; identical to SEQ ID NO: 31814
  GFR-binding peptide
  MOD_RES (1)..(3): Xaa is C or S

SEQ ID NO: 61345 - protein, 33 aa, Artificial Sequence; identical to SEQ ID NO: 31820
  GFR-binding peptide
  MOD_RES (12)..(13)..(14)..(15)..(16): Xaa is A or G
  MOD_RES (17)..(18)..(19)..(20): Xaa is A or G or is absent

SEQ ID NO: 61346 - protein, 41 aa, Artificial Sequence; identical to SEQ ID NO: 5731
  GFR-binding peptide
  MOD_RES (1)..(3)..(35)..(36): Xaa is C or S

SEQ ID NO: 61347 - protein, 39 aa, Artificial Sequence; identical to SEQ ID NO: 5733
  GFR-binding peptide
  MOD_RES (2)..(4)..(35)..(36): Xaa is C or S

SEQ ID NO: 61348 - protein, 42 aa, Artificial Sequence; identical to SEQ ID NO: 5735
  GFR-binding peptide
  MOD_RES (2)..(4)..(38)..(39): Xaa is C or S
  MOD_RES (16)..(17)..(18)..(19)..(20): Xaa is A or G
  MOD_RES (21)..(22)..(23)..(24): Xaa is A or G or is absent

SEQ ID NO: 61349 - protein, 33 aa, Artificial Sequence; identical to SEQ ID NO: 5736
  GFR-binding peptide
  MOD_RES (2)..(2): Xaa is C or S

SEQ ID NO: 61350 - protein, 37 aa, Artificial Sequence; identical to SEQ ID NO: 56781
  GFR-binding peptide
  MOD_RES (33)..(34): Xaa is C or S
  MOD_RES (11)..(12)..(13)..(14)..(15): Xaa is A or G
  MOD_RES (16)..(17)..(18)..(19): Xaa is A or G or is absent

SEQ ID NO: 61351 - protein, 39 aa, Artificial Sequence
  GFR-binding peptide
  MOD_RES (1)..(34)..(35): Xaa is C or S
  MOD_RES (12)..(13)..(14)..(15)..(16): Xaa is A or G
  MOD_RES (17)..(18)..(19)..(20): Xaa is A or G or is absent
XEEVIMRHKRLXXXXXXXXXYYLMSTASTKVPAXXTSPV

SEQ ID NO: 61352 - protein, 39 aa, Artificial Sequence; identical to SEQ ID NO: 26871
  GFR-binding peptide
  MOD_RES (2)..(4)..(36)..(37): Xaa is C or S

SEQ ID NO: 61353 - protein, 37 aa, Artificial Sequence
  GFR-binding peptide
  MOD_RES (31)..(32): Xaa is C or S
EVVMDEYKFKVVNNASDLYLISIPELRTPVXXTPPTS

SEQ ID NO: 61354 - protein, 37 aa, Artificial Sequence
  GFR-binding peptide
  MOD_RES (1)..(3)..(37): Xaa is C or S
  MOD_RES (15)..(16)..(17)..(18)..(19): Xaa is A or G
  MOD_RES (20)..(21)..(22)..(23): Xaa is A or G or is absent
XGXRDVVMGYHYKLXXXXXXXXXKYLMSIPSMKTPTX

SEQ ID NO: 61355 - protein, 35 aa, Artificial Sequence; identical to SEQ ID NO: 5744
  GFR-binding peptide
  MOD_RES (33)..(34): Xaa is C or S
  MOD_RES (11)..(12)..(13)..(14)..(15): Xaa is A or G
  MOD_RES (16)..(17)..(18)..(19): Xaa is A or G or is absent

SEQ ID NO: 61356 - protein, 33 aa, Artificial Sequence; identical to SEQ ID NO: 31841
  GFR-binding peptide
  MOD_RES (2)..(2): Xaa is C or S

SEQ ID NO: 61357 - protein, 38 aa, Artificial Sequence
  GFR-binding peptide
  MOD_RES (32)..(33): Xaa is C or S
SEVVMDRHKRLVVNNASDYYLISTASLRTPVXXTPPTS

SEQ ID NO: 61358 - protein, 36 aa, Artificial Sequence
  GFR-binding peptide
  MOD_RES (34)..(35): Xaa is C or S
  MOD_RES (12)..(13)..(14)..(15)..(16): Xaa is A or G
  MOD_RES (17)..(18)..(19)..(20): Xaa is A or G or is absent
SEVVMDRHKRLXXXXXXXXXYYLISTASLRTPVXXT

SEQ ID NO: 61359 - protein, 32 aa, Artificial Sequence; identical to SEQ ID NO: 5746
  GFR-binding peptide
  MOD_RES (11)..(12)..(13)..(14)..(15): Xaa is A or G
  MOD_RES (16)..(17)..(18)..(19): Xaa is A or G or is absent

SEQ ID NO: 61360 - protein, 35 aa, Artificial Sequence; identical to SEQ ID NO: 5748
  GFR-binding peptide
  MOD_RES (31)..(32): Xaa is C or S

SEQ ID NO: 61361 - protein, 37 aa, Artificial Sequence; identical to SEQ ID NO: 5749
  GFR-binding peptide
  MOD_RES (1)..(3)..(35)..(36): Xaa is C or S

SEQ ID NO: 61362 - protein, 42 aa, Artificial Sequence; identical to SEQ ID NO: 26881
  GFR-binding peptide
  MOD_RES (2)..(4)..(37)..(38): Xaa is C or S
  MOD_RES (15)..(16)..(17)..(18)..(19): Xaa is A or G
  MOD_RES (20)..(21)..(22)..(23): Xaa is A or G or is absent

SEQ ID NO: 61363 - protein, 37 aa, Artificial Sequence; identical to SEQ ID NO: 26883
  GFR-binding peptide
  MOD_RES (32)..(33): Xaa is C or S

SEQ ID NO: 61364 - protein, 40 aa, Artificial Sequence; identical to SEQ ID NO: 5751
  GFR-binding peptide
  MOD_RES (1)..(3)..(37)..(38): Xaa is C or S
  MOD_RES (15)..(16)..(17)..(18)..(19): Xaa is A or G
  MOD_RES (20)..(21)..(22)..(23): Xaa is A or G or is absent

SEQ ID NO: 61365 - protein, 38 aa, Artificial Sequence; identical to SEQ ID NO: 5752
  GFR-binding peptide
  MOD_RES (2)..(35)..(36): Xaa is C or S
  MOD_RES (13)..(14)..(15)..(16)..(17): Xaa is A or G
  MOD_RES (18)..(19)..(20)..(21): Xaa is A or G or is absent

SEQ ID NO: 61366 - protein, 38 aa, Artificial Sequence; identical to SEQ ID NO: 5753
  GFR-binding peptide
  MOD_RES (2)..(4)..(37)..(38): Xaa is C or S
  MOD_RES (15)..(16)..(17)..(18)..(19): Xaa is A or G
  MOD_RES (20)..(21)..(22)..(23): Xaa is A or G or is absent

SEQ ID NO: 61367 - protein, 32 aa, Artificial Sequence
  GFR-binding peptide
  MOD_RES (1)..(1): Xaa is C or S
XSEVVMDEYKFKVVNNASDLYLISIPELRTPV

SEQ ID NO: 61368 - protein, 34 aa, Artificial Sequence; identical to SEQ ID NO: 5755
  GFR-binding peptide
  MOD_RES (34)..(34): Xaa is C or S
  MOD_RES (12)..(13)..(14)..(15)..(16): Xaa is A or G
  MOD_RES (17)..(18)..(19)..(20): Xaa is A or G or is absent

SEQ ID NO: 61369 - protein, 40 aa, Artificial Sequence
  GFR-binding peptide
  MOD_RES (1)..(3)..(35)..(36): Xaa is C or S
XGXSEVVMDRHKRLVVNNASDYYLISTASLRTPVXXTPPT

SEQ ID NO: 61370 - protein, 33 aa, Artificial Sequence; identical to SEQ ID NO: 26887
  GFR-binding peptide
  MOD_RES (12)..(13)..(14)..(15)..(16): Xaa is A or G
  MOD_RES (17)..(18)..(19)..(20): Xaa is A or G or is absent

SEQ ID NO: 61371 - protein, 37 aa, Artificial Sequence; identical to SEQ ID NO: 5758
  GFR-binding peptide
  MOD_RES (1)..(3): Xaa is C or S
  MOD_RES (16)..(17)..(18)..(19)..(20): Xaa is A or G
  MOD_RES (21)..(22)..(23)..(24): Xaa is A or G or is absent

SEQ ID NO: 61372 - protein, 35 aa, Artificial Sequence
  GFR-binding peptide
  MOD_RES (2)..(33)..(34): Xaa is C or S
GXEEVIMRHKRLLLVRGNDYYLMSTASTKVPAXXT

SEQ ID NO: 61373 - protein, 39 aa, Artificial Sequence
  GFR-binding peptide
  MOD_RES (1)..(35)..(36): Xaa is C or S
  MOD_RES (13)..(14)..(15)..(16)..(17): Xaa is A or G
  MOD_RES (18)..(19)..(20)..(21): Xaa is A or G or is absent
XSEVTMNYHYKLXXXXXXXXXKYLISIPSMKEPVXXPEP

SEQ ID NO: 61374 - protein, 42 aa, Artificial Sequence; identical to SEQ ID NO: 5761
  GFR-binding peptide
  MOD_RES (1)..(3)..(37)..(38): Xaa is C or S
  MOD_RES (15)..(16)..(17)..(18)..(19): Xaa is A or G
  MOD_RES (20)..(21)..(22)..(23): Xaa is A or G or is absent

SEQ ID NO: 61375 - protein, 36 aa, Artificial Sequence; identical to SEQ ID NO: 26893
  GFR-binding peptide
  MOD_RES (1)..(35)..(36): Xaa is C or S
  MOD_RES (13)..(14)..(15)..(16)..(17): Xaa is A or G
  MOD_RES (18)..(19)..(20)..(21): Xaa is A or G or is absent

SEQ ID NO: 61376 - protein, 31 aa, Artificial Sequence
  GFR-binding peptide
  MOD_RES (31)..(31): Xaa is C or S
DVVMGEYKFKIIQQKDNLYLMSIPEMKTPTX

SEQ ID NO: 61377 - protein, 40 aa, Artificial Sequence
  GFR-binding peptide
  MOD_RES (2)..(36)..(37): Xaa is C or S
  MOD_RES (14)..(15)..(16)..(17)..(18): Xaa is A or G
  MOD_RES (19)..(20)..(21)..(22): Xaa is A or G or is absent
GXSEVVMDRHKRLXXXXXXXXXYYLISTASLRTPVXXTPP

SEQ ID NO: 61378 - protein, 39 aa, Artificial Sequence; identical to SEQ ID NO: 26899
  GFR-binding peptide
  MOD_RES (33)..(34): Xaa is C or S
  MOD_RES (11)..(12)..(13)..(14)..(15): Xaa is A or G
  MOD_RES (16)..(17)..(18)..(19): Xaa is A or G or is absent

SEQ ID NO: 61379 - protein, 40 aa, Artificial Sequence; identical to SEQ ID NO: 56808
  GFR-binding peptide
  MOD_RES (2)..(34)..(35): Xaa is C or S

SEQ ID NO: 61380 - protein, 34 aa, Artificial Sequence; identical to SEQ ID NO: 26900
  GFR-binding peptide
  MOD_RES (1)..(33)..(34): Xaa is C or S

SEQ ID NO: 61381 - protein, 44 aa, Artificial Sequence
  GFR-binding peptide
  MOD_RES (2)..(4)..(38)..(39): Xaa is C or S
  MOD_RES (16)..(17)..(18)..(19)..(20): Xaa is A or G
  MOD_RES (21)..(22)..(23)..(24): Xaa is A or G or is absent
RXGXAEVVMDRHKRLXXXXXXXXXYYLISTASLRAPVXXSAPAA

SEQ ID NO: 61382 - protein, 40 aa, Artificial Sequence; identical to SEQ ID NO: 5767
  GFR-binding peptide
  MOD_RES (34)..(34): Xaa is C or S
  MOD_RES (12)..(13)..(14)..(15)..(16): Xaa is A or G
  MOD_RES (17)..(18)..(19)..(20): Xaa is A or G or is absent

SEQ ID NO: 61383 - protein, 42 aa, Artificial Sequence; identical to SEQ ID NO: 26904
  GFR-binding peptide
  MOD_RES (2)..(4)..(36)..(37): Xaa is C or S

SEQ ID NO: 61384 - protein, 36 aa, Artificial Sequence
  GFR-binding peptide
  MOD_RES (1)..(3): Xaa is C or S
  MOD_RES (15)..(16)..(17)..(18)..(19): Xaa is A or G
  MOD_RES (20)..(21)..(22)..(23): Xaa is A or G or is absent
XGXAEVVMDRHKRLXXXXXXXXXYYLISTASLRAPV

SEQ ID NO: 61385 - protein, 32 aa, Artificial Sequence
  GFR-binding peptide
  MOD_RES (2)..(2): Xaa is C or S
KXSKVVMPIKGYVKPTRGVFYLINIPSLDQPV

SEQ ID NO: 61386 - protein, 37 aa, Artificial Sequence; identical to SEQ ID NO: 5771
  GFR-binding peptide
  MOD_RES (2)..(33)..(34): Xaa is C or S

SEQ ID NO: 61387 - protein, 35 aa, Artificial Sequence; identical to SEQ ID NO: 56817
  GFR-binding peptide
  MOD_RES (34)..(35): Xaa is C or S
  MOD_RES (12)..(13)..(14)..(15)..(16): Xaa is A or G
  MOD_RES (17)..(18)..(19)..(20): Xaa is A or G or is absent

SEQ ID NO: 61388 - protein, 30 aa, Artificial Sequence
  GFR-binding peptide
EEVIMRHKRLLLVRGNDYYLMSTASTKVPA

SEQ ID NO: 61389 - protein, 39 aa, Artificial Sequence; identical to SEQ ID NO: 5776
  GFR-binding peptide
  MOD_RES (2)..(4)..(37)..(38): Xaa is C or S

SEQ ID NO: 61390 - protein, 35 aa, Artificial Sequence; identical to SEQ ID NO: 31879
  GFR-binding peptide
  MOD_RES (33)..(34): Xaa is C or S
  MOD_RES (11)..(12)..(13)..(14)..(15): Xaa is A or G
  MOD_RES (16)..(17)..(18)..(19): Xaa is A or G or is absent

SEQ ID NO: 61391 - protein, 36 aa, Artificial Sequence; identical to SEQ ID NO: 31884
  GFR-binding peptide
  MOD_RES (1)..(35)..(36): Xaa is C or S
  MOD_RES (13)..(14)..(15)..(16)..(17): Xaa is A or G
  MOD_RES (18)..(19)..(20)..(21): Xaa is A or G or is absent

SEQ ID NO: 61392 - protein, 36 aa, Artificial Sequence; identical to SEQ ID NO: 5782
  GFR-binding peptide
  MOD_RES (2)..(36): Xaa is C or S
  MOD_RES (14)..(15)..(16)..(17)..(18): Xaa is A or G
  MOD_RES (19)..(20)..(21)..(22): Xaa is A or G or is absent

SEQ ID NO: 61393 - protein, 33 aa, Artificial Sequence
  GFR-binding peptide
  MOD_RES (12)..(13)..(14)..(15)..(16): Xaa is A or G
  MOD_RES (17)..(18)..(19)..(20): Xaa is A or G or is absent
AEVVMDRHKRLXXXXXXXXXYYLISTASLRAPV

SEQ ID NO: 61394 - protein, 37 aa, Artificial Sequence
  GFR-binding peptide
  MOD_RES (31)..(32): Xaa is C or S
DVVMGRHKRLIIQQKDNYYLMSTASMKTPTXXPGASG

SEQ ID NO: 61395 - protein, 34 aa, Artificial Sequence; identical to SEQ ID NO: 26925
  GFR-binding peptide
  MOD_RES (2)..(2): Xaa is C or S

SEQ ID NO: 61396 - protein, 37 aa, Artificial Sequence; identical to SEQ ID NO: 5790
  GFR-binding peptide
  MOD_RES (33)..(34): Xaa is C or S

SEQ ID NO: 61397 - protein, 39 aa, Artificial Sequence; identical to SEQ ID NO: 5791
  GFR-binding peptide
  MOD_RES (2)..(4)..(36)..(37): Xaa is C or S

SEQ ID NO: 61398 - protein, 38 aa, Artificial Sequence
  GFR-binding peptide
  MOD_RES (2)..(4)..(38): Xaa is C or S
  MOD_RES (16)..(17)..(18)..(19)..(20): Xaa is A or G
  MOD_RES (21)..(22)..(23)..(24): Xaa is A or G or is absent
RXGXAEVVMDRHKRLXXXXXXXXXYYLISTASLRAPVX

SEQ ID NO: 61399 - protein, 39 aa, Artificial Sequence; identical to SEQ ID NO: 5794
  GFR-binding peptide
  MOD_RES (33)..(34): Xaa is C or S

SEQ ID NO: 61400 - protein, 34 aa, Artificial Sequence
  GFR-binding peptide
  MOD_RES (1)..(3): Xaa is C or S
XGXRDVVMGEYKFKIIQQKDNLYLMSIPEMKTPT

SEQ ID NO: 61401 - protein, 35 aa, Artificial Sequence; identical to SEQ ID NO: 26931
  GFR-binding peptide
  MOD_RES (31)..(32): Xaa is C or S

SEQ ID NO: 61402 - protein, 40 aa, Artificial Sequence; identical to SEQ ID NO: 31900
  GFR-binding peptide
  MOD_RES (1)..(3)..(37)..(38): Xaa is C or S
  MOD_RES (15)..(16)..(17)..(18)..(19): Xaa is A or G
  MOD_RES (20)..(21)..(22)..(23): Xaa is A or G or is absent

SEQ ID NO: 61403 - protein, 37 aa, Artificial Sequence; identical to SEQ ID NO: 26933
  GFR-binding peptide
  MOD_RES (34)..(35): Xaa is C or S
  MOD_RES (12)..(13)..(14)..(15)..(16): Xaa is A or G
  MOD_RES (17)..(18)..(19)..(20): Xaa is A or G or is absent

SEQ ID NO: 61404 - protein, 39 aa, Artificial Sequence; identical to SEQ ID NO: 5797
  GFR-binding peptide
  MOD_RES (1)..(3)..(37)..(38): Xaa is C or S
  MOD_RES (15)..(16)..(17)..(18)..(19): Xaa is A or G
  MOD_RES (20)..(21)..(22)..(23): Xaa is A or G or is absent

SEQ ID NO: 61405 - protein, 38 aa, Artificial Sequence; identical to SEQ ID NO: 31904
  GFR-binding peptide
  MOD_RES (2)..(4)..(38): Xaa is C or S
  MOD_RES (16)..(17)..(18)..(19)..(20): Xaa is A or G
  MOD_RES (21)..(22)..(23)..(24): Xaa is A or G or is absent

SEQ ID NO: 61406 - protein, 36 aa, Artificial Sequence; identical to SEQ ID NO: 31907
  GFR-binding peptide
  MOD_RES (2)..(34)..(35): Xaa is C or S

SEQ ID NO: 61407 - protein, 35 aa, Artificial Sequence
  GFR-binding peptide
  MOD_RES (1)..(35): Xaa is C or S
  MOD_RES (13)..(14)..(15)..(16)..(17): Xaa is A or G
  MOD_RES (18)..(19)..(20)..(21): Xaa is A or G or is absent
XAEVVMDRHKRLXXXXXXXXXYYLISTASLRAPVX

SEQ ID NO: 61408 - protein, 37 aa, Artificial Sequence; identical to SEQ ID NO: 5800
  GFR-binding peptide
  MOD_RES (32)..(33): Xaa is C or S

SEQ ID NO: 61409 - protein, 39 aa, Artificial Sequence; identical to SEQ ID NO: 56844
  GFR-binding peptide
  MOD_RES (2)..(33)..(34): Xaa is C or S

SEQ ID NO: 61410 - protein, 34 aa, Artificial Sequence; identical to SEQ ID NO: 26937
  GFR-binding peptide
  MOD_RES (31)..(32): Xaa is C or S

SEQ ID NO: 61411 - protein, 43 aa, Artificial Sequence; identical to SEQ ID NO: 26939
  GFR-binding peptide
  MOD_RES (1)..(3)..(37)..(38): Xaa is C or S
  MOD_RES (15)..(16)..(17)..(18)..(19): Xaa is A or G
  MOD_RES (20)..(21)..(22)..(23): Xaa is A or G or is absent

SEQ ID NO: 61412 - protein, 40 aa, Artificial Sequence; identical to SEQ ID NO: 5807
  GFR-binding peptide
  MOD_RES (1)..(3)..(37)..(38): Xaa is C or S
  MOD_RES (15)..(16)..(17)..(18)..(19): Xaa is A or G
  MOD_RES (20)..(21)..(22)..(23): Xaa is A or G or is absent

SEQ ID NO: 61413 - protein, 39 aa, Artificial Sequence; identical to SEQ ID NO: 56854
  GFR-binding peptide
  MOD_RES (33)..(34): Xaa is C or S
  MOD_RES (11)..(12)..(13)..(14)..(15): Xaa is A or G
  MOD_RES (16)..(17)..(18)..(19): Xaa is A or G or is absent

SEQ ID NO: 61414 - protein, 31 aa, Artificial Sequence; identical to SEQ ID NO: 31915
  GFR-binding peptide
  MOD_RES (31)..(31): Xaa is C or S

SEQ ID NO: 61415 - protein, 35 aa, Artificial Sequence; identical to SEQ ID NO: 31916
  GFR-binding peptide
  MOD_RES (2)..(2): Xaa is C or S
  MOD_RES (14)..(15)..(16)..(17)..(18): Xaa is A or G
  MOD_RES (19)..(20)..(21)..(22): Xaa is A or G or is absent

SEQ ID NO: 61416 - protein, 37 aa, Artificial Sequence; identical to SEQ ID NO: 31917
  GFR-binding peptide
  MOD_RES (1)..(35)..(36): Xaa is C or S
  MOD_RES (13)..(14)..(15)..(16)..(17): Xaa is A or G
  MOD_RES (18)..(19)..(20)..(21): Xaa is A or G or is absent

SEQ ID NO: 61417 - protein, 40 aa, Artificial Sequence; identical to SEQ ID NO: 26943
  GFR-binding peptide
  MOD_RES (1)..(3)..(37)..(38): Xaa is C or S
  MOD_RES (15)..(16)..(17)..(18)..(19): Xaa is A or G
  MOD_RES (20)..(21)..(22)..(23): Xaa is A or G or is absent

SEQ ID NO: 61418 - protein, 30 aa, Artificial Sequence; identical to SEQ ID NO: 5814
  GFR-binding peptide

SEQ ID NO: 61419 - protein, 41 aa, Artificial Sequence; identical to SEQ ID NO: 5815
  GFR-binding peptide
  MOD_RES (2)..(4)..(38)..(39): Xaa is C or S
  MOD_RES (16)..(17)..(18)..(19)..(20): Xaa is A or G
  MOD_RES (21)..(22)..(23)..(24): Xaa is A or G or is absent

SEQ ID NO: 61420 - protein, 41 aa, Artificial Sequence
  GFR-binding peptide
  MOD_RES (2)..(4)..(38)..(39): Xaa is C or S
  MOD_RES (16)..(17)..(18)..(19)..(20): Xaa is A or G
  MOD_RES (21)..(22)..(23)..(24): Xaa is A or G or is absent
SXGXRDVVMGYHYKLXXXXXXXXXKYLMSIPSMKTPTXXPG

SEQ ID NO: 61421 - protein, 38 aa, Artificial Sequence; identical to SEQ ID NO: 5817
  GFR-binding peptide
  MOD_RES (32)..(33): Xaa is C or S

SEQ ID NO: 61422 - protein, 31 aa, Artificial Sequence; identical to SEQ ID NO: 5819
  GFR-binding peptide

SEQ ID NO: 61423 - protein, 40 aa, Artificial Sequence; identical to SEQ ID NO: 31927
  GFR-binding peptide
  MOD_RES (2)..(4)..(36)..(37): Xaa is C or S

SEQ ID NO: 61424 - protein, 36 aa, Artificial Sequence
  GFR-binding peptide
  MOD_RES (1)..(35)..(36): Xaa is C or S
  MOD_RES (13)..(14)..(15)..(16)..(17): Xaa is A or G
  MOD_RES (18)..(19)..(20)..(21): Xaa is A or G or is absent
XSEVVMDRHKRLXXXXXXXXXYYLISTASLRTPVXX

SEQ ID NO: 61425 - protein, 34 aa, Artificial Sequence
  GFR-binding peptide
  MOD_RES (2)..(4): Xaa is C or S
LXGXEEVIMRHKRLLLVRGNDYYLMSTASTKVPA

SEQ ID NO: 61426 - protein, 38 aa, Artificial Sequence; identical to SEQ ID NO: 5827
  GFR-binding peptide
  MOD_RES (33)..(34): Xaa is C or S
  MOD_RES (11)..(12)..(13)..(14)..(15): Xaa is A or G
  MOD_RES (16)..(17)..(18)..(19): Xaa is A or G or is absent

SEQ ID NO: 61427 - protein, 40 aa, Artificial Sequence; identical to SEQ ID NO: 5828
  GFR-binding peptide
  MOD_RES (1)..(35): Xaa is C or S
  MOD_RES (13)..(14)..(15)..(16)..(17): Xaa is A or G
  MOD_RES (18)..(19)..(20)..(21): Xaa is A or G or is absent

SEQ ID NO: 61428 - protein, 38 aa, Artificial Sequence; identical to SEQ ID NO: 5830
  GFR-binding peptide
  MOD_RES (2)..(4)..(36)..(37): Xaa is C or S

SEQ ID NO: 61429 - protein, 36 aa, Artificial Sequence; identical to SEQ ID NO: 5833
  GFR-binding peptide
  MOD_RES (33)..(34): Xaa is C or S
  MOD_RES (11)..(12)..(13)..(14)..(15): Xaa is A or G
  MOD_RES (16)..(17)..(18)..(19): Xaa is A or G or is absent

SEQ ID NO: 61430 - protein, 41 aa, Artificial Sequence; identical to SEQ ID NO: 26962
  GFR-binding peptide
  MOD_RES (1)..(3)..(35)..(36): Xaa is C or S

SEQ ID NO: 61431 - protein, 39 aa, Artificial Sequence; identical to SEQ ID NO: 5837
  GFR-binding peptide
  MOD_RES (1)..(33): Xaa is C or S

SEQ ID NO: 61432 - protein, 39 aa, Artificial Sequence; identical to SEQ ID NO: 5838
  GFR-binding peptide
  MOD_RES (2)..(4)..(36)..(37): Xaa is C or S

SEQ ID NO: 61433 - protein, 37 aa, Artificial Sequence
  GFR-binding peptide
  MOD_RES (2)..(34)..(35): Xaa is C or S
GXRDVVMGYHYKLIIQQKDNKYLMSIPSMKTPTXXPG

SEQ ID NO: 61434 - protein, 41 aa, Artificial Sequence
  GFR-binding peptide
  MOD_RES (1)..(35)..(36): Xaa is C or S
  MOD_RES (13)..(14)..(15)..(16)..(17): Xaa is A or G
  MOD_RES (18)..(19)..(20)..(21): Xaa is A or G or is absent
XSEVVMDEYKFKXXXXXXXXXLYLISIPELRTPVXXTPPTS

SEQ ID NO: 61435 - protein, 38 aa, Artificial Sequence; identical to SEQ ID NO: 26966
  GFR-binding peptide
  MOD_RES (1)..(3)..(37)..(38): Xaa is C or S
  MOD_RES (15)..(16)..(17)..(18)..(19): Xaa is A or G
  MOD_RES (20)..(21)..(22)..(23): Xaa is A or G or is absent

SEQ ID NO: 61436 - protein, 36 aa, Artificial Sequence; identical to SEQ ID NO: 5841
  GFR-binding peptide
  MOD_RES (2)..(33)..(34): Xaa is C or S

SEQ ID NO: 61437 - protein, 35 aa, Artificial Sequence; identical to SEQ ID NO: 31946
  GFR-binding peptide
  MOD_RES (1)..(35): Xaa is C or S
  MOD_RES (13)..(14)..(15)..(16)..(17): Xaa is A or G
  MOD_RES (18)..(19)..(20)..(21): Xaa is A or G or is absent

SEQ ID NO: 61438 - protein, 39 aa, Artificial Sequence; identical to SEQ ID NO: 31950
  GFR-binding peptide
  MOD_RES (1)..(3)..(35)..(36): Xaa is C or S

SEQ ID NO: 61439 - protein, 34 aa, Artificial Sequence; identical to SEQ ID NO: 31951
  GFR-binding peptide
  MOD_RES (2)..(33)..(34): Xaa is C or S

SEQ ID NO: 61440 - protein, 34 aa, Artificial Sequence; identical to SEQ ID NO: 5843
  GFR-binding peptide
  MOD_RES (32)..(33): Xaa is C or S

SEQ ID NO: 61441 - protein, 40 aa, Artificial Sequence; identical to SEQ ID NO: 5845
  GFR-binding peptide
  MOD_RES (1)..(36)..(37): Xaa is C or S
  MOD_RES (14)..(15)..(16)..(17)..(18): Xaa is A or G
  MOD_RES (19)..(20)..(21)..(22): Xaa is A or G or is absent

SEQ ID NO: 61442 - protein, 39 aa, Artificial Sequence
  GFR-binding peptide
  MOD_RES (2)..(4)..(38)..(39): Xaa is C or S
  MOD_RES (16)..(17)..(18)..(19)..(20): Xaa is A or G
  MOD_RES (21)..(22)..(23)..(24): Xaa is A or G or is absent
RXAXSEVTMNPIKGYXXXXXXXXXFYLINIPSMKEPVXX

SEQ ID NO: 61443 - protein, 42 aa, Artificial Sequence; identical to SEQ ID NO: 26976
  GFR-binding peptide
  MOD_RES (2)..(4)..(38)..(39): Xaa is C or S
  MOD_RES (16)..(17)..(18)..(19)..(20): Xaa is A or G
  MOD_RES (21)..(22)..(23)..(24): Xaa is A or G or is absent

SEQ ID NO: 61444 - protein, 38 aa, Artificial Sequence; identical to SEQ ID NO: 5852
  GFR-binding peptide
  MOD_RES (33)..(34): Xaa is C or S
  MOD_RES (11)..(12)..(13)..(14)..(15): Xaa is A or G
  MOD_RES (16)..(17)..(18)..(19): Xaa is A or G or is absent

SEQ ID NO: 61445 - protein, 37 aa, Artificial Sequence; identical to SEQ ID NO: 31962
  GFR-binding peptide
  MOD_RES (33)..(34): Xaa is C or S
  MOD_RES (11)..(12)..(13)..(14)..(15): Xaa is A or G
  MOD_RES (16)..(17)..(18)..(19): Xaa is A or G or is absent

SEQ ID NO: 61446 - protein, 38 aa, Artificial Sequence
  GFR-binding peptide
  MOD_RES (1)..(3)..(37)..(38): Xaa is C or S
  MOD_RES (15)..(16)..(17)..(18)..(19): Xaa is A or G
  MOD_RES (20)..(21)..(22)..(23): Xaa is A or G or is absent
XAXSEVTMNYHYKLXXXXXXXXXKYLISIPSMKEPVXX

SEQ ID NO: 61447 - protein, 35 aa, Artificial Sequence; identical to SEQ ID NO: 5859
  GFR-binding peptide
  MOD_RES (2)..(34)..(35): Xaa is C or S

SEQ ID NO: 61448 - protein, 37 aa, Artificial Sequence; identical to SEQ ID NO: 31966
  GFR-binding peptide
  MOD_RES (2)..(34)..(35): Xaa is C or S

SEQ ID NO: 61449 - protein, 35 aa, Artificial Sequence; identical to SEQ ID NO: 26988
  GFR-binding peptide
  MOD_RES (1)..(3)..(34)..(35): Xaa is C or S

SEQ ID NO: 61450 - protein, 41 aa, Artificial Sequence; identical to SEQ ID NO: 5860
  GFR-binding peptide
  MOD_RES (2)..(4)..(38)..(39): Xaa is C or S
  MOD_RES (16)..(17)..(18)..(19)..(20): Xaa is A or G
  MOD_RES (21)..(22)..(23)..(24): Xaa is A or G or is absent

SEQ ID NO: 61451 - protein, 36 aa, Artificial Sequence; identical to SEQ ID NO: 5866
  GFR-binding peptide
  MOD_RES (2)..(35)..(36): Xaa is C or S
  MOD_RES (13)..(14)..(15)..(16)..(17): Xaa is A or G
  MOD_RES (18)..(19)..(20)..(21): Xaa is A or G or is absent

SEQ ID NO: 61452 - protein, 38 aa, Artificial Sequence
  GFR-binding peptide
  MOD_RES (33)..(34): Xaa is C or S
  MOD_RES (11)..(12)..(13)..(14)..(15): Xaa is A or G
  MOD_RES (16)..(17)..(18)..(19): Xaa is A or G or is absent
EVTMNRHKRLXXXXXXXXXYYLISTASMKEPVXXPEPI

SEQ ID NO: 61453 - protein, 40 aa, Artificial Sequence; identical to SEQ ID NO: 26995
  GFR-binding peptide
  MOD_RES (1)..(35)..(36): Xaa is C or S
  MOD_RES (13)..(14)..(15)..(16)..(17): Xaa is A or G
  MOD_RES (18)..(19)..(20)..(21): Xaa is A or G or is absent

SEQ ID NO: 61454 - protein, 35 aa, Artificial Sequence
  GFR-binding peptide
  MOD_RES (32)..(33): Xaa is C or S
ESVAMGRHKRLYTVVGKDYYLISTASLKTPVXXAK

SEQ ID NO: 61455 - protein, 40 aa, Artificial Sequence; identical to SEQ ID NO: 5870
  GFR-binding peptide
  MOD_RES (2)..(34)..(35): Xaa is C or S

SEQ ID NO: 61456 - protein, 38 aa, Artificial Sequence; identical to SEQ ID NO: 31974
  GFR-binding peptide
  MOD_RES (1)..(3)..(37)..(38): Xaa is C or S
  MOD_RES (15)..(16)..(17)..(18)..(19): Xaa is A or G
  MOD_RES (20)..(21)..(22)..(23): Xaa is A or G or is absent

SEQ ID NO: 61457 - protein, 39 aa, Artificial Sequence
  GFR-binding peptide
  MOD_RES (2)..(35)..(36): Xaa is C or S
  MOD_RES (13)..(14)..(15)..(16)..(17): Xaa is A or G
  MOD_RES (18)..(19)..(20)..(21): Xaa is A or G or is absent
KXSRVIMPIKGYXXXXXXXXXFYLINIPSLAQPVXXPAA

SEQ ID NO: 61458 - protein, 36 aa, Artificial Sequence
  GFR-binding peptide
  MOD_RES (1)..(32)..(33): Xaa is C or S
XSKVIMPIKGYIKPTKGIFYLINIPSLDQSVXXPSA

SEQ ID NO: 61459 - protein, 32 aa, Artificial Sequence
  GFR-binding peptide
  MOD_RES (32)..(32): Xaa is C or S
SEVVMDYHYKLVVNNASDKYLISIPSLRTPVX

SEQ ID NO: 61460 - protein, 35 aa, Artificial Sequence; identical to SEQ ID NO: 27002
  GFR-binding peptide
  MOD_RES (1)..(35): Xaa is C or S
  MOD_RES (13)..(14)..(15)..(16)..(17): Xaa is A or G
  MOD_RES (18)..(19)..(20)..(21): Xaa is A or G or is absent

SEQ ID NO: 61461 - protein, 34 aa, Artificial Sequence
  GFR-binding peptide
  MOD_RES (2)..(2): Xaa is C or S
  MOD_RES (13)..(14)..(15)..(16)..(17): Xaa is A or G
  MOD_RES (18)..(19)..(20)..(21): Xaa is A or G or is absent
GXEEVIMEYKFKXXXXXXXXXLYLMSIPETKVPA

SEQ ID NO: 61462 - protein, 39 aa, Artificial Sequence; identical to SEQ ID NO: 5877
  GFR-binding peptide
  MOD_RES (1)..(3)..(38)..(39): Xaa is C or S
  MOD_RES (16)..(17)..(18)..(19)..(20): Xaa is A or G
  MOD_RES (21)..(22)..(23)..(24): Xaa is A or G or is absent

SEQ ID NO: 61463 - protein, 43 aa, Artificial Sequence; identical to SEQ ID NO: 5882
  GFR-binding peptide
  MOD_RES (2)..(4)..(37)..(38): Xaa is C or S
  MOD_RES (15)..(16)..(17)..(18)..(19): Xaa is A or G
  MOD_RES (20)..(21)..(22)..(23): Xaa is A or G or is absent

SEQ ID NO: 61464 - protein, 41 aa, Artificial Sequence; identical to SEQ ID NO: 5883
  GFR-binding peptide
  MOD_RES (2)..(4)..(35)..(36): Xaa is C or S

SEQ ID NO: 61465 - protein, 33 aa, Artificial Sequence
  GFR-binding peptide
  MOD_RES (31)..(32): Xaa is C or S
EEVIMRHKRLLLVRGNDYYLMSTASTKVPAXXT

SEQ ID NO: 61466 - protein, 35 aa, Artificial Sequence; identical to SEQ ID NO: 5885
  GFR-binding peptide
  MOD_RES (2)..(34)..(35): Xaa is C or S

SEQ ID NO: 61467 - protein, 32 aa, Artificial Sequence; identical to SEQ ID NO: 56937
  GFR-binding peptide
  MOD_RES (2)..(2): Xaa is C or S

SEQ ID NO: 61468 - protein, 42 aa, Artificial Sequence; identical to SEQ ID NO: 5887
  GFR-binding peptide
  MOD_RES (2)..(36): Xaa is C or S
  MOD_RES (14)..(15)..(16)..(17)..(18): Xaa is A or G
  MOD_RES (19)..(20)..(21)..(22): Xaa is A or G or is absent

SEQ ID NO: 61469 - protein, 38 aa, Artificial Sequence
  GFR-binding peptide
  MOD_RES (33)..(34): Xaa is C or S
  MOD_RES (11)..(12)..(13)..(14)..(15): Xaa is A or G
  MOD_RES (16)..(17)..(18)..(19): Xaa is A or G or is absent
DVVMGRHKRLXXXXXXXXXYYLMSTASMKTPTXXPGAS

SEQ ID NO: 61470 - protein, 35 aa, Artificial Sequence
  GFR-binding peptide
  MOD_RES (1)..(35): Xaa is C or S
  MOD_RES (13)..(14)..(15)..(16)..(17): Xaa is A or G
  MOD_RES (18)..(19)..(20)..(21): Xaa is A or G or is absent
XRDVVMGRHKRLXXXXXXXXXYYLMSTASMKTPTX

SEQ ID NO: 61471 - protein, 41 aa, Artificial Sequence; identical to SEQ ID NO: 27013
  GFR-binding peptide
  MOD_RES (2)..(35)..(36): Xaa is C or S
  MOD_RES (13)..(14)..(15)..(16)..(17): Xaa is A or G
  MOD_RES (18)..(19)..(20)..(21): Xaa is A or G or is absent

SEQ ID NO: 61472 - protein, 38 aa, Artificial Sequence; identical to SEQ ID NO: 27017
  GFR-binding peptide
  MOD_RES (1)..(33): Xaa is C or S

SEQ ID NO: 61473 - protein, 34 aa, Artificial Sequence; identical to SEQ ID NO: 5897
  GFR-binding peptide
  MOD_RES (2)..(2): Xaa is C or S
  MOD_RES (13)..(14)..(15)..(16)..(17): Xaa is A or G
  MOD_RES (18)..(19)..(20)..(21): Xaa is A or G or is absent

SEQ ID NO: 61474 - protein, 31 aa, Artificial Sequence; identical to SEQ ID NO: 5898
  GFR-binding peptide

SEQ ID NO: 61475 - protein, 40 aa, Artificial Sequence; identical to SEQ ID NO: 5900
  GFR-binding peptide
  MOD_RES (2)..(37)..(38): Xaa is C or S
  MOD_RES (15)..(16)..(17)..(18)..(19): Xaa is A or G
  MOD_RES (20)..(21)..(22)..(23): Xaa is A or G or is absent

SEQ ID NO: 61476 - protein, 37 aa, Artificial Sequence
  GFR-binding peptide
  MOD_RES (34)..(35): Xaa is C or S
  MOD_RES (12)..(13)..(14)..(15)..(16): Xaa is A or G
  MOD_RES (17)..(18)..(19)..(20): Xaa is A or G or is absent
SEVTMNEYKFKXXXXXXXXXLYLISIPEMKEPVXXPE

SEQ ID NO: 61477 - protein, 37 aa, Artificial Sequence; identical to SEQ ID NO: 32002
  GFR-binding peptide
  MOD_RES (1)..(35)..(36): Xaa is C or S
  MOD_RES (13)..(14)..(15)..(16)..(17): Xaa is A or G
  MOD_RES (18)..(19)..(20)..(21): Xaa is A or G or is absent

SEQ ID NO: 61478 - protein, 34 aa, Artificial Sequence; identical to SEQ ID NO: 27023
  GFR-binding peptide
  MOD_RES (1)..(33)..(34): Xaa is C or S

SEQ ID NO: 61479 - protein, 33 aa, Artificial Sequence; identical to SEQ ID NO: 32004
  GFR-binding peptide
  MOD_RES (32)..(32): Xaa is C or S

SEQ ID NO: 61480 - protein, 39 aa, Artificial Sequence; identical to SEQ ID NO: 5904
  GFR-binding peptide
  MOD_RES (2)..(4)..(37)..(38): Xaa is C or S
  MOD_RES (15)..(16)..(17)..(18)..(19): Xaa is A or G
  MOD_RES (20)..(21)..(22)..(23): Xaa is A or G or is absent

SEQ ID NO: 61481 - protein, 36 aa, Artificial Sequence; identical to SEQ ID NO: 5908
  GFR-binding peptide
  MOD_RES (2)..(33)..(34): Xaa is C or S

SEQ ID NO: 61482 - protein, 39 aa, Artificial Sequence; identical to SEQ ID NO: 5911
  GFR-binding peptide
  MOD_RES (2)..(4)..(35)..(36): Xaa is C or S

SEQ ID NO: 61483 - protein, 36 aa, Artificial Sequence; identical to SEQ ID NO: 5913
  GFR-binding peptide
  MOD_RES (34)..(35): Xaa is C or S
  MOD_RES (12)..(13)..(14)..(15)..(16): Xaa is A or G
  MOD_RES (17)..(18)..(19)..(20): Xaa is A or G or is absent

SEQ ID NO: 61484 - protein, 38 aa, Artificial Sequence; identical to SEQ ID NO: 32010
  GFR-binding peptide
  MOD_RES (2)..(36)..(37): Xaa is C or S
  MOD_RES (14)..(15)..(16)..(17)..(18): Xaa is A or G
  MOD_RES (19)..(20)..(21)..(22): Xaa is A or G or is absent

SEQ ID NO: 61485 - protein, 30 aa, Artificial Sequence; identical to SEQ ID NO: 5914
  GFR-binding peptide

SEQ ID NO: 61486 - protein, 39 aa, Artificial Sequence; identical to SEQ ID NO: 32021
  GFR-binding peptide
  MOD_RES (1)..(35)..(36): Xaa is C or S
  MOD_RES (13)..(14)..(15)..(16)..(17): Xaa is A or G
  MOD_RES (18)..(19)..(20)..(21): Xaa is A or G or is absent

SEQ ID NO: 61487 - protein, 39 aa, Artificial Sequence
  GFR-binding peptide
  MOD_RES (2)..(34)..(35): Xaa is C or S
AXSEVTMNRYKKLVVNKNEDFYLISIANMKEPVXXPEPI

SEQ ID NO: 61488 - protein, 40 aa, Artificial Sequence
  GFR-binding peptide
  MOD_RES (34)..(35): Xaa is C or S
  MOD_RES (12)..(13)..(14)..(15)..(16): Xaa is A or G
  MOD_RES (17)..(18)..(19)..(20): Xaa is A or G or is absent
SEVVMDYHYKLXXXXXXXXXKYLISIPSLRTPVXXTPPTS

SEQ ID NO: 61489 - protein, 40 aa, Artificial Sequence
  GFR-binding peptide
  MOD_RES (34)..(35): Xaa is C or S
  MOD_RES (12)..(13)..(14)..(15)..(16): Xaa is A or G
  MOD_RES (17)..(18)..(19)..(20): Xaa is A or G or is absent
SEVTMNRHKRLXXXXXXXXXYYLISTASMKEPVXXPEPIG

SEQ ID NO: 61490 - protein, 37 aa, Artificial Sequence; identical to SEQ ID NO: 32030
  GFR-binding peptide
  MOD_RES (2)..(34)..(35): Xaa is C or S

SEQ ID NO: 61491 - protein, 37 aa, Artificial Sequence; identical to SEQ ID NO: 32033
  GFR-binding peptide
  MOD_RES (34)..(35): Xaa is C or S
  MOD_RES (12)..(13)..(14)..(15)..(16): Xaa is A or G
  MOD_RES (17)..(18)..(19)..(20): Xaa is A or G or is absent

SEQ ID NO: 61492 - protein, 33 aa, Artificial Sequence; identical to SEQ ID NO: 5924
  GFR-binding peptide
  MOD_RES (31)..(31): Xaa is C or S

SEQ ID NO: 61493 - protein, 41 aa, Artificial Sequence; identical to SEQ ID NO: 27040
  GFR-binding peptide
  MOD_RES (1)..(3)..(35)..(36): Xaa is C or S

SEQ ID NO: 61494 - protein, 35 aa, Artificial Sequence; identical to SEQ ID NO: 27041
  GFR-binding peptide
  MOD_RES (2)..(34)..(35): Xaa is C or S

SEQ ID NO: 61495 - protein, 37 aa, Artificial Sequence; identical to SEQ ID NO: 5928
  GFR-binding peptide
  MOD_RES (1)..(3)..(36)..(37): Xaa is C or S

SEQ ID NO: 61496 - protein, 37 aa, Artificial Sequence; identical to SEQ ID NO: 27046
  GFR-binding peptide
  MOD_RES (2)..(4)..(36)..(37): Xaa is C or S

SEQ ID NO: 61497 - protein, 36 aa, Artificial Sequence
  GFR-binding peptide
  MOD_RES (2)..(35)..(36): Xaa is C or S
  MOD_RES (13)..(14)..(15)..(16)..(17): Xaa is A or G
  MOD_RES (18)..(19)..(20)..(21): Xaa is A or G or is absent
GXEEVIMYHYKLXXXXXXXXXKYLMSIPSTKVPAXX

SEQ ID NO: 61498 - protein, 38 aa, Artificial Sequence
  GFR-binding peptide
  MOD_RES (1)..(33)..(34): Xaa is C or S
XSEVVMDYHYKLVVNNASDKYLISIPSLRTPVXXTPPT

SEQ ID NO: 61499 - protein, 36 aa, Artificial Sequence
  GFR-binding peptide
  MOD_RES (2)..(36): Xaa is C or S
  MOD_RES (14)..(15)..(16)..(17)..(18): Xaa is A or G
  MOD_RES (19)..(20)..(21)..(22): Xaa is A or G or is absent
AXSEVTMNRYKKLXXXXXXXXXFYLISIANMKEPVX

SEQ ID NO: 61500 - protein, 36 aa, Artificial Sequence; identical to SEQ ID NO: 13356
  GFR-binding peptide
  MOD_RES (1)..(33)..(34): Xaa is C or S

SEQ ID NO: 61501 - protein, 34 aa, Artificial Sequence; identical to SEQ ID NO: 27053
  GFR-binding peptide
  MOD_RES (2)..(2): Xaa is C or S
  MOD_RES (13)..(14)..(15)..(16)..(17): Xaa is A or G
  MOD_RES (18)..(19)..(20)..(21): Xaa is A or G or is absent

SEQ ID NO: 61502 - protein, 33 aa, Artificial Sequence
  GFR-binding peptide
  MOD_RES (2)..(33): Xaa is C or S
KXSKVVMPIKGYVKPTRGVFYLINIPSLDQPVX

SEQ ID NO: 61503 - protein, 37 aa, Artificial Sequence; identical to SEQ ID NO: 5936
  GFR-binding peptide
  MOD_RES (1)..(36)..(37): Xaa is C or S
  MOD_RES (14)..(15)..(16)..(17)..(18): Xaa is A or G
  MOD_RES (19)..(20)..(21)..(22): Xaa is A or G or is absent

SEQ ID NO: 61504 - protein, 35 aa, Artificial Sequence
  GFR-binding peptide
  MOD_RES (2)..(2): Xaa is C or S
  MOD_RES (14)..(15)..(16)..(17)..(18): Xaa is A or G
  MOD_RES (19)..(20)..(21)..(22): Xaa is A or G or is absent
GXRDVVMGRHKRLXXXXXXXXXYYLMSTASMKTPT

SEQ ID NO: 61505 - protein, 36 aa, Artificial Sequence
  GFR-binding peptide
  MOD_RES (1)..(33)..(34): Xaa is C or S
XSEVVMDYHYKLVVNNASDKYLISIPSLRTPVXXTP

SEQ ID NO: 61506 - protein, 41 aa, Artificial Sequence
  GFR-binding peptide
  MOD_RES (2)..(4)..(35)..(36): Xaa is C or S
SXKXSKVVMPIKGYVKPTRGVFYLINIPSLDQPVXXPSASA

SEQ ID NO: 61507 - protein, 34 aa, Artificial Sequence; identical to SEQ ID NO: 32050
  GFR-binding peptide
  MOD_RES (1)..(34): Xaa is C or S
  MOD_RES (12)..(13)..(14)..(15)..(16): Xaa is A or G
  MOD_RES (17)..(18)..(19)..(20): Xaa is A or G or is absent

SEQ ID NO: 61508 - protein, 36 aa, Artificial Sequence; identical to SEQ ID NO: 27060
  GFR-binding peptide
  MOD_RES (32)..(33): Xaa is C or S

SEQ ID NO: 61509 - protein, 37 aa, Artificial Sequence; identical to SEQ ID NO: 32051
  GFR-binding peptide
  MOD_RES (1)..(33)..(34): Xaa is C or S

SEQ ID NO: 61510 - protein, 34 aa, Artificial Sequence
  GFR-binding peptide
  MOD_RES (31)..(32): Xaa is C or S
EEVIMEYKFKLLVRGNDLYLMSIPETKVPAXXTS

SEQ ID NO: 61511 - protein, 39 aa, Artificial Sequence; identical to SEQ ID NO: 32056
  GFR-binding peptide
  MOD_RES (1)..(35)..(36): Xaa is C or S
  MOD_RES (13)..(14)..(15)..(16)..(17): Xaa is A or G
  MOD_RES (18)..(19)..(20)..(21): Xaa is A or G or is absent

SEQ ID NO: 61512 - protein, 43 aa, Artificial Sequence; identical to SEQ ID NO: 13372
  GFR-binding peptide
  MOD_RES (2)..(4)..(38)..(39): Xaa is C or S
  MOD_RES (16)..(17)..(18)..(19)..(20): Xaa is A or G
  MOD_RES (21)..(22)..(23)..(24): Xaa is A or G or is absent

SEQ ID NO: 61513 - protein, 39 aa, Artificial Sequence
  GFR-binding peptide
  MOD_RES (34)..(35): Xaa is C or S
  MOD_RES (12)..(13)..(14)..(15)..(16): Xaa is A or G
  MOD_RES (17)..(18)..(19)..(20): Xaa is A or G or is absent
SEVTMNYHYKLXXXXXXXXXKYLISIPSMKEPVXXPEPI

SEQ ID NO: 61514 - protein, 39 aa, Artificial Sequence
  GFR-binding peptide
  MOD_RES (1)..(3)..(37)..(38): Xaa is C or S
  MOD_RES (15)..(16)..(17)..(18)..(19): Xaa is A or G
  MOD_RES (20)..(21)..(22)..(23): Xaa is A or G or is absent
XGXSEVVMDEYKFKXXXXXXXXXLYLISIPELRTPVXXT

SEQ ID NO: 61515 - protein, 40 aa, Artificial Sequence
  GFR-binding peptide
  MOD_RES (1)..(3)..(35)..(36): Xaa is C or S
XGXESVAMGRHKRLYTVVGKDYYLISTASLKTPVXXAKSA

SEQ ID NO: 61516 - protein, 38 aa, Artificial Sequence
  GFR-binding peptide
  MOD_RES (2)..(33)..(34): Xaa is C or S
KXSKVIMPIKGYIKPTKGIFYLINIPSLDQSVXXPSAS

SEQ ID NO: 61517 - protein, 37 aa, Artificial Sequence; identical to SEQ ID NO: 27065
  GFR-binding peptide
  MOD_RES (1)..(3)..(37): Xaa is C or S
  MOD_RES (15)..(16)..(17)..(18)..(19): Xaa is A or G
  MOD_RES (20)..(21)..(22)..(23): Xaa is A or G or is absent

SEQ ID NO: 61518 - protein, 37 aa, Artificial Sequence; identical to SEQ ID NO: 5952
  GFR-binding peptide
  MOD_RES (1)..(35)..(36): Xaa is C or S
  MOD_RES (13)..(14)..(15)..(16)..(17): Xaa is A or G
  MOD_RES (18)..(19)..(20)..(21): Xaa is A or G or is absent

SEQ ID NO: 61519 - protein, 36 aa, Artificial Sequence; identical to SEQ ID NO: 5953
  GFR-binding peptide
  MOD_RES (2)..(36): Xaa is C or S
  MOD_RES (14)..(15)..(16)..(17)..(18): Xaa is A or G
  MOD_RES (19)..(20)..(21)..(22): Xaa is A or G or is absent

SEQ ID NO: 61520 - protein, 39 aa, Artificial Sequence; identical to SEQ ID NO: 27069
  GFR-binding peptide
  MOD_RES (1)..(3)..(35)..(36): Xaa is C or S

SEQ ID NO: 61521 - protein, 37 aa, Artificial Sequence; identical to SEQ ID NO: 5955
  GFR-binding peptide
  MOD_RES (33)..(34): Xaa is C or S

SEQ ID NO: 61522 - protein, 32 aa, Artificial Sequence
  GFR-binding peptide
  MOD_RES (31)..(32): Xaa is C or S
DVVMGEYKFKIIQQKDNLYLMSIPEMKTPTXX

SEQ ID NO: 61523 - protein, 34 aa, Artificial Sequence
  GFR-binding peptide
  MOD_RES (34)..(34): Xaa is C or S
  MOD_RES (12)..(13)..(14)..(15)..(16): Xaa is A or G
  MOD_RES (17)..(18)..(19)..(20): Xaa is A or G or is absent
AEVVMDRHKRLXXXXXXXXXYYLISTASLRAPVX

SEQ ID NO: 61524 - protein, 33 aa, Artificial Sequence; identical to SEQ ID NO: 5957
  GFR-binding peptide
  MOD_RES (33)..(33): Xaa is C or S
  MOD_RES (11)..(12)..(13)..(14)..(15): Xaa is A or G
  MOD_RES (16)..(17)..(18)..(19): Xaa is A or G or is absent

SEQ ID NO: 61525 - protein, 38 aa, Artificial Sequence; identical to SEQ ID NO: 13382
  GFR-binding peptide
  MOD_RES (1)..(33)..(34): Xaa is C or S

SEQ ID NO: 61526 - protein, 42 aa, Artificial Sequence; identical to SEQ ID NO: 5958
  GFR-binding peptide
  MOD_RES (2)..(4)..(37)..(38): Xaa is C or S

SEQ ID NO: 61527 - protein, 37 aa, Artificial Sequence
  GFR-binding peptide
  MOD_RES (1)..(33)..(34): Xaa is C or S
XSEVVMDYHYKLVVNNASDKYLISIPSLRTPVXXTPP

SEQ ID NO: 61528 - protein, 38 aa, Artificial Sequence; identical to SEQ ID NO: 27078
  GFR-binding peptide
  MOD_RES (1)..(35)..(36): Xaa is C or S
  MOD_RES (13)..(14)..(15)..(16)..(17): Xaa is A or G
  MOD_RES (18)..(19)..(20)..(21): Xaa is A or G or is absent

SEQ ID NO: 61529 - protein, 34 aa, Artificial Sequence; identical to SEQ ID NO: 5966
  GFR-binding peptide
  MOD_RES (31)..(32): Xaa is C or S

SEQ ID NO: 61530 - protein, 41 aa, Artificial Sequence; identical to SEQ ID NO: 5967
  GFR-binding peptide
  MOD_RES (1)..(35)..(36): Xaa is C or S
  MOD_RES (13)..(14)..(15)..(16)..(17): Xaa is A or G
  MOD_RES (18)..(19)..(20)..(21): Xaa is A or G or is absent

SEQ ID NO: 61531 - protein, 33 aa, Artificial Sequence
  GFR-binding peptide
  MOD_RES (1)..(33): Xaa is C or S
XSEVVMDRHKRLVVNNASDYYLISTASLRTPVX

SEQ ID NO: 61532 - protein, 39 aa, Artificial Sequence; identical to SEQ ID NO: 27085
  GFR-binding peptide
  MOD_RES (2)..(4)..(36): Xaa is C or S

SEQ ID NO: 61533 - protein, 32 aa, Artificial Sequence; identical to SEQ ID NO: 5972
  GFR-binding peptide
  MOD_RES (2)..(2): Xaa is C or S

SEQ ID NO: 61534 - protein, 39 aa, Artificial Sequence; identical to SEQ ID NO: 5973
  GFR-binding peptide
  MOD_RES (1)..(34)..(35): Xaa is C or S

SEQ ID NO: 61535 - protein, 36 aa, Artificial Sequence; identical to SEQ ID NO: 32086
  GFR-binding peptide
  MOD_RES (2)..(35)..(36): Xaa is C or S

SEQ ID NO: 61536 - protein, 42 aa, Artificial Sequence
  GFR-binding peptide
  MOD_RES (1)..(3)..(36)..(37): Xaa is C or S
  MOD_RES (14)..(15)..(16)..(17)..(18): Xaa is A or G
  MOD_RES (19)..(20)..(21)..(22): Xaa is A or G or is absent
XKXSKVIMPIKGYXXXXXXXXXFYLINIPSLDQSVXXPSASA

SEQ ID NO: 61537 - protein, 34 aa, Artificial Sequence; identical to SEQ ID NO: 5975
  GFR-binding peptide
  MOD_RES (1)..(3): Xaa is C or S

SEQ ID NO: 61538 - protein, 36 aa, Artificial Sequence; identical to SEQ ID NO: 5980
  GFR-binding peptide
  MOD_RES (2)..(36): Xaa is C or S
  MOD_RES (14)..(15)..(16)..(17)..(18): Xaa is A or G
  MOD_RES (19)..(20)..(21)..(22): Xaa is A or G or is absent

SEQ ID NO: 61539 - protein, 40 aa, Artificial Sequence; identical to SEQ ID NO: 5981
  GFR-binding peptide
  MOD_RES (1)..(35)..(36): Xaa is C or S
  MOD_RES (13)..(14)..(15)..(16)..(17): Xaa is A or G
  MOD_RES (18)..(19)..(20)..(21): Xaa is A or G or is absent

SEQ ID NO: 61540 - protein, 32 aa, Artificial Sequence; identical to SEQ ID NO: 5983
  GFR-binding peptide
  MOD_RES (11)..(12)..(13)..(14)..(15): Xaa is A or G
  MOD_RES (16)..(17)..(18)..(19): Xaa is A or G or is absent

SEQ ID NO: 61541 - protein, 35 aa, Artificial Sequence; identical to SEQ ID NO: 27097
  GFR-binding peptide
  MOD_RES (33)..(33): Xaa is C or S
  MOD_RES (11)..(12)..(13)..(14)..(15): Xaa is A or G
  MOD_RES (16)..(17)..(18)..(19): Xaa is A or G or is absent

SEQ ID NO: 61542 - protein, 42 aa, Artificial Sequence; identical to SEQ ID NO: 5986
  GFR-binding peptide
  MOD_RES (1)..(3)..(36)..(37): Xaa is C or S
  MOD_RES (14)..(15)..(16)..(17)..(18): Xaa is A or G
  MOD_RES (19)..(20)..(21)..(22): Xaa is A or G or is absent

SEQ ID NO: 61543 - protein, 37 aa, Artificial Sequence; identical to SEQ ID NO: 27099
  GFR-binding peptide
  MOD_RES (1)..(3)..(35)..(36): Xaa is C or S

SEQ ID NO: 61544 - protein, 31 aa, Artificial Sequence; identical to SEQ ID NO: 5987
  GFR-binding peptide
  MOD_RES (31)..(31): Xaa is C or S

SEQ ID NO: 61545 - protein, 36 aa, Artificial Sequence
  GFR-binding peptide
  MOD_RES (1)..(3): Xaa is C or S
  MOD_RES (15)..(16)..(17)..(18)..(19): Xaa is A or G
  MOD_RES (20)..(21)..(22)..(23): Xaa is A or G or is absent
XAXSEVTMNYHYKLXXXXXXXXXKYLISIPSMKEPV

SEQ ID NO: 61546 - protein, 37 aa, Artificial Sequence; identical to SEQ ID NO: 32100
  GFR-binding peptide
  MOD_RES (2)..(4): Xaa is C or S
  MOD_RES (16)..(17)..(18)..(19)..(20): Xaa is A or G
  MOD_RES (21)..(22)..(23)..(24): Xaa is A or G or is absent

SEQ ID NO: 61547 - protein, 35 aa, Artificial Sequence; identical to SEQ ID NO: 5988
  GFR-binding peptide
  MOD_RES (1)..(35): Xaa is C or S
  MOD_RES (13)..(14)..(15)..(16)..(17): Xaa is A or G
  MOD_RES (18)..(19)..(20)..(21): Xaa is A or G or is absent

SEQ ID NO: 61548 - protein, 39 aa, Artificial Sequence; identical to SEQ ID NO: 32103
  GFR-binding peptide
  MOD_RES (2)..(4)..(38)..(39): Xaa is C or S
  MOD_RES (16)..(17)..(18)..(19)..(20): Xaa is A or G
  MOD_RES (21)..(22)..(23)..(24): Xaa is A or G or is absent

SEQ ID NO: 61549 - protein, 33 aa, Artificial Sequence; identical to SEQ ID NO: 5993
  GFR-binding peptide
  MOD_RES (32)..(33): Xaa is C or S

SEQ ID NO: 61550 - protein, 39 aa, Artificial Sequence; identical to SEQ ID NO: 5994
  GFR-binding peptide
  MOD_RES (1)..(3)..(35)..(36): Xaa is C or S

SEQ ID NO: 61551 - protein, 33 aa, Artificial Sequence; identical to SEQ ID NO: 27106
  GFR-binding peptide
  MOD_RES (2)..(2): Xaa is C or S

SEQ ID NO: 61552 - protein, 35 aa, Artificial Sequence; identical to SEQ ID NO: 5996
  GFR-binding peptide
  MOD_RES (33)..(34): Xaa is C or S
  MOD_RES (11)..(12)..(13)..(14)..(15): Xaa is A or G
  MOD_RES (16)..(17)..(18)..(19): Xaa is A or G or is absent

SEQ ID NO: 61553 - protein, 33 aa, Artificial Sequence; identical to SEQ ID NO: 32110
  GFR-binding peptide
  MOD_RES (2)..(2): Xaa is C or S

SEQ ID NO: 61554 - protein, 40 aa, Artificial Sequence; identical to SEQ ID NO: 32113
  GFR-binding peptide
  MOD_RES (34)..(35): Xaa is C or S
  MOD_RES (12)..(13)..(14)..(15)..(16): Xaa is A or G
  MOD_RES (17)..(18)..(19)..(20): Xaa is A or G or is absent

SEQ ID NO: 61555 - protein, 35 aa, Artificial Sequence; identical to SEQ ID NO: 32115
  GFR-binding peptide
  MOD_RES (32)..(33): Xaa is C or S

SEQ ID NO: 61556 - protein, 34 aa, Artificial Sequence; identical to SEQ ID NO: 27115
  GFR-binding peptide
  MOD_RES (33)..(34): Xaa is C or S
  MOD_RES (11)..(12)..(13)..(14)..(15): Xaa is A or G
  MOD_RES (16)..(17)..(18)..(19): Xaa is A or G or is absent

SEQ ID NO: 61557 - protein, 34 aa, Artificial Sequence
  GFR-binding peptide
  MOD_RES (1)..(33)..(34): Xaa is C or S
XSEVVMDRHKRLVVNNASDYYLISTASLRTPVXX

SEQ ID NO: 61558 - protein, 39 aa, Artificial Sequence; identical to SEQ ID NO: 6004
  GFR-binding peptide
  MOD_RES (1)..(34)..(35): Xaa is C or S
  MOD_RES (12)..(13)..(14)..(15)..(16): Xaa is A or G
  MOD_RES (17)..(18)..(19)..(20): Xaa is A or G or is absent

SEQ ID NO: 61559 - protein, 30 aa, Artificial Sequence
  GFR-binding peptide
EEVIMYHYKLLLVRGNDKYLMSIPSTKVPA

SEQ ID NO: 61560 - protein, 40 aa, Artificial Sequence
  GFR-binding peptide
  MOD_RES (2)..(4)..(38)..(39): Xaa is C or S
  MOD_RES (16)..(17)..(18)..(19)..(20): Xaa is A or G
  MOD_RES (21)..(22)..(23)..(24): Xaa is A or G or is absent
RXGXESVAMGRHKRLXXXXXXXXXYYLISTASLKTPVXXA

SEQ ID NO: 61561 - protein, 36 aa, Artificial Sequence
  GFR-binding peptide
  MOD_RES (1)..(33)..(34): Xaa is C or S
XSEVTMNEYKFKVVNKNEDLYLISIPEMKEPVXXPE

SEQ ID NO: 61562 - protein, 36 aa, Artificial Sequence; identical to SEQ ID NO: 6006
  GFR-binding peptide
  MOD_RES (32)..(33): Xaa is C or S

SEQ ID NO: 61563 - protein, 39 aa, Artificial Sequence; identical to SEQ ID NO: 27127
  GFR-binding peptide
  MOD_RES (1)..(3)..(35)..(36): Xaa is C or S

SEQ ID NO: 61564 - protein, 38 aa, Artificial Sequence; identical to SEQ ID NO: 27130
  GFR-binding peptide
  MOD_RES (1)..(3)..(35)..(36): Xaa is C or S

SEQ ID NO: 61565 - protein, 36 aa, Artificial Sequence; identical to SEQ ID NO: 6010
  GFR-binding peptide
  MOD_RES (2)..(34)..(35): Xaa is C or S

SEQ ID NO: 61566 - protein, 37 aa, Artificial Sequence; identical to SEQ ID NO: 6012
  GFR-binding peptide
  MOD_RES (34)..(35): Xaa is C or S
  MOD_RES (12)..(13)..(14)..(15)..(16): Xaa is A or G
  MOD_RES (17)..(18)..(19)..(20): Xaa is A or G or is absent

SEQ ID NO: 61567 - protein, 35 aa, Artificial Sequence; identical to SEQ ID NO: 32137
  GFR-binding peptide
  MOD_RES (1)..(3)..(35): Xaa is C or S

SEQ ID NO: 61568 - protein, 35 aa, Artificial Sequence; identical to SEQ ID NO: 6013
  GFR-binding peptide
  MOD_RES (34)..(35): Xaa is C or S
  MOD_RES (12)..(13)..(14)..(15)..(16): Xaa is A or G
  MOD_RES (17)..(18)..(19)..(20): Xaa is A or G or is absent

SEQ ID NO: 61569 - protein, 37 aa, Artificial Sequence
  GFR-binding peptide
  MOD_RES (1)..(3)..(34)..(35): Xaa is C or S
XGXEEVIMYHYKLLLVRGNDKYLMSIPSTKVPAXXTS

SEQ ID NO: 61570 - protein, 40 aa, Artificial Sequence; identical to SEQ ID NO: 6014
  GFR-binding peptide
  MOD_RES (1)..(3)..(36)..(37): Xaa is C or S
  MOD_RES (14)..(15)..(16)..(17)..(18): Xaa is A or G
  MOD_RES (19)..(20)..(21)..(22): Xaa is A or G or is absent

SEQ ID NO: 61571 - protein, 40 aa, Artificial Sequence; identical to SEQ ID NO: 27133
  GFR-binding peptide
  MOD_RES (2)..(34)..(35): Xaa is C or S

SEQ ID NO: 61572 - protein, 34 aa, Artificial Sequence; identical to SEQ ID NO: 27136
  GFR-binding peptide
  MOD_RES (34)..(34): Xaa is C or S
  MOD_RES (12)..(13)..(14)..(15)..(16): Xaa is A or G
  MOD_RES (17)..(18)..(19)..(20): Xaa is A or G or is absent

SEQ ID NO: 61573 - protein, 36 aa, Artificial Sequence; identical to SEQ ID NO: 27137
  GFR-binding peptide
  MOD_RES (2)..(34)..(35): Xaa is C or S

SEQ ID NO: 61574 - protein, 39 aa, Artificial Sequence; identical to SEQ ID NO: 13426
  GFR-binding peptide
  MOD_RES (1)..(35)..(36): Xaa is C or S
  MOD_RES (13)..(14)..(15)..(16)..(17): Xaa is A or G
  MOD_RES (18)..(19)..(20)..(21): Xaa is A or G or is absent

SEQ ID NO: 61575 - protein, 40 aa, Artificial Sequence
  GFR-binding peptide
  MOD_RES (1)..(3)..(36)..(37): Xaa is C or S
  MOD_RES (14)..(15)..(16)..(17)..(18): Xaa is A or G
  MOD_RES (19)..(20)..(21)..(22): Xaa is A or G or is absent
XKXSKVIMPIKGYXXXXXXXXXFYLINIPSLDQSVXXPSA

SEQ ID NO: 61576 - protein, 39 aa, Artificial Sequence; identical to SEQ ID NO: 6018
  GFR-binding peptide
  MOD_RES (1)..(35)..(36): Xaa is C or S
  MOD_RES (13)..(14)..(15)..(16)..(17): Xaa is A or G
  MOD_RES (18)..(19)..(20)..(21): Xaa is A or G or is absent

SEQ ID NO: 61577 - protein, 33 aa, Artificial Sequence; identical to SEQ ID NO: 6019
  GFR-binding peptide
  MOD_RES (31)..(32): Xaa is C or S

SEQ ID NO: 61578 - protein, 36 aa, Artificial Sequence; identical to SEQ ID NO: 32145
  GFR-binding peptide
  MOD_RES (1)..(33)..(34): Xaa is C or S

SEQ ID NO: 61579 - protein, 40 aa, Artificial Sequence
  GFR-binding peptide
  MOD_RES (1)..(3)..(35)..(36): Xaa is C or S
XAXSEVTMNRHKRLVVNKNEDYYLISTASMKEPVXXPEPI

SEQ ID NO: 61580 - protein, 38 aa, Artificial Sequence
  GFR-binding peptide
  MOD_RES (34)..(35): Xaa is C or S
  MOD_RES (12)..(13)..(14)..(15)..(16): Xaa is A or G
  MOD_RES (17)..(18)..(19)..(20): Xaa is A or G or is absent
RDVVMGRHKRLXXXXXXXXXYYLMSTASMKTPTXXPGA

SEQ ID NO: 61581 - protein, 37 aa, Artificial Sequence; identical to SEQ ID NO: 27143
  GFR-binding peptide
  MOD_RES (2)..(36)..(37): Xaa is C or S
  MOD_RES (14)..(15)..(16)..(17)..(18): Xaa is A or G
  MOD_RES (19)..(20)..(21)..(22): Xaa is A or G or is absent

SEQ ID NO: 61582 - protein, 35 aa, Artificial Sequence; identical to SEQ ID NO: 27144
  GFR-binding peptide
  MOD_RES (2)..(35): Xaa is C or S

SEQ ID NO: 61583 - protein, 33 aa, Artificial Sequence
  GFR-binding peptide
  MOD_RES (1)..(33): Xaa is C or S
XSEVVMDEYKFKVVNNASDLYLISIPELRTPVX

SEQ ID NO: 61584 - protein, 36 aa, Artificial Sequence; identical to SEQ ID NO: 6025
  GFR-binding peptide
  MOD_RES (32)..(33): Xaa is C or S

SEQ ID NO: 61585 - protein, 39 aa, Artificial Sequence; identical to SEQ ID NO: 6026
  GFR-binding peptide
  MOD_RES (1)..(3)..(37): Xaa is C or S
  MOD_RES (15)..(16)..(17)..(18)..(19): Xaa is A or G
  MOD_RES (20)..(21)..(22)..(23): Xaa is A or G or is absent

SEQ ID NO: 61586 - protein, 37 aa, Artificial Sequence; identical to SEQ ID NO: 32152
  GFR-binding peptide
  MOD_RES (31)..(31): Xaa is C or S

SEQ ID NO: 61587 - protein, 33 aa, Artificial Sequence; identical to SEQ ID NO: 6027
  GFR-binding peptide
  MOD_RES (2)..(2): Xaa is C or S

SEQ ID NO: 61588 - protein, 42 aa, Artificial Sequence
  GFR-binding peptide
  MOD_RES (2)..(4)..(37)..(38): Xaa is C or S
  MOD_RES (15)..(16)..(17)..(18)..(19): Xaa is A or G
  MOD_RES (20)..(21)..(22)..(23): Xaa is A or G or is absent
LXGXEEVIMRHKRLXXXXXXXXXYYLMSTASTKVPAXXTSPV

SEQ ID NO: 61589 - protein, 40 aa, Artificial Sequence; identical to SEQ ID NO: 6029
  GFR-binding peptide
  MOD_RES (2)..(34)..(35): Xaa is C or S

SEQ ID NO: 61590 - protein, 40 aa, Artificial Sequence; identical to SEQ ID NO: 6030
  GFR-binding peptide
  MOD_RES (2)..(34): Xaa is C or S

SEQ ID NO: 61591 - protein, 36 aa, Artificial Sequence; identical to SEQ ID NO: 27154
  GFR-binding peptide
  MOD_RES (33)..(34): Xaa is C or S
  MOD_RES (11)..(12)..(13)..(14)..(15): Xaa is A or G
  MOD_RES (16)..(17)..(18)..(19): Xaa is A or G or is absent

SEQ ID NO: 61592 - protein, 36 aa, Artificial Sequence; identical to SEQ ID NO: 27155
  GFR-binding peptide
  MOD_RES (2)..(34)..(35): Xaa is C or S

SEQ ID NO: 61593 - protein, 42 aa, Artificial Sequence; identical to SEQ ID NO: 6036
  GFR-binding peptide
  MOD_RES (1)..(3)..(38)..(39): Xaa is C or S
  MOD_RES (16)..(17)..(18)..(19)..(20): Xaa is A or G
  MOD_RES (21)..(22)..(23)..(24): Xaa is A or G or is absent

SEQ ID NO: 61594 - protein, 34 aa, Artificial Sequence; identical to SEQ ID NO: 6037
  GFR-binding peptide
  MOD_RES (34)..(34): Xaa is C or S
  MOD_RES (12)..(13)..(14)..(15)..(16): Xaa is A or G
  MOD_RES (17)..(18)..(19)..(20): Xaa is A or G or is absent

SEQ ID NO: 61595 - protein, 37 aa, Artificial Sequence; identical to SEQ ID NO: 6039
  GFR-binding peptide
  MOD_RES (2)..(4): Xaa is C or S
  MOD_RES (16)..(17)..(18)..(19)..(20): Xaa is A or G
  MOD_RES (21)..(22)..(23)..(24): Xaa is A or G or is absent

SEQ ID NO: 61596 - protein, 35 aa, Artificial Sequence; identical to SEQ ID NO: 32163
  GFR-binding peptide
  MOD_RES (2)..(34)..(35): Xaa is C or S

SEQ ID NO: 61597 - protein, 39 aa, Artificial Sequence; identical to SEQ ID NO: 6040
  GFR-binding peptide
  MOD_RES (1)..(3)..(37)..(38): Xaa is C or S
  MOD_RES (15)..(16)..(17)..(18)..(19): Xaa is A or G
  MOD_RES (20)..(21)..(22)..(23): Xaa is A or G or is absent

SEQ ID NO: 61598 - protein, 39 aa, Artificial Sequence
  GFR-binding peptide
  MOD_RES (2)..(36)..(37): Xaa is C or S
  MOD_RES (14)..(15)..(16)..(17)..(18): Xaa is A or G
  MOD_RES (19)..(20)..(21)..(22): Xaa is A or G or is absent
GXRDVVMGRHKRLXXXXXXXXXYYLMSTASMKTPTXXPG

SEQ ID NO: 61599 - protein, 35 aa, Artificial Sequence
  GFR-binding peptide
  MOD_RES (34)..(35): Xaa is C or S
  MOD_RES (12)..(13)..(14)..(15)..(16): Xaa is A or G
  MOD_RES (17)..(18)..(19)..(20): Xaa is A or G or is absent
AEVVMDRHKRLXXXXXXXXXYYLISTASLRAPVXX

SEQ ID NO: 61600 - protein, 32 aa, Artificial Sequence; identical to SEQ ID NO: 6044
  GFR-binding peptide
  MOD_RES (2)..(2): Xaa is C or S

SEQ ID NO: 61601 - protein, 39 aa, Artificial Sequence
  GFR-binding peptide
  MOD_RES (2)..(34)..(35): Xaa is C or S
AXSEVTMNPIKGYVVNKNEDFYLINIPSMKEPVXXPEPI

SEQ ID NO: 61602 - protein, 37 aa, Artificial Sequence; identical to SEQ ID NO: 13448
  GFR-binding peptide
  MOD_RES (1)..(33)..(34): Xaa is C or S

SEQ ID NO: 61603 - protein, 33 aa, Artificial Sequence
  GFR-binding peptide
  MOD_RES (1)..(3): Xaa is C or S
XGXEEVIMEYKFKLLVRGNDLYLMSIPETKVPA

SEQ ID NO: 61604 - protein, 33 aa, Artificial Sequence; identical to SEQ ID NO: 27171
  GFR-binding peptide
  MOD_RES (32)..(33): Xaa is C or S

SEQ ID NO: 61605 - protein, 35 aa, Artificial Sequence; identical to SEQ ID NO: 27172
  GFR-binding peptide
  MOD_RES (34)..(35): Xaa is C or S
  MOD_RES (12)..(13)..(14)..(15)..(16): Xaa is A or G
  MOD_RES (17)..(18)..(19)..(20): Xaa is A or G or is absent

SEQ ID NO: 61606 - protein, 33 aa, Artificial Sequence
  GFR-binding peptide
  MOD_RES (1)..(3): Xaa is C or S
XKXSRVIMPIKGYVKPKRGVFYLINIPSLAQPV

SEQ ID NO: 61607 - protein, 37 aa, Artificial Sequence
  GFR-binding peptide
  MOD_RES (1)..(3)..(35)..(36): Xaa is C or S
XAXSEVTMNRYKKLVVNKNEDFYLISIANMKEPVXXP

SEQ ID NO: 61608 - protein, 34 aa, Artificial Sequence
  GFR-binding peptide
  MOD_RES (2)..(33)..(34): Xaa is C or S
KXSKVVMPIKGYVKPTRGVFYLINIPSLDQPVXX

SEQ ID NO: 61609 - protein, 36 aa, Artificial Sequence
  GFR-binding peptide
  MOD_RES (2)..(35)..(36): Xaa is C or S
  MOD_RES (13)..(14)..(15)..(16)..(17): Xaa is A or G
  MOD_RES (18)..(19)..(20)..(21): Xaa is A or G or is absent
KXSRVIMPIKGYXXXXXXXXXFYLINIPSLAQPVXX

SEQ ID NO: 61610 - protein, 42 aa, Artificial Sequence
  GFR-binding peptide
  MOD_RES (1)..(3)..(36)..(37): Xaa is C or S
  MOD_RES (14)..(15)..(16)..(17)..(18): Xaa is A or G
  MOD_RES (19)..(20)..(21)..(22): Xaa is A or G or is absent
XGXEEVIMRHKRLXXXXXXXXXYYLMSTASTKVPAXXTSPVR

SEQ ID NO: 61611 - protein, 40 aa, Artificial Sequence; identical to SEQ ID NO: 27181
  GFR-binding peptide
  MOD_RES (2)..(34): Xaa is C or S

SEQ ID NO: 61612 - protein, 35 aa, Artificial Sequence; identical to SEQ ID NO: 27187
  GFR-binding peptide
  MOD_RES (2)..(4): Xaa is C or S

SEQ ID NO: 61613 - protein, 38 aa, Artificial Sequence; identical to SEQ ID NO: 6066
  GFR-binding peptide
  MOD_RES (1)..(3)..(35)..(36): Xaa is C or S

SEQ ID NO: 61614 - protein, 37 aa, Artificial Sequence; identical to SEQ ID NO: 6068
  GFR-binding peptide
  MOD_RES (2)..(4): Xaa is C or S
  MOD_RES (16)..(17)..(18)..(19)..(20): Xaa is A or G
  MOD_RES (21)..(22)..(23)..(24): Xaa is A or G or is absent

SEQ ID NO: 61615 - protein, 36 aa, Artificial Sequence; identical to SEQ ID NO: 27195
  GFR-binding peptide
  MOD_RES (34)..(35): Xaa is C or S
  MOD_RES (12)..(13)..(14)..(15)..(16): Xaa is A or G
  MOD_RES (17)..(18)..(19)..(20): Xaa is A or G or is absent

SEQ ID NO: 61616 - protein, 30 aa, Artificial Sequence
  GFR-binding peptide
EVVMDRHKRLVVNNAADYYLISTASLRAPV

SEQ ID NO: 61617 - protein, 38 aa, Artificial Sequence
  GFR-binding peptide
  MOD_RES (32)..(33): Xaa is C or S
ESVAMGRHKRLYTVVGKDYYLISTASLKTPVXXAKSAK

SEQ ID NO: 61618 - protein, 36 aa, Artificial Sequence; identical to SEQ ID NO: 6073
  GFR-binding peptide
  MOD_RES (2)..(36): Xaa is C or S
  MOD_RES (14)..(15)..(16)..(17)..(18): Xaa is A or G
  MOD_RES (19)..(20)..(21)..(22): Xaa is A or G or is absent

SEQ ID NO: 61619 - protein, 39 aa, Artificial Sequence; identical to SEQ ID NO: 6076
  GFR-binding peptide
  MOD_RES (33)..(34): Xaa is C or S
  MOD_RES (11)..(12)..(13)..(14)..(15): Xaa is A or G
  MOD_RES (16)..(17)..(18)..(19): Xaa is A or G or is absent

SEQ ID NO: 61620 - protein, 39 aa, Artificial Sequence
  GFR-binding peptide
  MOD_RES (2)..(33)..(34): Xaa is C or S
GXEEVIMYHYKLLLVRGNDKYLMSIPSTKVPAXXTSPVR

SEQ ID NO: 61621 - protein, 41 aa, Artificial Sequence; identical to SEQ ID NO: 27201
  GFR-binding peptide
  MOD_RES (1)..(35)..(36): Xaa is C or S
  MOD_RES (13)..(14)..(15)..(16)..(17): Xaa is A or G
  MOD_RES (18)..(19)..(20)..(21): Xaa is A or G or is absent

SEQ ID NO: 61622 - protein, 36 aa, Artificial Sequence; identical to SEQ ID NO: 6078
  GFR-binding peptide
  MOD_RES (31)..(32): Xaa is C or S

SEQ ID NO: 61623 - protein, 37 aa, Artificial Sequence
  GFR-binding peptide
  MOD_RES (1)..(3)..(36)..(37): Xaa is C or S
  MOD_RES (14)..(15)..(16)..(17)..(18): Xaa is A or G
  MOD_RES (19)..(20)..(21)..(22): Xaa is A or G or is absent
XGXEEVIMRHKRLXXXXXXXXXYYLMSTASTKVPAXX

SEQ ID NO: 61624 - protein, 41 aa, Artificial Sequence
  GFR-binding peptide
  MOD_RES (2)..(36)..(37): Xaa is C or S
  MOD_RES (14)..(15)..(16)..(17)..(18): Xaa is A or G
  MOD_RES (19)..(20)..(21)..(22): Xaa is A or G or is absent
GXRDVVMGEYKFKXXXXXXXXXLYLMSIPEMKTPTXXPGAS

SEQ ID NO: 61625 - protein, 39 aa, Artificial Sequence
  GFR-binding peptide
  MOD_RES (1)..(3)..(35)..(36): Xaa is C or S
XGXESVAMGRHKRLYTVVGKDYYLISTASLKTPVXXAKS

SEQ ID NO: 61626 - protein, 33 aa, Artificial Sequence; identical to SEQ ID NO: 32197
  GFR-binding peptide
  MOD_RES (31)..(32): Xaa is C or S

SEQ ID NO: 61627 - protein, 30 aa, Artificial Sequence; identical to SEQ ID NO: 32198
  GFR-binding peptide

SEQ ID NO: 61628 - protein, 42 aa, Artificial Sequence; identical to SEQ ID NO: 32201
  GFR-binding peptide
  MOD_RES (2)..(36)..(37): Xaa is C or S
  MOD_RES (14)..(15)..(16)..(17)..(18): Xaa is A or G
  MOD_RES (19)..(20)..(21)..(22): Xaa is A or G or is absent

SEQ ID NO: 61629 - protein, 39 aa, Artificial Sequence
  GFR-binding peptide
  MOD_RES (1)..(3)..(37)..(38): Xaa is C or S
  MOD_RES (15)..(16)..(17)..(18)..(19): Xaa is A or G
  MOD_RES (20)..(21)..(22)..(23): Xaa is A or G or is absent
XAXSEVTMNYHYKLXXXXXXXXXKYLISIPSMKEPVXXP

SEQ ID NO: 61630 - protein, 34 aa, Artificial Sequence; identical to SEQ ID NO: 27209
  GFR-binding peptide
  MOD_RES (34)..(34): Xaa is C or S
  MOD_RES (12)..(13)..(14)..(15)..(16): Xaa is A or G
  MOD_RES (17)..(18)..(19)..(20): Xaa is A or G or is absent

SEQ ID NO: 61631 - protein, 44 aa, Artificial Sequence
  GFR-binding peptide
  MOD_RES (2)..(4)..(38)..(39): Xaa is C or S
  MOD_RES (16)..(17)..(18)..(19)..(20): Xaa is A or G
  MOD_RES (21)..(22)..(23)..(24): Xaa is A or G or is absent
RXAXSEVTMNPIKGYXXXXXXXXXFYLINIPSMKEPVXXPEPIG

SEQ ID NO: 61632 - protein, 37 aa, Artificial Sequence; identical to SEQ ID NO: 6086
  GFR-binding peptide
  MOD_RES (33)..(34): Xaa is C or S
  MOD_RES (11)..(12)..(13)..(14)..(15): Xaa is A or G
  MOD_RES (16)..(17)..(18)..(19): Xaa is A or G or is absent

SEQ ID NO: 61633 - protein, 40 aa, Artificial Sequence; identical to SEQ ID NO: 27211
  GFR-binding peptide
  MOD_RES (2)..(4)..(38)..(39): Xaa is C or S
  MOD_RES (16)..(17)..(18)..(19)..(20): Xaa is A or G
  MOD_RES (21)..(22)..(23)..(24): Xaa is A or G or is absent

SEQ ID NO: 61634 - protein, 40 aa, Artificial Sequence; identical to SEQ ID NO: 32213
  GFR-binding peptide
  MOD_RES (2)..(4)..(38)..(39): Xaa is C or S
  MOD_RES (16)..(17)..(18)..(19)..(20): Xaa is A or G
  MOD_RES (21)..(22)..(23)..(24): Xaa is A or G or is absent

SEQ ID NO: 61635 - protein, 36 aa, Artificial Sequence
  GFR-binding peptide
  MOD_RES (32)..(33): Xaa is C or S
SEVVMDYHYKLVVNNASDKYLISIPSLRTPVXXTPP

SEQ ID NO: 61636 - protein, 40 aa, Artificial Sequence; identical to SEQ ID NO: 6092
  GFR-binding peptide
  MOD_RES (34)..(35): Xaa is C or S
  MOD_RES (12)..(13)..(14)..(15)..(16): Xaa is A or G
  MOD_RES (17)..(18)..(19)..(20): Xaa is A or G or is absent

SEQ ID NO: 61637 - protein, 36 aa, Artificial Sequence; identical to SEQ ID NO: 32218
  GFR-binding peptide
  MOD_RES (1)..(33)..(34): Xaa is C or S

SEQ ID NO: 61638 - protein, 44 aa, Artificial Sequence; identical to SEQ ID NO: 6096
  GFR-binding peptide
  MOD_RES (2)..(4)..(38)..(39): Xaa is C or S
  MOD_RES (16)..(17)..(18)..(19)..(20): Xaa is A or G
  MOD_RES (21)..(22)..(23)..(24): Xaa is A or G or is absent

SEQ ID NO: 61639 - protein, 35 aa, Artificial Sequence; identical to SEQ ID NO: 6097
  GFR-binding peptide
  MOD_RES (33)..(34): Xaa is C or S
  MOD_RES (11)..(12)..(13)..(14)..(15): Xaa is A or G
  MOD_RES (16)..(17)..(18)..(19): Xaa is A or G or is absent

SEQ ID NO: 61640 - protein, 39 aa, Artificial Sequence; identical to SEQ ID NO: 6098
  GFR-binding peptide
  MOD_RES (34)..(35): Xaa is C or S
  MOD_RES (12)..(13)..(14)..(15)..(16): Xaa is A or G
  MOD_RES (17)..(18)..(19)..(20): Xaa is A or G or is absent

SEQ ID NO: 61641 - protein, 39 aa, Artificial Sequence; identical to SEQ ID NO: 27225
  GFR-binding peptide
  MOD_RES (1)..(3)..(37)..(38): Xaa is C or S
  MOD_RES (15)..(16)..(17)..(18)..(19): Xaa is A or G
  MOD_RES (20)..(21)..(22)..(23): Xaa is A or G or is absent

SEQ ID NO: 61642 - protein, 37 aa, Artificial Sequence; identical to SEQ ID NO: 6099
  GFR-binding peptide
  MOD_RES (33)..(34): Xaa is C or S
  MOD_RES (11)..(12)..(13)..(14)..(15): Xaa is A or G
  MOD_RES (16)..(17)..(18)..(19): Xaa is A or G or is absent

SEQ ID NO: 61643 - protein, 38 aa, Artificial Sequence; identical to SEQ ID NO: 27230
  GFR-binding peptide
  MOD_RES (2)..(4)..(36)..(37): Xaa is C or S

SEQ ID NO: 61644 - protein, 34 aa, Artificial Sequence
  GFR-binding peptide
  MOD_RES (1)..(3)..(34): Xaa is C or S
XGXEEVIMEYKFKLLVRGNDLYLMSIPETKVPAX

SEQ ID NO: 61645 - protein, 37 aa, Artificial Sequence; identical to SEQ ID NO: 27231
  GFR-binding peptide
  MOD_RES (2)..(4)..(35)..(36): Xaa is C or S

SEQ ID NO: 61646 - protein, 38 aa, Artificial Sequence; identical to SEQ ID NO: 32223
  GFR-binding peptide
  MOD_RES (2)..(4)..(36)..(37): Xaa is C or S

SEQ ID NO: 61647 - protein, 37 aa, Artificial Sequence; identical to SEQ ID NO: 6101
  GFR-binding peptide
  MOD_RES (35)..(36): Xaa is C or S
  MOD_RES (13)..(14)..(15)..(16)..(17): Xaa is A or G
  MOD_RES (18)..(19)..(20)..(21): Xaa is A or G or is absent

SEQ ID NO: 61648 - protein, 34 aa, Artificial Sequence; identical to SEQ ID NO: 27234
  GFR-binding peptide
  MOD_RES (33)..(34): Xaa is C or S
  MOD_RES (11)..(12)..(13)..(14)..(15): Xaa is A or G
  MOD_RES (16)..(17)..(18)..(19): Xaa is A or G or is absent

SEQ ID NO: 61649 - protein, 40 aa, Artificial Sequence; identical to SEQ ID NO: 6103
  GFR-binding peptide
  MOD_RES (1)..(3)..(36)..(37): Xaa is C or S

SEQ ID NO: 61650 - protein, 38 aa, Artificial Sequence; identical to SEQ ID NO: 32225
  GFR-binding peptide
  MOD_RES (2)..(4)..(36)..(37): Xaa is C or S

SEQ ID NO: 61651 - protein, 37 aa, Artificial Sequence; identical to SEQ ID NO: 6104
  GFR-binding peptide
  MOD_RES (2)..(34): Xaa is C or S

SEQ ID NO: 61652 - protein, 39 aa, Artificial Sequence; identical to SEQ ID NO: 6106
  GFR-binding peptide
  MOD_RES (34)..(35): Xaa is C or S
  MOD_RES (12)..(13)..(14)..(15)..(16): Xaa is A or G
  MOD_RES (17)..(18)..(19)..(20): Xaa is A or G or is absent

SEQ ID NO: 61653 - protein, 39 aa, Artificial Sequence
  GFR-binding peptide
  MOD_RES (2)..(4)..(38)..(39): Xaa is C or S
  MOD_RES (16)..(17)..(18)..(19)..(20): Xaa is A or G
  MOD_RES (21)..(22)..(23)..(24): Xaa is A or G or is absent
RXGXESVAMGRHKRLXXXXXXXXXYYLISTASLKTPVXX

SEQ ID NO: 61654 - protein, 39 aa, Artificial Sequence; identical to SEQ ID NO: 6107
  GFR-binding peptide
  MOD_RES (33)..(34): Xaa is C or S
  MOD_RES (11)..(12)..(13)..(14)..(15): Xaa is A or G
  MOD_RES (16)..(17)..(18)..(19): Xaa is A or G or is absent

SEQ ID NO: 61655 - protein, 40 aa, Artificial Sequence; identical to SEQ ID NO: 6109
  GFR-binding peptide
  MOD_RES (2)..(35)..(36): Xaa is C or S
  MOD_RES (13)..(14)..(15)..(16)..(17): Xaa is A or G
  MOD_RES (18)..(19)..(20)..(21): Xaa is A or G or is absent

SEQ ID NO: 61656 - protein, 37 aa, Artificial Sequence; identical to SEQ ID NO: 6110
  GFR-binding peptide
  MOD_RES (2)..(35)..(36): Xaa is C or S

SEQ ID NO: 61657 - protein, 42 aa, Artificial Sequence
  GFR-binding peptide
  MOD_RES (2)..(4)..(36)..(37): Xaa is C or S
RXGXSEVVMDYHYKLVVNNASDKYLISIPSLRTPVXXTPPTS

SEQ ID NO: 61658 - protein, 36 aa, Artificial Sequence
  GFR-binding peptide
  MOD_RES (2)..(4)..(36): Xaa is C or S
RXAXSEVTMNRHKRLVVNKNEDYYLISTASMKEPVX

SEQ ID NO: 61659 - protein, 42 aa, Artificial Sequence; identical to SEQ ID NO: 6115
  GFR-binding peptide
  MOD_RES (2)..(36)..(37): Xaa is C or S
  MOD_RES (14)..(15)..(16)..(17)..(18): Xaa is A or G
  MOD_RES (19)..(20)..(21)..(22): Xaa is A or G or is absent

SEQ ID NO: 61660 - protein, 35 aa, Artificial Sequence
  GFR-binding peptide
  MOD_RES (2)..(2): Xaa is C or S
  MOD_RES (14)..(15)..(16)..(17)..(18): Xaa is A or G
  MOD_RES (19)..(20)..(21)..(22): Xaa is A or G or is absent
GXSEVVMDRHKRLXXXXXXXXXYYLISTASLRTPV

SEQ ID NO: 61661 - protein, 35 aa, Artificial Sequence
  GFR-binding peptide
  MOD_RES (1)..(3)..(35): Xaa is C or S
XGXSEVVMDRHKRLVVNNASDYYLISTASLRTPVX

SEQ ID NO: 61662 - protein, 33 aa, Artificial Sequence; identical to SEQ ID NO: 27252
  GFR-binding peptide
  MOD_RES (31)..(32): Xaa is C or S

SEQ ID NO: 61663 - protein, 39 aa, Artificial Sequence
  GFR-binding peptide
  MOD_RES (2)..(34)..(35): Xaa is C or S
GXRDVVMGYHYKLIIQQKDNKYLMSIPSMKTPTXXPGAS

SEQ ID NO: 61664 - protein, 40 aa, Artificial Sequence; identical to SEQ ID NO: 32243
  GFR-binding peptide
  MOD_RES (2)..(35)..(36): Xaa is C or S
  MOD_RES (13)..(14)..(15)..(16)..(17): Xaa is A or G
  MOD_RES (18)..(19)..(20)..(21): Xaa is A or G or is absent

SEQ ID NO: 61665 - protein, 38 aa, Artificial Sequence; identical to SEQ ID NO: 6125
  GFR-binding peptide
  MOD_RES (1)..(3)..(35)..(36): Xaa is C or S

SEQ ID NO: 61666 - protein, 34 aa, Artificial Sequence; identical to SEQ ID NO: 6127
  GFR-binding peptide
  MOD_RES (33)..(34): Xaa is C or S
  MOD_RES (11)..(12)..(13)..(14)..(15): Xaa is A or G
  MOD_RES (16)..(17)..(18)..(19): Xaa is A or G or is absent

SEQ ID NO: 61667 - protein, 39 aa, Artificial Sequence; identical to SEQ ID NO: 27260
  GFR-binding peptide
  MOD_RES (34)..(34): Xaa is C or S
  MOD_RES (12)..(13)..(14)..(15)..(16): Xaa is A or G
  MOD_RES (17)..(18)..(19)..(20): Xaa is A or G or is absent

SEQ ID NO: 61668 - protein, 40 aa, Artificial Sequence
  GFR-binding peptide
  MOD_RES (1)..(3)..(35)..(36): Xaa is C or S
XAXSEVTMNPIKGYVVNKNEDFYLINIPSMKEPVXXPEPI

SEQ ID NO: 61669 - protein, 36 aa, Artificial Sequence; identical to SEQ ID NO: 32247
  GFR-binding peptide
  MOD_RES (34)..(35): Xaa is C or S
  MOD_RES (12)..(13)..(14)..(15)..(16): Xaa is A or G
  MOD_RES (17)..(18)..(19)..(20): Xaa is A or G or is absent

SEQ ID NO: 61670 - protein, 39 aa, Artificial Sequence; identical to SEQ ID NO: 6133
  GFR-binding peptide
  MOD_RES (33)..(34): Xaa is C or S
  MOD_RES (11)..(12)..(13)..(14)..(15): Xaa is A or G
  MOD_RES (16)..(17)..(18)..(19): Xaa is A or G or is absent

SEQ ID NO: 61671 - protein, 41 aa, Artificial Sequence
  GFR-binding peptide
  MOD_RES (1)..(3)..(37)..(38): Xaa is C or S
  MOD_RES (15)..(16)..(17)..(18)..(19): Xaa is A or G
  MOD_RES (20)..(21)..(22)..(23): Xaa is A or G or is absent
XAXSEVTMNEYKFKXXXXXXXXXLYLISIPEMKEPVXXPEP

SEQ ID NO: 61672 - protein, 40 aa, Artificial Sequence; identical to SEQ ID NO: 6134
  GFR-binding peptide
  MOD_RES (2)..(34)..(35): Xaa is C or S

SEQ ID NO: 61673 - protein, 36 aa, Artificial Sequence; identical to SEQ ID NO: 27265
  GFR-binding peptide
  MOD_RES (34)..(35): Xaa is C or S
  MOD_RES (12)..(13)..(14)..(15)..(16): Xaa is A or G
  MOD_RES (17)..(18)..(19)..(20): Xaa is A or G or is absent

SEQ ID NO: 61674 - protein, 41 aa, Artificial Sequence; identical to SEQ ID NO: 27267
  GFR-binding peptide
  MOD_RES (2)..(35)..(36): Xaa is C or S

SEQ ID NO: 61675 - protein, 35 aa, Artificial Sequence
  GFR-binding peptide
  MOD_RES (32)..(33): Xaa is C or S
RDVVMGYHYKLIIQQKDNKYLMSIPSMKTPTXXPG

SEQ ID NO: 61676 - protein, 40 aa, Artificial Sequence; identical to SEQ ID NO: 27269
  GFR-binding peptide
  MOD_RES (2)..(4)..(37)..(38): Xaa is C or S

SEQ ID NO: 61677 - protein, 38 aa, Artificial Sequence; identical to SEQ ID NO: 32257
  GFR-binding peptide
  MOD_RES (2)..(36)..(37): Xaa is C or S
  MOD_RES (14)..(15)..(16)..(17)..(18): Xaa is A or G
  MOD_RES (19)..(20)..(21)..(22): Xaa is A or G or is absent

SEQ ID NO: 61678 - protein, 41 aa, Artificial Sequence
  GFR-binding peptide
  MOD_RES (1)..(35)..(36): Xaa is C or S
  MOD_RES (13)..(14)..(15)..(16)..(17): Xaa is A or G
  MOD_RES (18)..(19)..(20)..(21): Xaa is A or G or is absent
XRDVVMGRHKRLXXXXXXXXXYYLMSTASMKTPTXXPGASG

SEQ ID NO: 61679 - protein, 35 aa, Artificial Sequence; identical to SEQ ID NO: 27272
  GFR-binding peptide
  MOD_RES (2)..(35): Xaa is C or S
  MOD_RES (13)..(14)..(15)..(16)..(17): Xaa is A or G
  MOD_RES (18)..(19)..(20)..(21): Xaa is A or G or is absent

SEQ ID NO: 61680 - protein, 34 aa, Artificial Sequence
  GFR-binding peptide
  MOD_RES (1)..(1): Xaa is C or S
  MOD_RES (13)..(14)..(15)..(16)..(17): Xaa is A or G
  MOD_RES (18)..(19)..(20)..(21): Xaa is A or G or is absent
XSEVTMNRYKKLXXXXXXXXXFYLISIANMKEPV

SEQ ID NO: 61681 - protein, 42 aa, Artificial Sequence; identical to SEQ ID NO: 32262
  GFR-binding peptide
  MOD_RES (2)..(36)..(37): Xaa is C or S
  MOD_RES (14)..(15)..(16)..(17)..(18): Xaa is A or G
  MOD_RES (19)..(20)..(21)..(22): Xaa is A or G or is absent

SEQ ID NO: 61682 - protein, 37 aa, Artificial Sequence; identical to SEQ ID NO: 27275
  GFR-binding peptide
  MOD_RES (31)..(32): Xaa is C or S

SEQ ID NO: 61683 - protein, 37 aa, Artificial Sequence; identical to SEQ ID NO: 6146
  GFR-binding peptide
  MOD_RES (2)..(33)..(34): Xaa is C or S

SEQ ID NO: 61684 - protein, 34 aa, Artificial Sequence; identical to SEQ ID NO: 6149
  GFR-binding peptide
  MOD_RES (34)..(34): Xaa is C or S
  MOD_RES (12)..(13)..(14)..(15)..(16): Xaa is A or G
  MOD_RES (17)..(18)..(19)..(20): Xaa is A or G or is absent

SEQ ID NO: 61685 - protein, 41 aa, Artificial Sequence; identical to SEQ ID NO: 27279
  GFR-binding peptide
  MOD_RES (1)..(3)..(35)..(36): Xaa is C or S

SEQ ID NO: 61686 - protein, 36 aa, Artificial Sequence; identical to SEQ ID NO: 27280
  GFR-binding peptide
  MOD_RES (1)..(3): Xaa is C or S
  MOD_RES (15)..(16)..(17)..(18)..(19): Xaa is A or G
  MOD_RES (20)..(21)..(22)..(23): Xaa is A or G or is absent

SEQ ID NO: 61687 - protein, 37 aa, Artificial Sequence; identical to SEQ ID NO: 6152
  GFR-binding peptide
  MOD_RES (1)..(34)..(35): Xaa is C or S
  MOD_RES (12)..(13)..(14)..(15)..(16): Xaa is A or G
  MOD_RES (17)..(18)..(19)..(20): Xaa is A or G or is absent

SEQ ID NO: 61688 - protein, 38 aa, Artificial Sequence; identical to SEQ ID NO: 6153
  GFR-binding peptide
  MOD_RES (1)..(33): Xaa is C or S

SEQ ID NO: 61689 - protein, 40 aa, Artificial Sequence; identical to SEQ ID NO: 32270
  GFR-binding peptide
  MOD_RES (2)..(34)..(35): Xaa is C or S

SEQ ID NO: 61690 - protein, 36 aa, Artificial Sequence; identical to SEQ ID NO: 6154
  GFR-binding peptide
  MOD_RES (1)..(3): Xaa is C or S
  MOD_RES (15)..(16)..(17)..(18)..(19): Xaa is A or G
  MOD_RES (20)..(21)..(22)..(23): Xaa is A or G or is absent

SEQ ID NO: 61691 - protein, 40 aa, Artificial Sequence; identical to SEQ ID NO: 27290
  GFR-binding peptide
  MOD_RES (2)..(4)..(36)..(37): Xaa is C or S

SEQ ID NO: 61692 - protein, 37 aa, Artificial Sequence
  GFR-binding peptide
  MOD_RES (2)..(35)..(36): Xaa is C or S
  MOD_RES (13)..(14)..(15)..(16)..(17): Xaa is A or G
  MOD_RES (18)..(19)..(20)..(21): Xaa is A or G or is absent
KXSRVIMPIKGYXXXXXXXXXFYLINIPSLAQPVXXP

SEQ ID NO: 61693 - protein, 38 aa, Artificial Sequence; identical to SEQ ID NO: 6159
  GFR-binding peptide
  MOD_RES (2)..(4)..(38): Xaa is C or S
  MOD_RES (16)..(17)..(18)..(19)..(20): Xaa is A or G
  MOD_RES (21)..(22)..(23)..(24): Xaa is A or G or is absent

SEQ ID NO: 61694 - protein, 39 aa, Artificial Sequence
  GFR-binding peptide
  MOD_RES (2)..(36)..(37): Xaa is C or S
  MOD_RES (14)..(15)..(16)..(17)..(18): Xaa is A or G
  MOD_RES (19)..(20)..(21)..(22): Xaa is A or G or is absent
GXSEVVMDRHKRLXXXXXXXXXYYLISTASLRTPVXXTP

SEQ ID NO: 61695 - protein, 34 aa, Artificial Sequence
  GFR-binding peptide
  MOD_RES (1)..(34): Xaa is C or S
  MOD_RES (12)..(13)..(14)..(15)..(16): Xaa is A or G
  MOD_RES (17)..(18)..(19)..(20): Xaa is A or G or is absent
XEEVIMEYKFKXXXXXXXXXLYLMSIPETKVPAX

SEQ ID NO: 61696 - protein, 36 aa, Artificial Sequence
  GFR-binding peptide
  MOD_RES (33)..(34): Xaa is C or S
  MOD_RES (11)..(12)..(13)..(14)..(15): Xaa is A or G
  MOD_RES (16)..(17)..(18)..(19): Xaa is A or G or is absent
EVTMNEYKFKXXXXXXXXXLYLISIPEMKEPVXXPE

SEQ ID NO: 61697 - protein, 37 aa, Artificial Sequence; identical to SEQ ID NO: 6160
  GFR-binding peptide
  MOD_RES (2)..(4)..(37): Xaa is C or S
  MOD_RES (15)..(16)..(17)..(18)..(19): Xaa is A or G
  MOD_RES (20)..(21)..(22)..(23): Xaa is A or G or is absent

SEQ ID NO: 61698 - protein, 32 aa, Artificial Sequence
  GFR-binding peptide
  MOD_RES (31)..(32): Xaa is C or S
EVVMDYHYKLVVNNASDKYLISIPSLRTPVXX

SEQ ID NO: 61699 - protein, 34 aa, Artificial Sequence; identical to SEQ ID NO: 32278
  GFR-binding peptide
  MOD_RES (33)..(34): Xaa is C or S
  MOD_RES (11)..(12)..(13)..(14)..(15): Xaa is A or G
  MOD_RES (16)..(17)..(18)..(19): Xaa is A or G or is absent

SEQ ID NO: 61700 - protein, 33 aa, Artificial Sequence; identical to SEQ ID NO: 57210
  GFR-binding peptide
  MOD_RES (1)..(32)..(33): Xaa is C or S

SEQ ID NO: 61701 - protein, 37 aa, Artificial Sequence
  GFR-binding peptide
  MOD_RES (1)..(3)..(36)..(37): Xaa is C or S
  MOD_RES (14)..(15)..(16)..(17)..(18): Xaa is A or G
  MOD_RES (19)..(20)..(21)..(22): Xaa is A or G or is absent
XKXSKVVMPIKGYXXXXXXXXXFYLINIPSLDQPVXX

SEQ ID NO: 61702 - protein, 39 aa, Artificial Sequence; identical to SEQ ID NO: 27298
  GFR-binding peptide
  MOD_RES (2)..(4)..(38)..(39): Xaa is C or S
  MOD_RES (16)..(17)..(18)..(19)..(20): Xaa is A or G
  MOD_RES (21)..(22)..(23)..(24): Xaa is A or G or is absent

SEQ ID NO: 61703 - protein, 34 aa, Artificial Sequence; identical to SEQ ID NO: 6162
  GFR-binding peptide
  MOD_RES (1)..(1): Xaa is C or S
  MOD_RES (13)..(14)..(15)..(16)..(17): Xaa is A or G
  MOD_RES (18)..(19)..(20)..(21): Xaa is A or G or is absent

SEQ ID NO: 61704 - protein, 32 aa, Artificial Sequence
  GFR-binding peptide
  MOD_RES (31)..(32): Xaa is C or S
EVTMNRYKKLVVNKNEDFYLISIANMKEPVXX

SEQ ID NO: 61705 - protein, 40 aa, Artificial Sequence; identical to SEQ ID NO: 6164
  GFR-binding peptide
  MOD_RES (2)..(4)..(36)..(37): Xaa is C or S

SEQ ID NO: 61706 - protein, 38 aa, Artificial Sequence; identical to SEQ ID NO: 6167
  GFR-binding peptide
  MOD_RES (2)..(34)..(35): Xaa is C or S

SEQ ID NO: 61707 - protein, 35 aa, Artificial Sequence; identical to SEQ ID NO: 6171
  GFR-binding peptide
  MOD_RES (34)..(35): Xaa is C or S
  MOD_RES (12)..(13)..(14)..(15)..(16): Xaa is A or G
  MOD_RES (17)..(18)..(19)..(20): Xaa is A or G or is absent

SEQ ID NO: 61708 - protein, 35 aa, Artificial Sequence
  GFR-binding peptide
  MOD_RES (1)..(35): Xaa is C or S
  MOD_RES (13)..(14)..(15)..(16)..(17): Xaa is A or G
  MOD_RES (18)..(19)..(20)..(21): Xaa is A or G or is absent
XSEVTMNRYKKLXXXXXXXXXFYLISIANMKEPVX

SEQ ID NO: 61709 - protein, 31 aa, Artificial Sequence
  GFR-binding peptide
  MOD_RES (31)..(31): Xaa is C or S
EVVMDYHYKLVVNNASDKYLISIPSLRTPVX

SEQ ID NO: 61710 - protein, 36 aa, Artificial Sequence; identical to SEQ ID NO: 6175
  GFR-binding peptide
  MOD_RES (1)..(34)..(35): Xaa is C or S
  MOD_RES (12)..(13)..(14)..(15)..(16): Xaa is A or G
  MOD_RES (17)..(18)..(19)..(20): Xaa is A or G or is absent

SEQ ID NO: 61711 - protein, 32 aa, Artificial Sequence
  GFR-binding peptide
  MOD_RES (1)..(32): Xaa is C or S
XSKVVMPIKGYVKPTRGVFYLINIPSLDQPVX

SEQ ID NO: 61712 - protein, 31 aa, Artificial Sequence
  GFR-binding peptide
  MOD_RES (1)..(1): Xaa is C or S
XSKVVMPIKGYVKPTRGVFYLINIPSLDQPV

SEQ ID NO: 61713 - protein, 39 aa, Artificial Sequence; identical to SEQ ID NO: 6177
  GFR-binding peptide
  MOD_RES (2)..(4)..(36)..(37): Xaa is C or S

SEQ ID NO: 61714 - protein, 40 aa, Artificial Sequence; identical to SEQ ID NO: 27314
  GFR-binding peptide
  MOD_RES (2)..(4)..(35)..(36): Xaa is C or S

SEQ ID NO: 61715 - protein, 38 aa, Artificial Sequence
  GFR-binding peptide
  MOD_RES (1)..(35)..(36): Xaa is C or S
  MOD_RES (13)..(14)..(15)..(16)..(17): Xaa is A or G
  MOD_RES (18)..(19)..(20)..(21): Xaa is A or G or is absent
XSEVVMDRHKRLXXXXXXXXXYYLISTASLRTPVXXTP

SEQ ID NO: 61716 - protein, 38 aa, Artificial Sequence; identical to SEQ ID NO: 2269
  GFR-binding peptide
  MOD_RES (32)..(33): Xaa is C or S

SEQ ID NO: 61717 - protein, 36 aa, Artificial Sequence
  GFR-binding peptide
  MOD_RES (1)..(3)..(35)..(36): Xaa is C or S
XAXSEVTMNYHYKLVVNKNEDKYLISIPSMKEPVXX

SEQ ID NO: 61718 - protein, 42 aa, Artificial Sequence; identical to SEQ ID NO: 2274
  GFR-binding peptide
  MOD_RES (1)..(3)..(38)..(39): Xaa is C or S
  MOD_RES (16)..(17)..(18)..(19)..(20): Xaa is A or G
  MOD_RES (21)..(22)..(23)..(24): Xaa is A or G or is absent

SEQ ID NO: 61719 - protein, 36 aa, Artificial Sequence
  GFR-binding peptide
  MOD_RES (1)..(3): Xaa is C or S
  MOD_RES (15)..(16)..(17)..(18)..(19): Xaa is A or G
  MOD_RES (20)..(21)..(22)..(23): Xaa is A or G or is absent
XAXSEVTMNRHKRLXXXXXXXXXYYLISTASMKEPV

SEQ ID NO: 61720 - protein, 31 aa, Artificial Sequence
  GFR-binding peptide
  MOD_RES (31)..(31): Xaa is C or S
EVTMNRYKKLVVNKNEDFYLISIANMKEPVX

SEQ ID NO: 61721 - protein, 38 aa, Artificial Sequence
  GFR-binding peptide
  MOD_RES (1)..(3)..(34)..(35): Xaa is C or S
XGXEEVIMRHKRLLLVRGNDYYLMSTASTKVPAXXTSP

SEQ ID NO: 61722 - protein, 38 aa, Artificial Sequence; identical to SEQ ID NO: 2276
  GFR-binding peptide
  MOD_RES (32)..(32): Xaa is C or S

SEQ ID NO: 61723 - protein, 33 aa, Artificial Sequence; identical to SEQ ID NO: 2277
  GFR-binding peptide
  MOD_RES (2)..(2): Xaa is C or S

SEQ ID NO: 61724 - protein, 42 aa, Artificial Sequence
  GFR-binding peptide
  MOD_RES (2)..(36)..(37): Xaa is C or S
  MOD_RES (14)..(15)..(16)..(17)..(18): Xaa is A or G
  MOD_RES (19)..(20)..(21)..(22): Xaa is A or G or is absent
GXRDVVMGEYKFKXXXXXXXXXLYLMSIPEMKTPTXXPGASG

SEQ ID NO: 61725 - protein, 34 aa, Artificial Sequence
  GFR-binding peptide
  MOD_RES (1)..(3): Xaa is C or S
XAXSEVTMNEYKFKVVNKNEDLYLISIPEMKEPV

SEQ ID NO: 61726 - protein, 44 aa, Artificial Sequence; identical to SEQ ID NO: 56141
  GFR-binding peptide
  MOD_RES (2)..(4)..(38)..(39): Xaa is C or S
  MOD_RES (16)..(17)..(18)..(19)..(20): Xaa is A or G
  MOD_RES (21)..(22)..(23)..(24): Xaa is A or G or is absent

SEQ ID NO: 61727 - protein, 38 aa, Artificial Sequence; identical to SEQ ID NO: 56142
  GFR-binding peptide
  MOD_RES (1)..(3)..(37)..(38): Xaa is C or S
  MOD_RES (15)..(16)..(17)..(18)..(19): Xaa is A or G
  MOD_RES (20)..(21)..(22)..(23): Xaa is A or G or is absent

SEQ ID NO: 61728 - protein, 40 aa, Artificial Sequence
  GFR-binding peptide
  MOD_RES (1)..(3)..(34)..(35): Xaa is C or S
XKXSKVIMPIKGYIKPTKGIFYLINIPSLDQSVXXPSASA

SEQ ID NO: 61729 - protein, 33 aa, Artificial Sequence
  GFR-binding peptide
  MOD_RES (33)..(33): Xaa is C or S
  MOD_RES (11)..(12)..(13)..(14)..(15): Xaa is A or G
  MOD_RES (16)..(17)..(18)..(19): Xaa is A or G or is absent
EEVIMYHYKLXXXXXXXXXKYLMSIPSTKVPAX

SEQ ID NO: 61730 - protein, 35 aa, Artificial Sequence; identical to SEQ ID NO: 31213
  GFR-binding peptide
  MOD_RES (34)..(35): Xaa is C or S
  MOD_RES (12)..(13)..(14)..(15)..(16): Xaa is A or G
  MOD_RES (17)..(18)..(19)..(20): Xaa is A or G or is absent

SEQ ID NO: 61731 - protein, 37 aa, Artificial Sequence
  GFR-binding peptide
  MOD_RES (2)..(4)..(36)..(37): Xaa is C or S
RXAXSEVTMNYHYKLVVNKNEDKYLISIPSMKEPVXX

SEQ ID NO: 61732 - protein, 39 aa, Artificial Sequence
  GFR-binding peptide
  MOD_RES (1)..(3)..(34)..(35): Xaa is C or S
XKXSKVVMPIKGYVKPTRGVFYLINIPSLDQPVXXPSAS

SEQ ID NO: 61733 - protein, 33 aa, Artificial Sequence
  GFR-binding peptide
  MOD_RES (33)..(33): Xaa is C or S
  MOD_RES (11)..(12)..(13)..(14)..(15): Xaa is A or G
  MOD_RES (16)..(17)..(18)..(19): Xaa is A or G or is absent
EEVIMEYKFKXXXXXXXXXLYLMSIPETKVPAX

SEQ ID NO: 61734 - protein, 35 aa, Artificial Sequence; identical to SEQ ID NO: 31221
  GFR-binding peptide
  MOD_RES (32)..(33): Xaa is C or S

SEQ ID NO: 61735 - protein, 38 aa, Artificial Sequence; identical to SEQ ID NO: 2287
  GFR-binding peptide
  MOD_RES (32)..(33): Xaa is C or S

SEQ ID NO: 61736 - protein, 33 aa, Artificial Sequence; identical to SEQ ID NO: 23269
  GFR-binding peptide
  MOD_RES (31)..(32): Xaa is C or S

SEQ ID NO: 61737 - protein, 36 aa, Artificial Sequence; identical to SEQ ID NO: 56147
  GFR-binding peptide
  MOD_RES (33)..(34): Xaa is C or S
  MOD_RES (11)..(12)..(13)..(14)..(15): Xaa is A or G
  MOD_RES (16)..(17)..(18)..(19): Xaa is A or G or is absent

SEQ ID NO: 61738 - protein, 41 aa, Artificial Sequence; identical to SEQ ID NO: 56148
  GFR-binding peptide
  MOD_RES (2)..(36)..(37): Xaa is C or S
  MOD_RES (14)..(15)..(16)..(17)..(18): Xaa is A or G
  MOD_RES (19)..(20)..(21)..(22): Xaa is A or G or is absent

SEQ ID NO: 61739 - protein, 40 aa, Artificial Sequence
  GFR-binding peptide
  MOD_RES (2)..(4)..(37)..(38): Xaa is C or S
  MOD_RES (15)..(16)..(17)..(18)..(19): Xaa is A or G
  MOD_RES (20)..(21)..(22)..(23): Xaa is A or G or is absent
LXGXEEVIMYHYKLXXXXXXXXXKYLMSIPSTKVPAXXTS

SEQ ID NO: 61740 - protein, 42 aa, Artificial Sequence; identical to SEQ ID NO: 2289
  GFR-binding peptide
  MOD_RES (1)..(3)..(37)..(38): Xaa is C or S
  MOD_RES (15)..(16)..(17)..(18)..(19): Xaa is A or G
  MOD_RES (20)..(21)..(22)..(23): Xaa is A or G or is absent

SEQ ID NO: 61741 - protein, 40 aa, Artificial Sequence; identical to SEQ ID NO: 23272
  GFR-binding peptide
  MOD_RES (1)..(3)..(36)..(37): Xaa is C or S
  MOD_RES (14)..(15)..(16)..(17)..(18): Xaa is A or G
  MOD_RES (19)..(20)..(21)..(22): Xaa is A or G or is absent

SEQ ID NO: 61742 - protein, 39 aa, Artificial Sequence; identical to SEQ ID NO: 2290
  GFR-binding peptide
  MOD_RES (2)..(36)..(37): Xaa is C or S
  MOD_RES (14)..(15)..(16)..(17)..(18): Xaa is A or G
  MOD_RES (19)..(20)..(21)..(22): Xaa is A or G or is absent

SEQ ID NO: 61743 - protein, 38 aa, Artificial Sequence; identical to SEQ ID NO: 2294
  GFR-binding peptide
  MOD_RES (2)..(4)..(37)..(38): Xaa is C or S
  MOD_RES (15)..(16)..(17)..(18)..(19): Xaa is A or G
  MOD_RES (20)..(21)..(22)..(23): Xaa is A or G or is absent

SEQ ID NO: 61744 - protein, 34 aa, Artificial Sequence
  GFR-binding peptide
  MOD_RES (32)..(33): Xaa is C or S
AEVVMDRHKRLVVNNAADYYLISTASLRAPVXXS

SEQ ID NO: 61745 - protein, 40 aa, Artificial Sequence; identical to SEQ ID NO: 23278
  GFR-binding peptide
  MOD_RES (2)..(4)..(36)..(37): Xaa is C or S

SEQ ID NO: 61746 - protein, 40 aa, Artificial Sequence; identical to SEQ ID NO: 23280
  GFR-binding peptide
  MOD_RES (1)..(3)..(35)..(36): Xaa is C or S

SEQ ID NO: 61747 - protein, 35 aa, Artificial Sequence; identical to SEQ ID NO: 23286
  GFR-binding peptide
  MOD_RES (1)..(35): Xaa is C or S
  MOD_RES (13)..(14)..(15)..(16)..(17): Xaa is A or G
  MOD_RES (18)..(19)..(20)..(21): Xaa is A or G or is absent

SEQ ID NO: 61748 - protein, 35 aa, Artificial Sequence; identical to SEQ ID NO: 23287
  GFR-binding peptide
  MOD_RES (33)..(34): Xaa is C or S
  MOD_RES (11)..(12)..(13)..(14)..(15): Xaa is A or G
  MOD_RES (16)..(17)..(18)..(19): Xaa is A or G or is absent

SEQ ID NO: 61749 - protein, 36 aa, Artificial Sequence; identical to SEQ ID NO: 23290
  GFR-binding peptide
  MOD_RES (1)..(35)..(36): Xaa is C or S
  MOD_RES (13)..(14)..(15)..(16)..(17): Xaa is A or G
  MOD_RES (18)..(19)..(20)..(21): Xaa is A or G or is absent

SEQ ID NO: 61750 - protein, 36 aa, Artificial Sequence; identical to SEQ ID NO: 31239
  GFR-binding peptide
  MOD_RES (1)..(3): Xaa is C or S
  MOD_RES (15)..(16)..(17)..(18)..(19): Xaa is A or G
  MOD_RES (20)..(21)..(22)..(23): Xaa is A or G or is absent

SEQ ID NO: 61751 - protein, 34 aa, Artificial Sequence; identical to SEQ ID NO: 2306
  GFR-binding peptide
  MOD_RES (32)..(33): Xaa is C or S

SEQ ID NO: 61752 - protein, 30 aa, Artificial Sequence; identical to SEQ ID NO: 2308
  GFR-binding peptide

SEQ ID NO: 61753 - protein, 32 aa, Artificial Sequence; identical to SEQ ID NO: 2312
  GFR-binding peptide
  MOD_RES (32)..(32): Xaa is C or S

SEQ ID NO: 61754 - protein, 35 aa, Artificial Sequence; identical to SEQ ID NO: 23295
  GFR-binding peptide
  MOD_RES (1)..(3): Xaa is C or S
  MOD_RES (14)..(15)..(16)..(17)..(18): Xaa is A or G
  MOD_RES (19)..(20)..(21)..(22): Xaa is A or G or is absent

SEQ ID NO: 61755 - protein, 43 aa, Artificial Sequence; identical to SEQ ID NO: 31244
  GFR-binding peptide
  MOD_RES (1)..(3)..(37)..(38): Xaa is C or S
  MOD_RES (15)..(16)..(17)..(18)..(19): Xaa is A or G
  MOD_RES (20)..(21)..(22)..(23): Xaa is A or G or is absent

SEQ ID NO: 61756 - protein, 35 aa, Artificial Sequence; identical to SEQ ID NO: 2314
  GFR-binding peptide
  MOD_RES (2)..(35): Xaa is C or S

SEQ ID NO: 61757 - protein, 35 aa, Artificial Sequence; identical to SEQ ID NO: 31247
  GFR-binding peptide
  MOD_RES (1)..(1): Xaa is C or S
  MOD_RES (14)..(15)..(16)..(17)..(18): Xaa is A or G
  MOD_RES (19)..(20)..(21)..(22): Xaa is A or G or is absent

SEQ ID NO: 61758 - protein, 40 aa, Artificial Sequence; identical to SEQ ID NO: 23297
  GFR-binding peptide
  MOD_RES (1)..(35)..(36): Xaa is C or S
  MOD_RES (13)..(14)..(15)..(16)..(17): Xaa is A or G
  MOD_RES (18)..(19)..(20)..(21): Xaa is A or G or is absent

SEQ ID NO: 61759 - protein, 37 aa, Artificial Sequence; identical to SEQ ID NO: 2318
  GFR-binding peptide
  MOD_RES (1)..(3)..(36)..(37): Xaa is C or S

SEQ ID NO: 61760 - protein, 41 aa, Artificial Sequence; identical to SEQ ID NO: 56183
  GFR-binding peptide
  MOD_RES (1)..(3)..(35)..(36): Xaa is C or S

SEQ ID NO: 61761 - protein, 40 aa, Artificial Sequence
  GFR-binding peptide
  MOD_RES (1)..(3)..(35)..(36): Xaa is C or S
XAXSEVTMNYHYKLVVNKNEDKYLISIPSMKEPVXXPEPI

SEQ ID NO: 61762 - protein, 30 aa, Artificial Sequence; identical to SEQ ID NO: 23302
  GFR-binding peptide

SEQ ID NO: 61763 - protein, 34 aa, Artificial Sequence; identical to SEQ ID NO: 2326
  GFR-binding peptide
  MOD_RES (1)..(34): Xaa is C or S
  MOD_RES (12)..(13)..(14)..(15)..(16): Xaa is A or G
  MOD_RES (17)..(18)..(19)..(20): Xaa is A or G or is absent

SEQ ID NO: 61764 - protein, 40 aa, Artificial Sequence; identical to SEQ ID NO: 23308
  GFR-binding peptide
  MOD_RES (35)..(36): Xaa is C or S
  MOD_RES (13)..(14)..(15)..(16)..(17): Xaa is A or G
  MOD_RES (18)..(19)..(20)..(21): Xaa is A or G or is absent

SEQ ID NO: 61765 - protein, 42 aa, Artificial Sequence; identical to SEQ ID NO: 2328
  GFR-binding peptide
  MOD_RES (2)..(4)..(37)..(38): Xaa is C or S
  MOD_RES (15)..(16)..(17)..(18)..(19): Xaa is A or G
  MOD_RES (20)..(21)..(22)..(23): Xaa is A or G or is absent

SEQ ID NO: 61766 - protein, 40 aa, Artificial Sequence; identical to SEQ ID NO: 31256
  GFR-binding peptide
  MOD_RES (2)..(34)..(35): Xaa is C or S

SEQ ID NO: 61767 - protein, 33 aa, Artificial Sequence; identical to SEQ ID NO: 2330
  GFR-binding peptide
  MOD_RES (1)..(1): Xaa is C or S
  MOD_RES (12)..(13)..(14)..(15)..(16): Xaa is A or G
  MOD_RES (17)..(18)..(19)..(20): Xaa is A or G or is absent

SEQ ID NO: 61768 - protein, 38 aa, Artificial Sequence; identical to SEQ ID NO: 31263
  GFR-binding peptide
  MOD_RES (1)..(3)..(35)..(36): Xaa is C or S

SEQ ID NO: 61769 - protein, 37 aa, Artificial Sequence; identical to SEQ ID NO: 23318
  GFR-binding peptide
  MOD_RES (1)..(33)..(34): Xaa is C or S

SEQ ID NO: 61770 - protein, 41 aa, Artificial Sequence; identical to SEQ ID NO: 31266
  GFR-binding peptide
  MOD_RES (1)..(3)..(38)..(39): Xaa is C or S
  MOD_RES (16)..(17)..(18)..(19)..(20): Xaa is A or G
  MOD_RES (21)..(22)..(23)..(24): Xaa is A or G or is absent

SEQ ID NO: 61771 - protein, 42 aa, Artificial Sequence; identical to SEQ ID NO: 23321
  GFR-binding peptide
  MOD_RES (2)..(4)..(36)..(37): Xaa is C or S

SEQ ID NO: 61772 - protein, 37 aa, Artificial Sequence
  GFR-binding peptide
  MOD_RES (2)..(33)..(34): Xaa is C or S
KXSKVIMPIKGYIKPTKGIFYLINIPSLDQSVXXPSA

SEQ ID NO: 61773 - protein, 39 aa, Artificial Sequence; identical to SEQ ID NO: 2341
  GFR-binding peptide
  MOD_RES (33)..(34): Xaa is C or S
  MOD_RES (11)..(12)..(13)..(14)..(15): Xaa is A or G
  MOD_RES (16)..(17)..(18)..(19): Xaa is A or G or is absent

SEQ ID NO: 61774 - protein, 33 aa, Artificial Sequence
  GFR-binding peptide
  MOD_RES (33)..(33): Xaa is C or S
  MOD_RES (11)..(12)..(13)..(14)..(15): Xaa is A or G
  MOD_RES (16)..(17)..(18)..(19): Xaa is A or G or is absent
EVTMNYHYKLXXXXXXXXXKYLISIPSMKEPVX

SEQ ID NO: 61775 - protein, 35 aa, Artificial Sequence; identical to SEQ ID NO: 31287
  GFR-binding peptide
  MOD_RES (31)..(32): Xaa is C or S

SEQ ID NO: 61776 - protein, 37 aa, Artificial Sequence; identical to SEQ ID NO: 23329
  GFR-binding peptide
  MOD_RES (1)..(33)..(34): Xaa is C or S

SEQ ID NO: 61777 - protein, 39 aa, Artificial Sequence; identical to SEQ ID NO: 2346
  GFR-binding peptide
  MOD_RES (33)..(34): Xaa is C or S
  MOD_RES (11)..(12)..(13)..(14)..(15): Xaa is A or G
  MOD_RES (16)..(17)..(18)..(19): Xaa is A or G or is absent

SEQ ID NO: 61778 - protein, 32 aa, Artificial Sequence
  GFR-binding peptide
  MOD_RES (31)..(32): Xaa is C or S
EEVIMEYKFKLLVRGNDLYLMSIPETKVPAXX

SEQ ID NO: 61779 - protein, 33 aa, Artificial Sequence
  GFR-binding peptide
  MOD_RES (33)..(33): Xaa is C or S
  MOD_RES (11)..(12)..(13)..(14)..(15): Xaa is A or G
  MOD_RES (16)..(17)..(18)..(19): Xaa is A or G or is absent
EVTMNEYKFKXXXXXXXXXLYLISIPEMKEPVX

SEQ ID NO: 61780 - protein, 36 aa, Artificial Sequence; identical to SEQ ID NO: 23330
  GFR-binding peptide
  MOD_RES (1)..(3)..(36): Xaa is C or S
  MOD_RES (14)..(15)..(16)..(17)..(18): Xaa is A or G
  MOD_RES (19)..(20)..(21)..(22): Xaa is A or G or is absent

SEQ ID NO: 61781 - protein, 35 aa, Artificial Sequence; identical to SEQ ID NO: 2347
  GFR-binding peptide
  MOD_RES (2)..(2): Xaa is C or S
  MOD_RES (14)..(15)..(16)..(17)..(18): Xaa is A or G
  MOD_RES (19)..(20)..(21)..(22): Xaa is A or G or is absent

SEQ ID NO: 61782 - protein, 33 aa, Artificial Sequence; identical to SEQ ID NO: 2352
  GFR-binding peptide
  MOD_RES (2)..(33): Xaa is C or S

SEQ ID NO: 61783 - protein, 35 aa, Artificial Sequence; identical to SEQ ID NO: 23335
  GFR-binding peptide
  MOD_RES (1)..(32)..(33): Xaa is C or S

SEQ ID NO: 61784 - protein, 43 aa, Artificial Sequence; identical to SEQ ID NO: 2355
  GFR-binding peptide
  MOD_RES (2)..(4)..(38)..(39): Xaa is C or S
  MOD_RES (16)..(17)..(18)..(19)..(20): Xaa is A or G
  MOD_RES (21)..(22)..(23)..(24): Xaa is A or G or is absent

SEQ ID NO: 61785 - protein, 34 aa, Artificial Sequence; identical to SEQ ID NO: 2356
  GFR-binding peptide
  MOD_RES (1)..(34): Xaa is C or S
  MOD_RES (12)..(13)..(14)..(15)..(16): Xaa is A or G
  MOD_RES (17)..(18)..(19)..(20): Xaa is A or G or is absent

SEQ ID NO: 61786 - protein, 36 aa, Artificial Sequence; identical to SEQ ID NO: 23342
  GFR-binding peptide
  MOD_RES (1)..(35)..(36): Xaa is C or S
  MOD_RES (13)..(14)..(15)..(16)..(17): Xaa is A or G
  MOD_RES (18)..(19)..(20)..(21): Xaa is A or G or is absent

SEQ ID NO: 61787 - protein, 41 aa, Artificial Sequence; identical to SEQ ID NO: 23344
  GFR-binding peptide
  MOD_RES (2)..(4)..(36)..(37): Xaa is C or S

SEQ ID NO: 61788 - protein, 35 aa, Artificial Sequence
  GFR-binding peptide
  MOD_RES (2)..(34)..(35): Xaa is C or S
AXSEVTMNPIKGYVVNKNEDFYLINIPSMKEPVXX

SEQ ID NO: 61789 - protein, 44 aa, Artificial Sequence
  GFR-binding peptide
  MOD_RES (2)..(4)..(38)..(39): Xaa is C or S
  MOD_RES (16)..(17)..(18)..(19)..(20): Xaa is A or G
  MOD_RES (21)..(22)..(23)..(24): Xaa is A or G or is absent
HXGXSRVVMNEYKFKXXXXXXXXXLYLVSIPELKTPAXXPKPVH

SEQ ID NO: 61790 - protein, 37 aa, Artificial Sequence; identical to SEQ ID NO: 31314
  GFR-binding peptide
  MOD_RES (31)..(32): Xaa is C or S

SEQ ID NO: 61791 - protein, 33 aa, Artificial Sequence; identical to SEQ ID NO: 2369
  GFR-binding peptide
  MOD_RES (2)..(2): Xaa is C or S

SEQ ID NO: 61792 - protein, 38 aa, Artificial Sequence; identical to SEQ ID NO: 31324
  GFR-binding peptide
  MOD_RES (2)..(34)..(35): Xaa is C or S

SEQ ID NO: 61793 - protein, 38 aa, Artificial Sequence; identical to SEQ ID NO: 2380
  GFR-binding peptide
  MOD_RES (1)..(3)..(37)..(38): Xaa is C or S
  MOD_RES (15)..(16)..(17)..(18)..(19): Xaa is A or G
  MOD_RES (20)..(21)..(22)..(23): Xaa is A or G or is absent

SEQ ID NO: 61794 - protein, 39 aa, Artificial Sequence; identical to SEQ ID NO: 2381
  GFR-binding peptide
  MOD_RES (2)..(36)..(37): Xaa is C or S
  MOD_RES (14)..(15)..(16)..(17)..(18): Xaa is A or G
  MOD_RES (19)..(20)..(21)..(22): Xaa is A or G or is absent

SEQ ID NO: 61795 - protein, 42 aa, Artificial Sequence; identical to SEQ ID NO: 2383
  GFR-binding peptide
  MOD_RES (2)..(36)..(37): Xaa is C or S
  MOD_RES (14)..(15)..(16)..(17)..(18): Xaa is A or G
  MOD_RES (19)..(20)..(21)..(22): Xaa is A or G or is absent

SEQ ID NO: 61796 - protein, 40 aa, Artificial Sequence; identical to SEQ ID NO: 31328
  GFR-binding peptide
  MOD_RES (34)..(35): Xaa is C or S
  MOD_RES (12)..(13)..(14)..(15)..(16): Xaa is A or G
  MOD_RES (17)..(18)..(19)..(20): Xaa is A or G or is absent

SEQ ID NO: 61797 - protein, 38 aa, Artificial Sequence; identical to SEQ ID NO: 23355
  GFR-binding peptide
  MOD_RES (32)..(33): Xaa is C or S

SEQ ID NO: 61798 - protein, 36 aa, Artificial Sequence; identical to SEQ ID NO: 2386
  GFR-binding peptide
  MOD_RES (1)..(3)..(34)..(35): Xaa is C or S

SEQ ID NO: 61799 - protein, 38 aa, Artificial Sequence; identical to SEQ ID NO: 23358
  GFR-binding peptide
  MOD_RES (34)..(35): Xaa is C or S
  MOD_RES (12)..(13)..(14)..(15)..(16): Xaa is A or G
  MOD_RES (17)..(18)..(19)..(20): Xaa is A or G or is absent

SEQ ID NO: 61800 - protein, 39 aa, Artificial Sequence
  GFR-binding peptide
  MOD_RES (1)..(3)..(35)..(36): Xaa is C or S
XGXAEVVMDRHKRLVVNNAADYYLISTASLRAPVXXSAP

SEQ ID NO: 61801 - protein, 44 aa, Artificial Sequence; identical to SEQ ID NO: 31331
  GFR-binding peptide
  MOD_RES (2)..(4)..(38)..(39): Xaa is C or S
  MOD_RES (16)..(17)..(18)..(19)..(20): Xaa is A or G
  MOD_RES (21)..(22)..(23)..(24): Xaa is A or G or is absent

SEQ ID NO: 61802 - protein, 38 aa, Artificial Sequence; identical to SEQ ID NO: 23360
  GFR-binding peptide
  MOD_RES (1)..(3)..(35)..(36): Xaa is C or S

SEQ ID NO: 61803 - protein, 35 aa, Artificial Sequence; identical to SEQ ID NO: 2390
  GFR-binding peptide
  MOD_RES (1)..(32)..(33): Xaa is C or S

SEQ ID NO: 61804 - protein, 39 aa, Artificial Sequence
  GFR-binding peptide
  MOD_RES (2)..(4)..(38)..(39): Xaa is C or S
  MOD_RES (16)..(17)..(18)..(19)..(20): Xaa is A or G
  MOD_RES (21)..(22)..(23)..(24): Xaa is A or G or is absent
RXGXAEVVMDRHKRLXXXXXXXXXYYLISTASLRAPVXX

SEQ ID NO: 61805 - protein, 38 aa, Artificial Sequence
  GFR-binding peptide
  MOD_RES (2)..(4)..(36)..(37): Xaa is C or S
SXGXRDVVMGYHYKLIIQQKDNKYLMSIPSMKTPTXXP

SEQ ID NO: 61806 - protein, 33 aa, Artificial Sequence; identical to SEQ ID NO: 31342
  GFR-binding peptide
  MOD_RES (33)..(33): Xaa is C or S
  MOD_RES (11)..(12)..(13)..(14)..(15): Xaa is A or G
  MOD_RES (16)..(17)..(18)..(19): Xaa is A or G or is absent

SEQ ID NO: 61807 - protein, 35 aa, Artificial Sequence; identical to SEQ ID NO: 23368
  GFR-binding peptide
  MOD_RES (1)..(3)..(35): Xaa is C or S

SEQ ID NO: 61808 - protein, 36 aa, Artificial Sequence; identical to SEQ ID NO: 23370
  GFR-binding peptide
  MOD_RES (33)..(34): Xaa is C or S
  MOD_RES (11)..(12)..(13)..(14)..(15): Xaa is A or G
  MOD_RES (16)..(17)..(18)..(19): Xaa is A or G or is absent

SEQ ID NO: 61809 - protein, 39 aa, Artificial Sequence
  GFR-binding peptide
  MOD_RES (2)..(36)..(37): Xaa is C or S
  MOD_RES (14)..(15)..(16)..(17)..(18): Xaa is A or G
  MOD_RES (19)..(20)..(21)..(22): Xaa is A or G or is absent
AXSEVTMNRYKKLXXXXXXXXXFYLISIANMKEPVXXPE

SEQ ID NO: 61810 - protein, 35 aa, Artificial Sequence
  GFR-binding peptide
  MOD_RES (2)..(2): Xaa is C or S
  MOD_RES (14)..(15)..(16)..(17)..(18): Xaa is A or G
  MOD_RES (19)..(20)..(21)..(22): Xaa is A or G or is absent
AXSEVTMNPIKGYXXXXXXXXXFYLINIPSMKEPV

SEQ ID NO: 61811 - protein, 41 aa, Artificial Sequence; identical to SEQ ID NO: 2401
  GFR-binding peptide
  MOD_RES (1)..(3)..(35)..(36): Xaa is C or S

SEQ ID NO: 61812 - protein, 38 aa, Artificial Sequence; identical to SEQ ID NO: 2402
  GFR-binding peptide
  MOD_RES (2)..(4)..(36)..(37): Xaa is C or S

SEQ ID NO: 61813 - protein, 40 aa, Artificial Sequence
  GFR-binding peptide
  MOD_RES (2)..(36)..(37): Xaa is C or S
  MOD_RES (14)..(15)..(16)..(17)..(18): Xaa is A or G
  MOD_RES (19)..(20)..(21)..(22): Xaa is A or G or is absent
GXSEVVMDYHYKLXXXXXXXXXKYLISIPSLRTPVXXTPP

SEQ ID NO: 61814 - protein, 31 aa, Artificial Sequence
  GFR-binding peptide
  MOD_RES (31)..(31): Xaa is C or S
EVVMDEYKFKVVNNASDLYLISIPELRTPVX

SEQ ID NO: 61815 - protein, 31 aa, Artificial Sequence; identical to SEQ ID NO: 31363
  GFR-binding peptide
  MOD_RES (31)..(31): Xaa is C or S

SEQ ID NO: 61816 - protein, 36 aa, Artificial Sequence; identical to SEQ ID NO: 2404
  GFR-binding peptide
  MOD_RES (2)..(34)..(35): Xaa is C or S

SEQ ID NO: 61817 - protein, 41 aa, Artificial Sequence; identical to SEQ ID NO: 31364
  GFR-binding peptide
  MOD_RES (2)..(35)..(36): Xaa is C or S

SEQ ID NO: 61818 - protein, 37 aa, Artificial Sequence
  GFR-binding peptide
  MOD_RES (1)..(34)..(35): Xaa is C or S
  MOD_RES (12)..(13)..(14)..(15)..(16): Xaa is A or G
  MOD_RES (17)..(18)..(19)..(20): Xaa is A or G or is absent
XEEVIMRHKRLXXXXXXXXXYYLMSTASTKVPAXXTS

SEQ ID NO: 61819 - protein, 34 aa, Artificial Sequence; identical to SEQ ID NO: 2411
  GFR-binding peptide
  MOD_RES (31)..(32): Xaa is C or S

SEQ ID NO: 61820 - protein, 38 aa, Artificial Sequence; identical to SEQ ID NO: 2412
  GFR-binding peptide
  MOD_RES (2)..(4)..(36)..(37): Xaa is C or S

SEQ ID NO: 61821 - protein, 34 aa, Artificial Sequence; identical to SEQ ID NO: 31368
  GFR-binding peptide
  MOD_RES (33)..(34): Xaa is C or S
  MOD_RES (11)..(12)..(13)..(14)..(15): Xaa is A or G
  MOD_RES (16)..(17)..(18)..(19): Xaa is A or G or is absent

SEQ ID NO: 61822 - protein, 36 aa, Artificial Sequence; identical to SEQ ID NO: 2413
  GFR-binding peptide
  MOD_RES (2)..(35)..(36): Xaa is C or S
  MOD_RES (13)..(14)..(15)..(16)..(17): Xaa is A or G
  MOD_RES (18)..(19)..(20)..(21): Xaa is A or G or is absent

SEQ ID NO: 61823 - protein, 39 aa, Artificial Sequence; identical to SEQ ID NO: 2415
  GFR-binding peptide
  MOD_RES (1)..(3)..(35)..(36): Xaa is C or S

SEQ ID NO: 61824 - protein, 40 aa, Artificial Sequence; identical to SEQ ID NO: 9911
  GFR-binding peptide
  MOD_RES (2)..(34)..(35): Xaa is C or S

SEQ ID NO: 61825 - protein, 34 aa, Artificial Sequence
  GFR-binding peptide
  MOD_RES (33)..(34): Xaa is C or S
  MOD_RES (11)..(12)..(13)..(14)..(15): Xaa is A or G
  MOD_RES (16)..(17)..(18)..(19): Xaa is A or G or is absent
SRVIMPIKGYXXXXXXXXXFYLINIPSLAQPVXX

SEQ ID NO: 61826 - protein, 37 aa, Artificial Sequence; identical to SEQ ID NO: 23396
  GFR-binding peptide
  MOD_RES (2)..(4)..(36)..(37): Xaa is C or S

SEQ ID NO: 61827 - protein, 36 aa, Artificial Sequence; identical to SEQ ID NO: 2418
  GFR-binding peptide
  MOD_RES (1)..(32)..(33): Xaa is C or S

SEQ ID NO: 61828 - protein, 40 aa, Artificial Sequence; identical to SEQ ID NO: 2420
  GFR-binding peptide
  MOD_RES (2)..(4)..(36)..(37): Xaa is C or S

SEQ ID NO: 61829 - protein, 35 aa, Artificial Sequence; identical to SEQ ID NO: 2425
  GFR-binding peptide
  MOD_RES (2)..(35): Xaa is C or S
  MOD_RES (13)..(14)..(15)..(16)..(17): Xaa is A or G
  MOD_RES (18)..(19)..(20)..(21): Xaa is A or G or is absent

SEQ ID NO: 61830 - protein, 41 aa, Artificial Sequence; identical to SEQ ID NO: 23403
  GFR-binding peptide
  MOD_RES (2)..(4)..(36)..(37): Xaa is C or S

SEQ ID NO: 61831 - protein, 41 aa, Artificial Sequence; identical to SEQ ID NO: 23404
  GFR-binding peptide
  MOD_RES (1)..(3)..(36)..(37): Xaa is C or S
  MOD_RES (14)..(15)..(16)..(17)..(18): Xaa is A or G
  MOD_RES (19)..(20)..(21)..(22): Xaa is A or G or is absent

SEQ ID NO: 61832 - protein, 33 aa, Artificial Sequence
  GFR-binding peptide
  MOD_RES (12)..(13)..(14)..(15)..(16): Xaa is A or G
  MOD_RES (17)..(18)..(19)..(20): Xaa is A or G or is absent
SEVTMNRYKKLXXXXXXXXXFYLISIANMKEPV

SEQ ID NO: 61833 - protein, 37 aa, Artificial Sequence; identical to SEQ ID NO: 31379
  GFR-binding peptide
  MOD_RES (1)..(3)..(35)..(36): Xaa is C or S

SEQ ID NO: 61834 - protein, 38 aa, Artificial Sequence; identical to SEQ ID NO: 31380
  GFR-binding peptide
  MOD_RES (33)..(34): Xaa is C or S
  MOD_RES (11)..(12)..(13)..(14)..(15): Xaa is A or G
  MOD_RES (16)..(17)..(18)..(19): Xaa is A or G or is absent

SEQ ID NO: 61835 - protein, 33 aa, Artificial Sequence; identical to SEQ ID NO: 31382
  GFR-binding peptide
  MOD_RES (12)..(13)..(14)..(15)..(16): Xaa is A or G
  MOD_RES (17)..(18)..(19)..(20): Xaa is A or G or is absent

SEQ ID NO: 61836 - protein, 36 aa, Artificial Sequence; identical to SEQ ID NO: 31384
  GFR-binding peptide
  MOD_RES (33)..(34): Xaa is C or S
  MOD_RES (11)..(12)..(13)..(14)..(15): Xaa is A or G
  MOD_RES (16)..(17)..(18)..(19): Xaa is A or G or is absent

SEQ ID NO: 61837 - protein, 37 aa, Artificial Sequence; identical to SEQ ID NO: 2429
  GFR-binding peptide
  MOD_RES (2)..(4)..(36)..(37): Xaa is C or S

SEQ ID NO: 61838 - protein, 35 aa, Artificial Sequence; identical to SEQ ID NO: 23410
  GFR-binding peptide
  MOD_RES (2)..(35): Xaa is C or S
  MOD_RES (13)..(14)..(15)..(16)..(17): Xaa is A or G
  MOD_RES (18)..(19)..(20)..(21): Xaa is A or G or is absent

SEQ ID NO: 61839 - protein, 37 aa, Artificial Sequence; identical to SEQ ID NO: 31391
  GFR-binding peptide
  MOD_RES (34)..(35): Xaa is C or S
  MOD_RES (12)..(13)..(14)..(15)..(16): Xaa is A or G
  MOD_RES (17)..(18)..(19)..(20): Xaa is A or G or is absent

SEQ ID NO: 61840 - protein, 40 aa, Artificial Sequence; identical to SEQ ID NO: 2431
  GFR-binding peptide
  MOD_RES (34)..(35): Xaa is C or S
  MOD_RES (12)..(13)..(14)..(15)..(16): Xaa is A or G
  MOD_RES (17)..(18)..(19)..(20): Xaa is A or G or is absent

SEQ ID NO: 61841 - protein, 40 aa, Artificial Sequence; identical to SEQ ID NO: 23411
  GFR-binding peptide
  MOD_RES (2)..(36)..(37): Xaa is C or S
  MOD_RES (14)..(15)..(16)..(17)..(18): Xaa is A or G
  MOD_RES (19)..(20)..(21)..(22): Xaa is A or G or is absent

SEQ ID NO: 61842 - protein, 33 aa, Artificial Sequence; identical to SEQ ID NO: 23412
  GFR-binding peptide
  MOD_RES (31)..(32): Xaa is C or S

SEQ ID NO: 61843 - protein, 43 aa, Artificial Sequence; identical to SEQ ID NO: 23415
  GFR-binding peptide
  MOD_RES (1)..(3)..(37)..(38): Xaa is C or S
  MOD_RES (15)..(16)..(17)..(18)..(19): Xaa is A or G
  MOD_RES (20)..(21)..(22)..(23): Xaa is A or G or is absent

SEQ ID NO: 61844 - protein, 39 aa, Artificial Sequence
  GFR-binding peptide
  MOD_RES (1)..(3)..(35)..(36): Xaa is C or S
XGXRDVVMGYHYKLIIQQKDNKYLMSIPSMKTPTXXPGA

SEQ ID NO: 61845 - protein, 41 aa, Artificial Sequence; identical to SEQ ID NO: 2437
  GFR-binding peptide
  MOD_RES (2)..(36)..(37): Xaa is C or S
  MOD_RES (14)..(15)..(16)..(17)..(18): Xaa is A or G
  MOD_RES (19)..(20)..(21)..(22): Xaa is A or G or is absent

SEQ ID NO: 61846 - protein, 33 aa, Artificial Sequence; identical to SEQ ID NO: 31402
  GFR-binding peptide
  MOD_RES (2)..(2): Xaa is C or S

SEQ ID NO: 61847 - protein, 41 aa, Artificial Sequence
  GFR-binding peptide
  MOD_RES (2)..(35)..(36): Xaa is C or S
  MOD_RES (13)..(14)..(15)..(16)..(17): Xaa is A or G
  MOD_RES (18)..(19)..(20)..(21): Xaa is A or G or is absent
GXEEVIMEYKFKXXXXXXXXXLYLMSIPETKVPAXXTSPVR

SEQ ID NO: 61848 - protein, 36 aa, Artificial Sequence; identical to SEQ ID NO: 2440
  GFR-binding peptide
  MOD_RES (33)..(34): Xaa is C or S

SEQ ID NO: 61849 - protein, 35 aa, Artificial Sequence; identical to SEQ ID NO: 2442
  GFR-binding peptide
  MOD_RES (31)..(32): Xaa is C or S

SEQ ID NO: 61850 - protein, 38 aa, Artificial Sequence; identical to SEQ ID NO: 31413
  GFR-binding peptide
  MOD_RES (33)..(34): Xaa is C or S
  MOD_RES (11)..(12)..(13)..(14)..(15): Xaa is A or G
  MOD_RES (16)..(17)..(18)..(19): Xaa is A or G or is absent

SEQ ID NO: 61851 - protein, 39 aa, Artificial Sequence; identical to SEQ ID NO: 2446
  GFR-binding peptide
  MOD_RES (2)..(35)..(36): Xaa is C or S
  MOD_RES (13)..(14)..(15)..(16)..(17): Xaa is A or G
  MOD_RES (18)..(19)..(20)..(21): Xaa is A or G or is absent

SEQ ID NO: 61852 - protein, 31 aa, Artificial Sequence; identical to SEQ ID NO: 2448
  GFR-binding peptide
  MOD_RES (31)..(31): Xaa is C or S

SEQ ID NO: 61853 - protein, 33 aa, Artificial Sequence
  GFR-binding peptide
  MOD_RES (31)..(32): Xaa is C or S
EVVMDYHYKLVVNNASDKYLISIPSLRTPVXXT

SEQ ID NO: 61854 - protein, 37 aa, Artificial Sequence
  GFR-binding peptide
  MOD_RES (2)..(4): Xaa is C or S
  MOD_RES (16)..(17)..(18)..(19)..(20): Xaa is A or G
  MOD_RES (21)..(22)..(23)..(24): Xaa is A or G or is absent
RXAXSEVTMNRHKRLXXXXXXXXXYYLISTASMKEPV

SEQ ID NO: 61855 - protein, 35 aa, Artificial Sequence; identical to SEQ ID NO: 31417
  GFR-binding peptide
  MOD_RES (32)..(33): Xaa is C or S

SEQ ID NO: 61856 - protein, 39 aa, Artificial Sequence
  GFR-binding peptide
  MOD_RES (2)..(4)..(36)..(37): Xaa is C or S
RXGXSEVVMDRHKRLVVNNASDYYLISTASLRTPVXXTP

SEQ ID NO: 61857 - protein, 39 aa, Artificial Sequence; identical to SEQ ID NO: 31421
  GFR-binding peptide
  MOD_RES (1)..(3)..(37)..(38): Xaa is C or S
  MOD_RES (15)..(16)..(17)..(18)..(19): Xaa is A or G
  MOD_RES (20)..(21)..(22)..(23): Xaa is A or G or is absent

SEQ ID NO: 61858 - protein, 33 aa, Artificial Sequence; identical to SEQ ID NO: 31422
  GFR-binding peptide
  MOD_RES (32)..(33): Xaa is C or S

SEQ ID NO: 61859 - protein, 35 aa, Artificial Sequence; identical to SEQ ID NO: 31424
  GFR-binding peptide
  MOD_RES (1)..(3)..(35): Xaa is C or S

SEQ ID NO: 61860 - protein, 39 aa, Artificial Sequence
  GFR-binding peptide
  MOD_RES (2)..(4)..(37)..(38): Xaa is C or S
  MOD_RES (15)..(16)..(17)..(18)..(19): Xaa is A or G
  MOD_RES (20)..(21)..(22)..(23): Xaa is A or G or is absent
LXGXEEVIMEYKFKXXXXXXXXXLYLMSIPETKVPAXXT

SEQ ID NO: 61861 - protein, 34 aa, Artificial Sequence; identical to SEQ ID NO: 2455
  GFR-binding peptide
  MOD_RES (1)..(3): Xaa is C or S

SEQ ID NO: 61862 - protein, 41 aa, Artificial Sequence; identical to SEQ ID NO: 31426
  GFR-binding peptide
  MOD_RES (1)..(3)..(35)..(36): Xaa is C or S

SEQ ID NO: 61863 - protein, 39 aa, Artificial Sequence; identical to SEQ ID NO: 2457
  GFR-binding peptide
  MOD_RES (1)..(3)..(35)..(36): Xaa is C or S

SEQ ID NO: 61864 - protein, 39 aa, Artificial Sequence
  GFR-binding peptide
  MOD_RES (1)..(3)..(37)..(38): Xaa is C or S
  MOD_RES (15)..(16)..(17)..(18)..(19): Xaa is A or G
  MOD_RES (20)..(21)..(22)..(23): Xaa is A or G or is absent
XGXESVAMGRHKRLXXXXXXXXXYYLISTASLKTPVXXA

SEQ ID NO: 61865 - protein, 39 aa, Artificial Sequence; identical to SEQ ID NO: 2459
  GFR-binding peptide
  MOD_RES (33)..(34): Xaa is C or S
  MOD_RES (11)..(12)..(13)..(14)..(15): Xaa is A or G
  MOD_RES (16)..(17)..(18)..(19): Xaa is A or G or is absent

SEQ ID NO: 61866 - protein, 40 aa, Artificial Sequence; identical to SEQ ID NO: 23442
  GFR-binding peptide
  MOD_RES (1)..(35)..(36): Xaa is C or S
  MOD_RES (13)..(14)..(15)..(16)..(17): Xaa is A or G
  MOD_RES (18)..(19)..(20)..(21): Xaa is A or G or is absent

SEQ ID NO: 61867 - protein, 43 aa, Artificial Sequence
  GFR-binding peptide
  MOD_RES (1)..(3)..(37)..(38): Xaa is C or S
  MOD_RES (15)..(16)..(17)..(18)..(19): Xaa is A or G
  MOD_RES (20)..(21)..(22)..(23): Xaa is A or G or is absent
XAXSEVTMNRYKKLXXXXXXXXXFYLISIANMKEPVXXPEPIG

SEQ ID NO: 61868 - protein, 42 aa, Artificial Sequence; identical to SEQ ID NO: 23444
  GFR-binding peptide
  MOD_RES (1)..(3)..(37)..(38): Xaa is C or S
  MOD_RES (15)..(16)..(17)..(18)..(19): Xaa is A or G
  MOD_RES (20)..(21)..(22)..(23): Xaa is A or G or is absent

SEQ ID NO: 61869 - protein, 41 aa, Artificial Sequence; identical to SEQ ID NO: 31432
  GFR-binding peptide
  MOD_RES (2)..(4)..(36)..(37): Xaa is C or S

SEQ ID NO: 61870 - protein, 42 aa, Artificial Sequence; identical to SEQ ID NO: 23445
  GFR-binding peptide
  MOD_RES (2)..(36)..(37): Xaa is C or S
  MOD_RES (14)..(15)..(16)..(17)..(18): Xaa is A or G
  MOD_RES (19)..(20)..(21)..(22): Xaa is A or G or is absent

SEQ ID NO: 61871 - protein, 37 aa, Artificial Sequence; identical to SEQ ID NO: 23446
  GFR-binding peptide
  MOD_RES (1)..(3)..(37): Xaa is C or S
  MOD_RES (15)..(16)..(17)..(18)..(19): Xaa is A or G
  MOD_RES (20)..(21)..(22)..(23): Xaa is A or G or is absent

SEQ ID NO: 61872 - protein, 40 aa, Artificial Sequence; identical to SEQ ID NO: 2469
  GFR-binding peptide
  MOD_RES (1)..(3)..(38)..(39): Xaa is C or S
  MOD_RES (16)..(17)..(18)..(19)..(20): Xaa is A or G
  MOD_RES (21)..(22)..(23)..(24): Xaa is A or G or is absent

SEQ ID NO: 61873 - protein, 43 aa, Artificial Sequence; identical to SEQ ID NO: 2473
  GFR-binding peptide
  MOD_RES (2)..(4)..(39)..(40): Xaa is C or S
  MOD_RES (17)..(18)..(19)..(20)..(21): Xaa is A or G
  MOD_RES (22)..(23)..(24)..(25): Xaa is A or G or is absent

SEQ ID NO: 61874 - protein, 43 aa, Artificial Sequence; identical to SEQ ID NO: 31439
  GFR-binding peptide
  MOD_RES (2)..(37)..(38): Xaa is C or S
  MOD_RES (15)..(16)..(17)..(18)..(19): Xaa is A or G
  MOD_RES (20)..(21)..(22)..(23): Xaa is A or G or is absent

SEQ ID NO: 61875 - protein, 35 aa, Artificial Sequence; identical to SEQ ID NO: 2478
  GFR-binding peptide
  MOD_RES (31)..(32): Xaa is C or S

SEQ ID NO: 61876 - protein, 39 aa, Artificial Sequence
  GFR-binding peptide
  MOD_RES (2)..(35)..(36): Xaa is C or S
  MOD_RES (13)..(14)..(15)..(16)..(17): Xaa is A or G
  MOD_RES (18)..(19)..(20)..(21): Xaa is A or G or is absent
GXEEVIMEYKFKXXXXXXXXXLYLMSIPETKVPAXXTSP

SEQ ID NO: 61877 - protein, 38 aa, Artificial Sequence; identical to SEQ ID NO: 23458
  GFR-binding peptide
  MOD_RES (2)..(36)..(37): Xaa is C or S
  MOD_RES (14)..(15)..(16)..(17)..(18): Xaa is A or G
  MOD_RES (19)..(20)..(21)..(22): Xaa is A or G or is absent

SEQ ID NO: 61878 - protein, 35 aa, Artificial Sequence; identical to SEQ ID NO: 23459
  GFR-binding peptide
  MOD_RES (1)..(35): Xaa is C or S
  MOD_RES (13)..(14)..(15)..(16)..(17): Xaa is A or G
  MOD_RES (18)..(19)..(20)..(21): Xaa is A or G or is absent

SEQ ID NO: 61879 - protein, 36 aa, Artificial Sequence; identical to SEQ ID NO: 2480
  GFR-binding peptide
  MOD_RES (33)..(34): Xaa is C or S
  MOD_RES (11)..(12)..(13)..(14)..(15): Xaa is A or G
  MOD_RES (16)..(17)..(18)..(19): Xaa is A or G or is absent

SEQ ID NO: 61880 - protein, 37 aa, Artificial Sequence
  GFR-binding peptide
  MOD_RES (2)..(34)..(35): Xaa is C or S
AXSEVTMNYHYKLVVNKNEDKYLISIPSMKEPVXXPE

SEQ ID NO: 61881 - protein, 41 aa, Artificial Sequence; identical to SEQ ID NO: 31449
  GFR-binding peptide
  MOD_RES (1)..(35)..(36): Xaa is C or S
  MOD_RES (13)..(14)..(15)..(16)..(17): Xaa is A or G
  MOD_RES (18)..(19)..(20)..(21): Xaa is A or G or is absent

SEQ ID NO: 61882 - protein, 33 aa, Artificial Sequence; identical to SEQ ID NO: 23465
  GFR-binding peptide
  MOD_RES (2)..(2): Xaa is C or S

SEQ ID NO: 61883 - protein, 33 aa, Artificial Sequence; identical to SEQ ID NO: 31450
  GFR-binding peptide
  MOD_RES (1)..(33): Xaa is C or S

SEQ ID NO: 61884 - protein, 42 aa, Artificial Sequence; identical to SEQ ID NO: 31459
  GFR-binding peptide
  MOD_RES (1)..(3)..(37)..(38): Xaa is C or S
  MOD_RES (15)..(16)..(17)..(18)..(19): Xaa is A or G
  MOD_RES (20)..(21)..(22)..(23): Xaa is A or G or is absent

SEQ ID NO: 61885 - protein, 30 aa, Artificial Sequence; identical to SEQ ID NO: 23473
  GFR-binding peptide

SEQ ID NO: 61886 - protein, 34 aa, Artificial Sequence; identical to SEQ ID NO: 2495
  GFR-binding peptide
  MOD_RES (1)..(32)..(33): Xaa is C or S

SEQ ID NO: 61887 - protein, 41 aa, Artificial Sequence; identical to SEQ ID NO: 10000
  GFR-binding peptide
  MOD_RES (2)..(4)..(36)..(37): Xaa is C or S

SEQ ID NO: 61888 - protein, 38 aa, Artificial Sequence; identical to SEQ ID NO: 31467
  GFR-binding peptide
  MOD_RES (2)..(4)..(36)..(37): Xaa is C or S

SEQ ID NO: 61889 - protein, 34 aa, Artificial Sequence; identical to SEQ ID NO: 2502
  GFR-binding peptide
  MOD_RES (2)..(4): Xaa is C or S

SEQ ID NO: 61890 - protein, 34 aa, Artificial Sequence; identical to SEQ ID NO: 2503
  GFR-binding peptide
  MOD_RES (34)..(34): Xaa is C or S
  MOD_RES (12)..(13)..(14)..(15)..(16): Xaa is A or G
  MOD_RES (17)..(18)..(19)..(20): Xaa is A or G or is absent

SEQ ID NO: 61891 - protein, 35 aa, Artificial Sequence; identical to SEQ ID NO: 23485
  GFR-binding peptide
  MOD_RES (1)..(3)..(35): Xaa is C or S

SEQ ID NO: 61892 - protein, 36 aa, Artificial Sequence
  GFR-binding peptide
  MOD_RES (2)..(36): Xaa is C or S
  MOD_RES (14)..(15)..(16)..(17)..(18): Xaa is A or G
  MOD_RES (19)..(20)..(21)..(22): Xaa is A or G or is absent
GXSEVVMDRHKRLXXXXXXXXXYYLISTASLRTPVX

SEQ ID NO: 61893 - protein, 41 aa, Artificial Sequence
  GFR-binding peptide
  MOD_RES (2)..(35)..(36): Xaa is C or S
  MOD_RES (13)..(14)..(15)..(16)..(17): Xaa is A or G
  MOD_RES (18)..(19)..(20)..(21): Xaa is A or G or is absent
KXSKVIMPIKGYXXXXXXXXXFYLINIPSLDQSVXXPSASA

SEQ ID NO: 61894 - protein, 38 aa, Artificial Sequence; identical to SEQ ID NO: 23489
  GFR-binding peptide
  MOD_RES (2)..(35)..(36): Xaa is C or S
  MOD_RES (13)..(14)..(15)..(16)..(17): Xaa is A or G
  MOD_RES (18)..(19)..(20)..(21): Xaa is A or G or is absent

SEQ ID NO: 61895 - protein, 39 aa, Artificial Sequence; identical to SEQ ID NO: 23492
  GFR-binding peptide
  MOD_RES (2)..(4)..(38)..(39): Xaa is C or S
  MOD_RES (16)..(17)..(18)..(19)..(20): Xaa is A or G
  MOD_RES (21)..(22)..(23)..(24): Xaa is A or G or is absent

SEQ ID NO: 61896 - protein, 39 aa, Artificial Sequence; identical to SEQ ID NO: 31479
  GFR-binding peptide
  MOD_RES (2)..(4)..(38)..(39): Xaa is C or S
  MOD_RES (16)..(17)..(18)..(19)..(20): Xaa is A or G
  MOD_RES (21)..(22)..(23)..(24): Xaa is A or G or is absent

SEQ ID NO: 61897 - protein, 37 aa, Artificial Sequence
  GFR-binding peptide
  MOD_RES (32)..(33): Xaa is C or S
SEVVMDRHKRLVVNNASDYYLISTASLRTPVXXTPPT

SEQ ID NO: 61898 - protein, 39 aa, Artificial Sequence; identical to SEQ ID NO: 2516
  GFR-binding peptide
  MOD_RES (1)..(34)..(35): Xaa is C or S

SEQ ID NO: 61899 - protein, 38 aa, Artificial Sequence; identical to SEQ ID NO: 2519
  GFR-binding peptide
  MOD_RES (34)..(35): Xaa is C or S
  MOD_RES (12)..(13)..(14)..(15)..(16): Xaa is A or G
  MOD_RES (17)..(18)..(19)..(20): Xaa is A or G or is absent

SEQ ID NO: 61900 - protein, 39 aa, Artificial Sequence
  GFR-binding peptide
  MOD_RES (34)..(35): Xaa is C or S
  MOD_RES (12)..(13)..(14)..(15)..(16): Xaa is A or G
  MOD_RES (17)..(18)..(19)..(20): Xaa is A or G or is absent
SEVTMNEYKFKXXXXXXXXXLYLISIPEMKEPVXXPEPI

SEQ ID NO: 61901 - protein, 41 aa, Artificial Sequence
  GFR-binding peptide
  MOD_RES (1)..(35)..(36): Xaa is C or S
  MOD_RES (13)..(14)..(15)..(16)..(17): Xaa is A or G
  MOD_RES (18)..(19)..(20)..(21): Xaa is A or G or is absent
XSEVVMDYHYKLXXXXXXXXXKYLISIPSLRTPVXXTPPTS

SEQ ID NO: 61902 - protein, 35 aa, Artificial Sequence
  GFR-binding peptide
  MOD_RES (33)..(34): Xaa is C or S
  MOD_RES (11)..(12)..(13)..(14)..(15): Xaa is A or G
  MOD_RES (16)..(17)..(18)..(19): Xaa is A or G or is absent
SKVIMPIKGYXXXXXXXXXFYLINIPSLDQSVXXP

SEQ ID NO: 61903 - protein, 36 aa, Artificial Sequence; identical to SEQ ID NO: 2523
  GFR-binding peptide
  MOD_RES (2)..(36): Xaa is C or S
  MOD_RES (14)..(15)..(16)..(17)..(18): Xaa is A or G
  MOD_RES (19)..(20)..(21)..(22): Xaa is A or G or is absent

SEQ ID NO: 61904 - protein, 34 aa, Artificial Sequence; identical to SEQ ID NO: 10019
  GFR-binding peptide
  MOD_RES (1)..(3): Xaa is C or S

SEQ ID NO: 61905 - protein, 40 aa, Artificial Sequence
  GFR-binding peptide
  MOD_RES (1)..(35)..(36): Xaa is C or S
  MOD_RES (13)..(14)..(15)..(16)..(17): Xaa is A or G
  MOD_RES (18)..(19)..(20)..(21): Xaa is A or G or is absent
XSEVTMNRHKRLXXXXXXXXXYYLISTASMKEPVXXPEPI

SEQ ID NO: 61906 - protein, 36 aa, Artificial Sequence; identical to SEQ ID NO: 31496
  GFR-binding peptide
  MOD_RES (2)..(36): Xaa is C or S
  MOD_RES (14)..(15)..(16)..(17)..(18): Xaa is A or G
  MOD_RES (19)..(20)..(21)..(22): Xaa is A or G or is absent

SEQ ID NO: 61907 - protein, 33 aa, Artificial Sequence; identical to SEQ ID NO: 23507
  GFR-binding peptide
  MOD_RES (1)..(1): Xaa is C or S
  MOD_RES (12)..(13)..(14)..(15)..(16): Xaa is A or G
  MOD_RES (17)..(18)..(19)..(20): Xaa is A or G or is absent

SEQ ID NO: 61908 - protein, 35 aa, Artificial Sequence
  GFR-binding peptide
  MOD_RES (2)..(4): Xaa is C or S
RXAXSEVTMNEYKFKVVNKNEDLYLISIPEMKEPV

SEQ ID NO: 61909 - protein, 38 aa, Artificial Sequence; identical to SEQ ID NO: 23508
  GFR-binding peptide
  MOD_RES (1)..(3)..(35)..(36): Xaa is C or S

SEQ ID NO: 61910 - protein, 37 aa, Artificial Sequence
  GFR-binding peptide
  MOD_RES (2)..(4)..(35)..(36): Xaa is C or S
LXGXEEVIMEYKFKLLVRGNDLYLMSIPETKVPAXXT

SEQ ID NO: 61911 - protein, 35 aa, Artificial Sequence
  GFR-binding peptide
  MOD_RES (2)..(4): Xaa is C or S
SXGXRDVVMGRHKRLIIQQKDNYYLMSTASMKTPT

SEQ ID NO: 61912 - protein, 32 aa, Artificial Sequence; identical to SEQ ID NO: 31501
  GFR-binding peptide
  MOD_RES (11)..(12)..(13)..(14)..(15): Xaa is A or G
  MOD_RES (16)..(17)..(18)..(19): Xaa is A or G or is absent

SEQ ID NO: 61913 - protein, 41 aa, Artificial Sequence; identical to SEQ ID NO: 23513
  GFR-binding peptide
  MOD_RES (1)..(35)..(36): Xaa is C or S
  MOD_RES (13)..(14)..(15)..(16)..(17): Xaa is A or G
  MOD_RES (18)..(19)..(20)..(21): Xaa is A or G or is absent

SEQ ID NO: 61914 - protein, 38 aa, Artificial Sequence; identical to SEQ ID NO: 23516
  GFR-binding peptide
  MOD_RES (1)..(3)..(35)..(36): Xaa is C or S

SEQ ID NO: 61915 - protein, 39 aa, Artificial Sequence; identical to SEQ ID NO: 31506
  GFR-binding peptide
  MOD_RES (1)..(34)..(35): Xaa is C or S
  MOD_RES (12)..(13)..(14)..(15)..(16): Xaa is A or G
  MOD_RES (17)..(18)..(19)..(20): Xaa is A or G or is absent

SEQ ID NO: 61916 - protein, 41 aa, Artificial Sequence
  GFR-binding peptide
  MOD_RES (2)..(4)..(36)..(37): Xaa is C or S
SXGXRDVVMGRHKRLIIQQKDNYYLMSTASMKTPTXXPGAS

SEQ ID NO: 61917 - protein, 43 aa, Artificial Sequence; identical to SEQ ID NO: 23518
  GFR-binding peptide
  MOD_RES (2)..(4)..(37)..(38): Xaa is C or S
  MOD_RES (15)..(16)..(17)..(18)..(19): Xaa is A or G
  MOD_RES (20)..(21)..(22)..(23): Xaa is A or G or is absent

SEQ ID NO: 61918 - protein, 34 aa, Artificial Sequence
  GFR-binding peptide
  MOD_RES (34)..(34): Xaa is C or S
  MOD_RES (12)..(13)..(14)..(15)..(16): Xaa is A or G
  MOD_RES (17)..(18)..(19)..(20): Xaa is A or G or is absent
SEVTMNPIKGYXXXXXXXXXFYLINIPSMKEPVX

SEQ ID NO: 61919 - protein, 41 aa, Artificial Sequence; identical to SEQ ID NO: 23520
  GFR-binding peptide
  MOD_RES (2)..(36)..(37): Xaa is C or S
  MOD_RES (14)..(15)..(16)..(17)..(18): Xaa is A or G
  MOD_RES (19)..(20)..(21)..(22): Xaa is A or G or is absent

SEQ ID NO: 61920 - protein, 36 aa, Artificial Sequence; identical to SEQ ID NO: 23525
  GFR-binding peptide
  MOD_RES (1)..(32)..(33): Xaa is C or S

SEQ ID NO: 61921 - protein, 32 aa, Artificial Sequence; identical to SEQ ID NO: 10038
  GFR-binding peptide
  MOD_RES (31)..(32): Xaa is C or S

SEQ ID NO: 61922 - protein, 37 aa, Artificial Sequence; identical to SEQ ID NO: 31515
  GFR-binding peptide
  MOD_RES (2)..(4)..(37): Xaa is C or S

SEQ ID NO: 61923 - protein, 41 aa, Artificial Sequence; identical to SEQ ID NO: 2543
  GFR-binding peptide
  MOD_RES (1)..(3)..(37)..(38): Xaa is C or S
  MOD_RES (15)..(16)..(17)..(18)..(19): Xaa is A or G
  MOD_RES (20)..(21)..(22)..(23): Xaa is A or G or is absent

SEQ ID NO: 61924 - protein, 40 aa, Artificial Sequence
  GFR-binding peptide
  MOD_RES (2)..(35)..(36): Xaa is C or S
  MOD_RES (13)..(14)..(15)..(16)..(17): Xaa is A or G
  MOD_RES (18)..(19)..(20)..(21): Xaa is A or G or is absent
KXSRVIMPIKGYXXXXXXXXXFYLINIPSLAQPVXXPAAS

SEQ ID NO: 61925 - protein, 41 aa, Artificial Sequence; identical to SEQ ID NO: 2544
  GFR-binding peptide
  MOD_RES (2)..(4)..(36)..(37): Xaa is C or S

SEQ ID NO: 61926 - protein, 35 aa, Artificial Sequence; identical to SEQ ID NO: 23529
  GFR-binding peptide
  MOD_RES (31)..(32): Xaa is C or S

SEQ ID NO: 61927 - protein, 40 aa, Artificial Sequence; identical to SEQ ID NO: 23531
  GFR-binding peptide
  MOD_RES (2)..(4)..(38)..(39): Xaa is C or S
  MOD_RES (16)..(17)..(18)..(19)..(20): Xaa is A or G
  MOD_RES (21)..(22)..(23)..(24): Xaa is A or G or is absent

SEQ ID NO: 61928 - protein, 35 aa, Artificial Sequence; identical to SEQ ID NO: 2547
  GFR-binding peptide
  MOD_RES (2)..(34)..(35): Xaa is C or S

SEQ ID NO: 61929 - protein, 35 aa, Artificial Sequence; identical to SEQ ID NO: 2548
  GFR-binding peptide
  MOD_RES (32)..(33): Xaa is C or S

SEQ ID NO: 61930 - protein, 40 aa, Artificial Sequence
  GFR-binding peptide
  MOD_RES (2)..(4)..(36)..(37): Xaa is C or S
RXAXSEVTMNEYKFKVVNKNEDLYLISIPEMKEPVXXPEP

SEQ ID NO: 61931 - protein, 33 aa, Artificial Sequence
  GFR-binding peptide
  MOD_RES (2)..(33): Xaa is C or S
GXEEVIMEYKFKLLVRGNDLYLMSIPETKVPAX

SEQ ID NO: 61932 - protein, 41 aa, Artificial Sequence; identical to SEQ ID NO: 31524
  GFR-binding peptide
  MOD_RES (1)..(3)..(37): Xaa is C or S
  MOD_RES (15)..(16)..(17)..(18)..(19): Xaa is A or G
  MOD_RES (20)..(21)..(22)..(23): Xaa is A or G or is absent

SEQ ID NO: 61933 - protein, 40 aa, Artificial Sequence; identical to SEQ ID NO: 23538
  GFR-binding peptide
  MOD_RES (1)..(35): Xaa is C or S
  MOD_RES (13)..(14)..(15)..(16)..(17): Xaa is A or G
  MOD_RES (18)..(19)..(20)..(21): Xaa is A or G or is absent

SEQ ID NO: 61934 - protein, 37 aa, Artificial Sequence; identical to SEQ ID NO: 2553
  GFR-binding peptide
  MOD_RES (2)..(4)..(37): Xaa is C or S

SEQ ID NO: 61935 - protein, 43 aa, Artificial Sequence
  GFR-binding peptide
  MOD_RES (1)..(3)..(37)..(38): Xaa is C or S
  MOD_RES (15)..(16)..(17)..(18)..(19): Xaa is A or G
  MOD_RES (20)..(21)..(22)..(23): Xaa is A or G or is absent
XGXSRVVMNEYKFKXXXXXXXXXLYLVSIPELKTPAXXPKPVH

SEQ ID NO: 61936 - protein, 35 aa, Artificial Sequence; identical to SEQ ID NO: 2556
  GFR-binding peptide
  MOD_RES (1)..(3): Xaa is C or S
  MOD_RES (14)..(15)..(16)..(17)..(18): Xaa is A or G
  MOD_RES (19)..(20)..(21)..(22): Xaa is A or G or is absent

SEQ ID NO: 61937 - protein, 35 aa, Artificial Sequence
  GFR-binding peptide
  MOD_RES (1)..(33)..(34): Xaa is C or S
XSEVTMNRHKRLVVNKNEDYYLISTASMKEPVXXP

SEQ ID NO: 61938 - protein, 43 aa, Artificial Sequence; identical to SEQ ID NO: 31529
  GFR-binding peptide
  MOD_RES (2)..(4)..(38): Xaa is C or S
  MOD_RES (16)..(17)..(18)..(19)..(20): Xaa is A or G
  MOD_RES (21)..(22)..(23)..(24): Xaa is A or G or is absent

SEQ ID NO: 61939 - protein, 39 aa, Artificial Sequence; identical to SEQ ID NO: 31531
  GFR-binding peptide
  MOD_RES (1)..(33)..(34): Xaa is C or S

SEQ ID NO: 61940 - protein, 34 aa, Artificial Sequence; identical to SEQ ID NO: 2558
  GFR-binding peptide
  MOD_RES (2)..(4): Xaa is C or S

SEQ ID NO: 61941 - protein, 33 aa, Artificial Sequence; identical to SEQ ID NO: 31532
  GFR-binding peptide
  MOD_RES (33)..(33): Xaa is C or S
  MOD_RES (11)..(12)..(13)..(14)..(15): Xaa is A or G
  MOD_RES (16)..(17)..(18)..(19): Xaa is A or G or is absent

SEQ ID NO: 61942 - protein, 36 aa, Artificial Sequence; identical to SEQ ID NO: 2560
  GFR-binding peptide
  MOD_RES (1)..(3)..(36): Xaa is C or S
  MOD_RES (14)..(15)..(16)..(17)..(18): Xaa is A or G
  MOD_RES (19)..(20)..(21)..(22): Xaa is A or G or is absent

SEQ ID NO: 61943 - protein, 37 aa, Artificial Sequence; identical to SEQ ID NO: 23548
  GFR-binding peptide
  MOD_RES (2)..(34): Xaa is C or S

SEQ ID NO: 61944 - protein, 38 aa, Artificial Sequence; identical to SEQ ID NO: 2561
  GFR-binding peptide
  MOD_RES (1)..(3)..(35)..(36): Xaa is C or S

SEQ ID NO: 61945 - protein, 37 aa, Artificial Sequence; identical to SEQ ID NO: 23551
  GFR-binding peptide
  MOD_RES (1)..(33)..(34): Xaa is C or S

SEQ ID NO: 61946 - protein, 38 aa, Artificial Sequence
  GFR-binding peptide
  MOD_RES (2)..(4)..(35)..(36): Xaa is C or S
LXGXEEVIMYHYKLLLVRGNDKYLMSIPSTKVPAXXTS

SEQ ID NO: 61947 - protein, 41 aa, Artificial Sequence
  GFR-binding peptide
  MOD_RES (2)..(4)..(35)..(36): Xaa is C or S
SXKXSKVIMPIKGYIKPTKGIFYLINIPSLDQSVXXPSASA

SEQ ID NO: 61948 - protein, 33 aa, Artificial Sequence; identical to SEQ ID NO: 31537
  GFR-binding peptide
  MOD_RES (33)..(33): Xaa is C or S
  MOD_RES (11)..(12)..(13)..(14)..(15): Xaa is A or G
  MOD_RES (16)..(17)..(18)..(19): Xaa is A or G or is absent

SEQ ID NO: 61949 - protein, 41 aa, Artificial Sequence; identical to SEQ ID NO: 31540
  GFR-binding peptide
  MOD_RES (2)..(36)..(37): Xaa is C or S
  MOD_RES (14)..(15)..(16)..(17)..(18): Xaa is A or G
  MOD_RES (19)..(20)..(21)..(22): Xaa is A or G or is absent

SEQ ID NO: 61950 - protein, 36 aa, Artificial Sequence
  GFR-binding peptide
  MOD_RES (32)..(33): Xaa is C or S
AEVVMDRHKRLVVNNAADYYLISTASLRAPVXXSAP

SEQ ID NO: 61951 - protein, 36 aa, Artificial Sequence; identical to SEQ ID NO: 2566
  GFR-binding peptide
  MOD_RES (1)..(3)..(36): Xaa is C or S
  MOD_RES (14)..(15)..(16)..(17)..(18): Xaa is A or G
  MOD_RES (19)..(20)..(21)..(22): Xaa is A or G or is absent

SEQ ID NO: 61952 - protein, 40 aa, Artificial Sequence; identical to SEQ ID NO: 23560
  GFR-binding peptide
  MOD_RES (2)..(4)..(38)..(39): Xaa is C or S
  MOD_RES (16)..(17)..(18)..(19)..(20): Xaa is A or G
  MOD_RES (21)..(22)..(23)..(24): Xaa is A or G or is absent

SEQ ID NO: 61953 - protein, 38 aa, Artificial Sequence
  GFR-binding peptide
  MOD_RES (1)..(32)..(33): Xaa is C or S
XEEVIMYHYKLLLVRGNDKYLMSIPSTKVPAXXTSPVR

SEQ ID NO: 61954 - protein, 42 aa, Artificial Sequence
  GFR-binding peptide
  MOD_RES (2)..(36)..(37): Xaa is C or S
  MOD_RES (14)..(15)..(16)..(17)..(18): Xaa is A or G
  MOD_RES (19)..(20)..(21)..(22): Xaa is A or G or is absent
AXSEVTMNRYKKLXXXXXXXXXFYLISIANMKEPVXXPEPIG

SEQ ID NO: 61955 - protein, 39 aa, Artificial Sequence; identical to SEQ ID NO: 23564
  GFR-binding peptide
  MOD_RES (2)..(4)..(36)..(37): Xaa is C or S

SEQ ID NO: 61956 - protein, 37 aa, Artificial Sequence; identical to SEQ ID NO: 23565
  GFR-binding peptide
  MOD_RES (1)..(3)..(37): Xaa is C or S
  MOD_RES (15)..(16)..(17)..(18)..(19): Xaa is A or G
  MOD_RES (20)..(21)..(22)..(23): Xaa is A or G or is absent

SEQ ID NO: 61957 - protein, 34 aa, Artificial Sequence; identical to SEQ ID NO: 2570
  GFR-binding peptide
  MOD_RES (2)..(2): Xaa is C or S
  MOD_RES (13)..(14)..(15)..(16)..(17): Xaa is A or G
  MOD_RES (18)..(19)..(20)..(21): Xaa is A or G or is absent

SEQ ID NO: 61958 - protein, 40 aa, Artificial Sequence
  GFR-binding peptide
  MOD_RES (1)..(3)..(35)..(36): Xaa is C or S
XGXSEVVMDEYKFKVVNNASDLYLISIPELRTPVXXTPPT

SEQ ID NO: 61959 - protein, 35 aa, Artificial Sequence; identical to SEQ ID NO: 2574
  GFR-binding peptide
  MOD_RES (1)..(3): Xaa is C or S
  MOD_RES (14)..(15)..(16)..(17)..(18): Xaa is A or G
  MOD_RES (19)..(20)..(21)..(22): Xaa is A or G or is absent

SEQ ID NO: 61960 - protein, 32 aa, Artificial Sequence; identical to SEQ ID NO: 23571
  GFR-binding peptide
  MOD_RES (11)..(12)..(13)..(14)..(15): Xaa is A or G
  MOD_RES (16)..(17)..(18)..(19): Xaa is A or G or is absent

SEQ ID NO: 61961 - protein, 37 aa, Artificial Sequence; identical to SEQ ID NO: 23574
  GFR-binding peptide
  MOD_RES (34)..(35): Xaa is C or S
  MOD_RES (12)..(13)..(14)..(15)..(16): Xaa is A or G
  MOD_RES (17)..(18)..(19)..(20): Xaa is A or G or is absent

SEQ ID NO: 61962 - protein, 42 aa, Artificial Sequence; identical to SEQ ID NO: 2578
  GFR-binding peptide
  MOD_RES (2)..(4)..(38)..(39): Xaa is C or S
  MOD_RES (16)..(17)..(18)..(19)..(20): Xaa is A or G
  MOD_RES (21)..(22)..(23)..(24): Xaa is A or G or is absent

SEQ ID NO: 61963 - protein, 37 aa, Artificial Sequence
  GFR-binding peptide
  MOD_RES (34)..(35): Xaa is C or S
  MOD_RES (12)..(13)..(14)..(15)..(16): Xaa is A or G
  MOD_RES (17)..(18)..(19)..(20): Xaa is A or G or is absent
RDVVMGYHYKLXXXXXXXXXKYLMSIPSMKTPTXXPG

SEQ ID NO: 61964 - protein, 38 aa, Artificial Sequence; identical to SEQ ID NO: 2579
  GFR-binding peptide
  MOD_RES (1)..(3)..(36)..(37): Xaa is C or S
  MOD_RES (14)..(15)..(16)..(17)..(18): Xaa is A or G
  MOD_RES (19)..(20)..(21)..(22): Xaa is A or G or is absent

SEQ ID NO: 61965 - protein, 41 aa, Artificial Sequence; identical to SEQ ID NO: 31563
  GFR-binding peptide
  MOD_RES (35)..(36): Xaa is C or S
  MOD_RES (13)..(14)..(15)..(16)..(17): Xaa is A or G
  MOD_RES (18)..(19)..(20)..(21): Xaa is A or G or is absent

SEQ ID NO: 61966 - protein, 38 aa, Artificial Sequence; identical to SEQ ID NO: 2586
  GFR-binding peptide
  MOD_RES (1)..(34)..(35): Xaa is C or S
  MOD_RES (12)..(13)..(14)..(15)..(16): Xaa is A or G
  MOD_RES (17)..(18)..(19)..(20): Xaa is A or G or is absent

SEQ ID NO: 61967 - protein, 38 aa, Artificial Sequence
  GFR-binding peptide
  MOD_RES (33)..(34): Xaa is C or S
  MOD_RES (11)..(12)..(13)..(14)..(15): Xaa is A or G
  MOD_RES (16)..(17)..(18)..(19): Xaa is A or G or is absent
EVTMNPIKGYXXXXXXXXXFYLINIPSMKEPVXXPEPI

SEQ ID NO: 61968 - protein, 38 aa, Artificial Sequence
  GFR-binding peptide
  MOD_RES (1)..(32)..(33): Xaa is C or S
XSKVIMPIKGYIKPTKGIFYLINIPSLDQSVXXPSASA

SEQ ID NO: 61969 - protein, 38 aa, Artificial Sequence; identical to SEQ ID NO: 23589
  GFR-binding peptide
  MOD_RES (2)..(34)..(35): Xaa is C or S

SEQ ID NO: 61970 - protein, 41 aa, Artificial Sequence; identical to SEQ ID NO: 23593
  GFR-binding peptide
  MOD_RES (2)..(4)..(36)..(37): Xaa is C or S

SEQ ID NO: 61971 - protein, 36 aa, Artificial Sequence
  GFR-binding peptide
  MOD_RES (1)..(35)..(36): Xaa is C or S
  MOD_RES (13)..(14)..(15)..(16)..(17): Xaa is A or G
  MOD_RES (18)..(19)..(20)..(21): Xaa is A or G or is absent
XSEVTMNRHKRLXXXXXXXXXYYLISTASMKEPVXX

SEQ ID NO: 61972 - protein, 32 aa, Artificial Sequence
  GFR-binding peptide
  MOD_RES (1)..(1): Xaa is C or S
XRDVVMGYHYKLIIQQKDNKYLMSIPSMKTPT

SEQ ID NO: 61973 - protein, 40 aa, Artificial Sequence
  GFR-binding peptide
  MOD_RES (1)..(3)..(34)..(35): Xaa is C or S
XGXEEVIMRHKRLLLVRGNDYYLMSTASTKVPAXXTSPVR

SEQ ID NO: 61974 - protein, 36 aa, Artificial Sequence
  GFR-binding peptide
  MOD_RES (1)..(33)..(34): Xaa is C or S
XRDVVMGYHYKLIIQQKDNKYLMSIPSMKTPTXXPG

SEQ ID NO: 61975 - protein, 35 aa, Artificial Sequence; identical to SEQ ID NO: 23598
  GFR-binding peptide
  MOD_RES (32)..(33): Xaa is C or S

SEQ ID NO: 61976 - protein, 41 aa, Artificial Sequence; identical to SEQ ID NO: 2597
  GFR-binding peptide
  MOD_RES (2)..(36)..(37): Xaa is C or S
  MOD_RES (14)..(15)..(16)..(17)..(18): Xaa is A or G
  MOD_RES (19)..(20)..(21)..(22): Xaa is A or G or is absent

SEQ ID NO: 61977 - protein, 39 aa, Artificial Sequence; identical to SEQ ID NO: 23600
  GFR-binding peptide
  MOD_RES (34)..(35): Xaa is C or S
  MOD_RES (12)..(13)..(14)..(15)..(16): Xaa is A or G
  MOD_RES (17)..(18)..(19)..(20): Xaa is A or G or is absent

SEQ ID NO: 61978 - protein, 40 aa, Artificial Sequence; identical to SEQ ID NO: 31577
  GFR-binding peptide
  MOD_RES (1)..(3)..(37)..(38): Xaa is C or S
  MOD_RES (15)..(16)..(17)..(18)..(19): Xaa is A or G
  MOD_RES (20)..(21)..(22)..(23): Xaa is A or G or is absent

SEQ ID NO: 61979 - protein, 40 aa, Artificial Sequence; identical to SEQ ID NO: 31578
  GFR-binding peptide
  MOD_RES (2)..(35)..(36): Xaa is C or S

SEQ ID NO: 61980 - protein, 36 aa, Artificial Sequence; identical to SEQ ID NO: 2600
  GFR-binding peptide
  MOD_RES (32)..(33): Xaa is C or S

SEQ ID NO: 61981 - protein, 33 aa, Artificial Sequence
  GFR-binding peptide
  MOD_RES (33)..(33): Xaa is C or S
  MOD_RES (11)..(12)..(13)..(14)..(15): Xaa is A or G
  MOD_RES (16)..(17)..(18)..(19): Xaa is A or G or is absent
EVTMNRHKRLXXXXXXXXXYYLISTASMKEPVX

SEQ ID NO: 61982 - protein, 41 aa, Artificial Sequence
  GFR-binding peptide
  MOD_RES (1)..(35)..(36): Xaa is C or S
  MOD_RES (13)..(14)..(15)..(16)..(17): Xaa is A or G
  MOD_RES (18)..(19)..(20)..(21): Xaa is A or G or is absent
XSEVTMNEYKFKXXXXXXXXXLYLISIPEMKEPVXXPEPIG

SEQ ID NO: 61983 - protein, 41 aa, Artificial Sequence; identical to SEQ ID NO: 23607
  GFR-binding peptide
  MOD_RES (2)..(4)..(36)..(37): Xaa is C or S

SEQ ID NO: 61984 - protein, 38 aa, Artificial Sequence; identical to SEQ ID NO: 23608
  GFR-binding peptide
  MOD_RES (1)..(3)..(36)..(37): Xaa is C or S

SEQ ID NO: 61985 - protein, 36 aa, Artificial Sequence; identical to SEQ ID NO: 23609
  GFR-binding peptide
  MOD_RES (2)..(35)..(36): Xaa is C or S
  MOD_RES (13)..(14)..(15)..(16)..(17): Xaa is A or G
  MOD_RES (18)..(19)..(20)..(21): Xaa is A or G or is absent

SEQ ID NO: 61986 - protein, 33 aa, Artificial Sequence; identical to SEQ ID NO: 31585
  GFR-binding peptide
  MOD_RES (31)..(32): Xaa is C or S

SEQ ID NO: 61987 - protein, 40 aa, Artificial Sequence; identical to SEQ ID NO: 23610
  GFR-binding peptide
  MOD_RES (2)..(4)..(36)..(37): Xaa is C or S

SEQ ID NO: 61988 - protein, 32 aa, Artificial Sequence; identical to SEQ ID NO: 2604
  GFR-binding peptide
  MOD_RES (11)..(12)..(13)..(14)..(15): Xaa is A or G
  MOD_RES (16)..(17)..(18)..(19): Xaa is A or G or is absent

SEQ ID NO: 61989 - protein, 37 aa, Artificial Sequence; identical to SEQ ID NO: 2605
  GFR-binding peptide
  MOD_RES (1)..(3)..(35)..(36): Xaa is C or S

SEQ ID NO: 61990 - protein, 38 aa, Artificial Sequence; identical to SEQ ID NO: 23615
  GFR-binding peptide
  MOD_RES (2)..(36)..(37): Xaa is C or S
  MOD_RES (14)..(15)..(16)..(17)..(18): Xaa is A or G
  MOD_RES (19)..(20)..(21)..(22): Xaa is A or G or is absent

SEQ ID NO: 61991 - protein, 35 aa, Artificial Sequence; identical to SEQ ID NO: 31587
  GFR-binding peptide
  MOD_RES (2)..(2): Xaa is C or S
  MOD_RES (14)..(15)..(16)..(17)..(18): Xaa is A or G
  MOD_RES (19)..(20)..(21)..(22): Xaa is A or G or is absent

SEQ ID NO: 61992 - protein, 40 aa, Artificial Sequence; identical to SEQ ID NO: 31590
  GFR-binding peptide
  MOD_RES (2)..(4)..(37)..(38): Xaa is C or S
  MOD_RES (15)..(16)..(17)..(18)..(19): Xaa is A or G
  MOD_RES (20)..(21)..(22)..(23): Xaa is A or G or is absent

SEQ ID NO: 61993 - protein, 37 aa, Artificial Sequence; identical to SEQ ID NO: 31591
  GFR-binding peptide
  MOD_RES (2)..(36)..(37): Xaa is C or S
  MOD_RES (14)..(15)..(16)..(17)..(18): Xaa is A or G
  MOD_RES (19)..(20)..(21)..(22): Xaa is A or G or is absent

SEQ ID NO: 61994 - protein, 41 aa, Artificial Sequence; identical to SEQ ID NO: 56516
  GFR-binding peptide
  MOD_RES (2)..(4)..(37)..(38): Xaa is C or S
  MOD_RES (15)..(16)..(17)..(18)..(19): Xaa is A or G
  MOD_RES (20)..(21)..(22)..(23): Xaa is A or G or is absent

SEQ ID NO: 61995 - protein, 35 aa, Artificial Sequence; identical to SEQ ID NO: 2608
  GFR-binding peptide
  MOD_RES (2)..(4)..(35): Xaa is C or S

SEQ ID NO: 61996 - protein, 42 aa, Artificial Sequence
  GFR-binding peptide
  MOD_RES (2)..(4)..(38)..(39): Xaa is C or S
  MOD_RES (16)..(17)..(18)..(19)..(20): Xaa is A or G
  MOD_RES (21)..(22)..(23)..(24): Xaa is A or G or is absent
RXAXSEVTMNPIKGYXXXXXXXXXFYLINIPSMKEPVXXPEP

SEQ ID NO: 61997 - protein, 36 aa, Artificial Sequence; identical to SEQ ID NO: 2609
  GFR-binding peptide
  MOD_RES (2)..(34): Xaa is C or S

SEQ ID NO: 61998 - protein, 32 aa, Artificial Sequence
  GFR-binding peptide
  MOD_RES (32)..(32): Xaa is C or S
SEVTMNRYKKLVVNKNEDFYLISIANMKEPVX

SEQ ID NO: 61999 - protein, 32 aa, Artificial Sequence; identical to SEQ ID NO: 2610
  GFR-binding peptide
  MOD_RES (11)..(12)..(13)..(14)..(15): Xaa is A or G
  MOD_RES (16)..(17)..(18)..(19): Xaa is A or G or is absent

SEQ ID NO: 62000 - protein, 39 aa, Artificial Sequence; identical to SEQ ID NO: 2611
  GFR-binding peptide
  MOD_RES (1)..(3)..(38)..(39): Xaa is C or S
  MOD_RES (16)..(17)..(18)..(19)..(20): Xaa is A or G
  MOD_RES (21)..(22)..(23)..(24): Xaa is A or G or is absent

SEQ ID NO: 62001 - protein, 33 aa, Artificial Sequence
  GFR-binding peptide
  MOD_RES (1)..(32)..(33): Xaa is C or S
XSKVIMPIKGYIKPTKGIFYLINIPSLDQSVXX

SEQ ID NO: 62002 - protein, 32 aa, Artificial Sequence
  GFR-binding peptide
  MOD_RES (31)..(32): Xaa is C or S
SKVVMPIKGYVKPTRGVFYLINIPSLDQPVXX

SEQ ID NO: 62003 - protein, 38 aa, Artificial Sequence
  GFR-binding peptide
  MOD_RES (2)..(4)..(37)..(38): Xaa is C or S
  MOD_RES (15)..(16)..(17)..(18)..(19): Xaa is A or G
  MOD_RES (20)..(21)..(22)..(23): Xaa is A or G or is absent
SXKXSKVVMPIKGYXXXXXXXXXFYLINIPSLDQPVXX

SEQ ID NO: 62004 - protein, 43 aa, Artificial Sequence; identical to SEQ ID NO: 2613
  GFR-binding peptide
  MOD_RES (2)..(4)..(38)..(39): Xaa is C or S
  MOD_RES (16)..(17)..(18)..(19)..(20): Xaa is A or G
  MOD_RES (21)..(22)..(23)..(24): Xaa is A or G or is absent

SEQ ID NO: 62005 - protein, 35 aa, Artificial Sequence; identical to SEQ ID NO: 2614
  GFR-binding peptide
  MOD_RES (33)..(34): Xaa is C or S
  MOD_RES (11)..(12)..(13)..(14)..(15): Xaa is A or G
  MOD_RES (16)..(17)..(18)..(19): Xaa is A or G or is absent

SEQ ID NO: 62006 - protein, 36 aa, Artificial Sequence; identical to SEQ ID NO: 23622
  GFR-binding peptide
  MOD_RES (2)..(4)..(36): Xaa is C or S

SEQ ID NO: 62007 - protein, 30 aa, Artificial Sequence; identical to SEQ ID NO: 23623
  GFR-binding peptide

SEQ ID NO: 62008 - protein, 36 aa, Artificial Sequence
  GFR-binding peptide
  MOD_RES (2)..(34)..(35): Xaa is C or S
AXSEVTMNEYKFKVVNKNEDLYLISIPEMKEPVXXP

SEQ ID NO: 62009 - protein, 39 aa, Artificial Sequence; identical to SEQ ID NO: 31606
  GFR-binding peptide
  MOD_RES (1)..(35)..(36): Xaa is C or S
  MOD_RES (13)..(14)..(15)..(16)..(17): Xaa is A or G
  MOD_RES (18)..(19)..(20)..(21): Xaa is A or G or is absent

SEQ ID NO: 62010 - protein, 42 aa, Artificial Sequence; identical to SEQ ID NO: 2624
  GFR-binding peptide
  MOD_RES (2)..(4)..(37)..(38): Xaa is C or S
  MOD_RES (15)..(16)..(17)..(18)..(19): Xaa is A or G
  MOD_RES (20)..(21)..(22)..(23): Xaa is A or G or is absent

SEQ ID NO: 62011 - protein, 33 aa, Artificial Sequence; identical to SEQ ID NO: 2625
  GFR-binding peptide
  MOD_RES (31)..(32): Xaa is C or S

SEQ ID NO: 62012 - protein, 33 aa, Artificial Sequence; identical to SEQ ID NO: 23631
  GFR-binding peptide
  MOD_RES (32)..(33): Xaa is C or S

SEQ ID NO: 62013 - protein, 36 aa, Artificial Sequence; identical to SEQ ID NO: 2631
  GFR-binding peptide
  MOD_RES (33)..(34): Xaa is C or S
  MOD_RES (11)..(12)..(13)..(14)..(15): Xaa is A or G
  MOD_RES (16)..(17)..(18)..(19): Xaa is A or G or is absent

SEQ ID NO: 62014 - protein, 38 aa, Artificial Sequence
  GFR-binding peptide
  MOD_RES (2)..(4)..(38): Xaa is C or S
  MOD_RES (16)..(17)..(18)..(19)..(20): Xaa is A or G
  MOD_RES (21)..(22)..(23)..(24): Xaa is A or G or is absent
RXAXSEVTMNYHYKLXXXXXXXXXKYLISIPSMKEPVX

SEQ ID NO: 62015 - protein, 38 aa, Artificial Sequence
  GFR-binding peptide
  MOD_RES (2)..(4)..(36)..(37): Xaa is C or S
RXGXAEVVMDRHKRLVVNNAADYYLISTASLRAPVXXS

SEQ ID NO: 62016 - protein, 40 aa, Artificial Sequence; identical to SEQ ID NO: 31612
  GFR-binding peptide
  MOD_RES (1)..(3)..(35)..(36): Xaa is C or S

SEQ ID NO: 62017 - protein, 37 aa, Artificial Sequence; identical to SEQ ID NO: 23636
  GFR-binding peptide
  MOD_RES (34)..(35): Xaa is C or S
  MOD_RES (12)..(13)..(14)..(15)..(16): Xaa is A or G
  MOD_RES (17)..(18)..(19)..(20): Xaa is A or G or is absent

SEQ ID NO: 62018 - protein, 39 aa, Artificial Sequence; identical to SEQ ID NO: 2637
  GFR-binding peptide
  MOD_RES (2)..(4)..(37)..(38): Xaa is C or S
  MOD_RES (15)..(16)..(17)..(18)..(19): Xaa is A or G
  MOD_RES (20)..(21)..(22)..(23): Xaa is A or G or is absent

SEQ ID NO: 62019 - protein, 34 aa, Artificial Sequence; identical to SEQ ID NO: 23640
  GFR-binding peptide
  MOD_RES (31)..(32): Xaa is C or S

SEQ ID NO: 62020 - protein, 39 aa, Artificial Sequence; identical to SEQ ID NO: 2640
  GFR-binding peptide
  MOD_RES (2)..(36): Xaa is C or S
  MOD_RES (14)..(15)..(16)..(17)..(18): Xaa is A or G
  MOD_RES (19)..(20)..(21)..(22): Xaa is A or G or is absent

SEQ ID NO: 62021 - protein, 37 aa, Artificial Sequence; identical to SEQ ID NO: 2641
  GFR-binding peptide
  MOD_RES (32)..(33): Xaa is C or S

SEQ ID NO: 62022 - protein, 38 aa, Artificial Sequence; identical to SEQ ID NO: 23642
  GFR-binding peptide
  MOD_RES (2)..(4)..(38): Xaa is C or S
  MOD_RES (16)..(17)..(18)..(19)..(20): Xaa is A or G
  MOD_RES (21)..(22)..(23)..(24): Xaa is A or G or is absent

SEQ ID NO: 62023 - protein, 37 aa, Artificial Sequence
  GFR-binding peptide
  MOD_RES (31)..(32): Xaa is C or S
EVTMNPIKGYVVNKNEDFYLINIPSMKEPVXXPEPIG

SEQ ID NO: 62024 - protein, 37 aa, Artificial Sequence; identical to SEQ ID NO: 2642
  GFR-binding peptide
  MOD_RES (31)..(32): Xaa is C or S

SEQ ID NO: 62025 - protein, 37 aa, Artificial Sequence; identical to SEQ ID NO: 23647
  GFR-binding peptide
  MOD_RES (1)..(33)..(34): Xaa is C or S

SEQ ID NO: 62026 - protein, 39 aa, Artificial Sequence; identical to SEQ ID NO: 23648
  GFR-binding peptide
  MOD_RES (1)..(35)..(36): Xaa is C or S
  MOD_RES (13)..(14)..(15)..(16)..(17): Xaa is A or G
  MOD_RES (18)..(19)..(20)..(21): Xaa is A or G or is absent

SEQ ID NO: 62027 - protein, 42 aa, Artificial Sequence
  GFR-binding peptide
  MOD_RES (2)..(4)..(37)..(38): Xaa is C or S
  MOD_RES (15)..(16)..(17)..(18)..(19): Xaa is A or G
  MOD_RES (20)..(21)..(22)..(23): Xaa is A or G or is absent
SXKXSKVIMPIKGYXXXXXXXXXFYLINIPSLDQSVXXPSAS

SEQ ID NO: 62028 - protein, 39 aa, Artificial Sequence; identical to SEQ ID NO: 2648
  GFR-binding peptide
  MOD_RES (2)..(34)..(35): Xaa is C or S

SEQ ID NO: 62029 - protein, 33 aa, Artificial Sequence
  GFR-binding peptide
  MOD_RES (1)..(32)..(33): Xaa is C or S
XEEVIMEYKFKLLVRGNDLYLMSIPETKVPAXX

SEQ ID NO: 62030 - protein, 39 aa, Artificial Sequence; identical to SEQ ID NO: 2649
  GFR-binding peptide
  MOD_RES (2)..(4)..(38)..(39): Xaa is C or S
  MOD_RES (16)..(17)..(18)..(19)..(20): Xaa is A or G
  MOD_RES (21)..(22)..(23)..(24): Xaa is A or G or is absent

SEQ ID NO: 62031 - protein, 35 aa, Artificial Sequence; identical to SEQ ID NO: 31627
  GFR-binding peptide
  MOD_RES (2)..(34)..(35): Xaa is C or S

SEQ ID NO: 62032 - protein, 42 aa, Artificial Sequence; identical to SEQ ID NO: 31629
  GFR-binding peptide
  MOD_RES (2)..(4)..(38): Xaa is C or S
  MOD_RES (16)..(17)..(18)..(19)..(20): Xaa is A or G
  MOD_RES (21)..(22)..(23)..(24): Xaa is A or G or is absent

SEQ ID NO: 62033 - protein, 38 aa, Artificial Sequence
  GFR-binding peptide
  MOD_RES (1)..(3)..(37)..(38): Xaa is C or S
  MOD_RES (15)..(16)..(17)..(18)..(19): Xaa is A or G
  MOD_RES (20)..(21)..(22)..(23): Xaa is A or G or is absent
XAXSEVTMNRHKRLXXXXXXXXXYYLISTASMKEPVXX

SEQ ID NO: 62034 - protein, 39 aa, Artificial Sequence; identical to SEQ ID NO: 2654
  GFR-binding peptide
  MOD_RES (2)..(35)..(36): Xaa is C or S
  MOD_RES (13)..(14)..(15)..(16)..(17): Xaa is A or G
  MOD_RES (18)..(19)..(20)..(21): Xaa is A or G or is absent

SEQ ID NO: 62035 - protein, 35 aa, Artificial Sequence; identical to SEQ ID NO: 23655
  GFR-binding peptide
  MOD_RES (31)..(32): Xaa is C or S

SEQ ID NO: 62036 - protein, 40 aa, Artificial Sequence; identical to SEQ ID NO: 31636
  GFR-binding peptide
  MOD_RES (34)..(35): Xaa is C or S
  MOD_RES (12)..(13)..(14)..(15)..(16): Xaa is A or G
  MOD_RES (17)..(18)..(19)..(20): Xaa is A or G or is absent

SEQ ID NO: 62037 - protein, 38 aa, Artificial Sequence; identical to SEQ ID NO: 23657
  GFR-binding peptide
  MOD_RES (1)..(35)..(36): Xaa is C or S
  MOD_RES (13)..(14)..(15)..(16)..(17): Xaa is A or G
  MOD_RES (18)..(19)..(20)..(21): Xaa is A or G or is absent

SEQ ID NO: 62038 - protein, 36 aa, Artificial Sequence; identical to SEQ ID NO: 56563
  GFR-binding peptide
  MOD_RES (1)..(3): Xaa is C or S
  MOD_RES (15)..(16)..(17)..(18)..(19): Xaa is A or G
  MOD_RES (20)..(21)..(22)..(23): Xaa is A or G or is absent

SEQ ID NO: 62039 - protein, 41 aa, Artificial Sequence; identical to SEQ ID NO: 23661
  GFR-binding peptide
  MOD_RES (1)..(3)..(37)..(38): Xaa is C or S
  MOD_RES (15)..(16)..(17)..(18)..(19): Xaa is A or G
  MOD_RES (20)..(21)..(22)..(23): Xaa is A or G or is absent

SEQ ID NO: 62040 - protein, 37 aa, Artificial Sequence; identical to SEQ ID NO: 2663
  GFR-binding peptide
  MOD_RES (33)..(34): Xaa is C or S
  MOD_RES (11)..(12)..(13)..(14)..(15): Xaa is A or G
  MOD_RES (16)..(17)..(18)..(19): Xaa is A or G or is absent

SEQ ID NO: 62041 - protein, 36 aa, Artificial Sequence; identical to SEQ ID NO: 31643
  GFR-binding peptide
  MOD_RES (1)..(3)..(35)..(36): Xaa is C or S

SEQ ID NO: 62042 - protein, 35 aa, Artificial Sequence; identical to SEQ ID NO: 10150
  GFR-binding peptide
  MOD_RES (1)..(35): Xaa is C or S
  MOD_RES (13)..(14)..(15)..(16)..(17): Xaa is A or G
  MOD_RES (18)..(19)..(20)..(21): Xaa is A or G or is absent

SEQ ID NO: 62043 - protein, 38 aa, Artificial Sequence
  GFR-binding peptide
  MOD_RES (32)..(33): Xaa is C or S
SEVTMNRHKRLVVNKNEDYYLISTASMKEPVXXPEPIG

SEQ ID NO: 62044 - protein, 39 aa, Artificial Sequence
  GFR-binding peptide
  MOD_RES (2)..(4)..(35)..(36): Xaa is C or S
LXGXEEVIMRHKRLLLVRGNDYYLMSTASTKVPAXXTSP

SEQ ID NO: 62045 - protein, 39 aa, Artificial Sequence; identical to SEQ ID NO: 23667
  GFR-binding peptide
  MOD_RES (33)..(34): Xaa is C or S
  MOD_RES (11)..(12)..(13)..(14)..(15): Xaa is A or G
  MOD_RES (16)..(17)..(18)..(19): Xaa is A or G or is absent

SEQ ID NO: 62046 - protein, 31 aa, Artificial Sequence; identical to SEQ ID NO: 2670
  GFR-binding peptide
  MOD_RES (31)..(31): Xaa is C or S

SEQ ID NO: 62047 - protein, 35 aa, Artificial Sequence; identical to SEQ ID NO: 23669
  GFR-binding peptide
  MOD_RES (1)..(35): Xaa is C or S
  MOD_RES (13)..(14)..(15)..(16)..(17): Xaa is A or G
  MOD_RES (18)..(19)..(20)..(21): Xaa is A or G or is absent

SEQ ID NO: 62048 - protein, 38 aa, Artificial Sequence
  GFR-binding peptide
  MOD_RES (2)..(34)..(35): Xaa is C or S
AXSEVTMNYHYKLVVNKNEDKYLISIPSMKEPVXXPEP

SEQ ID NO: 62049 - protein, 38 aa, Artificial Sequence
  GFR-binding peptide
  MOD_RES (1)..(3)..(36)..(37): Xaa is C or S
  MOD_RES (14)..(15)..(16)..(17)..(18): Xaa is A or G
  MOD_RES (19)..(20)..(21)..(22): Xaa is A or G or is absent
XKXSKVIMPIKGYXXXXXXXXXFYLINIPSLDQSVXXP

SEQ ID NO: 62050 - protein, 42 aa, Artificial Sequence; identical to SEQ ID NO: 23672
  GFR-binding peptide
  MOD_RES (1)..(3)..(37)..(38): Xaa is C or S
  MOD_RES (15)..(16)..(17)..(18)..(19): Xaa is A or G
  MOD_RES (20)..(21)..(22)..(23): Xaa is A or G or is absent

SEQ ID NO: 62051 - protein, 38 aa, Artificial Sequence; identical to SEQ ID NO: 2673
  GFR-binding peptide
  MOD_RES (2)..(36)..(37): Xaa is C or S
  MOD_RES (14)..(15)..(16)..(17)..(18): Xaa is A or G
  MOD_RES (19)..(20)..(21)..(22): Xaa is A or G or is absent

SEQ ID NO: 62052 - protein, 38 aa, Artificial Sequence; identical to SEQ ID NO: 2675
  GFR-binding peptide
  MOD_RES (2)..(4)..(38): Xaa is C or S
  MOD_RES (16)..(17)..(18)..(19)..(20): Xaa is A or G
  MOD_RES (21)..(22)..(23)..(24): Xaa is A or G or is absent

SEQ ID NO: 62053 - protein, 35 aa, Artificial Sequence; identical to SEQ ID NO: 23676
  GFR-binding peptide
  MOD_RES (2)..(4): Xaa is C or S

SEQ ID NO: 62054 - protein, 39 aa, Artificial Sequence; identical to SEQ ID NO: 31652
  GFR-binding peptide
  MOD_RES (2)..(36)..(37): Xaa is C or S
  MOD_RES (14)..(15)..(16)..(17)..(18): Xaa is A or G
  MOD_RES (19)..(20)..(21)..(22): Xaa is A or G or is absent

SEQ ID NO: 62055 - protein, 38 aa, Artificial Sequence; identical to SEQ ID NO: 31653
  GFR-binding peptide
  MOD_RES (2)..(4)..(38): Xaa is C or S
  MOD_RES (16)..(17)..(18)..(19)..(20): Xaa is A or G
  MOD_RES (21)..(22)..(23)..(24): Xaa is A or G or is absent

SEQ ID NO: 62056 - protein, 40 aa, Artificial Sequence; identical to SEQ ID NO: 23677
  GFR-binding peptide
  MOD_RES (1)..(3)..(35)..(36): Xaa is C or S

SEQ ID NO: 62057 - protein, 35 aa, Artificial Sequence; identical to SEQ ID NO: 2679
  GFR-binding peptide
  MOD_RES (1)..(1): Xaa is C or S
  MOD_RES (14)..(15)..(16)..(17)..(18): Xaa is A or G
  MOD_RES (19)..(20)..(21)..(22): Xaa is A or G or is absent

SEQ ID NO: 62058 - protein, 41 aa, Artificial Sequence; identical to SEQ ID NO: 31658
  GFR-binding peptide
  MOD_RES (1)..(3)..(37)..(38): Xaa is C or S
  MOD_RES (15)..(16)..(17)..(18)..(19): Xaa is A or G
  MOD_RES (20)..(21)..(22)..(23): Xaa is A or G or is absent

SEQ ID NO: 62059 - protein, 34 aa, Artificial Sequence; identical to SEQ ID NO: 56596
  GFR-binding peptide
  MOD_RES (34)..(34): Xaa is C or S
  MOD_RES (12)..(13)..(14)..(15)..(16): Xaa is A or G
  MOD_RES (17)..(18)..(19)..(20): Xaa is A or G or is absent

SEQ ID NO: 62060 - protein, 39 aa, Artificial Sequence
  GFR-binding peptide
  MOD_RES (2)..(4)..(35)..(36): Xaa is C or S
SXKXSRVIMPIKGYVKPKRGVFYLINIPSLAQPVXXPAA

SEQ ID NO: 62061 - protein, 42 aa, Artificial Sequence; identical to SEQ ID NO: 2684
  GFR-binding peptide
  MOD_RES (2)..(36): Xaa is C or S
  MOD_RES (14)..(15)..(16)..(17)..(18): Xaa is A or G
  MOD_RES (19)..(20)..(21)..(22): Xaa is A or G or is absent

SEQ ID NO: 62062 - protein, 36 aa, Artificial Sequence; identical to SEQ ID NO: 2685
  GFR-binding peptide
  MOD_RES (1)..(3)..(35): Xaa is C or S

SEQ ID NO: 62063 - protein, 38 aa, Artificial Sequence; identical to SEQ ID NO: 2687
  GFR-binding peptide
  MOD_RES (34)..(35): Xaa is C or S
  MOD_RES (12)..(13)..(14)..(15)..(16): Xaa is A or G
  MOD_RES (17)..(18)..(19)..(20): Xaa is A or G or is absent

SEQ ID NO: 62064 - protein, 37 aa, Artificial Sequence
  GFR-binding peptide
  MOD_RES (1)..(33)..(34): Xaa is C or S
XESVAMGRHKRLYTVVGKDYYLISTASLKTPVXXAKS

SEQ ID NO: 62065 - protein, 38 aa, Artificial Sequence; identical to SEQ ID NO: 2691
  GFR-binding peptide
  MOD_RES (2)..(4)..(37)..(38): Xaa is C or S
  MOD_RES (15)..(16)..(17)..(18)..(19): Xaa is A or G
  MOD_RES (20)..(21)..(22)..(23): Xaa is A or G or is absent

SEQ ID NO: 62066 - protein, 35 aa, Artificial Sequence; identical to SEQ ID NO: 23685
  GFR-binding peptide
  MOD_RES (32)..(33): Xaa is C or S

SEQ ID NO: 62067 - protein, 33 aa, Artificial Sequence; identical to SEQ ID NO: 23686
  GFR-binding peptide
  MOD_RES (33)..(33): Xaa is C or S
  MOD_RES (11)..(12)..(13)..(14)..(15): Xaa is A or G
  MOD_RES (16)..(17)..(18)..(19): Xaa is A or G or is absent

SEQ ID NO: 62068 - protein, 34 aa, Artificial Sequence; identical to SEQ ID NO: 2693
  GFR-binding peptide
  MOD_RES (34)..(34): Xaa is C or S
  MOD_RES (12)..(13)..(14)..(15)..(16): Xaa is A or G
  MOD_RES (17)..(18)..(19)..(20): Xaa is A or G or is absent

SEQ ID NO: 62069 - protein, 34 aa, Artificial Sequence; identical to SEQ ID NO: 23691
  GFR-binding peptide
  MOD_RES (1)..(34): Xaa is C or S
  MOD_RES (12)..(13)..(14)..(15)..(16): Xaa is A or G
  MOD_RES (17)..(18)..(19)..(20): Xaa is A or G or is absent

SEQ ID NO: 62070 - protein, 38 aa, Artificial Sequence; identical to SEQ ID NO: 23692
  GFR-binding peptide
  MOD_RES (2)..(4)..(36)..(37): Xaa is C or S

SEQ ID NO: 62071 - protein, 41 aa, Artificial Sequence; identical to SEQ ID NO: 23693
  GFR-binding peptide
  MOD_RES (2)..(4)..(39)..(40): Xaa is C or S
  MOD_RES (17)..(18)..(19)..(20)..(21): Xaa is A or G
  MOD_RES (22)..(23)..(24)..(25): Xaa is A or G or is absent

SEQ ID NO: 62072 - protein, 36 aa, Artificial Sequence
  GFR-binding peptide
  MOD_RES (2)..(34)..(35): Xaa is C or S
GXRDVVMGEYKFKIIQQKDNLYLMSIPEMKTPTXXP

SEQ ID NO: 62073 - protein, 43 aa, Artificial Sequence; identical to SEQ ID NO: 23694
  GFR-binding peptide
  MOD_RES (2)..(4)..(38)..(39): Xaa is C or S
  MOD_RES (16)..(17)..(18)..(19)..(20): Xaa is A or G
  MOD_RES (21)..(22)..(23)..(24): Xaa is A or G or is absent

SEQ ID NO: 62074 - protein, 36 aa, Artificial Sequence; identical to SEQ ID NO: 2695
  GFR-binding peptide
  MOD_RES (32)..(33): Xaa is C or S

SEQ ID NO: 62075 - protein, 36 aa, Artificial Sequence
  GFR-binding peptide
  MOD_RES (34)..(35): Xaa is C or S
  MOD_RES (12)..(13)..(14)..(15)..(16): Xaa is A or G
  MOD_RES (17)..(18)..(19)..(20): Xaa is A or G or is absent
ESVAMGRHKRLXXXXXXXXXYYLISTASLKTPVXXA

SEQ ID NO: 62076 - protein, 42 aa, Artificial Sequence; identical to SEQ ID NO: 31670
  GFR-binding peptide
  MOD_RES (2)..(4)..(36)..(37): Xaa is C or S

SEQ ID NO: 62077 - protein, 41 aa, Artificial Sequence; identical to SEQ ID NO: 23697
  GFR-binding peptide
  MOD_RES (2)..(4)..(37)..(38): Xaa is C or S

SEQ ID NO: 62078 - protein, 36 aa, Artificial Sequence; identical to SEQ ID NO: 31673
  GFR-binding peptide
  MOD_RES (33)..(34): Xaa is C or S
  MOD_RES (11)..(12)..(13)..(14)..(15): Xaa is A or G
  MOD_RES (16)..(17)..(18)..(19): Xaa is A or G or is absent

SEQ ID NO: 62079 - protein, 34 aa, Artificial Sequence
  GFR-binding peptide
  MOD_RES (2)..(34): Xaa is C or S
AXSEVTMNYHYKLVVNKNEDKYLISIPSMKEPVX

SEQ ID NO: 62080 - protein, 36 aa, Artificial Sequence; identical to SEQ ID NO: 2699
  GFR-binding peptide
  MOD_RES (2)..(35)..(36): Xaa is C or S
  MOD_RES (13)..(14)..(15)..(16)..(17): Xaa is A or G
  MOD_RES (18)..(19)..(20)..(21): Xaa is A or G or is absent

SEQ ID NO: 62081 - protein, 39 aa, Artificial Sequence; identical to SEQ ID NO: 23700
  GFR-binding peptide
  MOD_RES (1)..(3)..(35)..(36): Xaa is C or S

SEQ ID NO: 62082 - protein, 42 aa, Artificial Sequence; identical to SEQ ID NO: 23701
  GFR-binding peptide
  MOD_RES (1)..(3)..(38)..(39): Xaa is C or S
  MOD_RES (16)..(17)..(18)..(19)..(20): Xaa is A or G
  MOD_RES (21)..(22)..(23)..(24): Xaa is A or G or is absent

SEQ ID NO: 62083 - protein, 34 aa, Artificial Sequence; identical to SEQ ID NO: 2702
  GFR-binding peptide
  MOD_RES (2)..(33)..(34): Xaa is C or S

SEQ ID NO: 62084 - protein, 31 aa, Artificial Sequence
  GFR-binding peptide
  MOD_RES (31)..(31): Xaa is C or S
EVVMDRHKRLVVNNASDYYLISTASLRTPVX

SEQ ID NO: 62085 - protein, 40 aa, Artificial Sequence; identical to SEQ ID NO: 23707
  GFR-binding peptide
  MOD_RES (1)..(3)..(37)..(38): Xaa is C or S
  MOD_RES (15)..(16)..(17)..(18)..(19): Xaa is A or G
  MOD_RES (20)..(21)..(22)..(23): Xaa is A or G or is absent

SEQ ID NO: 62086 - protein, 37 aa, Artificial Sequence; identical to SEQ ID NO: 2707
  GFR-binding peptide
  MOD_RES (33)..(34): Xaa is C or S
  MOD_RES (11)..(12)..(13)..(14)..(15): Xaa is A or G
  MOD_RES (16)..(17)..(18)..(19): Xaa is A or G or is absent

SEQ ID NO: 62087 - protein, 33 aa, Artificial Sequence; identical to SEQ ID NO: 2711
  GFR-binding peptide
  MOD_RES (33)..(33): Xaa is C or S
  MOD_RES (11)..(12)..(13)..(14)..(15): Xaa is A or G
  MOD_RES (16)..(17)..(18)..(19): Xaa is A or G or is absent

SEQ ID NO: 62088 - protein, 43 aa, Artificial Sequence; identical to SEQ ID NO: 23709
  GFR-binding peptide
  MOD_RES (2)..(4)..(38)..(39): Xaa is C or S
  MOD_RES (16)..(17)..(18)..(19)..(20): Xaa is A or G
  MOD_RES (21)..(22)..(23)..(24): Xaa is A or G or is absent

SEQ ID NO: 62089 - protein, 32 aa, Artificial Sequence; identical to SEQ ID NO: 2713
  GFR-binding peptide
  MOD_RES (11)..(12)..(13)..(14)..(15): Xaa is A or G
  MOD_RES (16)..(17)..(18)..(19): Xaa is A or G or is absent

SEQ ID NO: 62090 - protein, 33 aa, Artificial Sequence
  GFR-binding peptide
  MOD_RES (12)..(13)..(14)..(15)..(16): Xaa is A or G
  MOD_RES (17)..(18)..(19)..(20): Xaa is A or G or is absent
RDVVMGYHYKLXXXXXXXXXKYLMSIPSMKTPT

SEQ ID NO: 62091 - protein, 35 aa, Artificial Sequence; identical to SEQ ID NO: 31689
  GFR-binding peptide
  MOD_RES (31)..(32): Xaa is C or S

SEQ ID NO: 62092 - protein, 38 aa, Artificial Sequence
  GFR-binding peptide
  MOD_RES (33)..(34): Xaa is C or S
  MOD_RES (11)..(12)..(13)..(14)..(15): Xaa is A or G
  MOD_RES (16)..(17)..(18)..(19): Xaa is A or G or is absent
EVVMDRHKRLXXXXXXXXXYYLISTASLRTPVXXTPPT

SEQ ID NO: 62093 - protein, 34 aa, Artificial Sequence
  GFR-binding peptide
  MOD_RES (1)..(1): Xaa is C or S
  MOD_RES (13)..(14)..(15)..(16)..(17): Xaa is A or G
  MOD_RES (18)..(19)..(20)..(21): Xaa is A or G or is absent
XSEVTMNYHYKLXXXXXXXXXKYLISIPSMKEPV

SEQ ID NO: 62094 - protein, 40 aa, Artificial Sequence
  GFR-binding peptide
  MOD_RES (1)..(3)..(37)..(38): Xaa is C or S
  MOD_RES (15)..(16)..(17)..(18)..(19): Xaa is A or G
  MOD_RES (20)..(21)..(22)..(23): Xaa is A or G or is absent
XGXESVAMGRHKRLXXXXXXXXXYYLISTASLKTPVXXAK

SEQ ID NO: 62095 - protein, 41 aa, Artificial Sequence
  GFR-binding peptide
  MOD_RES (1)..(3)..(37)..(38): Xaa is C or S
  MOD_RES (15)..(16)..(17)..(18)..(19): Xaa is A or G
  MOD_RES (20)..(21)..(22)..(23): Xaa is A or G or is absent
XGXSEVVMDYHYKLXXXXXXXXXKYLISIPSLRTPVXXTPP

SEQ ID NO: 62096 - protein, 39 aa, Artificial Sequence; identical to SEQ ID NO: 31693
  GFR-binding peptide
  MOD_RES (2)..(34)..(35): Xaa is C or S

SEQ ID NO: 62097 - protein, 35 aa, Artificial Sequence; identical to SEQ ID NO: 2721
  GFR-binding peptide
  MOD_RES (2)..(35): Xaa is C or S
  MOD_RES (13)..(14)..(15)..(16)..(17): Xaa is A or G
  MOD_RES (18)..(19)..(20)..(21): Xaa is A or G or is absent

SEQ ID NO: 62098 - protein, 39 aa, Artificial Sequence; identical to SEQ ID NO: 31697
  GFR-binding peptide
  MOD_RES (2)..(37)..(38): Xaa is C or S
  MOD_RES (15)..(16)..(17)..(18)..(19): Xaa is A or G
  MOD_RES (20)..(21)..(22)..(23): Xaa is A or G or is absent

SEQ ID NO: 62099 - protein, 34 aa, Artificial Sequence; identical to SEQ ID NO: 31700
  GFR-binding peptide
  MOD_RES (2)..(2): Xaa is C or S
  MOD_RES (13)..(14)..(15)..(16)..(17): Xaa is A or G
  MOD_RES (18)..(19)..(20)..(21): Xaa is A or G or is absent

SEQ ID NO: 62100 - protein, 37 aa, Artificial Sequence; identical to SEQ ID NO: 2722
  GFR-binding peptide
  MOD_RES (1)..(35)..(36): Xaa is C or S
  MOD_RES (13)..(14)..(15)..(16)..(17): Xaa is A or G
  MOD_RES (18)..(19)..(20)..(21): Xaa is A or G or is absent

SEQ ID NO: 62101 - protein, 33 aa, Artificial Sequence; identical to SEQ ID NO: 2723
  GFR-binding peptide
  MOD_RES (32)..(33): Xaa is C or S

SEQ ID NO: 62102 - protein, 43 aa, Artificial Sequence; identical to SEQ ID NO: 23716
  GFR-binding peptide
  MOD_RES (1)..(3)..(37)..(38): Xaa is C or S
  MOD_RES (15)..(16)..(17)..(18)..(19): Xaa is A or G
  MOD_RES (20)..(21)..(22)..(23): Xaa is A or G or is absent

SEQ ID NO: 62103 - protein, 39 aa, Artificial Sequence; identical to SEQ ID NO: 2727
  GFR-binding peptide
  MOD_RES (1)..(3)..(35): Xaa is C or S

SEQ ID NO: 62104 - protein, 39 aa, Artificial Sequence; identical to SEQ ID NO: 23718
  GFR-binding peptide
  MOD_RES (33)..(34): Xaa is C or S
  MOD_RES (11)..(12)..(13)..(14)..(15): Xaa is A or G
  MOD_RES (16)..(17)..(18)..(19): Xaa is A or G or is absent

SEQ ID NO: 62105 - protein, 40 aa, Artificial Sequence; identical to SEQ ID NO: 23719
  GFR-binding peptide
  MOD_RES (1)..(3)..(34)..(35): Xaa is C or S

SEQ ID NO: 62106 - protein, 34 aa, Artificial Sequence; identical to SEQ ID NO: 2730
  GFR-binding peptide
  MOD_RES (34)..(34): Xaa is C or S
  MOD_RES (12)..(13)..(14)..(15)..(16): Xaa is A or G
  MOD_RES (17)..(18)..(19)..(20): Xaa is A or G or is absent

SEQ ID NO: 62107 - protein, 38 aa, Artificial Sequence
  GFR-binding peptide
  MOD_RES (32)..(33): Xaa is C or S
RDVVMGRHKRLIIQQKDNYYLMSTASMKTPTXXPGASG

SEQ ID NO: 62108 - protein, 35 aa, Artificial Sequence; identical to SEQ ID NO: 23722
  GFR-binding peptide
  MOD_RES (1)..(3)..(35): Xaa is C or S

SEQ ID NO: 62109 - protein, 37 aa, Artificial Sequence; identical to SEQ ID NO: 2733
  GFR-binding peptide
  MOD_RES (33)..(34): Xaa is C or S
  MOD_RES (11)..(12)..(13)..(14)..(15): Xaa is A or G
  MOD_RES (16)..(17)..(18)..(19): Xaa is A or G or is absent

SEQ ID NO: 62110 - protein, 39 aa, Artificial Sequence
  GFR-binding peptide
  MOD_RES (2)..(4)..(36)..(37): Xaa is C or S
RXAXSEVTMNRHKRLVVNKNEDYYLISTASMKEPVXXPE

SEQ ID NO: 62111 - protein, 32 aa, Artificial Sequence; identical to SEQ ID NO: 10224
  GFR-binding peptide
  MOD_RES (11)..(12)..(13)..(14)..(15): Xaa is A or G
  MOD_RES (16)..(17)..(18)..(19): Xaa is A or G or is absent

SEQ ID NO: 62112 - protein, 36 aa, Artificial Sequence; identical to SEQ ID NO: 23725
  GFR-binding peptide
  MOD_RES (31)..(32): Xaa is C or S

SEQ ID NO: 62113 - protein, 35 aa, Artificial Sequence
  GFR-binding peptide
  MOD_RES (1)..(35): Xaa is C or S
  MOD_RES (13)..(14)..(15)..(16)..(17): Xaa is A or G
  MOD_RES (18)..(19)..(20)..(21): Xaa is A or G or is absent
XSEVTMNYHYKLXXXXXXXXXKYLISIPSMKEPVX

SEQ ID NO: 62114 - protein, 35 aa, Artificial Sequence; identical to SEQ ID NO: 23726
  GFR-binding peptide
  MOD_RES (2)..(2): Xaa is C or S
  MOD_RES (14)..(15)..(16)..(17)..(18): Xaa is A or G
  MOD_RES (19)..(20)..(21)..(22): Xaa is A or G or is absent

SEQ ID NO: 62115 - protein, 31 aa, Artificial Sequence; identical to SEQ ID NO: 2746
  GFR-binding peptide
  MOD_RES (1)..(1): Xaa is C or S

SEQ ID NO: 62116 - protein, 38 aa, Artificial Sequence; identical to SEQ ID NO: 23729
  GFR-binding peptide
  MOD_RES (1)..(3)..(37): Xaa is C or S
  MOD_RES (15)..(16)..(17)..(18)..(19): Xaa is A or G
  MOD_RES (20)..(21)..(22)..(23): Xaa is A or G or is absent

SEQ ID NO: 62117 - protein, 38 aa, Artificial Sequence
  GFR-binding peptide
  MOD_RES (2)..(4)..(35)..(36): Xaa is C or S
SXKXSKVIMPIKGYIKPTKGIFYLINIPSLDQSVXXPS

SEQ ID NO: 62118 - protein, 35 aa, Artificial Sequence
  GFR-binding peptide
  MOD_RES (34)..(35): Xaa is C or S
  MOD_RES (12)..(13)..(14)..(15)..(16): Xaa is A or G
  MOD_RES (17)..(18)..(19)..(20): Xaa is A or G or is absent
SEVVMDEYKFKXXXXXXXXXLYLISIPELRTPVXX

SEQ ID NO: 62119 - protein, 38 aa, Artificial Sequence
  GFR-binding peptide
  MOD_RES (1)..(34)..(35): Xaa is C or S
  MOD_RES (12)..(13)..(14)..(15)..(16): Xaa is A or G
  MOD_RES (17)..(18)..(19)..(20): Xaa is A or G or is absent
XEEVIMRHKRLXXXXXXXXXYYLMSTASTKVPAXXTSP

SEQ ID NO: 62120 - protein, 40 aa, Artificial Sequence
  GFR-binding peptide
  MOD_RES (2)..(4)..(37)..(38): Xaa is C or S
  MOD_RES (15)..(16)..(17)..(18)..(19): Xaa is A or G
  MOD_RES (20)..(21)..(22)..(23): Xaa is A or G or is absent
SXKXSRVIMPIKGYXXXXXXXXXFYLINIPSLAQPVXXPA

SEQ ID NO: 62121 - protein, 36 aa, Artificial Sequence; identical to SEQ ID NO: 2748
  GFR-binding peptide
  MOD_RES (1)..(3)..(34)..(35): Xaa is C or S

SEQ ID NO: 62122 - protein, 41 aa, Artificial Sequence; identical to SEQ ID NO: 31738
  GFR-binding peptide
  MOD_RES (2)..(4)..(37)..(38): Xaa is C or S

SEQ ID NO: 62123 - protein, 36 aa, Artificial Sequence
  GFR-binding peptide
  MOD_RES (2)..(4)..(35)..(36): Xaa is C or S
LXGXEEVIMRHKRLLLVRGNDYYLMSTASTKVPAXX

SEQ ID NO: 62124 - protein, 39 aa, Artificial Sequence; identical to SEQ ID NO: 56674
  GFR-binding peptide
  MOD_RES (2)..(4)..(38)..(39): Xaa is C or S
  MOD_RES (16)..(17)..(18)..(19)..(20): Xaa is A or G
  MOD_RES (21)..(22)..(23)..(24): Xaa is A or G or is absent

SEQ ID NO: 62125 - protein, 33 aa, Artificial Sequence; identical to SEQ ID NO: 2749
  GFR-binding peptide
  MOD_RES (33)..(33): Xaa is C or S
  MOD_RES (11)..(12)..(13)..(14)..(15): Xaa is A or G
  MOD_RES (16)..(17)..(18)..(19): Xaa is A or G or is absent

SEQ ID NO: 62126 - protein, 41 aa, Artificial Sequence; identical to SEQ ID NO: 2751
  GFR-binding peptide
  MOD_RES (2)..(4)..(37)..(38): Xaa is C or S
  MOD_RES (15)..(16)..(17)..(18)..(19): Xaa is A or G
  MOD_RES (20)..(21)..(22)..(23): Xaa is A or G or is absent

SEQ ID NO: 62127 - protein, 41 aa, Artificial Sequence; identical to SEQ ID NO: 31740
  GFR-binding peptide
  MOD_RES (2)..(4)..(36)..(37): Xaa is C or S

SEQ ID NO: 62128 - protein, 38 aa, Artificial Sequence
  GFR-binding peptide
  MOD_RES (2)..(4)..(37)..(38): Xaa is C or S
  MOD_RES (15)..(16)..(17)..(18)..(19): Xaa is A or G
  MOD_RES (20)..(21)..(22)..(23): Xaa is A or G or is absent
SXKXSRVIMPIKGYXXXXXXXXXFYLINIPSLAQPVXX

SEQ ID NO: 62129 - protein, 37 aa, Artificial Sequence; identical to SEQ ID NO: 2755
  GFR-binding peptide
  MOD_RES (1)..(33)..(34): Xaa is C or S

SEQ ID NO: 62130 - protein, 37 aa, Artificial Sequence; identical to SEQ ID NO: 2756
  GFR-binding peptide
  MOD_RES (2)..(35)..(36): Xaa is C or S

SEQ ID NO: 62131 - protein, 35 aa, Artificial Sequence; identical to SEQ ID NO: 23741
  GFR-binding peptide
  MOD_RES (31)..(32): Xaa is C or S

SEQ ID NO: 62132 - protein, 43 aa, Artificial Sequence; identical to SEQ ID NO: 23742
  GFR-binding peptide
  MOD_RES (1)..(3)..(37)..(38): Xaa is C or S
  MOD_RES (15)..(16)..(17)..(18)..(19): Xaa is A or G
  MOD_RES (20)..(21)..(22)..(23): Xaa is A or G or is absent

SEQ ID NO: 62133 - protein, 40 aa, Artificial Sequence; identical to SEQ ID NO: 2758
  GFR-binding peptide
  MOD_RES (1)..(3)..(37)..(38): Xaa is C or S
  MOD_RES (15)..(16)..(17)..(18)..(19): Xaa is A or G
  MOD_RES (20)..(21)..(22)..(23): Xaa is A or G or is absent

SEQ ID NO: 62134 - protein, 37 aa, Artificial Sequence; identical to SEQ ID NO: 2759
  GFR-binding peptide
  MOD_RES (32)..(33): Xaa is C or S

SEQ ID NO: 62135 - protein, 39 aa, Artificial Sequence
  GFR-binding peptide
  MOD_RES (2)..(4)..(38)..(39): Xaa is C or S
  MOD_RES (16)..(17)..(18)..(19)..(20): Xaa is A or G
  MOD_RES (21)..(22)..(23)..(24): Xaa is A or G or is absent
SXGXRDVVMGEYKFKXXXXXXXXXLYLMSIPEMKTPTXX

SEQ ID NO: 62136 - protein, 34 aa, Artificial Sequence
  GFR-binding peptide
  MOD_RES (32)..(33): Xaa is C or S
SEVTMNYHYKLVVNKNEDKYLISIPSMKEPVXXP

SEQ ID NO: 62137 - protein, 35 aa, Artificial Sequence; identical to SEQ ID NO: 31746
  GFR-binding peptide
  MOD_RES (31)..(32): Xaa is C or S

SEQ ID NO: 62138 - protein, 42 aa, Artificial Sequence; identical to SEQ ID NO: 31748
  GFR-binding peptide
  MOD_RES (2)..(4)..(39)..(40): Xaa is C or S
  MOD_RES (17)..(18)..(19)..(20)..(21): Xaa is A or G
  MOD_RES (22)..(23)..(24)..(25): Xaa is A or G or is absent

SEQ ID NO: 62139 - protein, 39 aa, Artificial Sequence
  GFR-binding peptide
  MOD_RES (1)..(33)..(34): Xaa is C or S
XSEVTMNPIKGYVVNKNEDFYLINIPSMKEPVXXPEPIG

SEQ ID NO: 62140 - protein, 37 aa, Artificial Sequence; identical to SEQ ID NO: 2761
  GFR-binding peptide
  MOD_RES (1)..(35)..(36): Xaa is C or S
  MOD_RES (13)..(14)..(15)..(16)..(17): Xaa is A or G
  MOD_RES (18)..(19)..(20)..(21): Xaa is A or G or is absent

SEQ ID NO: 62141 - protein, 40 aa, Artificial Sequence
  GFR-binding peptide
  MOD_RES (1)..(3)..(35)..(36): Xaa is C or S
XGXAEVVMDRHKRLVVNNAADYYLISTASLRAPVXXSAPA

SEQ ID NO: 62142 - protein, 34 aa, Artificial Sequence
  GFR-binding peptide
  MOD_RES (2)..(34): Xaa is C or S
GXRDVVMGYHYKLIIQQKDNKYLMSIPSMKTPTX

SEQ ID NO: 62143 - protein, 33 aa, Artificial Sequence; identical to SEQ ID NO: 2763
  GFR-binding peptide
  MOD_RES (31)..(32): Xaa is C or S

SEQ ID NO: 62144 - protein, 32 aa, Artificial Sequence
  GFR-binding peptide
  MOD_RES (31)..(32): Xaa is C or S
SVAMGRHKRLYTVVGKDYYLISTASLKTPVXX

SEQ ID NO: 62145 - protein, 41 aa, Artificial Sequence; identical to SEQ ID NO: 23754
  GFR-binding peptide
  MOD_RES (1)..(35)..(36): Xaa is C or S
  MOD_RES (13)..(14)..(15)..(16)..(17): Xaa is A or G
  MOD_RES (18)..(19)..(20)..(21): Xaa is A or G or is absent

SEQ ID NO: 62146 - protein, 35 aa, Artificial Sequence; identical to SEQ ID NO: 56700
  GFR-binding peptide
  MOD_RES (31)..(32): Xaa is C or S

SEQ ID NO: 62147 - protein, 34 aa, Artificial Sequence; identical to SEQ ID NO: 31762
  GFR-binding peptide
  MOD_RES (33)..(34): Xaa is C or S

SEQ ID NO: 62148 - protein, 35 aa, Artificial Sequence; identical to SEQ ID NO: 31764
  GFR-binding peptide
  MOD_RES (1)..(33)..(34): Xaa is C or S

SEQ ID NO: 62149 - protein, 39 aa, Artificial Sequence; identical to SEQ ID NO: 23760
  GFR-binding peptide
  MOD_RES (2)..(4)..(36)..(37): Xaa is C or S

SEQ ID NO: 62150 - protein, 33 aa, Artificial Sequence; identical to SEQ ID NO: 56708
  GFR-binding peptide
  MOD_RES (2)..(33): Xaa is C or S

SEQ ID NO: 62151 - protein, 35 aa, Artificial Sequence
  GFR-binding peptide
  MOD_RES (1)..(33)..(34): Xaa is C or S
XRDVVMGEYKFKIIQQKDNLYLMSIPEMKTPTXXP

SEQ ID NO: 62152 - protein, 37 aa, Artificial Sequence; identical to SEQ ID NO: 2767
  GFR-binding peptide
  MOD_RES (2)..(4): Xaa is C or S
  MOD_RES (16)..(17)..(18)..(19)..(20): Xaa is A or G
  MOD_RES (21)..(22)..(23)..(24): Xaa is A or G or is absent

SEQ ID NO: 62153 - protein, 41 aa, Artificial Sequence; identical to SEQ ID NO: 2768
  GFR-binding peptide
  MOD_RES (1)..(3)..(35)..(36): Xaa is C or S

SEQ ID NO: 62154 - protein, 39 aa, Artificial Sequence
  GFR-binding peptide
  MOD_RES (2)..(34)..(35): Xaa is C or S
AXSEVTMNEYKFKVVNKNEDLYLISIPEMKEPVXXPEPI

SEQ ID NO: 62155 - protein, 33 aa, Artificial Sequence; identical to SEQ ID NO: 23765
  GFR-binding peptide
  MOD_RES (12)..(13)..(14)..(15)..(16): Xaa is A or G
  MOD_RES (17)..(18)..(19)..(20): Xaa is A or G or is absent

SEQ ID NO: 62156 - protein, 37 aa, Artificial Sequence; identical to SEQ ID NO: 2772
  GFR-binding peptide
  MOD_RES (1)..(33)..(34): Xaa is C or S

SEQ ID NO: 62157 - protein, 44 aa, Artificial Sequence; identical to SEQ ID NO: 2774
  GFR-binding peptide
  MOD_RES (2)..(4)..(38)..(39): Xaa is C or S
  MOD_RES (16)..(17)..(18)..(19)..(20): Xaa is A or G
  MOD_RES (21)..(22)..(23)..(24): Xaa is A or G or is absent

SEQ ID NO: 62158 - protein, 33 aa, Artificial Sequence; identical to SEQ ID NO: 2775
  GFR-binding peptide
  MOD_RES (1)..(3): Xaa is C or S

SEQ ID NO: 62159 - protein, 34 aa, Artificial Sequence; identical to SEQ ID NO: 23768
  GFR-binding peptide
  MOD_RES (31)..(32): Xaa is C or S

SEQ ID NO: 62160 - protein, 40 aa, Artificial Sequence; identical to SEQ ID NO: 56718
  GFR-binding peptide
  MOD_RES (1)..(3)..(36)..(37): Xaa is C or S
  MOD_RES (14)..(15)..(16)..(17)..(18): Xaa is A or G
  MOD_RES (19)..(20)..(21)..(22): Xaa is A or G or is absent

SEQ ID NO: 62161 - protein, 34 aa, Artificial Sequence
  GFR-binding peptide
  MOD_RES (31)..(32): Xaa is C or S
EEVIMRHKRLLLVRGNDYYLMSTASTKVPAXXTS

SEQ ID NO: 62162 - protein, 37 aa, Artificial Sequence; identical to SEQ ID NO: 2780
  GFR-binding peptide
  MOD_RES (1)..(34)..(35): Xaa is C or S
  MOD_RES (12)..(13)..(14)..(15)..(16): Xaa is A or G
  MOD_RES (17)..(18)..(19)..(20): Xaa is A or G or is absent

SEQ ID NO: 62163 - protein, 32 aa, Artificial Sequence; identical to SEQ ID NO: 31775
  GFR-binding peptide

SEQ ID NO: 62164 - protein, 32 aa, Artificial Sequence
  GFR-binding peptide
  MOD_RES (2)..(2): Xaa is C or S
KXSRVIMPIKGYVKPKRGVFYLINIPSLAQPV

SEQ ID NO: 62165 - protein, 37 aa, Artificial Sequence; identical to SEQ ID NO: 23776
  GFR-binding peptide
  MOD_RES (2)..(4): Xaa is C or S
  MOD_RES (16)..(17)..(18)..(19)..(20): Xaa is A or G
  MOD_RES (21)..(22)..(23)..(24): Xaa is A or G or is absent

SEQ ID NO: 62166 - protein, 39 aa, Artificial Sequence; identical to SEQ ID NO: 23777
  GFR-binding peptide
  MOD_RES (34)..(35): Xaa is C or S
  MOD_RES (12)..(13)..(14)..(15)..(16): Xaa is A or G
  MOD_RES (17)..(18)..(19)..(20): Xaa is A or G or is absent

SEQ ID NO: 62167 - protein, 32 aa, Artificial Sequence
  GFR-binding peptide
  MOD_RES (31)..(32): Xaa is C or S
EEVIMYHYKLLLVRGNDKYLMSIPSTKVPAXX

SEQ ID NO: 62168 - protein, 35 aa, Artificial Sequence; identical to SEQ ID NO: 31779
  GFR-binding peptide
  MOD_RES (2)..(34)..(35): Xaa is C or S

SEQ ID NO: 62169 - protein, 42 aa, Artificial Sequence; identical to SEQ ID NO: 2784
  GFR-binding peptide
  MOD_RES (2)..(37)..(38): Xaa is C or S
  MOD_RES (15)..(16)..(17)..(18)..(19): Xaa is A or G
  MOD_RES (20)..(21)..(22)..(23): Xaa is A or G or is absent

SEQ ID NO: 62170 - protein, 35 aa, Artificial Sequence; identical to SEQ ID NO: 2785
  GFR-binding peptide
  MOD_RES (2)..(4): Xaa is C or S

SEQ ID NO: 62171 - protein, 33 aa, Artificial Sequence; identical to SEQ ID NO: 2787
  GFR-binding peptide
  MOD_RES (32)..(33): Xaa is C or S

SEQ ID NO: 62172 - protein, 38 aa, Artificial Sequence
  GFR-binding peptide
  MOD_RES (1)..(35)..(36): Xaa is C or S
  MOD_RES (13)..(14)..(15)..(16)..(17): Xaa is A or G
  MOD_RES (18)..(19)..(20)..(21): Xaa is A or G or is absent
XSEVVMDEYKFKXXXXXXXXXLYLISIPELRTPVXXTP

SEQ ID NO: 62173 - protein, 36 aa, Artificial Sequence; identical to SEQ ID NO: 2792
  GFR-binding peptide
  MOD_RES (32)..(33): Xaa is C or S

SEQ ID NO: 62174 - protein, 34 aa, Artificial Sequence; identical to SEQ ID NO: 2796
  GFR-binding peptide
  MOD_RES (31)..(32): Xaa is C or S

SEQ ID NO: 62175 - protein, 39 aa, Artificial Sequence; identical to SEQ ID NO: 2798
  GFR-binding peptide
  MOD_RES (1)..(33)..(34): Xaa is C or S

SEQ ID NO: 62176 - protein, 42 aa, Artificial Sequence; identical to SEQ ID NO: 2799
  GFR-binding peptide
  MOD_RES (1)..(3)..(37)..(38): Xaa is C or S
  MOD_RES (15)..(16)..(17)..(18)..(19): Xaa is A or G
  MOD_RES (20)..(21)..(22)..(23): Xaa is A or G or is absent

SEQ ID NO: 62177 - protein, 40 aa, Artificial Sequence; identical to SEQ ID NO: 2800
  GFR-binding peptide
  MOD_RES (2)..(4)..(37)..(38): Xaa is C or S
  MOD_RES (15)..(16)..(17)..(18)..(19): Xaa is A or G
  MOD_RES (20)..(21)..(22)..(23): Xaa is A or G or is absent

SEQ ID NO: 62178 - protein, 35 aa, Artificial Sequence
  GFR-binding peptide
  MOD_RES (34)..(35): Xaa is C or S
  MOD_RES (12)..(13)..(14)..(15)..(16): Xaa is A or G
  MOD_RES (17)..(18)..(19)..(20): Xaa is A or G or is absent
SEVVMDYHYKLXXXXXXXXXKYLISIPSLRTPVXX

SEQ ID NO: 62179 - protein, 32 aa, Artificial Sequence
  GFR-binding peptide
  MOD_RES (11)..(12)..(13)..(14)..(15): Xaa is A or G
  MOD_RES (16)..(17)..(18)..(19): Xaa is A or G or is absent
SRVIMPIKGYXXXXXXXXXFYLINIPSLAQPV

SEQ ID NO: 62180 - protein, 37 aa, Artificial Sequence; identical to SEQ ID NO: 31795
  GFR-binding peptide
  MOD_RES (1)..(3)..(35)..(36): Xaa is C or S

SEQ ID NO: 62181 - protein, 37 aa, Artificial Sequence; identical to SEQ ID NO: 2802
  GFR-binding peptide
  MOD_RES (33)..(34): Xaa is C or S

SEQ ID NO: 62182 - protein, 34 aa, Artificial Sequence; identical to SEQ ID NO: 2804
  GFR-binding peptide
  MOD_RES (1)..(33)..(34): Xaa is C or S

SEQ ID NO: 62183 - protein, 36 aa, Artificial Sequence; identical to SEQ ID NO: 2805
  GFR-binding peptide
  MOD_RES (2)..(33)..(34): Xaa is C or S

SEQ ID NO: 62184 - protein, 32 aa, Artificial Sequence; identical to SEQ ID NO: 23794
  GFR-binding peptide
  MOD_RES (31)..(32): Xaa is C or S

SEQ ID NO: 62185 - protein, 41 aa, Artificial Sequence; identical to SEQ ID NO: 2806
  GFR-binding peptide
  MOD_RES (1)..(3)..(37): Xaa is C or S
  MOD_RES (15)..(16)..(17)..(18)..(19): Xaa is A or G
  MOD_RES (20)..(21)..(22)..(23): Xaa is A or G or is absent

SEQ ID NO: 62186 - protein, 36 aa, Artificial Sequence; identical to SEQ ID NO: 2807
  GFR-binding peptide
  MOD_RES (1)..(33): Xaa is C or S

SEQ ID NO: 62187 - protein, 41 aa, Artificial Sequence
  GFR-binding peptide
  MOD_RES (2)..(4)..(36)..(37): Xaa is C or S
RXAXSEVTMNYHYKLVVNKNEDKYLISIPSMKEPVXXPEPI

SEQ ID NO: 62188 - protein, 33 aa, Artificial Sequence; identical to SEQ ID NO: 23801
  GFR-binding peptide
  MOD_RES (32)..(33): Xaa is C or S

SEQ ID NO: 62189 - protein, 40 aa, Artificial Sequence; identical to SEQ ID NO: 2809
  GFR-binding peptide
  MOD_RES (1)..(35)..(36): Xaa is C or S
  MOD_RES (13)..(14)..(15)..(16)..(17): Xaa is A or G
  MOD_RES (18)..(19)..(20)..(21): Xaa is A or G or is absent

SEQ ID NO: 62190 - protein, 45 aa, Artificial Sequence; identical to SEQ ID NO: 31801
  GFR-binding peptide
  MOD_RES (2)..(4)..(39)..(40): Xaa is C or S
  MOD_RES (17)..(18)..(19)..(20)..(21): Xaa is A or G
  MOD_RES (22)..(23)..(24)..(25): Xaa is A or G or is absent

SEQ ID NO: 62191 - protein, 35 aa, Artificial Sequence; identical to SEQ ID NO: 2810
  GFR-binding peptide
  MOD_RES (32)..(33): Xaa is C or S

SEQ ID NO: 62192 - protein, 35 aa, Artificial Sequence
  GFR-binding peptide
  MOD_RES (2)..(4)..(35): Xaa is C or S
SXKXSRVIMPIKGYVKPKRGVFYLINIPSLAQPVX

SEQ ID NO: 62193 - protein, 36 aa, Artificial Sequence; identical to SEQ ID NO: 2811
  GFR-binding peptide
  MOD_RES (2)..(36): Xaa is C or S
  MOD_RES (14)..(15)..(16)..(17)..(18): Xaa is A or G
  MOD_RES (19)..(20)..(21)..(22): Xaa is A or G or is absent

SEQ ID NO: 62194 - protein, 33 aa, Artificial Sequence; identical to SEQ ID NO: 2812
  GFR-binding peptide
  MOD_RES (1)..(1): Xaa is C or S
  MOD_RES (12)..(13)..(14)..(15)..(16): Xaa is A or G
  MOD_RES (17)..(18)..(19)..(20): Xaa is A or G or is absent

SEQ ID NO: 62195 - protein, 34 aa, Artificial Sequence; identical to SEQ ID NO: 2813
  GFR-binding peptide
  MOD_RES (33)..(34): Xaa is C or S
  MOD_RES (11)..(12)..(13)..(14)..(15): Xaa is A or G
  MOD_RES (16)..(17)..(18)..(19): Xaa is A or G or is absent

SEQ ID NO: 62196 - protein, 36 aa, Artificial Sequence; identical to SEQ ID NO: 31803
  GFR-binding peptide
  MOD_RES (2)..(4)..(36): Xaa is C or S

SEQ ID NO: 62197 - protein, 39 aa, Artificial Sequence; identical to SEQ ID NO: 23807
  GFR-binding peptide
  MOD_RES (1)..(35)..(36): Xaa is C or S
  MOD_RES (13)..(14)..(15)..(16)..(17): Xaa is A or G
  MOD_RES (18)..(19)..(20)..(21): Xaa is A or G or is absent

SEQ ID NO: 62198 - protein, 32 aa, Artificial Sequence; identical to SEQ ID NO: 31809
  GFR-binding peptide
  MOD_RES (11)..(12)..(13)..(14)..(15): Xaa is A or G
  MOD_RES (16)..(17)..(18)..(19): Xaa is A or G or is absent

SEQ ID NO: 62199 - protein, 34 aa, Artificial Sequence
  GFR-binding peptide
  MOD_RES (1)..(34): Xaa is C or S
  MOD_RES (12)..(13)..(14)..(15)..(16): Xaa is A or G
  MOD_RES (17)..(18)..(19)..(20): Xaa is A or G or is absent
XEEVIMYHYKLXXXXXXXXXKYLMSIPSTKVPAX

SEQ ID NO: 62200 - protein, 40 aa, Artificial Sequence; identical to SEQ ID NO: 23808
  GFR-binding peptide
  MOD_RES (2)..(36)..(37): Xaa is C or S
  MOD_RES (14)..(15)..(16)..(17)..(18): Xaa is A or G
  MOD_RES (19)..(20)..(21)..(22): Xaa is A or G or is absent

SEQ ID NO: 62201 - protein, 34 aa, Artificial Sequence; identical to SEQ ID NO: 2816
  GFR-binding peptide
  MOD_RES (1)..(3)..(34): Xaa is C or S

SEQ ID NO: 62202 - protein, 36 aa, Artificial Sequence; identical to SEQ ID NO: 31810
  GFR-binding peptide
  MOD_RES (2)..(4)..(36): Xaa is C or S

SEQ ID NO: 62203 - protein, 36 aa, Artificial Sequence; identical to SEQ ID NO: 56773
  GFR-binding peptide
  MOD_RES (34)..(35): Xaa is C or S
  MOD_RES (12)..(13)..(14)..(15)..(16): Xaa is A or G
  MOD_RES (17)..(18)..(19)..(20): Xaa is A or G or is absent

SEQ ID NO: 62204 - protein, 39 aa, Artificial Sequence
  GFR-binding peptide
  MOD_RES (2)..(4)..(36)..(37): Xaa is C or S
SXGXRDVVMGEYKFKIIQQKDNLYLMSIPEMKTPTXXPG

SEQ ID NO: 62205 - protein, 33 aa, Artificial Sequence; identical to SEQ ID NO: 2819
  GFR-binding peptide
  MOD_RES (32)..(33): Xaa is C or S

SEQ ID NO: 62206 - protein, 41 aa, Artificial Sequence; identical to SEQ ID NO: 2820
  GFR-binding peptide
  MOD_RES (2)..(4)..(38)..(39): Xaa is C or S
  MOD_RES (16)..(17)..(18)..(19)..(20): Xaa is A or G
  MOD_RES (21)..(22)..(23)..(24): Xaa is A or G or is absent

SEQ ID NO: 62207 - protein, 42 aa, Artificial Sequence; identical to SEQ ID NO: 23810
  GFR-binding peptide
  MOD_RES (1)..(3)..(36)..(37): Xaa is C or S

SEQ ID NO: 62208 - protein, 40 aa, Artificial Sequence; identical to SEQ ID NO: 31818
  GFR-binding peptide
  MOD_RES (2)..(34)..(35): Xaa is C or S

SEQ ID NO: 62209 - protein, 36 aa, Artificial Sequence; identical to SEQ ID NO: 2822
  GFR-binding peptide
  MOD_RES (1)..(3)..(34)..(35): Xaa is C or S

SEQ ID NO: 62210 - protein, 33 aa, Artificial Sequence; identical to SEQ ID NO: 2824
  GFR-binding peptide
  MOD_RES (31)..(32): Xaa is C or S

SEQ ID NO: 62211 - protein, 35 aa, Artificial Sequence
  GFR-binding peptide
  MOD_RES (1)..(3)..(35): Xaa is C or S
XGXRDVVMGRHKRLIIQQKDNYYLMSTASMKTPTX

SEQ ID NO: 62212 - protein, 32 aa, Artificial Sequence; identical to SEQ ID NO: 2827
  GFR-binding peptide
  MOD_RES (1)..(32): Xaa is C or S

SEQ ID NO: 62213 - protein, 32 aa, Artificial Sequence; identical to SEQ ID NO: 2828
  GFR-binding peptide
  MOD_RES (31)..(32): Xaa is C or S

SEQ ID NO: 62214 - protein, 34 aa, Artificial Sequence; identical to SEQ ID NO: 23826
  GFR-binding peptide
  MOD_RES (2)..(34): Xaa is C or S

SEQ ID NO: 62215 - protein, 38 aa, Artificial Sequence; identical to SEQ ID NO: 23827
  GFR-binding peptide
  MOD_RES (2)..(35)..(36): Xaa is C or S
  MOD_RES (13)..(14)..(15)..(16)..(17): Xaa is A or G
  MOD_RES (18)..(19)..(20)..(21): Xaa is A or G or is absent

SEQ ID NO: 62216 - protein, 42 aa, Artificial Sequence; identical to SEQ ID NO: 2837
  GFR-binding peptide
  MOD_RES (1)..(3)..(37)..(38): Xaa is C or S
  MOD_RES (15)..(16)..(17)..(18)..(19): Xaa is A or G
  MOD_RES (20)..(21)..(22)..(23): Xaa is A or G or is absent

SEQ ID NO: 62217 - protein, 39 aa, Artificial Sequence; identical to SEQ ID NO: 2839
  GFR-binding peptide
  MOD_RES (2)..(4)..(39): Xaa is C or S
  MOD_RES (17)..(18)..(19)..(20)..(21): Xaa is A or G
  MOD_RES (22)..(23)..(24)..(25): Xaa is A or G or is absent

SEQ ID NO: 62218 - protein, 43 aa, Artificial Sequence; identical to SEQ ID NO: 31833
  GFR-binding peptide
  MOD_RES (2)..(4)..(39)..(40): Xaa is C or S
  MOD_RES (17)..(18)..(19)..(20)..(21): Xaa is A or G
  MOD_RES (22)..(23)..(24)..(25): Xaa is A or G or is absent

SEQ ID NO: 62219 - protein, 35 aa, Artificial Sequence; identical to SEQ ID NO: 31838
  GFR-binding peptide
  MOD_RES (2)..(34)..(35): Xaa is C or S

SEQ ID NO: 62220 - protein, 36 aa, Artificial Sequence
  GFR-binding peptide
  MOD_RES (1)..(33)..(34): Xaa is C or S
XSEVTMNRYKKLVVNKNEDFYLISIANMKEPVXXPE

SEQ ID NO: 62221 - protein, 35 aa, Artificial Sequence; identical to SEQ ID NO: 2842
  GFR-binding peptide
  MOD_RES (34)..(35): Xaa is C or S
  MOD_RES (12)..(13)..(14)..(15)..(16): Xaa is A or G
  MOD_RES (17)..(18)..(19)..(20): Xaa is A or G or is absent

SEQ ID NO: 62222 - protein, 33 aa, Artificial Sequence
  GFR-binding peptide
  MOD_RES (2)..(2): Xaa is C or S
AXSEVTMNEYKFKVVNKNEDLYLISIPEMKEPV

SEQ ID NO: 62223 - protein, 33 aa, Artificial Sequence; identical to SEQ ID NO: 23833
  GFR-binding peptide
  MOD_RES (33)..(33): Xaa is C or S
  MOD_RES (11)..(12)..(13)..(14)..(15): Xaa is A or G
  MOD_RES (16)..(17)..(18)..(19): Xaa is A or G or is absent

SEQ ID NO: 62224 - protein, 34 aa, Artificial Sequence; identical to SEQ ID NO: 2843
  GFR-binding peptide
  MOD_RES (33)..(34): Xaa is C or S
  MOD_RES (11)..(12)..(13)..(14)..(15): Xaa is A or G
  MOD_RES (16)..(17)..(18)..(19): Xaa is A or G or is absent

SEQ ID NO: 62225 - protein, 37 aa, Artificial Sequence; identical to SEQ ID NO: 23836
  GFR-binding peptide
  MOD_RES (1)..(33)..(34): Xaa is C or S

SEQ ID NO: 62226 - protein, 41 aa, Artificial Sequence
  GFR-binding peptide
  MOD_RES (2)..(4)..(38)..(39): Xaa is C or S
  MOD_RES (16)..(17)..(18)..(19)..(20): Xaa is A or G
  MOD_RES (21)..(22)..(23)..(24): Xaa is A or G or is absent
RXGXSEVVMDRHKRLXXXXXXXXXYYLISTASLRTPVXXTP

SEQ ID NO: 62227 - protein, 34 aa, Artificial Sequence; identical to SEQ ID NO: 2849
  GFR-binding peptide
  MOD_RES (1)..(1): Xaa is C or S
  MOD_RES (13)..(14)..(15)..(16)..(17): Xaa is A or G
  MOD_RES (18)..(19)..(20)..(21): Xaa is A or G or is absent

SEQ ID NO: 62228 - protein, 38 aa, Artificial Sequence; identical to SEQ ID NO: 31849
  GFR-binding peptide
  MOD_RES (2)..(34)..(35): Xaa is C or S

SEQ ID NO: 62229 - protein, 40 aa, Artificial Sequence; identical to SEQ ID NO: 31852
  GFR-binding peptide
  MOD_RES (2)..(4)..(35)..(36): Xaa is C or S

SEQ ID NO: 62230 - protein, 38 aa, Artificial Sequence; identical to SEQ ID NO: 2855
  GFR-binding peptide
  MOD_RES (2)..(4)..(36)..(37): Xaa is C or S

SEQ ID NO: 62231 - protein, 38 aa, Artificial Sequence
  GFR-binding peptide
  MOD_RES (1)..(3)..(37)..(38): Xaa is C or S
  MOD_RES (15)..(16)..(17)..(18)..(19): Xaa is A or G
  MOD_RES (20)..(21)..(22)..(23): Xaa is A or G or is absent
XGXSEVVMDRHKRLXXXXXXXXXYYLISTASLRTPVXX

SEQ ID NO: 62232 - protein, 41 aa, Artificial Sequence; identical to SEQ ID NO: 31859
  GFR-binding peptide
  MOD_RES (2)..(36)..(37): Xaa is C or S
  MOD_RES (14)..(15)..(16)..(17)..(18): Xaa is A or G
  MOD_RES (19)..(20)..(21)..(22): Xaa is A or G or is absent

SEQ ID NO: 62233 - protein, 40 aa, Artificial Sequence
  GFR-binding peptide
  MOD_RES (2)..(35)..(36): Xaa is C or S
  MOD_RES (13)..(14)..(15)..(16)..(17): Xaa is A or G
  MOD_RES (18)..(19)..(20)..(21): Xaa is A or G or is absent
KXSKVIMPIKGYXXXXXXXXXFYLINIPSLDQSVXXPSAS

SEQ ID NO: 62234 - protein, 37 aa, Artificial Sequence
  GFR-binding peptide
  MOD_RES (2)..(4): Xaa is C or S
  MOD_RES (16)..(17)..(18)..(19)..(20): Xaa is A or G
  MOD_RES (21)..(22)..(23)..(24): Xaa is A or G or is absent
SXGXRDVVMGYHYKLXXXXXXXXXKYLMSIPSMKTPT

SEQ ID NO: 62235 - protein, 39 aa, Artificial Sequence; identical to SEQ ID NO: 2868
  GFR-binding peptide
  MOD_RES (33)..(34): Xaa is C or S
  MOD_RES (11)..(12)..(13)..(14)..(15): Xaa is A or G
  MOD_RES (16)..(17)..(18)..(19): Xaa is A or G or is absent

SEQ ID NO: 62236 - protein, 38 aa, Artificial Sequence; identical to SEQ ID NO: 2869
  GFR-binding peptide
  MOD_RES (1)..(36)..(37): Xaa is C or S
  MOD_RES (14)..(15)..(16)..(17)..(18): Xaa is A or G
  MOD_RES (19)..(20)..(21)..(22): Xaa is A or G or is absent

SEQ ID NO: 62237 - protein, 31 aa, Artificial Sequence; identical to SEQ ID NO: 23856
  GFR-binding peptide
  MOD_RES (31)..(31): Xaa is C or S

SEQ ID NO: 62238 - protein, 39 aa, Artificial Sequence; identical to SEQ ID NO: 2870
  GFR-binding peptide
  MOD_RES (1)..(34)..(35): Xaa is C or S
  MOD_RES (12)..(13)..(14)..(15)..(16): Xaa is A or G
  MOD_RES (17)..(18)..(19)..(20): Xaa is A or G or is absent

SEQ ID NO: 62239 - protein, 33 aa, Artificial Sequence; identical to SEQ ID NO: 2872
  GFR-binding peptide
  MOD_RES (33)..(33): Xaa is C or S
  MOD_RES (11)..(12)..(13)..(14)..(15): Xaa is A or G
  MOD_RES (16)..(17)..(18)..(19): Xaa is A or G or is absent

SEQ ID NO: 62240 - protein, 39 aa, Artificial Sequence; identical to SEQ ID NO: 2874
  GFR-binding peptide
  MOD_RES (1)..(34)..(35): Xaa is C or S
  MOD_RES (12)..(13)..(14)..(15)..(16): Xaa is A or G
  MOD_RES (17)..(18)..(19)..(20): Xaa is A or G or is absent

SEQ ID NO: 62241 - protein, 34 aa, Artificial Sequence; identical to SEQ ID NO: 2875
  GFR-binding peptide
  MOD_RES (1)..(32)..(33): Xaa is C or S

SEQ ID NO: 62242 - protein, 34 aa, Artificial Sequence; identical to SEQ ID NO: 2876
  GFR-binding peptide
  MOD_RES (32)..(33): Xaa is C or S

SEQ ID NO: 62243 - protein, 35 aa, Artificial Sequence; identical to SEQ ID NO: 31878
  GFR-binding peptide
  MOD_RES (31)..(31): Xaa is C or S

SEQ ID NO: 62244 - protein, 33 aa, Artificial Sequence; identical to SEQ ID NO: 2878
  GFR-binding peptide
  MOD_RES (2)..(2): Xaa is C or S

SEQ ID NO: 62245 - protein, 33 aa, Artificial Sequence
  GFR-binding peptide
  MOD_RES (31)..(32): Xaa is C or S
EVVMDRHKRLVVNNASDYYLISTASLRTPVXXT

SEQ ID NO: 62246 - protein, 33 aa, Artificial Sequence
  GFR-binding peptide
  MOD_RES (32)..(33): Xaa is C or S
ESVAMGRHKRLYTVVGKDYYLISTASLKTPVXX

SEQ ID NO: 62247 - protein, 33 aa, Artificial Sequence; identical to SEQ ID NO: 23869
  GFR-binding peptide
  MOD_RES (32)..(33): Xaa is C or S

SEQ ID NO: 62248 - protein, 39 aa, Artificial Sequence; identical to SEQ ID NO: 23870
  GFR-binding peptide
  MOD_RES (1)..(3)..(34)..(35): Xaa is C or S

SEQ ID NO: 62249 - protein, 35 aa, Artificial Sequence; identical to SEQ ID NO: 31881
  GFR-binding peptide
  MOD_RES (2)..(4): Xaa is C or S

SEQ ID NO: 62250 - protein, 34 aa, Artificial Sequence
  GFR-binding peptide
  MOD_RES (31)..(32): Xaa is C or S
EVTMNEYKFKVVNKNEDLYLISIPEMKEPVXXPE

SEQ ID NO: 62251 - protein, 37 aa, Artificial Sequence; identical to SEQ ID NO: 2882
  GFR-binding peptide
  MOD_RES (2)..(33)..(34): Xaa is C or S

SEQ ID NO: 62252 - protein, 35 aa, Artificial Sequence; identical to SEQ ID NO: 31885
  GFR-binding peptide
  MOD_RES (1)..(33)..(34): Xaa is C or S

SEQ ID NO: 62253 - protein, 43 aa, Artificial Sequence
  GFR-binding peptide
  MOD_RES (1)..(3)..(37)..(38): Xaa is C or S
  MOD_RES (15)..(16)..(17)..(18)..(19): Xaa is A or G
  MOD_RES (20)..(21)..(22)..(23): Xaa is A or G or is absent
XGXRDVVMGEYKFKXXXXXXXXXLYLMSIPEMKTPTXXPGASG

SEQ ID NO: 62254 - protein, 39 aa, Artificial Sequence; identical to SEQ ID NO: 31888
  GFR-binding peptide
  MOD_RES (2)..(36): Xaa is C or S
  MOD_RES (14)..(15)..(16)..(17)..(18): Xaa is A or G
  MOD_RES (19)..(20)..(21)..(22): Xaa is A or G or is absent

SEQ ID NO: 62255 - protein, 43 aa, Artificial Sequence; identical to SEQ ID NO: 2884
  GFR-binding peptide
  MOD_RES (2)..(4)..(37)..(38): Xaa is C or S
  MOD_RES (15)..(16)..(17)..(18)..(19): Xaa is A or G
  MOD_RES (20)..(21)..(22)..(23): Xaa is A or G or is absent

SEQ ID NO: 62256 - protein, 37 aa, Artificial Sequence; identical to SEQ ID NO: 23874
  GFR-binding peptide
  MOD_RES (31)..(32): Xaa is C or S

SEQ ID NO: 62257 - protein, 40 aa, Artificial Sequence; identical to SEQ ID NO: 31889
  GFR-binding peptide
  MOD_RES (1)..(3)..(35)..(36): Xaa is C or S

SEQ ID NO: 62258 - protein, 38 aa, Artificial Sequence; identical to SEQ ID NO: 31894
  GFR-binding peptide
  MOD_RES (32)..(33): Xaa is C or S

SEQ ID NO: 62259 - protein, 36 aa, Artificial Sequence; identical to SEQ ID NO: 2886
  GFR-binding peptide
  MOD_RES (1)..(3)..(35)..(36): Xaa is C or S

SEQ ID NO: 62260 - protein, 36 aa, Artificial Sequence; identical to SEQ ID NO: 31895
  GFR-binding peptide
  MOD_RES (2)..(4)..(36): Xaa is C or S

SEQ ID NO: 62261 - protein, 40 aa, Artificial Sequence; identical to SEQ ID NO: 2887
  GFR-binding peptide
  MOD_RES (2)..(4)..(38)..(39): Xaa is C or S
  MOD_RES (16)..(17)..(18)..(19)..(20): Xaa is A or G
  MOD_RES (21)..(22)..(23)..(24): Xaa is A or G or is absent

SEQ ID NO: 62262 - protein, 34 aa, Artificial Sequence; identical to SEQ ID NO: 23878
  GFR-binding peptide
  MOD_RES (1)..(1): Xaa is C or S
  MOD_RES (13)..(14)..(15)..(16)..(17): Xaa is A or G
  MOD_RES (18)..(19)..(20)..(21): Xaa is A or G or is absent

SEQ ID NO: 62263 - protein, 34 aa, Artificial Sequence; identical to SEQ ID NO: 2888
  GFR-binding peptide
  MOD_RES (1)..(3): Xaa is C or S

SEQ ID NO: 62264 - protein, 38 aa, Artificial Sequence; identical to SEQ ID NO: 23880
  GFR-binding peptide
  MOD_RES (2)..(4)..(36): Xaa is C or S

SEQ ID NO: 62265 - protein, 38 aa, Artificial Sequence
  GFR-binding peptide
  MOD_RES (1)..(32)..(33): Xaa is C or S
XEEVIMEYKFKLLVRGNDLYLMSIPETKVPAXXTSPVR

SEQ ID NO: 62266 - protein, 39 aa, Artificial Sequence; identical to SEQ ID NO: 31896
  GFR-binding peptide
  MOD_RES (2)..(36)..(37): Xaa is C or S
  MOD_RES (14)..(15)..(16)..(17)..(18): Xaa is A or G
  MOD_RES (19)..(20)..(21)..(22): Xaa is A or G or is absent

SEQ ID NO: 62267 - protein, 37 aa, Artificial Sequence; identical to SEQ ID NO: 23882
  GFR-binding peptide
  MOD_RES (1)..(3)..(37): Xaa is C or S
  MOD_RES (15)..(16)..(17)..(18)..(19): Xaa is A or G
  MOD_RES (20)..(21)..(22)..(23): Xaa is A or G or is absent

SEQ ID NO: 62268 - protein, 33 aa, Artificial Sequence
  GFR-binding peptide
  MOD_RES (2)..(2): Xaa is C or S
GXESVAMGRHKRLYTVVGKDYYLISTASLKTPV

SEQ ID NO: 62269 - protein, 39 aa, Artificial Sequence; identical to SEQ ID NO: 2893
  GFR-binding peptide
  MOD_RES (2)..(35)..(36): Xaa is C or S
  MOD_RES (13)..(14)..(15)..(16)..(17): Xaa is A or G
  MOD_RES (18)..(19)..(20)..(21): Xaa is A or G or is absent

SEQ ID NO: 62270 - protein, 37 aa, Artificial Sequence; identical to SEQ ID NO: 2894
  GFR-binding peptide
  MOD_RES (2)..(35)..(36): Xaa is C or S
  MOD_RES (13)..(14)..(15)..(16)..(17): Xaa is A or G
  MOD_RES (18)..(19)..(20)..(21): Xaa is A or G or is absent

SEQ ID NO: 62271 - protein, 39 aa, Artificial Sequence; identical to SEQ ID NO: 2895
  GFR-binding peptide
  MOD_RES (1)..(36)..(37): Xaa is C or S
  MOD_RES (14)..(15)..(16)..(17)..(18): Xaa is A or G
  MOD_RES (19)..(20)..(21)..(22): Xaa is A or G or is absent

SEQ ID NO: 62272 - protein, 35 aa, Artificial Sequence; identical to SEQ ID NO: 31908
  GFR-binding peptide
  MOD_RES (32)..(33): Xaa is C or S

SEQ ID NO: 62273 - protein, 33 aa, Artificial Sequence
  GFR-binding peptide
  MOD_RES (12)..(13)..(14)..(15)..(16): Xaa is A or G
  MOD_RES (17)..(18)..(19)..(20): Xaa is A or G or is absent
SEVVMDRHKRLXXXXXXXXXYYLISTASLRTPV

SEQ ID NO: 62274 - protein, 37 aa, Artificial Sequence
  GFR-binding peptide
  MOD_RES (2)..(33)..(34): Xaa is C or S
GXEEVIMEYKFKLLVRGNDLYLMSIPETKVPAXXTSP

SEQ ID NO: 62275 - protein, 36 aa, Artificial Sequence; identical to SEQ ID NO: 2897
  GFR-binding peptide
  MOD_RES (1)..(35)..(36): Xaa is C or S
  MOD_RES (13)..(14)..(15)..(16)..(17): Xaa is A or G
  MOD_RES (18)..(19)..(20)..(21): Xaa is A or G or is absent

SEQ ID NO: 62276 - protein, 34 aa, Artificial Sequence; identical to SEQ ID NO: 2898
  GFR-binding peptide
  MOD_RES (1)..(1): Xaa is C or S
  MOD_RES (13)..(14)..(15)..(16)..(17): Xaa is A or G
  MOD_RES (18)..(19)..(20)..(21): Xaa is A or G or is absent

SEQ ID NO: 62277 - protein, 35 aa, Artificial Sequence; identical to SEQ ID NO: 23894
  GFR-binding peptide
  MOD_RES (32)..(33): Xaa is C or S

SEQ ID NO: 62278 - protein, 40 aa, Artificial Sequence
  GFR-binding peptide
  MOD_RES (1)..(3)..(37)..(38): Xaa is C or S
  MOD_RES (15)..(16)..(17)..(18)..(19): Xaa is A or G
  MOD_RES (20)..(21)..(22)..(23): Xaa is A or G or is absent
XAXSEVTMNRYKKLXXXXXXXXXFYLISIANMKEPVXXPE

SEQ ID NO: 62279 - protein, 38 aa, Artificial Sequence
  GFR-binding peptide
  MOD_RES (2)..(4)..(37)..(38): Xaa is C or S
  MOD_RES (15)..(16)..(17)..(18)..(19): Xaa is A or G
  MOD_RES (20)..(21)..(22)..(23): Xaa is A or G or is absent
LXGXEEVIMRHKRLXXXXXXXXXYYLMSTASTKVPAXX

SEQ ID NO: 62280 - protein, 31 aa, Artificial Sequence
  GFR-binding peptide
  MOD_RES (1)..(1): Xaa is C or S
XEEVIMEYKFKLLVRGNDLYLMSIPETKVPA

SEQ ID NO: 62281 - protein, 42 aa, Artificial Sequence; identical to SEQ ID NO: 23902
  GFR-binding peptide
  MOD_RES (2)..(4)..(38)..(39): Xaa is C or S
  MOD_RES (16)..(17)..(18)..(19)..(20): Xaa is A or G
  MOD_RES (21)..(22)..(23)..(24): Xaa is A or G or is absent

SEQ ID NO: 62282 - protein, 36 aa, Artificial Sequence; identical to SEQ ID NO: 31920
  GFR-binding peptide
  MOD_RES (32)..(33): Xaa is C or S

SEQ ID NO: 62283 - protein, 38 aa, Artificial Sequence; identical to SEQ ID NO: 23903
  GFR-binding peptide
  MOD_RES (33)..(34): Xaa is C or S
  MOD_RES (11)..(12)..(13)..(14)..(15): Xaa is A or G
  MOD_RES (16)..(17)..(18)..(19): Xaa is A or G or is absent

SEQ ID NO: 62284 - protein, 31 aa, Artificial Sequence; identical to SEQ ID NO: 2907
  GFR-binding peptide
  MOD_RES (31)..(31): Xaa is C or S

SEQ ID NO: 62285 - protein, 34 aa, Artificial Sequence; identical to SEQ ID NO: 23906
  GFR-binding peptide
  MOD_RES (1)..(33): Xaa is C or S

SEQ ID NO: 62286 - protein, 35 aa, Artificial Sequence
  GFR-binding peptide
  MOD_RES (31)..(32): Xaa is C or S
SKVIMPIKGYIKPTKGIFYLINIPSLDQSVXXPSA

SEQ ID NO: 62287 - protein, 36 aa, Artificial Sequence; identical to SEQ ID NO: 2910
  GFR-binding peptide
  MOD_RES (2)..(4): Xaa is C or S
  MOD_RES (15)..(16)..(17)..(18)..(19): Xaa is A or G
  MOD_RES (20)..(21)..(22)..(23): Xaa is A or G or is absent

SEQ ID NO: 62288 - protein, 39 aa, Artificial Sequence; identical to SEQ ID NO: 23908
  GFR-binding peptide
  MOD_RES (2)..(36)..(37): Xaa is C or S
  MOD_RES (14)..(15)..(16)..(17)..(18): Xaa is A or G
  MOD_RES (19)..(20)..(21)..(22): Xaa is A or G or is absent

SEQ ID NO: 62289 - protein, 36 aa, Artificial Sequence; identical to SEQ ID NO: 31925
  GFR-binding peptide
  MOD_RES (1)..(35)..(36): Xaa is C or S
  MOD_RES (13)..(14)..(15)..(16)..(17): Xaa is A or G
  MOD_RES (18)..(19)..(20)..(21): Xaa is A or G or is absent

SEQ ID NO: 62290 - protein, 32 aa, Artificial Sequence
  GFR-binding peptide
  MOD_RES (32)..(32): Xaa is C or S
SEVTMNPIKGYVVNKNEDFYLINIPSMKEPVX

SEQ ID NO: 62291 - protein, 35 aa, Artificial Sequence; identical to SEQ ID NO: 10383
  GFR-binding peptide
  MOD_RES (2)..(2): Xaa is C or S
  MOD_RES (14)..(15)..(16)..(17)..(18): Xaa is A or G
  MOD_RES (19)..(20)..(21)..(22): Xaa is A or G or is absent

SEQ ID NO: 62292 - protein, 39 aa, Artificial Sequence; identical to SEQ ID NO: 23915
  GFR-binding peptide
  MOD_RES (2)..(34)..(35): Xaa is C or S

SEQ ID NO: 62293 - protein, 35 aa, Artificial Sequence; identical to SEQ ID NO: 2918
  GFR-binding peptide
  MOD_RES (33)..(34): Xaa is C or S
  MOD_RES (11)..(12)..(13)..(14)..(15): Xaa is A or G
  MOD_RES (16)..(17)..(18)..(19): Xaa is A or G or is absent

SEQ ID NO: 62294 - protein, 40 aa, Artificial Sequence; identical to SEQ ID NO: 23919
  GFR-binding peptide
  MOD_RES (2)..(4)..(36)..(37): Xaa is C or S

SEQ ID NO: 62295 - protein, 38 aa, Artificial Sequence; identical to SEQ ID NO: 31929
  GFR-binding peptide
  MOD_RES (1)..(33)..(34): Xaa is C or S

SEQ ID NO: 62296 - protein, 39 aa, Artificial Sequence; identical to SEQ ID NO: 2922
  GFR-binding peptide
  MOD_RES (2)..(4)..(38)..(39): Xaa is C or S
  MOD_RES (16)..(17)..(18)..(19)..(20): Xaa is A or G
  MOD_RES (21)..(22)..(23)..(24): Xaa is A or G or is absent

SEQ ID NO: 62297 - protein, 39 aa, Artificial Sequence; identical to SEQ ID NO: 23921
  GFR-binding peptide
  MOD_RES (34)..(35): Xaa is C or S
  MOD_RES (12)..(13)..(14)..(15)..(16): Xaa is A or G
  MOD_RES (17)..(18)..(19)..(20): Xaa is A or G or is absent

SEQ ID NO: 62298 - protein, 36 aa, Artificial Sequence; identical to SEQ ID NO: 31933
  GFR-binding peptide
  MOD_RES (1)..(3)..(35)..(36): Xaa is C or S

SEQ ID NO: 62299 - protein, 39 aa, Artificial Sequence; identical to SEQ ID NO: 2926
  GFR-binding peptide
  MOD_RES (2)..(36)..(37): Xaa is C or S
  MOD_RES (14)..(15)..(16)..(17)..(18): Xaa is A or G
  MOD_RES (19)..(20)..(21)..(22): Xaa is A or G or is absent

SEQ ID NO: 62300 - protein, 36 aa, Artificial Sequence; identical to SEQ ID NO: 23928
  GFR-binding peptide
  MOD_RES (1)..(3)..(35)..(36): Xaa is C or S

SEQ ID NO: 62301 - protein, 40 aa, Artificial Sequence; identical to SEQ ID NO: 2928
  GFR-binding peptide
  MOD_RES (2)..(4)..(35)..(36): Xaa is C or S

SEQ ID NO: 62302 - protein, 41 aa, Artificial Sequence; identical to SEQ ID NO: 23931
  GFR-binding peptide
  MOD_RES (2)..(36)..(37): Xaa is C or S
  MOD_RES (14)..(15)..(16)..(17)..(18): Xaa is A or G
  MOD_RES (19)..(20)..(21)..(22): Xaa is A or G or is absent

SEQ ID NO: 62303 - protein, 40 aa, Artificial Sequence
  GFR-binding peptide
  MOD_RES (34)..(35): Xaa is C or S
  MOD_RES (12)..(13)..(14)..(15)..(16): Xaa is A or G
  MOD_RES (17)..(18)..(19)..(20): Xaa is A or G or is absent
ESVAMGRHKRLXXXXXXXXXYYLISTASLKTPVXXAKSAK

SEQ ID NO: 62304 - protein, 40 aa, Artificial Sequence
  GFR-binding peptide
  MOD_RES (34)..(35): Xaa is C or S
  MOD_RES (12)..(13)..(14)..(15)..(16): Xaa is A or G
  MOD_RES (17)..(18)..(19)..(20): Xaa is A or G or is absent
SEVVMDEYKFKXXXXXXXXXLYLISIPELRTPVXXTPPTS

SEQ ID NO: 62305 - protein, 38 aa, Artificial Sequence; identical to SEQ ID NO: 2934
  GFR-binding peptide
  MOD_RES (2)..(34)..(35): Xaa is C or S

SEQ ID NO: 62306 - protein, 36 aa, Artificial Sequence; identical to SEQ ID NO: 2936
  GFR-binding peptide
  MOD_RES (34)..(35): Xaa is C or S
  MOD_RES (12)..(13)..(14)..(15)..(16): Xaa is A or G
  MOD_RES (17)..(18)..(19)..(20): Xaa is A or G or is absent

SEQ ID NO: 62307 - protein, 41 aa, Artificial Sequence; identical to SEQ ID NO: 2937
  GFR-binding peptide
  MOD_RES (1)..(3)..(35)..(36): Xaa is C or S

SEQ ID NO: 62308 - protein, 36 aa, Artificial Sequence
  GFR-binding peptide
  MOD_RES (34)..(35): Xaa is C or S
  MOD_RES (12)..(13)..(14)..(15)..(16): Xaa is A or G
  MOD_RES (17)..(18)..(19)..(20): Xaa is A or G or is absent
SEVTMNPIKGYXXXXXXXXXFYLINIPSMKEPVXXP

SEQ ID NO: 62309 - protein, 38 aa, Artificial Sequence
  GFR-binding peptide
  MOD_RES (2)..(36)..(37): Xaa is C or S
  MOD_RES (14)..(15)..(16)..(17)..(18): Xaa is A or G
  MOD_RES (19)..(20)..(21)..(22): Xaa is A or G or is absent
GXSEVVMDEYKFKXXXXXXXXXLYLISIPELRTPVXXT

SEQ ID NO: 62310 - protein, 37 aa, Artificial Sequence; identical to SEQ ID NO: 2938
  GFR-binding peptide
  MOD_RES (1)..(33)..(34): Xaa is C or S

SEQ ID NO: 62311 - protein, 36 aa, Artificial Sequence
  GFR-binding peptide
  MOD_RES (2)..(4)..(36): Xaa is C or S
RXGXSEVVMDYHYKLVVNNASDKYLISIPSLRTPVX

SEQ ID NO: 62312 - protein, 35 aa, Artificial Sequence; identical to SEQ ID NO: 2939
  GFR-binding peptide
  MOD_RES (1)..(3)..(34)..(35): Xaa is C or S

SEQ ID NO: 62313 - protein, 38 aa, Artificial Sequence
  GFR-binding peptide
  MOD_RES (33)..(34): Xaa is C or S
  MOD_RES (11)..(12)..(13)..(14)..(15): Xaa is A or G
  MOD_RES (16)..(17)..(18)..(19): Xaa is A or G or is absent
EVVMDEYKFKXXXXXXXXXLYLISIPELRTPVXXTPPT

SEQ ID NO: 62314 - protein, 38 aa, Artificial Sequence; identical to SEQ ID NO: 2940
  GFR-binding peptide
  MOD_RES (2)..(34)..(35): Xaa is C or S

SEQ ID NO: 62315 - protein, 38 aa, Artificial Sequence; identical to SEQ ID NO: 2941
  GFR-binding peptide
  MOD_RES (34)..(35): Xaa is C or S
  MOD_RES (12)..(13)..(14)..(15)..(16): Xaa is A or G
  MOD_RES (17)..(18)..(19)..(20): Xaa is A or G or is absent

SEQ ID NO: 62316 - protein, 40 aa, Artificial Sequence; identical to SEQ ID NO: 2942
  GFR-binding peptide
  MOD_RES (2)..(4)..(38)..(39): Xaa is C or S
  MOD_RES (16)..(17)..(18)..(19)..(20): Xaa is A or G
  MOD_RES (21)..(22)..(23)..(24): Xaa is A or G or is absent

SEQ ID NO: 62317 - protein, 38 aa, Artificial Sequence; identical to SEQ ID NO: 2945
  GFR-binding peptide
  MOD_RES (2)..(4): Xaa is C or S
  MOD_RES (17)..(18)..(19)..(20)..(21): Xaa is A or G
  MOD_RES (22)..(23)..(24)..(25): Xaa is A or G or is absent

SEQ ID NO: 62318 - protein, 33 aa, Artificial Sequence
  GFR-binding peptide
  MOD_RES (2)..(2): Xaa is C or S
AXSEVTMNRYKKLVVNKNEDFYLISIANMKEPV

SEQ ID NO: 62319 - protein, 39 aa, Artificial Sequence; identical to SEQ ID NO: 23950
  GFR-binding peptide
  MOD_RES (1)..(3)..(36)..(37): Xaa is C or S
  MOD_RES (14)..(15)..(16)..(17)..(18): Xaa is A or G
  MOD_RES (19)..(20)..(21)..(22): Xaa is A or G or is absent

SEQ ID NO: 62320 - protein, 42 aa, Artificial Sequence; identical to SEQ ID NO: 31961
  GFR-binding peptide
  MOD_RES (2)..(4)..(38)..(39): Xaa is C or S
  MOD_RES (16)..(17)..(18)..(19)..(20): Xaa is A or G
  MOD_RES (21)..(22)..(23)..(24): Xaa is A or G or is absent

SEQ ID NO: 62321 - protein, 38 aa, Artificial Sequence; identical to SEQ ID NO: 2949
  GFR-binding peptide
  MOD_RES (2)..(4)..(35)..(36): Xaa is C or S

SEQ ID NO: 62322 - protein, 41 aa, Artificial Sequence
  GFR-binding peptide
  MOD_RES (2)..(35)..(36): Xaa is C or S
  MOD_RES (13)..(14)..(15)..(16)..(17): Xaa is A or G
  MOD_RES (18)..(19)..(20)..(21): Xaa is A or G or is absent
KXSRVIMPIKGYXXXXXXXXXFYLINIPSLAQPVXXPAASA

SEQ ID NO: 62323 - protein, 38 aa, Artificial Sequence; identical to SEQ ID NO: 2952
  GFR-binding peptide
  MOD_RES (1)..(34)..(35): Xaa is C or S
  MOD_RES (12)..(13)..(14)..(15)..(16): Xaa is A or G
  MOD_RES (17)..(18)..(19)..(20): Xaa is A or G or is absent

SEQ ID NO: 62324 - protein, 41 aa, Artificial Sequence; identical to SEQ ID NO: 2954
  GFR-binding peptide
  MOD_RES (1)..(3)..(35): Xaa is C or S

SEQ ID NO: 62325 - protein, 41 aa, Artificial Sequence; identical to SEQ ID NO: 2957
  GFR-binding peptide
  MOD_RES (1)..(3)..(35)..(36): Xaa is C or S

SEQ ID NO: 62326 - protein, 38 aa, Artificial Sequence; identical to SEQ ID NO: 23960
  GFR-binding peptide
  MOD_RES (1)..(3)..(35): Xaa is C or S

SEQ ID NO: 62327 - protein, 41 aa, Artificial Sequence; identical to SEQ ID NO: 2960
  GFR-binding peptide
  MOD_RES (2)..(4)..(36): Xaa is C or S

SEQ ID NO: 62328 - protein, 35 aa, Artificial Sequence; identical to SEQ ID NO: 2961
  GFR-binding peptide
  MOD_RES (31)..(32): Xaa is C or S

SEQ ID NO: 62329 - protein, 37 aa, Artificial Sequence; identical to SEQ ID NO: 2963
  GFR-binding peptide
  MOD_RES (1)..(35): Xaa is C or S
  MOD_RES (13)..(14)..(15)..(16)..(17): Xaa is A or G
  MOD_RES (18)..(19)..(20)..(21): Xaa is A or G or is absent

SEQ ID NO: 62330 - protein, 36 aa, Artificial Sequence; identical to SEQ ID NO: 2965
  GFR-binding peptide
  MOD_RES (1)..(3): Xaa is C or S
  MOD_RES (15)..(16)..(17)..(18)..(19): Xaa is A or G
  MOD_RES (20)..(21)..(22)..(23): Xaa is A or G or is absent

SEQ ID NO: 62331 - protein, 42 aa, Artificial Sequence
  GFR-binding peptide
  MOD_RES (1)..(3)..(36)..(37): Xaa is C or S
  MOD_RES (14)..(15)..(16)..(17)..(18): Xaa is A or G
  MOD_RES (19)..(20)..(21)..(22): Xaa is A or G or is absent
XGXEEVIMEYKFKXXXXXXXXXLYLMSIPETKVPAXXTSPVR

SEQ ID NO: 62332 - protein, 31 aa, Artificial Sequence
  GFR-binding peptide
SEVTMNEYKFKVVNKNEDLYLISIPEMKEPV

SEQ ID NO: 62333 - protein, 36 aa, Artificial Sequence
  GFR-binding peptide
  MOD_RES (2)..(4): Xaa is C or S
  MOD_RES (15)..(16)..(17)..(18)..(19): Xaa is A or G
  MOD_RES (20)..(21)..(22)..(23): Xaa is A or G or is absent
SXKXSKVVMPIKGYXXXXXXXXXFYLINIPSLDQPV

SEQ ID NO: 62334 - protein, 38 aa, Artificial Sequence
  GFR-binding peptide
  MOD_RES (2)..(4)..(36)..(37): Xaa is C or S
RXGXSEVVMDEYKFKVVNNASDLYLISIPELRTPVXXT

SEQ ID NO: 62335 - protein, 38 aa, Artificial Sequence
  GFR-binding peptide
  MOD_RES (33)..(34): Xaa is C or S
  MOD_RES (11)..(12)..(13)..(14)..(15): Xaa is A or G
  MOD_RES (16)..(17)..(18)..(19): Xaa is A or G or is absent
EVVMDYHYKLXXXXXXXXXKYLISIPSLRTPVXXTPPT

SEQ ID NO: 62336 - protein, 43 aa, Artificial Sequence
  GFR-binding peptide
  MOD_RES (2)..(4)..(38)..(39): Xaa is C or S
  MOD_RES (16)..(17)..(18)..(19)..(20): Xaa is A or G
  MOD_RES (21)..(22)..(23)..(24): Xaa is A or G or is absent
SXGXRDVVMGEYKFKXXXXXXXXXLYLMSIPEMKTPTXXPGAS

SEQ ID NO: 62337 - protein, 32 aa, Artificial Sequence; identical to SEQ ID NO: 2973
  GFR-binding peptide
  MOD_RES (31)..(32): Xaa is C or S

SEQ ID NO: 62338 - protein, 40 aa, Artificial Sequence; identical to SEQ ID NO: 31987
  GFR-binding peptide
  MOD_RES (34)..(35): Xaa is C or S
  MOD_RES (12)..(13)..(14)..(15)..(16): Xaa is A or G
  MOD_RES (17)..(18)..(19)..(20): Xaa is A or G or is absent

SEQ ID NO: 62339 - protein, 37 aa, Artificial Sequence
  GFR-binding peptide
  MOD_RES (1)..(34)..(35): Xaa is C or S
  MOD_RES (12)..(13)..(14)..(15)..(16): Xaa is A or G
  MOD_RES (17)..(18)..(19)..(20): Xaa is A or G or is absent
XSRVIMPIKGYXXXXXXXXXFYLINIPSLAQPVXXPA

SEQ ID NO: 62340 - protein, 36 aa, Artificial Sequence; identical to SEQ ID NO: 23971
  GFR-binding peptide
  MOD_RES (34)..(35): Xaa is C or S
  MOD_RES (12)..(13)..(14)..(15)..(16): Xaa is A or G
  MOD_RES (17)..(18)..(19)..(20): Xaa is A or G or is absent

SEQ ID NO: 62341 - protein, 33 aa, Artificial Sequence; identical to SEQ ID NO: 2975
  GFR-binding peptide
  MOD_RES (33)..(33): Xaa is C or S
  MOD_RES (11)..(12)..(13)..(14)..(15): Xaa is A or G
  MOD_RES (16)..(17)..(18)..(19): Xaa is A or G or is absent

SEQ ID NO: 62342 - protein, 37 aa, Artificial Sequence
  GFR-binding peptide
  MOD_RES (2)..(4)..(36)..(37): Xaa is C or S
RXGXSEVVMDEYKFKVVNNASDLYLISIPELRTPVXX

SEQ ID NO: 62343 - protein, 31 aa, Artificial Sequence
  GFR-binding peptide
AEVVMDRHKRLVVNNAADYYLISTASLRAPV

SEQ ID NO: 62344 - protein, 37 aa, Artificial Sequence
  GFR-binding peptide
  MOD_RES (2)..(4): Xaa is C or S
  MOD_RES (16)..(17)..(18)..(19)..(20): Xaa is A or G
  MOD_RES (21)..(22)..(23)..(24): Xaa is A or G or is absent
RXGXSEVVMDEYKFKXXXXXXXXXLYLISIPELRTPV

SEQ ID NO: 62345 - protein, 39 aa, Artificial Sequence; identical to SEQ ID NO: 2982
  GFR-binding peptide
  MOD_RES (1)..(3)..(36)..(37): Xaa is C or S
  MOD_RES (14)..(15)..(16)..(17)..(18): Xaa is A or G
  MOD_RES (19)..(20)..(21)..(22): Xaa is A or G or is absent

SEQ ID NO: 62346 - protein, 34 aa, Artificial Sequence; identical to SEQ ID NO: 2985
  GFR-binding peptide
  MOD_RES (2)..(2): Xaa is C or S

SEQ ID NO: 62347 - protein, 35 aa, Artificial Sequence
  GFR-binding peptide
  MOD_RES (31)..(32): Xaa is C or S
EVTMNYHYKLVVNKNEDKYLISIPSMKEPVXXPEP

SEQ ID NO: 62348 - protein, 36 aa, Artificial Sequence; identical to SEQ ID NO: 2988
  GFR-binding peptide
  MOD_RES (1)..(32)..(33): Xaa is C or S

SEQ ID NO: 62349 - protein, 36 aa, Artificial Sequence; identical to SEQ ID NO: 10446
  GFR-binding peptide
  MOD_RES (1)..(35)..(36): Xaa is C or S
  MOD_RES (13)..(14)..(15)..(16)..(17): Xaa is A or G
  MOD_RES (18)..(19)..(20)..(21): Xaa is A or G or is absent

SEQ ID NO: 62350 - protein, 36 aa, Artificial Sequence; identical to SEQ ID NO: 56957
  GFR-binding peptide
  MOD_RES (2)..(34)..(35): Xaa is C or S

SEQ ID NO: 62351 - protein, 37 aa, Artificial Sequence; identical to SEQ ID NO: 2992
  GFR-binding peptide
  MOD_RES (2)..(36)..(37): Xaa is C or S
  MOD_RES (14)..(15)..(16)..(17)..(18): Xaa is A or G
  MOD_RES (19)..(20)..(21)..(22): Xaa is A or G or is absent

SEQ ID NO: 62352 - protein, 34 aa, Artificial Sequence; identical to SEQ ID NO: 10448
  GFR-binding peptide
  MOD_RES (33)..(34): Xaa is C or S
  MOD_RES (11)..(12)..(13)..(14)..(15): Xaa is A or G
  MOD_RES (16)..(17)..(18)..(19): Xaa is A or G or is absent

SEQ ID NO: 62353 - protein, 36 aa, Artificial Sequence; identical to SEQ ID NO: 23992
  GFR-binding peptide
  MOD_RES (33)..(34): Xaa is C or S

SEQ ID NO: 62354 - protein, 33 aa, Artificial Sequence; identical to SEQ ID NO: 2995
  GFR-binding peptide
  MOD_RES (1)..(32)..(33): Xaa is C or S

SEQ ID NO: 62355 - protein, 34 aa, Artificial Sequence
  GFR-binding peptide
  MOD_RES (31)..(32): Xaa is C or S
EVTMNRHKRLVVNKNEDYYLISTASMKEPVXXPE

SEQ ID NO: 62356 - protein, 38 aa, Artificial Sequence; identical to SEQ ID NO: 2996
  GFR-binding peptide
  MOD_RES (33)..(34): Xaa is C or S
  MOD_RES (11)..(12)..(13)..(14)..(15): Xaa is A or G
  MOD_RES (16)..(17)..(18)..(19): Xaa is A or G or is absent

SEQ ID NO: 62357 - protein, 36 aa, Artificial Sequence
  GFR-binding peptide
  MOD_RES (1)..(34)..(35): Xaa is C or S
  MOD_RES (12)..(13)..(14)..(15)..(16): Xaa is A or G
  MOD_RES (17)..(18)..(19)..(20): Xaa is A or G or is absent
XEEVIMYHYKLXXXXXXXXXKYLMSIPSTKVPAXXT

SEQ ID NO: 62358 - protein, 36 aa, Artificial Sequence; identical to SEQ ID NO: 32009
  GFR-binding peptide
  MOD_RES (2)..(34)..(35): Xaa is C or S

SEQ ID NO: 62359 - protein, 35 aa, Artificial Sequence; identical to SEQ ID NO: 32014
  GFR-binding peptide
  MOD_RES (31)..(32): Xaa is C or S

SEQ ID NO: 62360 - protein, 37 aa, Artificial Sequence; identical to SEQ ID NO: 3002
  GFR-binding peptide
  MOD_RES (2)..(34)..(35): Xaa is C or S

SEQ ID NO: 62361 - protein, 39 aa, Artificial Sequence; identical to SEQ ID NO: 3003
  GFR-binding peptide
  MOD_RES (2)..(34)..(35): Xaa is C or S

SEQ ID NO: 62362 - protein, 35 aa, Artificial Sequence; identical to SEQ ID NO: 3004
  GFR-binding peptide
  MOD_RES (1)..(34)..(35): Xaa is C or S
  MOD_RES (12)..(13)..(14)..(15)..(16): Xaa is A or G
  MOD_RES (17)..(18)..(19)..(20): Xaa is A or G or is absent

SEQ ID NO: 62363 - protein, 38 aa, Artificial Sequence; identical to SEQ ID NO: 56973
  GFR-binding peptide
  MOD_RES (2)..(4)..(38): Xaa is C or S
  MOD_RES (16)..(17)..(18)..(19)..(20): Xaa is A or G
  MOD_RES (21)..(22)..(23)..(24): Xaa is A or G or is absent

SEQ ID NO: 62364 - protein, 36 aa, Artificial Sequence; identical to SEQ ID NO: 32025
  GFR-binding peptide
  MOD_RES (2)..(34)..(35): Xaa is C or S

SEQ ID NO: 62365 - protein, 36 aa, Artificial Sequence; identical to SEQ ID NO: 3006
  GFR-binding peptide
  MOD_RES (2)..(4)..(36): Xaa is C or S

SEQ ID NO: 62366 - protein, 39 aa, Artificial Sequence; identical to SEQ ID NO: 3007
  GFR-binding peptide
  MOD_RES (1)..(3)..(35)..(36): Xaa is C or S

SEQ ID NO: 62367 - protein, 41 aa, Artificial Sequence; identical to SEQ ID NO: 24003
  GFR-binding peptide
  MOD_RES (2)..(36): Xaa is C or S
  MOD_RES (14)..(15)..(16)..(17)..(18): Xaa is A or G
  MOD_RES (19)..(20)..(21)..(22): Xaa is A or G or is absent

SEQ ID NO: 62368 - protein, 41 aa, Artificial Sequence; identical to SEQ ID NO: 24004
  GFR-binding peptide
  MOD_RES (2)..(4)..(38)..(39): Xaa is C or S
  MOD_RES (16)..(17)..(18)..(19)..(20): Xaa is A or G
  MOD_RES (21)..(22)..(23)..(24): Xaa is A or G or is absent

SEQ ID NO: 62369 - protein, 41 aa, Artificial Sequence; identical to SEQ ID NO: 3009
  GFR-binding peptide
  MOD_RES (1)..(3)..(37)..(38): Xaa is C or S
  MOD_RES (15)..(16)..(17)..(18)..(19): Xaa is A or G
  MOD_RES (20)..(21)..(22)..(23): Xaa is A or G or is absent

SEQ ID NO: 62370 - protein, 36 aa, Artificial Sequence
  GFR-binding peptide
  MOD_RES (1)..(35)..(36): Xaa is C or S
  MOD_RES (13)..(14)..(15)..(16)..(17): Xaa is A or G
  MOD_RES (18)..(19)..(20)..(21): Xaa is A or G or is absent
XSEVTMNYHYKLXXXXXXXXXKYLISIPSMKEPVXX

SEQ ID NO: 62371 - protein, 34 aa, Artificial Sequence; identical to SEQ ID NO: 3010
  GFR-binding peptide
  MOD_RES (2)..(2): Xaa is C or S

SEQ ID NO: 62372 - protein, 38 aa, Artificial Sequence; identical to SEQ ID NO: 24005
  GFR-binding peptide
  MOD_RES (1)..(34)..(35): Xaa is C or S
  MOD_RES (12)..(13)..(14)..(15)..(16): Xaa is A or G
  MOD_RES (17)..(18)..(19)..(20): Xaa is A or G or is absent

SEQ ID NO: 62373 - protein, 33 aa, Artificial Sequence; identical to SEQ ID NO: 24006
  GFR-binding peptide
  MOD_RES (33)..(33): Xaa is C or S
  MOD_RES (11)..(12)..(13)..(14)..(15): Xaa is A or G
  MOD_RES (16)..(17)..(18)..(19): Xaa is A or G or is absent

SEQ ID NO: 62374 - protein, 41 aa, Artificial Sequence
  GFR-binding peptide
  MOD_RES (2)..(4)..(38)..(39): Xaa is C or S
  MOD_RES (16)..(17)..(18)..(19)..(20): Xaa is A or G
  MOD_RES (21)..(22)..(23)..(24): Xaa is A or G or is absent
RXGXSEVVMDEYKFKXXXXXXXXXLYLISIPELRTPVXXTP

SEQ ID NO: 62375 - protein, 40 aa, Artificial Sequence
  GFR-binding peptide
  MOD_RES (2)..(4)..(36)..(37): Xaa is C or S
RXGXSEVVMDRHKRLVVNNASDYYLISTASLRTPVXXTPP

SEQ ID NO: 62376 - protein, 41 aa, Artificial Sequence; identical to SEQ ID NO: 32037
  GFR-binding peptide
  MOD_RES (1)..(35): Xaa is C or S
  MOD_RES (13)..(14)..(15)..(16)..(17): Xaa is A or G
  MOD_RES (18)..(19)..(20)..(21): Xaa is A or G or is absent

SEQ ID NO: 62377 - protein, 39 aa, Artificial Sequence; identical to SEQ ID NO: 32041
  GFR-binding peptide
  MOD_RES (1)..(3)..(35)..(36): Xaa is C or S

SEQ ID NO: 62378 - protein, 35 aa, Artificial Sequence; identical to SEQ ID NO: 3016
  GFR-binding peptide
  MOD_RES (1)..(32)..(33): Xaa is C or S

SEQ ID NO: 62379 - protein, 34 aa, Artificial Sequence; identical to SEQ ID NO: 3017
  GFR-binding peptide
  MOD_RES (32)..(33): Xaa is C or S

SEQ ID NO: 62380 - protein, 40 aa, Artificial Sequence
  GFR-binding peptide
  MOD_RES (2)..(4)..(35)..(36): Xaa is C or S
SXKXSKVVMPIKGYVKPTRGVFYLINIPSLDQPVXXPSAS

SEQ ID NO: 62381 - protein, 36 aa, Artificial Sequence; identical to SEQ ID NO: 24014
  GFR-binding peptide
  MOD_RES (32)..(33): Xaa is C or S

SEQ ID NO: 62382 - protein, 37 aa, Artificial Sequence; identical to SEQ ID NO: 3019
  GFR-binding peptide
  MOD_RES (33)..(34): Xaa is C or S
  MOD_RES (11)..(12)..(13)..(14)..(15): Xaa is A or G
  MOD_RES (16)..(17)..(18)..(19): Xaa is A or G or is absent

SEQ ID NO: 62383 - protein, 34 aa, Artificial Sequence; identical to SEQ ID NO: 24016
  GFR-binding peptide
  MOD_RES (2)..(2): Xaa is C or S
  MOD_RES (13)..(14)..(15)..(16)..(17): Xaa is A or G
  MOD_RES (18)..(19)..(20)..(21): Xaa is A or G or is absent

SEQ ID NO: 62384 - protein, 32 aa, Artificial Sequence; identical to SEQ ID NO: 24017
  GFR-binding peptide
  MOD_RES (31)..(32): Xaa is C or S

SEQ ID NO: 62385 - protein, 35 aa, Artificial Sequence; identical to SEQ ID NO: 3021
  GFR-binding peptide
  MOD_RES (1)..(34)..(35): Xaa is C or S
  MOD_RES (12)..(13)..(14)..(15)..(16): Xaa is A or G
  MOD_RES (17)..(18)..(19)..(20): Xaa is A or G or is absent

SEQ ID NO: 62386 - protein, 40 aa, Artificial Sequence
  GFR-binding peptide
  MOD_RES (2)..(4)..(38)..(39): Xaa is C or S
  MOD_RES (16)..(17)..(18)..(19)..(20): Xaa is A or G
  MOD_RES (21)..(22)..(23)..(24): Xaa is A or G or is absent
RXAXSEVTMNYHYKLXXXXXXXXXKYLISIPSMKEPVXXP

SEQ ID NO: 62387 - protein, 37 aa, Artificial Sequence; identical to SEQ ID NO: 3024
  GFR-binding peptide
  MOD_RES (32)..(32): Xaa is C or S

SEQ ID NO: 62388 - protein, 36 aa, Artificial Sequence; identical to SEQ ID NO: 24020
  GFR-binding peptide
  MOD_RES (31)..(32): Xaa is C or S

SEQ ID NO: 62389 - protein, 40 aa, Artificial Sequence; identical to SEQ ID NO: 3025
  GFR-binding peptide
  MOD_RES (2)..(4)..(37)..(38): Xaa is C or S
  MOD_RES (15)..(16)..(17)..(18)..(19): Xaa is A or G
  MOD_RES (20)..(21)..(22)..(23): Xaa is A or G or is absent

SEQ ID NO: 62390 - protein, 35 aa, Artificial Sequence; identical to SEQ ID NO: 3027
  GFR-binding peptide
  MOD_RES (34)..(35): Xaa is C or S
  MOD_RES (12)..(13)..(14)..(15)..(16): Xaa is A or G
  MOD_RES (17)..(18)..(19)..(20): Xaa is A or G or is absent

SEQ ID NO: 62391 - protein, 37 aa, Artificial Sequence; identical to SEQ ID NO: 24024
  GFR-binding peptide
  MOD_RES (33)..(34): Xaa is C or S
  MOD_RES (11)..(12)..(13)..(14)..(15): Xaa is A or G
  MOD_RES (16)..(17)..(18)..(19): Xaa is A or G or is absent

SEQ ID NO: 62392 - protein, 34 aa, Artificial Sequence; identical to SEQ ID NO: 32052
  GFR-binding peptide
  MOD_RES (1)..(33)..(34): Xaa is C or S

SEQ ID NO: 62393 - protein, 40 aa, Artificial Sequence; identical to SEQ ID NO: 32054
  GFR-binding peptide
  MOD_RES (1)..(35)..(36): Xaa is C or S
  MOD_RES (13)..(14)..(15)..(16)..(17): Xaa is A or G
  MOD_RES (18)..(19)..(20)..(21): Xaa is A or G or is absent

SEQ ID NO: 62394 - protein, 34 aa, Artificial Sequence
  GFR-binding peptide
  MOD_RES (1)..(1): Xaa is C or S
  MOD_RES (13)..(14)..(15)..(16)..(17): Xaa is A or G
  MOD_RES (18)..(19)..(20)..(21): Xaa is A or G or is absent
XSEVTMNRHKRLXXXXXXXXXYYLISTASMKEPV

SEQ ID NO: 62395 - protein, 38 aa, Artificial Sequence; identical to SEQ ID NO: 3034
  GFR-binding peptide
  MOD_RES (35)..(36): Xaa is C or S
  MOD_RES (13)..(14)..(15)..(16)..(17): Xaa is A or G
  MOD_RES (18)..(19)..(20)..(21): Xaa is A or G or is absent

SEQ ID NO: 62396 - protein, 40 aa, Artificial Sequence; identical to SEQ ID NO: 32071
  GFR-binding peptide
  MOD_RES (2)..(4)..(36)..(37): Xaa is C or S

SEQ ID NO: 62397 - protein, 32 aa, Artificial Sequence
  GFR-binding peptide
  MOD_RES (32)..(32): Xaa is C or S
SEVTMNEYKFKVVNKNEDLYLISIPEMKEPVX

SEQ ID NO: 62398 - protein, 40 aa, Artificial Sequence
  GFR-binding peptide
  MOD_RES (2)..(36)..(37): Xaa is C or S
  MOD_RES (14)..(15)..(16)..(17)..(18): Xaa is A or G
  MOD_RES (19)..(20)..(21)..(22): Xaa is A or G or is absent
GXRDVVMGYHYKLXXXXXXXXXKYLMSIPSMKTPTXXPGA

SEQ ID NO: 62399 - protein, 35 aa, Artificial Sequence; identical to SEQ ID NO: 24031
  GFR-binding peptide
  MOD_RES (2)..(2): Xaa is C or S
  MOD_RES (14)..(15)..(16)..(17)..(18): Xaa is A or G
  MOD_RES (19)..(20)..(21)..(22): Xaa is A or G or is absent

SEQ ID NO: 62400 - protein, 42 aa, Artificial Sequence; identical to SEQ ID NO: 24035
  GFR-binding peptide
  MOD_RES (2)..(4)..(37)..(38): Xaa is C or S

SEQ ID NO: 62401 - protein, 35 aa, Artificial Sequence; identical to SEQ ID NO: 24036
  GFR-binding peptide
  MOD_RES (2)..(4): Xaa is C or S

SEQ ID NO: 62402 - protein, 37 aa, Artificial Sequence
  GFR-binding peptide
  MOD_RES (34)..(35): Xaa is C or S
  MOD_RES (12)..(13)..(14)..(15)..(16): Xaa is A or G
  MOD_RES (17)..(18)..(19)..(20): Xaa is A or G or is absent
SEVTMNPIKGYXXXXXXXXXFYLINIPSMKEPVXXPE

SEQ ID NO: 62403 - protein, 42 aa, Artificial Sequence; identical to SEQ ID NO: 3037
  GFR-binding peptide
  MOD_RES (2)..(4)..(36)..(37): Xaa is C or S

SEQ ID NO: 62404 - protein, 36 aa, Artificial Sequence; identical to SEQ ID NO: 3038
  GFR-binding peptide
  MOD_RES (1)..(34)..(35): Xaa is C or S
  MOD_RES (12)..(13)..(14)..(15)..(16): Xaa is A or G
  MOD_RES (17)..(18)..(19)..(20): Xaa is A or G or is absent

SEQ ID NO: 62405 - protein, 33 aa, Artificial Sequence
  GFR-binding peptide
  MOD_RES (2)..(2): Xaa is C or S
GXAEVVMDRHKRLVVNNAADYYLISTASLRAPV

SEQ ID NO: 62406 - protein, 37 aa, Artificial Sequence; identical to SEQ ID NO: 3044
  GFR-binding peptide
  MOD_RES (2)..(33)..(34): Xaa is C or S

SEQ ID NO: 62407 - protein, 34 aa, Artificial Sequence; identical to SEQ ID NO: 24041
  GFR-binding peptide
  MOD_RES (1)..(32)..(33): Xaa is C or S

SEQ ID NO: 62408 - protein, 44 aa, Artificial Sequence; identical to SEQ ID NO: 32079
  GFR-binding peptide
  MOD_RES (2)..(4)..(38)..(39): Xaa is C or S
  MOD_RES (16)..(17)..(18)..(19)..(20): Xaa is A or G
  MOD_RES (21)..(22)..(23)..(24): Xaa is A or G or is absent

SEQ ID NO: 62409 - protein, 35 aa, Artificial Sequence; identical to SEQ ID NO: 3047
  GFR-binding peptide
  MOD_RES (35)..(35): Xaa is C or S
  MOD_RES (13)..(14)..(15)..(16)..(17): Xaa is A or G
  MOD_RES (18)..(19)..(20)..(21): Xaa is A or G or is absent

SEQ ID NO: 62410 - protein, 33 aa, Artificial Sequence; identical to SEQ ID NO: 24045
  GFR-binding peptide
  MOD_RES (33)..(33): Xaa is C or S
  MOD_RES (11)..(12)..(13)..(14)..(15): Xaa is A or G
  MOD_RES (16)..(17)..(18)..(19): Xaa is A or G or is absent

SEQ ID NO: 62411 - protein, 32 aa, Artificial Sequence; identical to SEQ ID NO: 57023
  GFR-binding peptide
  MOD_RES (1)..(32): Xaa is C or S

SEQ ID NO: 62412 - protein, 38 aa, Artificial Sequence
  GFR-binding peptide
  MOD_RES (34)..(35): Xaa is C or S
  MOD_RES (12)..(13)..(14)..(15)..(16): Xaa is A or G
  MOD_RES (17)..(18)..(19)..(20): Xaa is A or G or is absent
SEVTMNPIKGYXXXXXXXXXFYLINIPSMKEPVXXPEP

SEQ ID NO: 62413 - protein, 37 aa, Artificial Sequence; identical to SEQ ID NO: 24048
  GFR-binding peptide
  MOD_RES (2)..(36)..(37): Xaa is C or S
  MOD_RES (14)..(15)..(16)..(17)..(18): Xaa is A or G
  MOD_RES (19)..(20)..(21)..(22): Xaa is A or G or is absent

SEQ ID NO: 62414 - protein, 38 aa, Artificial Sequence; identical to SEQ ID NO: 3054
  GFR-binding peptide
  MOD_RES (1)..(3)..(36)..(37): Xaa is C or S
  MOD_RES (14)..(15)..(16)..(17)..(18): Xaa is A or G
  MOD_RES (19)..(20)..(21)..(22): Xaa is A or G or is absent

SEQ ID NO: 62415 - protein, 35 aa, Artificial Sequence; identical to SEQ ID NO: 24056
  GFR-binding peptide
  MOD_RES (32)..(33): Xaa is C or S

SEQ ID NO: 62416 - protein, 33 aa, Artificial Sequence; identical to SEQ ID NO: 3055
  GFR-binding peptide
  MOD_RES (32)..(33): Xaa is C or S

SEQ ID NO: 62417 - protein, 37 aa, Artificial Sequence
  GFR-binding peptide
  MOD_RES (1)..(3)..(35)..(36): Xaa is C or S
XAXSEVTMNYHYKLVVNKNEDKYLISIPSMKEPVXXP

SEQ ID NO: 62418 - protein, 33 aa, Artificial Sequence
  GFR-binding peptide
  MOD_RES (1)..(32)..(33): Xaa is C or S
XEEVIMRHKRLLLVRGNDYYLMSTASTKVPAXX

SEQ ID NO: 62419 - protein, 40 aa, Artificial Sequence; identical to SEQ ID NO: 3058
  GFR-binding peptide
  MOD_RES (2)..(4)..(38)..(39): Xaa is C or S
  MOD_RES (16)..(17)..(18)..(19)..(20): Xaa is A or G
  MOD_RES (21)..(22)..(23)..(24): Xaa is A or G or is absent

SEQ ID NO: 62420 - protein, 31 aa, Artificial Sequence; identical to SEQ ID NO: 32102
  GFR-binding peptide
  MOD_RES (31)..(31): Xaa is C or S

SEQ ID NO: 62421 - protein, 36 aa, Artificial Sequence
  GFR-binding peptide
  MOD_RES (2)..(4)..(36): Xaa is C or S
RXAXSEVTMNEYKFKVVNKNEDLYLISIPEMKEPVX

SEQ ID NO: 62422 - protein, 36 aa, Artificial Sequence; identical to SEQ ID NO: 32105
  GFR-binding peptide
  MOD_RES (1)..(35): Xaa is C or S
  MOD_RES (13)..(14)..(15)..(16)..(17): Xaa is A or G
  MOD_RES (18)..(19)..(20)..(21): Xaa is A or G or is absent

SEQ ID NO: 62423 - protein, 32 aa, Artificial Sequence; identical to SEQ ID NO: 3061
  GFR-binding peptide
  MOD_RES (11)..(12)..(13)..(14)..(15): Xaa is A or G
  MOD_RES (16)..(17)..(18)..(19): Xaa is A or G or is absent

SEQ ID NO: 62424 - protein, 34 aa, Artificial Sequence; identical to SEQ ID NO: 24067
  GFR-binding peptide
  MOD_RES (34)..(34): Xaa is C or S
  MOD_RES (12)..(13)..(14)..(15)..(16): Xaa is A or G
  MOD_RES (17)..(18)..(19)..(20): Xaa is A or G or is absent

SEQ ID NO: 62425 - protein, 35 aa, Artificial Sequence; identical to SEQ ID NO: 3064
  GFR-binding peptide
  MOD_RES (32)..(33): Xaa is C or S

SEQ ID NO: 62426 - protein, 35 aa, Artificial Sequence; identical to SEQ ID NO: 57048
  GFR-binding peptide
  MOD_RES (2)..(4)..(35): Xaa is C or S

SEQ ID NO: 62427 - protein, 41 aa, Artificial Sequence
  GFR-binding peptide
  MOD_RES (1)..(35)..(36): Xaa is C or S
  MOD_RES (13)..(14)..(15)..(16)..(17): Xaa is A or G
  MOD_RES (18)..(19)..(20)..(21): Xaa is A or G or is absent
XSEVVMDRHKRLXXXXXXXXXYYLISTASLRTPVXXTPPTS

SEQ ID NO: 62428 - protein, 40 aa, Artificial Sequence; identical to SEQ ID NO: 3065
  GFR-binding peptide
  MOD_RES (2)..(34)..(35): Xaa is C or S

SEQ ID NO: 62429 - protein, 41 aa, Artificial Sequence; identical to SEQ ID NO: 57050
  GFR-binding peptide
  MOD_RES (1)..(3)..(37)..(38): Xaa is C or S
  MOD_RES (15)..(16)..(17)..(18)..(19): Xaa is A or G
  MOD_RES (20)..(21)..(22)..(23): Xaa is A or G or is absent

SEQ ID NO: 62430 - protein, 42 aa, Artificial Sequence; identical to SEQ ID NO: 24072
  GFR-binding peptide
  MOD_RES (2)..(4)..(36)..(37): Xaa is C or S

SEQ ID NO: 62431 - protein, 36 aa, Artificial Sequence; identical to SEQ ID NO: 3069
  GFR-binding peptide
  MOD_RES (1)..(3): Xaa is C or S
  MOD_RES (15)..(16)..(17)..(18)..(19): Xaa is A or G
  MOD_RES (20)..(21)..(22)..(23): Xaa is A or G or is absent

SEQ ID NO: 62432 - protein, 37 aa, Artificial Sequence
  GFR-binding peptide
  MOD_RES (1)..(35)..(36): Xaa is C or S
  MOD_RES (13)..(14)..(15)..(16)..(17): Xaa is A or G
  MOD_RES (18)..(19)..(20)..(21): Xaa is A or G or is absent
XSEVVMDEYKFKXXXXXXXXXLYLISIPELRTPVXXT

SEQ ID NO: 62433 - protein, 36 aa, Artificial Sequence; identical to SEQ ID NO: 3070
  GFR-binding peptide
  MOD_RES (2)..(34)..(35): Xaa is C or S

SEQ ID NO: 62434 - protein, 36 aa, Artificial Sequence
  GFR-binding peptide
  MOD_RES (2)..(4)..(35)..(36): Xaa is C or S
LXGXEEVIMEYKFKLLVRGNDLYLMSIPETKVPAXX

SEQ ID NO: 62435 - protein, 39 aa, Artificial Sequence; identical to SEQ ID NO: 3072
  GFR-binding peptide
  MOD_RES (1)..(33)..(34): Xaa is C or S

SEQ ID NO: 62436 - protein, 35 aa, Artificial Sequence; identical to SEQ ID NO: 3073
  GFR-binding peptide
  MOD_RES (2)..(2): Xaa is C or S
  MOD_RES (14)..(15)..(16)..(17)..(18): Xaa is A or G
  MOD_RES (19)..(20)..(21)..(22): Xaa is A or G or is absent

SEQ ID NO: 62437 - protein, 31 aa, Artificial Sequence; identical to SEQ ID NO: 3074
  GFR-binding peptide
  MOD_RES (31)..(31): Xaa is C or S

SEQ ID NO: 62438 - protein, 40 aa, Artificial Sequence; identical to SEQ ID NO: 32119
  GFR-binding peptide
  MOD_RES (1)..(35)..(36): Xaa is C or S
  MOD_RES (13)..(14)..(15)..(16)..(17): Xaa is A or G
  MOD_RES (18)..(19)..(20)..(21): Xaa is A or G or is absent

SEQ ID NO: 62439 - protein, 37 aa, Artificial Sequence; identical to SEQ ID NO: 10532
  GFR-binding peptide
  MOD_RES (34)..(35): Xaa is C or S
  MOD_RES (12)..(13)..(14)..(15)..(16): Xaa is A or G
  MOD_RES (17)..(18)..(19)..(20): Xaa is A or G or is absent

SEQ ID NO: 62440 - protein, 35 aa, Artificial Sequence
  GFR-binding peptide
  MOD_RES (2)..(34)..(35): Xaa is C or S
GXSEVVMDYHYKLVVNNASDKYLISIPSLRTPVXX

SEQ ID NO: 62441 - protein, 40 aa, Artificial Sequence; identical to SEQ ID NO: 3076
  GFR-binding peptide
  MOD_RES (1)..(3)..(36)..(37): Xaa is C or S
  MOD_RES (14)..(15)..(16)..(17)..(18): Xaa is A or G
  MOD_RES (19)..(20)..(21)..(22): Xaa is A or G or is absent

SEQ ID NO: 62442 - protein, 35 aa, Artificial Sequence
  GFR-binding peptide
  MOD_RES (31)..(32): Xaa is C or S
EEVIMYHYKLLLVRGNDKYLMSIPSTKVPAXXTSP

SEQ ID NO: 62443 - protein, 38 aa, Artificial Sequence; identical to SEQ ID NO: 32128
  GFR-binding peptide
  MOD_RES (2)..(4)..(37)..(38): Xaa is C or S

SEQ ID NO: 62444 - protein, 39 aa, Artificial Sequence; identical to SEQ ID NO: 24083
  GFR-binding peptide
  MOD_RES (33)..(34): Xaa is C or S
  MOD_RES (11)..(12)..(13)..(14)..(15): Xaa is A or G
  MOD_RES (16)..(17)..(18)..(19): Xaa is A or G or is absent

SEQ ID NO: 62445 - protein, 37 aa, Artificial Sequence
  GFR-binding peptide
  MOD_RES (2)..(4)..(37): Xaa is C or S
  MOD_RES (15)..(16)..(17)..(18)..(19): Xaa is A or G
  MOD_RES (20)..(21)..(22)..(23): Xaa is A or G or is absent
SXKXSRVIMPIKGYXXXXXXXXXFYLINIPSLAQPVX

SEQ ID NO: 62446 - protein, 40 aa, Artificial Sequence; identical to SEQ ID NO: 3083
  GFR-binding peptide
  MOD_RES (2)..(4)..(38)..(39): Xaa is C or S
  MOD_RES (16)..(17)..(18)..(19)..(20): Xaa is A or G
  MOD_RES (21)..(22)..(23)..(24): Xaa is A or G or is absent

SEQ ID NO: 62447 - protein, 38 aa, Artificial Sequence; identical to SEQ ID NO: 24088
  GFR-binding peptide
  MOD_RES (34)..(35): Xaa is C or S
  MOD_RES (12)..(13)..(14)..(15)..(16): Xaa is A or G
  MOD_RES (17)..(18)..(19)..(20): Xaa is A or G or is absent

SEQ ID NO: 62448 - protein, 38 aa, Artificial Sequence; identical to SEQ ID NO: 3088
  GFR-binding peptide
  MOD_RES (1)..(32)..(33): Xaa is C or S

SEQ ID NO: 62449 - protein, 32 aa, Artificial Sequence
  GFR-binding peptide
  MOD_RES (31)..(32): Xaa is C or S
EEVIMRHKRLLLVRGNDYYLMSTASTKVPAXX

SEQ ID NO: 62450 - protein, 38 aa, Artificial Sequence; identical to SEQ ID NO: 3090
  GFR-binding peptide
  MOD_RES (2)..(4)..(38): Xaa is C or S
  MOD_RES (16)..(17)..(18)..(19)..(20): Xaa is A or G
  MOD_RES (21)..(22)..(23)..(24): Xaa is A or G or is absent

SEQ ID NO: 62451 - protein, 35 aa, Artificial Sequence
  GFR-binding peptide
  MOD_RES (31)..(32): Xaa is C or S
EVTMNPIKGYVVNKNEDFYLINIPSMKEPVXXPEP

SEQ ID NO: 62452 - protein, 36 aa, Artificial Sequence
  GFR-binding peptide
  MOD_RES (2)..(4)..(36): Xaa is C or S
SXGXRDVVMGRHKRLIIQQKDNYYLMSTASMKTPTX

SEQ ID NO: 62453 - protein, 35 aa, Artificial Sequence; identical to SEQ ID NO: 32146
  GFR-binding peptide
  MOD_RES (33)..(34): Xaa is C or S
  MOD_RES (11)..(12)..(13)..(14)..(15): Xaa is A or G
  MOD_RES (16)..(17)..(18)..(19): Xaa is A or G or is absent

SEQ ID NO: 62454 - protein, 32 aa, Artificial Sequence; identical to SEQ ID NO: 3097
  GFR-binding peptide
  MOD_RES (11)..(12)..(13)..(14)..(15): Xaa is A or G
  MOD_RES (16)..(17)..(18)..(19): Xaa is A or G or is absent

SEQ ID NO: 62455 - protein, 40 aa, Artificial Sequence; identical to SEQ ID NO: 24097
  GFR-binding peptide
  MOD_RES (1)..(34)..(35): Xaa is C or S

SEQ ID NO: 62456 - protein, 39 aa, Artificial Sequence; identical to SEQ ID NO: 3098
  GFR-binding peptide
  MOD_RES (2)..(35)..(36): Xaa is C or S
  MOD_RES (13)..(14)..(15)..(16)..(17): Xaa is A or G
  MOD_RES (18)..(19)..(20)..(21): Xaa is A or G or is absent

SEQ ID NO: 62457 - protein, 42 aa, Artificial Sequence; identical to SEQ ID NO: 57078
  GFR-binding peptide
  MOD_RES (2)..(4)..(37)..(38): Xaa is C or S
  MOD_RES (15)..(16)..(17)..(18)..(19): Xaa is A or G
  MOD_RES (20)..(21)..(22)..(23): Xaa is A or G or is absent

SEQ ID NO: 62458 - protein, 39 aa, Artificial Sequence; identical to SEQ ID NO: 24099
  GFR-binding peptide
  MOD_RES (2)..(4)..(36)..(37): Xaa is C or S

SEQ ID NO: 62459 - protein, 38 aa, Artificial Sequence; identical to SEQ ID NO: 24100
  GFR-binding peptide
  MOD_RES (2)..(37)..(38): Xaa is C or S
  MOD_RES (15)..(16)..(17)..(18)..(19): Xaa is A or G
  MOD_RES (20)..(21)..(22)..(23): Xaa is A or G or is absent

SEQ ID NO: 62460 - protein, 37 aa, Artificial Sequence; identical to SEQ ID NO: 3101
  GFR-binding peptide
  MOD_RES (1)..(3)..(35)..(36): Xaa is C or S

SEQ ID NO: 62461 - protein, 38 aa, Artificial Sequence; identical to SEQ ID NO: 24102
  GFR-binding peptide
  MOD_RES (2)..(35)..(36): Xaa is C or S
  MOD_RES (13)..(14)..(15)..(16)..(17): Xaa is A or G
  MOD_RES (18)..(19)..(20)..(21): Xaa is A or G or is absent

SEQ ID NO: 62462 - protein, 39 aa, Artificial Sequence
  GFR-binding peptide
  MOD_RES (1)..(34)..(35): Xaa is C or S
  MOD_RES (12)..(13)..(14)..(15)..(16): Xaa is A or G
  MOD_RES (17)..(18)..(19)..(20): Xaa is A or G or is absent
XSRVIMPIKGYXXXXXXXXXFYLINIPSLAQPVXXPAAS

SEQ ID NO: 62463 - protein, 41 aa, Artificial Sequence; identical to SEQ ID NO: 32154
  GFR-binding peptide
  MOD_RES (1)..(35)..(36): Xaa is C or S
  MOD_RES (13)..(14)..(15)..(16)..(17): Xaa is A or G
  MOD_RES (18)..(19)..(20)..(21): Xaa is A or G or is absent

SEQ ID NO: 62464 - protein, 42 aa, Artificial Sequence; identical to SEQ ID NO: 32155
  GFR-binding peptide
  MOD_RES (1)..(3)..(37)..(38): Xaa is C or S
  MOD_RES (15)..(16)..(17)..(18)..(19): Xaa is A or G
  MOD_RES (20)..(21)..(22)..(23): Xaa is A or G or is absent

SEQ ID NO: 62465 - protein, 40 aa, Artificial Sequence; identical to SEQ ID NO: 3109
  GFR-binding peptide
  MOD_RES (1)..(34)..(35): Xaa is C or S
  MOD_RES (12)..(13)..(14)..(15)..(16): Xaa is A or G
  MOD_RES (17)..(18)..(19)..(20): Xaa is A or G or is absent

SEQ ID NO: 62466 - protein, 35 aa, Artificial Sequence; identical to SEQ ID NO: 3112
  GFR-binding peptide
  MOD_RES (1)..(3): Xaa is C or S
  MOD_RES (14)..(15)..(16)..(17)..(18): Xaa is A or G
  MOD_RES (19)..(20)..(21)..(22): Xaa is A or G or is absent

SEQ ID NO: 62467 - protein, 40 aa, Artificial Sequence
  GFR-binding peptide
  MOD_RES (2)..(35)..(36): Xaa is C or S
  MOD_RES (13)..(14)..(15)..(16)..(17): Xaa is A or G
  MOD_RES (18)..(19)..(20)..(21): Xaa is A or G or is absent
KXSKVVMPIKGYXXXXXXXXXFYLINIPSLDQPVXXPSAS

SEQ ID NO: 62468 - protein, 30 aa, Artificial Sequence; identical to SEQ ID NO: 3113
  GFR-binding peptide

SEQ ID NO: 62469 - protein, 41 aa, Artificial Sequence; identical to SEQ ID NO: 3116
  GFR-binding peptide
  MOD_RES (2)..(36)..(37): Xaa is C or S
  MOD_RES (14)..(15)..(16)..(17)..(18): Xaa is A or G
  MOD_RES (19)..(20)..(21)..(22): Xaa is A or G or is absent

SEQ ID NO: 62470 - protein, 34 aa, Artificial Sequence; identical to SEQ ID NO: 3119
  GFR-binding peptide
  MOD_RES (31)..(32): Xaa is C or S

SEQ ID NO: 62471 - protein, 37 aa, Artificial Sequence; identical to SEQ ID NO: 24116
  GFR-binding peptide
  MOD_RES (1)..(33)..(34): Xaa is C or S

SEQ ID NO: 62472 - protein, 33 aa, Artificial Sequence; identical to SEQ ID NO: 32164
  GFR-binding peptide
  MOD_RES (1)..(1): Xaa is C or S

SEQ ID NO: 62473 - protein, 34 aa, Artificial Sequence; identical to SEQ ID NO: 3122
  GFR-binding peptide
  MOD_RES (32)..(32): Xaa is C or S

SEQ ID NO: 62474 - protein, 37 aa, Artificial Sequence; identical to SEQ ID NO: 3124
  GFR-binding peptide
  MOD_RES (2)..(4)..(37): Xaa is C or S
  MOD_RES (15)..(16)..(17)..(18)..(19): Xaa is A or G
  MOD_RES (20)..(21)..(22)..(23): Xaa is A or G or is absent

SEQ ID NO: 62475 - protein, 37 aa, Artificial Sequence; identical to SEQ ID NO: 24121
  GFR-binding peptide
  MOD_RES (2)..(4)..(36)..(37): Xaa is C or S

SEQ ID NO: 62476 - protein, 43 aa, Artificial Sequence; identical to SEQ ID NO: 24123
  GFR-binding peptide
  MOD_RES (1)..(3)..(37)..(38): Xaa is C or S
  MOD_RES (15)..(16)..(17)..(18)..(19): Xaa is A or G
  MOD_RES (20)..(21)..(22)..(23): Xaa is A or G or is absent

SEQ ID NO: 62477 - protein, 41 aa, Artificial Sequence; identical to SEQ ID NO: 3127
  GFR-binding peptide
  MOD_RES (2)..(36): Xaa is C or S
  MOD_RES (14)..(15)..(16)..(17)..(18): Xaa is A or G
  MOD_RES (19)..(20)..(21)..(22): Xaa is A or G or is absent

SEQ ID NO: 62478 - protein, 40 aa, Artificial Sequence; identical to SEQ ID NO: 3130
  GFR-binding peptide
  MOD_RES (1)..(3)..(36)..(37): Xaa is C or S
  MOD_RES (14)..(15)..(16)..(17)..(18): Xaa is A or G
  MOD_RES (19)..(20)..(21)..(22): Xaa is A or G or is absent

SEQ ID NO: 62479 - protein, 37 aa, Artificial Sequence; identical to SEQ ID NO: 3131
  GFR-binding peptide
  MOD_RES (2)..(34)..(35): Xaa is C or S

SEQ ID NO: 62480 - protein, 37 aa, Artificial Sequence
  GFR-binding peptide
  MOD_RES (33)..(34): Xaa is C or S
  MOD_RES (11)..(12)..(13)..(14)..(15): Xaa is A or G
  MOD_RES (16)..(17)..(18)..(19): Xaa is A or G or is absent
SRVIMPIKGYXXXXXXXXXFYLINIPSLAQPVXXPAA

SEQ ID NO: 62481 - protein, 34 aa, Artificial Sequence; identical to SEQ ID NO: 32170
  GFR-binding peptide
  MOD_RES (2)..(34): Xaa is C or S

SEQ ID NO: 62482 - protein, 38 aa, Artificial Sequence; identical to SEQ ID NO: 3140
  GFR-binding peptide
  MOD_RES (2)..(33)..(34): Xaa is C or S

SEQ ID NO: 62483 - protein, 35 aa, Artificial Sequence; identical to SEQ ID NO: 32173
  GFR-binding peptide
  MOD_RES (2)..(34)..(35): Xaa is C or S

SEQ ID NO: 62484 - protein, 34 aa, Artificial Sequence; identical to SEQ ID NO: 24138
  GFR-binding peptide
  MOD_RES (1)..(3): Xaa is C or S

SEQ ID NO: 62485 - protein, 37 aa, Artificial Sequence; identical to SEQ ID NO: 32176
  GFR-binding peptide
  MOD_RES (1)..(33)..(34): Xaa is C or S

SEQ ID NO: 62486 - protein, 33 aa, Artificial Sequence
  GFR-binding peptide
  MOD_RES (33)..(33): Xaa is C or S
  MOD_RES (11)..(12)..(13)..(14)..(15): Xaa is A or G
  MOD_RES (16)..(17)..(18)..(19): Xaa is A or G or is absent
EEVIMRHKRLXXXXXXXXXYYLMSTASTKVPAX

SEQ ID NO: 62487 - protein, 37 aa, Artificial Sequence
  GFR-binding peptide
  MOD_RES (1)..(3)..(35)..(36): Xaa is C or S
XGXESVAMGRHKRLYTVVGKDYYLISTASLKTPVXXA

SEQ ID NO: 62488 - protein, 33 aa, Artificial Sequence; identical to SEQ ID NO: 3148
  GFR-binding peptide
  MOD_RES (1)..(3): Xaa is C or S

SEQ ID NO: 62489 - protein, 35 aa, Artificial Sequence
  GFR-binding peptide
  MOD_RES (2)..(34)..(35): Xaa is C or S
AXSEVTMNRHKRLVVNKNEDYYLISTASMKEPVXX

SEQ ID NO: 62490 - protein, 42 aa, Artificial Sequence
  GFR-binding peptide
  MOD_RES (1)..(3)..(36)..(37): Xaa is C or S
  MOD_RES (14)..(15)..(16)..(17)..(18): Xaa is A or G
  MOD_RES (19)..(20)..(21)..(22): Xaa is A or G or is absent
XGXEEVIMYHYKLXXXXXXXXXKYLMSIPSTKVPAXXTSPVR

SEQ ID NO: 62491 - protein, 31 aa, Artificial Sequence; identical to SEQ ID NO: 3149
  GFR-binding peptide
  MOD_RES (31)..(31): Xaa is C or S

SEQ ID NO: 62492 - protein, 35 aa, Artificial Sequence
  GFR-binding peptide
  MOD_RES (2)..(4): Xaa is C or S
RXGXSEVVMDYHYKLVVNNASDKYLISIPSLRTPV

SEQ ID NO: 62493 - protein, 33 aa, Artificial Sequence; identical to SEQ ID NO: 24144
  GFR-binding peptide
  MOD_RES (2)..(2): Xaa is C or S

SEQ ID NO: 62494 - protein, 36 aa, Artificial Sequence
  GFR-binding peptide
  MOD_RES (33)..(34): Xaa is C or S
  MOD_RES (11)..(12)..(13)..(14)..(15): Xaa is A or G
  MOD_RES (16)..(17)..(18)..(19): Xaa is A or G or is absent
EVTMNRYKKLXXXXXXXXXFYLISIANMKEPVXXPE

SEQ ID NO: 62495 - protein, 38 aa, Artificial Sequence; identical to SEQ ID NO: 3153
  GFR-binding peptide
  MOD_RES (2)..(34)..(35): Xaa is C or S

SEQ ID NO: 62496 - protein, 40 aa, Artificial Sequence; identical to SEQ ID NO: 24149
  GFR-binding peptide
  MOD_RES (2)..(36)..(37): Xaa is C or S
  MOD_RES (14)..(15)..(16)..(17)..(18): Xaa is A or G
  MOD_RES (19)..(20)..(21)..(22): Xaa is A or G or is absent

SEQ ID NO: 62497 - protein, 41 aa, Artificial Sequence; identical to SEQ ID NO: 32196
  GFR-binding peptide
  MOD_RES (1)..(35)..(36): Xaa is C or S
  MOD_RES (13)..(14)..(15)..(16)..(17): Xaa is A or G
  MOD_RES (18)..(19)..(20)..(21): Xaa is A or G or is absent

SEQ ID NO: 62498 - protein, 34 aa, Artificial Sequence; identical to SEQ ID NO: 3165
  GFR-binding peptide
  MOD_RES (1)..(3)..(34): Xaa is C or S

SEQ ID NO: 62499 - protein, 37 aa, Artificial Sequence; identical to SEQ ID NO: 3167
  GFR-binding peptide
  MOD_RES (2)..(34)..(35): Xaa is C or S

SEQ ID NO: 62500 - protein, 38 aa, Artificial Sequence; identical to SEQ ID NO: 24160
  GFR-binding peptide
  MOD_RES (2)..(36)..(37): Xaa is C or S
  MOD_RES (14)..(15)..(16)..(17)..(18): Xaa is A or G
  MOD_RES (19)..(20)..(21)..(22): Xaa is A or G or is absent

SEQ ID NO: 62501 - protein, 35 aa, Artificial Sequence
  GFR-binding peptide
  MOD_RES (31)..(32): Xaa is C or S
EVVMDYHYKLVVNNASDKYLISIPSLRTPVXXTPP

SEQ ID NO: 62502 - protein, 36 aa, Artificial Sequence; identical to SEQ ID NO: 32205
  GFR-binding peptide
  MOD_RES (1)..(32)..(33): Xaa is C or S

SEQ ID NO: 62503 - protein, 36 aa, Artificial Sequence
  GFR-binding peptide
  MOD_RES (32)..(33): Xaa is C or S
ESVAMGRHKRLYTVVGKDYYLISTASLKTPVXXAKS

SEQ ID NO: 62504 - protein, 35 aa, Artificial Sequence; identical to SEQ ID NO: 32206
  GFR-binding peptide
  MOD_RES (1)..(33)..(34): Xaa is C or S

SEQ ID NO: 62505 - protein, 33 aa, Artificial Sequence
  GFR-binding peptide
  MOD_RES (1)..(32)..(33): Xaa is C or S
XEEVIMYHYKLLLVRGNDKYLMSIPSTKVPAXX

SEQ ID NO: 62506 - protein, 31 aa, Artificial Sequence; identical to SEQ ID NO: 32208
  GFR-binding peptide
  MOD_RES (31)..(31): Xaa is C or S

SEQ ID NO: 62507 - protein, 38 aa, Artificial Sequence; identical to SEQ ID NO: 3168
  GFR-binding peptide
  MOD_RES (33)..(34): Xaa is C or S
  MOD_RES (11)..(12)..(13)..(14)..(15): Xaa is A or G
  MOD_RES (16)..(17)..(18)..(19): Xaa is A or G or is absent

SEQ ID NO: 62508 - protein, 33 aa, Artificial Sequence; identical to SEQ ID NO: 32211
  GFR-binding peptide
  MOD_RES (1)..(33): Xaa is C or S

SEQ ID NO: 62509 - protein, 37 aa, Artificial Sequence; identical to SEQ ID NO: 24169
  GFR-binding peptide
  MOD_RES (2)..(33)..(34): Xaa is C or S

SEQ ID NO: 62510 - protein, 37 aa, Artificial Sequence
  GFR-binding peptide
  MOD_RES (2)..(36)..(37): Xaa is C or S
  MOD_RES (14)..(15)..(16)..(17)..(18): Xaa is A or G
  MOD_RES (19)..(20)..(21)..(22): Xaa is A or G or is absent
GXSEVVMDYHYKLXXXXXXXXXKYLISIPSLRTPVXX

SEQ ID NO: 62511 - protein, 34 aa, Artificial Sequence; identical to SEQ ID NO: 32212
  GFR-binding peptide
  MOD_RES (34)..(34): Xaa is C or S
  MOD_RES (12)..(13)..(14)..(15)..(16): Xaa is A or G
  MOD_RES (17)..(18)..(19)..(20): Xaa is A or G or is absent

SEQ ID NO: 62512 - protein, 38 aa, Artificial Sequence; identical to SEQ ID NO: 3176
  GFR-binding peptide
  MOD_RES (2)..(4)..(35)..(36): Xaa is C or S

SEQ ID NO: 62513 - protein, 34 aa, Artificial Sequence; identical to SEQ ID NO: 24171
  GFR-binding peptide
  MOD_RES (1)..(33)..(34): Xaa is C or S

SEQ ID NO: 62514 - protein, 34 aa, Artificial Sequence; identical to SEQ ID NO: 3178
  GFR-binding peptide
  MOD_RES (1)..(34): Xaa is C or S
  MOD_RES (12)..(13)..(14)..(15)..(16): Xaa is A or G
  MOD_RES (17)..(18)..(19)..(20): Xaa is A or G or is absent

SEQ ID NO: 62515 - protein, 32 aa, Artificial Sequence
  GFR-binding peptide
  MOD_RES (32)..(32): Xaa is C or S
AEVVMDRHKRLVVNNAADYYLISTASLRAPVX

SEQ ID NO: 62516 - protein, 34 aa, Artificial Sequence; identical to SEQ ID NO: 3180
  GFR-binding peptide
  MOD_RES (2)..(34): Xaa is C or S

SEQ ID NO: 62517 - protein, 35 aa, Artificial Sequence
  GFR-binding peptide
  MOD_RES (1)..(35): Xaa is C or S
  MOD_RES (13)..(14)..(15)..(16)..(17): Xaa is A or G
  MOD_RES (18)..(19)..(20)..(21): Xaa is A or G or is absent
XSEVTMNRHKRLXXXXXXXXXYYLISTASMKEPVX

SEQ ID NO: 62518 - protein, 35 aa, Artificial Sequence; identical to SEQ ID NO: 32220
  GFR-binding peptide
  MOD_RES (2)..(4): Xaa is C or S

SEQ ID NO: 62519 - protein, 34 aa, Artificial Sequence; identical to SEQ ID NO: 24177
  GFR-binding peptide
  MOD_RES (2)..(34): Xaa is C or S

SEQ ID NO: 62520 - protein, 34 aa, Artificial Sequence; identical to SEQ ID NO: 3184
  GFR-binding peptide
  MOD_RES (1)..(1): Xaa is C or S
  MOD_RES (13)..(14)..(15)..(16)..(17): Xaa is A or G
  MOD_RES (18)..(19)..(20)..(21): Xaa is A or G or is absent

SEQ ID NO: 62521 - protein, 36 aa, Artificial Sequence; identical to SEQ ID NO: 3187
  GFR-binding peptide
  MOD_RES (2)..(36): Xaa is C or S
  MOD_RES (14)..(15)..(16)..(17)..(18): Xaa is A or G
  MOD_RES (19)..(20)..(21)..(22): Xaa is A or G or is absent

SEQ ID NO: 62522 - protein, 34 aa, Artificial Sequence
  GFR-binding peptide
  MOD_RES (31)..(32): Xaa is C or S
EVVMDRHKRLVVNNASDYYLISTASLRTPVXXTP

SEQ ID NO: 62523 - protein, 36 aa, Artificial Sequence; identical to SEQ ID NO: 3188
  GFR-binding peptide
  MOD_RES (34)..(35): Xaa is C or S
  MOD_RES (12)..(13)..(14)..(15)..(16): Xaa is A or G
  MOD_RES (17)..(18)..(19)..(20): Xaa is A or G or is absent

SEQ ID NO: 62524 - protein, 36 aa, Artificial Sequence; identical to SEQ ID NO: 3189
  GFR-binding peptide
  MOD_RES (1)..(3)..(35)..(36): Xaa is C or S

SEQ ID NO: 62525 - protein, 42 aa, Artificial Sequence; identical to SEQ ID NO: 3190
  GFR-binding peptide
  MOD_RES (2)..(4)..(38)..(39): Xaa is C or S
  MOD_RES (16)..(17)..(18)..(19)..(20): Xaa is A or G
  MOD_RES (21)..(22)..(23)..(24): Xaa is A or G or is absent

SEQ ID NO: 62526 - protein, 38 aa, Artificial Sequence
  GFR-binding peptide
  MOD_RES (34)..(35): Xaa is C or S
  MOD_RES (12)..(13)..(14)..(15)..(16): Xaa is A or G
  MOD_RES (17)..(18)..(19)..(20): Xaa is A or G or is absent
SEVTMNRHKRLXXXXXXXXXYYLISTASMKEPVXXPEP

SEQ ID NO: 62527 - protein, 36 aa, Artificial Sequence
  GFR-binding peptide
  MOD_RES (2)..(36): Xaa is C or S
  MOD_RES (14)..(15)..(16)..(17)..(18): Xaa is A or G
  MOD_RES (19)..(20)..(21)..(22): Xaa is A or G or is absent
GXESVAMGRHKRLXXXXXXXXXYYLISTASLKTPVX

SEQ ID NO: 62528 - protein, 39 aa, Artificial Sequence; identical to SEQ ID NO: 3191
  GFR-binding peptide
  MOD_RES (34)..(34): Xaa is C or S
  MOD_RES (12)..(13)..(14)..(15)..(16): Xaa is A or G
  MOD_RES (17)..(18)..(19)..(20): Xaa is A or G or is absent

SEQ ID NO: 62529 - protein, 38 aa, Artificial Sequence
  GFR-binding peptide
  MOD_RES (2)..(36)..(37): Xaa is C or S
  MOD_RES (14)..(15)..(16)..(17)..(18): Xaa is A or G
  MOD_RES (19)..(20)..(21)..(22): Xaa is A or G or is absent
GXSEVVMDYHYKLXXXXXXXXXKYLISIPSLRTPVXXT

SEQ ID NO: 62530 - protein, 41 aa, Artificial Sequence; identical to SEQ ID NO: 3195
  GFR-binding peptide
  MOD_RES (1)..(3)..(36)..(37): Xaa is C or S
  MOD_RES (14)..(15)..(16)..(17)..(18): Xaa is A or G
  MOD_RES (19)..(20)..(21)..(22): Xaa is A or G or is absent

SEQ ID NO: 62531 - protein, 34 aa, Artificial Sequence; identical to SEQ ID NO: 24185
  GFR-binding peptide
  MOD_RES (1)..(3): Xaa is C or S

SEQ ID NO: 62532 - protein, 37 aa, Artificial Sequence; identical to SEQ ID NO: 3198
  GFR-binding peptide
  MOD_RES (1)..(3)..(35)..(36): Xaa is C or S

SEQ ID NO: 62533 - protein, 34 aa, Artificial Sequence; identical to SEQ ID NO: 24187
  GFR-binding peptide
  MOD_RES (1)..(3): Xaa is C or S

SEQ ID NO: 62534 - protein, 38 aa, Artificial Sequence; identical to SEQ ID NO: 3199
  GFR-binding peptide
  MOD_RES (2)..(37)..(38): Xaa is C or S
  MOD_RES (15)..(16)..(17)..(18)..(19): Xaa is A or G
  MOD_RES (20)..(21)..(22)..(23): Xaa is A or G or is absent

SEQ ID NO: 62535 - protein, 38 aa, Artificial Sequence; identical to SEQ ID NO: 32237
  GFR-binding peptide
  MOD_RES (1)..(35)..(36): Xaa is C or S
  MOD_RES (13)..(14)..(15)..(16)..(17): Xaa is A or G
  MOD_RES (18)..(19)..(20)..(21): Xaa is A or G or is absent

SEQ ID NO: 62536 - protein, 32 aa, Artificial Sequence; identical to SEQ ID NO: 24194
  GFR-binding peptide
  MOD_RES (31)..(32): Xaa is C or S

SEQ ID NO: 62537 - protein, 40 aa, Artificial Sequence; identical to SEQ ID NO: 3205
  GFR-binding peptide
  MOD_RES (2)..(4)..(36)..(37): Xaa is C or S

SEQ ID NO: 62538 - protein, 33 aa, Artificial Sequence; identical to SEQ ID NO: 3206
  GFR-binding peptide
  MOD_RES (2)..(33): Xaa is C or S

SEQ ID NO: 62539 - protein, 38 aa, Artificial Sequence
  GFR-binding peptide
  MOD_RES (1)..(35)..(36): Xaa is C or S
  MOD_RES (13)..(14)..(15)..(16)..(17): Xaa is A or G
  MOD_RES (18)..(19)..(20)..(21): Xaa is A or G or is absent
XRDVVMGYHYKLXXXXXXXXXKYLMSIPSMKTPTXXPG

SEQ ID NO: 62540 - protein, 41 aa, Artificial Sequence; identical to SEQ ID NO: 24204
  GFR-binding peptide
  MOD_RES (2)..(4)..(38)..(39): Xaa is C or S
  MOD_RES (16)..(17)..(18)..(19)..(20): Xaa is A or G
  MOD_RES (21)..(22)..(23)..(24): Xaa is A or G or is absent

SEQ ID NO: 62541 - protein, 37 aa, Artificial Sequence
  GFR-binding peptide
  MOD_RES (32)..(33): Xaa is C or S
ESVAMGRHKRLYTVVGKDYYLISTASLKTPVXXAKSA

SEQ ID NO: 62542 - protein, 31 aa, Artificial Sequence
  GFR-binding peptide
SEVTMNPIKGYVVNKNEDFYLINIPSMKEPV

SEQ ID NO: 62543 - protein, 37 aa, Artificial Sequence
  GFR-binding peptide
  MOD_RES (33)..(34): Xaa is C or S
  MOD_RES (11)..(12)..(13)..(14)..(15): Xaa is A or G
  MOD_RES (16)..(17)..(18)..(19): Xaa is A or G or is absent
SVAMGRHKRLXXXXXXXXXYYLISTASLKTPVXXAKS

SEQ ID NO: 62544 - protein, 36 aa, Artificial Sequence
  GFR-binding peptide
  MOD_RES (1)..(3)..(35)..(36): Xaa is C or S
XGXRDVVMGEYKFKIIQQKDNLYLMSIPEMKTPTXX

SEQ ID NO: 62545 - protein, 43 aa, Artificial Sequence; identical to SEQ ID NO: 3214
  GFR-binding peptide
  MOD_RES (2)..(4)..(37)..(38): Xaa is C or S
  MOD_RES (15)..(16)..(17)..(18)..(19): Xaa is A or G
  MOD_RES (20)..(21)..(22)..(23): Xaa is A or G or is absent

SEQ ID NO: 62546 - protein, 39 aa, Artificial Sequence; identical to SEQ ID NO: 3215
  GFR-binding peptide
  MOD_RES (2)..(34)..(35): Xaa is C or S

SEQ ID NO: 62547 - protein, 36 aa, Artificial Sequence
  GFR-binding peptide
  MOD_RES (1)..(3): Xaa is C or S
  MOD_RES (15)..(16)..(17)..(18)..(19): Xaa is A or G
  MOD_RES (20)..(21)..(22)..(23): Xaa is A or G or is absent
XGXSEVVMDRHKRLXXXXXXXXXYYLISTASLRTPV

SEQ ID NO: 62548 - protein, 39 aa, Artificial Sequence; identical to SEQ ID NO: 10657
  GFR-binding peptide
  MOD_RES (33)..(34): Xaa is C or S
  MOD_RES (11)..(12)..(13)..(14)..(15): Xaa is A or G
  MOD_RES (16)..(17)..(18)..(19): Xaa is A or G or is absent

SEQ ID NO: 62549 - protein, 37 aa, Artificial Sequence; identical to SEQ ID NO: 3221
  GFR-binding peptide
  MOD_RES (2)..(4)..(36)..(37): Xaa is C or S

SEQ ID NO: 62550 - protein, 33 aa, Artificial Sequence
  GFR-binding peptide
  MOD_RES (1)..(33): Xaa is C or S
XSEVTMNRYKKLVVNKNEDFYLISIANMKEPVX

SEQ ID NO: 62551 - protein, 39 aa, Artificial Sequence; identical to SEQ ID NO: 3225
  GFR-binding peptide
  MOD_RES (2)..(35)..(36): Xaa is C or S
  MOD_RES (13)..(14)..(15)..(16)..(17): Xaa is A or G
  MOD_RES (18)..(19)..(20)..(21): Xaa is A or G or is absent

SEQ ID NO: 62552 - protein, 35 aa, Artificial Sequence; identical to SEQ ID NO: 3226
  GFR-binding peptide
  MOD_RES (2)..(2): Xaa is C or S
  MOD_RES (14)..(15)..(16)..(17)..(18): Xaa is A or G
  MOD_RES (19)..(20)..(21)..(22): Xaa is A or G or is absent

SEQ ID NO: 62553 - protein, 34 aa, Artificial Sequence; identical to SEQ ID NO: 24221
  GFR-binding peptide
  MOD_RES (1)..(34): Xaa is C or S

SEQ ID NO: 62554 - protein, 41 aa, Artificial Sequence; identical to SEQ ID NO: 3227
  GFR-binding peptide
  MOD_RES (2)..(4)..(35)..(36): Xaa is C or S

SEQ ID NO: 62555 - protein, 34 aa, Artificial Sequence
  GFR-binding peptide
  MOD_RES (1)..(33)..(34): Xaa is C or S
XSEVTMNRYKKLVVNKNEDFYLISIANMKEPVXX

SEQ ID NO: 62556 - protein, 36 aa, Artificial Sequence; identical to SEQ ID NO: 3228
  GFR-binding peptide
  MOD_RES (2)..(35)..(36): Xaa is C or S

SEQ ID NO: 62557 - protein, 36 aa, Artificial Sequence
  GFR-binding peptide
  MOD_RES (33)..(34): Xaa is C or S
  MOD_RES (11)..(12)..(13)..(14)..(15): Xaa is A or G
  MOD_RES (16)..(17)..(18)..(19): Xaa is A or G or is absent
SRVIMPIKGYXXXXXXXXXFYLINIPSLAQPVXXPA

SEQ ID NO: 62558 - protein, 39 aa, Artificial Sequence; identical to SEQ ID NO: 3232
  GFR-binding peptide
  MOD_RES (1)..(33)..(34): Xaa is C or S

SEQ ID NO: 62559 - protein, 34 aa, Artificial Sequence; identical to SEQ ID NO: 3233
  GFR-binding peptide
  MOD_RES (33)..(34): Xaa is C or S
  MOD_RES (11)..(12)..(13)..(14)..(15): Xaa is A or G
  MOD_RES (16)..(17)..(18)..(19): Xaa is A or G or is absent

SEQ ID NO: 62560 - protein, 39 aa, Artificial Sequence; identical to SEQ ID NO: 3235
  GFR-binding peptide
  MOD_RES (1)..(3)..(36)..(37): Xaa is C or S
  MOD_RES (14)..(15)..(16)..(17)..(18): Xaa is A or G
  MOD_RES (19)..(20)..(21)..(22): Xaa is A or G or is absent

SEQ ID NO: 62561 - protein, 39 aa, Artificial Sequence; identical to SEQ ID NO: 3236
  GFR-binding peptide
  MOD_RES (2)..(4)..(38): Xaa is C or S
  MOD_RES (16)..(17)..(18)..(19)..(20): Xaa is A or G
  MOD_RES (21)..(22)..(23)..(24): Xaa is A or G or is absent

SEQ ID NO: 62562 - protein, 33 aa, Artificial Sequence; identical to SEQ ID NO: 3237
  GFR-binding peptide
  MOD_RES (32)..(33): Xaa is C or S

SEQ ID NO: 62563 - protein, 36 aa, Artificial Sequence
  GFR-binding peptide
  MOD_RES (1)..(3)..(35)..(36): Xaa is C or S
XGXESVAMGRHKRLYTVVGKDYYLISTASLKTPVXX

SEQ ID NO: 62564 - protein, 31 aa, Artificial Sequence; identical to SEQ ID NO: 3242
  GFR-binding peptide
  MOD_RES (1)..(1): Xaa is C or S

SEQ ID NO: 62565 - protein, 42 aa, Artificial Sequence
  GFR-binding peptide
  MOD_RES (2)..(36)..(37): Xaa is C or S
  MOD_RES (14)..(15)..(16)..(17)..(18): Xaa is A or G
  MOD_RES (19)..(20)..(21)..(22): Xaa is A or G or is absent
GXRDVVMGYHYKLXXXXXXXXXKYLMSIPSMKTPTXXPGASG

SEQ ID NO: 62566 - protein, 39 aa, Artificial Sequence; identical to SEQ ID NO: 24235
  GFR-binding peptide
  MOD_RES (2)..(36)..(37): Xaa is C or S
  MOD_RES (14)..(15)..(16)..(17)..(18): Xaa is A or G
  MOD_RES (19)..(20)..(21)..(22): Xaa is A or G or is absent

SEQ ID NO: 62567 - protein, 39 aa, Artificial Sequence
  GFR-binding peptide
  MOD_RES (34)..(35): Xaa is C or S
  MOD_RES (12)..(13)..(14)..(15)..(16): Xaa is A or G
  MOD_RES (17)..(18)..(19)..(20): Xaa is A or G or is absent
RDVVMGRHKRLXXXXXXXXXYYLMSTASMKTPTXXPGAS

SEQ ID NO: 62568 - protein, 36 aa, Artificial Sequence; identical to SEQ ID NO: 3245
  GFR-binding peptide
  MOD_RES (1)..(3)..(34)..(35): Xaa is C or S

SEQ ID NO: 62569 - protein, 36 aa, Artificial Sequence; identical to SEQ ID NO: 24237
  GFR-binding peptide
  MOD_RES (2)..(4)..(36): Xaa is C or S

SEQ ID NO: 62570 - protein, 41 aa, Artificial Sequence; identical to SEQ ID NO: 24238
  GFR-binding peptide
  MOD_RES (2)..(36)..(37): Xaa is C or S
  MOD_RES (14)..(15)..(16)..(17)..(18): Xaa is A or G
  MOD_RES (19)..(20)..(21)..(22): Xaa is A or G or is absent

SEQ ID NO: 62571 - protein, 34 aa, Artificial Sequence; identical to SEQ ID NO: 3249
  GFR-binding peptide
  MOD_RES (2)..(33)..(34): Xaa is C or S

SEQ ID NO: 62572 - protein, 36 aa, Artificial Sequence; identical to SEQ ID NO: 3251
  GFR-binding peptide
  MOD_RES (34)..(35): Xaa is C or S
  MOD_RES (12)..(13)..(14)..(15)..(16): Xaa is A or G
  MOD_RES (17)..(18)..(19)..(20): Xaa is A or G or is absent

SEQ ID NO: 62573 - protein, 41 aa, Artificial Sequence
  GFR-binding peptide
  MOD_RES (2)..(35)..(36): Xaa is C or S
  MOD_RES (13)..(14)..(15)..(16)..(17): Xaa is A or G
  MOD_RES (18)..(19)..(20)..(21): Xaa is A or G or is absent
KXSKVVMPIKGYXXXXXXXXXFYLINIPSLDQPVXXPSASA

SEQ ID NO: 62574 - protein, 33 aa, Artificial Sequence
  GFR-binding peptide
  MOD_RES (32)..(33): Xaa is C or S
SEVVMDRHKRLVVNNASDYYLISTASLRTPVXX

SEQ ID NO: 62575 - protein, 41 aa, Artificial Sequence
  GFR-binding peptide
  MOD_RES (1)..(3)..(37)..(38): Xaa is C or S
  MOD_RES (15)..(16)..(17)..(18)..(19): Xaa is A or G
  MOD_RES (20)..(21)..(22)..(23): Xaa is A or G or is absent
XAXSEVTMNRHKRLXXXXXXXXXYYLISTASMKEPVXXPEP

SEQ ID NO: 62576 - protein, 37 aa, Artificial Sequence; identical to SEQ ID NO: 32282
  GFR-binding peptide
  MOD_RES (2)..(36)..(37): Xaa is C or S
  MOD_RES (14)..(15)..(16)..(17)..(18): Xaa is A or G
  MOD_RES (19)..(20)..(21)..(22): Xaa is A or G or is absent

SEQ ID NO: 62577 - protein, 35 aa, Artificial Sequence; identical to SEQ ID NO: 3257
  GFR-binding peptide
  MOD_RES (1)..(35): Xaa is C or S
  MOD_RES (13)..(14)..(15)..(16)..(17): Xaa is A or G
  MOD_RES (18)..(19)..(20)..(21): Xaa is A or G or is absent

SEQ ID NO: 62578 - protein, 37 aa, Artificial Sequence; identical to SEQ ID NO: 3258
  GFR-binding peptide
  MOD_RES (2)..(4)..(37): Xaa is C or S
  MOD_RES (15)..(16)..(17)..(18)..(19): Xaa is A or G
  MOD_RES (20)..(21)..(22)..(23): Xaa is A or G or is absent

SEQ ID NO: 62579 - protein, 34 aa, Artificial Sequence; identical to SEQ ID NO: 32286
  GFR-binding peptide
  MOD_RES (2)..(34): Xaa is C or S

SEQ ID NO: 62580 - protein, 30 aa, Artificial Sequence; identical to SEQ ID NO: 32289
  GFR-binding peptide

SEQ ID NO: 62581 - protein, 40 aa, Artificial Sequence
  GFR-binding peptide
  MOD_RES (1)..(3)..(37)..(38): Xaa is C or S
  MOD_RES (15)..(16)..(17)..(18)..(19): Xaa is A or G
  MOD_RES (20)..(21)..(22)..(23): Xaa is A or G or is absent
XGXSEVVMDEYKFKXXXXXXXXXLYLISIPELRTPVXXTP

SEQ ID NO: 62582 - protein, 39 aa, Artificial Sequence; identical to SEQ ID NO: 24254
  GFR-binding peptide
  MOD_RES (2)..(4)..(38)..(39): Xaa is C or S
  MOD_RES (16)..(17)..(18)..(19)..(20): Xaa is A or G
  MOD_RES (21)..(22)..(23)..(24): Xaa is A or G or is absent

SEQ ID NO: 62583 - protein, 30 aa, Artificial Sequence; identical to SEQ ID NO: 3268
  GFR-binding peptide

SEQ ID NO: 62584 - protein, 35 aa, Artificial Sequence; identical to SEQ ID NO: 3270
  GFR-binding peptide
  MOD_RES (2)..(4): Xaa is C or S

SEQ ID NO: 62585 - protein, 32 aa, Artificial Sequence; identical to SEQ ID NO: 24263
  GFR-binding peptide
  MOD_RES (11)..(12)..(13)..(14)..(15): Xaa is A or G
  MOD_RES (16)..(17)..(18)..(19): Xaa is A or G or is absent

SEQ ID NO: 62586 - protein, 38 aa, Artificial Sequence
  GFR-binding peptide
  MOD_RES (1)..(35)..(36): Xaa is C or S
  MOD_RES (13)..(14)..(15)..(16)..(17): Xaa is A or G
  MOD_RES (18)..(19)..(20)..(21): Xaa is A or G or is absent
XSEVTMNRHKRLXXXXXXXXXYYLISTASMKEPVXXPE

SEQ ID NO: 62587 - protein, 42 aa, Artificial Sequence; identical to SEQ ID NO: 3272
  GFR-binding peptide
  MOD_RES (2)..(4)..(36)..(37): Xaa is C or S

SEQ ID NO: 62588 - protein, 33 aa, Artificial Sequence; identical to SEQ ID NO: 24267
  GFR-binding peptide
  MOD_RES (1)..(33): Xaa is C or S

SEQ ID NO: 62589 - protein, 38 aa, Artificial Sequence; identical to SEQ ID NO: 24268
  GFR-binding peptide
  MOD_RES (2)..(4)..(38): Xaa is C or S
  MOD_RES (16)..(17)..(18)..(19)..(20): Xaa is A or G
  MOD_RES (21)..(22)..(23)..(24): Xaa is A or G or is absent

SEQ ID NO: 62590 - protein, 37 aa, Artificial Sequence
  GFR-binding peptide
  MOD_RES (33)..(34): Xaa is C or S
  MOD_RES (11)..(12)..(13)..(14)..(15): Xaa is A or G
  MOD_RES (16)..(17)..(18)..(19): Xaa is A or G or is absent
EVVMDEYKFKXXXXXXXXXLYLISIPELRTPVXXTPP

SEQ ID NO: 62591 - protein, 41 aa, Artificial Sequence
  GFR-binding peptide
  MOD_RES (1)..(3)..(37)..(38): Xaa is C or S
  MOD_RES (15)..(16)..(17)..(18)..(19): Xaa is A or G
  MOD_RES (20)..(21)..(22)..(23): Xaa is A or G or is absent
XGXSEVVMDEYKFKXXXXXXXXXLYLISIPELRTPVXXTPP

SEQ ID NO: 62592 - protein, 37 aa, Artificial Sequence; identical to SEQ ID NO: 3273
  GFR-binding peptide
  MOD_RES (33)..(33): Xaa is C or S
  MOD_RES (11)..(12)..(13)..(14)..(15): Xaa is A or G
  MOD_RES (16)..(17)..(18)..(19): Xaa is A or G or is absent

SEQ ID NO: 62593 - protein, 41 aa, Artificial Sequence
  GFR-binding peptide
  MOD_RES (1)..(3)..(35)..(36): Xaa is C or S
XGXSRVVMNYHYKLIVNSSDDKYLVSIPSLKTPAXXPKPVH

SEQ ID NO: 62594 - protein, 37 aa, Artificial Sequence; identical to SEQ ID NO: 31203
  GFR-binding peptide
  MOD_RES (32)..(33): Xaa is C or S

SEQ ID NO: 62595 - protein, 44 aa, Artificial Sequence
  GFR-binding peptide
  MOD_RES (2)..(4)..(38)..(39): Xaa is C or S
  MOD_RES (16)..(17)..(18)..(19)..(20): Xaa is A or G
  MOD_RES (21)..(22)..(23)..(24): Xaa is A or G or is absent
RXGXSEVVMDEYKFKXXXXXXXXXLYLISIPELRTPVXXTPPTS

SEQ ID NO: 62596 - protein, 41 aa, Artificial Sequence; identical to SEQ ID NO: 3278
  GFR-binding peptide
  MOD_RES (2)..(35)..(36): Xaa is C or S

SEQ ID NO: 62597 - protein, 40 aa, Artificial Sequence; identical to SEQ ID NO: 3279
  GFR-binding peptide
  MOD_RES (2)..(36)..(37): Xaa is C or S
  MOD_RES (14)..(15)..(16)..(17)..(18): Xaa is A or G
  MOD_RES (19)..(20)..(21)..(22): Xaa is A or G or is absent

SEQ ID NO: 62598 - protein, 39 aa, Artificial Sequence; identical to SEQ ID NO: 24272
  GFR-binding peptide
  MOD_RES (2)..(35)..(36): Xaa is C or S

SEQ ID NO: 62599 - protein, 32 aa, Artificial Sequence; identical to SEQ ID NO: 3280
  GFR-binding peptide
  MOD_RES (1)..(1): Xaa is C or S

SEQ ID NO: 62600 - protein, 33 aa, Artificial Sequence; identical to SEQ ID NO: 3281
  GFR-binding peptide
  MOD_RES (2)..(33): Xaa is C or S

SEQ ID NO: 62601 - protein, 35 aa, Artificial Sequence; identical to SEQ ID NO: 24276
  GFR-binding peptide
  MOD_RES (31)..(32): Xaa is C or S

SEQ ID NO: 62602 - protein, 38 aa, Artificial Sequence; identical to SEQ ID NO: 56144
  GFR-binding peptide
  MOD_RES (32)..(33): Xaa is C or S

SEQ ID NO: 62603 - protein, 37 aa, Artificial Sequence; identical to SEQ ID NO: 24277
  GFR-binding peptide
  MOD_RES (2)..(36)..(37): Xaa is C or S
  MOD_RES (14)..(15)..(16)..(17)..(18): Xaa is A or G
  MOD_RES (19)..(20)..(21)..(22): Xaa is A or G or is absent

SEQ ID NO: 62604 - protein, 38 aa, Artificial Sequence; identical to SEQ ID NO: 24279
  GFR-binding peptide
  MOD_RES (32)..(32): Xaa is C or S

SEQ ID NO: 62605 - protein, 39 aa, Artificial Sequence
  GFR-binding peptide
  MOD_RES (33)..(34): Xaa is C or S
  MOD_RES (11)..(12)..(13)..(14)..(15): Xaa is A or G
  MOD_RES (16)..(17)..(18)..(19): Xaa is A or G or is absent
SVAMGRHKRLXXXXXXXXXYYLISTASLKTPVXXAKSAK

SEQ ID NO: 62606 - protein, 37 aa, Artificial Sequence; identical to SEQ ID NO: 3289
  GFR-binding peptide
  MOD_RES (1)..(33)..(34): Xaa is C or S

SEQ ID NO: 62607 - protein, 37 aa, Artificial Sequence; identical to SEQ ID NO: 24281
  GFR-binding peptide
  MOD_RES (33)..(33): Xaa is C or S
  MOD_RES (11)..(12)..(13)..(14)..(15): Xaa is A or G
  MOD_RES (16)..(17)..(18)..(19): Xaa is A or G or is absent

SEQ ID NO: 62608 - protein, 42 aa, Artificial Sequence; identical to SEQ ID NO: 3290
  GFR-binding peptide
  MOD_RES (2)..(36)..(37): Xaa is C or S
  MOD_RES (14)..(15)..(16)..(17)..(18): Xaa is A or G
  MOD_RES (19)..(20)..(21)..(22): Xaa is A or G or is absent

SEQ ID NO: 62609 - protein, 36 aa, Artificial Sequence
  GFR-binding peptide
  MOD_RES (1)..(3): Xaa is C or S
  MOD_RES (15)..(16)..(17)..(18)..(19): Xaa is A or G
  MOD_RES (20)..(21)..(22)..(23): Xaa is A or G or is absent
XGXRDVVMGYHYKLXXXXXXXXXKYLMSIPSMKTPT

SEQ ID NO: 62610 - protein, 34 aa, Artificial Sequence; identical to SEQ ID NO: 24282
  GFR-binding peptide
  MOD_RES (34)..(34): Xaa is C or S
  MOD_RES (12)..(13)..(14)..(15)..(16): Xaa is A or G
  MOD_RES (17)..(18)..(19)..(20): Xaa is A or G or is absent

SEQ ID NO: 62611 - protein, 36 aa, Artificial Sequence
  GFR-binding peptide
  MOD_RES (31)..(32): Xaa is C or S
EVVMDRHKRLVVNNAADYYLISTASLRAPVXXSAPA

SEQ ID NO: 62612 - protein, 41 aa, Artificial Sequence; identical to SEQ ID NO: 3292
  GFR-binding peptide
  MOD_RES (1)..(3)..(36)..(37): Xaa is C or S
  MOD_RES (14)..(15)..(16)..(17)..(18): Xaa is A or G
  MOD_RES (19)..(20)..(21)..(22): Xaa is A or G or is absent

SEQ ID NO: 62613 - protein, 39 aa, Artificial Sequence; identical to SEQ ID NO: 56149
  GFR-binding peptide
  MOD_RES (1)..(3)..(36)..(37): Xaa is C or S
  MOD_RES (14)..(15)..(16)..(17)..(18): Xaa is A or G
  MOD_RES (19)..(20)..(21)..(22): Xaa is A or G or is absent

SEQ ID NO: 62614 - protein, 33 aa, Artificial Sequence; identical to SEQ ID NO: 3294
  GFR-binding peptide
  MOD_RES (2)..(33): Xaa is C or S

SEQ ID NO: 62615 - protein, 37 aa, Artificial Sequence; identical to SEQ ID NO: 24289
  GFR-binding peptide
  MOD_RES (2)..(36)..(37): Xaa is C or S
  MOD_RES (14)..(15)..(16)..(17)..(18): Xaa is A or G
  MOD_RES (19)..(20)..(21)..(22): Xaa is A or G or is absent

SEQ ID NO: 62616 - protein, 42 aa, Artificial Sequence; identical to SEQ ID NO: 31231
  GFR-binding peptide
  MOD_RES (2)..(4)..(37)..(38): Xaa is C or S

SEQ ID NO: 62617 - protein, 40 aa, Artificial Sequence; identical to SEQ ID NO: 24290
  GFR-binding peptide
  MOD_RES (34)..(35): Xaa is C or S
  MOD_RES (12)..(13)..(14)..(15)..(16): Xaa is A or G
  MOD_RES (17)..(18)..(19)..(20): Xaa is A or G or is absent

SEQ ID NO: 62618 - protein, 37 aa, Artificial Sequence
  GFR-binding peptide
  MOD_RES (2)..(34)..(35): Xaa is C or S
GXSEVVMDYHYKLVVNNASDKYLISIPSLRTPVXXTP

SEQ ID NO: 62619 - protein, 35 aa, Artificial Sequence; identical to SEQ ID NO: 24291
  GFR-binding peptide
  MOD_RES (1)..(34)..(35): Xaa is C or S
  MOD_RES (12)..(13)..(14)..(15)..(16): Xaa is A or G
  MOD_RES (17)..(18)..(19)..(20): Xaa is A or G or is absent

SEQ ID NO: 62620 - protein, 38 aa, Artificial Sequence; identical to SEQ ID NO: 24293
  GFR-binding peptide
  MOD_RES (33)..(34): Xaa is C or S
  MOD_RES (11)..(12)..(13)..(14)..(15): Xaa is A or G
  MOD_RES (16)..(17)..(18)..(19): Xaa is A or G or is absent

SEQ ID NO: 62621 - protein, 40 aa, Artificial Sequence; identical to SEQ ID NO: 24294
  GFR-binding peptide
  MOD_RES (2)..(36)..(37): Xaa is C or S
  MOD_RES (14)..(15)..(16)..(17)..(18): Xaa is A or G
  MOD_RES (19)..(20)..(21)..(22): Xaa is A or G or is absent

SEQ ID NO: 62622 - protein, 39 aa, Artificial Sequence; identical to SEQ ID NO: 56165
  GFR-binding peptide
  MOD_RES (2)..(35)..(36): Xaa is C or S
  MOD_RES (13)..(14)..(15)..(16)..(17): Xaa is A or G
  MOD_RES (18)..(19)..(20)..(21): Xaa is A or G or is absent

SEQ ID NO: 62623 - protein, 38 aa, Artificial Sequence; identical to SEQ ID NO: 24299
  GFR-binding peptide
  MOD_RES (2)..(4)..(37)..(38): Xaa is C or S
  MOD_RES (15)..(16)..(17)..(18)..(19): Xaa is A or G
  MOD_RES (20)..(21)..(22)..(23): Xaa is A or G or is absent

SEQ ID NO: 62624 - protein, 31 aa, Artificial Sequence; identical to SEQ ID NO: 3305
  GFR-binding peptide
  MOD_RES (31)..(31): Xaa is C or S

SEQ ID NO: 62625 - protein, 36 aa, Artificial Sequence; identical to SEQ ID NO: 3306
  GFR-binding peptide
  MOD_RES (1)..(3)..(34)..(35): Xaa is C or S

SEQ ID NO: 62626 - protein, 36 aa, Artificial Sequence
  GFR-binding peptide
  MOD_RES (33)..(34): Xaa is C or S
  MOD_RES (11)..(12)..(13)..(14)..(15): Xaa is A or G
  MOD_RES (16)..(17)..(18)..(19): Xaa is A or G or is absent
SKVVMPIKGYXXXXXXXXXFYLINIPSLDQPVXXPS

SEQ ID NO: 62627 - protein, 34 aa, Artificial Sequence; identical to SEQ ID NO: 3309
  GFR-binding peptide
  MOD_RES (1)..(34): Xaa is C or S

SEQ ID NO: 62628 - protein, 37 aa, Artificial Sequence
  GFR-binding peptide
  MOD_RES (31)..(32): Xaa is C or S
EVTMNYHYKLVVNKNEDKYLISIPSMKEPVXXPEPIG

SEQ ID NO: 62629 - protein, 37 aa, Artificial Sequence; identical to SEQ ID NO: 3311
  GFR-binding peptide
  MOD_RES (31)..(32): Xaa is C or S

SEQ ID NO: 62630 - protein, 36 aa, Artificial Sequence
  GFR-binding peptide
  MOD_RES (2)..(4)..(36): Xaa is C or S
SXGXRDVVMGEYKFKIIQQKDNLYLMSIPEMKTPTX

SEQ ID NO: 62631 - protein, 41 aa, Artificial Sequence
  GFR-binding peptide
  MOD_RES (1)..(3)..(36)..(37): Xaa is C or S
  MOD_RES (14)..(15)..(16)..(17)..(18): Xaa is A or G
  MOD_RES (19)..(20)..(21)..(22): Xaa is A or G or is absent
XKXSKVIMPIKGYXXXXXXXXXFYLINIPSLDQSVXXPSAS

SEQ ID NO: 62632 - protein, 40 aa, Artificial Sequence; identical to SEQ ID NO: 3312
  GFR-binding peptide
  MOD_RES (1)..(35)..(36): Xaa is C or S
  MOD_RES (13)..(14)..(15)..(16)..(17): Xaa is A or G
  MOD_RES (18)..(19)..(20)..(21): Xaa is A or G or is absent

SEQ ID NO: 62633 - protein, 34 aa, Artificial Sequence; identical to SEQ ID NO: 3316
  GFR-binding peptide
  MOD_RES (2)..(2): Xaa is C or S

SEQ ID NO: 62634 - protein, 37 aa, Artificial Sequence
  GFR-binding peptide
  MOD_RES (2)..(4): Xaa is C or S
  MOD_RES (16)..(17)..(18)..(19)..(20): Xaa is A or G
  MOD_RES (21)..(22)..(23)..(24): Xaa is A or G or is absent
RXAXSEVTMNRYKKLXXXXXXXXXFYLISIANMKEPV

SEQ ID NO: 62635 - protein, 40 aa, Artificial Sequence; identical to SEQ ID NO: 56179
  GFR-binding peptide
  MOD_RES (2)..(4)..(36)..(37): Xaa is C or S

SEQ ID NO: 62636 - protein, 37 aa, Artificial Sequence; identical to SEQ ID NO: 24308
  GFR-binding peptide
  MOD_RES (1)..(3)..(34)..(35): Xaa is C or S

SEQ ID NO: 62637 - protein, 33 aa, Artificial Sequence; identical to SEQ ID NO: 3319
  GFR-binding peptide
  MOD_RES (1)..(1): Xaa is C or S

SEQ ID NO: 62638 - protein, 35 aa, Artificial Sequence; identical to SEQ ID NO: 24310
  GFR-binding peptide
  MOD_RES (33)..(34): Xaa is C or S
  MOD_RES (11)..(12)..(13)..(14)..(15): Xaa is A or G
  MOD_RES (16)..(17)..(18)..(19): Xaa is A or G or is absent

SEQ ID NO: 62639 - protein, 34 aa, Artificial Sequence; identical to SEQ ID NO: 24312
  GFR-binding peptide
  MOD_RES (2)..(34): Xaa is C or S

SEQ ID NO: 62640 - protein, 40 aa, Artificial Sequence; identical to SEQ ID NO: 24315
  GFR-binding peptide
  MOD_RES (2)..(4)..(36): Xaa is C or S

SEQ ID NO: 62641 - protein, 40 aa, Artificial Sequence; identical to SEQ ID NO: 3321
  GFR-binding peptide
  MOD_RES (1)..(3)..(37)..(38): Xaa is C or S
  MOD_RES (15)..(16)..(17)..(18)..(19): Xaa is A or G
  MOD_RES (20)..(21)..(22)..(23): Xaa is A or G or is absent

SEQ ID NO: 62642 - protein, 40 aa, Artificial Sequence
  GFR-binding peptide
  MOD_RES (1)..(3)..(35)..(36): Xaa is C or S
XGXRDVVMGEYKFKIIQQKDNLYLMSIPEMKTPTXXPGAS

SEQ ID NO: 62643 - protein, 38 aa, Artificial Sequence; identical to SEQ ID NO: 3328
  GFR-binding peptide
  MOD_RES (34)..(34): Xaa is C or S
  MOD_RES (12)..(13)..(14)..(15)..(16): Xaa is A or G
  MOD_RES (17)..(18)..(19)..(20): Xaa is A or G or is absent

SEQ ID NO: 62644 - protein, 35 aa, Artificial Sequence; identical to SEQ ID NO: 3329
  GFR-binding peptide
  MOD_RES (2)..(4): Xaa is C or S

SEQ ID NO: 62645 - protein, 39 aa, Artificial Sequence; identical to SEQ ID NO: 3330
  GFR-binding peptide
  MOD_RES (1)..(33)..(34): Xaa is C or S

SEQ ID NO: 62646 - protein, 42 aa, Artificial Sequence
  GFR-binding peptide
  MOD_RES (1)..(3)..(37)..(38): Xaa is C or S
  MOD_RES (15)..(16)..(17)..(18)..(19): Xaa is A or G
  MOD_RES (20)..(21)..(22)..(23): Xaa is A or G or is absent
XAXSEVTMNRYKKLXXXXXXXXXFYLISIANMKEPVXXPEPI

SEQ ID NO: 62647 - protein, 40 aa, Artificial Sequence
  GFR-binding peptide
  MOD_RES (2)..(34)..(35): Xaa is C or S
GXRDVVMGRHKRLIIQQKDNYYLMSTASMKTPTXXPGASG

SEQ ID NO: 62648 - protein, 40 aa, Artificial Sequence
  GFR-binding peptide
  MOD_RES (1)..(3)..(37)..(38): Xaa is C or S
  MOD_RES (15)..(16)..(17)..(18)..(19): Xaa is A or G
  MOD_RES (20)..(21)..(22)..(23): Xaa is A or G or is absent
XAXSEVTMNYHYKLXXXXXXXXXKYLISIPSMKEPVXXPE

SEQ ID NO: 62649 - protein, 37 aa, Artificial Sequence
  GFR-binding peptide
  MOD_RES (1)..(33)..(34): Xaa is C or S
XSEVTMNRYKKLVVNKNEDFYLISIANMKEPVXXPEP

SEQ ID NO: 62650 - protein, 35 aa, Artificial Sequence
  GFR-binding peptide
  MOD_RES (2)..(4)..(35): Xaa is C or S
LXGXEEVIMRHKRLLLVRGNDYYLMSTASTKVPAX

SEQ ID NO: 62651 - protein, 39 aa, Artificial Sequence; identical to SEQ ID NO: 3334
  GFR-binding peptide
  MOD_RES (2)..(33)..(34): Xaa is C or S

SEQ ID NO: 62652 - protein, 36 aa, Artificial Sequence
  GFR-binding peptide
  MOD_RES (2)..(4): Xaa is C or S
  MOD_RES (15)..(16)..(17)..(18)..(19): Xaa is A or G
  MOD_RES (20)..(21)..(22)..(23): Xaa is A or G or is absent
LXGXEEVIMRHKRLXXXXXXXXXYYLMSTASTKVPA

SEQ ID NO: 62653 - protein, 37 aa, Artificial Sequence; identical to SEQ ID NO: 3340
  GFR-binding peptide
  MOD_RES (2)..(4)..(37): Xaa is C or S
  MOD_RES (15)..(16)..(17)..(18)..(19): Xaa is A or G
  MOD_RES (20)..(21)..(22)..(23): Xaa is A or G or is absent

SEQ ID NO: 62654 - protein, 34 aa, Artificial Sequence
  GFR-binding peptide
  MOD_RES (34)..(34): Xaa is C or S
  MOD_RES (12)..(13)..(14)..(15)..(16): Xaa is A or G
  MOD_RES (17)..(18)..(19)..(20): Xaa is A or G or is absent
SEVVMDYHYKLXXXXXXXXXKYLISIPSLRTPVX

SEQ ID NO: 62655 - protein, 40 aa, Artificial Sequence; identical to SEQ ID NO: 3343
  GFR-binding peptide
  MOD_RES (2)..(4)..(36)..(37): Xaa is C or S

SEQ ID NO: 62656 - protein, 37 aa, Artificial Sequence; identical to SEQ ID NO: 31281
  GFR-binding peptide
  MOD_RES (32)..(33): Xaa is C or S

SEQ ID NO: 62657 - protein, 41 aa, Artificial Sequence
  GFR-binding peptide
  MOD_RES (1)..(3)..(35)..(36): Xaa is C or S
XGXRDVVMGYHYKLIIQQKDNKYLMSIPSMKTPTXXPGASG

SEQ ID NO: 62658 - protein, 40 aa, Artificial Sequence; identical to SEQ ID NO: 31286
  GFR-binding peptide
  MOD_RES (2)..(4)..(36)..(37): Xaa is C or S

SEQ ID NO: 62659 - protein, 35 aa, Artificial Sequence; identical to SEQ ID NO: 3349
  GFR-binding peptide
  MOD_RES (1)..(3)..(34)..(35): Xaa is C or S

SEQ ID NO: 62660 - protein, 40 aa, Artificial Sequence; identical to SEQ ID NO: 3351
  GFR-binding peptide
  MOD_RES (34)..(35): Xaa is C or S
  MOD_RES (12)..(13)..(14)..(15)..(16): Xaa is A or G
  MOD_RES (17)..(18)..(19)..(20): Xaa is A or G or is absent

SEQ ID NO: 62661 - protein, 34 aa, Artificial Sequence
  GFR-binding peptide
  MOD_RES (31)..(32): Xaa is C or S
SVAMGRHKRLYTVVGKDYYLISTASLKTPVXXAK

SEQ ID NO: 62662 - protein, 33 aa, Artificial Sequence; identical to SEQ ID NO: 3352
  GFR-binding peptide
  MOD_RES (33)..(33): Xaa is C or S
  MOD_RES (11)..(12)..(13)..(14)..(15): Xaa is A or G
  MOD_RES (16)..(17)..(18)..(19): Xaa is A or G or is absent

SEQ ID NO: 62663 - protein, 38 aa, Artificial Sequence; identical to SEQ ID NO: 24333
  GFR-binding peptide
  MOD_RES (34)..(35): Xaa is C or S
  MOD_RES (12)..(13)..(14)..(15)..(16): Xaa is A or G
  MOD_RES (17)..(18)..(19)..(20): Xaa is A or G or is absent

SEQ ID NO: 62664 - protein, 43 aa, Artificial Sequence; identical to SEQ ID NO: 3356
  GFR-binding peptide
  MOD_RES (1)..(3)..(37)..(38): Xaa is C or S
  MOD_RES (15)..(16)..(17)..(18)..(19): Xaa is A or G
  MOD_RES (20)..(21)..(22)..(23): Xaa is A or G or is absent

SEQ ID NO: 62665 - protein, 35 aa, Artificial Sequence
  GFR-binding peptide
  MOD_RES (1)..(33)..(34): Xaa is C or S
XRDVVMGRHKRLIIQQKDNYYLMSTASMKTPTXXP

SEQ ID NO: 62666 - protein, 31 aa, Artificial Sequence; identical to SEQ ID NO: 31296
  GFR-binding peptide

SEQ ID NO: 62667 - protein, 34 aa, Artificial Sequence; identical to SEQ ID NO: 24340
  GFR-binding peptide
  MOD_RES (31)..(32): Xaa is C or S

SEQ ID NO: 62668 - protein, 40 aa, Artificial Sequence
  GFR-binding peptide
  MOD_RES (1)..(3)..(35)..(36): Xaa is C or S
XGXRDVVMGYHYKLIIQQKDNKYLMSIPSMKTPTXXPGAS

SEQ ID NO: 62669 - protein, 34 aa, Artificial Sequence; identical to SEQ ID NO: 3360
  GFR-binding peptide
  MOD_RES (1)..(32)..(33): Xaa is C or S

SEQ ID NO: 62670 - protein, 39 aa, Artificial Sequence; identical to SEQ ID NO: 24342
  GFR-binding peptide
  MOD_RES (1)..(33)..(34): Xaa is C or S

SEQ ID NO: 62671 - protein, 36 aa, Artificial Sequence; identical to SEQ ID NO: 24343
  GFR-binding peptide
  MOD_RES (2)..(4): Xaa is C or S

SEQ ID NO: 62672 - protein, 33 aa, Artificial Sequence; identical to SEQ ID NO: 3364
  GFR-binding peptide
  MOD_RES (31)..(32): Xaa is C or S

SEQ ID NO: 62673 - protein, 36 aa, Artificial Sequence
  GFR-binding peptide
  MOD_RES (2)..(34)..(35): Xaa is C or S
GXRDVVMGRHKRLIIQQKDNYYLMSTASMKTPTXXP

SEQ ID NO: 62674 - protein, 35 aa, Artificial Sequence; identical to SEQ ID NO: 31306
  GFR-binding peptide
  MOD_RES (2)..(34)..(35): Xaa is C or S

SEQ ID NO: 62675 - protein, 40 aa, Artificial Sequence; identical to SEQ ID NO: 24348
  GFR-binding peptide
  MOD_RES (2)..(36)..(37): Xaa is C or S
  MOD_RES (14)..(15)..(16)..(17)..(18): Xaa is A or G
  MOD_RES (19)..(20)..(21)..(22): Xaa is A or G or is absent

SEQ ID NO: 62676 - protein, 37 aa, Artificial Sequence; identical to SEQ ID NO: 3369
  GFR-binding peptide
  MOD_RES (2)..(4)..(36)..(37): Xaa is C or S

SEQ ID NO: 62677 - protein, 30 aa, Artificial Sequence; identical to SEQ ID NO: 24357
  GFR-binding peptide

SEQ ID NO: 62678 - protein, 35 aa, Artificial Sequence; identical to SEQ ID NO: 31320
  GFR-binding peptide
  MOD_RES (1)..(32)..(33): Xaa is C or S

SEQ ID NO: 62679 - protein, 39 aa, Artificial Sequence; identical to SEQ ID NO: 24362
  GFR-binding peptide
  MOD_RES (2)..(34)..(35): Xaa is C or S

SEQ ID NO: 62680 - protein, 37 aa, Artificial Sequence; identical to SEQ ID NO: 3380
  GFR-binding peptide
  MOD_RES (1)..(33)..(34): Xaa is C or S

SEQ ID NO: 62681 - protein, 36 aa, Artificial Sequence; identical to SEQ ID NO: 3382
  GFR-binding peptide
  MOD_RES (1)..(35)..(36): Xaa is C or S
  MOD_RES (13)..(14)..(15)..(16)..(17): Xaa is A or G
  MOD_RES (18)..(19)..(20)..(21): Xaa is A or G or is absent

SEQ ID NO: 62682 - protein, 38 aa, Artificial Sequence; identical to SEQ ID NO: 31334
  GFR-binding peptide
  MOD_RES (33)..(34): Xaa is C or S
  MOD_RES (11)..(12)..(13)..(14)..(15): Xaa is A or G
  MOD_RES (16)..(17)..(18)..(19): Xaa is A or G or is absent

SEQ ID NO: 62683 - protein, 40 aa, Artificial Sequence
  GFR-binding peptide
  MOD_RES (1)..(3)..(35)..(36): Xaa is C or S
XAXSEVTMNRYKKLVVNKNEDFYLISIANMKEPVXXPEPI

SEQ ID NO: 62684 - protein, 33 aa, Artificial Sequence; identical to SEQ ID NO: 24369
  GFR-binding peptide
  MOD_RES (33)..(33): Xaa is C or S

SEQ ID NO: 62685 - protein, 33 aa, Artificial Sequence
  GFR-binding peptide
  MOD_RES (2)..(2): Xaa is C or S
AXSEVTMNRHKRLVVNKNEDYYLISTASMKEPV

SEQ ID NO: 62686 - protein, 39 aa, Artificial Sequence
  GFR-binding peptide
  MOD_RES (33)..(34): Xaa is C or S
  MOD_RES (11)..(12)..(13)..(14)..(15): Xaa is A or G
  MOD_RES (16)..(17)..(18)..(19): Xaa is A or G or is absent
SKVIMPIKGYXXXXXXXXXFYLINIPSLDQSVXXPSASA

SEQ ID NO: 62687 - protein, 33 aa, Artificial Sequence; identical to SEQ ID NO: 31337
  GFR-binding peptide
  MOD_RES (32)..(33): Xaa is C or S

SEQ ID NO: 62688 - protein, 36 aa, Artificial Sequence; identical to SEQ ID NO: 3390
  GFR-binding peptide
  MOD_RES (31)..(32): Xaa is C or S

SEQ ID NO: 62689 - protein, 35 aa, Artificial Sequence; identical to SEQ ID NO: 31347
  GFR-binding peptide
  MOD_RES (35)..(35): Xaa is C or S
  MOD_RES (13)..(14)..(15)..(16)..(17): Xaa is A or G
  MOD_RES (18)..(19)..(20)..(21): Xaa is A or G or is absent

SEQ ID NO: 62690 - protein, 41 aa, Artificial Sequence; identical to SEQ ID NO: 3395
  GFR-binding peptide
  MOD_RES (2)..(4)..(38)..(39): Xaa is C or S
  MOD_RES (16)..(17)..(18)..(19)..(20): Xaa is A or G
  MOD_RES (21)..(22)..(23)..(24): Xaa is A or G or is absent

SEQ ID NO: 62691 - protein, 37 aa, Artificial Sequence
  GFR-binding peptide
  MOD_RES (1)..(33)..(34): Xaa is C or S
XSEVTMNYHYKLVVNKNEDKYLISIPSMKEPVXXPEP

SEQ ID NO: 62692 - protein, 40 aa, Artificial Sequence; identical to SEQ ID NO: 3397
  GFR-binding peptide
  MOD_RES (2)..(36)..(37): Xaa is C or S
  MOD_RES (14)..(15)..(16)..(17)..(18): Xaa is A or G
  MOD_RES (19)..(20)..(21)..(22): Xaa is A or G or is absent

SEQ ID NO: 62693 - protein, 39 aa, Artificial Sequence
  GFR-binding peptide
  MOD_RES (2)..(34)..(35): Xaa is C or S
GXSEVVMDYHYKLVVNNASDKYLISIPSLRTPVXXTPPT

SEQ ID NO: 62694 - protein, 40 aa, Artificial Sequence; identical to SEQ ID NO: 24376
  GFR-binding peptide
  MOD_RES (1)..(35)..(36): Xaa is C or S
  MOD_RES (13)..(14)..(15)..(16)..(17): Xaa is A or G
  MOD_RES (18)..(19)..(20)..(21): Xaa is A or G or is absent

SEQ ID NO: 62695 - protein, 42 aa, Artificial Sequence; identical to SEQ ID NO: 24377
  GFR-binding peptide
  MOD_RES (2)..(4)..(36)..(37): Xaa is C or S

SEQ ID NO: 62696 - protein, 38 aa, Artificial Sequence; identical to SEQ ID NO: 24381
  GFR-binding peptide
  MOD_RES (34)..(35): Xaa is C or S
  MOD_RES (12)..(13)..(14)..(15)..(16): Xaa is A or G
  MOD_RES (17)..(18)..(19)..(20): Xaa is A or G or is absent

SEQ ID NO: 62697 - protein, 38 aa, Artificial Sequence; identical to SEQ ID NO: 24382
  GFR-binding peptide
  MOD_RES (34)..(35): Xaa is C or S
  MOD_RES (12)..(13)..(14)..(15)..(16): Xaa is A or G
  MOD_RES (17)..(18)..(19)..(20): Xaa is A or G or is absent

SEQ ID NO: 62698 - protein, 36 aa, Artificial Sequence
  GFR-binding peptide
  MOD_RES (2)..(4)..(35)..(36): Xaa is C or S
SXKXSRVIMPIKGYVKPKRGVFYLINIPSLAQPVXX

SEQ ID NO: 62699 - protein, 36 aa, Artificial Sequence
  GFR-binding peptide
  MOD_RES (2)..(34)..(35): Xaa is C or S
AXSEVTMNRHKRLVVNKNEDYYLISTASMKEPVXXP

SEQ ID NO: 62700 - protein, 41 aa, Artificial Sequence; identical to SEQ ID NO: 3407
  GFR-binding peptide
  MOD_RES (2)..(4)..(36)..(37): Xaa is C or S

SEQ ID NO: 62701 - protein, 34 aa, Artificial Sequence; identical to SEQ ID NO: 56276
  GFR-binding peptide
  MOD_RES (31)..(32): Xaa is C or S

SEQ ID NO: 62702 - protein, 40 aa, Artificial Sequence
  GFR-binding peptide
  MOD_RES (2)..(4)..(36)..(37): Xaa is C or S
SXGXRDVVMGEYKFKIIQQKDNLYLMSIPEMKTPTXXPGA

SEQ ID NO: 62703 - protein, 36 aa, Artificial Sequence; identical to SEQ ID NO: 31370
  GFR-binding peptide
  MOD_RES (2)..(34)..(35): Xaa is C or S

SEQ ID NO: 62704 - protein, 35 aa, Artificial Sequence
  GFR-binding peptide
  MOD_RES (31)..(32): Xaa is C or S
EVTMNRHKRLVVNKNEDYYLISTASMKEPVXXPEP

SEQ ID NO: 62705 - protein, 40 aa, Artificial Sequence; identical to SEQ ID NO: 3411
  GFR-binding peptide
  MOD_RES (1)..(34)..(35): Xaa is C or S
  MOD_RES (12)..(13)..(14)..(15)..(16): Xaa is A or G
  MOD_RES (17)..(18)..(19)..(20): Xaa is A or G or is absent

SEQ ID NO: 62706 - protein, 39 aa, Artificial Sequence
  GFR-binding peptide
  MOD_RES (2)..(36)..(37): Xaa is C or S
  MOD_RES (14)..(15)..(16)..(17)..(18): Xaa is A or G
  MOD_RES (19)..(20)..(21)..(22): Xaa is A or G or is absent
GXSEVVMDYHYKLXXXXXXXXXKYLISIPSLRTPVXXTP

SEQ ID NO: 62707 - protein, 41 aa, Artificial Sequence
  GFR-binding peptide
  MOD_RES (2)..(4)..(37)..(38): Xaa is C or S
  MOD_RES (15)..(16)..(17)..(18)..(19): Xaa is A or G
  MOD_RES (20)..(21)..(22)..(23): Xaa is A or G or is absent
SXKXSKVIMPIKGYXXXXXXXXXFYLINIPSLDQSVXXPSA

SEQ ID NO: 62708 - protein, 31 aa, Artificial Sequence
  GFR-binding peptide
  MOD_RES (1)..(1): Xaa is C or S
XEEVIMRHKRLLLVRGNDYYLMSTASTKVPA

SEQ ID NO: 62709 - protein, 42 aa, Artificial Sequence; identical to SEQ ID NO: 3412
  GFR-binding peptide
  MOD_RES (2)..(36)..(37): Xaa is C or S
  MOD_RES (14)..(15)..(16)..(17)..(18): Xaa is A or G
  MOD_RES (19)..(20)..(21)..(22): Xaa is A or G or is absent

SEQ ID NO: 62710 - protein, 39 aa, Artificial Sequence; identical to SEQ ID NO: 3413
  GFR-binding peptide
  MOD_RES (33)..(34): Xaa is C or S
  MOD_RES (11)..(12)..(13)..(14)..(15): Xaa is A or G
  MOD_RES (16)..(17)..(18)..(19): Xaa is A or G or is absent

SEQ ID NO: 62711 - protein, 34 aa, Artificial Sequence; identical to SEQ ID NO: 24397
  GFR-binding peptide
  MOD_RES (2)..(34): Xaa is C or S

SEQ ID NO: 62712 - protein, 31 aa, Artificial Sequence; identical to SEQ ID NO: 3415
  GFR-binding peptide

SEQ ID NO: 62713 - protein, 36 aa, Artificial Sequence; identical to SEQ ID NO: 31375
  GFR-binding peptide
  MOD_RES (1)..(3)..(35)..(36): Xaa is C or S

SEQ ID NO: 62714 - protein, 41 aa, Artificial Sequence; identical to SEQ ID NO: 3416
  GFR-binding peptide
  MOD_RES (2)..(4)..(36)..(37): Xaa is C or S

SEQ ID NO: 62715 - protein, 40 aa, Artificial Sequence; identical to SEQ ID NO: 3417
  GFR-binding peptide
  MOD_RES (2)..(34)..(35): Xaa is C or S

SEQ ID NO: 62716 - protein, 36 aa, Artificial Sequence; identical to SEQ ID NO: 3418
  GFR-binding peptide
  MOD_RES (33)..(34): Xaa is C or S
  MOD_RES (11)..(12)..(13)..(14)..(15): Xaa is A or G
  MOD_RES (16)..(17)..(18)..(19): Xaa is A or G or is absent

SEQ ID NO: 62717 - protein, 39 aa, Artificial Sequence; identical to SEQ ID NO: 3419
  GFR-binding peptide
  MOD_RES (1)..(35)..(36): Xaa is C or S
  MOD_RES (13)..(14)..(15)..(16)..(17): Xaa is A or G
  MOD_RES (18)..(19)..(20)..(21): Xaa is A or G or is absent

SEQ ID NO: 62718 - protein, 41 aa, Artificial Sequence
  GFR-binding peptide
  MOD_RES (2)..(4)..(36)..(37): Xaa is C or S
RXGXESVAMGRHKRLYTVVGKDYYLISTASLKTPVXXAKSA

SEQ ID NO: 62719 - protein, 40 aa, Artificial Sequence; identical to SEQ ID NO: 31385
  GFR-binding peptide
  MOD_RES (2)..(4)..(36): Xaa is C or S

SEQ ID NO: 62720 - protein, 37 aa, Artificial Sequence; identical to SEQ ID NO: 31386
  GFR-binding peptide
  MOD_RES (2)..(4)..(36)..(37): Xaa is C or S

SEQ ID NO: 62721 - protein, 31 aa, Artificial Sequence; identical to SEQ ID NO: 3421
  GFR-binding peptide

SEQ ID NO: 62722 - protein, 39 aa, Artificial Sequence; identical to SEQ ID NO: 31389
  GFR-binding peptide
  MOD_RES (34)..(35): Xaa is C or S
  MOD_RES (12)..(13)..(14)..(15)..(16): Xaa is A or G
  MOD_RES (17)..(18)..(19)..(20): Xaa is A or G or is absent

SEQ ID NO: 62723 - protein, 39 aa, Artificial Sequence
  GFR-binding peptide
  MOD_RES (2)..(36)..(37): Xaa is C or S
  MOD_RES (14)..(15)..(16)..(17)..(18): Xaa is A or G
  MOD_RES (19)..(20)..(21)..(22): Xaa is A or G or is absent
GXSEVVMDEYKFKXXXXXXXXXLYLISIPELRTPVXXTP

SEQ ID NO: 62724 - protein, 40 aa, Artificial Sequence
  GFR-binding peptide
  MOD_RES (1)..(35)..(36): Xaa is C or S
  MOD_RES (13)..(14)..(15)..(16)..(17): Xaa is A or G
  MOD_RES (18)..(19)..(20)..(21): Xaa is A or G or is absent
XSEVTMNYHYKLXXXXXXXXXKYLISIPSMKEPVXXPEPI

SEQ ID NO: 62725 - protein, 33 aa, Artificial Sequence; identical to SEQ ID NO: 3424
  GFR-binding peptide
  MOD_RES (12)..(13)..(14)..(15)..(16): Xaa is A or G
  MOD_RES (17)..(18)..(19)..(20): Xaa is A or G or is absent

SEQ ID NO: 62726 - protein, 36 aa, Artificial Sequence; identical to SEQ ID NO: 56304
  GFR-binding peptide
  MOD_RES (2)..(4): Xaa is C or S
  MOD_RES (15)..(16)..(17)..(18)..(19): Xaa is A or G
  MOD_RES (20)..(21)..(22)..(23): Xaa is A or G or is absent

SEQ ID NO: 62727 - protein, 32 aa, Artificial Sequence; identical to SEQ ID NO: 24418
  GFR-binding peptide
  MOD_RES (31)..(32): Xaa is C or S

SEQ ID NO: 62728 - protein, 35 aa, Artificial Sequence
  GFR-binding peptide
  MOD_RES (34)..(35): Xaa is C or S
  MOD_RES (12)..(13)..(14)..(15)..(16): Xaa is A or G
  MOD_RES (17)..(18)..(19)..(20): Xaa is A or G or is absent
RDVVMGRHKRLXXXXXXXXXYYLMSTASMKTPTXX

SEQ ID NO: 62729 - protein, 39 aa, Artificial Sequence; identical to SEQ ID NO: 31401
  GFR-binding peptide
  MOD_RES (1)..(3)..(35)..(36): Xaa is C or S

SEQ ID NO: 62730 - protein, 40 aa, Artificial Sequence; identical to SEQ ID NO: 3428
  GFR-binding peptide
  MOD_RES (2)..(35)..(36): Xaa is C or S

SEQ ID NO: 62731 - protein, 34 aa, Artificial Sequence; identical to SEQ ID NO: 3429
  GFR-binding peptide
  MOD_RES (34)..(34): Xaa is C or S
  MOD_RES (12)..(13)..(14)..(15)..(16): Xaa is A or G
  MOD_RES (17)..(18)..(19)..(20): Xaa is A or G or is absent

SEQ ID NO: 62732 - protein, 35 aa, Artificial Sequence; identical to SEQ ID NO: 24424
  GFR-binding peptide
  MOD_RES (1)..(33)..(34): Xaa is C or S

SEQ ID NO: 62733 - protein, 33 aa, Artificial Sequence; identical to SEQ ID NO: 31404
  GFR-binding peptide
  MOD_RES (2)..(2): Xaa is C or S

SEQ ID NO: 62734 - protein, 39 aa, Artificial Sequence; identical to SEQ ID NO: 31405
  GFR-binding peptide
  MOD_RES (1)..(3)..(37)..(38): Xaa is C or S
  MOD_RES (15)..(16)..(17)..(18)..(19): Xaa is A or G
  MOD_RES (20)..(21)..(22)..(23): Xaa is A or G or is absent

SEQ ID NO: 62735 - protein, 38 aa, Artificial Sequence; identical to SEQ ID NO: 3433
  GFR-binding peptide
  MOD_RES (1)..(3)..(37)..(38): Xaa is C or S
  MOD_RES (15)..(16)..(17)..(18)..(19): Xaa is A or G
  MOD_RES (20)..(21)..(22)..(23): Xaa is A or G or is absent

SEQ ID NO: 62736 - protein, 39 aa, Artificial Sequence
  GFR-binding peptide
  MOD_RES (1)..(3)..(35)..(36): Xaa is C or S
XGXRDVVMGRHKRLIIQQKDNYYLMSTASMKTPTXXPGA

SEQ ID NO: 62737 - protein, 36 aa, Artificial Sequence; identical to SEQ ID NO: 56312
  GFR-binding peptide
  MOD_RES (31)..(32): Xaa is C or S

SEQ ID NO: 62738 - protein, 39 aa, Artificial Sequence
  GFR-binding peptide
  MOD_RES (2)..(34)..(35): Xaa is C or S
AXSEVTMNYHYKLVVNKNEDKYLISIPSMKEPVXXPEPI

SEQ ID NO: 62739 - protein, 44 aa, Artificial Sequence; identical to SEQ ID NO: 10856
  GFR-binding peptide
  MOD_RES (2)..(4)..(38)..(39): Xaa is C or S
  MOD_RES (16)..(17)..(18)..(19)..(20): Xaa is A or G
  MOD_RES (21)..(22)..(23)..(24): Xaa is A or G or is absent

SEQ ID NO: 62740 - protein, 43 aa, Artificial Sequence
  GFR-binding peptide
  MOD_RES (2)..(4)..(38)..(39): Xaa is C or S
  MOD_RES (16)..(17)..(18)..(19)..(20): Xaa is A or G
  MOD_RES (21)..(22)..(23)..(24): Xaa is A or G or is absent
RXGXSEVVMDEYKFKXXXXXXXXXLYLISIPELRTPVXXTPPT

SEQ ID NO: 62741 - protein, 37 aa, Artificial Sequence; identical to SEQ ID NO: 3443
  GFR-binding peptide
  MOD_RES (1)..(33)..(34): Xaa is C or S

SEQ ID NO: 62742 - protein, 33 aa, Artificial Sequence
  GFR-binding peptide
  MOD_RES (31)..(32): Xaa is C or S
DVVMGYHYKLIIQQKDNKYLMSIPSMKTPTXXP

SEQ ID NO: 62743 - protein, 35 aa, Artificial Sequence; identical to SEQ ID NO: 31420
  GFR-binding peptide
  MOD_RES (33)..(34): Xaa is C or S
  MOD_RES (11)..(12)..(13)..(14)..(15): Xaa is A or G
  MOD_RES (16)..(17)..(18)..(19): Xaa is A or G or is absent

SEQ ID NO: 62744 - protein, 42 aa, Artificial Sequence; identical to SEQ ID NO: 3445
  GFR-binding peptide
  MOD_RES (1)..(3)..(38)..(39): Xaa is C or S
  MOD_RES (16)..(17)..(18)..(19)..(20): Xaa is A or G
  MOD_RES (21)..(22)..(23)..(24): Xaa is A or G or is absent

SEQ ID NO: 62745 - protein, 37 aa, Artificial Sequence
  GFR-binding peptide
  MOD_RES (2)..(4)..(37): Xaa is C or S
  MOD_RES (15)..(16)..(17)..(18)..(19): Xaa is A or G
  MOD_RES (20)..(21)..(22)..(23): Xaa is A or G or is absent
SXKXSKVVMPIKGYXXXXXXXXXFYLINIPSLDQPVX

SEQ ID NO: 62746 - protein, 38 aa, Artificial Sequence; identical to SEQ ID NO: 24434
  GFR-binding peptide
  MOD_RES (2)..(33)..(34): Xaa is C or S

SEQ ID NO: 62747 - protein, 38 aa, Artificial Sequence; identical to SEQ ID NO: 31423
  GFR-binding peptide
  MOD_RES (34)..(35): Xaa is C or S
  MOD_RES (12)..(13)..(14)..(15)..(16): Xaa is A or G
  MOD_RES (17)..(18)..(19)..(20): Xaa is A or G or is absent

SEQ ID NO: 62748 - protein, 40 aa, Artificial Sequence; identical to SEQ ID NO: 3450
  GFR-binding peptide
  MOD_RES (1)..(3)..(36)..(37): Xaa is C or S

SEQ ID NO: 62749 - protein, 40 aa, Artificial Sequence
  GFR-binding peptide
  MOD_RES (1)..(35)..(36): Xaa is C or S
  MOD_RES (13)..(14)..(15)..(16)..(17): Xaa is A or G
  MOD_RES (18)..(19)..(20)..(21): Xaa is A or G or is absent
XSEVVMDYHYKLXXXXXXXXXKYLISIPSLRTPVXXTPPT

SEQ ID NO: 62750 - protein, 36 aa, Artificial Sequence
  GFR-binding peptide
  MOD_RES (34)..(35): Xaa is C or S
  MOD_RES (12)..(13)..(14)..(15)..(16): Xaa is A or G
  MOD_RES (17)..(18)..(19)..(20): Xaa is A or G or is absent
SEVVMDYHYKLXXXXXXXXXKYLISIPSLRTPVXXT

SEQ ID NO: 62751 - protein, 33 aa, Artificial Sequence; identical to SEQ ID NO: 3452
  GFR-binding peptide
  MOD_RES (32)..(33): Xaa is C or S

SEQ ID NO: 62752 - protein, 43 aa, Artificial Sequence; identical to SEQ ID NO: 24437
  GFR-binding peptide
  MOD_RES (2)..(4)..(38)..(39): Xaa is C or S
  MOD_RES (16)..(17)..(18)..(19)..(20): Xaa is A or G
  MOD_RES (21)..(22)..(23)..(24): Xaa is A or G or is absent

SEQ ID NO: 62753 - protein, 40 aa, Artificial Sequence; identical to SEQ ID NO: 3458
  GFR-binding peptide
  MOD_RES (1)..(3)..(37): Xaa is C or S
  MOD_RES (15)..(16)..(17)..(18)..(19): Xaa is A or G
  MOD_RES (20)..(21)..(22)..(23): Xaa is A or G or is absent

SEQ ID NO: 62754 - protein, 40 aa, Artificial Sequence; identical to SEQ ID NO: 24440
  GFR-binding peptide
  MOD_RES (2)..(36)..(37): Xaa is C or S
  MOD_RES (14)..(15)..(16)..(17)..(18): Xaa is A or G
  MOD_RES (19)..(20)..(21)..(22): Xaa is A or G or is absent

SEQ ID NO: 62755 - protein, 38 aa, Artificial Sequence
  GFR-binding peptide
  MOD_RES (1)..(3)..(34)..(35): Xaa is C or S
XGXEEVIMYHYKLLLVRGNDKYLMSIPSTKVPAXXTSP

SEQ ID NO: 62756 - protein, 33 aa, Artificial Sequence
  GFR-binding peptide
  MOD_RES (1)..(1): Xaa is C or S
  MOD_RES (12)..(13)..(14)..(15)..(16): Xaa is A or G
  MOD_RES (17)..(18)..(19)..(20): Xaa is A or G or is absent
XSKVVMPIKGYXXXXXXXXXFYLINIPSLDQPV

SEQ ID NO: 62757 - protein, 33 aa, Artificial Sequence; identical to SEQ ID NO: 24443
  GFR-binding peptide
  MOD_RES (33)..(33): Xaa is C or S
  MOD_RES (11)..(12)..(13)..(14)..(15): Xaa is A or G
  MOD_RES (16)..(17)..(18)..(19): Xaa is A or G or is absent

SEQ ID NO: 62758 - protein, 36 aa, Artificial Sequence; identical to SEQ ID NO: 31433
  GFR-binding peptide
  MOD_RES (2)..(4): Xaa is C or S

SEQ ID NO: 62759 - protein, 41 aa, Artificial Sequence; identical to SEQ ID NO: 3464
  GFR-binding peptide
  MOD_RES (2)..(4)..(37)..(38): Xaa is C or S
  MOD_RES (15)..(16)..(17)..(18)..(19): Xaa is A or G
  MOD_RES (20)..(21)..(22)..(23): Xaa is A or G or is absent

SEQ ID NO: 62760 - protein, 34 aa, Artificial Sequence; identical to SEQ ID NO: 3465
  GFR-binding peptide
  MOD_RES (31)..(32): Xaa is C or S

SEQ ID NO: 62761 - protein, 41 aa, Artificial Sequence; identical to SEQ ID NO: 3466
  GFR-binding peptide
  MOD_RES (2)..(4)..(37)..(38): Xaa is C or S

SEQ ID NO: 62762 - protein, 39 aa, Artificial Sequence; identical to SEQ ID NO: 3468
  GFR-binding peptide
  MOD_RES (2)..(34)..(35): Xaa is C or S

SEQ ID NO: 62763 - protein, 36 aa, Artificial Sequence
  GFR-binding peptide
  MOD_RES (2)..(33)..(34): Xaa is C or S
KXSKVIMPIKGYIKPTKGIFYLINIPSLDQSVXXPS

SEQ ID NO: 62764 - protein, 37 aa, Artificial Sequence
  GFR-binding peptide
  MOD_RES (1)..(33)..(34): Xaa is C or S
XRDVVMGYHYKLIIQQKDNKYLMSIPSMKTPTXXPGA

SEQ ID NO: 62765 - protein, 36 aa, Artificial Sequence; identical to SEQ ID NO: 31442
  GFR-binding peptide
  MOD_RES (1)..(3): Xaa is C or S
  MOD_RES (15)..(16)..(17)..(18)..(19): Xaa is A or G
  MOD_RES (20)..(21)..(22)..(23): Xaa is A or G or is absent

SEQ ID NO: 62766 - protein, 34 aa, Artificial Sequence; identical to SEQ ID NO: 24452
  GFR-binding peptide
  MOD_RES (32)..(33): Xaa is C or S

SEQ ID NO: 62767 - protein, 33 aa, Artificial Sequence; identical to SEQ ID NO: 3472
  GFR-binding peptide
  MOD_RES (2)..(2): Xaa is C or S

SEQ ID NO: 62768 - protein, 39 aa, Artificial Sequence; identical to SEQ ID NO: 24454
  GFR-binding peptide
  MOD_RES (1)..(3)..(35)..(36): Xaa is C or S

SEQ ID NO: 62769 - protein, 42 aa, Artificial Sequence; identical to SEQ ID NO: 3476
  GFR-binding peptide
  MOD_RES (1)..(3)..(37)..(38): Xaa is C or S
  MOD_RES (15)..(16)..(17)..(18)..(19): Xaa is A or G
  MOD_RES (20)..(21)..(22)..(23): Xaa is A or G or is absent

SEQ ID NO: 62770 - protein, 37 aa, Artificial Sequence; identical to SEQ ID NO: 24458
  GFR-binding peptide
  MOD_RES (33)..(34): Xaa is C or S
  MOD_RES (11)..(12)..(13)..(14)..(15): Xaa is A or G
  MOD_RES (16)..(17)..(18)..(19): Xaa is A or G or is absent

SEQ ID NO: 62771 - protein, 34 aa, Artificial Sequence; identical to SEQ ID NO: 3477
  GFR-binding peptide
  MOD_RES (2)..(4): Xaa is C or S

SEQ ID NO: 62772 - protein, 39 aa, Artificial Sequence; identical to SEQ ID NO: 3478
  GFR-binding peptide
  MOD_RES (1)..(3)..(35)..(36): Xaa is C or S

SEQ ID NO: 62773 - protein, 35 aa, Artificial Sequence; identical to SEQ ID NO: 3480
  GFR-binding peptide
  MOD_RES (33)..(34): Xaa is C or S
  MOD_RES (11)..(12)..(13)..(14)..(15): Xaa is A or G
  MOD_RES (16)..(17)..(18)..(19): Xaa is A or G or is absent

SEQ ID NO: 62774 - protein, 39 aa, Artificial Sequence; identical to SEQ ID NO: 31454
  GFR-binding peptide
  MOD_RES (1)..(3)..(36)..(37): Xaa is C or S

SEQ ID NO: 62775 - protein, 34 aa, Artificial Sequence; identical to SEQ ID NO: 31455
  GFR-binding peptide
  MOD_RES (32)..(33): Xaa is C or S

SEQ ID NO: 62776 - protein, 35 aa, Artificial Sequence; identical to SEQ ID NO: 3481
  GFR-binding peptide
  MOD_RES (31)..(32): Xaa is C or S

SEQ ID NO: 62777 - protein, 41 aa, Artificial Sequence; identical to SEQ ID NO: 56380
  GFR-binding peptide
  MOD_RES (2)..(35)..(36): Xaa is C or S
  MOD_RES (13)..(14)..(15)..(16)..(17): Xaa is A or G
  MOD_RES (18)..(19)..(20)..(21): Xaa is A or G or is absent

SEQ ID NO: 62778 - protein, 32 aa, Artificial Sequence
  GFR-binding peptide
  MOD_RES (1)..(1): Xaa is C or S
XSEVVMDYHYKLVVNNASDKYLISIPSLRTPV

SEQ ID NO: 62779 - protein, 39 aa, Artificial Sequence; identical to SEQ ID NO: 31457
  GFR-binding peptide
  MOD_RES (1)..(3)..(35)..(36): Xaa is C or S

SEQ ID NO: 62780 - protein, 35 aa, Artificial Sequence; identical to SEQ ID NO: 3485
  GFR-binding peptide
  MOD_RES (2)..(34): Xaa is C or S

SEQ ID NO: 62781 - protein, 35 aa, Artificial Sequence; identical to SEQ ID NO: 3487
  GFR-binding peptide
  MOD_RES (34)..(35): Xaa is C or S
  MOD_RES (12)..(13)..(14)..(15)..(16): Xaa is A or G
  MOD_RES (17)..(18)..(19)..(20): Xaa is A or G or is absent

SEQ ID NO: 62782 - protein, 40 aa, Artificial Sequence; identical to SEQ ID NO: 3488
  GFR-binding peptide
  MOD_RES (1)..(3)..(36)..(37): Xaa is C or S
  MOD_RES (14)..(15)..(16)..(17)..(18): Xaa is A or G
  MOD_RES (19)..(20)..(21)..(22): Xaa is A or G or is absent

SEQ ID NO: 62783 - protein, 32 aa, Artificial Sequence; identical to SEQ ID NO: 10902
  GFR-binding peptide
  MOD_RES (1)..(1): Xaa is C or S

SEQ ID NO: 62784 - protein, 41 aa, Artificial Sequence; identical to SEQ ID NO: 31462
  GFR-binding peptide
  MOD_RES (1)..(36)..(37): Xaa is C or S
  MOD_RES (14)..(15)..(16)..(17)..(18): Xaa is A or G
  MOD_RES (19)..(20)..(21)..(22): Xaa is A or G or is absent

SEQ ID NO: 62785 - protein, 34 aa, Artificial Sequence; identical to SEQ ID NO: 31463
  GFR-binding peptide
  MOD_RES (33)..(34): Xaa is C or S
  MOD_RES (11)..(12)..(13)..(14)..(15): Xaa is A or G
  MOD_RES (16)..(17)..(18)..(19): Xaa is A or G or is absent

SEQ ID NO: 62786 - protein, 38 aa, Artificial Sequence; identical to SEQ ID NO: 3492
  GFR-binding peptide
  MOD_RES (1)..(3)..(36)..(37): Xaa is C or S
  MOD_RES (14)..(15)..(16)..(17)..(18): Xaa is A or G
  MOD_RES (19)..(20)..(21)..(22): Xaa is A or G or is absent

SEQ ID NO: 62787 - protein, 36 aa, Artificial Sequence; identical to SEQ ID NO: 24473
  GFR-binding peptide
  MOD_RES (1)..(3): Xaa is C or S
  MOD_RES (15)..(16)..(17)..(18)..(19): Xaa is A or G
  MOD_RES (20)..(21)..(22)..(23): Xaa is A or G or is absent

SEQ ID NO: 62788 - protein, 30 aa, Artificial Sequence; identical to SEQ ID NO: 3495
  GFR-binding peptide

SEQ ID NO: 62789 - protein, 32 aa, Artificial Sequence; identical to SEQ ID NO: 3497
  GFR-binding peptide
  MOD_RES (11)..(12)..(13)..(14)..(15): Xaa is A or G
  MOD_RES (16)..(17)..(18)..(19): Xaa is A or G or is absent

SEQ ID NO: 62790 - protein, 33 aa, Artificial Sequence; identical to SEQ ID NO: 3498
  GFR-binding peptide
  MOD_RES (33)..(33): Xaa is C or S
  MOD_RES (11)..(12)..(13)..(14)..(15): Xaa is A or G
  MOD_RES (16)..(17)..(18)..(19): Xaa is A or G or is absent

SEQ ID NO: 62791 - protein, 35 aa, Artificial Sequence
  GFR-binding peptide
  MOD_RES (32)..(33): Xaa is C or S
AEVVMDRHKRLVVNNAADYYLISTASLRAPVXXSA

SEQ ID NO: 62792 - protein, 36 aa, Artificial Sequence
  GFR-binding peptide
  MOD_RES (31)..(32): Xaa is C or S
DVVMGEYKFKIIQQKDNLYLMSIPEMKTPTXXPGAS

SEQ ID NO: 62793 - protein, 40 aa, Artificial Sequence; identical to SEQ ID NO: 24484
  GFR-binding peptide
  MOD_RES (1)..(3)..(35): Xaa is C or S

SEQ ID NO: 62794 - protein, 40 aa, Artificial Sequence; identical to SEQ ID NO: 3502
  GFR-binding peptide
  MOD_RES (2)..(4)..(35)..(36): Xaa is C or S

SEQ ID NO: 62795 - protein, 40 aa, Artificial Sequence; identical to SEQ ID NO: 3503
  GFR-binding peptide
  MOD_RES (1)..(3)..(35)..(36): Xaa is C or S

SEQ ID NO: 62796 - protein, 36 aa, Artificial Sequence; identical to SEQ ID NO: 3504
  GFR-binding peptide
  MOD_RES (32)..(33): Xaa is C or S

SEQ ID NO: 62797 - protein, 35 aa, Artificial Sequence
  GFR-binding peptide
  MOD_RES (31)..(32): Xaa is C or S
EEVIMRHKRLLLVRGNDYYLMSTASTKVPAXXTSP

SEQ ID NO: 62798 - protein, 37 aa, Artificial Sequence; identical to SEQ ID NO: 24487
  GFR-binding peptide
  MOD_RES (1)..(34)..(35): Xaa is C or S
  MOD_RES (12)..(13)..(14)..(15)..(16): Xaa is A or G
  MOD_RES (17)..(18)..(19)..(20): Xaa is A or G or is absent

SEQ ID NO: 62799 - protein, 38 aa, Artificial Sequence; identical to SEQ ID NO: 3505
  GFR-binding peptide
  MOD_RES (1)..(3)..(34)..(35): Xaa is C or S

SEQ ID NO: 62800 - protein, 39 aa, Artificial Sequence
  GFR-binding peptide
  MOD_RES (1)..(3)..(37)..(38): Xaa is C or S
  MOD_RES (15)..(16)..(17)..(18)..(19): Xaa is A or G
  MOD_RES (20)..(21)..(22)..(23): Xaa is A or G or is absent
XGXSEVVMDYHYKLXXXXXXXXXKYLISIPSLRTPVXXT

SEQ ID NO: 62801 - protein, 36 aa, Artificial Sequence; identical to SEQ ID NO: 31489
  GFR-binding peptide
  MOD_RES (2)..(35)..(36): Xaa is C or S
  MOD_RES (13)..(14)..(15)..(16)..(17): Xaa is A or G
  MOD_RES (18)..(19)..(20)..(21): Xaa is A or G or is absent

SEQ ID NO: 62802 - protein, 35 aa, Artificial Sequence; identical to SEQ ID NO: 3509
  GFR-binding peptide
  MOD_RES (2)..(2): Xaa is C or S
  MOD_RES (14)..(15)..(16)..(17)..(18): Xaa is A or G
  MOD_RES (19)..(20)..(21)..(22): Xaa is A or G or is absent

SEQ ID NO: 62803 - protein, 43 aa, Artificial Sequence; identical to SEQ ID NO: 3510
  GFR-binding peptide
  MOD_RES (1)..(3)..(38)..(39): Xaa is C or S
  MOD_RES (16)..(17)..(18)..(19)..(20): Xaa is A or G
  MOD_RES (21)..(22)..(23)..(24): Xaa is A or G or is absent

SEQ ID NO: 62804 - protein, 39 aa, Artificial Sequence; identical to SEQ ID NO: 3511
  GFR-binding peptide
  MOD_RES (1)..(35): Xaa is C or S
  MOD_RES (13)..(14)..(15)..(16)..(17): Xaa is A or G
  MOD_RES (18)..(19)..(20)..(21): Xaa is A or G or is absent

SEQ ID NO: 62805 - protein, 36 aa, Artificial Sequence; identical to SEQ ID NO: 24497
  GFR-binding peptide
  MOD_RES (1)..(3): Xaa is C or S
  MOD_RES (15)..(16)..(17)..(18)..(19): Xaa is A or G
  MOD_RES (20)..(21)..(22)..(23): Xaa is A or G or is absent

SEQ ID NO: 62806 - protein, 34 aa, Artificial Sequence; identical to SEQ ID NO: 3514
  GFR-binding peptide
  MOD_RES (34)..(34): Xaa is C or S
  MOD_RES (12)..(13)..(14)..(15)..(16): Xaa is A or G
  MOD_RES (17)..(18)..(19)..(20): Xaa is A or G or is absent

SEQ ID NO: 62807 - protein, 37 aa, Artificial Sequence; identical to SEQ ID NO: 3515
  GFR-binding peptide
  MOD_RES (2)..(4)..(35)..(36): Xaa is C or S

SEQ ID NO: 62808 - protein, 33 aa, Artificial Sequence
  GFR-binding peptide
  MOD_RES (33)..(33): Xaa is C or S
  MOD_RES (11)..(12)..(13)..(14)..(15): Xaa is A or G
  MOD_RES (16)..(17)..(18)..(19): Xaa is A or G or is absent
DVVMGRHKRLXXXXXXXXXYYLMSTASMKTPTX

SEQ ID NO: 62809 - protein, 35 aa, Artificial Sequence; identical to SEQ ID NO: 24502
  GFR-binding peptide
  MOD_RES (2)..(34)..(35): Xaa is C or S

SEQ ID NO: 62810 - protein, 34 aa, Artificial Sequence
  GFR-binding peptide
  MOD_RES (1)..(1): Xaa is C or S
  MOD_RES (13)..(14)..(15)..(16)..(17): Xaa is A or G
  MOD_RES (18)..(19)..(20)..(21): Xaa is A or G or is absent
XESVAMGRHKRLXXXXXXXXXYYLISTASLKTPV

SEQ ID NO: 62811 - protein, 35 aa, Artificial Sequence; identical to SEQ ID NO: 24505
  GFR-binding peptide
  MOD_RES (2)..(2): Xaa is C or S
  MOD_RES (14)..(15)..(16)..(17)..(18): Xaa is A or G
  MOD_RES (19)..(20)..(21)..(22): Xaa is A or G or is absent

SEQ ID NO: 62812 - protein, 40 aa, Artificial Sequence; identical to SEQ ID NO: 3523
  GFR-binding peptide
  MOD_RES (2)..(34)..(35): Xaa is C or S

SEQ ID NO: 62813 - protein, 32 aa, Artificial Sequence; identical to SEQ ID NO: 31499
  GFR-binding peptide
  MOD_RES (31)..(32): Xaa is C or S

SEQ ID NO: 62814 - protein, 37 aa, Artificial Sequence
  GFR-binding peptide
  MOD_RES (32)..(33): Xaa is C or S
SEVVMDEYKFKVVNNASDLYLISIPELRTPVXXTPPT

SEQ ID NO: 62815 - protein, 35 aa, Artificial Sequence; identical to SEQ ID NO: 24510
  GFR-binding peptide
  MOD_RES (2)..(33)..(34): Xaa is C or S

SEQ ID NO: 62816 - protein, 32 aa, Artificial Sequence; identical to SEQ ID NO: 24514
  GFR-binding peptide
  MOD_RES (1)..(1): Xaa is C or S

SEQ ID NO: 62817 - protein, 36 aa, Artificial Sequence; identical to SEQ ID NO: 3527
  GFR-binding peptide
  MOD_RES (1)..(3)..(34)..(35): Xaa is C or S

SEQ ID NO: 62818 - protein, 38 aa, Artificial Sequence; identical to SEQ ID NO: 31504
  GFR-binding peptide
  MOD_RES (34)..(35): Xaa is C or S
  MOD_RES (12)..(13)..(14)..(15)..(16): Xaa is A or G
  MOD_RES (17)..(18)..(19)..(20): Xaa is A or G or is absent

SEQ ID NO: 62819 - protein, 34 aa, Artificial Sequence
  GFR-binding peptide
  MOD_RES (34)..(34): Xaa is C or S
  MOD_RES (12)..(13)..(14)..(15)..(16): Xaa is A or G
  MOD_RES (17)..(18)..(19)..(20): Xaa is A or G or is absent
SEVVMDEYKFKXXXXXXXXXLYLISIPELRTPVX

SEQ ID NO: 62820 - protein, 35 aa, Artificial Sequence
  GFR-binding peptide
  MOD_RES (1)..(3)..(35): Xaa is C or S
XGXRDVVMGEYKFKIIQQKDNLYLMSIPEMKTPTX

SEQ ID NO: 62821 - protein, 35 aa, Artificial Sequence; identical to SEQ ID NO: 3534
  GFR-binding peptide
  MOD_RES (1)..(34)..(35): Xaa is C or S
  MOD_RES (12)..(13)..(14)..(15)..(16): Xaa is A or G
  MOD_RES (17)..(18)..(19)..(20): Xaa is A or G or is absent

SEQ ID NO: 62822 - protein, 34 aa, Artificial Sequence; identical to SEQ ID NO: 24523
  GFR-binding peptide
  MOD_RES (31)..(32): Xaa is C or S

SEQ ID NO: 62823 - protein, 36 aa, Artificial Sequence; identical to SEQ ID NO: 3535
  GFR-binding peptide
  MOD_RES (1)..(3)..(36): Xaa is C or S
  MOD_RES (14)..(15)..(16)..(17)..(18): Xaa is A or G
  MOD_RES (19)..(20)..(21)..(22): Xaa is A or G or is absent

SEQ ID NO: 62824 - protein, 38 aa, Artificial Sequence; identical to SEQ ID NO: 24526
  GFR-binding peptide
  MOD_RES (2)..(34)..(35): Xaa is C or S

SEQ ID NO: 62825 - protein, 34 aa, Artificial Sequence
  GFR-binding peptide
  MOD_RES (31)..(32): Xaa is C or S
EVVMDRHKRLVVNNAADYYLISTASLRAPVXXSA

SEQ ID NO: 62826 - protein, 39 aa, Artificial Sequence; identical to SEQ ID NO: 24527
  GFR-binding peptide
  MOD_RES (1)..(33)..(34): Xaa is C or S

SEQ ID NO: 62827 - protein, 38 aa, Artificial Sequence; identical to SEQ ID NO: 24531
  GFR-binding peptide
  MOD_RES (1)..(3)..(37)..(38): Xaa is C or S
  MOD_RES (15)..(16)..(17)..(18)..(19): Xaa is A or G
  MOD_RES (20)..(21)..(22)..(23): Xaa is A or G or is absent

SEQ ID NO: 62828 - protein, 38 aa, Artificial Sequence; identical to SEQ ID NO: 24532
  GFR-binding peptide
  MOD_RES (33)..(34): Xaa is C or S
  MOD_RES (11)..(12)..(13)..(14)..(15): Xaa is A or G
  MOD_RES (16)..(17)..(18)..(19): Xaa is A or G or is absent

SEQ ID NO: 62829 - protein, 43 aa, Artificial Sequence; identical to SEQ ID NO: 10947
  GFR-binding peptide
  MOD_RES (1)..(3)..(37)..(38): Xaa is C or S
  MOD_RES (15)..(16)..(17)..(18)..(19): Xaa is A or G
  MOD_RES (20)..(21)..(22)..(23): Xaa is A or G or is absent

SEQ ID NO: 62830 - protein, 35 aa, Artificial Sequence; identical to SEQ ID NO: 3538
  GFR-binding peptide
  MOD_RES (2)..(33)..(34): Xaa is C or S

SEQ ID NO: 62831 - protein, 42 aa, Artificial Sequence
  GFR-binding peptide
  MOD_RES (2)..(36)..(37): Xaa is C or S
  MOD_RES (14)..(15)..(16)..(17)..(18): Xaa is A or G
  MOD_RES (19)..(20)..(21)..(22): Xaa is A or G or is absent
GXSEVVMDEYKFKXXXXXXXXXLYLISIPELRTPVXXTPPTS

SEQ ID NO: 62832 - protein, 37 aa, Artificial Sequence; identical to SEQ ID NO: 24533
  GFR-binding peptide
  MOD_RES (31)..(32): Xaa is C or S

SEQ ID NO: 62833 - protein, 41 aa, Artificial Sequence
  GFR-binding peptide
  MOD_RES (2)..(4)..(38)..(39): Xaa is C or S
  MOD_RES (16)..(17)..(18)..(19)..(20): Xaa is A or G
  MOD_RES (21)..(22)..(23)..(24): Xaa is A or G or is absent
RXAXSEVTMNPIKGYXXXXXXXXXFYLINIPSMKEPVXXPE

SEQ ID NO: 62834 - protein, 38 aa, Artificial Sequence; identical to SEQ ID NO: 3542
  GFR-binding peptide
  MOD_RES (2)..(4)..(38): Xaa is C or S
  MOD_RES (16)..(17)..(18)..(19)..(20): Xaa is A or G
  MOD_RES (21)..(22)..(23)..(24): Xaa is A or G or is absent

SEQ ID NO: 62835 - protein, 38 aa, Artificial Sequence; identical to SEQ ID NO: 3543
  GFR-binding peptide
  MOD_RES (1)..(3)..(35)..(36): Xaa is C or S

SEQ ID NO: 62836 - protein, 38 aa, Artificial Sequence; identical to SEQ ID NO: 24538
  GFR-binding peptide
  MOD_RES (1)..(35)..(36): Xaa is C or S
  MOD_RES (13)..(14)..(15)..(16)..(17): Xaa is A or G
  MOD_RES (18)..(19)..(20)..(21): Xaa is A or G or is absent

SEQ ID NO: 62837 - protein, 35 aa, Artificial Sequence; identical to SEQ ID NO: 3545
  GFR-binding peptide
  MOD_RES (1)..(35): Xaa is C or S
  MOD_RES (13)..(14)..(15)..(16)..(17): Xaa is A or G
  MOD_RES (18)..(19)..(20)..(21): Xaa is A or G or is absent

SEQ ID NO: 62838 - protein, 33 aa, Artificial Sequence; identical to SEQ ID NO: 31530
  GFR-binding peptide
  MOD_RES (1)..(33): Xaa is C or S

SEQ ID NO: 62839 - protein, 37 aa, Artificial Sequence
  GFR-binding peptide
  MOD_RES (33)..(34): Xaa is C or S
  MOD_RES (11)..(12)..(13)..(14)..(15): Xaa is A or G
  MOD_RES (16)..(17)..(18)..(19): Xaa is A or G or is absent
DVVMGRHKRLXXXXXXXXXYYLMSTASMKTPTXXPGA

SEQ ID NO: 62840 - protein, 37 aa, Artificial Sequence; identical to SEQ ID NO: 24540
  GFR-binding peptide
  MOD_RES (2)..(4)..(36)..(37): Xaa is C or S

SEQ ID NO: 62841 - protein, 38 aa, Artificial Sequence; identical to SEQ ID NO: 56461
  GFR-binding peptide
  MOD_RES (2)..(4)..(37)..(38): Xaa is C or S
  MOD_RES (15)..(16)..(17)..(18)..(19): Xaa is A or G
  MOD_RES (20)..(21)..(22)..(23): Xaa is A or G or is absent

SEQ ID NO: 62842 - protein, 36 aa, Artificial Sequence; identical to SEQ ID NO: 31534
  GFR-binding peptide
  MOD_RES (2)..(34)..(35): Xaa is C or S

SEQ ID NO: 62843 - protein, 33 aa, Artificial Sequence
  GFR-binding peptide
  MOD_RES (31)..(32): Xaa is C or S
SKVVMPIKGYVKPTRGVFYLINIPSLDQPVXXP

SEQ ID NO: 62844 - protein, 40 aa, Artificial Sequence
  GFR-binding peptide
  MOD_RES (2)..(4)..(38)..(39): Xaa is C or S
  MOD_RES (16)..(17)..(18)..(19)..(20): Xaa is A or G
  MOD_RES (21)..(22)..(23)..(24): Xaa is A or G or is absent
RXGXSEVVMDEYKFKXXXXXXXXXLYLISIPELRTPVXXT

SEQ ID NO: 62845 - protein, 34 aa, Artificial Sequence; identical to SEQ ID NO: 3549
  GFR-binding peptide
  MOD_RES (2)..(2): Xaa is C or S
  MOD_RES (13)..(14)..(15)..(16)..(17): Xaa is A or G
  MOD_RES (18)..(19)..(20)..(21): Xaa is A or G or is absent

SEQ ID NO: 62846 - protein, 35 aa, Artificial Sequence
  GFR-binding peptide
  MOD_RES (1)..(35): Xaa is C or S
  MOD_RES (13)..(14)..(15)..(16)..(17): Xaa is A or G
  MOD_RES (18)..(19)..(20)..(21): Xaa is A or G or is absent
XESVAMGRHKRLXXXXXXXXXYYLISTASLKTPVX

SEQ ID NO: 62847 - protein, 40 aa, Artificial Sequence; identical to SEQ ID NO: 24550
  GFR-binding peptide
  MOD_RES (34)..(35): Xaa is C or S
  MOD_RES (12)..(13)..(14)..(15)..(16): Xaa is A or G
  MOD_RES (17)..(18)..(19)..(20): Xaa is A or G or is absent

SEQ ID NO: 62848 - protein, 37 aa, Artificial Sequence
  GFR-binding peptide
  MOD_RES (1)..(32)..(33): Xaa is C or S
XSRVIMPIKGYVKPKRGVFYLINIPSLAQPVXXPAAS

SEQ ID NO: 62849 - protein, 36 aa, Artificial Sequence
  GFR-binding peptide
  MOD_RES (33)..(34): Xaa is C or S
  MOD_RES (11)..(12)..(13)..(14)..(15): Xaa is A or G
  MOD_RES (16)..(17)..(18)..(19): Xaa is A or G or is absent
DVVMGEYKFKXXXXXXXXXLYLMSIPEMKTPTXXPG

SEQ ID NO: 62850 - protein, 39 aa, Artificial Sequence
  GFR-binding peptide
  MOD_RES (2)..(34)..(35): Xaa is C or S
GXESVAMGRHKRLYTVVGKDYYLISTASLKTPVXXAKSA

SEQ ID NO: 62851 - protein, 39 aa, Artificial Sequence; identical to SEQ ID NO: 3554
  GFR-binding peptide
  MOD_RES (1)..(33)..(34): Xaa is C or S

SEQ ID NO: 62852 - protein, 42 aa, Artificial Sequence; identical to SEQ ID NO: 24558
  GFR-binding peptide
  MOD_RES (1)..(3)..(37)..(38): Xaa is C or S
  MOD_RES (15)..(16)..(17)..(18)..(19): Xaa is A or G
  MOD_RES (20)..(21)..(22)..(23): Xaa is A or G or is absent

SEQ ID NO: 62853 - protein, 40 aa, Artificial Sequence; identical to SEQ ID NO: 24560
  GFR-binding peptide
  MOD_RES (2)..(34)..(35): Xaa is C or S

SEQ ID NO: 62854 - protein, 38 aa, Artificial Sequence
  GFR-binding peptide
  MOD_RES (2)..(34)..(35): Xaa is C or S
GXSEVVMDYHYKLVVNNASDKYLISIPSLRTPVXXTPP

SEQ ID NO: 62855 - protein, 38 aa, Artificial Sequence; identical to SEQ ID NO: 24562
  GFR-binding peptide
  MOD_RES (2)..(34)..(35): Xaa is C or S

SEQ ID NO: 62856 - protein, 39 aa, Artificial Sequence; identical to SEQ ID NO: 3556
  GFR-binding peptide
  MOD_RES (2)..(33)..(34): Xaa is C or S

SEQ ID NO: 62857 - protein, 39 aa, Artificial Sequence; identical to SEQ ID NO: 24564
  GFR-binding peptide
  MOD_RES (1)..(3)..(35)..(36): Xaa is C or S

SEQ ID NO: 62858 - protein, 42 aa, Artificial Sequence; identical to SEQ ID NO: 24566
  GFR-binding peptide
  MOD_RES (1)..(3)..(37)..(38): Xaa is C or S
  MOD_RES (15)..(16)..(17)..(18)..(19): Xaa is A or G
  MOD_RES (20)..(21)..(22)..(23): Xaa is A or G or is absent

SEQ ID NO: 62859 - protein, 33 aa, Artificial Sequence; identical to SEQ ID NO: 3558
  GFR-binding peptide
  MOD_RES (12)..(13)..(14)..(15)..(16): Xaa is A or G
  MOD_RES (17)..(18)..(19)..(20): Xaa is A or G or is absent

SEQ ID NO: 62860 - protein, 35 aa, Artificial Sequence; identical to SEQ ID NO: 24568
  GFR-binding peptide
  MOD_RES (34)..(35): Xaa is C or S
  MOD_RES (12)..(13)..(14)..(15)..(16): Xaa is A or G
  MOD_RES (17)..(18)..(19)..(20): Xaa is A or G or is absent

SEQ ID NO: 62861 - protein, 34 aa, Artificial Sequence
  GFR-binding peptide
  MOD_RES (2)..(33)..(34): Xaa is C or S
GXEEVIMRHKRLLLVRGNDYYLMSTASTKVPAXX

SEQ ID NO: 62862 - protein, 33 aa, Artificial Sequence; identical to SEQ ID NO: 3561
  GFR-binding peptide
  MOD_RES (1)..(33): Xaa is C or S

SEQ ID NO: 62863 - protein, 35 aa, Artificial Sequence; identical to SEQ ID NO: 3562
  GFR-binding peptide
  MOD_RES (2)..(4): Xaa is C or S

SEQ ID NO: 62864 - protein, 33 aa, Artificial Sequence; identical to SEQ ID NO: 10982
  GFR-binding peptide
  MOD_RES (32)..(33): Xaa is C or S

SEQ ID NO: 62865 - protein, 32 aa, Artificial Sequence; identical to SEQ ID NO: 3564
  GFR-binding peptide
  MOD_RES (11)..(12)..(13)..(14)..(15): Xaa is A or G
  MOD_RES (16)..(17)..(18)..(19): Xaa is A or G or is absent

SEQ ID NO: 62866 - protein, 37 aa, Artificial Sequence; identical to SEQ ID NO: 24575
  GFR-binding peptide
  MOD_RES (32)..(33): Xaa is C or S

SEQ ID NO: 62867 - protein, 38 aa, Artificial Sequence; identical to SEQ ID NO: 56491
  GFR-binding peptide
  MOD_RES (33)..(34): Xaa is C or S
  MOD_RES (11)..(12)..(13)..(14)..(15): Xaa is A or G
  MOD_RES (16)..(17)..(18)..(19): Xaa is A or G or is absent

SEQ ID NO: 62868 - protein, 36 aa, Artificial Sequence
  GFR-binding peptide
  MOD_RES (1)..(3)..(35)..(36): Xaa is C or S
XAXSEVTMNRHKRLVVNKNEDYYLISTASMKEPVXX

SEQ ID NO: 62869 - protein, 41 aa, Artificial Sequence; identical to SEQ ID NO: 3568
  GFR-binding peptide
  MOD_RES (1)..(3)..(35)..(36): Xaa is C or S

SEQ ID NO: 62870 - protein, 35 aa, Artificial Sequence; identical to SEQ ID NO: 3570
  GFR-binding peptide
  MOD_RES (2)..(34)..(35): Xaa is C or S

SEQ ID NO: 62871 - protein, 35 aa, Artificial Sequence
  GFR-binding peptide
  MOD_RES (31)..(32): Xaa is C or S
EVVMDRHKRLVVNNASDYYLISTASLRTPVXXTPP

SEQ ID NO: 62872 - protein, 30 aa, Artificial Sequence; identical to SEQ ID NO: 3571
  GFR-binding peptide

SEQ ID NO: 62873 - protein, 38 aa, Artificial Sequence; identical to SEQ ID NO: 3572
  GFR-binding peptide
  MOD_RES (2)..(4)..(38): Xaa is C or S
  MOD_RES (16)..(17)..(18)..(19)..(20): Xaa is A or G
  MOD_RES (21)..(22)..(23)..(24): Xaa is A or G or is absent

SEQ ID NO: 62874 - protein, 40 aa, Artificial Sequence; identical to SEQ ID NO: 31576
  GFR-binding peptide
  MOD_RES (34)..(35): Xaa is C or S
  MOD_RES (12)..(13)..(14)..(15)..(16): Xaa is A or G
  MOD_RES (17)..(18)..(19)..(20): Xaa is A or G or is absent

SEQ ID NO: 62875 - protein, 32 aa, Artificial Sequence; identical to SEQ ID NO: 3577
  GFR-binding peptide
  MOD_RES (1)..(1): Xaa is C or S

SEQ ID NO: 62876 - protein, 37 aa, Artificial Sequence; identical to SEQ ID NO: 3579
  GFR-binding peptide
  MOD_RES (2)..(36)..(37): Xaa is C or S
  MOD_RES (14)..(15)..(16)..(17)..(18): Xaa is A or G
  MOD_RES (19)..(20)..(21)..(22): Xaa is A or G or is absent

SEQ ID NO: 62877 - protein, 34 aa, Artificial Sequence; identical to SEQ ID NO: 24585
  GFR-binding peptide
  MOD_RES (31)..(32): Xaa is C or S

SEQ ID NO: 62878 - protein, 42 aa, Artificial Sequence; identical to SEQ ID NO: 3580
  GFR-binding peptide
  MOD_RES (1)..(36)..(37): Xaa is C or S
  MOD_RES (14)..(15)..(16)..(17)..(18): Xaa is A or G
  MOD_RES (19)..(20)..(21)..(22): Xaa is A or G or is absent

SEQ ID NO: 62879 - protein, 33 aa, Artificial Sequence; identical to SEQ ID NO: 24588
  GFR-binding peptide
  MOD_RES (33)..(33): Xaa is C or S
  MOD_RES (11)..(12)..(13)..(14)..(15): Xaa is A or G
  MOD_RES (16)..(17)..(18)..(19): Xaa is A or G or is absent

SEQ ID NO: 62880 - protein, 32 aa, Artificial Sequence; identical to SEQ ID NO: 3581
  GFR-binding peptide
  MOD_RES (32)..(32): Xaa is C or S

SEQ ID NO: 62881 - protein, 37 aa, Artificial Sequence; identical to SEQ ID NO: 3582
  GFR-binding peptide
  MOD_RES (34)..(35): Xaa is C or S
  MOD_RES (12)..(13)..(14)..(15)..(16): Xaa is A or G
  MOD_RES (17)..(18)..(19)..(20): Xaa is A or G or is absent

SEQ ID NO: 62882 - protein, 38 aa, Artificial Sequence; identical to SEQ ID NO: 3583
  GFR-binding peptide
  MOD_RES (32)..(33): Xaa is C or S

SEQ ID NO: 62883 - protein, 41 aa, Artificial Sequence; identical to SEQ ID NO: 24593
  GFR-binding peptide
  MOD_RES (1)..(35)..(36): Xaa is C or S
  MOD_RES (13)..(14)..(15)..(16)..(17): Xaa is A or G
  MOD_RES (18)..(19)..(20)..(21): Xaa is A or G or is absent

SEQ ID NO: 62884 - protein, 35 aa, Artificial Sequence
  GFR-binding peptide
  MOD_RES (1)..(35): Xaa is C or S
  MOD_RES (13)..(14)..(15)..(16)..(17): Xaa is A or G
  MOD_RES (18)..(19)..(20)..(21): Xaa is A or G or is absent
XSEVVMDRHKRLXXXXXXXXXYYLISTASLRTPVX

SEQ ID NO: 62885 - protein, 34 aa, Artificial Sequence; identical to SEQ ID NO: 3585
  GFR-binding peptide
  MOD_RES (1)..(33)..(34): Xaa is C or S

SEQ ID NO: 62886 - protein, 39 aa, Artificial Sequence; identical to SEQ ID NO: 3586
  GFR-binding peptide
  MOD_RES (2)..(4)..(36)..(37): Xaa is C or S

SEQ ID NO: 62887 - protein, 36 aa, Artificial Sequence; identical to SEQ ID NO: 3589
  GFR-binding peptide
  MOD_RES (1)..(3)..(36): Xaa is C or S
  MOD_RES (14)..(15)..(16)..(17)..(18): Xaa is A or G
  MOD_RES (19)..(20)..(21)..(22): Xaa is A or G or is absent

SEQ ID NO: 62888 - protein, 41 aa, Artificial Sequence; identical to SEQ ID NO: 24599
  GFR-binding peptide
  MOD_RES (1)..(35)..(36): Xaa is C or S
  MOD_RES (13)..(14)..(15)..(16)..(17): Xaa is A or G
  MOD_RES (18)..(19)..(20)..(21): Xaa is A or G or is absent

SEQ ID NO: 62889 - protein, 40 aa, Artificial Sequence; identical to SEQ ID NO: 3591
  GFR-binding peptide
  MOD_RES (1)..(3)..(37)..(38): Xaa is C or S
  MOD_RES (15)..(16)..(17)..(18)..(19): Xaa is A or G
  MOD_RES (20)..(21)..(22)..(23): Xaa is A or G or is absent

SEQ ID NO: 62890 - protein, 40 aa, Artificial Sequence; identical to SEQ ID NO: 3592
  GFR-binding peptide
  MOD_RES (1)..(3)..(34)..(35): Xaa is C or S

SEQ ID NO: 62891 - protein, 41 aa, Artificial Sequence; identical to SEQ ID NO: 3593
  GFR-binding peptide
  MOD_RES (1)..(3)..(36)..(37): Xaa is C or S

SEQ ID NO: 62892 - protein, 40 aa, Artificial Sequence; identical to SEQ ID NO: 24604
  GFR-binding peptide
  MOD_RES (1)..(3)..(38)..(39): Xaa is C or S
  MOD_RES (16)..(17)..(18)..(19)..(20): Xaa is A or G
  MOD_RES (21)..(22)..(23)..(24): Xaa is A or G or is absent

SEQ ID NO: 62893 - protein, 42 aa, Artificial Sequence
  GFR-binding peptide
  MOD_RES (2)..(36)..(37): Xaa is C or S
  MOD_RES (14)..(15)..(16)..(17)..(18): Xaa is A or G
  MOD_RES (19)..(20)..(21)..(22): Xaa is A or G or is absent
GXSEVVMDYHYKLXXXXXXXXXKYLISIPSLRTPVXXTPPTS

SEQ ID NO: 62894 - protein, 37 aa, Artificial Sequence
  GFR-binding peptide
  MOD_RES (1)..(3)..(36)..(37): Xaa is C or S
  MOD_RES (14)..(15)..(16)..(17)..(18): Xaa is A or G
  MOD_RES (19)..(20)..(21)..(22): Xaa is A or G or is absent
XGXEEVIMEYKFKXXXXXXXXXLYLMSIPETKVPAXX

SEQ ID NO: 62895 - protein, 33 aa, Artificial Sequence
  GFR-binding peptide
  MOD_RES (2)..(33): Xaa is C or S
GXEEVIMRHKRLLLVRGNDYYLMSTASTKVPAX

SEQ ID NO: 62896 - protein, 37 aa, Artificial Sequence
  GFR-binding peptide
  MOD_RES (2)..(33)..(34): Xaa is C or S
GXEEVIMRHKRLLLVRGNDYYLMSTASTKVPAXXTSP

SEQ ID NO: 62897 - protein, 34 aa, Artificial Sequence; identical to SEQ ID NO: 31593
  GFR-binding peptide
  MOD_RES (1)..(33)..(34): Xaa is C or S

SEQ ID NO: 62898 - protein, 38 aa, Artificial Sequence; identical to SEQ ID NO: 31595
  GFR-binding peptide
  MOD_RES (1)..(3)..(37)..(38): Xaa is C or S
  MOD_RES (15)..(16)..(17)..(18)..(19): Xaa is A or G
  MOD_RES (20)..(21)..(22)..(23): Xaa is A or G or is absent

SEQ ID NO: 62899 - protein, 36 aa, Artificial Sequence; identical to SEQ ID NO: 24607
  GFR-binding peptide
  MOD_RES (32)..(33): Xaa is C or S

SEQ ID NO: 62900 - protein, 38 aa, Artificial Sequence; identical to SEQ ID NO: 24609
  GFR-binding peptide
  MOD_RES (1)..(3)..(37)..(38): Xaa is C or S
  MOD_RES (15)..(16)..(17)..(18)..(19): Xaa is A or G
  MOD_RES (20)..(21)..(22)..(23): Xaa is A or G or is absent

SEQ ID NO: 62901 - protein, 37 aa, Artificial Sequence; identical to SEQ ID NO: 24611
  GFR-binding peptide
  MOD_RES (1)..(3)..(34)..(35): Xaa is C or S

SEQ ID NO: 62902 - protein, 38 aa, Artificial Sequence; identical to SEQ ID NO: 3600
  GFR-binding peptide
  MOD_RES (1)..(3)..(36)..(37): Xaa is C or S

SEQ ID NO: 62903 - protein, 35 aa, Artificial Sequence; identical to SEQ ID NO: 3603
  GFR-binding peptide
  MOD_RES (1)..(3): Xaa is C or S
  MOD_RES (14)..(15)..(16)..(17)..(18): Xaa is A or G
  MOD_RES (19)..(20)..(21)..(22): Xaa is A or G or is absent

SEQ ID NO: 62904 - protein, 39 aa, Artificial Sequence; identical to SEQ ID NO: 3604
  GFR-binding peptide
  MOD_RES (2)..(36)..(37): Xaa is C or S
  MOD_RES (14)..(15)..(16)..(17)..(18): Xaa is A or G
  MOD_RES (19)..(20)..(21)..(22): Xaa is A or G or is absent

SEQ ID NO: 62905 - protein, 35 aa, Artificial Sequence
  GFR-binding peptide
  MOD_RES (1)..(33)..(34): Xaa is C or S
XSEVTMNEYKFKVVNKNEDLYLISIPEMKEPVXXP

SEQ ID NO: 62906 - protein, 33 aa, Artificial Sequence; identical to SEQ ID NO: 24618
  GFR-binding peptide
  MOD_RES (12)..(13)..(14)..(15)..(16): Xaa is A or G
  MOD_RES (17)..(18)..(19)..(20): Xaa is A or G or is absent

SEQ ID NO: 62907 - protein, 38 aa, Artificial Sequence; identical to SEQ ID NO: 24619
  GFR-binding peptide
  MOD_RES (2)..(4)..(36)..(37): Xaa is C or S

SEQ ID NO: 62908 - protein, 39 aa, Artificial Sequence
  GFR-binding peptide
  MOD_RES (1)..(35)..(36): Xaa is C or S
  MOD_RES (13)..(14)..(15)..(16)..(17): Xaa is A or G
  MOD_RES (18)..(19)..(20)..(21): Xaa is A or G or is absent
XSEVVMDEYKFKXXXXXXXXXLYLISIPELRTPVXXTPP

SEQ ID NO: 62909 - protein, 40 aa, Artificial Sequence; identical to SEQ ID NO: 3613
  GFR-binding peptide
  MOD_RES (2)..(4)..(38)..(39): Xaa is C or S
  MOD_RES (16)..(17)..(18)..(19)..(20): Xaa is A or G
  MOD_RES (21)..(22)..(23)..(24): Xaa is A or G or is absent

SEQ ID NO: 62910 - protein, 34 aa, Artificial Sequence; identical to SEQ ID NO: 31610
  GFR-binding peptide
  MOD_RES (1)..(3): Xaa is C or S

SEQ ID NO: 62911 - protein, 34 aa, Artificial Sequence; identical to SEQ ID NO: 3615
  GFR-binding peptide
  MOD_RES (31)..(32): Xaa is C or S

SEQ ID NO: 62912 - protein, 35 aa, Artificial Sequence; identical to SEQ ID NO: 24623
  GFR-binding peptide
  MOD_RES (2)..(2): Xaa is C or S
  MOD_RES (14)..(15)..(16)..(17)..(18): Xaa is A or G
  MOD_RES (19)..(20)..(21)..(22): Xaa is A or G or is absent

SEQ ID NO: 62913 - protein, 38 aa, Artificial Sequence; identical to SEQ ID NO: 24625
  GFR-binding peptide
  MOD_RES (1)..(3)..(37)..(38): Xaa is C or S
  MOD_RES (15)..(16)..(17)..(18)..(19): Xaa is A or G
  MOD_RES (20)..(21)..(22)..(23): Xaa is A or G or is absent

SEQ ID NO: 62914 - protein, 40 aa, Artificial Sequence
  GFR-binding peptide
  MOD_RES (2)..(4)..(37)..(38): Xaa is C or S
  MOD_RES (15)..(16)..(17)..(18)..(19): Xaa is A or G
  MOD_RES (20)..(21)..(22)..(23): Xaa is A or G or is absent
LXGXEEVIMEYKFKXXXXXXXXXLYLMSIPETKVPAXXTS

SEQ ID NO: 62915 - protein, 37 aa, Artificial Sequence; identical to SEQ ID NO: 11036
  GFR-binding peptide
  MOD_RES (1)..(35)..(36): Xaa is C or S
  MOD_RES (13)..(14)..(15)..(16)..(17): Xaa is A or G
  MOD_RES (18)..(19)..(20)..(21): Xaa is A or G or is absent

SEQ ID NO: 62916 - protein, 39 aa, Artificial Sequence; identical to SEQ ID NO: 3620
  GFR-binding peptide
  MOD_RES (2)..(4)..(36)..(37): Xaa is C or S

SEQ ID NO: 62917 - protein, 36 aa, Artificial Sequence; identical to SEQ ID NO: 24629
  GFR-binding peptide
  MOD_RES (31)..(32): Xaa is C or S

SEQ ID NO: 62918 - protein, 35 aa, Artificial Sequence; identical to SEQ ID NO: 3622
  GFR-binding peptide
  MOD_RES (2)..(35): Xaa is C or S

SEQ ID NO: 62919 - protein, 37 aa, Artificial Sequence
  GFR-binding peptide
  MOD_RES (1)..(35)..(36): Xaa is C or S
  MOD_RES (13)..(14)..(15)..(16)..(17): Xaa is A or G
  MOD_RES (18)..(19)..(20)..(21): Xaa is A or G or is absent
XSEVTMNYHYKLXXXXXXXXXKYLISIPSMKEPVXXP

SEQ ID NO: 62920 - protein, 37 aa, Artificial Sequence; identical to SEQ ID NO: 24633
  GFR-binding peptide
  MOD_RES (33)..(34): Xaa is C or S
  MOD_RES (11)..(12)..(13)..(14)..(15): Xaa is A or G
  MOD_RES (16)..(17)..(18)..(19): Xaa is A or G or is absent

SEQ ID NO: 62921 - protein, 38 aa, Artificial Sequence; identical to SEQ ID NO: 31626
  GFR-binding peptide
  MOD_RES (1)..(36)..(37): Xaa is C or S
  MOD_RES (14)..(15)..(16)..(17)..(18): Xaa is A or G
  MOD_RES (19)..(20)..(21)..(22): Xaa is A or G or is absent

SEQ ID NO: 62922 - protein, 38 aa, Artificial Sequence; identical to SEQ ID NO: 31630
  GFR-binding peptide
  MOD_RES (1)..(3)..(35)..(36): Xaa is C or S

SEQ ID NO: 62923 - protein, 37 aa, Artificial Sequence
  GFR-binding peptide
  MOD_RES (1)..(32)..(33): Xaa is C or S
XSKVIMPIKGYIKPTKGIFYLINIPSLDQSVXXPSAS

SEQ ID NO: 62924 - protein, 42 aa, Artificial Sequence; identical to SEQ ID NO: 31635
  GFR-binding peptide
  MOD_RES (2)..(36)..(37): Xaa is C or S
  MOD_RES (14)..(15)..(16)..(17)..(18): Xaa is A or G
  MOD_RES (19)..(20)..(21)..(22): Xaa is A or G or is absent

SEQ ID NO: 62925 - protein, 37 aa, Artificial Sequence; identical to SEQ ID NO: 3629
  GFR-binding peptide
  MOD_RES (1)..(34)..(35): Xaa is C or S
  MOD_RES (12)..(13)..(14)..(15)..(16): Xaa is A or G
  MOD_RES (17)..(18)..(19)..(20): Xaa is A or G or is absent

SEQ ID NO: 62926 - protein, 39 aa, Artificial Sequence; identical to SEQ ID NO: 3632
  GFR-binding peptide
  MOD_RES (33)..(34): Xaa is C or S

SEQ ID NO: 62927 - protein, 35 aa, Artificial Sequence; identical to SEQ ID NO: 3633
  GFR-binding peptide
  MOD_RES (2)..(34)..(35): Xaa is C or S

SEQ ID NO: 62928 - protein, 37 aa, Artificial Sequence; identical to SEQ ID NO: 24646
  GFR-binding peptide
  MOD_RES (1)..(3)..(37): Xaa is C or S
  MOD_RES (15)..(16)..(17)..(18)..(19): Xaa is A or G
  MOD_RES (20)..(21)..(22)..(23): Xaa is A or G or is absent

SEQ ID NO: 62929 - protein, 32 aa, Artificial Sequence; identical to SEQ ID NO: 24647
  GFR-binding peptide
  MOD_RES (11)..(12)..(13)..(14)..(15): Xaa is A or G
  MOD_RES (16)..(17)..(18)..(19): Xaa is A or G or is absent

SEQ ID NO: 62930 - protein, 37 aa, Artificial Sequence; identical to SEQ ID NO: 31642
  GFR-binding peptide
  MOD_RES (1)..(3)..(37): Xaa is C or S
  MOD_RES (15)..(16)..(17)..(18)..(19): Xaa is A or G
  MOD_RES (20)..(21)..(22)..(23): Xaa is A or G or is absent

SEQ ID NO: 62931 - protein, 41 aa, Artificial Sequence; identical to SEQ ID NO: 24650
  GFR-binding peptide
  MOD_RES (2)..(35)..(36): Xaa is C or S
  MOD_RES (13)..(14)..(15)..(16)..(17): Xaa is A or G
  MOD_RES (18)..(19)..(20)..(21): Xaa is A or G or is absent

SEQ ID NO: 62932 - protein, 37 aa, Artificial Sequence; identical to SEQ ID NO: 3635
  GFR-binding peptide
  MOD_RES (2)..(35)..(36): Xaa is C or S
  MOD_RES (13)..(14)..(15)..(16)..(17): Xaa is A or G
  MOD_RES (18)..(19)..(20)..(21): Xaa is A or G or is absent

SEQ ID NO: 62933 - protein, 40 aa, Artificial Sequence; identical to SEQ ID NO: 3636
  GFR-binding peptide
  MOD_RES (1)..(34)..(35): Xaa is C or S
  MOD_RES (12)..(13)..(14)..(15)..(16): Xaa is A or G
  MOD_RES (17)..(18)..(19)..(20): Xaa is A or G or is absent

SEQ ID NO: 62934 - protein, 35 aa, Artificial Sequence; identical to SEQ ID NO: 3637
  GFR-binding peptide
  MOD_RES (2)..(35): Xaa is C or S
  MOD_RES (13)..(14)..(15)..(16)..(17): Xaa is A or G
  MOD_RES (18)..(19)..(20)..(21): Xaa is A or G or is absent

SEQ ID NO: 62935 - protein, 34 aa, Artificial Sequence; identical to SEQ ID NO: 3638
  GFR-binding peptide
  MOD_RES (1)..(33)..(34): Xaa is C or S

SEQ ID NO: 62936 - protein, 36 aa, Artificial Sequence; identical to SEQ ID NO: 3639
  GFR-binding peptide
  MOD_RES (2)..(4)..(35)..(36): Xaa is C or S

SEQ ID NO: 62937 - protein, 40 aa, Artificial Sequence; identical to SEQ ID NO: 56579
  GFR-binding peptide
  MOD_RES (2)..(36)..(37): Xaa is C or S
  MOD_RES (14)..(15)..(16)..(17)..(18): Xaa is A or G
  MOD_RES (19)..(20)..(21)..(22): Xaa is A or G or is absent

SEQ ID NO: 62938 - protein, 36 aa, Artificial Sequence; identical to SEQ ID NO: 3640
  GFR-binding peptide
  MOD_RES (1)..(35)..(36): Xaa is C or S
  MOD_RES (13)..(14)..(15)..(16)..(17): Xaa is A or G
  MOD_RES (18)..(19)..(20)..(21): Xaa is A or G or is absent

SEQ ID NO: 62939 - protein, 42 aa, Artificial Sequence; identical to SEQ ID NO: 3642
  GFR-binding peptide
  MOD_RES (2)..(4)..(38)..(39): Xaa is C or S
  MOD_RES (16)..(17)..(18)..(19)..(20): Xaa is A or G
  MOD_RES (21)..(22)..(23)..(24): Xaa is A or G or is absent

SEQ ID NO: 62940 - protein, 33 aa, Artificial Sequence
  GFR-binding peptide
  MOD_RES (31)..(32): Xaa is C or S
EVVMDEYKFKVVNNASDLYLISIPELRTPVXXT

SEQ ID NO: 62941 - protein, 37 aa, Artificial Sequence; identical to SEQ ID NO: 31648
  GFR-binding peptide
  MOD_RES (31)..(32): Xaa is C or S

SEQ ID NO: 62942 - protein, 42 aa, Artificial Sequence; identical to SEQ ID NO: 3646
  GFR-binding peptide
  MOD_RES (2)..(36)..(37): Xaa is C or S
  MOD_RES (14)..(15)..(16)..(17)..(18): Xaa is A or G
  MOD_RES (19)..(20)..(21)..(22): Xaa is A or G or is absent

SEQ ID NO: 62943 - protein, 43 aa, Artificial Sequence; identical to SEQ ID NO: 3647
  GFR-binding peptide
  MOD_RES (2)..(4)..(38)..(39): Xaa is C or S
  MOD_RES (16)..(17)..(18)..(19)..(20): Xaa is A or G
  MOD_RES (21)..(22)..(23)..(24): Xaa is A or G or is absent

SEQ ID NO: 62944 - protein, 40 aa, Artificial Sequence
  GFR-binding peptide
  MOD_RES (1)..(3)..(34)..(35): Xaa is C or S
XGXEEVIMYHYKLLLVRGNDKYLMSIPSTKVPAXXTSPVR

SEQ ID NO: 62945 - protein, 38 aa, Artificial Sequence
  GFR-binding peptide
  MOD_RES (1)..(3)..(37)..(38): Xaa is C or S
  MOD_RES (15)..(16)..(17)..(18)..(19): Xaa is A or G
  MOD_RES (20)..(21)..(22)..(23): Xaa is A or G or is absent
XGXRDVVMGYHYKLXXXXXXXXXKYLMSIPSMKTPTXX

SEQ ID NO: 62946 - protein, 36 aa, Artificial Sequence; identical to SEQ ID NO: 31650
  GFR-binding peptide
  MOD_RES (1)..(33)..(34): Xaa is C or S

SEQ ID NO: 62947 - protein, 37 aa, Artificial Sequence; identical to SEQ ID NO: 56588
  GFR-binding peptide
  MOD_RES (2)..(33)..(34): Xaa is C or S

SEQ ID NO: 62948 - protein, 39 aa, Artificial Sequence; identical to SEQ ID NO: 3650
  GFR-binding peptide
  MOD_RES (1)..(3)..(35): Xaa is C or S

SEQ ID NO: 62949 - protein, 35 aa, Artificial Sequence; identical to SEQ ID NO: 3651
  GFR-binding peptide
  MOD_RES (1)..(3): Xaa is C or S
  MOD_RES (14)..(15)..(16)..(17)..(18): Xaa is A or G
  MOD_RES (19)..(20)..(21)..(22): Xaa is A or G or is absent

SEQ ID NO: 62950 - protein, 44 aa, Artificial Sequence; identical to SEQ ID NO: 3654
  GFR-binding peptide
  MOD_RES (1)..(3)..(38)..(39): Xaa is C or S
  MOD_RES (16)..(17)..(18)..(19)..(20): Xaa is A or G
  MOD_RES (21)..(22)..(23)..(24): Xaa is A or G or is absent

SEQ ID NO: 62951 - protein, 36 aa, Artificial Sequence; identical to SEQ ID NO: 24674
  GFR-binding peptide
  MOD_RES (34)..(35): Xaa is C or S
  MOD_RES (12)..(13)..(14)..(15)..(16): Xaa is A or G
  MOD_RES (17)..(18)..(19)..(20): Xaa is A or G or is absent

SEQ ID NO: 62952 - protein, 39 aa, Artificial Sequence; identical to SEQ ID NO: 3655
  GFR-binding peptide
  MOD_RES (2)..(4)..(39): Xaa is C or S
  MOD_RES (17)..(18)..(19)..(20)..(21): Xaa is A or G
  MOD_RES (22)..(23)..(24)..(25): Xaa is A or G or is absent

SEQ ID NO: 62953 - protein, 33 aa, Artificial Sequence
  GFR-binding peptide
  MOD_RES (33)..(33): Xaa is C or S
  MOD_RES (11)..(12)..(13)..(14)..(15): Xaa is A or G
  MOD_RES (16)..(17)..(18)..(19): Xaa is A or G or is absent
DVVMGYHYKLXXXXXXXXXKYLMSIPSMKTPTX

SEQ ID NO: 62954 - protein, 37 aa, Artificial Sequence
  GFR-binding peptide
  MOD_RES (33)..(34): Xaa is C or S
  MOD_RES (11)..(12)..(13)..(14)..(15): Xaa is A or G
  MOD_RES (16)..(17)..(18)..(19): Xaa is A or G or is absent
EVTMNRYKKLXXXXXXXXXFYLISIANMKEPVXXPEP

SEQ ID NO: 62955 - protein, 35 aa, Artificial Sequence; identical to SEQ ID NO: 3656
  GFR-binding peptide
  MOD_RES (32)..(33): Xaa is C or S

SEQ ID NO: 62956 - protein, 39 aa, Artificial Sequence; identical to SEQ ID NO: 3659
  GFR-binding peptide
  MOD_RES (1)..(3)..(34)..(35): Xaa is C or S

SEQ ID NO: 62957 - protein, 38 aa, Artificial Sequence
  GFR-binding peptide
  MOD_RES (1)..(35)..(36): Xaa is C or S
  MOD_RES (13)..(14)..(15)..(16)..(17): Xaa is A or G
  MOD_RES (18)..(19)..(20)..(21): Xaa is A or G or is absent
XSEVTMNYHYKLXXXXXXXXXKYLISIPSMKEPVXXPE

SEQ ID NO: 62958 - protein, 34 aa, Artificial Sequence; identical to SEQ ID NO: 3662
  GFR-binding peptide
  MOD_RES (33)..(34): Xaa is C or S
  MOD_RES (11)..(12)..(13)..(14)..(15): Xaa is A or G
  MOD_RES (16)..(17)..(18)..(19): Xaa is A or G or is absent

SEQ ID NO: 62959 - protein, 36 aa, Artificial Sequence
  GFR-binding peptide
  MOD_RES (1)..(35)..(36): Xaa is C or S
  MOD_RES (13)..(14)..(15)..(16)..(17): Xaa is A or G
  MOD_RES (18)..(19)..(20)..(21): Xaa is A or G or is absent
XRDVVMGYHYKLXXXXXXXXXKYLMSIPSMKTPTXX

SEQ ID NO: 62960 - protein, 39 aa, Artificial Sequence; identical to SEQ ID NO: 3667
  GFR-binding peptide
  MOD_RES (34)..(35): Xaa is C or S
  MOD_RES (12)..(13)..(14)..(15)..(16): Xaa is A or G
  MOD_RES (17)..(18)..(19)..(20): Xaa is A or G or is absent

SEQ ID NO: 62961 - protein, 41 aa, Artificial Sequence; identical to SEQ ID NO: 3668
  GFR-binding peptide
  MOD_RES (1)..(3)..(35)..(36): Xaa is C or S

SEQ ID NO: 62962 - protein, 34 aa, Artificial Sequence; identical to SEQ ID NO: 3669
  GFR-binding peptide
  MOD_RES (33)..(34): Xaa is C or S
  MOD_RES (11)..(12)..(13)..(14)..(15): Xaa is A or G
  MOD_RES (16)..(17)..(18)..(19): Xaa is A or G or is absent

SEQ ID NO: 62963 - protein, 37 aa, Artificial Sequence; identical to SEQ ID NO: 31675
  GFR-binding peptide
  MOD_RES (1)..(3)..(35)..(36): Xaa is C or S

SEQ ID NO: 62964 - protein, 34 aa, Artificial Sequence
  GFR-binding peptide
  MOD_RES (1)..(1): Xaa is C or S
  MOD_RES (13)..(14)..(15)..(16)..(17): Xaa is A or G
  MOD_RES (18)..(19)..(20)..(21): Xaa is A or G or is absent
XSEVVMDRHKRLXXXXXXXXXYYLISTASLRTPV

SEQ ID NO: 62965 - protein, 34 aa, Artificial Sequence
  GFR-binding peptide
  MOD_RES (1)..(32)..(33): Xaa is C or S
XEEVIMEYKFKLLVRGNDLYLMSIPETKVPAXXT

SEQ ID NO: 62966 - protein, 37 aa, Artificial Sequence; identical to SEQ ID NO: 3673
  GFR-binding peptide
  MOD_RES (1)..(3)..(37): Xaa is C or S
  MOD_RES (15)..(16)..(17)..(18)..(19): Xaa is A or G
  MOD_RES (20)..(21)..(22)..(23): Xaa is A or G or is absent

SEQ ID NO: 62967 - protein, 41 aa, Artificial Sequence; identical to SEQ ID NO: 3678
  GFR-binding peptide
  MOD_RES (1)..(3)..(37)..(38): Xaa is C or S
  MOD_RES (15)..(16)..(17)..(18)..(19): Xaa is A or G
  MOD_RES (20)..(21)..(22)..(23): Xaa is A or G or is absent

SEQ ID NO: 62968 - protein, 37 aa, Artificial Sequence; identical to SEQ ID NO: 31682
  GFR-binding peptide
  MOD_RES (2)..(4)..(36)..(37): Xaa is C or S

SEQ ID NO: 62969 - protein, 34 aa, Artificial Sequence; identical to SEQ ID NO: 3682
  GFR-binding peptide
  MOD_RES (1)..(32)..(33): Xaa is C or S

SEQ ID NO: 62970 - protein, 37 aa, Artificial Sequence; identical to SEQ ID NO: 24700
  GFR-binding peptide
  MOD_RES (33)..(34): Xaa is C or S
  MOD_RES (11)..(12)..(13)..(14)..(15): Xaa is A or G
  MOD_RES (16)..(17)..(18)..(19): Xaa is A or G or is absent

SEQ ID NO: 62971 - protein, 33 aa, Artificial Sequence; identical to SEQ ID NO: 56621
  GFR-binding peptide
  MOD_RES (1)..(33): Xaa is C or S

SEQ ID NO: 62972 - protein, 35 aa, Artificial Sequence; identical to SEQ ID NO: 3683
  GFR-binding peptide
  MOD_RES (33)..(34): Xaa is C or S
  MOD_RES (11)..(12)..(13)..(14)..(15): Xaa is A or G
  MOD_RES (16)..(17)..(18)..(19): Xaa is A or G or is absent

SEQ ID NO: 62973 - protein, 38 aa, Artificial Sequence; identical to SEQ ID NO: 3684
  GFR-binding peptide
  MOD_RES (2)..(33)..(34): Xaa is C or S

SEQ ID NO: 62974 - protein, 41 aa, Artificial Sequence; identical to SEQ ID NO: 24703
  GFR-binding peptide
  MOD_RES (2)..(37)..(38): Xaa is C or S
  MOD_RES (15)..(16)..(17)..(18)..(19): Xaa is A or G
  MOD_RES (20)..(21)..(22)..(23): Xaa is A or G or is absent

SEQ ID NO: 62975 - protein, 38 aa, Artificial Sequence
  GFR-binding peptide
  MOD_RES (1)..(32)..(33): Xaa is C or S
XEEVIMRHKRLLLVRGNDYYLMSTASTKVPAXXTSPVR

SEQ ID NO: 62976 - protein, 39 aa, Artificial Sequence; identical to SEQ ID NO: 56629
  GFR-binding peptide
  MOD_RES (2)..(4)..(36)..(37): Xaa is C or S

SEQ ID NO: 62977 - protein, 34 aa, Artificial Sequence; identical to SEQ ID NO: 31690
  GFR-binding peptide
  MOD_RES (1)..(33)..(34): Xaa is C or S

SEQ ID NO: 62978 - protein, 40 aa, Artificial Sequence
  GFR-binding peptide
  MOD_RES (2)..(4)..(36)..(37): Xaa is C or S
RXAXSEVTMNRHKRLVVNKNEDYYLISTASMKEPVXXPEP

SEQ ID NO: 62979 - protein, 34 aa, Artificial Sequence; identical to SEQ ID NO: 3692
  GFR-binding peptide
  MOD_RES (2)..(34): Xaa is C or S

SEQ ID NO: 62980 - protein, 38 aa, Artificial Sequence; identical to SEQ ID NO: 3693
  GFR-binding peptide
  MOD_RES (1)..(3)..(37)..(38): Xaa is C or S
  MOD_RES (15)..(16)..(17)..(18)..(19): Xaa is A or G
  MOD_RES (20)..(21)..(22)..(23): Xaa is A or G or is absent

SEQ ID NO: 62981 - protein, 41 aa, Artificial Sequence; identical to SEQ ID NO: 24712
  GFR-binding peptide
  MOD_RES (2)..(36)..(37): Xaa is C or S
  MOD_RES (14)..(15)..(16)..(17)..(18): Xaa is A or G
  MOD_RES (19)..(20)..(21)..(22): Xaa is A or G or is absent

SEQ ID NO: 62982 - protein, 40 aa, Artificial Sequence
  GFR-binding peptide
  MOD_RES (2)..(4)..(38)..(39): Xaa is C or S
  MOD_RES (16)..(17)..(18)..(19)..(20): Xaa is A or G
  MOD_RES (21)..(22)..(23)..(24): Xaa is A or G or is absent
RXGXAEVVMDRHKRLXXXXXXXXXYYLISTASLRAPVXXS

SEQ ID NO: 62983 - protein, 39 aa, Artificial Sequence; identical to SEQ ID NO: 31702
  GFR-binding peptide
  MOD_RES (1)..(35)..(36): Xaa is C or S
  MOD_RES (13)..(14)..(15)..(16)..(17): Xaa is A or G
  MOD_RES (18)..(19)..(20)..(21): Xaa is A or G or is absent

SEQ ID NO: 62984 - protein, 39 aa, Artificial Sequence
  GFR-binding peptide
  MOD_RES (1)..(34)..(35): Xaa is C or S
  MOD_RES (12)..(13)..(14)..(15)..(16): Xaa is A or G
  MOD_RES (17)..(18)..(19)..(20): Xaa is A or G or is absent
XEEVIMYHYKLXXXXXXXXXKYLMSIPSTKVPAXXTSPV

SEQ ID NO: 62985 - protein, 36 aa, Artificial Sequence; identical to SEQ ID NO: 3698
  GFR-binding peptide
  MOD_RES (1)..(36): Xaa is C or S
  MOD_RES (14)..(15)..(16)..(17)..(18): Xaa is A or G
  MOD_RES (19)..(20)..(21)..(22): Xaa is A or G or is absent

SEQ ID NO: 62986 - protein, 35 aa, Artificial Sequence; identical to SEQ ID NO: 31705
  GFR-binding peptide
  MOD_RES (31)..(32): Xaa is C or S

SEQ ID NO: 62987 - protein, 38 aa, Artificial Sequence
  GFR-binding peptide
  MOD_RES (1)..(3)..(35)..(36): Xaa is C or S
XGXAEVVMDRHKRLVVNNAADYYLISTASLRAPVXXSA

SEQ ID NO: 62988 - protein, 38 aa, Artificial Sequence; identical to SEQ ID NO: 24721
  GFR-binding peptide
  MOD_RES (1)..(3)..(37)..(38): Xaa is C or S
  MOD_RES (15)..(16)..(17)..(18)..(19): Xaa is A or G
  MOD_RES (20)..(21)..(22)..(23): Xaa is A or G or is absent

SEQ ID NO: 62989 - protein, 40 aa, Artificial Sequence; identical to SEQ ID NO: 11129
  GFR-binding peptide
  MOD_RES (2)..(4)..(38)..(39): Xaa is C or S
  MOD_RES (16)..(17)..(18)..(19)..(20): Xaa is A or G
  MOD_RES (21)..(22)..(23)..(24): Xaa is A or G or is absent

SEQ ID NO: 62990 - protein, 38 aa, Artificial Sequence; identical to SEQ ID NO: 24727
  GFR-binding peptide
  MOD_RES (34)..(35): Xaa is C or S
  MOD_RES (12)..(13)..(14)..(15)..(16): Xaa is A or G
  MOD_RES (17)..(18)..(19)..(20): Xaa is A or G or is absent

SEQ ID NO: 62991 - protein, 42 aa, Artificial Sequence
  GFR-binding peptide
  MOD_RES (2)..(4)..(36)..(37): Xaa is C or S
SXGXRDVVMGEYKFKIIQQKDNLYLMSIPEMKTPTXXPGASG

SEQ ID NO: 62992 - protein, 38 aa, Artificial Sequence; identical to SEQ ID NO: 31714
  GFR-binding peptide
  MOD_RES (33)..(34): Xaa is C or S
  MOD_RES (11)..(12)..(13)..(14)..(15): Xaa is A or G
  MOD_RES (16)..(17)..(18)..(19): Xaa is A or G or is absent

SEQ ID NO: 62993 - protein, 37 aa, Artificial Sequence; identical to SEQ ID NO: 3710
  GFR-binding peptide
  MOD_RES (2)..(4)..(36)..(37): Xaa is C or S

SEQ ID NO: 62994 - protein, 35 aa, Artificial Sequence; identical to SEQ ID NO: 24731
  GFR-binding peptide
  MOD_RES (1)..(32)..(33): Xaa is C or S

SEQ ID NO: 62995 - protein, 38 aa, Artificial Sequence; identical to SEQ ID NO: 3712
  GFR-binding peptide
  MOD_RES (2)..(4)..(36)..(37): Xaa is C or S

SEQ ID NO: 62996 - protein, 35 aa, Artificial Sequence; identical to SEQ ID NO: 3714
  GFR-binding peptide
  MOD_RES (34)..(35): Xaa is C or S
  MOD_RES (12)..(13)..(14)..(15)..(16): Xaa is A or G
  MOD_RES (17)..(18)..(19)..(20): Xaa is A or G or is absent

SEQ ID NO: 62997 - protein, 37 aa, Artificial Sequence; identical to SEQ ID NO: 31720
  GFR-binding peptide
  MOD_RES (31)..(32): Xaa is C or S

SEQ ID NO: 62998 - protein, 36 aa, Artificial Sequence; identical to SEQ ID NO: 3716
  GFR-binding peptide
  MOD_RES (31)..(32): Xaa is C or S

SEQ ID NO: 62999 - protein, 40 aa, Artificial Sequence; identical to SEQ ID NO: 31722
  GFR-binding peptide
  MOD_RES (2)..(4)..(38)..(39): Xaa is C or S
  MOD_RES (16)..(17)..(18)..(19)..(20): Xaa is A or G
  MOD_RES (21)..(22)..(23)..(24): Xaa is A or G or is absent

SEQ ID NO: 63000 - protein, 39 aa, Artificial Sequence; identical to SEQ ID NO: 31724
  GFR-binding peptide
  MOD_RES (2)..(4)..(36)..(37): Xaa is C or S

SEQ ID NO: 63001 - protein, 34 aa, Artificial Sequence
  GFR-binding peptide
  MOD_RES (2)..(34): Xaa is C or S
AXSEVTMNRYKKLVVNKNEDFYLISIANMKEPVX

SEQ ID NO: 63002 - protein, 38 aa, Artificial Sequence; identical to SEQ ID NO: 31732
  GFR-binding peptide
  MOD_RES (2)..(4)..(38): Xaa is C or S
  MOD_RES (16)..(17)..(18)..(19)..(20): Xaa is A or G
  MOD_RES (21)..(22)..(23)..(24): Xaa is A or G or is absent

SEQ ID NO: 63003 - protein, 39 aa, Artificial Sequence; identical to SEQ ID NO: 3721
  GFR-binding peptide
  MOD_RES (1)..(3)..(34)..(35): Xaa is C or S

SEQ ID NO: 63004 - protein, 39 aa, Artificial Sequence; identical to SEQ ID NO: 3724
  GFR-binding peptide
  MOD_RES (2)..(33)..(34): Xaa is C or S

SEQ ID NO: 63005 - protein, 37 aa, Artificial Sequence
  GFR-binding peptide
  MOD_RES (33)..(34): Xaa is C or S
  MOD_RES (11)..(12)..(13)..(14)..(15): Xaa is A or G
  MOD_RES (16)..(17)..(18)..(19): Xaa is A or G or is absent
SKVIMPIKGYXXXXXXXXXFYLINIPSLDQSVXXPSA

SEQ ID NO: 63006 - protein, 35 aa, Artificial Sequence; identical to SEQ ID NO: 31737
  GFR-binding peptide
  MOD_RES (2)..(4): Xaa is C or S

SEQ ID NO: 63007 - protein, 44 aa, Artificial Sequence
  GFR-binding peptide
  MOD_RES (2)..(4)..(38)..(39): Xaa is C or S
  MOD_RES (16)..(17)..(18)..(19)..(20): Xaa is A or G
  MOD_RES (21)..(22)..(23)..(24): Xaa is A or G or is absent
SXGXRDVVMGYHYKLXXXXXXXXXKYLMSIPSMKTPTXXPGASG

SEQ ID NO: 63008 - protein, 39 aa, Artificial Sequence; identical to SEQ ID NO: 3725
  GFR-binding peptide
  MOD_RES (2)..(35)..(36): Xaa is C or S
  MOD_RES (13)..(14)..(15)..(16)..(17): Xaa is A or G
  MOD_RES (18)..(19)..(20)..(21): Xaa is A or G or is absent

SEQ ID NO: 63009 - protein, 34 aa, Artificial Sequence; identical to SEQ ID NO: 3726
  GFR-binding peptide
  MOD_RES (2)..(2): Xaa is C or S
  MOD_RES (13)..(14)..(15)..(16)..(17): Xaa is A or G
  MOD_RES (18)..(19)..(20)..(21): Xaa is A or G or is absent

SEQ ID NO: 63010 - protein, 38 aa, Artificial Sequence; identical to SEQ ID NO: 24749
  GFR-binding peptide
  MOD_RES (32)..(33): Xaa is C or S

SEQ ID NO: 63011 - protein, 38 aa, Artificial Sequence
  GFR-binding peptide
  MOD_RES (2)..(4)..(35)..(36): Xaa is C or S
LXGXEEVIMRHKRLLLVRGNDYYLMSTASTKVPAXXTS

SEQ ID NO: 63012 - protein, 42 aa, Artificial Sequence; identical to SEQ ID NO: 3729
  GFR-binding peptide
  MOD_RES (2)..(37)..(38): Xaa is C or S
  MOD_RES (15)..(16)..(17)..(18)..(19): Xaa is A or G
  MOD_RES (20)..(21)..(22)..(23): Xaa is A or G or is absent

SEQ ID NO: 63013 - protein, 34 aa, Artificial Sequence; identical to SEQ ID NO: 24753
  GFR-binding peptide
  MOD_RES (1)..(1): Xaa is C or S
  MOD_RES (13)..(14)..(15)..(16)..(17): Xaa is A or G
  MOD_RES (18)..(19)..(20)..(21): Xaa is A or G or is absent

SEQ ID NO: 63014 - protein, 36 aa, Artificial Sequence
  GFR-binding peptide
  MOD_RES (31)..(32): Xaa is C or S
DVVMGYHYKLIIQQKDNKYLMSIPSMKTPTXXPGAS

SEQ ID NO: 63015 - protein, 39 aa, Artificial Sequence; identical to SEQ ID NO: 24757
  GFR-binding peptide
  MOD_RES (1)..(3)..(35)..(36): Xaa is C or S

SEQ ID NO: 63016 - protein, 39 aa, Artificial Sequence; identical to SEQ ID NO: 3732
  GFR-binding peptide
  MOD_RES (33)..(34): Xaa is C or S
  MOD_RES (11)..(12)..(13)..(14)..(15): Xaa is A or G
  MOD_RES (16)..(17)..(18)..(19): Xaa is A or G or is absent

SEQ ID NO: 63017 - protein, 40 aa, Artificial Sequence; identical to SEQ ID NO: 3735
  GFR-binding peptide
  MOD_RES (2)..(36)..(37): Xaa is C or S
  MOD_RES (14)..(15)..(16)..(17)..(18): Xaa is A or G
  MOD_RES (19)..(20)..(21)..(22): Xaa is A or G or is absent

SEQ ID NO: 63018 - protein, 39 aa, Artificial Sequence; identical to SEQ ID NO: 24761
  GFR-binding peptide
  MOD_RES (1)..(3)..(38)..(39): Xaa is C or S
  MOD_RES (16)..(17)..(18)..(19)..(20): Xaa is A or G
  MOD_RES (21)..(22)..(23)..(24): Xaa is A or G or is absent

SEQ ID NO: 63019 - protein, 39 aa, Artificial Sequence; identical to SEQ ID NO: 3738
  GFR-binding peptide
  MOD_RES (34)..(35): Xaa is C or S
  MOD_RES (12)..(13)..(14)..(15)..(16): Xaa is A or G
  MOD_RES (17)..(18)..(19)..(20): Xaa is A or G or is absent

SEQ ID NO: 63020 - protein, 38 aa, Artificial Sequence; identical to SEQ ID NO: 31753
  GFR-binding peptide
  MOD_RES (32)..(33): Xaa is C or S

SEQ ID NO: 63021 - protein, 35 aa, Artificial Sequence; identical to SEQ ID NO: 31755
  GFR-binding peptide
  MOD_RES (1)..(33)..(34): Xaa is C or S

SEQ ID NO: 63022 - protein, 37 aa, Artificial Sequence; identical to SEQ ID NO: 24767
  GFR-binding peptide
  MOD_RES (1)..(3)..(35)..(36): Xaa is C or S

SEQ ID NO: 63023 - protein, 37 aa, Artificial Sequence
  GFR-binding peptide
  MOD_RES (1)..(3)..(37): Xaa is C or S
  MOD_RES (15)..(16)..(17)..(18)..(19): Xaa is A or G
  MOD_RES (20)..(21)..(22)..(23): Xaa is A or G or is absent
XGXSEVVMDRHKRLXXXXXXXXXYYLISTASLRTPVX

SEQ ID NO: 63024 - protein, 43 aa, Artificial Sequence
  GFR-binding peptide
  MOD_RES (1)..(3)..(37)..(38): Xaa is C or S
  MOD_RES (15)..(16)..(17)..(18)..(19): Xaa is A or G
  MOD_RES (20)..(21)..(22)..(23): Xaa is A or G or is absent
XGXSRVVMNYHYKLXXXXXXXXXKYLVSIPSLKTPAXXPKPVH

SEQ ID NO: 63025 - protein, 41 aa, Artificial Sequence
  GFR-binding peptide
  MOD_RES (1)..(35)..(36): Xaa is C or S
  MOD_RES (13)..(14)..(15)..(16)..(17): Xaa is A or G
  MOD_RES (18)..(19)..(20)..(21): Xaa is A or G or is absent
XRDVVMGEYKFKXXXXXXXXXLYLMSIPEMKTPTXXPGASG

SEQ ID NO: 63026 - protein, 41 aa, Artificial Sequence; identical to SEQ ID NO: 31757
  GFR-binding peptide
  MOD_RES (1)..(3)..(37)..(38): Xaa is C or S
  MOD_RES (15)..(16)..(17)..(18)..(19): Xaa is A or G
  MOD_RES (20)..(21)..(22)..(23): Xaa is A or G or is absent

SEQ ID NO: 63027 - protein, 37 aa, Artificial Sequence; identical to SEQ ID NO: 3744
  GFR-binding peptide
  MOD_RES (31)..(32): Xaa is C or S

SEQ ID NO: 63028 - protein, 32 aa, Artificial Sequence; identical to SEQ ID NO: 3745
  GFR-binding peptide
  MOD_RES (2)..(2): Xaa is C or S

SEQ ID NO: 63029 - protein, 37 aa, Artificial Sequence; identical to SEQ ID NO: 24770
  GFR-binding peptide
  MOD_RES (31)..(32): Xaa is C or S

SEQ ID NO: 63030 - protein, 38 aa, Artificial Sequence; identical to SEQ ID NO: 3746
  GFR-binding peptide
  MOD_RES (32)..(33): Xaa is C or S

SEQ ID NO: 63031 - protein, 41 aa, Artificial Sequence; identical to SEQ ID NO: 24772
  GFR-binding peptide
  MOD_RES (1)..(3)..(37)..(38): Xaa is C or S
  MOD_RES (15)..(16)..(17)..(18)..(19): Xaa is A or G
  MOD_RES (20)..(21)..(22)..(23): Xaa is A or G or is absent

SEQ ID NO: 63032 - protein, 31 aa, Artificial Sequence; identical to SEQ ID NO: 24774
  GFR-binding peptide

SEQ ID NO: 63033 - protein, 38 aa, Artificial Sequence; identical to SEQ ID NO: 3748
  GFR-binding peptide
  MOD_RES (35)..(36): Xaa is C or S
  MOD_RES (13)..(14)..(15)..(16)..(17): Xaa is A or G
  MOD_RES (18)..(19)..(20)..(21): Xaa is A or G or is absent

SEQ ID NO: 63034 - protein, 38 aa, Artificial Sequence; identical to SEQ ID NO: 24776
  GFR-binding peptide
  MOD_RES (2)..(4)..(36)..(37): Xaa is C or S

SEQ ID NO: 63035 - protein, 40 aa, Artificial Sequence; identical to SEQ ID NO: 31768
  GFR-binding peptide
  MOD_RES (2)..(4)..(36)..(37): Xaa is C or S

SEQ ID NO: 63036 - protein, 38 aa, Artificial Sequence; identical to SEQ ID NO: 24778
  GFR-binding peptide
  MOD_RES (1)..(35)..(36): Xaa is C or S
  MOD_RES (13)..(14)..(15)..(16)..(17): Xaa is A or G
  MOD_RES (18)..(19)..(20)..(21): Xaa is A or G or is absent

SEQ ID NO: 63037 - protein, 37 aa, Artificial Sequence; identical to SEQ ID NO: 3749
  GFR-binding peptide
  MOD_RES (2)..(4)..(37): Xaa is C or S
  MOD_RES (15)..(16)..(17)..(18)..(19): Xaa is A or G
  MOD_RES (20)..(21)..(22)..(23): Xaa is A or G or is absent

SEQ ID NO: 63038 - protein, 35 aa, Artificial Sequence; identical to SEQ ID NO: 24780
  GFR-binding peptide
  MOD_RES (33)..(34): Xaa is C or S
  MOD_RES (11)..(12)..(13)..(14)..(15): Xaa is A or G
  MOD_RES (16)..(17)..(18)..(19): Xaa is A or G or is absent

SEQ ID NO: 63039 - protein, 39 aa, Artificial Sequence; identical to SEQ ID NO: 3750
  GFR-binding peptide
  MOD_RES (1)..(3)..(34)..(35): Xaa is C or S

SEQ ID NO: 63040 - protein, 40 aa, Artificial Sequence; identical to SEQ ID NO: 3757
  GFR-binding peptide
  MOD_RES (1)..(3)..(37)..(38): Xaa is C or S
  MOD_RES (15)..(16)..(17)..(18)..(19): Xaa is A or G
  MOD_RES (20)..(21)..(22)..(23): Xaa is A or G or is absent

SEQ ID NO: 63041 - protein, 37 aa, Artificial Sequence; identical to SEQ ID NO: 24788
  GFR-binding peptide
  MOD_RES (32)..(33): Xaa is C or S

SEQ ID NO: 63042 - protein, 37 aa, Artificial Sequence; identical to SEQ ID NO: 3762
  GFR-binding peptide
  MOD_RES (34)..(35): Xaa is C or S
  MOD_RES (12)..(13)..(14)..(15)..(16): Xaa is A or G
  MOD_RES (17)..(18)..(19)..(20): Xaa is A or G or is absent

SEQ ID NO: 63043 - protein, 38 aa, Artificial Sequence; identical to SEQ ID NO: 31776
  GFR-binding peptide
  MOD_RES (1)..(3)..(36)..(37): Xaa is C or S
  MOD_RES (14)..(15)..(16)..(17)..(18): Xaa is A or G
  MOD_RES (19)..(20)..(21)..(22): Xaa is A or G or is absent

SEQ ID NO: 63044 - protein, 35 aa, Artificial Sequence; identical to SEQ ID NO: 3763
  GFR-binding peptide
  MOD_RES (2)..(4): Xaa is C or S

SEQ ID NO: 63045 - protein, 40 aa, Artificial Sequence; identical to SEQ ID NO: 56726
  GFR-binding peptide
  MOD_RES (1)..(35)..(36): Xaa is C or S
  MOD_RES (13)..(14)..(15)..(16)..(17): Xaa is A or G
  MOD_RES (18)..(19)..(20)..(21): Xaa is A or G or is absent

SEQ ID NO: 63046 - protein, 39 aa, Artificial Sequence
  GFR-binding peptide
  MOD_RES (1)..(34)..(35): Xaa is C or S
  MOD_RES (12)..(13)..(14)..(15)..(16): Xaa is A or G
  MOD_RES (17)..(18)..(19)..(20): Xaa is A or G or is absent
XEEVIMEYKFKXXXXXXXXXLYLMSIPETKVPAXXTSPV

SEQ ID NO: 63047 - protein, 38 aa, Artificial Sequence; identical to SEQ ID NO: 31777
  GFR-binding peptide
  MOD_RES (1)..(35)..(36): Xaa is C or S
  MOD_RES (13)..(14)..(15)..(16)..(17): Xaa is A or G
  MOD_RES (18)..(19)..(20)..(21): Xaa is A or G or is absent

SEQ ID NO: 63048 - protein, 33 aa, Artificial Sequence
  GFR-binding peptide
  MOD_RES (33)..(33): Xaa is C or S
  MOD_RES (11)..(12)..(13)..(14)..(15): Xaa is A or G
  MOD_RES (16)..(17)..(18)..(19): Xaa is A or G or is absent
SVAMGRHKRLXXXXXXXXXYYLISTASLKTPVX

SEQ ID NO: 63049 - protein, 38 aa, Artificial Sequence; identical to SEQ ID NO: 3766
  GFR-binding peptide
  MOD_RES (2)..(4): Xaa is C or S
  MOD_RES (17)..(18)..(19)..(20)..(21): Xaa is A or G
  MOD_RES (22)..(23)..(24)..(25): Xaa is A or G or is absent

SEQ ID NO: 63050 - protein, 34 aa, Artificial Sequence
  GFR-binding peptide
  MOD_RES (2)..(34): Xaa is C or S
AXSEVTMNEYKFKVVNKNEDLYLISIPEMKEPVX

SEQ ID NO: 63051 - protein, 35 aa, Artificial Sequence; identical to SEQ ID NO: 3767
  GFR-binding peptide
  MOD_RES (2)..(35): Xaa is C or S
  MOD_RES (13)..(14)..(15)..(16)..(17): Xaa is A or G
  MOD_RES (18)..(19)..(20)..(21): Xaa is A or G or is absent

SEQ ID NO: 63052 - protein, 39 aa, Artificial Sequence; identical to SEQ ID NO: 24800
  GFR-binding peptide
  MOD_RES (34)..(35): Xaa is C or S
  MOD_RES (12)..(13)..(14)..(15)..(16): Xaa is A or G
  MOD_RES (17)..(18)..(19)..(20): Xaa is A or G or is absent

SEQ ID NO: 63053 - protein, 42 aa, Artificial Sequence; identical to SEQ ID NO: 3772
  GFR-binding peptide
  MOD_RES (2)..(4)..(37)..(38): Xaa is C or S

SEQ ID NO: 63054 - protein, 41 aa, Artificial Sequence; identical to SEQ ID NO: 31786
  GFR-binding peptide
  MOD_RES (1)..(3)..(35)..(36): Xaa is C or S

SEQ ID NO: 63055 - protein, 34 aa, Artificial Sequence
  GFR-binding peptide
  MOD_RES (33)..(34): Xaa is C or S
  MOD_RES (11)..(12)..(13)..(14)..(15): Xaa is A or G
  MOD_RES (16)..(17)..(18)..(19): Xaa is A or G or is absent
SKVIMPIKGYXXXXXXXXXFYLINIPSLDQSVXX

SEQ ID NO: 63056 - protein, 39 aa, Artificial Sequence; identical to SEQ ID NO: 24805
  GFR-binding peptide
  MOD_RES (1)..(35)..(36): Xaa is C or S
  MOD_RES (13)..(14)..(15)..(16)..(17): Xaa is A or G
  MOD_RES (18)..(19)..(20)..(21): Xaa is A or G or is absent

SEQ ID NO: 63057 - protein, 36 aa, Artificial Sequence; identical to SEQ ID NO: 24807
  GFR-binding peptide
  MOD_RES (2)..(4)..(35)..(36): Xaa is C or S

SEQ ID NO: 63058 - protein, 42 aa, Artificial Sequence; identical to SEQ ID NO: 3782
  GFR-binding peptide
  MOD_RES (2)..(36)..(37): Xaa is C or S
  MOD_RES (14)..(15)..(16)..(17)..(18): Xaa is A or G
  MOD_RES (19)..(20)..(21)..(22): Xaa is A or G or is absent

SEQ ID NO: 63059 - protein, 34 aa, Artificial Sequence; identical to SEQ ID NO: 3783
  GFR-binding peptide
  MOD_RES (1)..(34): Xaa is C or S

SEQ ID NO: 63060 - protein, 39 aa, Artificial Sequence
  GFR-binding peptide
  MOD_RES (1)..(34)..(35): Xaa is C or S
  MOD_RES (12)..(13)..(14)..(15)..(16): Xaa is A or G
  MOD_RES (17)..(18)..(19)..(20): Xaa is A or G or is absent
XSKVIMPIKGYXXXXXXXXXFYLINIPSLDQSVXXPSAS

SEQ ID NO: 63061 - protein, 35 aa, Artificial Sequence; identical to SEQ ID NO: 3785
  GFR-binding peptide
  MOD_RES (1)..(3)..(35): Xaa is C or S

SEQ ID NO: 63062 - protein, 40 aa, Artificial Sequence; identical to SEQ ID NO: 24814
  GFR-binding peptide
  MOD_RES (34)..(35): Xaa is C or S
  MOD_RES (12)..(13)..(14)..(15)..(16): Xaa is A or G
  MOD_RES (17)..(18)..(19)..(20): Xaa is A or G or is absent

SEQ ID NO: 63063 - protein, 37 aa, Artificial Sequence; identical to SEQ ID NO: 24815
  GFR-binding peptide
  MOD_RES (1)..(34)..(35): Xaa is C or S
  MOD_RES (12)..(13)..(14)..(15)..(16): Xaa is A or G
  MOD_RES (17)..(18)..(19)..(20): Xaa is A or G or is absent

SEQ ID NO: 63064 - protein, 35 aa, Artificial Sequence; identical to SEQ ID NO: 24816
  GFR-binding peptide
  MOD_RES (2)..(4)..(35): Xaa is C or S

SEQ ID NO: 63065 - protein, 40 aa, Artificial Sequence; identical to SEQ ID NO: 3795
  GFR-binding peptide
  MOD_RES (2)..(36)..(37): Xaa is C or S
  MOD_RES (14)..(15)..(16)..(17)..(18): Xaa is A or G
  MOD_RES (19)..(20)..(21)..(22): Xaa is A or G or is absent

SEQ ID NO: 63066 - protein, 39 aa, Artificial Sequence; identical to SEQ ID NO: 31804
  GFR-binding peptide
  MOD_RES (33)..(34): Xaa is C or S
  MOD_RES (11)..(12)..(13)..(14)..(15): Xaa is A or G
  MOD_RES (16)..(17)..(18)..(19): Xaa is A or G or is absent

SEQ ID NO: 63067 - protein, 38 aa, Artificial Sequence
  GFR-binding peptide
  MOD_RES (2)..(4)..(36)..(37): Xaa is C or S
RXAXSEVTMNRHKRLVVNKNEDYYLISTASMKEPVXXP

SEQ ID NO: 63068 - protein, 31 aa, Artificial Sequence; identical to SEQ ID NO: 31811
  GFR-binding peptide
  MOD_RES (31)..(31): Xaa is C or S

SEQ ID NO: 63069 - protein, 38 aa, Artificial Sequence
  GFR-binding peptide
  MOD_RES (1)..(35)..(36): Xaa is C or S
  MOD_RES (13)..(14)..(15)..(16)..(17): Xaa is A or G
  MOD_RES (18)..(19)..(20)..(21): Xaa is A or G or is absent
XSEVTMNRYKKLXXXXXXXXXFYLISIANMKEPVXXPE

SEQ ID NO: 63070 - protein, 34 aa, Artificial Sequence; identical to SEQ ID NO: 24830
  GFR-binding peptide
  MOD_RES (1)..(1): Xaa is C or S
  MOD_RES (13)..(14)..(15)..(16)..(17): Xaa is A or G
  MOD_RES (18)..(19)..(20)..(21): Xaa is A or G or is absent

SEQ ID NO: 63071 - protein, 40 aa, Artificial Sequence; identical to SEQ ID NO: 31821
  GFR-binding peptide
  MOD_RES (2)..(34)..(35): Xaa is C or S

SEQ ID NO: 63072 - protein, 35 aa, Artificial Sequence; identical to SEQ ID NO: 3807
  GFR-binding peptide
  MOD_RES (1)..(32)..(33): Xaa is C or S

SEQ ID NO: 63073 - protein, 36 aa, Artificial Sequence; identical to SEQ ID NO: 3808
  GFR-binding peptide
  MOD_RES (1)..(3)..(34)..(35): Xaa is C or S

SEQ ID NO: 63074 - protein, 39 aa, Artificial Sequence; identical to SEQ ID NO: 24837
  GFR-binding peptide
  MOD_RES (2)..(4)..(36)..(37): Xaa is C or S

SEQ ID NO: 63075 - protein, 42 aa, Artificial Sequence; identical to SEQ ID NO: 31827
  GFR-binding peptide
  MOD_RES (2)..(36)..(37): Xaa is C or S
  MOD_RES (14)..(15)..(16)..(17)..(18): Xaa is A or G
  MOD_RES (19)..(20)..(21)..(22): Xaa is A or G or is absent

SEQ ID NO: 63076 - protein, 33 aa, Artificial Sequence; identical to SEQ ID NO: 3810
  GFR-binding peptide
  MOD_RES (2)..(2): Xaa is C or S

SEQ ID NO: 63077 - protein, 40 aa, Artificial Sequence
  GFR-binding peptide
  MOD_RES (1)..(35)..(36): Xaa is C or S
  MOD_RES (13)..(14)..(15)..(16)..(17): Xaa is A or G
  MOD_RES (18)..(19)..(20)..(21): Xaa is A or G or is absent
XSEVTMNRYKKLXXXXXXXXXFYLISIANMKEPVXXPEPI

SEQ ID NO: 63078 - protein, 39 aa, Artificial Sequence; identical to SEQ ID NO: 3812
  GFR-binding peptide
  MOD_RES (1)..(35): Xaa is C or S
  MOD_RES (13)..(14)..(15)..(16)..(17): Xaa is A or G
  MOD_RES (18)..(19)..(20)..(21): Xaa is A or G or is absent

SEQ ID NO: 63079 - protein, 37 aa, Artificial Sequence; identical to SEQ ID NO: 3815
  GFR-binding peptide
  MOD_RES (34)..(35): Xaa is C or S
  MOD_RES (12)..(13)..(14)..(15)..(16): Xaa is A or G
  MOD_RES (17)..(18)..(19)..(20): Xaa is A or G or is absent

SEQ ID NO: 63080 - protein, 36 aa, Artificial Sequence; identical to SEQ ID NO: 31836
  GFR-binding peptide
  MOD_RES (1)..(3): Xaa is C or S
  MOD_RES (15)..(16)..(17)..(18)..(19): Xaa is A or G
  MOD_RES (20)..(21)..(22)..(23): Xaa is A or G or is absent

SEQ ID NO: 63081 - protein, 34 aa, Artificial Sequence; identical to SEQ ID NO: 31842
  GFR-binding peptide
  MOD_RES (31)..(32): Xaa is C or S

SEQ ID NO: 63082 - protein, 40 aa, Artificial Sequence; identical to SEQ ID NO: 24848
  GFR-binding peptide
  MOD_RES (1)..(3)..(35)..(36): Xaa is C or S

SEQ ID NO: 63083 - protein, 37 aa, Artificial Sequence; identical to SEQ ID NO: 24851
  GFR-binding peptide
  MOD_RES (1)..(35)..(36): Xaa is C or S
  MOD_RES (13)..(14)..(15)..(16)..(17): Xaa is A or G
  MOD_RES (18)..(19)..(20)..(21): Xaa is A or G or is absent

SEQ ID NO: 63084 - protein, 36 aa, Artificial Sequence; identical to SEQ ID NO: 24852
  GFR-binding peptide
  MOD_RES (1)..(3)..(35)..(36): Xaa is C or S

SEQ ID NO: 63085 - protein, 35 aa, Artificial Sequence; identical to SEQ ID NO: 3820
  GFR-binding peptide
  MOD_RES (2)..(33)..(34): Xaa is C or S

SEQ ID NO: 63086 - protein, 41 aa, Artificial Sequence; identical to SEQ ID NO: 31846
  GFR-binding peptide
  MOD_RES (1)..(3)..(35)..(36): Xaa is C or S

SEQ ID NO: 63087 - protein, 31 aa, Artificial Sequence; identical to SEQ ID NO: 3821
  GFR-binding peptide

SEQ ID NO: 63088 - protein, 36 aa, Artificial Sequence; identical to SEQ ID NO: 3823
  GFR-binding peptide
  MOD_RES (2)..(4)..(36): Xaa is C or S

SEQ ID NO: 63089 - protein, 34 aa, Artificial Sequence; identical to SEQ ID NO: 3824
  GFR-binding peptide
  MOD_RES (1)..(3): Xaa is C or S

SEQ ID NO: 63090 - protein, 35 aa, Artificial Sequence; identical to SEQ ID NO: 3826
  GFR-binding peptide
  MOD_RES (2)..(33)..(34): Xaa is C or S

SEQ ID NO: 63091 - protein, 35 aa, Artificial Sequence; identical to SEQ ID NO: 31848
  GFR-binding peptide
  MOD_RES (33)..(33): Xaa is C or S
  MOD_RES (11)..(12)..(13)..(14)..(15): Xaa is A or G
  MOD_RES (16)..(17)..(18)..(19): Xaa is A or G or is absent

SEQ ID NO: 63092 - protein, 36 aa, Artificial Sequence; identical to SEQ ID NO: 56796
  GFR-binding peptide
  MOD_RES (1)..(3)..(36): Xaa is C or S
  MOD_RES (14)..(15)..(16)..(17)..(18): Xaa is A or G
  MOD_RES (19)..(20)..(21)..(22): Xaa is A or G or is absent

SEQ ID NO: 63093 - protein, 35 aa, Artificial Sequence; identical to SEQ ID NO: 24860
  GFR-binding peptide
  MOD_RES (31)..(32): Xaa is C or S

SEQ ID NO: 63094 - protein, 37 aa, Artificial Sequence; identical to SEQ ID NO: 24861
  GFR-binding peptide
  MOD_RES (1)..(33): Xaa is C or S

SEQ ID NO: 63095 - protein, 37 aa, Artificial Sequence; identical to SEQ ID NO: 24864
  GFR-binding peptide
  MOD_RES (1)..(3)..(35)..(36): Xaa is C or S

SEQ ID NO: 63096 - protein, 37 aa, Artificial Sequence; identical to SEQ ID NO: 3828
  GFR-binding peptide
  MOD_RES (33)..(34): Xaa is C or S
  MOD_RES (11)..(12)..(13)..(14)..(15): Xaa is A or G
  MOD_RES (16)..(17)..(18)..(19): Xaa is A or G or is absent

SEQ ID NO: 63097 - protein, 32 aa, Artificial Sequence; identical to SEQ ID NO: 3829
  GFR-binding peptide
  MOD_RES (1)..(1): Xaa is C or S

SEQ ID NO: 63098 - protein, 35 aa, Artificial Sequence; identical to SEQ ID NO: 3830
  GFR-binding peptide
  MOD_RES (34)..(35): Xaa is C or S
  MOD_RES (12)..(13)..(14)..(15)..(16): Xaa is A or G
  MOD_RES (17)..(18)..(19)..(20): Xaa is A or G or is absent

SEQ ID NO: 63099 - protein, 35 aa, Artificial Sequence; identical to SEQ ID NO: 3831
  GFR-binding peptide
  MOD_RES (2)..(34)..(35): Xaa is C or S

SEQ ID NO: 63100 - protein, 38 aa, Artificial Sequence; identical to SEQ ID NO: 24872
  GFR-binding peptide
  MOD_RES (33)..(34): Xaa is C or S
  MOD_RES (11)..(12)..(13)..(14)..(15): Xaa is A or G
  MOD_RES (16)..(17)..(18)..(19): Xaa is A or G or is absent

SEQ ID NO: 63101 - protein, 35 aa, Artificial Sequence
  GFR-binding peptide
  MOD_RES (2)..(4)..(35): Xaa is C or S
SXKXSKVIMPIKGYIKPTKGIFYLINIPSLDQSVX

SEQ ID NO: 63102 - protein, 42 aa, Artificial Sequence
  GFR-binding peptide
  MOD_RES (2)..(4)..(37)..(38): Xaa is C or S
  MOD_RES (15)..(16)..(17)..(18)..(19): Xaa is A or G
  MOD_RES (20)..(21)..(22)..(23): Xaa is A or G or is absent
LXGXEEVIMYHYKLXXXXXXXXXKYLMSIPSTKVPAXXTSPV

SEQ ID NO: 63103 - protein, 36 aa, Artificial Sequence; identical to SEQ ID NO: 31864
  GFR-binding peptide
  MOD_RES (1)..(3)..(36): Xaa is C or S

SEQ ID NO: 63104 - protein, 31 aa, Artificial Sequence; identical to SEQ ID NO: 31865
  GFR-binding peptide
  MOD_RES (31)..(31): Xaa is C or S

SEQ ID NO: 63105 - protein, 40 aa, Artificial Sequence; identical to SEQ ID NO: 24874
  GFR-binding peptide
  MOD_RES (1)..(35)..(36): Xaa is C or S
  MOD_RES (13)..(14)..(15)..(16)..(17): Xaa is A or G
  MOD_RES (18)..(19)..(20)..(21): Xaa is A or G or is absent

SEQ ID NO: 63106 - protein, 40 aa, Artificial Sequence; identical to SEQ ID NO: 24875
  GFR-binding peptide
  MOD_RES (1)..(3)..(35)..(36): Xaa is C or S

SEQ ID NO: 63107 - protein, 38 aa, Artificial Sequence; identical to SEQ ID NO: 3836
  GFR-binding peptide
  MOD_RES (33)..(34): Xaa is C or S

SEQ ID NO: 63108 - protein, 36 aa, Artificial Sequence; identical to SEQ ID NO: 3837
  GFR-binding peptide
  MOD_RES (32)..(33): Xaa is C or S

SEQ ID NO: 63109 - protein, 37 aa, Artificial Sequence
  GFR-binding peptide
  MOD_RES (1)..(3)..(35)..(36): Xaa is C or S
XAXSEVTMNRHKRLVVNKNEDYYLISTASMKEPVXXP

SEQ ID NO: 63110 - protein, 42 aa, Artificial Sequence; identical to SEQ ID NO: 24882
  GFR-binding peptide
  MOD_RES (2)..(4)..(36)..(37): Xaa is C or S

SEQ ID NO: 63111 - protein, 33 aa, Artificial Sequence
  GFR-binding peptide
  MOD_RES (2)..(2): Xaa is C or S
GXSEVVMDYHYKLVVNNASDKYLISIPSLRTPV

SEQ ID NO: 63112 - protein, 32 aa, Artificial Sequence; identical to SEQ ID NO: 24885
  GFR-binding peptide
  MOD_RES (1)..(1): Xaa is C or S

SEQ ID NO: 63113 - protein, 39 aa, Artificial Sequence; identical to SEQ ID NO: 24886
  GFR-binding peptide
  MOD_RES (1)..(3)..(37)..(38): Xaa is C or S
  MOD_RES (15)..(16)..(17)..(18)..(19): Xaa is A or G
  MOD_RES (20)..(21)..(22)..(23): Xaa is A or G or is absent

SEQ ID NO: 63114 - protein, 38 aa, Artificial Sequence; identical to SEQ ID NO: 24887
  GFR-binding peptide
  MOD_RES (1)..(3)..(37)..(38): Xaa is C or S
  MOD_RES (15)..(16)..(17)..(18)..(19): Xaa is A or G
  MOD_RES (20)..(21)..(22)..(23): Xaa is A or G or is absent

SEQ ID NO: 63115 - protein, 42 aa, Artificial Sequence; identical to SEQ ID NO: 3843
  GFR-binding peptide
  MOD_RES (1)..(3)..(36)..(37): Xaa is C or S
  MOD_RES (14)..(15)..(16)..(17)..(18): Xaa is A or G
  MOD_RES (19)..(20)..(21)..(22): Xaa is A or G or is absent

SEQ ID NO: 63116 - protein, 38 aa, Artificial Sequence; identical to SEQ ID NO: 24892
  GFR-binding peptide
  MOD_RES (2)..(4): Xaa is C or S
  MOD_RES (17)..(18)..(19)..(20)..(21): Xaa is A or G
  MOD_RES (22)..(23)..(24)..(25): Xaa is A or G or is absent

SEQ ID NO: 63117 - protein, 41 aa, Artificial Sequence; identical to SEQ ID NO: 24893
  GFR-binding peptide
  MOD_RES (1)..(35)..(36): Xaa is C or S
  MOD_RES (13)..(14)..(15)..(16)..(17): Xaa is A or G
  MOD_RES (18)..(19)..(20)..(21): Xaa is A or G or is absent

SEQ ID NO: 63118 - protein, 37 aa, Artificial Sequence
  GFR-binding peptide
  MOD_RES (2)..(4)..(36)..(37): Xaa is C or S
RXGXESVAMGRHKRLYTVVGKDYYLISTASLKTPVXX

SEQ ID NO: 63119 - protein, 38 aa, Artificial Sequence; identical to SEQ ID NO: 24894
  GFR-binding peptide
  MOD_RES (33)..(34): Xaa is C or S
  MOD_RES (11)..(12)..(13)..(14)..(15): Xaa is A or G
  MOD_RES (16)..(17)..(18)..(19): Xaa is A or G or is absent

SEQ ID NO: 63120 - protein, 39 aa, Artificial Sequence; identical to SEQ ID NO: 24896
  GFR-binding peptide
  MOD_RES (2)..(33)..(34): Xaa is C or S

SEQ ID NO: 63121 - protein, 38 aa, Artificial Sequence; identical to SEQ ID NO: 24899
  GFR-binding peptide
  MOD_RES (1)..(35)..(36): Xaa is C or S
  MOD_RES (13)..(14)..(15)..(16)..(17): Xaa is A or G
  MOD_RES (18)..(19)..(20)..(21): Xaa is A or G or is absent

SEQ ID NO: 63122 - protein, 34 aa, Artificial Sequence; identical to SEQ ID NO: 3846
  GFR-binding peptide
  MOD_RES (2)..(33)..(34): Xaa is C or S

SEQ ID NO: 63123 - protein, 34 aa, Artificial Sequence; identical to SEQ ID NO: 24901
  GFR-binding peptide
  MOD_RES (31)..(32): Xaa is C or S

SEQ ID NO: 63124 - protein, 39 aa, Artificial Sequence; identical to SEQ ID NO: 3847
  GFR-binding peptide
  MOD_RES (1)..(3)..(36)..(37): Xaa is C or S
  MOD_RES (14)..(15)..(16)..(17)..(18): Xaa is A or G
  MOD_RES (19)..(20)..(21)..(22): Xaa is A or G or is absent

SEQ ID NO: 63125 - protein, 36 aa, Artificial Sequence; identical to SEQ ID NO: 24904
  GFR-binding peptide
  MOD_RES (2)..(36): Xaa is C or S
  MOD_RES (14)..(15)..(16)..(17)..(18): Xaa is A or G
  MOD_RES (19)..(20)..(21)..(22): Xaa is A or G or is absent

SEQ ID NO: 63126 - protein, 35 aa, Artificial Sequence; identical to SEQ ID NO: 24905
  GFR-binding peptide
  MOD_RES (34)..(35): Xaa is C or S
  MOD_RES (12)..(13)..(14)..(15)..(16): Xaa is A or G
  MOD_RES (17)..(18)..(19)..(20): Xaa is A or G or is absent

SEQ ID NO: 63127 - protein, 42 aa, Artificial Sequence; identical to SEQ ID NO: 3848
  GFR-binding peptide
  MOD_RES (1)..(3)..(37)..(38): Xaa is C or S
  MOD_RES (15)..(16)..(17)..(18)..(19): Xaa is A or G
  MOD_RES (20)..(21)..(22)..(23): Xaa is A or G or is absent

SEQ ID NO: 63128 - protein, 33 aa, Artificial Sequence; identical to SEQ ID NO: 31890
  GFR-binding peptide
  MOD_RES (1)..(33): Xaa is C or S

SEQ ID NO: 63129 - protein, 38 aa, Artificial Sequence; identical to SEQ ID NO: 24910
  GFR-binding peptide
  MOD_RES (34)..(35): Xaa is C or S
  MOD_RES (12)..(13)..(14)..(15)..(16): Xaa is A or G
  MOD_RES (17)..(18)..(19)..(20): Xaa is A or G or is absent

SEQ ID NO: 63130 - protein, 38 aa, Artificial Sequence; identical to SEQ ID NO: 11278
  GFR-binding peptide
  MOD_RES (2)..(36)..(37): Xaa is C or S
  MOD_RES (14)..(15)..(16)..(17)..(18): Xaa is A or G
  MOD_RES (19)..(20)..(21)..(22): Xaa is A or G or is absent

SEQ ID NO: 63131 - protein, 35 aa, Artificial Sequence
  GFR-binding peptide
  MOD_RES (1)..(3)..(35): Xaa is C or S
XAXSEVTMNRYKKLVVNKNEDFYLISIANMKEPVX

SEQ ID NO: 63132 - protein, 36 aa, Artificial Sequence; identical to SEQ ID NO: 24913
  GFR-binding peptide
  MOD_RES (1)..(3)..(35)..(36): Xaa is C or S

SEQ ID NO: 63133 - protein, 38 aa, Artificial Sequence
  GFR-binding peptide
  MOD_RES (2)..(4)..(38): Xaa is C or S
  MOD_RES (16)..(17)..(18)..(19)..(20): Xaa is A or G
  MOD_RES (21)..(22)..(23)..(24): Xaa is A or G or is absent
SXGXRDVVMGRHKRLXXXXXXXXXYYLMSTASMKTPTX

SEQ ID NO: 63134 - protein, 31 aa, Artificial Sequence; identical to SEQ ID NO: 3853
  GFR-binding peptide
  MOD_RES (31)..(31): Xaa is C or S

SEQ ID NO: 63135 - protein, 37 aa, Artificial Sequence; identical to SEQ ID NO: 3854
  GFR-binding peptide
  MOD_RES (1)..(35)..(36): Xaa is C or S
  MOD_RES (13)..(14)..(15)..(16)..(17): Xaa is A or G
  MOD_RES (18)..(19)..(20)..(21): Xaa is A or G or is absent

SEQ ID NO: 63136 - protein, 36 aa, Artificial Sequence; identical to SEQ ID NO: 3855
  GFR-binding peptide
  MOD_RES (1)..(3)..(34)..(35): Xaa is C or S

SEQ ID NO: 63137 - protein, 42 aa, Artificial Sequence; identical to SEQ ID NO: 31903
  GFR-binding peptide
  MOD_RES (2)..(4)..(37)..(38): Xaa is C or S
  MOD_RES (15)..(16)..(17)..(18)..(19): Xaa is A or G
  MOD_RES (20)..(21)..(22)..(23): Xaa is A or G or is absent

SEQ ID NO: 63138 - protein, 39 aa, Artificial Sequence
  GFR-binding peptide
  MOD_RES (1)..(33)..(34): Xaa is C or S
XSRVVMNYHYKLIVNSSDDKYLVSIPSLKTPAXXPKPVH

SEQ ID NO: 63139 - protein, 39 aa, Artificial Sequence
  GFR-binding peptide
  MOD_RES (1)..(3)..(34)..(35): Xaa is C or S
XKXSKVIMPIKGYIKPTKGIFYLINIPSLDQSVXXPSAS

SEQ ID NO: 63140 - protein, 34 aa, Artificial Sequence
  GFR-binding peptide
  MOD_RES (1)..(3): Xaa is C or S
XGXESVAMGRHKRLYTVVGKDYYLISTASLKTPV

SEQ ID NO: 63141 - protein, 38 aa, Artificial Sequence
  GFR-binding peptide
  MOD_RES (32)..(33): Xaa is C or S
SEVTMNEYKFKVVNKNEDLYLISIPEMKEPVXXPEPIG

SEQ ID NO: 63142 - protein, 36 aa, Artificial Sequence
  GFR-binding peptide
  MOD_RES (2)..(34)..(35): Xaa is C or S
GXESVAMGRHKRLYTVVGKDYYLISTASLKTPVXXA

SEQ ID NO: 63143 - protein, 34 aa, Artificial Sequence; identical to SEQ ID NO: 31909
  GFR-binding peptide
  MOD_RES (1)..(3): Xaa is C or S

SEQ ID NO: 63144 - protein, 38 aa, Artificial Sequence; identical to SEQ ID NO: 3859
  GFR-binding peptide
  MOD_RES (34)..(35): Xaa is C or S
  MOD_RES (12)..(13)..(14)..(15)..(16): Xaa is A or G
  MOD_RES (17)..(18)..(19)..(20): Xaa is A or G or is absent

SEQ ID NO: 63145 - protein, 41 aa, Artificial Sequence; identical to SEQ ID NO: 3860
  GFR-binding peptide
  MOD_RES (2)..(4)..(38)..(39): Xaa is C or S
  MOD_RES (16)..(17)..(18)..(19)..(20): Xaa is A or G
  MOD_RES (21)..(22)..(23)..(24): Xaa is A or G or is absent

SEQ ID NO: 63146 - protein, 36 aa, Artificial Sequence
  GFR-binding peptide
  MOD_RES (1)..(3)..(34)..(35): Xaa is C or S
XKXSKVIMPIKGYIKPTKGIFYLINIPSLDQSVXXP

SEQ ID NO: 63147 - protein, 34 aa, Artificial Sequence; identical to SEQ ID NO: 3862
  GFR-binding peptide
  MOD_RES (31)..(32): Xaa is C or S

SEQ ID NO: 63148 - protein, 42 aa, Artificial Sequence; identical to SEQ ID NO: 3864
  GFR-binding peptide
  MOD_RES (2)..(36)..(37): Xaa is C or S
  MOD_RES (14)..(15)..(16)..(17)..(18): Xaa is A or G
  MOD_RES (19)..(20)..(21)..(22): Xaa is A or G or is absent

SEQ ID NO: 63149 - protein, 37 aa, Artificial Sequence; identical to SEQ ID NO: 24930
  GFR-binding peptide
  MOD_RES (1)..(3)..(35)..(36): Xaa is C or S

SEQ ID NO: 63150 - protein, 43 aa, Artificial Sequence; identical to SEQ ID NO: 24932
  GFR-binding peptide
  MOD_RES (1)..(3)..(37)..(38): Xaa is C or S
  MOD_RES (15)..(16)..(17)..(18)..(19): Xaa is A or G
  MOD_RES (20)..(21)..(22)..(23): Xaa is A or G or is absent

SEQ ID NO: 63151 - protein, 35 aa, Artificial Sequence
  GFR-binding peptide
  MOD_RES (33)..(34): Xaa is C or S
  MOD_RES (11)..(12)..(13)..(14)..(15): Xaa is A or G
  MOD_RES (16)..(17)..(18)..(19): Xaa is A or G or is absent
SRVIMPIKGYXXXXXXXXXFYLINIPSLAQPVXXP

SEQ ID NO: 63152 - protein, 38 aa, Artificial Sequence; identical to SEQ ID NO: 3865
  GFR-binding peptide
  MOD_RES (33)..(34): Xaa is C or S
  MOD_RES (11)..(12)..(13)..(14)..(15): Xaa is A or G
  MOD_RES (16)..(17)..(18)..(19): Xaa is A or G or is absent

SEQ ID NO: 63153 - protein, 39 aa, Artificial Sequence
  GFR-binding peptide
  MOD_RES (1)..(3)..(37)..(38): Xaa is C or S
  MOD_RES (15)..(16)..(17)..(18)..(19): Xaa is A or G
  MOD_RES (20)..(21)..(22)..(23): Xaa is A or G or is absent
XAXSEVTMNRHKRLXXXXXXXXXYYLISTASMKEPVXXP

SEQ ID NO: 63154 - protein, 36 aa, Artificial Sequence; identical to SEQ ID NO: 24938
  GFR-binding peptide
  MOD_RES (31)..(32): Xaa is C or S

SEQ ID NO: 63155 - protein, 31 aa, Artificial Sequence
  GFR-binding peptide
SEVTMNRYKKLVVNKNEDFYLISIANMKEPV

SEQ ID NO: 63156 - protein, 38 aa, Artificial Sequence; identical to SEQ ID NO: 24939
  GFR-binding peptide
  MOD_RES (1)..(35)..(36): Xaa is C or S
  MOD_RES (13)..(14)..(15)..(16)..(17): Xaa is A or G
  MOD_RES (18)..(19)..(20)..(21): Xaa is A or G or is absent

SEQ ID NO: 63157 - protein, 34 aa, Artificial Sequence; identical to SEQ ID NO: 24942
  GFR-binding peptide
  MOD_RES (2)..(34): Xaa is C or S

SEQ ID NO: 63158 - protein, 36 aa, Artificial Sequence
  GFR-binding peptide
  MOD_RES (2)..(34)..(35): Xaa is C or S
GXAEVVMDRHKRLVVNNAADYYLISTASLRAPVXXS

SEQ ID NO: 63159 - protein, 36 aa, Artificial Sequence; identical to SEQ ID NO: 24947
  GFR-binding peptide
  MOD_RES (32)..(33): Xaa is C or S

SEQ ID NO: 63160 - protein, 37 aa, Artificial Sequence; identical to SEQ ID NO: 24949
  GFR-binding peptide
  MOD_RES (34)..(35): Xaa is C or S
  MOD_RES (12)..(13)..(14)..(15)..(16): Xaa is A or G
  MOD_RES (17)..(18)..(19)..(20): Xaa is A or G or is absent

SEQ ID NO: 63161 - protein, 34 aa, Artificial Sequence; identical to SEQ ID NO: 31923
  GFR-binding peptide
  MOD_RES (32)..(33): Xaa is C or S

SEQ ID NO: 63162 - protein, 36 aa, Artificial Sequence
  GFR-binding peptide
  MOD_RES (2)..(34)..(35): Xaa is C or S
AXSEVTMNRYKKLVVNKNEDFYLISIANMKEPVXXP

SEQ ID NO: 63163 - protein, 33 aa, Artificial Sequence; identical to SEQ ID NO: 24952
  GFR-binding peptide
  MOD_RES (33)..(33): Xaa is C or S
  MOD_RES (11)..(12)..(13)..(14)..(15): Xaa is A or G
  MOD_RES (16)..(17)..(18)..(19): Xaa is A or G or is absent

SEQ ID NO: 63164 - protein, 39 aa, Artificial Sequence; identical to SEQ ID NO: 31928
  GFR-binding peptide
  MOD_RES (2)..(36)..(37): Xaa is C or S
  MOD_RES (14)..(15)..(16)..(17)..(18): Xaa is A or G
  MOD_RES (19)..(20)..(21)..(22): Xaa is A or G or is absent

SEQ ID NO: 63165 - protein, 36 aa, Artificial Sequence; identical to SEQ ID NO: 24954
  GFR-binding peptide
  MOD_RES (2)..(4): Xaa is C or S
  MOD_RES (15)..(16)..(17)..(18)..(19): Xaa is A or G
  MOD_RES (20)..(21)..(22)..(23): Xaa is A or G or is absent

SEQ ID NO: 63166 - protein, 38 aa, Artificial Sequence; identical to SEQ ID NO: 31930
  GFR-binding peptide
  MOD_RES (34)..(35): Xaa is C or S
  MOD_RES (12)..(13)..(14)..(15)..(16): Xaa is A or G
  MOD_RES (17)..(18)..(19)..(20): Xaa is A or G or is absent

SEQ ID NO: 63167 - protein, 41 aa, Artificial Sequence; identical to SEQ ID NO: 31931
  GFR-binding peptide
  MOD_RES (2)..(36)..(37): Xaa is C or S
  MOD_RES (14)..(15)..(16)..(17)..(18): Xaa is A or G
  MOD_RES (19)..(20)..(21)..(22): Xaa is A or G or is absent

SEQ ID NO: 63168 - protein, 38 aa, Artificial Sequence; identical to SEQ ID NO: 3885
  GFR-binding peptide
  MOD_RES (1)..(3)..(35)..(36): Xaa is C or S

SEQ ID NO: 63169 - protein, 39 aa, Artificial Sequence; identical to SEQ ID NO: 24959
  GFR-binding peptide
  MOD_RES (1)..(36)..(37): Xaa is C or S
  MOD_RES (14)..(15)..(16)..(17)..(18): Xaa is A or G
  MOD_RES (19)..(20)..(21)..(22): Xaa is A or G or is absent

SEQ ID NO: 63170 - protein, 40 aa, Artificial Sequence; identical to SEQ ID NO: 3887
  GFR-binding peptide
  MOD_RES (35)..(36): Xaa is C or S
  MOD_RES (13)..(14)..(15)..(16)..(17): Xaa is A or G
  MOD_RES (18)..(19)..(20)..(21): Xaa is A or G or is absent

SEQ ID NO: 63171 - protein, 38 aa, Artificial Sequence; identical to SEQ ID NO: 3888
  GFR-binding peptide
  MOD_RES (1)..(3)..(34)..(35): Xaa is C or S

SEQ ID NO: 63172 - protein, 35 aa, Artificial Sequence; identical to SEQ ID NO: 31938
  GFR-binding peptide
  MOD_RES (2)..(4): Xaa is C or S

SEQ ID NO: 63173 - protein, 42 aa, Artificial Sequence; identical to SEQ ID NO: 24963
  GFR-binding peptide
  MOD_RES (1)..(3)..(36)..(37): Xaa is C or S
  MOD_RES (14)..(15)..(16)..(17)..(18): Xaa is A or G
  MOD_RES (19)..(20)..(21)..(22): Xaa is A or G or is absent

SEQ ID NO: 63174 - protein, 33 aa, Artificial Sequence
  GFR-binding peptide
  MOD_RES (32)..(33): Xaa is C or S
SEVTMNYHYKLVVNKNEDKYLISIPSMKEPVXX

SEQ ID NO: 63175 - protein, 38 aa, Artificial Sequence; identical to SEQ ID NO: 31941
  GFR-binding peptide
  MOD_RES (1)..(33): Xaa is C or S

SEQ ID NO: 63176 - protein, 34 aa, Artificial Sequence; identical to SEQ ID NO: 3894
  GFR-binding peptide
  MOD_RES (33)..(34): Xaa is C or S
  MOD_RES (11)..(12)..(13)..(14)..(15): Xaa is A or G
  MOD_RES (16)..(17)..(18)..(19): Xaa is A or G or is absent

SEQ ID NO: 63177 - protein, 38 aa, Artificial Sequence; identical to SEQ ID NO: 56895
  GFR-binding peptide
  MOD_RES (1)..(3)..(34)..(35): Xaa is C or S

SEQ ID NO: 63178 - protein, 34 aa, Artificial Sequence
  GFR-binding peptide
  MOD_RES (2)..(33)..(34): Xaa is C or S
GXEEVIMEYKFKLLVRGNDLYLMSIPETKVPAXX

SEQ ID NO: 63179 - protein, 35 aa, Artificial Sequence
  GFR-binding peptide
  MOD_RES (33)..(34): Xaa is C or S
  MOD_RES (11)..(12)..(13)..(14)..(15): Xaa is A or G
  MOD_RES (16)..(17)..(18)..(19): Xaa is A or G or is absent
EVVMDRHKRLXXXXXXXXXYYLISTASLRTPVXXT

SEQ ID NO: 63180 - protein, 34 aa, Artificial Sequence; identical to SEQ ID NO: 3896
  GFR-binding peptide
  MOD_RES (1)..(3): Xaa is C or S

SEQ ID NO: 63181 - protein, 37 aa, Artificial Sequence; identical to SEQ ID NO: 3897
  GFR-binding peptide
  MOD_RES (32)..(33): Xaa is C or S

SEQ ID NO: 63182 - protein, 38 aa, Artificial Sequence; identical to SEQ ID NO: 24975
  GFR-binding peptide
  MOD_RES (2)..(4)..(37)..(38): Xaa is C or S

SEQ ID NO: 63183 - protein, 42 aa, Artificial Sequence; identical to SEQ ID NO: 3898
  GFR-binding peptide
  MOD_RES (2)..(4)..(36)..(37): Xaa is C or S

SEQ ID NO: 63184 - protein, 36 aa, Artificial Sequence
  GFR-binding peptide
  MOD_RES (32)..(33): Xaa is C or S
SEVTMNPIKGYVVNKNEDFYLINIPSMKEPVXXPEP

SEQ ID NO: 63185 - protein, 32 aa, Artificial Sequence; identical to SEQ ID NO: 24981
  GFR-binding peptide
  MOD_RES (11)..(12)..(13)..(14)..(15): Xaa is A or G
  MOD_RES (16)..(17)..(18)..(19): Xaa is A or G or is absent

SEQ ID NO: 63186 - protein, 35 aa, Artificial Sequence; identical to SEQ ID NO: 31955
  GFR-binding peptide
  MOD_RES (32)..(33): Xaa is C or S

SEQ ID NO: 63187 - protein, 35 aa, Artificial Sequence
  GFR-binding peptide
  MOD_RES (2)..(4): Xaa is C or S
RXAXSEVTMNRHKRLVVNKNEDYYLISTASMKEPV

SEQ ID NO: 63188 - protein, 37 aa, Artificial Sequence; identical to SEQ ID NO: 56907
  GFR-binding peptide
  MOD_RES (1)..(32)..(33): Xaa is C or S

SEQ ID NO: 63189 - protein, 36 aa, Artificial Sequence; identical to SEQ ID NO: 3903
  GFR-binding peptide
  MOD_RES (31)..(32): Xaa is C or S

SEQ ID NO: 63190 - protein, 32 aa, Artificial Sequence; identical to SEQ ID NO: 24983
  GFR-binding peptide
  MOD_RES (1)..(1): Xaa is C or S

SEQ ID NO: 63191 - protein, 40 aa, Artificial Sequence; identical to SEQ ID NO: 24984
  GFR-binding peptide
  MOD_RES (2)..(4)..(37)..(38): Xaa is C or S
  MOD_RES (15)..(16)..(17)..(18)..(19): Xaa is A or G
  MOD_RES (20)..(21)..(22)..(23): Xaa is A or G or is absent

SEQ ID NO: 63192 - protein, 40 aa, Artificial Sequence
  GFR-binding peptide
  MOD_RES (1)..(3)..(34)..(35): Xaa is C or S
XKXSKVVMPIKGYVKPTRGVFYLINIPSLDQPVXXPSASA

SEQ ID NO: 63193 - protein, 34 aa, Artificial Sequence; identical to SEQ ID NO: 3904
  GFR-binding peptide
  MOD_RES (1)..(33)..(34): Xaa is C or S

SEQ ID NO: 63194 - protein, 37 aa, Artificial Sequence; identical to SEQ ID NO: 24986
  GFR-binding peptide
  MOD_RES (32)..(33): Xaa is C or S

SEQ ID NO: 63195 - protein, 37 aa, Artificial Sequence; identical to SEQ ID NO: 3907
  GFR-binding peptide
  MOD_RES (1)..(3)..(37): Xaa is C or S
  MOD_RES (15)..(16)..(17)..(18)..(19): Xaa is A or G
  MOD_RES (20)..(21)..(22)..(23): Xaa is A or G or is absent

SEQ ID NO: 63196 - protein, 34 aa, Artificial Sequence; identical to SEQ ID NO: 3908
  GFR-binding peptide
  MOD_RES (32)..(33): Xaa is C or S

SEQ ID NO: 63197 - protein, 37 aa, Artificial Sequence; identical to SEQ ID NO: 3909
  GFR-binding peptide
  MOD_RES (2)..(35)..(36): Xaa is C or S
  MOD_RES (13)..(14)..(15)..(16)..(17): Xaa is A or G
  MOD_RES (18)..(19)..(20)..(21): Xaa is A or G or is absent

SEQ ID NO: 63198 - protein, 36 aa, Artificial Sequence
  GFR-binding peptide
  MOD_RES (32)..(33): Xaa is C or S
SEVTMNYHYKLVVNKNEDKYLISIPSMKEPVXXPEP

SEQ ID NO: 63199 - protein, 41 aa, Artificial Sequence; identical to SEQ ID NO: 11333
  GFR-binding peptide
  MOD_RES (2)..(4)..(38)..(39): Xaa is C or S
  MOD_RES (16)..(17)..(18)..(19)..(20): Xaa is A or G
  MOD_RES (21)..(22)..(23)..(24): Xaa is A or G or is absent

SEQ ID NO: 63200 - protein, 36 aa, Artificial Sequence; identical to SEQ ID NO: 31973
  GFR-binding peptide
  MOD_RES (2)..(36): Xaa is C or S
  MOD_RES (14)..(15)..(16)..(17)..(18): Xaa is A or G
  MOD_RES (19)..(20)..(21)..(22): Xaa is A or G or is absent

SEQ ID NO: 63201 - protein, 40 aa, Artificial Sequence; identical to SEQ ID NO: 3914
  GFR-binding peptide
  MOD_RES (2)..(35)..(36): Xaa is C or S

SEQ ID NO: 63202 - protein, 34 aa, Artificial Sequence; identical to SEQ ID NO: 3919
  GFR-binding peptide
  MOD_RES (2)..(33)..(34): Xaa is C or S

SEQ ID NO: 63203 - protein, 34 aa, Artificial Sequence; identical to SEQ ID NO: 25000
  GFR-binding peptide
  MOD_RES (33)..(34): Xaa is C or S
  MOD_RES (11)..(12)..(13)..(14)..(15): Xaa is A or G
  MOD_RES (16)..(17)..(18)..(19): Xaa is A or G or is absent

SEQ ID NO: 63204 - protein, 41 aa, Artificial Sequence; identical to SEQ ID NO: 3921
  GFR-binding peptide
  MOD_RES (1)..(36)..(37): Xaa is C or S
  MOD_RES (14)..(15)..(16)..(17)..(18): Xaa is A or G
  MOD_RES (19)..(20)..(21)..(22): Xaa is A or G or is absent

SEQ ID NO: 63205 - protein, 34 aa, Artificial Sequence
  GFR-binding peptide
  MOD_RES (2)..(4): Xaa is C or S
SXKXSKVVMPIKGYVKPTRGVFYLINIPSLDQPV

SEQ ID NO: 63206 - protein, 37 aa, Artificial Sequence; identical to SEQ ID NO: 31983
  GFR-binding peptide
  MOD_RES (1)..(3)..(35)..(36): Xaa is C or S

SEQ ID NO: 63207 - protein, 39 aa, Artificial Sequence; identical to SEQ ID NO: 25004
  GFR-binding peptide
  MOD_RES (2)..(4)..(38)..(39): Xaa is C or S
  MOD_RES (16)..(17)..(18)..(19)..(20): Xaa is A or G
  MOD_RES (21)..(22)..(23)..(24): Xaa is A or G or is absent

SEQ ID NO: 63208 - protein, 42 aa, Artificial Sequence; identical to SEQ ID NO: 3929
  GFR-binding peptide
  MOD_RES (2)..(4)..(38): Xaa is C or S
  MOD_RES (16)..(17)..(18)..(19)..(20): Xaa is A or G
  MOD_RES (21)..(22)..(23)..(24): Xaa is A or G or is absent

SEQ ID NO: 63209 - protein, 36 aa, Artificial Sequence; identical to SEQ ID NO: 25010
  GFR-binding peptide
  MOD_RES (2)..(4)..(36): Xaa is C or S

SEQ ID NO: 63210 - protein, 30 aa, Artificial Sequence
  GFR-binding peptide
SVAMGRHKRLYTVVGKDYYLISTASLKTPV

SEQ ID NO: 63211 - protein, 42 aa, Artificial Sequence
  GFR-binding peptide
  MOD_RES (2)..(4)..(36)..(37): Xaa is C or S
RXAXSEVTMNRHKRLVVNKNEDYYLISTASMKEPVXXPEPIG

SEQ ID NO: 63212 - protein, 36 aa, Artificial Sequence; identical to SEQ ID NO: 31993
  GFR-binding peptide
  MOD_RES (1)..(3)..(35)..(36): Xaa is C or S

SEQ ID NO: 63213 - protein, 32 aa, Artificial Sequence; identical to SEQ ID NO: 3936
  GFR-binding peptide
  MOD_RES (31)..(32): Xaa is C or S

SEQ ID NO: 63214 - protein, 33 aa, Artificial Sequence; identical to SEQ ID NO: 25020
  GFR-binding peptide
  MOD_RES (12)..(13)..(14)..(15)..(16): Xaa is A or G
  MOD_RES (17)..(18)..(19)..(20): Xaa is A or G or is absent

SEQ ID NO: 63215 - protein, 34 aa, Artificial Sequence; identical to SEQ ID NO: 31995
  GFR-binding peptide
  MOD_RES (32)..(32): Xaa is C or S

SEQ ID NO: 63216 - protein, 33 aa, Artificial Sequence; identical to SEQ ID NO: 3940
  GFR-binding peptide
  MOD_RES (1)..(32)..(33): Xaa is C or S

SEQ ID NO: 63217 - protein, 40 aa, Artificial Sequence; identical to SEQ ID NO: 3944
  GFR-binding peptide
  MOD_RES (1)..(35)..(36): Xaa is C or S
  MOD_RES (13)..(14)..(15)..(16)..(17): Xaa is A or G
  MOD_RES (18)..(19)..(20)..(21): Xaa is A or G or is absent

SEQ ID NO: 63218 - protein, 38 aa, Artificial Sequence
  GFR-binding peptide
  MOD_RES (2)..(4)..(38): Xaa is C or S
  MOD_RES (16)..(17)..(18)..(19)..(20): Xaa is A or G
  MOD_RES (21)..(22)..(23)..(24): Xaa is A or G or is absent
SXGXRDVVMGEYKFKXXXXXXXXXLYLMSIPEMKTPTX

SEQ ID NO: 63219 - protein, 40 aa, Artificial Sequence; identical to SEQ ID NO: 3946
  GFR-binding peptide
  MOD_RES (1)..(3)..(36)..(37): Xaa is C or S
  MOD_RES (14)..(15)..(16)..(17)..(18): Xaa is A or G
  MOD_RES (19)..(20)..(21)..(22): Xaa is A or G or is absent

SEQ ID NO: 63220 - protein, 44 aa, Artificial Sequence; identical to SEQ ID NO: 32003
  GFR-binding peptide
  MOD_RES (2)..(4)..(38): Xaa is C or S
  MOD_RES (16)..(17)..(18)..(19)..(20): Xaa is A or G
  MOD_RES (21)..(22)..(23)..(24): Xaa is A or G or is absent

SEQ ID NO: 63221 - protein, 39 aa, Artificial Sequence; identical to SEQ ID NO: 3949
  GFR-binding peptide
  MOD_RES (2)..(36)..(37): Xaa is C or S
  MOD_RES (14)..(15)..(16)..(17)..(18): Xaa is A or G
  MOD_RES (19)..(20)..(21)..(22): Xaa is A or G or is absent

SEQ ID NO: 63222 - protein, 35 aa, Artificial Sequence
  GFR-binding peptide
  MOD_RES (2)..(2): Xaa is C or S
  MOD_RES (14)..(15)..(16)..(17)..(18): Xaa is A or G
  MOD_RES (19)..(20)..(21)..(22): Xaa is A or G or is absent
GXSEVVMDYHYKLXXXXXXXXXKYLISIPSLRTPV

SEQ ID NO: 63223 - protein, 36 aa, Artificial Sequence; identical to SEQ ID NO: 3951
  GFR-binding peptide
  MOD_RES (34)..(35): Xaa is C or S
  MOD_RES (12)..(13)..(14)..(15)..(16): Xaa is A or G
  MOD_RES (17)..(18)..(19)..(20): Xaa is A or G or is absent

SEQ ID NO: 63224 - protein, 41 aa, Artificial Sequence; identical to SEQ ID NO: 32011
  GFR-binding peptide
  MOD_RES (1)..(35)..(36): Xaa is C or S
  MOD_RES (13)..(14)..(15)..(16)..(17): Xaa is A or G
  MOD_RES (18)..(19)..(20)..(21): Xaa is A or G or is absent

SEQ ID NO: 63225 - protein, 34 aa, Artificial Sequence
  GFR-binding peptide
  MOD_RES (31)..(32): Xaa is C or S
SRVIMPIKGYVKPKRGVFYLINIPSLAQPVXXPA

SEQ ID NO: 63226 - protein, 34 aa, Artificial Sequence; identical to SEQ ID NO: 3953
  GFR-binding peptide
  MOD_RES (31)..(32): Xaa is C or S

SEQ ID NO: 63227 - protein, 37 aa, Artificial Sequence; identical to SEQ ID NO: 3957
  GFR-binding peptide
  MOD_RES (2)..(4): Xaa is C or S
  MOD_RES (16)..(17)..(18)..(19)..(20): Xaa is A or G
  MOD_RES (21)..(22)..(23)..(24): Xaa is A or G or is absent

SEQ ID NO: 63228 - protein, 37 aa, Artificial Sequence; identical to SEQ ID NO: 11377
  GFR-binding peptide
  MOD_RES (2)..(4): Xaa is C or S
  MOD_RES (16)..(17)..(18)..(19)..(20): Xaa is A or G
  MOD_RES (21)..(22)..(23)..(24): Xaa is A or G or is absent

SEQ ID NO: 63229 - protein, 35 aa, Artificial Sequence; identical to SEQ ID NO: 32020
  GFR-binding peptide
  MOD_RES (1)..(33)..(34): Xaa is C or S

SEQ ID NO: 63230 - protein, 35 aa, Artificial Sequence; identical to SEQ ID NO: 25039
  GFR-binding peptide
  MOD_RES (33)..(34): Xaa is C or S
  MOD_RES (11)..(12)..(13)..(14)..(15): Xaa is A or G
  MOD_RES (16)..(17)..(18)..(19): Xaa is A or G or is absent

SEQ ID NO: 63231 - protein, 41 aa, Artificial Sequence; identical to SEQ ID NO: 3958
  GFR-binding peptide
  MOD_RES (1)..(3)..(35)..(36): Xaa is C or S

SEQ ID NO: 63232 - protein, 34 aa, Artificial Sequence; identical to SEQ ID NO: 32023
  GFR-binding peptide
  MOD_RES (1)..(33)..(34): Xaa is C or S

SEQ ID NO: 63233 - protein, 35 aa, Artificial Sequence
  GFR-binding peptide
  MOD_RES (32)..(33): Xaa is C or S
SEVTMNYHYKLVVNKNEDKYLISIPSMKEPVXXPE

SEQ ID NO: 63234 - protein, 39 aa, Artificial Sequence; identical to SEQ ID NO: 25043
  GFR-binding peptide
  MOD_RES (1)..(35)..(36): Xaa is C or S
  MOD_RES (13)..(14)..(15)..(16)..(17): Xaa is A or G
  MOD_RES (18)..(19)..(20)..(21): Xaa is A or G or is absent

SEQ ID NO: 63235 - protein, 34 aa, Artificial Sequence
  GFR-binding peptide
  MOD_RES (32)..(33): Xaa is C or S
SEVTMNRYKKLVVNKNEDFYLISIANMKEPVXXP

SEQ ID NO: 63236 - protein, 32 aa, Artificial Sequence; identical to SEQ ID NO: 25046
  GFR-binding peptide
  MOD_RES (2)..(2): Xaa is C or S

SEQ ID NO: 63237 - protein, 36 aa, Artificial Sequence; identical to SEQ ID NO: 25052
  GFR-binding peptide
  MOD_RES (33)..(34): Xaa is C or S
  MOD_RES (11)..(12)..(13)..(14)..(15): Xaa is A or G
  MOD_RES (16)..(17)..(18)..(19): Xaa is A or G or is absent

SEQ ID NO: 63238 - protein, 39 aa, Artificial Sequence; identical to SEQ ID NO: 3970
  GFR-binding peptide
  MOD_RES (1)..(3)..(37)..(38): Xaa is C or S
  MOD_RES (15)..(16)..(17)..(18)..(19): Xaa is A or G
  MOD_RES (20)..(21)..(22)..(23): Xaa is A or G or is absent

SEQ ID NO: 63239 - protein, 36 aa, Artificial Sequence
  GFR-binding peptide
  MOD_RES (1)..(3)..(34)..(35): Xaa is C or S
XKXSKVVMPIKGYVKPTRGVFYLINIPSLDQPVXXP

SEQ ID NO: 63240 - protein, 39 aa, Artificial Sequence; identical to SEQ ID NO: 32038
  GFR-binding peptide
  MOD_RES (2)..(4)..(36)..(37): Xaa is C or S

SEQ ID NO: 63241 - protein, 41 aa, Artificial Sequence; identical to SEQ ID NO: 3971
  GFR-binding peptide
  MOD_RES (2)..(4)..(37)..(38): Xaa is C or S
  MOD_RES (15)..(16)..(17)..(18)..(19): Xaa is A or G
  MOD_RES (20)..(21)..(22)..(23): Xaa is A or G or is absent

SEQ ID NO: 63242 - protein, 37 aa, Artificial Sequence; identical to SEQ ID NO: 3975
  GFR-binding peptide
  MOD_RES (2)..(4)..(37): Xaa is C or S
  MOD_RES (15)..(16)..(17)..(18)..(19): Xaa is A or G
  MOD_RES (20)..(21)..(22)..(23): Xaa is A or G or is absent

SEQ ID NO: 63243 - protein, 36 aa, Artificial Sequence; identical to SEQ ID NO: 3978
  GFR-binding peptide
  MOD_RES (1)..(3)..(34)..(35): Xaa is C or S

SEQ ID NO: 63244 - protein, 39 aa, Artificial Sequence; identical to SEQ ID NO: 56992
  GFR-binding peptide
  MOD_RES (2)..(34)..(35): Xaa is C or S

SEQ ID NO: 63245 - protein, 39 aa, Artificial Sequence; identical to SEQ ID NO: 3982
  GFR-binding peptide
  MOD_RES (2)..(35)..(36): Xaa is C or S
  MOD_RES (13)..(14)..(15)..(16)..(17): Xaa is A or G
  MOD_RES (18)..(19)..(20)..(21): Xaa is A or G or is absent

SEQ ID NO: 63246 - protein, 38 aa, Artificial Sequence; identical to SEQ ID NO: 3984
  GFR-binding peptide
  MOD_RES (33)..(34): Xaa is C or S
  MOD_RES (11)..(12)..(13)..(14)..(15): Xaa is A or G
  MOD_RES (16)..(17)..(18)..(19): Xaa is A or G or is absent

SEQ ID NO: 63247 - protein, 36 aa, Artificial Sequence; identical to SEQ ID NO: 3985
  GFR-binding peptide
  MOD_RES (1)..(34)..(35): Xaa is C or S
  MOD_RES (12)..(13)..(14)..(15)..(16): Xaa is A or G
  MOD_RES (17)..(18)..(19)..(20): Xaa is A or G or is absent

SEQ ID NO: 63248 - protein, 40 aa, Artificial Sequence; identical to SEQ ID NO: 3988
  GFR-binding peptide
  MOD_RES (1)..(3)..(37)..(38): Xaa is C or S
  MOD_RES (15)..(16)..(17)..(18)..(19): Xaa is A or G
  MOD_RES (20)..(21)..(22)..(23): Xaa is A or G or is absent

SEQ ID NO: 63249 - protein, 36 aa, Artificial Sequence
  GFR-binding peptide
  MOD_RES (1)..(3)..(34)..(35): Xaa is C or S
XGXEEVIMEYKFKLLVRGNDLYLMSIPETKVPAXXT

SEQ ID NO: 63250 - protein, 38 aa, Artificial Sequence; identical to SEQ ID NO: 32064
  GFR-binding peptide
  MOD_RES (1)..(35)..(36): Xaa is C or S
  MOD_RES (13)..(14)..(15)..(16)..(17): Xaa is A or G
  MOD_RES (18)..(19)..(20)..(21): Xaa is A or G or is absent

SEQ ID NO: 63251 - protein, 38 aa, Artificial Sequence; identical to SEQ ID NO: 3991
  GFR-binding peptide
  MOD_RES (2)..(4)..(35)..(36): Xaa is C or S

SEQ ID NO: 63252 - protein, 37 aa, Artificial Sequence; identical to SEQ ID NO: 32067
  GFR-binding peptide
  MOD_RES (1)..(35)..(36): Xaa is C or S
  MOD_RES (13)..(14)..(15)..(16)..(17): Xaa is A or G
  MOD_RES (18)..(19)..(20)..(21): Xaa is A or G or is absent

SEQ ID NO: 63253 - protein, 41 aa, Artificial Sequence; identical to SEQ ID NO: 25075
  GFR-binding peptide
  MOD_RES (2)..(4)..(36): Xaa is C or S

SEQ ID NO: 63254 - protein, 35 aa, Artificial Sequence; identical to SEQ ID NO: 57005
  GFR-binding peptide
  MOD_RES (1)..(33)..(34): Xaa is C or S

SEQ ID NO: 63255 - protein, 41 aa, Artificial Sequence
  GFR-binding peptide
  MOD_RES (2)..(4)..(37)..(38): Xaa is C or S
  MOD_RES (15)..(16)..(17)..(18)..(19): Xaa is A or G
  MOD_RES (20)..(21)..(22)..(23): Xaa is A or G or is absent
LXGXEEVIMYHYKLXXXXXXXXXKYLMSIPSTKVPAXXTSP

SEQ ID NO: 63256 - protein, 36 aa, Artificial Sequence; identical to SEQ ID NO: 25079
  GFR-binding peptide
  MOD_RES (1)..(3): Xaa is C or S
  MOD_RES (15)..(16)..(17)..(18)..(19): Xaa is A or G
  MOD_RES (20)..(21)..(22)..(23): Xaa is A or G or is absent

SEQ ID NO: 63257 - protein, 35 aa, Artificial Sequence
  GFR-binding peptide
  MOD_RES (2)..(4)..(35): Xaa is C or S
LXGXEEVIMYHYKLLLVRGNDKYLMSIPSTKVPAX

SEQ ID NO: 63258 - protein, 32 aa, Artificial Sequence
  GFR-binding peptide
  MOD_RES (11)..(12)..(13)..(14)..(15): Xaa is A or G
  MOD_RES (16)..(17)..(18)..(19): Xaa is A or G or is absent
SVAMGRHKRLXXXXXXXXXYYLISTASLKTPV

SEQ ID NO: 63259 - protein, 38 aa, Artificial Sequence; identical to SEQ ID NO: 3999
  GFR-binding peptide
  MOD_RES (1)..(3)..(34)..(35): Xaa is C or S

SEQ ID NO: 63260 - protein, 34 aa, Artificial Sequence
  GFR-binding peptide
  MOD_RES (1)..(33)..(34): Xaa is C or S
XSEVTMNRHKRLVVNKNEDYYLISTASMKEPVXX

SEQ ID NO: 63261 - protein, 41 aa, Artificial Sequence; identical to SEQ ID NO: 4001
  GFR-binding peptide
  MOD_RES (2)..(4)..(35)..(36): Xaa is C or S

SEQ ID NO: 63262 - protein, 37 aa, Artificial Sequence; identical to SEQ ID NO: 4002
  GFR-binding peptide
  MOD_RES (2)..(4): Xaa is C or S
  MOD_RES (16)..(17)..(18)..(19)..(20): Xaa is A or G
  MOD_RES (21)..(22)..(23)..(24): Xaa is A or G or is absent

SEQ ID NO: 63263 - protein, 37 aa, Artificial Sequence; identical to SEQ ID NO: 4005
  GFR-binding peptide
  MOD_RES (33)..(34): Xaa is C or S
  MOD_RES (11)..(12)..(13)..(14)..(15): Xaa is A or G
  MOD_RES (16)..(17)..(18)..(19): Xaa is A or G or is absent

SEQ ID NO: 63264 - protein, 31 aa, Artificial Sequence
  GFR-binding peptide
  MOD_RES (1)..(1): Xaa is C or S
XEEVIMYHYKLLLVRGNDKYLMSIPSTKVPA

SEQ ID NO: 63265 - protein, 35 aa, Artificial Sequence; identical to SEQ ID NO: 32076
  GFR-binding peptide
  MOD_RES (1)..(35): Xaa is C or S
  MOD_RES (13)..(14)..(15)..(16)..(17): Xaa is A or G
  MOD_RES (18)..(19)..(20)..(21): Xaa is A or G or is absent

SEQ ID NO: 63266 - protein, 43 aa, Artificial Sequence
  GFR-binding peptide
  MOD_RES (1)..(3)..(37)..(38): Xaa is C or S
  MOD_RES (15)..(16)..(17)..(18)..(19): Xaa is A or G
  MOD_RES (20)..(21)..(22)..(23): Xaa is A or G or is absent
XAXSEVTMNRHKRLXXXXXXXXXYYLISTASMKEPVXXPEPIG

SEQ ID NO: 63267 - protein, 39 aa, Artificial Sequence; identical to SEQ ID NO: 25085
  GFR-binding peptide
  MOD_RES (1)..(3)..(36)..(37): Xaa is C or S

SEQ ID NO: 63268 - protein, 41 aa, Artificial Sequence; identical to SEQ ID NO: 32080
  GFR-binding peptide
  MOD_RES (1)..(3)..(37)..(38): Xaa is C or S
  MOD_RES (15)..(16)..(17)..(18)..(19): Xaa is A or G
  MOD_RES (20)..(21)..(22)..(23): Xaa is A or G or is absent

SEQ ID NO: 63269 - protein, 42 aa, Artificial Sequence; identical to SEQ ID NO: 32083
  GFR-binding peptide
  MOD_RES (2)..(4)..(36)..(37): Xaa is C or S

SEQ ID NO: 63270 - protein, 42 aa, Artificial Sequence; identical to SEQ ID NO: 32084
  GFR-binding peptide
  MOD_RES (2)..(36): Xaa is C or S
  MOD_RES (14)..(15)..(16)..(17)..(18): Xaa is A or G
  MOD_RES (19)..(20)..(21)..(22): Xaa is A or G or is absent

SEQ ID NO: 63271 - protein, 36 aa, Artificial Sequence; identical to SEQ ID NO: 4007
  GFR-binding peptide
  MOD_RES (1)..(32)..(33): Xaa is C or S

SEQ ID NO: 63272 - protein, 38 aa, Artificial Sequence
  GFR-binding peptide
  MOD_RES (2)..(35)..(36): Xaa is C or S
  MOD_RES (13)..(14)..(15)..(16)..(17): Xaa is A or G
  MOD_RES (18)..(19)..(20)..(21): Xaa is A or G or is absent
KXSKVVMPIKGYXXXXXXXXXFYLINIPSLDQPVXXPS

SEQ ID NO: 63273 - protein, 42 aa, Artificial Sequence; identical to SEQ ID NO: 4008
  GFR-binding peptide
  MOD_RES (1)..(3)..(36)..(37): Xaa is C or S

SEQ ID NO: 63274 - protein, 35 aa, Artificial Sequence; identical to SEQ ID NO: 32085
  GFR-binding peptide
  MOD_RES (1)..(3)..(35): Xaa is C or S

SEQ ID NO: 63275 - protein, 40 aa, Artificial Sequence
  GFR-binding peptide
  MOD_RES (34)..(35): Xaa is C or S
  MOD_RES (12)..(13)..(14)..(15)..(16): Xaa is A or G
  MOD_RES (17)..(18)..(19)..(20): Xaa is A or G or is absent
RDVVMGRHKRLXXXXXXXXXYYLMSTASMKTPTXXPGASG

SEQ ID NO: 63276 - protein, 39 aa, Artificial Sequence
  GFR-binding peptide
  MOD_RES (33)..(34): Xaa is C or S
  MOD_RES (11)..(12)..(13)..(14)..(15): Xaa is A or G
  MOD_RES (16)..(17)..(18)..(19): Xaa is A or G or is absent
EEVIMEYKFKXXXXXXXXXLYLMSIPETKVPAXXTSPVR

SEQ ID NO: 63277 - protein, 38 aa, Artificial Sequence
  GFR-binding peptide
  MOD_RES (1)..(3)..(35)..(36): Xaa is C or S
XAXSEVTMNRYKKLVVNKNEDFYLISIANMKEPVXXPE

SEQ ID NO: 63278 - protein, 34 aa, Artificial Sequence; identical to SEQ ID NO: 32095
  GFR-binding peptide
  MOD_RES (1)..(1): Xaa is C or S
  MOD_RES (13)..(14)..(15)..(16)..(17): Xaa is A or G
  MOD_RES (18)..(19)..(20)..(21): Xaa is A or G or is absent

SEQ ID NO: 63279 - protein, 32 aa, Artificial Sequence; identical to SEQ ID NO: 32097
  GFR-binding peptide
  MOD_RES (1)..(1): Xaa is C or S

SEQ ID NO: 63280 - protein, 33 aa, Artificial Sequence; identical to SEQ ID NO: 32098
  GFR-binding peptide
  MOD_RES (2)..(2): Xaa is C or S

SEQ ID NO: 63281 - protein, 41 aa, Artificial Sequence; identical to SEQ ID NO: 25094
  GFR-binding peptide
  MOD_RES (2)..(4)..(38)..(39): Xaa is C or S
  MOD_RES (16)..(17)..(18)..(19)..(20): Xaa is A or G
  MOD_RES (21)..(22)..(23)..(24): Xaa is A or G or is absent

SEQ ID NO: 63282 - protein, 39 aa, Artificial Sequence; identical to SEQ ID NO: 4015
  GFR-binding peptide
  MOD_RES (33)..(34): Xaa is C or S
  MOD_RES (11)..(12)..(13)..(14)..(15): Xaa is A or G
  MOD_RES (16)..(17)..(18)..(19): Xaa is A or G or is absent

SEQ ID NO: 63283 - protein, 35 aa, Artificial Sequence
  GFR-binding peptide
  MOD_RES (1)..(34)..(35): Xaa is C or S
  MOD_RES (12)..(13)..(14)..(15)..(16): Xaa is A or G
  MOD_RES (17)..(18)..(19)..(20): Xaa is A or G or is absent
XSRVIMPIKGYXXXXXXXXXFYLINIPSLAQPVXX

SEQ ID NO: 63284 - protein, 42 aa, Artificial Sequence; identical to SEQ ID NO: 32101
  GFR-binding peptide
  MOD_RES (2)..(36)..(37): Xaa is C or S
  MOD_RES (14)..(15)..(16)..(17)..(18): Xaa is A or G
  MOD_RES (19)..(20)..(21)..(22): Xaa is A or G or is absent

SEQ ID NO: 63285 - protein, 40 aa, Artificial Sequence
  GFR-binding peptide
  MOD_RES (34)..(35): Xaa is C or S
  MOD_RES (12)..(13)..(14)..(15)..(16): Xaa is A or G
  MOD_RES (17)..(18)..(19)..(20): Xaa is A or G or is absent
SEVTMNRYKKLXXXXXXXXXFYLISIANMKEPVXXPEPIG

SEQ ID NO: 63286 - protein, 37 aa, Artificial Sequence; identical to SEQ ID NO: 32106
  GFR-binding peptide
  MOD_RES (2)..(4): Xaa is C or S
  MOD_RES (16)..(17)..(18)..(19)..(20): Xaa is A or G
  MOD_RES (21)..(22)..(23)..(24): Xaa is A or G or is absent

SEQ ID NO: 63287 - protein, 36 aa, Artificial Sequence; identical to SEQ ID NO: 4022
  GFR-binding peptide
  MOD_RES (1)..(35)..(36): Xaa is C or S
  MOD_RES (13)..(14)..(15)..(16)..(17): Xaa is A or G
  MOD_RES (18)..(19)..(20)..(21): Xaa is A or G or is absent

SEQ ID NO: 63288 - protein, 38 aa, Artificial Sequence; identical to SEQ ID NO: 4023
  GFR-binding peptide
  MOD_RES (2)..(4)..(37)..(38): Xaa is C or S

SEQ ID NO: 63289 - protein, 37 aa, Artificial Sequence
  GFR-binding peptide
  MOD_RES (1)..(34)..(35): Xaa is C or S
  MOD_RES (12)..(13)..(14)..(15)..(16): Xaa is A or G
  MOD_RES (17)..(18)..(19)..(20): Xaa is A or G or is absent
XSKVIMPIKGYXXXXXXXXXFYLINIPSLDQSVXXPS

SEQ ID NO: 63290 - protein, 36 aa, Artificial Sequence; identical to SEQ ID NO: 25099
  GFR-binding peptide
  MOD_RES (1)..(3)..(36): Xaa is C or S

SEQ ID NO: 63291 - protein, 36 aa, Artificial Sequence
  GFR-binding peptide
  MOD_RES (2)..(4)..(36): Xaa is C or S
RXAXSEVTMNRYKKLVVNKNEDFYLISIANMKEPVX

SEQ ID NO: 63292 - protein, 44 aa, Artificial Sequence; identical to SEQ ID NO: 32109
  GFR-binding peptide
  MOD_RES (2)..(4)..(38)..(39): Xaa is C or S
  MOD_RES (16)..(17)..(18)..(19)..(20): Xaa is A or G
  MOD_RES (21)..(22)..(23)..(24): Xaa is A or G or is absent

SEQ ID NO: 63293 - protein, 36 aa, Artificial Sequence; identical to SEQ ID NO: 4029
  GFR-binding peptide
  MOD_RES (33)..(34): Xaa is C or S

SEQ ID NO: 63294 - protein, 36 aa, Artificial Sequence; identical to SEQ ID NO: 25105
  GFR-binding peptide
  MOD_RES (31)..(32): Xaa is C or S

SEQ ID NO: 63295 - protein, 39 aa, Artificial Sequence; identical to SEQ ID NO: 25107
  GFR-binding peptide
  MOD_RES (1)..(3)..(37)..(38): Xaa is C or S
  MOD_RES (15)..(16)..(17)..(18)..(19): Xaa is A or G
  MOD_RES (20)..(21)..(22)..(23): Xaa is A or G or is absent

SEQ ID NO: 63296 - protein, 32 aa, Artificial Sequence
  GFR-binding peptide
  MOD_RES (32)..(32): Xaa is C or S
RDVVMGYHYKLIIQQKDNKYLMSIPSMKTPTX

SEQ ID NO: 63297 - protein, 34 aa, Artificial Sequence; identical to SEQ ID NO: 4032
  GFR-binding peptide
  MOD_RES (2)..(34): Xaa is C or S

SEQ ID NO: 63298 - protein, 32 aa, Artificial Sequence
  GFR-binding peptide
  MOD_RES (32)..(32): Xaa is C or S
SEVTMNYHYKLVVNKNEDKYLISIPSMKEPVX

SEQ ID NO: 63299 - protein, 34 aa, Artificial Sequence; identical to SEQ ID NO: 32126
  GFR-binding peptide
  MOD_RES (1)..(1): Xaa is C or S
  MOD_RES (13)..(14)..(15)..(16)..(17): Xaa is A or G
  MOD_RES (18)..(19)..(20)..(21): Xaa is A or G or is absent

SEQ ID NO: 63300 - protein, 41 aa, Artificial Sequence; identical to SEQ ID NO: 32132
  GFR-binding peptide
  MOD_RES (1)..(3)..(36)..(37): Xaa is C or S
  MOD_RES (14)..(15)..(16)..(17)..(18): Xaa is A or G
  MOD_RES (19)..(20)..(21)..(22): Xaa is A or G or is absent

SEQ ID NO: 63301 - protein, 40 aa, Artificial Sequence; identical to SEQ ID NO: 4035
  GFR-binding peptide
  MOD_RES (1)..(34)..(35): Xaa is C or S

SEQ ID NO: 63302 - protein, 37 aa, Artificial Sequence; identical to SEQ ID NO: 4037
  GFR-binding peptide
  MOD_RES (2)..(35)..(36): Xaa is C or S
  MOD_RES (13)..(14)..(15)..(16)..(17): Xaa is A or G
  MOD_RES (18)..(19)..(20)..(21): Xaa is A or G or is absent

SEQ ID NO: 63303 - protein, 39 aa, Artificial Sequence; identical to SEQ ID NO: 25115
  GFR-binding peptide
  MOD_RES (1)..(34)..(35): Xaa is C or S
  MOD_RES (12)..(13)..(14)..(15)..(16): Xaa is A or G
  MOD_RES (17)..(18)..(19)..(20): Xaa is A or G or is absent

SEQ ID NO: 63304 - protein, 37 aa, Artificial Sequence
  GFR-binding peptide
  MOD_RES (31)..(32): Xaa is C or S
EVTMNRHKRLVVNKNEDYYLISTASMKEPVXXPEPIG

SEQ ID NO: 63305 - protein, 44 aa, Artificial Sequence; identical to SEQ ID NO: 4038
  GFR-binding peptide
  MOD_RES (2)..(4)..(38)..(39): Xaa is C or S
  MOD_RES (16)..(17)..(18)..(19)..(20): Xaa is A or G
  MOD_RES (21)..(22)..(23)..(24): Xaa is A or G or is absent

SEQ ID NO: 63306 - protein, 35 aa, Artificial Sequence
  GFR-binding peptide
  MOD_RES (1)..(3)..(35): Xaa is C or S
XGXRDVVMGYHYKLIIQQKDNKYLMSIPSMKTPTX

SEQ ID NO: 63307 - protein, 39 aa, Artificial Sequence
  GFR-binding peptide
  MOD_RES (1)..(3)..(35)..(36): Xaa is C or S
XAXSEVTMNRYKKLVVNKNEDFYLISIANMKEPVXXPEP

SEQ ID NO: 63308 - protein, 34 aa, Artificial Sequence; identical to SEQ ID NO: 25119
  GFR-binding peptide
  MOD_RES (31)..(32): Xaa is C or S

SEQ ID NO: 63309 - protein, 33 aa, Artificial Sequence; identical to SEQ ID NO: 4044
  GFR-binding peptide
  MOD_RES (1)..(32)..(33): Xaa is C or S

SEQ ID NO: 63310 - protein, 34 aa, Artificial Sequence
  GFR-binding peptide
  MOD_RES (1)..(33)..(34): Xaa is C or S
XSEVTMNEYKFKVVNKNEDLYLISIPEMKEPVXX

SEQ ID NO: 63311 - protein, 33 aa, Artificial Sequence
  GFR-binding peptide
  MOD_RES (31)..(32): Xaa is C or S
DVVMGEYKFKIIQQKDNLYLMSIPEMKTPTXXP

SEQ ID NO: 63312 - protein, 32 aa, Artificial Sequence; identical to SEQ ID NO: 25127
  GFR-binding peptide
  MOD_RES (31)..(32): Xaa is C or S

SEQ ID NO: 63313 - protein, 36 aa, Artificial Sequence
  GFR-binding peptide
  MOD_RES (33)..(34): Xaa is C or S
  MOD_RES (11)..(12)..(13)..(14)..(15): Xaa is A or G
  MOD_RES (16)..(17)..(18)..(19): Xaa is A or G or is absent
EVTMNPIKGYXXXXXXXXXFYLINIPSMKEPVXXPE

SEQ ID NO: 63314 - protein, 42 aa, Artificial Sequence; identical to SEQ ID NO: 4055
  GFR-binding peptide
  MOD_RES (1)..(36)..(37): Xaa is C or S
  MOD_RES (14)..(15)..(16)..(17)..(18): Xaa is A or G
  MOD_RES (19)..(20)..(21)..(22): Xaa is A or G or is absent

SEQ ID NO: 63315 - protein, 40 aa, Artificial Sequence; identical to SEQ ID NO: 4056
  GFR-binding peptide
  MOD_RES (1)..(34)..(35): Xaa is C or S
  MOD_RES (12)..(13)..(14)..(15)..(16): Xaa is A or G
  MOD_RES (17)..(18)..(19)..(20): Xaa is A or G or is absent

SEQ ID NO: 63316 - protein, 39 aa, Artificial Sequence
  GFR-binding peptide
  MOD_RES (2)..(4)..(38)..(39): Xaa is C or S
  MOD_RES (16)..(17)..(18)..(19)..(20): Xaa is A or G
  MOD_RES (21)..(22)..(23)..(24): Xaa is A or G or is absent
RXAXSEVTMNYHYKLXXXXXXXXXKYLISIPSMKEPVXX

SEQ ID NO: 63317 - protein, 37 aa, Artificial Sequence; identical to SEQ ID NO: 4063
  GFR-binding peptide
  MOD_RES (1)..(34)..(35): Xaa is C or S
  MOD_RES (12)..(13)..(14)..(15)..(16): Xaa is A or G
  MOD_RES (17)..(18)..(19)..(20): Xaa is A or G or is absent

SEQ ID NO: 63318 - protein, 35 aa, Artificial Sequence
  GFR-binding peptide
  MOD_RES (2)..(35): Xaa is C or S
  MOD_RES (13)..(14)..(15)..(16)..(17): Xaa is A or G
  MOD_RES (18)..(19)..(20)..(21): Xaa is A or G or is absent
KXSRVIMPIKGYXXXXXXXXXFYLINIPSLAQPVX

SEQ ID NO: 63319 - protein, 35 aa, Artificial Sequence; identical to SEQ ID NO: 4069
  GFR-binding peptide
  MOD_RES (33)..(34): Xaa is C or S
  MOD_RES (11)..(12)..(13)..(14)..(15): Xaa is A or G
  MOD_RES (16)..(17)..(18)..(19): Xaa is A or G or is absent

SEQ ID NO: 63320 - protein, 35 aa, Artificial Sequence; identical to SEQ ID NO: 4071
  GFR-binding peptide
  MOD_RES (32)..(33): Xaa is C or S

SEQ ID NO: 63321 - protein, 37 aa, Artificial Sequence
  GFR-binding peptide
  MOD_RES (1)..(3)..(37): Xaa is C or S
  MOD_RES (15)..(16)..(17)..(18)..(19): Xaa is A or G
  MOD_RES (20)..(21)..(22)..(23): Xaa is A or G or is absent
XGXRDVVMGRHKRLXXXXXXXXXYYLMSTASMKTPTX

SEQ ID NO: 63322 - protein, 38 aa, Artificial Sequence; identical to SEQ ID NO: 25144
  GFR-binding peptide
  MOD_RES (34)..(34): Xaa is C or S
  MOD_RES (12)..(13)..(14)..(15)..(16): Xaa is A or G
  MOD_RES (17)..(18)..(19)..(20): Xaa is A or G or is absent

SEQ ID NO: 63323 - protein, 39 aa, Artificial Sequence; identical to SEQ ID NO: 4073
  GFR-binding peptide
  MOD_RES (1)..(35)..(36): Xaa is C or S
  MOD_RES (13)..(14)..(15)..(16)..(17): Xaa is A or G
  MOD_RES (18)..(19)..(20)..(21): Xaa is A or G or is absent

SEQ ID NO: 63324 - protein, 40 aa, Artificial Sequence
  GFR-binding peptide
  MOD_RES (1)..(3)..(35)..(36): Xaa is C or S
XGXRDVVMGRHKRLIIQQKDNYYLMSTASMKTPTXXPGAS

SEQ ID NO: 63325 - protein, 35 aa, Artificial Sequence
  GFR-binding peptide
  MOD_RES (2)..(2): Xaa is C or S
  MOD_RES (14)..(15)..(16)..(17)..(18): Xaa is A or G
  MOD_RES (19)..(20)..(21)..(22): Xaa is A or G or is absent
GXSEVVMDEYKFKXXXXXXXXXLYLISIPELRTPV

SEQ ID NO: 63326 - protein, 34 aa, Artificial Sequence; identical to SEQ ID NO: 32167
  GFR-binding peptide
  MOD_RES (1)..(34): Xaa is C or S

SEQ ID NO: 63327 - protein, 33 aa, Artificial Sequence
  GFR-binding peptide
  MOD_RES (1)..(33): Xaa is C or S
XSEVTMNRHKRLVVNKNEDYYLISTASMKEPVX

SEQ ID NO: 63328 - protein, 36 aa, Artificial Sequence; identical to SEQ ID NO: 25151
  GFR-binding peptide
  MOD_RES (32)..(33): Xaa is C or S

SEQ ID NO: 63329 - protein, 38 aa, Artificial Sequence; identical to SEQ ID NO: 25153
  GFR-binding peptide
  MOD_RES (2)..(4)..(35)..(36): Xaa is C or S

SEQ ID NO: 63330 - protein, 39 aa, Artificial Sequence; identical to SEQ ID NO: 4078
  GFR-binding peptide
  MOD_RES (1)..(3)..(36)..(37): Xaa is C or S
  MOD_RES (14)..(15)..(16)..(17)..(18): Xaa is A or G
  MOD_RES (19)..(20)..(21)..(22): Xaa is A or G or is absent

SEQ ID NO: 63331 - protein, 38 aa, Artificial Sequence; identical to SEQ ID NO: 25154
  GFR-binding peptide
  MOD_RES (2)..(36)..(37): Xaa is C or S
  MOD_RES (14)..(15)..(16)..(17)..(18): Xaa is A or G
  MOD_RES (19)..(20)..(21)..(22): Xaa is A or G or is absent

SEQ ID NO: 63332 - protein, 39 aa, Artificial Sequence; identical to SEQ ID NO: 32168
  GFR-binding peptide
  MOD_RES (1)..(33)..(34): Xaa is C or S

SEQ ID NO: 63333 - protein, 39 aa, Artificial Sequence; identical to SEQ ID NO: 25155
  GFR-binding peptide
  MOD_RES (1)..(3)..(35): Xaa is C or S

SEQ ID NO: 63334 - protein, 41 aa, Artificial Sequence; identical to SEQ ID NO: 25157
  GFR-binding peptide
  MOD_RES (2)..(36)..(37): Xaa is C or S
  MOD_RES (14)..(15)..(16)..(17)..(18): Xaa is A or G
  MOD_RES (19)..(20)..(21)..(22): Xaa is A or G or is absent

SEQ ID NO: 63335 - protein, 41 aa, Artificial Sequence; identical to SEQ ID NO: 4080
  GFR-binding peptide
  MOD_RES (35)..(36): Xaa is C or S
  MOD_RES (13)..(14)..(15)..(16)..(17): Xaa is A or G
  MOD_RES (18)..(19)..(20)..(21): Xaa is A or G or is absent

SEQ ID NO: 63336 - protein, 40 aa, Artificial Sequence; identical to SEQ ID NO: 4081
  GFR-binding peptide
  MOD_RES (2)..(4)..(36)..(37): Xaa is C or S

SEQ ID NO: 63337 - protein, 33 aa, Artificial Sequence
  GFR-binding peptide
  MOD_RES (1)..(33): Xaa is C or S
XSEVTMNEYKFKVVNKNEDLYLISIPEMKEPVX

SEQ ID NO: 63338 - protein, 41 aa, Artificial Sequence; identical to SEQ ID NO: 32172
  GFR-binding peptide
  MOD_RES (1)..(35)..(36): Xaa is C or S
  MOD_RES (13)..(14)..(15)..(16)..(17): Xaa is A or G
  MOD_RES (18)..(19)..(20)..(21): Xaa is A or G or is absent

SEQ ID NO: 63339 - protein, 38 aa, Artificial Sequence; identical to SEQ ID NO: 4083
  GFR-binding peptide
  MOD_RES (1)..(3)..(34)..(35): Xaa is C or S

SEQ ID NO: 63340 - protein, 37 aa, Artificial Sequence; identical to SEQ ID NO: 4084
  GFR-binding peptide
  MOD_RES (2)..(4): Xaa is C or S
  MOD_RES (16)..(17)..(18)..(19)..(20): Xaa is A or G
  MOD_RES (21)..(22)..(23)..(24): Xaa is A or G or is absent

SEQ ID NO: 63341 - protein, 33 aa, Artificial Sequence; identical to SEQ ID NO: 4085
  GFR-binding peptide
  MOD_RES (12)..(13)..(14)..(15)..(16): Xaa is A or G
  MOD_RES (17)..(18)..(19)..(20): Xaa is A or G or is absent

SEQ ID NO: 63342 - protein, 39 aa, Artificial Sequence; identical to SEQ ID NO: 4091
  GFR-binding peptide
  MOD_RES (2)..(34): Xaa is C or S

SEQ ID NO: 63343 - protein, 38 aa, Artificial Sequence; identical to SEQ ID NO: 4093
  GFR-binding peptide
  MOD_RES (2)..(4)..(36)..(37): Xaa is C or S

SEQ ID NO: 63344 - protein, 40 aa, Artificial Sequence; identical to SEQ ID NO: 4096
  GFR-binding peptide
  MOD_RES (1)..(36)..(37): Xaa is C or S
  MOD_RES (14)..(15)..(16)..(17)..(18): Xaa is A or G
  MOD_RES (19)..(20)..(21)..(22): Xaa is A or G or is absent

SEQ ID NO: 63345 - protein, 40 aa, Artificial Sequence; identical to SEQ ID NO: 4098
  GFR-binding peptide
  MOD_RES (1)..(3)..(34)..(35): Xaa is C or S

SEQ ID NO: 63346 - protein, 36 aa, Artificial Sequence
  GFR-binding peptide
  MOD_RES (1)..(35)..(36): Xaa is C or S
  MOD_RES (13)..(14)..(15)..(16)..(17): Xaa is A or G
  MOD_RES (18)..(19)..(20)..(21): Xaa is A or G or is absent
XRDVVMGRHKRLXXXXXXXXXYYLMSTASMKTPTXX

SEQ ID NO: 63347 - protein, 38 aa, Artificial Sequence; identical to SEQ ID NO: 4101
  GFR-binding peptide
  MOD_RES (1)..(32)..(33): Xaa is C or S

SEQ ID NO: 63348 - protein, 40 aa, Artificial Sequence; identical to SEQ ID NO: 32183
  GFR-binding peptide
  MOD_RES (1)..(35)..(36): Xaa is C or S
  MOD_RES (13)..(14)..(15)..(16)..(17): Xaa is A or G
  MOD_RES (18)..(19)..(20)..(21): Xaa is A or G or is absent

SEQ ID NO: 63349 - protein, 37 aa, Artificial Sequence; identical to SEQ ID NO: 4102
  GFR-binding peptide
  MOD_RES (2)..(37): Xaa is C or S
  MOD_RES (15)..(16)..(17)..(18)..(19): Xaa is A or G
  MOD_RES (20)..(21)..(22)..(23): Xaa is A or G or is absent

SEQ ID NO: 63350 - protein, 39 aa, Artificial Sequence; identical to SEQ ID NO: 4104
  GFR-binding peptide
  MOD_RES (1)..(3)..(34)..(35): Xaa is C or S

SEQ ID NO: 63351 - protein, 38 aa, Artificial Sequence; identical to SEQ ID NO: 25171
  GFR-binding peptide
  MOD_RES (1)..(3)..(37)..(38): Xaa is C or S
  MOD_RES (15)..(16)..(17)..(18)..(19): Xaa is A or G
  MOD_RES (20)..(21)..(22)..(23): Xaa is A or G or is absent

SEQ ID NO: 63352 - protein, 36 aa, Artificial Sequence; identical to SEQ ID NO: 25172
  GFR-binding peptide
  MOD_RES (1)..(35)..(36): Xaa is C or S
  MOD_RES (13)..(14)..(15)..(16)..(17): Xaa is A or G
  MOD_RES (18)..(19)..(20)..(21): Xaa is A or G or is absent

SEQ ID NO: 63353 - protein, 39 aa, Artificial Sequence; identical to SEQ ID NO: 32186
  GFR-binding peptide
  MOD_RES (1)..(33)..(34): Xaa is C or S

SEQ ID NO: 63354 - protein, 37 aa, Artificial Sequence; identical to SEQ ID NO: 4110
  GFR-binding peptide
  MOD_RES (1)..(34)..(35): Xaa is C or S

SEQ ID NO: 63355 - protein, 41 aa, Artificial Sequence; identical to SEQ ID NO: 4111
  GFR-binding peptide
  MOD_RES (2)..(36)..(37): Xaa is C or S
  MOD_RES (14)..(15)..(16)..(17)..(18): Xaa is A or G
  MOD_RES (19)..(20)..(21)..(22): Xaa is A or G or is absent

SEQ ID NO: 63356 - protein, 38 aa, Artificial Sequence; identical to SEQ ID NO: 4112
  GFR-binding peptide
  MOD_RES (1)..(3)..(34)..(35): Xaa is C or S

SEQ ID NO: 63357 - protein, 37 aa, Artificial Sequence; identical to SEQ ID NO: 32189
  GFR-binding peptide
  MOD_RES (2)..(37): Xaa is C or S
  MOD_RES (15)..(16)..(17)..(18)..(19): Xaa is A or G
  MOD_RES (20)..(21)..(22)..(23): Xaa is A or G or is absent

SEQ ID NO: 63358 - protein, 37 aa, Artificial Sequence; identical to SEQ ID NO: 4117
  GFR-binding peptide
  MOD_RES (33)..(33): Xaa is C or S
  MOD_RES (11)..(12)..(13)..(14)..(15): Xaa is A or G
  MOD_RES (16)..(17)..(18)..(19): Xaa is A or G or is absent

SEQ ID NO: 63359 - protein, 42 aa, Artificial Sequence; identical to SEQ ID NO: 32191
  GFR-binding peptide
  MOD_RES (1)..(3)..(37)..(38): Xaa is C or S
  MOD_RES (15)..(16)..(17)..(18)..(19): Xaa is A or G
  MOD_RES (20)..(21)..(22)..(23): Xaa is A or G or is absent

SEQ ID NO: 63360 - protein, 37 aa, Artificial Sequence; identical to SEQ ID NO: 4118
  GFR-binding peptide
  MOD_RES (1)..(33): Xaa is C or S

SEQ ID NO: 63361 - protein, 36 aa, Artificial Sequence; identical to SEQ ID NO: 32193
  GFR-binding peptide
  MOD_RES (33)..(34): Xaa is C or S
  MOD_RES (11)..(12)..(13)..(14)..(15): Xaa is A or G
  MOD_RES (16)..(17)..(18)..(19): Xaa is A or G or is absent

SEQ ID NO: 63362 - protein, 35 aa, Artificial Sequence
  GFR-binding peptide
  MOD_RES (1)..(3): Xaa is C or S
  MOD_RES (14)..(15)..(16)..(17)..(18): Xaa is A or G
  MOD_RES (19)..(20)..(21)..(22): Xaa is A or G or is absent
XGXEEVIMYHYKLXXXXXXXXXKYLMSIPSTKVPA

SEQ ID NO: 63363 - protein, 40 aa, Artificial Sequence; identical to SEQ ID NO: 32202
  GFR-binding peptide
  MOD_RES (2)..(37)..(38): Xaa is C or S
  MOD_RES (15)..(16)..(17)..(18)..(19): Xaa is A or G
  MOD_RES (20)..(21)..(22)..(23): Xaa is A or G or is absent

SEQ ID NO: 63364 - protein, 35 aa, Artificial Sequence; identical to SEQ ID NO: 4125
  GFR-binding peptide
  MOD_RES (1)..(32)..(33): Xaa is C or S

SEQ ID NO: 63365 - protein, 38 aa, Artificial Sequence; identical to SEQ ID NO: 4128
  GFR-binding peptide
  MOD_RES (34)..(35): Xaa is C or S
  MOD_RES (12)..(13)..(14)..(15)..(16): Xaa is A or G
  MOD_RES (17)..(18)..(19)..(20): Xaa is A or G or is absent

SEQ ID NO: 63366 - protein, 37 aa, Artificial Sequence; identical to SEQ ID NO: 4129
  GFR-binding peptide
  MOD_RES (1)..(32)..(33): Xaa is C or S

SEQ ID NO: 63367 - protein, 40 aa, Artificial Sequence; identical to SEQ ID NO: 4132
  GFR-binding peptide
  MOD_RES (2)..(4)..(37)..(38): Xaa is C or S
  MOD_RES (15)..(16)..(17)..(18)..(19): Xaa is A or G
  MOD_RES (20)..(21)..(22)..(23): Xaa is A or G or is absent

SEQ ID NO: 63368 - protein, 34 aa, Artificial Sequence; identical to SEQ ID NO: 4133
  GFR-binding peptide
  MOD_RES (2)..(34): Xaa is C or S

SEQ ID NO: 63369 - protein, 37 aa, Artificial Sequence; identical to SEQ ID NO: 4134
  GFR-binding peptide
  MOD_RES (1)..(33)..(34): Xaa is C or S

SEQ ID NO: 63370 - protein, 38 aa, Artificial Sequence; identical to SEQ ID NO: 32209
  GFR-binding peptide
  MOD_RES (1)..(3)..(37)..(38): Xaa is C or S
  MOD_RES (15)..(16)..(17)..(18)..(19): Xaa is A or G
  MOD_RES (20)..(21)..(22)..(23): Xaa is A or G or is absent

SEQ ID NO: 63371 - protein, 31 aa, Artificial Sequence; identical to SEQ ID NO: 25194
  GFR-binding peptide
  MOD_RES (31)..(31): Xaa is C or S

SEQ ID NO: 63372 - protein, 37 aa, Artificial Sequence; identical to SEQ ID NO: 25195
  GFR-binding peptide
  MOD_RES (1)..(35)..(36): Xaa is C or S
  MOD_RES (13)..(14)..(15)..(16)..(17): Xaa is A or G
  MOD_RES (18)..(19)..(20)..(21): Xaa is A or G or is absent

SEQ ID NO: 63373 - protein, 40 aa, Artificial Sequence; identical to SEQ ID NO: 4140
  GFR-binding peptide
  MOD_RES (2)..(37)..(38): Xaa is C or S
  MOD_RES (15)..(16)..(17)..(18)..(19): Xaa is A or G
  MOD_RES (20)..(21)..(22)..(23): Xaa is A or G or is absent

SEQ ID NO: 63374 - protein, 40 aa, Artificial Sequence; identical to SEQ ID NO: 32214
  GFR-binding peptide
  MOD_RES (2)..(4)..(36)..(37): Xaa is C or S

SEQ ID NO: 63375 - protein, 38 aa, Artificial Sequence; identical to SEQ ID NO: 4142
  GFR-binding peptide
  MOD_RES (1)..(3)..(34)..(35): Xaa is C or S

SEQ ID NO: 63376 - protein, 36 aa, Artificial Sequence; identical to SEQ ID NO: 25199
  GFR-binding peptide
  MOD_RES (1)..(3)..(36): Xaa is C or S
  MOD_RES (14)..(15)..(16)..(17)..(18): Xaa is A or G
  MOD_RES (19)..(20)..(21)..(22): Xaa is A or G or is absent

SEQ ID NO: 63377 - protein, 38 aa, Artificial Sequence; identical to SEQ ID NO: 4146
  GFR-binding peptide
  MOD_RES (34)..(35): Xaa is C or S
  MOD_RES (12)..(13)..(14)..(15)..(16): Xaa is A or G
  MOD_RES (17)..(18)..(19)..(20): Xaa is A or G or is absent

SEQ ID NO: 63378 - protein, 36 aa, Artificial Sequence
  GFR-binding peptide
  MOD_RES (31)..(32): Xaa is C or S
DVVMGRHKRLIIQQKDNYYLMSTASMKTPTXXPGAS

SEQ ID NO: 63379 - protein, 37 aa, Artificial Sequence
  GFR-binding peptide
  MOD_RES (2)..(36)..(37): Xaa is C or S
  MOD_RES (14)..(15)..(16)..(17)..(18): Xaa is A or G
  MOD_RES (19)..(20)..(21)..(22): Xaa is A or G or is absent
GXAEVVMDRHKRLXXXXXXXXXYYLISTASLRAPVXX

SEQ ID NO: 63380 - protein, 41 aa, Artificial Sequence
  GFR-binding peptide
  MOD_RES (1)..(35)..(36): Xaa is C or S
  MOD_RES (13)..(14)..(15)..(16)..(17): Xaa is A or G
  MOD_RES (18)..(19)..(20)..(21): Xaa is A or G or is absent
XSEVTMNPIKGYXXXXXXXXXFYLINIPSMKEPVXXPEPIG

SEQ ID NO: 63381 - protein, 32 aa, Artificial Sequence; identical to SEQ ID NO: 25207
  GFR-binding peptide
  MOD_RES (31)..(32): Xaa is C or S

SEQ ID NO: 63382 - protein, 33 aa, Artificial Sequence
  GFR-binding peptide
  MOD_RES (33)..(33): Xaa is C or S
  MOD_RES (11)..(12)..(13)..(14)..(15): Xaa is A or G
  MOD_RES (16)..(17)..(18)..(19): Xaa is A or G or is absent
EVVMDRHKRLXXXXXXXXXYYLISTASLRAPVX

SEQ ID NO: 63383 - protein, 34 aa, Artificial Sequence; identical to SEQ ID NO: 4152
  GFR-binding peptide
  MOD_RES (2)..(2): Xaa is C or S
  MOD_RES (13)..(14)..(15)..(16)..(17): Xaa is A or G
  MOD_RES (18)..(19)..(20)..(21): Xaa is A or G or is absent

SEQ ID NO: 63384 - protein, 37 aa, Artificial Sequence; identical to SEQ ID NO: 25212
  GFR-binding peptide
  MOD_RES (1)..(33)..(34): Xaa is C or S

SEQ ID NO: 63385 - protein, 34 aa, Artificial Sequence; identical to SEQ ID NO: 25213
  GFR-binding peptide
  MOD_RES (2)..(34): Xaa is C or S

SEQ ID NO: 63386 - protein, 34 aa, Artificial Sequence; identical to SEQ ID NO: 25214
  GFR-binding peptide
  MOD_RES (33)..(34): Xaa is C or S
  MOD_RES (11)..(12)..(13)..(14)..(15): Xaa is A or G
  MOD_RES (16)..(17)..(18)..(19): Xaa is A or G or is absent

SEQ ID NO: 63387 - protein, 40 aa, Artificial Sequence; identical to SEQ ID NO: 32227
  GFR-binding peptide
  MOD_RES (2)..(36)..(37): Xaa is C or S
  MOD_RES (14)..(15)..(16)..(17)..(18): Xaa is A or G
  MOD_RES (19)..(20)..(21)..(22): Xaa is A or G or is absent

SEQ ID NO: 63388 - protein, 36 aa, Artificial Sequence; identical to SEQ ID NO: 25215
  GFR-binding peptide
  MOD_RES (1)..(3)..(35)..(36): Xaa is C or S

SEQ ID NO: 63389 - protein, 38 aa, Artificial Sequence; identical to SEQ ID NO: 32228
  GFR-binding peptide
  MOD_RES (33)..(34): Xaa is C or S
  MOD_RES (11)..(12)..(13)..(14)..(15): Xaa is A or G
  MOD_RES (16)..(17)..(18)..(19): Xaa is A or G or is absent

SEQ ID NO: 63390 - protein, 36 aa, Artificial Sequence; identical to SEQ ID NO: 25216
  GFR-binding peptide
  MOD_RES (1)..(33)..(34): Xaa is C or S

SEQ ID NO: 63391 - protein, 39 aa, Artificial Sequence
  GFR-binding peptide
  MOD_RES (2)..(4)..(38)..(39): Xaa is C or S
  MOD_RES (16)..(17)..(18)..(19)..(20): Xaa is A or G
  MOD_RES (21)..(22)..(23)..(24): Xaa is A or G or is absent
RXGXSEVVMDYHYKLXXXXXXXXXKYLISIPSLRTPVXX

SEQ ID NO: 63392 - protein, 43 aa, Artificial Sequence; identical to SEQ ID NO: 32231
  GFR-binding peptide
  MOD_RES (2)..(4)..(38)..(39): Xaa is C or S
  MOD_RES (16)..(17)..(18)..(19)..(20): Xaa is A or G
  MOD_RES (21)..(22)..(23)..(24): Xaa is A or G or is absent

SEQ ID NO: 63393 - protein, 36 aa, Artificial Sequence; identical to SEQ ID NO: 25220
  GFR-binding peptide
  MOD_RES (1)..(3)..(35)..(36): Xaa is C or S

SEQ ID NO: 63394 - protein, 34 aa, Artificial Sequence; identical to SEQ ID NO: 32232
  GFR-binding peptide
  MOD_RES (33)..(34): Xaa is C or S
  MOD_RES (11)..(12)..(13)..(14)..(15): Xaa is A or G
  MOD_RES (16)..(17)..(18)..(19): Xaa is A or G or is absent

SEQ ID NO: 63395 - protein, 40 aa, Artificial Sequence
  GFR-binding peptide
  MOD_RES (2)..(36)..(37): Xaa is C or S
  MOD_RES (14)..(15)..(16)..(17)..(18): Xaa is A or G
  MOD_RES (19)..(20)..(21)..(22): Xaa is A or G or is absent
GXSEVVMDEYKFKXXXXXXXXXLYLISIPELRTPVXXTPP

SEQ ID NO: 63396 - protein, 40 aa, Artificial Sequence; identical to SEQ ID NO: 4161
  GFR-binding peptide
  MOD_RES (2)..(34)..(35): Xaa is C or S

SEQ ID NO: 63397 - protein, 35 aa, Artificial Sequence; identical to SEQ ID NO: 4163
  GFR-binding peptide
  MOD_RES (31)..(32): Xaa is C or S

SEQ ID NO: 63398 - protein, 37 aa, Artificial Sequence
  GFR-binding peptide
  MOD_RES (32)..(33): Xaa is C or S
RDVVMGYHYKLIIQQKDNKYLMSIPSMKTPTXXPGAS

SEQ ID NO: 63399 - protein, 38 aa, Artificial Sequence; identical to SEQ ID NO: 32241
  GFR-binding peptide
  MOD_RES (1)..(3)..(37)..(38): Xaa is C or S
  MOD_RES (15)..(16)..(17)..(18)..(19): Xaa is A or G
  MOD_RES (20)..(21)..(22)..(23): Xaa is A or G or is absent

SEQ ID NO: 63400 - protein, 41 aa, Artificial Sequence; identical to SEQ ID NO: 25227
  GFR-binding peptide
  MOD_RES (1)..(3)..(35)..(36): Xaa is C or S

SEQ ID NO: 63401 - protein, 35 aa, Artificial Sequence; identical to SEQ ID NO: 4171
  GFR-binding peptide
  MOD_RES (32)..(33): Xaa is C or S

SEQ ID NO: 63402 - protein, 37 aa, Artificial Sequence; identical to SEQ ID NO: 32244
  GFR-binding peptide
  MOD_RES (31)..(32): Xaa is C or S

SEQ ID NO: 63403 - protein, 35 aa, Artificial Sequence; identical to SEQ ID NO: 32245
  GFR-binding peptide
  MOD_RES (1)..(35): Xaa is C or S
  MOD_RES (13)..(14)..(15)..(16)..(17): Xaa is A or G
  MOD_RES (18)..(19)..(20)..(21): Xaa is A or G or is absent

SEQ ID NO: 63404 - protein, 40 aa, Artificial Sequence
  GFR-binding peptide
  MOD_RES (2)..(34)..(35): Xaa is C or S
GXSEVVMDEYKFKVVNNASDLYLISIPELRTPVXXTPPTS

SEQ ID NO: 63405 - protein, 42 aa, Artificial Sequence; identical to SEQ ID NO: 32246
  GFR-binding peptide
  MOD_RES (2)..(4)..(38)..(39): Xaa is C or S
  MOD_RES (16)..(17)..(18)..(19)..(20): Xaa is A or G
  MOD_RES (21)..(22)..(23)..(24): Xaa is A or G or is absent

SEQ ID NO: 63406 - protein, 36 aa, Artificial Sequence; identical to SEQ ID NO: 4175
  GFR-binding peptide
  MOD_RES (2)..(4): Xaa is C or S

SEQ ID NO: 63407 - protein, 34 aa, Artificial Sequence
  GFR-binding peptide
  MOD_RES (1)..(3): Xaa is C or S
XGXAEVVMDRHKRLVVNNAADYYLISTASLRAPV

SEQ ID NO: 63408 - protein, 37 aa, Artificial Sequence; identical to SEQ ID NO: 4177
  GFR-binding peptide
  MOD_RES (1)..(35)..(36): Xaa is C or S
  MOD_RES (13)..(14)..(15)..(16)..(17): Xaa is A or G
  MOD_RES (18)..(19)..(20)..(21): Xaa is A or G or is absent

SEQ ID NO: 63409 - protein, 43 aa, Artificial Sequence; identical to SEQ ID NO: 4179
  GFR-binding peptide
  MOD_RES (2)..(4)..(38)..(39): Xaa is C or S
  MOD_RES (16)..(17)..(18)..(19)..(20): Xaa is A or G
  MOD_RES (21)..(22)..(23)..(24): Xaa is A or G or is absent

SEQ ID NO: 63410 - protein, 41 aa, Artificial Sequence; identical to SEQ ID NO: 4180
  GFR-binding peptide
  MOD_RES (1)..(35)..(36): Xaa is C or S
  MOD_RES (13)..(14)..(15)..(16)..(17): Xaa is A or G
  MOD_RES (18)..(19)..(20)..(21): Xaa is A or G or is absent

SEQ ID NO: 63411 - protein, 39 aa, Artificial Sequence; identical to SEQ ID NO: 4181
  GFR-binding peptide
  MOD_RES (1)..(34)..(35): Xaa is C or S
  MOD_RES (12)..(13)..(14)..(15)..(16): Xaa is A or G
  MOD_RES (17)..(18)..(19)..(20): Xaa is A or G or is absent

SEQ ID NO: 63412 - protein, 40 aa, Artificial Sequence
  GFR-binding peptide
  MOD_RES (1)..(3)..(37)..(38): Xaa is C or S
  MOD_RES (15)..(16)..(17)..(18)..(19): Xaa is A or G
  MOD_RES (20)..(21)..(22)..(23): Xaa is A or G or is absent
XAXSEVTMNPIKGYXXXXXXXXXFYLINIPSMKEPVXXPE

SEQ ID NO: 63413 - protein, 38 aa, Artificial Sequence; identical to SEQ ID NO: 32255
  GFR-binding peptide
  MOD_RES (1)..(34)..(35): Xaa is C or S

SEQ ID NO: 63414 - protein, 38 aa, Artificial Sequence; identical to SEQ ID NO: 4186
  GFR-binding peptide
  MOD_RES (1)..(32)..(33): Xaa is C or S

SEQ ID NO: 63415 - protein, 33 aa, Artificial Sequence; identical to SEQ ID NO: 25240
  GFR-binding peptide
  MOD_RES (32)..(33): Xaa is C or S

SEQ ID NO: 63416 - protein, 44 aa, Artificial Sequence; identical to SEQ ID NO: 32258
  GFR-binding peptide
  MOD_RES (2)..(4)..(39)..(40): Xaa is C or S
  MOD_RES (17)..(18)..(19)..(20)..(21): Xaa is A or G
  MOD_RES (22)..(23)..(24)..(25): Xaa is A or G or is absent

SEQ ID NO: 63417 - protein, 41 aa, Artificial Sequence; identical to SEQ ID NO: 25241
  GFR-binding peptide
  MOD_RES (1)..(35)..(36): Xaa is C or S
  MOD_RES (13)..(14)..(15)..(16)..(17): Xaa is A or G
  MOD_RES (18)..(19)..(20)..(21): Xaa is A or G or is absent

SEQ ID NO: 63418 - protein, 41 aa, Artificial Sequence
  GFR-binding peptide
  MOD_RES (2)..(4)..(35)..(36): Xaa is C or S
LXGXEEVIMEYKFKLLVRGNDLYLMSIPETKVPAXXTSPVR

SEQ ID NO: 63419 - protein, 34 aa, Artificial Sequence; identical to SEQ ID NO: 4189
  GFR-binding peptide
  MOD_RES (32)..(33): Xaa is C or S

SEQ ID NO: 63420 - protein, 35 aa, Artificial Sequence; identical to SEQ ID NO: 32259
  GFR-binding peptide
  MOD_RES (1)..(3)..(35): Xaa is C or S

SEQ ID NO: 63421 - protein, 36 aa, Artificial Sequence; identical to SEQ ID NO: 4191
  GFR-binding peptide
  MOD_RES (31)..(32): Xaa is C or S

SEQ ID NO: 63422 - protein, 40 aa, Artificial Sequence
  GFR-binding peptide
  MOD_RES (2)..(34)..(35): Xaa is C or S
GXSRVVMNRHKRLIVNSSDDYYLVSTASLKTPAXXPKPVH

SEQ ID NO: 63423 - protein, 32 aa, Artificial Sequence; identical to SEQ ID NO: 32263
  GFR-binding peptide
  MOD_RES (31)..(32): Xaa is C or S

SEQ ID NO: 63424 - protein, 41 aa, Artificial Sequence; identical to SEQ ID NO: 4193
  GFR-binding peptide
  MOD_RES (1)..(3)..(37)..(38): Xaa is C or S
  MOD_RES (15)..(16)..(17)..(18)..(19): Xaa is A or G
  MOD_RES (20)..(21)..(22)..(23): Xaa is A or G or is absent

SEQ ID NO: 63425 - protein, 42 aa, Artificial Sequence
  GFR-binding peptide
  MOD_RES (1)..(3)..(37)..(38): Xaa is C or S
  MOD_RES (15)..(16)..(17)..(18)..(19): Xaa is A or G
  MOD_RES (20)..(21)..(22)..(23): Xaa is A or G or is absent
XGXRDVVMGYHYKLXXXXXXXXXKYLMSIPSMKTPTXXPGAS

SEQ ID NO: 63426 - protein, 38 aa, Artificial Sequence; identical to SEQ ID NO: 4196
  GFR-binding peptide
  MOD_RES (1)..(3)..(35): Xaa is C or S

SEQ ID NO: 63427 - protein, 38 aa, Artificial Sequence; identical to SEQ ID NO: 25251
  GFR-binding peptide
  MOD_RES (1)..(34)..(35): Xaa is C or S
  MOD_RES (12)..(13)..(14)..(15)..(16): Xaa is A or G
  MOD_RES (17)..(18)..(19)..(20): Xaa is A or G or is absent

SEQ ID NO: 63428 - protein, 35 aa, Artificial Sequence
  GFR-binding peptide
  MOD_RES (31)..(32): Xaa is C or S
EVVMDRHKRLVVNNAADYYLISTASLRAPVXXSAP

SEQ ID NO: 63429 - protein, 41 aa, Artificial Sequence; identical to SEQ ID NO: 32273
  GFR-binding peptide
  MOD_RES (2)..(4)..(37)..(38): Xaa is C or S
  MOD_RES (15)..(16)..(17)..(18)..(19): Xaa is A or G
  MOD_RES (20)..(21)..(22)..(23): Xaa is A or G or is absent

SEQ ID NO: 63430 - protein, 41 aa, Artificial Sequence; identical to SEQ ID NO: 4201
  GFR-binding peptide
  MOD_RES (2)..(4)..(35)..(36): Xaa is C or S

SEQ ID NO: 63431 - protein, 33 aa, Artificial Sequence
  GFR-binding peptide
  MOD_RES (12)..(13)..(14)..(15)..(16): Xaa is A or G
  MOD_RES (17)..(18)..(19)..(20): Xaa is A or G or is absent
RDVVMGEYKFKXXXXXXXXXLYLMSIPEMKTPT

SEQ ID NO: 63432 - protein, 38 aa, Artificial Sequence; identical to SEQ ID NO: 4203
  GFR-binding peptide
  MOD_RES (33)..(34): Xaa is C or S

SEQ ID NO: 63433 - protein, 44 aa, Artificial Sequence; identical to SEQ ID NO: 25259
  GFR-binding peptide
  MOD_RES (2)..(4)..(38)..(39): Xaa is C or S
  MOD_RES (16)..(17)..(18)..(19)..(20): Xaa is A or G
  MOD_RES (21)..(22)..(23)..(24): Xaa is A or G or is absent

SEQ ID NO: 63434 - protein, 37 aa, Artificial Sequence; identical to SEQ ID NO: 25260
  GFR-binding peptide
  MOD_RES (2)..(4)..(35)..(36): Xaa is C or S

SEQ ID NO: 63435 - protein, 36 aa, Artificial Sequence; identical to SEQ ID NO: 25261
  GFR-binding peptide
  MOD_RES (32)..(33): Xaa is C or S

SEQ ID NO: 63436 - protein, 39 aa, Artificial Sequence; identical to SEQ ID NO: 32280
  GFR-binding peptide
  MOD_RES (1)..(3)..(36)..(37): Xaa is C or S
  MOD_RES (14)..(15)..(16)..(17)..(18): Xaa is A or G
  MOD_RES (19)..(20)..(21)..(22): Xaa is A or G or is absent

SEQ ID NO: 63437 - protein, 35 aa, Artificial Sequence; identical to SEQ ID NO: 4206
  GFR-binding peptide
  MOD_RES (1)..(3): Xaa is C or S
  MOD_RES (14)..(15)..(16)..(17)..(18): Xaa is A or G
  MOD_RES (19)..(20)..(21)..(22): Xaa is A or G or is absent

SEQ ID NO: 63438 - protein, 38 aa, Artificial Sequence; identical to SEQ ID NO: 4207
  GFR-binding peptide
  MOD_RES (2)..(36)..(37): Xaa is C or S
  MOD_RES (14)..(15)..(16)..(17)..(18): Xaa is A or G
  MOD_RES (19)..(20)..(21)..(22): Xaa is A or G or is absent

SEQ ID NO: 63439 - protein, 38 aa, Artificial Sequence
  GFR-binding peptide
  MOD_RES (1)..(3)..(34)..(35): Xaa is C or S
XKXSRVIMPIKGYVKPKRGVFYLINIPSLAQPVXXPAA

SEQ ID NO: 63440 - protein, 36 aa, Artificial Sequence; identical to SEQ ID NO: 4208
  GFR-binding peptide
  MOD_RES (35)..(36): Xaa is C or S
  MOD_RES (13)..(14)..(15)..(16)..(17): Xaa is A or G
  MOD_RES (18)..(19)..(20)..(21): Xaa is A or G or is absent

SEQ ID NO: 63441 - protein, 36 aa, Artificial Sequence; identical to SEQ ID NO: 32283
  GFR-binding peptide
  MOD_RES (33)..(34): Xaa is C or S
  MOD_RES (11)..(12)..(13)..(14)..(15): Xaa is A or G
  MOD_RES (16)..(17)..(18)..(19): Xaa is A or G or is absent

SEQ ID NO: 63442 - protein, 32 aa, Artificial Sequence; identical to SEQ ID NO: 25268
  GFR-binding peptide
  MOD_RES (1)..(32): Xaa is C or S

SEQ ID NO: 63443 - protein, 41 aa, Artificial Sequence
  GFR-binding peptide
  MOD_RES (1)..(3)..(37)..(38): Xaa is C or S
  MOD_RES (15)..(16)..(17)..(18)..(19): Xaa is A or G
  MOD_RES (20)..(21)..(22)..(23): Xaa is A or G or is absent
XAXSEVTMNRYKKLXXXXXXXXXFYLISIANMKEPVXXPEP

SEQ ID NO: 63444 - protein, 33 aa, Artificial Sequence; identical to SEQ ID NO: 4211
  GFR-binding peptide
  MOD_RES (33)..(33): Xaa is C or S
  MOD_RES (11)..(12)..(13)..(14)..(15): Xaa is A or G
  MOD_RES (16)..(17)..(18)..(19): Xaa is A or G or is absent

SEQ ID NO: 63445 - protein, 35 aa, Artificial Sequence
  GFR-binding peptide
  MOD_RES (2)..(2): Xaa is C or S
  MOD_RES (14)..(15)..(16)..(17)..(18): Xaa is A or G
  MOD_RES (19)..(20)..(21)..(22): Xaa is A or G or is absent
AXSEVTMNEYKFKXXXXXXXXXLYLISIPEMKEPV

SEQ ID NO: 63446 - protein, 33 aa, Artificial Sequence; identical to SEQ ID NO: 25272
  GFR-binding peptide
  MOD_RES (2)..(33): Xaa is C or S

SEQ ID NO: 63447 - protein, 36 aa, Artificial Sequence; identical to SEQ ID NO: 4213
  GFR-binding peptide
  MOD_RES (2)..(35)..(36): Xaa is C or S
  MOD_RES (13)..(14)..(15)..(16)..(17): Xaa is A or G
  MOD_RES (18)..(19)..(20)..(21): Xaa is A or G or is absent

SEQ ID NO: 63448 - protein, 40 aa, Artificial Sequence
  GFR-binding peptide
  MOD_RES (2)..(34)..(35): Xaa is C or S
GXSEVVMDRHKRLVVNNASDYYLISTASLRTPVXXTPPTS

SEQ ID NO: 63449 - protein, 33 aa, Artificial Sequence
  GFR-binding peptide
  MOD_RES (33)..(33): Xaa is C or S
  MOD_RES (11)..(12)..(13)..(14)..(15): Xaa is A or G
  MOD_RES (16)..(17)..(18)..(19): Xaa is A or G or is absent
DVVMGEYKFKXXXXXXXXXLYLMSIPEMKTPTX

SEQ ID NO: 63450 - protein, 32 aa, Artificial Sequence; identical to SEQ ID NO: 4220
  GFR-binding peptide
  MOD_RES (1)..(32): Xaa is C or S

SEQ ID NO: 63451 - protein, 31 aa, Artificial Sequence; identical to SEQ ID NO: 4221
  GFR-binding peptide
  MOD_RES (1)..(1): Xaa is C or S

SEQ ID NO: 63452 - protein, 36 aa, Artificial Sequence; identical to SEQ ID NO: 25281
  GFR-binding peptide
  MOD_RES (1)..(3): Xaa is C or S
  MOD_RES (15)..(16)..(17)..(18)..(19): Xaa is A or G
  MOD_RES (20)..(21)..(22)..(23): Xaa is A or G or is absent

SEQ ID NO: 63453 - protein, 40 aa, Artificial Sequence; identical to SEQ ID NO: 4226
  GFR-binding peptide
  MOD_RES (1)..(3)..(34)..(35): Xaa is C or S

SEQ ID NO: 63454 - protein, 39 aa, Artificial Sequence; identical to SEQ ID NO: 31199
  GFR-binding peptide
  MOD_RES (1)..(33)..(34): Xaa is C or S

SEQ ID NO: 63455 - protein, 37 aa, Artificial Sequence; identical to SEQ ID NO: 25288
  GFR-binding peptide
  MOD_RES (2)..(4): Xaa is C or S
  MOD_RES (16)..(17)..(18)..(19)..(20): Xaa is A or G
  MOD_RES (21)..(22)..(23)..(24): Xaa is A or G or is absent

SEQ ID NO: 63456 - protein, 41 aa, Artificial Sequence
  GFR-binding peptide
  MOD_RES (2)..(4)..(37)..(38): Xaa is C or S
  MOD_RES (15)..(16)..(17)..(18)..(19): Xaa is A or G
  MOD_RES (20)..(21)..(22)..(23): Xaa is A or G or is absent
LXGXEEVIMRHKRLXXXXXXXXXYYLMSTASTKVPAXXTSP

SEQ ID NO: 63457 - protein, 38 aa, Artificial Sequence; identical to SEQ ID NO: 25289
  GFR-binding peptide
  MOD_RES (2)..(4)..(38): Xaa is C or S
  MOD_RES (16)..(17)..(18)..(19)..(20): Xaa is A or G
  MOD_RES (21)..(22)..(23)..(24): Xaa is A or G or is absent

SEQ ID NO: 63458 - protein, 39 aa, Artificial Sequence; identical to SEQ ID NO: 25292
  GFR-binding peptide
  MOD_RES (1)..(34)..(35): Xaa is C or S
  MOD_RES (12)..(13)..(14)..(15)..(16): Xaa is A or G
  MOD_RES (17)..(18)..(19)..(20): Xaa is A or G or is absent

SEQ ID NO: 63459 - protein, 34 aa, Artificial Sequence; identical to SEQ ID NO: 4231
  GFR-binding peptide
  MOD_RES (31)..(32): Xaa is C or S

SEQ ID NO: 63460 - protein, 34 aa, Artificial Sequence
  GFR-binding peptide
  MOD_RES (1)..(3): Xaa is C or S
XAXSEVTMNPIKGYVVNKNEDFYLINIPSMKEPV

SEQ ID NO: 63461 - protein, 37 aa, Artificial Sequence; identical to SEQ ID NO: 31217
  GFR-binding peptide
  MOD_RES (34)..(35): Xaa is C or S
  MOD_RES (12)..(13)..(14)..(15)..(16): Xaa is A or G
  MOD_RES (17)..(18)..(19)..(20): Xaa is A or G or is absent

SEQ ID NO: 63462 - protein, 34 aa, Artificial Sequence
  GFR-binding peptide
  MOD_RES (33)..(34): Xaa is C or S
  MOD_RES (11)..(12)..(13)..(14)..(15): Xaa is A or G
  MOD_RES (16)..(17)..(18)..(19): Xaa is A or G or is absent
EVTMNYHYKLXXXXXXXXXKYLISIPSMKEPVXX

SEQ ID NO: 63463 - protein, 36 aa, Artificial Sequence; identical to SEQ ID NO: 4235
  GFR-binding peptide
  MOD_RES (2)..(4)..(36): Xaa is C or S

SEQ ID NO: 63464 - protein, 39 aa, Artificial Sequence; identical to SEQ ID NO: 4237
  GFR-binding peptide
  MOD_RES (1)..(3)..(37): Xaa is C or S
  MOD_RES (15)..(16)..(17)..(18)..(19): Xaa is A or G
  MOD_RES (20)..(21)..(22)..(23): Xaa is A or G or is absent

SEQ ID NO: 63465 - protein, 42 aa, Artificial Sequence
  GFR-binding peptide
  MOD_RES (2)..(4)..(38)..(39): Xaa is C or S
  MOD_RES (16)..(17)..(18)..(19)..(20): Xaa is A or G
  MOD_RES (21)..(22)..(23)..(24): Xaa is A or G or is absent
RXGXSEVVMDRHKRLXXXXXXXXXYYLISTASLRTPVXXTPP

SEQ ID NO: 63466 - protein, 38 aa, Artificial Sequence; identical to SEQ ID NO: 31222
  GFR-binding peptide
  MOD_RES (2)..(34)..(35): Xaa is C or S

SEQ ID NO: 63467 - protein, 39 aa, Artificial Sequence; identical to SEQ ID NO: 31224
  GFR-binding peptide
  MOD_RES (2)..(4)..(38)..(39): Xaa is C or S
  MOD_RES (16)..(17)..(18)..(19)..(20): Xaa is A or G
  MOD_RES (21)..(22)..(23)..(24): Xaa is A or G or is absent

SEQ ID NO: 63468 - protein, 38 aa, Artificial Sequence
  GFR-binding peptide
  MOD_RES (32)..(33): Xaa is C or S
SEVVMDYHYKLVVNNASDKYLISIPSLRTPVXXTPPTS

SEQ ID NO: 63469 - protein, 34 aa, Artificial Sequence
  GFR-binding peptide
  MOD_RES (33)..(34): Xaa is C or S
  MOD_RES (11)..(12)..(13)..(14)..(15): Xaa is A or G
  MOD_RES (16)..(17)..(18)..(19): Xaa is A or G or is absent
EVTMNEYKFKXXXXXXXXXLYLISIPEMKEPVXX

SEQ ID NO: 63470 - protein, 41 aa, Artificial Sequence; identical to SEQ ID NO: 4244
  GFR-binding peptide
  MOD_RES (1)..(3)..(38)..(39): Xaa is C or S
  MOD_RES (16)..(17)..(18)..(19)..(20): Xaa is A or G
  MOD_RES (21)..(22)..(23)..(24): Xaa is A or G or is absent

SEQ ID NO: 63471 - protein, 35 aa, Artificial Sequence; identical to SEQ ID NO: 31233
  GFR-binding peptide
  MOD_RES (1)..(3)..(35): Xaa is C or S

SEQ ID NO: 63472 - protein, 31 aa, Artificial Sequence; identical to SEQ ID NO: 4248
  GFR-binding peptide
  MOD_RES (31)..(31): Xaa is C or S

SEQ ID NO: 63473 - protein, 35 aa, Artificial Sequence; identical to SEQ ID NO: 31235
  GFR-binding peptide
  MOD_RES (1)..(34)..(35): Xaa is C or S

SEQ ID NO: 63474 - protein, 39 aa, Artificial Sequence
  GFR-binding peptide
  MOD_RES (34)..(35): Xaa is C or S
  MOD_RES (12)..(13)..(14)..(15)..(16): Xaa is A or G
  MOD_RES (17)..(18)..(19)..(20): Xaa is A or G or is absent
SEVTMNPIKGYXXXXXXXXXFYLINIPSMKEPVXXPEPI

SEQ ID NO: 63475 - protein, 38 aa, Artificial Sequence; identical to SEQ ID NO: 4249
  GFR-binding peptide
  MOD_RES (1)..(33): Xaa is C or S

SEQ ID NO: 63476 - protein, 35 aa, Artificial Sequence; identical to SEQ ID NO: 25301
  GFR-binding peptide
  MOD_RES (1)..(3)..(35): Xaa is C or S

SEQ ID NO: 63477 - protein, 38 aa, Artificial Sequence; identical to SEQ ID NO: 31236
  GFR-binding peptide
  MOD_RES (2)..(33)..(34): Xaa is C or S

SEQ ID NO: 63478 - protein, 34 aa, Artificial Sequence; identical to SEQ ID NO: 25303
  GFR-binding peptide
  MOD_RES (1)..(33)..(34): Xaa is C or S

SEQ ID NO: 63479 - protein, 35 aa, Artificial Sequence; identical to SEQ ID NO: 4252
  GFR-binding peptide
  MOD_RES (1)..(3)..(35): Xaa is C or S

SEQ ID NO: 63480 - protein, 33 aa, Artificial Sequence
  GFR-binding peptide
  MOD_RES (1)..(1): Xaa is C or S
  MOD_RES (12)..(13)..(14)..(15)..(16): Xaa is A or G
  MOD_RES (17)..(18)..(19)..(20): Xaa is A or G or is absent
XEEVIMRHKRLXXXXXXXXXYYLMSTASTKVPA

SEQ ID NO: 63481 - protein, 39 aa, Artificial Sequence; identical to SEQ ID NO: 25305
  GFR-binding peptide
  MOD_RES (1)..(3)..(37)..(38): Xaa is C or S
  MOD_RES (15)..(16)..(17)..(18)..(19): Xaa is A or G
  MOD_RES (20)..(21)..(22)..(23): Xaa is A or G or is absent

SEQ ID NO: 63482 - protein, 33 aa, Artificial Sequence; identical to SEQ ID NO: 25306
  GFR-binding peptide
  MOD_RES (1)..(33): Xaa is C or S

SEQ ID NO: 63483 - protein, 33 aa, Artificial Sequence; identical to SEQ ID NO: 25307
  GFR-binding peptide
  MOD_RES (12)..(13)..(14)..(15)..(16): Xaa is A or G
  MOD_RES (17)..(18)..(19)..(20): Xaa is A or G or is absent

SEQ ID NO: 63484 - protein, 37 aa, Artificial Sequence
  GFR-binding peptide
  MOD_RES (2)..(35)..(36): Xaa is C or S
  MOD_RES (13)..(14)..(15)..(16)..(17): Xaa is A or G
  MOD_RES (18)..(19)..(20)..(21): Xaa is A or G or is absent
KXSKVVMPIKGYXXXXXXXXXFYLINIPSLDQPVXXP

SEQ ID NO: 63485 - protein, 41 aa, Artificial Sequence; identical to SEQ ID NO: 4256
  GFR-binding peptide
  MOD_RES (2)..(4)..(36)..(37): Xaa is C or S

SEQ ID NO: 63486 - protein, 41 aa, Artificial Sequence
  GFR-binding peptide
  MOD_RES (1)..(3)..(37)..(38): Xaa is C or S
  MOD_RES (15)..(16)..(17)..(18)..(19): Xaa is A or G
  MOD_RES (20)..(21)..(22)..(23): Xaa is A or G or is absent
XGXRDVVMGRHKRLXXXXXXXXXYYLMSTASMKTPTXXPGA

SEQ ID NO: 63487 - protein, 32 aa, Artificial Sequence; identical to SEQ ID NO: 25312
  GFR-binding peptide
  MOD_RES (11)..(12)..(13)..(14)..(15): Xaa is A or G
  MOD_RES (16)..(17)..(18)..(19): Xaa is A or G or is absent

SEQ ID NO: 63488 - protein, 42 aa, Artificial Sequence
  GFR-binding peptide
  MOD_RES (2)..(36)..(37): Xaa is C or S
  MOD_RES (14)..(15)..(16)..(17)..(18): Xaa is A or G
  MOD_RES (19)..(20)..(21)..(22): Xaa is A or G or is absent
GXAEVVMDRHKRLXXXXXXXXXYYLISTASLRAPVXXSAPAA

SEQ ID NO: 63489 - protein, 44 aa, Artificial Sequence
  GFR-binding peptide
  MOD_RES (2)..(4)..(38)..(39): Xaa is C or S
  MOD_RES (16)..(17)..(18)..(19)..(20): Xaa is A or G
  MOD_RES (21)..(22)..(23)..(24): Xaa is A or G or is absent
RXGXSEVVMDRHKRLXXXXXXXXXYYLISTASLRTPVXXTPPTS

SEQ ID NO: 63490 - protein, 33 aa, Artificial Sequence; identical to SEQ ID NO: 11675
  GFR-binding peptide
  MOD_RES (1)..(33): Xaa is C or S

SEQ ID NO: 63491 - protein, 40 aa, Artificial Sequence; identical to SEQ ID NO: 25316
  GFR-binding peptide
  MOD_RES (2)..(4)..(38)..(39): Xaa is C or S
  MOD_RES (16)..(17)..(18)..(19)..(20): Xaa is A or G
  MOD_RES (21)..(22)..(23)..(24): Xaa is A or G or is absent

SEQ ID NO: 63492 - protein, 39 aa, Artificial Sequence; identical to SEQ ID NO: 4262
  GFR-binding peptide
  MOD_RES (33)..(33): Xaa is C or S
  MOD_RES (11)..(12)..(13)..(14)..(15): Xaa is A or G
  MOD_RES (16)..(17)..(18)..(19): Xaa is A or G or is absent

SEQ ID NO: 63493 - protein, 34 aa, Artificial Sequence; identical to SEQ ID NO: 4264
  GFR-binding peptide
  MOD_RES (1)..(3)..(34): Xaa is C or S

SEQ ID NO: 63494 - protein, 40 aa, Artificial Sequence; identical to SEQ ID NO: 25322
  GFR-binding peptide
  MOD_RES (2)..(4)..(38)..(39): Xaa is C or S
  MOD_RES (16)..(17)..(18)..(19)..(20): Xaa is A or G
  MOD_RES (21)..(22)..(23)..(24): Xaa is A or G or is absent

SEQ ID NO: 63495 - protein, 41 aa, Artificial Sequence
  GFR-binding peptide
  MOD_RES (1)..(3)..(37)..(38): Xaa is C or S
  MOD_RES (15)..(16)..(17)..(18)..(19): Xaa is A or G
  MOD_RES (20)..(21)..(22)..(23): Xaa is A or G or is absent
XGXESVAMGRHKRLXXXXXXXXXYYLISTASLKTPVXXAKS

SEQ ID NO: 63496 - protein, 35 aa, Artificial Sequence; identical to SEQ ID NO: 56197
  GFR-binding peptide
  MOD_RES (2)..(34)..(35): Xaa is C or S

SEQ ID NO: 63497 - protein, 36 aa, Artificial Sequence; identical to SEQ ID NO: 31262
  GFR-binding peptide
  MOD_RES (31)..(32): Xaa is C or S

SEQ ID NO: 63498 - protein, 36 aa, Artificial Sequence; identical to SEQ ID NO: 31264
  GFR-binding peptide
  MOD_RES (1)..(33)..(34): Xaa is C or S

SEQ ID NO: 63499 - protein, 31 aa, Artificial Sequence; identical to SEQ ID NO: 11698
  GFR-binding peptide
  MOD_RES (31)..(31): Xaa is C or S

SEQ ID NO: 63500 - protein, 37 aa, Artificial Sequence; identical to SEQ ID NO: 4279
  GFR-binding peptide
  MOD_RES (2)..(4)..(36): Xaa is C or S

SEQ ID NO: 63501 - protein, 36 aa, Artificial Sequence
  GFR-binding peptide
  MOD_RES (2)..(36): Xaa is C or S
  MOD_RES (14)..(15)..(16)..(17)..(18): Xaa is A or G
  MOD_RES (19)..(20)..(21)..(22): Xaa is A or G or is absent
GXSEVVMDEYKFKXXXXXXXXXLYLISIPELRTPVX

SEQ ID NO: 63502 - protein, 38 aa, Artificial Sequence
  GFR-binding peptide
  MOD_RES (1)..(34)..(35): Xaa is C or S
  MOD_RES (12)..(13)..(14)..(15)..(16): Xaa is A or G
  MOD_RES (17)..(18)..(19)..(20): Xaa is A or G or is absent
XEEVIMEYKFKXXXXXXXXXLYLMSIPETKVPAXXTSP

SEQ ID NO: 63503 - protein, 36 aa, Artificial Sequence
  GFR-binding peptide
  MOD_RES (31)..(32): Xaa is C or S
EVVMDRHKRLVVNNASDYYLISTASLRTPVXXTPPT

SEQ ID NO: 63504 - protein, 37 aa, Artificial Sequence
  GFR-binding peptide
  MOD_RES (31)..(32): Xaa is C or S
SRVIMPIKGYVKPKRGVFYLINIPSLAQPVXXPAASA

SEQ ID NO: 63505 - protein, 37 aa, Artificial Sequence
  GFR-binding peptide
  MOD_RES (34)..(35): Xaa is C or S
  MOD_RES (12)..(13)..(14)..(15)..(16): Xaa is A or G
  MOD_RES (17)..(18)..(19)..(20): Xaa is A or G or is absent
SEVVMDRHKRLXXXXXXXXXYYLISTASLRTPVXXTP

SEQ ID NO: 63506 - protein, 34 aa, Artificial Sequence; identical to SEQ ID NO: 31284
  GFR-binding peptide
  MOD_RES (31)..(32): Xaa is C or S

SEQ ID NO: 63507 - protein, 41 aa, Artificial Sequence
  GFR-binding peptide
  MOD_RES (1)..(3)..(37)..(38): Xaa is C or S
  MOD_RES (15)..(16)..(17)..(18)..(19): Xaa is A or G
  MOD_RES (20)..(21)..(22)..(23): Xaa is A or G or is absent
XAXSEVTMNPIKGYXXXXXXXXXFYLINIPSMKEPVXXPEP

SEQ ID NO: 63508 - protein, 35 aa, Artificial Sequence; identical to SEQ ID NO: 4284
  GFR-binding peptide
  MOD_RES (1)..(3)..(34)..(35): Xaa is C or S

SEQ ID NO: 63509 - protein, 42 aa, Artificial Sequence; identical to SEQ ID NO: 31299
  GFR-binding peptide
  MOD_RES (2)..(36)..(37): Xaa is C or S
  MOD_RES (14)..(15)..(16)..(17)..(18): Xaa is A or G
  MOD_RES (19)..(20)..(21)..(22): Xaa is A or G or is absent

SEQ ID NO: 63510 - protein, 41 aa, Artificial Sequence
  GFR-binding peptide
  MOD_RES (2)..(4)..(35)..(36): Xaa is C or S
LXGXEEVIMRHKRLLLVRGNDYYLMSTASTKVPAXXTSPVR

SEQ ID NO: 63511 - protein, 44 aa, Artificial Sequence; identical to SEQ ID NO: 4285
  GFR-binding peptide
  MOD_RES (2)..(4)..(38)..(39): Xaa is C or S
  MOD_RES (16)..(17)..(18)..(19)..(20): Xaa is A or G
  MOD_RES (21)..(22)..(23)..(24): Xaa is A or G or is absent

SEQ ID NO: 63512 - protein, 39 aa, Artificial Sequence; identical to SEQ ID NO: 25334
  GFR-binding peptide
  MOD_RES (1)..(33)..(34): Xaa is C or S

SEQ ID NO: 63513 - protein, 40 aa, Artificial Sequence
  GFR-binding peptide
  MOD_RES (2)..(4)..(36)..(37): Xaa is C or S
SXGXRDVVMGRHKRLIIQQKDNYYLMSTASMKTPTXXPGA

SEQ ID NO: 63514 - protein, 36 aa, Artificial Sequence
  GFR-binding peptide
  MOD_RES (1)..(3)..(36): Xaa is C or S
  MOD_RES (14)..(15)..(16)..(17)..(18): Xaa is A or G
  MOD_RES (19)..(20)..(21)..(22): Xaa is A or G or is absent
XGXEEVIMYHYKLXXXXXXXXXKYLMSIPSTKVPAX

SEQ ID NO: 63515 - protein, 36 aa, Artificial Sequence
  GFR-binding peptide
  MOD_RES (34)..(35): Xaa is C or S
  MOD_RES (12)..(13)..(14)..(15)..(16): Xaa is A or G
  MOD_RES (17)..(18)..(19)..(20): Xaa is A or G or is absent
RDVVMGRHKRLXXXXXXXXXYYLMSTASMKTPTXXP

SEQ ID NO: 63516 - protein, 42 aa, Artificial Sequence; identical to SEQ ID NO: 56227
  GFR-binding peptide
  MOD_RES (2)..(36)..(37): Xaa is C or S
  MOD_RES (14)..(15)..(16)..(17)..(18): Xaa is A or G
  MOD_RES (19)..(20)..(21)..(22): Xaa is A or G or is absent

SEQ ID NO: 63517 - protein, 35 aa, Artificial Sequence
  GFR-binding peptide
  MOD_RES (31)..(32): Xaa is C or S
DVVMGRHKRLIIQQKDNYYLMSTASMKTPTXXPGA

SEQ ID NO: 63518 - protein, 40 aa, Artificial Sequence; identical to SEQ ID NO: 4290
  GFR-binding peptide
  MOD_RES (2)..(35)..(36): Xaa is C or S
  MOD_RES (13)..(14)..(15)..(16)..(17): Xaa is A or G
  MOD_RES (18)..(19)..(20)..(21): Xaa is A or G or is absent

SEQ ID NO: 63519 - protein, 35 aa, Artificial Sequence; identical to SEQ ID NO: 25342
  GFR-binding peptide
  MOD_RES (31)..(32): Xaa is C or S

SEQ ID NO: 63520 - protein, 37 aa, Artificial Sequence; identical to SEQ ID NO: 4292
  GFR-binding peptide
  MOD_RES (34)..(35): Xaa is C or S
  MOD_RES (12)..(13)..(14)..(15)..(16): Xaa is A or G
  MOD_RES (17)..(18)..(19)..(20): Xaa is A or G or is absent

SEQ ID NO: 63521 - protein, 38 aa, Artificial Sequence; identical to SEQ ID NO: 31308
  GFR-binding peptide
  MOD_RES (2)..(4)..(36)..(37): Xaa is C or S

SEQ ID NO: 63522 - protein, 36 aa, Artificial Sequence; identical to SEQ ID NO: 4296
  GFR-binding peptide
  MOD_RES (31)..(32): Xaa is C or S

SEQ ID NO: 63523 - protein, 39 aa, Artificial Sequence; identical to SEQ ID NO: 4297
  GFR-binding peptide
  MOD_RES (2)..(4)..(38)..(39): Xaa is C or S
  MOD_RES (16)..(17)..(18)..(19)..(20): Xaa is A or G
  MOD_RES (21)..(22)..(23)..(24): Xaa is A or G or is absent

SEQ ID NO: 63524 - protein, 43 aa, Artificial Sequence; identical to SEQ ID NO: 25351
  GFR-binding peptide
  MOD_RES (2)..(4)..(38)..(39): Xaa is C or S
  MOD_RES (16)..(17)..(18)..(19)..(20): Xaa is A or G
  MOD_RES (21)..(22)..(23)..(24): Xaa is A or G or is absent

SEQ ID NO: 63525 - protein, 35 aa, Artificial Sequence; identical to SEQ ID NO: 31317
  GFR-binding peptide
  MOD_RES (1)..(3)..(35): Xaa is C or S

SEQ ID NO: 63526 - protein, 37 aa, Artificial Sequence; identical to SEQ ID NO: 25353
  GFR-binding peptide
  MOD_RES (1)..(3)..(36)..(37): Xaa is C or S
  MOD_RES (14)..(15)..(16)..(17)..(18): Xaa is A or G
  MOD_RES (19)..(20)..(21)..(22): Xaa is A or G or is absent

SEQ ID NO: 63527 - protein, 33 aa, Artificial Sequence; identical to SEQ ID NO: 25357
  GFR-binding peptide
  MOD_RES (31)..(32): Xaa is C or S

SEQ ID NO: 63528 - protein, 36 aa, Artificial Sequence; identical to SEQ ID NO: 4300
  GFR-binding peptide
  MOD_RES (2)..(33)..(34): Xaa is C or S

SEQ ID NO: 63529 - protein, 40 aa, Artificial Sequence; identical to SEQ ID NO: 4301
  GFR-binding peptide
  MOD_RES (2)..(34): Xaa is C or S

SEQ ID NO: 63530 - protein, 36 aa, Artificial Sequence; identical to SEQ ID NO: 31321
  GFR-binding peptide
  MOD_RES (31)..(31): Xaa is C or S

SEQ ID NO: 63531 - protein, 36 aa, Artificial Sequence; identical to SEQ ID NO: 4302
  GFR-binding peptide
  MOD_RES (34)..(35): Xaa is C or S
  MOD_RES (12)..(13)..(14)..(15)..(16): Xaa is A or G
  MOD_RES (17)..(18)..(19)..(20): Xaa is A or G or is absent

SEQ ID NO: 63532 - protein, 39 aa, Artificial Sequence; identical to SEQ ID NO: 31322
  GFR-binding peptide
  MOD_RES (1)..(33)..(34): Xaa is C or S

SEQ ID NO: 63533 - protein, 40 aa, Artificial Sequence; identical to SEQ ID NO: 4305
  GFR-binding peptide
  MOD_RES (2)..(4)..(36)..(37): Xaa is C or S

SEQ ID NO: 63534 - protein, 31 aa, Artificial Sequence; identical to SEQ ID NO: 25362
  GFR-binding peptide
  MOD_RES (31)..(31): Xaa is C or S

SEQ ID NO: 63535 - protein, 32 aa, Artificial Sequence; identical to SEQ ID NO: 4308
  GFR-binding peptide
  MOD_RES (31)..(32): Xaa is C or S

SEQ ID NO: 63536 - protein, 36 aa, Artificial Sequence; identical to SEQ ID NO: 31326
  GFR-binding peptide
  MOD_RES (34)..(35): Xaa is C or S
  MOD_RES (12)..(13)..(14)..(15)..(16): Xaa is A or G
  MOD_RES (17)..(18)..(19)..(20): Xaa is A or G or is absent

SEQ ID NO: 63537 - protein, 36 aa, Artificial Sequence; identical to SEQ ID NO: 31327
  GFR-binding peptide
  MOD_RES (2)..(33)..(34): Xaa is C or S

SEQ ID NO: 63538 - protein, 36 aa, Artificial Sequence; identical to SEQ ID NO: 4312
  GFR-binding peptide
  MOD_RES (1)..(34)..(35): Xaa is C or S

SEQ ID NO: 63539 - protein, 32 aa, Artificial Sequence; identical to SEQ ID NO: 4313
  GFR-binding peptide
  MOD_RES (1)..(1): Xaa is C or S

SEQ ID NO: 63540 - protein, 38 aa, Artificial Sequence
  GFR-binding peptide
  MOD_RES (1)..(3)..(36)..(37): Xaa is C or S
  MOD_RES (14)..(15)..(16)..(17)..(18): Xaa is A or G
  MOD_RES (19)..(20)..(21)..(22): Xaa is A or G or is absent
XGXEEVIMYHYKLXXXXXXXXXKYLMSIPSTKVPAXXT

SEQ ID NO: 63541 - protein, 35 aa, Artificial Sequence; identical to SEQ ID NO: 31330
  GFR-binding peptide
  MOD_RES (1)..(35): Xaa is C or S
  MOD_RES (13)..(14)..(15)..(16)..(17): Xaa is A or G
  MOD_RES (18)..(19)..(20)..(21): Xaa is A or G or is absent

SEQ ID NO: 63542 - protein, 39 aa, Artificial Sequence; identical to SEQ ID NO: 25367
  GFR-binding peptide
  MOD_RES (2)..(4)..(38)..(39): Xaa is C or S
  MOD_RES (16)..(17)..(18)..(19)..(20): Xaa is A or G
  MOD_RES (21)..(22)..(23)..(24): Xaa is A or G or is absent

SEQ ID NO: 63543 - protein, 38 aa, Artificial Sequence; identical to SEQ ID NO: 4316
  GFR-binding peptide
  MOD_RES (1)..(3)..(35)..(36): Xaa is C or S

SEQ ID NO: 63544 - protein, 42 aa, Artificial Sequence; identical to SEQ ID NO: 25369
  GFR-binding peptide
  MOD_RES (2)..(4)..(38)..(39): Xaa is C or S
  MOD_RES (16)..(17)..(18)..(19)..(20): Xaa is A or G
  MOD_RES (21)..(22)..(23)..(24): Xaa is A or G or is absent

SEQ ID NO: 63545 - protein, 41 aa, Artificial Sequence; identical to SEQ ID NO: 4318
  GFR-binding peptide
  MOD_RES (1)..(35): Xaa is C or S
  MOD_RES (13)..(14)..(15)..(16)..(17): Xaa is A or G
  MOD_RES (18)..(19)..(20)..(21): Xaa is A or G or is absent

SEQ ID NO: 63546 - protein, 38 aa, Artificial Sequence; identical to SEQ ID NO: 25374
  GFR-binding peptide
  MOD_RES (1)..(35)..(36): Xaa is C or S
  MOD_RES (13)..(14)..(15)..(16)..(17): Xaa is A or G
  MOD_RES (18)..(19)..(20)..(21): Xaa is A or G or is absent

SEQ ID NO: 63547 - protein, 37 aa, Artificial Sequence; identical to SEQ ID NO: 31341
  GFR-binding peptide
  MOD_RES (1)..(36)..(37): Xaa is C or S
  MOD_RES (14)..(15)..(16)..(17)..(18): Xaa is A or G
  MOD_RES (19)..(20)..(21)..(22): Xaa is A or G or is absent

SEQ ID NO: 63548 - protein, 36 aa, Artificial Sequence; identical to SEQ ID NO: 4320
  GFR-binding peptide
  MOD_RES (2)..(36): Xaa is C or S
  MOD_RES (14)..(15)..(16)..(17)..(18): Xaa is A or G
  MOD_RES (19)..(20)..(21)..(22): Xaa is A or G or is absent

SEQ ID NO: 63549 - protein, 32 aa, Artificial Sequence; identical to SEQ ID NO: 25377
  GFR-binding peptide
  MOD_RES (31)..(32): Xaa is C or S

SEQ ID NO: 63550 - protein, 38 aa, Artificial Sequence; identical to SEQ ID NO: 4321
  GFR-binding peptide
  MOD_RES (1)..(35): Xaa is C or S
  MOD_RES (13)..(14)..(15)..(16)..(17): Xaa is A or G
  MOD_RES (18)..(19)..(20)..(21): Xaa is A or G or is absent

SEQ ID NO: 63551 - protein, 39 aa, Artificial Sequence; identical to SEQ ID NO: 25380
  GFR-binding peptide
  MOD_RES (34)..(35): Xaa is C or S
  MOD_RES (12)..(13)..(14)..(15)..(16): Xaa is A or G
  MOD_RES (17)..(18)..(19)..(20): Xaa is A or G or is absent

SEQ ID NO: 63552 - protein, 34 aa, Artificial Sequence; identical to SEQ ID NO: 4323
  GFR-binding peptide
  MOD_RES (2)..(34): Xaa is C or S

SEQ ID NO: 63553 - protein, 37 aa, Artificial Sequence; identical to SEQ ID NO: 25384
  GFR-binding peptide
  MOD_RES (1)..(33)..(34): Xaa is C or S

SEQ ID NO: 63554 - protein, 35 aa, Artificial Sequence
  GFR-binding peptide
  MOD_RES (2)..(2): Xaa is C or S
  MOD_RES (14)..(15)..(16)..(17)..(18): Xaa is A or G
  MOD_RES (19)..(20)..(21)..(22): Xaa is A or G or is absent
AXSEVTMNYHYKLXXXXXXXXXKYLISIPSMKEPV

SEQ ID NO: 63555 - protein, 35 aa, Artificial Sequence
  GFR-binding peptide
  MOD_RES (1)..(3)..(35): Xaa is C or S
XAXSEVTMNRHKRLVVNKNEDYYLISTASMKEPVX

SEQ ID NO: 63556 - protein, 37 aa, Artificial Sequence
  GFR-binding peptide
  MOD_RES (33)..(34): Xaa is C or S
  MOD_RES (11)..(12)..(13)..(14)..(15): Xaa is A or G
  MOD_RES (16)..(17)..(18)..(19): Xaa is A or G or is absent
EEVIMYHYKLXXXXXXXXXKYLMSIPSTKVPAXXTSP

SEQ ID NO: 63557 - protein, 39 aa, Artificial Sequence; identical to SEQ ID NO: 25394
  GFR-binding peptide
  MOD_RES (34)..(35): Xaa is C or S
  MOD_RES (12)..(13)..(14)..(15)..(16): Xaa is A or G
  MOD_RES (17)..(18)..(19)..(20): Xaa is A or G or is absent

SEQ ID NO: 63558 - protein, 37 aa, Artificial Sequence; identical to SEQ ID NO: 25396
  GFR-binding peptide
  MOD_RES (34)..(35): Xaa is C or S
  MOD_RES (12)..(13)..(14)..(15)..(16): Xaa is A or G
  MOD_RES (17)..(18)..(19)..(20): Xaa is A or G or is absent

SEQ ID NO: 63559 - protein, 34 aa, Artificial Sequence; identical to SEQ ID NO: 31361
  GFR-binding peptide
  MOD_RES (1)..(32)..(33): Xaa is C or S

SEQ ID NO: 63560 - protein, 33 aa, Artificial Sequence; identical to SEQ ID NO: 4335
  GFR-binding peptide
  MOD_RES (1)..(1): Xaa is C or S
  MOD_RES (12)..(13)..(14)..(15)..(16): Xaa is A or G
  MOD_RES (17)..(18)..(19)..(20): Xaa is A or G or is absent

SEQ ID NO: 63561 - protein, 36 aa, Artificial Sequence; identical to SEQ ID NO: 25399
  GFR-binding peptide
  MOD_RES (1)..(33)..(34): Xaa is C or S

SEQ ID NO: 63562 - protein, 34 aa, Artificial Sequence; identical to SEQ ID NO: 4338
  GFR-binding peptide
  MOD_RES (1)..(34): Xaa is C or S
  MOD_RES (12)..(13)..(14)..(15)..(16): Xaa is A or G
  MOD_RES (17)..(18)..(19)..(20): Xaa is A or G or is absent

SEQ ID NO: 63563 - protein, 36 aa, Artificial Sequence; identical to SEQ ID NO: 4339
  GFR-binding peptide
  MOD_RES (32)..(33): Xaa is C or S

SEQ ID NO: 63564 - protein, 36 aa, Artificial Sequence; identical to SEQ ID NO: 4342
  GFR-binding peptide
  MOD_RES (2)..(34)..(35): Xaa is C or S

SEQ ID NO: 63565 - protein, 34 aa, Artificial Sequence; identical to SEQ ID NO: 31371
  GFR-binding peptide
  MOD_RES (31)..(32): Xaa is C or S

SEQ ID NO: 63566 - protein, 35 aa, Artificial Sequence
  GFR-binding peptide
  MOD_RES (2)..(34)..(35): Xaa is C or S
AXSEVTMNRYKKLVVNKNEDFYLISIANMKEPVXX

SEQ ID NO: 63567 - protein, 31 aa, Artificial Sequence; identical to SEQ ID NO: 25407
  GFR-binding peptide
  MOD_RES (31)..(31): Xaa is C or S

SEQ ID NO: 63568 - protein, 38 aa, Artificial Sequence
  GFR-binding peptide
  MOD_RES (1)..(3)..(35)..(36): Xaa is C or S
XAXSEVTMNPIKGYVVNKNEDFYLINIPSMKEPVXXPE

SEQ ID NO: 63569 - protein, 32 aa, Artificial Sequence; identical to SEQ ID NO: 31373
  GFR-binding peptide
  MOD_RES (31)..(32): Xaa is C or S

SEQ ID NO: 63570 - protein, 40 aa, Artificial Sequence
  GFR-binding peptide
  MOD_RES (1)..(3)..(35)..(36): Xaa is C or S
XGXSEVVMDYHYKLVVNNASDKYLISIPSLRTPVXXTPPT

SEQ ID NO: 63571 - protein, 39 aa, Artificial Sequence
  GFR-binding peptide
  MOD_RES (1)..(35)..(36): Xaa is C or S
  MOD_RES (13)..(14)..(15)..(16)..(17): Xaa is A or G
  MOD_RES (18)..(19)..(20)..(21): Xaa is A or G or is absent
XSEVVMDRHKRLXXXXXXXXXYYLISTASLRTPVXXTPP

SEQ ID NO: 63572 - protein, 37 aa, Artificial Sequence; identical to SEQ ID NO: 4357
  GFR-binding peptide
  MOD_RES (2)..(4): Xaa is C or S
  MOD_RES (16)..(17)..(18)..(19)..(20): Xaa is A or G
  MOD_RES (21)..(22)..(23)..(24): Xaa is A or G or is absent

SEQ ID NO: 63573 - protein, 39 aa, Artificial Sequence
  GFR-binding peptide
  MOD_RES (1)..(33)..(34): Xaa is C or S
XSRVVMNEYKFKIVNSSDDLYLVSIPELKTPAXXPKPVH

SEQ ID NO: 63574 - protein, 40 aa, Artificial Sequence
  GFR-binding peptide
  MOD_RES (34)..(35): Xaa is C or S
  MOD_RES (12)..(13)..(14)..(15)..(16): Xaa is A or G
  MOD_RES (17)..(18)..(19)..(20): Xaa is A or G or is absent
SEVTMNEYKFKXXXXXXXXXLYLISIPEMKEPVXXPEPIG

SEQ ID NO: 63575 - protein, 40 aa, Artificial Sequence; identical to SEQ ID NO: 4363
  GFR-binding peptide
  MOD_RES (1)..(3)..(35)..(36): Xaa is C or S

SEQ ID NO: 63576 - protein, 36 aa, Artificial Sequence; identical to SEQ ID NO: 56293
  GFR-binding peptide
  MOD_RES (31)..(32): Xaa is C or S

SEQ ID NO: 63577 - protein, 36 aa, Artificial Sequence; identical to SEQ ID NO: 25421
  GFR-binding peptide
  MOD_RES (2)..(34)..(35): Xaa is C or S

SEQ ID NO: 63578 - protein, 35 aa, Artificial Sequence
  GFR-binding peptide
  MOD_RES (1)..(32)..(33): Xaa is C or S
XEEVIMEYKFKLLVRGNDLYLMSIPETKVPAXXTS

SEQ ID NO: 63579 - protein, 41 aa, Artificial Sequence; identical to SEQ ID NO: 25423
  GFR-binding peptide
  MOD_RES (2)..(36)..(37): Xaa is C or S
  MOD_RES (14)..(15)..(16)..(17)..(18): Xaa is A or G
  MOD_RES (19)..(20)..(21)..(22): Xaa is A or G or is absent

SEQ ID NO: 63580 - protein, 38 aa, Artificial Sequence; identical to SEQ ID NO: 31393
  GFR-binding peptide
  MOD_RES (2)..(4)..(36)..(37): Xaa is C or S

SEQ ID NO: 63581 - protein, 38 aa, Artificial Sequence
  GFR-binding peptide
  MOD_RES (2)..(4)..(35)..(36): Xaa is C or S
LXGXEEVIMEYKFKLLVRGNDLYLMSIPETKVPAXXTS

SEQ ID NO: 63582 - protein, 37 aa, Artificial Sequence; identical to SEQ ID NO: 31397
  GFR-binding peptide
  MOD_RES (1)..(35)..(36): Xaa is C or S
  MOD_RES (13)..(14)..(15)..(16)..(17): Xaa is A or G
  MOD_RES (18)..(19)..(20)..(21): Xaa is A or G or is absent

SEQ ID NO: 63583 - protein, 33 aa, Artificial Sequence
  GFR-binding peptide
  MOD_RES (31)..(32): Xaa is C or S
EVTMNPIKGYVVNKNEDFYLINIPSMKEPVXXP

SEQ ID NO: 63584 - protein, 37 aa, Artificial Sequence
  GFR-binding peptide
  MOD_RES (1)..(35)..(36): Xaa is C or S
  MOD_RES (13)..(14)..(15)..(16)..(17): Xaa is A or G
  MOD_RES (18)..(19)..(20)..(21): Xaa is A or G or is absent
XSEVTMNRHKRLXXXXXXXXXYYLISTASMKEPVXXP

SEQ ID NO: 63585 - protein, 35 aa, Artificial Sequence; identical to SEQ ID NO: 4369
  GFR-binding peptide
  MOD_RES (33)..(34): Xaa is C or S
  MOD_RES (11)..(12)..(13)..(14)..(15): Xaa is A or G
  MOD_RES (16)..(17)..(18)..(19): Xaa is A or G or is absent

SEQ ID NO: 63586 - protein, 35 aa, Artificial Sequence; identical to SEQ ID NO: 25432
  GFR-binding peptide
  MOD_RES (34)..(35): Xaa is C or S
  MOD_RES (12)..(13)..(14)..(15)..(16): Xaa is A or G
  MOD_RES (17)..(18)..(19)..(20): Xaa is A or G or is absent

SEQ ID NO: 63587 - protein, 38 aa, Artificial Sequence; identical to SEQ ID NO: 25433
  GFR-binding peptide
  MOD_RES (32)..(33): Xaa is C or S

SEQ ID NO: 63588 - protein, 37 aa, Artificial Sequence
  GFR-binding peptide
  MOD_RES (2)..(4): Xaa is C or S
  MOD_RES (16)..(17)..(18)..(19)..(20): Xaa is A or G
  MOD_RES (21)..(22)..(23)..(24): Xaa is A or G or is absent
RXAXSEVTMNPIKGYXXXXXXXXXFYLINIPSMKEPV

SEQ ID NO: 63589 - protein, 41 aa, Artificial Sequence; identical to SEQ ID NO: 25435
  GFR-binding peptide
  MOD_RES (2)..(4)..(38)..(39): Xaa is C or S
  MOD_RES (16)..(17)..(18)..(19)..(20): Xaa is A or G
  MOD_RES (21)..(22)..(23)..(24): Xaa is A or G or is absent

SEQ ID NO: 63590 - protein, 36 aa, Artificial Sequence
  GFR-binding peptide
  MOD_RES (1)..(3): Xaa is C or S
  MOD_RES (15)..(16)..(17)..(18)..(19): Xaa is A or G
  MOD_RES (20)..(21)..(22)..(23): Xaa is A or G or is absent
XAXSEVTMNRYKKLXXXXXXXXXFYLISIANMKEPV

SEQ ID NO: 63591 - protein, 37 aa, Artificial Sequence
  GFR-binding peptide
  MOD_RES (1)..(3)..(35)..(36): Xaa is C or S
XGXRDVVMGRHKRLIIQQKDNYYLMSTASMKTPTXXP

SEQ ID NO: 63592 - protein, 35 aa, Artificial Sequence; identical to SEQ ID NO: 11800
  GFR-binding peptide
  MOD_RES (2)..(4): Xaa is C or S

SEQ ID NO: 63593 - protein, 35 aa, Artificial Sequence; identical to SEQ ID NO: 4372
  GFR-binding peptide
  MOD_RES (35)..(35): Xaa is C or S
  MOD_RES (13)..(14)..(15)..(16)..(17): Xaa is A or G
  MOD_RES (18)..(19)..(20)..(21): Xaa is A or G or is absent

SEQ ID NO: 63594 - protein, 39 aa, Artificial Sequence
  GFR-binding peptide
  MOD_RES (2)..(36)..(37): Xaa is C or S
  MOD_RES (14)..(15)..(16)..(17)..(18): Xaa is A or G
  MOD_RES (19)..(20)..(21)..(22): Xaa is A or G or is absent
AXSEVTMNYHYKLXXXXXXXXXKYLISIPSMKEPVXXPE

SEQ ID NO: 63595 - protein, 35 aa, Artificial Sequence; identical to SEQ ID NO: 25440
  GFR-binding peptide
  MOD_RES (1)..(1): Xaa is C or S
  MOD_RES (14)..(15)..(16)..(17)..(18): Xaa is A or G
  MOD_RES (19)..(20)..(21)..(22): Xaa is A or G or is absent

SEQ ID NO: 63596 - protein, 39 aa, Artificial Sequence; identical to SEQ ID NO: 4377
  GFR-binding peptide
  MOD_RES (1)..(3)..(36)..(37): Xaa is C or S

SEQ ID NO: 63597 - protein, 39 aa, Artificial Sequence; identical to SEQ ID NO: 4379
  GFR-binding peptide
  MOD_RES (2)..(4)..(35)..(36): Xaa is C or S

SEQ ID NO: 63598 - protein, 37 aa, Artificial Sequence; identical to SEQ ID NO: 4380
  GFR-binding peptide
  MOD_RES (2)..(34)..(35): Xaa is C or S

SEQ ID NO: 63599 - protein, 40 aa, Artificial Sequence; identical to SEQ ID NO: 25443
  GFR-binding peptide
  MOD_RES (1)..(3)..(34)..(35): Xaa is C or S

SEQ ID NO: 63600 - protein, 35 aa, Artificial Sequence
  GFR-binding peptide
  MOD_RES (2)..(33)..(34): Xaa is C or S
KXSRVIMPIKGYVKPKRGVFYLINIPSLAQPVXXP

SEQ ID NO: 63601 - protein, 30 aa, Artificial Sequence; identical to SEQ ID NO: 25446
  GFR-binding peptide

SEQ ID NO: 63602 - protein, 39 aa, Artificial Sequence
  GFR-binding peptide
  MOD_RES (2)..(34)..(35): Xaa is C or S
GXAEVVMDRHKRLVVNNAADYYLISTASLRAPVXXSAPA

SEQ ID NO: 63603 - protein, 32 aa, Artificial Sequence; identical to SEQ ID NO: 31427
  GFR-binding peptide
  MOD_RES (31)..(32): Xaa is C or S

SEQ ID NO: 63604 - protein, 42 aa, Artificial Sequence; identical to SEQ ID NO: 4388
  GFR-binding peptide
  MOD_RES (2)..(4)..(38)..(39): Xaa is C or S
  MOD_RES (16)..(17)..(18)..(19)..(20): Xaa is A or G
  MOD_RES (21)..(22)..(23)..(24): Xaa is A or G or is absent

SEQ ID NO: 63605 - protein, 38 aa, Artificial Sequence; identical to SEQ ID NO: 25452
  GFR-binding peptide
  MOD_RES (1)..(3)..(35)..(36): Xaa is C or S

SEQ ID NO: 63606 - protein, 37 aa, Artificial Sequence; identical to SEQ ID NO: 25453
  GFR-binding peptide
  MOD_RES (2)..(36)..(37): Xaa is C or S
  MOD_RES (14)..(15)..(16)..(17)..(18): Xaa is A or G
  MOD_RES (19)..(20)..(21)..(22): Xaa is A or G or is absent

SEQ ID NO: 63607 - protein, 39 aa, Artificial Sequence
  GFR-binding peptide
  MOD_RES (2)..(33)..(34): Xaa is C or S
GXEEVIMRHKRLLLVRGNDYYLMSTASTKVPAXXTSPVR

SEQ ID NO: 63608 - protein, 43 aa, Artificial Sequence; identical to SEQ ID NO: 31428
  GFR-binding peptide
  MOD_RES (1)..(3)..(37)..(38): Xaa is C or S
  MOD_RES (15)..(16)..(17)..(18)..(19): Xaa is A or G
  MOD_RES (20)..(21)..(22)..(23): Xaa is A or G or is absent

SEQ ID NO: 63609 - protein, 40 aa, Artificial Sequence
  GFR-binding peptide
  MOD_RES (2)..(4)..(37)..(38): Xaa is C or S
  MOD_RES (15)..(16)..(17)..(18)..(19): Xaa is A or G
  MOD_RES (20)..(21)..(22)..(23): Xaa is A or G or is absent
SXKXSKVVMPIKGYXXXXXXXXXFYLINIPSLDQPVXXPS

SEQ ID NO: 63610 - protein, 41 aa, Artificial Sequence; identical to SEQ ID NO: 4398
  GFR-binding peptide
  MOD_RES (2)..(4)..(36)..(37): Xaa is C or S

SEQ ID NO: 63611 - protein, 36 aa, Artificial Sequence
  GFR-binding peptide
  MOD_RES (34)..(35): Xaa is C or S
  MOD_RES (12)..(13)..(14)..(15)..(16): Xaa is A or G
  MOD_RES (17)..(18)..(19)..(20): Xaa is A or G or is absent
AEVVMDRHKRLXXXXXXXXXYYLISTASLRAPVXXS

SEQ ID NO: 63612 - protein, 38 aa, Artificial Sequence; identical to SEQ ID NO: 4401
  GFR-binding peptide
  MOD_RES (1)..(3)..(34)..(35): Xaa is C or S

SEQ ID NO: 63613 - protein, 39 aa, Artificial Sequence; identical to SEQ ID NO: 25463
  GFR-binding peptide
  MOD_RES (34)..(35): Xaa is C or S
  MOD_RES (12)..(13)..(14)..(15)..(16): Xaa is A or G
  MOD_RES (17)..(18)..(19)..(20): Xaa is A or G or is absent

SEQ ID NO: 63614 - protein, 35 aa, Artificial Sequence; identical to SEQ ID NO: 31436
  GFR-binding peptide
  MOD_RES (2)..(33)..(34): Xaa is C or S

SEQ ID NO: 63615 - protein, 34 aa, Artificial Sequence; identical to SEQ ID NO: 31437
  GFR-binding peptide
  MOD_RES (1)..(33)..(34): Xaa is C or S

SEQ ID NO: 63616 - protein, 35 aa, Artificial Sequence; identical to SEQ ID NO: 31438
  GFR-binding peptide
  MOD_RES (32)..(33): Xaa is C or S

SEQ ID NO: 63617 - protein, 39 aa, Artificial Sequence; identical to SEQ ID NO: 25466
  GFR-binding peptide
  MOD_RES (2)..(4)..(37)..(38): Xaa is C or S
  MOD_RES (15)..(16)..(17)..(18)..(19): Xaa is A or G
  MOD_RES (20)..(21)..(22)..(23): Xaa is A or G or is absent

SEQ ID NO: 63618 - protein, 43 aa, Artificial Sequence; identical to SEQ ID NO: 4407
  GFR-binding peptide
  MOD_RES (2)..(37)..(38): Xaa is C or S
  MOD_RES (15)..(16)..(17)..(18)..(19): Xaa is A or G
  MOD_RES (20)..(21)..(22)..(23): Xaa is A or G or is absent

SEQ ID NO: 63619 - protein, 33 aa, Artificial Sequence; identical to SEQ ID NO: 31443
  GFR-binding peptide
  MOD_RES (33)..(33): Xaa is C or S

SEQ ID NO: 63620 - protein, 42 aa, Artificial Sequence; identical to SEQ ID NO: 25469
  GFR-binding peptide
  MOD_RES (2)..(37)..(38): Xaa is C or S
  MOD_RES (15)..(16)..(17)..(18)..(19): Xaa is A or G
  MOD_RES (20)..(21)..(22)..(23): Xaa is A or G or is absent

SEQ ID NO: 63621 - protein, 35 aa, Artificial Sequence; identical to SEQ ID NO: 25470
  GFR-binding peptide
  MOD_RES (2)..(33)..(34): Xaa is C or S

SEQ ID NO: 63622 - protein, 40 aa, Artificial Sequence
  GFR-binding peptide
  MOD_RES (1)..(3)..(35)..(36): Xaa is C or S
XAXSEVTMNEYKFKVVNKNEDLYLISIPEMKEPVXXPEPI

SEQ ID NO: 63623 - protein, 39 aa, Artificial Sequence
  GFR-binding peptide
  MOD_RES (33)..(34): Xaa is C or S
  MOD_RES (11)..(12)..(13)..(14)..(15): Xaa is A or G
  MOD_RES (16)..(17)..(18)..(19): Xaa is A or G or is absent
EVTMNPIKGYXXXXXXXXXFYLINIPSMKEPVXXPEPIG

SEQ ID NO: 63624 - protein, 38 aa, Artificial Sequence
  GFR-binding peptide
  MOD_RES (1)..(33)..(34): Xaa is C or S
XRDVVMGRHKRLIIQQKDNYYLMSTASMKTPTXXPGAS

SEQ ID NO: 63625 - protein, 41 aa, Artificial Sequence; identical to SEQ ID NO: 31448
  GFR-binding peptide
  MOD_RES (1)..(35)..(36): Xaa is C or S
  MOD_RES (13)..(14)..(15)..(16)..(17): Xaa is A or G
  MOD_RES (18)..(19)..(20)..(21): Xaa is A or G or is absent

SEQ ID NO: 63626 - protein, 41 aa, Artificial Sequence; identical to SEQ ID NO: 25475
  GFR-binding peptide
  MOD_RES (2)..(4)..(36)..(37): Xaa is C or S

SEQ ID NO: 63627 - protein, 35 aa, Artificial Sequence; identical to SEQ ID NO: 4414
  GFR-binding peptide
  MOD_RES (1)..(3)..(34)..(35): Xaa is C or S

SEQ ID NO: 63628 - protein, 35 aa, Artificial Sequence; identical to SEQ ID NO: 25477
  GFR-binding peptide
  MOD_RES (2)..(2): Xaa is C or S
  MOD_RES (14)..(15)..(16)..(17)..(18): Xaa is A or G
  MOD_RES (19)..(20)..(21)..(22): Xaa is A or G or is absent

SEQ ID NO: 63629 - protein, 40 aa, Artificial Sequence
  GFR-binding peptide
  MOD_RES (1)..(3)..(37)..(38): Xaa is C or S
  MOD_RES (15)..(16)..(17)..(18)..(19): Xaa is A or G
  MOD_RES (20)..(21)..(22)..(23): Xaa is A or G or is absent
XAXSEVTMNEYKFKXXXXXXXXXLYLISIPEMKEPVXXPE

SEQ ID NO: 63630 - protein, 37 aa, Artificial Sequence; identical to SEQ ID NO: 25480
  GFR-binding peptide
  MOD_RES (2)..(4)..(37): Xaa is C or S
  MOD_RES (15)..(16)..(17)..(18)..(19): Xaa is A or G
  MOD_RES (20)..(21)..(22)..(23): Xaa is A or G or is absent

SEQ ID NO: 63631 - protein, 37 aa, Artificial Sequence
  GFR-binding peptide
  MOD_RES (2)..(36)..(37): Xaa is C or S
  MOD_RES (14)..(15)..(16)..(17)..(18): Xaa is A or G
  MOD_RES (19)..(20)..(21)..(22): Xaa is A or G or is absent
GXRDVVMGRHKRLXXXXXXXXXYYLMSTASMKTPTXX

SEQ ID NO: 63632 - protein, 40 aa, Artificial Sequence; identical to SEQ ID NO: 4416
  GFR-binding peptide
  MOD_RES (35)..(36): Xaa is C or S
  MOD_RES (13)..(14)..(15)..(16)..(17): Xaa is A or G
  MOD_RES (18)..(19)..(20)..(21): Xaa is A or G or is absent

SEQ ID NO: 63633 - protein, 34 aa, Artificial Sequence; identical to SEQ ID NO: 56377
  GFR-binding peptide
  MOD_RES (31)..(32): Xaa is C or S

SEQ ID NO: 63634 - protein, 33 aa, Artificial Sequence; identical to SEQ ID NO: 25483
  GFR-binding peptide
  MOD_RES (31)..(32): Xaa is C or S

SEQ ID NO: 63635 - protein, 36 aa, Artificial Sequence; identical to SEQ ID NO: 4418
  GFR-binding peptide
  MOD_RES (2)..(35)..(36): Xaa is C or S
  MOD_RES (13)..(14)..(15)..(16)..(17): Xaa is A or G
  MOD_RES (18)..(19)..(20)..(21): Xaa is A or G or is absent

SEQ ID NO: 63636 - protein, 34 aa, Artificial Sequence; identical to SEQ ID NO: 4421
  GFR-binding peptide
  MOD_RES (2)..(4): Xaa is C or S

SEQ ID NO: 63637 - protein, 39 aa, Artificial Sequence; identical to SEQ ID NO: 25488
  GFR-binding peptide
  MOD_RES (33)..(34): Xaa is C or S
  MOD_RES (11)..(12)..(13)..(14)..(15): Xaa is A or G
  MOD_RES (16)..(17)..(18)..(19): Xaa is A or G or is absent

SEQ ID NO: 63638 - protein, 36 aa, Artificial Sequence
  GFR-binding peptide
  MOD_RES (2)..(33)..(34): Xaa is C or S
GXEEVIMEYKFKLLVRGNDLYLMSIPETKVPAXXTS

SEQ ID NO: 63639 - protein, 41 aa, Artificial Sequence; identical to SEQ ID NO: 4424
  GFR-binding peptide
  MOD_RES (1)..(3)..(37)..(38): Xaa is C or S
  MOD_RES (15)..(16)..(17)..(18)..(19): Xaa is A or G
  MOD_RES (20)..(21)..(22)..(23): Xaa is A or G or is absent

SEQ ID NO: 63640 - protein, 37 aa, Artificial Sequence
  GFR-binding peptide
  MOD_RES (31)..(32): Xaa is C or S
SKVVMPIKGYVKPTRGVFYLINIPSLDQPVXXPSASA

SEQ ID NO: 63641 - protein, 34 aa, Artificial Sequence; identical to SEQ ID NO: 25494
  GFR-binding peptide
  MOD_RES (31)..(32): Xaa is C or S

SEQ ID NO: 63642 - protein, 38 aa, Artificial Sequence; identical to SEQ ID NO: 25495
  GFR-binding peptide
  MOD_RES (2)..(4)..(35)..(36): Xaa is C or S

SEQ ID NO: 63643 - protein, 36 aa, Artificial Sequence; identical to SEQ ID NO: 4429
  GFR-binding peptide
  MOD_RES (1)..(34)..(35): Xaa is C or S
  MOD_RES (12)..(13)..(14)..(15)..(16): Xaa is A or G
  MOD_RES (17)..(18)..(19)..(20): Xaa is A or G or is absent

SEQ ID NO: 63644 - protein, 38 aa, Artificial Sequence
  GFR-binding peptide
  MOD_RES (1)..(3)..(37)..(38): Xaa is C or S
  MOD_RES (15)..(16)..(17)..(18)..(19): Xaa is A or G
  MOD_RES (20)..(21)..(22)..(23): Xaa is A or G or is absent
XGXRDVVMGRHKRLXXXXXXXXXYYLMSTASMKTPTXX

SEQ ID NO: 63645 - protein, 35 aa, Artificial Sequence; identical to SEQ ID NO: 4431
  GFR-binding peptide
  MOD_RES (2)..(4): Xaa is C or S

SEQ ID NO: 63646 - protein, 39 aa, Artificial Sequence
  GFR-binding peptide
  MOD_RES (1)..(3)..(35)..(36): Xaa is C or S
XGXSEVVMDYHYKLVVNNASDKYLISIPSLRTPVXXTPP

SEQ ID NO: 63647 - protein, 39 aa, Artificial Sequence; identical to SEQ ID NO: 56393
  GFR-binding peptide
  MOD_RES (1)..(35)..(36): Xaa is C or S
  MOD_RES (13)..(14)..(15)..(16)..(17): Xaa is A or G
  MOD_RES (18)..(19)..(20)..(21): Xaa is A or G or is absent

SEQ ID NO: 63648 - protein, 34 aa, Artificial Sequence; identical to SEQ ID NO: 4432
  GFR-binding peptide
  MOD_RES (2)..(2): Xaa is C or S
  MOD_RES (13)..(14)..(15)..(16)..(17): Xaa is A or G
  MOD_RES (18)..(19)..(20)..(21): Xaa is A or G or is absent

SEQ ID NO: 63649 - protein, 43 aa, Artificial Sequence; identical to SEQ ID NO: 25504
  GFR-binding peptide
  MOD_RES (2)..(4)..(37)..(38): Xaa is C or S

SEQ ID NO: 63650 - protein, 33 aa, Artificial Sequence; identical to SEQ ID NO: 4435
  GFR-binding peptide
  MOD_RES (1)..(32)..(33): Xaa is C or S

SEQ ID NO: 63651 - protein, 40 aa, Artificial Sequence; identical to SEQ ID NO: 31472
  GFR-binding peptide
  MOD_RES (1)..(3)..(37)..(38): Xaa is C or S
  MOD_RES (15)..(16)..(17)..(18)..(19): Xaa is A or G
  MOD_RES (20)..(21)..(22)..(23): Xaa is A or G or is absent

SEQ ID NO: 63652 - protein, 38 aa, Artificial Sequence; identical to SEQ ID NO: 4437
  GFR-binding peptide
  MOD_RES (1)..(3)..(36)..(37): Xaa is C or S

SEQ ID NO: 63653 - protein, 36 aa, Artificial Sequence; identical to SEQ ID NO: 4439
  GFR-binding peptide
  MOD_RES (32)..(33): Xaa is C or S

SEQ ID NO: 63654 - protein, 39 aa, Artificial Sequence; identical to SEQ ID NO: 4440
  GFR-binding peptide
  MOD_RES (2)..(34)..(35): Xaa is C or S

SEQ ID NO: 63655 - protein, 34 aa, Artificial Sequence; identical to SEQ ID NO: 4441
  GFR-binding peptide
  MOD_RES (1)..(34): Xaa is C or S

SEQ ID NO: 63656 - protein, 35 aa, Artificial Sequence; identical to SEQ ID NO: 4442
  GFR-binding peptide
  MOD_RES (33)..(34): Xaa is C or S
  MOD_RES (11)..(12)..(13)..(14)..(15): Xaa is A or G
  MOD_RES (16)..(17)..(18)..(19): Xaa is A or G or is absent

SEQ ID NO: 63657 - protein, 30 aa, Artificial Sequence; identical to SEQ ID NO: 31478
  GFR-binding peptide

SEQ ID NO: 63658 - protein, 40 aa, Artificial Sequence; identical to SEQ ID NO: 25521
  GFR-binding peptide
  MOD_RES (1)..(3)..(35)..(36): Xaa is C or S

SEQ ID NO: 63659 - protein, 35 aa, Artificial Sequence
  GFR-binding peptide
  MOD_RES (2)..(4)..(35): Xaa is C or S
LXGXEEVIMEYKFKLLVRGNDLYLMSIPETKVPAX

SEQ ID NO: 63660 - protein, 38 aa, Artificial Sequence; identical to SEQ ID NO: 4446
  GFR-binding peptide
  MOD_RES (34)..(35): Xaa is C or S
  MOD_RES (12)..(13)..(14)..(15)..(16): Xaa is A or G
  MOD_RES (17)..(18)..(19)..(20): Xaa is A or G or is absent

SEQ ID NO: 63661 - protein, 35 aa, Artificial Sequence; identical to SEQ ID NO: 25527
  GFR-binding peptide
  MOD_RES (1)..(3): Xaa is C or S
  MOD_RES (14)..(15)..(16)..(17)..(18): Xaa is A or G
  MOD_RES (19)..(20)..(21)..(22): Xaa is A or G or is absent

SEQ ID NO: 63662 - protein, 43 aa, Artificial Sequence; identical to SEQ ID NO: 31493
  GFR-binding peptide
  MOD_RES (1)..(3)..(37)..(38): Xaa is C or S
  MOD_RES (15)..(16)..(17)..(18)..(19): Xaa is A or G
  MOD_RES (20)..(21)..(22)..(23): Xaa is A or G or is absent

SEQ ID NO: 63663 - protein, 36 aa, Artificial Sequence; identical to SEQ ID NO: 25528
  GFR-binding peptide
  MOD_RES (1)..(34)..(35): Xaa is C or S
  MOD_RES (12)..(13)..(14)..(15)..(16): Xaa is A or G
  MOD_RES (17)..(18)..(19)..(20): Xaa is A or G or is absent

SEQ ID NO: 63664 - protein, 33 aa, Artificial Sequence; identical to SEQ ID NO: 4452
  GFR-binding peptide
  MOD_RES (31)..(32): Xaa is C or S

SEQ ID NO: 63665 - protein, 32 aa, Artificial Sequence; identical to SEQ ID NO: 4453
  GFR-binding peptide
  MOD_RES (11)..(12)..(13)..(14)..(15): Xaa is A or G
  MOD_RES (16)..(17)..(18)..(19): Xaa is A or G or is absent

SEQ ID NO: 63666 - protein, 42 aa, Artificial Sequence
  GFR-binding peptide
  MOD_RES (2)..(36)..(37): Xaa is C or S
  MOD_RES (14)..(15)..(16)..(17)..(18): Xaa is A or G
  MOD_RES (19)..(20)..(21)..(22): Xaa is A or G or is absent
AXSEVTMNEYKFKXXXXXXXXXLYLISIPEMKEPVXXPEPIG

SEQ ID NO: 63667 - protein, 36 aa, Artificial Sequence
  GFR-binding peptide
  MOD_RES (1)..(3)..(35)..(36): Xaa is C or S
XAXSEVTMNEYKFKVVNKNEDLYLISIPEMKEPVXX

SEQ ID NO: 63668 - protein, 40 aa, Artificial Sequence; identical to SEQ ID NO: 31500
  GFR-binding peptide
  MOD_RES (1)..(36)..(37): Xaa is C or S
  MOD_RES (14)..(15)..(16)..(17)..(18): Xaa is A or G
  MOD_RES (19)..(20)..(21)..(22): Xaa is A or G or is absent

SEQ ID NO: 63669 - protein, 35 aa, Artificial Sequence; identical to SEQ ID NO: 25537
  GFR-binding peptide
  MOD_RES (31)..(32): Xaa is C or S

SEQ ID NO: 63670 - protein, 31 aa, Artificial Sequence; identical to SEQ ID NO: 25540
  GFR-binding peptide
  MOD_RES (31)..(31): Xaa is C or S

SEQ ID NO: 63671 - protein, 32 aa, Artificial Sequence; identical to SEQ ID NO: 25541
  GFR-binding peptide
  MOD_RES (11)..(12)..(13)..(14)..(15): Xaa is A or G
  MOD_RES (16)..(17)..(18)..(19): Xaa is A or G or is absent

SEQ ID NO: 63672 - protein, 31 aa, Artificial Sequence
  GFR-binding peptide
  MOD_RES (31)..(31): Xaa is C or S
EEVIMEYKFKLLVRGNDLYLMSIPETKVPAX

SEQ ID NO: 63673 - protein, 36 aa, Artificial Sequence; identical to SEQ ID NO: 25543
  GFR-binding peptide
  MOD_RES (33)..(34): Xaa is C or S
  MOD_RES (11)..(12)..(13)..(14)..(15): Xaa is A or G
  MOD_RES (16)..(17)..(18)..(19): Xaa is A or G or is absent

SEQ ID NO: 63674 - protein, 33 aa, Artificial Sequence; identical to SEQ ID NO: 25544
  GFR-binding peptide
  MOD_RES (32)..(33): Xaa is C or S

SEQ ID NO: 63675 - protein, 37 aa, Artificial Sequence; identical to SEQ ID NO: 25545
  GFR-binding peptide
  MOD_RES (32)..(33): Xaa is C or S

SEQ ID NO: 63676 - protein, 34 aa, Artificial Sequence; identical to SEQ ID NO: 4461
  GFR-binding peptide
  MOD_RES (1)..(3)..(34): Xaa is C or S

SEQ ID NO: 63677 - protein, 37 aa, Artificial Sequence; identical to SEQ ID NO: 25547
  GFR-binding peptide
  MOD_RES (2)..(4)..(36)..(37): Xaa is C or S

SEQ ID NO: 63678 - protein, 38 aa, Artificial Sequence; identical to SEQ ID NO: 25549
  GFR-binding peptide
  MOD_RES (32)..(33): Xaa is C or S

SEQ ID NO: 63679 - protein, 41 aa, Artificial Sequence; identical to SEQ ID NO: 25550
  GFR-binding peptide
  MOD_RES (2)..(4)..(37)..(38): Xaa is C or S
  MOD_RES (15)..(16)..(17)..(18)..(19): Xaa is A or G
  MOD_RES (20)..(21)..(22)..(23): Xaa is A or G or is absent

SEQ ID NO: 63680 - protein, 43 aa, Artificial Sequence; identical to SEQ ID NO: 31507
  GFR-binding peptide
  MOD_RES (1)..(3)..(37)..(38): Xaa is C or S
  MOD_RES (15)..(16)..(17)..(18)..(19): Xaa is A or G
  MOD_RES (20)..(21)..(22)..(23): Xaa is A or G or is absent

SEQ ID NO: 63681 - protein, 35 aa, Artificial Sequence; identical to SEQ ID NO: 31510
  GFR-binding peptide
  MOD_RES (34)..(35): Xaa is C or S
  MOD_RES (12)..(13)..(14)..(15)..(16): Xaa is A or G
  MOD_RES (17)..(18)..(19)..(20): Xaa is A or G or is absent

SEQ ID NO: 63682 - protein, 37 aa, Artificial Sequence; identical to SEQ ID NO: 31513
  GFR-binding peptide
  MOD_RES (31)..(32): Xaa is C or S

SEQ ID NO: 63683 - protein, 35 aa, Artificial Sequence; identical to SEQ ID NO: 4464
  GFR-binding peptide
  MOD_RES (1)..(33)..(34): Xaa is C or S

SEQ ID NO: 63684 - protein, 34 aa, Artificial Sequence
  GFR-binding peptide
  MOD_RES (32)..(33): Xaa is C or S
RDVVMGYHYKLIIQQKDNKYLMSIPSMKTPTXXP

SEQ ID NO: 63685 - protein, 39 aa, Artificial Sequence; identical to SEQ ID NO: 25554
  GFR-binding peptide
  MOD_RES (1)..(3)..(36)..(37): Xaa is C or S
  MOD_RES (14)..(15)..(16)..(17)..(18): Xaa is A or G
  MOD_RES (19)..(20)..(21)..(22): Xaa is A or G or is absent

SEQ ID NO: 63686 - protein, 35 aa, Artificial Sequence; identical to SEQ ID NO: 25555
  GFR-binding peptide
  MOD_RES (1)..(34)..(35): Xaa is C or S
  MOD_RES (12)..(13)..(14)..(15)..(16): Xaa is A or G
  MOD_RES (17)..(18)..(19)..(20): Xaa is A or G or is absent

SEQ ID NO: 63687 - protein, 39 aa, Artificial Sequence; identical to SEQ ID NO: 56442
  GFR-binding peptide
  MOD_RES (2)..(4)..(35)..(36): Xaa is C or S

SEQ ID NO: 63688 - protein, 34 aa, Artificial Sequence; identical to SEQ ID NO: 4469
  GFR-binding peptide
  MOD_RES (13)..(14)..(15)..(16)..(17): Xaa is A or G
  MOD_RES (18)..(19)..(20)..(21): Xaa is A or G or is absent

SEQ ID NO: 63689 - protein, 38 aa, Artificial Sequence; identical to SEQ ID NO: 4470
  GFR-binding peptide
  MOD_RES (2)..(35)..(36): Xaa is C or S
  MOD_RES (13)..(14)..(15)..(16)..(17): Xaa is A or G
  MOD_RES (18)..(19)..(20)..(21): Xaa is A or G or is absent

SEQ ID NO: 63690 - protein, 39 aa, Artificial Sequence; identical to SEQ ID NO: 4471
  GFR-binding peptide
  MOD_RES (34)..(35): Xaa is C or S
  MOD_RES (12)..(13)..(14)..(15)..(16): Xaa is A or G
  MOD_RES (17)..(18)..(19)..(20): Xaa is A or G or is absent

SEQ ID NO: 63691 - protein, 40 aa, Artificial Sequence; identical to SEQ ID NO: 4474
  GFR-binding peptide
  MOD_RES (2)..(4)..(39)..(40): Xaa is C or S
  MOD_RES (17)..(18)..(19)..(20)..(21): Xaa is A or G
  MOD_RES (22)..(23)..(24)..(25): Xaa is A or G or is absent

SEQ ID NO: 63692 - protein, 42 aa, Artificial Sequence; identical to SEQ ID NO: 25560
  GFR-binding peptide
  MOD_RES (2)..(4)..(38)..(39): Xaa is C or S
  MOD_RES (16)..(17)..(18)..(19)..(20): Xaa is A or G
  MOD_RES (21)..(22)..(23)..(24): Xaa is A or G or is absent

SEQ ID NO: 63693 - protein, 38 aa, Artificial Sequence; identical to SEQ ID NO: 25561
  GFR-binding peptide
  MOD_RES (2)..(34)..(35): Xaa is C or S

SEQ ID NO: 63694 - protein, 39 aa, Artificial Sequence; identical to SEQ ID NO: 4475
  GFR-binding peptide
  MOD_RES (1)..(34)..(35): Xaa is C or S
  MOD_RES (12)..(13)..(14)..(15)..(16): Xaa is A or G
  MOD_RES (17)..(18)..(19)..(20): Xaa is A or G or is absent

SEQ ID NO: 63695 - protein, 32 aa, Artificial Sequence; identical to SEQ ID NO: 25563
  GFR-binding peptide
  MOD_RES (31)..(32): Xaa is C or S

SEQ ID NO: 63696 - protein, 36 aa, Artificial Sequence; identical to SEQ ID NO: 4476
  GFR-binding peptide
  MOD_RES (33)..(34): Xaa is C or S
  MOD_RES (11)..(12)..(13)..(14)..(15): Xaa is A or G
  MOD_RES (16)..(17)..(18)..(19): Xaa is A or G or is absent

SEQ ID NO: 63697 - protein, 40 aa, Artificial Sequence; identical to SEQ ID NO: 25566
  GFR-binding peptide
  MOD_RES (1)..(35)..(36): Xaa is C or S
  MOD_RES (13)..(14)..(15)..(16)..(17): Xaa is A or G
  MOD_RES (18)..(19)..(20)..(21): Xaa is A or G or is absent

SEQ ID NO: 63698 - protein, 40 aa, Artificial Sequence
  GFR-binding peptide
  MOD_RES (34)..(35): Xaa is C or S
  MOD_RES (12)..(13)..(14)..(15)..(16): Xaa is A or G
  MOD_RES (17)..(18)..(19)..(20): Xaa is A or G or is absent
AEVVMDRHKRLXXXXXXXXXYYLISTASLRAPVXXSAPAA

SEQ ID NO: 63699 - protein, 35 aa, Artificial Sequence
  GFR-binding peptide
  MOD_RES (1)..(33)..(34): Xaa is C or S
XSEVVMDYHYKLVVNNASDKYLISIPSLRTPVXXT

SEQ ID NO: 63700 - protein, 36 aa, Artificial Sequence; identical to SEQ ID NO: 56458
  GFR-binding peptide
  MOD_RES (33)..(34): Xaa is C or S
  MOD_RES (11)..(12)..(13)..(14)..(15): Xaa is A or G
  MOD_RES (16)..(17)..(18)..(19): Xaa is A or G or is absent

SEQ ID NO: 63701 - protein, 38 aa, Artificial Sequence; identical to SEQ ID NO: 4477
  GFR-binding peptide
  MOD_RES (2)..(4)..(38): Xaa is C or S
  MOD_RES (16)..(17)..(18)..(19)..(20): Xaa is A or G
  MOD_RES (21)..(22)..(23)..(24): Xaa is A or G or is absent

SEQ ID NO: 63702 - protein, 42 aa, Artificial Sequence
  GFR-binding peptide
  MOD_RES (1)..(3)..(37)..(38): Xaa is C or S
  MOD_RES (15)..(16)..(17)..(18)..(19): Xaa is A or G
  MOD_RES (20)..(21)..(22)..(23): Xaa is A or G or is absent
XGXESVAMGRHKRLXXXXXXXXXYYLISTASLKTPVXXAKSA

SEQ ID NO: 63703 - protein, 37 aa, Artificial Sequence; identical to SEQ ID NO: 31526
  GFR-binding peptide
  MOD_RES (2)..(4)..(35)..(36): Xaa is C or S

SEQ ID NO: 63704 - protein, 39 aa, Artificial Sequence; identical to SEQ ID NO: 31527
  GFR-binding peptide
  MOD_RES (2)..(4)..(36)..(37): Xaa is C or S

SEQ ID NO: 63705 - protein, 38 aa, Artificial Sequence; identical to SEQ ID NO: 11913
  GFR-binding peptide
  MOD_RES (1)..(3)..(35)..(36): Xaa is C or S

SEQ ID NO: 63706 - protein, 39 aa, Artificial Sequence; identical to SEQ ID NO: 25569
  GFR-binding peptide
  MOD_RES (34)..(35): Xaa is C or S
  MOD_RES (12)..(13)..(14)..(15)..(16): Xaa is A or G
  MOD_RES (17)..(18)..(19)..(20): Xaa is A or G or is absent

SEQ ID NO: 63707 - protein, 40 aa, Artificial Sequence
  GFR-binding peptide
  MOD_RES (1)..(3)..(37)..(38): Xaa is C or S
  MOD_RES (15)..(16)..(17)..(18)..(19): Xaa is A or G
  MOD_RES (20)..(21)..(22)..(23): Xaa is A or G or is absent
XAXSEVTMNRHKRLXXXXXXXXXYYLISTASMKEPVXXPE

SEQ ID NO: 63708 - protein, 32 aa, Artificial Sequence
  GFR-binding peptide
  MOD_RES (11)..(12)..(13)..(14)..(15): Xaa is A or G
  MOD_RES (16)..(17)..(18)..(19): Xaa is A or G or is absent
EEVIMEYKFKXXXXXXXXXLYLMSIPETKVPA

SEQ ID NO: 63709 - protein, 42 aa, Artificial Sequence; identical to SEQ ID NO: 25571
  GFR-binding peptide
  MOD_RES (2)..(4)..(38)..(39): Xaa is C or S
  MOD_RES (16)..(17)..(18)..(19)..(20): Xaa is A or G
  MOD_RES (21)..(22)..(23)..(24): Xaa is A or G or is absent

SEQ ID NO: 63710 - protein, 40 aa, Artificial Sequence; identical to SEQ ID NO: 4482
  GFR-binding peptide
  MOD_RES (2)..(35)..(36): Xaa is C or S
  MOD_RES (13)..(14)..(15)..(16)..(17): Xaa is A or G
  MOD_RES (18)..(19)..(20)..(21): Xaa is A or G or is absent

SEQ ID NO: 63711 - protein, 39 aa, Artificial Sequence; identical to SEQ ID NO: 4484
  GFR-binding peptide
  MOD_RES (33)..(34): Xaa is C or S
  MOD_RES (11)..(12)..(13)..(14)..(15): Xaa is A or G
  MOD_RES (16)..(17)..(18)..(19): Xaa is A or G or is absent

SEQ ID NO: 63712 - protein, 40 aa, Artificial Sequence; identical to SEQ ID NO: 25576
  GFR-binding peptide
  MOD_RES (2)..(4)..(35)..(36): Xaa is C or S

SEQ ID NO: 63713 - protein, 36 aa, Artificial Sequence; identical to SEQ ID NO: 4487
  GFR-binding peptide
  MOD_RES (33)..(34): Xaa is C or S
  MOD_RES (11)..(12)..(13)..(14)..(15): Xaa is A or G
  MOD_RES (16)..(17)..(18)..(19): Xaa is A or G or is absent

SEQ ID NO: 63714 - protein, 39 aa, Artificial Sequence
  GFR-binding peptide
  MOD_RES (1)..(3)..(34)..(35): Xaa is C or S
XKXSRVIMPIKGYVKPKRGVFYLINIPSLAQPVXXPAAS

SEQ ID NO: 63715 - protein, 36 aa, Artificial Sequence; identical to SEQ ID NO: 56466
  GFR-binding peptide
  MOD_RES (1)..(33)..(34): Xaa is C or S

SEQ ID NO: 63716 - protein, 38 aa, Artificial Sequence; identical to SEQ ID NO: 31543
  GFR-binding peptide
  MOD_RES (1)..(33)..(34): Xaa is C or S

SEQ ID NO: 63717 - protein, 39 aa, Artificial Sequence
  GFR-binding peptide
  MOD_RES (33)..(34): Xaa is C or S
  MOD_RES (11)..(12)..(13)..(14)..(15): Xaa is A or G
  MOD_RES (16)..(17)..(18)..(19): Xaa is A or G or is absent
EEVIMYHYKLXXXXXXXXXKYLMSIPSTKVPAXXTSPVR

SEQ ID NO: 63718 - protein, 42 aa, Artificial Sequence; identical to SEQ ID NO: 31545
  GFR-binding peptide
  MOD_RES (1)..(3)..(37)..(38): Xaa is C or S
  MOD_RES (15)..(16)..(17)..(18)..(19): Xaa is A or G
  MOD_RES (20)..(21)..(22)..(23): Xaa is A or G or is absent

SEQ ID NO: 63719 - protein, 36 aa, Artificial Sequence; identical to SEQ ID NO: 31546
  GFR-binding peptide
  MOD_RES (2)..(36): Xaa is C or S
  MOD_RES (14)..(15)..(16)..(17)..(18): Xaa is A or G
  MOD_RES (19)..(20)..(21)..(22): Xaa is A or G or is absent

SEQ ID NO: 63720 - protein, 42 aa, Artificial Sequence
  GFR-binding peptide
  MOD_RES (2)..(4)..(38)..(39): Xaa is C or S
  MOD_RES (16)..(17)..(18)..(19)..(20): Xaa is A or G
  MOD_RES (21)..(22)..(23)..(24): Xaa is A or G or is absent
SXGXRDVVMGEYKFKXXXXXXXXXLYLMSIPEMKTPTXXPGA

SEQ ID NO: 63721 - protein, 41 aa, Artificial Sequence; identical to SEQ ID NO: 25583
  GFR-binding peptide
  MOD_RES (1)..(3)..(36)..(37): Xaa is C or S
  MOD_RES (14)..(15)..(16)..(17)..(18): Xaa is A or G
  MOD_RES (19)..(20)..(21)..(22): Xaa is A or G or is absent

SEQ ID NO: 63722 - protein, 41 aa, Artificial Sequence
  GFR-binding peptide
  MOD_RES (2)..(4)..(36)..(37): Xaa is C or S
RXAXSEVTMNRYKKLVVNKNEDFYLISIANMKEPVXXPEPI

SEQ ID NO: 63723 - protein, 36 aa, Artificial Sequence; identical to SEQ ID NO: 25587
  GFR-binding peptide
  MOD_RES (34)..(35): Xaa is C or S
  MOD_RES (12)..(13)..(14)..(15)..(16): Xaa is A or G
  MOD_RES (17)..(18)..(19)..(20): Xaa is A or G or is absent

SEQ ID NO: 63724 - protein, 35 aa, Artificial Sequence; identical to SEQ ID NO: 25589
  GFR-binding peptide
  MOD_RES (32)..(33): Xaa is C or S

SEQ ID NO: 63725 - protein, 34 aa, Artificial Sequence; identical to SEQ ID NO: 25591
  GFR-binding peptide
  MOD_RES (32)..(33): Xaa is C or S

SEQ ID NO: 63726 - protein, 36 aa, Artificial Sequence
  GFR-binding peptide
  MOD_RES (1)..(3): Xaa is C or S
  MOD_RES (15)..(16)..(17)..(18)..(19): Xaa is A or G
  MOD_RES (20)..(21)..(22)..(23): Xaa is A or G or is absent
XGXRDVVMGEYKFKXXXXXXXXXLYLMSIPEMKTPT

SEQ ID NO: 63727 - protein, 37 aa, Artificial Sequence; identical to SEQ ID NO: 4499
  GFR-binding peptide
  MOD_RES (2)..(34)..(35): Xaa is C or S

SEQ ID NO: 63728 - protein, 38 aa, Artificial Sequence
  GFR-binding peptide
  MOD_RES (1)..(3)..(37)..(38): Xaa is C or S
  MOD_RES (15)..(16)..(17)..(18)..(19): Xaa is A or G
  MOD_RES (20)..(21)..(22)..(23): Xaa is A or G or is absent
XAXSEVTMNRYKKLXXXXXXXXXFYLISIANMKEPVXX

SEQ ID NO: 63729 - protein, 38 aa, Artificial Sequence; identical to SEQ ID NO: 31559
  GFR-binding peptide
  MOD_RES (2)..(36)..(37): Xaa is C or S
  MOD_RES (14)..(15)..(16)..(17)..(18): Xaa is A or G
  MOD_RES (19)..(20)..(21)..(22): Xaa is A or G or is absent

SEQ ID NO: 63730 - protein, 34 aa, Artificial Sequence; identical to SEQ ID NO: 4501
  GFR-binding peptide
  MOD_RES (2)..(2): Xaa is C or S
  MOD_RES (13)..(14)..(15)..(16)..(17): Xaa is A or G
  MOD_RES (18)..(19)..(20)..(21): Xaa is A or G or is absent

SEQ ID NO: 63731 - protein, 39 aa, Artificial Sequence
  GFR-binding peptide
  MOD_RES (2)..(34)..(35): Xaa is C or S
GXRDVVMGEYKFKIIQQKDNLYLMSIPEMKTPTXXPGAS

SEQ ID NO: 63732 - protein, 36 aa, Artificial Sequence; identical to SEQ ID NO: 31561
  GFR-binding peptide
  MOD_RES (1)..(34)..(35): Xaa is C or S

SEQ ID NO: 63733 - protein, 40 aa, Artificial Sequence; identical to SEQ ID NO: 25600
  GFR-binding peptide
  MOD_RES (2)..(4)..(36)..(37): Xaa is C or S

SEQ ID NO: 63734 - protein, 39 aa, Artificial Sequence; identical to SEQ ID NO: 31565
  GFR-binding peptide
  MOD_RES (1)..(3)..(37)..(38): Xaa is C or S
  MOD_RES (15)..(16)..(17)..(18)..(19): Xaa is A or G
  MOD_RES (20)..(21)..(22)..(23): Xaa is A or G or is absent

SEQ ID NO: 63735 - protein, 37 aa, Artificial Sequence
  GFR-binding peptide
  MOD_RES (1)..(35)..(36): Xaa is C or S
  MOD_RES (13)..(14)..(15)..(16)..(17): Xaa is A or G
  MOD_RES (18)..(19)..(20)..(21): Xaa is A or G or is absent
XRDVVMGEYKFKXXXXXXXXXLYLMSIPEMKTPTXXP

SEQ ID NO: 63736 - protein, 34 aa, Artificial Sequence; identical to SEQ ID NO: 31567
  GFR-binding peptide
  MOD_RES (2)..(34): Xaa is C or S

SEQ ID NO: 63737 - protein, 35 aa, Artificial Sequence
  GFR-binding peptide
  MOD_RES (1)..(3)..(35): Xaa is C or S
XGXSEVVMDEYKFKVVNNASDLYLISIPELRTPVX

SEQ ID NO: 63738 - protein, 41 aa, Artificial Sequence; identical to SEQ ID NO: 4507
  GFR-binding peptide
  MOD_RES (1)..(3)..(35)..(36): Xaa is C or S

SEQ ID NO: 63739 - protein, 36 aa, Artificial Sequence; identical to SEQ ID NO: 31568
  GFR-binding peptide
  MOD_RES (1)..(33)..(34): Xaa is C or S

SEQ ID NO: 63740 - protein, 42 aa, Artificial Sequence; identical to SEQ ID NO: 4508
  GFR-binding peptide
  MOD_RES (1)..(3)..(37)..(38): Xaa is C or S
  MOD_RES (15)..(16)..(17)..(18)..(19): Xaa is A or G
  MOD_RES (20)..(21)..(22)..(23): Xaa is A or G or is absent

SEQ ID NO: 63741 - protein, 38 aa, Artificial Sequence; identical to SEQ ID NO: 31569
  GFR-binding peptide
  MOD_RES (34)..(35): Xaa is C or S
  MOD_RES (12)..(13)..(14)..(15)..(16): Xaa is A or G
  MOD_RES (17)..(18)..(19)..(20): Xaa is A or G or is absent

SEQ ID NO: 63742 - protein, 35 aa, Artificial Sequence; identical to SEQ ID NO: 4513
  GFR-binding peptide
  MOD_RES (34)..(35): Xaa is C or S
  MOD_RES (12)..(13)..(14)..(15)..(16): Xaa is A or G
  MOD_RES (17)..(18)..(19)..(20): Xaa is A or G or is absent

SEQ ID NO: 63743 - protein, 37 aa, Artificial Sequence; identical to SEQ ID NO: 4515
  GFR-binding peptide
  MOD_RES (2)..(34): Xaa is C or S

SEQ ID NO: 63744 - protein, 37 aa, Artificial Sequence; identical to SEQ ID NO: 4516
  GFR-binding peptide
  MOD_RES (33)..(34): Xaa is C or S
  MOD_RES (11)..(12)..(13)..(14)..(15): Xaa is A or G
  MOD_RES (16)..(17)..(18)..(19): Xaa is A or G or is absent

SEQ ID NO: 63745 - protein, 43 aa, Artificial Sequence; identical to SEQ ID NO: 4517
  GFR-binding peptide
  MOD_RES (2)..(4)..(38): Xaa is C or S
  MOD_RES (16)..(17)..(18)..(19)..(20): Xaa is A or G
  MOD_RES (21)..(22)..(23)..(24): Xaa is A or G or is absent

SEQ ID NO: 63746 - protein, 37 aa, Artificial Sequence; identical to SEQ ID NO: 4518
  GFR-binding peptide
  MOD_RES (1)..(3)..(35)..(36): Xaa is C or S

SEQ ID NO: 63747 - protein, 36 aa, Artificial Sequence; identical to SEQ ID NO: 25612
  GFR-binding peptide
  MOD_RES (1)..(3): Xaa is C or S
  MOD_RES (15)..(16)..(17)..(18)..(19): Xaa is A or G
  MOD_RES (20)..(21)..(22)..(23): Xaa is A or G or is absent

SEQ ID NO: 63748 - protein, 41 aa, Artificial Sequence; identical to SEQ ID NO: 25613
  GFR-binding peptide
  MOD_RES (1)..(3)..(35)..(36): Xaa is C or S

SEQ ID NO: 63749 - protein, 36 aa, Artificial Sequence; identical to SEQ ID NO: 31583
  GFR-binding peptide
  MOD_RES (34)..(35): Xaa is C or S
  MOD_RES (12)..(13)..(14)..(15)..(16): Xaa is A or G
  MOD_RES (17)..(18)..(19)..(20): Xaa is A or G or is absent

SEQ ID NO: 63750 - protein, 38 aa, Artificial Sequence
  GFR-binding peptide
  MOD_RES (2)..(36)..(37): Xaa is C or S
  MOD_RES (14)..(15)..(16)..(17)..(18): Xaa is A or G
  MOD_RES (19)..(20)..(21)..(22): Xaa is A or G or is absent
AXSEVTMNPIKGYXXXXXXXXXFYLINIPSMKEPVXXP

SEQ ID NO: 63751 - protein, 33 aa, Artificial Sequence
  GFR-binding peptide
  MOD_RES (2)..(2): Xaa is C or S
AXSEVTMNYHYKLVVNKNEDKYLISIPSMKEPV

SEQ ID NO: 63752 - protein, 35 aa, Artificial Sequence; identical to SEQ ID NO: 4526
  GFR-binding peptide
  MOD_RES (32)..(33): Xaa is C or S

SEQ ID NO: 63753 - protein, 37 aa, Artificial Sequence; identical to SEQ ID NO: 4527
  GFR-binding peptide
  MOD_RES (1)..(3)..(37): Xaa is C or S
  MOD_RES (15)..(16)..(17)..(18)..(19): Xaa is A or G
  MOD_RES (20)..(21)..(22)..(23): Xaa is A or G or is absent

SEQ ID NO: 63754 - protein, 36 aa, Artificial Sequence; identical to SEQ ID NO: 25618
  GFR-binding peptide
  MOD_RES (2)..(36): Xaa is C or S
  MOD_RES (14)..(15)..(16)..(17)..(18): Xaa is A or G
  MOD_RES (19)..(20)..(21)..(22): Xaa is A or G or is absent

SEQ ID NO: 63755 - protein, 37 aa, Artificial Sequence
  GFR-binding peptide
  MOD_RES (2)..(4)..(35)..(36): Xaa is C or S
SXKXSKVIMPIKGYIKPTKGIFYLINIPSLDQSVXXP

SEQ ID NO: 63756 - protein, 36 aa, Artificial Sequence; identical to SEQ ID NO: 25620
  GFR-binding peptide
  MOD_RES (31)..(32): Xaa is C or S

SEQ ID NO: 63757 - protein, 36 aa, Artificial Sequence
  GFR-binding peptide
  MOD_RES (1)..(3): Xaa is C or S
  MOD_RES (15)..(16)..(17)..(18)..(19): Xaa is A or G
  MOD_RES (20)..(21)..(22)..(23): Xaa is A or G or is absent
XGXRDVVMGRHKRLXXXXXXXXXYYLMSTASMKTPT

SEQ ID NO: 63758 - protein, 38 aa, Artificial Sequence; identical to SEQ ID NO: 31594
  GFR-binding peptide
  MOD_RES (32)..(33): Xaa is C or S

SEQ ID NO: 63759 - protein, 38 aa, Artificial Sequence; identical to SEQ ID NO: 4528
  GFR-binding peptide
  MOD_RES (2)..(4)..(36)..(37): Xaa is C or S

SEQ ID NO: 63760 - protein, 34 aa, Artificial Sequence; identical to SEQ ID NO: 31596
  GFR-binding peptide
  MOD_RES (33)..(34): Xaa is C or S
  MOD_RES (11)..(12)..(13)..(14)..(15): Xaa is A or G
  MOD_RES (16)..(17)..(18)..(19): Xaa is A or G or is absent

SEQ ID NO: 63761 - protein, 34 aa, Artificial Sequence; identical to SEQ ID NO: 31597
  GFR-binding peptide
  MOD_RES (33)..(34): Xaa is C or S
  MOD_RES (11)..(12)..(13)..(14)..(15): Xaa is A or G
  MOD_RES (16)..(17)..(18)..(19): Xaa is A or G or is absent

SEQ ID NO: 63762 - protein, 33 aa, Artificial Sequence; identical to SEQ ID NO: 4530
  GFR-binding peptide
  MOD_RES (32)..(33): Xaa is C or S

SEQ ID NO: 63763 - protein, 35 aa, Artificial Sequence; identical to SEQ ID NO: 25624
  GFR-binding peptide
  MOD_RES (35)..(35): Xaa is C or S
  MOD_RES (13)..(14)..(15)..(16)..(17): Xaa is A or G
  MOD_RES (18)..(19)..(20)..(21): Xaa is A or G or is absent

SEQ ID NO: 63764 - protein, 39 aa, Artificial Sequence; identical to SEQ ID NO: 25625
  GFR-binding peptide
  MOD_RES (2)..(4)..(37)..(38): Xaa is C or S
  MOD_RES (15)..(16)..(17)..(18)..(19): Xaa is A or G
  MOD_RES (20)..(21)..(22)..(23): Xaa is A or G or is absent

SEQ ID NO: 63765 - protein, 41 aa, Artificial Sequence; identical to SEQ ID NO: 25626
  GFR-binding peptide
  MOD_RES (1)..(3)..(37): Xaa is C or S
  MOD_RES (15)..(16)..(17)..(18)..(19): Xaa is A or G
  MOD_RES (20)..(21)..(22)..(23): Xaa is A or G or is absent

SEQ ID NO: 63766 - protein, 38 aa, Artificial Sequence; identical to SEQ ID NO: 25631
  GFR-binding peptide
  MOD_RES (1)..(3)..(35)..(36): Xaa is C or S

SEQ ID NO: 63767 - protein, 35 aa, Artificial Sequence; identical to SEQ ID NO: 4537
  GFR-binding peptide
  MOD_RES (2)..(4): Xaa is C or S

SEQ ID NO: 63768 - protein, 34 aa, Artificial Sequence; identical to SEQ ID NO: 4539
  GFR-binding peptide
  MOD_RES (32)..(33): Xaa is C or S

SEQ ID NO: 63769 - protein, 37 aa, Artificial Sequence; identical to SEQ ID NO: 4541
  GFR-binding peptide
  MOD_RES (34)..(34): Xaa is C or S
  MOD_RES (12)..(13)..(14)..(15)..(16): Xaa is A or G
  MOD_RES (17)..(18)..(19)..(20): Xaa is A or G or is absent

SEQ ID NO: 63770 - protein, 34 aa, Artificial Sequence
  GFR-binding peptide
  MOD_RES (32)..(33): Xaa is C or S
SEVTMNEYKFKVVNKNEDLYLISIPEMKEPVXXP

SEQ ID NO: 63771 - protein, 38 aa, Artificial Sequence; identical to SEQ ID NO: 25638
  GFR-binding peptide
  MOD_RES (2)..(4)..(36)..(37): Xaa is C or S

SEQ ID NO: 63772 - protein, 38 aa, Artificial Sequence; identical to SEQ ID NO: 25641
  GFR-binding peptide
  MOD_RES (1)..(3)..(37)..(38): Xaa is C or S
  MOD_RES (15)..(16)..(17)..(18)..(19): Xaa is A or G
  MOD_RES (20)..(21)..(22)..(23): Xaa is A or G or is absent

SEQ ID NO: 63773 - protein, 39 aa, Artificial Sequence; identical to SEQ ID NO: 25644
  GFR-binding peptide
  MOD_RES (1)..(3)..(35)..(36): Xaa is C or S

SEQ ID NO: 63774 - protein, 38 aa, Artificial Sequence; identical to SEQ ID NO: 4550
  GFR-binding peptide
  MOD_RES (1)..(35)..(36): Xaa is C or S
  MOD_RES (13)..(14)..(15)..(16)..(17): Xaa is A or G
  MOD_RES (18)..(19)..(20)..(21): Xaa is A or G or is absent

SEQ ID NO: 63775 - protein, 34 aa, Artificial Sequence; identical to SEQ ID NO: 4552
  GFR-binding peptide
  MOD_RES (31)..(32): Xaa is C or S

SEQ ID NO: 63776 - protein, 40 aa, Artificial Sequence; identical to SEQ ID NO: 4553
  GFR-binding peptide
  MOD_RES (34)..(35): Xaa is C or S
  MOD_RES (12)..(13)..(14)..(15)..(16): Xaa is A or G
  MOD_RES (17)..(18)..(19)..(20): Xaa is A or G or is absent

SEQ ID NO: 63777 - protein, 36 aa, Artificial Sequence
  GFR-binding peptide
  MOD_RES (1)..(34)..(35): Xaa is C or S
  MOD_RES (12)..(13)..(14)..(15)..(16): Xaa is A or G
  MOD_RES (17)..(18)..(19)..(20): Xaa is A or G or is absent
XSRVIMPIKGYXXXXXXXXXFYLINIPSLAQPVXXP

SEQ ID NO: 63778 - protein, 38 aa, Artificial Sequence; identical to SEQ ID NO: 4559
  GFR-binding peptide
  MOD_RES (1)..(3)..(36)..(37): Xaa is C or S
  MOD_RES (14)..(15)..(16)..(17)..(18): Xaa is A or G
  MOD_RES (19)..(20)..(21)..(22): Xaa is A or G or is absent

SEQ ID NO: 63779 - protein, 39 aa, Artificial Sequence; identical to SEQ ID NO: 4560
  GFR-binding peptide
  MOD_RES (2)..(4)..(37)..(38): Xaa is C or S
  MOD_RES (15)..(16)..(17)..(18)..(19): Xaa is A or G
  MOD_RES (20)..(21)..(22)..(23): Xaa is A or G or is absent

SEQ ID NO: 63780 - protein, 41 aa, Artificial Sequence
  GFR-binding peptide
  MOD_RES (2)..(4)..(36)..(37): Xaa is C or S
RXGXSEVVMDEYKFKVVNNASDLYLISIPELRTPVXXTPPT

SEQ ID NO: 63781 - protein, 36 aa, Artificial Sequence
  GFR-binding peptide
  MOD_RES (2)..(4): Xaa is C or S
  MOD_RES (15)..(16)..(17)..(18)..(19): Xaa is A or G
  MOD_RES (20)..(21)..(22)..(23): Xaa is A or G or is absent
SXKXSKVIMPIKGYXXXXXXXXXFYLINIPSLDQSV

SEQ ID NO: 63782 - protein, 41 aa, Artificial Sequence; identical to SEQ ID NO: 25654
  GFR-binding peptide
  MOD_RES (1)..(35)..(36): Xaa is C or S
  MOD_RES (13)..(14)..(15)..(16)..(17): Xaa is A or G
  MOD_RES (18)..(19)..(20)..(21): Xaa is A or G or is absent

SEQ ID NO: 63783 - protein, 36 aa, Artificial Sequence; identical to SEQ ID NO: 31616
  GFR-binding peptide
  MOD_RES (1)..(3): Xaa is C or S
  MOD_RES (15)..(16)..(17)..(18)..(19): Xaa is A or G
  MOD_RES (20)..(21)..(22)..(23): Xaa is A or G or is absent

SEQ ID NO: 63784 - protein, 38 aa, Artificial Sequence; identical to SEQ ID NO: 4561
  GFR-binding peptide
  MOD_RES (1)..(33)..(34): Xaa is C or S

SEQ ID NO: 63785 - protein, 36 aa, Artificial Sequence; identical to SEQ ID NO: 4565
  GFR-binding peptide
  MOD_RES (34)..(34): Xaa is C or S
  MOD_RES (12)..(13)..(14)..(15)..(16): Xaa is A or G
  MOD_RES (17)..(18)..(19)..(20): Xaa is A or G or is absent

SEQ ID NO: 63786 - protein, 33 aa, Artificial Sequence
  GFR-binding peptide
  MOD_RES (31)..(32): Xaa is C or S
SKVIMPIKGYIKPTKGIFYLINIPSLDQSVXXP

SEQ ID NO: 63787 - protein, 37 aa, Artificial Sequence; identical to SEQ ID NO: 31622
  GFR-binding peptide
  MOD_RES (2)..(34)..(35): Xaa is C or S

SEQ ID NO: 63788 - protein, 36 aa, Artificial Sequence; identical to SEQ ID NO: 4568
  GFR-binding peptide
  MOD_RES (2)..(33)..(34): Xaa is C or S

SEQ ID NO: 63789 - protein, 36 aa, Artificial Sequence; identical to SEQ ID NO: 31625
  GFR-binding peptide
  MOD_RES (32)..(33): Xaa is C or S

SEQ ID NO: 63790 - protein, 37 aa, Artificial Sequence; identical to SEQ ID NO: 4572
  GFR-binding peptide
  MOD_RES (2)..(4): Xaa is C or S
  MOD_RES (16)..(17)..(18)..(19)..(20): Xaa is A or G
  MOD_RES (21)..(22)..(23)..(24): Xaa is A or G or is absent

SEQ ID NO: 63791 - protein, 36 aa, Artificial Sequence; identical to SEQ ID NO: 25666
  GFR-binding peptide
  MOD_RES (31)..(32): Xaa is C or S

SEQ ID NO: 63792 - protein, 32 aa, Artificial Sequence; identical to SEQ ID NO: 4580
  GFR-binding peptide
  MOD_RES (11)..(12)..(13)..(14)..(15): Xaa is A or G
  MOD_RES (16)..(17)..(18)..(19): Xaa is A or G or is absent

SEQ ID NO: 63793 - protein, 38 aa, Artificial Sequence; identical to SEQ ID NO: 25668
  GFR-binding peptide
  MOD_RES (1)..(33)..(34): Xaa is C or S

SEQ ID NO: 63794 - protein, 40 aa, Artificial Sequence
  GFR-binding peptide
  MOD_RES (2)..(4)..(36)..(37): Xaa is C or S
RXAXSEVTMNRYKKLVVNKNEDFYLISIANMKEPVXXPEP

SEQ ID NO: 63795 - protein, 42 aa, Artificial Sequence; identical to SEQ ID NO: 25670
  GFR-binding peptide
  MOD_RES (2)..(4)..(38)..(39): Xaa is C or S
  MOD_RES (16)..(17)..(18)..(19)..(20): Xaa is A or G
  MOD_RES (21)..(22)..(23)..(24): Xaa is A or G or is absent

SEQ ID NO: 63796 - protein, 43 aa, Artificial Sequence; identical to SEQ ID NO: 31641
  GFR-binding peptide
  MOD_RES (2)..(4)..(38)..(39): Xaa is C or S
  MOD_RES (16)..(17)..(18)..(19)..(20): Xaa is A or G
  MOD_RES (21)..(22)..(23)..(24): Xaa is A or G or is absent

SEQ ID NO: 63797 - protein, 41 aa, Artificial Sequence; identical to SEQ ID NO: 25671
  GFR-binding peptide
  MOD_RES (2)..(4)..(36)..(37): Xaa is C or S

SEQ ID NO: 63798 - protein, 39 aa, Artificial Sequence; identical to SEQ ID NO: 31644
  GFR-binding peptide
  MOD_RES (2)..(4)..(39): Xaa is C or S
  MOD_RES (17)..(18)..(19)..(20)..(21): Xaa is A or G
  MOD_RES (22)..(23)..(24)..(25): Xaa is A or G or is absent

SEQ ID NO: 63799 - protein, 36 aa, Artificial Sequence; identical to SEQ ID NO: 25677
  GFR-binding peptide
  MOD_RES (1)..(35)..(36): Xaa is C or S
  MOD_RES (13)..(14)..(15)..(16)..(17): Xaa is A or G
  MOD_RES (18)..(19)..(20)..(21): Xaa is A or G or is absent

SEQ ID NO: 63800 - protein, 38 aa, Artificial Sequence; identical to SEQ ID NO: 4587
  GFR-binding peptide
  MOD_RES (2)..(4)..(38): Xaa is C or S
  MOD_RES (16)..(17)..(18)..(19)..(20): Xaa is A or G
  MOD_RES (21)..(22)..(23)..(24): Xaa is A or G or is absent

SEQ ID NO: 63801 - protein, 35 aa, Artificial Sequence; identical to SEQ ID NO: 4588
  GFR-binding peptide
  MOD_RES (2)..(35): Xaa is C or S
  MOD_RES (13)..(14)..(15)..(16)..(17): Xaa is A or G
  MOD_RES (18)..(19)..(20)..(21): Xaa is A or G or is absent

SEQ ID NO: 63802 - protein, 39 aa, Artificial Sequence
  GFR-binding peptide
  MOD_RES (33)..(34): Xaa is C or S
  MOD_RES (11)..(12)..(13)..(14)..(15): Xaa is A or G
  MOD_RES (16)..(17)..(18)..(19): Xaa is A or G or is absent
RVVMNYHYKLXXXXXXXXXKYLVSIPSLKTPAXXPKPVH

SEQ ID NO: 63803 - protein, 44 aa, Artificial Sequence
  GFR-binding peptide
  MOD_RES (2)..(4)..(38)..(39): Xaa is C or S
  MOD_RES (16)..(17)..(18)..(19)..(20): Xaa is A or G
  MOD_RES (21)..(22)..(23)..(24): Xaa is A or G or is absent
RXGXSEVVMDYHYKLXXXXXXXXXKYLISIPSLRTPVXXTPPTS

SEQ ID NO: 63804 - protein, 37 aa, Artificial Sequence; identical to SEQ ID NO: 4589
  GFR-binding peptide
  MOD_RES (1)..(35)..(36): Xaa is C or S
  MOD_RES (13)..(14)..(15)..(16)..(17): Xaa is A or G
  MOD_RES (18)..(19)..(20)..(21): Xaa is A or G or is absent

SEQ ID NO: 63805 - protein, 35 aa, Artificial Sequence
  GFR-binding peptide
  MOD_RES (1)..(32)..(33): Xaa is C or S
XSKVIMPIKGYIKPTKGIFYLINIPSLDQSVXXPS

SEQ ID NO: 63806 - protein, 38 aa, Artificial Sequence
  GFR-binding peptide
  MOD_RES (1)..(33)..(34): Xaa is C or S
XRDVVMGEYKFKIIQQKDNLYLMSIPEMKTPTXXPGAS

SEQ ID NO: 63807 - protein, 37 aa, Artificial Sequence; identical to SEQ ID NO: 4593
  GFR-binding peptide
  MOD_RES (2)..(36)..(37): Xaa is C or S
  MOD_RES (14)..(15)..(16)..(17)..(18): Xaa is A or G
  MOD_RES (19)..(20)..(21)..(22): Xaa is A or G or is absent

SEQ ID NO: 63808 - protein, 42 aa, Artificial Sequence; identical to SEQ ID NO: 56589
  GFR-binding peptide
  MOD_RES (2)..(4)..(38)..(39): Xaa is C or S
  MOD_RES (16)..(17)..(18)..(19)..(20): Xaa is A or G
  MOD_RES (21)..(22)..(23)..(24): Xaa is A or G or is absent

SEQ ID NO: 63809 - protein, 41 aa, Artificial Sequence
  GFR-binding peptide
  MOD_RES (2)..(36)..(37): Xaa is C or S
  MOD_RES (14)..(15)..(16)..(17)..(18): Xaa is A or G
  MOD_RES (19)..(20)..(21)..(22): Xaa is A or G or is absent
GXRDVVMGYHYKLXXXXXXXXXKYLMSIPSMKTPTXXPGAS

SEQ ID NO: 63810 - protein, 37 aa, Artificial Sequence; identical to SEQ ID NO: 56590
  GFR-binding peptide
  MOD_RES (2)..(36)..(37): Xaa is C or S
  MOD_RES (14)..(15)..(16)..(17)..(18): Xaa is A or G
  MOD_RES (19)..(20)..(21)..(22): Xaa is A or G or is absent

SEQ ID NO: 63811 - protein, 36 aa, Artificial Sequence; identical to SEQ ID NO: 4597
  GFR-binding peptide
  MOD_RES (33)..(34): Xaa is C or S
  MOD_RES (11)..(12)..(13)..(14)..(15): Xaa is A or G
  MOD_RES (16)..(17)..(18)..(19): Xaa is A or G or is absent

SEQ ID NO: 63812 - protein, 40 aa, Artificial Sequence; identical to SEQ ID NO: 25691
  GFR-binding peptide
  MOD_RES (1)..(34)..(35): Xaa is C or S
  MOD_RES (12)..(13)..(14)..(15)..(16): Xaa is A or G
  MOD_RES (17)..(18)..(19)..(20): Xaa is A or G or is absent

SEQ ID NO: 63813 - protein, 36 aa, Artificial Sequence; identical to SEQ ID NO: 31657
  GFR-binding peptide
  MOD_RES (2)..(4)..(36): Xaa is C or S

SEQ ID NO: 63814 - protein, 35 aa, Artificial Sequence
  GFR-binding peptide
  MOD_RES (32)..(33): Xaa is C or S
RDVVMGRHKRLIIQQKDNYYLMSTASMKTPTXXPG

SEQ ID NO: 63815 - protein, 38 aa, Artificial Sequence; identical to SEQ ID NO: 4600
  GFR-binding peptide
  MOD_RES (2)..(4)..(36)..(37): Xaa is C or S

SEQ ID NO: 63816 - protein, 38 aa, Artificial Sequence; identical to SEQ ID NO: 4602
  GFR-binding peptide
  MOD_RES (1)..(35)..(36): Xaa is C or S
  MOD_RES (13)..(14)..(15)..(16)..(17): Xaa is A or G
  MOD_RES (18)..(19)..(20)..(21): Xaa is A or G or is absent

SEQ ID NO: 63817 - protein, 32 aa, Artificial Sequence; identical to SEQ ID NO: 31666
  GFR-binding peptide
  MOD_RES (1)..(1): Xaa is C or S

SEQ ID NO: 63818 - protein, 36 aa, Artificial Sequence; identical to SEQ ID NO: 4607
  GFR-binding peptide
  MOD_RES (2)..(4)..(35)..(36): Xaa is C or S

SEQ ID NO: 63819 - protein, 34 aa, Artificial Sequence; identical to SEQ ID NO: 4610
  GFR-binding peptide
  MOD_RES (31)..(32): Xaa is C or S

SEQ ID NO: 63820 - protein, 40 aa, Artificial Sequence; identical to SEQ ID NO: 4613
  GFR-binding peptide
  MOD_RES (1)..(3)..(35): Xaa is C or S

SEQ ID NO: 63821 - protein, 35 aa, Artificial Sequence; identical to SEQ ID NO: 25704
  GFR-binding peptide
  MOD_RES (2)..(34)..(35): Xaa is C or S

SEQ ID NO: 63822 - protein, 33 aa, Artificial Sequence; identical to SEQ ID NO: 12037
  GFR-binding peptide
  MOD_RES (33)..(33): Xaa is C or S
  MOD_RES (11)..(12)..(13)..(14)..(15): Xaa is A or G
  MOD_RES (16)..(17)..(18)..(19): Xaa is A or G or is absent

SEQ ID NO: 63823 - protein, 43 aa, Artificial Sequence; identical to SEQ ID NO: 4615
  GFR-binding peptide
  MOD_RES (1)..(3)..(37): Xaa is C or S
  MOD_RES (15)..(16)..(17)..(18)..(19): Xaa is A or G
  MOD_RES (20)..(21)..(22)..(23): Xaa is A or G or is absent

SEQ ID NO: 63824 - protein, 37 aa, Artificial Sequence
  GFR-binding peptide
  MOD_RES (33)..(34): Xaa is C or S
  MOD_RES (11)..(12)..(13)..(14)..(15): Xaa is A or G
  MOD_RES (16)..(17)..(18)..(19): Xaa is A or G or is absent
EVTMNEYKFKXXXXXXXXXLYLISIPEMKEPVXXPEP

SEQ ID NO: 63825 - protein, 37 aa, Artificial Sequence; identical to SEQ ID NO: 25707
  GFR-binding peptide
  MOD_RES (2)..(4): Xaa is C or S
  MOD_RES (16)..(17)..(18)..(19)..(20): Xaa is A or G
  MOD_RES (21)..(22)..(23)..(24): Xaa is A or G or is absent

SEQ ID NO: 63826 - protein, 40 aa, Artificial Sequence; identical to SEQ ID NO: 4618
  GFR-binding peptide
  MOD_RES (1)..(35)..(36): Xaa is C or S
  MOD_RES (13)..(14)..(15)..(16)..(17): Xaa is A or G
  MOD_RES (18)..(19)..(20)..(21): Xaa is A or G or is absent

SEQ ID NO: 63827 - protein, 33 aa, Artificial Sequence; identical to SEQ ID NO: 4619
  GFR-binding peptide
  MOD_RES (1)..(33): Xaa is C or S

SEQ ID NO: 63828 - protein, 31 aa, Artificial Sequence; identical to SEQ ID NO: 4621
  GFR-binding peptide
  MOD_RES (1)..(1): Xaa is C or S

SEQ ID NO: 63829 - protein, 41 aa, Artificial Sequence
  GFR-binding peptide
  MOD_RES (1)..(3)..(35)..(36): Xaa is C or S
XAXSEVTMNPIKGYVVNKNEDFYLINIPSMKEPVXXPEPIG

SEQ ID NO: 63830 - protein, 34 aa, Artificial Sequence
  GFR-binding peptide
  MOD_RES (34)..(34): Xaa is C or S
  MOD_RES (12)..(13)..(14)..(15)..(16): Xaa is A or G
  MOD_RES (17)..(18)..(19)..(20): Xaa is A or G or is absent
SEVTMNEYKFKXXXXXXXXXLYLISIPEMKEPVX

SEQ ID NO: 63831 - protein, 41 aa, Artificial Sequence; identical to SEQ ID NO: 4623
  GFR-binding peptide
  MOD_RES (2)..(4)..(38)..(39): Xaa is C or S
  MOD_RES (16)..(17)..(18)..(19)..(20): Xaa is A or G
  MOD_RES (21)..(22)..(23)..(24): Xaa is A or G or is absent

SEQ ID NO: 63832 - protein, 38 aa, Artificial Sequence; identical to SEQ ID NO: 31678
  GFR-binding peptide
  MOD_RES (33)..(34): Xaa is C or S

SEQ ID NO: 63833 - protein, 43 aa, Artificial Sequence; identical to SEQ ID NO: 31679
  GFR-binding peptide
  MOD_RES (1)..(3)..(37)..(38): Xaa is C or S
  MOD_RES (15)..(16)..(17)..(18)..(19): Xaa is A or G
  MOD_RES (20)..(21)..(22)..(23): Xaa is A or G or is absent

SEQ ID NO: 63834 - protein, 38 aa, Artificial Sequence; identical to SEQ ID NO: 56620
  GFR-binding peptide
  MOD_RES (1)..(34)..(35): Xaa is C or S
  MOD_RES (12)..(13)..(14)..(15)..(16): Xaa is A or G
  MOD_RES (17)..(18)..(19)..(20): Xaa is A or G or is absent

SEQ ID NO: 63835 - protein, 33 aa, Artificial Sequence; identical to SEQ ID NO: 4627
  GFR-binding peptide
  MOD_RES (1)..(3): Xaa is C or S

SEQ ID NO: 63836 - protein, 33 aa, Artificial Sequence
  GFR-binding peptide
  MOD_RES (1)..(33): Xaa is C or S
XRDVVMGRHKRLIIQQKDNYYLMSTASMKTPTX

SEQ ID NO: 63837 - protein, 37 aa, Artificial Sequence
  GFR-binding peptide
  MOD_RES (2)..(34)..(35): Xaa is C or S
GXESVAMGRHKRLYTVVGKDYYLISTASLKTPVXXAK

SEQ ID NO: 63838 - protein, 38 aa, Artificial Sequence
  GFR-binding peptide
  MOD_RES (1)..(32)..(33): Xaa is C or S
XSRVIMPIKGYVKPKRGVFYLINIPSLAQPVXXPAASA

SEQ ID NO: 63839 - protein, 42 aa, Artificial Sequence; identical to SEQ ID NO: 4632
  GFR-binding peptide
  MOD_RES (1)..(3)..(37)..(38): Xaa is C or S
  MOD_RES (15)..(16)..(17)..(18)..(19): Xaa is A or G
  MOD_RES (20)..(21)..(22)..(23): Xaa is A or G or is absent

SEQ ID NO: 63840 - protein, 34 aa, Artificial Sequence; identical to SEQ ID NO: 25721
  GFR-binding peptide
  MOD_RES (33)..(34): Xaa is C or S
  MOD_RES (11)..(12)..(13)..(14)..(15): Xaa is A or G
  MOD_RES (16)..(17)..(18)..(19): Xaa is A or G or is absent

SEQ ID NO: 63841 - protein, 41 aa, Artificial Sequence
  GFR-binding peptide
  MOD_RES (1)..(3)..(35)..(36): Xaa is C or S
XGXRDVVMGRHKRLIIQQKDNYYLMSTASMKTPTXXPGASG

SEQ ID NO: 63842 - protein, 35 aa, Artificial Sequence; identical to SEQ ID NO: 4635
  GFR-binding peptide
  MOD_RES (32)..(33): Xaa is C or S

SEQ ID NO: 63843 - protein, 39 aa, Artificial Sequence
  GFR-binding peptide
  MOD_RES (2)..(4)..(36)..(37): Xaa is C or S
SXGXRDVVMGRHKRLIIQQKDNYYLMSTASMKTPTXXPG

SEQ ID NO: 63844 - protein, 38 aa, Artificial Sequence; identical to SEQ ID NO: 4636
  GFR-binding peptide
  MOD_RES (33)..(33): Xaa is C or S
  MOD_RES (11)..(12)..(13)..(14)..(15): Xaa is A or G
  MOD_RES (16)..(17)..(18)..(19): Xaa is A or G or is absent

SEQ ID NO: 63845 - protein, 35 aa, Artificial Sequence; identical to SEQ ID NO: 25726
  GFR-binding peptide
  MOD_RES (33)..(34): Xaa is C or S
  MOD_RES (11)..(12)..(13)..(14)..(15): Xaa is A or G
  MOD_RES (16)..(17)..(18)..(19): Xaa is A or G or is absent

SEQ ID NO: 63846 - protein, 41 aa, Artificial Sequence
  GFR-binding peptide
  MOD_RES (1)..(3)..(35)..(36): Xaa is C or S
XGXSRVVMNRHKRLIVNSSDDYYLVSTASLKTPAXXPKPVH

SEQ ID NO: 63847 - protein, 34 aa, Artificial Sequence
  GFR-binding peptide
  MOD_RES (34)..(34): Xaa is C or S
  MOD_RES (12)..(13)..(14)..(15)..(16): Xaa is A or G
  MOD_RES (17)..(18)..(19)..(20): Xaa is A or G or is absent
SEVTMNRHKRLXXXXXXXXXYYLISTASMKEPVX

SEQ ID NO: 63848 - protein, 41 aa, Artificial Sequence; identical to SEQ ID NO: 4639
  GFR-binding peptide
  MOD_RES (2)..(4)..(36)..(37): Xaa is C or S

SEQ ID NO: 63849 - protein, 33 aa, Artificial Sequence; identical to SEQ ID NO: 4640
  GFR-binding peptide
  MOD_RES (2)..(2): Xaa is C or S

SEQ ID NO: 63850 - protein, 35 aa, Artificial Sequence; identical to SEQ ID NO: 31699
  GFR-binding peptide
  MOD_RES (31)..(32): Xaa is C or S

SEQ ID NO: 63851 - protein, 38 aa, Artificial Sequence; identical to SEQ ID NO: 4641
  GFR-binding peptide
  MOD_RES (1)..(3)..(34)..(35): Xaa is C or S

SEQ ID NO: 63852 - protein, 41 aa, Artificial Sequence; identical to SEQ ID NO: 31703
  GFR-binding peptide
  MOD_RES (1)..(3)..(35)..(36): Xaa is C or S

SEQ ID NO: 63853 - protein, 38 aa, Artificial Sequence; identical to SEQ ID NO: 56640
  GFR-binding peptide
  MOD_RES (2)..(33)..(34): Xaa is C or S

SEQ ID NO: 63854 - protein, 34 aa, Artificial Sequence
  GFR-binding peptide
  MOD_RES (1)..(33)..(34): Xaa is C or S
XRDVVMGRHKRLIIQQKDNYYLMSTASMKTPTXX

SEQ ID NO: 63855 - protein, 34 aa, Artificial Sequence; identical to SEQ ID NO: 25734
  GFR-binding peptide
  MOD_RES (31)..(32): Xaa is C or S

SEQ ID NO: 63856 - protein, 40 aa, Artificial Sequence; identical to SEQ ID NO: 4644
  GFR-binding peptide
  MOD_RES (1)..(3)..(35)..(36): Xaa is C or S

SEQ ID NO: 63857 - protein, 33 aa, Artificial Sequence; identical to SEQ ID NO: 25736
  GFR-binding peptide
  MOD_RES (2)..(33): Xaa is C or S

SEQ ID NO: 63858 - protein, 37 aa, Artificial Sequence; identical to SEQ ID NO: 25737
  GFR-binding peptide
  MOD_RES (33)..(34): Xaa is C or S

SEQ ID NO: 63859 - protein, 33 aa, Artificial Sequence; identical to SEQ ID NO: 25738
  GFR-binding peptide
  MOD_RES (1)..(33): Xaa is C or S

SEQ ID NO: 63860 - protein, 36 aa, Artificial Sequence; identical to SEQ ID NO: 4646
  GFR-binding peptide
  MOD_RES (1)..(33)..(34): Xaa is C or S

SEQ ID NO: 63861 - protein, 31 aa, Artificial Sequence
  GFR-binding peptide
  MOD_RES (31)..(31): Xaa is C or S
EVTMNEYKFKVVNKNEDLYLISIPEMKEPVX

SEQ ID NO: 63862 - protein, 41 aa, Artificial Sequence; identical to SEQ ID NO: 4648
  GFR-binding peptide
  MOD_RES (2)..(4)..(37)..(38): Xaa is C or S
  MOD_RES (15)..(16)..(17)..(18)..(19): Xaa is A or G
  MOD_RES (20)..(21)..(22)..(23): Xaa is A or G or is absent

SEQ ID NO: 63863 - protein, 40 aa, Artificial Sequence
  GFR-binding peptide
  MOD_RES (1)..(3)..(37)..(38): Xaa is C or S
  MOD_RES (15)..(16)..(17)..(18)..(19): Xaa is A or G
  MOD_RES (20)..(21)..(22)..(23): Xaa is A or G or is absent
XGXRDVVMGRHKRLXXXXXXXXXYYLMSTASMKTPTXXPG

SEQ ID NO: 63864 - protein, 37 aa, Artificial Sequence; identical to SEQ ID NO: 4650
  GFR-binding peptide
  MOD_RES (2)..(33)..(34): Xaa is C or S

SEQ ID NO: 63865 - protein, 37 aa, Artificial Sequence; identical to SEQ ID NO: 4651
  GFR-binding peptide
  MOD_RES (32)..(32): Xaa is C or S

SEQ ID NO: 63866 - protein, 37 aa, Artificial Sequence; identical to SEQ ID NO: 25742
  GFR-binding peptide
  MOD_RES (34)..(35): Xaa is C or S
  MOD_RES (12)..(13)..(14)..(15)..(16): Xaa is A or G
  MOD_RES (17)..(18)..(19)..(20): Xaa is A or G or is absent

SEQ ID NO: 63867 - protein, 39 aa, Artificial Sequence; identical to SEQ ID NO: 4653
  GFR-binding peptide
  MOD_RES (1)..(3)..(34)..(35): Xaa is C or S

SEQ ID NO: 63868 - protein, 37 aa, Artificial Sequence; identical to SEQ ID NO: 4654
  GFR-binding peptide
  MOD_RES (1)..(3)..(35): Xaa is C or S

SEQ ID NO: 63869 - protein, 36 aa, Artificial Sequence; identical to SEQ ID NO: 25749
  GFR-binding peptide
  MOD_RES (1)..(35)..(36): Xaa is C or S
  MOD_RES (13)..(14)..(15)..(16)..(17): Xaa is A or G
  MOD_RES (18)..(19)..(20)..(21): Xaa is A or G or is absent

SEQ ID NO: 63870 - protein, 37 aa, Artificial Sequence; identical to SEQ ID NO: 25750
  GFR-binding peptide
  MOD_RES (34)..(35): Xaa is C or S
  MOD_RES (12)..(13)..(14)..(15)..(16): Xaa is A or G
  MOD_RES (17)..(18)..(19)..(20): Xaa is A or G or is absent

SEQ ID NO: 63871 - protein, 38 aa, Artificial Sequence; identical to SEQ ID NO: 4656
  GFR-binding peptide
  MOD_RES (1)..(34)..(35): Xaa is C or S
  MOD_RES (12)..(13)..(14)..(15)..(16): Xaa is A or G
  MOD_RES (17)..(18)..(19)..(20): Xaa is A or G or is absent

SEQ ID NO: 63872 - protein, 43 aa, Artificial Sequence
  GFR-binding peptide
  MOD_RES (2)..(4)..(38)..(39): Xaa is C or S
  MOD_RES (16)..(17)..(18)..(19)..(20): Xaa is A or G
  MOD_RES (21)..(22)..(23)..(24): Xaa is A or G or is absent
RXGXSEVVMDYHYKLXXXXXXXXXKYLISIPSLRTPVXXTPPT

SEQ ID NO: 63873 - protein, 34 aa, Artificial Sequence; identical to SEQ ID NO: 4658
  GFR-binding peptide
  MOD_RES (34)..(34): Xaa is C or S
  MOD_RES (12)..(13)..(14)..(15)..(16): Xaa is A or G
  MOD_RES (17)..(18)..(19)..(20): Xaa is A or G or is absent

SEQ ID NO: 63874 - protein, 39 aa, Artificial Sequence; identical to SEQ ID NO: 4659
  GFR-binding peptide
  MOD_RES (2)..(37)..(38): Xaa is C or S
  MOD_RES (15)..(16)..(17)..(18)..(19): Xaa is A or G
  MOD_RES (20)..(21)..(22)..(23): Xaa is A or G or is absent

SEQ ID NO: 63875 - protein, 43 aa, Artificial Sequence; identical to SEQ ID NO: 4661
  GFR-binding peptide
  MOD_RES (2)..(4)..(38): Xaa is C or S
  MOD_RES (16)..(17)..(18)..(19)..(20): Xaa is A or G
  MOD_RES (21)..(22)..(23)..(24): Xaa is A or G or is absent

SEQ ID NO: 63876 - protein, 32 aa, Artificial Sequence
  GFR-binding peptide
  MOD_RES (1)..(1): Xaa is C or S
XRDVVMGEYKFKIIQQKDNLYLMSIPEMKTPT

SEQ ID NO: 63877 - protein, 38 aa, Artificial Sequence; identical to SEQ ID NO: 4664
  GFR-binding peptide
  MOD_RES (2)..(36)..(37): Xaa is C or S
  MOD_RES (14)..(15)..(16)..(17)..(18): Xaa is A or G
  MOD_RES (19)..(20)..(21)..(22): Xaa is A or G or is absent

SEQ ID NO: 63878 - protein, 40 aa, Artificial Sequence; identical to SEQ ID NO: 4665
  GFR-binding peptide
  MOD_RES (34)..(35): Xaa is C or S
  MOD_RES (12)..(13)..(14)..(15)..(16): Xaa is A or G
  MOD_RES (17)..(18)..(19)..(20): Xaa is A or G or is absent

SEQ ID NO: 63879 - protein, 34 aa, Artificial Sequence
  GFR-binding peptide
  MOD_RES (31)..(32): Xaa is C or S
EVTMNPIKGYVVNKNEDFYLINIPSMKEPVXXPE

SEQ ID NO: 63880 - protein, 36 aa, Artificial Sequence
  GFR-binding peptide
  MOD_RES (31)..(32): Xaa is C or S
EVVMDYHYKLVVNNASDKYLISIPSLRTPVXXTPPT

SEQ ID NO: 63881 - protein, 34 aa, Artificial Sequence; identical to SEQ ID NO: 25762
  GFR-binding peptide
  MOD_RES (2)..(33)..(34): Xaa is C or S

SEQ ID NO: 63882 - protein, 36 aa, Artificial Sequence; identical to SEQ ID NO: 31734
  GFR-binding peptide
  MOD_RES (1)..(35)..(36): Xaa is C or S
  MOD_RES (13)..(14)..(15)..(16)..(17): Xaa is A or G
  MOD_RES (18)..(19)..(20)..(21): Xaa is A or G or is absent

SEQ ID NO: 63883 - protein, 39 aa, Artificial Sequence; identical to SEQ ID NO: 31736
  GFR-binding peptide
  MOD_RES (1)..(35): Xaa is C or S
  MOD_RES (13)..(14)..(15)..(16)..(17): Xaa is A or G
  MOD_RES (18)..(19)..(20)..(21): Xaa is A or G or is absent

SEQ ID NO: 63884 - protein, 35 aa, Artificial Sequence
  GFR-binding peptide
  MOD_RES (1)..(3)..(35): Xaa is C or S
XGXESVAMGRHKRLYTVVGKDYYLISTASLKTPVX

SEQ ID NO: 63885 - protein, 38 aa, Artificial Sequence
  GFR-binding peptide
  MOD_RES (2)..(36)..(37): Xaa is C or S
  MOD_RES (14)..(15)..(16)..(17)..(18): Xaa is A or G
  MOD_RES (19)..(20)..(21)..(22): Xaa is A or G or is absent
GXESVAMGRHKRLXXXXXXXXXYYLISTASLKTPVXXA

SEQ ID NO: 63886 - protein, 36 aa, Artificial Sequence; identical to SEQ ID NO: 25765
  GFR-binding peptide
  MOD_RES (1)..(33)..(34): Xaa is C or S

SEQ ID NO: 63887 - protein, 38 aa, Artificial Sequence
  GFR-binding peptide
  MOD_RES (33)..(34): Xaa is C or S
  MOD_RES (11)..(12)..(13)..(14)..(15): Xaa is A or G
  MOD_RES (16)..(17)..(18)..(19): Xaa is A or G or is absent
EVTMNRYKKLXXXXXXXXXFYLISIANMKEPVXXPEPI

SEQ ID NO: 63888 - protein, 35 aa, Artificial Sequence
  GFR-binding peptide
  MOD_RES (34)..(35): Xaa is C or S
  MOD_RES (12)..(13)..(14)..(15)..(16): Xaa is A or G
  MOD_RES (17)..(18)..(19)..(20): Xaa is A or G or is absent
SEVTMNRHKRLXXXXXXXXXYYLISTASMKEPVXX

SEQ ID NO: 63889 - protein, 38 aa, Artificial Sequence; identical to SEQ ID NO: 31743
  GFR-binding peptide
  MOD_RES (1)..(33)..(34): Xaa is C or S

SEQ ID NO: 63890 - protein, 35 aa, Artificial Sequence; identical to SEQ ID NO: 31751
  GFR-binding peptide
  MOD_RES (1)..(33)..(34): Xaa is C or S

SEQ ID NO: 63891 - protein, 37 aa, Artificial Sequence; identical to SEQ ID NO: 12118
  GFR-binding peptide
  MOD_RES (1)..(3)..(37): Xaa is C or S
  MOD_RES (15)..(16)..(17)..(18)..(19): Xaa is A or G
  MOD_RES (20)..(21)..(22)..(23): Xaa is A or G or is absent

SEQ ID NO: 63892 - protein, 41 aa, Artificial Sequence; identical to SEQ ID NO: 25776
  GFR-binding peptide
  MOD_RES (2)..(35)..(36): Xaa is C or S
  MOD_RES (13)..(14)..(15)..(16)..(17): Xaa is A or G
  MOD_RES (18)..(19)..(20)..(21): Xaa is A or G or is absent

SEQ ID NO: 63893 - protein, 38 aa, Artificial Sequence; identical to SEQ ID NO: 4689
  GFR-binding peptide
  MOD_RES (1)..(33)..(34): Xaa is C or S

SEQ ID NO: 63894 - protein, 36 aa, Artificial Sequence; identical to SEQ ID NO: 4690
  GFR-binding peptide
  MOD_RES (2)..(36): Xaa is C or S
  MOD_RES (14)..(15)..(16)..(17)..(18): Xaa is A or G
  MOD_RES (19)..(20)..(21)..(22): Xaa is A or G or is absent

SEQ ID NO: 63895 - protein, 40 aa, Artificial Sequence; identical to SEQ ID NO: 25779
  GFR-binding peptide
  MOD_RES (1)..(3)..(36)..(37): Xaa is C or S
  MOD_RES (14)..(15)..(16)..(17)..(18): Xaa is A or G
  MOD_RES (19)..(20)..(21)..(22): Xaa is A or G or is absent

SEQ ID NO: 63896 - protein, 39 aa, Artificial Sequence; identical to SEQ ID NO: 31765
  GFR-binding peptide
  MOD_RES (2)..(4)..(38): Xaa is C or S
  MOD_RES (16)..(17)..(18)..(19)..(20): Xaa is A or G
  MOD_RES (21)..(22)..(23)..(24): Xaa is A or G or is absent

SEQ ID NO: 63897 - protein, 40 aa, Artificial Sequence; identical to SEQ ID NO: 31766
  GFR-binding peptide
  MOD_RES (2)..(4)..(36)..(37): Xaa is C or S

SEQ ID NO: 63898 - protein, 34 aa, Artificial Sequence; identical to SEQ ID NO: 4695
  GFR-binding peptide
  MOD_RES (33)..(34): Xaa is C or S
  MOD_RES (11)..(12)..(13)..(14)..(15): Xaa is A or G
  MOD_RES (16)..(17)..(18)..(19): Xaa is A or G or is absent

SEQ ID NO: 63899 - protein, 36 aa, Artificial Sequence
  GFR-binding peptide
  MOD_RES (2)..(4)..(35)..(36): Xaa is C or S
SXKXSKVVMPIKGYVKPTRGVFYLINIPSLDQPVXX

SEQ ID NO: 63900 - protein, 33 aa, Artificial Sequence; identical to SEQ ID NO: 4697
  GFR-binding peptide
  MOD_RES (33)..(33): Xaa is C or S
  MOD_RES (11)..(12)..(13)..(14)..(15): Xaa is A or G
  MOD_RES (16)..(17)..(18)..(19): Xaa is A or G or is absent

SEQ ID NO: 63901 - protein, 39 aa, Artificial Sequence; identical to SEQ ID NO: 4698
  GFR-binding peptide
  MOD_RES (1)..(33)..(34): Xaa is C or S

SEQ ID NO: 63902 - protein, 36 aa, Artificial Sequence
  GFR-binding peptide
  MOD_RES (2)..(4)..(36): Xaa is C or S
RXGXESVAMGRHKRLYTVVGKDYYLISTASLKTPVX

SEQ ID NO: 63903 - protein, 37 aa, Artificial Sequence
  GFR-binding peptide
  MOD_RES (31)..(32): Xaa is C or S
EEVIMRHKRLLLVRGNDYYLMSTASTKVPAXXTSPVR

SEQ ID NO: 63904 - protein, 36 aa, Artificial Sequence
  GFR-binding peptide
  MOD_RES (33)..(34): Xaa is C or S
  MOD_RES (11)..(12)..(13)..(14)..(15): Xaa is A or G
  MOD_RES (16)..(17)..(18)..(19): Xaa is A or G or is absent
EVVMDYHYKLXXXXXXXXXKYLISIPSLRTPVXXTP

SEQ ID NO: 63905 - protein, 38 aa, Artificial Sequence
  GFR-binding peptide
  MOD_RES (1)..(33)..(34): Xaa is C or S
XSEVTMNPIKGYVVNKNEDFYLINIPSMKEPVXXPEPI

SEQ ID NO: 63906 - protein, 39 aa, Artificial Sequence; identical to SEQ ID NO: 25788
  GFR-binding peptide
  MOD_RES (2)..(36)..(37): Xaa is C or S
  MOD_RES (14)..(15)..(16)..(17)..(18): Xaa is A or G
  MOD_RES (19)..(20)..(21)..(22): Xaa is A or G or is absent

SEQ ID NO: 63907 - protein, 36 aa, Artificial Sequence; identical to SEQ ID NO: 4708
  GFR-binding peptide
  MOD_RES (1)..(35)..(36): Xaa is C or S
  MOD_RES (13)..(14)..(15)..(16)..(17): Xaa is A or G
  MOD_RES (18)..(19)..(20)..(21): Xaa is A or G or is absent

SEQ ID NO: 63908 - protein, 40 aa, Artificial Sequence
  GFR-binding peptide
  MOD_RES (2)..(4)..(38)..(39): Xaa is C or S
  MOD_RES (16)..(17)..(18)..(19)..(20): Xaa is A or G
  MOD_RES (21)..(22)..(23)..(24): Xaa is A or G or is absent
SXGXRDVVMGYHYKLXXXXXXXXXKYLMSIPSMKTPTXXP

SEQ ID NO: 63909 - protein, 38 aa, Artificial Sequence; identical to SEQ ID NO: 4711
  GFR-binding peptide
  MOD_RES (2)..(4)..(35)..(36): Xaa is C or S

SEQ ID NO: 63910 - protein, 40 aa, Artificial Sequence; identical to SEQ ID NO: 31778
  GFR-binding peptide
  MOD_RES (1)..(3)..(36)..(37): Xaa is C or S
  MOD_RES (14)..(15)..(16)..(17)..(18): Xaa is A or G
  MOD_RES (19)..(20)..(21)..(22): Xaa is A or G or is absent

SEQ ID NO: 63911 - protein, 31 aa, Artificial Sequence; identical to SEQ ID NO: 56733
  GFR-binding peptide
  MOD_RES (31)..(31): Xaa is C or S

SEQ ID NO: 63912 - protein, 36 aa, Artificial Sequence; identical to SEQ ID NO: 31780
  GFR-binding peptide
  MOD_RES (31)..(32): Xaa is C or S

SEQ ID NO: 63913 - protein, 32 aa, Artificial Sequence
  GFR-binding peptide
  MOD_RES (1)..(1): Xaa is C or S
XRDVVMGRHKRLIIQQKDNYYLMSTASMKTPT

SEQ ID NO: 63914 - protein, 41 aa, Artificial Sequence; identical to SEQ ID NO: 4720
  GFR-binding peptide
  MOD_RES (1)..(3)..(37)..(38): Xaa is C or S
  MOD_RES (15)..(16)..(17)..(18)..(19): Xaa is A or G
  MOD_RES (20)..(21)..(22)..(23): Xaa is A or G or is absent

SEQ ID NO: 63915 - protein, 38 aa, Artificial Sequence; identical to SEQ ID NO: 4722
  GFR-binding peptide
  MOD_RES (2)..(4)..(38): Xaa is C or S
  MOD_RES (16)..(17)..(18)..(19)..(20): Xaa is A or G
  MOD_RES (21)..(22)..(23)..(24): Xaa is A or G or is absent

SEQ ID NO: 63916 - protein, 37 aa, Artificial Sequence; identical to SEQ ID NO: 25802
  GFR-binding peptide
  MOD_RES (31)..(32): Xaa is C or S

SEQ ID NO: 63917 - protein, 33 aa, Artificial Sequence; identical to SEQ ID NO: 4724
  GFR-binding peptide
  MOD_RES (33)..(33): Xaa is C or S
  MOD_RES (11)..(12)..(13)..(14)..(15): Xaa is A or G
  MOD_RES (16)..(17)..(18)..(19): Xaa is A or G or is absent

SEQ ID NO: 63918 - protein, 40 aa, Artificial Sequence; identical to SEQ ID NO: 31791
  GFR-binding peptide
  MOD_RES (1)..(35)..(36): Xaa is C or S
  MOD_RES (13)..(14)..(15)..(16)..(17): Xaa is A or G
  MOD_RES (18)..(19)..(20)..(21): Xaa is A or G or is absent

SEQ ID NO: 63919 - protein, 43 aa, Artificial Sequence; identical to SEQ ID NO: 4728
  GFR-binding peptide
  MOD_RES (2)..(4)..(37)..(38): Xaa is C or S
  MOD_RES (15)..(16)..(17)..(18)..(19): Xaa is A or G
  MOD_RES (20)..(21)..(22)..(23): Xaa is A or G or is absent

SEQ ID NO: 63920 - protein, 39 aa, Artificial Sequence; identical to SEQ ID NO: 4730
  GFR-binding peptide
  MOD_RES (1)..(3)..(35)..(36): Xaa is C or S

SEQ ID NO: 63921 - protein, 39 aa, Artificial Sequence; identical to SEQ ID NO: 25808
  GFR-binding peptide
  MOD_RES (1)..(3)..(37)..(38): Xaa is C or S
  MOD_RES (15)..(16)..(17)..(18)..(19): Xaa is A or G
  MOD_RES (20)..(21)..(22)..(23): Xaa is A or G or is absent

SEQ ID NO: 63922 - protein, 36 aa, Artificial Sequence; identical to SEQ ID NO: 25809
  GFR-binding peptide
  MOD_RES (2)..(36): Xaa is C or S
  MOD_RES (14)..(15)..(16)..(17)..(18): Xaa is A or G
  MOD_RES (19)..(20)..(21)..(22): Xaa is A or G or is absent

SEQ ID NO: 63923 - protein, 34 aa, Artificial Sequence; identical to SEQ ID NO: 25810
  GFR-binding peptide
  MOD_RES (1)..(3): Xaa is C or S

SEQ ID NO: 63924 - protein, 38 aa, Artificial Sequence; identical to SEQ ID NO: 4733
  GFR-binding peptide
  MOD_RES (2)..(4)..(37)..(38): Xaa is C or S
  MOD_RES (15)..(16)..(17)..(18)..(19): Xaa is A or G
  MOD_RES (20)..(21)..(22)..(23): Xaa is A or G or is absent

SEQ ID NO: 63925 - protein, 33 aa, Artificial Sequence; identical to SEQ ID NO: 25813
  GFR-binding peptide
  MOD_RES (32)..(33): Xaa is C or S

SEQ ID NO: 63926 - protein, 33 aa, Artificial Sequence; identical to SEQ ID NO: 4734
  GFR-binding peptide
  MOD_RES (31)..(32): Xaa is C or S

SEQ ID NO: 63927 - protein, 34 aa, Artificial Sequence
  GFR-binding peptide
  MOD_RES (1)..(33)..(34): Xaa is C or S
XSEVTMNYHYKLVVNKNEDKYLISIPSMKEPVXX

SEQ ID NO: 63928 - protein, 37 aa, Artificial Sequence; identical to SEQ ID NO: 31799
  GFR-binding peptide
  MOD_RES (2)..(4): Xaa is C or S
  MOD_RES (16)..(17)..(18)..(19)..(20): Xaa is A or G
  MOD_RES (21)..(22)..(23)..(24): Xaa is A or G or is absent

SEQ ID NO: 63929 - protein, 35 aa, Artificial Sequence; identical to SEQ ID NO: 4736
  GFR-binding peptide
  MOD_RES (1)..(3): Xaa is C or S

SEQ ID NO: 63930 - protein, 41 aa, Artificial Sequence
  GFR-binding peptide
  MOD_RES (2)..(4)..(36)..(37): Xaa is C or S
RXGXAEVVMDRHKRLVVNNAADYYLISTASLRAPVXXSAPA

SEQ ID NO: 63931 - protein, 31 aa, Artificial Sequence
  GFR-binding peptide
  MOD_RES (31)..(31): Xaa is C or S
EEVIMRHKRLLLVRGNDYYLMSTASTKVPAX

SEQ ID NO: 63932 - protein, 38 aa, Artificial Sequence; identical to SEQ ID NO: 12169
  GFR-binding peptide
  MOD_RES (1)..(35)..(36): Xaa is C or S
  MOD_RES (13)..(14)..(15)..(16)..(17): Xaa is A or G
  MOD_RES (18)..(19)..(20)..(21): Xaa is A or G or is absent

SEQ ID NO: 63933 - protein, 41 aa, Artificial Sequence; identical to SEQ ID NO: 25821
  GFR-binding peptide
  MOD_RES (2)..(36)..(37): Xaa is C or S
  MOD_RES (14)..(15)..(16)..(17)..(18): Xaa is A or G
  MOD_RES (19)..(20)..(21)..(22): Xaa is A or G or is absent

SEQ ID NO: 63934 - protein, 39 aa, Artificial Sequence; identical to SEQ ID NO: 4744
  GFR-binding peptide
  MOD_RES (2)..(34)..(35): Xaa is C or S

SEQ ID NO: 63935 - protein, 33 aa, Artificial Sequence
  GFR-binding peptide
  MOD_RES (32)..(33): Xaa is C or S
SEVTMNPIKGYVVNKNEDFYLINIPSMKEPVXX

SEQ ID NO: 63936 - protein, 37 aa, Artificial Sequence
  GFR-binding peptide
  MOD_RES (1)..(35)..(36): Xaa is C or S
  MOD_RES (13)..(14)..(15)..(16)..(17): Xaa is A or G
  MOD_RES (18)..(19)..(20)..(21): Xaa is A or G or is absent
XRDVVMGYHYKLXXXXXXXXXKYLMSIPSMKTPTXXP

SEQ ID NO: 63937 - protein, 37 aa, Artificial Sequence
  GFR-binding peptide
  MOD_RES (34)..(35): Xaa is C or S
  MOD_RES (12)..(13)..(14)..(15)..(16): Xaa is A or G
  MOD_RES (17)..(18)..(19)..(20): Xaa is A or G or is absent
SEVTMNYHYKLXXXXXXXXXKYLISIPSMKEPVXXPE

SEQ ID NO: 63938 - protein, 37 aa, Artificial Sequence
  GFR-binding peptide
  MOD_RES (2)..(34)..(35): Xaa is C or S
AXSEVTMNEYKFKVVNKNEDLYLISIPEMKEPVXXPE

SEQ ID NO: 63939 - protein, 35 aa, Artificial Sequence; identical to SEQ ID NO: 25824
  GFR-binding peptide
  MOD_RES (2)..(4)..(35): Xaa is C or S

SEQ ID NO: 63940 - protein, 41 aa, Artificial Sequence; identical to SEQ ID NO: 25825
  GFR-binding peptide
  MOD_RES (2)..(36)..(37): Xaa is C or S
  MOD_RES (14)..(15)..(16)..(17)..(18): Xaa is A or G
  MOD_RES (19)..(20)..(21)..(22): Xaa is A or G or is absent

SEQ ID NO: 63941 - protein, 32 aa, Artificial Sequence; identical to SEQ ID NO: 31816
  GFR-binding peptide
  MOD_RES (32)..(32): Xaa is C or S

SEQ ID NO: 63942 - protein, 37 aa, Artificial Sequence; identical to SEQ ID NO: 4747
  GFR-binding peptide
  MOD_RES (2)..(36)..(37): Xaa is C or S
  MOD_RES (14)..(15)..(16)..(17)..(18): Xaa is A or G
  MOD_RES (19)..(20)..(21)..(22): Xaa is A or G or is absent

SEQ ID NO: 63943 - protein, 36 aa, Artificial Sequence; identical to SEQ ID NO: 31824
  GFR-binding peptide
  MOD_RES (34)..(35): Xaa is C or S
  MOD_RES (12)..(13)..(14)..(15)..(16): Xaa is A or G
  MOD_RES (17)..(18)..(19)..(20): Xaa is A or G or is absent

SEQ ID NO: 63944 - protein, 32 aa, Artificial Sequence; identical to SEQ ID NO: 25830
  GFR-binding peptide
  MOD_RES (11)..(12)..(13)..(14)..(15): Xaa is A or G
  MOD_RES (16)..(17)..(18)..(19): Xaa is A or G or is absent

SEQ ID NO: 63945 - protein, 38 aa, Artificial Sequence; identical to SEQ ID NO: 31828
  GFR-binding peptide
  MOD_RES (1)..(35)..(36): Xaa is C or S
  MOD_RES (13)..(14)..(15)..(16)..(17): Xaa is A or G
  MOD_RES (18)..(19)..(20)..(21): Xaa is A or G or is absent

SEQ ID NO: 63946 - protein, 33 aa, Artificial Sequence; identical to SEQ ID NO: 4753
  GFR-binding peptide
  MOD_RES (33)..(33): Xaa is C or S
  MOD_RES (11)..(12)..(13)..(14)..(15): Xaa is A or G
  MOD_RES (16)..(17)..(18)..(19): Xaa is A or G or is absent

SEQ ID NO: 63947 - protein, 39 aa, Artificial Sequence; identical to SEQ ID NO: 25834
  GFR-binding peptide
  MOD_RES (2)..(33)..(34): Xaa is C or S

SEQ ID NO: 63948 - protein, 34 aa, Artificial Sequence
  GFR-binding peptide
  MOD_RES (1)..(32)..(33): Xaa is C or S
XSRVIMPIKGYVKPKRGVFYLINIPSLAQPVXXP

SEQ ID NO: 63949 - protein, 33 aa, Artificial Sequence; identical to SEQ ID NO: 4755
  GFR-binding peptide
  MOD_RES (31)..(32): Xaa is C or S

SEQ ID NO: 63950 - protein, 41 aa, Artificial Sequence
  GFR-binding peptide
  MOD_RES (1)..(3)..(35)..(36): Xaa is C or S
XGXSEVVMDEYKFKVVNNASDLYLISIPELRTPVXXTPPTS

SEQ ID NO: 63951 - protein, 34 aa, Artificial Sequence; identical to SEQ ID NO: 4758
  GFR-binding peptide
  MOD_RES (1)..(3): Xaa is C or S

SEQ ID NO: 63952 - protein, 30 aa, Artificial Sequence; identical to SEQ ID NO: 31837
  GFR-binding peptide

SEQ ID NO: 63953 - protein, 38 aa, Artificial Sequence
  GFR-binding peptide
  MOD_RES (1)..(33)..(34): Xaa is C or S
XSEVTMNEYKFKVVNKNEDLYLISIPEMKEPVXXPEPI

SEQ ID NO: 63954 - protein, 38 aa, Artificial Sequence; identical to SEQ ID NO: 25842
  GFR-binding peptide
  MOD_RES (33)..(34): Xaa is C or S
  MOD_RES (11)..(12)..(13)..(14)..(15): Xaa is A or G
  MOD_RES (16)..(17)..(18)..(19): Xaa is A or G or is absent

SEQ ID NO: 63955 - protein, 43 aa, Artificial Sequence; identical to SEQ ID NO: 25843
  GFR-binding peptide
  MOD_RES (2)..(4)..(39)..(40): Xaa is C or S
  MOD_RES (17)..(18)..(19)..(20)..(21): Xaa is A or G
  MOD_RES (22)..(23)..(24)..(25): Xaa is A or G or is absent

SEQ ID NO: 63956 - protein, 34 aa, Artificial Sequence; identical to SEQ ID NO: 4761
  GFR-binding peptide
  MOD_RES (31)..(32): Xaa is C or S

SEQ ID NO: 63957 - protein, 37 aa, Artificial Sequence; identical to SEQ ID NO: 4762
  GFR-binding peptide
  MOD_RES (1)..(3)..(37): Xaa is C or S
  MOD_RES (15)..(16)..(17)..(18)..(19): Xaa is A or G
  MOD_RES (20)..(21)..(22)..(23): Xaa is A or G or is absent

SEQ ID NO: 63958 - protein, 36 aa, Artificial Sequence
  GFR-binding peptide
  MOD_RES (33)..(34): Xaa is C or S
  MOD_RES (11)..(12)..(13)..(14)..(15): Xaa is A or G
  MOD_RES (16)..(17)..(18)..(19): Xaa is A or G or is absent
DVVMGRHKRLXXXXXXXXXYYLMSTASMKTPTXXPG

SEQ ID NO: 63959 - protein, 38 aa, Artificial Sequence; identical to SEQ ID NO: 4763
  GFR-binding peptide
  MOD_RES (1)..(3)..(35)..(36): Xaa is C or S

SEQ ID NO: 63960 - protein, 37 aa, Artificial Sequence; identical to SEQ ID NO: 4764
  GFR-binding peptide
  MOD_RES (34)..(35): Xaa is C or S
  MOD_RES (12)..(13)..(14)..(15)..(16): Xaa is A or G
  MOD_RES (17)..(18)..(19)..(20): Xaa is A or G or is absent

SEQ ID NO: 63961 - protein, 38 aa, Artificial Sequence; identical to SEQ ID NO: 4767
  GFR-binding peptide
  MOD_RES (32)..(33): Xaa is C or S

SEQ ID NO: 63962 - protein, 40 aa, Artificial Sequence; identical to SEQ ID NO: 25853
  GFR-binding peptide
  MOD_RES (2)..(35)..(36): Xaa is C or S
  MOD_RES (13)..(14)..(15)..(16)..(17): Xaa is A or G
  MOD_RES (18)..(19)..(20)..(21): Xaa is A or G or is absent

SEQ ID NO: 63963 - protein, 39 aa, Artificial Sequence; identical to SEQ ID NO: 4769
  GFR-binding peptide
  MOD_RES (34)..(35): Xaa is C or S
  MOD_RES (12)..(13)..(14)..(15)..(16): Xaa is A or G
  MOD_RES (17)..(18)..(19)..(20): Xaa is A or G or is absent

SEQ ID NO: 63964 - protein, 33 aa, Artificial Sequence; identical to SEQ ID NO: 25855
  GFR-binding peptide
  MOD_RES (2)..(2): Xaa is C or S

SEQ ID NO: 63965 - protein, 36 aa, Artificial Sequence
  GFR-binding peptide
  MOD_RES (1)..(33)..(34): Xaa is C or S
XSEVVMDRHKRLVVNNASDYYLISTASLRTPVXXTP

SEQ ID NO: 63966 - protein, 33 aa, Artificial Sequence; identical to SEQ ID NO: 4775
  GFR-binding peptide
  MOD_RES (1)..(3): Xaa is C or S

SEQ ID NO: 63967 - protein, 41 aa, Artificial Sequence; identical to SEQ ID NO: 4776
  GFR-binding peptide
  MOD_RES (1)..(3)..(35)..(36): Xaa is C or S

SEQ ID NO: 63968 - protein, 35 aa, Artificial Sequence
  GFR-binding peptide
  MOD_RES (34)..(35): Xaa is C or S
  MOD_RES (12)..(13)..(14)..(15)..(16): Xaa is A or G
  MOD_RES (17)..(18)..(19)..(20): Xaa is A or G or is absent
SEVTMNEYKFKXXXXXXXXXLYLISIPEMKEPVXX

SEQ ID NO: 63969 - protein, 41 aa, Artificial Sequence; identical to SEQ ID NO: 25861
  GFR-binding peptide
  MOD_RES (2)..(4)..(38)..(39): Xaa is C or S
  MOD_RES (16)..(17)..(18)..(19)..(20): Xaa is A or G
  MOD_RES (21)..(22)..(23)..(24): Xaa is A or G or is absent

SEQ ID NO: 63970 - protein, 40 aa, Artificial Sequence; identical to SEQ ID NO: 4777
  GFR-binding peptide
  MOD_RES (2)..(4)..(35)..(36): Xaa is C or S

SEQ ID NO: 63971 - protein, 41 aa, Artificial Sequence; identical to SEQ ID NO: 4778
  GFR-binding peptide
  MOD_RES (1)..(3)..(36)..(37): Xaa is C or S
  MOD_RES (14)..(15)..(16)..(17)..(18): Xaa is A or G
  MOD_RES (19)..(20)..(21)..(22): Xaa is A or G or is absent

SEQ ID NO: 63972 - protein, 35 aa, Artificial Sequence; identical to SEQ ID NO: 25864
  GFR-binding peptide
  MOD_RES (33)..(34): Xaa is C or S
  MOD_RES (11)..(12)..(13)..(14)..(15): Xaa is A or G
  MOD_RES (16)..(17)..(18)..(19): Xaa is A or G or is absent

SEQ ID NO: 63973 - protein, 41 aa, Artificial Sequence
  GFR-binding peptide
  MOD_RES (1)..(3)..(35)..(36): Xaa is C or S
XAXSEVTMNRHKRLVVNKNEDYYLISTASMKEPVXXPEPIG

SEQ ID NO: 63974 - protein, 39 aa, Artificial Sequence
  GFR-binding peptide
  MOD_RES (1)..(35)..(36): Xaa is C or S
  MOD_RES (13)..(14)..(15)..(16)..(17): Xaa is A or G
  MOD_RES (18)..(19)..(20)..(21): Xaa is A or G or is absent
XSEVVMDYHYKLXXXXXXXXXKYLISIPSLRTPVXXTPP

SEQ ID NO: 63975 - protein, 38 aa, Artificial Sequence; identical to SEQ ID NO: 4785
  GFR-binding peptide
  MOD_RES (1)..(33)..(34): Xaa is C or S

SEQ ID NO: 63976 - protein, 34 aa, Artificial Sequence; identical to SEQ ID NO: 25867
  GFR-binding peptide
  MOD_RES (1)..(3): Xaa is C or S

SEQ ID NO: 63977 - protein, 37 aa, Artificial Sequence; identical to SEQ ID NO: 4786
  GFR-binding peptide
  MOD_RES (1)..(36)..(37): Xaa is C or S
  MOD_RES (14)..(15)..(16)..(17)..(18): Xaa is A or G
  MOD_RES (19)..(20)..(21)..(22): Xaa is A or G or is absent

SEQ ID NO: 63978 - protein, 30 aa, Artificial Sequence; identical to SEQ ID NO: 4787
  GFR-binding peptide

SEQ ID NO: 63979 - protein, 35 aa, Artificial Sequence
  GFR-binding peptide
  MOD_RES (32)..(33): Xaa is C or S
SEVTMNPIKGYVVNKNEDFYLINIPSMKEPVXXPE

SEQ ID NO: 63980 - protein, 35 aa, Artificial Sequence; identical to SEQ ID NO: 4790
  GFR-binding peptide
  MOD_RES (1)..(34)..(35): Xaa is C or S
  MOD_RES (12)..(13)..(14)..(15)..(16): Xaa is A or G
  MOD_RES (17)..(18)..(19)..(20): Xaa is A or G or is absent

SEQ ID NO: 63981 - protein, 40 aa, Artificial Sequence
  GFR-binding peptide
  MOD_RES (2)..(34)..(35): Xaa is C or S
AXSEVTMNYHYKLVVNKNEDKYLISIPSMKEPVXXPEPIG

SEQ ID NO: 63982 - protein, 34 aa, Artificial Sequence
  GFR-binding peptide
  MOD_RES (33)..(34): Xaa is C or S
  MOD_RES (11)..(12)..(13)..(14)..(15): Xaa is A or G
  MOD_RES (16)..(17)..(18)..(19): Xaa is A or G or is absent
SVAMGRHKRLXXXXXXXXXYYLISTASLKTPVXX

SEQ ID NO: 63983 - protein, 37 aa, Artificial Sequence
  GFR-binding peptide
  MOD_RES (2)..(4): Xaa is C or S
  MOD_RES (16)..(17)..(18)..(19)..(20): Xaa is A or G
  MOD_RES (21)..(22)..(23)..(24): Xaa is A or G or is absent
RXGXSEVVMDRHKRLXXXXXXXXXYYLISTASLRTPV

SEQ ID NO: 63984 - protein, 38 aa, Artificial Sequence; identical to SEQ ID NO: 25876
  GFR-binding peptide
  MOD_RES (2)..(4)..(38): Xaa is C or S
  MOD_RES (16)..(17)..(18)..(19)..(20): Xaa is A or G
  MOD_RES (21)..(22)..(23)..(24): Xaa is A or G or is absent

SEQ ID NO: 63985 - protein, 36 aa, Artificial Sequence; identical to SEQ ID NO: 31876
  GFR-binding peptide
  MOD_RES (1)..(33)..(34): Xaa is C or S

SEQ ID NO: 63986 - protein, 39 aa, Artificial Sequence
  GFR-binding peptide
  MOD_RES (1)..(3)..(36)..(37): Xaa is C or S
  MOD_RES (14)..(15)..(16)..(17)..(18): Xaa is A or G
  MOD_RES (19)..(20)..(21)..(22): Xaa is A or G or is absent
XGXEEVIMRHKRLXXXXXXXXXYYLMSTASTKVPAXXTS

SEQ ID NO: 63987 - protein, 36 aa, Artificial Sequence; identical to SEQ ID NO: 4802
  GFR-binding peptide
  MOD_RES (1)..(3)..(35)..(36): Xaa is C or S

SEQ ID NO: 63988 - protein, 37 aa, Artificial Sequence; identical to SEQ ID NO: 31877
  GFR-binding peptide
  MOD_RES (2)..(35)..(36): Xaa is C or S
  MOD_RES (13)..(14)..(15)..(16)..(17): Xaa is A or G
  MOD_RES (18)..(19)..(20)..(21): Xaa is A or G or is absent

SEQ ID NO: 63989 - protein, 33 aa, Artificial Sequence; identical to SEQ ID NO: 4803
  GFR-binding peptide
  MOD_RES (1)..(3): Xaa is C or S

SEQ ID NO: 63990 - protein, 34 aa, Artificial Sequence; identical to SEQ ID NO: 25882
  GFR-binding peptide
  MOD_RES (1)..(34): Xaa is C or S
  MOD_RES (12)..(13)..(14)..(15)..(16): Xaa is A or G
  MOD_RES (17)..(18)..(19)..(20): Xaa is A or G or is absent

SEQ ID NO: 63991 - protein, 41 aa, Artificial Sequence; identical to SEQ ID NO: 4808
  GFR-binding peptide
  MOD_RES (1)..(3)..(36)..(37): Xaa is C or S
  MOD_RES (14)..(15)..(16)..(17)..(18): Xaa is A or G
  MOD_RES (19)..(20)..(21)..(22): Xaa is A or G or is absent

SEQ ID NO: 63992 - protein, 36 aa, Artificial Sequence
  GFR-binding peptide
  MOD_RES (31)..(32): Xaa is C or S
SKVIMPIKGYIKPTKGIFYLINIPSLDQSVXXPSAS

SEQ ID NO: 63993 - protein, 34 aa, Artificial Sequence
  GFR-binding peptide
  MOD_RES (2)..(34): Xaa is C or S
GXSEVVMDRHKRLVVNNASDYYLISTASLRTPVX

SEQ ID NO: 63994 - protein, 33 aa, Artificial Sequence
  GFR-binding peptide
  MOD_RES (31)..(32): Xaa is C or S
SVAMGRHKRLYTVVGKDYYLISTASLKTPVXXA

SEQ ID NO: 63995 - protein, 38 aa, Artificial Sequence
  GFR-binding peptide
  MOD_RES (2)..(36)..(37): Xaa is C or S
  MOD_RES (14)..(15)..(16)..(17)..(18): Xaa is A or G
  MOD_RES (19)..(20)..(21)..(22): Xaa is A or G or is absent
AXSEVTMNRHKRLXXXXXXXXXYYLISTASMKEPVXXP

SEQ ID NO: 63996 - protein, 37 aa, Artificial Sequence; identical to SEQ ID NO: 25899
  GFR-binding peptide
  MOD_RES (2)..(4): Xaa is C or S
  MOD_RES (16)..(17)..(18)..(19)..(20): Xaa is A or G
  MOD_RES (21)..(22)..(23)..(24): Xaa is A or G or is absent

SEQ ID NO: 63997 - protein, 37 aa, Artificial Sequence
  GFR-binding peptide
  MOD_RES (2)..(4)..(35)..(36): Xaa is C or S
LXGXEEVIMRHKRLLLVRGNDYYLMSTASTKVPAXXT

SEQ ID NO: 63998 - protein, 40 aa, Artificial Sequence; identical to SEQ ID NO: 4821
  GFR-binding peptide
  MOD_RES (2)..(4)..(38): Xaa is C or S
  MOD_RES (16)..(17)..(18)..(19)..(20): Xaa is A or G
  MOD_RES (21)..(22)..(23)..(24): Xaa is A or G or is absent

SEQ ID NO: 63999 - protein, 36 aa, Artificial Sequence; identical to SEQ ID NO: 4823
  GFR-binding peptide
  MOD_RES (33)..(34): Xaa is C or S
  MOD_RES (11)..(12)..(13)..(14)..(15): Xaa is A or G
  MOD_RES (16)..(17)..(18)..(19): Xaa is A or G or is absent

SEQ ID NO: 64000 - protein, 40 aa, Artificial Sequence; identical to SEQ ID NO: 4824
  GFR-binding peptide
  MOD_RES (1)..(36)..(37): Xaa is C or S
  MOD_RES (14)..(15)..(16)..(17)..(18): Xaa is A or G
  MOD_RES (19)..(20)..(21)..(22): Xaa is A or G or is absent

SEQ ID NO: 64001 - protein, 33 aa, Artificial Sequence; identical to SEQ ID NO: 4827
  GFR-binding peptide
  MOD_RES (1)..(32)..(33): Xaa is C or S

SEQ ID NO: 64002 - protein, 37 aa, Artificial Sequence; identical to SEQ ID NO: 31905
  GFR-binding peptide
  MOD_RES (2)..(4): Xaa is C or S
  MOD_RES (16)..(17)..(18)..(19)..(20): Xaa is A or G
  MOD_RES (21)..(22)..(23)..(24): Xaa is A or G or is absent

SEQ ID NO: 64003 - protein, 39 aa, Artificial Sequence
  GFR-binding peptide
  MOD_RES (2)..(33)..(34): Xaa is C or S
KXSRVIMPIKGYVKPKRGVFYLINIPSLAQPVXXPAASA

SEQ ID NO: 64004 - protein, 35 aa, Artificial Sequence; identical to SEQ ID NO: 4835
  GFR-binding peptide
  MOD_RES (1)..(3)..(34)..(35): Xaa is C or S

SEQ ID NO: 64005 - protein, 40 aa, Artificial Sequence; identical to SEQ ID NO: 25910
  GFR-binding peptide
  MOD_RES (1)..(35)..(36): Xaa is C or S
  MOD_RES (13)..(14)..(15)..(16)..(17): Xaa is A or G
  MOD_RES (18)..(19)..(20)..(21): Xaa is A or G or is absent

SEQ ID NO: 64006 - protein, 36 aa, Artificial Sequence
  GFR-binding peptide
  MOD_RES (1)..(3)..(35)..(36): Xaa is C or S
XGXRDVVMGYHYKLIIQQKDNKYLMSIPSMKTPTXX

SEQ ID NO: 64007 - protein, 41 aa, Artificial Sequence
  GFR-binding peptide
  MOD_RES (1)..(3)..(37)..(38): Xaa is C or S
  MOD_RES (15)..(16)..(17)..(18)..(19): Xaa is A or G
  MOD_RES (20)..(21)..(22)..(23): Xaa is A or G or is absent
XGXRDVVMGEYKFKXXXXXXXXXLYLMSIPEMKTPTXXPGA

SEQ ID NO: 64008 - protein, 38 aa, Artificial Sequence; identical to SEQ ID NO: 25912
  GFR-binding peptide
  MOD_RES (1)..(33)..(34): Xaa is C or S

SEQ ID NO: 64009 - protein, 38 aa, Artificial Sequence; identical to SEQ ID NO: 4845
  GFR-binding peptide
  MOD_RES (2)..(4)..(36)..(37): Xaa is C or S

SEQ ID NO: 64010 - protein, 35 aa, Artificial Sequence; identical to SEQ ID NO: 25921
  GFR-binding peptide
  MOD_RES (2)..(4): Xaa is C or S

SEQ ID NO: 64011 - protein, 32 aa, Artificial Sequence
  GFR-binding peptide
  MOD_RES (2)..(2): Xaa is C or S
GXEEVIMRHKRLLLVRGNDYYLMSTASTKVPA

SEQ ID NO: 64012 - protein, 38 aa, Artificial Sequence
  GFR-binding peptide
  MOD_RES (2)..(4)..(36)..(37): Xaa is C or S
SXGXRDVVMGRHKRLIIQQKDNYYLMSTASMKTPTXXP

SEQ ID NO: 64013 - protein, 41 aa, Artificial Sequence; identical to SEQ ID NO: 25922
  GFR-binding peptide
  MOD_RES (1)..(3)..(37)..(38): Xaa is C or S
  MOD_RES (15)..(16)..(17)..(18)..(19): Xaa is A or G
  MOD_RES (20)..(21)..(22)..(23): Xaa is A or G or is absent

SEQ ID NO: 64014 - protein, 36 aa, Artificial Sequence; identical to SEQ ID NO: 25923
  GFR-binding peptide
  MOD_RES (1)..(3): Xaa is C or S
  MOD_RES (15)..(16)..(17)..(18)..(19): Xaa is A or G
  MOD_RES (20)..(21)..(22)..(23): Xaa is A or G or is absent

SEQ ID NO: 64015 - protein, 37 aa, Artificial Sequence
  GFR-binding peptide
  MOD_RES (2)..(36)..(37): Xaa is C or S
  MOD_RES (14)..(15)..(16)..(17)..(18): Xaa is A or G
  MOD_RES (19)..(20)..(21)..(22): Xaa is A or G or is absent
GXSEVVMDRHKRLXXXXXXXXXYYLISTASLRTPVXX

SEQ ID NO: 64016 - protein, 40 aa, Artificial Sequence; identical to SEQ ID NO: 25926
  GFR-binding peptide
  MOD_RES (2)..(4)..(38)..(39): Xaa is C or S
  MOD_RES (16)..(17)..(18)..(19)..(20): Xaa is A or G
  MOD_RES (21)..(22)..(23)..(24): Xaa is A or G or is absent

SEQ ID NO: 64017 - protein, 38 aa, Artificial Sequence; identical to SEQ ID NO: 25927
  GFR-binding peptide
  MOD_RES (1)..(33)..(34): Xaa is C or S

SEQ ID NO: 64018 - protein, 32 aa, Artificial Sequence; identical to SEQ ID NO: 31924
  GFR-binding peptide
  MOD_RES (1)..(1): Xaa is C or S

SEQ ID NO: 64019 - protein, 40 aa, Artificial Sequence; identical to SEQ ID NO: 31926
  GFR-binding peptide
  MOD_RES (1)..(34)..(35): Xaa is C or S
  MOD_RES (12)..(13)..(14)..(15)..(16): Xaa is A or G
  MOD_RES (17)..(18)..(19)..(20): Xaa is A or G or is absent

SEQ ID NO: 64020 - protein, 35 aa, Artificial Sequence; identical to SEQ ID NO: 25929
  GFR-binding peptide
  MOD_RES (34)..(35): Xaa is C or S
  MOD_RES (12)..(13)..(14)..(15)..(16): Xaa is A or G
  MOD_RES (17)..(18)..(19)..(20): Xaa is A or G or is absent

SEQ ID NO: 64021 - protein, 36 aa, Artificial Sequence; identical to SEQ ID NO: 25936
  GFR-binding peptide
  MOD_RES (1)..(3)..(35): Xaa is C or S

SEQ ID NO: 64022 - protein, 36 aa, Artificial Sequence; identical to SEQ ID NO: 4869
  GFR-binding peptide
  MOD_RES (1)..(3)..(36): Xaa is C or S

SEQ ID NO: 64023 - protein, 39 aa, Artificial Sequence; identical to SEQ ID NO: 25941
  GFR-binding peptide
  MOD_RES (33)..(34): Xaa is C or S
  MOD_RES (11)..(12)..(13)..(14)..(15): Xaa is A or G
  MOD_RES (16)..(17)..(18)..(19): Xaa is A or G or is absent

SEQ ID NO: 64024 - protein, 34 aa, Artificial Sequence; identical to SEQ ID NO: 31936
  GFR-binding peptide
  MOD_RES (32)..(33): Xaa is C or S

SEQ ID NO: 64025 - protein, 37 aa, Artificial Sequence; identical to SEQ ID NO: 25944
  GFR-binding peptide
  MOD_RES (1)..(35)..(36): Xaa is C or S
  MOD_RES (13)..(14)..(15)..(16)..(17): Xaa is A or G
  MOD_RES (18)..(19)..(20)..(21): Xaa is A or G or is absent

SEQ ID NO: 64026 - protein, 34 aa, Artificial Sequence
  GFR-binding peptide
  MOD_RES (31)..(32): Xaa is C or S
EVTMNRYKKLVVNKNEDFYLISIANMKEPVXXPE

SEQ ID NO: 64027 - protein, 41 aa, Artificial Sequence; identical to SEQ ID NO: 25946
  GFR-binding peptide
  MOD_RES (2)..(4)..(36)..(37): Xaa is C or S

SEQ ID NO: 64028 - protein, 38 aa, Artificial Sequence
  GFR-binding peptide
  MOD_RES (2)..(36)..(37): Xaa is C or S
  MOD_RES (14)..(15)..(16)..(17)..(18): Xaa is A or G
  MOD_RES (19)..(20)..(21)..(22): Xaa is A or G or is absent
GXSEVVMDRHKRLXXXXXXXXXYYLISTASLRTPVXXT

SEQ ID NO: 64029 - protein, 36 aa, Artificial Sequence; identical to SEQ ID NO: 25951
  GFR-binding peptide
  MOD_RES (2)..(33)..(34): Xaa is C or S

SEQ ID NO: 64030 - protein, 37 aa, Artificial Sequence
  GFR-binding peptide
  MOD_RES (1)..(3)..(37): Xaa is C or S
  MOD_RES (15)..(16)..(17)..(18)..(19): Xaa is A or G
  MOD_RES (20)..(21)..(22)..(23): Xaa is A or G or is absent
XGXESVAMGRHKRLXXXXXXXXXYYLISTASLKTPVX

SEQ ID NO: 64031 - protein, 39 aa, Artificial Sequence; identical to SEQ ID NO: 31952
  GFR-binding peptide
  MOD_RES (2)..(35)..(36): Xaa is C or S

SEQ ID NO: 64032 - protein, 37 aa, Artificial Sequence
  GFR-binding peptide
  MOD_RES (2)..(34)..(35): Xaa is C or S
GXAEVVMDRHKRLVVNNAADYYLISTASLRAPVXXSA

SEQ ID NO: 64033 - protein, 41 aa, Artificial Sequence; identical to SEQ ID NO: 4876
  GFR-binding peptide
  MOD_RES (1)..(3)..(35)..(36): Xaa is C or S

SEQ ID NO: 64034 - protein, 38 aa, Artificial Sequence
  GFR-binding peptide
  MOD_RES (1)..(3)..(37)..(38): Xaa is C or S
  MOD_RES (15)..(16)..(17)..(18)..(19): Xaa is A or G
  MOD_RES (20)..(21)..(22)..(23): Xaa is A or G or is absent
XGXRDVVMGEYKFKXXXXXXXXXLYLMSIPEMKTPTXX

SEQ ID NO: 64035 - protein, 36 aa, Artificial Sequence; identical to SEQ ID NO: 4877
  GFR-binding peptide
  MOD_RES (31)..(32): Xaa is C or S

SEQ ID NO: 64036 - protein, 40 aa, Artificial Sequence; identical to SEQ ID NO: 4878
  GFR-binding peptide
  MOD_RES (2)..(4)..(36)..(37): Xaa is C or S

SEQ ID NO: 64037 - protein, 40 aa, Artificial Sequence; identical to SEQ ID NO: 4883
  GFR-binding peptide
  MOD_RES (2)..(4)..(39)..(40): Xaa is C or S
  MOD_RES (17)..(18)..(19)..(20)..(21): Xaa is A or G
  MOD_RES (22)..(23)..(24)..(25): Xaa is A or G or is absent

SEQ ID NO: 64038 - protein, 41 aa, Artificial Sequence
  GFR-binding peptide
  MOD_RES (2)..(4)..(37)..(38): Xaa is C or S
  MOD_RES (15)..(16)..(17)..(18)..(19): Xaa is A or G
  MOD_RES (20)..(21)..(22)..(23): Xaa is A or G or is absent
LXGXEEVIMEYKFKXXXXXXXXXLYLMSIPETKVPAXXTSP

SEQ ID NO: 64039 - protein, 32 aa, Artificial Sequence
  GFR-binding peptide
  MOD_RES (11)..(12)..(13)..(14)..(15): Xaa is A or G
  MOD_RES (16)..(17)..(18)..(19): Xaa is A or G or is absent
EVTMNYHYKLXXXXXXXXXKYLISIPSMKEPV

SEQ ID NO: 64040 - protein, 34 aa, Artificial Sequence; identical to SEQ ID NO: 4887
  GFR-binding peptide
  MOD_RES (32)..(33): Xaa is C or S

SEQ ID NO: 64041 - protein, 34 aa, Artificial Sequence; identical to SEQ ID NO: 31969
  GFR-binding peptide
  MOD_RES (1)..(3): Xaa is C or S

SEQ ID NO: 64042 - protein, 38 aa, Artificial Sequence; identical to SEQ ID NO: 31970
  GFR-binding peptide
  MOD_RES (1)..(33)..(34): Xaa is C or S

SEQ ID NO: 64043 - protein, 37 aa, Artificial Sequence; identical to SEQ ID NO: 4889
  GFR-binding peptide
  MOD_RES (1)..(3)..(37): Xaa is C or S
  MOD_RES (15)..(16)..(17)..(18)..(19): Xaa is A or G
  MOD_RES (20)..(21)..(22)..(23): Xaa is A or G or is absent

SEQ ID NO: 64044 - protein, 36 aa, Artificial Sequence
  GFR-binding peptide
  MOD_RES (1)..(35)..(36): Xaa is C or S
  MOD_RES (13)..(14)..(15)..(16)..(17): Xaa is A or G
  MOD_RES (18)..(19)..(20)..(21): Xaa is A or G or is absent
XSEVVMDEYKFKXXXXXXXXXLYLISIPELRTPVXX

SEQ ID NO: 64045 - protein, 38 aa, Artificial Sequence; identical to SEQ ID NO: 25972
  GFR-binding peptide
  MOD_RES (32)..(33): Xaa is C or S

SEQ ID NO: 64046 - protein, 34 aa, Artificial Sequence; identical to SEQ ID NO: 25974
  GFR-binding peptide
  MOD_RES (1)..(1): Xaa is C or S
  MOD_RES (13)..(14)..(15)..(16)..(17): Xaa is A or G
  MOD_RES (18)..(19)..(20)..(21): Xaa is A or G or is absent

SEQ ID NO: 64047 - protein, 31 aa, Artificial Sequence; identical to SEQ ID NO: 4894
  GFR-binding peptide
  MOD_RES (31)..(31): Xaa is C or S

SEQ ID NO: 64048 - protein, 41 aa, Artificial Sequence; identical to SEQ ID NO: 31976
  GFR-binding peptide
  MOD_RES (1)..(3)..(35)..(36): Xaa is C or S

SEQ ID NO: 64049 - protein, 39 aa, Artificial Sequence; identical to SEQ ID NO: 31977
  GFR-binding peptide
  MOD_RES (33)..(34): Xaa is C or S
  MOD_RES (11)..(12)..(13)..(14)..(15): Xaa is A or G
  MOD_RES (16)..(17)..(18)..(19): Xaa is A or G or is absent

SEQ ID NO: 64050 - protein, 37 aa, Artificial Sequence; identical to SEQ ID NO: 4895
  GFR-binding peptide
  MOD_RES (1)..(3)..(34)..(35): Xaa is C or S

SEQ ID NO: 64051 - protein, 41 aa, Artificial Sequence
  GFR-binding peptide
  MOD_RES (1)..(35)..(36): Xaa is C or S
  MOD_RES (13)..(14)..(15)..(16)..(17): Xaa is A or G
  MOD_RES (18)..(19)..(20)..(21): Xaa is A or G or is absent
XSEVTMNRYKKLXXXXXXXXXFYLISIANMKEPVXXPEPIG

SEQ ID NO: 64052 - protein, 41 aa, Artificial Sequence; identical to SEQ ID NO: 25981
  GFR-binding peptide
  MOD_RES (1)..(3)..(37)..(38): Xaa is C or S
  MOD_RES (15)..(16)..(17)..(18)..(19): Xaa is A or G
  MOD_RES (20)..(21)..(22)..(23): Xaa is A or G or is absent

SEQ ID NO: 64053 - protein, 34 aa, Artificial Sequence
  GFR-binding peptide
  MOD_RES (2)..(34): Xaa is C or S
GXRDVVMGEYKFKIIQQKDNLYLMSIPEMKTPTX

SEQ ID NO: 64054 - protein, 39 aa, Artificial Sequence; identical to SEQ ID NO: 4897
  GFR-binding peptide
  MOD_RES (2)..(4)..(37)..(38): Xaa is C or S
  MOD_RES (15)..(16)..(17)..(18)..(19): Xaa is A or G
  MOD_RES (20)..(21)..(22)..(23): Xaa is A or G or is absent

SEQ ID NO: 64055 - protein, 35 aa, Artificial Sequence; identical to SEQ ID NO: 4899
  GFR-binding peptide
  MOD_RES (2)..(35): Xaa is C or S
  MOD_RES (13)..(14)..(15)..(16)..(17): Xaa is A or G
  MOD_RES (18)..(19)..(20)..(21): Xaa is A or G or is absent

SEQ ID NO: 64056 - protein, 33 aa, Artificial Sequence
  GFR-binding peptide
  MOD_RES (33)..(33): Xaa is C or S
  MOD_RES (11)..(12)..(13)..(14)..(15): Xaa is A or G
  MOD_RES (16)..(17)..(18)..(19): Xaa is A or G or is absent
EVVMDRHKRLXXXXXXXXXYYLISTASLRTPVX

SEQ ID NO: 64057 - protein, 37 aa, Artificial Sequence; identical to SEQ ID NO: 31984
  GFR-binding peptide
  MOD_RES (2)..(36)..(37): Xaa is C or S
  MOD_RES (14)..(15)..(16)..(17)..(18): Xaa is A or G
  MOD_RES (19)..(20)..(21)..(22): Xaa is A or G or is absent

SEQ ID NO: 64058 - protein, 30 aa, Artificial Sequence
  GFR-binding peptide
EVVMDYHYKLVVNNASDKYLISIPSLRTPV

SEQ ID NO: 64059 - protein, 42 aa, Artificial Sequence; identical to SEQ ID NO: 4904
  GFR-binding peptide
  MOD_RES (2)..(36)..(37): Xaa is C or S
  MOD_RES (14)..(15)..(16)..(17)..(18): Xaa is A or G
  MOD_RES (19)..(20)..(21)..(22): Xaa is A or G or is absent

SEQ ID NO: 64060 - protein, 39 aa, Artificial Sequence
  GFR-binding peptide
  MOD_RES (2)..(35)..(36): Xaa is C or S
  MOD_RES (13)..(14)..(15)..(16)..(17): Xaa is A or G
  MOD_RES (18)..(19)..(20)..(21): Xaa is A or G or is absent
GXEEVIMRHKRLXXXXXXXXXYYLMSTASTKVPAXXTSP

SEQ ID NO: 64061 - protein, 40 aa, Artificial Sequence; identical to SEQ ID NO: 4905
  GFR-binding peptide
  MOD_RES (34)..(35): Xaa is C or S
  MOD_RES (12)..(13)..(14)..(15)..(16): Xaa is A or G
  MOD_RES (17)..(18)..(19)..(20): Xaa is A or G or is absent

SEQ ID NO: 64062 - protein, 36 aa, Artificial Sequence; identical to SEQ ID NO: 25994
  GFR-binding peptide
  MOD_RES (34)..(34): Xaa is C or S
  MOD_RES (12)..(13)..(14)..(15)..(16): Xaa is A or G
  MOD_RES (17)..(18)..(19)..(20): Xaa is A or G or is absent

SEQ ID NO: 64063 - protein, 35 aa, Artificial Sequence; identical to SEQ ID NO: 25995
  GFR-binding peptide
  MOD_RES (1)..(35): Xaa is C or S
  MOD_RES (13)..(14)..(15)..(16)..(17): Xaa is A or G
  MOD_RES (18)..(19)..(20)..(21): Xaa is A or G or is absent

SEQ ID NO: 64064 - protein, 38 aa, Artificial Sequence; identical to SEQ ID NO: 4907
  GFR-binding peptide
  MOD_RES (2)..(4)..(38): Xaa is C or S
  MOD_RES (16)..(17)..(18)..(19)..(20): Xaa is A or G
  MOD_RES (21)..(22)..(23)..(24): Xaa is A or G or is absent

SEQ ID NO: 64065 - protein, 40 aa, Artificial Sequence; identical to SEQ ID NO: 4908
  GFR-binding peptide
  MOD_RES (2)..(36)..(37): Xaa is C or S
  MOD_RES (14)..(15)..(16)..(17)..(18): Xaa is A or G
  MOD_RES (19)..(20)..(21)..(22): Xaa is A or G or is absent

SEQ ID NO: 64066 - protein, 36 aa, Artificial Sequence; identical to SEQ ID NO: 25998
  GFR-binding peptide
  MOD_RES (2)..(36): Xaa is C or S
  MOD_RES (14)..(15)..(16)..(17)..(18): Xaa is A or G
  MOD_RES (19)..(20)..(21)..(22): Xaa is A or G or is absent

SEQ ID NO: 64067 - protein, 42 aa, Artificial Sequence; identical to SEQ ID NO: 31991
  GFR-binding peptide
  MOD_RES (2)..(4)..(36)..(37): Xaa is C or S

SEQ ID NO: 64068 - protein, 32 aa, Artificial Sequence
  GFR-binding peptide
  MOD_RES (11)..(12)..(13)..(14)..(15): Xaa is A or G
  MOD_RES (16)..(17)..(18)..(19): Xaa is A or G or is absent
EEVIMYHYKLXXXXXXXXXKYLMSIPSTKVPA

SEQ ID NO: 64069 - protein, 42 aa, Artificial Sequence; identical to SEQ ID NO: 56948
  GFR-binding peptide
  MOD_RES (1)..(3)..(37)..(38): Xaa is C or S
  MOD_RES (15)..(16)..(17)..(18)..(19): Xaa is A or G
  MOD_RES (20)..(21)..(22)..(23): Xaa is A or G or is absent

SEQ ID NO: 64070 - protein, 39 aa, Artificial Sequence; identical to SEQ ID NO: 4915
  GFR-binding peptide
  MOD_RES (2)..(33)..(34): Xaa is C or S

SEQ ID NO: 64071 - protein, 38 aa, Artificial Sequence; identical to SEQ ID NO: 4918
  GFR-binding peptide
  MOD_RES (2)..(35)..(36): Xaa is C or S
  MOD_RES (13)..(14)..(15)..(16)..(17): Xaa is A or G
  MOD_RES (18)..(19)..(20)..(21): Xaa is A or G or is absent

SEQ ID NO: 64072 - protein, 34 aa, Artificial Sequence; identical to SEQ ID NO: 31999
  GFR-binding peptide
  MOD_RES (34)..(34): Xaa is C or S
  MOD_RES (12)..(13)..(14)..(15)..(16): Xaa is A or G
  MOD_RES (17)..(18)..(19)..(20): Xaa is A or G or is absent

SEQ ID NO: 64073 - protein, 33 aa, Artificial Sequence
  GFR-binding peptide
  MOD_RES (12)..(13)..(14)..(15)..(16): Xaa is A or G
  MOD_RES (17)..(18)..(19)..(20): Xaa is A or G or is absent
SEVTMNRHKRLXXXXXXXXXYYLISTASMKEPV

SEQ ID NO: 64074 - protein, 43 aa, Artificial Sequence; identical to SEQ ID NO: 26010
  GFR-binding peptide
  MOD_RES (2)..(4)..(38): Xaa is C or S
  MOD_RES (16)..(17)..(18)..(19)..(20): Xaa is A or G
  MOD_RES (21)..(22)..(23)..(24): Xaa is A or G or is absent

SEQ ID NO: 64075 - protein, 42 aa, Artificial Sequence
  GFR-binding peptide
  MOD_RES (2)..(4)..(36)..(37): Xaa is C or S
SXGXRDVVMGYHYKLIIQQKDNKYLMSIPSMKTPTXXPGASG

SEQ ID NO: 64076 - protein, 38 aa, Artificial Sequence; identical to SEQ ID NO: 4921
  GFR-binding peptide
  MOD_RES (1)..(3)..(37): Xaa is C or S
  MOD_RES (15)..(16)..(17)..(18)..(19): Xaa is A or G
  MOD_RES (20)..(21)..(22)..(23): Xaa is A or G or is absent

SEQ ID NO: 64077 - protein, 36 aa, Artificial Sequence; identical to SEQ ID NO: 4922
  GFR-binding peptide
  MOD_RES (1)..(33)..(34): Xaa is C or S

SEQ ID NO: 64078 - protein, 38 aa, Artificial Sequence; identical to SEQ ID NO: 26014
  GFR-binding peptide
  MOD_RES (1)..(33)..(34): Xaa is C or S

SEQ ID NO: 64079 - protein, 36 aa, Artificial Sequence; identical to SEQ ID NO: 4924
  GFR-binding peptide
  MOD_RES (31)..(32): Xaa is C or S

SEQ ID NO: 64080 - protein, 37 aa, Artificial Sequence; identical to SEQ ID NO: 26017
  GFR-binding peptide
  MOD_RES (33)..(34): Xaa is C or S
  MOD_RES (11)..(12)..(13)..(14)..(15): Xaa is A or G
  MOD_RES (16)..(17)..(18)..(19): Xaa is A or G or is absent

SEQ ID NO: 64081 - protein, 32 aa, Artificial Sequence; identical to SEQ ID NO: 26018
  GFR-binding peptide
  MOD_RES (32)..(32): Xaa is C or S

SEQ ID NO: 64082 - protein, 38 aa, Artificial Sequence; identical to SEQ ID NO: 4926
  GFR-binding peptide
  MOD_RES (33)..(34): Xaa is C or S
  MOD_RES (11)..(12)..(13)..(14)..(15): Xaa is A or G
  MOD_RES (16)..(17)..(18)..(19): Xaa is A or G or is absent

SEQ ID NO: 64083 - protein, 35 aa, Artificial Sequence; identical to SEQ ID NO: 26021
  GFR-binding peptide
  MOD_RES (1)..(35): Xaa is C or S
  MOD_RES (13)..(14)..(15)..(16)..(17): Xaa is A or G
  MOD_RES (18)..(19)..(20)..(21): Xaa is A or G or is absent

SEQ ID NO: 64084 - protein, 44 aa, Artificial Sequence; identical to SEQ ID NO: 32006
  GFR-binding peptide
  MOD_RES (2)..(4)..(38)..(39): Xaa is C or S
  MOD_RES (16)..(17)..(18)..(19)..(20): Xaa is A or G
  MOD_RES (21)..(22)..(23)..(24): Xaa is A or G or is absent

SEQ ID NO: 64085 - protein, 38 aa, Artificial Sequence; identical to SEQ ID NO: 32007
  GFR-binding peptide
  MOD_RES (1)..(3)..(37)..(38): Xaa is C or S
  MOD_RES (15)..(16)..(17)..(18)..(19): Xaa is A or G
  MOD_RES (20)..(21)..(22)..(23): Xaa is A or G or is absent

SEQ ID NO: 64086 - protein, 34 aa, Artificial Sequence; identical to SEQ ID NO: 4931
  GFR-binding peptide
  MOD_RES (2)..(33)..(34): Xaa is C or S

SEQ ID NO: 64087 - protein, 37 aa, Artificial Sequence; identical to SEQ ID NO: 56966
  GFR-binding peptide
  MOD_RES (2)..(4)..(37): Xaa is C or S
  MOD_RES (15)..(16)..(17)..(18)..(19): Xaa is A or G
  MOD_RES (20)..(21)..(22)..(23): Xaa is A or G or is absent

SEQ ID NO: 64088 - protein, 31 aa, Artificial Sequence; identical to SEQ ID NO: 32013
  GFR-binding peptide
  MOD_RES (31)..(31): Xaa is C or S

SEQ ID NO: 64089 - protein, 34 aa, Artificial Sequence
  GFR-binding peptide
  MOD_RES (1)..(1): Xaa is C or S
  MOD_RES (13)..(14)..(15)..(16)..(17): Xaa is A or G
  MOD_RES (18)..(19)..(20)..(21): Xaa is A or G or is absent
XSEVTMNPIKGYXXXXXXXXXFYLINIPSMKEPV

SEQ ID NO: 64090 - protein, 33 aa, Artificial Sequence; identical to SEQ ID NO: 32022
  GFR-binding peptide
  MOD_RES (32)..(33): Xaa is C or S

SEQ ID NO: 64091 - protein, 38 aa, Artificial Sequence; identical to SEQ ID NO: 4934
  GFR-binding peptide
  MOD_RES (1)..(3)..(38): Xaa is C or S
  MOD_RES (16)..(17)..(18)..(19)..(20): Xaa is A or G
  MOD_RES (21)..(22)..(23)..(24): Xaa is A or G or is absent

SEQ ID NO: 64092 - protein, 37 aa, Artificial Sequence
  GFR-binding peptide
  MOD_RES (2)..(34)..(35): Xaa is C or S
AXSEVTMNRYKKLVVNKNEDFYLISIANMKEPVXXPE

SEQ ID NO: 64093 - protein, 36 aa, Artificial Sequence; identical to SEQ ID NO: 4935
  GFR-binding peptide
  MOD_RES (1)..(3): Xaa is C or S
  MOD_RES (15)..(16)..(17)..(18)..(19): Xaa is A or G
  MOD_RES (20)..(21)..(22)..(23): Xaa is A or G or is absent

SEQ ID NO: 64094 - protein, 38 aa, Artificial Sequence; identical to SEQ ID NO: 4937
  GFR-binding peptide
  MOD_RES (1)..(3)..(37)..(38): Xaa is C or S
  MOD_RES (15)..(16)..(17)..(18)..(19): Xaa is A or G
  MOD_RES (20)..(21)..(22)..(23): Xaa is A or G or is absent

SEQ ID NO: 64095 - protein, 37 aa, Artificial Sequence; identical to SEQ ID NO: 4938
  GFR-binding peptide
  MOD_RES (2)..(4)..(37): Xaa is C or S
  MOD_RES (15)..(16)..(17)..(18)..(19): Xaa is A or G
  MOD_RES (20)..(21)..(22)..(23): Xaa is A or G or is absent

SEQ ID NO: 64096 - protein, 39 aa, Artificial Sequence; identical to SEQ ID NO: 32027
  GFR-binding peptide
  MOD_RES (33)..(34): Xaa is C or S
  MOD_RES (11)..(12)..(13)..(14)..(15): Xaa is A or G
  MOD_RES (16)..(17)..(18)..(19): Xaa is A or G or is absent

SEQ ID NO: 64097 - protein, 36 aa, Artificial Sequence; identical to SEQ ID NO: 26032
  GFR-binding peptide
  MOD_RES (1)..(33)..(34): Xaa is C or S

SEQ ID NO: 64098 - protein, 40 aa, Artificial Sequence; identical to SEQ ID NO: 4942
  GFR-binding peptide
  MOD_RES (2)..(36)..(37): Xaa is C or S
  MOD_RES (14)..(15)..(16)..(17)..(18): Xaa is A or G
  MOD_RES (19)..(20)..(21)..(22): Xaa is A or G or is absent

SEQ ID NO: 64099 - protein, 36 aa, Artificial Sequence; identical to SEQ ID NO: 32032
  GFR-binding peptide
  MOD_RES (1)..(3)..(35)..(36): Xaa is C or S

SEQ ID NO: 64100 - protein, 36 aa, Artificial Sequence; identical to SEQ ID NO: 32034
  GFR-binding peptide
  MOD_RES (2)..(4)..(36): Xaa is C or S

SEQ ID NO: 64101 - protein, 35 aa, Artificial Sequence; identical to SEQ ID NO: 4945
  GFR-binding peptide
  MOD_RES (1)..(33)..(34): Xaa is C or S

SEQ ID NO: 64102 - protein, 41 aa, Artificial Sequence; identical to SEQ ID NO: 4946
  GFR-binding peptide
  MOD_RES (35)..(36): Xaa is C or S
  MOD_RES (13)..(14)..(15)..(16)..(17): Xaa is A or G
  MOD_RES (18)..(19)..(20)..(21): Xaa is A or G or is absent

SEQ ID NO: 64103 - protein, 37 aa, Artificial Sequence; identical to SEQ ID NO: 4947
  GFR-binding peptide
  MOD_RES (2)..(4)..(37): Xaa is C or S
  MOD_RES (15)..(16)..(17)..(18)..(19): Xaa is A or G
  MOD_RES (20)..(21)..(22)..(23): Xaa is A or G or is absent

SEQ ID NO: 64104 - protein, 36 aa, Artificial Sequence
  GFR-binding peptide
  MOD_RES (1)..(33)..(34): Xaa is C or S
XSEVTMNYHYKLVVNKNEDKYLISIPSMKEPVXXPE

SEQ ID NO: 64105 - protein, 32 aa, Artificial Sequence; identical to SEQ ID NO: 26036
  GFR-binding peptide
  MOD_RES (2)..(2): Xaa is C or S

SEQ ID NO: 64106 - protein, 42 aa, Artificial Sequence
  GFR-binding peptide
  MOD_RES (1)..(3)..(37)..(38): Xaa is C or S
  MOD_RES (15)..(16)..(17)..(18)..(19): Xaa is A or G
  MOD_RES (20)..(21)..(22)..(23): Xaa is A or G or is absent
XGXRDVVMGEYKFKXXXXXXXXXLYLMSIPEMKTPTXXPGAS

SEQ ID NO: 64107 - protein, 33 aa, Artificial Sequence; identical to SEQ ID NO: 26039
  GFR-binding peptide
  MOD_RES (1)..(32)..(33): Xaa is C or S

SEQ ID NO: 64108 - protein, 37 aa, Artificial Sequence; identical to SEQ ID NO: 26042
  GFR-binding peptide
  MOD_RES (2)..(4)..(37): Xaa is C or S
  MOD_RES (15)..(16)..(17)..(18)..(19): Xaa is A or G
  MOD_RES (20)..(21)..(22)..(23): Xaa is A or G or is absent

SEQ ID NO: 64109 - protein, 31 aa, Artificial Sequence; identical to SEQ ID NO: 4949
  GFR-binding peptide

SEQ ID NO: 64110 - protein, 42 aa, Artificial Sequence; identical to SEQ ID NO: 4950
  GFR-binding peptide
  MOD_RES (1)..(3)..(37)..(38): Xaa is C or S
  MOD_RES (15)..(16)..(17)..(18)..(19): Xaa is A or G
  MOD_RES (20)..(21)..(22)..(23): Xaa is A or G or is absent

SEQ ID NO: 64111 - protein, 33 aa, Artificial Sequence; identical to SEQ ID NO: 4951
  GFR-binding peptide
  MOD_RES (2)..(33): Xaa is C or S

SEQ ID NO: 64112 - protein, 35 aa, Artificial Sequence; identical to SEQ ID NO: 32044
  GFR-binding peptide
  MOD_RES (1)..(3)..(35): Xaa is C or S

SEQ ID NO: 64113 - protein, 33 aa, Artificial Sequence; identical to SEQ ID NO: 4953
  GFR-binding peptide
  MOD_RES (32)..(33): Xaa is C or S

SEQ ID NO: 64114 - protein, 37 aa, Artificial Sequence; identical to SEQ ID NO: 26049
  GFR-binding peptide
  MOD_RES (34)..(35): Xaa is C or S
  MOD_RES (12)..(13)..(14)..(15)..(16): Xaa is A or G
  MOD_RES (17)..(18)..(19)..(20): Xaa is A or G or is absent

SEQ ID NO: 64115 - protein, 43 aa, Artificial Sequence; identical to SEQ ID NO: 26050
  GFR-binding peptide
  MOD_RES (2)..(37)..(38): Xaa is C or S
  MOD_RES (15)..(16)..(17)..(18)..(19): Xaa is A or G
  MOD_RES (20)..(21)..(22)..(23): Xaa is A or G or is absent

SEQ ID NO: 64116 - protein, 40 aa, Artificial Sequence; identical to SEQ ID NO: 12387
  GFR-binding peptide
  MOD_RES (2)..(36)..(37): Xaa is C or S
  MOD_RES (14)..(15)..(16)..(17)..(18): Xaa is A or G
  MOD_RES (19)..(20)..(21)..(22): Xaa is A or G or is absent

SEQ ID NO: 64117 - protein, 38 aa, Artificial Sequence; identical to SEQ ID NO: 32045
  GFR-binding peptide
  MOD_RES (1)..(35)..(36): Xaa is C or S
  MOD_RES (13)..(14)..(15)..(16)..(17): Xaa is A or G
  MOD_RES (18)..(19)..(20)..(21): Xaa is A or G or is absent

SEQ ID NO: 64118 - protein, 37 aa, Artificial Sequence; identical to SEQ ID NO: 4955
  GFR-binding peptide
  MOD_RES (2)..(34)..(35): Xaa is C or S

SEQ ID NO: 64119 - protein, 36 aa, Artificial Sequence; identical to SEQ ID NO: 4956
  GFR-binding peptide
  MOD_RES (2)..(34)..(35): Xaa is C or S

SEQ ID NO: 64120 - protein, 41 aa, Artificial Sequence; identical to SEQ ID NO: 32047
  GFR-binding peptide
  MOD_RES (1)..(35)..(36): Xaa is C or S
  MOD_RES (13)..(14)..(15)..(16)..(17): Xaa is A or G
  MOD_RES (18)..(19)..(20)..(21): Xaa is A or G or is absent

SEQ ID NO: 64121 - protein, 37 aa, Artificial Sequence; identical to SEQ ID NO: 32049
  GFR-binding peptide
  MOD_RES (2)..(36)..(37): Xaa is C or S
  MOD_RES (14)..(15)..(16)..(17)..(18): Xaa is A or G
  MOD_RES (19)..(20)..(21)..(22): Xaa is A or G or is absent

SEQ ID NO: 64122 - protein, 41 aa, Artificial Sequence; identical to SEQ ID NO: 56998
  GFR-binding peptide
  MOD_RES (1)..(35)..(36): Xaa is C or S
  MOD_RES (13)..(14)..(15)..(16)..(17): Xaa is A or G
  MOD_RES (18)..(19)..(20)..(21): Xaa is A or G or is absent

SEQ ID NO: 64123 - protein, 36 aa, Artificial Sequence; identical to SEQ ID NO: 4961
  GFR-binding peptide
  MOD_RES (33)..(34): Xaa is C or S
  MOD_RES (11)..(12)..(13)..(14)..(15): Xaa is A or G
  MOD_RES (16)..(17)..(18)..(19): Xaa is A or G or is absent

SEQ ID NO: 64124 - protein, 35 aa, Artificial Sequence; identical to SEQ ID NO: 12395
  GFR-binding peptide
  MOD_RES (2)..(34)..(35): Xaa is C or S

SEQ ID NO: 64125 - protein, 34 aa, Artificial Sequence
  GFR-binding peptide
  MOD_RES (1)..(3): Xaa is C or S
XAXSEVTMNRHKRLVVNKNEDYYLISTASMKEPV

SEQ ID NO: 64126 - protein, 32 aa, Artificial Sequence; identical to SEQ ID NO: 4963
  GFR-binding peptide
  MOD_RES (11)..(12)..(13)..(14)..(15): Xaa is A or G
  MOD_RES (16)..(17)..(18)..(19): Xaa is A or G or is absent

SEQ ID NO: 64127 - protein, 38 aa, Artificial Sequence; identical to SEQ ID NO: 4965
  GFR-binding peptide
  MOD_RES (1)..(32)..(33): Xaa is C or S

SEQ ID NO: 64128 - protein, 30 aa, Artificial Sequence; identical to SEQ ID NO: 4966
  GFR-binding peptide

SEQ ID NO: 64129 - protein, 38 aa, Artificial Sequence; identical to SEQ ID NO: 32058
  GFR-binding peptide
  MOD_RES (1)..(3)..(35)..(36): Xaa is C or S

SEQ ID NO: 64130 - protein, 31 aa, Artificial Sequence; identical to SEQ ID NO: 32063
  GFR-binding peptide

SEQ ID NO: 64131 - protein, 36 aa, Artificial Sequence; identical to SEQ ID NO: 4972
  GFR-binding peptide
  MOD_RES (2)..(4)..(35)..(36): Xaa is C or S

SEQ ID NO: 64132 - protein, 37 aa, Artificial Sequence; identical to SEQ ID NO: 26067
  GFR-binding peptide
  MOD_RES (2)..(34)..(35): Xaa is C or S

SEQ ID NO: 64133 - protein, 36 aa, Artificial Sequence; identical to SEQ ID NO: 26069
  GFR-binding peptide
  MOD_RES (34)..(35): Xaa is C or S
  MOD_RES (12)..(13)..(14)..(15)..(16): Xaa is A or G
  MOD_RES (17)..(18)..(19)..(20): Xaa is A or G or is absent

SEQ ID NO: 64134 - protein, 43 aa, Artificial Sequence; identical to SEQ ID NO: 4981
  GFR-binding peptide
  MOD_RES (1)..(3)..(37)..(38): Xaa is C or S
  MOD_RES (15)..(16)..(17)..(18)..(19): Xaa is A or G
  MOD_RES (20)..(21)..(22)..(23): Xaa is A or G or is absent

SEQ ID NO: 64135 - protein, 35 aa, Artificial Sequence; identical to SEQ ID NO: 57011
  GFR-binding peptide
  MOD_RES (2)..(33)..(34): Xaa is C or S

SEQ ID NO: 64136 - protein, 38 aa, Artificial Sequence; identical to SEQ ID NO: 4984
  GFR-binding peptide
  MOD_RES (2)..(36)..(37): Xaa is C or S
  MOD_RES (14)..(15)..(16)..(17)..(18): Xaa is A or G
  MOD_RES (19)..(20)..(21)..(22): Xaa is A or G or is absent

SEQ ID NO: 64137 - protein, 38 aa, Artificial Sequence; identical to SEQ ID NO: 4985
  GFR-binding peptide
  MOD_RES (2)..(4)..(35)..(36): Xaa is C or S

SEQ ID NO: 64138 - protein, 37 aa, Artificial Sequence
  GFR-binding peptide
  MOD_RES (2)..(4)..(36)..(37): Xaa is C or S
RXAXSEVTMNRHKRLVVNKNEDYYLISTASMKEPVXX

SEQ ID NO: 64139 - protein, 36 aa, Artificial Sequence; identical to SEQ ID NO: 32077
  GFR-binding peptide
  MOD_RES (32)..(33): Xaa is C or S

SEQ ID NO: 64140 - protein, 39 aa, Artificial Sequence; identical to SEQ ID NO: 32081
  GFR-binding peptide
  MOD_RES (1)..(3)..(37)..(38): Xaa is C or S
  MOD_RES (15)..(16)..(17)..(18)..(19): Xaa is A or G
  MOD_RES (20)..(21)..(22)..(23): Xaa is A or G or is absent

SEQ ID NO: 64141 - protein, 38 aa, Artificial Sequence
  GFR-binding peptide
  MOD_RES (1)..(35)..(36): Xaa is C or S
  MOD_RES (13)..(14)..(15)..(16)..(17): Xaa is A or G
  MOD_RES (18)..(19)..(20)..(21): Xaa is A or G or is absent
XESVAMGRHKRLXXXXXXXXXYYLISTASLKTPVXXAK

SEQ ID NO: 64142 - protein, 36 aa, Artificial Sequence
  GFR-binding peptide
  MOD_RES (31)..(32): Xaa is C or S
SRVIMPIKGYVKPKRGVFYLINIPSLAQPVXXPAAS

SEQ ID NO: 64143 - protein, 38 aa, Artificial Sequence
  GFR-binding peptide
  MOD_RES (1)..(3)..(36)..(37): Xaa is C or S
  MOD_RES (14)..(15)..(16)..(17)..(18): Xaa is A or G
  MOD_RES (19)..(20)..(21)..(22): Xaa is A or G or is absent
XGXEEVIMEYKFKXXXXXXXXXLYLMSIPETKVPAXXT

SEQ ID NO: 64144 - protein, 39 aa, Artificial Sequence; identical to SEQ ID NO: 4987
  GFR-binding peptide
  MOD_RES (2)..(36)..(37): Xaa is C or S
  MOD_RES (14)..(15)..(16)..(17)..(18): Xaa is A or G
  MOD_RES (19)..(20)..(21)..(22): Xaa is A or G or is absent

SEQ ID NO: 64145 - protein, 38 aa, Artificial Sequence; identical to SEQ ID NO: 26081
  GFR-binding peptide
  MOD_RES (34)..(35): Xaa is C or S
  MOD_RES (12)..(13)..(14)..(15)..(16): Xaa is A or G
  MOD_RES (17)..(18)..(19)..(20): Xaa is A or G or is absent

SEQ ID NO: 64146 - protein, 36 aa, Artificial Sequence; identical to SEQ ID NO: 4988
  GFR-binding peptide
  MOD_RES (35)..(36): Xaa is C or S
  MOD_RES (13)..(14)..(15)..(16)..(17): Xaa is A or G
  MOD_RES (18)..(19)..(20)..(21): Xaa is A or G or is absent

SEQ ID NO: 64147 - protein, 35 aa, Artificial Sequence; identical to SEQ ID NO: 32090
  GFR-binding peptide
  MOD_RES (33)..(34): Xaa is C or S
  MOD_RES (11)..(12)..(13)..(14)..(15): Xaa is A or G
  MOD_RES (16)..(17)..(18)..(19): Xaa is A or G or is absent

SEQ ID NO: 64148 - protein, 37 aa, Artificial Sequence
  GFR-binding peptide
  MOD_RES (34)..(35): Xaa is C or S
  MOD_RES (12)..(13)..(14)..(15)..(16): Xaa is A or G
  MOD_RES (17)..(18)..(19)..(20): Xaa is A or G or is absent
SEVTMNRHKRLXXXXXXXXXYYLISTASMKEPVXXPE

SEQ ID NO: 64149 - protein, 40 aa, Artificial Sequence; identical to SEQ ID NO: 32096
  GFR-binding peptide
  MOD_RES (34)..(35): Xaa is C or S
  MOD_RES (12)..(13)..(14)..(15)..(16): Xaa is A or G
  MOD_RES (17)..(18)..(19)..(20): Xaa is A or G or is absent

SEQ ID NO: 64150 - protein, 39 aa, Artificial Sequence; identical to SEQ ID NO: 12430
  GFR-binding peptide
  MOD_RES (2)..(36)..(37): Xaa is C or S
  MOD_RES (14)..(15)..(16)..(17)..(18): Xaa is A or G
  MOD_RES (19)..(20)..(21)..(22): Xaa is A or G or is absent

SEQ ID NO: 64151 - protein, 42 aa, Artificial Sequence; identical to SEQ ID NO: 26085
  GFR-binding peptide
  MOD_RES (2)..(4)..(37)..(38): Xaa is C or S
  MOD_RES (15)..(16)..(17)..(18)..(19): Xaa is A or G
  MOD_RES (20)..(21)..(22)..(23): Xaa is A or G or is absent

SEQ ID NO: 64152 - protein, 39 aa, Artificial Sequence; identical to SEQ ID NO: 12433
  GFR-binding peptide
  MOD_RES (1)..(3)..(35)..(36): Xaa is C or S

SEQ ID NO: 64153 - protein, 34 aa, Artificial Sequence; identical to SEQ ID NO: 4992
  GFR-binding peptide
  MOD_RES (31)..(32): Xaa is C or S

SEQ ID NO: 64154 - protein, 36 aa, Artificial Sequence; identical to SEQ ID NO: 4993
  GFR-binding peptide
  MOD_RES (33)..(34): Xaa is C or S
  MOD_RES (11)..(12)..(13)..(14)..(15): Xaa is A or G
  MOD_RES (16)..(17)..(18)..(19): Xaa is A or G or is absent

SEQ ID NO: 64155 - protein, 42 aa, Artificial Sequence; identical to SEQ ID NO: 4994
  GFR-binding peptide
  MOD_RES (1)..(3)..(36)..(37): Xaa is C or S
  MOD_RES (14)..(15)..(16)..(17)..(18): Xaa is A or G
  MOD_RES (19)..(20)..(21)..(22): Xaa is A or G or is absent

SEQ ID NO: 64156 - protein, 38 aa, Artificial Sequence
  GFR-binding peptide
  MOD_RES (1)..(3)..(36)..(37): Xaa is C or S
  MOD_RES (14)..(15)..(16)..(17)..(18): Xaa is A or G
  MOD_RES (19)..(20)..(21)..(22): Xaa is A or G or is absent
XKXSKVVMPIKGYXXXXXXXXXFYLINIPSLDQPVXXP

SEQ ID NO: 64157 - protein, 43 aa, Artificial Sequence
  GFR-binding peptide
  MOD_RES (2)..(4)..(38)..(39): Xaa is C or S
  MOD_RES (16)..(17)..(18)..(19)..(20): Xaa is A or G
  MOD_RES (21)..(22)..(23)..(24): Xaa is A or G or is absent
SXGXRDVVMGRHKRLXXXXXXXXXYYLMSTASMKTPTXXPGAS

SEQ ID NO: 64158 - protein, 43 aa, Artificial Sequence; identical to SEQ ID NO: 4995
  GFR-binding peptide
  MOD_RES (1)..(3)..(37)..(38): Xaa is C or S
  MOD_RES (15)..(16)..(17)..(18)..(19): Xaa is A or G
  MOD_RES (20)..(21)..(22)..(23): Xaa is A or G or is absent

SEQ ID NO: 64159 - protein, 39 aa, Artificial Sequence; identical to SEQ ID NO: 32107
  GFR-binding peptide
  MOD_RES (2)..(34)..(35): Xaa is C or S

SEQ ID NO: 64160 - protein, 36 aa, Artificial Sequence
  GFR-binding peptide
  MOD_RES (2)..(4): Xaa is C or S
  MOD_RES (15)..(16)..(17)..(18)..(19): Xaa is A or G
  MOD_RES (20)..(21)..(22)..(23): Xaa is A or G or is absent
LXGXEEVIMYHYKLXXXXXXXXXKYLMSIPSTKVPA

SEQ ID NO: 64161 - protein, 35 aa, Artificial Sequence; identical to SEQ ID NO: 5000
  GFR-binding peptide
  MOD_RES (2)..(34)..(35): Xaa is C or S

SEQ ID NO: 64162 - protein, 34 aa, Artificial Sequence; identical to SEQ ID NO: 26095
  GFR-binding peptide
  MOD_RES (34)..(34): Xaa is C or S
  MOD_RES (12)..(13)..(14)..(15)..(16): Xaa is A or G
  MOD_RES (17)..(18)..(19)..(20): Xaa is A or G or is absent

SEQ ID NO: 64163 - protein, 39 aa, Artificial Sequence; identical to SEQ ID NO: 5001
  GFR-binding peptide
  MOD_RES (2)..(4)..(36)..(37): Xaa is C or S

SEQ ID NO: 64164 - protein, 41 aa, Artificial Sequence; identical to SEQ ID NO: 5003
  GFR-binding peptide
  MOD_RES (2)..(35)..(36): Xaa is C or S

SEQ ID NO: 64165 - protein, 37 aa, Artificial Sequence; identical to SEQ ID NO: 32111
  GFR-binding peptide
  MOD_RES (1)..(3): Xaa is C or S
  MOD_RES (16)..(17)..(18)..(19)..(20): Xaa is A or G
  MOD_RES (21)..(22)..(23)..(24): Xaa is A or G or is absent

SEQ ID NO: 64166 - protein, 44 aa, Artificial Sequence
  GFR-binding peptide
  MOD_RES (2)..(4)..(38)..(39): Xaa is C or S
  MOD_RES (16)..(17)..(18)..(19)..(20): Xaa is A or G
  MOD_RES (21)..(22)..(23)..(24): Xaa is A or G or is absent
RXAXSEVTMNRYKKLXXXXXXXXXFYLISIANMKEPVXXPEPIG

SEQ ID NO: 64167 - protein, 33 aa, Artificial Sequence; identical to SEQ ID NO: 32117
  GFR-binding peptide
  MOD_RES (32)..(33): Xaa is C or S

SEQ ID NO: 64168 - protein, 40 aa, Artificial Sequence
  GFR-binding peptide
  MOD_RES (34)..(35): Xaa is C or S
  MOD_RES (12)..(13)..(14)..(15)..(16): Xaa is A or G
  MOD_RES (17)..(18)..(19)..(20): Xaa is A or G or is absent
SRVVMNEYKFKXXXXXXXXXLYLVSIPELKTPAXXPKPVH

SEQ ID NO: 64169 - protein, 39 aa, Artificial Sequence; identical to SEQ ID NO: 32122
  GFR-binding peptide
  MOD_RES (2)..(4)..(37)..(38): Xaa is C or S
  MOD_RES (15)..(16)..(17)..(18)..(19): Xaa is A or G
  MOD_RES (20)..(21)..(22)..(23): Xaa is A or G or is absent

SEQ ID NO: 64170 - protein, 36 aa, Artificial Sequence; identical to SEQ ID NO: 26102
  GFR-binding peptide
  MOD_RES (2)..(34): Xaa is C or S

SEQ ID NO: 64171 - protein, 38 aa, Artificial Sequence; identical to SEQ ID NO: 32127
  GFR-binding peptide
  MOD_RES (33)..(34): Xaa is C or S
  MOD_RES (11)..(12)..(13)..(14)..(15): Xaa is A or G
  MOD_RES (16)..(17)..(18)..(19): Xaa is A or G or is absent

SEQ ID NO: 64172 - protein, 40 aa, Artificial Sequence; identical to SEQ ID NO: 32130
  GFR-binding peptide
  MOD_RES (2)..(36)..(37): Xaa is C or S
  MOD_RES (14)..(15)..(16)..(17)..(18): Xaa is A or G
  MOD_RES (19)..(20)..(21)..(22): Xaa is A or G or is absent

SEQ ID NO: 64173 - protein, 37 aa, Artificial Sequence; identical to SEQ ID NO: 5012
  GFR-binding peptide
  MOD_RES (1)..(32)..(33): Xaa is C or S

SEQ ID NO: 64174 - protein, 42 aa, Artificial Sequence; identical to SEQ ID NO: 57063
  GFR-binding peptide
  MOD_RES (2)..(4)..(36)..(37): Xaa is C or S

SEQ ID NO: 64175 - protein, 39 aa, Artificial Sequence; identical to SEQ ID NO: 26105
  GFR-binding peptide
  MOD_RES (1)..(33): Xaa is C or S

SEQ ID NO: 64176 - protein, 34 aa, Artificial Sequence
  GFR-binding peptide
  MOD_RES (32)..(33): Xaa is C or S
SEVVMDYHYKLVVNNASDKYLISIPSLRTPVXXT

SEQ ID NO: 64177 - protein, 37 aa, Artificial Sequence; identical to SEQ ID NO: 26108
  GFR-binding peptide
  MOD_RES (2)..(36)..(37): Xaa is C or S
  MOD_RES (14)..(15)..(16)..(17)..(18): Xaa is A or G
  MOD_RES (19)..(20)..(21)..(22): Xaa is A or G or is absent

SEQ ID NO: 64178 - protein, 35 aa, Artificial Sequence; identical to SEQ ID NO: 32134
  GFR-binding peptide
  MOD_RES (33)..(34): Xaa is C or S
  MOD_RES (11)..(12)..(13)..(14)..(15): Xaa is A or G
  MOD_RES (16)..(17)..(18)..(19): Xaa is A or G or is absent

SEQ ID NO: 64179 - protein, 43 aa, Artificial Sequence; identical to SEQ ID NO: 26109
  GFR-binding peptide
  MOD_RES (2)..(4)..(38)..(39): Xaa is C or S
  MOD_RES (16)..(17)..(18)..(19)..(20): Xaa is A or G
  MOD_RES (21)..(22)..(23)..(24): Xaa is A or G or is absent

SEQ ID NO: 64180 - protein, 37 aa, Artificial Sequence; identical to SEQ ID NO: 26110
  GFR-binding peptide
  MOD_RES (2)..(36)..(37): Xaa is C or S
  MOD_RES (14)..(15)..(16)..(17)..(18): Xaa is A or G
  MOD_RES (19)..(20)..(21)..(22): Xaa is A or G or is absent

SEQ ID NO: 64181 - protein, 35 aa, Artificial Sequence
  GFR-binding peptide
  MOD_RES (1)..(3): Xaa is C or S
  MOD_RES (14)..(15)..(16)..(17)..(18): Xaa is A or G
  MOD_RES (19)..(20)..(21)..(22): Xaa is A or G or is absent
XKXSKVVMPIKGYXXXXXXXXXFYLINIPSLDQPV

SEQ ID NO: 64182 - protein, 40 aa, Artificial Sequence; identical to SEQ ID NO: 5021
  GFR-binding peptide
  MOD_RES (2)..(36)..(37): Xaa is C or S
  MOD_RES (14)..(15)..(16)..(17)..(18): Xaa is A or G
  MOD_RES (19)..(20)..(21)..(22): Xaa is A or G or is absent

SEQ ID NO: 64183 - protein, 42 aa, Artificial Sequence; identical to SEQ ID NO: 5022
  GFR-binding peptide
  MOD_RES (2)..(4)..(38)..(39): Xaa is C or S
  MOD_RES (16)..(17)..(18)..(19)..(20): Xaa is A or G
  MOD_RES (21)..(22)..(23)..(24): Xaa is A or G or is absent

SEQ ID NO: 64184 - protein, 34 aa, Artificial Sequence; identical to SEQ ID NO: 32140
  GFR-binding peptide
  MOD_RES (31)..(32): Xaa is C or S

SEQ ID NO: 64185 - protein, 40 aa, Artificial Sequence
  GFR-binding peptide
  MOD_RES (2)..(36)..(37): Xaa is C or S
  MOD_RES (14)..(15)..(16)..(17)..(18): Xaa is A or G
  MOD_RES (19)..(20)..(21)..(22): Xaa is A or G or is absent
AXSEVTMNRHKRLXXXXXXXXXYYLISTASMKEPVXXPEP

SEQ ID NO: 64186 - protein, 34 aa, Artificial Sequence; identical to SEQ ID NO: 5024
  GFR-binding peptide
  MOD_RES (1)..(33): Xaa is C or S

SEQ ID NO: 64187 - protein, 38 aa, Artificial Sequence; identical to SEQ ID NO: 32143
  GFR-binding peptide
  MOD_RES (2)..(4)..(38): Xaa is C or S
  MOD_RES (16)..(17)..(18)..(19)..(20): Xaa is A or G
  MOD_RES (21)..(22)..(23)..(24): Xaa is A or G or is absent

SEQ ID NO: 64188 - protein, 36 aa, Artificial Sequence; identical to SEQ ID NO: 5025
  GFR-binding peptide
  MOD_RES (2)..(35)..(36): Xaa is C or S
  MOD_RES (13)..(14)..(15)..(16)..(17): Xaa is A or G
  MOD_RES (18)..(19)..(20)..(21): Xaa is A or G or is absent

SEQ ID NO: 64189 - protein, 32 aa, Artificial Sequence; identical to SEQ ID NO: 26117
  GFR-binding peptide
  MOD_RES (32)..(32): Xaa is C or S

SEQ ID NO: 64190 - protein, 33 aa, Artificial Sequence; identical to SEQ ID NO: 5026
  GFR-binding peptide
  MOD_RES (32)..(32): Xaa is C or S

SEQ ID NO: 64191 - protein, 33 aa, Artificial Sequence
  GFR-binding peptide
  MOD_RES (33)..(33): Xaa is C or S
  MOD_RES (11)..(12)..(13)..(14)..(15): Xaa is A or G
  MOD_RES (16)..(17)..(18)..(19): Xaa is A or G or is absent
SRVIMPIKGYXXXXXXXXXFYLINIPSLAQPVX

SEQ ID NO: 64192 - protein, 31 aa, Artificial Sequence
  GFR-binding peptide
SEVVMDRHKRLVVNNASDYYLISTASLRTPV

SEQ ID NO: 64193 - protein, 39 aa, Artificial Sequence
  GFR-binding peptide
  MOD_RES (1)..(35)..(36): Xaa is C or S
  MOD_RES (13)..(14)..(15)..(16)..(17): Xaa is A or G
  MOD_RES (18)..(19)..(20)..(21): Xaa is A or G or is absent
XSEVTMNRYKKLXXXXXXXXXFYLISIANMKEPVXXPEP

SEQ ID NO: 64194 - protein, 36 aa, Artificial Sequence; identical to SEQ ID NO: 5032
  GFR-binding peptide
  MOD_RES (32)..(32): Xaa is C or S

SEQ ID NO: 64195 - protein, 34 aa, Artificial Sequence; identical to SEQ ID NO: 5033
  GFR-binding peptide
  MOD_RES (1)..(34): Xaa is C or S
  MOD_RES (12)..(13)..(14)..(15)..(16): Xaa is A or G
  MOD_RES (17)..(18)..(19)..(20): Xaa is A or G or is absent

SEQ ID NO: 64196 - protein, 35 aa, Artificial Sequence; identical to SEQ ID NO: 5038
  GFR-binding peptide
  MOD_RES (1)..(3)..(35): Xaa is C or S

SEQ ID NO: 64197 - protein, 36 aa, Artificial Sequence; identical to SEQ ID NO: 26130
  GFR-binding peptide
  MOD_RES (2)..(4)..(36): Xaa is C or S

SEQ ID NO: 64198 - protein, 34 aa, Artificial Sequence; identical to SEQ ID NO: 32156
  GFR-binding peptide
  MOD_RES (33)..(34): Xaa is C or S
  MOD_RES (11)..(12)..(13)..(14)..(15): Xaa is A or G
  MOD_RES (16)..(17)..(18)..(19): Xaa is A or G or is absent

SEQ ID NO: 64199 - protein, 39 aa, Artificial Sequence; identical to SEQ ID NO: 32157
  GFR-binding peptide
  MOD_RES (33)..(34): Xaa is C or S
  MOD_RES (11)..(12)..(13)..(14)..(15): Xaa is A or G
  MOD_RES (16)..(17)..(18)..(19): Xaa is A or G or is absent

SEQ ID NO: 64200 - protein, 39 aa, Artificial Sequence; identical to SEQ ID NO: 5043
  GFR-binding peptide
  MOD_RES (1)..(3)..(37)..(38): Xaa is C or S
  MOD_RES (15)..(16)..(17)..(18)..(19): Xaa is A or G
  MOD_RES (20)..(21)..(22)..(23): Xaa is A or G or is absent

SEQ ID NO: 64201 - protein, 41 aa, Artificial Sequence; identical to SEQ ID NO: 32160
  GFR-binding peptide
  MOD_RES (2)..(4)..(36)..(37): Xaa is C or S

SEQ ID NO: 64202 - protein, 39 aa, Artificial Sequence; identical to SEQ ID NO: 26136
  GFR-binding peptide
  MOD_RES (1)..(3)..(35)..(36): Xaa is C or S

SEQ ID NO: 64203 - protein, 36 aa, Artificial Sequence; identical to SEQ ID NO: 32166
  GFR-binding peptide
  MOD_RES (31)..(32): Xaa is C or S

SEQ ID NO: 64204 - protein, 42 aa, Artificial Sequence; identical to SEQ ID NO: 26139
  GFR-binding peptide
  MOD_RES (1)..(3)..(37)..(38): Xaa is C or S
  MOD_RES (15)..(16)..(17)..(18)..(19): Xaa is A or G
  MOD_RES (20)..(21)..(22)..(23): Xaa is A or G or is absent

SEQ ID NO: 64205 - protein, 39 aa, Artificial Sequence; identical to SEQ ID NO: 5047
  GFR-binding peptide
  MOD_RES (34)..(35): Xaa is C or S
  MOD_RES (12)..(13)..(14)..(15)..(16): Xaa is A or G
  MOD_RES (17)..(18)..(19)..(20): Xaa is A or G or is absent

SEQ ID NO: 64206 - protein, 34 aa, Artificial Sequence; identical to SEQ ID NO: 26144
  GFR-binding peptide
  MOD_RES (31)..(32): Xaa is C or S

SEQ ID NO: 64207 - protein, 42 aa, Artificial Sequence; identical to SEQ ID NO: 5049
  GFR-binding peptide
  MOD_RES (2)..(4)..(36)..(37): Xaa is C or S

SEQ ID NO: 64208 - protein, 41 aa, Artificial Sequence; identical to SEQ ID NO: 5051
  GFR-binding peptide
  MOD_RES (2)..(4)..(37)..(38): Xaa is C or S
  MOD_RES (15)..(16)..(17)..(18)..(19): Xaa is A or G
  MOD_RES (20)..(21)..(22)..(23): Xaa is A or G or is absent

SEQ ID NO: 64209 - protein, 35 aa, Artificial Sequence; identical to SEQ ID NO: 26151
  GFR-binding peptide
  MOD_RES (34)..(34): Xaa is C or S
  MOD_RES (12)..(13)..(14)..(15)..(16): Xaa is A or G
  MOD_RES (17)..(18)..(19)..(20): Xaa is A or G or is absent

SEQ ID NO: 64210 - protein, 33 aa, Artificial Sequence; identical to SEQ ID NO: 32169
  GFR-binding peptide
  MOD_RES (2)..(2): Xaa is C or S

SEQ ID NO: 64211 - protein, 39 aa, Artificial Sequence; identical to SEQ ID NO: 5058
  GFR-binding peptide
  MOD_RES (2)..(36)..(37): Xaa is C or S
  MOD_RES (14)..(15)..(16)..(17)..(18): Xaa is A or G
  MOD_RES (19)..(20)..(21)..(22): Xaa is A or G or is absent

SEQ ID NO: 64212 - protein, 36 aa, Artificial Sequence
  GFR-binding peptide
  MOD_RES (2)..(36): Xaa is C or S
  MOD_RES (14)..(15)..(16)..(17)..(18): Xaa is A or G
  MOD_RES (19)..(20)..(21)..(22): Xaa is A or G or is absent
GXRDVVMGEYKFKXXXXXXXXXLYLMSIPEMKTPTX

SEQ ID NO: 64213 - protein, 40 aa, Artificial Sequence; identical to SEQ ID NO: 12488
  GFR-binding peptide
  MOD_RES (2)..(4)..(36)..(37): Xaa is C or S

SEQ ID NO: 64214 - protein, 43 aa, Artificial Sequence
  GFR-binding peptide
  MOD_RES (2)..(4)..(37)..(38): Xaa is C or S
  MOD_RES (15)..(16)..(17)..(18)..(19): Xaa is A or G
  MOD_RES (20)..(21)..(22)..(23): Xaa is A or G or is absent
LXGXEEVIMEYKFKXXXXXXXXXLYLMSIPETKVPAXXTSPVR

SEQ ID NO: 64215 - protein, 36 aa, Artificial Sequence; identical to SEQ ID NO: 5060
  GFR-binding peptide
  MOD_RES (31)..(32): Xaa is C or S

SEQ ID NO: 64216 - protein, 40 aa, Artificial Sequence; identical to SEQ ID NO: 5061
  GFR-binding peptide
  MOD_RES (1)..(34)..(35): Xaa is C or S

SEQ ID NO: 64217 - protein, 43 aa, Artificial Sequence; identical to SEQ ID NO: 26161
  GFR-binding peptide
  MOD_RES (1)..(3)..(37)..(38): Xaa is C or S
  MOD_RES (15)..(16)..(17)..(18)..(19): Xaa is A or G
  MOD_RES (20)..(21)..(22)..(23): Xaa is A or G or is absent

SEQ ID NO: 64218 - protein, 36 aa, Artificial Sequence; identical to SEQ ID NO: 5063
  GFR-binding peptide
  MOD_RES (2)..(35)..(36): Xaa is C or S

SEQ ID NO: 64219 - protein, 41 aa, Artificial Sequence; identical to SEQ ID NO: 5064
  GFR-binding peptide
  MOD_RES (2)..(36): Xaa is C or S
  MOD_RES (14)..(15)..(16)..(17)..(18): Xaa is A or G
  MOD_RES (19)..(20)..(21)..(22): Xaa is A or G or is absent

SEQ ID NO: 64220 - protein, 37 aa, Artificial Sequence; identical to SEQ ID NO: 5065
  GFR-binding peptide
  MOD_RES (2)..(37): Xaa is C or S
  MOD_RES (15)..(16)..(17)..(18)..(19): Xaa is A or G
  MOD_RES (20)..(21)..(22)..(23): Xaa is A or G or is absent

SEQ ID NO: 64221 - protein, 35 aa, Artificial Sequence; identical to SEQ ID NO: 26163
  GFR-binding peptide
  MOD_RES (1)..(33): Xaa is C or S

SEQ ID NO: 64222 - protein, 32 aa, Artificial Sequence
  GFR-binding peptide
  MOD_RES (11)..(12)..(13)..(14)..(15): Xaa is A or G
  MOD_RES (16)..(17)..(18)..(19): Xaa is A or G or is absent
EVTMNPIKGYXXXXXXXXXFYLINIPSMKEPV

SEQ ID NO: 64223 - protein, 39 aa, Artificial Sequence
  GFR-binding peptide
  MOD_RES (2)..(33)..(34): Xaa is C or S
GXEEVIMEYKFKLLVRGNDLYLMSIPETKVPAXXTSPVR

SEQ ID NO: 64224 - protein, 38 aa, Artificial Sequence
  GFR-binding peptide
  MOD_RES (1)..(33)..(34): Xaa is C or S
XSEVTMNRHKRLVVNKNEDYYLISTASMKEPVXXPEPI

SEQ ID NO: 64225 - protein, 36 aa, Artificial Sequence; identical to SEQ ID NO: 57111
  GFR-binding peptide
  MOD_RES (2)..(4)..(36): Xaa is C or S

SEQ ID NO: 64226 - protein, 34 aa, Artificial Sequence; identical to SEQ ID NO: 12502
  GFR-binding peptide
  MOD_RES (1)..(33)..(34): Xaa is C or S

SEQ ID NO: 64227 - protein, 38 aa, Artificial Sequence
  GFR-binding peptide
  MOD_RES (2)..(4)..(36)..(37): Xaa is C or S
RXAXSEVTMNEYKFKVVNKNEDLYLISIPEMKEPVXXP

SEQ ID NO: 64228 - protein, 38 aa, Artificial Sequence
  GFR-binding peptide
  MOD_RES (2)..(4)..(37)..(38): Xaa is C or S
  MOD_RES (15)..(16)..(17)..(18)..(19): Xaa is A or G
  MOD_RES (20)..(21)..(22)..(23): Xaa is A or G or is absent
LXGXEEVIMYHYKLXXXXXXXXXKYLMSIPSTKVPAXX

SEQ ID NO: 64229 - protein, 31 aa, Artificial Sequence; identical to SEQ ID NO: 5073
  GFR-binding peptide
  MOD_RES (31)..(31): Xaa is C or S

SEQ ID NO: 64230 - protein, 34 aa, Artificial Sequence; identical to SEQ ID NO: 26178
  GFR-binding peptide
  MOD_RES (33)..(34): Xaa is C or S
  MOD_RES (11)..(12)..(13)..(14)..(15): Xaa is A or G
  MOD_RES (16)..(17)..(18)..(19): Xaa is A or G or is absent

SEQ ID NO: 64231 - protein, 38 aa, Artificial Sequence; identical to SEQ ID NO: 26185
  GFR-binding peptide
  MOD_RES (1)..(34)..(35): Xaa is C or S

SEQ ID NO: 64232 - protein, 32 aa, Artificial Sequence
  GFR-binding peptide
  MOD_RES (11)..(12)..(13)..(14)..(15): Xaa is A or G
  MOD_RES (16)..(17)..(18)..(19): Xaa is A or G or is absent
EVTMNEYKFKXXXXXXXXXLYLISIPEMKEPV

SEQ ID NO: 64233 - protein, 38 aa, Artificial Sequence; identical to SEQ ID NO: 5081
  GFR-binding peptide
  MOD_RES (32)..(33): Xaa is C or S

SEQ ID NO: 64234 - protein, 37 aa, Artificial Sequence; identical to SEQ ID NO: 5083
  GFR-binding peptide
  MOD_RES (31)..(32): Xaa is C or S

SEQ ID NO: 64235 - protein, 38 aa, Artificial Sequence; identical to SEQ ID NO: 5084
  GFR-binding peptide
  MOD_RES (2)..(36): Xaa is C or S
  MOD_RES (14)..(15)..(16)..(17)..(18): Xaa is A or G
  MOD_RES (19)..(20)..(21)..(22): Xaa is A or G or is absent

SEQ ID NO: 64236 - protein, 41 aa, Artificial Sequence; identical to SEQ ID NO: 5087
  GFR-binding peptide
  MOD_RES (1)..(35)..(36): Xaa is C or S
  MOD_RES (13)..(14)..(15)..(16)..(17): Xaa is A or G
  MOD_RES (18)..(19)..(20)..(21): Xaa is A or G or is absent

SEQ ID NO: 64237 - protein, 37 aa, Artificial Sequence
  GFR-binding peptide
  MOD_RES (34)..(35): Xaa is C or S
  MOD_RES (12)..(13)..(14)..(15)..(16): Xaa is A or G
  MOD_RES (17)..(18)..(19)..(20): Xaa is A or G or is absent
AEVVMDRHKRLXXXXXXXXXYYLISTASLRAPVXXSA

SEQ ID NO: 64238 - protein, 33 aa, Artificial Sequence; identical to SEQ ID NO: 26193
  GFR-binding peptide
  MOD_RES (32)..(33): Xaa is C or S

SEQ ID NO: 64239 - protein, 38 aa, Artificial Sequence; identical to SEQ ID NO: 5094
  GFR-binding peptide
  MOD_RES (33)..(34): Xaa is C or S
  MOD_RES (11)..(12)..(13)..(14)..(15): Xaa is A or G
  MOD_RES (16)..(17)..(18)..(19): Xaa is A or G or is absent

SEQ ID NO: 64240 - protein, 40 aa, Artificial Sequence; identical to SEQ ID NO: 5096
  GFR-binding peptide
  MOD_RES (2)..(35)..(36): Xaa is C or S
  MOD_RES (13)..(14)..(15)..(16)..(17): Xaa is A or G
  MOD_RES (18)..(19)..(20)..(21): Xaa is A or G or is absent

SEQ ID NO: 64241 - protein, 33 aa, Artificial Sequence
  GFR-binding peptide
  MOD_RES (33)..(33): Xaa is C or S
  MOD_RES (11)..(12)..(13)..(14)..(15): Xaa is A or G
  MOD_RES (16)..(17)..(18)..(19): Xaa is A or G or is absent
SKVVMPIKGYXXXXXXXXXFYLINIPSLDQPVX

SEQ ID NO: 64242 - protein, 36 aa, Artificial Sequence; identical to SEQ ID NO: 5098
  GFR-binding peptide
  MOD_RES (1)..(32)..(33): Xaa is C or S

SEQ ID NO: 64243 - protein, 38 aa, Artificial Sequence
  GFR-binding peptide
  MOD_RES (2)..(34)..(35): Xaa is C or S
GXSEVVMDEYKFKVVNNASDLYLISIPELRTPVXXTPP

SEQ ID NO: 64244 - protein, 32 aa, Artificial Sequence; identical to SEQ ID NO: 32204
  GFR-binding peptide
  MOD_RES (31)..(32): Xaa is C or S

SEQ ID NO: 64245 - protein, 35 aa, Artificial Sequence; identical to SEQ ID NO: 57129
  GFR-binding peptide
  MOD_RES (1)..(3)..(35): Xaa is C or S

SEQ ID NO: 64246 - protein, 31 aa, Artificial Sequence; identical to SEQ ID NO: 5099
  GFR-binding peptide

SEQ ID NO: 64247 - protein, 35 aa, Artificial Sequence
  GFR-binding peptide
  MOD_RES (2)..(34)..(35): Xaa is C or S
AXSEVTMNEYKFKVVNKNEDLYLISIPEMKEPVXX

SEQ ID NO: 64248 - protein, 40 aa, Artificial Sequence; identical to SEQ ID NO: 57136
  GFR-binding peptide
  MOD_RES (1)..(3)..(34)..(35): Xaa is C or S

SEQ ID NO: 64249 - protein, 38 aa, Artificial Sequence; identical to SEQ ID NO: 5102
  GFR-binding peptide
  MOD_RES (1)..(35)..(36): Xaa is C or S
  MOD_RES (13)..(14)..(15)..(16)..(17): Xaa is A or G
  MOD_RES (18)..(19)..(20)..(21): Xaa is A or G or is absent

SEQ ID NO: 64250 - protein, 32 aa, Artificial Sequence
  GFR-binding peptide
  MOD_RES (32)..(32): Xaa is C or S
RDVVMGEYKFKIIQQKDNLYLMSIPEMKTPTX

SEQ ID NO: 64251 - protein, 38 aa, Artificial Sequence; identical to SEQ ID NO: 5103
  GFR-binding peptide
  MOD_RES (33)..(34): Xaa is C or S
  MOD_RES (11)..(12)..(13)..(14)..(15): Xaa is A or G
  MOD_RES (16)..(17)..(18)..(19): Xaa is A or G or is absent

SEQ ID NO: 64252 - protein, 32 aa, Artificial Sequence
  GFR-binding peptide
  MOD_RES (11)..(12)..(13)..(14)..(15): Xaa is A or G
  MOD_RES (16)..(17)..(18)..(19): Xaa is A or G or is absent
SKVIMPIKGYXXXXXXXXXFYLINIPSLDQSV

SEQ ID NO: 64253 - protein, 39 aa, Artificial Sequence; identical to SEQ ID NO: 26209
  GFR-binding peptide
  MOD_RES (1)..(3)..(35)..(36): Xaa is C or S

SEQ ID NO: 64254 - protein, 35 aa, Artificial Sequence; identical to SEQ ID NO: 5107
  GFR-binding peptide
  MOD_RES (1)..(32)..(33): Xaa is C or S

SEQ ID NO: 64255 - protein, 38 aa, Artificial Sequence
  GFR-binding peptide
  MOD_RES (34)..(35): Xaa is C or S
  MOD_RES (12)..(13)..(14)..(15)..(16): Xaa is A or G
  MOD_RES (17)..(18)..(19)..(20): Xaa is A or G or is absent
RDVVMGEYKFKXXXXXXXXXLYLMSIPEMKTPTXXPGA

SEQ ID NO: 64256 - protein, 36 aa, Artificial Sequence; identical to SEQ ID NO: 26210
  GFR-binding peptide
  MOD_RES (2)..(34)..(35): Xaa is C or S

SEQ ID NO: 64257 - protein, 41 aa, Artificial Sequence; identical to SEQ ID NO: 5108
  GFR-binding peptide
  MOD_RES (1)..(35): Xaa is C or S
  MOD_RES (13)..(14)..(15)..(16)..(17): Xaa is A or G
  MOD_RES (18)..(19)..(20)..(21): Xaa is A or G or is absent

SEQ ID NO: 64258 - protein, 35 aa, Artificial Sequence; identical to SEQ ID NO: 5113
  GFR-binding peptide
  MOD_RES (1)..(3): Xaa is C or S

SEQ ID NO: 64259 - protein, 31 aa, Artificial Sequence; identical to SEQ ID NO: 26215
  GFR-binding peptide
  MOD_RES (31)..(31): Xaa is C or S

SEQ ID NO: 64260 - protein, 38 aa, Artificial Sequence; identical to SEQ ID NO: 26216
  GFR-binding peptide
  MOD_RES (2)..(36)..(37): Xaa is C or S
  MOD_RES (14)..(15)..(16)..(17)..(18): Xaa is A or G
  MOD_RES (19)..(20)..(21)..(22): Xaa is A or G or is absent

SEQ ID NO: 64261 - protein, 41 aa, Artificial Sequence; identical to SEQ ID NO: 5120
  GFR-binding peptide
  MOD_RES (2)..(4)..(36)..(37): Xaa is C or S

SEQ ID NO: 64262 - protein, 36 aa, Artificial Sequence; identical to SEQ ID NO: 5122
  GFR-binding peptide
  MOD_RES (33)..(34): Xaa is C or S
  MOD_RES (11)..(12)..(13)..(14)..(15): Xaa is A or G
  MOD_RES (16)..(17)..(18)..(19): Xaa is A or G or is absent

SEQ ID NO: 64263 - protein, 39 aa, Artificial Sequence; identical to SEQ ID NO: 26225
  GFR-binding peptide
  MOD_RES (2)..(4)..(36)..(37): Xaa is C or S

SEQ ID NO: 64264 - protein, 37 aa, Artificial Sequence; identical to SEQ ID NO: 5125
  GFR-binding peptide
  MOD_RES (2)..(34)..(35): Xaa is C or S

SEQ ID NO: 64265 - protein, 34 aa, Artificial Sequence
  GFR-binding peptide
  MOD_RES (1)..(32)..(33): Xaa is C or S
XSKVIMPIKGYIKPTKGIFYLINIPSLDQSVXXP

SEQ ID NO: 64266 - protein, 34 aa, Artificial Sequence; identical to SEQ ID NO: 5127
  GFR-binding peptide
  MOD_RES (33)..(34): Xaa is C or S

SEQ ID NO: 64267 - protein, 36 aa, Artificial Sequence; identical to SEQ ID NO: 26227
  GFR-binding peptide
  MOD_RES (1)..(35)..(36): Xaa is C or S
  MOD_RES (13)..(14)..(15)..(16)..(17): Xaa is A or G
  MOD_RES (18)..(19)..(20)..(21): Xaa is A or G or is absent

SEQ ID NO: 64268 - protein, 38 aa, Artificial Sequence
  GFR-binding peptide
  MOD_RES (32)..(33): Xaa is C or S
SEVTMNYHYKLVVNKNEDKYLISIPSMKEPVXXPEPIG

SEQ ID NO: 64269 - protein, 33 aa, Artificial Sequence
  GFR-binding peptide
  MOD_RES (1)..(33): Xaa is C or S
XSEVTMNYHYKLVVNKNEDKYLISIPSMKEPVX

SEQ ID NO: 64270 - protein, 42 aa, Artificial Sequence; identical to SEQ ID NO: 5131
  GFR-binding peptide
  MOD_RES (2)..(4)..(37)..(38): Xaa is C or S
  MOD_RES (15)..(16)..(17)..(18)..(19): Xaa is A or G
  MOD_RES (20)..(21)..(22)..(23): Xaa is A or G or is absent

SEQ ID NO: 64271 - protein, 37 aa, Artificial Sequence; identical to SEQ ID NO: 5133
  GFR-binding peptide
  MOD_RES (32)..(33): Xaa is C or S

SEQ ID NO: 64272 - protein, 40 aa, Artificial Sequence; identical to SEQ ID NO: 5134
  GFR-binding peptide
  MOD_RES (34)..(35): Xaa is C or S
  MOD_RES (12)..(13)..(14)..(15)..(16): Xaa is A or G
  MOD_RES (17)..(18)..(19)..(20): Xaa is A or G or is absent

SEQ ID NO: 64273 - protein, 33 aa, Artificial Sequence; identical to SEQ ID NO: 5135
  GFR-binding peptide
  MOD_RES (1)..(1): Xaa is C or S
  MOD_RES (12)..(13)..(14)..(15)..(16): Xaa is A or G
  MOD_RES (17)..(18)..(19)..(20): Xaa is A or G or is absent

SEQ ID NO: 64274 - protein, 38 aa, Artificial Sequence
  GFR-binding peptide
  MOD_RES (2)..(35)..(36): Xaa is C or S
  MOD_RES (13)..(14)..(15)..(16)..(17): Xaa is A or G
  MOD_RES (18)..(19)..(20)..(21): Xaa is A or G or is absent
GXEEVIMEYKFKXXXXXXXXXLYLMSIPETKVPAXXTS

SEQ ID NO: 64275 - protein, 40 aa, Artificial Sequence
  GFR-binding peptide
  MOD_RES (2)..(34)..(35): Xaa is C or S
GXESVAMGRHKRLYTVVGKDYYLISTASLKTPVXXAKSAK

SEQ ID NO: 64276 - protein, 38 aa, Artificial Sequence; identical to SEQ ID NO: 26245
  GFR-binding peptide
  MOD_RES (1)..(3)..(35)..(36): Xaa is C or S

SEQ ID NO: 64277 - protein, 36 aa, Artificial Sequence
  GFR-binding peptide
  MOD_RES (32)..(33): Xaa is C or S
SEVTMNRYKKLVVNKNEDFYLISIANMKEPVXXPEP

SEQ ID NO: 64278 - protein, 31 aa, Artificial Sequence
  GFR-binding peptide
SEVTMNRHKRLVVNKNEDYYLISTASMKEPV

SEQ ID NO: 64279 - protein, 31 aa, Artificial Sequence; identical to SEQ ID NO: 32249
  GFR-binding peptide

SEQ ID NO: 64280 - protein, 33 aa, Artificial Sequence; identical to SEQ ID NO: 32250
  GFR-binding peptide
  MOD_RES (32)..(33): Xaa is C or S

SEQ ID NO: 64281 - protein, 41 aa, Artificial Sequence; identical to SEQ ID NO: 26251
  GFR-binding peptide
  MOD_RES (2)..(4)..(38)..(39): Xaa is C or S
  MOD_RES (16)..(17)..(18)..(19)..(20): Xaa is A or G
  MOD_RES (21)..(22)..(23)..(24): Xaa is A or G or is absent

SEQ ID NO: 64282 - protein, 33 aa, Artificial Sequence; identical to SEQ ID NO: 26252
  GFR-binding peptide
  MOD_RES (12)..(13)..(14)..(15)..(16): Xaa is A or G
  MOD_RES (17)..(18)..(19)..(20): Xaa is A or G or is absent

SEQ ID NO: 64283 - protein, 40 aa, Artificial Sequence; identical to SEQ ID NO: 5146
  GFR-binding peptide
  MOD_RES (1)..(3)..(35)..(36): Xaa is C or S

SEQ ID NO: 64284 - protein, 36 aa, Artificial Sequence; identical to SEQ ID NO: 26256
  GFR-binding peptide
  MOD_RES (2)..(4)..(36): Xaa is C or S

SEQ ID NO: 64285 - protein, 36 aa, Artificial Sequence; identical to SEQ ID NO: 5148
  GFR-binding peptide
  MOD_RES (2)..(4)..(35)..(36): Xaa is C or S

SEQ ID NO: 64286 - protein, 39 aa, Artificial Sequence
  GFR-binding peptide
  MOD_RES (1)..(33)..(34): Xaa is C or S
XSRVVMNRHKRLIVNSSDDYYLVSTASLKTPAXXPKPVH

SEQ ID NO: 64287 - protein, 44 aa, Artificial Sequence; identical to SEQ ID NO: 26261
  GFR-binding peptide
  MOD_RES (2)..(4)..(38)..(39): Xaa is C or S
  MOD_RES (16)..(17)..(18)..(19)..(20): Xaa is A or G
  MOD_RES (21)..(22)..(23)..(24): Xaa is A or G or is absent

SEQ ID NO: 64288 - protein, 36 aa, Artificial Sequence; identical to SEQ ID NO: 5154
  GFR-binding peptide
  MOD_RES (2)..(34)..(35): Xaa is C or S

SEQ ID NO: 64289 - protein, 36 aa, Artificial Sequence; identical to SEQ ID NO: 5155
  GFR-binding peptide
  MOD_RES (1)..(33)..(34): Xaa is C or S

SEQ ID NO: 64290 - protein, 35 aa, Artificial Sequence; identical to SEQ ID NO: 32266
  GFR-binding peptide
  MOD_RES (1)..(33): Xaa is C or S

SEQ ID NO: 64291 - protein, 35 aa, Artificial Sequence; identical to SEQ ID NO: 5158
  GFR-binding peptide
  MOD_RES (1)..(3)..(35): Xaa is C or S

SEQ ID NO: 64292 - protein, 34 aa, Artificial Sequence; identical to SEQ ID NO: 5159
  GFR-binding peptide
  MOD_RES (2)..(34): Xaa is C or S

SEQ ID NO: 64293 - protein, 38 aa, Artificial Sequence; identical to SEQ ID NO: 32268
  GFR-binding peptide
  MOD_RES (2)..(36)..(37): Xaa is C or S
  MOD_RES (14)..(15)..(16)..(17)..(18): Xaa is A or G
  MOD_RES (19)..(20)..(21)..(22): Xaa is A or G or is absent

SEQ ID NO: 64294 - protein, 35 aa, Artificial Sequence; identical to SEQ ID NO: 5161
  GFR-binding peptide
  MOD_RES (2)..(4): Xaa is C or S

SEQ ID NO: 64295 - protein, 36 aa, Artificial Sequence; identical to SEQ ID NO: 26269
  GFR-binding peptide
  MOD_RES (1)..(3)..(35)..(36): Xaa is C or S

SEQ ID NO: 64296 - protein, 40 aa, Artificial Sequence; identical to SEQ ID NO: 32271
  GFR-binding peptide
  MOD_RES (34)..(35): Xaa is C or S
  MOD_RES (12)..(13)..(14)..(15)..(16): Xaa is A or G
  MOD_RES (17)..(18)..(19)..(20): Xaa is A or G or is absent

SEQ ID NO: 64297 - protein, 39 aa, Artificial Sequence; identical to SEQ ID NO: 32272
  GFR-binding peptide
  MOD_RES (1)..(35)..(36): Xaa is C or S
  MOD_RES (13)..(14)..(15)..(16)..(17): Xaa is A or G
  MOD_RES (18)..(19)..(20)..(21): Xaa is A or G or is absent

SEQ ID NO: 64298 - protein, 36 aa, Artificial Sequence
  GFR-binding peptide
  MOD_RES (2)..(4)..(36): Xaa is C or S
RXAXSEVTMNPIKGYVVNKNEDFYLINIPSMKEPVX

SEQ ID NO: 64299 - protein, 39 aa, Artificial Sequence; identical to SEQ ID NO: 26271
  GFR-binding peptide
  MOD_RES (2)..(34)..(35): Xaa is C or S

SEQ ID NO: 64300 - protein, 37 aa, Artificial Sequence; identical to SEQ ID NO: 26272
  GFR-binding peptide
  MOD_RES (2)..(34)..(35): Xaa is C or S

SEQ ID NO: 64301 - protein, 39 aa, Artificial Sequence
  GFR-binding peptide
  MOD_RES (1)..(3)..(35)..(36): Xaa is C or S
XGXRDVVMGEYKFKIIQQKDNLYLMSIPEMKTPTXXPGA

SEQ ID NO: 64302 - protein, 37 aa, Artificial Sequence; identical to SEQ ID NO: 5168
  GFR-binding peptide
  MOD_RES (34)..(35): Xaa is C or S
  MOD_RES (12)..(13)..(14)..(15)..(16): Xaa is A or G
  MOD_RES (17)..(18)..(19)..(20): Xaa is A or G or is absent

SEQ ID NO: 64303 - protein, 39 aa, Artificial Sequence; identical to SEQ ID NO: 32276
  GFR-binding peptide
  MOD_RES (33)..(34): Xaa is C or S
  MOD_RES (11)..(12)..(13)..(14)..(15): Xaa is A or G
  MOD_RES (16)..(17)..(18)..(19): Xaa is A or G or is absent

SEQ ID NO: 64304 - protein, 38 aa, Artificial Sequence; identical to SEQ ID NO: 57209
  GFR-binding peptide
  MOD_RES (2)..(4)..(36)..(37): Xaa is C or S

SEQ ID NO: 64305 - protein, 37 aa, Artificial Sequence; identical to SEQ ID NO: 5170
  GFR-binding peptide
  MOD_RES (1)..(32)..(33): Xaa is C or S

SEQ ID NO: 64306 - protein, 32 aa, Artificial Sequence; identical to SEQ ID NO: 5171
  GFR-binding peptide
  MOD_RES (31)..(32): Xaa is C or S

SEQ ID NO: 64307 - protein, 35 aa, Artificial Sequence; identical to SEQ ID NO: 5174
  GFR-binding peptide
  MOD_RES (2)..(34)..(35): Xaa is C or S

SEQ ID NO: 64308 - protein, 38 aa, Artificial Sequence; identical to SEQ ID NO: 5176
  GFR-binding peptide
  MOD_RES (1)..(34)..(35): Xaa is C or S

SEQ ID NO: 64309 - protein, 37 aa, Artificial Sequence
  GFR-binding peptide
  MOD_RES (33)..(34): Xaa is C or S
  MOD_RES (11)..(12)..(13)..(14)..(15): Xaa is A or G
  MOD_RES (16)..(17)..(18)..(19): Xaa is A or G or is absent
EVTMNYHYKLXXXXXXXXXKYLISIPSMKEPVXXPEP

SEQ ID NO: 64310 - protein, 38 aa, Artificial Sequence; identical to SEQ ID NO: 26284
  GFR-binding peptide
  MOD_RES (1)..(36)..(37): Xaa is C or S
  MOD_RES (14)..(15)..(16)..(17)..(18): Xaa is A or G
  MOD_RES (19)..(20)..(21)..(22): Xaa is A or G or is absent

SEQ ID NO: 64311 - protein, 34 aa, Artificial Sequence; identical to SEQ ID NO: 5177
  GFR-binding peptide
  MOD_RES (33)..(34): Xaa is C or S
  MOD_RES (11)..(12)..(13)..(14)..(15): Xaa is A or G
  MOD_RES (16)..(17)..(18)..(19): Xaa is A or G or is absent

SEQ ID NO: 64312 - protein, 33 aa, Artificial Sequence
  GFR-binding peptide
  MOD_RES (33)..(33): Xaa is C or S
  MOD_RES (11)..(12)..(13)..(14)..(15): Xaa is A or G
  MOD_RES (16)..(17)..(18)..(19): Xaa is A or G or is absent
EVTMNPIKGYXXXXXXXXXFYLINIPSMKEPVX

SEQ ID NO: 64313 - protein, 39 aa, Artificial Sequence; identical to SEQ ID NO: 32287
  GFR-binding peptide
  MOD_RES (33)..(34): Xaa is C or S
  MOD_RES (11)..(12)..(13)..(14)..(15): Xaa is A or G
  MOD_RES (16)..(17)..(18)..(19): Xaa is A or G or is absent

SEQ ID NO: 64314 - protein, 41 aa, Artificial Sequence; identical to SEQ ID NO: 26289
  GFR-binding peptide
  MOD_RES (2)..(36)..(37): Xaa is C or S
  MOD_RES (14)..(15)..(16)..(17)..(18): Xaa is A or G
  MOD_RES (19)..(20)..(21)..(22): Xaa is A or G or is absent

SEQ ID NO: 64315 - protein, 40 aa, Artificial Sequence
  GFR-binding peptide
  MOD_RES (2)..(4)..(35)..(36): Xaa is C or S
SXKXSRVIMPIKGYVKPKRGVFYLINIPSLAQPVXXPAAS

SEQ ID NO: 64316 - protein, 38 aa, Artificial Sequence; identical to SEQ ID NO: 5182
  GFR-binding peptide
  MOD_RES (1)..(32)..(33): Xaa is C or S

SEQ ID NO: 64317 - protein, 35 aa, Artificial Sequence; identical to SEQ ID NO: 5184
  GFR-binding peptide
  MOD_RES (1)..(34)..(35): Xaa is C or S

SEQ ID NO: 64318 - protein, 41 aa, Artificial Sequence; identical to SEQ ID NO: 57228
  GFR-binding peptide
  MOD_RES (2)..(4)..(38)..(39): Xaa is C or S
  MOD_RES (16)..(17)..(18)..(19)..(20): Xaa is A or G
  MOD_RES (21)..(22)..(23)..(24): Xaa is A or G or is absent

SEQ ID NO: 64319 - protein, 32 aa, Artificial Sequence; identical to SEQ ID NO: 32292
  GFR-binding peptide
  MOD_RES (32)..(32): Xaa is C or S

SEQ ID NO: 64320 - protein, 38 aa, Artificial Sequence; identical to SEQ ID NO: 5186
  GFR-binding peptide
  MOD_RES (1)..(35)..(36): Xaa is C or S
  MOD_RES (13)..(14)..(15)..(16)..(17): Xaa is A or G
  MOD_RES (18)..(19)..(20)..(21): Xaa is A or G or is absent

SEQ ID NO: 64321 - protein, 33 aa, Artificial Sequence; identical to SEQ ID NO: 26301
  GFR-binding peptide
  MOD_RES (33)..(33): Xaa is C or S
  MOD_RES (11)..(12)..(13)..(14)..(15): Xaa is A or G
  MOD_RES (16)..(17)..(18)..(19): Xaa is A or G or is absent

SEQ ID NO: 64322 - protein, 33 aa, Artificial Sequence; identical to SEQ ID NO: 32294
  GFR-binding peptide
  MOD_RES (12)..(13)..(14)..(15)..(16): Xaa is A or G
  MOD_RES (17)..(18)..(19)..(20): Xaa is A or G or is absent

SEQ ID NO: 64323 - protein, 44 aa, Artificial Sequence; identical to SEQ ID NO: 5189
  GFR-binding peptide
  MOD_RES (2)..(4)..(38)..(39): Xaa is C or S
  MOD_RES (16)..(17)..(18)..(19)..(20): Xaa is A or G
  MOD_RES (21)..(22)..(23)..(24): Xaa is A or G or is absent

SEQ ID NO: 64324 - protein, 37 aa, Artificial Sequence; identical to SEQ ID NO: 32296
  GFR-binding peptide
  MOD_RES (1)..(3)..(36)..(37): Xaa is C or S

SEQ ID NO: 64325 - protein, 39 aa, Artificial Sequence
  GFR-binding peptide
  MOD_RES (33)..(34): Xaa is C or S
  MOD_RES (11)..(12)..(13)..(14)..(15): Xaa is A or G
  MOD_RES (16)..(17)..(18)..(19): Xaa is A or G or is absent
RVVMNEYKFKXXXXXXXXXLYLVSIPELKTPAXXPKPVH

SEQ ID NO: 64326 - protein, 37 aa, Artificial Sequence
  GFR-binding peptide
  MOD_RES (1)..(3)..(34)..(35): Xaa is C or S
XKXSKVVMPIKGYVKPTRGVFYLINIPSLDQPVXXPS

SEQ ID NO: 64327 - protein, 36 aa, Artificial Sequence
  GFR-binding peptide
  MOD_RES (31)..(32): Xaa is C or S
SVAMGRHKRLYTVVGKDYYLISTASLKTPVXXAKSA

SEQ ID NO: 64328 - protein, 38 aa, Artificial Sequence; identical to SEQ ID NO: 5196
  GFR-binding peptide
  MOD_RES (1)..(3)..(35)..(36): Xaa is C or S

SEQ ID NO: 64329 - protein, 39 aa, Artificial Sequence; identical to SEQ ID NO: 5197
  GFR-binding peptide
  MOD_RES (1)..(3)..(37)..(38): Xaa is C or S
  MOD_RES (15)..(16)..(17)..(18)..(19): Xaa is A or G
  MOD_RES (20)..(21)..(22)..(23): Xaa is A or G or is absent

SEQ ID NO: 64330 - protein, 33 aa, Artificial Sequence; identical to SEQ ID NO: 26310
  GFR-binding peptide
  MOD_RES (31)..(32): Xaa is C or S

SEQ ID NO: 64331 - protein, 36 aa, Artificial Sequence; identical to SEQ ID NO: 5201
  GFR-binding peptide
  MOD_RES (33)..(34): Xaa is C or S

SEQ ID NO: 64332 - protein, 36 aa, Artificial Sequence; identical to SEQ ID NO: 5203
  GFR-binding peptide
  MOD_RES (1)..(36): Xaa is C or S
  MOD_RES (14)..(15)..(16)..(17)..(18): Xaa is A or G
  MOD_RES (19)..(20)..(21)..(22): Xaa is A or G or is absent

SEQ ID NO: 64333 - protein, 41 aa, Artificial Sequence; identical to SEQ ID NO: 26315
  GFR-binding peptide
  MOD_RES (35)..(36): Xaa is C or S
  MOD_RES (13)..(14)..(15)..(16)..(17): Xaa is A or G
  MOD_RES (18)..(19)..(20)..(21): Xaa is A or G or is absent

SEQ ID NO: 64334 - protein, 31 aa, Artificial Sequence; identical to SEQ ID NO: 5207
  GFR-binding peptide
  MOD_RES (1)..(1): Xaa is C or S

SEQ ID NO: 64335 - protein, 35 aa, Artificial Sequence
  GFR-binding peptide
  MOD_RES (1)..(3): Xaa is C or S
  MOD_RES (14)..(15)..(16)..(17)..(18): Xaa is A or G
  MOD_RES (19)..(20)..(21)..(22): Xaa is A or G or is absent
XGXEEVIMRHKRLXXXXXXXXXYYLMSTASTKVPA

SEQ ID NO: 64336 - protein, 38 aa, Artificial Sequence
  GFR-binding peptide
  MOD_RES (1)..(34)..(35): Xaa is C or S
  MOD_RES (12)..(13)..(14)..(15)..(16): Xaa is A or G
  MOD_RES (17)..(18)..(19)..(20): Xaa is A or G or is absent
XSKVVMPIKGYXXXXXXXXXFYLINIPSLDQPVXXPSA

SEQ ID NO: 64337 - protein, 36 aa, Artificial Sequence
  GFR-binding peptide
  MOD_RES (32)..(33): Xaa is C or S
SEVTMNRHKRLVVNKNEDYYLISTASMKEPVXXPEP

SEQ ID NO: 64338 - protein, 33 aa, Artificial Sequence; identical to SEQ ID NO: 26322
  GFR-binding peptide
  MOD_RES (33)..(33): Xaa is C or S
  MOD_RES (11)..(12)..(13)..(14)..(15): Xaa is A or G
  MOD_RES (16)..(17)..(18)..(19): Xaa is A or G or is absent

SEQ ID NO: 64339 - protein, 36 aa, Artificial Sequence
  GFR-binding peptide
  MOD_RES (34)..(35): Xaa is C or S
  MOD_RES (12)..(13)..(14)..(15)..(16): Xaa is A or G
  MOD_RES (17)..(18)..(19)..(20): Xaa is A or G or is absent
SEVVMDEYKFKXXXXXXXXXLYLISIPELRTPVXXT

SEQ ID NO: 64340 - protein, 36 aa, Artificial Sequence; identical to SEQ ID NO: 31223
  GFR-binding peptide
  MOD_RES (31)..(32): Xaa is C or S

SEQ ID NO: 64341 - protein, 34 aa, Artificial Sequence
  GFR-binding peptide
  MOD_RES (1)..(3): Xaa is C or S
XGXSEVVMDYHYKLVVNNASDKYLISIPSLRTPV

SEQ ID NO: 64342 - protein, 35 aa, Artificial Sequence
  GFR-binding peptide
  MOD_RES (1)..(35): Xaa is C or S
  MOD_RES (13)..(14)..(15)..(16)..(17): Xaa is A or G
  MOD_RES (18)..(19)..(20)..(21): Xaa is A or G or is absent
XSEVTMNPIKGYXXXXXXXXXFYLINIPSMKEPVX

SEQ ID NO: 64343 - protein, 33 aa, Artificial Sequence; identical to SEQ ID NO: 26324
  GFR-binding peptide
  MOD_RES (33)..(33): Xaa is C or S
  MOD_RES (11)..(12)..(13)..(14)..(15): Xaa is A or G
  MOD_RES (16)..(17)..(18)..(19): Xaa is A or G or is absent

SEQ ID NO: 64344 - protein, 39 aa, Artificial Sequence; identical to SEQ ID NO: 31227
  GFR-binding peptide
  MOD_RES (1)..(3)..(37): Xaa is C or S
  MOD_RES (15)..(16)..(17)..(18)..(19): Xaa is A or G
  MOD_RES (20)..(21)..(22)..(23): Xaa is A or G or is absent

SEQ ID NO: 64345 - protein, 42 aa, Artificial Sequence; identical to SEQ ID NO: 26330
  GFR-binding peptide
  MOD_RES (1)..(3)..(37): Xaa is C or S
  MOD_RES (15)..(16)..(17)..(18)..(19): Xaa is A or G
  MOD_RES (20)..(21)..(22)..(23): Xaa is A or G or is absent

SEQ ID NO: 64346 - protein, 36 aa, Artificial Sequence; identical to SEQ ID NO: 31230
  GFR-binding peptide
  MOD_RES (2)..(34)..(35): Xaa is C or S

SEQ ID NO: 64347 - protein, 37 aa, Artificial Sequence; identical to SEQ ID NO: 5223
  GFR-binding peptide
  MOD_RES (31)..(32): Xaa is C or S

SEQ ID NO: 64348 - protein, 36 aa, Artificial Sequence; identical to SEQ ID NO: 26337
  GFR-binding peptide
  MOD_RES (2)..(34)..(35): Xaa is C or S

SEQ ID NO: 64349 - protein, 41 aa, Artificial Sequence; identical to SEQ ID NO: 5227
  GFR-binding peptide
  MOD_RES (1)..(36)..(37): Xaa is C or S
  MOD_RES (14)..(15)..(16)..(17)..(18): Xaa is A or G
  MOD_RES (19)..(20)..(21)..(22): Xaa is A or G or is absent

SEQ ID NO: 64350 - protein, 34 aa, Artificial Sequence; identical to SEQ ID NO: 5231
  GFR-binding peptide
  MOD_RES (1)..(1): Xaa is C or S
  MOD_RES (13)..(14)..(15)..(16)..(17): Xaa is A or G
  MOD_RES (18)..(19)..(20)..(21): Xaa is A or G or is absent

SEQ ID NO: 64351 - protein, 36 aa, Artificial Sequence
  GFR-binding peptide
  MOD_RES (1)..(32)..(33): Xaa is C or S
XSKVVMPIKGYVKPTRGVFYLINIPSLDQPVXXPSA

SEQ ID NO: 64352 - protein, 44 aa, Artificial Sequence; identical to SEQ ID NO: 31242
  GFR-binding peptide
  MOD_RES (2)..(4)..(38)..(39): Xaa is C or S
  MOD_RES (16)..(17)..(18)..(19)..(20): Xaa is A or G
  MOD_RES (21)..(22)..(23)..(24): Xaa is A or G or is absent

SEQ ID NO: 64353 - protein, 38 aa, Artificial Sequence
  GFR-binding peptide
  MOD_RES (33)..(34): Xaa is C or S
  MOD_RES (11)..(12)..(13)..(14)..(15): Xaa is A or G
  MOD_RES (16)..(17)..(18)..(19): Xaa is A or G or is absent
EEVIMRHKRLXXXXXXXXXYYLMSTASTKVPAXXTSPV

SEQ ID NO: 64354 - protein, 34 aa, Artificial Sequence; identical to SEQ ID NO: 31245
  GFR-binding peptide
  MOD_RES (32)..(33): Xaa is C or S

SEQ ID NO: 64355 - protein, 36 aa, Artificial Sequence
  GFR-binding peptide
  MOD_RES (1)..(3)..(35)..(36): Xaa is C or S
XAXSEVTMNRYKKLVVNKNEDFYLISIANMKEPVXX

SEQ ID NO: 64356 - protein, 36 aa, Artificial Sequence; identical to SEQ ID NO: 26351
  GFR-binding peptide
  MOD_RES (31)..(32): Xaa is C or S

SEQ ID NO: 64357 - protein, 37 aa, Artificial Sequence
  GFR-binding peptide
  MOD_RES (31)..(32): Xaa is C or S
RVVMNYHYKLIVNSSDDKYLVSIPSLKTPAXXPKPVH

SEQ ID NO: 64358 - protein, 34 aa, Artificial Sequence
  GFR-binding peptide
  MOD_RES (1)..(3): Xaa is C or S
XGXSEVVMDEYKFKVVNNASDLYLISIPELRTPV

SEQ ID NO: 64359 - protein, 39 aa, Artificial Sequence; identical to SEQ ID NO: 31248
  GFR-binding peptide
  MOD_RES (2)..(4)..(36)..(37): Xaa is C or S

SEQ ID NO: 64360 - protein, 37 aa, Artificial Sequence
  GFR-binding peptide
  MOD_RES (2)..(4): Xaa is C or S
  MOD_RES (16)..(17)..(18)..(19)..(20): Xaa is A or G
  MOD_RES (21)..(22)..(23)..(24): Xaa is A or G or is absent
RXGXESVAMGRHKRLXXXXXXXXXYYLISTASLKTPV

SEQ ID NO: 64361 - protein, 35 aa, Artificial Sequence; identical to SEQ ID NO: 26353
  GFR-binding peptide
  MOD_RES (1)..(3)..(35): Xaa is C or S

SEQ ID NO: 64362 - protein, 40 aa, Artificial Sequence; identical to SEQ ID NO: 31255
  GFR-binding peptide
  MOD_RES (1)..(3)..(37)..(38): Xaa is C or S
  MOD_RES (15)..(16)..(17)..(18)..(19): Xaa is A or G
  MOD_RES (20)..(21)..(22)..(23): Xaa is A or G or is absent

SEQ ID NO: 64363 - protein, 36 aa, Artificial Sequence; identical to SEQ ID NO: 26357
  GFR-binding peptide
  MOD_RES (2)..(4)..(36): Xaa is C or S

SEQ ID NO: 64364 - protein, 43 aa, Artificial Sequence; identical to SEQ ID NO: 26358
  GFR-binding peptide
  MOD_RES (1)..(3)..(37)..(38): Xaa is C or S
  MOD_RES (15)..(16)..(17)..(18)..(19): Xaa is A or G
  MOD_RES (20)..(21)..(22)..(23): Xaa is A or G or is absent

SEQ ID NO: 64365 - protein, 34 aa, Artificial Sequence; identical to SEQ ID NO: 5240
  GFR-binding peptide
  MOD_RES (1)..(3)..(34): Xaa is C or S

SEQ ID NO: 64366 - protein, 36 aa, Artificial Sequence; identical to SEQ ID NO: 26361
  GFR-binding peptide
  MOD_RES (33)..(34): Xaa is C or S
  MOD_RES (11)..(12)..(13)..(14)..(15): Xaa is A or G
  MOD_RES (16)..(17)..(18)..(19): Xaa is A or G or is absent

SEQ ID NO: 64367 - protein, 30 aa, Artificial Sequence
  GFR-binding peptide
EVTMNRYKKLVVNKNEDFYLISIANMKEPV

SEQ ID NO: 64368 - protein, 36 aa, Artificial Sequence
  GFR-binding peptide
  MOD_RES (1)..(34)..(35): Xaa is C or S
  MOD_RES (12)..(13)..(14)..(15)..(16): Xaa is A or G
  MOD_RES (17)..(18)..(19)..(20): Xaa is A or G or is absent
XEEVIMEYKFKXXXXXXXXXLYLMSIPETKVPAXXT

SEQ ID NO: 64369 - protein, 36 aa, Artificial Sequence; identical to SEQ ID NO: 12680
  GFR-binding peptide
  MOD_RES (1)..(3): Xaa is C or S
  MOD_RES (15)..(16)..(17)..(18)..(19): Xaa is A or G
  MOD_RES (20)..(21)..(22)..(23): Xaa is A or G or is absent

SEQ ID NO: 64370 - protein, 36 aa, Artificial Sequence; identical to SEQ ID NO: 5246
  GFR-binding peptide
  MOD_RES (2)..(33)..(34): Xaa is C or S

SEQ ID NO: 64371 - protein, 35 aa, Artificial Sequence; identical to SEQ ID NO: 31260
  GFR-binding peptide
  MOD_RES (1)..(3)..(35): Xaa is C or S

SEQ ID NO: 64372 - protein, 33 aa, Artificial Sequence; identical to SEQ ID NO: 12682
  GFR-binding peptide
  MOD_RES (2)..(2): Xaa is C or S

SEQ ID NO: 64373 - protein, 38 aa, Artificial Sequence; identical to SEQ ID NO: 26368
  GFR-binding peptide
  MOD_RES (1)..(33)..(34): Xaa is C or S

SEQ ID NO: 64374 - protein, 39 aa, Artificial Sequence; identical to SEQ ID NO: 5249
  GFR-binding peptide
  MOD_RES (2)..(4)..(37)..(38): Xaa is C or S

SEQ ID NO: 64375 - protein, 38 aa, Artificial Sequence; identical to SEQ ID NO: 5250
  GFR-binding peptide
  MOD_RES (1)..(3)..(35)..(36): Xaa is C or S

SEQ ID NO: 64376 - protein, 35 aa, Artificial Sequence
  GFR-binding peptide
  MOD_RES (2)..(33)..(34): Xaa is C or S
KXSKVIMPIKGYIKPTKGIFYLINIPSLDQSVXXP

SEQ ID NO: 64377 - protein, 35 aa, Artificial Sequence; identical to SEQ ID NO: 5251
  GFR-binding peptide
  MOD_RES (1)..(34)..(35): Xaa is C or S
  MOD_RES (12)..(13)..(14)..(15)..(16): Xaa is A or G
  MOD_RES (17)..(18)..(19)..(20): Xaa is A or G or is absent

SEQ ID NO: 64378 - protein, 36 aa, Artificial Sequence; identical to SEQ ID NO: 31267
  GFR-binding peptide
  MOD_RES (32)..(33): Xaa is C or S

SEQ ID NO: 64379 - protein, 45 aa, Artificial Sequence; identical to SEQ ID NO: 5252
  GFR-binding peptide
  MOD_RES (2)..(4)..(39)..(40): Xaa is C or S
  MOD_RES (17)..(18)..(19)..(20)..(21): Xaa is A or G
  MOD_RES (22)..(23)..(24)..(25): Xaa is A or G or is absent

SEQ ID NO: 64380 - protein, 42 aa, Artificial Sequence
  GFR-binding peptide
  MOD_RES (2)..(36)..(37): Xaa is C or S
  MOD_RES (14)..(15)..(16)..(17)..(18): Xaa is A or G
  MOD_RES (19)..(20)..(21)..(22): Xaa is A or G or is absent
GXESVAMGRHKRLXXXXXXXXXYYLISTASLKTPVXXAKSAK

SEQ ID NO: 64381 - protein, 36 aa, Artificial Sequence; identical to SEQ ID NO: 5254
  GFR-binding peptide
  MOD_RES (2)..(4)..(36): Xaa is C or S

SEQ ID NO: 64382 - protein, 40 aa, Artificial Sequence; identical to SEQ ID NO: 5256
  GFR-binding peptide
  MOD_RES (1)..(3)..(35)..(36): Xaa is C or S

SEQ ID NO: 64383 - protein, 38 aa, Artificial Sequence; identical to SEQ ID NO: 31272
  GFR-binding peptide
  MOD_RES (1)..(35)..(36): Xaa is C or S
  MOD_RES (13)..(14)..(15)..(16)..(17): Xaa is A or G
  MOD_RES (18)..(19)..(20)..(21): Xaa is A or G or is absent

SEQ ID NO: 64384 - protein, 34 aa, Artificial Sequence; identical to SEQ ID NO: 31273
  GFR-binding peptide
  MOD_RES (13)..(14)..(15)..(16)..(17): Xaa is A or G
  MOD_RES (18)..(19)..(20)..(21): Xaa is A or G or is absent

SEQ ID NO: 64385 - protein, 34 aa, Artificial Sequence; identical to SEQ ID NO: 26379
  GFR-binding peptide
  MOD_RES (33)..(34): Xaa is C or S
  MOD_RES (11)..(12)..(13)..(14)..(15): Xaa is A or G
  MOD_RES (16)..(17)..(18)..(19): Xaa is A or G or is absent

SEQ ID NO: 64386 - protein, 41 aa, Artificial Sequence; identical to SEQ ID NO: 31277
  GFR-binding peptide
  MOD_RES (1)..(3)..(37)..(38): Xaa is C or S
  MOD_RES (15)..(16)..(17)..(18)..(19): Xaa is A or G
  MOD_RES (20)..(21)..(22)..(23): Xaa is A or G or is absent

SEQ ID NO: 64387 - protein, 43 aa, Artificial Sequence; identical to SEQ ID NO: 5259
  GFR-binding peptide
  MOD_RES (1)..(3)..(37)..(38): Xaa is C or S
  MOD_RES (15)..(16)..(17)..(18)..(19): Xaa is A or G
  MOD_RES (20)..(21)..(22)..(23): Xaa is A or G or is absent

SEQ ID NO: 64388 - protein, 42 aa, Artificial Sequence; identical to SEQ ID NO: 5260
  GFR-binding peptide
  MOD_RES (2)..(4)..(38)..(39): Xaa is C or S
  MOD_RES (16)..(17)..(18)..(19)..(20): Xaa is A or G
  MOD_RES (21)..(22)..(23)..(24): Xaa is A or G or is absent

SEQ ID NO: 64389 - protein, 39 aa, Artificial Sequence; identical to SEQ ID NO: 26382
  GFR-binding peptide
  MOD_RES (1)..(33)..(34): Xaa is C or S

SEQ ID NO: 64390 - protein, 34 aa, Artificial Sequence; identical to SEQ ID NO: 31280
  GFR-binding peptide
  MOD_RES (2)..(34): Xaa is C or S

SEQ ID NO: 64391 - protein, 32 aa, Artificial Sequence; identical to SEQ ID NO: 5263
  GFR-binding peptide
  MOD_RES (11)..(12)..(13)..(14)..(15): Xaa is A or G
  MOD_RES (16)..(17)..(18)..(19): Xaa is A or G or is absent

SEQ ID NO: 64392 - protein, 31 aa, Artificial Sequence
  GFR-binding peptide
  MOD_RES (31)..(31): Xaa is C or S
SKVIMPIKGYIKPTKGIFYLINIPSLDQSVX

SEQ ID NO: 64393 - protein, 39 aa, Artificial Sequence; identical to SEQ ID NO: 5265
  GFR-binding peptide
  MOD_RES (1)..(3)..(36)..(37): Xaa is C or S
  MOD_RES (14)..(15)..(16)..(17)..(18): Xaa is A or G
  MOD_RES (19)..(20)..(21)..(22): Xaa is A or G or is absent

SEQ ID NO: 64394 - protein, 41 aa, Artificial Sequence; identical to SEQ ID NO: 31285
  GFR-binding peptide
  MOD_RES (1)..(3)..(35): Xaa is C or S

SEQ ID NO: 64395 - protein, 33 aa, Artificial Sequence
  GFR-binding peptide
  MOD_RES (2)..(2): Xaa is C or S
GXSEVVMDEYKFKVVNNASDLYLISIPELRTPV

SEQ ID NO: 64396 - protein, 38 aa, Artificial Sequence; identical to SEQ ID NO: 5270
  GFR-binding peptide
  MOD_RES (32)..(33): Xaa is C or S

SEQ ID NO: 64397 - protein, 37 aa, Artificial Sequence; identical to SEQ ID NO: 5272
  GFR-binding peptide
  MOD_RES (1)..(35)..(36): Xaa is C or S
  MOD_RES (13)..(14)..(15)..(16)..(17): Xaa is A or G
  MOD_RES (18)..(19)..(20)..(21): Xaa is A or G or is absent

SEQ ID NO: 64398 - protein, 34 aa, Artificial Sequence
  GFR-binding peptide
  MOD_RES (1)..(33)..(34): Xaa is C or S
XESVAMGRHKRLYTVVGKDYYLISTASLKTPVXX

SEQ ID NO: 64399 - protein, 39 aa, Artificial Sequence; identical to SEQ ID NO: 5274
  GFR-binding peptide
  MOD_RES (2)..(4)..(38)..(39): Xaa is C or S
  MOD_RES (16)..(17)..(18)..(19)..(20): Xaa is A or G
  MOD_RES (21)..(22)..(23)..(24): Xaa is A or G or is absent

SEQ ID NO: 64400 - protein, 37 aa, Artificial Sequence; identical to SEQ ID NO: 26393
  GFR-binding peptide
  MOD_RES (1)..(32)..(33): Xaa is C or S

SEQ ID NO: 64401 - protein, 38 aa, Artificial Sequence; identical to SEQ ID NO: 5276
  GFR-binding peptide
  MOD_RES (32)..(33): Xaa is C or S

SEQ ID NO: 64402 - protein, 38 aa, Artificial Sequence; identical to SEQ ID NO: 31300
  GFR-binding peptide
  MOD_RES (1)..(3)..(35)..(36): Xaa is C or S

SEQ ID NO: 64403 - protein, 32 aa, Artificial Sequence; identical to SEQ ID NO: 31301
  GFR-binding peptide
  MOD_RES (11)..(12)..(13)..(14)..(15): Xaa is A or G
  MOD_RES (16)..(17)..(18)..(19): Xaa is A or G or is absent

SEQ ID NO: 64404 - protein, 33 aa, Artificial Sequence
  GFR-binding peptide
  MOD_RES (12)..(13)..(14)..(15)..(16): Xaa is A or G
  MOD_RES (17)..(18)..(19)..(20): Xaa is A or G or is absent
SEVTMNPIKGYXXXXXXXXXFYLINIPSMKEPV

SEQ ID NO: 64405 - protein, 38 aa, Artificial Sequence
  GFR-binding peptide
  MOD_RES (1)..(33)..(34): Xaa is C or S
XSEVVMDRHKRLVVNNASDYYLISTASLRTPVXXTPPT

SEQ ID NO: 64406 - protein, 35 aa, Artificial Sequence
  GFR-binding peptide
  MOD_RES (2)..(4): Xaa is C or S
SXGXRDVVMGEYKFKIIQQKDNLYLMSIPEMKTPT

SEQ ID NO: 64407 - protein, 41 aa, Artificial Sequence; identical to SEQ ID NO: 5281
  GFR-binding peptide
  MOD_RES (2)..(4)..(36)..(37): Xaa is C or S

SEQ ID NO: 64408 - protein, 36 aa, Artificial Sequence; identical to SEQ ID NO: 26402
  GFR-binding peptide
  MOD_RES (31)..(32): Xaa is C or S

SEQ ID NO: 64409 - protein, 39 aa, Artificial Sequence; identical to SEQ ID NO: 5284
  GFR-binding peptide
  MOD_RES (2)..(34)..(35): Xaa is C or S

SEQ ID NO: 64410 - protein, 31 aa, Artificial Sequence; identical to SEQ ID NO: 5289
  GFR-binding peptide
  MOD_RES (31)..(31): Xaa is C or S

SEQ ID NO: 64411 - protein, 34 aa, Artificial Sequence; identical to SEQ ID NO: 26410
  GFR-binding peptide
  MOD_RES (32)..(33): Xaa is C or S

SEQ ID NO: 64412 - protein, 40 aa, Artificial Sequence
  GFR-binding peptide
  MOD_RES (1)..(35)..(36): Xaa is C or S
  MOD_RES (13)..(14)..(15)..(16)..(17): Xaa is A or G
  MOD_RES (18)..(19)..(20)..(21): Xaa is A or G or is absent
XAEVVMDRHKRLXXXXXXXXXYYLISTASLRAPVXXSAPA

SEQ ID NO: 64413 - protein, 37 aa, Artificial Sequence; identical to SEQ ID NO: 5298
  GFR-binding peptide
  MOD_RES (32)..(33): Xaa is C or S

SEQ ID NO: 64414 - protein, 35 aa, Artificial Sequence; identical to SEQ ID NO: 26421
  GFR-binding peptide
  MOD_RES (2)..(2): Xaa is C or S
  MOD_RES (14)..(15)..(16)..(17)..(18): Xaa is A or G
  MOD_RES (19)..(20)..(21)..(22): Xaa is A or G or is absent

SEQ ID NO: 64415 - protein, 40 aa, Artificial Sequence
  GFR-binding peptide
  MOD_RES (2)..(36)..(37): Xaa is C or S
  MOD_RES (14)..(15)..(16)..(17)..(18): Xaa is A or G
  MOD_RES (19)..(20)..(21)..(22): Xaa is A or G or is absent
AXSEVTMNYHYKLXXXXXXXXXKYLISIPSMKEPVXXPEP

SEQ ID NO: 64416 - protein, 39 aa, Artificial Sequence; identical to SEQ ID NO: 5302
  GFR-binding peptide
  MOD_RES (2)..(4)..(37)..(38): Xaa is C or S
  MOD_RES (15)..(16)..(17)..(18)..(19): Xaa is A or G
  MOD_RES (20)..(21)..(22)..(23): Xaa is A or G or is absent

SEQ ID NO: 64417 - protein, 41 aa, Artificial Sequence
  GFR-binding peptide
  MOD_RES (2)..(4)..(36)..(37): Xaa is C or S
RXGXSEVVMDRHKRLVVNNASDYYLISTASLRTPVXXTPPT

SEQ ID NO: 64418 - protein, 41 aa, Artificial Sequence; identical to SEQ ID NO: 5305
  GFR-binding peptide
  MOD_RES (2)..(4)..(37)..(38): Xaa is C or S
  MOD_RES (15)..(16)..(17)..(18)..(19): Xaa is A or G
  MOD_RES (20)..(21)..(22)..(23): Xaa is A or G or is absent

SEQ ID NO: 64419 - protein, 35 aa, Artificial Sequence
  GFR-binding peptide
  MOD_RES (2)..(4): Xaa is C or S
SXGXRDVVMGYHYKLIIQQKDNKYLMSIPSMKTPT

SEQ ID NO: 64420 - protein, 39 aa, Artificial Sequence
  GFR-binding peptide
  MOD_RES (1)..(3)..(36)..(37): Xaa is C or S
  MOD_RES (14)..(15)..(16)..(17)..(18): Xaa is A or G
  MOD_RES (19)..(20)..(21)..(22): Xaa is A or G or is absent
XKXSRVIMPIKGYXXXXXXXXXFYLINIPSLAQPVXXPA

SEQ ID NO: 64421 - protein, 37 aa, Artificial Sequence; identical to SEQ ID NO: 56251
  GFR-binding peptide
  MOD_RES (1)..(3)..(37): Xaa is C or S
  MOD_RES (15)..(16)..(17)..(18)..(19): Xaa is A or G
  MOD_RES (20)..(21)..(22)..(23): Xaa is A or G or is absent

SEQ ID NO: 64422 - protein, 39 aa, Artificial Sequence; identical to SEQ ID NO: 31332
  GFR-binding peptide
  MOD_RES (33)..(34): Xaa is C or S
  MOD_RES (11)..(12)..(13)..(14)..(15): Xaa is A or G
  MOD_RES (16)..(17)..(18)..(19): Xaa is A or G or is absent

SEQ ID NO: 64423 - protein, 31 aa, Artificial Sequence; identical to SEQ ID NO: 5308
  GFR-binding peptide
  MOD_RES (31)..(31): Xaa is C or S

SEQ ID NO: 64424 - protein, 35 aa, Artificial Sequence; identical to SEQ ID NO: 26431
  GFR-binding peptide
  MOD_RES (1)..(3)..(35): Xaa is C or S

SEQ ID NO: 64425 - protein, 44 aa, Artificial Sequence; identical to SEQ ID NO: 5309
  GFR-binding peptide
  MOD_RES (2)..(4)..(39)..(40): Xaa is C or S
  MOD_RES (17)..(18)..(19)..(20)..(21): Xaa is A or G
  MOD_RES (22)..(23)..(24)..(25): Xaa is A or G or is absent

SEQ ID NO: 64426 - protein, 34 aa, Artificial Sequence; identical to SEQ ID NO: 26434
  GFR-binding peptide
  MOD_RES (31)..(32): Xaa is C or S

SEQ ID NO: 64427 - protein, 44 aa, Artificial Sequence; identical to SEQ ID NO: 5311
  GFR-binding peptide
  MOD_RES (2)..(4)..(38)..(39): Xaa is C or S
  MOD_RES (16)..(17)..(18)..(19)..(20): Xaa is A or G
  MOD_RES (21)..(22)..(23)..(24): Xaa is A or G or is absent

SEQ ID NO: 64428 - protein, 39 aa, Artificial Sequence
  GFR-binding peptide
  MOD_RES (1)..(3)..(34)..(35): Xaa is C or S
XGXEEVIMYHYKLLLVRGNDKYLMSIPSTKVPAXXTSPV

SEQ ID NO: 64429 - protein, 31 aa, Artificial Sequence
  GFR-binding peptide
  MOD_RES (31)..(31): Xaa is C or S
EVVMDRHKRLVVNNAADYYLISTASLRAPVX

SEQ ID NO: 64430 - protein, 37 aa, Artificial Sequence; identical to SEQ ID NO: 31339
  GFR-binding peptide
  MOD_RES (2)..(34)..(35): Xaa is C or S

SEQ ID NO: 64431 - protein, 36 aa, Artificial Sequence; identical to SEQ ID NO: 26438
  GFR-binding peptide
  MOD_RES (2)..(4)..(35)..(36): Xaa is C or S

SEQ ID NO: 64432 - protein, 39 aa, Artificial Sequence; identical to SEQ ID NO: 56260
  GFR-binding peptide
  MOD_RES (1)..(3)..(37)..(38): Xaa is C or S
  MOD_RES (15)..(16)..(17)..(18)..(19): Xaa is A or G
  MOD_RES (20)..(21)..(22)..(23): Xaa is A or G or is absent

SEQ ID NO: 64433 - protein, 42 aa, Artificial Sequence; identical to SEQ ID NO: 5317
  GFR-binding peptide
  MOD_RES (2)..(4)..(38)..(39): Xaa is C or S
  MOD_RES (16)..(17)..(18)..(19)..(20): Xaa is A or G
  MOD_RES (21)..(22)..(23)..(24): Xaa is A or G or is absent

SEQ ID NO: 64434 - protein, 42 aa, Artificial Sequence
  GFR-binding peptide
  MOD_RES (2)..(4)..(38)..(39): Xaa is C or S
  MOD_RES (16)..(17)..(18)..(19)..(20): Xaa is A or G
  MOD_RES (21)..(22)..(23)..(24): Xaa is A or G or is absent
RXGXSEVVMDEYKFKXXXXXXXXXLYLISIPELRTPVXXTPP

SEQ ID NO: 64435 - protein, 36 aa, Artificial Sequence; identical to SEQ ID NO: 12744
  GFR-binding peptide
  MOD_RES (33)..(34): Xaa is C or S
  MOD_RES (11)..(12)..(13)..(14)..(15): Xaa is A or G
  MOD_RES (16)..(17)..(18)..(19): Xaa is A or G or is absent

SEQ ID NO: 64436 - protein, 38 aa, Artificial Sequence
  GFR-binding peptide
  MOD_RES (1)..(3)..(35)..(36): Xaa is C or S
XGXSEVVMDEYKFKVVNNASDLYLISIPELRTPVXXTP

SEQ ID NO: 64437 - protein, 36 aa, Artificial Sequence; identical to SEQ ID NO: 31352
  GFR-binding peptide
  MOD_RES (31)..(32): Xaa is C or S

SEQ ID NO: 64438 - protein, 37 aa, Artificial Sequence; identical to SEQ ID NO: 31354
  GFR-binding peptide
  MOD_RES (33)..(34): Xaa is C or S
  MOD_RES (11)..(12)..(13)..(14)..(15): Xaa is A or G
  MOD_RES (16)..(17)..(18)..(19): Xaa is A or G or is absent

SEQ ID NO: 64439 - protein, 38 aa, Artificial Sequence; identical to SEQ ID NO: 5322
  GFR-binding peptide
  MOD_RES (33)..(34): Xaa is C or S
  MOD_RES (11)..(12)..(13)..(14)..(15): Xaa is A or G
  MOD_RES (16)..(17)..(18)..(19): Xaa is A or G or is absent

SEQ ID NO: 64440 - protein, 39 aa, Artificial Sequence; identical to SEQ ID NO: 5323
  GFR-binding peptide
  MOD_RES (2)..(4)..(39): Xaa is C or S
  MOD_RES (17)..(18)..(19)..(20)..(21): Xaa is A or G
  MOD_RES (22)..(23)..(24)..(25): Xaa is A or G or is absent

SEQ ID NO: 64441 - protein, 33 aa, Artificial Sequence; identical to SEQ ID NO: 5330
  GFR-binding peptide
  MOD_RES (1)..(33): Xaa is C or S

SEQ ID NO: 64442 - protein, 36 aa, Artificial Sequence
  GFR-binding peptide
  MOD_RES (1)..(3)..(36): Xaa is C or S
  MOD_RES (14)..(15)..(16)..(17)..(18): Xaa is A or G
  MOD_RES (19)..(20)..(21)..(22): Xaa is A or G or is absent
XKXSKVVMPIKGYXXXXXXXXXFYLINIPSLDQPVX

SEQ ID NO: 64443 - protein, 32 aa, Artificial Sequence; identical to SEQ ID NO: 26457
  GFR-binding peptide
  MOD_RES (1)..(32): Xaa is C or S

SEQ ID NO: 64444 - protein, 40 aa, Artificial Sequence; identical to SEQ ID NO: 5332
  GFR-binding peptide
  MOD_RES (1)..(3)..(34)..(35): Xaa is C or S

SEQ ID NO: 64445 - protein, 39 aa, Artificial Sequence; identical to SEQ ID NO: 5333
  GFR-binding peptide
  MOD_RES (1)..(33): Xaa is C or S

SEQ ID NO: 64446 - protein, 35 aa, Artificial Sequence
  GFR-binding peptide
  MOD_RES (1)..(33)..(34): Xaa is C or S
XESVAMGRHKRLYTVVGKDYYLISTASLKTPVXXA

SEQ ID NO: 64447 - protein, 39 aa, Artificial Sequence; identical to SEQ ID NO: 26459
  GFR-binding peptide
  MOD_RES (2)..(37)..(38): Xaa is C or S
  MOD_RES (15)..(16)..(17)..(18)..(19): Xaa is A or G
  MOD_RES (20)..(21)..(22)..(23): Xaa is A or G or is absent

SEQ ID NO: 64448 - protein, 42 aa, Artificial Sequence
  GFR-binding peptide
  MOD_RES (1)..(3)..(37)..(38): Xaa is C or S
  MOD_RES (15)..(16)..(17)..(18)..(19): Xaa is A or G
  MOD_RES (20)..(21)..(22)..(23): Xaa is A or G or is absent
XGXRDVVMGRHKRLXXXXXXXXXYYLMSTASMKTPTXXPGAS

SEQ ID NO: 64449 - protein, 41 aa, Artificial Sequence; identical to SEQ ID NO: 31374
  GFR-binding peptide
  MOD_RES (1)..(3)..(35)..(36): Xaa is C or S

SEQ ID NO: 64450 - protein, 38 aa, Artificial Sequence
  GFR-binding peptide
  MOD_RES (34)..(35): Xaa is C or S
  MOD_RES (12)..(13)..(14)..(15)..(16): Xaa is A or G
  MOD_RES (17)..(18)..(19)..(20): Xaa is A or G or is absent
ESVAMGRHKRLXXXXXXXXXYYLISTASLKTPVXXAKS

SEQ ID NO: 64451 - protein, 31 aa, Artificial Sequence; identical to SEQ ID NO: 5336
  GFR-binding peptide
  MOD_RES (31)..(31): Xaa is C or S

SEQ ID NO: 64452 - protein, 37 aa, Artificial Sequence
  GFR-binding peptide
  MOD_RES (2)..(4)..(35)..(36): Xaa is C or S
SXKXSRVIMPIKGYVKPKRGVFYLINIPSLAQPVXXP

SEQ ID NO: 64453 - protein, 42 aa, Artificial Sequence; identical to SEQ ID NO: 12770
  GFR-binding peptide
  MOD_RES (2)..(4)..(38)..(39): Xaa is C or S
  MOD_RES (16)..(17)..(18)..(19)..(20): Xaa is A or G
  MOD_RES (21)..(22)..(23)..(24): Xaa is A or G or is absent

SEQ ID NO: 64454 - protein, 32 aa, Artificial Sequence; identical to SEQ ID NO: 5345
  GFR-binding peptide
  MOD_RES (31)..(32): Xaa is C or S

SEQ ID NO: 64455 - protein, 39 aa, Artificial Sequence; identical to SEQ ID NO: 26471
  GFR-binding peptide
  MOD_RES (1)..(35)..(36): Xaa is C or S
  MOD_RES (13)..(14)..(15)..(16)..(17): Xaa is A or G
  MOD_RES (18)..(19)..(20)..(21): Xaa is A or G or is absent

SEQ ID NO: 64456 - protein, 31 aa, Artificial Sequence; identical to SEQ ID NO: 12773
  GFR-binding peptide

SEQ ID NO: 64457 - protein, 34 aa, Artificial Sequence
  GFR-binding peptide
  MOD_RES (2)..(4): Xaa is C or S
LXGXEEVIMYHYKLLLVRGNDKYLMSIPSTKVPA

SEQ ID NO: 64458 - protein, 33 aa, Artificial Sequence; identical to SEQ ID NO: 5346
  GFR-binding peptide
  MOD_RES (32)..(33): Xaa is C or S

SEQ ID NO: 64459 - protein, 32 aa, Artificial Sequence; identical to SEQ ID NO: 5347
  GFR-binding peptide
  MOD_RES (31)..(32): Xaa is C or S

SEQ ID NO: 64460 - protein, 32 aa, Artificial Sequence; identical to SEQ ID NO: 26477
  GFR-binding peptide
  MOD_RES (31)..(32): Xaa is C or S

SEQ ID NO: 64461 - protein, 39 aa, Artificial Sequence
  GFR-binding peptide
  MOD_RES (1)..(3)..(35)..(36): Xaa is C or S
XAXSEVTMNPIKGYVVNKNEDFYLINIPSMKEPVXXPEP

SEQ ID NO: 64462 - protein, 41 aa, Artificial Sequence; identical to SEQ ID NO: 31399
  GFR-binding peptide
  MOD_RES (2)..(4)..(38)..(39): Xaa is C or S
  MOD_RES (16)..(17)..(18)..(19)..(20): Xaa is A or G
  MOD_RES (21)..(22)..(23)..(24): Xaa is A or G or is absent

SEQ ID NO: 64463 - protein, 41 aa, Artificial Sequence; identical to SEQ ID NO: 5356
  GFR-binding peptide
  MOD_RES (2)..(4)..(38)..(39): Xaa is C or S
  MOD_RES (16)..(17)..(18)..(19)..(20): Xaa is A or G
  MOD_RES (21)..(22)..(23)..(24): Xaa is A or G or is absent

SEQ ID NO: 64464 - protein, 40 aa, Artificial Sequence; identical to SEQ ID NO: 26483
  GFR-binding peptide
  MOD_RES (34)..(34): Xaa is C or S
  MOD_RES (12)..(13)..(14)..(15)..(16): Xaa is A or G
  MOD_RES (17)..(18)..(19)..(20): Xaa is A or G or is absent

SEQ ID NO: 64465 - protein, 38 aa, Artificial Sequence
  GFR-binding peptide
  MOD_RES (1)..(3)..(35)..(36): Xaa is C or S
XAXSEVTMNRHKRLVVNKNEDYYLISTASMKEPVXXPE

SEQ ID NO: 64466 - protein, 34 aa, Artificial Sequence; identical to SEQ ID NO: 5358
  GFR-binding peptide
  MOD_RES (33)..(34): Xaa is C or S
  MOD_RES (11)..(12)..(13)..(14)..(15): Xaa is A or G
  MOD_RES (16)..(17)..(18)..(19): Xaa is A or G or is absent

SEQ ID NO: 64467 - protein, 36 aa, Artificial Sequence; identical to SEQ ID NO: 5359
  GFR-binding peptide
  MOD_RES (33)..(34): Xaa is C or S
  MOD_RES (11)..(12)..(13)..(14)..(15): Xaa is A or G
  MOD_RES (16)..(17)..(18)..(19): Xaa is A or G or is absent

SEQ ID NO: 64468 - protein, 41 aa, Artificial Sequence; identical to SEQ ID NO: 26487
  GFR-binding peptide
  MOD_RES (1)..(3)..(37)..(38): Xaa is C or S
  MOD_RES (15)..(16)..(17)..(18)..(19): Xaa is A or G
  MOD_RES (20)..(21)..(22)..(23): Xaa is A or G or is absent

SEQ ID NO: 64469 - protein, 41 aa, Artificial Sequence
  GFR-binding peptide
  MOD_RES (2)..(36)..(37): Xaa is C or S
  MOD_RES (14)..(15)..(16)..(17)..(18): Xaa is A or G
  MOD_RES (19)..(20)..(21)..(22): Xaa is A or G or is absent
GXESVAMGRHKRLXXXXXXXXXYYLISTASLKTPVXXAKSA

SEQ ID NO: 64470 - protein, 37 aa, Artificial Sequence
  GFR-binding peptide
  MOD_RES (31)..(32): Xaa is C or S
EEVIMYHYKLLLVRGNDKYLMSIPSTKVPAXXTSPVR

SEQ ID NO: 64471 - protein, 38 aa, Artificial Sequence; identical to SEQ ID NO: 26491
  GFR-binding peptide
  MOD_RES (1)..(3)..(34)..(35): Xaa is C or S

SEQ ID NO: 64472 - protein, 37 aa, Artificial Sequence; identical to SEQ ID NO: 5363
  GFR-binding peptide
  MOD_RES (1)..(3)..(35)..(36): Xaa is C or S

SEQ ID NO: 64473 - protein, 35 aa, Artificial Sequence; identical to SEQ ID NO: 5364
  GFR-binding peptide
  MOD_RES (2)..(35): Xaa is C or S

SEQ ID NO: 64474 - protein, 37 aa, Artificial Sequence; identical to SEQ ID NO: 31414
  GFR-binding peptide
  MOD_RES (2)..(36)..(37): Xaa is C or S
  MOD_RES (14)..(15)..(16)..(17)..(18): Xaa is A or G
  MOD_RES (19)..(20)..(21)..(22): Xaa is A or G or is absent

SEQ ID NO: 64475 - protein, 33 aa, Artificial Sequence
  GFR-binding peptide
  MOD_RES (1)..(33): Xaa is C or S
XRDVVMGEYKFKIIQQKDNLYLMSIPEMKTPTX

SEQ ID NO: 64476 - protein, 33 aa, Artificial Sequence; identical to SEQ ID NO: 31416
  GFR-binding peptide
  MOD_RES (2)..(2): Xaa is C or S

SEQ ID NO: 64477 - protein, 37 aa, Artificial Sequence; identical to SEQ ID NO: 5366
  GFR-binding peptide
  MOD_RES (1)..(35): Xaa is C or S
  MOD_RES (13)..(14)..(15)..(16)..(17): Xaa is A or G
  MOD_RES (18)..(19)..(20)..(21): Xaa is A or G or is absent

SEQ ID NO: 64478 - protein, 37 aa, Artificial Sequence; identical to SEQ ID NO: 26499
  GFR-binding peptide
  MOD_RES (2)..(36)..(37): Xaa is C or S
  MOD_RES (14)..(15)..(16)..(17)..(18): Xaa is A or G
  MOD_RES (19)..(20)..(21)..(22): Xaa is A or G or is absent

SEQ ID NO: 64479 - protein, 40 aa, Artificial Sequence; identical to SEQ ID NO: 5371
  GFR-binding peptide
  MOD_RES (34)..(35): Xaa is C or S
  MOD_RES (12)..(13)..(14)..(15)..(16): Xaa is A or G
  MOD_RES (17)..(18)..(19)..(20): Xaa is A or G or is absent

SEQ ID NO: 64480 - protein, 37 aa, Artificial Sequence; identical to SEQ ID NO: 5372
  GFR-binding peptide
  MOD_RES (34)..(35): Xaa is C or S
  MOD_RES (12)..(13)..(14)..(15)..(16): Xaa is A or G
  MOD_RES (17)..(18)..(19)..(20): Xaa is A or G or is absent

SEQ ID NO: 64481 - protein, 32 aa, Artificial Sequence
  GFR-binding peptide
  MOD_RES (1)..(1): Xaa is C or S
XSEVTMNYHYKLVVNKNEDKYLISIPSMKEPV

SEQ ID NO: 64482 - protein, 33 aa, Artificial Sequence; identical to SEQ ID NO: 26504
  GFR-binding peptide
  MOD_RES (1)..(33): Xaa is C or S

SEQ ID NO: 64483 - protein, 42 aa, Artificial Sequence; identical to SEQ ID NO: 26505
  GFR-binding peptide
  MOD_RES (2)..(36)..(37): Xaa is C or S
  MOD_RES (14)..(15)..(16)..(17)..(18): Xaa is A or G
  MOD_RES (19)..(20)..(21)..(22): Xaa is A or G or is absent

SEQ ID NO: 64484 - protein, 35 aa, Artificial Sequence
  GFR-binding peptide
  MOD_RES (31)..(32): Xaa is C or S
EVVMDEYKFKVVNNASDLYLISIPELRTPVXXTPP

SEQ ID NO: 64485 - protein, 37 aa, Artificial Sequence
  GFR-binding peptide
  MOD_RES (33)..(34): Xaa is C or S
  MOD_RES (11)..(12)..(13)..(14)..(15): Xaa is A or G
  MOD_RES (16)..(17)..(18)..(19): Xaa is A or G or is absent
EVVMDRHKRLXXXXXXXXXYYLISTASLRTPVXXTPP

SEQ ID NO: 64486 - protein, 36 aa, Artificial Sequence; identical to SEQ ID NO: 5375
  GFR-binding peptide
  MOD_RES (1)..(3): Xaa is C or S
  MOD_RES (15)..(16)..(17)..(18)..(19): Xaa is A or G
  MOD_RES (20)..(21)..(22)..(23): Xaa is A or G or is absent

SEQ ID NO: 64487 - protein, 36 aa, Artificial Sequence; identical to SEQ ID NO: 5376
  GFR-binding peptide
  MOD_RES (1)..(3)..(36): Xaa is C or S
  MOD_RES (14)..(15)..(16)..(17)..(18): Xaa is A or G
  MOD_RES (19)..(20)..(21)..(22): Xaa is A or G or is absent

SEQ ID NO: 64488 - protein, 36 aa, Artificial Sequence; identical to SEQ ID NO: 5378
  GFR-binding peptide
  MOD_RES (2)..(4): Xaa is C or S
  MOD_RES (15)..(16)..(17)..(18)..(19): Xaa is A or G
  MOD_RES (20)..(21)..(22)..(23): Xaa is A or G or is absent

SEQ ID NO: 64489 - protein, 43 aa, Artificial Sequence
  GFR-binding peptide
  MOD_RES (2)..(4)..(38)..(39): Xaa is C or S
  MOD_RES (16)..(17)..(18)..(19)..(20): Xaa is A or G
  MOD_RES (21)..(22)..(23)..(24): Xaa is A or G or is absent
RXGXESVAMGRHKRLXXXXXXXXXYYLISTASLKTPVXXAKSA

SEQ ID NO: 64490 - protein, 36 aa, Artificial Sequence
  GFR-binding peptide
  MOD_RES (1)..(3): Xaa is C or S
  MOD_RES (15)..(16)..(17)..(18)..(19): Xaa is A or G
  MOD_RES (20)..(21)..(22)..(23): Xaa is A or G or is absent
XGXESVAMGRHKRLXXXXXXXXXYYLISTASLKTPV

SEQ ID NO: 64491 - protein, 39 aa, Artificial Sequence; identical to SEQ ID NO: 5379
  GFR-binding peptide
  MOD_RES (1)..(3)..(36)..(37): Xaa is C or S
  MOD_RES (14)..(15)..(16)..(17)..(18): Xaa is A or G
  MOD_RES (19)..(20)..(21)..(22): Xaa is A or G or is absent

SEQ ID NO: 64492 - protein, 32 aa, Artificial Sequence; identical to SEQ ID NO: 5380
  GFR-binding peptide

SEQ ID NO: 64493 - protein, 41 aa, Artificial Sequence
  GFR-binding peptide
  MOD_RES (2)..(4)..(36)..(37): Xaa is C or S
RXAXSEVTMNRHKRLVVNKNEDYYLISTASMKEPVXXPEPI

SEQ ID NO: 64494 - protein, 39 aa, Artificial Sequence
  GFR-binding peptide
  MOD_RES (1)..(35)..(36): Xaa is C or S
  MOD_RES (13)..(14)..(15)..(16)..(17): Xaa is A or G
  MOD_RES (18)..(19)..(20)..(21): Xaa is A or G or is absent
XRDVVMGEYKFKXXXXXXXXXLYLMSIPEMKTPTXXPGA

SEQ ID NO: 64495 - protein, 38 aa, Artificial Sequence
  GFR-binding peptide
  MOD_RES (32)..(33): Xaa is C or S
AEVVMDRHKRLVVNNAADYYLISTASLRAPVXXSAPAA

SEQ ID NO: 64496 - protein, 34 aa, Artificial Sequence; identical to SEQ ID NO: 26518
  GFR-binding peptide
  MOD_RES (1)..(1): Xaa is C or S
  MOD_RES (13)..(14)..(15)..(16)..(17): Xaa is A or G
  MOD_RES (18)..(19)..(20)..(21): Xaa is A or G or is absent

SEQ ID NO: 64497 - protein, 43 aa, Artificial Sequence; identical to SEQ ID NO: 5393
  GFR-binding peptide
  MOD_RES (2)..(4)..(38)..(39): Xaa is C or S
  MOD_RES (16)..(17)..(18)..(19)..(20): Xaa is A or G
  MOD_RES (21)..(22)..(23)..(24): Xaa is A or G or is absent

SEQ ID NO: 64498 - protein, 42 aa, Artificial Sequence; identical to SEQ ID NO: 5396
  GFR-binding peptide
  MOD_RES (2)..(36)..(37): Xaa is C or S
  MOD_RES (14)..(15)..(16)..(17)..(18): Xaa is A or G
  MOD_RES (19)..(20)..(21)..(22): Xaa is A or G or is absent

SEQ ID NO: 64499 - protein, 43 aa, Artificial Sequence; identical to SEQ ID NO: 5397
  GFR-binding peptide
  MOD_RES (1)..(3)..(37): Xaa is C or S
  MOD_RES (15)..(16)..(17)..(18)..(19): Xaa is A or G
  MOD_RES (20)..(21)..(22)..(23): Xaa is A or G or is absent

SEQ ID NO: 64500 - protein, 36 aa, Artificial Sequence; identical to SEQ ID NO: 5398
  GFR-binding peptide
  MOD_RES (31)..(32): Xaa is C or S

SEQ ID NO: 64501 - protein, 37 aa, Artificial Sequence
  GFR-binding peptide
  MOD_RES (1)..(35)..(36): Xaa is C or S
  MOD_RES (13)..(14)..(15)..(16)..(17): Xaa is A or G
  MOD_RES (18)..(19)..(20)..(21): Xaa is A or G or is absent
XSEVVMDRHKRLXXXXXXXXXYYLISTASLRTPVXXT

SEQ ID NO: 64502 - protein, 36 aa, Artificial Sequence
  GFR-binding peptide
  MOD_RES (1)..(3)..(36): Xaa is C or S
  MOD_RES (14)..(15)..(16)..(17)..(18): Xaa is A or G
  MOD_RES (19)..(20)..(21)..(22): Xaa is A or G or is absent
XGXEEVIMRHKRLXXXXXXXXXYYLMSTASTKVPAX

SEQ ID NO: 64503 - protein, 35 aa, Artificial Sequence; identical to SEQ ID NO: 56362
  GFR-binding peptide
  MOD_RES (2)..(4): Xaa is C or S

SEQ ID NO: 64504 - protein, 44 aa, Artificial Sequence; identical to SEQ ID NO: 31445
  GFR-binding peptide
  MOD_RES (1)..(3)..(38)..(39): Xaa is C or S
  MOD_RES (16)..(17)..(18)..(19)..(20): Xaa is A or G
  MOD_RES (21)..(22)..(23)..(24): Xaa is A or G or is absent

SEQ ID NO: 64505 - protein, 40 aa, Artificial Sequence; identical to SEQ ID NO: 26527
  GFR-binding peptide
  MOD_RES (1)..(3)..(37)..(38): Xaa is C or S
  MOD_RES (15)..(16)..(17)..(18)..(19): Xaa is A or G
  MOD_RES (20)..(21)..(22)..(23): Xaa is A or G or is absent

SEQ ID NO: 64506 - protein, 43 aa, Artificial Sequence; identical to SEQ ID NO: 5405
  GFR-binding peptide
  MOD_RES (2)..(4)..(38)..(39): Xaa is C or S
  MOD_RES (16)..(17)..(18)..(19)..(20): Xaa is A or G
  MOD_RES (21)..(22)..(23)..(24): Xaa is A or G or is absent

SEQ ID NO: 64507 - protein, 38 aa, Artificial Sequence
  GFR-binding peptide
  MOD_RES (34)..(35): Xaa is C or S
  MOD_RES (12)..(13)..(14)..(15)..(16): Xaa is A or G
  MOD_RES (17)..(18)..(19)..(20): Xaa is A or G or is absent
SEVVMDYHYKLXXXXXXXXXKYLISIPSLRTPVXXTPP

SEQ ID NO: 64508 - protein, 32 aa, Artificial Sequence; identical to SEQ ID NO: 31456
  GFR-binding peptide
  MOD_RES (32)..(32): Xaa is C or S

SEQ ID NO: 64509 - protein, 41 aa, Artificial Sequence; identical to SEQ ID NO: 5406
  GFR-binding peptide
  MOD_RES (2)..(4)..(38)..(39): Xaa is C or S
  MOD_RES (16)..(17)..(18)..(19)..(20): Xaa is A or G
  MOD_RES (21)..(22)..(23)..(24): Xaa is A or G or is absent

SEQ ID NO: 64510 - protein, 39 aa, Artificial Sequence; identical to SEQ ID NO: 5407
  GFR-binding peptide
  MOD_RES (2)..(4)..(38)..(39): Xaa is C or S
  MOD_RES (16)..(17)..(18)..(19)..(20): Xaa is A or G
  MOD_RES (21)..(22)..(23)..(24): Xaa is A or G or is absent

SEQ ID NO: 64511 - protein, 30 aa, Artificial Sequence; identical to SEQ ID NO: 56384
  GFR-binding peptide

SEQ ID NO: 64512 - protein, 41 aa, Artificial Sequence; identical to SEQ ID NO: 5408
  GFR-binding peptide
  MOD_RES (2)..(36)..(37): Xaa is C or S
  MOD_RES (14)..(15)..(16)..(17)..(18): Xaa is A or G
  MOD_RES (19)..(20)..(21)..(22): Xaa is A or G or is absent

SEQ ID NO: 64513 - protein, 35 aa, Artificial Sequence; identical to SEQ ID NO: 5409
  GFR-binding peptide
  MOD_RES (32)..(33): Xaa is C or S

SEQ ID NO: 64514 - protein, 39 aa, Artificial Sequence
  GFR-binding peptide
  MOD_RES (1)..(3)..(36)..(37): Xaa is C or S
  MOD_RES (14)..(15)..(16)..(17)..(18): Xaa is A or G
  MOD_RES (19)..(20)..(21)..(22): Xaa is A or G or is absent
XKXSKVVMPIKGYXXXXXXXXXFYLINIPSLDQPVXXPS

SEQ ID NO: 64515 - protein, 35 aa, Artificial Sequence; identical to SEQ ID NO: 5413
  GFR-binding peptide
  MOD_RES (1)..(35): Xaa is C or S
  MOD_RES (13)..(14)..(15)..(16)..(17): Xaa is A or G
  MOD_RES (18)..(19)..(20)..(21): Xaa is A or G or is absent

SEQ ID NO: 64516 - protein, 39 aa, Artificial Sequence
  GFR-binding peptide
  MOD_RES (2)..(35)..(36): Xaa is C or S
  MOD_RES (13)..(14)..(15)..(16)..(17): Xaa is A or G
  MOD_RES (18)..(19)..(20)..(21): Xaa is A or G or is absent
KXSKVIMPIKGYXXXXXXXXXFYLINIPSLDQSVXXPSA

SEQ ID NO: 64517 - protein, 36 aa, Artificial Sequence
  GFR-binding peptide
  MOD_RES (1)..(34)..(35): Xaa is C or S
  MOD_RES (12)..(13)..(14)..(15)..(16): Xaa is A or G
  MOD_RES (17)..(18)..(19)..(20): Xaa is A or G or is absent
XSKVVMPIKGYXXXXXXXXXFYLINIPSLDQPVXXP

SEQ ID NO: 64518 - protein, 40 aa, Artificial Sequence; identical to SEQ ID NO: 56390
  GFR-binding peptide
  MOD_RES (2)..(35)..(36): Xaa is C or S
  MOD_RES (13)..(14)..(15)..(16)..(17): Xaa is A or G
  MOD_RES (18)..(19)..(20)..(21): Xaa is A or G or is absent

SEQ ID NO: 64519 - protein, 37 aa, Artificial Sequence; identical to SEQ ID NO: 31468
  GFR-binding peptide
  MOD_RES (2)..(36)..(37): Xaa is C or S
  MOD_RES (14)..(15)..(16)..(17)..(18): Xaa is A or G
  MOD_RES (19)..(20)..(21)..(22): Xaa is A or G or is absent

SEQ ID NO: 64520 - protein, 36 aa, Artificial Sequence; identical to SEQ ID NO: 31469
  GFR-binding peptide
  MOD_RES (32)..(33): Xaa is C or S

SEQ ID NO: 64521 - protein, 39 aa, Artificial Sequence; identical to SEQ ID NO: 5415
  GFR-binding peptide
  MOD_RES (2)..(4)..(35)..(36): Xaa is C or S

SEQ ID NO: 64522 - protein, 39 aa, Artificial Sequence
  GFR-binding peptide
  MOD_RES (1)..(33)..(34): Xaa is C or S
XESVAMGRHKRLYTVVGKDYYLISTASLKTPVXXAKSAK

SEQ ID NO: 64523 - protein, 35 aa, Artificial Sequence; identical to SEQ ID NO: 26548
  GFR-binding peptide
  MOD_RES (34)..(35): Xaa is C or S
  MOD_RES (12)..(13)..(14)..(15)..(16): Xaa is A or G
  MOD_RES (17)..(18)..(19)..(20): Xaa is A or G or is absent

SEQ ID NO: 64524 - protein, 31 aa, Artificial Sequence; identical to SEQ ID NO: 5422
  GFR-binding peptide
  MOD_RES (31)..(31): Xaa is C or S

SEQ ID NO: 64525 - protein, 34 aa, Artificial Sequence; identical to SEQ ID NO: 5426
  GFR-binding peptide
  MOD_RES (2)..(4): Xaa is C or S

SEQ ID NO: 64526 - protein, 35 aa, Artificial Sequence; identical to SEQ ID NO: 31475
  GFR-binding peptide
  MOD_RES (33)..(34): Xaa is C or S
  MOD_RES (11)..(12)..(13)..(14)..(15): Xaa is A or G
  MOD_RES (16)..(17)..(18)..(19): Xaa is A or G or is absent

SEQ ID NO: 64527 - protein, 40 aa, Artificial Sequence
  GFR-binding peptide
  MOD_RES (2)..(4)..(38)..(39): Xaa is C or S
  MOD_RES (16)..(17)..(18)..(19)..(20): Xaa is A or G
  MOD_RES (21)..(22)..(23)..(24): Xaa is A or G or is absent
RXAXSEVTMNPIKGYXXXXXXXXXFYLINIPSMKEPVXXP

SEQ ID NO: 64528 - protein, 39 aa, Artificial Sequence; identical to SEQ ID NO: 5430
  GFR-binding peptide
  MOD_RES (1)..(3)..(35)..(36): Xaa is C or S

SEQ ID NO: 64529 - protein, 42 aa, Artificial Sequence; identical to SEQ ID NO: 31476
  GFR-binding peptide
  MOD_RES (2)..(4)..(36)..(37): Xaa is C or S

SEQ ID NO: 64530 - protein, 36 aa, Artificial Sequence; identical to SEQ ID NO: 5432
  GFR-binding peptide
  MOD_RES (2)..(2): Xaa is C or S
  MOD_RES (15)..(16)..(17)..(18)..(19): Xaa is A or G
  MOD_RES (20)..(21)..(22)..(23): Xaa is A or G or is absent

SEQ ID NO: 64531 - protein, 33 aa, Artificial Sequence; identical to SEQ ID NO: 5433
  GFR-binding peptide
  MOD_RES (33)..(33): Xaa is C or S
  MOD_RES (11)..(12)..(13)..(14)..(15): Xaa is A or G
  MOD_RES (16)..(17)..(18)..(19): Xaa is A or G or is absent

SEQ ID NO: 64532 - protein, 39 aa, Artificial Sequence
  GFR-binding peptide
  MOD_RES (2)..(4)..(35)..(36): Xaa is C or S
LXGXEEVIMEYKFKLLVRGNDLYLMSIPETKVPAXXTSP

SEQ ID NO: 64533 - protein, 35 aa, Artificial Sequence; identical to SEQ ID NO: 56412
  GFR-binding peptide
  MOD_RES (33)..(34): Xaa is C or S
  MOD_RES (11)..(12)..(13)..(14)..(15): Xaa is A or G
  MOD_RES (16)..(17)..(18)..(19): Xaa is A or G or is absent

SEQ ID NO: 64534 - protein, 33 aa, Artificial Sequence; identical to SEQ ID NO: 5437
  GFR-binding peptide
  MOD_RES (33)..(33): Xaa is C or S
  MOD_RES (11)..(12)..(13)..(14)..(15): Xaa is A or G
  MOD_RES (16)..(17)..(18)..(19): Xaa is A or G or is absent

SEQ ID NO: 64535 - protein, 40 aa, Artificial Sequence
  GFR-binding peptide
  MOD_RES (2)..(4)..(36)..(37): Xaa is C or S
RXGXSEVVMDEYKFKVVNNASDLYLISIPELRTPVXXTPP

SEQ ID NO: 64536 - protein, 32 aa, Artificial Sequence
  GFR-binding peptide
  MOD_RES (1)..(1): Xaa is C or S
XSEVTMNRYKKLVVNKNEDFYLISIANMKEPV

SEQ ID NO: 64537 - protein, 41 aa, Artificial Sequence; identical to SEQ ID NO: 26560
  GFR-binding peptide
  MOD_RES (1)..(3)..(37)..(38): Xaa is C or S
  MOD_RES (15)..(16)..(17)..(18)..(19): Xaa is A or G
  MOD_RES (20)..(21)..(22)..(23): Xaa is A or G or is absent

SEQ ID NO: 64538 - protein, 33 aa, Artificial Sequence; identical to SEQ ID NO: 12868
  GFR-binding peptide
  MOD_RES (12)..(13)..(14)..(15)..(16): Xaa is A or G
  MOD_RES (17)..(18)..(19)..(20): Xaa is A or G or is absent

SEQ ID NO: 64539 - protein, 39 aa, Artificial Sequence; identical to SEQ ID NO: 26565
  GFR-binding peptide
  MOD_RES (33)..(34): Xaa is C or S
  MOD_RES (11)..(12)..(13)..(14)..(15): Xaa is A or G
  MOD_RES (16)..(17)..(18)..(19): Xaa is A or G or is absent

SEQ ID NO: 64540 - protein, 33 aa, Artificial Sequence; identical to SEQ ID NO: 5451
  GFR-binding peptide
  MOD_RES (12)..(13)..(14)..(15)..(16): Xaa is A or G
  MOD_RES (17)..(18)..(19)..(20): Xaa is A or G or is absent

SEQ ID NO: 64541 - protein, 34 aa, Artificial Sequence
  GFR-binding peptide
  MOD_RES (1)..(3)..(34): Xaa is C or S
XKXSKVVMPIKGYVKPTRGVFYLINIPSLDQPVX

SEQ ID NO: 64542 - protein, 31 aa, Artificial Sequence; identical to SEQ ID NO: 5457
  GFR-binding peptide
  MOD_RES (1)..(1): Xaa is C or S

SEQ ID NO: 64543 - protein, 35 aa, Artificial Sequence; identical to SEQ ID NO: 31503
  GFR-binding peptide
  MOD_RES (32)..(33): Xaa is C or S

SEQ ID NO: 64544 - protein, 37 aa, Artificial Sequence; identical to SEQ ID NO: 26570
  GFR-binding peptide
  MOD_RES (2)..(4)..(36): Xaa is C or S

SEQ ID NO: 64545 - protein, 39 aa, Artificial Sequence
  GFR-binding peptide
  MOD_RES (2)..(33)..(34): Xaa is C or S
KXSKVIMPIKGYIKPTKGIFYLINIPSLDQSVXXPSASA

SEQ ID NO: 64546 - protein, 42 aa, Artificial Sequence; identical to SEQ ID NO: 31505
  GFR-binding peptide
  MOD_RES (1)..(3)..(37)..(38): Xaa is C or S
  MOD_RES (15)..(16)..(17)..(18)..(19): Xaa is A or G
  MOD_RES (20)..(21)..(22)..(23): Xaa is A or G or is absent

SEQ ID NO: 64547 - protein, 36 aa, Artificial Sequence; identical to SEQ ID NO: 26571
  GFR-binding peptide
  MOD_RES (2)..(36): Xaa is C or S
  MOD_RES (14)..(15)..(16)..(17)..(18): Xaa is A or G
  MOD_RES (19)..(20)..(21)..(22): Xaa is A or G or is absent

SEQ ID NO: 64548 - protein, 43 aa, Artificial Sequence; identical to SEQ ID NO: 31508
  GFR-binding peptide
  MOD_RES (2)..(4)..(38)..(39): Xaa is C or S
  MOD_RES (16)..(17)..(18)..(19)..(20): Xaa is A or G
  MOD_RES (21)..(22)..(23)..(24): Xaa is A or G or is absent

SEQ ID NO: 64549 - protein, 35 aa, Artificial Sequence; identical to SEQ ID NO: 26574
  GFR-binding peptide
  MOD_RES (32)..(33): Xaa is C or S

SEQ ID NO: 64550 - protein, 38 aa, Artificial Sequence; identical to SEQ ID NO: 56437
  GFR-binding peptide
  MOD_RES (2)..(4)..(35)..(36): Xaa is C or S

SEQ ID NO: 64551 - protein, 33 aa, Artificial Sequence; identical to SEQ ID NO: 31512
  GFR-binding peptide
  MOD_RES (33)..(33): Xaa is C or S
  MOD_RES (11)..(12)..(13)..(14)..(15): Xaa is A or G
  MOD_RES (16)..(17)..(18)..(19): Xaa is A or G or is absent

SEQ ID NO: 64552 - protein, 35 aa, Artificial Sequence; identical to SEQ ID NO: 26575
  GFR-binding peptide
  MOD_RES (31)..(32): Xaa is C or S

SEQ ID NO: 64553 - protein, 41 aa, Artificial Sequence; identical to SEQ ID NO: 31514
  GFR-binding peptide
  MOD_RES (2)..(36): Xaa is C or S
  MOD_RES (14)..(15)..(16)..(17)..(18): Xaa is A or G
  MOD_RES (19)..(20)..(21)..(22): Xaa is A or G or is absent

SEQ ID NO: 64554 - protein, 34 aa, Artificial Sequence; identical to SEQ ID NO: 26578
  GFR-binding peptide
  MOD_RES (1)..(33)..(34): Xaa is C or S

SEQ ID NO: 64555 - protein, 38 aa, Artificial Sequence; identical to SEQ ID NO: 5465
  GFR-binding peptide
  MOD_RES (1)..(3)..(38): Xaa is C or S
  MOD_RES (16)..(17)..(18)..(19)..(20): Xaa is A or G
  MOD_RES (21)..(22)..(23)..(24): Xaa is A or G or is absent

SEQ ID NO: 64556 - protein, 40 aa, Artificial Sequence; identical to SEQ ID NO: 31516
  GFR-binding peptide
  MOD_RES (1)..(3)..(37)..(38): Xaa is C or S
  MOD_RES (15)..(16)..(17)..(18)..(19): Xaa is A or G
  MOD_RES (20)..(21)..(22)..(23): Xaa is A or G or is absent

SEQ ID NO: 64557 - protein, 37 aa, Artificial Sequence; identical to SEQ ID NO: 5469
  GFR-binding peptide
  MOD_RES (31)..(32): Xaa is C or S

SEQ ID NO: 64558 - protein, 37 aa, Artificial Sequence
  GFR-binding peptide
  MOD_RES (2)..(4)..(36)..(37): Xaa is C or S
RXGXSEVVMDRHKRLVVNNASDYYLISTASLRTPVXX

SEQ ID NO: 64559 - protein, 36 aa, Artificial Sequence; identical to SEQ ID NO: 26582
  GFR-binding peptide
  MOD_RES (1)..(35)..(36): Xaa is C or S
  MOD_RES (13)..(14)..(15)..(16)..(17): Xaa is A or G
  MOD_RES (18)..(19)..(20)..(21): Xaa is A or G or is absent

SEQ ID NO: 64560 - protein, 42 aa, Artificial Sequence
  GFR-binding peptide
  MOD_RES (2)..(4)..(38)..(39): Xaa is C or S
  MOD_RES (16)..(17)..(18)..(19)..(20): Xaa is A or G
  MOD_RES (21)..(22)..(23)..(24): Xaa is A or G or is absent
SXGXRDVVMGRHKRLXXXXXXXXXYYLMSTASMKTPTXXPGA

SEQ ID NO: 64561 - protein, 40 aa, Artificial Sequence; identical to SEQ ID NO: 12885
  GFR-binding peptide
  MOD_RES (34)..(35): Xaa is C or S
  MOD_RES (12)..(13)..(14)..(15)..(16): Xaa is A or G
  MOD_RES (17)..(18)..(19)..(20): Xaa is A or G or is absent

SEQ ID NO: 64562 - protein, 37 aa, Artificial Sequence; identical to SEQ ID NO: 26583
  GFR-binding peptide
  MOD_RES (32)..(32): Xaa is C or S

SEQ ID NO: 64563 - protein, 33 aa, Artificial Sequence; identical to SEQ ID NO: 31518
  GFR-binding peptide
  MOD_RES (31)..(32): Xaa is C or S

SEQ ID NO: 64564 - protein, 39 aa, Artificial Sequence; identical to SEQ ID NO: 5471
  GFR-binding peptide
  MOD_RES (1)..(36)..(37): Xaa is C or S
  MOD_RES (14)..(15)..(16)..(17)..(18): Xaa is A or G
  MOD_RES (19)..(20)..(21)..(22): Xaa is A or G or is absent

SEQ ID NO: 64565 - protein, 38 aa, Artificial Sequence
  GFR-binding peptide
  MOD_RES (2)..(4)..(36)..(37): Xaa is C or S
RXAXSEVTMNYHYKLVVNKNEDKYLISIPSMKEPVXXP

SEQ ID NO: 64566 - protein, 38 aa, Artificial Sequence; identical to SEQ ID NO: 31521
  GFR-binding peptide
  MOD_RES (1)..(35): Xaa is C or S
  MOD_RES (13)..(14)..(15)..(16)..(17): Xaa is A or G
  MOD_RES (18)..(19)..(20)..(21): Xaa is A or G or is absent

SEQ ID NO: 64567 - protein, 35 aa, Artificial Sequence; identical to SEQ ID NO: 26587
  GFR-binding peptide
  MOD_RES (32)..(33): Xaa is C or S

SEQ ID NO: 64568 - protein, 38 aa, Artificial Sequence; identical to SEQ ID NO: 31522
  GFR-binding peptide
  MOD_RES (2)..(4)..(36): Xaa is C or S

SEQ ID NO: 64569 - protein, 32 aa, Artificial Sequence; identical to SEQ ID NO: 5476
  GFR-binding peptide
  MOD_RES (31)..(32): Xaa is C or S

SEQ ID NO: 64570 - protein, 42 aa, Artificial Sequence; identical to SEQ ID NO: 31523
  GFR-binding peptide
  MOD_RES (2)..(36)..(37): Xaa is C or S
  MOD_RES (14)..(15)..(16)..(17)..(18): Xaa is A or G
  MOD_RES (19)..(20)..(21)..(22): Xaa is A or G or is absent

SEQ ID NO: 64571 - protein, 39 aa, Artificial Sequence
  GFR-binding peptide
  MOD_RES (1)..(3)..(37)..(38): Xaa is C or S
  MOD_RES (15)..(16)..(17)..(18)..(19): Xaa is A or G
  MOD_RES (20)..(21)..(22)..(23): Xaa is A or G or is absent
XAXSEVTMNRYKKLXXXXXXXXXFYLISIANMKEPVXXP

SEQ ID NO: 64572 - protein, 39 aa, Artificial Sequence; identical to SEQ ID NO: 5484
  GFR-binding peptide
  MOD_RES (2)..(35)..(36): Xaa is C or S
  MOD_RES (13)..(14)..(15)..(16)..(17): Xaa is A or G
  MOD_RES (18)..(19)..(20)..(21): Xaa is A or G or is absent

SEQ ID NO: 64573 - protein, 38 aa, Artificial Sequence; identical to SEQ ID NO: 5488
  GFR-binding peptide
  MOD_RES (2)..(34)..(35): Xaa is C or S

SEQ ID NO: 64574 - protein, 36 aa, Artificial Sequence; identical to SEQ ID NO: 5489
  GFR-binding peptide
  MOD_RES (31)..(32): Xaa is C or S

SEQ ID NO: 64575 - protein, 33 aa, Artificial Sequence
  GFR-binding peptide
  MOD_RES (2)..(2): Xaa is C or S
AXSEVTMNPIKGYVVNKNEDFYLINIPSMKEPV

SEQ ID NO: 64576 - protein, 36 aa, Artificial Sequence; identical to SEQ ID NO: 5490
  GFR-binding peptide
  MOD_RES (32)..(33): Xaa is C or S

SEQ ID NO: 64577 - protein, 37 aa, Artificial Sequence
  GFR-binding peptide
  MOD_RES (1)..(32)..(33): Xaa is C or S
XEEVIMEYKFKLLVRGNDLYLMSIPETKVPAXXTSPV

SEQ ID NO: 64578 - protein, 40 aa, Artificial Sequence
  GFR-binding peptide
  MOD_RES (1)..(3)..(36)..(37): Xaa is C or S
  MOD_RES (14)..(15)..(16)..(17)..(18): Xaa is A or G
  MOD_RES (19)..(20)..(21)..(22): Xaa is A or G or is absent
XKXSKVVMPIKGYXXXXXXXXXFYLINIPSLDQPVXXPSA

SEQ ID NO: 64579 - protein, 34 aa, Artificial Sequence; identical to SEQ ID NO: 5496
  GFR-binding peptide
  MOD_RES (31)..(32): Xaa is C or S

SEQ ID NO: 64580 - protein, 39 aa, Artificial Sequence; identical to SEQ ID NO: 5501
  GFR-binding peptide
  MOD_RES (1)..(35)..(36): Xaa is C or S
  MOD_RES (13)..(14)..(15)..(16)..(17): Xaa is A or G
  MOD_RES (18)..(19)..(20)..(21): Xaa is A or G or is absent

SEQ ID NO: 64581 - protein, 34 aa, Artificial Sequence; identical to SEQ ID NO: 26605
  GFR-binding peptide
  MOD_RES (2)..(34): Xaa is C or S

SEQ ID NO: 64582 - protein, 33 aa, Artificial Sequence; identical to SEQ ID NO: 31551
  GFR-binding peptide
  MOD_RES (1)..(33): Xaa is C or S

SEQ ID NO: 64583 - protein, 40 aa, Artificial Sequence; identical to SEQ ID NO: 5502
  GFR-binding peptide
  MOD_RES (1)..(3)..(38)..(39): Xaa is C or S
  MOD_RES (16)..(17)..(18)..(19)..(20): Xaa is A or G
  MOD_RES (21)..(22)..(23)..(24): Xaa is A or G or is absent

SEQ ID NO: 64584 - protein, 35 aa, Artificial Sequence; identical to SEQ ID NO: 31553
  GFR-binding peptide
  MOD_RES (1)..(33)..(34): Xaa is C or S

SEQ ID NO: 64585 - protein, 35 aa, Artificial Sequence; identical to SEQ ID NO: 5503
  GFR-binding peptide
  MOD_RES (2)..(2): Xaa is C or S
  MOD_RES (14)..(15)..(16)..(17)..(18): Xaa is A or G
  MOD_RES (19)..(20)..(21)..(22): Xaa is A or G or is absent

SEQ ID NO: 64586 - protein, 34 aa, Artificial Sequence; identical to SEQ ID NO: 26609
  GFR-binding peptide
  MOD_RES (1)..(32)..(33): Xaa is C or S

SEQ ID NO: 64587 - protein, 36 aa, Artificial Sequence
  GFR-binding peptide
  MOD_RES (1)..(3)..(36): Xaa is C or S
  MOD_RES (14)..(15)..(16)..(17)..(18): Xaa is A or G
  MOD_RES (19)..(20)..(21)..(22): Xaa is A or G or is absent
XGXEEVIMEYKFKXXXXXXXXXLYLMSIPETKVPAX

SEQ ID NO: 64588 - protein, 38 aa, Artificial Sequence; identical to SEQ ID NO: 26610
  GFR-binding peptide
  MOD_RES (2)..(4)..(37)..(38): Xaa is C or S
  MOD_RES (15)..(16)..(17)..(18)..(19): Xaa is A or G
  MOD_RES (20)..(21)..(22)..(23): Xaa is A or G or is absent

SEQ ID NO: 64589 - protein, 43 aa, Artificial Sequence; identical to SEQ ID NO: 5506
  GFR-binding peptide
  MOD_RES (1)..(3)..(38)..(39): Xaa is C or S
  MOD_RES (16)..(17)..(18)..(19)..(20): Xaa is A or G
  MOD_RES (21)..(22)..(23)..(24): Xaa is A or G or is absent

SEQ ID NO: 64590 - protein, 40 aa, Artificial Sequence; identical to SEQ ID NO: 5507
  GFR-binding peptide
  MOD_RES (1)..(3)..(36)..(37): Xaa is C or S
  MOD_RES (14)..(15)..(16)..(17)..(18): Xaa is A or G
  MOD_RES (19)..(20)..(21)..(22): Xaa is A or G or is absent

SEQ ID NO: 64591 - protein, 40 aa, Artificial Sequence
  GFR-binding peptide
  MOD_RES (2)..(36)..(37): Xaa is C or S
  MOD_RES (14)..(15)..(16)..(17)..(18): Xaa is A or G
  MOD_RES (19)..(20)..(21)..(22): Xaa is A or G or is absent
GXESVAMGRHKRLXXXXXXXXXYYLISTASLKTPVXXAKS

SEQ ID NO: 64592 - protein, 41 aa, Artificial Sequence; identical to SEQ ID NO: 5509
  GFR-binding peptide
  MOD_RES (1)..(35)..(36): Xaa is C or S
  MOD_RES (13)..(14)..(15)..(16)..(17): Xaa is A or G
  MOD_RES (18)..(19)..(20)..(21): Xaa is A or G or is absent

SEQ ID NO: 64593 - protein, 34 aa, Artificial Sequence; identical to SEQ ID NO: 5510
  GFR-binding peptide
  MOD_RES (32)..(33): Xaa is C or S

SEQ ID NO: 64594 - protein, 38 aa, Artificial Sequence; identical to SEQ ID NO: 26619
  GFR-binding peptide
  MOD_RES (1)..(35): Xaa is C or S
  MOD_RES (13)..(14)..(15)..(16)..(17): Xaa is A or G
  MOD_RES (18)..(19)..(20)..(21): Xaa is A or G or is absent

SEQ ID NO: 64595 - protein, 33 aa, Artificial Sequence; identical to SEQ ID NO: 26621
  GFR-binding peptide
  MOD_RES (31)..(32): Xaa is C or S

SEQ ID NO: 64596 - protein, 39 aa, Artificial Sequence; identical to SEQ ID NO: 31564
  GFR-binding peptide
  MOD_RES (2)..(4)..(38)..(39): Xaa is C or S
  MOD_RES (16)..(17)..(18)..(19)..(20): Xaa is A or G
  MOD_RES (21)..(22)..(23)..(24): Xaa is A or G or is absent

SEQ ID NO: 64597 - protein, 34 aa, Artificial Sequence
  GFR-binding peptide
  MOD_RES (1)..(34): Xaa is C or S
  MOD_RES (12)..(13)..(14)..(15)..(16): Xaa is A or G
  MOD_RES (17)..(18)..(19)..(20): Xaa is A or G or is absent
XSKVIMPIKGYXXXXXXXXXFYLINIPSLDQSVX

SEQ ID NO: 64598 - protein, 32 aa, Artificial Sequence
  GFR-binding peptide
  MOD_RES (31)..(32): Xaa is C or S
EVVMDRHKRLVVNNAADYYLISTASLRAPVXX

SEQ ID NO: 64599 - protein, 31 aa, Artificial Sequence
  GFR-binding peptide
  MOD_RES (31)..(31): Xaa is C or S
EEVIMYHYKLLLVRGNDKYLMSIPSTKVPAX

SEQ ID NO: 64600 - protein, 32 aa, Artificial Sequence; identical to SEQ ID NO: 56493
  GFR-binding peptide
  MOD_RES (31)..(32): Xaa is C or S

SEQ ID NO: 64601 - protein, 35 aa, Artificial Sequence; identical to SEQ ID NO: 5519
  GFR-binding peptide
  MOD_RES (31)..(32): Xaa is C or S

SEQ ID NO: 64602 - protein, 39 aa, Artificial Sequence; identical to SEQ ID NO: 56496
  GFR-binding peptide
  MOD_RES (1)..(3)..(35)..(36): Xaa is C or S

SEQ ID NO: 64603 - protein, 37 aa, Artificial Sequence
  GFR-binding peptide
  MOD_RES (2)..(34)..(35): Xaa is C or S
AXSEVTMNPIKGYVVNKNEDFYLINIPSMKEPVXXPE

SEQ ID NO: 64604 - protein, 41 aa, Artificial Sequence; identical to SEQ ID NO: 5521
  GFR-binding peptide
  MOD_RES (2)..(4)..(36)..(37): Xaa is C or S

SEQ ID NO: 64605 - protein, 41 aa, Artificial Sequence
  GFR-binding peptide
  MOD_RES (1)..(3)..(37)..(38): Xaa is C or S
  MOD_RES (15)..(16)..(17)..(18)..(19): Xaa is A or G
  MOD_RES (20)..(21)..(22)..(23): Xaa is A or G or is absent
XGXRDVVMGYHYKLXXXXXXXXXKYLMSIPSMKTPTXXPGA

SEQ ID NO: 64606 - protein, 32 aa, Artificial Sequence; identical to SEQ ID NO: 26629
  GFR-binding peptide
  MOD_RES (11)..(12)..(13)..(14)..(15): Xaa is A or G
  MOD_RES (16)..(17)..(18)..(19): Xaa is A or G or is absent

SEQ ID NO: 64607 - protein, 36 aa, Artificial Sequence
  GFR-binding peptide
  MOD_RES (33)..(34): Xaa is C or S
  MOD_RES (11)..(12)..(13)..(14)..(15): Xaa is A or G
  MOD_RES (16)..(17)..(18)..(19): Xaa is A or G or is absent
SKVIMPIKGYXXXXXXXXXFYLINIPSLDQSVXXPS

SEQ ID NO: 64608 - protein, 35 aa, Artificial Sequence; identical to SEQ ID NO: 5523
  GFR-binding peptide
  MOD_RES (2)..(35): Xaa is C or S
  MOD_RES (13)..(14)..(15)..(16)..(17): Xaa is A or G
  MOD_RES (18)..(19)..(20)..(21): Xaa is A or G or is absent

SEQ ID NO: 64609 - protein, 41 aa, Artificial Sequence; identical to SEQ ID NO: 31570
  GFR-binding peptide
  MOD_RES (1)..(3)..(36)..(37): Xaa is C or S

SEQ ID NO: 64610 - protein, 41 aa, Artificial Sequence; identical to SEQ ID NO: 31573
  GFR-binding peptide
  MOD_RES (2)..(36)..(37): Xaa is C or S
  MOD_RES (14)..(15)..(16)..(17)..(18): Xaa is A or G
  MOD_RES (19)..(20)..(21)..(22): Xaa is A or G or is absent

SEQ ID NO: 64611 - protein, 34 aa, Artificial Sequence; identical to SEQ ID NO: 31575
  GFR-binding peptide
  MOD_RES (33)..(34): Xaa is C or S
  MOD_RES (11)..(12)..(13)..(14)..(15): Xaa is A or G
  MOD_RES (16)..(17)..(18)..(19): Xaa is A or G or is absent

SEQ ID NO: 64612 - protein, 32 aa, Artificial Sequence; identical to SEQ ID NO: 26632
  GFR-binding peptide
  MOD_RES (11)..(12)..(13)..(14)..(15): Xaa is A or G
  MOD_RES (16)..(17)..(18)..(19): Xaa is A or G or is absent

SEQ ID NO: 64613 - protein, 36 aa, Artificial Sequence; identical to SEQ ID NO: 26635
  GFR-binding peptide
  MOD_RES (1)..(3)..(34)..(35): Xaa is C or S

SEQ ID NO: 64614 - protein, 37 aa, Artificial Sequence
  GFR-binding peptide
  MOD_RES (33)..(34): Xaa is C or S
  MOD_RES (11)..(12)..(13)..(14)..(15): Xaa is A or G
  MOD_RES (16)..(17)..(18)..(19): Xaa is A or G or is absent
EVTMNPIKGYXXXXXXXXXFYLINIPSMKEPVXXPEP

SEQ ID NO: 64615 - protein, 38 aa, Artificial Sequence
  GFR-binding peptide
  MOD_RES (1)..(3)..(37)..(38): Xaa is C or S
  MOD_RES (15)..(16)..(17)..(18)..(19): Xaa is A or G
  MOD_RES (20)..(21)..(22)..(23): Xaa is A or G or is absent
XGXESVAMGRHKRLXXXXXXXXXYYLISTASLKTPVXX

SEQ ID NO: 64616 - protein, 38 aa, Artificial Sequence; identical to SEQ ID NO: 12943
  GFR-binding peptide
  MOD_RES (2)..(34)..(35): Xaa is C or S

SEQ ID NO: 64617 - protein, 42 aa, Artificial Sequence; identical to SEQ ID NO: 26637
  GFR-binding peptide
  MOD_RES (2)..(36): Xaa is C or S
  MOD_RES (14)..(15)..(16)..(17)..(18): Xaa is A or G
  MOD_RES (19)..(20)..(21)..(22): Xaa is A or G or is absent

SEQ ID NO: 64618 - protein, 31 aa, Artificial Sequence; identical to SEQ ID NO: 26638
  GFR-binding peptide
  MOD_RES (1)..(1): Xaa is C or S

SEQ ID NO: 64619 - protein, 32 aa, Artificial Sequence; identical to SEQ ID NO: 5528
  GFR-binding peptide
  MOD_RES (31)..(32): Xaa is C or S

SEQ ID NO: 64620 - protein, 33 aa, Artificial Sequence; identical to SEQ ID NO: 26640
  GFR-binding peptide
  MOD_RES (1)..(32)..(33): Xaa is C or S

SEQ ID NO: 64621 - protein, 35 aa, Artificial Sequence; identical to SEQ ID NO: 5529
  GFR-binding peptide
  MOD_RES (33)..(34): Xaa is C or S
  MOD_RES (11)..(12)..(13)..(14)..(15): Xaa is A or G
  MOD_RES (16)..(17)..(18)..(19): Xaa is A or G or is absent

SEQ ID NO: 64622 - protein, 34 aa, Artificial Sequence; identical to SEQ ID NO: 31584
  GFR-binding peptide
  MOD_RES (33)..(34): Xaa is C or S
  MOD_RES (11)..(12)..(13)..(14)..(15): Xaa is A or G
  MOD_RES (16)..(17)..(18)..(19): Xaa is A or G or is absent

SEQ ID NO: 64623 - protein, 32 aa, Artificial Sequence; identical to SEQ ID NO: 5533
  GFR-binding peptide
  MOD_RES (1)..(32): Xaa is C or S

SEQ ID NO: 64624 - protein, 38 aa, Artificial Sequence
  GFR-binding peptide
  MOD_RES (1)..(3)..(35)..(36): Xaa is C or S
XGXSEVVMDYHYKLVVNNASDKYLISIPSLRTPVXXTP

SEQ ID NO: 64625 - protein, 32 aa, Artificial Sequence; identical to SEQ ID NO: 31588
  GFR-binding peptide
  MOD_RES (32)..(32): Xaa is C or S

SEQ ID NO: 64626 - protein, 41 aa, Artificial Sequence; identical to SEQ ID NO: 26647
  GFR-binding peptide
  MOD_RES (2)..(4)..(37)..(38): Xaa is C or S
  MOD_RES (15)..(16)..(17)..(18)..(19): Xaa is A or G
  MOD_RES (20)..(21)..(22)..(23): Xaa is A or G or is absent

SEQ ID NO: 64627 - protein, 38 aa, Artificial Sequence; identical to SEQ ID NO: 26648
  GFR-binding peptide
  MOD_RES (34)..(35): Xaa is C or S
  MOD_RES (12)..(13)..(14)..(15)..(16): Xaa is A or G
  MOD_RES (17)..(18)..(19)..(20): Xaa is A or G or is absent

SEQ ID NO: 64628 - protein, 36 aa, Artificial Sequence; identical to SEQ ID NO: 31598
  GFR-binding peptide
  MOD_RES (2)..(2): Xaa is C or S
  MOD_RES (15)..(16)..(17)..(18)..(19): Xaa is A or G
  MOD_RES (20)..(21)..(22)..(23): Xaa is A or G or is absent

SEQ ID NO: 64629 - protein, 42 aa, Artificial Sequence; identical to SEQ ID NO: 5539
  GFR-binding peptide
  MOD_RES (1)..(3)..(37)..(38): Xaa is C or S
  MOD_RES (15)..(16)..(17)..(18)..(19): Xaa is A or G
  MOD_RES (20)..(21)..(22)..(23): Xaa is A or G or is absent

SEQ ID NO: 64630 - protein, 35 aa, Artificial Sequence
  GFR-binding peptide
  MOD_RES (34)..(35): Xaa is C or S
  MOD_RES (12)..(13)..(14)..(15)..(16): Xaa is A or G
  MOD_RES (17)..(18)..(19)..(20): Xaa is A or G or is absent
SEVTMNPIKGYXXXXXXXXXFYLINIPSMKEPVXX

SEQ ID NO: 64631 - protein, 35 aa, Artificial Sequence; identical to SEQ ID NO: 5540
  GFR-binding peptide
  MOD_RES (2)..(2): Xaa is C or S
  MOD_RES (14)..(15)..(16)..(17)..(18): Xaa is A or G
  MOD_RES (19)..(20)..(21)..(22): Xaa is A or G or is absent

SEQ ID NO: 64632 - protein, 35 aa, Artificial Sequence; identical to SEQ ID NO: 5542
  GFR-binding peptide
  MOD_RES (31)..(32): Xaa is C or S

SEQ ID NO: 64633 - protein, 39 aa, Artificial Sequence; identical to SEQ ID NO: 31605
  GFR-binding peptide
  MOD_RES (33)..(34): Xaa is C or S
  MOD_RES (11)..(12)..(13)..(14)..(15): Xaa is A or G
  MOD_RES (16)..(17)..(18)..(19): Xaa is A or G or is absent

SEQ ID NO: 64634 - protein, 39 aa, Artificial Sequence; identical to SEQ ID NO: 5549
  GFR-binding peptide
  MOD_RES (33)..(34): Xaa is C or S
  MOD_RES (11)..(12)..(13)..(14)..(15): Xaa is A or G
  MOD_RES (16)..(17)..(18)..(19): Xaa is A or G or is absent

SEQ ID NO: 64635 - protein, 41 aa, Artificial Sequence; identical to SEQ ID NO: 5552
  GFR-binding peptide
  MOD_RES (2)..(4)..(38): Xaa is C or S
  MOD_RES (16)..(17)..(18)..(19)..(20): Xaa is A or G
  MOD_RES (21)..(22)..(23)..(24): Xaa is A or G or is absent

SEQ ID NO: 64636 - protein, 37 aa, Artificial Sequence; identical to SEQ ID NO: 26666
  GFR-binding peptide
  MOD_RES (2)..(4): Xaa is C or S
  MOD_RES (16)..(17)..(18)..(19)..(20): Xaa is A or G
  MOD_RES (21)..(22)..(23)..(24): Xaa is A or G or is absent

SEQ ID NO: 64637 - protein, 38 aa, Artificial Sequence
  GFR-binding peptide
  MOD_RES (1)..(35)..(36): Xaa is C or S
  MOD_RES (13)..(14)..(15)..(16)..(17): Xaa is A or G
  MOD_RES (18)..(19)..(20)..(21): Xaa is A or G or is absent
XRDVVMGRHKRLXXXXXXXXXYYLMSTASMKTPTXXPG

SEQ ID NO: 64638 - protein, 34 aa, Artificial Sequence; identical to SEQ ID NO: 31613
  GFR-binding peptide
  MOD_RES (1)..(33)..(34): Xaa is C or S

SEQ ID NO: 64639 - protein, 39 aa, Artificial Sequence
  GFR-binding peptide
  MOD_RES (1)..(3)..(37)..(38): Xaa is C or S
  MOD_RES (15)..(16)..(17)..(18)..(19): Xaa is A or G
  MOD_RES (20)..(21)..(22)..(23): Xaa is A or G or is absent
XGXRDVVMGRHKRLXXXXXXXXXYYLMSTASMKTPTXXP

SEQ ID NO: 64640 - protein, 37 aa, Artificial Sequence; identical to SEQ ID NO: 5555
  GFR-binding peptide
  MOD_RES (1)..(33)..(34): Xaa is C or S

SEQ ID NO: 64641 - protein, 36 aa, Artificial Sequence; identical to SEQ ID NO: 26671
  GFR-binding peptide
  MOD_RES (2)..(33)..(34): Xaa is C or S

SEQ ID NO: 64642 - protein, 37 aa, Artificial Sequence; identical to SEQ ID NO: 26672
  GFR-binding peptide
  MOD_RES (1)..(33)..(34): Xaa is C or S

SEQ ID NO: 64643 - protein, 35 aa, Artificial Sequence; identical to SEQ ID NO: 5557
  GFR-binding peptide
  MOD_RES (1)..(35): Xaa is C or S
  MOD_RES (13)..(14)..(15)..(16)..(17): Xaa is A or G
  MOD_RES (18)..(19)..(20)..(21): Xaa is A or G or is absent

SEQ ID NO: 64644 - protein, 37 aa, Artificial Sequence; identical to SEQ ID NO: 5558
  GFR-binding peptide
  MOD_RES (1)..(3): Xaa is C or S
  MOD_RES (16)..(17)..(18)..(19)..(20): Xaa is A or G
  MOD_RES (21)..(22)..(23)..(24): Xaa is A or G or is absent

SEQ ID NO: 64645 - protein, 42 aa, Artificial Sequence; identical to SEQ ID NO: 5559
  GFR-binding peptide
  MOD_RES (2)..(4)..(39)..(40): Xaa is C or S
  MOD_RES (17)..(18)..(19)..(20)..(21): Xaa is A or G
  MOD_RES (22)..(23)..(24)..(25): Xaa is A or G or is absent

SEQ ID NO: 64646 - protein, 40 aa, Artificial Sequence; identical to SEQ ID NO: 5561
  GFR-binding peptide
  MOD_RES (1)..(3)..(35)..(36): Xaa is C or S

SEQ ID NO: 64647 - protein, 33 aa, Artificial Sequence; identical to SEQ ID NO: 31617
  GFR-binding peptide
  MOD_RES (2)..(2): Xaa is C or S

SEQ ID NO: 64648 - protein, 39 aa, Artificial Sequence; identical to SEQ ID NO: 31618
  GFR-binding peptide
  MOD_RES (1)..(35)..(36): Xaa is C or S
  MOD_RES (13)..(14)..(15)..(16)..(17): Xaa is A or G
  MOD_RES (18)..(19)..(20)..(21): Xaa is A or G or is absent

SEQ ID NO: 64649 - protein, 37 aa, Artificial Sequence; identical to SEQ ID NO: 31619
  GFR-binding peptide
  MOD_RES (2)..(4)..(36)..(37): Xaa is C or S

SEQ ID NO: 64650 - protein, 35 aa, Artificial Sequence
  GFR-binding peptide
  MOD_RES (1)..(34)..(35): Xaa is C or S
  MOD_RES (12)..(13)..(14)..(15)..(16): Xaa is A or G
  MOD_RES (17)..(18)..(19)..(20): Xaa is A or G or is absent
XEEVIMRHKRLXXXXXXXXXYYLMSTASTKVPAXX

SEQ ID NO: 64651 - protein, 32 aa, Artificial Sequence
  GFR-binding peptide
  MOD_RES (31)..(32): Xaa is C or S
SKVIMPIKGYIKPTKGIFYLINIPSLDQSVXX

SEQ ID NO: 64652 - protein, 38 aa, Artificial Sequence; identical to SEQ ID NO: 5567
  GFR-binding peptide
  MOD_RES (34)..(35): Xaa is C or S
  MOD_RES (12)..(13)..(14)..(15)..(16): Xaa is A or G
  MOD_RES (17)..(18)..(19)..(20): Xaa is A or G or is absent

SEQ ID NO: 64653 - protein, 38 aa, Artificial Sequence; identical to SEQ ID NO: 31631
  GFR-binding peptide
  MOD_RES (32)..(32): Xaa is C or S

SEQ ID NO: 64654 - protein, 34 aa, Artificial Sequence; identical to SEQ ID NO: 31633
  GFR-binding peptide
  MOD_RES (1)..(3): Xaa is C or S

SEQ ID NO: 64655 - protein, 39 aa, Artificial Sequence; identical to SEQ ID NO: 5569
  GFR-binding peptide
  MOD_RES (1)..(3)..(37)..(38): Xaa is C or S
  MOD_RES (15)..(16)..(17)..(18)..(19): Xaa is A or G
  MOD_RES (20)..(21)..(22)..(23): Xaa is A or G or is absent

SEQ ID NO: 64656 - protein, 34 aa, Artificial Sequence
  GFR-binding peptide
  MOD_RES (31)..(32): Xaa is C or S
SKVIMPIKGYIKPTKGIFYLINIPSLDQSVXXPS

SEQ ID NO: 64657 - protein, 32 aa, Artificial Sequence
  GFR-binding peptide
  MOD_RES (1)..(1): Xaa is C or S
XESVAMGRHKRLYTVVGKDYYLISTASLKTPV

SEQ ID NO: 64658 - protein, 30 aa, Artificial Sequence
  GFR-binding peptide
DVVMGYHYKLIIQQKDNKYLMSIPSMKTPT

SEQ ID NO: 64659 - protein, 36 aa, Artificial Sequence; identical to SEQ ID NO: 5574
  GFR-binding peptide
  MOD_RES (35)..(36): Xaa is C or S
  MOD_RES (13)..(14)..(15)..(16)..(17): Xaa is A or G
  MOD_RES (18)..(19)..(20)..(21): Xaa is A or G or is absent

SEQ ID NO: 64660 - protein, 42 aa, Artificial Sequence; identical to SEQ ID NO: 5575
  GFR-binding peptide
  MOD_RES (1)..(3)..(37)..(38): Xaa is C or S
  MOD_RES (15)..(16)..(17)..(18)..(19): Xaa is A or G
  MOD_RES (20)..(21)..(22)..(23): Xaa is A or G or is absent

SEQ ID NO: 64661 - protein, 38 aa, Artificial Sequence; identical to SEQ ID NO: 5578
  GFR-binding peptide
  MOD_RES (1)..(3)..(37)..(38): Xaa is C or S
  MOD_RES (15)..(16)..(17)..(18)..(19): Xaa is A or G
  MOD_RES (20)..(21)..(22)..(23): Xaa is A or G or is absent

SEQ ID NO: 64662 - protein, 34 aa, Artificial Sequence; identical to SEQ ID NO: 5579
  GFR-binding peptide
  MOD_RES (1)..(32)..(33): Xaa is C or S

SEQ ID NO: 64663 - protein, 39 aa, Artificial Sequence; identical to SEQ ID NO: 5581
  GFR-binding peptide
  MOD_RES (2)..(4)..(38)..(39): Xaa is C or S
  MOD_RES (16)..(17)..(18)..(19)..(20): Xaa is A or G
  MOD_RES (21)..(22)..(23)..(24): Xaa is A or G or is absent

SEQ ID NO: 64664 - protein, 39 aa, Artificial Sequence
  GFR-binding peptide
  MOD_RES (2)..(4)..(38)..(39): Xaa is C or S
  MOD_RES (16)..(17)..(18)..(19)..(20): Xaa is A or G
  MOD_RES (21)..(22)..(23)..(24): Xaa is A or G or is absent
SXGXRDVVMGRHKRLXXXXXXXXXYYLMSTASMKTPTXX

SEQ ID NO: 64665 - protein, 37 aa, Artificial Sequence; identical to SEQ ID NO: 5586
  GFR-binding peptide
  MOD_RES (2)..(35)..(36): Xaa is C or S
  MOD_RES (13)..(14)..(15)..(16)..(17): Xaa is A or G
  MOD_RES (18)..(19)..(20)..(21): Xaa is A or G or is absent

SEQ ID NO: 64666 - protein, 33 aa, Artificial Sequence; identical to SEQ ID NO: 31645
  GFR-binding peptide
  MOD_RES (33)..(33): Xaa is C or S
  MOD_RES (11)..(12)..(13)..(14)..(15): Xaa is A or G
  MOD_RES (16)..(17)..(18)..(19): Xaa is A or G or is absent

SEQ ID NO: 64667 - protein, 35 aa, Artificial Sequence
  GFR-binding peptide
  MOD_RES (32)..(33): Xaa is C or S
SEVVMDEYKFKVVNNASDLYLISIPELRTPVXXTP

SEQ ID NO: 64668 - protein, 37 aa, Artificial Sequence; identical to SEQ ID NO: 5589
  GFR-binding peptide
  MOD_RES (1)..(3)..(36)..(37): Xaa is C or S
  MOD_RES (14)..(15)..(16)..(17)..(18): Xaa is A or G
  MOD_RES (19)..(20)..(21)..(22): Xaa is A or G or is absent

SEQ ID NO: 64669 - protein, 33 aa, Artificial Sequence; identical to SEQ ID NO: 5590
  GFR-binding peptide
  MOD_RES (1)..(33): Xaa is C or S

SEQ ID NO: 64670 - protein, 34 aa, Artificial Sequence; identical to SEQ ID NO: 56582
  GFR-binding peptide
  MOD_RES (2)..(34): Xaa is C or S

SEQ ID NO: 64671 - protein, 34 aa, Artificial Sequence; identical to SEQ ID NO: 31647
  GFR-binding peptide
  MOD_RES (1)..(3): Xaa is C or S

SEQ ID NO: 64672 - protein, 36 aa, Artificial Sequence
  GFR-binding peptide
  MOD_RES (2)..(36): Xaa is C or S
  MOD_RES (14)..(15)..(16)..(17)..(18): Xaa is A or G
  MOD_RES (19)..(20)..(21)..(22): Xaa is A or G or is absent
AXSEVTMNYHYKLXXXXXXXXXKYLISIPSMKEPVX

SEQ ID NO: 64673 - protein, 37 aa, Artificial Sequence; identical to SEQ ID NO: 31651
  GFR-binding peptide
  MOD_RES (1)..(3)..(37): Xaa is C or S
  MOD_RES (15)..(16)..(17)..(18)..(19): Xaa is A or G
  MOD_RES (20)..(21)..(22)..(23): Xaa is A or G or is absent

SEQ ID NO: 64674 - protein, 33 aa, Artificial Sequence
  GFR-binding peptide
  MOD_RES (2)..(2): Xaa is C or S
GXRDVVMGEYKFKIIQQKDNLYLMSIPEMKTPT

SEQ ID NO: 64675 - protein, 42 aa, Artificial Sequence; identical to SEQ ID NO: 26704
  GFR-binding peptide
  MOD_RES (2)..(4)..(36): Xaa is C or S

SEQ ID NO: 64676 - protein, 34 aa, Artificial Sequence; identical to SEQ ID NO: 13009
  GFR-binding peptide
  MOD_RES (2)..(34): Xaa is C or S

SEQ ID NO: 64677 - protein, 41 aa, Artificial Sequence; identical to SEQ ID NO: 5597
  GFR-binding peptide
  MOD_RES (1)..(3)..(38)..(39): Xaa is C or S
  MOD_RES (16)..(17)..(18)..(19)..(20): Xaa is A or G
  MOD_RES (21)..(22)..(23)..(24): Xaa is A or G or is absent

SEQ ID NO: 64678 - protein, 40 aa, Artificial Sequence; identical to SEQ ID NO: 5598
  GFR-binding peptide
  MOD_RES (2)..(4)..(36)..(37): Xaa is C or S

SEQ ID NO: 64679 - protein, 33 aa, Artificial Sequence; identical to SEQ ID NO: 5599
  GFR-binding peptide
  MOD_RES (33)..(33): Xaa is C or S
  MOD_RES (11)..(12)..(13)..(14)..(15): Xaa is A or G
  MOD_RES (16)..(17)..(18)..(19): Xaa is A or G or is absent

SEQ ID NO: 64680 - protein, 39 aa, Artificial Sequence; identical to SEQ ID NO: 5600
  GFR-binding peptide
  MOD_RES (2)..(4)..(36)..(37): Xaa is C or S

SEQ ID NO: 64681 - protein, 37 aa, Artificial Sequence
  GFR-binding peptide
  MOD_RES (2)..(35)..(36): Xaa is C or S
  MOD_RES (13)..(14)..(15)..(16)..(17): Xaa is A or G
  MOD_RES (18)..(19)..(20)..(21): Xaa is A or G or is absent
GXEEVIMRHKRLXXXXXXXXXYYLMSTASTKVPAXXT

SEQ ID NO: 64682 - protein, 37 aa, Artificial Sequence; identical to SEQ ID NO: 31665
  GFR-binding peptide
  MOD_RES (33)..(34): Xaa is C or S
  MOD_RES (11)..(12)..(13)..(14)..(15): Xaa is A or G
  MOD_RES (16)..(17)..(18)..(19): Xaa is A or G or is absent

SEQ ID NO: 64683 - protein, 43 aa, Artificial Sequence; identical to SEQ ID NO: 5602
  GFR-binding peptide
  MOD_RES (1)..(3)..(37)..(38): Xaa is C or S
  MOD_RES (15)..(16)..(17)..(18)..(19): Xaa is A or G
  MOD_RES (20)..(21)..(22)..(23): Xaa is A or G or is absent

SEQ ID NO: 64684 - protein, 42 aa, Artificial Sequence; identical to SEQ ID NO: 26714
  GFR-binding peptide
  MOD_RES (2)..(36)..(37): Xaa is C or S
  MOD_RES (14)..(15)..(16)..(17)..(18): Xaa is A or G
  MOD_RES (19)..(20)..(21)..(22): Xaa is A or G or is absent

SEQ ID NO: 64685 - protein, 35 aa, Artificial Sequence; identical to SEQ ID NO: 31667
  GFR-binding peptide
  MOD_RES (1)..(35): Xaa is C or S
  MOD_RES (13)..(14)..(15)..(16)..(17): Xaa is A or G
  MOD_RES (18)..(19)..(20)..(21): Xaa is A or G or is absent

SEQ ID NO: 64686 - protein, 36 aa, Artificial Sequence; identical to SEQ ID NO: 5606
  GFR-binding peptide
  MOD_RES (34)..(35): Xaa is C or S
  MOD_RES (12)..(13)..(14)..(15)..(16): Xaa is A or G
  MOD_RES (17)..(18)..(19)..(20): Xaa is A or G or is absent

SEQ ID NO: 64687 - protein, 39 aa, Artificial Sequence; identical to SEQ ID NO: 26718
  GFR-binding peptide
  MOD_RES (2)..(4)..(35)..(36): Xaa is C or S

SEQ ID NO: 64688 - protein, 38 aa, Artificial Sequence; identical to SEQ ID NO: 26721
  GFR-binding peptide
  MOD_RES (33)..(34): Xaa is C or S

SEQ ID NO: 64689 - protein, 36 aa, Artificial Sequence; identical to SEQ ID NO: 5609
  GFR-binding peptide
  MOD_RES (2)..(4)..(36): Xaa is C or S

SEQ ID NO: 64690 - protein, 36 aa, Artificial Sequence; identical to SEQ ID NO: 5611
  GFR-binding peptide
  MOD_RES (31)..(31): Xaa is C or S

SEQ ID NO: 64691 - protein, 41 aa, Artificial Sequence; identical to SEQ ID NO: 5612
  GFR-binding peptide
  MOD_RES (1)..(35)..(36): Xaa is C or S
  MOD_RES (13)..(14)..(15)..(16)..(17): Xaa is A or G
  MOD_RES (18)..(19)..(20)..(21): Xaa is A or G or is absent

SEQ ID NO: 64692 - protein, 44 aa, Artificial Sequence; identical to SEQ ID NO: 31674
  GFR-binding peptide
  MOD_RES (2)..(4)..(38)..(39): Xaa is C or S
  MOD_RES (16)..(17)..(18)..(19)..(20): Xaa is A or G
  MOD_RES (21)..(22)..(23)..(24): Xaa is A or G or is absent

SEQ ID NO: 64693 - protein, 35 aa, Artificial Sequence
  GFR-binding peptide
  MOD_RES (33)..(34): Xaa is C or S
  MOD_RES (11)..(12)..(13)..(14)..(15): Xaa is A or G
  MOD_RES (16)..(17)..(18)..(19): Xaa is A or G or is absent
SVAMGRHKRLXXXXXXXXXYYLISTASLKTPVXXA

SEQ ID NO: 64694 - protein, 44 aa, Artificial Sequence; identical to SEQ ID NO: 26731
  GFR-binding peptide
  MOD_RES (2)..(4)..(38)..(39): Xaa is C or S
  MOD_RES (16)..(17)..(18)..(19)..(20): Xaa is A or G
  MOD_RES (21)..(22)..(23)..(24): Xaa is A or G or is absent

SEQ ID NO: 64695 - protein, 37 aa, Artificial Sequence; identical to SEQ ID NO: 5618
  GFR-binding peptide
  MOD_RES (33)..(34): Xaa is C or S
  MOD_RES (11)..(12)..(13)..(14)..(15): Xaa is A or G
  MOD_RES (16)..(17)..(18)..(19): Xaa is A or G or is absent

SEQ ID NO: 64696 - protein, 36 aa, Artificial Sequence; identical to SEQ ID NO: 26733
  GFR-binding peptide
  MOD_RES (2)..(4): Xaa is C or S
  MOD_RES (15)..(16)..(17)..(18)..(19): Xaa is A or G
  MOD_RES (20)..(21)..(22)..(23): Xaa is A or G or is absent

SEQ ID NO: 64697 - protein, 41 aa, Artificial Sequence; identical to SEQ ID NO: 5621
  GFR-binding peptide
  MOD_RES (2)..(35)..(36): Xaa is C or S
  MOD_RES (13)..(14)..(15)..(16)..(17): Xaa is A or G
  MOD_RES (18)..(19)..(20)..(21): Xaa is A or G or is absent

SEQ ID NO: 64698 - protein, 41 aa, Artificial Sequence
  GFR-binding peptide
  MOD_RES (2)..(4)..(36)..(37): Xaa is C or S
SXGXRDVVMGEYKFKIIQQKDNLYLMSIPEMKTPTXXPGAS

SEQ ID NO: 64699 - protein, 37 aa, Artificial Sequence; identical to SEQ ID NO: 31681
  GFR-binding peptide
  MOD_RES (33)..(34): Xaa is C or S
  MOD_RES (11)..(12)..(13)..(14)..(15): Xaa is A or G
  MOD_RES (16)..(17)..(18)..(19): Xaa is A or G or is absent

SEQ ID NO: 64700 - protein, 36 aa, Artificial Sequence; identical to SEQ ID NO: 26739
  GFR-binding peptide
  MOD_RES (1)..(32)..(33): Xaa is C or S

SEQ ID NO: 64701 - protein, 34 aa, Artificial Sequence; identical to SEQ ID NO: 26741
  GFR-binding peptide
  MOD_RES (33)..(34): Xaa is C or S
  MOD_RES (11)..(12)..(13)..(14)..(15): Xaa is A or G
  MOD_RES (16)..(17)..(18)..(19): Xaa is A or G or is absent

SEQ ID NO: 64702 - protein, 41 aa, Artificial Sequence; identical to SEQ ID NO: 5622
  GFR-binding peptide
  MOD_RES (1)..(3)..(36)..(37): Xaa is C or S
  MOD_RES (14)..(15)..(16)..(17)..(18): Xaa is A or G
  MOD_RES (19)..(20)..(21)..(22): Xaa is A or G or is absent

SEQ ID NO: 64703 - protein, 37 aa, Artificial Sequence; identical to SEQ ID NO: 31683
  GFR-binding peptide
  MOD_RES (1)..(3)..(35)..(36): Xaa is C or S

SEQ ID NO: 64704 - protein, 35 aa, Artificial Sequence
  GFR-binding peptide
  MOD_RES (2)..(33)..(34): Xaa is C or S
KXSKVVMPIKGYVKPTRGVFYLINIPSLDQPVXXP

SEQ ID NO: 64705 - protein, 33 aa, Artificial Sequence
  GFR-binding peptide
  MOD_RES (2)..(2): Xaa is C or S
GXRDVVMGRHKRLIIQQKDNYYLMSTASMKTPT

SEQ ID NO: 64706 - protein, 37 aa, Artificial Sequence
  GFR-binding peptide
  MOD_RES (2)..(36)..(37): Xaa is C or S
  MOD_RES (14)..(15)..(16)..(17)..(18): Xaa is A or G
  MOD_RES (19)..(20)..(21)..(22): Xaa is A or G or is absent
GXSEVVMDEYKFKXXXXXXXXXLYLISIPELRTPVXX

SEQ ID NO: 64707 - protein, 37 aa, Artificial Sequence
  GFR-binding peptide
  MOD_RES (1)..(3)..(36)..(37): Xaa is C or S
  MOD_RES (14)..(15)..(16)..(17)..(18): Xaa is A or G
  MOD_RES (19)..(20)..(21)..(22): Xaa is A or G or is absent
XKXSKVIMPIKGYXXXXXXXXXFYLINIPSLDQSVXX

SEQ ID NO: 64708 - protein, 34 aa, Artificial Sequence; identical to SEQ ID NO: 26748
  GFR-binding peptide
  MOD_RES (33)..(34): Xaa is C or S
  MOD_RES (11)..(12)..(13)..(14)..(15): Xaa is A or G
  MOD_RES (16)..(17)..(18)..(19): Xaa is A or G or is absent

SEQ ID NO: 64709 - protein, 35 aa, Artificial Sequence; identical to SEQ ID NO: 5630
  GFR-binding peptide
  MOD_RES (33)..(34): Xaa is C or S
  MOD_RES (11)..(12)..(13)..(14)..(15): Xaa is A or G
  MOD_RES (16)..(17)..(18)..(19): Xaa is A or G or is absent

SEQ ID NO: 64710 - protein, 38 aa, Artificial Sequence; identical to SEQ ID NO: 26751
  GFR-binding peptide
  MOD_RES (1)..(32)..(33): Xaa is C or S

SEQ ID NO: 64711 - protein, 38 aa, Artificial Sequence
  GFR-binding peptide
  MOD_RES (34)..(35): Xaa is C or S
  MOD_RES (12)..(13)..(14)..(15)..(16): Xaa is A or G
  MOD_RES (17)..(18)..(19)..(20): Xaa is A or G or is absent
SEVTMNYHYKLXXXXXXXXXKYLISIPSMKEPVXXPEP

SEQ ID NO: 64712 - protein, 36 aa, Artificial Sequence; identical to SEQ ID NO: 26754
  GFR-binding peptide
  MOD_RES (2)..(4)..(36): Xaa is C or S

SEQ ID NO: 64713 - protein, 42 aa, Artificial Sequence; identical to SEQ ID NO: 5634
  GFR-binding peptide
  MOD_RES (2)..(36)..(37): Xaa is C or S
  MOD_RES (14)..(15)..(16)..(17)..(18): Xaa is A or G
  MOD_RES (19)..(20)..(21)..(22): Xaa is A or G or is absent

SEQ ID NO: 64714 - protein, 34 aa, Artificial Sequence; identical to SEQ ID NO: 26755
  GFR-binding peptide
  MOD_RES (32)..(33): Xaa is C or S

SEQ ID NO: 64715 - protein, 36 aa, Artificial Sequence; identical to SEQ ID NO: 31692
  GFR-binding peptide
  MOD_RES (34)..(34): Xaa is C or S
  MOD_RES (12)..(13)..(14)..(15)..(16): Xaa is A or G
  MOD_RES (17)..(18)..(19)..(20): Xaa is A or G or is absent

SEQ ID NO: 64716 - protein, 40 aa, Artificial Sequence
  GFR-binding peptide
  MOD_RES (2)..(4)..(36)..(37): Xaa is C or S
RXGXSEVVMDYHYKLVVNNASDKYLISIPSLRTPVXXTPP

SEQ ID NO: 64717 - protein, 42 aa, Artificial Sequence
  GFR-binding peptide
  MOD_RES (1)..(3)..(36)..(37): Xaa is C or S
  MOD_RES (14)..(15)..(16)..(17)..(18): Xaa is A or G
  MOD_RES (19)..(20)..(21)..(22): Xaa is A or G or is absent
XKXSKVVMPIKGYXXXXXXXXXFYLINIPSLDQPVXXPSASA

SEQ ID NO: 64718 - protein, 37 aa, Artificial Sequence; identical to SEQ ID NO: 31694
  GFR-binding peptide
  MOD_RES (2)..(4): Xaa is C or S
  MOD_RES (16)..(17)..(18)..(19)..(20): Xaa is A or G
  MOD_RES (21)..(22)..(23)..(24): Xaa is A or G or is absent

SEQ ID NO: 64719 - protein, 37 aa, Artificial Sequence
  GFR-binding peptide
  MOD_RES (31)..(32): Xaa is C or S
RVVMNRHKRLIVNSSDDYYLVSTASLKTPAXXPKPVH

SEQ ID NO: 64720 - protein, 37 aa, Artificial Sequence; identical to SEQ ID NO: 56638
  GFR-binding peptide
  MOD_RES (31)..(32): Xaa is C or S

SEQ ID NO: 64721 - protein, 36 aa, Artificial Sequence; identical to SEQ ID NO: 26761
  GFR-binding peptide
  MOD_RES (33)..(34): Xaa is C or S
  MOD_RES (11)..(12)..(13)..(14)..(15): Xaa is A or G
  MOD_RES (16)..(17)..(18)..(19): Xaa is A or G or is absent

SEQ ID NO: 64722 - protein, 41 aa, Artificial Sequence; identical to SEQ ID NO: 26763
  GFR-binding peptide
  MOD_RES (1)..(3)..(38)..(39): Xaa is C or S
  MOD_RES (16)..(17)..(18)..(19)..(20): Xaa is A or G
  MOD_RES (21)..(22)..(23)..(24): Xaa is A or G or is absent

SEQ ID NO: 64723 - protein, 37 aa, Artificial Sequence; identical to SEQ ID NO: 26764
  GFR-binding peptide
  MOD_RES (1)..(3)..(37): Xaa is C or S
  MOD_RES (15)..(16)..(17)..(18)..(19): Xaa is A or G
  MOD_RES (20)..(21)..(22)..(23): Xaa is A or G or is absent

SEQ ID NO: 64724 - protein, 35 aa, Artificial Sequence; identical to SEQ ID NO: 31713
  GFR-binding peptide
  MOD_RES (2)..(2): Xaa is C or S
  MOD_RES (14)..(15)..(16)..(17)..(18): Xaa is A or G
  MOD_RES (19)..(20)..(21)..(22): Xaa is A or G or is absent

SEQ ID NO: 64725 - protein, 38 aa, Artificial Sequence
  GFR-binding peptide
  MOD_RES (33)..(34): Xaa is C or S
  MOD_RES (11)..(12)..(13)..(14)..(15): Xaa is A or G
  MOD_RES (16)..(17)..(18)..(19): Xaa is A or G or is absent
EVTMNEYKFKXXXXXXXXXLYLISIPEMKEPVXXPEPI

SEQ ID NO: 64726 - protein, 38 aa, Artificial Sequence; identical to SEQ ID NO: 26767
  GFR-binding peptide
  MOD_RES (1)..(35)..(36): Xaa is C or S
  MOD_RES (13)..(14)..(15)..(16)..(17): Xaa is A or G
  MOD_RES (18)..(19)..(20)..(21): Xaa is A or G or is absent

SEQ ID NO: 64727 - protein, 34 aa, Artificial Sequence; identical to SEQ ID NO: 13069
  GFR-binding peptide
  MOD_RES (1)..(1): Xaa is C or S
  MOD_RES (13)..(14)..(15)..(16)..(17): Xaa is A or G
  MOD_RES (18)..(19)..(20)..(21): Xaa is A or G or is absent

SEQ ID NO: 64728 - protein, 39 aa, Artificial Sequence
  GFR-binding peptide
  MOD_RES (2)..(4)..(35)..(36): Xaa is C or S
LXGXEEVIMYHYKLLLVRGNDKYLMSIPSTKVPAXXTSP

SEQ ID NO: 64729 - protein, 40 aa, Artificial Sequence; identical to SEQ ID NO: 31718
  GFR-binding peptide
  MOD_RES (1)..(3)..(35): Xaa is C or S

SEQ ID NO: 64730 - protein, 39 aa, Artificial Sequence; identical to SEQ ID NO: 5645
  GFR-binding peptide
  MOD_RES (33)..(34): Xaa is C or S
  MOD_RES (11)..(12)..(13)..(14)..(15): Xaa is A or G
  MOD_RES (16)..(17)..(18)..(19): Xaa is A or G or is absent

SEQ ID NO: 64731 - protein, 44 aa, Artificial Sequence; identical to SEQ ID NO: 5647
  GFR-binding peptide
  MOD_RES (2)..(4)..(38)..(39): Xaa is C or S
  MOD_RES (16)..(17)..(18)..(19)..(20): Xaa is A or G
  MOD_RES (21)..(22)..(23)..(24): Xaa is A or G or is absent

SEQ ID NO: 64732 - protein, 42 aa, Artificial Sequence; identical to SEQ ID NO: 26776
  GFR-binding peptide
  MOD_RES (1)..(3)..(37)..(38): Xaa is C or S
  MOD_RES (15)..(16)..(17)..(18)..(19): Xaa is A or G
  MOD_RES (20)..(21)..(22)..(23): Xaa is A or G or is absent

SEQ ID NO: 64733 - protein, 35 aa, Artificial Sequence; identical to SEQ ID NO: 26777
  GFR-binding peptide
  MOD_RES (1)..(32)..(33): Xaa is C or S

SEQ ID NO: 64734 - protein, 39 aa, Artificial Sequence; identical to SEQ ID NO: 5651
  GFR-binding peptide
  MOD_RES (1)..(3)..(38)..(39): Xaa is C or S
  MOD_RES (16)..(17)..(18)..(19)..(20): Xaa is A or G
  MOD_RES (21)..(22)..(23)..(24): Xaa is A or G or is absent

SEQ ID NO: 64735 - protein, 39 aa, Artificial Sequence; identical to SEQ ID NO: 5654
  GFR-binding peptide
  MOD_RES (2)..(37)..(38): Xaa is C or S
  MOD_RES (15)..(16)..(17)..(18)..(19): Xaa is A or G
  MOD_RES (20)..(21)..(22)..(23): Xaa is A or G or is absent

SEQ ID NO: 64736 - protein, 42 aa, Artificial Sequence; identical to SEQ ID NO: 5655
  GFR-binding peptide
  MOD_RES (1)..(3)..(36)..(37): Xaa is C or S
  MOD_RES (14)..(15)..(16)..(17)..(18): Xaa is A or G
  MOD_RES (19)..(20)..(21)..(22): Xaa is A or G or is absent

SEQ ID NO: 64737 - protein, 40 aa, Artificial Sequence
  GFR-binding peptide
  MOD_RES (2)..(36)..(37): Xaa is C or S
  MOD_RES (14)..(15)..(16)..(17)..(18): Xaa is A or G
  MOD_RES (19)..(20)..(21)..(22): Xaa is A or G or is absent
GXRDVVMGEYKFKXXXXXXXXXLYLMSIPEMKTPTXXPGA

SEQ ID NO: 64738 - protein, 37 aa, Artificial Sequence; identical to SEQ ID NO: 31725
  GFR-binding peptide
  MOD_RES (1)..(33)..(34): Xaa is C or S

SEQ ID NO: 64739 - protein, 32 aa, Artificial Sequence; identical to SEQ ID NO: 31727
  GFR-binding peptide
  MOD_RES (11)..(12)..(13)..(14)..(15): Xaa is A or G
  MOD_RES (16)..(17)..(18)..(19): Xaa is A or G or is absent

SEQ ID NO: 64740 - protein, 40 aa, Artificial Sequence; identical to SEQ ID NO: 26784
  GFR-binding peptide
  MOD_RES (1)..(3)..(35)..(36): Xaa is C or S

SEQ ID NO: 64741 - protein, 34 aa, Artificial Sequence
  GFR-binding peptide
  MOD_RES (2)..(4): Xaa is C or S
LXGXEEVIMEYKFKLLVRGNDLYLMSIPETKVPA

SEQ ID NO: 64742 - protein, 43 aa, Artificial Sequence; identical to SEQ ID NO: 5656
  GFR-binding peptide
  MOD_RES (2)..(4)..(37)..(38): Xaa is C or S
  MOD_RES (15)..(16)..(17)..(18)..(19): Xaa is A or G
  MOD_RES (20)..(21)..(22)..(23): Xaa is A or G or is absent

SEQ ID NO: 64743 - protein, 39 aa, Artificial Sequence; identical to SEQ ID NO: 26789
  GFR-binding peptide
  MOD_RES (2)..(4)..(36)..(37): Xaa is C or S

SEQ ID NO: 64744 - protein, 36 aa, Artificial Sequence; identical to SEQ ID NO: 26793
  GFR-binding peptide
  MOD_RES (1)..(33)..(34): Xaa is C or S

SEQ ID NO: 64745 - protein, 38 aa, Artificial Sequence; identical to SEQ ID NO: 26796
  GFR-binding peptide
  MOD_RES (1)..(3)..(35)..(36): Xaa is C or S

SEQ ID NO: 64746 - protein, 37 aa, Artificial Sequence; identical to SEQ ID NO: 26797
  GFR-binding peptide
  MOD_RES (1)..(3)..(35)..(36): Xaa is C or S

SEQ ID NO: 64747 - protein, 41 aa, Artificial Sequence; identical to SEQ ID NO: 5664
  GFR-binding peptide
  MOD_RES (2)..(4)..(38)..(39): Xaa is C or S
  MOD_RES (16)..(17)..(18)..(19)..(20): Xaa is A or G
  MOD_RES (21)..(22)..(23)..(24): Xaa is A or G or is absent

SEQ ID NO: 64748 - protein, 39 aa, Artificial Sequence; identical to SEQ ID NO: 31745
  GFR-binding peptide
  MOD_RES (1)..(3)..(37)..(38): Xaa is C or S
  MOD_RES (15)..(16)..(17)..(18)..(19): Xaa is A or G
  MOD_RES (20)..(21)..(22)..(23): Xaa is A or G or is absent

SEQ ID NO: 64749 - protein, 35 aa, Artificial Sequence
  GFR-binding peptide
  MOD_RES (2)..(4)..(35): Xaa is C or S
SXKXSKVVMPIKGYVKPTRGVFYLINIPSLDQPVX

SEQ ID NO: 64750 - protein, 39 aa, Artificial Sequence; identical to SEQ ID NO: 5668
  GFR-binding peptide
  MOD_RES (2)..(4)..(37)..(38): Xaa is C or S
  MOD_RES (15)..(16)..(17)..(18)..(19): Xaa is A or G
  MOD_RES (20)..(21)..(22)..(23): Xaa is A or G or is absent

SEQ ID NO: 64751 - protein, 36 aa, Artificial Sequence; identical to SEQ ID NO: 5670
  GFR-binding peptide
  MOD_RES (33)..(34): Xaa is C or S
  MOD_RES (11)..(12)..(13)..(14)..(15): Xaa is A or G
  MOD_RES (16)..(17)..(18)..(19): Xaa is A or G or is absent

SEQ ID NO: 64752 - protein, 40 aa, Artificial Sequence
  GFR-binding peptide
  MOD_RES (1)..(34)..(35): Xaa is C or S
  MOD_RES (12)..(13)..(14)..(15)..(16): Xaa is A or G
  MOD_RES (17)..(18)..(19)..(20): Xaa is A or G or is absent
XSKVIMPIKGYXXXXXXXXXFYLINIPSLDQSVXXPSASA

SEQ ID NO: 64753 - protein, 37 aa, Artificial Sequence; identical to SEQ ID NO: 5671
  GFR-binding peptide
  MOD_RES (1)..(34)..(35): Xaa is C or S
  MOD_RES (12)..(13)..(14)..(15)..(16): Xaa is A or G
  MOD_RES (17)..(18)..(19)..(20): Xaa is A or G or is absent

SEQ ID NO: 64754 - protein, 37 aa, Artificial Sequence
  GFR-binding peptide
  MOD_RES (2)..(4)..(36)..(37): Xaa is C or S
RXGXAEVVMDRHKRLVVNNAADYYLISTASLRAPVXX

SEQ ID NO: 64755 - protein, 38 aa, Artificial Sequence
  GFR-binding peptide
  MOD_RES (1)..(3)..(36)..(37): Xaa is C or S
  MOD_RES (14)..(15)..(16)..(17)..(18): Xaa is A or G
  MOD_RES (19)..(20)..(21)..(22): Xaa is A or G or is absent
XGXEEVIMRHKRLXXXXXXXXXYYLMSTASTKVPAXXT

SEQ ID NO: 64756 - protein, 38 aa, Artificial Sequence; identical to SEQ ID NO: 5673
  GFR-binding peptide
  MOD_RES (1)..(33)..(34): Xaa is C or S

SEQ ID NO: 64757 - protein, 40 aa, Artificial Sequence; identical to SEQ ID NO: 26806
  GFR-binding peptide
  MOD_RES (34)..(35): Xaa is C or S
  MOD_RES (12)..(13)..(14)..(15)..(16): Xaa is A or G
  MOD_RES (17)..(18)..(19)..(20): Xaa is A or G or is absent

SEQ ID NO: 64758 - protein, 34 aa, Artificial Sequence; identical to SEQ ID NO: 31754
  GFR-binding peptide
  MOD_RES (1)..(1): Xaa is C or S
  MOD_RES (13)..(14)..(15)..(16)..(17): Xaa is A or G
  MOD_RES (18)..(19)..(20)..(21): Xaa is A or G or is absent

SEQ ID NO: 64759 - protein, 42 aa, Artificial Sequence; identical to SEQ ID NO: 5676
  GFR-binding peptide
  MOD_RES (1)..(3)..(37): Xaa is C or S
  MOD_RES (15)..(16)..(17)..(18)..(19): Xaa is A or G
  MOD_RES (20)..(21)..(22)..(23): Xaa is A or G or is absent

SEQ ID NO: 64760 - protein, 41 aa, Artificial Sequence
  GFR-binding peptide
  MOD_RES (1)..(35)..(36): Xaa is C or S
  MOD_RES (13)..(14)..(15)..(16)..(17): Xaa is A or G
  MOD_RES (18)..(19)..(20)..(21): Xaa is A or G or is absent
XAEVVMDRHKRLXXXXXXXXXYYLISTASLRAPVXXSAPAA

SEQ ID NO: 64761 - protein, 35 aa, Artificial Sequence; identical to SEQ ID NO: 5679
  GFR-binding peptide
  MOD_RES (1)..(3)..(35): Xaa is C or S

SEQ ID NO: 64762 - protein, 34 aa, Artificial Sequence
  GFR-binding peptide
  MOD_RES (31)..(32): Xaa is C or S
EVVMDYHYKLVVNNASDKYLISIPSLRTPVXXTP

SEQ ID NO: 64763 - protein, 37 aa, Artificial Sequence; identical to SEQ ID NO: 26809
  GFR-binding peptide
  MOD_RES (32)..(33): Xaa is C or S

SEQ ID NO: 64764 - protein, 37 aa, Artificial Sequence; identical to SEQ ID NO: 5682
  GFR-binding peptide
  MOD_RES (1)..(3)..(36)..(37): Xaa is C or S
  MOD_RES (14)..(15)..(16)..(17)..(18): Xaa is A or G
  MOD_RES (19)..(20)..(21)..(22): Xaa is A or G or is absent

SEQ ID NO: 64765 - protein, 37 aa, Artificial Sequence; identical to SEQ ID NO: 5684
  GFR-binding peptide
  MOD_RES (1)..(35)..(36): Xaa is C or S
  MOD_RES (13)..(14)..(15)..(16)..(17): Xaa is A or G
  MOD_RES (18)..(19)..(20)..(21): Xaa is A or G or is absent

SEQ ID NO: 64766 - protein, 36 aa, Artificial Sequence
  GFR-binding peptide
  MOD_RES (33)..(34): Xaa is C or S
  MOD_RES (11)..(12)..(13)..(14)..(15): Xaa is A or G
  MOD_RES (16)..(17)..(18)..(19): Xaa is A or G or is absent
EVVMDEYKFKXXXXXXXXXLYLISIPELRTPVXXTP

SEQ ID NO: 64767 - protein, 37 aa, Artificial Sequence; identical to SEQ ID NO: 31769
  GFR-binding peptide
  MOD_RES (1)..(33): Xaa is C or S

SEQ ID NO: 64768 - protein, 35 aa, Artificial Sequence; identical to SEQ ID NO: 5688
  GFR-binding peptide
  MOD_RES (1)..(32)..(33): Xaa is C or S

SEQ ID NO: 64769 - protein, 35 aa, Artificial Sequence; identical to SEQ ID NO: 5691
  GFR-binding peptide
  MOD_RES (2)..(33)..(34): Xaa is C or S

SEQ ID NO: 64770 - protein, 34 aa, Artificial Sequence; identical to SEQ ID NO: 26819
  GFR-binding peptide
  MOD_RES (34)..(34): Xaa is C or S
  MOD_RES (12)..(13)..(14)..(15)..(16): Xaa is A or G
  MOD_RES (17)..(18)..(19)..(20): Xaa is A or G or is absent

SEQ ID NO: 64771 - protein, 37 aa, Artificial Sequence; identical to SEQ ID NO: 13132
  GFR-binding peptide
  MOD_RES (31)..(32): Xaa is C or S

SEQ ID NO: 64772 - protein, 35 aa, Artificial Sequence; identical to SEQ ID NO: 5694
  GFR-binding peptide
  MOD_RES (31)..(32): Xaa is C or S

SEQ ID NO: 64773 - protein, 31 aa, Artificial Sequence; identical to SEQ ID NO: 26821
  GFR-binding peptide

SEQ ID NO: 64774 - protein, 40 aa, Artificial Sequence
  GFR-binding peptide
  MOD_RES (1)..(35)..(36): Xaa is C or S
  MOD_RES (13)..(14)..(15)..(16)..(17): Xaa is A or G
  MOD_RES (18)..(19)..(20)..(21): Xaa is A or G or is absent
XRDVVMGEYKFKXXXXXXXXXLYLMSIPEMKTPTXXPGAS

SEQ ID NO: 64775 - protein, 38 aa, Artificial Sequence; identical to SEQ ID NO: 5698
  GFR-binding peptide
  MOD_RES (1)..(3)..(37)..(38): Xaa is C or S
  MOD_RES (15)..(16)..(17)..(18)..(19): Xaa is A or G
  MOD_RES (20)..(21)..(22)..(23): Xaa is A or G or is absent

SEQ ID NO: 64776 - protein, 31 aa, Artificial Sequence; identical to SEQ ID NO: 5701
  GFR-binding peptide

SEQ ID NO: 64777 - protein, 39 aa, Artificial Sequence; identical to SEQ ID NO: 56732
  GFR-binding peptide
  MOD_RES (2)..(4)..(37)..(38): Xaa is C or S
  MOD_RES (15)..(16)..(17)..(18)..(19): Xaa is A or G
  MOD_RES (20)..(21)..(22)..(23): Xaa is A or G or is absent

SEQ ID NO: 64778 - protein, 41 aa, Artificial Sequence; identical to SEQ ID NO: 26827
  GFR-binding peptide
  MOD_RES (1)..(35)..(36): Xaa is C or S
  MOD_RES (13)..(14)..(15)..(16)..(17): Xaa is A or G
  MOD_RES (18)..(19)..(20)..(21): Xaa is A or G or is absent

SEQ ID NO: 64779 - protein, 40 aa, Artificial Sequence; identical to SEQ ID NO: 26828
  GFR-binding peptide
  MOD_RES (34)..(35): Xaa is C or S
  MOD_RES (12)..(13)..(14)..(15)..(16): Xaa is A or G
  MOD_RES (17)..(18)..(19)..(20): Xaa is A or G or is absent

SEQ ID NO: 64780 - protein, 35 aa, Artificial Sequence; identical to SEQ ID NO: 26829
  GFR-binding peptide
  MOD_RES (2)..(4): Xaa is C or S

SEQ ID NO: 64781 - protein, 36 aa, Artificial Sequence; identical to SEQ ID NO: 31788
  GFR-binding peptide
  MOD_RES (33)..(34): Xaa is C or S
  MOD_RES (11)..(12)..(13)..(14)..(15): Xaa is A or G
  MOD_RES (16)..(17)..(18)..(19): Xaa is A or G or is absent

SEQ ID NO: 64782 - protein, 38 aa, Artificial Sequence; identical to SEQ ID NO: 5707
  GFR-binding peptide
  MOD_RES (2)..(4)..(35)..(36): Xaa is C or S

SEQ ID NO: 64783 - protein, 34 aa, Artificial Sequence; identical to SEQ ID NO: 26833
  GFR-binding peptide
  MOD_RES (2)..(34): Xaa is C or S

SEQ ID NO: 64784 - protein, 37 aa, Artificial Sequence; identical to SEQ ID NO: 5711
  GFR-binding peptide
  MOD_RES (32)..(33): Xaa is C or S

SEQ ID NO: 64785 - protein, 35 aa, Artificial Sequence; identical to SEQ ID NO: 31793
  GFR-binding peptide
  MOD_RES (1)..(3): Xaa is C or S
  MOD_RES (14)..(15)..(16)..(17)..(18): Xaa is A or G
  MOD_RES (19)..(20)..(21)..(22): Xaa is A or G or is absent

SEQ ID NO: 64786 - protein, 39 aa, Artificial Sequence; identical to SEQ ID NO: 5712
  GFR-binding peptide
  MOD_RES (2)..(34)..(35): Xaa is C or S

SEQ ID NO: 64787 - protein, 36 aa, Artificial Sequence; identical to SEQ ID NO: 5713
  GFR-binding peptide
  MOD_RES (2)..(4): Xaa is C or S
  MOD_RES (15)..(16)..(17)..(18)..(19): Xaa is A or G
  MOD_RES (20)..(21)..(22)..(23): Xaa is A or G or is absent

SEQ ID NO: 64788 - protein, 38 aa, Artificial Sequence
  GFR-binding peptide
  MOD_RES (2)..(4)..(36)..(37): Xaa is C or S
RXAXSEVTMNRYKKLVVNKNEDFYLISIANMKEPVXXP

SEQ ID NO: 64789 - protein, 33 aa, Artificial Sequence
  GFR-binding peptide
  MOD_RES (1)..(33): Xaa is C or S
XESVAMGRHKRLYTVVGKDYYLISTASLKTPVX

SEQ ID NO: 64790 - protein, 41 aa, Artificial Sequence; identical to SEQ ID NO: 5717
  GFR-binding peptide
  MOD_RES (2)..(4)..(39)..(40): Xaa is C or S
  MOD_RES (17)..(18)..(19)..(20)..(21): Xaa is A or G
  MOD_RES (22)..(23)..(24)..(25): Xaa is A or G or is absent

SEQ ID NO: 64791 - protein, 38 aa, Artificial Sequence; identical to SEQ ID NO: 26843
  GFR-binding peptide
  MOD_RES (1)..(32)..(33): Xaa is C or S

SEQ ID NO: 64792 - protein, 33 aa, Artificial Sequence; identical to SEQ ID NO: 5718
  GFR-binding peptide
  MOD_RES (33)..(33): Xaa is C or S

SEQ ID NO: 64793 - protein, 35 aa, Artificial Sequence; identical to SEQ ID NO: 5719
  GFR-binding peptide
  MOD_RES (31)..(32): Xaa is C or S

SEQ ID NO: 64794 - protein, 36 aa, Artificial Sequence; identical to SEQ ID NO: 5720
  GFR-binding peptide
  MOD_RES (2)..(4)..(36): Xaa is C or S

SEQ ID NO: 64795 - protein, 41 aa, Artificial Sequence
  GFR-binding peptide
  MOD_RES (2)..(4)..(36)..(37): Xaa is C or S
SXGXRDVVMGYHYKLIIQQKDNKYLMSIPSMKTPTXXPGAS

SEQ ID NO: 64796 - protein, 43 aa, Artificial Sequence
  GFR-binding peptide
  MOD_RES (2)..(4)..(37)..(38): Xaa is C or S
  MOD_RES (15)..(16)..(17)..(18)..(19): Xaa is A or G
  MOD_RES (20)..(21)..(22)..(23): Xaa is A or G or is absent
SXKXSKVVMPIKGYXXXXXXXXXFYLINIPSLDQPVXXPSASA

SEQ ID NO: 64797 - protein, 37 aa, Artificial Sequence; identical to SEQ ID NO: 26850
  GFR-binding peptide
  MOD_RES (1)..(35)..(36): Xaa is C or S
  MOD_RES (13)..(14)..(15)..(16)..(17): Xaa is A or G
  MOD_RES (18)..(19)..(20)..(21): Xaa is A or G or is absent

SEQ ID NO: 64798 - protein, 35 aa, Artificial Sequence; identical to SEQ ID NO: 31806
  GFR-binding peptide
  MOD_RES (33)..(34): Xaa is C or S
  MOD_RES (11)..(12)..(13)..(14)..(15): Xaa is A or G
  MOD_RES (16)..(17)..(18)..(19): Xaa is A or G or is absent

SEQ ID NO: 64799 - protein, 35 aa, Artificial Sequence
  GFR-binding peptide
  MOD_RES (31)..(32): Xaa is C or S
SVAMGRHKRLYTVVGKDYYLISTASLKTPVXXAKS

SEQ ID NO: 64800 - protein, 32 aa, Artificial Sequence; identical to SEQ ID NO: 26851
  GFR-binding peptide
  MOD_RES (31)..(31): Xaa is C or S

SEQ ID NO: 64801 - protein, 31 aa, Artificial Sequence; identical to SEQ ID NO: 5727
  GFR-binding peptide
  MOD_RES (31)..(31): Xaa is C or S

SEQ ID NO: 64802 - protein, 35 aa, Artificial Sequence; identical to SEQ ID NO: 5728
  GFR-binding peptide
  MOD_RES (34)..(35): Xaa is C or S
  MOD_RES (12)..(13)..(14)..(15)..(16): Xaa is A or G
  MOD_RES (17)..(18)..(19)..(20): Xaa is A or G or is absent

SEQ ID NO: 64803 - protein, 40 aa, Artificial Sequence
  GFR-binding peptide
  MOD_RES (34)..(35): Xaa is C or S
  MOD_RES (12)..(13)..(14)..(15)..(16): Xaa is A or G
  MOD_RES (17)..(18)..(19)..(20): Xaa is A or G or is absent
RDVVMGYHYKLXXXXXXXXXKYLMSIPSMKTPTXXPGASG

SEQ ID NO: 64804 - protein, 40 aa, Artificial Sequence; identical to SEQ ID NO: 26856
  GFR-binding peptide
  MOD_RES (1)..(3)..(37)..(38): Xaa is C or S
  MOD_RES (15)..(16)..(17)..(18)..(19): Xaa is A or G
  MOD_RES (20)..(21)..(22)..(23): Xaa is A or G or is absent

SEQ ID NO: 64805 - protein, 41 aa, Artificial Sequence; identical to SEQ ID NO: 31812
  GFR-binding peptide
  MOD_RES (2)..(36)..(37): Xaa is C or S
  MOD_RES (14)..(15)..(16)..(17)..(18): Xaa is A or G
  MOD_RES (19)..(20)..(21)..(22): Xaa is A or G or is absent

SEQ ID NO: 64806 - protein, 34 aa, Artificial Sequence; identical to SEQ ID NO: 5729
  GFR-binding peptide
  MOD_RES (1)..(33)..(34): Xaa is C or S

SEQ ID NO: 64807 - protein, 31 aa, Artificial Sequence; identical to SEQ ID NO: 26860
  GFR-binding peptide
  MOD_RES (31)..(31): Xaa is C or S

SEQ ID NO: 64808 - protein, 35 aa, Artificial Sequence; identical to SEQ ID NO: 56776
  GFR-binding peptide
  MOD_RES (1)..(3): Xaa is C or S
  MOD_RES (14)..(15)..(16)..(17)..(18): Xaa is A or G
  MOD_RES (19)..(20)..(21)..(22): Xaa is A or G or is absent

SEQ ID NO: 64809 - protein, 38 aa, Artificial Sequence
  GFR-binding peptide
  MOD_RES (32)..(33): Xaa is C or S
SEVTMNRYKKLVVNKNEDFYLISIANMKEPVXXPEPIG

SEQ ID NO: 64810 - protein, 37 aa, Artificial Sequence; identical to SEQ ID NO: 5732
  GFR-binding peptide
  MOD_RES (1)..(34)..(35): Xaa is C or S
  MOD_RES (12)..(13)..(14)..(15)..(16): Xaa is A or G
  MOD_RES (17)..(18)..(19)..(20): Xaa is A or G or is absent

SEQ ID NO: 64811 - protein, 36 aa, Artificial Sequence; identical to SEQ ID NO: 31825
  GFR-binding peptide
  MOD_RES (1)..(3): Xaa is C or S
  MOD_RES (15)..(16)..(17)..(18)..(19): Xaa is A or G
  MOD_RES (20)..(21)..(22)..(23): Xaa is A or G or is absent

SEQ ID NO: 64812 - protein, 36 aa, Artificial Sequence; identical to SEQ ID NO: 26864
  GFR-binding peptide
  MOD_RES (2)..(35)..(36): Xaa is C or S
  MOD_RES (13)..(14)..(15)..(16)..(17): Xaa is A or G
  MOD_RES (18)..(19)..(20)..(21): Xaa is A or G or is absent

SEQ ID NO: 64813 - protein, 39 aa, Artificial Sequence; identical to SEQ ID NO: 26865
  GFR-binding peptide
  MOD_RES (2)..(4)..(39): Xaa is C or S
  MOD_RES (17)..(18)..(19)..(20)..(21): Xaa is A or G
  MOD_RES (22)..(23)..(24)..(25): Xaa is A or G or is absent

SEQ ID NO: 64814 - protein, 37 aa, Artificial Sequence; identical to SEQ ID NO: 31826
  GFR-binding peptide
  MOD_RES (2)..(4): Xaa is C or S
  MOD_RES (16)..(17)..(18)..(19)..(20): Xaa is A or G
  MOD_RES (21)..(22)..(23)..(24): Xaa is A or G or is absent

SEQ ID NO: 64815 - protein, 38 aa, Artificial Sequence
  GFR-binding peptide
  MOD_RES (1)..(33)..(34): Xaa is C or S
XESVAMGRHKRLYTVVGKDYYLISTASLKTPVXXAKSA

SEQ ID NO: 64816 - protein, 38 aa, Artificial Sequence; identical to SEQ ID NO: 31829
  GFR-binding peptide
  MOD_RES (2)..(36)..(37): Xaa is C or S
  MOD_RES (14)..(15)..(16)..(17)..(18): Xaa is A or G
  MOD_RES (19)..(20)..(21)..(22): Xaa is A or G or is absent

SEQ ID NO: 64817 - protein, 38 aa, Artificial Sequence
  GFR-binding peptide
  MOD_RES (1)..(34)..(35): Xaa is C or S
  MOD_RES (12)..(13)..(14)..(15)..(16): Xaa is A or G
  MOD_RES (17)..(18)..(19)..(20): Xaa is A or G or is absent
XEEVIMYHYKLXXXXXXXXXKYLMSIPSTKVPAXXTSP

SEQ ID NO: 64818 - protein, 42 aa, Artificial Sequence; identical to SEQ ID NO: 5737
  GFR-binding peptide
  MOD_RES (1)..(3)..(36)..(37): Xaa is C or S

SEQ ID NO: 64819 - protein, 35 aa, Artificial Sequence; identical to SEQ ID NO: 26873
  GFR-binding peptide
  MOD_RES (1)..(3): Xaa is C or S
  MOD_RES (14)..(15)..(16)..(17)..(18): Xaa is A or G
  MOD_RES (19)..(20)..(21)..(22): Xaa is A or G or is absent

SEQ ID NO: 64820 - protein, 36 aa, Artificial Sequence; identical to SEQ ID NO: 5740
  GFR-binding peptide
  MOD_RES (33)..(33): Xaa is C or S
  MOD_RES (11)..(12)..(13)..(14)..(15): Xaa is A or G
  MOD_RES (16)..(17)..(18)..(19): Xaa is A or G or is absent

SEQ ID NO: 64821 - protein, 38 aa, Artificial Sequence; identical to SEQ ID NO: 26875
  GFR-binding peptide
  MOD_RES (2)..(4)..(38): Xaa is C or S
  MOD_RES (16)..(17)..(18)..(19)..(20): Xaa is A or G
  MOD_RES (21)..(22)..(23)..(24): Xaa is A or G or is absent

SEQ ID NO: 64822 - protein, 36 aa, Artificial Sequence; identical to SEQ ID NO: 5741
  GFR-binding peptide
  MOD_RES (31)..(32): Xaa is C or S

SEQ ID NO: 64823 - protein, 36 aa, Artificial Sequence; identical to SEQ ID NO: 26878
  GFR-binding peptide
  MOD_RES (1)..(34)..(35): Xaa is C or S

SEQ ID NO: 64824 - protein, 43 aa, Artificial Sequence; identical to SEQ ID NO: 5747
  GFR-binding peptide
  MOD_RES (2)..(37)..(38): Xaa is C or S
  MOD_RES (15)..(16)..(17)..(18)..(19): Xaa is A or G
  MOD_RES (20)..(21)..(22)..(23): Xaa is A or G or is absent

SEQ ID NO: 64825 - protein, 36 aa, Artificial Sequence
  GFR-binding peptide
  MOD_RES (2)..(4): Xaa is C or S
  MOD_RES (15)..(16)..(17)..(18)..(19): Xaa is A or G
  MOD_RES (20)..(21)..(22)..(23): Xaa is A or G or is absent
LXGXEEVIMEYKFKXXXXXXXXXLYLMSIPETKVPA

SEQ ID NO: 64826 - protein, 42 aa, Artificial Sequence; identical to SEQ ID NO: 56793
  GFR-binding peptide
  MOD_RES (2)..(4)..(36)..(37): Xaa is C or S

SEQ ID NO: 64827 - protein, 34 aa, Artificial Sequence; identical to SEQ ID NO: 5754
  GFR-binding peptide
  MOD_RES (31)..(32): Xaa is C or S

SEQ ID NO: 64828 - protein, 38 aa, Artificial Sequence
  GFR-binding peptide
  MOD_RES (32)..(33): Xaa is C or S
SEVVMDEYKFKVVNNASDLYLISIPELRTPVXXTPPTS

SEQ ID NO: 64829 - protein, 31 aa, Artificial Sequence
  GFR-binding peptide
  MOD_RES (1)..(1): Xaa is C or S
XSKVIMPIKGYIKPTKGIFYLINIPSLDQSV

SEQ ID NO: 64830 - protein, 35 aa, Artificial Sequence; identical to SEQ ID NO: 5756
  GFR-binding peptide
  MOD_RES (2)..(4): Xaa is C or S

SEQ ID NO: 64831 - protein, 36 aa, Artificial Sequence; identical to SEQ ID NO: 26888
  GFR-binding peptide
  MOD_RES (35)..(36): Xaa is C or S
  MOD_RES (13)..(14)..(15)..(16)..(17): Xaa is A or G
  MOD_RES (18)..(19)..(20)..(21): Xaa is A or G or is absent

SEQ ID NO: 64832 - protein, 38 aa, Artificial Sequence; identical to SEQ ID NO: 5759
  GFR-binding peptide
  MOD_RES (1)..(35)..(36): Xaa is C or S
  MOD_RES (13)..(14)..(15)..(16)..(17): Xaa is A or G
  MOD_RES (18)..(19)..(20)..(21): Xaa is A or G or is absent

SEQ ID NO: 64833 - protein, 38 aa, Artificial Sequence; identical to SEQ ID NO: 5764
  GFR-binding peptide
  MOD_RES (1)..(34)..(35): Xaa is C or S
  MOD_RES (12)..(13)..(14)..(15)..(16): Xaa is A or G
  MOD_RES (17)..(18)..(19)..(20): Xaa is A or G or is absent

SEQ ID NO: 64834 - protein, 43 aa, Artificial Sequence; identical to SEQ ID NO: 26895
  GFR-binding peptide
  MOD_RES (1)..(3)..(37)..(38): Xaa is C or S
  MOD_RES (15)..(16)..(17)..(18)..(19): Xaa is A or G
  MOD_RES (20)..(21)..(22)..(23): Xaa is A or G or is absent

SEQ ID NO: 64835 - protein, 39 aa, Artificial Sequence
  GFR-binding peptide
  MOD_RES (2)..(4)..(38)..(39): Xaa is C or S
  MOD_RES (16)..(17)..(18)..(19)..(20): Xaa is A or G
  MOD_RES (21)..(22)..(23)..(24): Xaa is A or G or is absent
RXAXSEVTMNEYKFKXXXXXXXXXLYLISIPEMKEPVXX

SEQ ID NO: 64836 - protein, 39 aa, Artificial Sequence; identical to SEQ ID NO: 26901
  GFR-binding peptide
  MOD_RES (2)..(34)..(35): Xaa is C or S

SEQ ID NO: 64837 - protein, 40 aa, Artificial Sequence
  GFR-binding peptide
  MOD_RES (1)..(34)..(35): Xaa is C or S
  MOD_RES (12)..(13)..(14)..(15)..(16): Xaa is A or G
  MOD_RES (17)..(18)..(19)..(20): Xaa is A or G or is absent
XEEVIMYHYKLXXXXXXXXXKYLMSIPSTKVPAXXTSPVR

SEQ ID NO: 64838 - protein, 35 aa, Artificial Sequence; identical to SEQ ID NO: 26902
  GFR-binding peptide
  MOD_RES (1)..(33)..(34): Xaa is C or S

SEQ ID NO: 64839 - protein, 30 aa, Artificial Sequence; identical to SEQ ID NO: 26905
  GFR-binding peptide

SEQ ID NO: 64840 - protein, 36 aa, Artificial Sequence; identical to SEQ ID NO: 26906
  GFR-binding peptide
  MOD_RES (2)..(33)..(34): Xaa is C or S

SEQ ID NO: 64841 - protein, 42 aa, Artificial Sequence
  GFR-binding peptide
  MOD_RES (2)..(36)..(37): Xaa is C or S
  MOD_RES (14)..(15)..(16)..(17)..(18): Xaa is A or G
  MOD_RES (19)..(20)..(21)..(22): Xaa is A or G or is absent
AXSEVTMNRHKRLXXXXXXXXXYYLISTASMKEPVXXPEPIG

SEQ ID NO: 64842 - protein, 32 aa, Artificial Sequence; identical to SEQ ID NO: 31871
  GFR-binding peptide
  MOD_RES (11)..(12)..(13)..(14)..(15): Xaa is A or G
  MOD_RES (16)..(17)..(18)..(19): Xaa is A or G or is absent

SEQ ID NO: 64843 - protein, 36 aa, Artificial Sequence; identical to SEQ ID NO: 5768
  GFR-binding peptide
  MOD_RES (1)..(32)..(33): Xaa is C or S

SEQ ID NO: 64844 - protein, 34 aa, Artificial Sequence; identical to SEQ ID NO: 5769
  GFR-binding peptide
  MOD_RES (1)..(33)..(34): Xaa is C or S

SEQ ID NO: 64845 - protein, 38 aa, Artificial Sequence
  GFR-binding peptide
  MOD_RES (1)..(3)..(37)..(38): Xaa is C or S
  MOD_RES (15)..(16)..(17)..(18)..(19): Xaa is A or G
  MOD_RES (20)..(21)..(22)..(23): Xaa is A or G or is absent
XAXSEVTMNPIKGYXXXXXXXXXFYLINIPSMKEPVXX

SEQ ID NO: 64846 - protein, 37 aa, Artificial Sequence
  GFR-binding peptide
  MOD_RES (1)..(3)..(36)..(37): Xaa is C or S
  MOD_RES (14)..(15)..(16)..(17)..(18): Xaa is A or G
  MOD_RES (19)..(20)..(21)..(22): Xaa is A or G or is absent
XKXSRVIMPIKGYXXXXXXXXXFYLINIPSLAQPVXX

SEQ ID NO: 64847 - protein, 44 aa, Artificial Sequence; identical to SEQ ID NO: 31873
  GFR-binding peptide
  MOD_RES (2)..(4)..(38)..(39): Xaa is C or S
  MOD_RES (16)..(17)..(18)..(19)..(20): Xaa is A or G
  MOD_RES (21)..(22)..(23)..(24): Xaa is A or G or is absent

SEQ ID NO: 64848 - protein, 36 aa, Artificial Sequence; identical to SEQ ID NO: 5774
  GFR-binding peptide
  MOD_RES (2)..(35)..(36): Xaa is C or S

SEQ ID NO: 64849 - protein, 34 aa, Artificial Sequence; identical to SEQ ID NO: 5775
  GFR-binding peptide
  MOD_RES (2)..(2): Xaa is C or S
  MOD_RES (13)..(14)..(15)..(16)..(17): Xaa is A or G
  MOD_RES (18)..(19)..(20)..(21): Xaa is A or G or is absent

SEQ ID NO: 64850 - protein, 41 aa, Artificial Sequence; identical to SEQ ID NO: 5777
  GFR-binding peptide
  MOD_RES (2)..(4)..(37)..(38): Xaa is C or S

SEQ ID NO: 64851 - protein, 42 aa, Artificial Sequence
  GFR-binding peptide
  MOD_RES (1)..(3)..(37)..(38): Xaa is C or S
  MOD_RES (15)..(16)..(17)..(18)..(19): Xaa is A or G
  MOD_RES (20)..(21)..(22)..(23): Xaa is A or G or is absent
XGXAEVVMDRHKRLXXXXXXXXXYYLISTASLRAPVXXSAPA

SEQ ID NO: 64852 - protein, 36 aa, Artificial Sequence; identical to SEQ ID NO: 26916
  GFR-binding peptide
  MOD_RES (1)..(34)..(35): Xaa is C or S
  MOD_RES (12)..(13)..(14)..(15)..(16): Xaa is A or G
  MOD_RES (17)..(18)..(19)..(20): Xaa is A or G or is absent

SEQ ID NO: 64853 - protein, 33 aa, Artificial Sequence
  GFR-binding peptide
  MOD_RES (2)..(2): Xaa is C or S
GXSEVVMDRHKRLVVNNASDYYLISTASLRTPV

SEQ ID NO: 64854 - protein, 38 aa, Artificial Sequence; identical to SEQ ID NO: 31882
  GFR-binding peptide
  MOD_RES (2)..(4)..(38): Xaa is C or S
  MOD_RES (16)..(17)..(18)..(19)..(20): Xaa is A or G
  MOD_RES (21)..(22)..(23)..(24): Xaa is A or G or is absent

SEQ ID NO: 64855 - protein, 35 aa, Artificial Sequence; identical to SEQ ID NO: 5780
  GFR-binding peptide
  MOD_RES (2)..(33)..(34): Xaa is C or S

SEQ ID NO: 64856 - protein, 35 aa, Artificial Sequence; identical to SEQ ID NO: 31886
  GFR-binding peptide
  MOD_RES (2)..(4): Xaa is C or S

SEQ ID NO: 64857 - protein, 32 aa, Artificial Sequence; identical to SEQ ID NO: 5783
  GFR-binding peptide
  MOD_RES (1)..(32): Xaa is C or S

SEQ ID NO: 64858 - protein, 30 aa, Artificial Sequence
  GFR-binding peptide
SKVVMPIKGYVKPTRGVFYLINIPSLDQPV

SEQ ID NO: 64859 - protein, 36 aa, Artificial Sequence; identical to SEQ ID NO: 56828
  GFR-binding peptide
  MOD_RES (1)..(3)..(35)..(36): Xaa is C or S

SEQ ID NO: 64860 - protein, 36 aa, Artificial Sequence; identical to SEQ ID NO: 26921
  GFR-binding peptide
  MOD_RES (1)..(3)..(35)..(36): Xaa is C or S

SEQ ID NO: 64861 - protein, 36 aa, Artificial Sequence; identical to SEQ ID NO: 5786
  GFR-binding peptide
  MOD_RES (2)..(34)..(35): Xaa is C or S

SEQ ID NO: 64862 - protein, 36 aa, Artificial Sequence; identical to SEQ ID NO: 5788
  GFR-binding peptide
  MOD_RES (34)..(35): Xaa is C or S
  MOD_RES (12)..(13)..(14)..(15)..(16): Xaa is A or G
  MOD_RES (17)..(18)..(19)..(20): Xaa is A or G or is absent

SEQ ID NO: 64863 - protein, 33 aa, Artificial Sequence; identical to SEQ ID NO: 26927
  GFR-binding peptide
  MOD_RES (1)..(1): Xaa is C or S
  MOD_RES (12)..(13)..(14)..(15)..(16): Xaa is A or G
  MOD_RES (17)..(18)..(19)..(20): Xaa is A or G or is absent

SEQ ID NO: 64864 - protein, 33 aa, Artificial Sequence; identical to SEQ ID NO: 5789
  GFR-binding peptide
  MOD_RES (1)..(1): Xaa is C or S
  MOD_RES (12)..(13)..(14)..(15)..(16): Xaa is A or G
  MOD_RES (17)..(18)..(19)..(20): Xaa is A or G or is absent

SEQ ID NO: 64865 - protein, 38 aa, Artificial Sequence; identical to SEQ ID NO: 26928
  GFR-binding peptide
  MOD_RES (2)..(4)..(35)..(36): Xaa is C or S

SEQ ID NO: 64866 - protein, 39 aa, Artificial Sequence; identical to SEQ ID NO: 5793
  GFR-binding peptide
  MOD_RES (1)..(33)..(34): Xaa is C or S

SEQ ID NO: 64867 - protein, 39 aa, Artificial Sequence
  GFR-binding peptide
  MOD_RES (33)..(34): Xaa is C or S
  MOD_RES (11)..(12)..(13)..(14)..(15): Xaa is A or G
  MOD_RES (16)..(17)..(18)..(19): Xaa is A or G or is absent
EVVMDYHYKLXXXXXXXXXKYLISIPSLRTPVXXTPPTS

SEQ ID NO: 64868 - protein, 39 aa, Artificial Sequence
  GFR-binding peptide
  MOD_RES (2)..(4)..(36)..(37): Xaa is C or S
RXAXSEVTMNPIKGYVVNKNEDFYLINIPSMKEPVXXPE

SEQ ID NO: 64869 - protein, 38 aa, Artificial Sequence
  GFR-binding peptide
  MOD_RES (33)..(34): Xaa is C or S
  MOD_RES (11)..(12)..(13)..(14)..(15): Xaa is A or G
  MOD_RES (16)..(17)..(18)..(19): Xaa is A or G or is absent
EVTMNYHYKLXXXXXXXXXKYLISIPSMKEPVXXPEPI

SEQ ID NO: 64870 - protein, 34 aa, Artificial Sequence; identical to SEQ ID NO: 5796
  GFR-binding peptide
  MOD_RES (33)..(34): Xaa is C or S
  MOD_RES (11)..(12)..(13)..(14)..(15): Xaa is A or G
  MOD_RES (16)..(17)..(18)..(19): Xaa is A or G or is absent

SEQ ID NO: 64871 - protein, 36 aa, Artificial Sequence; identical to SEQ ID NO: 31901
  GFR-binding peptide
  MOD_RES (1)..(36): Xaa is C or S
  MOD_RES (14)..(15)..(16)..(17)..(18): Xaa is A or G
  MOD_RES (19)..(20)..(21)..(22): Xaa is A or G or is absent

SEQ ID NO: 64872 - protein, 42 aa, Artificial Sequence; identical to SEQ ID NO: 26934
  GFR-binding peptide
  MOD_RES (2)..(4)..(38)..(39): Xaa is C or S
  MOD_RES (16)..(17)..(18)..(19)..(20): Xaa is A or G
  MOD_RES (21)..(22)..(23)..(24): Xaa is A or G or is absent

SEQ ID NO: 64873 - protein, 34 aa, Artificial Sequence; identical to SEQ ID NO: 31913
  GFR-binding peptide
  MOD_RES (1)..(3): Xaa is C or S

SEQ ID NO: 64874 - protein, 41 aa, Artificial Sequence; identical to SEQ ID NO: 13238
  GFR-binding peptide
  MOD_RES (1)..(3)..(35)..(36): Xaa is C or S

SEQ ID NO: 64875 - protein, 34 aa, Artificial Sequence; identical to SEQ ID NO: 5806
  GFR-binding peptide
  MOD_RES (1)..(3): Xaa is C or S

SEQ ID NO: 64876 - protein, 39 aa, Artificial Sequence
  GFR-binding peptide
  MOD_RES (1)..(33)..(34): Xaa is C or S
XAEVVMDRHKRLVVNNAADYYLISTASLRAPVXXSAPAA

SEQ ID NO: 64877 - protein, 39 aa, Artificial Sequence
  GFR-binding peptide
  MOD_RES (2)..(4)..(38)..(39): Xaa is C or S
  MOD_RES (16)..(17)..(18)..(19)..(20): Xaa is A or G
  MOD_RES (21)..(22)..(23)..(24): Xaa is A or G or is absent
RXAXSEVTMNRHKRLXXXXXXXXXYYLISTASMKEPVXX

SEQ ID NO: 64878 - protein, 30 aa, Artificial Sequence
  GFR-binding peptide
EVVMDRHKRLVVNNASDYYLISTASLRTPV

SEQ ID NO: 64879 - protein, 38 aa, Artificial Sequence; identical to SEQ ID NO: 5808
  GFR-binding peptide
  MOD_RES (1)..(3)..(36)..(37): Xaa is C or S
  MOD_RES (14)..(15)..(16)..(17)..(18): Xaa is A or G
  MOD_RES (19)..(20)..(21)..(22): Xaa is A or G or is absent

SEQ ID NO: 64880 - protein, 37 aa, Artificial Sequence; identical to SEQ ID NO: 5809
  GFR-binding peptide
  MOD_RES (34)..(34): Xaa is C or S
  MOD_RES (12)..(13)..(14)..(15)..(16): Xaa is A or G
  MOD_RES (17)..(18)..(19)..(20): Xaa is A or G or is absent

SEQ ID NO: 64881 - protein, 40 aa, Artificial Sequence; identical to SEQ ID NO: 31918
  GFR-binding peptide
  MOD_RES (2)..(36): Xaa is C or S
  MOD_RES (14)..(15)..(16)..(17)..(18): Xaa is A or G
  MOD_RES (19)..(20)..(21)..(22): Xaa is A or G or is absent

SEQ ID NO: 64882 - protein, 39 aa, Artificial Sequence; identical to SEQ ID NO: 5812
  GFR-binding peptide
  MOD_RES (1)..(33)..(34): Xaa is C or S

SEQ ID NO: 64883 - protein, 39 aa, Artificial Sequence
  GFR-binding peptide
  MOD_RES (1)..(3)..(36)..(37): Xaa is C or S
  MOD_RES (14)..(15)..(16)..(17)..(18): Xaa is A or G
  MOD_RES (19)..(20)..(21)..(22): Xaa is A or G or is absent
XGXEEVIMYHYKLXXXXXXXXXKYLMSIPSTKVPAXXTS

SEQ ID NO: 64884 - protein, 39 aa, Artificial Sequence
  GFR-binding peptide
  MOD_RES (1)..(33)..(34): Xaa is C or S
XRDVVMGRHKRLIIQQKDNYYLMSTASMKTPTXXPGASG

SEQ ID NO: 64885 - protein, 39 aa, Artificial Sequence; identical to SEQ ID NO: 5820
  GFR-binding peptide
  MOD_RES (2)..(36)..(37): Xaa is C or S
  MOD_RES (14)..(15)..(16)..(17)..(18): Xaa is A or G
  MOD_RES (19)..(20)..(21)..(22): Xaa is A or G or is absent

SEQ ID NO: 64886 - protein, 42 aa, Artificial Sequence
  GFR-binding peptide
  MOD_RES (2)..(4)..(36)..(37): Xaa is C or S
RXAXSEVTMNRYKKLVVNKNEDFYLISIANMKEPVXXPEPIG

SEQ ID NO: 64887 - protein, 34 aa, Artificial Sequence
  GFR-binding peptide
  MOD_RES (31)..(32): Xaa is C or S
EVVMDEYKFKVVNNASDLYLISIPELRTPVXXTP

SEQ ID NO: 64888 - protein, 40 aa, Artificial Sequence; identical to SEQ ID NO: 5825
  GFR-binding peptide
  MOD_RES (2)..(4)..(36)..(37): Xaa is C or S

SEQ ID NO: 64889 - protein, 33 aa, Artificial Sequence; identical to SEQ ID NO: 56875
  GFR-binding peptide
  MOD_RES (31)..(32): Xaa is C or S

SEQ ID NO: 64890 - protein, 35 aa, Artificial Sequence; identical to SEQ ID NO: 26955
  GFR-binding peptide
  MOD_RES (1)..(35): Xaa is C or S
  MOD_RES (13)..(14)..(15)..(16)..(17): Xaa is A or G
  MOD_RES (18)..(19)..(20)..(21): Xaa is A or G or is absent

SEQ ID NO: 64891 - protein, 32 aa, Artificial Sequence
  GFR-binding peptide
  MOD_RES (31)..(32): Xaa is C or S
EVTMNYHYKLVVNKNEDKYLISIPSMKEPVXX

SEQ ID NO: 64892 - protein, 38 aa, Artificial Sequence
  GFR-binding peptide
  MOD_RES (2)..(34)..(35): Xaa is C or S
GXRDVVMGYHYKLIIQQKDNKYLMSIPSMKTPTXXPGA

SEQ ID NO: 64893 - protein, 43 aa, Artificial Sequence; identical to SEQ ID NO: 56884
  GFR-binding peptide
  MOD_RES (2)..(4)..(38)..(39): Xaa is C or S
  MOD_RES (16)..(17)..(18)..(19)..(20): Xaa is A or G
  MOD_RES (21)..(22)..(23)..(24): Xaa is A or G or is absent

SEQ ID NO: 64894 - protein, 42 aa, Artificial Sequence
  GFR-binding peptide
  MOD_RES (2)..(36)..(37): Xaa is C or S
  MOD_RES (14)..(15)..(16)..(17)..(18): Xaa is A or G
  MOD_RES (19)..(20)..(21)..(22): Xaa is A or G or is absent
GXSRVVMNRHKRLXXXXXXXXXYYLVSTASLKTPAXXPKPVH

SEQ ID NO: 64895 - protein, 36 aa, Artificial Sequence; identical to SEQ ID NO: 5831
  GFR-binding peptide
  MOD_RES (2)..(2): Xaa is C or S
  MOD_RES (15)..(16)..(17)..(18)..(19): Xaa is A or G
  MOD_RES (20)..(21)..(22)..(23): Xaa is A or G or is absent

SEQ ID NO: 64896 - protein, 36 aa, Artificial Sequence; identical to SEQ ID NO: 31932
  GFR-binding peptide
  MOD_RES (1)..(3)..(34)..(35): Xaa is C or S

SEQ ID NO: 64897 - protein, 34 aa, Artificial Sequence; identical to SEQ ID NO: 5832
  GFR-binding peptide
  MOD_RES (2)..(34): Xaa is C or S

SEQ ID NO: 64898 - protein, 33 aa, Artificial Sequence; identical to SEQ ID NO: 31934
  GFR-binding peptide
  MOD_RES (31)..(32): Xaa is C or S

SEQ ID NO: 64899 - protein, 35 aa, Artificial Sequence; identical to SEQ ID NO: 26960
  GFR-binding peptide
  MOD_RES (32)..(33): Xaa is C or S

SEQ ID NO: 64900 - protein, 30 aa, Artificial Sequence; identical to SEQ ID NO: 31940
  GFR-binding peptide

SEQ ID NO: 64901 - protein, 34 aa, Artificial Sequence; identical to SEQ ID NO: 13270
  GFR-binding peptide
  MOD_RES (34)..(34): Xaa is C or S
  MOD_RES (12)..(13)..(14)..(15)..(16): Xaa is A or G
  MOD_RES (17)..(18)..(19)..(20): Xaa is A or G or is absent

SEQ ID NO: 64902 - protein, 43 aa, Artificial Sequence; identical to SEQ ID NO: 26965
  GFR-binding peptide
  MOD_RES (1)..(3)..(37): Xaa is C or S
  MOD_RES (15)..(16)..(17)..(18)..(19): Xaa is A or G
  MOD_RES (20)..(21)..(22)..(23): Xaa is A or G or is absent

SEQ ID NO: 64903 - protein, 37 aa, Artificial Sequence; identical to SEQ ID NO: 5842
  GFR-binding peptide
  MOD_RES (2)..(4)..(36)..(37): Xaa is C or S

SEQ ID NO: 64904 - protein, 39 aa, Artificial Sequence; identical to SEQ ID NO: 13275
  GFR-binding peptide
  MOD_RES (1)..(33)..(34): Xaa is C or S

SEQ ID NO: 64905 - protein, 40 aa, Artificial Sequence; identical to SEQ ID NO: 31949
  GFR-binding peptide
  MOD_RES (1)..(34)..(35): Xaa is C or S

SEQ ID NO: 64906 - protein, 36 aa, Artificial Sequence; identical to SEQ ID NO: 26969
  GFR-binding peptide
  MOD_RES (1)..(3)..(35)..(36): Xaa is C or S

SEQ ID NO: 64907 - protein, 36 aa, Artificial Sequence; identical to SEQ ID NO: 5844
  GFR-binding peptide
  MOD_RES (1)..(3)..(35)..(36): Xaa is C or S

SEQ ID NO: 64908 - protein, 31 aa, Artificial Sequence
  GFR-binding peptide
  MOD_RES (31)..(31): Xaa is C or S
EVTMNYHYKLVVNKNEDKYLISIPSMKEPVX

SEQ ID NO: 64909 - protein, 40 aa, Artificial Sequence; identical to SEQ ID NO: 26972
  GFR-binding peptide
  MOD_RES (34)..(35): Xaa is C or S
  MOD_RES (12)..(13)..(14)..(15)..(16): Xaa is A or G
  MOD_RES (17)..(18)..(19)..(20): Xaa is A or G or is absent

SEQ ID NO: 64910 - protein, 35 aa, Artificial Sequence; identical to SEQ ID NO: 5848
  GFR-binding peptide
  MOD_RES (2)..(33)..(34): Xaa is C or S

SEQ ID NO: 64911 - protein, 39 aa, Artificial Sequence; identical to SEQ ID NO: 5849
  GFR-binding peptide
  MOD_RES (2)..(34)..(35): Xaa is C or S

SEQ ID NO: 64912 - protein, 34 aa, Artificial Sequence
  GFR-binding peptide
  MOD_RES (33)..(34): Xaa is C or S
  MOD_RES (11)..(12)..(13)..(14)..(15): Xaa is A or G
  MOD_RES (16)..(17)..(18)..(19): Xaa is A or G or is absent
SKVVMPIKGYXXXXXXXXXFYLINIPSLDQPVXX

SEQ ID NO: 64913 - protein, 34 aa, Artificial Sequence; identical to SEQ ID NO: 5851
  GFR-binding peptide
  MOD_RES (34)..(34): Xaa is C or S
  MOD_RES (12)..(13)..(14)..(15)..(16): Xaa is A or G
  MOD_RES (17)..(18)..(19)..(20): Xaa is A or G or is absent

SEQ ID NO: 64914 - protein, 42 aa, Artificial Sequence; identical to SEQ ID NO: 26977
  GFR-binding peptide
  MOD_RES (1)..(3)..(37)..(38): Xaa is C or S
  MOD_RES (15)..(16)..(17)..(18)..(19): Xaa is A or G
  MOD_RES (20)..(21)..(22)..(23): Xaa is A or G or is absent

SEQ ID NO: 64915 - protein, 35 aa, Artificial Sequence
  GFR-binding peptide
  MOD_RES (2)..(4): Xaa is C or S
RXAXSEVTMNRYKKLVVNKNEDFYLISIANMKEPV

SEQ ID NO: 64916 - protein, 41 aa, Artificial Sequence
  GFR-binding peptide
  MOD_RES (2)..(4)..(36)..(37): Xaa is C or S
RXAXSEVTMNEYKFKVVNKNEDLYLISIPEMKEPVXXPEPI

SEQ ID NO: 64917 - protein, 39 aa, Artificial Sequence; identical to SEQ ID NO: 31957
  GFR-binding peptide
  MOD_RES (2)..(36)..(37): Xaa is C or S
  MOD_RES (14)..(15)..(16)..(17)..(18): Xaa is A or G
  MOD_RES (19)..(20)..(21)..(22): Xaa is A or G or is absent

SEQ ID NO: 64918 - protein, 33 aa, Artificial Sequence
  GFR-binding peptide
  MOD_RES (1)..(3): Xaa is C or S
XKXSKVVMPIKGYVKPTRGVFYLINIPSLDQPV

SEQ ID NO: 64919 - protein, 37 aa, Artificial Sequence; identical to SEQ ID NO: 5853
  GFR-binding peptide
  MOD_RES (32)..(33): Xaa is C or S

SEQ ID NO: 64920 - protein, 38 aa, Artificial Sequence; identical to SEQ ID NO: 5854
  GFR-binding peptide
  MOD_RES (33)..(34): Xaa is C or S
  MOD_RES (11)..(12)..(13)..(14)..(15): Xaa is A or G
  MOD_RES (16)..(17)..(18)..(19): Xaa is A or G or is absent

SEQ ID NO: 64921 - protein, 36 aa, Artificial Sequence; identical to SEQ ID NO: 5855
  GFR-binding peptide
  MOD_RES (2)..(4): Xaa is C or S
  MOD_RES (15)..(16)..(17)..(18)..(19): Xaa is A or G
  MOD_RES (20)..(21)..(22)..(23): Xaa is A or G or is absent

SEQ ID NO: 64922 - protein, 39 aa, Artificial Sequence; identical to SEQ ID NO: 5856
  GFR-binding peptide
  MOD_RES (2)..(33)..(34): Xaa is C or S

SEQ ID NO: 64923 - protein, 33 aa, Artificial Sequence; identical to SEQ ID NO: 5857
  GFR-binding peptide
  MOD_RES (33)..(33): Xaa is C or S

SEQ ID NO: 64924 - protein, 37 aa, Artificial Sequence; identical to SEQ ID NO: 26986
  GFR-binding peptide
  MOD_RES (32)..(33): Xaa is C or S

SEQ ID NO: 64925 - protein, 39 aa, Artificial Sequence; identical to SEQ ID NO: 31965
  GFR-binding peptide
  MOD_RES (33)..(34): Xaa is C or S
  MOD_RES (11)..(12)..(13)..(14)..(15): Xaa is A or G
  MOD_RES (16)..(17)..(18)..(19): Xaa is A or G or is absent

SEQ ID NO: 64926 - protein, 34 aa, Artificial Sequence
  GFR-binding peptide
  MOD_RES (1)..(32)..(33): Xaa is C or S
XEEVIMYHYKLLLVRGNDKYLMSIPSTKVPAXXT

SEQ ID NO: 64927 - protein, 37 aa, Artificial Sequence; identical to SEQ ID NO: 5861
  GFR-binding peptide
  MOD_RES (31)..(32): Xaa is C or S

SEQ ID NO: 64928 - protein, 41 aa, Artificial Sequence; identical to SEQ ID NO: 5862
  GFR-binding peptide
  MOD_RES (1)..(3)..(37)..(38): Xaa is C or S
  MOD_RES (15)..(16)..(17)..(18)..(19): Xaa is A or G
  MOD_RES (20)..(21)..(22)..(23): Xaa is A or G or is absent

SEQ ID NO: 64929 - protein, 34 aa, Artificial Sequence; identical to SEQ ID NO: 31968
  GFR-binding peptide
  MOD_RES (33)..(33): Xaa is C or S
  MOD_RES (11)..(12)..(13)..(14)..(15): Xaa is A or G
  MOD_RES (16)..(17)..(18)..(19): Xaa is A or G or is absent

SEQ ID NO: 64930 - protein, 37 aa, Artificial Sequence; identical to SEQ ID NO: 5864
  GFR-binding peptide
  MOD_RES (2)..(4)..(35)..(36): Xaa is C or S

SEQ ID NO: 64931 - protein, 37 aa, Artificial Sequence; identical to SEQ ID NO: 26993
  GFR-binding peptide
  MOD_RES (33)..(34): Xaa is C or S
  MOD_RES (11)..(12)..(13)..(14)..(15): Xaa is A or G
  MOD_RES (16)..(17)..(18)..(19): Xaa is A or G or is absent

SEQ ID NO: 64932 - protein, 40 aa, Artificial Sequence; identical to SEQ ID NO: 5868
  GFR-binding peptide
  MOD_RES (2)..(4)..(38)..(39): Xaa is C or S
  MOD_RES (16)..(17)..(18)..(19)..(20): Xaa is A or G
  MOD_RES (21)..(22)..(23)..(24): Xaa is A or G or is absent

SEQ ID NO: 64933 - protein, 37 aa, Artificial Sequence
  GFR-binding peptide
  MOD_RES (2)..(4)..(37): Xaa is C or S
  MOD_RES (15)..(16)..(17)..(18)..(19): Xaa is A or G
  MOD_RES (20)..(21)..(22)..(23): Xaa is A or G or is absent
LXGXEEVIMRHKRLXXXXXXXXXYYLMSTASTKVPAX

SEQ ID NO: 64934 - protein, 43 aa, Artificial Sequence
  GFR-binding peptide
  MOD_RES (2)..(4)..(38)..(39): Xaa is C or S
  MOD_RES (16)..(17)..(18)..(19)..(20): Xaa is A or G
  MOD_RES (21)..(22)..(23)..(24): Xaa is A or G or is absent
RXAXSEVTMNYHYKLXXXXXXXXXKYLISIPSMKEPVXXPEPI

SEQ ID NO: 64935 - protein, 33 aa, Artificial Sequence; identical to SEQ ID NO: 56924
  GFR-binding peptide
  MOD_RES (2)..(2): Xaa is C or S

SEQ ID NO: 64936 - protein, 37 aa, Artificial Sequence; identical to SEQ ID NO: 26996
  GFR-binding peptide
  MOD_RES (2)..(37): Xaa is C or S
  MOD_RES (15)..(16)..(17)..(18)..(19): Xaa is A or G
  MOD_RES (20)..(21)..(22)..(23): Xaa is A or G or is absent

SEQ ID NO: 64937 - protein, 33 aa, Artificial Sequence; identical to SEQ ID NO: 26997
  GFR-binding peptide
  MOD_RES (31)..(32): Xaa is C or S

SEQ ID NO: 64938 - protein, 37 aa, Artificial Sequence
  GFR-binding peptide
  MOD_RES (32)..(33): Xaa is C or S
AEVVMDRHKRLVVNNAADYYLISTASLRAPVXXSAPA

SEQ ID NO: 64939 - protein, 33 aa, Artificial Sequence; identical to SEQ ID NO: 31975
  GFR-binding peptide
  MOD_RES (12)..(13)..(14)..(15)..(16): Xaa is A or G
  MOD_RES (17)..(18)..(19)..(20): Xaa is A or G or is absent

SEQ ID NO: 64940 - protein, 32 aa, Artificial Sequence; identical to SEQ ID NO: 5873
  GFR-binding peptide
  MOD_RES (31)..(32): Xaa is C or S

SEQ ID NO: 64941 - protein, 40 aa, Artificial Sequence
  GFR-binding peptide
  MOD_RES (1)..(3)..(37)..(38): Xaa is C or S
  MOD_RES (15)..(16)..(17)..(18)..(19): Xaa is A or G
  MOD_RES (20)..(21)..(22)..(23): Xaa is A or G or is absent
XGXSEVVMDYHYKLXXXXXXXXXKYLISIPSLRTPVXXTP

SEQ ID NO: 64942 - protein, 41 aa, Artificial Sequence; identical to SEQ ID NO: 31978
  GFR-binding peptide
  MOD_RES (2)..(36)..(37): Xaa is C or S
  MOD_RES (14)..(15)..(16)..(17)..(18): Xaa is A or G
  MOD_RES (19)..(20)..(21)..(22): Xaa is A or G or is absent

SEQ ID NO: 64943 - protein, 38 aa, Artificial Sequence; identical to SEQ ID NO: 5876
  GFR-binding peptide
  MOD_RES (1)..(33)..(34): Xaa is C or S

SEQ ID NO: 64944 - protein, 40 aa, Artificial Sequence
  GFR-binding peptide
  MOD_RES (1)..(35)..(36): Xaa is C or S
  MOD_RES (13)..(14)..(15)..(16)..(17): Xaa is A or G
  MOD_RES (18)..(19)..(20)..(21): Xaa is A or G or is absent
XSEVTMNEYKFKXXXXXXXXXLYLISIPEMKEPVXXPEPI

SEQ ID NO: 64945 - protein, 32 aa, Artificial Sequence; identical to SEQ ID NO: 27005
  GFR-binding peptide
  MOD_RES (32)..(32): Xaa is C or S

SEQ ID NO: 64946 - protein, 34 aa, Artificial Sequence; identical to SEQ ID NO: 5878
  GFR-binding peptide
  MOD_RES (1)..(1): Xaa is C or S
  MOD_RES (13)..(14)..(15)..(16)..(17): Xaa is A or G
  MOD_RES (18)..(19)..(20)..(21): Xaa is A or G or is absent

SEQ ID NO: 64947 - protein, 39 aa, Artificial Sequence; identical to SEQ ID NO: 5881
  GFR-binding peptide
  MOD_RES (1)..(34)..(35): Xaa is C or S
  MOD_RES (12)..(13)..(14)..(15)..(16): Xaa is A or G
  MOD_RES (17)..(18)..(19)..(20): Xaa is A or G or is absent

SEQ ID NO: 64948 - protein, 38 aa, Artificial Sequence; identical to SEQ ID NO: 31985
  GFR-binding peptide
  MOD_RES (2)..(35)..(36): Xaa is C or S
  MOD_RES (13)..(14)..(15)..(16)..(17): Xaa is A or G
  MOD_RES (18)..(19)..(20)..(21): Xaa is A or G or is absent

SEQ ID NO: 64949 - protein, 36 aa, Artificial Sequence; identical to SEQ ID NO: 5886
  GFR-binding peptide
  MOD_RES (2)..(4)..(36): Xaa is C or S

SEQ ID NO: 64950 - protein, 41 aa, Artificial Sequence; identical to SEQ ID NO: 13317
  GFR-binding peptide
  MOD_RES (1)..(3)..(37)..(38): Xaa is C or S
  MOD_RES (15)..(16)..(17)..(18)..(19): Xaa is A or G
  MOD_RES (20)..(21)..(22)..(23): Xaa is A or G or is absent

SEQ ID NO: 64951 - protein, 37 aa, Artificial Sequence; identical to SEQ ID NO: 5892
  GFR-binding peptide
  MOD_RES (2)..(33)..(34): Xaa is C or S

SEQ ID NO: 64952 - protein, 40 aa, Artificial Sequence; identical to SEQ ID NO: 56949
  GFR-binding peptide
  MOD_RES (1)..(34)..(35): Xaa is C or S
  MOD_RES (12)..(13)..(14)..(15)..(16): Xaa is A or G
  MOD_RES (17)..(18)..(19)..(20): Xaa is A or G or is absent

SEQ ID NO: 64953 - protein, 33 aa, Artificial Sequence; identical to SEQ ID NO: 5893
  GFR-binding peptide
  MOD_RES (1)..(32)..(33): Xaa is C or S

SEQ ID NO: 64954 - protein, 36 aa, Artificial Sequence; identical to SEQ ID NO: 27015
  GFR-binding peptide
  MOD_RES (1)..(35)..(36): Xaa is C or S
  MOD_RES (13)..(14)..(15)..(16)..(17): Xaa is A or G
  MOD_RES (18)..(19)..(20)..(21): Xaa is A or G or is absent

SEQ ID NO: 64955 - protein, 44 aa, Artificial Sequence; identical to SEQ ID NO: 5895
  GFR-binding peptide
  MOD_RES (2)..(4)..(38)..(39): Xaa is C or S
  MOD_RES (16)..(17)..(18)..(19)..(20): Xaa is A or G
  MOD_RES (21)..(22)..(23)..(24): Xaa is A or G or is absent

SEQ ID NO: 64956 - protein, 38 aa, Artificial Sequence; identical to SEQ ID NO: 5896
  GFR-binding peptide
  MOD_RES (2)..(4)..(38): Xaa is C or S
  MOD_RES (16)..(17)..(18)..(19)..(20): Xaa is A or G
  MOD_RES (21)..(22)..(23)..(24): Xaa is A or G or is absent

SEQ ID NO: 64957 - protein, 33 aa, Artificial Sequence
  GFR-binding peptide
  MOD_RES (1)..(33): Xaa is C or S
XSEVTMNPIKGYVVNKNEDFYLINIPSMKEPVX

SEQ ID NO: 64958 - protein, 40 aa, Artificial Sequence; identical to SEQ ID NO: 31998
  GFR-binding peptide
  MOD_RES (1)..(3)..(37)..(38): Xaa is C or S
  MOD_RES (15)..(16)..(17)..(18)..(19): Xaa is A or G
  MOD_RES (20)..(21)..(22)..(23): Xaa is A or G or is absent

SEQ ID NO: 64959 - protein, 32 aa, Artificial Sequence; identical to SEQ ID NO: 27020
  GFR-binding peptide
  MOD_RES (31)..(32): Xaa is C or S

SEQ ID NO: 64960 - protein, 39 aa, Artificial Sequence; identical to SEQ ID NO: 5903
  GFR-binding peptide
  MOD_RES (2)..(4)..(37)..(38): Xaa is C or S
  MOD_RES (15)..(16)..(17)..(18)..(19): Xaa is A or G
  MOD_RES (20)..(21)..(22)..(23): Xaa is A or G or is absent

SEQ ID NO: 64961 - protein, 36 aa, Artificial Sequence
  GFR-binding peptide
  MOD_RES (1)..(33)..(34): Xaa is C or S
XAEVVMDRHKRLVVNNAADYYLISTASLRAPVXXSA

SEQ ID NO: 64962 - protein, 38 aa, Artificial Sequence
  GFR-binding peptide
  MOD_RES (32)..(33): Xaa is C or S
SRVVMNRHKRLIVNSSDDYYLVSTASLKTPAXXPKPVH

SEQ ID NO: 64963 - protein, 36 aa, Artificial Sequence; identical to SEQ ID NO: 32005
  GFR-binding peptide
  MOD_RES (1)..(35)..(36): Xaa is C or S
  MOD_RES (13)..(14)..(15)..(16)..(17): Xaa is A or G
  MOD_RES (18)..(19)..(20)..(21): Xaa is A or G or is absent

SEQ ID NO: 64964 - protein, 33 aa, Artificial Sequence; identical to SEQ ID NO: 5906
  GFR-binding peptide
  MOD_RES (1)..(1): Xaa is C or S
  MOD_RES (12)..(13)..(14)..(15)..(16): Xaa is A or G
  MOD_RES (17)..(18)..(19)..(20): Xaa is A or G or is absent

SEQ ID NO: 64965 - protein, 37 aa, Artificial Sequence; identical to SEQ ID NO: 27026
  GFR-binding peptide
  MOD_RES (2)..(4)..(36)..(37): Xaa is C or S

SEQ ID NO: 64966 - protein, 36 aa, Artificial Sequence; identical to SEQ ID NO: 27028
  GFR-binding peptide
  MOD_RES (31)..(31): Xaa is C or S

SEQ ID NO: 64967 - protein, 39 aa, Artificial Sequence; identical to SEQ ID NO: 27034
  GFR-binding peptide
  MOD_RES (2)..(34)..(35): Xaa is C or S

SEQ ID NO: 64968 - protein, 38 aa, Artificial Sequence; identical to SEQ ID NO: 5916
  GFR-binding peptide
  MOD_RES (32)..(33): Xaa is C or S

SEQ ID NO: 64969 - protein, 39 aa, Artificial Sequence; identical to SEQ ID NO: 5917
  GFR-binding peptide
  MOD_RES (34)..(35): Xaa is C or S
  MOD_RES (12)..(13)..(14)..(15)..(16): Xaa is A or G
  MOD_RES (17)..(18)..(19)..(20): Xaa is A or G or is absent

SEQ ID NO: 64970 - protein, 34 aa, Artificial Sequence
  GFR-binding peptide
  MOD_RES (1)..(33)..(34): Xaa is C or S
XRDVVMGEYKFKIIQQKDNLYLMSIPEMKTPTXX

SEQ ID NO: 64971 - protein, 40 aa, Artificial Sequence; identical to SEQ ID NO: 5918
  GFR-binding peptide
  MOD_RES (2)..(4)..(35)..(36): Xaa is C or S

SEQ ID NO: 64972 - protein, 39 aa, Artificial Sequence; identical to SEQ ID NO: 32028
  GFR-binding peptide
  MOD_RES (2)..(34)..(35): Xaa is C or S

SEQ ID NO: 64973 - protein, 40 aa, Artificial Sequence; identical to SEQ ID NO: 5921
  GFR-binding peptide
  MOD_RES (2)..(36)..(37): Xaa is C or S
  MOD_RES (14)..(15)..(16)..(17)..(18): Xaa is A or G
  MOD_RES (19)..(20)..(21)..(22): Xaa is A or G or is absent

SEQ ID NO: 64974 - protein, 36 aa, Artificial Sequence; identical to SEQ ID NO: 5922
  GFR-binding peptide
  MOD_RES (1)..(3)..(36): Xaa is C or S
  MOD_RES (14)..(15)..(16)..(17)..(18): Xaa is A or G
  MOD_RES (19)..(20)..(21)..(22): Xaa is A or G or is absent

SEQ ID NO: 64975 - protein, 38 aa, Artificial Sequence; identical to SEQ ID NO: 27039
  GFR-binding peptide
  MOD_RES (1)..(3)..(38): Xaa is C or S
  MOD_RES (16)..(17)..(18)..(19)..(20): Xaa is A or G
  MOD_RES (21)..(22)..(23)..(24): Xaa is A or G or is absent

SEQ ID NO: 64976 - protein, 38 aa, Artificial Sequence
  GFR-binding peptide
  MOD_RES (1)..(3)..(35)..(36): Xaa is C or S
XGXRDVVMGRHKRLIIQQKDNYYLMSTASMKTPTXXPG

SEQ ID NO: 64977 - protein, 37 aa, Artificial Sequence; identical to SEQ ID NO: 32035
  GFR-binding peptide
  MOD_RES (32)..(33): Xaa is C or S

SEQ ID NO: 64978 - protein, 34 aa, Artificial Sequence; identical to SEQ ID NO: 5925
  GFR-binding peptide
  MOD_RES (2)..(34): Xaa is C or S

SEQ ID NO: 64979 - protein, 39 aa, Artificial Sequence; identical to SEQ ID NO: 5926
  GFR-binding peptide
  MOD_RES (2)..(33)..(34): Xaa is C or S

SEQ ID NO: 64980 - protein, 37 aa, Artificial Sequence; identical to SEQ ID NO: 32036
  GFR-binding peptide
  MOD_RES (2)..(34)..(35): Xaa is C or S

SEQ ID NO: 64981 - protein, 37 aa, Artificial Sequence; identical to SEQ ID NO: 27045
  GFR-binding peptide
  MOD_RES (1)..(3)..(37): Xaa is C or S
  MOD_RES (15)..(16)..(17)..(18)..(19): Xaa is A or G
  MOD_RES (20)..(21)..(22)..(23): Xaa is A or G or is absent

SEQ ID NO: 64982 - protein, 34 aa, Artificial Sequence
  GFR-binding peptide
  MOD_RES (33)..(34): Xaa is C or S
  MOD_RES (11)..(12)..(13)..(14)..(15): Xaa is A or G
  MOD_RES (16)..(17)..(18)..(19): Xaa is A or G or is absent
EVTMNPIKGYXXXXXXXXXFYLINIPSMKEPVXX

SEQ ID NO: 64983 - protein, 35 aa, Artificial Sequence
  GFR-binding peptide
  MOD_RES (2)..(34)..(35): Xaa is C or S
GXSEVVMDRHKRLVVNNASDYYLISTASLRTPVXX

SEQ ID NO: 64984 - protein, 35 aa, Artificial Sequence; identical to SEQ ID NO: 32042
  GFR-binding peptide
  MOD_RES (34)..(35): Xaa is C or S
  MOD_RES (12)..(13)..(14)..(15)..(16): Xaa is A or G
  MOD_RES (17)..(18)..(19)..(20): Xaa is A or G or is absent

SEQ ID NO: 64985 - protein, 34 aa, Artificial Sequence; identical to SEQ ID NO: 5930
  GFR-binding peptide
  MOD_RES (1)..(1): Xaa is C or S
  MOD_RES (13)..(14)..(15)..(16)..(17): Xaa is A or G
  MOD_RES (18)..(19)..(20)..(21): Xaa is A or G or is absent

SEQ ID NO: 64986 - protein, 37 aa, Artificial Sequence; identical to SEQ ID NO: 5931
  GFR-binding peptide
  MOD_RES (2)..(37): Xaa is C or S
  MOD_RES (15)..(16)..(17)..(18)..(19): Xaa is A or G
  MOD_RES (20)..(21)..(22)..(23): Xaa is A or G or is absent

SEQ ID NO: 64987 - protein, 40 aa, Artificial Sequence; identical to SEQ ID NO: 5934
  GFR-binding peptide
  MOD_RES (1)..(34)..(35): Xaa is C or S

SEQ ID NO: 64988 - protein, 32 aa, Artificial Sequence; identical to SEQ ID NO: 5937
  GFR-binding peptide
  MOD_RES (32)..(32): Xaa is C or S

SEQ ID NO: 64989 - protein, 39 aa, Artificial Sequence; identical to SEQ ID NO: 5938
  GFR-binding peptide
  MOD_RES (33)..(34): Xaa is C or S
  MOD_RES (11)..(12)..(13)..(14)..(15): Xaa is A or G
  MOD_RES (16)..(17)..(18)..(19): Xaa is A or G or is absent

SEQ ID NO: 64990 - protein, 43 aa, Artificial Sequence; identical to SEQ ID NO: 32046
  GFR-binding peptide
  MOD_RES (2)..(4)..(38)..(39): Xaa is C or S
  MOD_RES (16)..(17)..(18)..(19)..(20): Xaa is A or G
  MOD_RES (21)..(22)..(23)..(24): Xaa is A or G or is absent

SEQ ID NO: 64991 - protein, 39 aa, Artificial Sequence; identical to SEQ ID NO: 32048
  GFR-binding peptide
  MOD_RES (2)..(34)..(35): Xaa is C or S

SEQ ID NO: 64992 - protein, 37 aa, Artificial Sequence
  GFR-binding peptide
  MOD_RES (1)..(3)..(34)..(35): Xaa is C or S
XGXEEVIMRHKRLLLVRGNDYYLMSTASTKVPAXXTS

SEQ ID NO: 64993 - protein, 34 aa, Artificial Sequence; identical to SEQ ID NO: 5940
  GFR-binding peptide
  MOD_RES (1)..(3)..(34): Xaa is C or S

SEQ ID NO: 64994 - protein, 40 aa, Artificial Sequence; identical to SEQ ID NO: 5943
  GFR-binding peptide
  MOD_RES (2)..(35)..(36): Xaa is C or S
  MOD_RES (13)..(14)..(15)..(16)..(17): Xaa is A or G
  MOD_RES (18)..(19)..(20)..(21): Xaa is A or G or is absent

SEQ ID NO: 64995 - protein, 32 aa, Artificial Sequence; identical to SEQ ID NO: 5944
  GFR-binding peptide
  MOD_RES (31)..(31): Xaa is C or S

SEQ ID NO: 64996 - protein, 37 aa, Artificial Sequence; identical to SEQ ID NO: 5945
  GFR-binding peptide
  MOD_RES (2)..(34)..(35): Xaa is C or S

SEQ ID NO: 64997 - protein, 36 aa, Artificial Sequence; identical to SEQ ID NO: 5946
  GFR-binding peptide
  MOD_RES (2)..(4)..(36): Xaa is C or S

SEQ ID NO: 64998 - protein, 32 aa, Artificial Sequence; identical to SEQ ID NO: 5947
  GFR-binding peptide
  MOD_RES (1)..(1): Xaa is C or S

SEQ ID NO: 64999 - protein, 36 aa, Artificial Sequence; identical to SEQ ID NO: 32057
  GFR-binding peptide
  MOD_RES (1)..(35)..(36): Xaa is C or S
  MOD_RES (13)..(14)..(15)..(16)..(17): Xaa is A or G
  MOD_RES (18)..(19)..(20)..(21): Xaa is A or G or is absent

SEQ ID NO: 65000 - protein, 37 aa, Artificial Sequence; identical to SEQ ID NO: 5950
  GFR-binding peptide
  MOD_RES (2)..(34)..(35): Xaa is C or S

SEQ ID NO: 65001 - protein, 37 aa, Artificial Sequence; identical to SEQ ID NO: 32059
  GFR-binding peptide
  MOD_RES (2)..(36)..(37): Xaa is C or S
  MOD_RES (14)..(15)..(16)..(17)..(18): Xaa is A or G
  MOD_RES (19)..(20)..(21)..(22): Xaa is A or G or is absent

SEQ ID NO: 65002 - protein, 36 aa, Artificial Sequence; identical to SEQ ID NO: 5951
  GFR-binding peptide
  MOD_RES (1)..(32)..(33): Xaa is C or S

SEQ ID NO: 65003 - protein, 33 aa, Artificial Sequence
  GFR-binding peptide
  MOD_RES (1)..(1): Xaa is C or S
  MOD_RES (12)..(13)..(14)..(15)..(16): Xaa is A or G
  MOD_RES (17)..(18)..(19)..(20): Xaa is A or G or is absent
XSKVIMPIKGYXXXXXXXXXFYLINIPSLDQSV

SEQ ID NO: 65004 - protein, 34 aa, Artificial Sequence; identical to SEQ ID NO: 32062
  GFR-binding peptide
  MOD_RES (31)..(32): Xaa is C or S

SEQ ID NO: 65005 - protein, 35 aa, Artificial Sequence
  GFR-binding peptide
  MOD_RES (33)..(34): Xaa is C or S
  MOD_RES (11)..(12)..(13)..(14)..(15): Xaa is A or G
  MOD_RES (16)..(17)..(18)..(19): Xaa is A or G or is absent
EVTMNPIKGYXXXXXXXXXFYLINIPSMKEPVXXP

SEQ ID NO: 65006 - protein, 35 aa, Artificial Sequence
  GFR-binding peptide
  MOD_RES (31)..(32): Xaa is C or S
DVVMGYHYKLIIQQKDNKYLMSIPSMKTPTXXPGA

SEQ ID NO: 65007 - protein, 34 aa, Artificial Sequence; identical to SEQ ID NO: 32068
  GFR-binding peptide
  MOD_RES (2)..(34): Xaa is C or S

SEQ ID NO: 65008 - protein, 33 aa, Artificial Sequence; identical to SEQ ID NO: 5954
  GFR-binding peptide
  MOD_RES (12)..(13)..(14)..(15)..(16): Xaa is A or G
  MOD_RES (17)..(18)..(19)..(20): Xaa is A or G or is absent

SEQ ID NO: 65009 - protein, 38 aa, Artificial Sequence; identical to SEQ ID NO: 27070
  GFR-binding peptide
  MOD_RES (1)..(33)..(34): Xaa is C or S

SEQ ID NO: 65010 - protein, 35 aa, Artificial Sequence; identical to SEQ ID NO: 32070
  GFR-binding peptide
  MOD_RES (32)..(32): Xaa is C or S

SEQ ID NO: 65011 - protein, 41 aa, Artificial Sequence; identical to SEQ ID NO: 27072
  GFR-binding peptide
  MOD_RES (1)..(3)..(37)..(38): Xaa is C or S
  MOD_RES (15)..(16)..(17)..(18)..(19): Xaa is A or G
  MOD_RES (20)..(21)..(22)..(23): Xaa is A or G or is absent

SEQ ID NO: 65012 - protein, 41 aa, Artificial Sequence; identical to SEQ ID NO: 27077
  GFR-binding peptide
  MOD_RES (1)..(35)..(36): Xaa is C or S
  MOD_RES (13)..(14)..(15)..(16)..(17): Xaa is A or G
  MOD_RES (18)..(19)..(20)..(21): Xaa is A or G or is absent

SEQ ID NO: 65013 - protein, 30 aa, Artificial Sequence
  GFR-binding peptide
DVVMGRHKRLIIQQKDNYYLMSTASMKTPT

SEQ ID NO: 65014 - protein, 35 aa, Artificial Sequence
  GFR-binding peptide
  MOD_RES (34)..(35): Xaa is C or S
  MOD_RES (12)..(13)..(14)..(15)..(16): Xaa is A or G
  MOD_RES (17)..(18)..(19)..(20): Xaa is A or G or is absent
SEVTMNRYKKLXXXXXXXXXFYLISIANMKEPVXX

SEQ ID NO: 65015 - protein, 38 aa, Artificial Sequence
  GFR-binding peptide
  MOD_RES (33)..(34): Xaa is C or S
  MOD_RES (11)..(12)..(13)..(14)..(15): Xaa is A or G
  MOD_RES (16)..(17)..(18)..(19): Xaa is A or G or is absent
DVVMGYHYKLXXXXXXXXXKYLMSIPSMKTPTXXPGAS

SEQ ID NO: 65016 - protein, 38 aa, Artificial Sequence; identical to SEQ ID NO: 5964
  GFR-binding peptide
  MOD_RES (2)..(34)..(35): Xaa is C or S

SEQ ID NO: 65017 - protein, 38 aa, Artificial Sequence; identical to SEQ ID NO: 5965
  GFR-binding peptide
  MOD_RES (1)..(34)..(35): Xaa is C or S
  MOD_RES (12)..(13)..(14)..(15)..(16): Xaa is A or G
  MOD_RES (17)..(18)..(19)..(20): Xaa is A or G or is absent

SEQ ID NO: 65018 - protein, 41 aa, Artificial Sequence; identical to SEQ ID NO: 32078
  GFR-binding peptide
  MOD_RES (2)..(4)..(39)..(40): Xaa is C or S
  MOD_RES (17)..(18)..(19)..(20)..(21): Xaa is A or G
  MOD_RES (22)..(23)..(24)..(25): Xaa is A or G or is absent

SEQ ID NO: 65019 - protein, 39 aa, Artificial Sequence
  GFR-binding peptide
  MOD_RES (2)..(36)..(37): Xaa is C or S
  MOD_RES (14)..(15)..(16)..(17)..(18): Xaa is A or G
  MOD_RES (19)..(20)..(21)..(22): Xaa is A or G or is absent
GXESVAMGRHKRLXXXXXXXXXYYLISTASLKTPVXXAK

SEQ ID NO: 65020 - protein, 40 aa, Artificial Sequence; identical to SEQ ID NO: 5970
  GFR-binding peptide
  MOD_RES (1)..(34)..(35): Xaa is C or S
  MOD_RES (12)..(13)..(14)..(15)..(16): Xaa is A or G
  MOD_RES (17)..(18)..(19)..(20): Xaa is A or G or is absent

SEQ ID NO: 65021 - protein, 38 aa, Artificial Sequence; identical to SEQ ID NO: 5971
  GFR-binding peptide
  MOD_RES (32)..(33): Xaa is C or S

SEQ ID NO: 65022 - protein, 36 aa, Artificial Sequence; identical to SEQ ID NO: 57025
  GFR-binding peptide
  MOD_RES (2)..(36): Xaa is C or S
  MOD_RES (14)..(15)..(16)..(17)..(18): Xaa is A or G
  MOD_RES (19)..(20)..(21)..(22): Xaa is A or G or is absent

SEQ ID NO: 65023 - protein, 39 aa, Artificial Sequence; identical to SEQ ID NO: 27089
  GFR-binding peptide
  MOD_RES (1)..(35): Xaa is C or S
  MOD_RES (13)..(14)..(15)..(16)..(17): Xaa is A or G
  MOD_RES (18)..(19)..(20)..(21): Xaa is A or G or is absent

SEQ ID NO: 65024 - protein, 36 aa, Artificial Sequence; identical to SEQ ID NO: 32087
  GFR-binding peptide
  MOD_RES (1)..(34)..(35): Xaa is C or S
  MOD_RES (12)..(13)..(14)..(15)..(16): Xaa is A or G
  MOD_RES (17)..(18)..(19)..(20): Xaa is A or G or is absent

SEQ ID NO: 65025 - protein, 40 aa, Artificial Sequence; identical to SEQ ID NO: 27090
  GFR-binding peptide
  MOD_RES (2)..(4)..(38)..(39): Xaa is C or S
  MOD_RES (16)..(17)..(18)..(19)..(20): Xaa is A or G
  MOD_RES (21)..(22)..(23)..(24): Xaa is A or G or is absent

SEQ ID NO: 65026 - protein, 42 aa, Artificial Sequence
  GFR-binding peptide
  MOD_RES (2)..(4)..(36)..(37): Xaa is C or S
RXGXAEVVMDRHKRLVVNNAADYYLISTASLRAPVXXSAPAA

SEQ ID NO: 65027 - protein, 30 aa, Artificial Sequence; identical to SEQ ID NO: 5976
  GFR-binding peptide

SEQ ID NO: 65028 - protein, 39 aa, Artificial Sequence; identical to SEQ ID NO: 5977
  GFR-binding peptide
  MOD_RES (2)..(4)..(38)..(39): Xaa is C or S
  MOD_RES (16)..(17)..(18)..(19)..(20): Xaa is A or G
  MOD_RES (21)..(22)..(23)..(24): Xaa is A or G or is absent

SEQ ID NO: 65029 - protein, 37 aa, Artificial Sequence; identical to SEQ ID NO: 5978
  GFR-binding peptide
  MOD_RES (1)..(3)..(35)..(36): Xaa is C or S

SEQ ID NO: 65030 - protein, 35 aa, Artificial Sequence
  GFR-binding peptide
  MOD_RES (2)..(34)..(35): Xaa is C or S
GXSEVVMDEYKFKVVNNASDLYLISIPELRTPVXX

SEQ ID NO: 65031 - protein, 37 aa, Artificial Sequence
  GFR-binding peptide
  MOD_RES (2)..(4)..(37): Xaa is C or S
  MOD_RES (15)..(16)..(17)..(18)..(19): Xaa is A or G
  MOD_RES (20)..(21)..(22)..(23): Xaa is A or G or is absent
SXKXSKVIMPIKGYXXXXXXXXXFYLINIPSLDQSVX

SEQ ID NO: 65032 - protein, 41 aa, Artificial Sequence
  GFR-binding peptide
  MOD_RES (2)..(4)..(37)..(38): Xaa is C or S
  MOD_RES (15)..(16)..(17)..(18)..(19): Xaa is A or G
  MOD_RES (20)..(21)..(22)..(23): Xaa is A or G or is absent
SXKXSRVIMPIKGYXXXXXXXXXFYLINIPSLAQPVXXPAA

SEQ ID NO: 65033 - protein, 37 aa, Artificial Sequence
  GFR-binding peptide
  MOD_RES (31)..(32): Xaa is C or S
EEVIMEYKFKLLVRGNDLYLMSIPETKVPAXXTSPVR

SEQ ID NO: 65034 - protein, 37 aa, Artificial Sequence; identical to SEQ ID NO: 5991
  GFR-binding peptide
  MOD_RES (1)..(33)..(34): Xaa is C or S

SEQ ID NO: 65035 - protein, 40 aa, Artificial Sequence; identical to SEQ ID NO: 5995
  GFR-binding peptide
  MOD_RES (2)..(36): Xaa is C or S
  MOD_RES (14)..(15)..(16)..(17)..(18): Xaa is A or G
  MOD_RES (19)..(20)..(21)..(22): Xaa is A or G or is absent

SEQ ID NO: 65036 - protein, 35 aa, Artificial Sequence
  GFR-binding peptide
  MOD_RES (31)..(32): Xaa is C or S
DVVMGEYKFKIIQQKDNLYLMSIPEMKTPTXXPGA

SEQ ID NO: 65037 - protein, 37 aa, Artificial Sequence; identical to SEQ ID NO: 32108
  GFR-binding peptide
  MOD_RES (1)..(3)..(37): Xaa is C or S
  MOD_RES (15)..(16)..(17)..(18)..(19): Xaa is A or G
  MOD_RES (20)..(21)..(22)..(23): Xaa is A or G or is absent

SEQ ID NO: 65038 - protein, 36 aa, Artificial Sequence; identical to SEQ ID NO: 5997
  GFR-binding peptide
  MOD_RES (1)..(33)..(34): Xaa is C or S

SEQ ID NO: 65039 - protein, 35 aa, Artificial Sequence; identical to SEQ ID NO: 27110
  GFR-binding peptide
  MOD_RES (1)..(3): Xaa is C or S

SEQ ID NO: 65040 - protein, 35 aa, Artificial Sequence; identical to SEQ ID NO: 5998
  GFR-binding peptide
  MOD_RES (2)..(4): Xaa is C or S

SEQ ID NO: 65041 - protein, 37 aa, Artificial Sequence; identical to SEQ ID NO: 32112
  GFR-binding peptide
  MOD_RES (33)..(34): Xaa is C or S
  MOD_RES (11)..(12)..(13)..(14)..(15): Xaa is A or G
  MOD_RES (16)..(17)..(18)..(19): Xaa is A or G or is absent

SEQ ID NO: 65042 - protein, 39 aa, Artificial Sequence
  GFR-binding peptide
  MOD_RES (1)..(33)..(34): Xaa is C or S
XSEVTMNRHKRLVVNKNEDYYLISTASMKEPVXXPEPIG

SEQ ID NO: 65043 - protein, 34 aa, Artificial Sequence
  GFR-binding peptide
  MOD_RES (34)..(34): Xaa is C or S
  MOD_RES (12)..(13)..(14)..(15)..(16): Xaa is A or G
  MOD_RES (17)..(18)..(19)..(20): Xaa is A or G or is absent
SEVTMNRYKKLXXXXXXXXXFYLISIANMKEPVX

SEQ ID NO: 65044 - protein, 41 aa, Artificial Sequence; identical to SEQ ID NO: 6000
  GFR-binding peptide
  MOD_RES (2)..(36)..(37): Xaa is C or S
  MOD_RES (14)..(15)..(16)..(17)..(18): Xaa is A or G
  MOD_RES (19)..(20)..(21)..(22): Xaa is A or G or is absent

SEQ ID NO: 65045 - protein, 35 aa, Artificial Sequence; identical to SEQ ID NO: 6001
  GFR-binding peptide
  MOD_RES (31)..(32): Xaa is C or S

SEQ ID NO: 65046 - protein, 42 aa, Artificial Sequence
  GFR-binding peptide
  MOD_RES (2)..(4)..(36)..(37): Xaa is C or S
RXGXESVAMGRHKRLYTVVGKDYYLISTASLKTPVXXAKSAK

SEQ ID NO: 65047 - protein, 34 aa, Artificial Sequence
  GFR-binding peptide
  MOD_RES (2)..(4): Xaa is C or S
SXKXSRVIMPIKGYVKPKRGVFYLINIPSLAQPV

SEQ ID NO: 65048 - protein, 38 aa, Artificial Sequence; identical to SEQ ID NO: 27117
  GFR-binding peptide
  MOD_RES (2)..(36)..(37): Xaa is C or S
  MOD_RES (14)..(15)..(16)..(17)..(18): Xaa is A or G
  MOD_RES (19)..(20)..(21)..(22): Xaa is A or G or is absent

SEQ ID NO: 65049 - protein, 37 aa, Artificial Sequence; identical to SEQ ID NO: 32129
  GFR-binding peptide
  MOD_RES (2)..(34)..(35): Xaa is C or S

SEQ ID NO: 65050 - protein, 39 aa, Artificial Sequence; identical to SEQ ID NO: 27121
  GFR-binding peptide
  MOD_RES (1)..(3)..(34)..(35): Xaa is C or S

SEQ ID NO: 65051 - protein, 38 aa, Artificial Sequence
  GFR-binding peptide
  MOD_RES (33)..(34): Xaa is C or S
  MOD_RES (11)..(12)..(13)..(14)..(15): Xaa is A or G
  MOD_RES (16)..(17)..(18)..(19): Xaa is A or G or is absent
SVAMGRHKRLXXXXXXXXXYYLISTASLKTPVXXAKSA

SEQ ID NO: 65052 - protein, 42 aa, Artificial Sequence
  GFR-binding peptide
  MOD_RES (1)..(3)..(36)..(37): Xaa is C or S
  MOD_RES (14)..(15)..(16)..(17)..(18): Xaa is A or G
  MOD_RES (19)..(20)..(21)..(22): Xaa is A or G or is absent
XKXSRVIMPIKGYXXXXXXXXXFYLINIPSLAQPVXXPAASA

SEQ ID NO: 65053 - protein, 38 aa, Artificial Sequence
  GFR-binding peptide
  MOD_RES (2)..(4)..(36)..(37): Xaa is C or S
SXGXRDVVMGEYKFKIIQQKDNLYLMSIPEMKTPTXXP

SEQ ID NO: 65054 - protein, 32 aa, Artificial Sequence; identical to SEQ ID NO: 27125
  GFR-binding peptide
  MOD_RES (1)..(1): Xaa is C or S

SEQ ID NO: 65055 - protein, 35 aa, Artificial Sequence; identical to SEQ ID NO: 27128
  GFR-binding peptide
  MOD_RES (31)..(32): Xaa is C or S

SEQ ID NO: 65056 - protein, 38 aa, Artificial Sequence; identical to SEQ ID NO: 6007
  GFR-binding peptide
  MOD_RES (2)..(4)..(37)..(38): Xaa is C or S
  MOD_RES (15)..(16)..(17)..(18)..(19): Xaa is A or G
  MOD_RES (20)..(21)..(22)..(23): Xaa is A or G or is absent

SEQ ID NO: 65057 - protein, 35 aa, Artificial Sequence; identical to SEQ ID NO: 13417
  GFR-binding peptide
  MOD_RES (34)..(35): Xaa is C or S
  MOD_RES (12)..(13)..(14)..(15)..(16): Xaa is A or G
  MOD_RES (17)..(18)..(19)..(20): Xaa is A or G or is absent

SEQ ID NO: 65058 - protein, 35 aa, Artificial Sequence; identical to SEQ ID NO: 6008
  GFR-binding peptide
  MOD_RES (1)..(3)..(35): Xaa is C or S

SEQ ID NO: 65059 - protein, 37 aa, Artificial Sequence; identical to SEQ ID NO: 27129
  GFR-binding peptide
  MOD_RES (2)..(34)..(35): Xaa is C or S

SEQ ID NO: 65060 - protein, 35 aa, Artificial Sequence; identical to SEQ ID NO: 6009
  GFR-binding peptide
  MOD_RES (1)..(35): Xaa is C or S
  MOD_RES (13)..(14)..(15)..(16)..(17): Xaa is A or G
  MOD_RES (18)..(19)..(20)..(21): Xaa is A or G or is absent

SEQ ID NO: 65061 - protein, 35 aa, Artificial Sequence
  GFR-binding peptide
  MOD_RES (33)..(34): Xaa is C or S
  MOD_RES (11)..(12)..(13)..(14)..(15): Xaa is A or G
  MOD_RES (16)..(17)..(18)..(19): Xaa is A or G or is absent
SKVVMPIKGYXXXXXXXXXFYLINIPSLDQPVXXP

SEQ ID NO: 65062 - protein, 42 aa, Artificial Sequence; identical to SEQ ID NO: 6011
  GFR-binding peptide
  MOD_RES (2)..(36)..(37): Xaa is C or S
  MOD_RES (14)..(15)..(16)..(17)..(18): Xaa is A or G
  MOD_RES (19)..(20)..(21)..(22): Xaa is A or G or is absent

SEQ ID NO: 65063 - protein, 36 aa, Artificial Sequence
  GFR-binding peptide
  MOD_RES (33)..(34): Xaa is C or S
  MOD_RES (11)..(12)..(13)..(14)..(15): Xaa is A or G
  MOD_RES (16)..(17)..(18)..(19): Xaa is A or G or is absent
EEVIMRHKRLXXXXXXXXXYYLMSTASTKVPAXXTS

SEQ ID NO: 65064 - protein, 37 aa, Artificial Sequence; identical to SEQ ID NO: 32138
  GFR-binding peptide
  MOD_RES (1)..(35)..(36): Xaa is C or S
  MOD_RES (13)..(14)..(15)..(16)..(17): Xaa is A or G
  MOD_RES (18)..(19)..(20)..(21): Xaa is A or G or is absent

SEQ ID NO: 65065 - protein, 43 aa, Artificial Sequence
  GFR-binding peptide
  MOD_RES (1)..(3)..(37)..(38): Xaa is C or S
  MOD_RES (15)..(16)..(17)..(18)..(19): Xaa is A or G
  MOD_RES (20)..(21)..(22)..(23): Xaa is A or G or is absent
XGXRDVVMGYHYKLXXXXXXXXXKYLMSIPSMKTPTXXPGASG

SEQ ID NO: 65066 - protein, 33 aa, Artificial Sequence; identical to SEQ ID NO: 32139
  GFR-binding peptide
  MOD_RES (33)..(33): Xaa is C or S
  MOD_RES (11)..(12)..(13)..(14)..(15): Xaa is A or G
  MOD_RES (16)..(17)..(18)..(19): Xaa is A or G or is absent

SEQ ID NO: 65067 - protein, 36 aa, Artificial Sequence; identical to SEQ ID NO: 27134
  GFR-binding peptide
  MOD_RES (1)..(3)..(34)..(35): Xaa is C or S

SEQ ID NO: 65068 - protein, 36 aa, Artificial Sequence; identical to SEQ ID NO: 6017
  GFR-binding peptide
  MOD_RES (2)..(4)..(35)..(36): Xaa is C or S

SEQ ID NO: 65069 - protein, 31 aa, Artificial Sequence
  GFR-binding peptide
  MOD_RES (31)..(31): Xaa is C or S
EVTMNRHKRLVVNKNEDYYLISTASMKEPVX

SEQ ID NO: 65070 - protein, 40 aa, Artificial Sequence; identical to SEQ ID NO: 32142
  GFR-binding peptide
  MOD_RES (34)..(35): Xaa is C or S
  MOD_RES (12)..(13)..(14)..(15)..(16): Xaa is A or G
  MOD_RES (17)..(18)..(19)..(20): Xaa is A or G or is absent

SEQ ID NO: 65071 - protein, 41 aa, Artificial Sequence; identical to SEQ ID NO: 6020
  GFR-binding peptide
  MOD_RES (1)..(35)..(36): Xaa is C or S
  MOD_RES (13)..(14)..(15)..(16)..(17): Xaa is A or G
  MOD_RES (18)..(19)..(20)..(21): Xaa is A or G or is absent

SEQ ID NO: 65072 - protein, 35 aa, Artificial Sequence; identical to SEQ ID NO: 32144
  GFR-binding peptide
  MOD_RES (34)..(34): Xaa is C or S
  MOD_RES (12)..(13)..(14)..(15)..(16): Xaa is A or G
  MOD_RES (17)..(18)..(19)..(20): Xaa is A or G or is absent

SEQ ID NO: 65073 - protein, 35 aa, Artificial Sequence; identical to SEQ ID NO: 6021
  GFR-binding peptide
  MOD_RES (1)..(34)..(35): Xaa is C or S
  MOD_RES (12)..(13)..(14)..(15)..(16): Xaa is A or G
  MOD_RES (17)..(18)..(19)..(20): Xaa is A or G or is absent

SEQ ID NO: 65074 - protein, 39 aa, Artificial Sequence; identical to SEQ ID NO: 27140
  GFR-binding peptide
  MOD_RES (2)..(4)..(38)..(39): Xaa is C or S
  MOD_RES (16)..(17)..(18)..(19)..(20): Xaa is A or G
  MOD_RES (21)..(22)..(23)..(24): Xaa is A or G or is absent

SEQ ID NO: 65075 - protein, 37 aa, Artificial Sequence
  GFR-binding peptide
  MOD_RES (2)..(35)..(36): Xaa is C or S
  MOD_RES (13)..(14)..(15)..(16)..(17): Xaa is A or G
  MOD_RES (18)..(19)..(20)..(21): Xaa is A or G or is absent
GXEEVIMYHYKLXXXXXXXXXKYLMSIPSTKVPAXXT

SEQ ID NO: 65076 - protein, 37 aa, Artificial Sequence; identical to SEQ ID NO: 27142
  GFR-binding peptide
  MOD_RES (2)..(4): Xaa is C or S
  MOD_RES (16)..(17)..(18)..(19)..(20): Xaa is A or G
  MOD_RES (21)..(22)..(23)..(24): Xaa is A or G or is absent

SEQ ID NO: 65077 - protein, 34 aa, Artificial Sequence; identical to SEQ ID NO: 6023
  GFR-binding peptide
  MOD_RES (1)..(33)..(34): Xaa is C or S

SEQ ID NO: 65078 - protein, 32 aa, Artificial Sequence; identical to SEQ ID NO: 32147
  GFR-binding peptide
  MOD_RES (11)..(12)..(13)..(14)..(15): Xaa is A or G
  MOD_RES (16)..(17)..(18)..(19): Xaa is A or G or is absent

SEQ ID NO: 65079 - protein, 32 aa, Artificial Sequence; identical to SEQ ID NO: 27145
  GFR-binding peptide
  MOD_RES (1)..(1): Xaa is C or S

SEQ ID NO: 65080 - protein, 41 aa, Artificial Sequence
  GFR-binding peptide
  MOD_RES (2)..(36)..(37): Xaa is C or S
  MOD_RES (14)..(15)..(16)..(17)..(18): Xaa is A or G
  MOD_RES (19)..(20)..(21)..(22): Xaa is A or G or is absent
AXSEVTMNRYKKLXXXXXXXXXFYLISIANMKEPVXXPEPI

SEQ ID NO: 65081 - protein, 42 aa, Artificial Sequence; identical to SEQ ID NO: 6024
  GFR-binding peptide
  MOD_RES (2)..(4)..(37)..(38): Xaa is C or S
  MOD_RES (15)..(16)..(17)..(18)..(19): Xaa is A or G
  MOD_RES (20)..(21)..(22)..(23): Xaa is A or G or is absent

SEQ ID NO: 65082 - protein, 36 aa, Artificial Sequence; identical to SEQ ID NO: 32150
  GFR-binding peptide
  MOD_RES (34)..(35): Xaa is C or S
  MOD_RES (12)..(13)..(14)..(15)..(16): Xaa is A or G
  MOD_RES (17)..(18)..(19)..(20): Xaa is A or G or is absent

SEQ ID NO: 65083 - protein, 40 aa, Artificial Sequence; identical to SEQ ID NO: 32151
  GFR-binding peptide
  MOD_RES (34)..(35): Xaa is C or S
  MOD_RES (12)..(13)..(14)..(15)..(16): Xaa is A or G
  MOD_RES (17)..(18)..(19)..(20): Xaa is A or G or is absent

SEQ ID NO: 65084 - protein, 36 aa, Artificial Sequence; identical to SEQ ID NO: 27150
  GFR-binding peptide
  MOD_RES (32)..(33): Xaa is C or S

SEQ ID NO: 65085 - protein, 39 aa, Artificial Sequence
  GFR-binding peptide
  MOD_RES (1)..(33)..(34): Xaa is C or S
XSEVVMDYHYKLVVNNASDKYLISIPSLRTPVXXTPPTS

SEQ ID NO: 65086 - protein, 43 aa, Artificial Sequence; identical to SEQ ID NO: 6032
  GFR-binding peptide
  MOD_RES (1)..(3)..(37)..(38): Xaa is C or S
  MOD_RES (15)..(16)..(17)..(18)..(19): Xaa is A or G
  MOD_RES (20)..(21)..(22)..(23): Xaa is A or G or is absent

SEQ ID NO: 65087 - protein, 39 aa, Artificial Sequence; identical to SEQ ID NO: 32161
  GFR-binding peptide
  MOD_RES (1)..(35)..(36): Xaa is C or S
  MOD_RES (13)..(14)..(15)..(16)..(17): Xaa is A or G
  MOD_RES (18)..(19)..(20)..(21): Xaa is A or G or is absent

SEQ ID NO: 65088 - protein, 37 aa, Artificial Sequence
  GFR-binding peptide
  MOD_RES (34)..(35): Xaa is C or S
  MOD_RES (12)..(13)..(14)..(15)..(16): Xaa is A or G
  MOD_RES (17)..(18)..(19)..(20): Xaa is A or G or is absent
SEVVMDYHYKLXXXXXXXXXKYLISIPSLRTPVXXTP

SEQ ID NO: 65089 - protein, 41 aa, Artificial Sequence; identical to SEQ ID NO: 6041
  GFR-binding peptide
  MOD_RES (2)..(4)..(36)..(37): Xaa is C or S

SEQ ID NO: 65090 - protein, 37 aa, Artificial Sequence
  GFR-binding peptide
  MOD_RES (1)..(33)..(34): Xaa is C or S
XAEVVMDRHKRLVVNNAADYYLISTASLRAPVXXSAP

SEQ ID NO: 65091 - protein, 40 aa, Artificial Sequence; identical to SEQ ID NO: 32165
  GFR-binding peptide
  MOD_RES (2)..(4)..(38)..(39): Xaa is C or S
  MOD_RES (16)..(17)..(18)..(19)..(20): Xaa is A or G
  MOD_RES (21)..(22)..(23)..(24): Xaa is A or G or is absent

SEQ ID NO: 65092 - protein, 35 aa, Artificial Sequence
  GFR-binding peptide
  MOD_RES (2)..(2): Xaa is C or S
  MOD_RES (14)..(15)..(16)..(17)..(18): Xaa is A or G
  MOD_RES (19)..(20)..(21)..(22): Xaa is A or G or is absent
AXSEVTMNRHKRLXXXXXXXXXYYLISTASMKEPV

SEQ ID NO: 65093 - protein, 34 aa, Artificial Sequence; identical to SEQ ID NO: 6042
  GFR-binding peptide
  MOD_RES (1)..(1): Xaa is C or S
  MOD_RES (13)..(14)..(15)..(16)..(17): Xaa is A or G
  MOD_RES (18)..(19)..(20)..(21): Xaa is A or G or is absent

SEQ ID NO: 65094 - protein, 37 aa, Artificial Sequence; identical to SEQ ID NO: 6045
  GFR-binding peptide
  MOD_RES (2)..(4)..(37): Xaa is C or S
  MOD_RES (15)..(16)..(17)..(18)..(19): Xaa is A or G
  MOD_RES (20)..(21)..(22)..(23): Xaa is A or G or is absent

SEQ ID NO: 65095 - protein, 42 aa, Artificial Sequence; identical to SEQ ID NO: 6046
  GFR-binding peptide
  MOD_RES (1)..(3)..(36)..(37): Xaa is C or S
  MOD_RES (14)..(15)..(16)..(17)..(18): Xaa is A or G
  MOD_RES (19)..(20)..(21)..(22): Xaa is A or G or is absent

SEQ ID NO: 65096 - protein, 34 aa, Artificial Sequence
  GFR-binding peptide
  MOD_RES (1)..(32)..(33): Xaa is C or S
XEEVIMRHKRLLLVRGNDYYLMSTASTKVPAXXT

SEQ ID NO: 65097 - protein, 32 aa, Artificial Sequence
  GFR-binding peptide
  MOD_RES (1)..(32): Xaa is C or S
XSKVIMPIKGYIKPTKGIFYLINIPSLDQSVX

SEQ ID NO: 65098 - protein, 39 aa, Artificial Sequence
  GFR-binding peptide
  MOD_RES (34)..(35): Xaa is C or S
  MOD_RES (12)..(13)..(14)..(15)..(16): Xaa is A or G
  MOD_RES (17)..(18)..(19)..(20): Xaa is A or G or is absent
SEVVMDYHYKLXXXXXXXXXKYLISIPSLRTPVXXTPPT

SEQ ID NO: 65099 - protein, 38 aa, Artificial Sequence; identical to SEQ ID NO: 6052
  GFR-binding peptide
  MOD_RES (33)..(34): Xaa is C or S
  MOD_RES (11)..(12)..(13)..(14)..(15): Xaa is A or G
  MOD_RES (16)..(17)..(18)..(19): Xaa is A or G or is absent

SEQ ID NO: 65100 - protein, 35 aa, Artificial Sequence; identical to SEQ ID NO: 6054
  GFR-binding peptide
  MOD_RES (31)..(32): Xaa is C or S

SEQ ID NO: 65101 - protein, 39 aa, Artificial Sequence; identical to SEQ ID NO: 27174
  GFR-binding peptide
  MOD_RES (2)..(34)..(35): Xaa is C or S

SEQ ID NO: 65102 - protein, 36 aa, Artificial Sequence; identical to SEQ ID NO: 6055
  GFR-binding peptide
  MOD_RES (1)..(33)..(34): Xaa is C or S

SEQ ID NO: 65103 - protein, 33 aa, Artificial Sequence
  GFR-binding peptide
  MOD_RES (31)..(32): Xaa is C or S
EVVMDRHKRLVVNNAADYYLISTASLRAPVXXS

SEQ ID NO: 65104 - protein, 43 aa, Artificial Sequence; identical to SEQ ID NO: 6056
  GFR-binding peptide
  MOD_RES (2)..(4)..(38)..(39): Xaa is C or S
  MOD_RES (16)..(17)..(18)..(19)..(20): Xaa is A or G
  MOD_RES (21)..(22)..(23)..(24): Xaa is A or G or is absent

SEQ ID NO: 65105 - protein, 38 aa, Artificial Sequence; identical to SEQ ID NO: 27178
  GFR-binding peptide
  MOD_RES (33)..(33): Xaa is C or S
  MOD_RES (11)..(12)..(13)..(14)..(15): Xaa is A or G
  MOD_RES (16)..(17)..(18)..(19): Xaa is A or G or is absent

SEQ ID NO: 65106 - protein, 37 aa, Artificial Sequence; identical to SEQ ID NO: 27179
  GFR-binding peptide
  MOD_RES (2)..(4)..(36)..(37): Xaa is C or S

SEQ ID NO: 65107 - protein, 37 aa, Artificial Sequence; identical to SEQ ID NO: 6058
  GFR-binding peptide
  MOD_RES (1)..(35)..(36): Xaa is C or S
  MOD_RES (13)..(14)..(15)..(16)..(17): Xaa is A or G
  MOD_RES (18)..(19)..(20)..(21): Xaa is A or G or is absent

SEQ ID NO: 65108 - protein, 43 aa, Artificial Sequence
  GFR-binding peptide
  MOD_RES (1)..(3)..(37)..(38): Xaa is C or S
  MOD_RES (15)..(16)..(17)..(18)..(19): Xaa is A or G
  MOD_RES (20)..(21)..(22)..(23): Xaa is A or G or is absent
XAXSEVTMNPIKGYXXXXXXXXXFYLINIPSMKEPVXXPEPIG

SEQ ID NO: 65109 - protein, 44 aa, Artificial Sequence
  GFR-binding peptide
  MOD_RES (2)..(4)..(38)..(39): Xaa is C or S
  MOD_RES (16)..(17)..(18)..(19)..(20): Xaa is A or G
  MOD_RES (21)..(22)..(23)..(24): Xaa is A or G or is absent
RXAXSEVTMNRHKRLXXXXXXXXXYYLISTASMKEPVXXPEPIG

SEQ ID NO: 65110 - protein, 38 aa, Artificial Sequence; identical to SEQ ID NO: 27184
  GFR-binding peptide
  MOD_RES (33)..(34): Xaa is C or S
  MOD_RES (11)..(12)..(13)..(14)..(15): Xaa is A or G
  MOD_RES (16)..(17)..(18)..(19): Xaa is A or G or is absent

SEQ ID NO: 65111 - protein, 35 aa, Artificial Sequence; identical to SEQ ID NO: 6060
  GFR-binding peptide
  MOD_RES (2)..(33)..(34): Xaa is C or S

SEQ ID NO: 65112 - protein, 34 aa, Artificial Sequence; identical to SEQ ID NO: 27188
  GFR-binding peptide
  MOD_RES (1)..(33)..(34): Xaa is C or S

SEQ ID NO: 65113 - protein, 37 aa, Artificial Sequence; identical to SEQ ID NO: 6062
  GFR-binding peptide
  MOD_RES (2)..(35)..(36): Xaa is C or S

SEQ ID NO: 65114 - protein, 40 aa, Artificial Sequence; identical to SEQ ID NO: 32182
  GFR-binding peptide
  MOD_RES (2)..(36)..(37): Xaa is C or S
  MOD_RES (14)..(15)..(16)..(17)..(18): Xaa is A or G
  MOD_RES (19)..(20)..(21)..(22): Xaa is A or G or is absent

SEQ ID NO: 65115 - protein, 40 aa, Artificial Sequence; identical to SEQ ID NO: 6067
  GFR-binding peptide
  MOD_RES (2)..(34)..(35): Xaa is C or S

SEQ ID NO: 65116 - protein, 31 aa, Artificial Sequence; identical to SEQ ID NO: 27194
  GFR-binding peptide
  MOD_RES (31)..(31): Xaa is C or S

SEQ ID NO: 65117 - protein, 33 aa, Artificial Sequence; identical to SEQ ID NO: 6069
  GFR-binding peptide
  MOD_RES (1)..(32)..(33): Xaa is C or S

SEQ ID NO: 65118 - protein, 31 aa, Artificial Sequence; identical to SEQ ID NO: 6070
  GFR-binding peptide
  MOD_RES (31)..(31): Xaa is C or S

SEQ ID NO: 65119 - protein, 38 aa, Artificial Sequence; identical to SEQ ID NO: 32184
  GFR-binding peptide
  MOD_RES (2)..(34)..(35): Xaa is C or S

SEQ ID NO: 65120 - protein, 36 aa, Artificial Sequence; identical to SEQ ID NO: 6077
  GFR-binding peptide
  MOD_RES (1)..(3)..(35)..(36): Xaa is C or S

SEQ ID NO: 65121 - protein, 42 aa, Artificial Sequence
  GFR-binding peptide
  MOD_RES (2)..(4)..(36)..(37): Xaa is C or S
RXAXSEVTMNYHYKLVVNKNEDKYLISIPSMKEPVXXPEPIG

SEQ ID NO: 65122 - protein, 38 aa, Artificial Sequence; identical to SEQ ID NO: 13487
  GFR-binding peptide
  MOD_RES (1)..(3)..(37)..(38): Xaa is C or S
  MOD_RES (15)..(16)..(17)..(18)..(19): Xaa is A or G
  MOD_RES (20)..(21)..(22)..(23): Xaa is A or G or is absent

SEQ ID NO: 65123 - protein, 35 aa, Artificial Sequence
  GFR-binding peptide
  MOD_RES (1)..(3)..(35): Xaa is C or S
XAXSEVTMNPIKGYVVNKNEDFYLINIPSMKEPVX

SEQ ID NO: 65124 - protein, 38 aa, Artificial Sequence; identical to SEQ ID NO: 6081
  GFR-binding peptide
  MOD_RES (1)..(35)..(36): Xaa is C or S
  MOD_RES (13)..(14)..(15)..(16)..(17): Xaa is A or G
  MOD_RES (18)..(19)..(20)..(21): Xaa is A or G or is absent

SEQ ID NO: 65125 - protein, 39 aa, Artificial Sequence; identical to SEQ ID NO: 32195
  GFR-binding peptide
  MOD_RES (2)..(4)..(38)..(39): Xaa is C or S
  MOD_RES (16)..(17)..(18)..(19)..(20): Xaa is A or G
  MOD_RES (21)..(22)..(23)..(24): Xaa is A or G or is absent

SEQ ID NO: 65126 - protein, 40 aa, Artificial Sequence; identical to SEQ ID NO: 27205
  GFR-binding peptide
  MOD_RES (1)..(3)..(35)..(36): Xaa is C or S

SEQ ID NO: 65127 - protein, 34 aa, Artificial Sequence; identical to SEQ ID NO: 27206
  GFR-binding peptide
  MOD_RES (33)..(34): Xaa is C or S
  MOD_RES (11)..(12)..(13)..(14)..(15): Xaa is A or G
  MOD_RES (16)..(17)..(18)..(19): Xaa is A or G or is absent

SEQ ID NO: 65128 - protein, 43 aa, Artificial Sequence
  GFR-binding peptide
  MOD_RES (2)..(4)..(37)..(38): Xaa is C or S
  MOD_RES (15)..(16)..(17)..(18)..(19): Xaa is A or G
  MOD_RES (20)..(21)..(22)..(23): Xaa is A or G or is absent
LXGXEEVIMRHKRLXXXXXXXXXYYLMSTASTKVPAXXTSPVR

SEQ ID NO: 65129 - protein, 33 aa, Artificial Sequence; identical to SEQ ID NO: 32199
  GFR-binding peptide
  MOD_RES (33)..(33): Xaa is C or S
  MOD_RES (11)..(12)..(13)..(14)..(15): Xaa is A or G
  MOD_RES (16)..(17)..(18)..(19): Xaa is A or G or is absent

SEQ ID NO: 65130 - protein, 41 aa, Artificial Sequence; identical to SEQ ID NO: 6085
  GFR-binding peptide
  MOD_RES (2)..(35)..(36): Xaa is C or S
  MOD_RES (13)..(14)..(15)..(16)..(17): Xaa is A or G
  MOD_RES (18)..(19)..(20)..(21): Xaa is A or G or is absent

SEQ ID NO: 65131 - protein, 36 aa, Artificial Sequence; identical to SEQ ID NO: 32203
  GFR-binding peptide
  MOD_RES (31)..(32): Xaa is C or S

SEQ ID NO: 65132 - protein, 44 aa, Artificial Sequence
  GFR-binding peptide
  MOD_RES (2)..(4)..(38)..(39): Xaa is C or S
  MOD_RES (16)..(17)..(18)..(19)..(20): Xaa is A or G
  MOD_RES (21)..(22)..(23)..(24): Xaa is A or G or is absent
RXAXSEVTMNEYKFKXXXXXXXXXLYLISIPEMKEPVXXPEPIG

SEQ ID NO: 65133 - protein, 37 aa, Artificial Sequence
  GFR-binding peptide
  MOD_RES (32)..(33): Xaa is C or S
SEVTMNYHYKLVVNKNEDKYLISIPSMKEPVXXPEPI

SEQ ID NO: 65134 - protein, 42 aa, Artificial Sequence; identical to SEQ ID NO: 6088
  GFR-binding peptide
  MOD_RES (1)..(3)..(36)..(37): Xaa is C or S

SEQ ID NO: 65135 - protein, 39 aa, Artificial Sequence
  GFR-binding peptide
  MOD_RES (1)..(3)..(35)..(36): Xaa is C or S
XAXSEVTMNRHKRLVVNKNEDYYLISTASMKEPVXXPEP

SEQ ID NO: 65136 - protein, 40 aa, Artificial Sequence; identical to SEQ ID NO: 27215
  GFR-binding peptide
  MOD_RES (1)..(36)..(37): Xaa is C or S
  MOD_RES (14)..(15)..(16)..(17)..(18): Xaa is A or G
  MOD_RES (19)..(20)..(21)..(22): Xaa is A or G or is absent

SEQ ID NO: 65137 - protein, 30 aa, Artificial Sequence; identical to SEQ ID NO: 6091
  GFR-binding peptide

SEQ ID NO: 65138 - protein, 38 aa, Artificial Sequence; identical to SEQ ID NO: 32217
  GFR-binding peptide
  MOD_RES (1)..(3)..(37)..(38): Xaa is C or S
  MOD_RES (15)..(16)..(17)..(18)..(19): Xaa is A or G
  MOD_RES (20)..(21)..(22)..(23): Xaa is A or G or is absent

SEQ ID NO: 65139 - protein, 37 aa, Artificial Sequence; identical to SEQ ID NO: 13509
  GFR-binding peptide
  MOD_RES (32)..(33): Xaa is C or S

SEQ ID NO: 65140 - protein, 34 aa, Artificial Sequence; identical to SEQ ID NO: 6095
  GFR-binding peptide
  MOD_RES (13)..(14)..(15)..(16)..(17): Xaa is A or G
  MOD_RES (18)..(19)..(20)..(21): Xaa is A or G or is absent

SEQ ID NO: 65141 - protein, 32 aa, Artificial Sequence; identical to SEQ ID NO: 27220
  GFR-binding peptide
  MOD_RES (31)..(32): Xaa is C or S

SEQ ID NO: 65142 - protein, 42 aa, Artificial Sequence; identical to SEQ ID NO: 6100
  GFR-binding peptide
  MOD_RES (2)..(4)..(36)..(37): Xaa is C or S

SEQ ID NO: 65143 - protein, 38 aa, Artificial Sequence; identical to SEQ ID NO: 27227
  GFR-binding peptide
  MOD_RES (1)..(3)..(36)..(37): Xaa is C or S
  MOD_RES (14)..(15)..(16)..(17)..(18): Xaa is A or G
  MOD_RES (19)..(20)..(21)..(22): Xaa is A or G or is absent

SEQ ID NO: 65144 - protein, 33 aa, Artificial Sequence; identical to SEQ ID NO: 27228
  GFR-binding peptide
  MOD_RES (12)..(13)..(14)..(15)..(16): Xaa is A or G
  MOD_RES (17)..(18)..(19)..(20): Xaa is A or G or is absent

SEQ ID NO: 65145 - protein, 36 aa, Artificial Sequence; identical to SEQ ID NO: 27229
  GFR-binding peptide
  MOD_RES (33)..(34): Xaa is C or S
  MOD_RES (11)..(12)..(13)..(14)..(15): Xaa is A or G
  MOD_RES (16)..(17)..(18)..(19): Xaa is A or G or is absent

SEQ ID NO: 65146 - protein, 39 aa, Artificial Sequence; identical to SEQ ID NO: 27232
  GFR-binding peptide
  MOD_RES (2)..(4)..(36)..(37): Xaa is C or S

SEQ ID NO: 65147 - protein, 38 aa, Artificial Sequence; identical to SEQ ID NO: 6102
  GFR-binding peptide
  MOD_RES (1)..(36)..(37): Xaa is C or S
  MOD_RES (14)..(15)..(16)..(17)..(18): Xaa is A or G
  MOD_RES (19)..(20)..(21)..(22): Xaa is A or G or is absent

SEQ ID NO: 65148 - protein, 35 aa, Artificial Sequence; identical to SEQ ID NO: 27235
  GFR-binding peptide
  MOD_RES (2)..(2): Xaa is C or S
  MOD_RES (14)..(15)..(16)..(17)..(18): Xaa is A or G
  MOD_RES (19)..(20)..(21)..(22): Xaa is A or G or is absent

SEQ ID NO: 65149 - protein, 33 aa, Artificial Sequence; identical to SEQ ID NO: 6105
  GFR-binding peptide
  MOD_RES (1)..(3): Xaa is C or S

SEQ ID NO: 65150 - protein, 39 aa, Artificial Sequence; identical to SEQ ID NO: 27239
  GFR-binding peptide
  MOD_RES (1)..(33)..(34): Xaa is C or S

SEQ ID NO: 65151 - protein, 39 aa, Artificial Sequence; identical to SEQ ID NO: 32226
  GFR-binding peptide
  MOD_RES (2)..(4)..(36): Xaa is C or S

SEQ ID NO: 65152 - protein, 45 aa, Artificial Sequence; identical to SEQ ID NO: 27244
  GFR-binding peptide
  MOD_RES (2)..(4)..(39)..(40): Xaa is C or S
  MOD_RES (17)..(18)..(19)..(20)..(21): Xaa is A or G
  MOD_RES (22)..(23)..(24)..(25): Xaa is A or G or is absent

SEQ ID NO: 65153 - protein, 42 aa, Artificial Sequence; identical to SEQ ID NO: 32233
  GFR-binding peptide
  MOD_RES (2)..(36)..(37): Xaa is C or S
  MOD_RES (14)..(15)..(16)..(17)..(18): Xaa is A or G
  MOD_RES (19)..(20)..(21)..(22): Xaa is A or G or is absent

SEQ ID NO: 65154 - protein, 35 aa, Artificial Sequence; identical to SEQ ID NO: 6112
  GFR-binding peptide
  MOD_RES (1)..(35): Xaa is C or S
  MOD_RES (13)..(14)..(15)..(16)..(17): Xaa is A or G
  MOD_RES (18)..(19)..(20)..(21): Xaa is A or G or is absent

SEQ ID NO: 65155 - protein, 35 aa, Artificial Sequence; identical to SEQ ID NO: 6114
  GFR-binding peptide
  MOD_RES (33)..(34): Xaa is C or S
  MOD_RES (11)..(12)..(13)..(14)..(15): Xaa is A or G
  MOD_RES (16)..(17)..(18)..(19): Xaa is A or G or is absent

SEQ ID NO: 65156 - protein, 35 aa, Artificial Sequence; identical to SEQ ID NO: 6117
  GFR-binding peptide
  MOD_RES (1)..(3)..(35): Xaa is C or S

SEQ ID NO: 65157 - protein, 40 aa, Artificial Sequence; identical to SEQ ID NO: 6118
  GFR-binding peptide
  MOD_RES (2)..(4)..(38)..(39): Xaa is C or S
  MOD_RES (16)..(17)..(18)..(19)..(20): Xaa is A or G
  MOD_RES (21)..(22)..(23)..(24): Xaa is A or G or is absent

SEQ ID NO: 65158 - protein, 33 aa, Artificial Sequence; identical to SEQ ID NO: 6119
  GFR-binding peptide
  MOD_RES (1)..(33): Xaa is C or S

SEQ ID NO: 65159 - protein, 40 aa, Artificial Sequence; identical to SEQ ID NO: 32238
  GFR-binding peptide
  MOD_RES (1)..(35)..(36): Xaa is C or S
  MOD_RES (13)..(14)..(15)..(16)..(17): Xaa is A or G
  MOD_RES (18)..(19)..(20)..(21): Xaa is A or G or is absent

SEQ ID NO: 65160 - protein, 34 aa, Artificial Sequence; identical to SEQ ID NO: 6120
  GFR-binding peptide
  MOD_RES (32)..(33): Xaa is C or S

SEQ ID NO: 65161 - protein, 34 aa, Artificial Sequence; identical to SEQ ID NO: 6121
  GFR-binding peptide
  MOD_RES (33)..(34): Xaa is C or S
  MOD_RES (11)..(12)..(13)..(14)..(15): Xaa is A or G
  MOD_RES (16)..(17)..(18)..(19): Xaa is A or G or is absent

SEQ ID NO: 65162 - protein, 37 aa, Artificial Sequence; identical to SEQ ID NO: 6123
  GFR-binding peptide
  MOD_RES (1)..(33)..(34): Xaa is C or S

SEQ ID NO: 65163 - protein, 37 aa, Artificial Sequence; identical to SEQ ID NO: 6124
  GFR-binding peptide
  MOD_RES (2)..(36)..(37): Xaa is C or S
  MOD_RES (14)..(15)..(16)..(17)..(18): Xaa is A or G
  MOD_RES (19)..(20)..(21)..(22): Xaa is A or G or is absent

SEQ ID NO: 65164 - protein, 38 aa, Artificial Sequence; identical to SEQ ID NO: 6128
  GFR-binding peptide
  MOD_RES (2)..(34): Xaa is C or S

SEQ ID NO: 65165 - protein, 32 aa, Artificial Sequence
  GFR-binding peptide
  MOD_RES (1)..(1): Xaa is C or S
XSEVTMNPIKGYVVNKNEDFYLINIPSMKEPV

SEQ ID NO: 65166 - protein, 44 aa, Artificial Sequence; identical to SEQ ID NO: 6130
  GFR-binding peptide
  MOD_RES (2)..(4)..(38): Xaa is C or S
  MOD_RES (16)..(17)..(18)..(19)..(20): Xaa is A or G
  MOD_RES (21)..(22)..(23)..(24): Xaa is A or G or is absent

SEQ ID NO: 65167 - protein, 37 aa, Artificial Sequence; identical to SEQ ID NO: 6131
  GFR-binding peptide
  MOD_RES (2)..(4): Xaa is C or S
  MOD_RES (16)..(17)..(18)..(19)..(20): Xaa is A or G
  MOD_RES (21)..(22)..(23)..(24): Xaa is A or G or is absent

SEQ ID NO: 65168 - protein, 33 aa, Artificial Sequence; identical to SEQ ID NO: 6135
  GFR-binding peptide
  MOD_RES (12)..(13)..(14)..(15)..(16): Xaa is A or G
  MOD_RES (17)..(18)..(19)..(20): Xaa is A or G or is absent

SEQ ID NO: 65169 - protein, 37 aa, Artificial Sequence; identical to SEQ ID NO: 32251
  GFR-binding peptide
  MOD_RES (2)..(4)..(36)..(37): Xaa is C or S

SEQ ID NO: 65170 - protein, 36 aa, Artificial Sequence; identical to SEQ ID NO: 27266
  GFR-binding peptide
  MOD_RES (1)..(3)..(35)..(36): Xaa is C or S

SEQ ID NO: 65171 - protein, 35 aa, Artificial Sequence
  GFR-binding peptide
  MOD_RES (2)..(34)..(35): Xaa is C or S
GXRDVVMGRHKRLIIQQKDNYYLMSTASMKTPTXX

SEQ ID NO: 65172 - protein, 39 aa, Artificial Sequence
  GFR-binding peptide
  MOD_RES (1)..(3)..(37)..(38): Xaa is C or S
  MOD_RES (15)..(16)..(17)..(18)..(19): Xaa is A or G
  MOD_RES (20)..(21)..(22)..(23): Xaa is A or G or is absent
XAXSEVTMNPIKGYXXXXXXXXXFYLINIPSMKEPVXXP

SEQ ID NO: 65173 - protein, 32 aa, Artificial Sequence; identical to SEQ ID NO: 6142
  GFR-binding peptide
  MOD_RES (31)..(32): Xaa is C or S

SEQ ID NO: 65174 - protein, 40 aa, Artificial Sequence; identical to SEQ ID NO: 6144
  GFR-binding peptide
  MOD_RES (1)..(3)..(36)..(37): Xaa is C or S
  MOD_RES (14)..(15)..(16)..(17)..(18): Xaa is A or G
  MOD_RES (19)..(20)..(21)..(22): Xaa is A or G or is absent

SEQ ID NO: 65175 - protein, 38 aa, Artificial Sequence; identical to SEQ ID NO: 6145
  GFR-binding peptide
  MOD_RES (2)..(4)..(36)..(37): Xaa is C or S

SEQ ID NO: 65176 - protein, 38 aa, Artificial Sequence; identical to SEQ ID NO: 6147
  GFR-binding peptide
  MOD_RES (33)..(34): Xaa is C or S
  MOD_RES (11)..(12)..(13)..(14)..(15): Xaa is A or G
  MOD_RES (16)..(17)..(18)..(19): Xaa is A or G or is absent

SEQ ID NO: 65177 - protein, 42 aa, Artificial Sequence; identical to SEQ ID NO: 27277
  GFR-binding peptide
  MOD_RES (2)..(4)..(38)..(39): Xaa is C or S
  MOD_RES (16)..(17)..(18)..(19)..(20): Xaa is A or G
  MOD_RES (21)..(22)..(23)..(24): Xaa is A or G or is absent

SEQ ID NO: 65178 - protein, 34 aa, Artificial Sequence; identical to SEQ ID NO: 6150
  GFR-binding peptide
  MOD_RES (33)..(34): Xaa is C or S
  MOD_RES (11)..(12)..(13)..(14)..(15): Xaa is A or G
  MOD_RES (16)..(17)..(18)..(19): Xaa is A or G or is absent

SEQ ID NO: 65179 - protein, 39 aa, Artificial Sequence; identical to SEQ ID NO: 27282
  GFR-binding peptide
  MOD_RES (1)..(33)..(34): Xaa is C or S

SEQ ID NO: 65180 - protein, 40 aa, Artificial Sequence; identical to SEQ ID NO: 27285
  GFR-binding peptide
  MOD_RES (1)..(35)..(36): Xaa is C or S
  MOD_RES (13)..(14)..(15)..(16)..(17): Xaa is A or G
  MOD_RES (18)..(19)..(20)..(21): Xaa is A or G or is absent

SEQ ID NO: 65181 - protein, 37 aa, Artificial Sequence
  GFR-binding peptide
  MOD_RES (34)..(35): Xaa is C or S
  MOD_RES (12)..(13)..(14)..(15)..(16): Xaa is A or G
  MOD_RES (17)..(18)..(19)..(20): Xaa is A or G or is absent
RDVVMGEYKFKXXXXXXXXXLYLMSIPEMKTPTXXPG

SEQ ID NO: 65182 - protein, 34 aa, Artificial Sequence; identical to SEQ ID NO: 32269
  GFR-binding peptide
  MOD_RES (34)..(34): Xaa is C or S
  MOD_RES (12)..(13)..(14)..(15)..(16): Xaa is A or G
  MOD_RES (17)..(18)..(19)..(20): Xaa is A or G or is absent

SEQ ID NO: 65183 - protein, 39 aa, Artificial Sequence; identical to SEQ ID NO: 27287
  GFR-binding peptide
  MOD_RES (33)..(33): Xaa is C or S
  MOD_RES (11)..(12)..(13)..(14)..(15): Xaa is A or G
  MOD_RES (16)..(17)..(18)..(19): Xaa is A or G or is absent

SEQ ID NO: 65184 - protein, 33 aa, Artificial Sequence; identical to SEQ ID NO: 27291
  GFR-binding peptide
  MOD_RES (32)..(33): Xaa is C or S

SEQ ID NO: 65185 - protein, 40 aa, Artificial Sequence
  GFR-binding peptide
  MOD_RES (1)..(3)..(36)..(37): Xaa is C or S
  MOD_RES (14)..(15)..(16)..(17)..(18): Xaa is A or G
  MOD_RES (19)..(20)..(21)..(22): Xaa is A or G or is absent
XKXSRVIMPIKGYXXXXXXXXXFYLINIPSLAQPVXXPAA

SEQ ID NO: 65186 - protein, 38 aa, Artificial Sequence; identical to SEQ ID NO: 27292
  GFR-binding peptide
  MOD_RES (2)..(4)..(36)..(37): Xaa is C or S

SEQ ID NO: 65187 - protein, 36 aa, Artificial Sequence
  GFR-binding peptide
  MOD_RES (1)..(3): Xaa is C or S
  MOD_RES (15)..(16)..(17)..(18)..(19): Xaa is A or G
  MOD_RES (20)..(21)..(22)..(23): Xaa is A or G or is absent
XAXSEVTMNPIKGYXXXXXXXXXFYLINIPSMKEPV

SEQ ID NO: 65188 - protein, 39 aa, Artificial Sequence
  GFR-binding peptide
  MOD_RES (33)..(34): Xaa is C or S
  MOD_RES (11)..(12)..(13)..(14)..(15): Xaa is A or G
  MOD_RES (16)..(17)..(18)..(19): Xaa is A or G or is absent
EVVMDEYKFKXXXXXXXXXLYLISIPELRTPVXXTPPTS

SEQ ID NO: 65189 - protein, 42 aa, Artificial Sequence; identical to SEQ ID NO: 32277
  GFR-binding peptide
  MOD_RES (1)..(3)..(37)..(38): Xaa is C or S
  MOD_RES (15)..(16)..(17)..(18)..(19): Xaa is A or G
  MOD_RES (20)..(21)..(22)..(23): Xaa is A or G or is absent

SEQ ID NO: 65190 - protein, 34 aa, Artificial Sequence; identical to SEQ ID NO: 27299
  GFR-binding peptide
  MOD_RES (1)..(3): Xaa is C or S

SEQ ID NO: 65191 - protein, 41 aa, Artificial Sequence; identical to SEQ ID NO: 13560
  GFR-binding peptide
  MOD_RES (2)..(36)..(37): Xaa is C or S
  MOD_RES (14)..(15)..(16)..(17)..(18): Xaa is A or G
  MOD_RES (19)..(20)..(21)..(22): Xaa is A or G or is absent

SEQ ID NO: 65192 - protein, 40 aa, Artificial Sequence; identical to SEQ ID NO: 27302
  GFR-binding peptide
  MOD_RES (2)..(34)..(35): Xaa is C or S

SEQ ID NO: 65193 - protein, 36 aa, Artificial Sequence; identical to SEQ ID NO: 6163
  GFR-binding peptide
  MOD_RES (31)..(31): Xaa is C or S

SEQ ID NO: 65194 - protein, 34 aa, Artificial Sequence; identical to SEQ ID NO: 27305
  GFR-binding peptide
  MOD_RES (32)..(32): Xaa is C or S

SEQ ID NO: 65195 - protein, 39 aa, Artificial Sequence; identical to SEQ ID NO: 6165
  GFR-binding peptide
  MOD_RES (1)..(3)..(37)..(38): Xaa is C or S
  MOD_RES (15)..(16)..(17)..(18)..(19): Xaa is A or G
  MOD_RES (20)..(21)..(22)..(23): Xaa is A or G or is absent

SEQ ID NO: 65196 - protein, 41 aa, Artificial Sequence; identical to SEQ ID NO: 6166
  GFR-binding peptide
  MOD_RES (1)..(3)..(36)..(37): Xaa is C or S
  MOD_RES (14)..(15)..(16)..(17)..(18): Xaa is A or G
  MOD_RES (19)..(20)..(21)..(22): Xaa is A or G or is absent

SEQ ID NO: 65197 - protein, 39 aa, Artificial Sequence
  GFR-binding peptide
  MOD_RES (2)..(33)..(34): Xaa is C or S
KXSKVVMPIKGYVKPTRGVFYLINIPSLDQPVXXPSASA

SEQ ID NO: 65198 - protein, 36 aa, Artificial Sequence; identical to SEQ ID NO: 6172
  GFR-binding peptide
  MOD_RES (2)..(34)..(35): Xaa is C or S

SEQ ID NO: 65199 - protein, 35 aa, Artificial Sequence; identical to SEQ ID NO: 6174
  GFR-binding peptide
  MOD_RES (2)..(4)..(35): Xaa is C or S

SEQ ID NO: 65200 - protein, 36 aa, Artificial Sequence; identical to SEQ ID NO: 6176
  GFR-binding peptide
  MOD_RES (1)..(35)..(36): Xaa is C or S
  MOD_RES (13)..(14)..(15)..(16)..(17): Xaa is A or G
  MOD_RES (18)..(19)..(20)..(21): Xaa is A or G or is absent

SEQ ID NO: 65201 - protein, 35 aa, Artificial Sequence
  GFR-binding peptide
  MOD_RES (2)..(34)..(35): Xaa is C or S
GXRDVVMGEYKFKIIQQKDNLYLMSIPEMKTPTXX

SEQ ID NO: 65202 - protein, 36 aa, Artificial Sequence; identical to SEQ ID NO: 32293
  GFR-binding peptide
  MOD_RES (2)..(34): Xaa is C or S

SEQ ID NO: 65203 - protein, 36 aa, Artificial Sequence; identical to SEQ ID NO: 27313
  GFR-binding peptide
  MOD_RES (2)..(36): Xaa is C or S
  MOD_RES (14)..(15)..(16)..(17)..(18): Xaa is A or G
  MOD_RES (19)..(20)..(21)..(22): Xaa is A or G or is absent

SEQ ID NO: 65204 - protein, 36 aa, Artificial Sequence
  GFR-binding peptide
  MOD_RES (31)..(32): Xaa is C or S
EVTMNYHYKLVVNKNEDKYLISIPSMKEPVXXPEPI

SEQ ID NO: 65205 - protein, 37 aa, Artificial Sequence; identical to SEQ ID NO: 27316
  GFR-binding peptide
  MOD_RES (2)..(34)..(35): Xaa is C or S

SEQ ID NO: 65206 - protein, 33 aa, Artificial Sequence; identical to SEQ ID NO: 6179
  GFR-binding peptide
  MOD_RES (31)..(32): Xaa is C or S

SEQ ID NO: 65207 - protein, 38 aa, Artificial Sequence
  GFR-binding peptide
  MOD_RES (2)..(35)..(36): Xaa is C or S
  MOD_RES (13)..(14)..(15)..(16)..(17): Xaa is A or G
  MOD_RES (18)..(19)..(20)..(21): Xaa is A or G or is absent
KXSRVIMPIKGYXXXXXXXXXFYLINIPSLAQPVXXPA

SEQ ID NO: 65208 - protein, 40 aa, Artificial Sequence; identical to SEQ ID NO: 32303
  GFR-binding peptide
  MOD_RES (6)..(7): Xaa is C or S
  MOD_RES (21)..(22)..(23)..(24)..(25): Xaa is A or G
  MOD_RES (26)..(27)..(28)..(29): Xaa is A or G or is absent

SEQ ID NO: 65209 - protein, 34 aa, Artificial Sequence; identical to SEQ ID NO: 6184
  GFR-binding peptide
  MOD_RES (14)..(15)..(16)..(17)..(18): Xaa is A or G
  MOD_RES (19)..(20)..(21)..(22): Xaa is A or G or is absent

SEQ ID NO: 65210 - protein, 31 aa, Artificial Sequence
  GFR-binding peptide
  MOD_RES (1)..(1): Xaa is C or S
XVPQALSPINILYFVGRKPKVYGKIPMIVRS

SEQ ID NO: 65211 - protein, 36 aa, Artificial Sequence
  GFR-binding peptide
  MOD_RES (5)..(6): Xaa is C or S
IPEPXXVPEKMEPISILYLDENKNVVKFKYENMTVE

SEQ ID NO: 65212 - protein, 32 aa, Artificial Sequence
  GFR-binding peptide
  MOD_RES (1)..(2): Xaa is C or S
XXVPEKMSATSILYYDENKNVVLRKHRNMTVE

SEQ ID NO: 65213 - protein, 42 aa, Artificial Sequence; identical to SEQ ID NO: 32308
  GFR-binding peptide
  MOD_RES (5)..(6)..(40)..(42): Xaa is C or S
  MOD_RES (20)..(21)..(22)..(23)..(24): Xaa is A or G
  MOD_RES (25)..(26)..(27)..(28): Xaa is A or G or is absent

SEQ ID NO: 65214 - protein, 38 aa, Artificial Sequence; identical to SEQ ID NO: 6190
  GFR-binding peptide
  MOD_RES (2)..(3)..(36)..(38): Xaa is C or S
  MOD_RES (17)..(18)..(19)..(20)..(21): Xaa is A or G
  MOD_RES (22)..(23)..(24)..(25): Xaa is A or G or is absent

SEQ ID NO: 65215 - protein, 40 aa, Artificial Sequence; identical to SEQ ID NO: 27328
  GFR-binding peptide
  MOD_RES (4)..(5)..(37)..(39): Xaa is C or S

SEQ ID NO: 65216 - protein, 38 aa, Artificial Sequence
  GFR-binding peptide
  MOD_RES (5)..(6): Xaa is C or S
  MOD_RES (20)..(21)..(22)..(23)..(24): Xaa is A or G
  MOD_RES (25)..(26)..(27)..(28): Xaa is A or G or is absent
SASPXXVPQDLSPINILYFXXXXXXXXXYGKIPMVVKS

SEQ ID NO: 65217 - protein, 39 aa, Artificial Sequence
  GFR-binding peptide
  MOD_RES (6)..(7)..(39): Xaa is C or S
GIPEPXXVPEKMNAISILYFDENKNVVLKKYRNMTVESX

SEQ ID NO: 65218 - protein, 36 aa, Artificial Sequence; identical to SEQ ID NO: 6192
  GFR-binding peptide
  MOD_RES (3)..(4)..(36): Xaa is C or S

SEQ ID NO: 65219 - protein, 32 aa, Artificial Sequence; identical to SEQ ID NO: 6193
  GFR-binding peptide
  MOD_RES (1)..(32): Xaa is C or S

SEQ ID NO: 65220 - protein, 37 aa, Artificial Sequence; identical to SEQ ID NO: 6194
  GFR-binding peptide
  MOD_RES (4)..(5): Xaa is C or S
  MOD_RES (19)..(20)..(21)..(22)..(23): Xaa is A or G
  MOD_RES (24)..(25)..(26)..(27): Xaa is A or G or is absent

SEQ ID NO: 65221 - protein, 35 aa, Artificial Sequence; identical to SEQ ID NO: 6196
  GFR-binding peptide
  MOD_RES (1)..(35): Xaa is C or S
  MOD_RES (15)..(16)..(17)..(18)..(19): Xaa is A or G
  MOD_RES (20)..(21)..(22)..(23): Xaa is A or G or is absent

SEQ ID NO: 65222 - protein, 39 aa, Artificial Sequence; identical to SEQ ID NO: 6197
  GFR-binding peptide
  MOD_RES (5)..(6)..(39): Xaa is C or S
  MOD_RES (20)..(21)..(22)..(23)..(24): Xaa is A or G
  MOD_RES (25)..(26)..(27)..(28): Xaa is A or G or is absent

SEQ ID NO: 65223 - protein, 33 aa, Artificial Sequence
  GFR-binding peptide
  MOD_RES (1)..(33): Xaa is C or S
XVPTRLSPISILYKDSANNVVLKYHYDMVVESX

SEQ ID NO: 65224 - protein, 32 aa, Artificial Sequence
  GFR-binding peptide
  MOD_RES (1)..(1): Xaa is C or S
XVPTRLEPISILYLDSANNVVKFKYEDMVVES

SEQ ID NO: 65225 - protein, 35 aa, Artificial Sequence; identical to SEQ ID NO: 6199
  GFR-binding peptide
  MOD_RES (4)..(5): Xaa is C or S

SEQ ID NO: 65226 - protein, 35 aa, Artificial Sequence; identical to SEQ ID NO: 32323
  GFR-binding peptide
  MOD_RES (2)..(3): Xaa is C or S
  MOD_RES (17)..(18)..(19)..(20)..(21): Xaa is A or G
  MOD_RES (22)..(23)..(24)..(25): Xaa is A or G or is absent

SEQ ID NO: 65227 - protein, 36 aa, Artificial Sequence; identical to SEQ ID NO: 32326
  GFR-binding peptide
  MOD_RES (4)..(5): Xaa is C or S

SEQ ID NO: 65228 - protein, 37 aa, Artificial Sequence; identical to SEQ ID NO: 27341
  GFR-binding peptide
  MOD_RES (4)..(5)..(36): Xaa is C or S

SEQ ID NO: 65229 - protein, 33 aa, Artificial Sequence; identical to SEQ ID NO: 6205
  GFR-binding peptide
  MOD_RES (14)..(15)..(16)..(17)..(18): Xaa is A or G
  MOD_RES (19)..(20)..(21)..(22): Xaa is A or G or is absent

SEQ ID NO: 65230 - protein, 38 aa, Artificial Sequence; identical to SEQ ID NO: 6207
  GFR-binding peptide
  MOD_RES (3)..(4)..(38): Xaa is C or S
  MOD_RES (18)..(19)..(20)..(21)..(22): Xaa is A or G
  MOD_RES (23)..(24)..(25)..(26): Xaa is A or G or is absent

SEQ ID NO: 65231 - protein, 33 aa, Artificial Sequence
  GFR-binding peptide
  MOD_RES (1)..(2)..(33): Xaa is C or S
XXVPQALSPINILYFVGRKPKVYGKIPMIVRSX

SEQ ID NO: 65232 - protein, 39 aa, Artificial Sequence; identical to SEQ ID NO: 6208
  GFR-binding peptide
  MOD_RES (4)..(5)..(37)..(39): Xaa is C or S

SEQ ID NO: 65233 - protein, 34 aa, Artificial Sequence; identical to SEQ ID NO: 27348
  GFR-binding peptide
  MOD_RES (1)..(2)..(34): Xaa is C or S

SEQ ID NO: 65234 - protein, 32 aa, Artificial Sequence; identical to SEQ ID NO: 6210
  GFR-binding peptide
  MOD_RES (1)..(2): Xaa is C or S

SEQ ID NO: 65235 - protein, 41 aa, Artificial Sequence; identical to SEQ ID NO: 6212
  GFR-binding peptide
  MOD_RES (6)..(7)..(41): Xaa is C or S
  MOD_RES (21)..(22)..(23)..(24)..(25): Xaa is A or G
  MOD_RES (26)..(27)..(28)..(29): Xaa is A or G or is absent

SEQ ID NO: 65236 - protein, 43 aa, Artificial Sequence
  GFR-binding peptide
  MOD_RES (6)..(7)..(41)..(43): Xaa is C or S
  MOD_RES (21)..(22)..(23)..(24)..(25): Xaa is A or G
  MOD_RES (26)..(27)..(28)..(29): Xaa is A or G or is absent
GSAGPXXTPTKMSATSMLYYXXXXXXXXXLRKHRGMVVDRXGX

SEQ ID NO: 65237 - protein, 43 aa, Artificial Sequence; identical to SEQ ID NO: 32336
  GFR-binding peptide
  MOD_RES (6)..(7)..(41)..(43): Xaa is C or S
  MOD_RES (21)..(22)..(23)..(24)..(25): Xaa is A or G
  MOD_RES (26)..(27)..(28)..(29): Xaa is A or G or is absent

SEQ ID NO: 65238 - protein, 39 aa, Artificial Sequence
  GFR-binding peptide
  MOD_RES (5)..(6): Xaa is C or S
  MOD_RES (20)..(21)..(22)..(23)..(24): Xaa is A or G
  MOD_RES (25)..(26)..(27)..(28): Xaa is A or G or is absent
ASKAXXVPTKLSATSILYYXXXXXXXXXLRKHRGMAVSE

SEQ ID NO: 65239 - protein, 35 aa, Artificial Sequence; identical to SEQ ID NO: 27354
  GFR-binding peptide
  MOD_RES (1)..(33)..(35): Xaa is C or S

SEQ ID NO: 65240 - protein, 44 aa, Artificial Sequence
  GFR-binding peptide
  MOD_RES (6)..(7)..(41)..(43): Xaa is C or S
  MOD_RES (21)..(22)..(23)..(24)..(25): Xaa is A or G
  MOD_RES (26)..(27)..(28)..(29): Xaa is A or G or is absent
GSAGPXXTPTKMEPISMLYLXXXXXXXXXKFKYEGMVVDRXGXS

SEQ ID NO: 65241 - protein, 36 aa, Artificial Sequence; identical to SEQ ID NO: 13601
  GFR-binding peptide
  MOD_RES (1)..(35): Xaa is C or S
  MOD_RES (15)..(16)..(17)..(18)..(19): Xaa is A or G
  MOD_RES (20)..(21)..(22)..(23): Xaa is A or G or is absent

SEQ ID NO: 65242 - protein, 40 aa, Artificial Sequence; identical to SEQ ID NO: 32338
  GFR-binding peptide
  MOD_RES (4)..(38)..(40): Xaa is C or S
  MOD_RES (18)..(19)..(20)..(21)..(22): Xaa is A or G
  MOD_RES (23)..(24)..(25)..(26): Xaa is A or G or is absent

SEQ ID NO: 65243 - protein, 43 aa, Artificial Sequence; identical to SEQ ID NO: 6217
  GFR-binding peptide
  MOD_RES (5)..(6)..(40)..(42): Xaa is C or S
  MOD_RES (20)..(21)..(22)..(23)..(24): Xaa is A or G
  MOD_RES (25)..(26)..(27)..(28): Xaa is A or G or is absent

SEQ ID NO: 65244 - protein, 38 aa, Artificial Sequence
  GFR-binding peptide
  MOD_RES (1)..(2)..(36)..(38): Xaa is C or S
  MOD_RES (16)..(17)..(18)..(19)..(20): Xaa is A or G
  MOD_RES (21)..(22)..(23)..(24): Xaa is A or G or is absent
XXVPTRLEPISILYLXXXXXXXXXKFKYEDMVVESXGX

SEQ ID NO: 65245 - protein, 35 aa, Artificial Sequence; identical to SEQ ID NO: 6221
  GFR-binding peptide
  MOD_RES (2)..(3)..(35): Xaa is C or S

SEQ ID NO: 65246 - protein, 34 aa, Artificial Sequence
  GFR-binding peptide
  MOD_RES (2)..(3)..(34): Xaa is C or S
PXXVPQDLSPINILYFVGRTPKVYGKIPMVVKSX

SEQ ID NO: 65247 - protein, 37 aa, Artificial Sequence
  GFR-binding peptide
  MOD_RES (5)..(6): Xaa is C or S
IPEPXXVPEKMNAISILYFDENKNVVLKKYRNMTVES

SEQ ID NO: 65248 - protein, 31 aa, Artificial Sequence; identical to SEQ ID NO: 27359
  GFR-binding peptide
  MOD_RES (1)..(1): Xaa is C or S

SEQ ID NO: 65249 - protein, 35 aa, Artificial Sequence
  GFR-binding peptide
  MOD_RES (3)..(4): Xaa is C or S
EPXXVPEKMSATSILYYDENKNVVLRKHRNMTVES

SEQ ID NO: 65250 - protein, 32 aa, Artificial Sequence; identical to SEQ ID NO: 6225
  GFR-binding peptide
  MOD_RES (32)..(32): Xaa is C or S

SEQ ID NO: 65251 - protein, 39 aa, Artificial Sequence; identical to SEQ ID NO: 6229
  GFR-binding peptide
  MOD_RES (1)..(2)..(36)..(38): Xaa is C or S
  MOD_RES (16)..(17)..(18)..(19)..(20): Xaa is A or G
  MOD_RES (21)..(22)..(23)..(24): Xaa is A or G or is absent

SEQ ID NO: 65252 - protein, 37 aa, Artificial Sequence; identical to SEQ ID NO: 6230
  GFR-binding peptide
  MOD_RES (34)..(36): Xaa is C or S
  MOD_RES (14)..(15)..(16)..(17)..(18): Xaa is A or G
  MOD_RES (19)..(20)..(21)..(22): Xaa is A or G or is absent

SEQ ID NO: 65253 - protein, 42 aa, Artificial Sequence; identical to SEQ ID NO: 32350
  GFR-binding peptide
  MOD_RES (4)..(5)..(39)..(41): Xaa is C or S
  MOD_RES (19)..(20)..(21)..(22)..(23): Xaa is A or G
  MOD_RES (24)..(25)..(26)..(27): Xaa is A or G or is absent

SEQ ID NO: 65254 - protein, 38 aa, Artificial Sequence; identical to SEQ ID NO: 6232
  GFR-binding peptide
  MOD_RES (4)..(5)..(37): Xaa is C or S

SEQ ID NO: 65255 - protein, 37 aa, Artificial Sequence; identical to SEQ ID NO: 32352
  GFR-binding peptide
  MOD_RES (6)..(7): Xaa is C or S

SEQ ID NO: 65256 - protein, 37 aa, Artificial Sequence
  GFR-binding peptide
  MOD_RES (6)..(7): Xaa is C or S
GSAGPXXTPTKMSPISMLYKNDKQQIILKYHYGMVVD

SEQ ID NO: 65257 - protein, 35 aa, Artificial Sequence; identical to SEQ ID NO: 27368
  GFR-binding peptide
  MOD_RES (1)..(2): Xaa is C or S
  MOD_RES (16)..(17)..(18)..(19)..(20): Xaa is A or G
  MOD_RES (21)..(22)..(23)..(24): Xaa is A or G or is absent

SEQ ID NO: 65258 - protein, 37 aa, Artificial Sequence
  GFR-binding peptide
  MOD_RES (4)..(5): Xaa is C or S
  MOD_RES (19)..(20)..(21)..(22)..(23): Xaa is A or G
  MOD_RES (24)..(25)..(26)..(27): Xaa is A or G or is absent
PASXXVPARLSATSILYYXXXXXXXXXLRKHRDMVVE

SEQ ID NO: 65259 - protein, 36 aa, Artificial Sequence; identical to SEQ ID NO: 6235
  GFR-binding peptide
  MOD_RES (1)..(2)..(36): Xaa is C or S
  MOD_RES (16)..(17)..(18)..(19)..(20): Xaa is A or G
  MOD_RES (21)..(22)..(23)..(24): Xaa is A or G or is absent

SEQ ID NO: 65260 - protein, 39 aa, Artificial Sequence; identical to SEQ ID NO: 32357
  GFR-binding peptide
  MOD_RES (5)..(6): Xaa is C or S
  MOD_RES (20)..(21)..(22)..(23)..(24): Xaa is A or G
  MOD_RES (25)..(26)..(27)..(28): Xaa is A or G or is absent

SEQ ID NO: 65261 - protein, 34 aa, Artificial Sequence; identical to SEQ ID NO: 57288
  GFR-binding peptide
  MOD_RES (2)..(3)..(34): Xaa is C or S

SEQ ID NO: 65262 - protein, 40 aa, Artificial Sequence; identical to SEQ ID NO: 27377
  GFR-binding peptide
  MOD_RES (5)..(6)..(38)..(40): Xaa is C or S

SEQ ID NO: 65263 - protein, 40 aa, Artificial Sequence; identical to SEQ ID NO: 6239
  GFR-binding peptide
  MOD_RES (4)..(5)..(38)..(40): Xaa is C or S

SEQ ID NO: 65264 - protein, 36 aa, Artificial Sequence; identical to SEQ ID NO: 6240
  GFR-binding peptide
  MOD_RES (34)..(36): Xaa is C or S
  MOD_RES (14)..(15)..(16)..(17)..(18): Xaa is A or G
  MOD_RES (19)..(20)..(21)..(22): Xaa is A or G or is absent

SEQ ID NO: 65265 - protein, 43 aa, Artificial Sequence; identical to SEQ ID NO: 27381
  GFR-binding peptide
  MOD_RES (5)..(6)..(40)..(42): Xaa is C or S
  MOD_RES (20)..(21)..(22)..(23)..(24): Xaa is A or G
  MOD_RES (25)..(26)..(27)..(28): Xaa is A or G or is absent

SEQ ID NO: 65266 - protein, 37 aa, Artificial Sequence; identical to SEQ ID NO: 27383
  GFR-binding peptide
  MOD_RES (2)..(3)..(36): Xaa is C or S
  MOD_RES (17)..(18)..(19)..(20)..(21): Xaa is A or G
  MOD_RES (22)..(23)..(24)..(25): Xaa is A or G or is absent

SEQ ID NO: 65267 - protein, 38 aa, Artificial Sequence
  GFR-binding peptide
  MOD_RES (3)..(4)..(37): Xaa is C or S
  MOD_RES (18)..(19)..(20)..(21)..(22): Xaa is A or G
  MOD_RES (23)..(24)..(25)..(26): Xaa is A or G or is absent
STXXAPVKTSATSMLYYXXXXXXXXXLRKHRMIVEEXG

SEQ ID NO: 65268 - protein, 37 aa, Artificial Sequence; identical to SEQ ID NO: 32371
  GFR-binding peptide
  MOD_RES (3)..(4)..(36): Xaa is C or S

SEQ ID NO: 65269 - protein, 36 aa, Artificial Sequence; identical to SEQ ID NO: 32372
  GFR-binding peptide
  MOD_RES (3)..(4): Xaa is C or S
  MOD_RES (18)..(19)..(20)..(21)..(22): Xaa is A or G
  MOD_RES (23)..(24)..(25)..(26): Xaa is A or G or is absent

SEQ ID NO: 65270 - protein, 37 aa, Artificial Sequence; identical to SEQ ID NO: 27386
  GFR-binding peptide
  MOD_RES (3)..(4)..(36): Xaa is C or S

SEQ ID NO: 65271 - protein, 30 aa, Artificial Sequence
  GFR-binding peptide
VSQDLSPINILYFIGKTPKIYGKIPMIVKS

SEQ ID NO: 65272 - protein, 30 aa, Artificial Sequence; identical to SEQ ID NO: 6247
  GFR-binding peptide

SEQ ID NO: 65273 - protein, 34 aa, Artificial Sequence
  GFR-binding peptide
  MOD_RES (3)..(4): Xaa is C or S
SPXXVPQDLSPINILYFVGRTPKVYGKIPMVVKS

SEQ ID NO: 65274 - protein, 37 aa, Artificial Sequence
  GFR-binding peptide
  MOD_RES (5)..(6): Xaa is C or S
IPEPXXVPEKMEPISILYLDENKNVVKFKYENMTVES

SEQ ID NO: 65275 - protein, 43 aa, Artificial Sequence; identical to SEQ ID NO: 6253
  GFR-binding peptide
  MOD_RES (5)..(6)..(40)..(42): Xaa is C or S
  MOD_RES (20)..(21)..(22)..(23)..(24): Xaa is A or G
  MOD_RES (25)..(26)..(27)..(28): Xaa is A or G or is absent

SEQ ID NO: 65276 - protein, 36 aa, Artificial Sequence; identical to SEQ ID NO: 27393
  GFR-binding peptide
  MOD_RES (2)..(3): Xaa is C or S
  MOD_RES (17)..(18)..(19)..(20)..(21): Xaa is A or G
  MOD_RES (22)..(23)..(24)..(25): Xaa is A or G or is absent

SEQ ID NO: 65277 - protein, 34 aa, Artificial Sequence
  GFR-binding peptide
  MOD_RES (1)..(34): Xaa is C or S
  MOD_RES (15)..(16)..(17)..(18)..(19): Xaa is A or G
  MOD_RES (20)..(21)..(22)..(23): Xaa is A or G or is absent
XAPVKTSATSMLYYXXXXXXXXXLRKHRMIVEEX

SEQ ID NO: 65278 - protein, 41 aa, Artificial Sequence
  GFR-binding peptide
  MOD_RES (5)..(6)..(40): Xaa is C or S
  MOD_RES (20)..(21)..(22)..(23)..(24): Xaa is A or G
  MOD_RES (25)..(26)..(27)..(28): Xaa is A or G or is absent
IPEPXXVPEKMSPISILYKXXXXXXXXXLKYHYNMTVESXA

SEQ ID NO: 65279 - protein, 33 aa, Artificial Sequence; identical to SEQ ID NO: 6261
  GFR-binding peptide
  MOD_RES (1)..(1): Xaa is C or S
  MOD_RES (15)..(16)..(17)..(18)..(19): Xaa is A or G
  MOD_RES (20)..(21)..(22)..(23): Xaa is A or G or is absent

SEQ ID NO: 65280 - protein, 38 aa, Artificial Sequence; identical to SEQ ID NO: 6262
  GFR-binding peptide
  MOD_RES (4)..(5)..(38): Xaa is C or S
  MOD_RES (19)..(20)..(21)..(22)..(23): Xaa is A or G
  MOD_RES (24)..(25)..(26)..(27): Xaa is A or G or is absent

SEQ ID NO: 65281 - protein, 37 aa, Artificial Sequence; identical to SEQ ID NO: 6263
  GFR-binding peptide
  MOD_RES (1)..(35)..(37): Xaa is C or S
  MOD_RES (15)..(16)..(17)..(18)..(19): Xaa is A or G
  MOD_RES (20)..(21)..(22)..(23): Xaa is A or G or is absent

SEQ ID NO: 65282 - protein, 34 aa, Artificial Sequence; identical to SEQ ID NO: 32399
  GFR-binding peptide
  MOD_RES (1)..(33): Xaa is C or S

SEQ ID NO: 65283 - protein, 39 aa, Artificial Sequence
  GFR-binding peptide
  MOD_RES (6)..(7): Xaa is C or S
  MOD_RES (21)..(22)..(23)..(24)..(25): Xaa is A or G
  MOD_RES (26)..(27)..(28)..(29): Xaa is A or G or is absent
AAPASXXVPARLSATSILYYXXXXXXXXXLRKHRDMVVE

SEQ ID NO: 65284 - protein, 39 aa, Artificial Sequence; identical to SEQ ID NO: 6264
  GFR-binding peptide
  MOD_RES (3)..(4)..(38): Xaa is C or S
  MOD_RES (18)..(19)..(20)..(21)..(22): Xaa is A or G
  MOD_RES (23)..(24)..(25)..(26): Xaa is A or G or is absent

SEQ ID NO: 65285 - protein, 34 aa, Artificial Sequence; identical to SEQ ID NO: 57320
  GFR-binding peptide
  MOD_RES (31)..(33): Xaa is C or S

SEQ ID NO: 65286 - protein, 40 aa, Artificial Sequence; identical to SEQ ID NO: 32403
  GFR-binding peptide
  MOD_RES (4)..(5)..(37)..(39): Xaa is C or S

SEQ ID NO: 65287 - protein, 39 aa, Artificial Sequence; identical to SEQ ID NO: 6266
  GFR-binding peptide
  MOD_RES (6)..(7): Xaa is C or S
  MOD_RES (21)..(22)..(23)..(24)..(25): Xaa is A or G
  MOD_RES (26)..(27)..(28)..(29): Xaa is A or G or is absent

SEQ ID NO: 65288 - protein, 39 aa, Artificial Sequence; identical to SEQ ID NO: 27405
  GFR-binding peptide
  MOD_RES (6)..(7): Xaa is C or S
  MOD_RES (21)..(22)..(23)..(24)..(25): Xaa is A or G
  MOD_RES (26)..(27)..(28)..(29): Xaa is A or G or is absent

SEQ ID NO: 65289 - protein, 33 aa, Artificial Sequence; identical to SEQ ID NO: 27406
  GFR-binding peptide
  MOD_RES (1)..(33): Xaa is C or S

SEQ ID NO: 65290 - protein, 39 aa, Artificial Sequence; identical to SEQ ID NO: 57326
  GFR-binding peptide
  MOD_RES (3)..(4)..(38): Xaa is C or S
  MOD_RES (18)..(19)..(20)..(21)..(22): Xaa is A or G
  MOD_RES (23)..(24)..(25)..(26): Xaa is A or G or is absent

SEQ ID NO: 65291 - protein, 36 aa, Artificial Sequence
  GFR-binding peptide
  MOD_RES (3)..(4): Xaa is C or S
  MOD_RES (18)..(19)..(20)..(21)..(22): Xaa is A or G
  MOD_RES (23)..(24)..(25)..(26): Xaa is A or G or is absent
EPXXVPEKMSPISILYKXXXXXXXXXLKYHYNMTVE

SEQ ID NO: 65292 - protein, 32 aa, Artificial Sequence; identical to SEQ ID NO: 32410
  GFR-binding peptide
  MOD_RES (1)..(1): Xaa is C or S

SEQ ID NO: 65293 - protein, 33 aa, Artificial Sequence
  GFR-binding peptide
  MOD_RES (1)..(2): Xaa is C or S
XXVPEKMSATSILYYDENKNVVLRKHRNMTVES

SEQ ID NO: 65294 - protein, 36 aa, Artificial Sequence; identical to SEQ ID NO: 27407
  GFR-binding peptide
  MOD_RES (1)..(2)..(33)..(35): Xaa is C or S

SEQ ID NO: 65295 - protein, 37 aa, Artificial Sequence; identical to SEQ ID NO: 6272
  GFR-binding peptide
  MOD_RES (5)..(6): Xaa is C or S

SEQ ID NO: 65296 - protein, 41 aa, Artificial Sequence
  GFR-binding peptide
  MOD_RES (3)..(4)..(38)..(40): Xaa is C or S
  MOD_RES (18)..(19)..(20)..(21)..(22): Xaa is A or G
  MOD_RES (23)..(24)..(25)..(26): Xaa is A or G or is absent
EPXXVPEKMNAISILYFXXXXXXXXXLKKYRNMTVESXAXR

SEQ ID NO: 65297 - protein, 38 aa, Artificial Sequence; identical to SEQ ID NO: 6276
  GFR-binding peptide
  MOD_RES (5)..(6)..(38): Xaa is C or S

SEQ ID NO: 65298 - protein, 39 aa, Artificial Sequence; identical to SEQ ID NO: 6278
  GFR-binding peptide
  MOD_RES (5)..(6)..(38): Xaa is C or S

SEQ ID NO: 65299 - protein, 42 aa, Artificial Sequence
  GFR-binding peptide
  MOD_RES (6)..(7)..(41): Xaa is C or S
  MOD_RES (21)..(22)..(23)..(24)..(25): Xaa is A or G
  MOD_RES (26)..(27)..(28)..(29): Xaa is A or G or is absent
GIPEPXXVPEKMSPINILYFXXXXXXXXXYGKIPNMTVESXA

SEQ ID NO: 65300 - protein, 37 aa, Artificial Sequence; identical to SEQ ID NO: 6279
  GFR-binding peptide
  MOD_RES (1)..(34)..(36): Xaa is C or S

SEQ ID NO: 65301 - protein, 40 aa, Artificial Sequence
  GFR-binding peptide
  MOD_RES (2)..(3)..(37)..(39): Xaa is C or S
  MOD_RES (17)..(18)..(19)..(20)..(21): Xaa is A or G
  MOD_RES (22)..(23)..(24)..(25): Xaa is A or G or is absent
PXXVPEKMNAISILYFXXXXXXXXXLKKYRNMTVESXAXR

SEQ ID NO: 65302 - protein, 33 aa, Artificial Sequence
  GFR-binding peptide
  MOD_RES (14)..(15)..(16)..(17)..(18): Xaa is A or G
  MOD_RES (19)..(20)..(21)..(22): Xaa is A or G or is absent
VPTRLSPISILYKXXXXXXXXXLKYHYDMVVES

SEQ ID NO: 65303 - protein, 37 aa, Artificial Sequence; identical to SEQ ID NO: 6285
  GFR-binding peptide
  MOD_RES (6)..(7): Xaa is C or S

SEQ ID NO: 65304 - protein, 44 aa, Artificial Sequence; identical to SEQ ID NO: 6288
  GFR-binding peptide
  MOD_RES (6)..(7)..(42)..(44): Xaa is C or S
  MOD_RES (21)..(22)..(23)..(24)..(25): Xaa is A or G
  MOD_RES (26)..(27)..(28)..(29): Xaa is A or G or is absent

SEQ ID NO: 65305 - protein, 37 aa, Artificial Sequence
  GFR-binding peptide
  MOD_RES (4)..(5)..(36): Xaa is C or S
ASPXXVPQDLSPINILYFVGRTPKVYGKIPMVVKSXK

SEQ ID NO: 65306 - protein, 39 aa, Artificial Sequence; identical to SEQ ID NO: 6289
  GFR-binding peptide
  MOD_RES (2)..(3)..(37)..(39): Xaa is C or S
  MOD_RES (17)..(18)..(19)..(20)..(21): Xaa is A or G
  MOD_RES (22)..(23)..(24)..(25): Xaa is A or G or is absent

SEQ ID NO: 65307 - protein, 40 aa, Artificial Sequence; identical to SEQ ID NO: 6291
  GFR-binding peptide
  MOD_RES (2)..(3)..(38)..(40): Xaa is C or S
  MOD_RES (17)..(18)..(19)..(20)..(21): Xaa is A or G
  MOD_RES (22)..(23)..(24)..(25): Xaa is A or G or is absent

SEQ ID NO: 65308 - protein, 35 aa, Artificial Sequence; identical to SEQ ID NO: 6293
  GFR-binding peptide
  MOD_RES (1)..(33)..(35): Xaa is C or S

SEQ ID NO: 65309 - protein, 41 aa, Artificial Sequence; identical to SEQ ID NO: 6294
  GFR-binding peptide
  MOD_RES (5)..(6)..(40): Xaa is C or S
  MOD_RES (20)..(21)..(22)..(23)..(24): Xaa is A or G
  MOD_RES (25)..(26)..(27)..(28): Xaa is A or G or is absent

SEQ ID NO: 65310 - protein, 41 aa, Artificial Sequence; identical to SEQ ID NO: 27425
  GFR-binding peptide
  MOD_RES (6)..(7)..(39)..(41): Xaa is C or S

SEQ ID NO: 65311 - protein, 44 aa, Artificial Sequence; identical to SEQ ID NO: 27426
  GFR-binding peptide
  MOD_RES (6)..(7)..(42)..(44): Xaa is C or S
  MOD_RES (21)..(22)..(23)..(24)..(25): Xaa is A or G
  MOD_RES (26)..(27)..(28)..(29): Xaa is A or G or is absent

SEQ ID NO: 65312 - protein, 39 aa, Artificial Sequence; identical to SEQ ID NO: 6295
  GFR-binding peptide
  MOD_RES (2)..(3)..(37)..(39): Xaa is C or S
  MOD_RES (17)..(18)..(19)..(20)..(21): Xaa is A or G
  MOD_RES (22)..(23)..(24)..(25): Xaa is A or G or is absent

SEQ ID NO: 65313 - protein, 35 aa, Artificial Sequence; identical to SEQ ID NO: 6297
  GFR-binding peptide
  MOD_RES (2)..(3): Xaa is C or S
  MOD_RES (17)..(18)..(19)..(20)..(21): Xaa is A or G
  MOD_RES (22)..(23)..(24)..(25): Xaa is A or G or is absent

SEQ ID NO: 65314 - protein, 39 aa, Artificial Sequence; identical to SEQ ID NO: 32436
  GFR-binding peptide
  MOD_RES (5)..(6)..(37)..(39): Xaa is C or S

SEQ ID NO: 65315 - protein, 36 aa, Artificial Sequence; identical to SEQ ID NO: 6298
  GFR-binding peptide
  MOD_RES (2)..(3)..(36): Xaa is C or S
  MOD_RES (17)..(18)..(19)..(20)..(21): Xaa is A or G
  MOD_RES (22)..(23)..(24)..(25): Xaa is A or G or is absent

SEQ ID NO: 65316 - protein, 42 aa, Artificial Sequence; identical to SEQ ID NO: 32439
  GFR-binding peptide
  MOD_RES (6)..(7)..(39)..(41): Xaa is C or S

SEQ ID NO: 65317 - protein, 37 aa, Artificial Sequence; identical to SEQ ID NO: 6299
  GFR-binding peptide
  MOD_RES (1)..(35)..(37): Xaa is C or S
  MOD_RES (15)..(16)..(17)..(18)..(19): Xaa is A or G
  MOD_RES (20)..(21)..(22)..(23): Xaa is A or G or is absent

SEQ ID NO: 65318 - protein, 34 aa, Artificial Sequence; identical to SEQ ID NO: 6300
  GFR-binding peptide
  MOD_RES (2)..(3)..(34): Xaa is C or S

SEQ ID NO: 65319 - protein, 38 aa, Artificial Sequence; identical to SEQ ID NO: 32443
  GFR-binding peptide
  MOD_RES (1)..(2)..(36)..(38): Xaa is C or S
  MOD_RES (16)..(17)..(18)..(19)..(20): Xaa is A or G
  MOD_RES (21)..(22)..(23)..(24): Xaa is A or G or is absent

SEQ ID NO: 65320 - protein, 36 aa, Artificial Sequence; identical to SEQ ID NO: 27431
  GFR-binding peptide
  MOD_RES (2)..(3): Xaa is C or S
  MOD_RES (17)..(18)..(19)..(20)..(21): Xaa is A or G
  MOD_RES (22)..(23)..(24)..(25): Xaa is A or G or is absent

SEQ ID NO: 65321 - protein, 37 aa, Artificial Sequence; identical to SEQ ID NO: 32452
  GFR-binding peptide
  MOD_RES (4)..(5)..(37): Xaa is C or S

SEQ ID NO: 65322 - protein, 34 aa, Artificial Sequence
  GFR-binding peptide
  MOD_RES (1)..(2)..(34): Xaa is C or S
XXVPEKMSPINILYFDENKNVVYGKIPNMTVESX

SEQ ID NO: 65323 - protein, 40 aa, Artificial Sequence; identical to SEQ ID NO: 6305
  GFR-binding peptide
  MOD_RES (4)..(5)..(37)..(39): Xaa is C or S

SEQ ID NO: 65324 - protein, 37 aa, Artificial Sequence; identical to SEQ ID NO: 32458
  GFR-binding peptide
  MOD_RES (2)..(3): Xaa is C or S
  MOD_RES (17)..(18)..(19)..(20)..(21): Xaa is A or G
  MOD_RES (22)..(23)..(24)..(25): Xaa is A or G or is absent

SEQ ID NO: 65325 - protein, 38 aa, Artificial Sequence; identical to SEQ ID NO: 6307
  GFR-binding peptide
  MOD_RES (5)..(6): Xaa is C or S
  MOD_RES (20)..(21)..(22)..(23)..(24): Xaa is A or G
  MOD_RES (25)..(26)..(27)..(28): Xaa is A or G or is absent

SEQ ID NO: 65326 - protein, 31 aa, Artificial Sequence
  GFR-binding peptide
  MOD_RES (1)..(1): Xaa is C or S
XTPTKMSPISMLYKNDKQQIILKYHYGMVVD

SEQ ID NO: 65327 - protein, 42 aa, Artificial Sequence
  GFR-binding peptide
  MOD_RES (6)..(7)..(39)..(41): Xaa is C or S
STPPTXXVPTRLSATSILYYDSANNVVLRKHRDMVVESXGXR

SEQ ID NO: 65328 - protein, 42 aa, Artificial Sequence; identical to SEQ ID NO: 27448
  GFR-binding peptide
  MOD_RES (5)..(6)..(40)..(42): Xaa is C or S
  MOD_RES (20)..(21)..(22)..(23)..(24): Xaa is A or G
  MOD_RES (25)..(26)..(27)..(28): Xaa is A or G or is absent

SEQ ID NO: 65329 - protein, 34 aa, Artificial Sequence
  GFR-binding peptide
  MOD_RES (1)..(32)..(34): Xaa is C or S
XVPQALSPINILYFVGRKPKVYGKIPMIVRSXKX

SEQ ID NO: 65330 - protein, 40 aa, Artificial Sequence; identical to SEQ ID NO: 27450
  GFR-binding peptide
  MOD_RES (5)..(6)..(38)..(40): Xaa is C or S

SEQ ID NO: 65331 - protein, 38 aa, Artificial Sequence
  GFR-binding peptide
  MOD_RES (3)..(4)..(36)..(38): Xaa is C or S
PTXXVPTRLSATSILYYDSANNVVLRKHRDMVVESXGX

SEQ ID NO: 65332 - protein, 38 aa, Artificial Sequence; identical to SEQ ID NO: 27452
  GFR-binding peptide
  MOD_RES (1)..(2)..(35)..(37): Xaa is C or S
  MOD_RES (16)..(17)..(18)..(19)..(20): Xaa is A or G
  MOD_RES (21)..(22)..(23)..(24): Xaa is A or G or is absent

SEQ ID NO: 65333 - protein, 40 aa, Artificial Sequence
  GFR-binding peptide
  MOD_RES (6)..(7)..(39): Xaa is C or S
GSAGPXXTPTKMSPISMLYKNDKQQIILKYHYGMVVDRXG

SEQ ID NO: 65334 - protein, 40 aa, Artificial Sequence
  GFR-binding peptide
  MOD_RES (2)..(3)..(37)..(39): Xaa is C or S
  MOD_RES (17)..(18)..(19)..(20)..(21): Xaa is A or G
  MOD_RES (22)..(23)..(24)..(25): Xaa is A or G or is absent
PXXVPEKMEPISILYLXXXXXXXXXKFKYENMTVESXAXR

SEQ ID NO: 65335 - protein, 43 aa, Artificial Sequence; identical to SEQ ID NO: 32465
  GFR-binding peptide
  MOD_RES (5)..(6)..(40)..(42): Xaa is C or S
  MOD_RES (20)..(21)..(22)..(23)..(24): Xaa is A or G
  MOD_RES (25)..(26)..(27)..(28): Xaa is A or G or is absent

SEQ ID NO: 65336 - protein, 37 aa, Artificial Sequence; identical to SEQ ID NO: 27454
  GFR-binding peptide
  MOD_RES (3)..(4)..(36): Xaa is C or S

SEQ ID NO: 65337 - protein, 38 aa, Artificial Sequence; identical to SEQ ID NO: 6316
  GFR-binding peptide
  MOD_RES (5)..(6)..(38): Xaa is C or S

SEQ ID NO: 65338 - protein, 37 aa, Artificial Sequence
  GFR-binding peptide
  MOD_RES (1)..(2)..(34)..(36): Xaa is C or S
XXVPEKMEPISILYLDENKNVVKFKYENMTVESXAXR

SEQ ID NO: 65339 - protein, 37 aa, Artificial Sequence; identical to SEQ ID NO: 6318
  GFR-binding peptide
  MOD_RES (3)..(4)..(35)..(37): Xaa is C or S

SEQ ID NO: 65340 - protein, 37 aa, Artificial Sequence
  GFR-binding peptide
  MOD_RES (2)..(3)..(35)..(37): Xaa is C or S
TXXVPTRLEPISILYLDSANNVVKFKYEDMVVESXGX

SEQ ID NO: 65341 - protein, 38 aa, Artificial Sequence; identical to SEQ ID NO: 27459
  GFR-binding peptide
  MOD_RES (4)..(5)..(37): Xaa is C or S

SEQ ID NO: 65342 - protein, 34 aa, Artificial Sequence
  GFR-binding peptide
  MOD_RES (1)..(32)..(34): Xaa is C or S
XAPVKTSPISMLYKDNGRVLLLKYHYMIVEEXGX

SEQ ID NO: 65343 - protein, 35 aa, Artificial Sequence; identical to SEQ ID NO: 6325
  GFR-binding peptide
  MOD_RES (34)..(34): Xaa is C or S
  MOD_RES (14)..(15)..(16)..(17)..(18): Xaa is A or G
  MOD_RES (19)..(20)..(21)..(22): Xaa is A or G or is absent

SEQ ID NO: 65344 - protein, 38 aa, Artificial Sequence; identical to SEQ ID NO: 57374
  GFR-binding peptide
  MOD_RES (4)..(5)..(37): Xaa is C or S

SEQ ID NO: 65345 - protein, 36 aa, Artificial Sequence; identical to SEQ ID NO: 6326
  GFR-binding peptide
  MOD_RES (3)..(4)..(36): Xaa is C or S

SEQ ID NO: 65346 - protein, 32 aa, Artificial Sequence; identical to SEQ ID NO: 6327
  GFR-binding peptide
  MOD_RES (1)..(1): Xaa is C or S

SEQ ID NO: 65347 - protein, 41 aa, Artificial Sequence; identical to SEQ ID NO: 57381
  GFR-binding peptide
  MOD_RES (5)..(6)..(39)..(41): Xaa is C or S
  MOD_RES (20)..(21)..(22)..(23)..(24): Xaa is A or G
  MOD_RES (25)..(26)..(27)..(28): Xaa is A or G or is absent

SEQ ID NO: 65348 - protein, 35 aa, Artificial Sequence; identical to SEQ ID NO: 6331
  GFR-binding peptide
  MOD_RES (2)..(3)..(35): Xaa is C or S

SEQ ID NO: 65349 - protein, 36 aa, Artificial Sequence
  GFR-binding peptide
  MOD_RES (4)..(5)..(36): Xaa is C or S
AAPXXVPQALSPINILYFVGRKPKVYGKIPMIVRSX

SEQ ID NO: 65350 - protein, 37 aa, Artificial Sequence; identical to SEQ ID NO: 6332
  GFR-binding peptide
  MOD_RES (1)..(2)..(36): Xaa is C or S
  MOD_RES (16)..(17)..(18)..(19)..(20): Xaa is A or G
  MOD_RES (21)..(22)..(23)..(24): Xaa is A or G or is absent

SEQ ID NO: 65351 - protein, 38 aa, Artificial Sequence
  GFR-binding peptide
  MOD_RES (6)..(7): Xaa is C or S
HVPKPXXAPTKLSPISVLYKDDSSNVILKYHYNMVVRS

SEQ ID NO: 65352 - protein, 40 aa, Artificial Sequence
  GFR-binding peptide
  MOD_RES (6)..(7)..(39): Xaa is C or S
GIPEPXXVPEKMNAISILYFDENKNVVLKKYRNMTVESXA

SEQ ID NO: 65353 - protein, 42 aa, Artificial Sequence; identical to SEQ ID NO: 6334
  GFR-binding peptide
  MOD_RES (5)..(6)..(40)..(42): Xaa is C or S
  MOD_RES (20)..(21)..(22)..(23)..(24): Xaa is A or G
  MOD_RES (25)..(26)..(27)..(28): Xaa is A or G or is absent

SEQ ID NO: 65354 - protein, 34 aa, Artificial Sequence
  GFR-binding peptide
  MOD_RES (2)..(3): Xaa is C or S
TXXVPTRLEPISILYLDSANNVVKFKYEDMVVES

SEQ ID NO: 65355 - protein, 33 aa, Artificial Sequence; identical to SEQ ID NO: 6338
  GFR-binding peptide
  MOD_RES (2)..(3): Xaa is C or S

SEQ ID NO: 65356 - protein, 38 aa, Artificial Sequence; identical to SEQ ID NO: 27476
  GFR-binding peptide
  MOD_RES (3)..(4)..(38): Xaa is C or S
  MOD_RES (18)..(19)..(20)..(21)..(22): Xaa is A or G
  MOD_RES (23)..(24)..(25)..(26): Xaa is A or G or is absent

SEQ ID NO: 65357 - protein, 36 aa, Artificial Sequence
  GFR-binding peptide
  MOD_RES (1)..(33)..(35): Xaa is C or S
XVPEKMSPISILYKDENKNVVLKYHYNMTVESXAXR

SEQ ID NO: 65358 - protein, 37 aa, Artificial Sequence; identical to SEQ ID NO: 27477
  GFR-binding peptide
  MOD_RES (4)..(5): Xaa is C or S
  MOD_RES (19)..(20)..(21)..(22)..(23): Xaa is A or G
  MOD_RES (24)..(25)..(26)..(27): Xaa is A or G or is absent

SEQ ID NO: 65359 - protein, 41 aa, Artificial Sequence
  GFR-binding peptide
  MOD_RES (5)..(6)..(40): Xaa is C or S
  MOD_RES (20)..(21)..(22)..(23)..(24): Xaa is A or G
  MOD_RES (25)..(26)..(27)..(28): Xaa is A or G or is absent
IPEPXXVPEKMEPISILYLXXXXXXXXXKFKYENMTVESXA

SEQ ID NO: 65360 - protein, 36 aa, Artificial Sequence; identical to SEQ ID NO: 27478
  GFR-binding peptide
  MOD_RES (1)..(35): Xaa is C or S
  MOD_RES (15)..(16)..(17)..(18)..(19): Xaa is A or G
  MOD_RES (20)..(21)..(22)..(23): Xaa is A or G or is absent

SEQ ID NO: 65361 - protein, 36 aa, Artificial Sequence; identical to SEQ ID NO: 32499
  GFR-binding peptide
  MOD_RES (1)..(2)..(36): Xaa is C or S
  MOD_RES (16)..(17)..(18)..(19)..(20): Xaa is A or G
  MOD_RES (21)..(22)..(23)..(24): Xaa is A or G or is absent

SEQ ID NO: 65362 - protein, 38 aa, Artificial Sequence; identical to SEQ ID NO: 13721
  GFR-binding peptide
  MOD_RES (5)..(6): Xaa is C or S
  MOD_RES (20)..(21)..(22)..(23)..(24): Xaa is A or G
  MOD_RES (25)..(26)..(27)..(28): Xaa is A or G or is absent

SEQ ID NO: 65363 - protein, 43 aa, Artificial Sequence; identical to SEQ ID NO: 6342
  GFR-binding peptide
  MOD_RES (6)..(7)..(40)..(42): Xaa is C or S
  MOD_RES (21)..(22)..(23)..(24)..(25): Xaa is A or G
  MOD_RES (26)..(27)..(28)..(29): Xaa is A or G or is absent

SEQ ID NO: 65364 - protein, 34 aa, Artificial Sequence
  GFR-binding peptide
  MOD_RES (31)..(33): Xaa is C or S
VSQDLSPINILYFIGKTPKIYGKIPMIVKSXKXS

SEQ ID NO: 65365 - protein, 35 aa, Artificial Sequence; identical to SEQ ID NO: 27479
  GFR-binding peptide
  MOD_RES (1)..(2)..(34): Xaa is C or S

SEQ ID NO: 65366 - protein, 37 aa, Artificial Sequence; identical to SEQ ID NO: 6344
  GFR-binding peptide
  MOD_RES (2)..(36): Xaa is C or S
  MOD_RES (16)..(17)..(18)..(19)..(20): Xaa is A or G
  MOD_RES (21)..(22)..(23)..(24): Xaa is A or G or is absent

SEQ ID NO: 65367 - protein, 39 aa, Artificial Sequence; identical to SEQ ID NO: 27481
  GFR-binding peptide
  MOD_RES (4)..(5)..(39): Xaa is C or S
  MOD_RES (19)..(20)..(21)..(22)..(23): Xaa is A or G
  MOD_RES (24)..(25)..(26)..(27): Xaa is A or G or is absent

SEQ ID NO: 65368 - protein, 37 aa, Artificial Sequence
  GFR-binding peptide
  MOD_RES (1)..(2)..(36): Xaa is C or S
  MOD_RES (16)..(17)..(18)..(19)..(20): Xaa is A or G
  MOD_RES (21)..(22)..(23)..(24): Xaa is A or G or is absent
XXVPEKMEPISILYLXXXXXXXXXKFKYENMTVESXA

SEQ ID NO: 65369 - protein, 37 aa, Artificial Sequence; identical to SEQ ID NO: 27482
  GFR-binding peptide
  MOD_RES (2)..(36): Xaa is C or S
  MOD_RES (16)..(17)..(18)..(19)..(20): Xaa is A or G
  MOD_RES (21)..(22)..(23)..(24): Xaa is A or G or is absent

SEQ ID NO: 65370 - protein, 34 aa, Artificial Sequence; identical to SEQ ID NO: 13732
  GFR-binding peptide
  MOD_RES (2)..(3): Xaa is C or S

SEQ ID NO: 65371 - protein, 37 aa, Artificial Sequence; identical to SEQ ID NO: 27488
  GFR-binding peptide
  MOD_RES (3)..(35)..(37): Xaa is C or S

SEQ ID NO: 65372 - protein, 34 aa, Artificial Sequence
  GFR-binding peptide
  MOD_RES (32)..(34): Xaa is C or S
TPTKMSATSMLYYNDKQQIILRKHRGMVVDRXGX

SEQ ID NO: 65373 - protein, 33 aa, Artificial Sequence; identical to SEQ ID NO: 6348
  GFR-binding peptide
  MOD_RES (2)..(2): Xaa is C or S

SEQ ID NO: 65374 - protein, 41 aa, Artificial Sequence; identical to SEQ ID NO: 6349
  GFR-binding peptide
  MOD_RES (4)..(5)..(39)..(41): Xaa is C or S
  MOD_RES (19)..(20)..(21)..(22)..(23): Xaa is A or G
  MOD_RES (24)..(25)..(26)..(27): Xaa is A or G or is absent

SEQ ID NO: 65375 - protein, 44 aa, Artificial Sequence; identical to SEQ ID NO: 57413
  GFR-binding peptide
  MOD_RES (6)..(7)..(41)..(43): Xaa is C or S
  MOD_RES (21)..(22)..(23)..(24)..(25): Xaa is A or G
  MOD_RES (26)..(27)..(28)..(29): Xaa is A or G or is absent

SEQ ID NO: 65376 - protein, 35 aa, Artificial Sequence; identical to SEQ ID NO: 6350
  GFR-binding peptide
  MOD_RES (34)..(34): Xaa is C or S
  MOD_RES (14)..(15)..(16)..(17)..(18): Xaa is A or G
  MOD_RES (19)..(20)..(21)..(22): Xaa is A or G or is absent

SEQ ID NO: 65377 - protein, 37 aa, Artificial Sequence
  GFR-binding peptide
  MOD_RES (3)..(4)..(36): Xaa is C or S
PTXXVPTRLSATSILYYDSANNVVLRKHRDMVVESXG

SEQ ID NO: 65378 - protein, 40 aa, Artificial Sequence; identical to SEQ ID NO: 6352
  GFR-binding peptide
  MOD_RES (4)..(5)..(37)..(39): Xaa is C or S

SEQ ID NO: 65379 - protein, 37 aa, Artificial Sequence
  GFR-binding peptide
  MOD_RES (1)..(2)..(34)..(36): Xaa is C or S
XXTPTKMSATSMLYYNDKQQIILRKHRGMVVDRXGXS

SEQ ID NO: 65380 - protein, 33 aa, Artificial Sequence; identical to SEQ ID NO: 6355
  GFR-binding peptide
  MOD_RES (1)..(1): Xaa is C or S
  MOD_RES (15)..(16)..(17)..(18)..(19): Xaa is A or G
  MOD_RES (20)..(21)..(22)..(23): Xaa is A or G or is absent

SEQ ID NO: 65381 - protein, 41 aa, Artificial Sequence; identical to SEQ ID NO: 27494
  GFR-binding peptide
  MOD_RES (4)..(5)..(39)..(41): Xaa is C or S
  MOD_RES (19)..(20)..(21)..(22)..(23): Xaa is A or G
  MOD_RES (24)..(25)..(26)..(27): Xaa is A or G or is absent

SEQ ID NO: 65382 - protein, 35 aa, Artificial Sequence; identical to SEQ ID NO: 6358
  GFR-binding peptide
  MOD_RES (1)..(1): Xaa is C or S
  MOD_RES (15)..(16)..(17)..(18)..(19): Xaa is A or G
  MOD_RES (20)..(21)..(22)..(23): Xaa is A or G or is absent

SEQ ID NO: 65383 - protein, 37 aa, Artificial Sequence
  GFR-binding peptide
  MOD_RES (3)..(4)..(35)..(37): Xaa is C or S
STXXAPVKTEPISMLYLDNGRVLLKFKYEMIVEEXGX

SEQ ID NO: 65384 - protein, 36 aa, Artificial Sequence; identical to SEQ ID NO: 6360
  GFR-binding peptide
  MOD_RES (1)..(35): Xaa is C or S
  MOD_RES (15)..(16)..(17)..(18)..(19): Xaa is A or G
  MOD_RES (20)..(21)..(22)..(23): Xaa is A or G or is absent

SEQ ID NO: 65385 - protein, 39 aa, Artificial Sequence; identical to SEQ ID NO: 27498
  GFR-binding peptide
  MOD_RES (6)..(7): Xaa is C or S
  MOD_RES (21)..(22)..(23)..(24)..(25): Xaa is A or G
  MOD_RES (26)..(27)..(28)..(29): Xaa is A or G or is absent

SEQ ID NO: 65386 - protein, 44 aa, Artificial Sequence; identical to SEQ ID NO: 32522
  GFR-binding peptide
  MOD_RES (6)..(7)..(41)..(43): Xaa is C or S
  MOD_RES (21)..(22)..(23)..(24)..(25): Xaa is A or G
  MOD_RES (26)..(27)..(28)..(29): Xaa is A or G or is absent

SEQ ID NO: 65387 - protein, 41 aa, Artificial Sequence; identical to SEQ ID NO: 32525
  GFR-binding peptide
  MOD_RES (6)..(7)..(39)..(41): Xaa is C or S

SEQ ID NO: 65388 - protein, 33 aa, Artificial Sequence; identical to SEQ ID NO: 32526
  GFR-binding peptide
  MOD_RES (1)..(1): Xaa is C or S
  MOD_RES (15)..(16)..(17)..(18)..(19): Xaa is A or G
  MOD_RES (20)..(21)..(22)..(23): Xaa is A or G or is absent

SEQ ID NO: 65389 - protein, 38 aa, Artificial Sequence
  GFR-binding peptide
  MOD_RES (3)..(4)..(36)..(38): Xaa is C or S
KAXXVPTKLSATSILYYDKGVVTYLRKHRGMAVSEXGX

SEQ ID NO: 65390 - protein, 38 aa, Artificial Sequence
  GFR-binding peptide
  MOD_RES (1)..(2)..(35)..(37): Xaa is C or S
  MOD_RES (16)..(17)..(18)..(19)..(20): Xaa is A or G
  MOD_RES (21)..(22)..(23)..(24): Xaa is A or G or is absent
XXAPVKTEPISMLYLXXXXXXXXXKFKYEMIVEEXGXL

SEQ ID NO: 65391 - protein, 40 aa, Artificial Sequence; identical to SEQ ID NO: 27502
  GFR-binding peptide
  MOD_RES (3)..(4)..(38)..(40): Xaa is C or S
  MOD_RES (18)..(19)..(20)..(21)..(22): Xaa is A or G
  MOD_RES (23)..(24)..(25)..(26): Xaa is A or G or is absent

SEQ ID NO: 65392 - protein, 39 aa, Artificial Sequence; identical to SEQ ID NO: 6365
  GFR-binding peptide
  MOD_RES (6)..(7): Xaa is C or S
  MOD_RES (21)..(22)..(23)..(24)..(25): Xaa is A or G
  MOD_RES (26)..(27)..(28)..(29): Xaa is A or G or is absent

SEQ ID NO: 65393 - protein, 37 aa, Artificial Sequence; identical to SEQ ID NO: 6369
  GFR-binding peptide
  MOD_RES (5)..(6): Xaa is C or S

SEQ ID NO: 65394 - protein, 40 aa, Artificial Sequence; identical to SEQ ID NO: 6372
  GFR-binding peptide
  MOD_RES (6)..(7)..(38)..(40): Xaa is C or S

SEQ ID NO: 65395 - protein, 33 aa, Artificial Sequence
  GFR-binding peptide
  MOD_RES (33)..(33): Xaa is C or S
  MOD_RES (14)..(15)..(16)..(17)..(18): Xaa is A or G
  MOD_RES (19)..(20)..(21)..(22): Xaa is A or G or is absent
APVKTEPISMLYLXXXXXXXXXKFKYEMIVEEX

SEQ ID NO: 65396 - protein, 38 aa, Artificial Sequence; identical to SEQ ID NO: 6374
  GFR-binding peptide
  MOD_RES (35)..(37): Xaa is C or S
  MOD_RES (14)..(15)..(16)..(17)..(18): Xaa is A or G
  MOD_RES (19)..(20)..(21)..(22): Xaa is A or G or is absent

SEQ ID NO: 65397 - protein, 37 aa, Artificial Sequence; identical to SEQ ID NO: 6377
  GFR-binding peptide
  MOD_RES (2)..(3)..(35)..(37): Xaa is C or S

SEQ ID NO: 65398 - protein, 35 aa, Artificial Sequence; identical to SEQ ID NO: 6378
  GFR-binding peptide
  MOD_RES (35)..(35): Xaa is C or S
  MOD_RES (14)..(15)..(16)..(17)..(18): Xaa is A or G
  MOD_RES (19)..(20)..(21)..(22): Xaa is A or G or is absent

SEQ ID NO: 65399 - protein, 33 aa, Artificial Sequence
  GFR-binding peptide
  MOD_RES (14)..(15)..(16)..(17)..(18): Xaa is A or G
  MOD_RES (19)..(20)..(21)..(22): Xaa is A or G or is absent
VPTRLEPISILYLXXXXXXXXXKFKYEDMVVES

SEQ ID NO: 65400 - protein, 39 aa, Artificial Sequence; identical to SEQ ID NO: 27518
  GFR-binding peptide
  MOD_RES (2)..(3)..(37)..(39): Xaa is C or S
  MOD_RES (17)..(18)..(19)..(20)..(21): Xaa is A or G
  MOD_RES (22)..(23)..(24)..(25): Xaa is A or G or is absent

SEQ ID NO: 65401 - protein, 37 aa, Artificial Sequence
  GFR-binding peptide
  MOD_RES (3)..(4)..(35)..(37): Xaa is C or S
APXXVPQALSPINILYFVGRKPKVYGKIPMIVRSXKX

SEQ ID NO: 65402 - protein, 36 aa, Artificial Sequence
  GFR-binding peptide
  MOD_RES (5)..(6): Xaa is C or S
VPSTXXAPVKTEPISMLYLDNGRVLLKFKYEMIVEE

SEQ ID NO: 65403 - protein, 39 aa, Artificial Sequence; identical to SEQ ID NO: 6381
  GFR-binding peptide
  MOD_RES (4)..(5)..(36)..(38): Xaa is C or S

SEQ ID NO: 65404 - protein, 39 aa, Artificial Sequence; identical to SEQ ID NO: 6383
  GFR-binding peptide
  MOD_RES (5)..(6): Xaa is C or S
  MOD_RES (20)..(21)..(22)..(23)..(24): Xaa is A or G
  MOD_RES (25)..(26)..(27)..(28): Xaa is A or G or is absent

SEQ ID NO: 65405 - protein, 35 aa, Artificial Sequence; identical to SEQ ID NO: 57454
  GFR-binding peptide
  MOD_RES (1)..(34): Xaa is C or S
  MOD_RES (15)..(16)..(17)..(18)..(19): Xaa is A or G
  MOD_RES (20)..(21)..(22)..(23): Xaa is A or G or is absent

SEQ ID NO: 65406 - protein, 35 aa, Artificial Sequence
  GFR-binding peptide
  MOD_RES (2)..(3)..(35): Xaa is C or S
TXXVPTRLSATSILYYDSANNVVLRKHRDMVVESX

SEQ ID NO: 65407 - protein, 40 aa, Artificial Sequence; identical to SEQ ID NO: 6385
  GFR-binding peptide
  MOD_RES (5)..(6)..(37)..(39): Xaa is C or S

SEQ ID NO: 65408 - protein, 36 aa, Artificial Sequence
  GFR-binding peptide
  MOD_RES (2)..(3)..(35): Xaa is C or S
TXXVPTRLEPISILYLDSANNVVKFKYEDMVVESXG

SEQ ID NO: 65409 - protein, 43 aa, Artificial Sequence; identical to SEQ ID NO: 6386
  GFR-binding peptide
  MOD_RES (5)..(6)..(40)..(42): Xaa is C or S
  MOD_RES (20)..(21)..(22)..(23)..(24): Xaa is A or G
  MOD_RES (25)..(26)..(27)..(28): Xaa is A or G or is absent

SEQ ID NO: 65410 - protein, 39 aa, Artificial Sequence; identical to SEQ ID NO: 27526
  GFR-binding peptide
  MOD_RES (1)..(2)..(36)..(38): Xaa is C or S
  MOD_RES (16)..(17)..(18)..(19)..(20): Xaa is A or G
  MOD_RES (21)..(22)..(23)..(24): Xaa is A or G or is absent

SEQ ID NO: 65411 - protein, 41 aa, Artificial Sequence; identical to SEQ ID NO: 32552
  GFR-binding peptide
  MOD_RES (5)..(6)..(40): Xaa is C or S
  MOD_RES (20)..(21)..(22)..(23)..(24): Xaa is A or G
  MOD_RES (25)..(26)..(27)..(28): Xaa is A or G or is absent

SEQ ID NO: 65412 - protein, 36 aa, Artificial Sequence; identical to SEQ ID NO: 32555
  GFR-binding peptide
  MOD_RES (1)..(35): Xaa is C or S
  MOD_RES (15)..(16)..(17)..(18)..(19): Xaa is A or G
  MOD_RES (20)..(21)..(22)..(23): Xaa is A or G or is absent

SEQ ID NO: 65413 - protein, 38 aa, Artificial Sequence; identical to SEQ ID NO: 6390
  GFR-binding peptide
  MOD_RES (4)..(5): Xaa is C or S
  MOD_RES (19)..(20)..(21)..(22)..(23): Xaa is A or G
  MOD_RES (24)..(25)..(26)..(27): Xaa is A or G or is absent

SEQ ID NO: 65414 - protein, 38 aa, Artificial Sequence; identical to SEQ ID NO: 6391
  GFR-binding peptide
  MOD_RES (4)..(5)..(37): Xaa is C or S

SEQ ID NO: 65415 - protein, 37 aa, Artificial Sequence; identical to SEQ ID NO: 32556
  GFR-binding peptide
  MOD_RES (4)..(5): Xaa is C or S
  MOD_RES (19)..(20)..(21)..(22)..(23): Xaa is A or G
  MOD_RES (24)..(25)..(26)..(27): Xaa is A or G or is absent

SEQ ID NO: 65416 - protein, 31 aa, Artificial Sequence
  GFR-binding peptide
  MOD_RES (1)..(1): Xaa is C or S
XTPTKMSATSMLYYNDKQQIILRKHRGMVVD

SEQ ID NO: 65417 - protein, 37 aa, Artificial Sequence; identical to SEQ ID NO: 6395
  GFR-binding peptide
  MOD_RES (4)..(5): Xaa is C or S
  MOD_RES (19)..(20)..(21)..(22)..(23): Xaa is A or G
  MOD_RES (24)..(25)..(26)..(27): Xaa is A or G or is absent

SEQ ID NO: 65418 - protein, 37 aa, Artificial Sequence; identical to SEQ ID NO: 27536
  GFR-binding peptide
  MOD_RES (1)..(2)..(36): Xaa is C or S
  MOD_RES (16)..(17)..(18)..(19)..(20): Xaa is A or G
  MOD_RES (21)..(22)..(23)..(24): Xaa is A or G or is absent

SEQ ID NO: 65419 - protein, 31 aa, Artificial Sequence; identical to SEQ ID NO: 32561
  GFR-binding peptide
  MOD_RES (31)..(31): Xaa is C or S

SEQ ID NO: 65420 - protein, 38 aa, Artificial Sequence; identical to SEQ ID NO: 6398
  GFR-binding peptide
  MOD_RES (1)..(35)..(37): Xaa is C or S
  MOD_RES (15)..(16)..(17)..(18)..(19): Xaa is A or G
  MOD_RES (20)..(21)..(22)..(23): Xaa is A or G or is absent

SEQ ID NO: 65421 - protein, 38 aa, Artificial Sequence; identical to SEQ ID NO: 6399
  GFR-binding peptide
  MOD_RES (3)..(4)..(37): Xaa is C or S
  MOD_RES (18)..(19)..(20)..(21)..(22): Xaa is A or G
  MOD_RES (23)..(24)..(25)..(26): Xaa is A or G or is absent

SEQ ID NO: 65422 - protein, 32 aa, Artificial Sequence; identical to SEQ ID NO: 6400
  GFR-binding peptide
  MOD_RES (2)..(2): Xaa is C or S

SEQ ID NO: 65423 - protein, 35 aa, Artificial Sequence; identical to SEQ ID NO: 6402
  GFR-binding peptide
  MOD_RES (3)..(3): Xaa is C or S
  MOD_RES (17)..(18)..(19)..(20)..(21): Xaa is A or G
  MOD_RES (22)..(23)..(24)..(25): Xaa is A or G or is absent

SEQ ID NO: 65424 - protein, 34 aa, Artificial Sequence; identical to SEQ ID NO: 27546
  GFR-binding peptide
  MOD_RES (34)..(34): Xaa is C or S
  MOD_RES (14)..(15)..(16)..(17)..(18): Xaa is A or G
  MOD_RES (19)..(20)..(21)..(22): Xaa is A or G or is absent

SEQ ID NO: 65425 - protein, 41 aa, Artificial Sequence
  GFR-binding peptide
  MOD_RES (5)..(6)..(40): Xaa is C or S
  MOD_RES (20)..(21)..(22)..(23)..(24): Xaa is A or G
  MOD_RES (25)..(26)..(27)..(28): Xaa is A or G or is absent
SAGPXXTPTKMSATSMLYYXXXXXXXXXLRKHRGMVVDRXG

SEQ ID NO: 65426 - protein, 35 aa, Artificial Sequence; identical to SEQ ID NO: 27548
  GFR-binding peptide
  MOD_RES (1)..(2)..(35): Xaa is C or S

SEQ ID NO: 65427 - protein, 39 aa, Artificial Sequence; identical to SEQ ID NO: 6406
  GFR-binding peptide
  MOD_RES (6)..(7)..(39): Xaa is C or S

SEQ ID NO: 65428 - protein, 34 aa, Artificial Sequence; identical to SEQ ID NO: 57471
  GFR-binding peptide
  MOD_RES (2)..(3): Xaa is C or S

SEQ ID NO: 65429 - protein, 38 aa, Artificial Sequence; identical to SEQ ID NO: 6407
  GFR-binding peptide
  MOD_RES (3)..(4)..(36)..(38): Xaa is C or S

SEQ ID NO: 65430 - protein, 39 aa, Artificial Sequence; identical to SEQ ID NO: 6408
  GFR-binding peptide
  MOD_RES (4)..(5): Xaa is C or S
  MOD_RES (19)..(20)..(21)..(22)..(23): Xaa is A or G
  MOD_RES (24)..(25)..(26)..(27): Xaa is A or G or is absent

SEQ ID NO: 65431 - protein, 37 aa, Artificial Sequence; identical to SEQ ID NO: 32570
  GFR-binding peptide
  MOD_RES (1)..(2)..(36): Xaa is C or S
  MOD_RES (16)..(17)..(18)..(19)..(20): Xaa is A or G
  MOD_RES (21)..(22)..(23)..(24): Xaa is A or G or is absent

SEQ ID NO: 65432 - protein, 37 aa, Artificial Sequence; identical to SEQ ID NO: 32572
  GFR-binding peptide
  MOD_RES (4)..(5)..(37): Xaa is C or S

SEQ ID NO: 65433 - protein, 41 aa, Artificial Sequence; identical to SEQ ID NO: 32573
  GFR-binding peptide
  MOD_RES (5)..(6)..(38)..(40): Xaa is C or S

SEQ ID NO: 65434 - protein, 39 aa, Artificial Sequence; identical to SEQ ID NO: 32574
  GFR-binding peptide
  MOD_RES (5)..(6): Xaa is C or S
  MOD_RES (20)..(21)..(22)..(23)..(24): Xaa is A or G
  MOD_RES (25)..(26)..(27)..(28): Xaa is A or G or is absent

SEQ ID NO: 65435 - protein, 42 aa, Artificial Sequence; identical to SEQ ID NO: 6410
  GFR-binding peptide
  MOD_RES (6)..(40)..(42): Xaa is C or S
  MOD_RES (20)..(21)..(22)..(23)..(24): Xaa is A or G
  MOD_RES (25)..(26)..(27)..(28): Xaa is A or G or is absent

SEQ ID NO: 65436 - protein, 36 aa, Artificial Sequence; identical to SEQ ID NO: 32575
  GFR-binding peptide
  MOD_RES (34)..(36): Xaa is C or S
  MOD_RES (14)..(15)..(16)..(17)..(18): Xaa is A or G
  MOD_RES (19)..(20)..(21)..(22): Xaa is A or G or is absent

SEQ ID NO: 65437 - protein, 38 aa, Artificial Sequence; identical to SEQ ID NO: 57479
  GFR-binding peptide
  MOD_RES (4)..(5): Xaa is C or S
  MOD_RES (19)..(20)..(21)..(22)..(23): Xaa is A or G
  MOD_RES (24)..(25)..(26)..(27): Xaa is A or G or is absent

SEQ ID NO: 65438 - protein, 41 aa, Artificial Sequence; identical to SEQ ID NO: 27554
  GFR-binding peptide
  MOD_RES (5)..(6)..(39)..(41): Xaa is C or S
  MOD_RES (20)..(21)..(22)..(23)..(24): Xaa is A or G
  MOD_RES (25)..(26)..(27)..(28): Xaa is A or G or is absent

SEQ ID NO: 65439 - protein, 33 aa, Artificial Sequence; identical to SEQ ID NO: 32577
  GFR-binding peptide
  MOD_RES (1)..(32): Xaa is C or S

SEQ ID NO: 65440 - protein, 37 aa, Artificial Sequence
  GFR-binding peptide
  MOD_RES (4)..(5)..(37): Xaa is C or S
PPTXXVPTRLSATSILYYDSANNVVLRKHRDMVVESX

SEQ ID NO: 65441 - protein, 34 aa, Artificial Sequence; identical to SEQ ID NO: 32579
  GFR-binding peptide
  MOD_RES (34)..(34): Xaa is C or S
  MOD_RES (14)..(15)..(16)..(17)..(18): Xaa is A or G
  MOD_RES (19)..(20)..(21)..(22): Xaa is A or G or is absent

SEQ ID NO: 65442 - protein, 32 aa, Artificial Sequence; identical to SEQ ID NO: 6413
  GFR-binding peptide
  MOD_RES (31)..(31): Xaa is C or S

SEQ ID NO: 65443 - protein, 38 aa, Artificial Sequence
  GFR-binding peptide
  MOD_RES (5)..(6)..(38): Xaa is C or S
IPEPXXVPEKMSPISILYKDENKNVVLKYHYNMTVESX

SEQ ID NO: 65444 - protein, 34 aa, Artificial Sequence; identical to SEQ ID NO: 6414
  GFR-binding peptide
  MOD_RES (1)..(1): Xaa is C or S
  MOD_RES (15)..(16)..(17)..(18)..(19): Xaa is A or G
  MOD_RES (20)..(21)..(22)..(23): Xaa is A or G or is absent

SEQ ID NO: 65445 - protein, 40 aa, Artificial Sequence; identical to SEQ ID NO: 27558
  GFR-binding peptide
  MOD_RES (6)..(7): Xaa is C or S
  MOD_RES (21)..(22)..(23)..(24)..(25): Xaa is A or G
  MOD_RES (26)..(27)..(28)..(29): Xaa is A or G or is absent

SEQ ID NO: 65446 - protein, 36 aa, Artificial Sequence
  GFR-binding peptide
  MOD_RES (3)..(4): Xaa is C or S
  MOD_RES (18)..(19)..(20)..(21)..(22): Xaa is A or G
  MOD_RES (23)..(24)..(25)..(26): Xaa is A or G or is absent
EPXXVPEKMSATSILYYXXXXXXXXXLRKHRNMTVE

SEQ ID NO: 65447 - protein, 35 aa, Artificial Sequence; identical to SEQ ID NO: 32584
  GFR-binding peptide
  MOD_RES (2)..(3): Xaa is C or S
  MOD_RES (17)..(18)..(19)..(20)..(21): Xaa is A or G
  MOD_RES (22)..(23)..(24)..(25): Xaa is A or G or is absent

SEQ ID NO: 65448 - protein, 35 aa, Artificial Sequence; identical to SEQ ID NO: 32586
  GFR-binding peptide
  MOD_RES (1)..(2)..(35): Xaa is C or S
  MOD_RES (16)..(17)..(18)..(19)..(20): Xaa is A or G
  MOD_RES (21)..(22)..(23)..(24): Xaa is A or G or is absent

SEQ ID NO: 65449 - protein, 37 aa, Artificial Sequence
  GFR-binding peptide
  MOD_RES (1)..(35)..(37): Xaa is C or S
  MOD_RES (15)..(16)..(17)..(18)..(19): Xaa is A or G
  MOD_RES (20)..(21)..(22)..(23): Xaa is A or G or is absent
XVPTRLSPISILYKXXXXXXXXXLKYHYDMVVESXGX

SEQ ID NO: 65450 - protein, 38 aa, Artificial Sequence
  GFR-binding peptide
  MOD_RES (2)..(3)..(37): Xaa is C or S
  MOD_RES (17)..(18)..(19)..(20)..(21): Xaa is A or G
  MOD_RES (22)..(23)..(24)..(25): Xaa is A or G or is absent
PXXTPTKMSPISMLYKXXXXXXXXXLKYHYGMVVDRXG

SEQ ID NO: 65451 - protein, 39 aa, Artificial Sequence
  GFR-binding peptide
  MOD_RES (2)..(3)..(36)..(38): Xaa is C or S
  MOD_RES (17)..(18)..(19)..(20)..(21): Xaa is A or G
  MOD_RES (22)..(23)..(24)..(25): Xaa is A or G or is absent
PXXVSQDLSPINILYFXXXXXXXXXYGKIPMIVKSXKXS

SEQ ID NO: 65452 - protein, 35 aa, Artificial Sequence; identical to SEQ ID NO: 6421
  GFR-binding peptide
  MOD_RES (2)..(34): Xaa is C or S

SEQ ID NO: 65453 - protein, 35 aa, Artificial Sequence; identical to SEQ ID NO: 13800
  GFR-binding peptide
  MOD_RES (2)..(3)..(35): Xaa is C or S

SEQ ID NO: 65454 - protein, 37 aa, Artificial Sequence; identical to SEQ ID NO: 27564
  GFR-binding peptide
  MOD_RES (1)..(2)..(34)..(36): Xaa is C or S

SEQ ID NO: 65455 - protein, 36 aa, Artificial Sequence; identical to SEQ ID NO: 6422
  GFR-binding peptide
  MOD_RES (3)..(4)..(36): Xaa is C or S

SEQ ID NO: 65456 - protein, 36 aa, Artificial Sequence; identical to SEQ ID NO: 6425
  GFR-binding peptide
  MOD_RES (2)..(3): Xaa is C or S
  MOD_RES (17)..(18)..(19)..(20)..(21): Xaa is A or G
  MOD_RES (22)..(23)..(24)..(25): Xaa is A or G or is absent

SEQ ID NO: 65457 - protein, 35 aa, Artificial Sequence; identical to SEQ ID NO: 27569
  GFR-binding peptide
  MOD_RES (1)..(2)..(33)..(35): Xaa is C or S

SEQ ID NO: 65458 - protein, 34 aa, Artificial Sequence; identical to SEQ ID NO: 6426
  GFR-binding peptide
  MOD_RES (2)..(3): Xaa is C or S

SEQ ID NO: 65459 - protein, 34 aa, Artificial Sequence
  GFR-binding peptide
  MOD_RES (1)..(2)..(34): Xaa is C or S
XXTPTKMSPISMLYKNDKQQIILKYHYGMVVDRX

SEQ ID NO: 65460 - protein, 33 aa, Artificial Sequence; identical to SEQ ID NO: 6430
  GFR-binding peptide
  MOD_RES (32)..(32): Xaa is C or S

SEQ ID NO: 65461 - protein, 36 aa, Artificial Sequence; identical to SEQ ID NO: 6431
  GFR-binding peptide
  MOD_RES (1)..(2)..(34)..(36): Xaa is C or S

SEQ ID NO: 65462 - protein, 34 aa, Artificial Sequence; identical to SEQ ID NO: 57508
  GFR-binding peptide
  MOD_RES (34)..(34): Xaa is C or S
  MOD_RES (14)..(15)..(16)..(17)..(18): Xaa is A or G
  MOD_RES (19)..(20)..(21)..(22): Xaa is A or G or is absent

SEQ ID NO: 65463 - protein, 37 aa, Artificial Sequence; identical to SEQ ID NO: 6432
  GFR-binding peptide
  MOD_RES (4)..(5)..(36): Xaa is C or S

SEQ ID NO: 65464 - protein, 38 aa, Artificial Sequence; identical to SEQ ID NO: 6438
  GFR-binding peptide
  MOD_RES (3)..(4)..(38): Xaa is C or S
  MOD_RES (18)..(19)..(20)..(21)..(22): Xaa is A or G
  MOD_RES (23)..(24)..(25)..(26): Xaa is A or G or is absent

SEQ ID NO: 65465 - protein, 36 aa, Artificial Sequence; identical to SEQ ID NO: 27584
  GFR-binding peptide
  MOD_RES (1)..(33)..(35): Xaa is C or S

SEQ ID NO: 65466 - protein, 41 aa, Artificial Sequence; identical to SEQ ID NO: 6443
  GFR-binding peptide
  MOD_RES (3)..(4)..(38)..(40): Xaa is C or S
  MOD_RES (18)..(19)..(20)..(21)..(22): Xaa is A or G
  MOD_RES (23)..(24)..(25)..(26): Xaa is A or G or is absent

SEQ ID NO: 65467 - protein, 33 aa, Artificial Sequence; identical to SEQ ID NO: 57523
  GFR-binding peptide
  MOD_RES (31)..(33): Xaa is C or S

SEQ ID NO: 65468 - protein, 35 aa, Artificial Sequence; identical to SEQ ID NO: 6444
  GFR-binding peptide
  MOD_RES (1)..(2)..(34): Xaa is C or S

SEQ ID NO: 65469 - protein, 38 aa, Artificial Sequence
  GFR-binding peptide
  MOD_RES (2)..(3)..(37): Xaa is C or S
  MOD_RES (17)..(18)..(19)..(20)..(21): Xaa is A or G
  MOD_RES (22)..(23)..(24)..(25): Xaa is A or G or is absent
PXXVPEKMSPISILYKXXXXXXXXXLKYHYNMTVESXA

SEQ ID NO: 65470 - protein, 33 aa, Artificial Sequence; identical to SEQ ID NO: 57524
  GFR-binding peptide
  MOD_RES (2)..(3): Xaa is C or S

SEQ ID NO: 65471 - protein, 36 aa, Artificial Sequence; identical to SEQ ID NO: 6445
  GFR-binding peptide
  MOD_RES (4)..(5): Xaa is C or S

SEQ ID NO: 65472 - protein, 33 aa, Artificial Sequence; identical to SEQ ID NO: 6446
  GFR-binding peptide
  MOD_RES (2)..(3): Xaa is C or S

SEQ ID NO: 65473 - protein, 39 aa, Artificial Sequence
  GFR-binding peptide
  MOD_RES (6)..(7)..(39): Xaa is C or S
GIPEPXXVPEKMEPISILYLDENKNVVKFKYENMTVESX

SEQ ID NO: 65474 - protein, 43 aa, Artificial Sequence; identical to SEQ ID NO: 27593
  GFR-binding peptide
  MOD_RES (5)..(6)..(41)..(43): Xaa is C or S
  MOD_RES (20)..(21)..(22)..(23)..(24): Xaa is A or G
  MOD_RES (25)..(26)..(27)..(28): Xaa is A or G or is absent

SEQ ID NO: 65475 - protein, 36 aa, Artificial Sequence; identical to SEQ ID NO: 27594
  GFR-binding peptide
  MOD_RES (33)..(35): Xaa is C or S
  MOD_RES (14)..(15)..(16)..(17)..(18): Xaa is A or G
  MOD_RES (19)..(20)..(21)..(22): Xaa is A or G or is absent

SEQ ID NO: 65476 - protein, 36 aa, Artificial Sequence; identical to SEQ ID NO: 6453
  GFR-binding peptide
  MOD_RES (1)..(33)..(35): Xaa is C or S

SEQ ID NO: 65477 - protein, 38 aa, Artificial Sequence; identical to SEQ ID NO: 32621
  GFR-binding peptide
  MOD_RES (3)..(37): Xaa is C or S
  MOD_RES (17)..(18)..(19)..(20)..(21): Xaa is A or G
  MOD_RES (22)..(23)..(24)..(25): Xaa is A or G or is absent

SEQ ID NO: 65478 - protein, 32 aa, Artificial Sequence
  GFR-binding peptide
  MOD_RES (1)..(2): Xaa is C or S
XXVPEKMEPISILYLDENKNVVKFKYENMTVE

SEQ ID NO: 65479 - protein, 36 aa, Artificial Sequence; identical to SEQ ID NO: 27602
  GFR-binding peptide
  MOD_RES (2)..(3): Xaa is C or S
  MOD_RES (17)..(18)..(19)..(20)..(21): Xaa is A or G
  MOD_RES (22)..(23)..(24)..(25): Xaa is A or G or is absent

SEQ ID NO: 65480 - protein, 38 aa, Artificial Sequence
  GFR-binding peptide
  MOD_RES (5)..(6): Xaa is C or S
  MOD_RES (20)..(21)..(22)..(23)..(24): Xaa is A or G
  MOD_RES (25)..(26)..(27)..(28): Xaa is A or G or is absent
SAGPXXTPTKMEPISMLYLXXXXXXXXXKFKYEGMVVD

SEQ ID NO: 65481 - protein, 40 aa, Artificial Sequence; identical to SEQ ID NO: 6454
  GFR-binding peptide
  MOD_RES (5)..(6)..(38)..(40): Xaa is C or S

SEQ ID NO: 65482 - protein, 34 aa, Artificial Sequence; identical to SEQ ID NO: 6456
  GFR-binding peptide
  MOD_RES (2)..(3): Xaa is C or S

SEQ ID NO: 65483 - protein, 39 aa, Artificial Sequence; identical to SEQ ID NO: 6457
  GFR-binding peptide
  MOD_RES (4)..(5)..(38): Xaa is C or S

SEQ ID NO: 65484 - protein, 35 aa, Artificial Sequence; identical to SEQ ID NO: 6458
  GFR-binding peptide
  MOD_RES (2)..(3)..(35): Xaa is C or S

SEQ ID NO: 65485 - protein, 39 aa, Artificial Sequence; identical to SEQ ID NO: 6460
  GFR-binding peptide
  MOD_RES (6)..(7): Xaa is C or S
  MOD_RES (21)..(22)..(23)..(24)..(25): Xaa is A or G
  MOD_RES (26)..(27)..(28)..(29): Xaa is A or G or is absent

SEQ ID NO: 65486 - protein, 37 aa, Artificial Sequence; identical to SEQ ID NO: 32638
  GFR-binding peptide
  MOD_RES (5)..(5): Xaa is C or S
  MOD_RES (19)..(20)..(21)..(22)..(23): Xaa is A or G
  MOD_RES (24)..(25)..(26)..(27): Xaa is A or G or is absent

SEQ ID NO: 65487 - protein, 37 aa, Artificial Sequence; identical to SEQ ID NO: 57545
  GFR-binding peptide
  MOD_RES (2)..(3)..(35)..(37): Xaa is C or S

SEQ ID NO: 65488 - protein, 40 aa, Artificial Sequence; identical to SEQ ID NO: 27616
  GFR-binding peptide
  MOD_RES (6)..(7)..(40): Xaa is C or S
  MOD_RES (21)..(22)..(23)..(24)..(25): Xaa is A or G
  MOD_RES (26)..(27)..(28)..(29): Xaa is A or G or is absent

SEQ ID NO: 65489 - protein, 42 aa, Artificial Sequence; identical to SEQ ID NO: 6463
  GFR-binding peptide
  MOD_RES (6)..(7)..(41): Xaa is C or S
  MOD_RES (21)..(22)..(23)..(24)..(25): Xaa is A or G
  MOD_RES (26)..(27)..(28)..(29): Xaa is A or G or is absent

SEQ ID NO: 65490 - protein, 39 aa, Artificial Sequence; identical to SEQ ID NO: 6464
  GFR-binding peptide
  MOD_RES (4)..(5)..(39): Xaa is C or S
  MOD_RES (19)..(20)..(21)..(22)..(23): Xaa is A or G
  MOD_RES (24)..(25)..(26)..(27): Xaa is A or G or is absent

SEQ ID NO: 65491 - protein, 36 aa, Artificial Sequence; identical to SEQ ID NO: 6465
  GFR-binding peptide
  MOD_RES (33)..(35): Xaa is C or S
  MOD_RES (14)..(15)..(16)..(17)..(18): Xaa is A or G
  MOD_RES (19)..(20)..(21)..(22): Xaa is A or G or is absent

SEQ ID NO: 65492 - protein, 36 aa, Artificial Sequence
  GFR-binding peptide
  MOD_RES (5)..(6): Xaa is C or S
IPEPXXVPEKMSATSILYYDENKNVVLRKHRNMTVE

SEQ ID NO: 65493 - protein, 42 aa, Artificial Sequence; identical to SEQ ID NO: 6469
  GFR-binding peptide
  MOD_RES (5)..(6)..(40)..(42): Xaa is C or S
  MOD_RES (20)..(21)..(22)..(23)..(24): Xaa is A or G
  MOD_RES (25)..(26)..(27)..(28): Xaa is A or G or is absent

SEQ ID NO: 65494 - protein, 35 aa, Artificial Sequence; identical to SEQ ID NO: 27624
  GFR-binding peptide
  MOD_RES (1)..(35): Xaa is C or S
  MOD_RES (15)..(16)..(17)..(18)..(19): Xaa is A or G
  MOD_RES (20)..(21)..(22)..(23): Xaa is A or G or is absent

SEQ ID NO: 65495 - protein, 36 aa, Artificial Sequence; identical to SEQ ID NO: 6470
  GFR-binding peptide
  MOD_RES (34)..(36): Xaa is C or S
  MOD_RES (14)..(15)..(16)..(17)..(18): Xaa is A or G
  MOD_RES (19)..(20)..(21)..(22): Xaa is A or G or is absent

SEQ ID NO: 65496 - protein, 39 aa, Artificial Sequence; identical to SEQ ID NO: 27626
  GFR-binding peptide
  MOD_RES (2)..(3)..(37)..(39): Xaa is C or S
  MOD_RES (17)..(18)..(19)..(20)..(21): Xaa is A or G
  MOD_RES (22)..(23)..(24)..(25): Xaa is A or G or is absent

SEQ ID NO: 65497 - protein, 42 aa, Artificial Sequence; identical to SEQ ID NO: 27627
  GFR-binding peptide
  MOD_RES (6)..(7)..(41): Xaa is C or S
  MOD_RES (21)..(22)..(23)..(24)..(25): Xaa is A or G
  MOD_RES (26)..(27)..(28)..(29): Xaa is A or G or is absent

SEQ ID NO: 65498 - protein, 37 aa, Artificial Sequence; identical to SEQ ID NO: 27630
  GFR-binding peptide
  MOD_RES (2)..(3)..(37): Xaa is C or S
  MOD_RES (17)..(18)..(19)..(20)..(21): Xaa is A or G
  MOD_RES (22)..(23)..(24)..(25): Xaa is A or G or is absent

SEQ ID NO: 65499 - protein, 38 aa, Artificial Sequence; identical to SEQ ID NO: 6475
  GFR-binding peptide
  MOD_RES (3)..(4)..(35)..(37): Xaa is C or S

SEQ ID NO: 65500 - protein, 42 aa, Artificial Sequence; identical to SEQ ID NO: 27632
  GFR-binding peptide
  MOD_RES (6)..(7)..(41): Xaa is C or S
  MOD_RES (21)..(22)..(23)..(24)..(25): Xaa is A or G
  MOD_RES (26)..(27)..(28)..(29): Xaa is A or G or is absent

SEQ ID NO: 65501 - protein, 39 aa, Artificial Sequence
  GFR-binding peptide
  MOD_RES (4)..(5)..(39): Xaa is C or S
  MOD_RES (19)..(20)..(21)..(22)..(23): Xaa is A or G
  MOD_RES (24)..(25)..(26)..(27): Xaa is A or G or is absent
AGPXXTPTKMSATSMLYYXXXXXXXXXLRKHRGMVVDRX

SEQ ID NO: 65502 - protein, 33 aa, Artificial Sequence; identical to SEQ ID NO: 32651
  GFR-binding peptide
  MOD_RES (2)..(3): Xaa is C or S

SEQ ID NO: 65503 - protein, 41 aa, Artificial Sequence; identical to SEQ ID NO: 27633
  GFR-binding peptide
  MOD_RES (5)..(6)..(38)..(40): Xaa is C or S

SEQ ID NO: 65504 - protein, 41 aa, Artificial Sequence; identical to SEQ ID NO: 27634
  GFR-binding peptide
  MOD_RES (3)..(4)..(38)..(40): Xaa is C or S
  MOD_RES (18)..(19)..(20)..(21)..(22): Xaa is A or G
  MOD_RES (23)..(24)..(25)..(26): Xaa is A or G or is absent

SEQ ID NO: 65505 - protein, 38 aa, Artificial Sequence; identical to SEQ ID NO: 27636
  GFR-binding peptide
  MOD_RES (6)..(7): Xaa is C or S

SEQ ID NO: 65506 - protein, 43 aa, Artificial Sequence; identical to SEQ ID NO: 6479
  GFR-binding peptide
  MOD_RES (4)..(5)..(40)..(42): Xaa is C or S
  MOD_RES (19)..(20)..(21)..(22)..(23): Xaa is A or G
  MOD_RES (24)..(25)..(26)..(27): Xaa is A or G or is absent

SEQ ID NO: 65507 - protein, 35 aa, Artificial Sequence; identical to SEQ ID NO: 27641
  GFR-binding peptide
  MOD_RES (1)..(2)..(35): Xaa is C or S
  MOD_RES (16)..(17)..(18)..(19)..(20): Xaa is A or G
  MOD_RES (21)..(22)..(23)..(24): Xaa is A or G or is absent

SEQ ID NO: 65508 - protein, 41 aa, Artificial Sequence
  GFR-binding peptide
  MOD_RES (3)..(4)..(38)..(40): Xaa is C or S
  MOD_RES (18)..(19)..(20)..(21)..(22): Xaa is A or G
  MOD_RES (23)..(24)..(25)..(26): Xaa is A or G or is absent
EPXXVPEKMEPISILYLXXXXXXXXXKFKYENMTVESXAXR

SEQ ID NO: 65509 - protein, 38 aa, Artificial Sequence; identical to SEQ ID NO: 32659
  GFR-binding peptide
  MOD_RES (3)..(4)..(36)..(38): Xaa is C or S

SEQ ID NO: 65510 - protein, 34 aa, Artificial Sequence; identical to SEQ ID NO: 6486
  GFR-binding peptide
  MOD_RES (31)..(33): Xaa is C or S

SEQ ID NO: 65511 - protein, 37 aa, Artificial Sequence; identical to SEQ ID NO: 27644
  GFR-binding peptide
  MOD_RES (4)..(5): Xaa is C or S
  MOD_RES (19)..(20)..(21)..(22)..(23): Xaa is A or G
  MOD_RES (24)..(25)..(26)..(27): Xaa is A or G or is absent

SEQ ID NO: 65512 - protein, 35 aa, Artificial Sequence
  GFR-binding peptide
  MOD_RES (2)..(3): Xaa is C or S
  MOD_RES (17)..(18)..(19)..(20)..(21): Xaa is A or G
  MOD_RES (22)..(23)..(24)..(25): Xaa is A or G or is absent
SXXVPARLSATSILYYXXXXXXXXXLRKHRDMVVE

SEQ ID NO: 65513 - protein, 40 aa, Artificial Sequence
  GFR-binding peptide
  MOD_RES (6)..(7)..(39): Xaa is C or S
GIPEPXXVPEKMEPISILYLDENKNVVKFKYENMTVESXA

SEQ ID NO: 65514 - protein, 36 aa, Artificial Sequence; identical to SEQ ID NO: 27648
  GFR-binding peptide
  MOD_RES (2)..(3)..(35): Xaa is C or S

SEQ ID NO: 65515 - protein, 37 aa, Artificial Sequence; identical to SEQ ID NO: 57569
  GFR-binding peptide
  MOD_RES (6)..(7): Xaa is C or S

SEQ ID NO: 65516 - protein, 37 aa, Artificial Sequence; identical to SEQ ID NO: 27649
  GFR-binding peptide
  MOD_RES (2)..(3)..(34)..(36): Xaa is C or S

SEQ ID NO: 65517 - protein, 41 aa, Artificial Sequence
  GFR-binding peptide
  MOD_RES (6)..(7)..(39)..(41): Xaa is C or S
GIPEPXXVPEKMEPISILYLDENKNVVKFKYENMTVESXAX

SEQ ID NO: 65518 - protein, 35 aa, Artificial Sequence
  GFR-binding peptide
  MOD_RES (3)..(4)..(35): Xaa is C or S
APXXVPQALSPINILYFVGRKPKVYGKIPMIVRSX

SEQ ID NO: 65519 - protein, 36 aa, Artificial Sequence; identical to SEQ ID NO: 6489
  GFR-binding peptide
  MOD_RES (2)..(3)..(36): Xaa is C or S
  MOD_RES (17)..(18)..(19)..(20)..(21): Xaa is A or G
  MOD_RES (22)..(23)..(24)..(25): Xaa is A or G or is absent

SEQ ID NO: 65520 - protein, 37 aa, Artificial Sequence
  GFR-binding peptide
  MOD_RES (3)..(4): Xaa is C or S
  MOD_RES (18)..(19)..(20)..(21)..(22): Xaa is A or G
  MOD_RES (23)..(24)..(25)..(26): Xaa is A or G or is absent
EPXXVPEKMNAISILYFXXXXXXXXXLKKYRNMTVES

SEQ ID NO: 65521 - protein, 33 aa, Artificial Sequence; identical to SEQ ID NO: 27656
  GFR-binding peptide
  MOD_RES (1)..(1): Xaa is C or S
  MOD_RES (15)..(16)..(17)..(18)..(19): Xaa is A or G
  MOD_RES (20)..(21)..(22)..(23): Xaa is A or G or is absent

SEQ ID NO: 65522 - protein, 43 aa, Artificial Sequence; identical to SEQ ID NO: 6493
  GFR-binding peptide
  MOD_RES (6)..(7)..(41)..(43): Xaa is C or S
  MOD_RES (21)..(22)..(23)..(24)..(25): Xaa is A or G
  MOD_RES (26)..(27)..(28)..(29): Xaa is A or G or is absent

SEQ ID NO: 65523 - protein, 39 aa, Artificial Sequence
  GFR-binding peptide
  MOD_RES (5)..(6)..(38): Xaa is C or S
TPPTXXVPTRLSATSILYYDSANNVVLRKHRDMVVESXG

SEQ ID NO: 65524 - protein, 33 aa, Artificial Sequence; identical to SEQ ID NO: 6498
  GFR-binding peptide
  MOD_RES (33)..(33): Xaa is C or S
  MOD_RES (14)..(15)..(16)..(17)..(18): Xaa is A or G
  MOD_RES (19)..(20)..(21)..(22): Xaa is A or G or is absent

SEQ ID NO: 65525 - protein, 38 aa, Artificial Sequence; identical to SEQ ID NO: 32684
  GFR-binding peptide
  MOD_RES (4)..(5)..(37): Xaa is C or S

SEQ ID NO: 65526 - protein, 36 aa, Artificial Sequence; identical to SEQ ID NO: 32685
  GFR-binding peptide
  MOD_RES (1)..(35): Xaa is C or S
  MOD_RES (15)..(16)..(17)..(18)..(19): Xaa is A or G
  MOD_RES (20)..(21)..(22)..(23): Xaa is A or G or is absent

SEQ ID NO: 65527 - protein, 35 aa, Artificial Sequence; identical to SEQ ID NO: 27665
  GFR-binding peptide
  MOD_RES (2)..(3): Xaa is C or S
  MOD_RES (17)..(18)..(19)..(20)..(21): Xaa is A or G
  MOD_RES (22)..(23)..(24)..(25): Xaa is A or G or is absent

SEQ ID NO: 65528 - protein, 39 aa, Artificial Sequence; identical to SEQ ID NO: 6505
  GFR-binding peptide
  MOD_RES (4)..(5)..(37)..(39): Xaa is C or S

SEQ ID NO: 65529 - protein, 37 aa, Artificial Sequence
  GFR-binding peptide
  MOD_RES (3)..(4)..(37): Xaa is C or S
  MOD_RES (18)..(19)..(20)..(21)..(22): Xaa is A or G
  MOD_RES (23)..(24)..(25)..(26): Xaa is A or G or is absent
STXXAPVKTSPISMLYKXXXXXXXXXLKYHYMIVEEX

SEQ ID NO: 65530 - protein, 41 aa, Artificial Sequence; identical to SEQ ID NO: 57584
  GFR-binding peptide
  MOD_RES (6)..(7)..(38)..(40): Xaa is C or S

SEQ ID NO: 65531 - protein, 36 aa, Artificial Sequence; identical to SEQ ID NO: 32687
  GFR-binding peptide
  MOD_RES (1)..(2): Xaa is C or S
  MOD_RES (16)..(17)..(18)..(19)..(20): Xaa is A or G
  MOD_RES (21)..(22)..(23)..(24): Xaa is A or G or is absent

SEQ ID NO: 65532 - protein, 40 aa, Artificial Sequence; identical to SEQ ID NO: 32689
  GFR-binding peptide
  MOD_RES (2)..(3)..(37)..(39): Xaa is C or S
  MOD_RES (17)..(18)..(19)..(20)..(21): Xaa is A or G
  MOD_RES (22)..(23)..(24)..(25): Xaa is A or G or is absent

SEQ ID NO: 65533 - protein, 34 aa, Artificial Sequence
  GFR-binding peptide
  MOD_RES (2)..(3): Xaa is C or S
PXXTPTKMEPISMLYLNDKQQIIKFKYEGMVVDR

SEQ ID NO: 65534 - protein, 39 aa, Artificial Sequence
  GFR-binding peptide
  MOD_RES (4)..(5)..(39): Xaa is C or S
  MOD_RES (19)..(20)..(21)..(22)..(23): Xaa is A or G
  MOD_RES (24)..(25)..(26)..(27): Xaa is A or G or is absent
PEPXXVPEKMEPISILYLXXXXXXXXXKFKYENMTVESX

SEQ ID NO: 65535 - protein, 37 aa, Artificial Sequence; identical to SEQ ID NO: 27670
  GFR-binding peptide
  MOD_RES (2)..(3)..(37): Xaa is C or S
  MOD_RES (17)..(18)..(19)..(20)..(21): Xaa is A or G
  MOD_RES (22)..(23)..(24)..(25): Xaa is A or G or is absent

SEQ ID NO: 65536 - protein, 35 aa, Artificial Sequence; identical to SEQ ID NO: 6511
  GFR-binding peptide
  MOD_RES (1)..(2): Xaa is C or S
  MOD_RES (16)..(17)..(18)..(19)..(20): Xaa is A or G
  MOD_RES (21)..(22)..(23)..(24): Xaa is A or G or is absent

SEQ ID NO: 65537 - protein, 40 aa, Artificial Sequence
  GFR-binding peptide
  MOD_RES (5)..(6)..(37)..(39): Xaa is C or S
SASPXXVSQDLSPINILYFIGKTPKIYGKIPMIVKSXKXS

SEQ ID NO: 65538 - protein, 41 aa, Artificial Sequence; identical to SEQ ID NO: 6512
  GFR-binding peptide
  MOD_RES (6)..(7)..(38)..(40): Xaa is C or S

SEQ ID NO: 65539 - protein, 31 aa, Artificial Sequence; identical to SEQ ID NO: 6513
  GFR-binding peptide
  MOD_RES (1)..(1): Xaa is C or S

SEQ ID NO: 65540 - protein, 38 aa, Artificial Sequence
  GFR-binding peptide
  MOD_RES (5)..(6)..(37): Xaa is C or S
VPSTXXAPVKTSPISMLYKDNGRVLLLKYHYMIVEEXG

SEQ ID NO: 65541 - protein, 38 aa, Artificial Sequence; identical to SEQ ID NO: 32693
  GFR-binding peptide
  MOD_RES (3)..(4)..(35)..(37): Xaa is C or S

SEQ ID NO: 65542 - protein, 34 aa, Artificial Sequence; identical to SEQ ID NO: 57594
  GFR-binding peptide
  MOD_RES (1)..(32)..(34): Xaa is C or S

SEQ ID NO: 65543 - protein, 36 aa, Artificial Sequence; identical to SEQ ID NO: 32694
  GFR-binding peptide
  MOD_RES (3)..(4): Xaa is C or S
  MOD_RES (18)..(19)..(20)..(21)..(22): Xaa is A or G
  MOD_RES (23)..(24)..(25)..(26): Xaa is A or G or is absent

SEQ ID NO: 65544 - protein, 39 aa, Artificial Sequence
  GFR-binding peptide
  MOD_RES (6)..(7)..(39): Xaa is C or S
GSAGPXXTPTKMEPISMLYLNDKQQIIKFKYEGMVVDRX

SEQ ID NO: 65545 - protein, 40 aa, Artificial Sequence
  GFR-binding peptide
  MOD_RES (6)..(7): Xaa is C or S
  MOD_RES (21)..(22)..(23)..(24)..(25): Xaa is A or G
  MOD_RES (26)..(27)..(28)..(29): Xaa is A or G or is absent
GIPEPXXVPEKMSPINILYFXXXXXXXXXYGKIPNMTVES

SEQ ID NO: 65546 - protein, 39 aa, Artificial Sequence; identical to SEQ ID NO: 6520
  GFR-binding peptide
  MOD_RES (2)..(3)..(38): Xaa is C or S
  MOD_RES (17)..(18)..(19)..(20)..(21): Xaa is A or G
  MOD_RES (22)..(23)..(24)..(25): Xaa is A or G or is absent

SEQ ID NO: 65547 - protein, 32 aa, Artificial Sequence
  GFR-binding peptide
  MOD_RES (1)..(1): Xaa is C or S
XVPTKLSATSILYYDKGVVTYLRKHRGMAVSE

SEQ ID NO: 65548 - protein, 31 aa, Artificial Sequence; identical to SEQ ID NO: 27678
  GFR-binding peptide

SEQ ID NO: 65549 - protein, 33 aa, Artificial Sequence; identical to SEQ ID NO: 27686
  GFR-binding peptide
  MOD_RES (1)..(33): Xaa is C or S

SEQ ID NO: 65550 - protein, 31 aa, Artificial Sequence; identical to SEQ ID NO: 27687
  GFR-binding peptide

SEQ ID NO: 65551 - protein, 35 aa, Artificial Sequence; identical to SEQ ID NO: 57609
  GFR-binding peptide
  MOD_RES (1)..(2)..(33)..(35): Xaa is C or S

SEQ ID NO: 65552 - protein, 39 aa, Artificial Sequence; identical to SEQ ID NO: 32704
  GFR-binding peptide
  MOD_RES (5)..(6): Xaa is C or S
  MOD_RES (20)..(21)..(22)..(23)..(24): Xaa is A or G
  MOD_RES (25)..(26)..(27)..(28): Xaa is A or G or is absent

SEQ ID NO: 65553 - protein, 43 aa, Artificial Sequence; identical to SEQ ID NO: 6527
  GFR-binding peptide
  MOD_RES (6)..(7)..(40)..(42): Xaa is C or S
  MOD_RES (21)..(22)..(23)..(24)..(25): Xaa is A or G
  MOD_RES (26)..(27)..(28)..(29): Xaa is A or G or is absent

SEQ ID NO: 65554 - protein, 40 aa, Artificial Sequence
  GFR-binding peptide
  MOD_RES (4)..(5)..(38)..(40): Xaa is C or S
  MOD_RES (19)..(20)..(21)..(22)..(23): Xaa is A or G
  MOD_RES (24)..(25)..(26)..(27): Xaa is A or G or is absent
PSTXXAPVKTEPISMLYLXXXXXXXXXKFKYEMIVEEXGX

SEQ ID NO: 65555 - protein, 38 aa, Artificial Sequence; identical to SEQ ID NO: 32708
  GFR-binding peptide
  MOD_RES (3)..(4)..(36)..(38): Xaa is C or S

SEQ ID NO: 65556 - protein, 39 aa, Artificial Sequence; identical to SEQ ID NO: 27695
  GFR-binding peptide
  MOD_RES (3)..(4)..(38): Xaa is C or S
  MOD_RES (18)..(19)..(20)..(21)..(22): Xaa is A or G
  MOD_RES (23)..(24)..(25)..(26): Xaa is A or G or is absent

SEQ ID NO: 65557 - protein, 41 aa, Artificial Sequence; identical to SEQ ID NO: 32712
  GFR-binding peptide
  MOD_RES (3)..(4)..(38)..(40): Xaa is C or S
  MOD_RES (18)..(19)..(20)..(21)..(22): Xaa is A or G
  MOD_RES (23)..(24)..(25)..(26): Xaa is A or G or is absent

SEQ ID NO: 65558 - protein, 37 aa, Artificial Sequence; identical to SEQ ID NO: 6534
  GFR-binding peptide
  MOD_RES (1)..(2)..(37): Xaa is C or S
  MOD_RES (16)..(17)..(18)..(19)..(20): Xaa is A or G
  MOD_RES (21)..(22)..(23)..(24): Xaa is A or G or is absent

SEQ ID NO: 65559 - protein, 39 aa, Artificial Sequence; identical to SEQ ID NO: 6536
  GFR-binding peptide
  MOD_RES (6)..(6): Xaa is C or S
  MOD_RES (20)..(21)..(22)..(23)..(24): Xaa is A or G
  MOD_RES (25)..(26)..(27)..(28): Xaa is A or G or is absent

SEQ ID NO: 65560 - protein, 36 aa, Artificial Sequence; identical to SEQ ID NO: 13902
  GFR-binding peptide
  MOD_RES (2)..(3)..(35): Xaa is C or S

SEQ ID NO: 65561 - protein, 37 aa, Artificial Sequence; identical to SEQ ID NO: 6539
  GFR-binding peptide
  MOD_RES (1)..(2)..(35)..(37): Xaa is C or S
  MOD_RES (16)..(17)..(18)..(19)..(20): Xaa is A or G
  MOD_RES (21)..(22)..(23)..(24): Xaa is A or G or is absent

SEQ ID NO: 65562 - protein, 36 aa, Artificial Sequence; identical to SEQ ID NO: 57623
  GFR-binding peptide
  MOD_RES (1)..(2)..(35): Xaa is C or S
  MOD_RES (16)..(17)..(18)..(19)..(20): Xaa is A or G
  MOD_RES (21)..(22)..(23)..(24): Xaa is A or G or is absent

SEQ ID NO: 65563 - protein, 35 aa, Artificial Sequence; identical to SEQ ID NO: 32722
  GFR-binding peptide
  MOD_RES (1)..(35): Xaa is C or S
  MOD_RES (15)..(16)..(17)..(18)..(19): Xaa is A or G
  MOD_RES (20)..(21)..(22)..(23): Xaa is A or G or is absent

SEQ ID NO: 65564 - protein, 35 aa, Artificial Sequence; identical to SEQ ID NO: 6542
  GFR-binding peptide
  MOD_RES (1)..(32)..(34): Xaa is C or S

SEQ ID NO: 65565 - protein, 38 aa, Artificial Sequence; identical to SEQ ID NO: 6545
  GFR-binding peptide
  MOD_RES (1)..(2)..(36)..(38): Xaa is C or S
  MOD_RES (16)..(17)..(18)..(19)..(20): Xaa is A or G
  MOD_RES (21)..(22)..(23)..(24): Xaa is A or G or is absent

SEQ ID NO: 65566 - protein, 30 aa, Artificial Sequence
  GFR-binding peptide
VPEKMSPINILYFDENKNVVYGKIPNMTVE

SEQ ID NO: 65567 - protein, 36 aa, Artificial Sequence; identical to SEQ ID NO: 6547
  GFR-binding peptide
  MOD_RES (1)..(35): Xaa is C or S
  MOD_RES (15)..(16)..(17)..(18)..(19): Xaa is A or G
  MOD_RES (20)..(21)..(22)..(23): Xaa is A or G or is absent

SEQ ID NO: 65568 - protein, 38 aa, Artificial Sequence; identical to SEQ ID NO: 6549
  GFR-binding peptide
  MOD_RES (3)..(4)..(38): Xaa is C or S
  MOD_RES (18)..(19)..(20)..(21)..(22): Xaa is A or G
  MOD_RES (23)..(24)..(25)..(26): Xaa is A or G or is absent

SEQ ID NO: 65569 - protein, 37 aa, Artificial Sequence; identical to SEQ ID NO: 27708
  GFR-binding peptide
  MOD_RES (1)..(2)..(36): Xaa is C or S
  MOD_RES (16)..(17)..(18)..(19)..(20): Xaa is A or G
  MOD_RES (21)..(22)..(23)..(24): Xaa is A or G or is absent

SEQ ID NO: 65570 - protein, 38 aa, Artificial Sequence
  GFR-binding peptide
  MOD_RES (5)..(6)..(38): Xaa is C or S
SAGPXXTPTKMSPISMLYKNDKQQIILKYHYGMVVDRX

SEQ ID NO: 65571 - protein, 40 aa, Artificial Sequence; identical to SEQ ID NO: 6552
  GFR-binding peptide
  MOD_RES (2)..(3)..(37)..(39): Xaa is C or S
  MOD_RES (17)..(18)..(19)..(20)..(21): Xaa is A or G
  MOD_RES (22)..(23)..(24)..(25): Xaa is A or G or is absent

SEQ ID NO: 65572 - protein, 38 aa, Artificial Sequence; identical to SEQ ID NO: 6554
  GFR-binding peptide
  MOD_RES (3)..(4): Xaa is C or S
  MOD_RES (18)..(19)..(20)..(21)..(22): Xaa is A or G
  MOD_RES (23)..(24)..(25)..(26): Xaa is A or G or is absent

SEQ ID NO: 65573 - protein, 40 aa, Artificial Sequence; identical to SEQ ID NO: 32730
  GFR-binding peptide
  MOD_RES (4)..(5)..(38)..(40): Xaa is C or S

SEQ ID NO: 65574 - protein, 37 aa, Artificial Sequence; identical to SEQ ID NO: 6557
  GFR-binding peptide
  MOD_RES (6)..(7): Xaa is C or S

SEQ ID NO: 65575 - protein, 38 aa, Artificial Sequence; identical to SEQ ID NO: 6559
  GFR-binding peptide
  MOD_RES (4)..(5): Xaa is C or S
  MOD_RES (19)..(20)..(21)..(22)..(23): Xaa is A or G
  MOD_RES (24)..(25)..(26)..(27): Xaa is A or G or is absent

SEQ ID NO: 65576 - protein, 36 aa, Artificial Sequence; identical to SEQ ID NO: 32738
  GFR-binding peptide
  MOD_RES (2)..(34)..(36): Xaa is C or S

SEQ ID NO: 65577 - protein, 39 aa, Artificial Sequence
  GFR-binding peptide
  MOD_RES (4)..(5)..(37)..(39): Xaa is C or S
PPTXXVPTRLEPISILYLDSANNVVKFKYEDMVVESXGX

SEQ ID NO: 65578 - protein, 37 aa, Artificial Sequence; identical to SEQ ID NO: 27719
  GFR-binding peptide
  MOD_RES (34)..(36): Xaa is C or S
  MOD_RES (14)..(15)..(16)..(17)..(18): Xaa is A or G
  MOD_RES (19)..(20)..(21)..(22): Xaa is A or G or is absent

SEQ ID NO: 65579 - protein, 37 aa, Artificial Sequence; identical to SEQ ID NO: 32742
  GFR-binding peptide
  MOD_RES (2)..(3)..(37): Xaa is C or S
  MOD_RES (17)..(18)..(19)..(20)..(21): Xaa is A or G
  MOD_RES (22)..(23)..(24)..(25): Xaa is A or G or is absent

SEQ ID NO: 65580 - protein, 39 aa, Artificial Sequence; identical to SEQ ID NO: 32744
  GFR-binding peptide
  MOD_RES (5)..(6): Xaa is C or S
  MOD_RES (20)..(21)..(22)..(23)..(24): Xaa is A or G
  MOD_RES (25)..(26)..(27)..(28): Xaa is A or G or is absent

SEQ ID NO: 65581 - protein, 35 aa, Artificial Sequence; identical to SEQ ID NO: 6561
  GFR-binding peptide
  MOD_RES (2)..(3)..(35): Xaa is C or S

SEQ ID NO: 65582 - protein, 38 aa, Artificial Sequence
  GFR-binding peptide
  MOD_RES (2)..(3)..(35)..(37): Xaa is C or S
TXXVPTRLSPISILYKDSANNVVLKYHYDMVVESXGXR

SEQ ID NO: 65583 - protein, 39 aa, Artificial Sequence; identical to SEQ ID NO: 32747
  GFR-binding peptide
  MOD_RES (5)..(6)..(39): Xaa is C or S

SEQ ID NO: 65584 - protein, 37 aa, Artificial Sequence; identical to SEQ ID NO: 27721
  GFR-binding peptide
  MOD_RES (4)..(5): Xaa is C or S
  MOD_RES (19)..(20)..(21)..(22)..(23): Xaa is A or G
  MOD_RES (24)..(25)..(26)..(27): Xaa is A or G or is absent

SEQ ID NO: 65585 - protein, 38 aa, Artificial Sequence
  GFR-binding peptide
  MOD_RES (3)..(4)..(38): Xaa is C or S
  MOD_RES (18)..(19)..(20)..(21)..(22): Xaa is A or G
  MOD_RES (23)..(24)..(25)..(26): Xaa is A or G or is absent
PTXXVPTRLSPISILYKXXXXXXXXXLKYHYDMVVESX

SEQ ID NO: 65586 - protein, 38 aa, Artificial Sequence; identical to SEQ ID NO: 6567
  GFR-binding peptide
  MOD_RES (5)..(6)..(38): Xaa is C or S

SEQ ID NO: 65587 - protein, 36 aa, Artificial Sequence; identical to SEQ ID NO: 6569
  GFR-binding peptide
  MOD_RES (33)..(35): Xaa is C or S
  MOD_RES (14)..(15)..(16)..(17)..(18): Xaa is A or G
  MOD_RES (19)..(20)..(21)..(22): Xaa is A or G or is absent

SEQ ID NO: 65588 - protein, 40 aa, Artificial Sequence; identical to SEQ ID NO: 27728
  GFR-binding peptide
  MOD_RES (3)..(4)..(39): Xaa is C or S
  MOD_RES (18)..(19)..(20)..(21)..(22): Xaa is A or G
  MOD_RES (23)..(24)..(25)..(26): Xaa is A or G or is absent

SEQ ID NO: 65589 - protein, 38 aa, Artificial Sequence; identical to SEQ ID NO: 27729
  GFR-binding peptide
  MOD_RES (4)..(5)..(37): Xaa is C or S

SEQ ID NO: 65590 - protein, 32 aa, Artificial Sequence; identical to SEQ ID NO: 6571
  GFR-binding peptide
  MOD_RES (1)..(2): Xaa is C or S

SEQ ID NO: 65591 - protein, 32 aa, Artificial Sequence; identical to SEQ ID NO: 27731
  GFR-binding peptide
  MOD_RES (1)..(2): Xaa is C or S

SEQ ID NO: 65592 - protein, 35 aa, Artificial Sequence
  GFR-binding peptide
  MOD_RES (1)..(2)..(33)..(35): Xaa is C or S
XXVPQALSPINILYFVGRKPKVYGKIPMIVRSXKX

SEQ ID NO: 65593 - protein, 43 aa, Artificial Sequence; identical to SEQ ID NO: 6573
  GFR-binding peptide
  MOD_RES (5)..(6)..(41)..(43): Xaa is C or S
  MOD_RES (20)..(21)..(22)..(23)..(24): Xaa is A or G
  MOD_RES (25)..(26)..(27)..(28): Xaa is A or G or is absent

SEQ ID NO: 65594 - protein, 38 aa, Artificial Sequence; identical to SEQ ID NO: 32752
  GFR-binding peptide
  MOD_RES (5)..(6): Xaa is C or S
  MOD_RES (20)..(21)..(22)..(23)..(24): Xaa is A or G
  MOD_RES (25)..(26)..(27)..(28): Xaa is A or G or is absent

SEQ ID NO: 65595 - protein, 35 aa, Artificial Sequence
  GFR-binding peptide
  MOD_RES (32)..(34): Xaa is C or S
VPEKMSPISILYKDENKNVVLKYHYNMTVESXAXR

SEQ ID NO: 65596 - protein, 43 aa, Artificial Sequence; identical to SEQ ID NO: 27739
  GFR-binding peptide
  MOD_RES (6)..(7)..(41)..(43): Xaa is C or S
  MOD_RES (21)..(22)..(23)..(24)..(25): Xaa is A or G
  MOD_RES (26)..(27)..(28)..(29): Xaa is A or G or is absent

SEQ ID NO: 65597 - protein, 35 aa, Artificial Sequence; identical to SEQ ID NO: 6577
  GFR-binding peptide
  MOD_RES (2)..(3): Xaa is C or S
  MOD_RES (17)..(18)..(19)..(20)..(21): Xaa is A or G
  MOD_RES (22)..(23)..(24)..(25): Xaa is A or G or is absent

SEQ ID NO: 65598 - protein, 30 aa, Artificial Sequence; identical to SEQ ID NO: 6580
  GFR-binding peptide

SEQ ID NO: 65599 - protein, 39 aa, Artificial Sequence
  GFR-binding peptide
  MOD_RES (3)..(4)..(37)..(39): Xaa is C or S
  MOD_RES (18)..(19)..(20)..(21)..(22): Xaa is A or G
  MOD_RES (23)..(24)..(25)..(26): Xaa is A or G or is absent
STXXAPVKTEPISMLYLXXXXXXXXXKFKYEMIVEEXGX

SEQ ID NO: 65600 - protein, 35 aa, Artificial Sequence; identical to SEQ ID NO: 6581
  GFR-binding peptide
  MOD_RES (3)..(3): Xaa is C or S
  MOD_RES (17)..(18)..(19)..(20)..(21): Xaa is A or G
  MOD_RES (22)..(23)..(24)..(25): Xaa is A or G or is absent

SEQ ID NO: 65601 - protein, 37 aa, Artificial Sequence; identical to SEQ ID NO: 27744
  GFR-binding peptide
  MOD_RES (1)..(2)..(35)..(37): Xaa is C or S
  MOD_RES (16)..(17)..(18)..(19)..(20): Xaa is A or G
  MOD_RES (21)..(22)..(23)..(24): Xaa is A or G or is absent

SEQ ID NO: 65602 - protein, 36 aa, Artificial Sequence
  GFR-binding peptide
  MOD_RES (1)..(2)..(34)..(36): Xaa is C or S
XXVPTRLSATSILYYDSANNVVLRKHRDMVVESXGX

SEQ ID NO: 65603 - protein, 35 aa, Artificial Sequence; identical to SEQ ID NO: 27745
  GFR-binding peptide
  MOD_RES (34)..(34): Xaa is C or S
  MOD_RES (14)..(15)..(16)..(17)..(18): Xaa is A or G
  MOD_RES (19)..(20)..(21)..(22): Xaa is A or G or is absent

SEQ ID NO: 65604 - protein, 37 aa, Artificial Sequence; identical to SEQ ID NO: 6582
  GFR-binding peptide
  MOD_RES (3)..(4): Xaa is C or S
  MOD_RES (18)..(19)..(20)..(21)..(22): Xaa is A or G
  MOD_RES (23)..(24)..(25)..(26): Xaa is A or G or is absent

SEQ ID NO: 65605 - protein, 36 aa, Artificial Sequence
  GFR-binding peptide
  MOD_RES (1)..(33)..(35): Xaa is C or S
XVPTRLEPISILYLDSANNVVKFKYEDMVVESXGXR

SEQ ID NO: 65606 - protein, 37 aa, Artificial Sequence; identical to SEQ ID NO: 6584
  GFR-binding peptide
  MOD_RES (1)..(2)..(35)..(37): Xaa is C or S
  MOD_RES (16)..(17)..(18)..(19)..(20): Xaa is A or G
  MOD_RES (21)..(22)..(23)..(24): Xaa is A or G or is absent

SEQ ID NO: 65607 - protein, 37 aa, Artificial Sequence; identical to SEQ ID NO: 6591
  GFR-binding peptide
  MOD_RES (4)..(5): Xaa is C or S
  MOD_RES (19)..(20)..(21)..(22)..(23): Xaa is A or G
  MOD_RES (24)..(25)..(26)..(27): Xaa is A or G or is absent

SEQ ID NO: 65608 - protein, 34 aa, Artificial Sequence; identical to SEQ ID NO: 6592
  GFR-binding peptide
  MOD_RES (4)..(4): Xaa is C or S

SEQ ID NO: 65609 - protein, 32 aa, Artificial Sequence; identical to SEQ ID NO: 13962
  GFR-binding peptide
  MOD_RES (1)..(1): Xaa is C or S

SEQ ID NO: 65610 - protein, 40 aa, Artificial Sequence; identical to SEQ ID NO: 6595
  GFR-binding peptide
  MOD_RES (2)..(3)..(37)..(39): Xaa is C or S
  MOD_RES (17)..(18)..(19)..(20)..(21): Xaa is A or G
  MOD_RES (22)..(23)..(24)..(25): Xaa is A or G or is absent

SEQ ID NO: 65611 - protein, 38 aa, Artificial Sequence; identical to SEQ ID NO: 32775
  GFR-binding peptide
  MOD_RES (4)..(5)..(37): Xaa is C or S

SEQ ID NO: 65612 - protein, 39 aa, Artificial Sequence
  GFR-binding peptide
  MOD_RES (3)..(4)..(38): Xaa is C or S
  MOD_RES (18)..(19)..(20)..(21)..(22): Xaa is A or G
  MOD_RES (23)..(24)..(25)..(26): Xaa is A or G or is absent
EPXXVPEKMSPINILYFXXXXXXXXXYGKIPNMTVESXA

SEQ ID NO: 65613 - protein, 37 aa, Artificial Sequence; identical to SEQ ID NO: 27754
  GFR-binding peptide
  MOD_RES (5)..(6)..(37): Xaa is C or S

SEQ ID NO: 65614 - protein, 34 aa, Artificial Sequence; identical to SEQ ID NO: 27755
  GFR-binding peptide
  MOD_RES (32)..(34): Xaa is C or S

SEQ ID NO: 65615 - protein, 36 aa, Artificial Sequence
  GFR-binding peptide
  MOD_RES (1)..(2)..(34)..(36): Xaa is C or S
XXVPEKMSPINILYFDENKNVVYGKIPNMTVESXAX

SEQ ID NO: 65616 - protein, 38 aa, Artificial Sequence
  GFR-binding peptide
  MOD_RES (4)..(5)..(37): Xaa is C or S
AGPXXTPTKMEPISMLYLNDKQQIIKFKYEGMVVDRXG

SEQ ID NO: 65617 - protein, 35 aa, Artificial Sequence
  GFR-binding peptide
  MOD_RES (3)..(4): Xaa is C or S
PTXXVPTRLSPISILYKDSANNVVLKYHYDMVVES

SEQ ID NO: 65618 - protein, 39 aa, Artificial Sequence; identical to SEQ ID NO: 6599
  GFR-binding peptide
  MOD_RES (2)..(3)..(36)..(38): Xaa is C or S
  MOD_RES (17)..(18)..(19)..(20)..(21): Xaa is A or G
  MOD_RES (22)..(23)..(24)..(25): Xaa is A or G or is absent

SEQ ID NO: 65619 - protein, 42 aa, Artificial Sequence; identical to SEQ ID NO: 6600
  GFR-binding peptide
  MOD_RES (4)..(5)..(39)..(41): Xaa is C or S
  MOD_RES (19)..(20)..(21)..(22)..(23): Xaa is A or G
  MOD_RES (24)..(25)..(26)..(27): Xaa is A or G or is absent

SEQ ID NO: 65620 - protein, 39 aa, Artificial Sequence; identical to SEQ ID NO: 57695
  GFR-binding peptide
  MOD_RES (6)..(7)..(39): Xaa is C or S

SEQ ID NO: 65621 - protein, 36 aa, Artificial Sequence; identical to SEQ ID NO: 6605
  GFR-binding peptide
  MOD_RES (1)..(2)..(34)..(36): Xaa is C or S

SEQ ID NO: 65622 - protein, 30 aa, Artificial Sequence; identical to SEQ ID NO: 27763
  GFR-binding peptide

SEQ ID NO: 65623 - protein, 35 aa, Artificial Sequence; identical to SEQ ID NO: 27764
  GFR-binding peptide
  MOD_RES (2)..(3): Xaa is C or S

SEQ ID NO: 65624 - protein, 37 aa, Artificial Sequence; identical to SEQ ID NO: 32798
  GFR-binding peptide
  MOD_RES (5)..(6): Xaa is C or S

SEQ ID NO: 65625 - protein, 39 aa, Artificial Sequence; identical to SEQ ID NO: 6609
  GFR-binding peptide
  MOD_RES (4)..(5)..(36)..(38): Xaa is C or S

SEQ ID NO: 65626 - protein, 35 aa, Artificial Sequence; identical to SEQ ID NO: 32800
  GFR-binding peptide
  MOD_RES (3)..(4): Xaa is C or S

SEQ ID NO: 65627 - protein, 38 aa, Artificial Sequence
  GFR-binding peptide
  MOD_RES (1)..(35)..(37): Xaa is C or S
  MOD_RES (15)..(16)..(17)..(18)..(19): Xaa is A or G
  MOD_RES (20)..(21)..(22)..(23): Xaa is A or G or is absent
XVPEKMSATSILYYXXXXXXXXXLRKHRNMTVESXAXR

SEQ ID NO: 65628 - protein, 36 aa, Artificial Sequence
  GFR-binding peptide
  MOD_RES (4)..(5)..(36): Xaa is C or S
PSTXXAPVKTSPISMLYKDNGRVLLLKYHYMIVEEX

SEQ ID NO: 65629 - protein, 35 aa, Artificial Sequence
  GFR-binding peptide
  MOD_RES (2)..(3): Xaa is C or S
  MOD_RES (17)..(18)..(19)..(20)..(21): Xaa is A or G
  MOD_RES (22)..(23)..(24)..(25): Xaa is A or G or is absent
TXXAPVKTSATSMLYYXXXXXXXXXLRKHRMIVEE

SEQ ID NO: 65630 - protein, 37 aa, Artificial Sequence
  GFR-binding peptide
  MOD_RES (1)..(35)..(37): Xaa is C or S
  MOD_RES (15)..(16)..(17)..(18)..(19): Xaa is A or G
  MOD_RES (20)..(21)..(22)..(23): Xaa is A or G or is absent
XVPEKMSPINILYFXXXXXXXXXYGKIPNMTVESXAX

SEQ ID NO: 65631 - protein, 38 aa, Artificial Sequence; identical to SEQ ID NO: 6612
  GFR-binding peptide
  MOD_RES (5)..(6)..(38): Xaa is C or S

SEQ ID NO: 65632 - protein, 41 aa, Artificial Sequence; identical to SEQ ID NO: 6614
  GFR-binding peptide
  MOD_RES (5)..(6)..(39)..(41): Xaa is C or S

SEQ ID NO: 65633 - protein, 35 aa, Artificial Sequence; identical to SEQ ID NO: 6615
  GFR-binding peptide
  MOD_RES (2)..(3)..(35): Xaa is C or S

SEQ ID NO: 65634 - protein, 36 aa, Artificial Sequence; identical to SEQ ID NO: 27770
  GFR-binding peptide
  MOD_RES (1)..(2)..(34)..(36): Xaa is C or S

SEQ ID NO: 65635 - protein, 40 aa, Artificial Sequence; identical to SEQ ID NO: 27771
  GFR-binding peptide
  MOD_RES (3)..(4)..(38)..(40): Xaa is C or S
  MOD_RES (18)..(19)..(20)..(21)..(22): Xaa is A or G
  MOD_RES (23)..(24)..(25)..(26): Xaa is A or G or is absent

SEQ ID NO: 65636 - protein, 41 aa, Artificial Sequence
  GFR-binding peptide
  MOD_RES (3)..(4)..(38)..(40): Xaa is C or S
  MOD_RES (18)..(19)..(20)..(21)..(22): Xaa is A or G
  MOD_RES (23)..(24)..(25)..(26): Xaa is A or G or is absent
PTXXVPTRLSPISILYKXXXXXXXXXLKYHYDMVVESXGXR

SEQ ID NO: 65637 - protein, 37 aa, Artificial Sequence
  GFR-binding peptide
  MOD_RES (1)..(34)..(36): Xaa is C or S
  MOD_RES (15)..(16)..(17)..(18)..(19): Xaa is A or G
  MOD_RES (20)..(21)..(22)..(23): Xaa is A or G or is absent
XAPVKTSPISMLYKXXXXXXXXXLKYHYMIVEEXGXL

SEQ ID NO: 65638 - protein, 40 aa, Artificial Sequence; identical to SEQ ID NO: 57722
  GFR-binding peptide
  MOD_RES (3)..(4)..(38)..(40): Xaa is C or S
  MOD_RES (18)..(19)..(20)..(21)..(22): Xaa is A or G
  MOD_RES (23)..(24)..(25)..(26): Xaa is A or G or is absent

SEQ ID NO: 65639 - protein, 39 aa, Artificial Sequence; identical to SEQ ID NO: 6620
  GFR-binding peptide
  MOD_RES (6)..(7): Xaa is C or S

SEQ ID NO: 65640 - protein, 39 aa, Artificial Sequence; identical to SEQ ID NO: 6622
  GFR-binding peptide
  MOD_RES (4)..(5)..(36)..(38): Xaa is C or S

SEQ ID NO: 65641 - protein, 33 aa, Artificial Sequence; identical to SEQ ID NO: 27775
  GFR-binding peptide
  MOD_RES (31)..(33): Xaa is C or S

SEQ ID NO: 65642 - protein, 31 aa, Artificial Sequence
  GFR-binding peptide
  MOD_RES (31)..(31): Xaa is C or S
VPQALSPINILYFVGRKPKVYGKIPMIVRSX

SEQ ID NO: 65643 - protein, 34 aa, Artificial Sequence; identical to SEQ ID NO: 32819
  GFR-binding peptide
  MOD_RES (34)..(34): Xaa is C or S
  MOD_RES (14)..(15)..(16)..(17)..(18): Xaa is A or G
  MOD_RES (19)..(20)..(21)..(22): Xaa is A or G or is absent

SEQ ID NO: 65644 - protein, 40 aa, Artificial Sequence; identical to SEQ ID NO: 27778
  GFR-binding peptide
  MOD_RES (3)..(4)..(38)..(40): Xaa is C or S
  MOD_RES (18)..(19)..(20)..(21)..(22): Xaa is A or G
  MOD_RES (23)..(24)..(25)..(26): Xaa is A or G or is absent

SEQ ID NO: 65645 - protein, 33 aa, Artificial Sequence; identical to SEQ ID NO: 27779
  GFR-binding peptide
  MOD_RES (1)..(33): Xaa is C or S

SEQ ID NO: 65646 - protein, 44 aa, Artificial Sequence; identical to SEQ ID NO: 27783
  GFR-binding peptide
  MOD_RES (5)..(6)..(41)..(43): Xaa is C or S
  MOD_RES (20)..(21)..(22)..(23)..(24): Xaa is A or G
  MOD_RES (25)..(26)..(27)..(28): Xaa is A or G or is absent

SEQ ID NO: 65647 - protein, 37 aa, Artificial Sequence
  GFR-binding peptide
  MOD_RES (34)..(36): Xaa is C or S
  MOD_RES (14)..(15)..(16)..(17)..(18): Xaa is A or G
  MOD_RES (19)..(20)..(21)..(22): Xaa is A or G or is absent
VPEKMSPISILYKXXXXXXXXXLKYHYNMTVESXAXR

SEQ ID NO: 65648 - protein, 36 aa, Artificial Sequence; identical to SEQ ID NO: 32826
  GFR-binding peptide
  MOD_RES (2)..(3): Xaa is C or S
  MOD_RES (17)..(18)..(19)..(20)..(21): Xaa is A or G
  MOD_RES (22)..(23)..(24)..(25): Xaa is A or G or is absent

SEQ ID NO: 65649 - protein, 37 aa, Artificial Sequence; identical to SEQ ID NO: 32827
  GFR-binding peptide
  MOD_RES (3)..(4): Xaa is C or S
  MOD_RES (18)..(19)..(20)..(21)..(22): Xaa is A or G
  MOD_RES (23)..(24)..(25)..(26): Xaa is A or G or is absent

SEQ ID NO: 65650 - protein, 37 aa, Artificial Sequence
  GFR-binding peptide
  MOD_RES (3)..(4)..(36): Xaa is C or S
GPXXTPTKMSATSMLYYNDKQQIILRKHRGMVVDRXG

SEQ ID NO: 65651 - protein, 40 aa, Artificial Sequence; identical to SEQ ID NO: 6630
  GFR-binding peptide
  MOD_RES (4)..(38)..(40): Xaa is C or S
  MOD_RES (18)..(19)..(20)..(21)..(22): Xaa is A or G
  MOD_RES (23)..(24)..(25)..(26): Xaa is A or G or is absent

SEQ ID NO: 65652 - protein, 37 aa, Artificial Sequence; identical to SEQ ID NO: 32835
  GFR-binding peptide
  MOD_RES (4)..(5)..(37): Xaa is C or S

SEQ ID NO: 65653 - protein, 36 aa, Artificial Sequence
  GFR-binding peptide
  MOD_RES (1)..(2)..(36): Xaa is C or S
  MOD_RES (16)..(17)..(18)..(19)..(20): Xaa is A or G
  MOD_RES (21)..(22)..(23)..(24): Xaa is A or G or is absent
XXTPTKMEPISMLYLXXXXXXXXXKFKYEGMVVDRX

SEQ ID NO: 65654 - protein, 37 aa, Artificial Sequence; identical to SEQ ID NO: 27795
  GFR-binding peptide
  MOD_RES (4)..(5): Xaa is C or S
  MOD_RES (19)..(20)..(21)..(22)..(23): Xaa is A or G
  MOD_RES (24)..(25)..(26)..(27): Xaa is A or G or is absent

SEQ ID NO: 65655 - protein, 38 aa, Artificial Sequence
  GFR-binding peptide
  MOD_RES (3)..(4)..(36)..(38): Xaa is C or S
EPXXVPEKMEPISILYLDENKNVVKFKYENMTVESXAX

SEQ ID NO: 65656 - protein, 39 aa, Artificial Sequence
  GFR-binding peptide
  MOD_RES (1)..(2)..(36)..(38): Xaa is C or S
  MOD_RES (16)..(17)..(18)..(19)..(20): Xaa is A or G
  MOD_RES (21)..(22)..(23)..(24): Xaa is A or G or is absent
XXVPEKMNAISILYFXXXXXXXXXLKKYRNMTVESXAXR

SEQ ID NO: 65657 - protein, 34 aa, Artificial Sequence; identical to SEQ ID NO: 27797
  GFR-binding peptide
  MOD_RES (1)..(1): Xaa is C or S
  MOD_RES (15)..(16)..(17)..(18)..(19): Xaa is A or G
  MOD_RES (20)..(21)..(22)..(23): Xaa is A or G or is absent

SEQ ID NO: 65658 - protein, 35 aa, Artificial Sequence; identical to SEQ ID NO: 27799
  GFR-binding peptide
  MOD_RES (1)..(2)..(34): Xaa is C or S

SEQ ID NO: 65659 - protein, 38 aa, Artificial Sequence; identical to SEQ ID NO: 27801
  GFR-binding peptide
  MOD_RES (4)..(5)..(36)..(38): Xaa is C or S

SEQ ID NO: 65660 - protein, 40 aa, Artificial Sequence; identical to SEQ ID NO: 6635
  GFR-binding peptide
  MOD_RES (6)..(7)..(40): Xaa is C or S
  MOD_RES (21)..(22)..(23)..(24)..(25): Xaa is A or G
  MOD_RES (26)..(27)..(28)..(29): Xaa is A or G or is absent

SEQ ID NO: 65661 - protein, 40 aa, Artificial Sequence
  GFR-binding peptide
  MOD_RES (5)..(6)..(40): Xaa is C or S
  MOD_RES (20)..(21)..(22)..(23)..(24): Xaa is A or G
  MOD_RES (25)..(26)..(27)..(28): Xaa is A or G or is absent
TPPTXXVPTRLEPISILYLXXXXXXXXXKFKYEDMVVESX

SEQ ID NO: 65662 - protein, 40 aa, Artificial Sequence; identical to SEQ ID NO: 6641
  GFR-binding peptide
  MOD_RES (5)..(6)..(37)..(39): Xaa is C or S

SEQ ID NO: 65663 - protein, 35 aa, Artificial Sequence; identical to SEQ ID NO: 6642
  GFR-binding peptide
  MOD_RES (1)..(34): Xaa is C or S
  MOD_RES (15)..(16)..(17)..(18)..(19): Xaa is A or G
  MOD_RES (20)..(21)..(22)..(23): Xaa is A or G or is absent

SEQ ID NO: 65664 - protein, 37 aa, Artificial Sequence
  GFR-binding peptide
  MOD_RES (2)..(3)..(37): Xaa is C or S
  MOD_RES (17)..(18)..(19)..(20)..(21): Xaa is A or G
  MOD_RES (22)..(23)..(24)..(25): Xaa is A or G or is absent
PXXVPEKMEPISILYLXXXXXXXXXKFKYENMTVESX

SEQ ID NO: 65665 - protein, 37 aa, Artificial Sequence; identical to SEQ ID NO: 32850
  GFR-binding peptide
  MOD_RES (34)..(36): Xaa is C or S
  MOD_RES (14)..(15)..(16)..(17)..(18): Xaa is A or G
  MOD_RES (19)..(20)..(21)..(22): Xaa is A or G or is absent

SEQ ID NO: 65666 - protein, 41 aa, Artificial Sequence; identical to SEQ ID NO: 6644
  GFR-binding peptide
  MOD_RES (6)..(7)..(41): Xaa is C or S
  MOD_RES (21)..(22)..(23)..(24)..(25): Xaa is A or G
  MOD_RES (26)..(27)..(28)..(29): Xaa is A or G or is absent

SEQ ID NO: 65667 - protein, 32 aa, Artificial Sequence
  GFR-binding peptide
  MOD_RES (14)..(15)..(16)..(17)..(18): Xaa is A or G
  MOD_RES (19)..(20)..(21)..(22): Xaa is A or G or is absent
VPTRLSPISILYKXXXXXXXXXLKYHYDMVVE

SEQ ID NO: 65668 - protein, 34 aa, Artificial Sequence; identical to SEQ ID NO: 6646
  GFR-binding peptide
  MOD_RES (1)..(2)..(33): Xaa is C or S

SEQ ID NO: 65669 - protein, 32 aa, Artificial Sequence
  GFR-binding peptide
  MOD_RES (14)..(15)..(16)..(17)..(18): Xaa is A or G
  MOD_RES (19)..(20)..(21)..(22): Xaa is A or G or is absent
VPTRLEPISILYLXXXXXXXXXKFKYEDMVVE

SEQ ID NO: 65670 - protein, 39 aa, Artificial Sequence; identical to SEQ ID NO: 32858
  GFR-binding peptide
  MOD_RES (3)..(4)..(36)..(38): Xaa is C or S

SEQ ID NO: 65671 - protein, 37 aa, Artificial Sequence; identical to SEQ ID NO: 32861
  GFR-binding peptide
  MOD_RES (3)..(4)..(35)..(37): Xaa is C or S

SEQ ID NO: 65672 - protein, 38 aa, Artificial Sequence
  GFR-binding peptide
  MOD_RES (3)..(4)..(38): Xaa is C or S
  MOD_RES (18)..(19)..(20)..(21)..(22): Xaa is A or G
  MOD_RES (23)..(24)..(25)..(26): Xaa is A or G or is absent
EPXXVPEKMSPINILYFXXXXXXXXXYGKIPNMTVESX

SEQ ID NO: 65673 - protein, 35 aa, Artificial Sequence; identical to SEQ ID NO: 6652
  GFR-binding peptide
  MOD_RES (2)..(3): Xaa is C or S
  MOD_RES (17)..(18)..(19)..(20)..(21): Xaa is A or G
  MOD_RES (22)..(23)..(24)..(25): Xaa is A or G or is absent

SEQ ID NO: 65674 - protein, 35 aa, Artificial Sequence
  GFR-binding peptide
  MOD_RES (2)..(3)..(35): Xaa is C or S
TXXVPTRLEPISILYLDSANNVVKFKYEDMVVESX

SEQ ID NO: 65675 - protein, 35 aa, Artificial Sequence; identical to SEQ ID NO: 6653
  GFR-binding peptide
  MOD_RES (1)..(32)..(34): Xaa is C or S

SEQ ID NO: 65676 - protein, 36 aa, Artificial Sequence; identical to SEQ ID NO: 32863
  GFR-binding peptide
  MOD_RES (2)..(3): Xaa is C or S
  MOD_RES (17)..(18)..(19)..(20)..(21): Xaa is A or G
  MOD_RES (22)..(23)..(24)..(25): Xaa is A or G or is absent

SEQ ID NO: 65677 - protein, 43 aa, Artificial Sequence; identical to SEQ ID NO: 6658
  GFR-binding peptide
  MOD_RES (5)..(6)..(40)..(42): Xaa is C or S
  MOD_RES (20)..(21)..(22)..(23)..(24): Xaa is A or G
  MOD_RES (25)..(26)..(27)..(28): Xaa is A or G or is absent

SEQ ID NO: 65678 - protein, 36 aa, Artificial Sequence; identical to SEQ ID NO: 27820
  GFR-binding peptide
  MOD_RES (1)..(2)..(34)..(36): Xaa is C or S

SEQ ID NO: 65679 - protein, 36 aa, Artificial Sequence
  GFR-binding peptide
  MOD_RES (1)..(2)..(35): Xaa is C or S
  MOD_RES (16)..(17)..(18)..(19)..(20): Xaa is A or G
  MOD_RES (21)..(22)..(23)..(24): Xaa is A or G or is absent
XXVPQDLSPINILYFXXXXXXXXXYGKIPMVVKSXK

SEQ ID NO: 65680 - protein, 33 aa, Artificial Sequence; identical to SEQ ID NO: 6660
  GFR-binding peptide
  MOD_RES (1)..(33): Xaa is C or S

SEQ ID NO: 65681 - protein, 39 aa, Artificial Sequence; identical to SEQ ID NO: 32868
  GFR-binding peptide
  MOD_RES (5)..(6)..(38): Xaa is C or S

SEQ ID NO: 65682 - protein, 40 aa, Artificial Sequence; identical to SEQ ID NO: 27825
  GFR-binding peptide
  MOD_RES (6)..(7)..(39): Xaa is C or S

SEQ ID NO: 65683 - protein, 37 aa, Artificial Sequence; identical to SEQ ID NO: 32873
  GFR-binding peptide
  MOD_RES (1)..(34)..(36): Xaa is C or S
  MOD_RES (15)..(16)..(17)..(18)..(19): Xaa is A or G
  MOD_RES (20)..(21)..(22)..(23): Xaa is A or G or is absent

SEQ ID NO: 65684 - protein, 37 aa, Artificial Sequence
  GFR-binding peptide
  MOD_RES (1)..(2)..(36): Xaa is C or S
  MOD_RES (16)..(17)..(18)..(19)..(20): Xaa is A or G
  MOD_RES (21)..(22)..(23)..(24): Xaa is A or G or is absent
XXTPTKMSPISMLYKXXXXXXXXXLKYHYGMVVDRXG

SEQ ID NO: 65685 - protein, 35 aa, Artificial Sequence; identical to SEQ ID NO: 27833
  GFR-binding peptide
  MOD_RES (2)..(3): Xaa is C or S
  MOD_RES (17)..(18)..(19)..(20)..(21): Xaa is A or G
  MOD_RES (22)..(23)..(24)..(25): Xaa is A or G or is absent

SEQ ID NO: 65686 - protein, 37 aa, Artificial Sequence
  GFR-binding peptide
  MOD_RES (6)..(7): Xaa is C or S
HVPKPXXAPTKLEPISVLYLDDSSNVIKFKYENMVVR

SEQ ID NO: 65687 - protein, 40 aa, Artificial Sequence
  GFR-binding peptide
  MOD_RES (6)..(7)..(39): Xaa is C or S
HVPKPXXAPTKLSPISVLYKDDSSNVILKYHYNMVVRSXG

SEQ ID NO: 65688 - protein, 39 aa, Artificial Sequence; identical to SEQ ID NO: 6675
  GFR-binding peptide
  MOD_RES (2)..(36)..(38): Xaa is C or S
  MOD_RES (16)..(17)..(18)..(19)..(20): Xaa is A or G
  MOD_RES (21)..(22)..(23)..(24): Xaa is A or G or is absent

SEQ ID NO: 65689 - protein, 33 aa, Artificial Sequence
  GFR-binding peptide
  MOD_RES (31)..(33): Xaa is C or S
APVKTSPISMLYKDNGRVLLLKYHYMIVEEXGX

SEQ ID NO: 65690 - protein, 39 aa, Artificial Sequence
  GFR-binding peptide
  MOD_RES (5)..(6): Xaa is C or S
  MOD_RES (20)..(21)..(22)..(23)..(24): Xaa is A or G
  MOD_RES (25)..(26)..(27)..(28): Xaa is A or G or is absent
IPEPXXVPEKMSATSILYYXXXXXXXXXLRKHRNMTVES

SEQ ID NO: 65691 - protein, 35 aa, Artificial Sequence
  GFR-binding peptide
  MOD_RES (1)..(34): Xaa is C or S
  MOD_RES (15)..(16)..(17)..(18)..(19): Xaa is A or G
  MOD_RES (20)..(21)..(22)..(23): Xaa is A or G or is absent
XVPQDLSPINILYFXXXXXXXXXYGKIPMVVKSXK

SEQ ID NO: 65692 - protein, 38 aa, Artificial Sequence
  GFR-binding peptide
  MOD_RES (1)..(35)..(37): Xaa is C or S
  MOD_RES (15)..(16)..(17)..(18)..(19): Xaa is A or G
  MOD_RES (20)..(21)..(22)..(23): Xaa is A or G or is absent
XTPTKMSPISMLYKXXXXXXXXXLKYHYGMVVDRXGXS

SEQ ID NO: 65693 - protein, 36 aa, Artificial Sequence; identical to SEQ ID NO: 6678
  GFR-binding peptide
  MOD_RES (1)..(33)..(35): Xaa is C or S

SEQ ID NO: 65694 - protein, 34 aa, Artificial Sequence; identical to SEQ ID NO: 32889
  GFR-binding peptide
  MOD_RES (2)..(3): Xaa is C or S

SEQ ID NO: 65695 - protein, 32 aa, Artificial Sequence; identical to SEQ ID NO: 6681
  GFR-binding peptide
  MOD_RES (14)..(15)..(16)..(17)..(18): Xaa is A or G
  MOD_RES (19)..(20)..(21)..(22): Xaa is A or G or is absent

SEQ ID NO: 65696 - protein, 40 aa, Artificial Sequence; identical to SEQ ID NO: 32894
  GFR-binding peptide
  MOD_RES (3)..(37)..(39): Xaa is C or S
  MOD_RES (17)..(18)..(19)..(20)..(21): Xaa is A or G
  MOD_RES (22)..(23)..(24)..(25): Xaa is A or G or is absent

SEQ ID NO: 65697 - protein, 39 aa, Artificial Sequence; identical to SEQ ID NO: 6683
  GFR-binding peptide
  MOD_RES (6)..(7): Xaa is C or S
  MOD_RES (21)..(22)..(23)..(24)..(25): Xaa is A or G
  MOD_RES (26)..(27)..(28)..(29): Xaa is A or G or is absent

SEQ ID NO: 65698 - protein, 34 aa, Artificial Sequence; identical to SEQ ID NO: 27850
  GFR-binding peptide
  MOD_RES (2)..(3)..(34): Xaa is C or S

SEQ ID NO: 65699 - protein, 40 aa, Artificial Sequence; identical to SEQ ID NO: 6685
  GFR-binding peptide
  MOD_RES (5)..(6)..(40): Xaa is C or S
  MOD_RES (20)..(21)..(22)..(23)..(24): Xaa is A or G
  MOD_RES (25)..(26)..(27)..(28): Xaa is A or G or is absent

SEQ ID NO: 65700 - protein, 33 aa, Artificial Sequence; identical to SEQ ID NO: 32897
  GFR-binding peptide
  MOD_RES (14)..(15)..(16)..(17)..(18): Xaa is A or G
  MOD_RES (19)..(20)..(21)..(22): Xaa is A or G or is absent

SEQ ID NO: 65701 - protein, 32 aa, Artificial Sequence; identical to SEQ ID NO: 6686
  GFR-binding peptide
  MOD_RES (14)..(15)..(16)..(17)..(18): Xaa is A or G
  MOD_RES (19)..(20)..(21)..(22): Xaa is A or G or is absent

SEQ ID NO: 65702 - protein, 39 aa, Artificial Sequence; identical to SEQ ID NO: 6691
  GFR-binding peptide
  MOD_RES (5)..(6)..(37)..(39): Xaa is C or S

SEQ ID NO: 65703 - protein, 38 aa, Artificial Sequence; identical to SEQ ID NO: 6692
  GFR-binding peptide
  MOD_RES (3)..(4)..(38): Xaa is C or S
  MOD_RES (18)..(19)..(20)..(21)..(22): Xaa is A or G
  MOD_RES (23)..(24)..(25)..(26): Xaa is A or G or is absent

SEQ ID NO: 65704 - protein, 35 aa, Artificial Sequence; identical to SEQ ID NO: 27857
  GFR-binding peptide
  MOD_RES (2)..(3)..(35): Xaa is C or S

SEQ ID NO: 65705 - protein, 39 aa, Artificial Sequence; identical to SEQ ID NO: 6694
  GFR-binding peptide
  MOD_RES (3)..(4)..(36)..(38): Xaa is C or S

SEQ ID NO: 65706 - protein, 34 aa, Artificial Sequence; identical to SEQ ID NO: 32905
  GFR-binding peptide
  MOD_RES (2)..(34): Xaa is C or S

SEQ ID NO: 65707 - protein, 37 aa, Artificial Sequence
  GFR-binding peptide
  MOD_RES (5)..(6): Xaa is C or S
SAGPXXTPTKMSATSMLYYNDKQQIILRKHRGMVVDR

SEQ ID NO: 65708 - protein, 37 aa, Artificial Sequence
  GFR-binding peptide
  MOD_RES (3)..(4): Xaa is C or S
  MOD_RES (18)..(19)..(20)..(21)..(22): Xaa is A or G
  MOD_RES (23)..(24)..(25)..(26): Xaa is A or G or is absent
GPXXTPTKMSATSMLYYXXXXXXXXXLRKHRGMVVDR

SEQ ID NO: 65709 - protein, 36 aa, Artificial Sequence; identical to SEQ ID NO: 6697
  GFR-binding peptide
  MOD_RES (3)..(4): Xaa is C or S
  MOD_RES (18)..(19)..(20)..(21)..(22): Xaa is A or G
  MOD_RES (23)..(24)..(25)..(26): Xaa is A or G or is absent

SEQ ID NO: 65710 - protein, 38 aa, Artificial Sequence; identical to SEQ ID NO: 32906
  GFR-binding peptide
  MOD_RES (3)..(4)..(38): Xaa is C or S
  MOD_RES (18)..(19)..(20)..(21)..(22): Xaa is A or G
  MOD_RES (23)..(24)..(25)..(26): Xaa is A or G or is absent

SEQ ID NO: 65711 - protein, 33 aa, Artificial Sequence; identical to SEQ ID NO: 32907
  GFR-binding peptide
  MOD_RES (14)..(15)..(16)..(17)..(18): Xaa is A or G
  MOD_RES (19)..(20)..(21)..(22): Xaa is A or G or is absent

SEQ ID NO: 65712 - protein, 40 aa, Artificial Sequence; identical to SEQ ID NO: 32909
  GFR-binding peptide
  MOD_RES (5)..(6)..(38)..(40): Xaa is C or S

SEQ ID NO: 65713 - protein, 36 aa, Artificial Sequence; identical to SEQ ID NO: 32910
  GFR-binding peptide
  MOD_RES (1)..(2)..(34)..(36): Xaa is C or S

SEQ ID NO: 65714 - protein, 39 aa, Artificial Sequence; identical to SEQ ID NO: 6699
  GFR-binding peptide
  MOD_RES (5)..(6)..(37)..(39): Xaa is C or S

SEQ ID NO: 65715 - protein, 34 aa, Artificial Sequence; identical to SEQ ID NO: 6702
  GFR-binding peptide
  MOD_RES (1)..(1): Xaa is C or S
  MOD_RES (15)..(16)..(17)..(18)..(19): Xaa is A or G
  MOD_RES (20)..(21)..(22)..(23): Xaa is A or G or is absent

SEQ ID NO: 65716 - protein, 38 aa, Artificial Sequence; identical to SEQ ID NO: 6703
  GFR-binding peptide
  MOD_RES (3)..(35)..(37): Xaa is C or S

SEQ ID NO: 65717 - protein, 37 aa, Artificial Sequence; identical to SEQ ID NO: 6704
  GFR-binding peptide
  MOD_RES (5)..(6)..(37): Xaa is C or S

SEQ ID NO: 65718 - protein, 33 aa, Artificial Sequence; identical to SEQ ID NO: 32919
  GFR-binding peptide
  MOD_RES (14)..(15)..(16)..(17)..(18): Xaa is A or G
  MOD_RES (19)..(20)..(21)..(22): Xaa is A or G or is absent

SEQ ID NO: 65719 - protein, 33 aa, Artificial Sequence
  GFR-binding peptide
  MOD_RES (1)..(1): Xaa is C or S
  MOD_RES (15)..(16)..(17)..(18)..(19): Xaa is A or G
  MOD_RES (20)..(21)..(22)..(23): Xaa is A or G or is absent
XVSQDLSPINILYFXXXXXXXXXYGKIPMIVKS

SEQ ID NO: 65720 - protein, 37 aa, Artificial Sequence; identical to SEQ ID NO: 32920
  GFR-binding peptide
  MOD_RES (1)..(2)..(34)..(36): Xaa is C or S

SEQ ID NO: 65721 - protein, 39 aa, Artificial Sequence; identical to SEQ ID NO: 6709
  GFR-binding peptide
  MOD_RES (4)..(5)..(39): Xaa is C or S
  MOD_RES (19)..(20)..(21)..(22)..(23): Xaa is A or G
  MOD_RES (24)..(25)..(26)..(27): Xaa is A or G or is absent

SEQ ID NO: 65722 - protein, 34 aa, Artificial Sequence
  GFR-binding peptide
  MOD_RES (1)..(34): Xaa is C or S
  MOD_RES (15)..(16)..(17)..(18)..(19): Xaa is A or G
  MOD_RES (20)..(21)..(22)..(23): Xaa is A or G or is absent
XVPQALSPINILYFXXXXXXXXXYGKIPMIVRSX

SEQ ID NO: 65723 - protein, 39 aa, Artificial Sequence; identical to SEQ ID NO: 27873
  GFR-binding peptide
  MOD_RES (6)..(7): Xaa is C or S
  MOD_RES (21)..(22)..(23)..(24)..(25): Xaa is A or G
  MOD_RES (26)..(27)..(28)..(29): Xaa is A or G or is absent

SEQ ID NO: 65724 - protein, 37 aa, Artificial Sequence
  GFR-binding peptide
  MOD_RES (1)..(2)..(36): Xaa is C or S
  MOD_RES (16)..(17)..(18)..(19)..(20): Xaa is A or G
  MOD_RES (21)..(22)..(23)..(24): Xaa is A or G or is absent
XXTPTKMEPISMLYLXXXXXXXXXKFKYEGMVVDRXG

SEQ ID NO: 65725 - protein, 38 aa, Artificial Sequence; identical to SEQ ID NO: 6710
  GFR-binding peptide
  MOD_RES (6)..(7): Xaa is C or S

SEQ ID NO: 65726 - protein, 43 aa, Artificial Sequence; identical to SEQ ID NO: 6711
  GFR-binding peptide
  MOD_RES (6)..(7)..(41)..(43): Xaa is C or S
  MOD_RES (21)..(22)..(23)..(24)..(25): Xaa is A or G
  MOD_RES (26)..(27)..(28)..(29): Xaa is A or G or is absent

SEQ ID NO: 65727 - protein, 40 aa, Artificial Sequence; identical to SEQ ID NO: 32926
  GFR-binding peptide
  MOD_RES (2)..(3)..(37)..(39): Xaa is C or S
  MOD_RES (17)..(18)..(19)..(20)..(21): Xaa is A or G
  MOD_RES (22)..(23)..(24)..(25): Xaa is A or G or is absent

SEQ ID NO: 65728 - protein, 36 aa, Artificial Sequence
  GFR-binding peptide
  MOD_RES (2)..(3)..(34)..(36): Xaa is C or S
TXXAPVKTSATSMLYYDNGRVLLLRKHRMIVEEXGX

SEQ ID NO: 65729 - protein, 38 aa, Artificial Sequence; identical to SEQ ID NO: 14066
  GFR-binding peptide
  MOD_RES (1)..(35)..(37): Xaa is C or S
  MOD_RES (15)..(16)..(17)..(18)..(19): Xaa is A or G
  MOD_RES (20)..(21)..(22)..(23): Xaa is A or G or is absent

SEQ ID NO: 65730 - protein, 37 aa, Artificial Sequence
  GFR-binding peptide
  MOD_RES (5)..(6): Xaa is C or S
IPEPXXVPEKMSPINILYFDENKNVVYGKIPNMTVES

SEQ ID NO: 65731 - protein, 35 aa, Artificial Sequence; identical to SEQ ID NO: 6714
  GFR-binding peptide
  MOD_RES (1)..(33)..(35): Xaa is C or S

SEQ ID NO: 65732 - protein, 41 aa, Artificial Sequence; identical to SEQ ID NO: 32928
  GFR-binding peptide
  MOD_RES (4)..(5)..(39)..(41): Xaa is C or S
  MOD_RES (19)..(20)..(21)..(22)..(23): Xaa is A or G
  MOD_RES (24)..(25)..(26)..(27): Xaa is A or G or is absent

SEQ ID NO: 65733 - protein, 35 aa, Artificial Sequence; identical to SEQ ID NO: 32929
  GFR-binding peptide
  MOD_RES (1)..(2)..(34): Xaa is C or S

SEQ ID NO: 65734 - protein, 31 aa, Artificial Sequence; identical to SEQ ID NO: 32930
  GFR-binding peptide

SEQ ID NO: 65735 - protein, 35 aa, Artificial Sequence; identical to SEQ ID NO: 32931
  GFR-binding peptide
  MOD_RES (4)..(5): Xaa is C or S

SEQ ID NO: 65736 - protein, 41 aa, Artificial Sequence; identical to SEQ ID NO: 27878
  GFR-binding peptide
  MOD_RES (5)..(6)..(38)..(40): Xaa is C or S

SEQ ID NO: 65737 - protein, 36 aa, Artificial Sequence; identical to SEQ ID NO: 32934
  GFR-binding peptide
  MOD_RES (1)..(2)..(34)..(36): Xaa is C or S

SEQ ID NO: 65738 - protein, 35 aa, Artificial Sequence; identical to SEQ ID NO: 57835
  GFR-binding peptide
  MOD_RES (34)..(34): Xaa is C or S
  MOD_RES (14)..(15)..(16)..(17)..(18): Xaa is A or G
  MOD_RES (19)..(20)..(21)..(22): Xaa is A or G or is absent

SEQ ID NO: 65739 - protein, 40 aa, Artificial Sequence; identical to SEQ ID NO: 6715
  GFR-binding peptide
  MOD_RES (5)..(6)..(39): Xaa is C or S
  MOD_RES (20)..(21)..(22)..(23)..(24): Xaa is A or G
  MOD_RES (25)..(26)..(27)..(28): Xaa is A or G or is absent

SEQ ID NO: 65740 - protein, 33 aa, Artificial Sequence; identical to SEQ ID NO: 32935
  GFR-binding peptide
  MOD_RES (2)..(3): Xaa is C or S

SEQ ID NO: 65741 - protein, 35 aa, Artificial Sequence; identical to SEQ ID NO: 27882
  GFR-binding peptide
  MOD_RES (2)..(3)..(35): Xaa is C or S

SEQ ID NO: 65742 - protein, 33 aa, Artificial Sequence; identical to SEQ ID NO: 57838
  GFR-binding peptide
  MOD_RES (1)..(1): Xaa is C or S
  MOD_RES (15)..(16)..(17)..(18)..(19): Xaa is A or G
  MOD_RES (20)..(21)..(22)..(23): Xaa is A or G or is absent

SEQ ID NO: 65743 - protein, 40 aa, Artificial Sequence; identical to SEQ ID NO: 6718
  GFR-binding peptide
  MOD_RES (3)..(4)..(38)..(40): Xaa is C or S
  MOD_RES (18)..(19)..(20)..(21)..(22): Xaa is A or G
  MOD_RES (23)..(24)..(25)..(26): Xaa is A or G or is absent

SEQ ID NO: 65744 - protein, 34 aa, Artificial Sequence
  GFR-binding peptide
  MOD_RES (32)..(34): Xaa is C or S
TPTKMSPISMLYKNDKQQIILKYHYGMVVDRXGX

SEQ ID NO: 65745 - protein, 41 aa, Artificial Sequence
  GFR-binding peptide
  MOD_RES (5)..(6)..(40): Xaa is C or S
  MOD_RES (20)..(21)..(22)..(23)..(24): Xaa is A or G
  MOD_RES (25)..(26)..(27)..(28): Xaa is A or G or is absent
TPPTXXVPTRLSPISILYKXXXXXXXXXLKYHYDMVVESXG

SEQ ID NO: 65746 - protein, 41 aa, Artificial Sequence
  GFR-binding peptide
  MOD_RES (6)..(7)..(39)..(41): Xaa is C or S
KASKAXXVPTKLSATSILYYDKGVVTYLRKHRGMAVSEXGX

SEQ ID NO: 65747 - protein, 44 aa, Artificial Sequence; identical to SEQ ID NO: 6720
  GFR-binding peptide
  MOD_RES (7)..(41)..(43): Xaa is C or S
  MOD_RES (21)..(22)..(23)..(24)..(25): Xaa is A or G
  MOD_RES (26)..(27)..(28)..(29): Xaa is A or G or is absent

SEQ ID NO: 65748 - protein, 36 aa, Artificial Sequence; identical to SEQ ID NO: 6721
  GFR-binding peptide
  MOD_RES (1)..(2)..(35): Xaa is C or S
  MOD_RES (16)..(17)..(18)..(19)..(20): Xaa is A or G
  MOD_RES (21)..(22)..(23)..(24): Xaa is A or G or is absent

SEQ ID NO: 65749 - protein, 38 aa, Artificial Sequence
  GFR-binding peptide
  MOD_RES (3)..(4)..(38): Xaa is C or S
  MOD_RES (18)..(19)..(20)..(21)..(22): Xaa is A or G
  MOD_RES (23)..(24)..(25)..(26): Xaa is A or G or is absent
GPXXTPTKMEPISMLYLXXXXXXXXXKFKYEGMVVDRX

SEQ ID NO: 65750 - protein, 41 aa, Artificial Sequence
  GFR-binding peptide
  MOD_RES (6)..(7)..(39)..(41): Xaa is C or S
STPPTXXVPTRLSPISILYKDSANNVVLKYHYDMVVESXGX

SEQ ID NO: 65751 - protein, 39 aa, Artificial Sequence
  GFR-binding peptide
  MOD_RES (2)..(3)..(37)..(39): Xaa is C or S
  MOD_RES (17)..(18)..(19)..(20)..(21): Xaa is A or G
  MOD_RES (22)..(23)..(24)..(25): Xaa is A or G or is absent
PXXTPTKMEPISMLYLXXXXXXXXXKFKYEGMVVDRXGX

SEQ ID NO: 65752 - protein, 42 aa, Artificial Sequence; identical to SEQ ID NO: 6723
  GFR-binding peptide
  MOD_RES (6)..(7)..(42): Xaa is C or S
  MOD_RES (21)..(22)..(23)..(24)..(25): Xaa is A or G
  MOD_RES (26)..(27)..(28)..(29): Xaa is A or G or is absent

SEQ ID NO: 65753 - protein, 35 aa, Artificial Sequence; identical to SEQ ID NO: 6727
  GFR-binding peptide
  MOD_RES (1)..(2)..(35): Xaa is C or S
  MOD_RES (16)..(17)..(18)..(19)..(20): Xaa is A or G
  MOD_RES (21)..(22)..(23)..(24): Xaa is A or G or is absent

SEQ ID NO: 65754 - protein, 37 aa, Artificial Sequence
  GFR-binding peptide
  MOD_RES (5)..(6): Xaa is C or S
SAGPXXTPTKMEPISMLYLNDKQQIIKFKYEGMVVDR

SEQ ID NO: 65755 - protein, 41 aa, Artificial Sequence; identical to SEQ ID NO: 32947
  GFR-binding peptide
  MOD_RES (6)..(7)..(41): Xaa is C or S
  MOD_RES (21)..(22)..(23)..(24)..(25): Xaa is A or G
  MOD_RES (26)..(27)..(28)..(29): Xaa is A or G or is absent

SEQ ID NO: 65756 - protein, 37 aa, Artificial Sequence; identical to SEQ ID NO: 27894
  GFR-binding peptide
  MOD_RES (6)..(7): Xaa is C or S

SEQ ID NO: 65757 - protein, 36 aa, Artificial Sequence
  GFR-binding peptide
  MOD_RES (3)..(4): Xaa is C or S
  MOD_RES (18)..(19)..(20)..(21)..(22): Xaa is A or G
  MOD_RES (23)..(24)..(25)..(26): Xaa is A or G or is absent
STXXAPVKTEPISMLYLXXXXXXXXXKFKYEMIVEE

SEQ ID NO: 65758 - protein, 39 aa, Artificial Sequence; identical to SEQ ID NO: 27895
  GFR-binding peptide
  MOD_RES (6)..(7)..(39): Xaa is C or S

SEQ ID NO: 65759 - protein, 38 aa, Artificial Sequence
  GFR-binding peptide
  MOD_RES (5)..(6)..(38): Xaa is C or S
TPPTXXVPTRLEPISILYLDSANNVVKFKYEDMVVESX

SEQ ID NO: 65760 - protein, 42 aa, Artificial Sequence; identical to SEQ ID NO: 27897
  GFR-binding peptide
  MOD_RES (4)..(5)..(39)..(41): Xaa is C or S
  MOD_RES (19)..(20)..(21)..(22)..(23): Xaa is A or G
  MOD_RES (24)..(25)..(26)..(27): Xaa is A or G or is absent

SEQ ID NO: 65761 - protein, 38 aa, Artificial Sequence
  GFR-binding peptide
  MOD_RES (3)..(4)..(38): Xaa is C or S
  MOD_RES (18)..(19)..(20)..(21)..(22): Xaa is A or G
  MOD_RES (23)..(24)..(25)..(26): Xaa is A or G or is absent
ASXXVPARLSATSILYYXXXXXXXXXLRKHRDMVVEAX

SEQ ID NO: 65762 - protein, 35 aa, Artificial Sequence
  GFR-binding peptide
  MOD_RES (1)..(2)..(35): Xaa is C or S
  MOD_RES (16)..(17)..(18)..(19)..(20): Xaa is A or G
  MOD_RES (21)..(22)..(23)..(24): Xaa is A or G or is absent
XXVSQDLSPINILYFXXXXXXXXXYGKIPMIVKSX

SEQ ID NO: 65763 - protein, 31 aa, Artificial Sequence; identical to SEQ ID NO: 6737
  GFR-binding peptide

SEQ ID NO: 65764 - protein, 40 aa, Artificial Sequence; identical to SEQ ID NO: 6739
  GFR-binding peptide
  MOD_RES (2)..(3)..(37)..(39): Xaa is C or S
  MOD_RES (17)..(18)..(19)..(20)..(21): Xaa is A or G
  MOD_RES (22)..(23)..(24)..(25): Xaa is A or G or is absent

SEQ ID NO: 65765 - protein, 33 aa, Artificial Sequence; identical to SEQ ID NO: 27906
  GFR-binding peptide
  MOD_RES (1)..(33): Xaa is C or S

SEQ ID NO: 65766 - protein, 40 aa, Artificial Sequence; identical to SEQ ID NO: 32963
  GFR-binding peptide
  MOD_RES (5)..(6)..(40): Xaa is C or S
  MOD_RES (20)..(21)..(22)..(23)..(24): Xaa is A or G
  MOD_RES (25)..(26)..(27)..(28): Xaa is A or G or is absent

SEQ ID NO: 65767 - protein, 38 aa, Artificial Sequence; identical to SEQ ID NO: 32964
  GFR-binding peptide
  MOD_RES (35)..(37): Xaa is C or S
  MOD_RES (14)..(15)..(16)..(17)..(18): Xaa is A or G
  MOD_RES (19)..(20)..(21)..(22): Xaa is A or G or is absent

SEQ ID NO: 65768 - protein, 36 aa, Artificial Sequence
  GFR-binding peptide
  MOD_RES (5)..(6): Xaa is C or S
VPSTXXAPVKTSATSMLYYDNGRVLLLRKHRMIVEE

SEQ ID NO: 65769 - protein, 30 aa, Artificial Sequence
  GFR-binding peptide
TPTKMEPISMLYLNDKQQIIKFKYEGMVVD

SEQ ID NO: 65770 - protein, 41 aa, Artificial Sequence; identical to SEQ ID NO: 6744
  GFR-binding peptide
  MOD_RES (3)..(4)..(38)..(40): Xaa is C or S
  MOD_RES (18)..(19)..(20)..(21)..(22): Xaa is A or G
  MOD_RES (23)..(24)..(25)..(26): Xaa is A or G or is absent

SEQ ID NO: 65771 - protein, 37 aa, Artificial Sequence; identical to SEQ ID NO: 27916
  GFR-binding peptide
  MOD_RES (3)..(4)..(35)..(37): Xaa is C or S

SEQ ID NO: 65772 - protein, 36 aa, Artificial Sequence
  GFR-binding peptide
  MOD_RES (4)..(5): Xaa is C or S
PPTXXVPTRLEPISILYLDSANNVVKFKYEDMVVES

SEQ ID NO: 65773 - protein, 40 aa, Artificial Sequence; identical to SEQ ID NO: 27917
  GFR-binding peptide
  MOD_RES (6)..(7): Xaa is C or S
  MOD_RES (21)..(22)..(23)..(24)..(25): Xaa is A or G
  MOD_RES (26)..(27)..(28)..(29): Xaa is A or G or is absent

SEQ ID NO: 65774 - protein, 31 aa, Artificial Sequence
  GFR-binding peptide
  MOD_RES (1)..(1): Xaa is C or S
XVPEKMSPINILYFDENKNVVYGKIPNMTVE

SEQ ID NO: 65775 - protein, 37 aa, Artificial Sequence
  GFR-binding peptide
  MOD_RES (2)..(3)..(37): Xaa is C or S
  MOD_RES (17)..(18)..(19)..(20)..(21): Xaa is A or G
  MOD_RES (22)..(23)..(24)..(25): Xaa is A or G or is absent
TXXVPTRLSPISILYKXXXXXXXXXLKYHYDMVVESX

SEQ ID NO: 65776 - protein, 33 aa, Artificial Sequence; identical to SEQ ID NO: 32973
  GFR-binding peptide
  MOD_RES (1)..(2): Xaa is C or S

SEQ ID NO: 65777 - protein, 32 aa, Artificial Sequence
  GFR-binding peptide
  MOD_RES (14)..(15)..(16)..(17)..(18): Xaa is A or G
  MOD_RES (19)..(20)..(21)..(22): Xaa is A or G or is absent
VPTRLSATSILYYXXXXXXXXXLRKHRDMVVE

SEQ ID NO: 65778 - protein, 37 aa, Artificial Sequence; identical to SEQ ID NO: 32977
  GFR-binding peptide
  MOD_RES (2)..(3)..(35)..(37): Xaa is C or S

SEQ ID NO: 65779 - protein, 37 aa, Artificial Sequence; identical to SEQ ID NO: 6750
  GFR-binding peptide
  MOD_RES (2)..(3)..(34)..(36): Xaa is C or S

SEQ ID NO: 65780 - protein, 38 aa, Artificial Sequence; identical to SEQ ID NO: 14102
  GFR-binding peptide
  MOD_RES (6)..(7): Xaa is C or S

SEQ ID NO: 65781 - protein, 37 aa, Artificial Sequence; identical to SEQ ID NO: 32980
  GFR-binding peptide
  MOD_RES (1)..(35)..(37): Xaa is C or S
  MOD_RES (15)..(16)..(17)..(18)..(19): Xaa is A or G
  MOD_RES (20)..(21)..(22)..(23): Xaa is A or G or is absent

SEQ ID NO: 65782 - protein, 36 aa, Artificial Sequence
  GFR-binding peptide
  MOD_RES (4)..(5)..(36): Xaa is C or S
PSTXXAPVKTEPISMLYLDNGRVLLKFKYEMIVEEX

SEQ ID NO: 65783 - protein, 35 aa, Artificial Sequence; identical to SEQ ID NO: 6754
  GFR-binding peptide
  MOD_RES (1)..(35): Xaa is C or S
  MOD_RES (15)..(16)..(17)..(18)..(19): Xaa is A or G
  MOD_RES (20)..(21)..(22)..(23): Xaa is A or G or is absent

SEQ ID NO: 65784 - protein, 32 aa, Artificial Sequence; identical to SEQ ID NO: 32984
  GFR-binding peptide
  MOD_RES (1)..(1): Xaa is C or S

SEQ ID NO: 65785 - protein, 38 aa, Artificial Sequence; identical to SEQ ID NO: 57874
  GFR-binding peptide
  MOD_RES (5)..(6): Xaa is C or S
  MOD_RES (20)..(21)..(22)..(23)..(24): Xaa is A or G
  MOD_RES (25)..(26)..(27)..(28): Xaa is A or G or is absent

SEQ ID NO: 65786 - protein, 36 aa, Artificial Sequence; identical to SEQ ID NO: 27930
  GFR-binding peptide
  MOD_RES (1)..(35): Xaa is C or S
  MOD_RES (15)..(16)..(17)..(18)..(19): Xaa is A or G
  MOD_RES (20)..(21)..(22)..(23): Xaa is A or G or is absent

SEQ ID NO: 65787 - protein, 41 aa, Artificial Sequence; identical to SEQ ID NO: 27931
  GFR-binding peptide
  MOD_RES (6)..(7)..(39)..(41): Xaa is C or S

SEQ ID NO: 65788 - protein, 44 aa, Artificial Sequence; identical to SEQ ID NO: 6758
  GFR-binding peptide
  MOD_RES (6)..(7)..(41)..(43): Xaa is C or S
  MOD_RES (21)..(22)..(23)..(24)..(25): Xaa is A or G
  MOD_RES (26)..(27)..(28)..(29): Xaa is A or G or is absent

SEQ ID NO: 65789 - protein, 39 aa, Artificial Sequence; identical to SEQ ID NO: 27932
  GFR-binding peptide
  MOD_RES (4)..(5)..(36)..(38): Xaa is C or S

SEQ ID NO: 65790 - protein, 38 aa, Artificial Sequence; identical to SEQ ID NO: 6760
  GFR-binding peptide
  MOD_RES (2)..(3)..(35)..(37): Xaa is C or S

SEQ ID NO: 65791 - protein, 38 aa, Artificial Sequence; identical to SEQ ID NO: 6761
  GFR-binding peptide
  MOD_RES (1)..(2)..(35)..(37): Xaa is C or S
  MOD_RES (16)..(17)..(18)..(19)..(20): Xaa is A or G
  MOD_RES (21)..(22)..(23)..(24): Xaa is A or G or is absent

SEQ ID NO: 65792 - protein, 35 aa, Artificial Sequence; identical to SEQ ID NO: 27940
  GFR-binding peptide
  MOD_RES (3)..(4): Xaa is C or S

SEQ ID NO: 65793 - protein, 36 aa, Artificial Sequence; identical to SEQ ID NO: 14116
  GFR-binding peptide
  MOD_RES (5)..(6): Xaa is C or S

SEQ ID NO: 65794 - protein, 42 aa, Artificial Sequence; identical to SEQ ID NO: 6765
  GFR-binding peptide
  MOD_RES (5)..(6)..(39)..(41): Xaa is C or S
  MOD_RES (20)..(21)..(22)..(23)..(24): Xaa is A or G
  MOD_RES (25)..(26)..(27)..(28): Xaa is A or G or is absent

SEQ ID NO: 65795 - protein, 38 aa, Artificial Sequence; identical to SEQ ID NO: 27942
  GFR-binding peptide
  MOD_RES (5)..(6)..(38): Xaa is C or S

SEQ ID NO: 65796 - protein, 38 aa, Artificial Sequence
  GFR-binding peptide
  MOD_RES (4)..(5): Xaa is C or S
  MOD_RES (19)..(20)..(21)..(22)..(23): Xaa is A or G
  MOD_RES (24)..(25)..(26)..(27): Xaa is A or G or is absent
PASXXVPARLSATSILYYXXXXXXXXXLRKHRDMVVEA

SEQ ID NO: 65797 - protein, 33 aa, Artificial Sequence; identical to SEQ ID NO: 6769
  GFR-binding peptide
  MOD_RES (1)..(1): Xaa is C or S

SEQ ID NO: 65798 - protein, 40 aa, Artificial Sequence; identical to SEQ ID NO: 6771
  GFR-binding peptide
  MOD_RES (5)..(6)..(40): Xaa is C or S
  MOD_RES (20)..(21)..(22)..(23)..(24): Xaa is A or G
  MOD_RES (25)..(26)..(27)..(28): Xaa is A or G or is absent

SEQ ID NO: 65799 - protein, 35 aa, Artificial Sequence
  GFR-binding peptide
  MOD_RES (1)..(33)..(35): Xaa is C or S
XVPARLSATSILYYDAANNVVLRKHRDMVVEAXGX

SEQ ID NO: 65800 - protein, 40 aa, Artificial Sequence; identical to SEQ ID NO: 6775
  GFR-binding peptide
  MOD_RES (3)..(4)..(37)..(39): Xaa is C or S
  MOD_RES (18)..(19)..(20)..(21)..(22): Xaa is A or G
  MOD_RES (23)..(24)..(25)..(26): Xaa is A or G or is absent

SEQ ID NO: 65801 - protein, 37 aa, Artificial Sequence; identical to SEQ ID NO: 6776
  GFR-binding peptide
  MOD_RES (35)..(37): Xaa is C or S
  MOD_RES (14)..(15)..(16)..(17)..(18): Xaa is A or G
  MOD_RES (19)..(20)..(21)..(22): Xaa is A or G or is absent

SEQ ID NO: 65802 - protein, 35 aa, Artificial Sequence; identical to SEQ ID NO: 57901
  GFR-binding peptide
  MOD_RES (1)..(35): Xaa is C or S
  MOD_RES (15)..(16)..(17)..(18)..(19): Xaa is A or G
  MOD_RES (20)..(21)..(22)..(23): Xaa is A or G or is absent

SEQ ID NO: 65803 - protein, 41 aa, Artificial Sequence; identical to SEQ ID NO: 33012
  GFR-binding peptide
  MOD_RES (6)..(7)..(39)..(41): Xaa is C or S

SEQ ID NO: 65804 - protein, 36 aa, Artificial Sequence; identical to SEQ ID NO: 33014
  GFR-binding peptide
  MOD_RES (5)..(5): Xaa is C or S

SEQ ID NO: 65805 - protein, 37 aa, Artificial Sequence; identical to SEQ ID NO: 33017
  GFR-binding peptide
  MOD_RES (3)..(4): Xaa is C or S
  MOD_RES (18)..(19)..(20)..(21)..(22): Xaa is A or G
  MOD_RES (23)..(24)..(25)..(26): Xaa is A or G or is absent

SEQ ID NO: 65806 - protein, 35 aa, Artificial Sequence
  GFR-binding peptide
  MOD_RES (1)..(33)..(35): Xaa is C or S
XVPEKMEPISILYLDENKNVVKFKYENMTVESXAX

SEQ ID NO: 65807 - protein, 41 aa, Artificial Sequence; identical to SEQ ID NO: 33024
  GFR-binding peptide
  MOD_RES (3)..(4)..(38)..(40): Xaa is C or S
  MOD_RES (18)..(19)..(20)..(21)..(22): Xaa is A or G
  MOD_RES (23)..(24)..(25)..(26): Xaa is A or G or is absent

SEQ ID NO: 65808 - protein, 38 aa, Artificial Sequence; identical to SEQ ID NO: 6795
  GFR-binding peptide
  MOD_RES (4)..(5): Xaa is C or S
  MOD_RES (19)..(20)..(21)..(22)..(23): Xaa is A or G
  MOD_RES (24)..(25)..(26)..(27): Xaa is A or G or is absent

SEQ ID NO: 65809 - protein, 39 aa, Artificial Sequence; identical to SEQ ID NO: 33026
  GFR-binding peptide
  MOD_RES (5)..(6): Xaa is C or S
  MOD_RES (20)..(21)..(22)..(23)..(24): Xaa is A or G
  MOD_RES (25)..(26)..(27)..(28): Xaa is A or G or is absent

SEQ ID NO: 65810 - protein, 34 aa, Artificial Sequence; identical to SEQ ID NO: 57917
  GFR-binding peptide
  MOD_RES (33)..(33): Xaa is C or S
  MOD_RES (14)..(15)..(16)..(17)..(18): Xaa is A or G
  MOD_RES (19)..(20)..(21)..(22): Xaa is A or G or is absent

SEQ ID NO: 65811 - protein, 39 aa, Artificial Sequence; identical to SEQ ID NO: 33029
  GFR-binding peptide
  MOD_RES (6)..(7)..(39): Xaa is C or S

SEQ ID NO: 65812 - protein, 34 aa, Artificial Sequence; identical to SEQ ID NO: 6798
  GFR-binding peptide
  MOD_RES (31)..(33): Xaa is C or S

SEQ ID NO: 65813 - protein, 31 aa, Artificial Sequence; identical to SEQ ID NO: 33037
  GFR-binding peptide

SEQ ID NO: 65814 - protein, 32 aa, Artificial Sequence; identical to SEQ ID NO: 6802
  GFR-binding peptide
  MOD_RES (14)..(15)..(16)..(17)..(18): Xaa is A or G
  MOD_RES (19)..(20)..(21)..(22): Xaa is A or G or is absent

SEQ ID NO: 65815 - protein, 40 aa, Artificial Sequence; identical to SEQ ID NO: 6804
  GFR-binding peptide
  MOD_RES (6)..(7)..(40): Xaa is C or S
  MOD_RES (21)..(22)..(23)..(24)..(25): Xaa is A or G
  MOD_RES (26)..(27)..(28)..(29): Xaa is A or G or is absent

SEQ ID NO: 65816 - protein, 37 aa, Artificial Sequence; identical to SEQ ID NO: 27986
  GFR-binding peptide
  MOD_RES (4)..(5)..(37): Xaa is C or S

SEQ ID NO: 65817 - protein, 35 aa, Artificial Sequence
  GFR-binding peptide
  MOD_RES (2)..(3): Xaa is C or S
  MOD_RES (17)..(18)..(19)..(20)..(21): Xaa is A or G
  MOD_RES (22)..(23)..(24)..(25): Xaa is A or G or is absent
TXXAPVKTEPISMLYLXXXXXXXXXKFKYEMIVEE

SEQ ID NO: 65818 - protein, 41 aa, Artificial Sequence; identical to SEQ ID NO: 57931
  GFR-binding peptide
  MOD_RES (5)..(6)..(38)..(40): Xaa is C or S

SEQ ID NO: 65819 - protein, 39 aa, Artificial Sequence; identical to SEQ ID NO: 6807
  GFR-binding peptide
  MOD_RES (6)..(38): Xaa is C or S

SEQ ID NO: 65820 - protein, 37 aa, Artificial Sequence; identical to SEQ ID NO: 57933
  GFR-binding peptide
  MOD_RES (5)..(6): Xaa is C or S

SEQ ID NO: 65821 - protein, 39 aa, Artificial Sequence; identical to SEQ ID NO: 6811
  GFR-binding peptide
  MOD_RES (3)..(4)..(37)..(39): Xaa is C or S
  MOD_RES (18)..(19)..(20)..(21)..(22): Xaa is A or G
  MOD_RES (23)..(24)..(25)..(26): Xaa is A or G or is absent

SEQ ID NO: 65822 - protein, 35 aa, Artificial Sequence; identical to SEQ ID NO: 6813
  GFR-binding peptide
  MOD_RES (32)..(34): Xaa is C or S

SEQ ID NO: 65823 - protein, 37 aa, Artificial Sequence; identical to SEQ ID NO: 33049
  GFR-binding peptide
  MOD_RES (4)..(5)..(36): Xaa is C or S

SEQ ID NO: 65824 - protein, 35 aa, Artificial Sequence
  GFR-binding peptide
  MOD_RES (1)..(35): Xaa is C or S
  MOD_RES (15)..(16)..(17)..(18)..(19): Xaa is A or G
  MOD_RES (20)..(21)..(22)..(23): Xaa is A or G or is absent
XTPTKMEPISMLYLXXXXXXXXXKFKYEGMVVDRX

SEQ ID NO: 65825 - protein, 32 aa, Artificial Sequence; identical to SEQ ID NO: 6818
  GFR-binding peptide
  MOD_RES (14)..(15)..(16)..(17)..(18): Xaa is A or G
  MOD_RES (19)..(20)..(21)..(22): Xaa is A or G or is absent

SEQ ID NO: 65826 - protein, 33 aa, Artificial Sequence; identical to SEQ ID NO: 27995
  GFR-binding peptide
  MOD_RES (32)..(32): Xaa is C or S

SEQ ID NO: 65827 - protein, 41 aa, Artificial Sequence
  GFR-binding peptide
  MOD_RES (6)..(7)..(41): Xaa is C or S
  MOD_RES (21)..(22)..(23)..(24)..(25): Xaa is A or G
  MOD_RES (26)..(27)..(28)..(29): Xaa is A or G or is absent
GIPEPXXVPEKMSPISILYKXXXXXXXXXLKYHYNMTVESX

SEQ ID NO: 65828 - protein, 37 aa, Artificial Sequence; identical to SEQ ID NO: 6819
  GFR-binding peptide
  MOD_RES (1)..(2)..(36): Xaa is C or S
  MOD_RES (16)..(17)..(18)..(19)..(20): Xaa is A or G
  MOD_RES (21)..(22)..(23)..(24): Xaa is A or G or is absent

SEQ ID NO: 65829 - protein, 37 aa, Artificial Sequence; identical to SEQ ID NO: 33051
  GFR-binding peptide
  MOD_RES (5)..(6)..(37): Xaa is C or S

SEQ ID NO: 65830 - protein, 37 aa, Artificial Sequence; identical to SEQ ID NO: 33052
  GFR-binding peptide
  MOD_RES (3)..(4): Xaa is C or S
  MOD_RES (18)..(19)..(20)..(21)..(22): Xaa is A or G
  MOD_RES (23)..(24)..(25)..(26): Xaa is A or G or is absent

SEQ ID NO: 65831 - protein, 37 aa, Artificial Sequence; identical to SEQ ID NO: 6820
  GFR-binding peptide
  MOD_RES (3)..(4)..(37): Xaa is C or S

SEQ ID NO: 65832 - protein, 36 aa, Artificial Sequence
  GFR-binding peptide
  MOD_RES (34)..(36): Xaa is C or S
  MOD_RES (14)..(15)..(16)..(17)..(18): Xaa is A or G
  MOD_RES (19)..(20)..(21)..(22): Xaa is A or G or is absent
VPEKMEPISILYLXXXXXXXXXKFKYENMTVESXAX

SEQ ID NO: 65833 - protein, 41 aa, Artificial Sequence
  GFR-binding peptide
  MOD_RES (4)..(5)..(39)..(41): Xaa is C or S
  MOD_RES (19)..(20)..(21)..(22)..(23): Xaa is A or G
  MOD_RES (24)..(25)..(26)..(27): Xaa is A or G or is absent
PPTXXVPTRLSATSILYYXXXXXXXXXLRKHRDMVVESXGX

SEQ ID NO: 65834 - protein, 32 aa, Artificial Sequence; identical to SEQ ID NO: 33056
  GFR-binding peptide
  MOD_RES (32)..(32): Xaa is C or S

SEQ ID NO: 65835 - protein, 40 aa, Artificial Sequence; identical to SEQ ID NO: 6823
  GFR-binding peptide
  MOD_RES (6)..(7)..(39): Xaa is C or S

SEQ ID NO: 65836 - protein, 37 aa, Artificial Sequence; identical to SEQ ID NO: 28003
  GFR-binding peptide
  MOD_RES (1)..(2)..(35)..(37): Xaa is C or S
  MOD_RES (16)..(17)..(18)..(19)..(20): Xaa is A or G
  MOD_RES (21)..(22)..(23)..(24): Xaa is A or G or is absent

SEQ ID NO: 65837 - protein, 36 aa, Artificial Sequence; identical to SEQ ID NO: 6826
  GFR-binding peptide
  MOD_RES (3)..(4): Xaa is C or S
  MOD_RES (18)..(19)..(20)..(21)..(22): Xaa is A or G
  MOD_RES (23)..(24)..(25)..(26): Xaa is A or G or is absent

SEQ ID NO: 65838 - protein, 36 aa, Artificial Sequence; identical to SEQ ID NO: 14167
  GFR-binding peptide
  MOD_RES (4)..(5): Xaa is C or S

SEQ ID NO: 65839 - protein, 39 aa, Artificial Sequence; identical to SEQ ID NO: 28006
  GFR-binding peptide
  MOD_RES (2)..(3)..(37)..(39): Xaa is C or S
  MOD_RES (17)..(18)..(19)..(20)..(21): Xaa is A or G
  MOD_RES (22)..(23)..(24)..(25): Xaa is A or G or is absent

SEQ ID NO: 65840 - protein, 35 aa, Artificial Sequence
  GFR-binding peptide
  MOD_RES (33)..(35): Xaa is C or S
  MOD_RES (14)..(15)..(16)..(17)..(18): Xaa is A or G
  MOD_RES (19)..(20)..(21)..(22): Xaa is A or G or is absent
VPQALSPINILYFXXXXXXXXXYGKIPMIVRSXKX

SEQ ID NO: 65841 - protein, 40 aa, Artificial Sequence; identical to SEQ ID NO: 6828
  GFR-binding peptide
  MOD_RES (6)..(7): Xaa is C or S
  MOD_RES (21)..(22)..(23)..(24)..(25): Xaa is A or G
  MOD_RES (26)..(27)..(28)..(29): Xaa is A or G or is absent

SEQ ID NO: 65842 - protein, 37 aa, Artificial Sequence; identical to SEQ ID NO: 28009
  GFR-binding peptide
  MOD_RES (5)..(6): Xaa is C or S

SEQ ID NO: 65843 - protein, 40 aa, Artificial Sequence; identical to SEQ ID NO: 6831
  GFR-binding peptide
  MOD_RES (6)..(7)..(38)..(40): Xaa is C or S

SEQ ID NO: 65844 - protein, 37 aa, Artificial Sequence; identical to SEQ ID NO: 33064
  GFR-binding peptide
  MOD_RES (3)..(4)..(36): Xaa is C or S

SEQ ID NO: 65845 - protein, 40 aa, Artificial Sequence
  GFR-binding peptide
  MOD_RES (4)..(5)..(37)..(39): Xaa is C or S
PEPXXVPEKMSPISILYKDENKNVVLKYHYNMTVESXAXR

SEQ ID NO: 65846 - protein, 36 aa, Artificial Sequence
  GFR-binding peptide
  MOD_RES (1)..(35): Xaa is C or S
  MOD_RES (15)..(16)..(17)..(18)..(19): Xaa is A or G
  MOD_RES (20)..(21)..(22)..(23): Xaa is A or G or is absent
XTPTKMSATSMLYYXXXXXXXXXLRKHRGMVVDRXG

SEQ ID NO: 65847 - protein, 37 aa, Artificial Sequence; identical to SEQ ID NO: 33065
  GFR-binding peptide
  MOD_RES (6)..(7): Xaa is C or S

SEQ ID NO: 65848 - protein, 42 aa, Artificial Sequence
  GFR-binding peptide
  MOD_RES (5)..(6)..(40)..(42): Xaa is C or S
  MOD_RES (20)..(21)..(22)..(23)..(24): Xaa is A or G
  MOD_RES (25)..(26)..(27)..(28): Xaa is A or G or is absent
IPEPXXVPEKMEPISILYLXXXXXXXXXKFKYENMTVESXAX

SEQ ID NO: 65849 - protein, 37 aa, Artificial Sequence; identical to SEQ ID NO: 6835
  GFR-binding peptide
  MOD_RES (34)..(36): Xaa is C or S
  MOD_RES (14)..(15)..(16)..(17)..(18): Xaa is A or G
  MOD_RES (19)..(20)..(21)..(22): Xaa is A or G or is absent

SEQ ID NO: 65850 - protein, 32 aa, Artificial Sequence; identical to SEQ ID NO: 33068
  GFR-binding peptide
  MOD_RES (1)..(2): Xaa is C or S

SEQ ID NO: 65851 - protein, 37 aa, Artificial Sequence
  GFR-binding peptide
  MOD_RES (34)..(36): Xaa is C or S
  MOD_RES (14)..(15)..(16)..(17)..(18): Xaa is A or G
  MOD_RES (19)..(20)..(21)..(22): Xaa is A or G or is absent
TPTKMSATSMLYYXXXXXXXXXLRKHRGMVVDRXGXS

SEQ ID NO: 65852 - protein, 40 aa, Artificial Sequence; identical to SEQ ID NO: 6836
  GFR-binding peptide
  MOD_RES (3)..(4)..(38)..(40): Xaa is C or S
  MOD_RES (18)..(19)..(20)..(21)..(22): Xaa is A or G
  MOD_RES (23)..(24)..(25)..(26): Xaa is A or G or is absent

SEQ ID NO: 65853 - protein, 39 aa, Artificial Sequence
  GFR-binding peptide
  MOD_RES (2)..(3)..(36)..(38): Xaa is C or S
  MOD_RES (17)..(18)..(19)..(20)..(21): Xaa is A or G
  MOD_RES (22)..(23)..(24)..(25): Xaa is A or G or is absent
TXXAPVKTSATSMLYYXXXXXXXXXLRKHRMIVEEXGXL

SEQ ID NO: 65854 - protein, 39 aa, Artificial Sequence
  GFR-binding peptide
  MOD_RES (4)..(5)..(39): Xaa is C or S
  MOD_RES (19)..(20)..(21)..(22)..(23): Xaa is A or G
  MOD_RES (24)..(25)..(26)..(27): Xaa is A or G or is absent
AGPXXTPTKMSPISMLYKXXXXXXXXXLKYHYGMVVDRX

SEQ ID NO: 65855 - protein, 37 aa, Artificial Sequence
  GFR-binding peptide
  MOD_RES (34)..(36): Xaa is C or S
  MOD_RES (14)..(15)..(16)..(17)..(18): Xaa is A or G
  MOD_RES (19)..(20)..(21)..(22): Xaa is A or G or is absent
VPARLSATSILYYXXXXXXXXXLRKHRDMVVEAXGXR

SEQ ID NO: 65856 - protein, 32 aa, Artificial Sequence; identical to SEQ ID NO: 6839
  GFR-binding peptide
  MOD_RES (1)..(1): Xaa is C or S

SEQ ID NO: 65857 - protein, 35 aa, Artificial Sequence; identical to SEQ ID NO: 28021
  GFR-binding peptide
  MOD_RES (2)..(3): Xaa is C or S
  MOD_RES (17)..(18)..(19)..(20)..(21): Xaa is A or G
  MOD_RES (22)..(23)..(24)..(25): Xaa is A or G or is absent

SEQ ID NO: 65858 - protein, 37 aa, Artificial Sequence; identical to SEQ ID NO: 28022
  GFR-binding peptide
  MOD_RES (3)..(4)..(36): Xaa is C or S

SEQ ID NO: 65859 - protein, 34 aa, Artificial Sequence
  GFR-binding peptide
  MOD_RES (1)..(2): Xaa is C or S
  MOD_RES (16)..(17)..(18)..(19)..(20): Xaa is A or G
  MOD_RES (21)..(22)..(23)..(24): Xaa is A or G or is absent
XXTPTKMEPISMLYLXXXXXXXXXKFKYEGMVVD

SEQ ID NO: 65860 - protein, 37 aa, Artificial Sequence; identical to SEQ ID NO: 6846
  GFR-binding peptide
  MOD_RES (2)..(3)..(34)..(36): Xaa is C or S

SEQ ID NO: 65861 - protein, 37 aa, Artificial Sequence; identical to SEQ ID NO: 33084
  GFR-binding peptide
  MOD_RES (3)..(4): Xaa is C or S
  MOD_RES (18)..(19)..(20)..(21)..(22): Xaa is A or G
  MOD_RES (23)..(24)..(25)..(26): Xaa is A or G or is absent

SEQ ID NO: 65862 - protein, 33 aa, Artificial Sequence; identical to SEQ ID NO: 33085
  GFR-binding peptide
  MOD_RES (2)..(3): Xaa is C or S

SEQ ID NO: 65863 - protein, 41 aa, Artificial Sequence; identical to SEQ ID NO: 28023
  GFR-binding peptide
  MOD_RES (5)..(6)..(38)..(40): Xaa is C or S

SEQ ID NO: 65864 - protein, 40 aa, Artificial Sequence; identical to SEQ ID NO: 57974
  GFR-binding peptide
  MOD_RES (5)..(6)..(37)..(39): Xaa is C or S

SEQ ID NO: 65865 - protein, 38 aa, Artificial Sequence; identical to SEQ ID NO: 33087
  GFR-binding peptide
  MOD_RES (1)..(2)..(37): Xaa is C or S
  MOD_RES (16)..(17)..(18)..(19)..(20): Xaa is A or G
  MOD_RES (21)..(22)..(23)..(24): Xaa is A or G or is absent

SEQ ID NO: 65866 - protein, 35 aa, Artificial Sequence
  GFR-binding peptide
  MOD_RES (1)..(2)..(34): Xaa is C or S
XXTPTKMSPISMLYKNDKQQIILKYHYGMVVDRXG

SEQ ID NO: 65867 - protein, 43 aa, Artificial Sequence
  GFR-binding peptide
  MOD_RES (6)..(7)..(41)..(43): Xaa is C or S
  MOD_RES (21)..(22)..(23)..(24)..(25): Xaa is A or G
  MOD_RES (26)..(27)..(28)..(29): Xaa is A or G or is absent
HVPKPXXAPTKLSATSVLYYXXXXXXXXXLRKHRNMVVRSXGX

SEQ ID NO: 65868 - protein, 36 aa, Artificial Sequence; identical to SEQ ID NO: 33099
  GFR-binding peptide
  MOD_RES (1)..(35): Xaa is C or S
  MOD_RES (15)..(16)..(17)..(18)..(19): Xaa is A or G
  MOD_RES (20)..(21)..(22)..(23): Xaa is A or G or is absent

SEQ ID NO: 65869 - protein, 39 aa, Artificial Sequence; identical to SEQ ID NO: 6856
  GFR-binding peptide
  MOD_RES (3)..(4)..(38): Xaa is C or S
  MOD_RES (18)..(19)..(20)..(21)..(22): Xaa is A or G
  MOD_RES (23)..(24)..(25)..(26): Xaa is A or G or is absent

SEQ ID NO: 65870 - protein, 33 aa, Artificial Sequence; identical to SEQ ID NO: 6857
  GFR-binding peptide
  MOD_RES (32)..(32): Xaa is C or S

SEQ ID NO: 65871 - protein, 38 aa, Artificial Sequence; identical to SEQ ID NO: 6866
  GFR-binding peptide
  MOD_RES (5)..(37): Xaa is C or S

SEQ ID NO: 65872 - protein, 33 aa, Artificial Sequence; identical to SEQ ID NO: 6867
  GFR-binding peptide
  MOD_RES (2)..(3): Xaa is C or S

SEQ ID NO: 65873 - protein, 39 aa, Artificial Sequence; identical to SEQ ID NO: 57995
  GFR-binding peptide
  MOD_RES (5)..(6)..(37)..(39): Xaa is C or S

SEQ ID NO: 65874 - protein, 35 aa, Artificial Sequence; identical to SEQ ID NO: 28048
  GFR-binding peptide
  MOD_RES (1)..(2)..(33)..(35): Xaa is C or S

SEQ ID NO: 65875 - protein, 36 aa, Artificial Sequence; identical to SEQ ID NO: 28049
  GFR-binding peptide
  MOD_RES (1)..(2)..(36): Xaa is C or S
  MOD_RES (16)..(17)..(18)..(19)..(20): Xaa is A or G
  MOD_RES (21)..(22)..(23)..(24): Xaa is A or G or is absent

SEQ ID NO: 65876 - protein, 37 aa, Artificial Sequence; identical to SEQ ID NO: 28051
  GFR-binding peptide
  MOD_RES (6)..(7): Xaa is C or S

SEQ ID NO: 65877 - protein, 38 aa, Artificial Sequence; identical to SEQ ID NO: 33127
  GFR-binding peptide
  MOD_RES (5)..(5): Xaa is C or S
  MOD_RES (19)..(20)..(21)..(22)..(23): Xaa is A or G
  MOD_RES (24)..(25)..(26)..(27): Xaa is A or G or is absent

SEQ ID NO: 65878 - protein, 43 aa, Artificial Sequence; identical to SEQ ID NO: 33128
  GFR-binding peptide
  MOD_RES (5)..(6)..(40)..(42): Xaa is C or S
  MOD_RES (20)..(21)..(22)..(23)..(24): Xaa is A or G
  MOD_RES (25)..(26)..(27)..(28): Xaa is A or G or is absent

SEQ ID NO: 65879 - protein, 40 aa, Artificial Sequence; identical to SEQ ID NO: 6876
  GFR-binding peptide
  MOD_RES (5)..(6)..(37)..(39): Xaa is C or S

SEQ ID NO: 65880 - protein, 37 aa, Artificial Sequence; identical to SEQ ID NO: 33132
  GFR-binding peptide
  MOD_RES (3)..(4): Xaa is C or S
  MOD_RES (18)..(19)..(20)..(21)..(22): Xaa is A or G
  MOD_RES (23)..(24)..(25)..(26): Xaa is A or G or is absent

SEQ ID NO: 65881 - protein, 39 aa, Artificial Sequence; identical to SEQ ID NO: 28053
  GFR-binding peptide
  MOD_RES (6)..(38): Xaa is C or S

SEQ ID NO: 65882 - protein, 36 aa, Artificial Sequence; identical to SEQ ID NO: 28054
  GFR-binding peptide
  MOD_RES (2)..(3)..(36): Xaa is C or S
  MOD_RES (17)..(18)..(19)..(20)..(21): Xaa is A or G
  MOD_RES (22)..(23)..(24)..(25): Xaa is A or G or is absent

SEQ ID NO: 65883 - protein, 42 aa, Artificial Sequence; identical to SEQ ID NO: 33137
  GFR-binding peptide
  MOD_RES (6)..(7)..(40)..(42): Xaa is C or S
  MOD_RES (21)..(22)..(23)..(24)..(25): Xaa is A or G
  MOD_RES (26)..(27)..(28)..(29): Xaa is A or G or is absent

SEQ ID NO: 65884 - protein, 34 aa, Artificial Sequence
  GFR-binding peptide
  MOD_RES (34)..(34): Xaa is C or S
  MOD_RES (14)..(15)..(16)..(17)..(18): Xaa is A or G
  MOD_RES (19)..(20)..(21)..(22): Xaa is A or G or is absent
TPTKMEPISMLYLXXXXXXXXXKFKYEGMVVDRX

SEQ ID NO: 65885 - protein, 37 aa, Artificial Sequence; identical to SEQ ID NO: 33140
  GFR-binding peptide
  MOD_RES (4)..(5): Xaa is C or S
  MOD_RES (19)..(20)..(21)..(22)..(23): Xaa is A or G
  MOD_RES (24)..(25)..(26)..(27): Xaa is A or G or is absent

SEQ ID NO: 65886 - protein, 41 aa, Artificial Sequence; identical to SEQ ID NO: 6880
  GFR-binding peptide
  MOD_RES (5)..(6)..(38)..(40): Xaa is C or S

SEQ ID NO: 65887 - protein, 37 aa, Artificial Sequence; identical to SEQ ID NO: 28059
  GFR-binding peptide
  MOD_RES (2)..(3)..(35)..(37): Xaa is C or S

SEQ ID NO: 65888 - protein, 38 aa, Artificial Sequence; identical to SEQ ID NO: 28064
  GFR-binding peptide
  MOD_RES (2)..(3)..(35)..(37): Xaa is C or S

SEQ ID NO: 65889 - protein, 35 aa, Artificial Sequence; identical to SEQ ID NO: 6886
  GFR-binding peptide
  MOD_RES (3)..(4): Xaa is C or S

SEQ ID NO: 65890 - protein, 35 aa, Artificial Sequence; identical to SEQ ID NO: 28066
  GFR-binding peptide
  MOD_RES (32)..(34): Xaa is C or S

SEQ ID NO: 65891 - protein, 35 aa, Artificial Sequence
  GFR-binding peptide
  MOD_RES (2)..(3)..(34): Xaa is C or S
TXXAPVKTSPISMLYKDNGRVLLLKYHYMIVEEXG

SEQ ID NO: 65892 - protein, 39 aa, Artificial Sequence; identical to SEQ ID NO: 28072
  GFR-binding peptide
  MOD_RES (6)..(7): Xaa is C or S

SEQ ID NO: 65893 - protein, 35 aa, Artificial Sequence; identical to SEQ ID NO: 6892
  GFR-binding peptide
  MOD_RES (1)..(2): Xaa is C or S
  MOD_RES (16)..(17)..(18)..(19)..(20): Xaa is A or G
  MOD_RES (21)..(22)..(23)..(24): Xaa is A or G or is absent

SEQ ID NO: 65894 - protein, 38 aa, Artificial Sequence; identical to SEQ ID NO: 28075
  GFR-binding peptide
  MOD_RES (4)..(5): Xaa is C or S
  MOD_RES (19)..(20)..(21)..(22)..(23): Xaa is A or G
  MOD_RES (24)..(25)..(26)..(27): Xaa is A or G or is absent

SEQ ID NO: 65895 - protein, 40 aa, Artificial Sequence; identical to SEQ ID NO: 33155
  GFR-binding peptide
  MOD_RES (4)..(5)..(39): Xaa is C or S
  MOD_RES (19)..(20)..(21)..(22)..(23): Xaa is A or G
  MOD_RES (24)..(25)..(26)..(27): Xaa is A or G or is absent

SEQ ID NO: 65896 - protein, 37 aa, Artificial Sequence; identical to SEQ ID NO: 28080
  GFR-binding peptide
  MOD_RES (3)..(37): Xaa is C or S
  MOD_RES (17)..(18)..(19)..(20)..(21): Xaa is A or G
  MOD_RES (22)..(23)..(24)..(25): Xaa is A or G or is absent

SEQ ID NO: 65897 - protein, 39 aa, Artificial Sequence; identical to SEQ ID NO: 33156
  GFR-binding peptide
  MOD_RES (3)..(4)..(38): Xaa is C or S
  MOD_RES (18)..(19)..(20)..(21)..(22): Xaa is A or G
  MOD_RES (23)..(24)..(25)..(26): Xaa is A or G or is absent

SEQ ID NO: 65898 - protein, 37 aa, Artificial Sequence; identical to SEQ ID NO: 33157
  GFR-binding peptide
  MOD_RES (4)..(5)..(37): Xaa is C or S

SEQ ID NO: 65899 - protein, 37 aa, Artificial Sequence; identical to SEQ ID NO: 33158
  GFR-binding peptide
  MOD_RES (4)..(5)..(37): Xaa is C or S

SEQ ID NO: 65900 - protein, 38 aa, Artificial Sequence; identical to SEQ ID NO: 6900
  GFR-binding peptide
  MOD_RES (1)..(2)..(36)..(38): Xaa is C or S
  MOD_RES (16)..(17)..(18)..(19)..(20): Xaa is A or G
  MOD_RES (21)..(22)..(23)..(24): Xaa is A or G or is absent

SEQ ID NO: 65901 - protein, 33 aa, Artificial Sequence; identical to SEQ ID NO: 28088
  GFR-binding peptide
  MOD_RES (1)..(2): Xaa is C or S

SEQ ID NO: 65902 - protein, 44 aa, Artificial Sequence; identical to SEQ ID NO: 33168
  GFR-binding peptide
  MOD_RES (6)..(7)..(41)..(43): Xaa is C or S
  MOD_RES (21)..(22)..(23)..(24)..(25): Xaa is A or G
  MOD_RES (26)..(27)..(28)..(29): Xaa is A or G or is absent

SEQ ID NO: 65903 - protein, 36 aa, Artificial Sequence; identical to SEQ ID NO: 6904
  GFR-binding peptide
  MOD_RES (3)..(35): Xaa is C or S

SEQ ID NO: 65904 - protein, 37 aa, Artificial Sequence; identical to SEQ ID NO: 6906
  GFR-binding peptide
  MOD_RES (4)..(5): Xaa is C or S
  MOD_RES (19)..(20)..(21)..(22)..(23): Xaa is A or G
  MOD_RES (24)..(25)..(26)..(27): Xaa is A or G or is absent

SEQ ID NO: 65905 - protein, 39 aa, Artificial Sequence; identical to SEQ ID NO: 6909
  GFR-binding peptide
  MOD_RES (6)..(7)..(38): Xaa is C or S

SEQ ID NO: 65906 - protein, 34 aa, Artificial Sequence
  GFR-binding peptide
  MOD_RES (2)..(3): Xaa is C or S
PXXTPTKMSATSMLYYNDKQQIILRKHRGMVVDR

SEQ ID NO: 65907 - protein, 42 aa, Artificial Sequence; identical to SEQ ID NO: 28099
  GFR-binding peptide
  MOD_RES (6)..(7)..(39)..(41): Xaa is C or S

SEQ ID NO: 65908 - protein, 38 aa, Artificial Sequence; identical to SEQ ID NO: 6913
  GFR-binding peptide
  MOD_RES (5)..(5): Xaa is C or S
  MOD_RES (19)..(20)..(21)..(22)..(23): Xaa is A or G
  MOD_RES (24)..(25)..(26)..(27): Xaa is A or G or is absent

SEQ ID NO: 65909 - protein, 36 aa, Artificial Sequence
  GFR-binding peptide
  MOD_RES (5)..(6): Xaa is C or S
VPSTXXAPVKTSPISMLYKDNGRVLLLKYHYMIVEE

SEQ ID NO: 65910 - protein, 41 aa, Artificial Sequence; identical to SEQ ID NO: 6917
  GFR-binding peptide
  MOD_RES (4)..(5)..(40): Xaa is C or S
  MOD_RES (19)..(20)..(21)..(22)..(23): Xaa is A or G
  MOD_RES (24)..(25)..(26)..(27): Xaa is A or G or is absent

SEQ ID NO: 65911 - protein, 39 aa, Artificial Sequence; identical to SEQ ID NO: 33184
  GFR-binding peptide
  MOD_RES (4)..(5)..(37)..(39): Xaa is C or S

SEQ ID NO: 65912 - protein, 39 aa, Artificial Sequence
  GFR-binding peptide
  MOD_RES (3)..(4)..(38): Xaa is C or S
  MOD_RES (18)..(19)..(20)..(21)..(22): Xaa is A or G
  MOD_RES (23)..(24)..(25)..(26): Xaa is A or G or is absent
EPXXVPEKMSATSILYYXXXXXXXXXLRKHRNMTVESXA

SEQ ID NO: 65913 - protein, 41 aa, Artificial Sequence
  GFR-binding peptide
  MOD_RES (6)..(7)..(41): Xaa is C or S
  MOD_RES (21)..(22)..(23)..(24)..(25): Xaa is A or G
  MOD_RES (26)..(27)..(28)..(29): Xaa is A or G or is absent
HVPKPXXAPTKLSATSVLYYXXXXXXXXXLRKHRNMVVRSX

SEQ ID NO: 65914 - protein, 32 aa, Artificial Sequence; identical to SEQ ID NO: 6919
  GFR-binding peptide
  MOD_RES (1)..(2): Xaa is C or S

SEQ ID NO: 65915 - protein, 34 aa, Artificial Sequence; identical to SEQ ID NO: 6920
  GFR-binding peptide
  MOD_RES (1)..(2): Xaa is C or S
  MOD_RES (16)..(17)..(18)..(19)..(20): Xaa is A or G
  MOD_RES (21)..(22)..(23)..(24): Xaa is A or G or is absent

SEQ ID NO: 65916 - protein, 41 aa, Artificial Sequence; identical to SEQ ID NO: 6921
  GFR-binding peptide
  MOD_RES (5)..(6)..(40): Xaa is C or S
  MOD_RES (20)..(21)..(22)..(23)..(24): Xaa is A or G
  MOD_RES (25)..(26)..(27)..(28): Xaa is A or G or is absent

SEQ ID NO: 65917 - protein, 35 aa, Artificial Sequence; identical to SEQ ID NO: 58052
  GFR-binding peptide
  MOD_RES (4)..(5): Xaa is C or S

SEQ ID NO: 65918 - protein, 35 aa, Artificial Sequence; identical to SEQ ID NO: 6927
  GFR-binding peptide
  MOD_RES (4)..(5): Xaa is C or S

SEQ ID NO: 65919 - protein, 43 aa, Artificial Sequence; identical to SEQ ID NO: 28110
  GFR-binding peptide
  MOD_RES (5)..(6)..(40)..(42): Xaa is C or S
  MOD_RES (20)..(21)..(22)..(23)..(24): Xaa is A or G
  MOD_RES (25)..(26)..(27)..(28): Xaa is A or G or is absent

SEQ ID NO: 65920 - protein, 38 aa, Artificial Sequence; identical to SEQ ID NO: 33198
  GFR-binding peptide
  MOD_RES (1)..(2)..(36)..(38): Xaa is C or S
  MOD_RES (16)..(17)..(18)..(19)..(20): Xaa is A or G
  MOD_RES (21)..(22)..(23)..(24): Xaa is A or G or is absent

SEQ ID NO: 65921 - protein, 34 aa, Artificial Sequence; identical to SEQ ID NO: 28111
  GFR-binding peptide
  MOD_RES (1)..(2)..(34): Xaa is C or S

SEQ ID NO: 65922 - protein, 34 aa, Artificial Sequence; identical to SEQ ID NO: 6928
  GFR-binding peptide
  MOD_RES (32)..(34): Xaa is C or S

SEQ ID NO: 65923 - protein, 40 aa, Artificial Sequence; identical to SEQ ID NO: 28113
  GFR-binding peptide
  MOD_RES (4)..(5)..(37)..(39): Xaa is C or S

SEQ ID NO: 65924 - protein, 34 aa, Artificial Sequence; identical to SEQ ID NO: 6929
  GFR-binding peptide
  MOD_RES (2)..(3)..(34): Xaa is C or S

SEQ ID NO: 65925 - protein, 34 aa, Artificial Sequence
  GFR-binding peptide
  MOD_RES (1)..(33): Xaa is C or S
XVPEKMSPINILYFDENKNVVYGKIPNMTVESXA

SEQ ID NO: 65926 - protein, 34 aa, Artificial Sequence; identical to SEQ ID NO: 33204
  GFR-binding peptide
  MOD_RES (4)..(4): Xaa is C or S

SEQ ID NO: 65927 - protein, 40 aa, Artificial Sequence; identical to SEQ ID NO: 6933
  GFR-binding peptide
  MOD_RES (4)..(5)..(38)..(40): Xaa is C or S
  MOD_RES (19)..(20)..(21)..(22)..(23): Xaa is A or G
  MOD_RES (24)..(25)..(26)..(27): Xaa is A or G or is absent

SEQ ID NO: 65928 - protein, 40 aa, Artificial Sequence; identical to SEQ ID NO: 6937
  GFR-binding peptide
  MOD_RES (4)..(5)..(39): Xaa is C or S
  MOD_RES (19)..(20)..(21)..(22)..(23): Xaa is A or G
  MOD_RES (24)..(25)..(26)..(27): Xaa is A or G or is absent

SEQ ID NO: 65929 - protein, 32 aa, Artificial Sequence
  GFR-binding peptide
  MOD_RES (14)..(15)..(16)..(17)..(18): Xaa is A or G
  MOD_RES (19)..(20)..(21)..(22): Xaa is A or G or is absent
VPQDLSPINILYFXXXXXXXXXYGKIPMVVKS

SEQ ID NO: 65930 - protein, 38 aa, Artificial Sequence
  GFR-binding peptide
  MOD_RES (3)..(4)..(35)..(37): Xaa is C or S
SPXXVPQDLSPINILYFVGRTPKVYGKIPMVVKSXKXS

SEQ ID NO: 65931 - protein, 32 aa, Artificial Sequence; identical to SEQ ID NO: 28127
  GFR-binding peptide
  MOD_RES (1)..(1): Xaa is C or S

SEQ ID NO: 65932 - protein, 37 aa, Artificial Sequence
  GFR-binding peptide
  MOD_RES (3)..(4)..(37): Xaa is C or S
  MOD_RES (18)..(19)..(20)..(21)..(22): Xaa is A or G
  MOD_RES (23)..(24)..(25)..(26): Xaa is A or G or is absent
SPXXVPQDLSPINILYFXXXXXXXXXYGKIPMVVKSX

SEQ ID NO: 65933 - protein, 43 aa, Artificial Sequence; identical to SEQ ID NO: 58066
  GFR-binding peptide
  MOD_RES (6)..(7)..(40)..(42): Xaa is C or S
  MOD_RES (21)..(22)..(23)..(24)..(25): Xaa is A or G
  MOD_RES (26)..(27)..(28)..(29): Xaa is A or G or is absent

SEQ ID NO: 65934 - protein, 40 aa, Artificial Sequence
  GFR-binding peptide
  MOD_RES (6)..(7)..(40): Xaa is C or S
  MOD_RES (21)..(22)..(23)..(24)..(25): Xaa is A or G
  MOD_RES (26)..(27)..(28)..(29): Xaa is A or G or is absent
RVPSTXXAPVKTSATSMLYYXXXXXXXXXLRKHRMIVEEX

SEQ ID NO: 65935 - protein, 37 aa, Artificial Sequence; identical to SEQ ID NO: 6944
  GFR-binding peptide
  MOD_RES (4)..(5): Xaa is C or S
  MOD_RES (19)..(20)..(21)..(22)..(23): Xaa is A or G
  MOD_RES (24)..(25)..(26)..(27): Xaa is A or G or is absent

SEQ ID NO: 65936 - protein, 36 aa, Artificial Sequence; identical to SEQ ID NO: 6945
  GFR-binding peptide
  MOD_RES (1)..(2)..(34)..(36): Xaa is C or S

SEQ ID NO: 65937 - protein, 36 aa, Artificial Sequence; identical to SEQ ID NO: 28129
  GFR-binding peptide
  MOD_RES (2)..(3)..(35): Xaa is C or S

SEQ ID NO: 65938 - protein, 37 aa, Artificial Sequence; identical to SEQ ID NO: 28131
  GFR-binding peptide
  MOD_RES (4)..(5): Xaa is C or S
  MOD_RES (19)..(20)..(21)..(22)..(23): Xaa is A or G
  MOD_RES (24)..(25)..(26)..(27): Xaa is A or G or is absent

SEQ ID NO: 65939 - protein, 38 aa, Artificial Sequence; identical to SEQ ID NO: 28133
  GFR-binding peptide
  MOD_RES (4)..(5)..(38): Xaa is C or S
  MOD_RES (19)..(20)..(21)..(22)..(23): Xaa is A or G
  MOD_RES (24)..(25)..(26)..(27): Xaa is A or G or is absent

SEQ ID NO: 65940 - protein, 36 aa, Artificial Sequence; identical to SEQ ID NO: 6949
  GFR-binding peptide
  MOD_RES (4)..(5): Xaa is C or S

SEQ ID NO: 65941 - protein, 38 aa, Artificial Sequence; identical to SEQ ID NO: 33221
  GFR-binding peptide
  MOD_RES (2)..(3)..(35)..(37): Xaa is C or S

SEQ ID NO: 65942 - protein, 34 aa, Artificial Sequence; identical to SEQ ID NO: 28136
  GFR-binding peptide
  MOD_RES (14)..(15)..(16)..(17)..(18): Xaa is A or G
  MOD_RES (19)..(20)..(21)..(22): Xaa is A or G or is absent

SEQ ID NO: 65943 - protein, 38 aa, Artificial Sequence; identical to SEQ ID NO: 6951
  GFR-binding peptide
  MOD_RES (3)..(37): Xaa is C or S
  MOD_RES (17)..(18)..(19)..(20)..(21): Xaa is A or G
  MOD_RES (22)..(23)..(24)..(25): Xaa is A or G or is absent

SEQ ID NO: 65944 - protein, 35 aa, Artificial Sequence; identical to SEQ ID NO: 6952
  GFR-binding peptide
  MOD_RES (2)..(3): Xaa is C or S

SEQ ID NO: 65945 - protein, 41 aa, Artificial Sequence; identical to SEQ ID NO: 33225
  GFR-binding peptide
  MOD_RES (6)..(7)..(41): Xaa is C or S
  MOD_RES (21)..(22)..(23)..(24)..(25): Xaa is A or G
  MOD_RES (26)..(27)..(28)..(29): Xaa is A or G or is absent

SEQ ID NO: 65946 - protein, 37 aa, Artificial Sequence; identical to SEQ ID NO: 6957
  GFR-binding peptide
  MOD_RES (4)..(5): Xaa is C or S
  MOD_RES (19)..(20)..(21)..(22)..(23): Xaa is A or G
  MOD_RES (24)..(25)..(26)..(27): Xaa is A or G or is absent

SEQ ID NO: 65947 - protein, 36 aa, Artificial Sequence; identical to SEQ ID NO: 28143
  GFR-binding peptide
  MOD_RES (5)..(6): Xaa is C or S

SEQ ID NO: 65948 - protein, 38 aa, Artificial Sequence; identical to SEQ ID NO: 6963
  GFR-binding peptide
  MOD_RES (4)..(5)..(38): Xaa is C or S
  MOD_RES (19)..(20)..(21)..(22)..(23): Xaa is A or G
  MOD_RES (24)..(25)..(26)..(27): Xaa is A or G or is absent

SEQ ID NO: 65949 - protein, 38 aa, Artificial Sequence
  GFR-binding peptide
  MOD_RES (4)..(5)..(37): Xaa is C or S
PEPXXVPEKMSATSILYYDENKNVVLRKHRNMTVESXA

SEQ ID NO: 65950 - protein, 35 aa, Artificial Sequence; identical to SEQ ID NO: 6966
  GFR-binding peptide
  MOD_RES (2)..(3): Xaa is C or S
  MOD_RES (17)..(18)..(19)..(20)..(21): Xaa is A or G
  MOD_RES (22)..(23)..(24)..(25): Xaa is A or G or is absent

SEQ ID NO: 65951 - protein, 35 aa, Artificial Sequence
  GFR-binding peptide
  MOD_RES (2)..(3): Xaa is C or S
  MOD_RES (17)..(18)..(19)..(20)..(21): Xaa is A or G
  MOD_RES (22)..(23)..(24)..(25): Xaa is A or G or is absent
TXXAPVKTSPISMLYKXXXXXXXXXLKYHYMIVEE

SEQ ID NO: 65952 - protein, 32 aa, Artificial Sequence; identical to SEQ ID NO: 6972
  GFR-binding peptide
  MOD_RES (1)..(2): Xaa is C or S

SEQ ID NO: 65953 - protein, 38 aa, Artificial Sequence
  GFR-binding peptide
  MOD_RES (2)..(3)..(37): Xaa is C or S
  MOD_RES (17)..(18)..(19)..(20)..(21): Xaa is A or G
  MOD_RES (22)..(23)..(24)..(25): Xaa is A or G or is absent
PXXTPTKMEPISMLYLXXXXXXXXXKFKYEGMVVDRXG

SEQ ID NO: 65954 - protein, 38 aa, Artificial Sequence; identical to SEQ ID NO: 33233
  GFR-binding peptide
  MOD_RES (4)..(5)..(38): Xaa is C or S
  MOD_RES (19)..(20)..(21)..(22)..(23): Xaa is A or G
  MOD_RES (24)..(25)..(26)..(27): Xaa is A or G or is absent

SEQ ID NO: 65955 - protein, 38 aa, Artificial Sequence; identical to SEQ ID NO: 6975
  GFR-binding peptide
  MOD_RES (4)..(5): Xaa is C or S
  MOD_RES (19)..(20)..(21)..(22)..(23): Xaa is A or G
  MOD_RES (24)..(25)..(26)..(27): Xaa is A or G or is absent

SEQ ID NO: 65956 - protein, 37 aa, Artificial Sequence
  GFR-binding peptide
  MOD_RES (34)..(36): Xaa is C or S
  MOD_RES (14)..(15)..(16)..(17)..(18): Xaa is A or G
  MOD_RES (19)..(20)..(21)..(22): Xaa is A or G or is absent
TPTKMEPISMLYLXXXXXXXXXKFKYEGMVVDRXGXS

SEQ ID NO: 65957 - protein, 40 aa, Artificial Sequence
  GFR-binding peptide
  MOD_RES (4)..(5)..(37)..(39): Xaa is C or S
SKAXXVPTKLSATSILYYDKGVVTYLRKHRGMAVSEXGXR

SEQ ID NO: 65958 - protein, 37 aa, Artificial Sequence; identical to SEQ ID NO: 28160
  GFR-binding peptide
  MOD_RES (4)..(5): Xaa is C or S
  MOD_RES (19)..(20)..(21)..(22)..(23): Xaa is A or G
  MOD_RES (24)..(25)..(26)..(27): Xaa is A or G or is absent

SEQ ID NO: 65959 - protein, 41 aa, Artificial Sequence; identical to SEQ ID NO: 33235
  GFR-binding peptide
  MOD_RES (3)..(4)..(38)..(40): Xaa is C or S
  MOD_RES (18)..(19)..(20)..(21)..(22): Xaa is A or G
  MOD_RES (23)..(24)..(25)..(26): Xaa is A or G or is absent

SEQ ID NO: 65960 - protein, 39 aa, Artificial Sequence; identical to SEQ ID NO: 33236
  GFR-binding peptide
  MOD_RES (6)..(7): Xaa is C or S
  MOD_RES (21)..(22)..(23)..(24)..(25): Xaa is A or G
  MOD_RES (26)..(27)..(28)..(29): Xaa is A or G or is absent

SEQ ID NO: 65961 - protein, 37 aa, Artificial Sequence
  GFR-binding peptide
  MOD_RES (1)..(35)..(37): Xaa is C or S
  MOD_RES (15)..(16)..(17)..(18)..(19): Xaa is A or G
  MOD_RES (20)..(21)..(22)..(23): Xaa is A or G or is absent
XTPTKMEPISMLYLXXXXXXXXXKFKYEGMVVDRXGX

SEQ ID NO: 65962 - protein, 35 aa, Artificial Sequence
  GFR-binding peptide
  MOD_RES (1)..(33)..(35): Xaa is C or S
XVPTRLSPISILYKDSANNVVLKYHYDMVVESXGX

SEQ ID NO: 65963 - protein, 32 aa, Artificial Sequence; identical to SEQ ID NO: 6982
  GFR-binding peptide
  MOD_RES (1)..(32): Xaa is C or S

SEQ ID NO: 65964 - protein, 32 aa, Artificial Sequence; identical to SEQ ID NO: 6983
  GFR-binding peptide
  MOD_RES (1)..(2): Xaa is C or S

SEQ ID NO: 65965 - protein, 40 aa, Artificial Sequence; identical to SEQ ID NO: 28163
  GFR-binding peptide
  MOD_RES (6)..(7): Xaa is C or S
  MOD_RES (21)..(22)..(23)..(24)..(25): Xaa is A or G
  MOD_RES (26)..(27)..(28)..(29): Xaa is A or G or is absent

SEQ ID NO: 65966 - protein, 38 aa, Artificial Sequence; identical to SEQ ID NO: 28164
  GFR-binding peptide
  MOD_RES (4)..(5)..(36)..(38): Xaa is C or S

SEQ ID NO: 65967 - protein, 31 aa, Artificial Sequence; identical to SEQ ID NO: 33246
  GFR-binding peptide

SEQ ID NO: 65968 - protein, 36 aa, Artificial Sequence; identical to SEQ ID NO: 6987
  GFR-binding peptide
  MOD_RES (1)..(2)..(33)..(35): Xaa is C or S

SEQ ID NO: 65969 - protein, 38 aa, Artificial Sequence; identical to SEQ ID NO: 6988
  GFR-binding peptide
  MOD_RES (1)..(35)..(37): Xaa is C or S
  MOD_RES (15)..(16)..(17)..(18)..(19): Xaa is A or G
  MOD_RES (20)..(21)..(22)..(23): Xaa is A or G or is absent

SEQ ID NO: 65970 - protein, 38 aa, Artificial Sequence; identical to SEQ ID NO: 33248
  GFR-binding peptide
  MOD_RES (1)..(35)..(37): Xaa is C or S
  MOD_RES (15)..(16)..(17)..(18)..(19): Xaa is A or G
  MOD_RES (20)..(21)..(22)..(23): Xaa is A or G or is absent

SEQ ID NO: 65971 - protein, 39 aa, Artificial Sequence; identical to SEQ ID NO: 33249
  GFR-binding peptide
  MOD_RES (3)..(4)..(36)..(38): Xaa is C or S

SEQ ID NO: 65972 - protein, 38 aa, Artificial Sequence; identical to SEQ ID NO: 6990
  GFR-binding peptide
  MOD_RES (1)..(2)..(36)..(38): Xaa is C or S
  MOD_RES (16)..(17)..(18)..(19)..(20): Xaa is A or G
  MOD_RES (21)..(22)..(23)..(24): Xaa is A or G or is absent

SEQ ID NO: 65973 - protein, 34 aa, Artificial Sequence; identical to SEQ ID NO: 6991
  GFR-binding peptide
  MOD_RES (3)..(4): Xaa is C or S

SEQ ID NO: 65974 - protein, 38 aa, Artificial Sequence; identical to SEQ ID NO: 6992
  GFR-binding peptide
  MOD_RES (6)..(7)..(38): Xaa is C or S

SEQ ID NO: 65975 - protein, 38 aa, Artificial Sequence; identical to SEQ ID NO: 6994
  GFR-binding peptide
  MOD_RES (3)..(4)..(37): Xaa is C or S
  MOD_RES (18)..(19)..(20)..(21)..(22): Xaa is A or G
  MOD_RES (23)..(24)..(25)..(26): Xaa is A or G or is absent

SEQ ID NO: 65976 - protein, 37 aa, Artificial Sequence; identical to SEQ ID NO: 28173
  GFR-binding peptide
  MOD_RES (2)..(3)..(37): Xaa is C or S
  MOD_RES (17)..(18)..(19)..(20)..(21): Xaa is A or G
  MOD_RES (22)..(23)..(24)..(25): Xaa is A or G or is absent

SEQ ID NO: 65977 - protein, 37 aa, Artificial Sequence
  GFR-binding peptide
  MOD_RES (6)..(7): Xaa is C or S
GSAGPXXTPTKMEPISMLYLNDKQQIIKFKYEGMVVD

SEQ ID NO: 65978 - protein, 36 aa, Artificial Sequence; identical to SEQ ID NO: 6996
  GFR-binding peptide
  MOD_RES (34)..(36): Xaa is C or S
  MOD_RES (14)..(15)..(16)..(17)..(18): Xaa is A or G
  MOD_RES (19)..(20)..(21)..(22): Xaa is A or G or is absent

SEQ ID NO: 65979 - protein, 37 aa, Artificial Sequence; identical to SEQ ID NO: 6999
  GFR-binding peptide
  MOD_RES (4)..(5): Xaa is C or S
  MOD_RES (19)..(20)..(21)..(22)..(23): Xaa is A or G
  MOD_RES (24)..(25)..(26)..(27): Xaa is A or G or is absent

SEQ ID NO: 65980 - protein, 38 aa, Artificial Sequence; identical to SEQ ID NO: 7000
  GFR-binding peptide
  MOD_RES (2)..(3)..(35)..(37): Xaa is C or S

SEQ ID NO: 65981 - protein, 37 aa, Artificial Sequence; identical to SEQ ID NO: 28177
  GFR-binding peptide
  MOD_RES (1)..(2)..(35)..(37): Xaa is C or S

SEQ ID NO: 65982 - protein, 40 aa, Artificial Sequence; identical to SEQ ID NO: 7002
  GFR-binding peptide
  MOD_RES (4)..(5)..(39): Xaa is C or S
  MOD_RES (19)..(20)..(21)..(22)..(23): Xaa is A or G
  MOD_RES (24)..(25)..(26)..(27): Xaa is A or G or is absent

SEQ ID NO: 65983 - protein, 37 aa, Artificial Sequence; identical to SEQ ID NO: 7005
  GFR-binding peptide
  MOD_RES (2)..(34)..(36): Xaa is C or S

SEQ ID NO: 65984 - protein, 35 aa, Artificial Sequence; identical to SEQ ID NO: 7006
  GFR-binding peptide
  MOD_RES (33)..(35): Xaa is C or S
  MOD_RES (14)..(15)..(16)..(17)..(18): Xaa is A or G
  MOD_RES (19)..(20)..(21)..(22): Xaa is A or G or is absent

SEQ ID NO: 65985 - protein, 36 aa, Artificial Sequence; identical to SEQ ID NO: 7007
  GFR-binding peptide
  MOD_RES (1)..(2)..(33)..(35): Xaa is C or S

SEQ ID NO: 65986 - protein, 32 aa, Artificial Sequence; identical to SEQ ID NO: 28187
  GFR-binding peptide
  MOD_RES (1)..(1): Xaa is C or S

SEQ ID NO: 65987 - protein, 40 aa, Artificial Sequence; identical to SEQ ID NO: 7008
  GFR-binding peptide
  MOD_RES (3)..(4)..(37)..(39): Xaa is C or S

SEQ ID NO: 65988 - protein, 33 aa, Artificial Sequence; identical to SEQ ID NO: 7009
  GFR-binding peptide
  MOD_RES (1)..(32): Xaa is C or S

SEQ ID NO: 65989 - protein, 34 aa, Artificial Sequence; identical to SEQ ID NO: 33273
  GFR-binding peptide
  MOD_RES (3)..(4): Xaa is C or S

SEQ ID NO: 65990 - protein, 34 aa, Artificial Sequence; identical to SEQ ID NO: 7013
  GFR-binding peptide
  MOD_RES (1)..(33): Xaa is C or S

SEQ ID NO: 65991 - protein, 42 aa, Artificial Sequence; identical to SEQ ID NO: 33274
  GFR-binding peptide
  MOD_RES (6)..(7)..(41): Xaa is C or S
  MOD_RES (21)..(22)..(23)..(24)..(25): Xaa is A or G
  MOD_RES (26)..(27)..(28)..(29): Xaa is A or G or is absent

SEQ ID NO: 65992 - protein, 30 aa, Artificial Sequence
  GFR-binding peptide
VPEKMSPISILYKDENKNVVLKYHYNMTVE

SEQ ID NO: 65993 - protein, 37 aa, Artificial Sequence; identical to SEQ ID NO: 7017
  GFR-binding peptide
  MOD_RES (1)..(2)..(34)..(36): Xaa is C or S

SEQ ID NO: 65994 - protein, 36 aa, Artificial Sequence; identical to SEQ ID NO: 7018
  GFR-binding peptide
  MOD_RES (2)..(3)..(36): Xaa is C or S

SEQ ID NO: 65995 - protein, 35 aa, Artificial Sequence
  GFR-binding peptide
  MOD_RES (1)..(2)..(33)..(35): Xaa is C or S
XXAPVKTSPISMLYKDNGRVLLLKYHYMIVEEXGX

SEQ ID NO: 65996 - protein, 38 aa, Artificial Sequence
  GFR-binding peptide
  MOD_RES (2)..(3)..(37): Xaa is C or S
  MOD_RES (17)..(18)..(19)..(20)..(21): Xaa is A or G
  MOD_RES (22)..(23)..(24)..(25): Xaa is A or G or is absent
SXXVPARLSATSILYYXXXXXXXXXLRKHRDMVVEAXG

SEQ ID NO: 65997 - protein, 38 aa, Artificial Sequence; identical to SEQ ID NO: 33279
  GFR-binding peptide
  MOD_RES (3)..(4)..(36)..(38): Xaa is C or S

SEQ ID NO: 65998 - protein, 37 aa, Artificial Sequence; identical to SEQ ID NO: 33280
  GFR-binding peptide
  MOD_RES (6)..(7): Xaa is C or S

SEQ ID NO: 65999 - protein, 36 aa, Artificial Sequence; identical to SEQ ID NO: 7022
  GFR-binding peptide
  MOD_RES (34)..(36): Xaa is C or S
  MOD_RES (14)..(15)..(16)..(17)..(18): Xaa is A or G
  MOD_RES (19)..(20)..(21)..(22): Xaa is A or G or is absent

SEQ ID NO: 66000 - protein, 34 aa, Artificial Sequence
  GFR-binding peptide
  MOD_RES (1)..(2)..(34): Xaa is C or S
XXVPTRLSPISILYKDSANNVVLKYHYDMVVESX

SEQ ID NO: 66001 - protein, 35 aa, Artificial Sequence
  GFR-binding peptide
  MOD_RES (34)..(34): Xaa is C or S
  MOD_RES (14)..(15)..(16)..(17)..(18): Xaa is A or G
  MOD_RES (19)..(20)..(21)..(22): Xaa is A or G or is absent
VPEKMNAISILYFXXXXXXXXXLKKYRNMTVESXA

SEQ ID NO: 66002 - protein, 38 aa, Artificial Sequence; identical to SEQ ID NO: 7030
  GFR-binding peptide
  MOD_RES (4)..(5): Xaa is C or S
  MOD_RES (19)..(20)..(21)..(22)..(23): Xaa is A or G
  MOD_RES (24)..(25)..(26)..(27): Xaa is A or G or is absent

SEQ ID NO: 66003 - protein, 33 aa, Artificial Sequence
  GFR-binding peptide
  MOD_RES (14)..(15)..(16)..(17)..(18): Xaa is A or G
  MOD_RES (19)..(20)..(21)..(22): Xaa is A or G or is absent
TPTKMSATSMLYYXXXXXXXXXLRKHRGMVVDR

SEQ ID NO: 66004 - protein, 34 aa, Artificial Sequence; identical to SEQ ID NO: 7036
  GFR-binding peptide
  MOD_RES (33)..(33): Xaa is C or S
  MOD_RES (14)..(15)..(16)..(17)..(18): Xaa is A or G
  MOD_RES (19)..(20)..(21)..(22): Xaa is A or G or is absent

SEQ ID NO: 66005 - protein, 36 aa, Artificial Sequence; identical to SEQ ID NO: 7038
  GFR-binding peptide
  MOD_RES (3)..(4)..(35): Xaa is C or S

SEQ ID NO: 66006 - protein, 38 aa, Artificial Sequence; identical to SEQ ID NO: 7039
  GFR-binding peptide
  MOD_RES (5)..(6): Xaa is C or S

SEQ ID NO: 66007 - protein, 39 aa, Artificial Sequence; identical to SEQ ID NO: 33291
  GFR-binding peptide
  MOD_RES (5)..(6)..(38): Xaa is C or S

SEQ ID NO: 66008 - protein, 39 aa, Artificial Sequence; identical to SEQ ID NO: 33292
  GFR-binding peptide
  MOD_RES (5)..(6): Xaa is C or S
  MOD_RES (20)..(21)..(22)..(23)..(24): Xaa is A or G
  MOD_RES (25)..(26)..(27)..(28): Xaa is A or G or is absent

SEQ ID NO: 66009 - protein, 39 aa, Artificial Sequence; identical to SEQ ID NO: 28219
  GFR-binding peptide
  MOD_RES (4)..(5)..(38): Xaa is C or S
  MOD_RES (19)..(20)..(21)..(22)..(23): Xaa is A or G
  MOD_RES (24)..(25)..(26)..(27): Xaa is A or G or is absent

SEQ ID NO: 66010 - protein, 37 aa, Artificial Sequence
  GFR-binding peptide
  MOD_RES (1)..(2)..(36): Xaa is C or S
  MOD_RES (16)..(17)..(18)..(19)..(20): Xaa is A or G
  MOD_RES (21)..(22)..(23)..(24): Xaa is A or G or is absent
XXVPEKMSPISILYKXXXXXXXXXLKYHYNMTVESXA

SEQ ID NO: 66011 - protein, 39 aa, Artificial Sequence
  GFR-binding peptide
  MOD_RES (2)..(3)..(37)..(39): Xaa is C or S
  MOD_RES (17)..(18)..(19)..(20)..(21): Xaa is A or G
  MOD_RES (22)..(23)..(24)..(25): Xaa is A or G or is absent
TXXVPTRLSATSILYYXXXXXXXXXLRKHRDMVVESXGX

SEQ ID NO: 66012 - protein, 38 aa, Artificial Sequence; identical to SEQ ID NO: 28225
  GFR-binding peptide
  MOD_RES (2)..(3)..(36)..(38): Xaa is C or S
  MOD_RES (17)..(18)..(19)..(20)..(21): Xaa is A or G
  MOD_RES (22)..(23)..(24)..(25): Xaa is A or G or is absent

SEQ ID NO: 66013 - protein, 34 aa, Artificial Sequence; identical to SEQ ID NO: 28226
  GFR-binding peptide
  MOD_RES (31)..(33): Xaa is C or S

SEQ ID NO: 66014 - protein, 43 aa, Artificial Sequence; identical to SEQ ID NO: 7048
  GFR-binding peptide
  MOD_RES (6)..(7)..(42): Xaa is C or S
  MOD_RES (21)..(22)..(23)..(24)..(25): Xaa is A or G
  MOD_RES (26)..(27)..(28)..(29): Xaa is A or G or is absent

SEQ ID NO: 66015 - protein, 34 aa, Artificial Sequence; identical to SEQ ID NO: 7050
  GFR-binding peptide
  MOD_RES (1)..(1): Xaa is C or S
  MOD_RES (15)..(16)..(17)..(18)..(19): Xaa is A or G
  MOD_RES (20)..(21)..(22)..(23): Xaa is A or G or is absent

SEQ ID NO: 66016 - protein, 41 aa, Artificial Sequence; identical to SEQ ID NO: 7051
  GFR-binding peptide
  MOD_RES (6)..(7)..(40): Xaa is C or S
  MOD_RES (21)..(22)..(23)..(24)..(25): Xaa is A or G
  MOD_RES (26)..(27)..(28)..(29): Xaa is A or G or is absent

SEQ ID NO: 66017 - protein, 32 aa, Artificial Sequence; identical to SEQ ID NO: 28230
  GFR-binding peptide
  MOD_RES (1)..(1): Xaa is C or S

SEQ ID NO: 66018 - protein, 38 aa, Artificial Sequence
  GFR-binding peptide
  MOD_RES (2)..(3)..(35)..(37): Xaa is C or S
PXXVPEKMSPINILYFDENKNVVYGKIPNMTVESXAXR

SEQ ID NO: 66019 - protein, 36 aa, Artificial Sequence; identical to SEQ ID NO: 58158
  GFR-binding peptide
  MOD_RES (1)..(2)..(36): Xaa is C or S
  MOD_RES (16)..(17)..(18)..(19)..(20): Xaa is A or G
  MOD_RES (21)..(22)..(23)..(24): Xaa is A or G or is absent

SEQ ID NO: 66020 - protein, 35 aa, Artificial Sequence; identical to SEQ ID NO: 7052
  GFR-binding peptide
  MOD_RES (1)..(2)..(35): Xaa is C or S

SEQ ID NO: 66021 - protein, 40 aa, Artificial Sequence; identical to SEQ ID NO: 7053
  GFR-binding peptide
  MOD_RES (5)..(6)..(38)..(40): Xaa is C or S

SEQ ID NO: 66022 - protein, 38 aa, Artificial Sequence
  GFR-binding peptide
  MOD_RES (4)..(5)..(37): Xaa is C or S
PPTXXVPTRLSATSILYYDSANNVVLRKHRDMVVESXG

SEQ ID NO: 66023 - protein, 41 aa, Artificial Sequence
  GFR-binding peptide
  MOD_RES (5)..(6)..(40): Xaa is C or S
  MOD_RES (20)..(21)..(22)..(23)..(24): Xaa is A or G
  MOD_RES (25)..(26)..(27)..(28): Xaa is A or G or is absent
TPPTXXVPTRLEPISILYLXXXXXXXXXKFKYEDMVVESXG

SEQ ID NO: 66024 - protein, 35 aa, Artificial Sequence; identical to SEQ ID NO: 33309
  GFR-binding peptide
  MOD_RES (1)..(32)..(34): Xaa is C or S

SEQ ID NO: 66025 - protein, 40 aa, Artificial Sequence; identical to SEQ ID NO: 28241
  GFR-binding peptide
  MOD_RES (3)..(4)..(37)..(39): Xaa is C or S
  MOD_RES (18)..(19)..(20)..(21)..(22): Xaa is A or G
  MOD_RES (23)..(24)..(25)..(26): Xaa is A or G or is absent

SEQ ID NO: 66026 - protein, 40 aa, Artificial Sequence
  GFR-binding peptide
  MOD_RES (5)..(6)..(40): Xaa is C or S
  MOD_RES (20)..(21)..(22)..(23)..(24): Xaa is A or G
  MOD_RES (25)..(26)..(27)..(28): Xaa is A or G or is absent
IPEPXXVPEKMSPINILYFXXXXXXXXXYGKIPNMTVESX

SEQ ID NO: 66027 - protein, 39 aa, Artificial Sequence; identical to SEQ ID NO: 33316
  GFR-binding peptide
  MOD_RES (5)..(6)..(38): Xaa is C or S

SEQ ID NO: 66028 - protein, 31 aa, Artificial Sequence
  GFR-binding peptide
TPTKMSATSMLYYNDKQQIILRKHRGMVVDR

SEQ ID NO: 66029 - protein, 36 aa, Artificial Sequence; identical to SEQ ID NO: 7062
  GFR-binding peptide
  MOD_RES (5)..(6): Xaa is C or S

SEQ ID NO: 66030 - protein, 42 aa, Artificial Sequence; identical to SEQ ID NO: 7063
  GFR-binding peptide
  MOD_RES (6)..(7)..(39)..(41): Xaa is C or S

SEQ ID NO: 66031 - protein, 38 aa, Artificial Sequence
  GFR-binding peptide
  MOD_RES (2)..(3)..(37): Xaa is C or S
  MOD_RES (17)..(18)..(19)..(20)..(21): Xaa is A or G
  MOD_RES (22)..(23)..(24)..(25): Xaa is A or G or is absent
PXXVPEKMEPISILYLXXXXXXXXXKFKYENMTVESXA

SEQ ID NO: 66032 - protein, 35 aa, Artificial Sequence; identical to SEQ ID NO: 7072
  GFR-binding peptide
  MOD_RES (1)..(2): Xaa is C or S
  MOD_RES (16)..(17)..(18)..(19)..(20): Xaa is A or G
  MOD_RES (21)..(22)..(23)..(24): Xaa is A or G or is absent

SEQ ID NO: 66033 - protein, 36 aa, Artificial Sequence; identical to SEQ ID NO: 33320
  GFR-binding peptide
  MOD_RES (34)..(36): Xaa is C or S
  MOD_RES (14)..(15)..(16)..(17)..(18): Xaa is A or G
  MOD_RES (19)..(20)..(21)..(22): Xaa is A or G or is absent

SEQ ID NO: 66034 - protein, 38 aa, Artificial Sequence; identical to SEQ ID NO: 7075
  GFR-binding peptide
  MOD_RES (6)..(7)..(38): Xaa is C or S

SEQ ID NO: 66035 - protein, 33 aa, Artificial Sequence; identical to SEQ ID NO: 58172
  GFR-binding peptide
  MOD_RES (1)..(1): Xaa is C or S
  MOD_RES (15)..(16)..(17)..(18)..(19): Xaa is A or G
  MOD_RES (20)..(21)..(22)..(23): Xaa is A or G or is absent

SEQ ID NO: 66036 - protein, 38 aa, Artificial Sequence
  GFR-binding peptide
  MOD_RES (3)..(4)..(37): Xaa is C or S
  MOD_RES (18)..(19)..(20)..(21)..(22): Xaa is A or G
  MOD_RES (23)..(24)..(25)..(26): Xaa is A or G or is absent
STXXAPVKTSPISMLYKXXXXXXXXXLKYHYMIVEEXG

SEQ ID NO: 66037 - protein, 35 aa, Artificial Sequence; identical to SEQ ID NO: 33328
  GFR-binding peptide
  MOD_RES (2)..(3): Xaa is C or S
  MOD_RES (17)..(18)..(19)..(20)..(21): Xaa is A or G
  MOD_RES (22)..(23)..(24)..(25): Xaa is A or G or is absent

SEQ ID NO: 66038 - protein, 39 aa, Artificial Sequence; identical to SEQ ID NO: 28254
  GFR-binding peptide
  MOD_RES (4)..(5)..(38): Xaa is C or S
  MOD_RES (19)..(20)..(21)..(22)..(23): Xaa is A or G
  MOD_RES (24)..(25)..(26)..(27): Xaa is A or G or is absent

SEQ ID NO: 66039 - protein, 37 aa, Artificial Sequence; identical to SEQ ID NO: 58174
  GFR-binding peptide
  MOD_RES (1)..(2)..(35)..(37): Xaa is C or S
  MOD_RES (16)..(17)..(18)..(19)..(20): Xaa is A or G
  MOD_RES (21)..(22)..(23)..(24): Xaa is A or G or is absent

SEQ ID NO: 66040 - protein, 41 aa, Artificial Sequence; identical to SEQ ID NO: 7078
  GFR-binding peptide
  MOD_RES (6)..(7)..(40): Xaa is C or S
  MOD_RES (21)..(22)..(23)..(24)..(25): Xaa is A or G
  MOD_RES (26)..(27)..(28)..(29): Xaa is A or G or is absent

SEQ ID NO: 66041 - protein, 40 aa, Artificial Sequence; identical to SEQ ID NO: 7079
  GFR-binding peptide
  MOD_RES (2)..(3)..(37)..(39): Xaa is C or S
  MOD_RES (17)..(18)..(19)..(20)..(21): Xaa is A or G
  MOD_RES (22)..(23)..(24)..(25): Xaa is A or G or is absent

SEQ ID NO: 66042 - protein, 31 aa, Artificial Sequence; identical to SEQ ID NO: 33329
  GFR-binding peptide

SEQ ID NO: 66043 - protein, 33 aa, Artificial Sequence; identical to SEQ ID NO: 7082
  GFR-binding peptide
  MOD_RES (2)..(3): Xaa is C or S

SEQ ID NO: 66044 - protein, 36 aa, Artificial Sequence; identical to SEQ ID NO: 33333
  GFR-binding peptide
  MOD_RES (34)..(36): Xaa is C or S
  MOD_RES (14)..(15)..(16)..(17)..(18): Xaa is A or G
  MOD_RES (19)..(20)..(21)..(22): Xaa is A or G or is absent

SEQ ID NO: 66045 - protein, 32 aa, Artificial Sequence; identical to SEQ ID NO: 7085
  GFR-binding peptide
  MOD_RES (32)..(32): Xaa is C or S

SEQ ID NO: 66046 - protein, 41 aa, Artificial Sequence; identical to SEQ ID NO: 7086
  GFR-binding peptide
  MOD_RES (4)..(5)..(39)..(41): Xaa is C or S
  MOD_RES (19)..(20)..(21)..(22)..(23): Xaa is A or G
  MOD_RES (24)..(25)..(26)..(27): Xaa is A or G or is absent

SEQ ID NO: 66047 - protein, 38 aa, Artificial Sequence; identical to SEQ ID NO: 33339
  GFR-binding peptide
  MOD_RES (6)..(7)..(38): Xaa is C or S

SEQ ID NO: 66048 - protein, 42 aa, Artificial Sequence; identical to SEQ ID NO: 28267
  GFR-binding peptide
  MOD_RES (3)..(4)..(39)..(41): Xaa is C or S
  MOD_RES (18)..(19)..(20)..(21)..(22): Xaa is A or G
  MOD_RES (23)..(24)..(25)..(26): Xaa is A or G or is absent

SEQ ID NO: 66049 - protein, 32 aa, Artificial Sequence; identical to SEQ ID NO: 7092
  GFR-binding peptide
  MOD_RES (31)..(31): Xaa is C or S

SEQ ID NO: 66050 - protein, 36 aa, Artificial Sequence; identical to SEQ ID NO: 7093
  GFR-binding peptide
  MOD_RES (3)..(4)..(36): Xaa is C or S

SEQ ID NO: 66051 - protein, 37 aa, Artificial Sequence; identical to SEQ ID NO: 7095
  GFR-binding peptide
  MOD_RES (1)..(35)..(37): Xaa is C or S
  MOD_RES (15)..(16)..(17)..(18)..(19): Xaa is A or G
  MOD_RES (20)..(21)..(22)..(23): Xaa is A or G or is absent

SEQ ID NO: 66052 - protein, 35 aa, Artificial Sequence; identical to SEQ ID NO: 33344
  GFR-binding peptide
  MOD_RES (34)..(34): Xaa is C or S
  MOD_RES (14)..(15)..(16)..(17)..(18): Xaa is A or G
  MOD_RES (19)..(20)..(21)..(22): Xaa is A or G or is absent

SEQ ID NO: 66053 - protein, 32 aa, Artificial Sequence; identical to SEQ ID NO: 28274
  GFR-binding peptide
  MOD_RES (31)..(31): Xaa is C or S

SEQ ID NO: 66054 - protein, 40 aa, Artificial Sequence; identical to SEQ ID NO: 7097
  GFR-binding peptide
  MOD_RES (5)..(6)..(40): Xaa is C or S
  MOD_RES (20)..(21)..(22)..(23)..(24): Xaa is A or G
  MOD_RES (25)..(26)..(27)..(28): Xaa is A or G or is absent

SEQ ID NO: 66055 - protein, 37 aa, Artificial Sequence
  GFR-binding peptide
  MOD_RES (4)..(5)..(37): Xaa is C or S
PPTXXVPTRLEPISILYLDSANNVVKFKYEDMVVESX

SEQ ID NO: 66056 - protein, 37 aa, Artificial Sequence; identical to SEQ ID NO: 28276
  GFR-binding peptide
  MOD_RES (1)..(2)..(37): Xaa is C or S
  MOD_RES (16)..(17)..(18)..(19)..(20): Xaa is A or G
  MOD_RES (21)..(22)..(23)..(24): Xaa is A or G or is absent

SEQ ID NO: 66057 - protein, 36 aa, Artificial Sequence
  GFR-binding peptide
  MOD_RES (1)..(2)..(35): Xaa is C or S
  MOD_RES (16)..(17)..(18)..(19)..(20): Xaa is A or G
  MOD_RES (21)..(22)..(23)..(24): Xaa is A or G or is absent
XXVSQDLSPINILYFXXXXXXXXXYGKIPMIVKSXK

SEQ ID NO: 66058 - protein, 38 aa, Artificial Sequence; identical to SEQ ID NO: 33353
  GFR-binding peptide
  MOD_RES (5)..(6): Xaa is C or S
  MOD_RES (20)..(21)..(22)..(23)..(24): Xaa is A or G
  MOD_RES (25)..(26)..(27)..(28): Xaa is A or G or is absent

SEQ ID NO: 66059 - protein, 31 aa, Artificial Sequence; identical to SEQ ID NO: 58197
  GFR-binding peptide
  MOD_RES (1)..(1): Xaa is C or S

SEQ ID NO: 66060 - protein, 36 aa, Artificial Sequence; identical to SEQ ID NO: 28281
  GFR-binding peptide
  MOD_RES (2)..(3)..(35): Xaa is C or S

SEQ ID NO: 66061 - protein, 38 aa, Artificial Sequence; identical to SEQ ID NO: 7104
  GFR-binding peptide
  MOD_RES (1)..(2)..(36)..(38): Xaa is C or S
  MOD_RES (16)..(17)..(18)..(19)..(20): Xaa is A or G
  MOD_RES (21)..(22)..(23)..(24): Xaa is A or G or is absent

SEQ ID NO: 66062 - protein, 32 aa, Artificial Sequence
  GFR-binding peptide
  MOD_RES (1)..(1): Xaa is C or S
XVPTRLSATSILYYDSANNVVLRKHRDMVVES

SEQ ID NO: 66063 - protein, 33 aa, Artificial Sequence; identical to SEQ ID NO: 7105
  GFR-binding peptide
  MOD_RES (14)..(15)..(16)..(17)..(18): Xaa is A or G
  MOD_RES (19)..(20)..(21)..(22): Xaa is A or G or is absent

SEQ ID NO: 66064 - protein, 39 aa, Artificial Sequence; identical to SEQ ID NO: 7107
  GFR-binding peptide
  MOD_RES (6)..(7)..(39): Xaa is C or S

SEQ ID NO: 66065 - protein, 40 aa, Artificial Sequence; identical to SEQ ID NO: 32305
  GFR-binding peptide
  MOD_RES (3)..(4)..(38)..(40): Xaa is C or S
  MOD_RES (18)..(19)..(20)..(21)..(22): Xaa is A or G
  MOD_RES (23)..(24)..(25)..(26): Xaa is A or G or is absent

SEQ ID NO: 66066 - protein, 39 aa, Artificial Sequence
  GFR-binding peptide
  MOD_RES (3)..(4)..(36)..(38): Xaa is C or S
ASXXVPARLSATSILYYDAANNVVLRKHRDMVVEAXGXR

SEQ ID NO: 66067 - protein, 35 aa, Artificial Sequence; identical to SEQ ID NO: 32307
  GFR-binding peptide
  MOD_RES (3)..(4): Xaa is C or S

SEQ ID NO: 66068 - protein, 39 aa, Artificial Sequence; identical to SEQ ID NO: 32309
  GFR-binding peptide
  MOD_RES (3)..(4)..(36)..(38): Xaa is C or S

SEQ ID NO: 66069 - protein, 41 aa, Artificial Sequence; identical to SEQ ID NO: 7111
  GFR-binding peptide
  MOD_RES (6)..(7)..(40): Xaa is C or S
  MOD_RES (21)..(22)..(23)..(24)..(25): Xaa is A or G
  MOD_RES (26)..(27)..(28)..(29): Xaa is A or G or is absent

SEQ ID NO: 66070 - protein, 30 aa, Artificial Sequence
  GFR-binding peptide
VPQALSPINILYFVGRKPKVYGKIPMIVRS

SEQ ID NO: 66071 - protein, 34 aa, Artificial Sequence; identical to SEQ ID NO: 7113
  GFR-binding peptide
  MOD_RES (3)..(4): Xaa is C or S

SEQ ID NO: 66072 - protein, 37 aa, Artificial Sequence; identical to SEQ ID NO: 7114
  GFR-binding peptide
  MOD_RES (1)..(2)..(35)..(37): Xaa is C or S
  MOD_RES (16)..(17)..(18)..(19)..(20): Xaa is A or G
  MOD_RES (21)..(22)..(23)..(24): Xaa is A or G or is absent

SEQ ID NO: 66073 - protein, 40 aa, Artificial Sequence; identical to SEQ ID NO: 32315
  GFR-binding peptide
  MOD_RES (7)..(7): Xaa is C or S
  MOD_RES (21)..(22)..(23)..(24)..(25): Xaa is A or G
  MOD_RES (26)..(27)..(28)..(29): Xaa is A or G or is absent

SEQ ID NO: 66074 - protein, 35 aa, Artificial Sequence; identical to SEQ ID NO: 7115
  GFR-binding peptide
  MOD_RES (1)..(2)..(33)..(35): Xaa is C or S

SEQ ID NO: 66075 - protein, 39 aa, Artificial Sequence; identical to SEQ ID NO: 7116
  GFR-binding peptide
  MOD_RES (4)..(5)..(39): Xaa is C or S
  MOD_RES (19)..(20)..(21)..(22)..(23): Xaa is A or G
  MOD_RES (24)..(25)..(26)..(27): Xaa is A or G or is absent

SEQ ID NO: 66076 - protein, 34 aa, Artificial Sequence; identical to SEQ ID NO: 32317
  GFR-binding peptide
  MOD_RES (1)..(33): Xaa is C or S

SEQ ID NO: 66077 - protein, 41 aa, Artificial Sequence; identical to SEQ ID NO: 32318
  GFR-binding peptide
  MOD_RES (4)..(5)..(39)..(41): Xaa is C or S
  MOD_RES (19)..(20)..(21)..(22)..(23): Xaa is A or G
  MOD_RES (24)..(25)..(26)..(27): Xaa is A or G or is absent

SEQ ID NO: 66078 - protein, 32 aa, Artificial Sequence; identical to SEQ ID NO: 7120
  GFR-binding peptide
  MOD_RES (32)..(32): Xaa is C or S

SEQ ID NO: 66079 - protein, 42 aa, Artificial Sequence; identical to SEQ ID NO: 7122
  GFR-binding peptide
  MOD_RES (4)..(5)..(39)..(41): Xaa is C or S
  MOD_RES (19)..(20)..(21)..(22)..(23): Xaa is A or G
  MOD_RES (24)..(25)..(26)..(27): Xaa is A or G or is absent

SEQ ID NO: 66080 - protein, 36 aa, Artificial Sequence; identical to SEQ ID NO: 7125
  GFR-binding peptide
  MOD_RES (1)..(2)..(36): Xaa is C or S
  MOD_RES (16)..(17)..(18)..(19)..(20): Xaa is A or G
  MOD_RES (21)..(22)..(23)..(24): Xaa is A or G or is absent

SEQ ID NO: 66081 - protein, 39 aa, Artificial Sequence; identical to SEQ ID NO: 28304
  GFR-binding peptide
  MOD_RES (1)..(2)..(36)..(38): Xaa is C or S
  MOD_RES (16)..(17)..(18)..(19)..(20): Xaa is A or G
  MOD_RES (21)..(22)..(23)..(24): Xaa is A or G or is absent

SEQ ID NO: 66082 - protein, 37 aa, Artificial Sequence; identical to SEQ ID NO: 32327
  GFR-binding peptide
  MOD_RES (4)..(5): Xaa is C or S
  MOD_RES (19)..(20)..(21)..(22)..(23): Xaa is A or G
  MOD_RES (24)..(25)..(26)..(27): Xaa is A or G or is absent

SEQ ID NO: 66083 - protein, 39 aa, Artificial Sequence
  GFR-binding peptide
  MOD_RES (1)..(2)..(36)..(38): Xaa is C or S
  MOD_RES (16)..(17)..(18)..(19)..(20): Xaa is A or G
  MOD_RES (21)..(22)..(23)..(24): Xaa is A or G or is absent
XXTPTKMSPISMLYKXXXXXXXXXLKYHYGMVVDRXGXS

SEQ ID NO: 66084 - protein, 35 aa, Artificial Sequence; identical to SEQ ID NO: 7128
  GFR-binding peptide
  MOD_RES (34)..(34): Xaa is C or S
  MOD_RES (14)..(15)..(16)..(17)..(18): Xaa is A or G
  MOD_RES (19)..(20)..(21)..(22): Xaa is A or G or is absent

SEQ ID NO: 66085 - protein, 41 aa, Artificial Sequence; identical to SEQ ID NO: 7129
  GFR-binding peptide
  MOD_RES (4)..(5)..(39)..(41): Xaa is C or S
  MOD_RES (19)..(20)..(21)..(22)..(23): Xaa is A or G
  MOD_RES (24)..(25)..(26)..(27): Xaa is A or G or is absent

SEQ ID NO: 66086 - protein, 34 aa, Artificial Sequence; identical to SEQ ID NO: 28308
  GFR-binding peptide
  MOD_RES (4)..(4): Xaa is C or S

SEQ ID NO: 66087 - protein, 37 aa, Artificial Sequence
  GFR-binding peptide
  MOD_RES (3)..(4)..(36): Xaa is C or S
GPXXTPTKMEPISMLYLNDKQQIIKFKYEGMVVDRXG

SEQ ID NO: 66088 - protein, 32 aa, Artificial Sequence; identical to SEQ ID NO: 7133
  GFR-binding peptide
  MOD_RES (14)..(15)..(16)..(17)..(18): Xaa is A or G
  MOD_RES (19)..(20)..(21)..(22): Xaa is A or G or is absent

SEQ ID NO: 66089 - protein, 37 aa, Artificial Sequence; identical to SEQ ID NO: 57267
  GFR-binding peptide
  MOD_RES (3)..(4)..(36): Xaa is C or S

SEQ ID NO: 66090 - protein, 30 aa, Artificial Sequence; identical to SEQ ID NO: 28317
  GFR-binding peptide

SEQ ID NO: 66091 - protein, 41 aa, Artificial Sequence; identical to SEQ ID NO: 7137
  GFR-binding peptide
  MOD_RES (3)..(4)..(38)..(40): Xaa is C or S
  MOD_RES (18)..(19)..(20)..(21)..(22): Xaa is A or G
  MOD_RES (23)..(24)..(25)..(26): Xaa is A or G or is absent

SEQ ID NO: 66092 - protein, 33 aa, Artificial Sequence; identical to SEQ ID NO: 28319
  GFR-binding peptide
  MOD_RES (1)..(2)..(33): Xaa is C or S

SEQ ID NO: 66093 - protein, 39 aa, Artificial Sequence
  GFR-binding peptide
  MOD_RES (6)..(7): Xaa is C or S
  MOD_RES (21)..(22)..(23)..(24)..(25): Xaa is A or G
  MOD_RES (26)..(27)..(28)..(29): Xaa is A or G or is absent
GIPEPXXVPEKMSPISILYKXXXXXXXXXLKYHYNMTVE

SEQ ID NO: 66094 - protein, 44 aa, Artificial Sequence; identical to SEQ ID NO: 32339
  GFR-binding peptide
  MOD_RES (6)..(7)..(41)..(43): Xaa is C or S
  MOD_RES (21)..(22)..(23)..(24)..(25): Xaa is A or G
  MOD_RES (26)..(27)..(28)..(29): Xaa is A or G or is absent

SEQ ID NO: 66095 - protein, 43 aa, Artificial Sequence; identical to SEQ ID NO: 7143
  GFR-binding peptide
  MOD_RES (6)..(7)..(41)..(43): Xaa is C or S
  MOD_RES (21)..(22)..(23)..(24)..(25): Xaa is A or G
  MOD_RES (26)..(27)..(28)..(29): Xaa is A or G or is absent

SEQ ID NO: 66096 - protein, 37 aa, Artificial Sequence; identical to SEQ ID NO: 7144
  GFR-binding peptide
  MOD_RES (5)..(6): Xaa is C or S

SEQ ID NO: 66097 - protein, 33 aa, Artificial Sequence
  GFR-binding peptide
  MOD_RES (14)..(15)..(16)..(17)..(18): Xaa is A or G
  MOD_RES (19)..(20)..(21)..(22): Xaa is A or G or is absent
VPEKMEPISILYLXXXXXXXXXKFKYENMTVES

SEQ ID NO: 66098 - protein, 35 aa, Artificial Sequence; identical to SEQ ID NO: 28325
  GFR-binding peptide
  MOD_RES (2)..(3): Xaa is C or S
  MOD_RES (17)..(18)..(19)..(20)..(21): Xaa is A or G
  MOD_RES (22)..(23)..(24)..(25): Xaa is A or G or is absent

SEQ ID NO: 66099 - protein, 34 aa, Artificial Sequence; identical to SEQ ID NO: 32349
  GFR-binding peptide
  MOD_RES (1)..(32)..(34): Xaa is C or S

SEQ ID NO: 66100 - protein, 30 aa, Artificial Sequence; identical to SEQ ID NO: 7149
  GFR-binding peptide

SEQ ID NO: 66101 - protein, 38 aa, Artificial Sequence
  GFR-binding peptide
  MOD_RES (6)..(7)..(38): Xaa is C or S
ASASPXXVPQDLSPINILYFVGRTPKVYGKIPMVVKSX

SEQ ID NO: 66102 - protein, 37 aa, Artificial Sequence
  GFR-binding peptide
  MOD_RES (3)..(4)..(36): Xaa is C or S
EPXXVPEKMSATSILYYDENKNVVLRKHRNMTVESXA

SEQ ID NO: 66103 - protein, 38 aa, Artificial Sequence; identical to SEQ ID NO: 28332
  GFR-binding peptide
  MOD_RES (2)..(3)..(37): Xaa is C or S
  MOD_RES (17)..(18)..(19)..(20)..(21): Xaa is A or G
  MOD_RES (22)..(23)..(24)..(25): Xaa is A or G or is absent

SEQ ID NO: 66104 - protein, 38 aa, Artificial Sequence; identical to SEQ ID NO: 7153
  GFR-binding peptide
  MOD_RES (2)..(3)..(37): Xaa is C or S
  MOD_RES (17)..(18)..(19)..(20)..(21): Xaa is A or G
  MOD_RES (22)..(23)..(24)..(25): Xaa is A or G or is absent

SEQ ID NO: 66105 - protein, 38 aa, Artificial Sequence; identical to SEQ ID NO: 28334
  GFR-binding peptide
  MOD_RES (5)..(6)..(37): Xaa is C or S

SEQ ID NO: 66106 - protein, 40 aa, Artificial Sequence; identical to SEQ ID NO: 7156
  GFR-binding peptide
  MOD_RES (4)..(5)..(38)..(40): Xaa is C or S
  MOD_RES (19)..(20)..(21)..(22)..(23): Xaa is A or G
  MOD_RES (24)..(25)..(26)..(27): Xaa is A or G or is absent

SEQ ID NO: 66107 - protein, 33 aa, Artificial Sequence
  GFR-binding peptide
  MOD_RES (1)..(2): Xaa is C or S
XXTPTKMEPISMLYLNDKQQIIKFKYEGMVVDR

SEQ ID NO: 66108 - protein, 40 aa, Artificial Sequence; identical to SEQ ID NO: 7160
  GFR-binding peptide
  MOD_RES (3)..(4)..(37)..(39): Xaa is C or S
  MOD_RES (18)..(19)..(20)..(21)..(22): Xaa is A or G
  MOD_RES (23)..(24)..(25)..(26): Xaa is A or G or is absent

SEQ ID NO: 66109 - protein, 35 aa, Artificial Sequence; identical to SEQ ID NO: 28340
  GFR-binding peptide
  MOD_RES (1)..(2): Xaa is C or S
  MOD_RES (16)..(17)..(18)..(19)..(20): Xaa is A or G
  MOD_RES (21)..(22)..(23)..(24): Xaa is A or G or is absent

SEQ ID NO: 66110 - protein, 35 aa, Artificial Sequence
  GFR-binding peptide
  MOD_RES (1)..(35): Xaa is C or S
  MOD_RES (15)..(16)..(17)..(18)..(19): Xaa is A or G
  MOD_RES (20)..(21)..(22)..(23): Xaa is A or G or is absent
XVPEKMEPISILYLXXXXXXXXXKFKYENMTVESX

SEQ ID NO: 66111 - protein, 40 aa, Artificial Sequence
  GFR-binding peptide
  MOD_RES (4)..(5)..(39): Xaa is C or S
  MOD_RES (19)..(20)..(21)..(22)..(23): Xaa is A or G
  MOD_RES (24)..(25)..(26)..(27): Xaa is A or G or is absent
AGPXXTPTKMSATSMLYYXXXXXXXXXLRKHRGMVVDRXG

SEQ ID NO: 66112 - protein, 41 aa, Artificial Sequence; identical to SEQ ID NO: 7162
  GFR-binding peptide
  MOD_RES (6)..(7)..(38)..(40): Xaa is C or S

SEQ ID NO: 66113 - protein, 42 aa, Artificial Sequence; identical to SEQ ID NO: 32362
  GFR-binding peptide
  MOD_RES (4)..(5)..(39)..(41): Xaa is C or S
  MOD_RES (19)..(20)..(21)..(22)..(23): Xaa is A or G
  MOD_RES (24)..(25)..(26)..(27): Xaa is A or G or is absent

SEQ ID NO: 66114 - protein, 41 aa, Artificial Sequence; identical to SEQ ID NO: 7165
  GFR-binding peptide
  MOD_RES (6)..(7): Xaa is C or S
  MOD_RES (21)..(22)..(23)..(24)..(25): Xaa is A or G
  MOD_RES (26)..(27)..(28)..(29): Xaa is A or G or is absent

SEQ ID NO: 66115 - protein, 36 aa, Artificial Sequence; identical to SEQ ID NO: 7166
  GFR-binding peptide
  MOD_RES (1)..(35): Xaa is C or S
  MOD_RES (15)..(16)..(17)..(18)..(19): Xaa is A or G
  MOD_RES (20)..(21)..(22)..(23): Xaa is A or G or is absent

SEQ ID NO: 66116 - protein, 41 aa, Artificial Sequence; identical to SEQ ID NO: 7167
  GFR-binding peptide
  MOD_RES (4)..(38)..(40): Xaa is C or S
  MOD_RES (18)..(19)..(20)..(21)..(22): Xaa is A or G
  MOD_RES (23)..(24)..(25)..(26): Xaa is A or G or is absent

SEQ ID NO: 66117 - protein, 35 aa, Artificial Sequence; identical to SEQ ID NO: 57296
  GFR-binding peptide
  MOD_RES (1)..(2)..(35): Xaa is C or S
  MOD_RES (16)..(17)..(18)..(19)..(20): Xaa is A or G
  MOD_RES (21)..(22)..(23)..(24): Xaa is A or G or is absent

SEQ ID NO: 66118 - protein, 39 aa, Artificial Sequence
  GFR-binding peptide
  MOD_RES (6)..(7): Xaa is C or S
  MOD_RES (21)..(22)..(23)..(24)..(25): Xaa is A or G
  MOD_RES (26)..(27)..(28)..(29): Xaa is A or G or is absent
GIPEPXXVPEKMEPISILYLXXXXXXXXXKFKYENMTVE

SEQ ID NO: 66119 - protein, 37 aa, Artificial Sequence; identical to SEQ ID NO: 7170
  GFR-binding peptide
  MOD_RES (2)..(3)..(36): Xaa is C or S
  MOD_RES (17)..(18)..(19)..(20)..(21): Xaa is A or G
  MOD_RES (22)..(23)..(24)..(25): Xaa is A or G or is absent

SEQ ID NO: 66120 - protein, 32 aa, Artificial Sequence; identical to SEQ ID NO: 32370
  GFR-binding peptide
  MOD_RES (1)..(1): Xaa is C or S

SEQ ID NO: 66121 - protein, 41 aa, Artificial Sequence
  GFR-binding peptide
  MOD_RES (6)..(7)..(39)..(41): Xaa is C or S
HVPKPXXAPTKLEPISVLYLDDSSNVIKFKYENMVVRSXGX

SEQ ID NO: 66122 - protein, 41 aa, Artificial Sequence
  GFR-binding peptide
  MOD_RES (5)..(6)..(39)..(41): Xaa is C or S
  MOD_RES (20)..(21)..(22)..(23)..(24): Xaa is A or G
  MOD_RES (25)..(26)..(27)..(28): Xaa is A or G or is absent
SASPXXVPQDLSPINILYFXXXXXXXXXYGKIPMVVKSXKX

SEQ ID NO: 66123 - protein, 37 aa, Artificial Sequence; identical to SEQ ID NO: 7171
  GFR-binding peptide
  MOD_RES (5)..(6)..(37): Xaa is C or S

SEQ ID NO: 66124 - protein, 35 aa, Artificial Sequence; identical to SEQ ID NO: 28344
  GFR-binding peptide
  MOD_RES (2)..(3)..(35): Xaa is C or S

SEQ ID NO: 66125 - protein, 35 aa, Artificial Sequence; identical to SEQ ID NO: 32378
  GFR-binding peptide
  MOD_RES (32)..(34): Xaa is C or S

SEQ ID NO: 66126 - protein, 34 aa, Artificial Sequence
  GFR-binding peptide
  MOD_RES (3)..(4): Xaa is C or S
GPXXTPTKMEPISMLYLNDKQQIIKFKYEGMVVD

SEQ ID NO: 66127 - protein, 35 aa, Artificial Sequence; identical to SEQ ID NO: 28346
  GFR-binding peptide
  MOD_RES (1)..(2): Xaa is C or S
  MOD_RES (16)..(17)..(18)..(19)..(20): Xaa is A or G
  MOD_RES (21)..(22)..(23)..(24): Xaa is A or G or is absent

SEQ ID NO: 66128 - protein, 35 aa, Artificial Sequence
  GFR-binding peptide
  MOD_RES (2)..(3)..(35): Xaa is C or S
SXXVPARLSATSILYYDAANNVVLRKHRDMVVEAX

SEQ ID NO: 66129 - protein, 36 aa, Artificial Sequence
  GFR-binding peptide
  MOD_RES (2)..(3)..(36): Xaa is C or S
  MOD_RES (17)..(18)..(19)..(20)..(21): Xaa is A or G
  MOD_RES (22)..(23)..(24)..(25): Xaa is A or G or is absent
TXXAPVKTSATSMLYYXXXXXXXXXLRKHRMIVEEX

SEQ ID NO: 66130 - protein, 42 aa, Artificial Sequence; identical to SEQ ID NO: 7177
  GFR-binding peptide
  MOD_RES (4)..(5)..(39)..(41): Xaa is C or S
  MOD_RES (19)..(20)..(21)..(22)..(23): Xaa is A or G
  MOD_RES (24)..(25)..(26)..(27): Xaa is A or G or is absent

SEQ ID NO: 66131 - protein, 41 aa, Artificial Sequence; identical to SEQ ID NO: 32383
  GFR-binding peptide
  MOD_RES (6)..(7)..(39)..(41): Xaa is C or S

SEQ ID NO: 66132 - protein, 38 aa, Artificial Sequence; identical to SEQ ID NO: 32385
  GFR-binding peptide
  MOD_RES (1)..(2)..(36)..(38): Xaa is C or S
  MOD_RES (16)..(17)..(18)..(19)..(20): Xaa is A or G
  MOD_RES (21)..(22)..(23)..(24): Xaa is A or G or is absent

SEQ ID NO: 66133 - protein, 36 aa, Artificial Sequence; identical to SEQ ID NO: 7182
  GFR-binding peptide
  MOD_RES (2)..(3)..(35): Xaa is C or S

SEQ ID NO: 66134 - protein, 36 aa, Artificial Sequence
  GFR-binding peptide
  MOD_RES (1)..(2)..(34)..(36): Xaa is C or S
XXVPTRLSPISILYKDSANNVVLKYHYDMVVESXGX

SEQ ID NO: 66135 - protein, 38 aa, Artificial Sequence; identical to SEQ ID NO: 7184
  GFR-binding peptide
  MOD_RES (1)..(2)..(35)..(37): Xaa is C or S
  MOD_RES (16)..(17)..(18)..(19)..(20): Xaa is A or G
  MOD_RES (21)..(22)..(23)..(24): Xaa is A or G or is absent

SEQ ID NO: 66136 - protein, 37 aa, Artificial Sequence; identical to SEQ ID NO: 32387
  GFR-binding peptide
  MOD_RES (3)..(4)..(37): Xaa is C or S
  MOD_RES (18)..(19)..(20)..(21)..(22): Xaa is A or G
  MOD_RES (23)..(24)..(25)..(26): Xaa is A or G or is absent

SEQ ID NO: 66137 - protein, 31 aa, Artificial Sequence; identical to SEQ ID NO: 7186
  GFR-binding peptide
  MOD_RES (1)..(1): Xaa is C or S

SEQ ID NO: 66138 - protein, 35 aa, Artificial Sequence; identical to SEQ ID NO: 28352
  GFR-binding peptide
  MOD_RES (4)..(5): Xaa is C or S

SEQ ID NO: 66139 - protein, 41 aa, Artificial Sequence; identical to SEQ ID NO: 32389
  GFR-binding peptide
  MOD_RES (4)..(38)..(40): Xaa is C or S
  MOD_RES (18)..(19)..(20)..(21)..(22): Xaa is A or G
  MOD_RES (23)..(24)..(25)..(26): Xaa is A or G or is absent

SEQ ID NO: 66140 - protein, 37 aa, Artificial Sequence; identical to SEQ ID NO: 57314
  GFR-binding peptide
  MOD_RES (3)..(4): Xaa is C or S
  MOD_RES (18)..(19)..(20)..(21)..(22): Xaa is A or G
  MOD_RES (23)..(24)..(25)..(26): Xaa is A or G or is absent

SEQ ID NO: 66141 - protein, 39 aa, Artificial Sequence; identical to SEQ ID NO: 7188
  GFR-binding peptide
  MOD_RES (5)..(6): Xaa is C or S
  MOD_RES (20)..(21)..(22)..(23)..(24): Xaa is A or G
  MOD_RES (25)..(26)..(27)..(28): Xaa is A or G or is absent

SEQ ID NO: 66142 - protein, 42 aa, Artificial Sequence; identical to SEQ ID NO: 7191
  GFR-binding peptide
  MOD_RES (5)..(6)..(39)..(41): Xaa is C or S
  MOD_RES (20)..(21)..(22)..(23)..(24): Xaa is A or G
  MOD_RES (25)..(26)..(27)..(28): Xaa is A or G or is absent

SEQ ID NO: 66143 - protein, 31 aa, Artificial Sequence; identical to SEQ ID NO: 7192
  GFR-binding peptide

SEQ ID NO: 66144 - protein, 38 aa, Artificial Sequence
  GFR-binding peptide
  MOD_RES (4)..(5)..(36)..(38): Xaa is C or S
ASPXXVSQDLSPINILYFIGKTPKIYGKIPMIVKSXKX

SEQ ID NO: 66145 - protein, 39 aa, Artificial Sequence
  GFR-binding peptide
  MOD_RES (5)..(6): Xaa is C or S
  MOD_RES (20)..(21)..(22)..(23)..(24): Xaa is A or G
  MOD_RES (25)..(26)..(27)..(28): Xaa is A or G or is absent
IPEPXXVPEKMNAISILYFXXXXXXXXXLKKYRNMTVES

SEQ ID NO: 66146 - protein, 32 aa, Artificial Sequence
  GFR-binding peptide
  MOD_RES (14)..(15)..(16)..(17)..(18): Xaa is A or G
  MOD_RES (19)..(20)..(21)..(22): Xaa is A or G or is absent
TPTKMSPISMLYKXXXXXXXXXLKYHYGMVVD

SEQ ID NO: 66147 - protein, 38 aa, Artificial Sequence
  GFR-binding peptide
  MOD_RES (1)..(35)..(37): Xaa is C or S
  MOD_RES (15)..(16)..(17)..(18)..(19): Xaa is A or G
  MOD_RES (20)..(21)..(22)..(23): Xaa is A or G or is absent
XVPEKMNAISILYFXXXXXXXXXLKKYRNMTVESXAXR

SEQ ID NO: 66148 - protein, 37 aa, Artificial Sequence; identical to SEQ ID NO: 7195
  GFR-binding peptide
  MOD_RES (1)..(2)..(34)..(36): Xaa is C or S

SEQ ID NO: 66149 - protein, 40 aa, Artificial Sequence; identical to SEQ ID NO: 32405
  GFR-binding peptide
  MOD_RES (6)..(7)..(39): Xaa is C or S

SEQ ID NO: 66150 - protein, 36 aa, Artificial Sequence; identical to SEQ ID NO: 32406
  GFR-binding peptide
  MOD_RES (2)..(3)..(35): Xaa is C or S

SEQ ID NO: 66151 - protein, 36 aa, Artificial Sequence
  GFR-binding peptide
  MOD_RES (1)..(33)..(35): Xaa is C or S
XTPTKMSPISMLYKNDKQQIILKYHYGMVVDRXGXS

SEQ ID NO: 66152 - protein, 41 aa, Artificial Sequence; identical to SEQ ID NO: 28366
  GFR-binding peptide
  MOD_RES (6)..(7)..(39)..(41): Xaa is C or S

SEQ ID NO: 66153 - protein, 33 aa, Artificial Sequence
  GFR-binding peptide
  MOD_RES (2)..(3): Xaa is C or S
PXXVPEKMSATSILYYDENKNVVLRKHRNMTVE

SEQ ID NO: 66154 - protein, 34 aa, Artificial Sequence; identical to SEQ ID NO: 32407
  GFR-binding peptide
  MOD_RES (32)..(34): Xaa is C or S

SEQ ID NO: 66155 - protein, 39 aa, Artificial Sequence; identical to SEQ ID NO: 32409
  GFR-binding peptide
  MOD_RES (5)..(6)..(38): Xaa is C or S

SEQ ID NO: 66156 - protein, 37 aa, Artificial Sequence; identical to SEQ ID NO: 7200
  GFR-binding peptide
  MOD_RES (3)..(4)..(35)..(37): Xaa is C or S

SEQ ID NO: 66157 - protein, 37 aa, Artificial Sequence; identical to SEQ ID NO: 7201
  GFR-binding peptide
  MOD_RES (1)..(35)..(37): Xaa is C or S
  MOD_RES (15)..(16)..(17)..(18)..(19): Xaa is A or G
  MOD_RES (20)..(21)..(22)..(23): Xaa is A or G or is absent

SEQ ID NO: 66158 - protein, 40 aa, Artificial Sequence; identical to SEQ ID NO: 7205
  GFR-binding peptide
  MOD_RES (6)..(7)..(39): Xaa is C or S

SEQ ID NO: 66159 - protein, 34 aa, Artificial Sequence; identical to SEQ ID NO: 28373
  GFR-binding peptide
  MOD_RES (34)..(34): Xaa is C or S
  MOD_RES (14)..(15)..(16)..(17)..(18): Xaa is A or G
  MOD_RES (19)..(20)..(21)..(22): Xaa is A or G or is absent

SEQ ID NO: 66160 - protein, 37 aa, Artificial Sequence; identical to SEQ ID NO: 28374
  GFR-binding peptide
  MOD_RES (6)..(7): Xaa is C or S

SEQ ID NO: 66161 - protein, 34 aa, Artificial Sequence
  GFR-binding peptide
  MOD_RES (1)..(33): Xaa is C or S
XVPEKMSATSILYYDENKNVVLRKHRNMTVESXA

SEQ ID NO: 66162 - protein, 32 aa, Artificial Sequence; identical to SEQ ID NO: 32423
  GFR-binding peptide
  MOD_RES (1)..(2): Xaa is C or S

SEQ ID NO: 66163 - protein, 40 aa, Artificial Sequence; identical to SEQ ID NO: 14516
  GFR-binding peptide
  MOD_RES (5)..(6)..(38)..(40): Xaa is C or S

SEQ ID NO: 66164 - protein, 37 aa, Artificial Sequence; identical to SEQ ID NO: 7213
  GFR-binding peptide
  MOD_RES (6)..(7): Xaa is C or S

SEQ ID NO: 66165 - protein, 36 aa, Artificial Sequence; identical to SEQ ID NO: 7214
  GFR-binding peptide
  MOD_RES (1)..(33)..(35): Xaa is C or S

SEQ ID NO: 66166 - protein, 38 aa, Artificial Sequence; identical to SEQ ID NO: 28381
  GFR-binding peptide
  MOD_RES (5)..(6): Xaa is C or S
  MOD_RES (20)..(21)..(22)..(23)..(24): Xaa is A or G
  MOD_RES (25)..(26)..(27)..(28): Xaa is A or G or is absent

SEQ ID NO: 66167 - protein, 34 aa, Artificial Sequence; identical to SEQ ID NO: 32427
  GFR-binding peptide
  MOD_RES (34)..(34): Xaa is C or S
  MOD_RES (14)..(15)..(16)..(17)..(18): Xaa is A or G
  MOD_RES (19)..(20)..(21)..(22): Xaa is A or G or is absent

SEQ ID NO: 66168 - protein, 39 aa, Artificial Sequence; identical to SEQ ID NO: 14518
  GFR-binding peptide
  MOD_RES (1)..(2)..(36)..(38): Xaa is C or S
  MOD_RES (16)..(17)..(18)..(19)..(20): Xaa is A or G
  MOD_RES (21)..(22)..(23)..(24): Xaa is A or G or is absent

SEQ ID NO: 66169 - protein, 32 aa, Artificial Sequence; identical to SEQ ID NO: 28383
  GFR-binding peptide
  MOD_RES (1)..(1): Xaa is C or S

SEQ ID NO: 66170 - protein, 37 aa, Artificial Sequence
  GFR-binding peptide
  MOD_RES (5)..(6): Xaa is C or S
IPEPXXVPEKMSATSILYYDENKNVVLRKHRNMTVES

SEQ ID NO: 66171 - protein, 35 aa, Artificial Sequence
  GFR-binding peptide
  MOD_RES (3)..(4): Xaa is C or S
EPXXVPEKMEPISILYLDENKNVVKFKYENMTVES

SEQ ID NO: 66172 - protein, 34 aa, Artificial Sequence; identical to SEQ ID NO: 32437
  GFR-binding peptide
  MOD_RES (3)..(4): Xaa is C or S

SEQ ID NO: 66173 - protein, 43 aa, Artificial Sequence; identical to SEQ ID NO: 28384
  GFR-binding peptide
  MOD_RES (5)..(6)..(40)..(42): Xaa is C or S
  MOD_RES (20)..(21)..(22)..(23)..(24): Xaa is A or G
  MOD_RES (25)..(26)..(27)..(28): Xaa is A or G or is absent

SEQ ID NO: 66174 - protein, 36 aa, Artificial Sequence
  GFR-binding peptide
  MOD_RES (3)..(4)..(36): Xaa is C or S
PTXXVPTRLEPISILYLDSANNVVKFKYEDMVVESX

SEQ ID NO: 66175 - protein, 41 aa, Artificial Sequence; identical to SEQ ID NO: 7219
  GFR-binding peptide
  MOD_RES (4)..(5)..(38)..(40): Xaa is C or S
  MOD_RES (19)..(20)..(21)..(22)..(23): Xaa is A or G
  MOD_RES (24)..(25)..(26)..(27): Xaa is A or G or is absent

SEQ ID NO: 66176 - protein, 34 aa, Artificial Sequence; identical to SEQ ID NO: 7221
  GFR-binding peptide
  MOD_RES (1)..(2)..(34): Xaa is C or S

SEQ ID NO: 66177 - protein, 37 aa, Artificial Sequence; identical to SEQ ID NO: 7224
  GFR-binding peptide
  MOD_RES (3)..(4)..(37): Xaa is C or S
  MOD_RES (18)..(19)..(20)..(21)..(22): Xaa is A or G
  MOD_RES (23)..(24)..(25)..(26): Xaa is A or G or is absent

SEQ ID NO: 66178 - protein, 34 aa, Artificial Sequence
  GFR-binding peptide
  MOD_RES (1)..(2)..(33): Xaa is C or S
XXVPQALSPINILYFVGRKPKVYGKIPMIVRSXK

SEQ ID NO: 66179 - protein, 40 aa, Artificial Sequence; identical to SEQ ID NO: 7226
  GFR-binding peptide
  MOD_RES (5)..(6)..(39): Xaa is C or S
  MOD_RES (20)..(21)..(22)..(23)..(24): Xaa is A or G
  MOD_RES (25)..(26)..(27)..(28): Xaa is A or G or is absent

SEQ ID NO: 66180 - protein, 36 aa, Artificial Sequence
  GFR-binding peptide
  MOD_RES (1)..(35): Xaa is C or S
  MOD_RES (15)..(16)..(17)..(18)..(19): Xaa is A or G
  MOD_RES (20)..(21)..(22)..(23): Xaa is A or G or is absent
XVPEKMSATSILYYXXXXXXXXXLRKHRNMTVESXA

SEQ ID NO: 66181 - protein, 36 aa, Artificial Sequence; identical to SEQ ID NO: 32455
  GFR-binding peptide
  MOD_RES (2)..(3): Xaa is C or S
  MOD_RES (17)..(18)..(19)..(20)..(21): Xaa is A or G
  MOD_RES (22)..(23)..(24)..(25): Xaa is A or G or is absent

SEQ ID NO: 66182 - protein, 38 aa, Artificial Sequence
  GFR-binding peptide
  MOD_RES (1)..(35)..(37): Xaa is C or S
  MOD_RES (15)..(16)..(17)..(18)..(19): Xaa is A or G
  MOD_RES (20)..(21)..(22)..(23): Xaa is A or G or is absent
XVPTKLSATSILYYXXXXXXXXXLRKHRGMAVSEXGXR

SEQ ID NO: 66183 - protein, 36 aa, Artificial Sequence; identical to SEQ ID NO: 28396
  GFR-binding peptide
  MOD_RES (1)..(2)..(35): Xaa is C or S

SEQ ID NO: 66184 - protein, 34 aa, Artificial Sequence; identical to SEQ ID NO: 28397
  GFR-binding peptide
  MOD_RES (34)..(34): Xaa is C or S
  MOD_RES (14)..(15)..(16)..(17)..(18): Xaa is A or G
  MOD_RES (19)..(20)..(21)..(22): Xaa is A or G or is absent

SEQ ID NO: 66185 - protein, 37 aa, Artificial Sequence; identical to SEQ ID NO: 32459
  GFR-binding peptide
  MOD_RES (1)..(2)..(36): Xaa is C or S
  MOD_RES (16)..(17)..(18)..(19)..(20): Xaa is A or G
  MOD_RES (21)..(22)..(23)..(24): Xaa is A or G or is absent

SEQ ID NO: 66186 - protein, 39 aa, Artificial Sequence; identical to SEQ ID NO: 7229
  GFR-binding peptide
  MOD_RES (5)..(6)..(38): Xaa is C or S

SEQ ID NO: 66187 - protein, 32 aa, Artificial Sequence; identical to SEQ ID NO: 32460
  GFR-binding peptide
  MOD_RES (1)..(2): Xaa is C or S

SEQ ID NO: 66188 - protein, 38 aa, Artificial Sequence; identical to SEQ ID NO: 28400
  GFR-binding peptide
  MOD_RES (3)..(4)..(36)..(38): Xaa is C or S

SEQ ID NO: 66189 - protein, 37 aa, Artificial Sequence; identical to SEQ ID NO: 7231
  GFR-binding peptide
  MOD_RES (6)..(7): Xaa is C or S

SEQ ID NO: 66190 - protein, 34 aa, Artificial Sequence; identical to SEQ ID NO: 7232
  GFR-binding peptide
  MOD_RES (2)..(34): Xaa is C or S

SEQ ID NO: 66191 - protein, 39 aa, Artificial Sequence; identical to SEQ ID NO: 28404
  GFR-binding peptide
  MOD_RES (2)..(3)..(36)..(38): Xaa is C or S
  MOD_RES (17)..(18)..(19)..(20)..(21): Xaa is A or G
  MOD_RES (22)..(23)..(24)..(25): Xaa is A or G or is absent

SEQ ID NO: 66192 - protein, 35 aa, Artificial Sequence; identical to SEQ ID NO: 7233
  GFR-binding peptide
  MOD_RES (34)..(34): Xaa is C or S
  MOD_RES (14)..(15)..(16)..(17)..(18): Xaa is A or G
  MOD_RES (19)..(20)..(21)..(22): Xaa is A or G or is absent

SEQ ID NO: 66193 - protein, 33 aa, Artificial Sequence
  GFR-binding peptide
  MOD_RES (1)..(2): Xaa is C or S
XXVPEKMEPISILYLDENKNVVKFKYENMTVES

SEQ ID NO: 66194 - protein, 37 aa, Artificial Sequence; identical to SEQ ID NO: 28407
  GFR-binding peptide
  MOD_RES (4)..(5)..(36): Xaa is C or S

SEQ ID NO: 66195 - protein, 38 aa, Artificial Sequence; identical to SEQ ID NO: 28410
  GFR-binding peptide
  MOD_RES (5)..(6)..(38): Xaa is C or S

SEQ ID NO: 66196 - protein, 38 aa, Artificial Sequence; identical to SEQ ID NO: 32469
  GFR-binding peptide
  MOD_RES (5)..(6)..(38): Xaa is C or S

SEQ ID NO: 66197 - protein, 35 aa, Artificial Sequence; identical to SEQ ID NO: 7241
  GFR-binding peptide
  MOD_RES (3)..(4): Xaa is C or S

SEQ ID NO: 66198 - protein, 34 aa, Artificial Sequence
  GFR-binding peptide
  MOD_RES (1)..(33): Xaa is C or S
XVPTRLEPISILYLDSANNVVKFKYEDMVVESXG

SEQ ID NO: 66199 - protein, 42 aa, Artificial Sequence; identical to SEQ ID NO: 32479
  GFR-binding peptide
  MOD_RES (4)..(5)..(40)..(42): Xaa is C or S
  MOD_RES (19)..(20)..(21)..(22)..(23): Xaa is A or G
  MOD_RES (24)..(25)..(26)..(27): Xaa is A or G or is absent

SEQ ID NO: 66200 - protein, 34 aa, Artificial Sequence
  GFR-binding peptide
  MOD_RES (1)..(2): Xaa is C or S
  MOD_RES (16)..(17)..(18)..(19)..(20): Xaa is A or G
  MOD_RES (21)..(22)..(23)..(24): Xaa is A or G or is absent
XXVPTRLSPISILYKXXXXXXXXXLKYHYDMVVE

SEQ ID NO: 66201 - protein, 35 aa, Artificial Sequence; identical to SEQ ID NO: 28419
  GFR-binding peptide
  MOD_RES (4)..(4): Xaa is C or S

SEQ ID NO: 66202 - protein, 37 aa, Artificial Sequence; identical to SEQ ID NO: 28420
  GFR-binding peptide
  MOD_RES (34)..(36): Xaa is C or S
  MOD_RES (14)..(15)..(16)..(17)..(18): Xaa is A or G
  MOD_RES (19)..(20)..(21)..(22): Xaa is A or G or is absent

SEQ ID NO: 66203 - protein, 33 aa, Artificial Sequence; identical to SEQ ID NO: 32485
  GFR-binding peptide
  MOD_RES (2)..(3): Xaa is C or S

SEQ ID NO: 66204 - protein, 35 aa, Artificial Sequence; identical to SEQ ID NO: 28421
  GFR-binding peptide
  MOD_RES (1)..(2): Xaa is C or S
  MOD_RES (16)..(17)..(18)..(19)..(20): Xaa is A or G
  MOD_RES (21)..(22)..(23)..(24): Xaa is A or G or is absent

SEQ ID NO: 66205 - protein, 38 aa, Artificial Sequence; identical to SEQ ID NO: 28424
  GFR-binding peptide
  MOD_RES (5)..(6): Xaa is C or S
  MOD_RES (20)..(21)..(22)..(23)..(24): Xaa is A or G
  MOD_RES (25)..(26)..(27)..(28): Xaa is A or G or is absent

SEQ ID NO: 66206 - protein, 36 aa, Artificial Sequence; identical to SEQ ID NO: 7244
  GFR-binding peptide
  MOD_RES (2)..(3)..(36): Xaa is C or S
  MOD_RES (17)..(18)..(19)..(20)..(21): Xaa is A or G
  MOD_RES (22)..(23)..(24)..(25): Xaa is A or G or is absent

SEQ ID NO: 66207 - protein, 35 aa, Artificial Sequence; identical to SEQ ID NO: 28428
  GFR-binding peptide
  MOD_RES (32)..(34): Xaa is C or S

SEQ ID NO: 66208 - protein, 38 aa, Artificial Sequence; identical to SEQ ID NO: 32486
  GFR-binding peptide
  MOD_RES (1)..(35)..(37): Xaa is C or S
  MOD_RES (15)..(16)..(17)..(18)..(19): Xaa is A or G
  MOD_RES (20)..(21)..(22)..(23): Xaa is A or G or is absent

SEQ ID NO: 66209 - protein, 35 aa, Artificial Sequence
  GFR-binding peptide
  MOD_RES (32)..(34): Xaa is C or S
VPTRLSATSILYYDSANNVVLRKHRDMVVESXGXR

SEQ ID NO: 66210 - protein, 40 aa, Artificial Sequence; identical to SEQ ID NO: 7247
  GFR-binding peptide
  MOD_RES (5)..(37)..(39): Xaa is C or S

SEQ ID NO: 66211 - protein, 43 aa, Artificial Sequence; identical to SEQ ID NO: 7248
  GFR-binding peptide
  MOD_RES (5)..(6)..(40)..(42): Xaa is C or S
  MOD_RES (20)..(21)..(22)..(23)..(24): Xaa is A or G
  MOD_RES (25)..(26)..(27)..(28): Xaa is A or G or is absent

SEQ ID NO: 66212 - protein, 35 aa, Artificial Sequence; identical to SEQ ID NO: 32494
  GFR-binding peptide
  MOD_RES (34)..(34): Xaa is C or S
  MOD_RES (14)..(15)..(16)..(17)..(18): Xaa is A or G
  MOD_RES (19)..(20)..(21)..(22): Xaa is A or G or is absent

SEQ ID NO: 66213 - protein, 37 aa, Artificial Sequence; identical to SEQ ID NO: 7250
  GFR-binding peptide
  MOD_RES (5)..(37): Xaa is C or S

SEQ ID NO: 66214 - protein, 34 aa, Artificial Sequence
  GFR-binding peptide
  MOD_RES (1)..(33): Xaa is C or S
XTPTKMSATSMLYYNDKQQIILRKHRGMVVDRXG

SEQ ID NO: 66215 - protein, 38 aa, Artificial Sequence; identical to SEQ ID NO: 7251
  GFR-binding peptide
  MOD_RES (3)..(4)..(37): Xaa is C or S
  MOD_RES (18)..(19)..(20)..(21)..(22): Xaa is A or G
  MOD_RES (23)..(24)..(25)..(26): Xaa is A or G or is absent

SEQ ID NO: 66216 - protein, 37 aa, Artificial Sequence; identical to SEQ ID NO: 32497
  GFR-binding peptide
  MOD_RES (2)..(3)..(37): Xaa is C or S
  MOD_RES (17)..(18)..(19)..(20)..(21): Xaa is A or G
  MOD_RES (22)..(23)..(24)..(25): Xaa is A or G or is absent

SEQ ID NO: 66217 - protein, 37 aa, Artificial Sequence; identical to SEQ ID NO: 28437
  GFR-binding peptide
  MOD_RES (1)..(34)..(36): Xaa is C or S
  MOD_RES (15)..(16)..(17)..(18)..(19): Xaa is A or G
  MOD_RES (20)..(21)..(22)..(23): Xaa is A or G or is absent

SEQ ID NO: 66218 - protein, 40 aa, Artificial Sequence; identical to SEQ ID NO: 28438
  GFR-binding peptide
  MOD_RES (5)..(6)..(38)..(40): Xaa is C or S

SEQ ID NO: 66219 - protein, 37 aa, Artificial Sequence
  GFR-binding peptide
  MOD_RES (1)..(34)..(36): Xaa is C or S
  MOD_RES (15)..(16)..(17)..(18)..(19): Xaa is A or G
  MOD_RES (20)..(21)..(22)..(23): Xaa is A or G or is absent
XAPVKTEPISMLYLXXXXXXXXXKFKYEMIVEEXGXL

SEQ ID NO: 66220 - protein, 39 aa, Artificial Sequence
  GFR-binding peptide
  MOD_RES (4)..(5)..(37)..(39): Xaa is C or S
PPTXXVPTRLSATSILYYDSANNVVLRKHRDMVVESXGX

SEQ ID NO: 66221 - protein, 40 aa, Artificial Sequence; identical to SEQ ID NO: 7256
  GFR-binding peptide
  MOD_RES (5)..(6)..(37)..(39): Xaa is C or S

SEQ ID NO: 66222 - protein, 32 aa, Artificial Sequence
  GFR-binding peptide
  MOD_RES (1)..(2): Xaa is C or S
XXVPEKMSPINILYFDENKNVVYGKIPNMTVE

SEQ ID NO: 66223 - protein, 38 aa, Artificial Sequence; identical to SEQ ID NO: 32506
  GFR-binding peptide
  MOD_RES (4)..(5): Xaa is C or S
  MOD_RES (19)..(20)..(21)..(22)..(23): Xaa is A or G
  MOD_RES (24)..(25)..(26)..(27): Xaa is A or G or is absent

SEQ ID NO: 66224 - protein, 42 aa, Artificial Sequence
  GFR-binding peptide
  MOD_RES (4)..(5)..(39)..(41): Xaa is C or S
  MOD_RES (19)..(20)..(21)..(22)..(23): Xaa is A or G
  MOD_RES (24)..(25)..(26)..(27): Xaa is A or G or is absent
AGPXXTPTKMSPISMLYKXXXXXXXXXLKYHYGMVVDRXGXS

SEQ ID NO: 66225 - protein, 42 aa, Artificial Sequence; identical to SEQ ID NO: 32510
  GFR-binding peptide
  MOD_RES (6)..(7)..(39)..(41): Xaa is C or S

SEQ ID NO: 66226 - protein, 32 aa, Artificial Sequence; identical to SEQ ID NO: 7261
  GFR-binding peptide
  MOD_RES (14)..(15)..(16)..(17)..(18): Xaa is A or G
  MOD_RES (19)..(20)..(21)..(22): Xaa is A or G or is absent

SEQ ID NO: 66227 - protein, 40 aa, Artificial Sequence; identical to SEQ ID NO: 7263
  GFR-binding peptide
  MOD_RES (4)..(5)..(39): Xaa is C or S
  MOD_RES (19)..(20)..(21)..(22)..(23): Xaa is A or G
  MOD_RES (24)..(25)..(26)..(27): Xaa is A or G or is absent

SEQ ID NO: 66228 - protein, 38 aa, Artificial Sequence; identical to SEQ ID NO: 7268
  GFR-binding peptide
  MOD_RES (2)..(3)..(36)..(38): Xaa is C or S
  MOD_RES (17)..(18)..(19)..(20)..(21): Xaa is A or G
  MOD_RES (22)..(23)..(24)..(25): Xaa is A or G or is absent

SEQ ID NO: 66229 - protein, 38 aa, Artificial Sequence
  GFR-binding peptide
  MOD_RES (2)..(3)..(35)..(37): Xaa is C or S
AXXVPTKLSATSILYYDKGVVTYLRKHRGMAVSEXGXR

SEQ ID NO: 66230 - protein, 37 aa, Artificial Sequence
  GFR-binding peptide
  MOD_RES (1)..(2)..(34)..(36): Xaa is C or S
XXTPTKMEPISMLYLNDKQQIIKFKYEGMVVDRXGXS

SEQ ID NO: 66231 - protein, 33 aa, Artificial Sequence; identical to SEQ ID NO: 7271
  GFR-binding peptide
  MOD_RES (14)..(15)..(16)..(17)..(18): Xaa is A or G
  MOD_RES (19)..(20)..(21)..(22): Xaa is A or G or is absent

SEQ ID NO: 66232 - protein, 32 aa, Artificial Sequence
  GFR-binding peptide
  MOD_RES (1)..(32): Xaa is C or S
XAPVKTSATSMLYYDNGRVLLLRKHRMIVEEX

SEQ ID NO: 66233 - protein, 32 aa, Artificial Sequence; identical to SEQ ID NO: 28449
  GFR-binding peptide
  MOD_RES (32)..(32): Xaa is C or S

SEQ ID NO: 66234 - protein, 38 aa, Artificial Sequence; identical to SEQ ID NO: 7275
  GFR-binding peptide
  MOD_RES (3)..(4)..(37): Xaa is C or S
  MOD_RES (18)..(19)..(20)..(21)..(22): Xaa is A or G
  MOD_RES (23)..(24)..(25)..(26): Xaa is A or G or is absent

SEQ ID NO: 66235 - protein, 36 aa, Artificial Sequence; identical to SEQ ID NO: 28453
  GFR-binding peptide
  MOD_RES (2)..(3)..(35): Xaa is C or S

SEQ ID NO: 66236 - protein, 42 aa, Artificial Sequence
  GFR-binding peptide
  MOD_RES (5)..(6)..(39)..(41): Xaa is C or S
  MOD_RES (20)..(21)..(22)..(23)..(24): Xaa is A or G
  MOD_RES (25)..(26)..(27)..(28): Xaa is A or G or is absent
SAAPXXVPQALSPINILYFXXXXXXXXXYGKIPMIVRSXKXS

SEQ ID NO: 66237 - protein, 35 aa, Artificial Sequence
  GFR-binding peptide
  MOD_RES (1)..(2): Xaa is C or S
  MOD_RES (16)..(17)..(18)..(19)..(20): Xaa is A or G
  MOD_RES (21)..(22)..(23)..(24): Xaa is A or G or is absent
XXTPTKMSPISMLYKXXXXXXXXXLKYHYGMVVDR

SEQ ID NO: 66238 - protein, 44 aa, Artificial Sequence; identical to SEQ ID NO: 7277
  GFR-binding peptide
  MOD_RES (6)..(7)..(41)..(43): Xaa is C or S
  MOD_RES (21)..(22)..(23)..(24)..(25): Xaa is A or G
  MOD_RES (26)..(27)..(28)..(29): Xaa is A or G or is absent

SEQ ID NO: 66239 - protein, 32 aa, Artificial Sequence
  GFR-binding peptide
  MOD_RES (14)..(15)..(16)..(17)..(18): Xaa is A or G
  MOD_RES (19)..(20)..(21)..(22): Xaa is A or G or is absent
TPTKMSATSMLYYXXXXXXXXXLRKHRGMVVD

SEQ ID NO: 66240 - protein, 43 aa, Artificial Sequence
  GFR-binding peptide
  MOD_RES (6)..(7)..(41)..(43): Xaa is C or S
  MOD_RES (21)..(22)..(23)..(24)..(25): Xaa is A or G
  MOD_RES (26)..(27)..(28)..(29): Xaa is A or G or is absent
KASKAXXVPTKLSATSILYYXXXXXXXXXLRKHRGMAVSEXGX

SEQ ID NO: 66241 - protein, 36 aa, Artificial Sequence; identical to SEQ ID NO: 7280
  GFR-binding peptide
  MOD_RES (1)..(33)..(35): Xaa is C or S

SEQ ID NO: 66242 - protein, 32 aa, Artificial Sequence; identical to SEQ ID NO: 28459
  GFR-binding peptide
  MOD_RES (14)..(15)..(16)..(17)..(18): Xaa is A or G
  MOD_RES (19)..(20)..(21)..(22): Xaa is A or G or is absent

SEQ ID NO: 66243 - protein, 33 aa, Artificial Sequence; identical to SEQ ID NO: 7284
  GFR-binding peptide
  MOD_RES (32)..(32): Xaa is C or S

SEQ ID NO: 66244 - protein, 42 aa, Artificial Sequence; identical to SEQ ID NO: 14584
  GFR-binding peptide
  MOD_RES (5)..(6)..(40)..(42): Xaa is C or S
  MOD_RES (20)..(21)..(22)..(23)..(24): Xaa is A or G
  MOD_RES (25)..(26)..(27)..(28): Xaa is A or G or is absent

SEQ ID NO: 66245 - protein, 38 aa, Artificial Sequence; identical to SEQ ID NO: 32535
  GFR-binding peptide
  MOD_RES (6)..(6): Xaa is C or S
  MOD_RES (20)..(21)..(22)..(23)..(24): Xaa is A or G
  MOD_RES (25)..(26)..(27)..(28): Xaa is A or G or is absent

SEQ ID NO: 66246 - protein, 32 aa, Artificial Sequence; identical to SEQ ID NO: 28463
  GFR-binding peptide
  MOD_RES (32)..(32): Xaa is C or S

SEQ ID NO: 66247 - protein, 38 aa, Artificial Sequence; identical to SEQ ID NO: 32537
  GFR-binding peptide
  MOD_RES (4)..(5)..(37): Xaa is C or S

SEQ ID NO: 66248 - protein, 38 aa, Artificial Sequence; identical to SEQ ID NO: 7285
  GFR-binding peptide
  MOD_RES (3)..(4)..(36)..(38): Xaa is C or S

SEQ ID NO: 66249 - protein, 39 aa, Artificial Sequence; identical to SEQ ID NO: 32538
  GFR-binding peptide
  MOD_RES (4)..(5): Xaa is C or S
  MOD_RES (19)..(20)..(21)..(22)..(23): Xaa is A or G
  MOD_RES (24)..(25)..(26)..(27): Xaa is A or G or is absent

SEQ ID NO: 66250 - protein, 34 aa, Artificial Sequence; identical to SEQ ID NO: 7286
  GFR-binding peptide
  MOD_RES (1)..(2)..(33): Xaa is C or S

SEQ ID NO: 66251 - protein, 37 aa, Artificial Sequence; identical to SEQ ID NO: 7287
  GFR-binding peptide
  MOD_RES (3)..(4): Xaa is C or S
  MOD_RES (18)..(19)..(20)..(21)..(22): Xaa is A or G
  MOD_RES (23)..(24)..(25)..(26): Xaa is A or G or is absent

SEQ ID NO: 66252 - protein, 33 aa, Artificial Sequence; identical to SEQ ID NO: 28466
  GFR-binding peptide
  MOD_RES (14)..(15)..(16)..(17)..(18): Xaa is A or G
  MOD_RES (19)..(20)..(21)..(22): Xaa is A or G or is absent

SEQ ID NO: 66253 - protein, 35 aa, Artificial Sequence; identical to SEQ ID NO: 57446
  GFR-binding peptide
  MOD_RES (3)..(4): Xaa is C or S

SEQ ID NO: 66254 - protein, 34 aa, Artificial Sequence; identical to SEQ ID NO: 32542
  GFR-binding peptide
  MOD_RES (34)..(34): Xaa is C or S
  MOD_RES (14)..(15)..(16)..(17)..(18): Xaa is A or G
  MOD_RES (19)..(20)..(21)..(22): Xaa is A or G or is absent

SEQ ID NO: 66255 - protein, 37 aa, Artificial Sequence; identical to SEQ ID NO: 7291
  GFR-binding peptide
  MOD_RES (6)..(7): Xaa is C or S

SEQ ID NO: 66256 - protein, 42 aa, Artificial Sequence; identical to SEQ ID NO: 14591
  GFR-binding peptide
  MOD_RES (6)..(7)..(41): Xaa is C or S
  MOD_RES (21)..(22)..(23)..(24)..(25): Xaa is A or G
  MOD_RES (26)..(27)..(28)..(29): Xaa is A or G or is absent

SEQ ID NO: 66257 - protein, 36 aa, Artificial Sequence; identical to SEQ ID NO: 28473
  GFR-binding peptide
  MOD_RES (1)..(2)..(35): Xaa is C or S
  MOD_RES (16)..(17)..(18)..(19)..(20): Xaa is A or G
  MOD_RES (21)..(22)..(23)..(24): Xaa is A or G or is absent

SEQ ID NO: 66258 - protein, 34 aa, Artificial Sequence; identical to SEQ ID NO: 28475
  GFR-binding peptide
  MOD_RES (33)..(33): Xaa is C or S
  MOD_RES (14)..(15)..(16)..(17)..(18): Xaa is A or G
  MOD_RES (19)..(20)..(21)..(22): Xaa is A or G or is absent

SEQ ID NO: 66259 - protein, 38 aa, Artificial Sequence; identical to SEQ ID NO: 32549
  GFR-binding peptide
  MOD_RES (5)..(6): Xaa is C or S
  MOD_RES (20)..(21)..(22)..(23)..(24): Xaa is A or G
  MOD_RES (25)..(26)..(27)..(28): Xaa is A or G or is absent

SEQ ID NO: 66260 - protein, 31 aa, Artificial Sequence; identical to SEQ ID NO: 28477
  GFR-binding peptide
  MOD_RES (1)..(1): Xaa is C or S

SEQ ID NO: 66261 - protein, 40 aa, Artificial Sequence
  GFR-binding peptide
  MOD_RES (6)..(7)..(40): Xaa is C or S
  MOD_RES (21)..(22)..(23)..(24)..(25): Xaa is A or G
  MOD_RES (26)..(27)..(28)..(29): Xaa is A or G or is absent
RVPSTXXAPVKTEPISMLYLXXXXXXXXXKFKYEMIVEEX

SEQ ID NO: 66262 - protein, 40 aa, Artificial Sequence; identical to SEQ ID NO: 7299
  GFR-binding peptide
  MOD_RES (5)..(6)..(40): Xaa is C or S
  MOD_RES (20)..(21)..(22)..(23)..(24): Xaa is A or G
  MOD_RES (25)..(26)..(27)..(28): Xaa is A or G or is absent

SEQ ID NO: 66263 - protein, 34 aa, Artificial Sequence
  GFR-binding peptide
  MOD_RES (3)..(4): Xaa is C or S
GPXXTPTKMSATSMLYYNDKQQIILRKHRGMVVD

SEQ ID NO: 66264 - protein, 38 aa, Artificial Sequence; identical to SEQ ID NO: 7300
  GFR-binding peptide
  MOD_RES (1)..(2)..(35)..(37): Xaa is C or S
  MOD_RES (16)..(17)..(18)..(19)..(20): Xaa is A or G
  MOD_RES (21)..(22)..(23)..(24): Xaa is A or G or is absent

SEQ ID NO: 66265 - protein, 41 aa, Artificial Sequence; identical to SEQ ID NO: 7302
  GFR-binding peptide
  MOD_RES (5)..(6)..(39)..(41): Xaa is C or S
  MOD_RES (20)..(21)..(22)..(23)..(24): Xaa is A or G
  MOD_RES (25)..(26)..(27)..(28): Xaa is A or G or is absent

SEQ ID NO: 66266 - protein, 34 aa, Artificial Sequence; identical to SEQ ID NO: 7305
  GFR-binding peptide
  MOD_RES (1)..(2): Xaa is C or S
  MOD_RES (16)..(17)..(18)..(19)..(20): Xaa is A or G
  MOD_RES (21)..(22)..(23)..(24): Xaa is A or G or is absent

SEQ ID NO: 66267 - protein, 35 aa, Artificial Sequence; identical to SEQ ID NO: 28490
  GFR-binding peptide
  MOD_RES (2)..(3)..(35): Xaa is C or S

SEQ ID NO: 66268 - protein, 44 aa, Artificial Sequence
  GFR-binding peptide
  MOD_RES (6)..(7)..(41)..(43): Xaa is C or S
  MOD_RES (21)..(22)..(23)..(24)..(25): Xaa is A or G
  MOD_RES (26)..(27)..(28)..(29): Xaa is A or G or is absent
GIPEPXXVPEKMSPISILYKXXXXXXXXXLKYHYNMTVESXAXR

SEQ ID NO: 66269 - protein, 35 aa, Artificial Sequence
  GFR-binding peptide
  MOD_RES (2)..(3): Xaa is C or S
  MOD_RES (17)..(18)..(19)..(20)..(21): Xaa is A or G
  MOD_RES (22)..(23)..(24)..(25): Xaa is A or G or is absent
PXXTPTKMSPISMLYKXXXXXXXXXLKYHYGMVVD

SEQ ID NO: 66270 - protein, 37 aa, Artificial Sequence; identical to SEQ ID NO: 57469
  GFR-binding peptide
  MOD_RES (4)..(5)..(37): Xaa is C or S

SEQ ID NO: 66271 - protein, 40 aa, Artificial Sequence
  GFR-binding peptide
  MOD_RES (6)..(7)..(39): Xaa is C or S
AAPASXXVPARLSATSILYYDAANNVVLRKHRDMVVEAXG

SEQ ID NO: 66272 - protein, 36 aa, Artificial Sequence; identical to SEQ ID NO: 7309
  GFR-binding peptide
  MOD_RES (2)..(3): Xaa is C or S
  MOD_RES (17)..(18)..(19)..(20)..(21): Xaa is A or G
  MOD_RES (22)..(23)..(24)..(25): Xaa is A or G or is absent

SEQ ID NO: 66273 - protein, 37 aa, Artificial Sequence; identical to SEQ ID NO: 7310
  GFR-binding peptide
  MOD_RES (3)..(4)..(35)..(37): Xaa is C or S

SEQ ID NO: 66274 - protein, 37 aa, Artificial Sequence; identical to SEQ ID NO: 28495
  GFR-binding peptide
  MOD_RES (1)..(35)..(37): Xaa is C or S
  MOD_RES (15)..(16)..(17)..(18)..(19): Xaa is A or G
  MOD_RES (20)..(21)..(22)..(23): Xaa is A or G or is absent

SEQ ID NO: 66275 - protein, 35 aa, Artificial Sequence; identical to SEQ ID NO: 28497
  GFR-binding peptide
  MOD_RES (32)..(34): Xaa is C or S

SEQ ID NO: 66276 - protein, 34 aa, Artificial Sequence
  GFR-binding peptide
  MOD_RES (1)..(1): Xaa is C or S
  MOD_RES (15)..(16)..(17)..(18)..(19): Xaa is A or G
  MOD_RES (20)..(21)..(22)..(23): Xaa is A or G or is absent
XTPTKMEPISMLYLXXXXXXXXXKFKYEGMVVDR

SEQ ID NO: 66277 - protein, 35 aa, Artificial Sequence; identical to SEQ ID NO: 14610
  GFR-binding peptide
  MOD_RES (4)..(5): Xaa is C or S

SEQ ID NO: 66278 - protein, 40 aa, Artificial Sequence; identical to SEQ ID NO: 7313
  GFR-binding peptide
  MOD_RES (4)..(5)..(37)..(39): Xaa is C or S

SEQ ID NO: 66279 - protein, 33 aa, Artificial Sequence
  GFR-binding peptide
  MOD_RES (14)..(15)..(16)..(17)..(18): Xaa is A or G
  MOD_RES (19)..(20)..(21)..(22): Xaa is A or G or is absent
VPEKMSPISILYKXXXXXXXXXLKYHYNMTVES

SEQ ID NO: 66280 - protein, 37 aa, Artificial Sequence; identical to SEQ ID NO: 32576
  GFR-binding peptide
  MOD_RES (2)..(3)..(35)..(37): Xaa is C or S

SEQ ID NO: 66281 - protein, 42 aa, Artificial Sequence; identical to SEQ ID NO: 7314
  GFR-binding peptide
  MOD_RES (4)..(5)..(39)..(41): Xaa is C or S
  MOD_RES (19)..(20)..(21)..(22)..(23): Xaa is A or G
  MOD_RES (24)..(25)..(26)..(27): Xaa is A or G or is absent

SEQ ID NO: 66282 - protein, 34 aa, Artificial Sequence
  GFR-binding peptide
  MOD_RES (1)..(2): Xaa is C or S
  MOD_RES (16)..(17)..(18)..(19)..(20): Xaa is A or G
  MOD_RES (21)..(22)..(23)..(24): Xaa is A or G or is absent
XXVPTRLEPISILYLXXXXXXXXXKFKYEDMVVE

SEQ ID NO: 66283 - protein, 39 aa, Artificial Sequence; identical to SEQ ID NO: 28507
  GFR-binding peptide
  MOD_RES (4)..(5)..(39): Xaa is C or S
  MOD_RES (19)..(20)..(21)..(22)..(23): Xaa is A or G
  MOD_RES (24)..(25)..(26)..(27): Xaa is A or G or is absent

SEQ ID NO: 66284 - protein, 40 aa, Artificial Sequence
  GFR-binding peptide
  MOD_RES (5)..(6)..(37)..(39): Xaa is C or S
VPSTXXAPVKTSATSMLYYDNGRVLLLRKHRMIVEEXGXL

SEQ ID NO: 66285 - protein, 40 aa, Artificial Sequence
  GFR-binding peptide
  MOD_RES (6)..(7): Xaa is C or S
  MOD_RES (21)..(22)..(23)..(24)..(25): Xaa is A or G
  MOD_RES (26)..(27)..(28)..(29): Xaa is A or G or is absent
STPPTXXVPTRLSATSILYYXXXXXXXXXLRKHRDMVVES

SEQ ID NO: 66286 - protein, 41 aa, Artificial Sequence
  GFR-binding peptide
  MOD_RES (5)..(6)..(39)..(41): Xaa is C or S
  MOD_RES (20)..(21)..(22)..(23)..(24): Xaa is A or G
  MOD_RES (25)..(26)..(27)..(28): Xaa is A or G or is absent
SAAPXXVPQALSPINILYFXXXXXXXXXYGKIPMIVRSXKX

SEQ ID NO: 66287 - protein, 34 aa, Artificial Sequence
  GFR-binding peptide
  MOD_RES (33)..(33): Xaa is C or S
  MOD_RES (14)..(15)..(16)..(17)..(18): Xaa is A or G
  MOD_RES (19)..(20)..(21)..(22): Xaa is A or G or is absent
APVKTSATSMLYYXXXXXXXXXLRKHRMIVEEXG

SEQ ID NO: 66288 - protein, 38 aa, Artificial Sequence
  GFR-binding peptide
  MOD_RES (4)..(5)..(37): Xaa is C or S
SKAXXVPTKLSATSILYYDKGVVTYLRKHRGMAVSEXG

SEQ ID NO: 66289 - protein, 41 aa, Artificial Sequence; identical to SEQ ID NO: 7327
  GFR-binding peptide
  MOD_RES (4)..(5)..(38)..(40): Xaa is C or S
  MOD_RES (19)..(20)..(21)..(22)..(23): Xaa is A or G
  MOD_RES (24)..(25)..(26)..(27): Xaa is A or G or is absent

SEQ ID NO: 66290 - protein, 42 aa, Artificial Sequence; identical to SEQ ID NO: 28516
  GFR-binding peptide
  MOD_RES (6)..(7)..(41): Xaa is C or S
  MOD_RES (21)..(22)..(23)..(24)..(25): Xaa is A or G
  MOD_RES (26)..(27)..(28)..(29): Xaa is A or G or is absent

SEQ ID NO: 66291 - protein, 42 aa, Artificial Sequence
  GFR-binding peptide
  MOD_RES (4)..(5)..(39)..(41): Xaa is C or S
  MOD_RES (19)..(20)..(21)..(22)..(23): Xaa is A or G
  MOD_RES (24)..(25)..(26)..(27): Xaa is A or G or is absent
SKAXXVPTKLSATSILYYXXXXXXXXXLRKHRGMAVSEXGXR

SEQ ID NO: 66292 - protein, 34 aa, Artificial Sequence
  GFR-binding peptide
  MOD_RES (1)..(2): Xaa is C or S
  MOD_RES (16)..(17)..(18)..(19)..(20): Xaa is A or G
  MOD_RES (21)..(22)..(23)..(24): Xaa is A or G or is absent
XXVPARLSATSILYYXXXXXXXXXLRKHRDMVVE

SEQ ID NO: 66293 - protein, 36 aa, Artificial Sequence; identical to SEQ ID NO: 28518
  GFR-binding peptide
  MOD_RES (2)..(3)..(35): Xaa is C or S

SEQ ID NO: 66294 - protein, 34 aa, Artificial Sequence
  GFR-binding peptide
  MOD_RES (1)..(2): Xaa is C or S
  MOD_RES (16)..(17)..(18)..(19)..(20): Xaa is A or G
  MOD_RES (21)..(22)..(23)..(24): Xaa is A or G or is absent
XXVPTRLSATSILYYXXXXXXXXXLRKHRDMVVE

SEQ ID NO: 66295 - protein, 32 aa, Artificial Sequence; identical to SEQ ID NO: 7331
  GFR-binding peptide
  MOD_RES (32)..(32): Xaa is C or S

SEQ ID NO: 66296 - protein, 38 aa, Artificial Sequence; identical to SEQ ID NO: 28520
  GFR-binding peptide
  MOD_RES (2)..(3)..(35)..(37): Xaa is C or S

SEQ ID NO: 66297 - protein, 41 aa, Artificial Sequence; identical to SEQ ID NO: 28522
  GFR-binding peptide
  MOD_RES (7)..(41): Xaa is C or S
  MOD_RES (21)..(22)..(23)..(24)..(25): Xaa is A or G
  MOD_RES (26)..(27)..(28)..(29): Xaa is A or G or is absent

SEQ ID NO: 66298 - protein, 35 aa, Artificial Sequence; identical to SEQ ID NO: 28524
  GFR-binding peptide
  MOD_RES (2)..(3)..(35): Xaa is C or S

SEQ ID NO: 66299 - protein, 32 aa, Artificial Sequence; identical to SEQ ID NO: 57500
  GFR-binding peptide
  MOD_RES (14)..(15)..(16)..(17)..(18): Xaa is A or G
  MOD_RES (19)..(20)..(21)..(22): Xaa is A or G or is absent

SEQ ID NO: 66300 - protein, 35 aa, Artificial Sequence; identical to SEQ ID NO: 28526
  GFR-binding peptide
  MOD_RES (3)..(4): Xaa is C or S

SEQ ID NO: 66301 - protein, 38 aa, Artificial Sequence; identical to SEQ ID NO: 7336
  GFR-binding peptide
  MOD_RES (4)..(5): Xaa is C or S
  MOD_RES (19)..(20)..(21)..(22)..(23): Xaa is A or G
  MOD_RES (24)..(25)..(26)..(27): Xaa is A or G or is absent

SEQ ID NO: 66302 - protein, 37 aa, Artificial Sequence; identical to SEQ ID NO: 32599
  GFR-binding peptide
  MOD_RES (1)..(35)..(37): Xaa is C or S
  MOD_RES (15)..(16)..(17)..(18)..(19): Xaa is A or G
  MOD_RES (20)..(21)..(22)..(23): Xaa is A or G or is absent

SEQ ID NO: 66303 - protein, 34 aa, Artificial Sequence; identical to SEQ ID NO: 7340
  GFR-binding peptide
  MOD_RES (1)..(34): Xaa is C or S
  MOD_RES (15)..(16)..(17)..(18)..(19): Xaa is A or G
  MOD_RES (20)..(21)..(22)..(23): Xaa is A or G or is absent

SEQ ID NO: 66304 - protein, 36 aa, Artificial Sequence
  GFR-binding peptide
  MOD_RES (3)..(4)..(35): Xaa is C or S
STXXAPVKTSATSMLYYDNGRVLLLRKHRMIVEEXG

SEQ ID NO: 66305 - protein, 39 aa, Artificial Sequence
  GFR-binding peptide
  MOD_RES (4)..(5)..(38): Xaa is C or S
  MOD_RES (19)..(20)..(21)..(22)..(23): Xaa is A or G
  MOD_RES (24)..(25)..(26)..(27): Xaa is A or G or is absent
ASPXXVPQDLSPINILYFXXXXXXXXXYGKIPMVVKSXK

SEQ ID NO: 66306 - protein, 31 aa, Artificial Sequence; identical to SEQ ID NO: 57511
  GFR-binding peptide

SEQ ID NO: 66307 - protein, 38 aa, Artificial Sequence
  GFR-binding peptide
  MOD_RES (5)..(6): Xaa is C or S
  MOD_RES (20)..(21)..(22)..(23)..(24): Xaa is A or G
  MOD_RES (25)..(26)..(27)..(28): Xaa is A or G or is absent
APASXXVPARLSATSILYYXXXXXXXXXLRKHRDMVVE

SEQ ID NO: 66308 - protein, 36 aa, Artificial Sequence
  GFR-binding peptide
  MOD_RES (1)..(34)..(36): Xaa is C or S
  MOD_RES (15)..(16)..(17)..(18)..(19): Xaa is A or G
  MOD_RES (20)..(21)..(22)..(23): Xaa is A or G or is absent
XVSQDLSPINILYFXXXXXXXXXYGKIPMIVKSXKX

SEQ ID NO: 66309 - protein, 36 aa, Artificial Sequence; identical to SEQ ID NO: 32607
  GFR-binding peptide
  MOD_RES (3)..(4): Xaa is C or S
  MOD_RES (18)..(19)..(20)..(21)..(22): Xaa is A or G
  MOD_RES (23)..(24)..(25)..(26): Xaa is A or G or is absent

SEQ ID NO: 66310 - protein, 41 aa, Artificial Sequence; identical to SEQ ID NO: 7344
  GFR-binding peptide
  MOD_RES (5)..(39)..(41): Xaa is C or S
  MOD_RES (19)..(20)..(21)..(22)..(23): Xaa is A or G
  MOD_RES (24)..(25)..(26)..(27): Xaa is A or G or is absent

SEQ ID NO: 66311 - protein, 34 aa, Artificial Sequence; identical to SEQ ID NO: 28540
  GFR-binding peptide
  MOD_RES (2)..(3): Xaa is C or S

SEQ ID NO: 66312 - protein, 31 aa, Artificial Sequence
  GFR-binding peptide
VPTRLSPISILYKDSANNVVLKYHYDMVVES

SEQ ID NO: 66313 - protein, 37 aa, Artificial Sequence; identical to SEQ ID NO: 7348
  GFR-binding peptide
  MOD_RES (1)..(2)..(36): Xaa is C or S
  MOD_RES (16)..(17)..(18)..(19)..(20): Xaa is A or G
  MOD_RES (21)..(22)..(23)..(24): Xaa is A or G or is absent

SEQ ID NO: 66314 - protein, 39 aa, Artificial Sequence
  GFR-binding peptide
  MOD_RES (5)..(6)..(38): Xaa is C or S
SAGPXXTPTKMSATSMLYYNDKQQIILRKHRGMVVDRXG

SEQ ID NO: 66315 - protein, 35 aa, Artificial Sequence; identical to SEQ ID NO: 28545
  GFR-binding peptide
  MOD_RES (1)..(33)..(35): Xaa is C or S

SEQ ID NO: 66316 - protein, 33 aa, Artificial Sequence; identical to SEQ ID NO: 28547
  GFR-binding peptide
  MOD_RES (32)..(32): Xaa is C or S

SEQ ID NO: 66317 - protein, 42 aa, Artificial Sequence; identical to SEQ ID NO: 28549
  GFR-binding peptide
  MOD_RES (6)..(7)..(41): Xaa is C or S
  MOD_RES (21)..(22)..(23)..(24)..(25): Xaa is A or G
  MOD_RES (26)..(27)..(28)..(29): Xaa is A or G or is absent

SEQ ID NO: 66318 - protein, 37 aa, Artificial Sequence; identical to SEQ ID NO: 32627
  GFR-binding peptide
  MOD_RES (3)..(4): Xaa is C or S
  MOD_RES (18)..(19)..(20)..(21)..(22): Xaa is A or G
  MOD_RES (23)..(24)..(25)..(26): Xaa is A or G or is absent

SEQ ID NO: 66319 - protein, 34 aa, Artificial Sequence
  GFR-binding peptide
  MOD_RES (1)..(1): Xaa is C or S
  MOD_RES (15)..(16)..(17)..(18)..(19): Xaa is A or G
  MOD_RES (20)..(21)..(22)..(23): Xaa is A or G or is absent
XTPTKMSPISMLYKXXXXXXXXXLKYHYGMVVDR

SEQ ID NO: 66320 - protein, 38 aa, Artificial Sequence; identical to SEQ ID NO: 32630
  GFR-binding peptide
  MOD_RES (1)..(35)..(37): Xaa is C or S
  MOD_RES (15)..(16)..(17)..(18)..(19): Xaa is A or G
  MOD_RES (20)..(21)..(22)..(23): Xaa is A or G or is absent

SEQ ID NO: 66321 - protein, 40 aa, Artificial Sequence; identical to SEQ ID NO: 7353
  GFR-binding peptide
  MOD_RES (2)..(3)..(37)..(39): Xaa is C or S
  MOD_RES (17)..(18)..(19)..(20)..(21): Xaa is A or G
  MOD_RES (22)..(23)..(24)..(25): Xaa is A or G or is absent

SEQ ID NO: 66322 - protein, 36 aa, Artificial Sequence; identical to SEQ ID NO: 32634
  GFR-binding peptide
  MOD_RES (1)..(2)..(33)..(35): Xaa is C or S

SEQ ID NO: 66323 - protein, 39 aa, Artificial Sequence; identical to SEQ ID NO: 28559
  GFR-binding peptide
  MOD_RES (3)..(4)..(38): Xaa is C or S
  MOD_RES (18)..(19)..(20)..(21)..(22): Xaa is A or G
  MOD_RES (23)..(24)..(25)..(26): Xaa is A or G or is absent

SEQ ID NO: 66324 - protein, 37 aa, Artificial Sequence; identical to SEQ ID NO: 7355
  GFR-binding peptide
  MOD_RES (1)..(34)..(36): Xaa is C or S

SEQ ID NO: 66325 - protein, 33 aa, Artificial Sequence; identical to SEQ ID NO: 7356
  GFR-binding peptide
  MOD_RES (32)..(32): Xaa is C or S

SEQ ID NO: 66326 - protein, 40 aa, Artificial Sequence; identical to SEQ ID NO: 28564
  GFR-binding peptide
  MOD_RES (3)..(4)..(38)..(40): Xaa is C or S
  MOD_RES (18)..(19)..(20)..(21)..(22): Xaa is A or G
  MOD_RES (23)..(24)..(25)..(26): Xaa is A or G or is absent

SEQ ID NO: 66327 - protein, 35 aa, Artificial Sequence; identical to SEQ ID NO: 28566
  GFR-binding peptide
  MOD_RES (2)..(3)..(35): Xaa is C or S

SEQ ID NO: 66328 - protein, 41 aa, Artificial Sequence
  GFR-binding peptide
  MOD_RES (6)..(7)..(38)..(40): Xaa is C or S
RVPSTXXAPVKTSPISMLYKDNGRVLLLKYHYMIVEEXGXL

SEQ ID NO: 66329 - protein, 35 aa, Artificial Sequence; identical to SEQ ID NO: 7360
  GFR-binding peptide
  MOD_RES (3)..(4): Xaa is C or S

SEQ ID NO: 66330 - protein, 39 aa, Artificial Sequence; identical to SEQ ID NO: 7362
  GFR-binding peptide
  MOD_RES (3)..(4)..(36)..(38): Xaa is C or S

SEQ ID NO: 66331 - protein, 36 aa, Artificial Sequence; identical to SEQ ID NO: 7366
  GFR-binding peptide
  MOD_RES (5)..(6): Xaa is C or S

SEQ ID NO: 66332 - protein, 36 aa, Artificial Sequence; identical to SEQ ID NO: 28578
  GFR-binding peptide
  MOD_RES (1)..(36): Xaa is C or S
  MOD_RES (15)..(16)..(17)..(18)..(19): Xaa is A or G
  MOD_RES (20)..(21)..(22)..(23): Xaa is A or G or is absent

SEQ ID NO: 66333 - protein, 35 aa, Artificial Sequence
  GFR-binding peptide
  MOD_RES (33)..(35): Xaa is C or S
  MOD_RES (14)..(15)..(16)..(17)..(18): Xaa is A or G
  MOD_RES (19)..(20)..(21)..(22): Xaa is A or G or is absent
APVKTEPISMLYLXXXXXXXXXKFKYEMIVEEXGX

SEQ ID NO: 66334 - protein, 39 aa, Artificial Sequence; identical to SEQ ID NO: 28581
  GFR-binding peptide
  MOD_RES (6)..(7)..(38): Xaa is C or S

SEQ ID NO: 66335 - protein, 35 aa, Artificial Sequence; identical to SEQ ID NO: 7369
  GFR-binding peptide
  MOD_RES (3)..(35): Xaa is C or S

SEQ ID NO: 66336 - protein, 34 aa, Artificial Sequence; identical to SEQ ID NO: 7371
  GFR-binding peptide
  MOD_RES (2)..(2): Xaa is C or S
  MOD_RES (16)..(17)..(18)..(19)..(20): Xaa is A or G
  MOD_RES (21)..(22)..(23)..(24): Xaa is A or G or is absent

SEQ ID NO: 66337 - protein, 32 aa, Artificial Sequence
  GFR-binding peptide
  MOD_RES (32)..(32): Xaa is C or S
VPEKMSATSILYYDENKNVVLRKHRNMTVESX

SEQ ID NO: 66338 - protein, 38 aa, Artificial Sequence; identical to SEQ ID NO: 7375
  GFR-binding peptide
  MOD_RES (3)..(4)..(35)..(37): Xaa is C or S

SEQ ID NO: 66339 - protein, 40 aa, Artificial Sequence; identical to SEQ ID NO: 28585
  GFR-binding peptide
  MOD_RES (6)..(7)..(39): Xaa is C or S

SEQ ID NO: 66340 - protein, 36 aa, Artificial Sequence; identical to SEQ ID NO: 32664
  GFR-binding peptide
  MOD_RES (3)..(4): Xaa is C or S

SEQ ID NO: 66341 - protein, 40 aa, Artificial Sequence; identical to SEQ ID NO: 7378
  GFR-binding peptide
  MOD_RES (4)..(5)..(39): Xaa is C or S
  MOD_RES (19)..(20)..(21)..(22)..(23): Xaa is A or G
  MOD_RES (24)..(25)..(26)..(27): Xaa is A or G or is absent

SEQ ID NO: 66342 - protein, 39 aa, Artificial Sequence; identical to SEQ ID NO: 32665
  GFR-binding peptide
  MOD_RES (1)..(2)..(36)..(38): Xaa is C or S
  MOD_RES (16)..(17)..(18)..(19)..(20): Xaa is A or G
  MOD_RES (21)..(22)..(23)..(24): Xaa is A or G or is absent

SEQ ID NO: 66343 - protein, 39 aa, Artificial Sequence; identical to SEQ ID NO: 32666
  GFR-binding peptide
  MOD_RES (5)..(37)..(39): Xaa is C or S

SEQ ID NO: 66344 - protein, 38 aa, Artificial Sequence; identical to SEQ ID NO: 32667
  GFR-binding peptide
  MOD_RES (4)..(5): Xaa is C or S
  MOD_RES (19)..(20)..(21)..(22)..(23): Xaa is A or G
  MOD_RES (24)..(25)..(26)..(27): Xaa is A or G or is absent

SEQ ID NO: 66345 - protein, 42 aa, Artificial Sequence; identical to SEQ ID NO: 28592
  GFR-binding peptide
  MOD_RES (5)..(6)..(40)..(42): Xaa is C or S
  MOD_RES (20)..(21)..(22)..(23)..(24): Xaa is A or G
  MOD_RES (25)..(26)..(27)..(28): Xaa is A or G or is absent

SEQ ID NO: 66346 - protein, 42 aa, Artificial Sequence
  GFR-binding peptide
  MOD_RES (6)..(7)..(41): Xaa is C or S
  MOD_RES (21)..(22)..(23)..(24)..(25): Xaa is A or G
  MOD_RES (26)..(27)..(28)..(29): Xaa is A or G or is absent
HVPKPXXAPTKLEPISVLYLXXXXXXXXXKFKYENMVVRSXG

SEQ ID NO: 66347 - protein, 38 aa, Artificial Sequence; identical to SEQ ID NO: 7388
  GFR-binding peptide
  MOD_RES (1)..(2)..(36)..(38): Xaa is C or S
  MOD_RES (16)..(17)..(18)..(19)..(20): Xaa is A or G
  MOD_RES (21)..(22)..(23)..(24): Xaa is A or G or is absent

SEQ ID NO: 66348 - protein, 40 aa, Artificial Sequence
  GFR-binding peptide
  MOD_RES (4)..(5)..(39): Xaa is C or S
  MOD_RES (19)..(20)..(21)..(22)..(23): Xaa is A or G
  MOD_RES (24)..(25)..(26)..(27): Xaa is A or G or is absent
PEPXXVPEKMSPINILYFXXXXXXXXXYGKIPNMTVESXA

SEQ ID NO: 66349 - protein, 37 aa, Artificial Sequence
  GFR-binding peptide
  MOD_RES (5)..(6): Xaa is C or S
TPPTXXVPTRLSPISILYKDSANNVVLKYHYDMVVES

SEQ ID NO: 66350 - protein, 33 aa, Artificial Sequence
  GFR-binding peptide
  MOD_RES (1)..(32): Xaa is C or S
XVPQALSPINILYFVGRKPKVYGKIPMIVRSXK

SEQ ID NO: 66351 - protein, 35 aa, Artificial Sequence
  GFR-binding peptide
  MOD_RES (1)..(2): Xaa is C or S
  MOD_RES (16)..(17)..(18)..(19)..(20): Xaa is A or G
  MOD_RES (21)..(22)..(23)..(24): Xaa is A or G or is absent
XXVPTRLSATSILYYXXXXXXXXXLRKHRDMVVES

SEQ ID NO: 66352 - protein, 42 aa, Artificial Sequence; identical to SEQ ID NO: 7396
  GFR-binding peptide
  MOD_RES (6)..(7)..(40)..(42): Xaa is C or S
  MOD_RES (21)..(22)..(23)..(24)..(25): Xaa is A or G
  MOD_RES (26)..(27)..(28)..(29): Xaa is A or G or is absent

SEQ ID NO: 66353 - protein, 38 aa, Artificial Sequence
  GFR-binding peptide
  MOD_RES (1)..(2)..(36)..(38): Xaa is C or S
  MOD_RES (16)..(17)..(18)..(19)..(20): Xaa is A or G
  MOD_RES (21)..(22)..(23)..(24): Xaa is A or G or is absent
XXVPEKMEPISILYLXXXXXXXXXKFKYENMTVESXAX

SEQ ID NO: 66354 - protein, 36 aa, Artificial Sequence
  GFR-binding peptide
  MOD_RES (5)..(6): Xaa is C or S
IPEPXXVPEKMSPINILYFDENKNVVYGKIPNMTVE

SEQ ID NO: 66355 - protein, 36 aa, Artificial Sequence; identical to SEQ ID NO: 7398
  GFR-binding peptide
  MOD_RES (1)..(2)..(34)..(36): Xaa is C or S

SEQ ID NO: 66356 - protein, 31 aa, Artificial Sequence
  GFR-binding peptide
VPTRLEPISILYLDSANNVVKFKYEDMVVES

SEQ ID NO: 66357 - protein, 37 aa, Artificial Sequence
  GFR-binding peptide
  MOD_RES (4)..(5)..(37): Xaa is C or S
AGPXXTPTKMEPISMLYLNDKQQIIKFKYEGMVVDRX

SEQ ID NO: 66358 - protein, 34 aa, Artificial Sequence; identical to SEQ ID NO: 28615
  GFR-binding peptide
  MOD_RES (34)..(34): Xaa is C or S
  MOD_RES (14)..(15)..(16)..(17)..(18): Xaa is A or G
  MOD_RES (19)..(20)..(21)..(22): Xaa is A or G or is absent

SEQ ID NO: 66359 - protein, 39 aa, Artificial Sequence; identical to SEQ ID NO: 7405
  GFR-binding peptide
  MOD_RES (1)..(2)..(36)..(38): Xaa is C or S
  MOD_RES (16)..(17)..(18)..(19)..(20): Xaa is A or G
  MOD_RES (21)..(22)..(23)..(24): Xaa is A or G or is absent

SEQ ID NO: 66360 - protein, 37 aa, Artificial Sequence; identical to SEQ ID NO: 7406
  GFR-binding peptide
  MOD_RES (1)..(35)..(37): Xaa is C or S
  MOD_RES (15)..(16)..(17)..(18)..(19): Xaa is A or G
  MOD_RES (20)..(21)..(22)..(23): Xaa is A or G or is absent

SEQ ID NO: 66361 - protein, 39 aa, Artificial Sequence
  GFR-binding peptide
  MOD_RES (5)..(6)..(38): Xaa is C or S
TPPTXXVPTRLEPISILYLDSANNVVKFKYEDMVVESXG

SEQ ID NO: 66362 - protein, 36 aa, Artificial Sequence; identical to SEQ ID NO: 57586
  GFR-binding peptide
  MOD_RES (2)..(3)..(36): Xaa is C or S
  MOD_RES (17)..(18)..(19)..(20)..(21): Xaa is A or G
  MOD_RES (22)..(23)..(24)..(25): Xaa is A or G or is absent

SEQ ID NO: 66363 - protein, 37 aa, Artificial Sequence
  GFR-binding peptide
  MOD_RES (1)..(35)..(37): Xaa is C or S
  MOD_RES (15)..(16)..(17)..(18)..(19): Xaa is A or G
  MOD_RES (20)..(21)..(22)..(23): Xaa is A or G or is absent
XVPEKMSPISILYKXXXXXXXXXLKYHYNMTVESXAX

SEQ ID NO: 66364 - protein, 32 aa, Artificial Sequence; identical to SEQ ID NO: 32688
  GFR-binding peptide
  MOD_RES (32)..(32): Xaa is C or S

SEQ ID NO: 66365 - protein, 34 aa, Artificial Sequence; identical to SEQ ID NO: 28617
  GFR-binding peptide
  MOD_RES (1)..(1): Xaa is C or S
  MOD_RES (15)..(16)..(17)..(18)..(19): Xaa is A or G
  MOD_RES (20)..(21)..(22)..(23): Xaa is A or G or is absent

SEQ ID NO: 66366 - protein, 38 aa, Artificial Sequence; identical to SEQ ID NO: 7407
  GFR-binding peptide
  MOD_RES (4)..(5)..(38): Xaa is C or S

SEQ ID NO: 66367 - protein, 39 aa, Artificial Sequence; identical to SEQ ID NO: 7408
  GFR-binding peptide
  MOD_RES (5)..(6)..(37)..(39): Xaa is C or S

SEQ ID NO: 66368 - protein, 38 aa, Artificial Sequence; identical to SEQ ID NO: 32692
  GFR-binding peptide
  MOD_RES (4)..(5): Xaa is C or S
  MOD_RES (19)..(20)..(21)..(22)..(23): Xaa is A or G
  MOD_RES (24)..(25)..(26)..(27): Xaa is A or G or is absent

SEQ ID NO: 66369 - protein, 44 aa, Artificial Sequence
  GFR-binding peptide
  MOD_RES (6)..(7)..(41)..(43): Xaa is C or S
  MOD_RES (21)..(22)..(23)..(24)..(25): Xaa is A or G
  MOD_RES (26)..(27)..(28)..(29): Xaa is A or G or is absent
HVPKPXXAPTKLSPISVLYKXXXXXXXXXLKYHYNMVVRSXGXH

SEQ ID NO: 66370 - protein, 36 aa, Artificial Sequence; identical to SEQ ID NO: 7409
  GFR-binding peptide
  MOD_RES (5)..(6): Xaa is C or S

SEQ ID NO: 66371 - protein, 35 aa, Artificial Sequence; identical to SEQ ID NO: 7410
  GFR-binding peptide
  MOD_RES (4)..(5): Xaa is C or S

SEQ ID NO: 66372 - protein, 39 aa, Artificial Sequence; identical to SEQ ID NO: 32696
  GFR-binding peptide
  MOD_RES (4)..(5)..(39): Xaa is C or S
  MOD_RES (19)..(20)..(21)..(22)..(23): Xaa is A or G
  MOD_RES (24)..(25)..(26)..(27): Xaa is A or G or is absent

SEQ ID NO: 66373 - protein, 42 aa, Artificial Sequence; identical to SEQ ID NO: 7415
  GFR-binding peptide
  MOD_RES (6)..(7)..(39)..(41): Xaa is C or S

SEQ ID NO: 66374 - protein, 38 aa, Artificial Sequence
  GFR-binding peptide
  MOD_RES (1)..(35)..(37): Xaa is C or S
  MOD_RES (15)..(16)..(17)..(18)..(19): Xaa is A or G
  MOD_RES (20)..(21)..(22)..(23): Xaa is A or G or is absent
XVPEKMEPISILYLXXXXXXXXXKFKYENMTVESXAXR

SEQ ID NO: 66375 - protein, 40 aa, Artificial Sequence; identical to SEQ ID NO: 32700
  GFR-binding peptide
  MOD_RES (2)..(3)..(37)..(39): Xaa is C or S
  MOD_RES (17)..(18)..(19)..(20)..(21): Xaa is A or G
  MOD_RES (22)..(23)..(24)..(25): Xaa is A or G or is absent

SEQ ID NO: 66376 - protein, 36 aa, Artificial Sequence
  GFR-binding peptide
  MOD_RES (4)..(5)..(36): Xaa is C or S
PSTXXAPVKTSATSMLYYDNGRVLLLRKHRMIVEEX

SEQ ID NO: 66377 - protein, 34 aa, Artificial Sequence
  GFR-binding peptide
  MOD_RES (1)..(1): Xaa is C or S
  MOD_RES (15)..(16)..(17)..(18)..(19): Xaa is A or G
  MOD_RES (20)..(21)..(22)..(23): Xaa is A or G or is absent
XVPTRLSATSILYYXXXXXXXXXLRKHRDMVVES

SEQ ID NO: 66378 - protein, 33 aa, Artificial Sequence
  GFR-binding peptide
  MOD_RES (1)..(33): Xaa is C or S
XTPTKMSPISMLYKNDKQQIILKYHYGMVVDRX

SEQ ID NO: 66379 - protein, 36 aa, Artificial Sequence; identical to SEQ ID NO: 32707
  GFR-binding peptide
  MOD_RES (2)..(3): Xaa is C or S
  MOD_RES (17)..(18)..(19)..(20)..(21): Xaa is A or G
  MOD_RES (22)..(23)..(24)..(25): Xaa is A or G or is absent

SEQ ID NO: 66380 - protein, 33 aa, Artificial Sequence; identical to SEQ ID NO: 28636
  GFR-binding peptide
  MOD_RES (2)..(3): Xaa is C or S

SEQ ID NO: 66381 - protein, 33 aa, Artificial Sequence; identical to SEQ ID NO: 7423
  GFR-binding peptide
  MOD_RES (1)..(33): Xaa is C or S

SEQ ID NO: 66382 - protein, 37 aa, Artificial Sequence; identical to SEQ ID NO: 7424
  GFR-binding peptide
  MOD_RES (1)..(2)..(35)..(37): Xaa is C or S
  MOD_RES (16)..(17)..(18)..(19)..(20): Xaa is A or G
  MOD_RES (21)..(22)..(23)..(24): Xaa is A or G or is absent

SEQ ID NO: 66383 - protein, 37 aa, Artificial Sequence
  GFR-binding peptide
  MOD_RES (6)..(7): Xaa is C or S
KASKAXXVPTKLSATSILYYDKGVVTYLRKHRGMAVS

SEQ ID NO: 66384 - protein, 38 aa, Artificial Sequence; identical to SEQ ID NO: 7427
  GFR-binding peptide
  MOD_RES (5)..(6): Xaa is C or S
  MOD_RES (20)..(21)..(22)..(23)..(24): Xaa is A or G
  MOD_RES (25)..(26)..(27)..(28): Xaa is A or G or is absent

SEQ ID NO: 66385 - protein, 34 aa, Artificial Sequence; identical to SEQ ID NO: 7428
  GFR-binding peptide
  MOD_RES (1)..(2)..(34): Xaa is C or S

SEQ ID NO: 66386 - protein, 33 aa, Artificial Sequence; identical to SEQ ID NO: 32721
  GFR-binding peptide
  MOD_RES (31)..(33): Xaa is C or S

SEQ ID NO: 66387 - protein, 37 aa, Artificial Sequence; identical to SEQ ID NO: 32724
  GFR-binding peptide
  MOD_RES (5)..(6): Xaa is C or S

SEQ ID NO: 66388 - protein, 37 aa, Artificial Sequence; identical to SEQ ID NO: 7431
  GFR-binding peptide
  MOD_RES (3)..(4)..(35)..(37): Xaa is C or S

SEQ ID NO: 66389 - protein, 36 aa, Artificial Sequence
  GFR-binding peptide
  MOD_RES (2)..(3): Xaa is C or S
  MOD_RES (17)..(18)..(19)..(20)..(21): Xaa is A or G
  MOD_RES (22)..(23)..(24)..(25): Xaa is A or G or is absent
PXXVPEKMSPISILYKXXXXXXXXXLKYHYNMTVES

SEQ ID NO: 66390 - protein, 34 aa, Artificial Sequence; identical to SEQ ID NO: 28653
  GFR-binding peptide
  MOD_RES (1)..(1): Xaa is C or S
  MOD_RES (15)..(16)..(17)..(18)..(19): Xaa is A or G
  MOD_RES (20)..(21)..(22)..(23): Xaa is A or G or is absent

SEQ ID NO: 66391 - protein, 42 aa, Artificial Sequence
  GFR-binding peptide
  MOD_RES (6)..(7)..(39)..(41): Xaa is C or S
GSAGPXXTPTKMSATSMLYYNDKQQIILRKHRGMVVDRXGXS

SEQ ID NO: 66392 - protein, 43 aa, Artificial Sequence
  GFR-binding peptide
  MOD_RES (5)..(6)..(40)..(42): Xaa is C or S
  MOD_RES (20)..(21)..(22)..(23)..(24): Xaa is A or G
  MOD_RES (25)..(26)..(27)..(28): Xaa is A or G or is absent
IPEPXXVPEKMSPINILYFXXXXXXXXXYGKIPNMTVESXAXR

SEQ ID NO: 66393 - protein, 38 aa, Artificial Sequence; identical to SEQ ID NO: 7438
  GFR-binding peptide
  MOD_RES (1)..(36)..(38): Xaa is C or S
  MOD_RES (15)..(16)..(17)..(18)..(19): Xaa is A or G
  MOD_RES (20)..(21)..(22)..(23): Xaa is A or G or is absent

SEQ ID NO: 66394 - protein, 35 aa, Artificial Sequence
  GFR-binding peptide
  MOD_RES (2)..(3): Xaa is C or S
  MOD_RES (17)..(18)..(19)..(20)..(21): Xaa is A or G
  MOD_RES (22)..(23)..(24)..(25): Xaa is A or G or is absent
PXXVPEKMSATSILYYXXXXXXXXXLRKHRNMTVE

SEQ ID NO: 66395 - protein, 36 aa, Artificial Sequence
  GFR-binding peptide
  MOD_RES (4)..(5): Xaa is C or S
PPTXXVPTRLSATSILYYDSANNVVLRKHRDMVVES

SEQ ID NO: 66396 - protein, 38 aa, Artificial Sequence; identical to SEQ ID NO: 7441
  GFR-binding peptide
  MOD_RES (5)..(6)..(38): Xaa is C or S

SEQ ID NO: 66397 - protein, 38 aa, Artificial Sequence; identical to SEQ ID NO: 7445
  GFR-binding peptide
  MOD_RES (2)..(3)..(37): Xaa is C or S
  MOD_RES (17)..(18)..(19)..(20)..(21): Xaa is A or G
  MOD_RES (22)..(23)..(24)..(25): Xaa is A or G or is absent

SEQ ID NO: 66398 - protein, 37 aa, Artificial Sequence
  GFR-binding peptide
  MOD_RES (2)..(3)..(35)..(37): Xaa is C or S
TXXVPTRLSATSILYYDSANNVVLRKHRDMVVESXGX

SEQ ID NO: 66399 - protein, 33 aa, Artificial Sequence; identical to SEQ ID NO: 28669
  GFR-binding peptide
  MOD_RES (1)..(33): Xaa is C or S

SEQ ID NO: 66400 - protein, 33 aa, Artificial Sequence; identical to SEQ ID NO: 28670
  GFR-binding peptide
  MOD_RES (2)..(3): Xaa is C or S

SEQ ID NO: 66401 - protein, 37 aa, Artificial Sequence
  GFR-binding peptide
  MOD_RES (4)..(5)..(36): Xaa is C or S
PSTXXAPVKTSPISMLYKDNGRVLLLKYHYMIVEEXG

SEQ ID NO: 66402 - protein, 37 aa, Artificial Sequence; identical to SEQ ID NO: 32745
  GFR-binding peptide
  MOD_RES (4)..(5)..(37): Xaa is C or S

SEQ ID NO: 66403 - protein, 37 aa, Artificial Sequence; identical to SEQ ID NO: 32746
  GFR-binding peptide
  MOD_RES (1)..(35)..(37): Xaa is C or S
  MOD_RES (15)..(16)..(17)..(18)..(19): Xaa is A or G
  MOD_RES (20)..(21)..(22)..(23): Xaa is A or G or is absent

SEQ ID NO: 66404 - protein, 42 aa, Artificial Sequence; identical to SEQ ID NO: 28676
  GFR-binding peptide
  MOD_RES (4)..(5)..(39)..(41): Xaa is C or S
  MOD_RES (19)..(20)..(21)..(22)..(23): Xaa is A or G
  MOD_RES (24)..(25)..(26)..(27): Xaa is A or G or is absent

SEQ ID NO: 66405 - protein, 39 aa, Artificial Sequence; identical to SEQ ID NO: 28677
  GFR-binding peptide
  MOD_RES (4)..(5)..(39): Xaa is C or S
  MOD_RES (19)..(20)..(21)..(22)..(23): Xaa is A or G
  MOD_RES (24)..(25)..(26)..(27): Xaa is A or G or is absent

SEQ ID NO: 66406 - protein, 40 aa, Artificial Sequence; identical to SEQ ID NO: 7452
  GFR-binding peptide
  MOD_RES (6)..(7)..(38)..(40): Xaa is C or S

SEQ ID NO: 66407 - protein, 32 aa, Artificial Sequence; identical to SEQ ID NO: 7454
  GFR-binding peptide
  MOD_RES (1)..(1): Xaa is C or S

SEQ ID NO: 66408 - protein, 43 aa, Artificial Sequence
  GFR-binding peptide
  MOD_RES (6)..(7)..(41)..(43): Xaa is C or S
  MOD_RES (21)..(22)..(23)..(24)..(25): Xaa is A or G
  MOD_RES (26)..(27)..(28)..(29): Xaa is A or G or is absent
AAPASXXVPARLSATSILYYXXXXXXXXXLRKHRDMVVEAXGX

SEQ ID NO: 66409 - protein, 35 aa, Artificial Sequence
  GFR-binding peptide
  MOD_RES (4)..(5): Xaa is C or S
PEPXXVPEKMNAISILYFDENKNVVLKKYRNMTVE

SEQ ID NO: 66410 - protein, 38 aa, Artificial Sequence; identical to SEQ ID NO: 32751
  GFR-binding peptide
  MOD_RES (2)..(3)..(35)..(37): Xaa is C or S

SEQ ID NO: 66411 - protein, 40 aa, Artificial Sequence; identical to SEQ ID NO: 28684
  GFR-binding peptide
  MOD_RES (6)..(7)..(39): Xaa is C or S

SEQ ID NO: 66412 - protein, 35 aa, Artificial Sequence; identical to SEQ ID NO: 7459
  GFR-binding peptide
  MOD_RES (1)..(2)..(35): Xaa is C or S
  MOD_RES (16)..(17)..(18)..(19)..(20): Xaa is A or G
  MOD_RES (21)..(22)..(23)..(24): Xaa is A or G or is absent

SEQ ID NO: 66413 - protein, 36 aa, Artificial Sequence; identical to SEQ ID NO: 7460
  GFR-binding peptide
  MOD_RES (5)..(5): Xaa is C or S

SEQ ID NO: 66414 - protein, 34 aa, Artificial Sequence; identical to SEQ ID NO: 28689
  GFR-binding peptide
  MOD_RES (2)..(3): Xaa is C or S

SEQ ID NO: 66415 - protein, 35 aa, Artificial Sequence; identical to SEQ ID NO: 28692
  GFR-binding peptide
  MOD_RES (1)..(2)..(34): Xaa is C or S

SEQ ID NO: 66416 - protein, 32 aa, Artificial Sequence
  GFR-binding peptide
  MOD_RES (31)..(31): Xaa is C or S
APVKTEPISMLYLDNGRVLLKFKYEMIVEEXG

SEQ ID NO: 66417 - protein, 40 aa, Artificial Sequence; identical to SEQ ID NO: 7469
  GFR-binding peptide
  MOD_RES (5)..(6)..(38)..(40): Xaa is C or S

SEQ ID NO: 66418 - protein, 39 aa, Artificial Sequence; identical to SEQ ID NO: 7470
  GFR-binding peptide
  MOD_RES (2)..(3)..(37)..(39): Xaa is C or S
  MOD_RES (17)..(18)..(19)..(20)..(21): Xaa is A or G
  MOD_RES (22)..(23)..(24)..(25): Xaa is A or G or is absent

SEQ ID NO: 66419 - protein, 43 aa, Artificial Sequence
  GFR-binding peptide
  MOD_RES (5)..(6)..(40)..(42): Xaa is C or S
  MOD_RES (20)..(21)..(22)..(23)..(24): Xaa is A or G
  MOD_RES (25)..(26)..(27)..(28): Xaa is A or G or is absent
IPEPXXVPEKMSATSILYYXXXXXXXXXLRKHRNMTVESXAXR

SEQ ID NO: 66420 - protein, 37 aa, Artificial Sequence
  GFR-binding peptide
  MOD_RES (34)..(36): Xaa is C or S
  MOD_RES (14)..(15)..(16)..(17)..(18): Xaa is A or G
  MOD_RES (19)..(20)..(21)..(22): Xaa is A or G or is absent
VPTRLSPISILYKXXXXXXXXXLKYHYDMVVESXGXR

SEQ ID NO: 66421 - protein, 32 aa, Artificial Sequence; identical to SEQ ID NO: 32760
  GFR-binding peptide
  MOD_RES (2)..(2): Xaa is C or S

SEQ ID NO: 66422 - protein, 36 aa, Artificial Sequence; identical to SEQ ID NO: 7473
  GFR-binding peptide
  MOD_RES (2)..(3): Xaa is C or S
  MOD_RES (17)..(18)..(19)..(20)..(21): Xaa is A or G
  MOD_RES (22)..(23)..(24)..(25): Xaa is A or G or is absent

SEQ ID NO: 66423 - protein, 39 aa, Artificial Sequence; identical to SEQ ID NO: 7474
  GFR-binding peptide
  MOD_RES (4)..(5)..(39): Xaa is C or S
  MOD_RES (19)..(20)..(21)..(22)..(23): Xaa is A or G
  MOD_RES (24)..(25)..(26)..(27): Xaa is A or G or is absent

SEQ ID NO: 66424 - protein, 36 aa, Artificial Sequence; identical to SEQ ID NO: 28701
  GFR-binding peptide
  MOD_RES (3)..(4): Xaa is C or S
  MOD_RES (18)..(19)..(20)..(21)..(22): Xaa is A or G
  MOD_RES (23)..(24)..(25)..(26): Xaa is A or G or is absent

SEQ ID NO: 66425 - protein, 35 aa, Artificial Sequence
  GFR-binding peptide
  MOD_RES (2)..(3): Xaa is C or S
  MOD_RES (17)..(18)..(19)..(20)..(21): Xaa is A or G
  MOD_RES (22)..(23)..(24)..(25): Xaa is A or G or is absent
PXXTPTKMSATSMLYYXXXXXXXXXLRKHRGMVVD

SEQ ID NO: 66426 - protein, 37 aa, Artificial Sequence; identical to SEQ ID NO: 7479
  GFR-binding peptide
  MOD_RES (4)..(5): Xaa is C or S
  MOD_RES (19)..(20)..(21)..(22)..(23): Xaa is A or G
  MOD_RES (24)..(25)..(26)..(27): Xaa is A or G or is absent

SEQ ID NO: 66427 - protein, 33 aa, Artificial Sequence
  GFR-binding peptide
  MOD_RES (2)..(3): Xaa is C or S
PXXVPEKMEPISILYLDENKNVVKFKYENMTVE

SEQ ID NO: 66428 - protein, 39 aa, Artificial Sequence
  GFR-binding peptide
  MOD_RES (3)..(4)..(36)..(38): Xaa is C or S
PTXXVPTRLSPISILYKDSANNVVLKYHYDMVVESXGXR

SEQ ID NO: 66429 - protein, 38 aa, Artificial Sequence; identical to SEQ ID NO: 7480
  GFR-binding peptide
  MOD_RES (1)..(2)..(36)..(38): Xaa is C or S
  MOD_RES (16)..(17)..(18)..(19)..(20): Xaa is A or G
  MOD_RES (21)..(22)..(23)..(24): Xaa is A or G or is absent

SEQ ID NO: 66430 - protein, 36 aa, Artificial Sequence
  GFR-binding peptide
  MOD_RES (2)..(3)..(35): Xaa is C or S
TXXVPTRLSPISILYKDSANNVVLKYHYDMVVESXG

SEQ ID NO: 66431 - protein, 40 aa, Artificial Sequence; identical to SEQ ID NO: 32771
  GFR-binding peptide
  MOD_RES (6)..(7)..(39): Xaa is C or S

SEQ ID NO: 66432 - protein, 41 aa, Artificial Sequence; identical to SEQ ID NO: 7483
  GFR-binding peptide
  MOD_RES (6)..(7)..(41): Xaa is C or S
  MOD_RES (21)..(22)..(23)..(24)..(25): Xaa is A or G
  MOD_RES (26)..(27)..(28)..(29): Xaa is A or G or is absent

SEQ ID NO: 66433 - protein, 33 aa, Artificial Sequence; identical to SEQ ID NO: 7487
  GFR-binding peptide
  MOD_RES (14)..(15)..(16)..(17)..(18): Xaa is A or G
  MOD_RES (19)..(20)..(21)..(22): Xaa is A or G or is absent

SEQ ID NO: 66434 - protein, 35 aa, Artificial Sequence
  GFR-binding peptide
  MOD_RES (3)..(4)..(35): Xaa is C or S
SPXXVPQDLSPINILYFVGRTPKVYGKIPMVVKSX

SEQ ID NO: 66435 - protein, 37 aa, Artificial Sequence; identical to SEQ ID NO: 7489
  GFR-binding peptide
  MOD_RES (6)..(7): Xaa is C or S

SEQ ID NO: 66436 - protein, 42 aa, Artificial Sequence
  GFR-binding peptide
  MOD_RES (4)..(5)..(39)..(41): Xaa is C or S
  MOD_RES (19)..(20)..(21)..(22)..(23): Xaa is A or G
  MOD_RES (24)..(25)..(26)..(27): Xaa is A or G or is absent
PEPXXVPEKMNAISILYFXXXXXXXXXLKKYRNMTVESXAXR

SEQ ID NO: 66437 - protein, 41 aa, Artificial Sequence; identical to SEQ ID NO: 7491
  GFR-binding peptide
  MOD_RES (4)..(5)..(38)..(40): Xaa is C or S

SEQ ID NO: 66438 - protein, 34 aa, Artificial Sequence; identical to SEQ ID NO: 28716
  GFR-binding peptide
  MOD_RES (1)..(32)..(34): Xaa is C or S

SEQ ID NO: 66439 - protein, 31 aa, Artificial Sequence; identical to SEQ ID NO: 7495
  GFR-binding peptide

SEQ ID NO: 66440 - protein, 36 aa, Artificial Sequence; identical to SEQ ID NO: 28718
  GFR-binding peptide
  MOD_RES (5)..(5): Xaa is C or S

SEQ ID NO: 66441 - protein, 34 aa, Artificial Sequence; identical to SEQ ID NO: 28719
  GFR-binding peptide
  MOD_RES (2)..(3): Xaa is C or S

SEQ ID NO: 66442 - protein, 39 aa, Artificial Sequence; identical to SEQ ID NO: 32788
  GFR-binding peptide
  MOD_RES (4)..(5)..(37)..(39): Xaa is C or S

SEQ ID NO: 66443 - protein, 33 aa, Artificial Sequence; identical to SEQ ID NO: 7497
  GFR-binding peptide
  MOD_RES (1)..(2): Xaa is C or S

SEQ ID NO: 66444 - protein, 33 aa, Artificial Sequence; identical to SEQ ID NO: 7499
  GFR-binding peptide
  MOD_RES (1)..(1): Xaa is C or S
  MOD_RES (15)..(16)..(17)..(18)..(19): Xaa is A or G
  MOD_RES (20)..(21)..(22)..(23): Xaa is A or G or is absent

SEQ ID NO: 66445 - protein, 41 aa, Artificial Sequence; identical to SEQ ID NO: 28727
  GFR-binding peptide
  MOD_RES (4)..(5)..(39)..(41): Xaa is C or S
  MOD_RES (19)..(20)..(21)..(22)..(23): Xaa is A or G
  MOD_RES (24)..(25)..(26)..(27): Xaa is A or G or is absent

SEQ ID NO: 66446 - protein, 42 aa, Artificial Sequence; identical to SEQ ID NO: 7500
  GFR-binding peptide
  MOD_RES (3)..(4)..(39)..(41): Xaa is C or S
  MOD_RES (18)..(19)..(20)..(21)..(22): Xaa is A or G
  MOD_RES (23)..(24)..(25)..(26): Xaa is A or G or is absent

SEQ ID NO: 66447 - protein, 37 aa, Artificial Sequence; identical to SEQ ID NO: 14808
  GFR-binding peptide
  MOD_RES (1)..(2)..(36): Xaa is C or S
  MOD_RES (16)..(17)..(18)..(19)..(20): Xaa is A or G
  MOD_RES (21)..(22)..(23)..(24): Xaa is A or G or is absent

SEQ ID NO: 66448 - protein, 34 aa, Artificial Sequence; identical to SEQ ID NO: 28731
  GFR-binding peptide
  MOD_RES (2)..(3): Xaa is C or S

SEQ ID NO: 66449 - protein, 45 aa, Artificial Sequence; identical to SEQ ID NO: 7504
  GFR-binding peptide
  MOD_RES (6)..(7)..(42)..(44): Xaa is C or S
  MOD_RES (21)..(22)..(23)..(24)..(25): Xaa is A or G
  MOD_RES (26)..(27)..(28)..(29): Xaa is A or G or is absent

SEQ ID NO: 66450 - protein, 36 aa, Artificial Sequence; identical to SEQ ID NO: 28734
  GFR-binding peptide
  MOD_RES (3)..(4): Xaa is C or S
  MOD_RES (18)..(19)..(20)..(21)..(22): Xaa is A or G
  MOD_RES (23)..(24)..(25)..(26): Xaa is A or G or is absent

SEQ ID NO: 66451 - protein, 33 aa, Artificial Sequence
  GFR-binding peptide
  MOD_RES (1)..(1): Xaa is C or S
  MOD_RES (15)..(16)..(17)..(18)..(19): Xaa is A or G
  MOD_RES (20)..(21)..(22)..(23): Xaa is A or G or is absent
XVPTRLEPISILYLXXXXXXXXXKFKYEDMVVE

SEQ ID NO: 66452 - protein, 38 aa, Artificial Sequence
  GFR-binding peptide
  MOD_RES (1)..(35)..(37): Xaa is C or S
  MOD_RES (15)..(16)..(17)..(18)..(19): Xaa is A or G
  MOD_RES (20)..(21)..(22)..(23): Xaa is A or G or is absent
XVPTRLSATSILYYXXXXXXXXXLRKHRDMVVESXGXR

SEQ ID NO: 66453 - protein, 35 aa, Artificial Sequence; identical to SEQ ID NO: 7508
  GFR-binding peptide
  MOD_RES (1)..(32)..(34): Xaa is C or S

SEQ ID NO: 66454 - protein, 36 aa, Artificial Sequence
  GFR-binding peptide
  MOD_RES (1)..(2)..(36): Xaa is C or S
  MOD_RES (16)..(17)..(18)..(19)..(20): Xaa is A or G
  MOD_RES (21)..(22)..(23)..(24): Xaa is A or G or is absent
XXVPEKMSPINILYFXXXXXXXXXYGKIPNMTVESX

SEQ ID NO: 66455 - protein, 42 aa, Artificial Sequence; identical to SEQ ID NO: 32807
  GFR-binding peptide
  MOD_RES (4)..(5)..(39)..(41): Xaa is C or S
  MOD_RES (19)..(20)..(21)..(22)..(23): Xaa is A or G
  MOD_RES (24)..(25)..(26)..(27): Xaa is A or G or is absent

SEQ ID NO: 66456 - protein, 35 aa, Artificial Sequence; identical to SEQ ID NO: 7509
  GFR-binding peptide
  MOD_RES (1)..(33)..(35): Xaa is C or S

SEQ ID NO: 66457 - protein, 35 aa, Artificial Sequence
  GFR-binding peptide
  MOD_RES (4)..(5): Xaa is C or S
ASPXXVPQDLSPINILYFVGRTPKVYGKIPMVVKS

SEQ ID NO: 66458 - protein, 35 aa, Artificial Sequence; identical to SEQ ID NO: 7510
  GFR-binding peptide
  MOD_RES (1)..(32)..(34): Xaa is C or S

SEQ ID NO: 66459 - protein, 40 aa, Artificial Sequence
  GFR-binding peptide
  MOD_RES (6)..(7)..(38)..(40): Xaa is C or S
ASAAPXXVPQALSPINILYFVGRKPKVYGKIPMIVRSXKX

SEQ ID NO: 66460 - protein, 39 aa, Artificial Sequence; identical to SEQ ID NO: 7511
  GFR-binding peptide
  MOD_RES (1)..(2)..(36)..(38): Xaa is C or S
  MOD_RES (16)..(17)..(18)..(19)..(20): Xaa is A or G
  MOD_RES (21)..(22)..(23)..(24): Xaa is A or G or is absent

SEQ ID NO: 66461 - protein, 39 aa, Artificial Sequence; identical to SEQ ID NO: 7513
  GFR-binding peptide
  MOD_RES (5)..(6)..(38): Xaa is C or S

SEQ ID NO: 66462 - protein, 32 aa, Artificial Sequence; identical to SEQ ID NO: 32816
  GFR-binding peptide
  MOD_RES (32)..(32): Xaa is C or S

SEQ ID NO: 66463 - protein, 42 aa, Artificial Sequence
  GFR-binding peptide
  MOD_RES (5)..(6)..(39)..(41): Xaa is C or S
  MOD_RES (20)..(21)..(22)..(23)..(24): Xaa is A or G
  MOD_RES (25)..(26)..(27)..(28): Xaa is A or G or is absent
SASPXXVPQDLSPINILYFXXXXXXXXXYGKIPMVVKSXKXS

SEQ ID NO: 66464 - protein, 34 aa, Artificial Sequence
  GFR-binding peptide
  MOD_RES (34)..(34): Xaa is C or S
  MOD_RES (14)..(15)..(16)..(17)..(18): Xaa is A or G
  MOD_RES (19)..(20)..(21)..(22): Xaa is A or G or is absent
VPEKMEPISILYLXXXXXXXXXKFKYENMTVESX

SEQ ID NO: 66465 - protein, 40 aa, Artificial Sequence; identical to SEQ ID NO: 7518
  GFR-binding peptide
  MOD_RES (6)..(38)..(40): Xaa is C or S

SEQ ID NO: 66466 - protein, 39 aa, Artificial Sequence; identical to SEQ ID NO: 32818
  GFR-binding peptide
  MOD_RES (4)..(5)..(36)..(38): Xaa is C or S

SEQ ID NO: 66467 - protein, 34 aa, Artificial Sequence; identical to SEQ ID NO: 28749
  GFR-binding peptide
  MOD_RES (1)..(2)..(34): Xaa is C or S

SEQ ID NO: 66468 - protein, 40 aa, Artificial Sequence
  GFR-binding peptide
  MOD_RES (6)..(7)..(38)..(40): Xaa is C or S
RVPSTXXAPVKTEPISMLYLDNGRVLLKFKYEMIVEEXGX

SEQ ID NO: 66469 - protein, 41 aa, Artificial Sequence
  GFR-binding peptide
  MOD_RES (4)..(5)..(39)..(41): Xaa is C or S
  MOD_RES (19)..(20)..(21)..(22)..(23): Xaa is A or G
  MOD_RES (24)..(25)..(26)..(27): Xaa is A or G or is absent
PASXXVPARLSATSILYYXXXXXXXXXLRKHRDMVVEAXGX

SEQ ID NO: 66470 - protein, 40 aa, Artificial Sequence; identical to SEQ ID NO: 7520
  GFR-binding peptide
  MOD_RES (4)..(5)..(37)..(39): Xaa is C or S

SEQ ID NO: 66471 - protein, 42 aa, Artificial Sequence
  GFR-binding peptide
  MOD_RES (4)..(5)..(39)..(41): Xaa is C or S
  MOD_RES (19)..(20)..(21)..(22)..(23): Xaa is A or G
  MOD_RES (24)..(25)..(26)..(27): Xaa is A or G or is absent
PEPXXVPEKMEPISILYLXXXXXXXXXKFKYENMTVESXAXR

SEQ ID NO: 66472 - protein, 37 aa, Artificial Sequence; identical to SEQ ID NO: 7523
  GFR-binding peptide
  MOD_RES (1)..(2)..(36): Xaa is C or S
  MOD_RES (16)..(17)..(18)..(19)..(20): Xaa is A or G
  MOD_RES (21)..(22)..(23)..(24): Xaa is A or G or is absent

SEQ ID NO: 66473 - protein, 34 aa, Artificial Sequence
  GFR-binding peptide
  MOD_RES (33)..(33): Xaa is C or S
  MOD_RES (14)..(15)..(16)..(17)..(18): Xaa is A or G
  MOD_RES (19)..(20)..(21)..(22): Xaa is A or G or is absent
VPQDLSPINILYFXXXXXXXXXYGKIPMVVKSXK

SEQ ID NO: 66474 - protein, 39 aa, Artificial Sequence
  GFR-binding peptide
  MOD_RES (5)..(6): Xaa is C or S
  MOD_RES (20)..(21)..(22)..(23)..(24): Xaa is A or G
  MOD_RES (25)..(26)..(27)..(28): Xaa is A or G or is absent
SAGPXXTPTKMSPISMLYKXXXXXXXXXLKYHYGMVVDR

SEQ ID NO: 66475 - protein, 38 aa, Artificial Sequence
  GFR-binding peptide
  MOD_RES (1)..(2)..(35)..(37): Xaa is C or S
  MOD_RES (16)..(17)..(18)..(19)..(20): Xaa is A or G
  MOD_RES (21)..(22)..(23)..(24): Xaa is A or G or is absent
XXVSQDLSPINILYFXXXXXXXXXYGKIPMIVKSXKXS

SEQ ID NO: 66476 - protein, 37 aa, Artificial Sequence; identical to SEQ ID NO: 7525
  GFR-binding peptide
  MOD_RES (7)..(7): Xaa is C or S

SEQ ID NO: 66477 - protein, 33 aa, Artificial Sequence; identical to SEQ ID NO: 7526
  GFR-binding peptide
  MOD_RES (33)..(33): Xaa is C or S

SEQ ID NO: 66478 - protein, 38 aa, Artificial Sequence; identical to SEQ ID NO: 32829
  GFR-binding peptide
  MOD_RES (2)..(3)..(37): Xaa is C or S
  MOD_RES (17)..(18)..(19)..(20)..(21): Xaa is A or G
  MOD_RES (22)..(23)..(24)..(25): Xaa is A or G or is absent

SEQ ID NO: 66479 - protein, 37 aa, Artificial Sequence; identical to SEQ ID NO: 7528
  GFR-binding peptide
  MOD_RES (2)..(3): Xaa is C or S
  MOD_RES (17)..(18)..(19)..(20)..(21): Xaa is A or G
  MOD_RES (22)..(23)..(24)..(25): Xaa is A or G or is absent

SEQ ID NO: 66480 - protein, 41 aa, Artificial Sequence
  GFR-binding peptide
  MOD_RES (3)..(4)..(38)..(40): Xaa is C or S
  MOD_RES (18)..(19)..(20)..(21)..(22): Xaa is A or G
  MOD_RES (23)..(24)..(25)..(26): Xaa is A or G or is absent
EPXXVPEKMSATSILYYXXXXXXXXXLRKHRNMTVESXAXR

SEQ ID NO: 66481 - protein, 32 aa, Artificial Sequence; identical to SEQ ID NO: 28765
  GFR-binding peptide
  MOD_RES (1)..(2): Xaa is C or S

SEQ ID NO: 66482 - protein, 39 aa, Artificial Sequence; identical to SEQ ID NO: 32836
  GFR-binding peptide
  MOD_RES (2)..(3)..(37)..(39): Xaa is C or S
  MOD_RES (17)..(18)..(19)..(20)..(21): Xaa is A or G
  MOD_RES (22)..(23)..(24)..(25): Xaa is A or G or is absent

SEQ ID NO: 66483 - protein, 33 aa, Artificial Sequence; identical to SEQ ID NO: 28774
  GFR-binding peptide
  MOD_RES (33)..(33): Xaa is C or S

SEQ ID NO: 66484 - protein, 34 aa, Artificial Sequence
  GFR-binding peptide
  MOD_RES (3)..(4): Xaa is C or S
GPXXTPTKMSPISMLYKNDKQQIILKYHYGMVVD

SEQ ID NO: 66485 - protein, 34 aa, Artificial Sequence
  GFR-binding peptide
  MOD_RES (1)..(33): Xaa is C or S
XVPTKLSATSILYYDKGVVTYLRKHRGMAVSEXG

SEQ ID NO: 66486 - protein, 35 aa, Artificial Sequence
  GFR-binding peptide
  MOD_RES (1)..(34): Xaa is C or S
  MOD_RES (15)..(16)..(17)..(18)..(19): Xaa is A or G
  MOD_RES (20)..(21)..(22)..(23): Xaa is A or G or is absent
XAPVKTSATSMLYYXXXXXXXXXLRKHRMIVEEXG

SEQ ID NO: 66487 - protein, 42 aa, Artificial Sequence; identical to SEQ ID NO: 32847
  GFR-binding peptide
  MOD_RES (5)..(6)..(40)..(42): Xaa is C or S
  MOD_RES (20)..(21)..(22)..(23)..(24): Xaa is A or G
  MOD_RES (25)..(26)..(27)..(28): Xaa is A or G or is absent

SEQ ID NO: 66488 - protein, 35 aa, Artificial Sequence; identical to SEQ ID NO: 32848
  GFR-binding peptide
  MOD_RES (1)..(35): Xaa is C or S
  MOD_RES (15)..(16)..(17)..(18)..(19): Xaa is A or G
  MOD_RES (20)..(21)..(22)..(23): Xaa is A or G or is absent

SEQ ID NO: 66489 - protein, 34 aa, Artificial Sequence; identical to SEQ ID NO: 7541
  GFR-binding peptide
  MOD_RES (32)..(34): Xaa is C or S

SEQ ID NO: 66490 - protein, 36 aa, Artificial Sequence; identical to SEQ ID NO: 32849
  GFR-binding peptide
  MOD_RES (2)..(3)..(35): Xaa is C or S

SEQ ID NO: 66491 - protein, 35 aa, Artificial Sequence
  GFR-binding peptide
  MOD_RES (34)..(34): Xaa is C or S
  MOD_RES (14)..(15)..(16)..(17)..(18): Xaa is A or G
  MOD_RES (19)..(20)..(21)..(22): Xaa is A or G or is absent
TPTKMEPISMLYLXXXXXXXXXKFKYEGMVVDRXG

SEQ ID NO: 66492 - protein, 35 aa, Artificial Sequence; identical to SEQ ID NO: 28782
  GFR-binding peptide
  MOD_RES (2)..(3)..(35): Xaa is C or S

SEQ ID NO: 66493 - protein, 37 aa, Artificial Sequence; identical to SEQ ID NO: 28783
  GFR-binding peptide
  MOD_RES (3)..(4): Xaa is C or S
  MOD_RES (18)..(19)..(20)..(21)..(22): Xaa is A or G
  MOD_RES (23)..(24)..(25)..(26): Xaa is A or G or is absent

SEQ ID NO: 66494 - protein, 34 aa, Artificial Sequence; identical to SEQ ID NO: 57755
  GFR-binding peptide
  MOD_RES (32)..(34): Xaa is C or S

SEQ ID NO: 66495 - protein, 38 aa, Artificial Sequence; identical to SEQ ID NO: 7546
  GFR-binding peptide
  MOD_RES (1)..(35)..(37): Xaa is C or S
  MOD_RES (15)..(16)..(17)..(18)..(19): Xaa is A or G
  MOD_RES (20)..(21)..(22)..(23): Xaa is A or G or is absent

SEQ ID NO: 66496 - protein, 37 aa, Artificial Sequence; identical to SEQ ID NO: 7549
  GFR-binding peptide
  MOD_RES (6)..(7): Xaa is C or S

SEQ ID NO: 66497 - protein, 37 aa, Artificial Sequence; identical to SEQ ID NO: 7556
  GFR-binding peptide
  MOD_RES (4)..(5): Xaa is C or S
  MOD_RES (19)..(20)..(21)..(22)..(23): Xaa is A or G
  MOD_RES (24)..(25)..(26)..(27): Xaa is A or G or is absent

SEQ ID NO: 66498 - protein, 40 aa, Artificial Sequence; identical to SEQ ID NO: 7557
  GFR-binding peptide
  MOD_RES (5)..(6): Xaa is C or S
  MOD_RES (20)..(21)..(22)..(23)..(24): Xaa is A or G
  MOD_RES (25)..(26)..(27)..(28): Xaa is A or G or is absent

SEQ ID NO: 66499 - protein, 38 aa, Artificial Sequence; identical to SEQ ID NO: 7560
  GFR-binding peptide
  MOD_RES (3)..(4)..(37): Xaa is C or S
  MOD_RES (18)..(19)..(20)..(21)..(22): Xaa is A or G
  MOD_RES (23)..(24)..(25)..(26): Xaa is A or G or is absent

SEQ ID NO: 66500 - protein, 38 aa, Artificial Sequence; identical to SEQ ID NO: 7561
  GFR-binding peptide
  MOD_RES (4)..(5)..(37): Xaa is C or S

SEQ ID NO: 66501 - protein, 40 aa, Artificial Sequence; identical to SEQ ID NO: 7563
  GFR-binding peptide
  MOD_RES (5)..(6)..(38)..(40): Xaa is C or S

SEQ ID NO: 66502 - protein, 38 aa, Artificial Sequence
  GFR-binding peptide
  MOD_RES (4)..(5): Xaa is C or S
  MOD_RES (19)..(20)..(21)..(22)..(23): Xaa is A or G
  MOD_RES (24)..(25)..(26)..(27): Xaa is A or G or is absent
PPTXXVPTRLSATSILYYXXXXXXXXXLRKHRDMVVES

SEQ ID NO: 66503 - protein, 33 aa, Artificial Sequence; identical to SEQ ID NO: 28802
  GFR-binding peptide
  MOD_RES (2)..(3): Xaa is C or S

SEQ ID NO: 66504 - protein, 32 aa, Artificial Sequence; identical to SEQ ID NO: 28806
  GFR-binding peptide
  MOD_RES (14)..(15)..(16)..(17)..(18): Xaa is A or G
  MOD_RES (19)..(20)..(21)..(22): Xaa is A or G or is absent

SEQ ID NO: 66505 - protein, 41 aa, Artificial Sequence; identical to SEQ ID NO: 7570
  GFR-binding peptide
  MOD_RES (5)..(6)..(38)..(40): Xaa is C or S

SEQ ID NO: 66506 - protein, 36 aa, Artificial Sequence; identical to SEQ ID NO: 7572
  GFR-binding peptide
  MOD_RES (34)..(36): Xaa is C or S
  MOD_RES (14)..(15)..(16)..(17)..(18): Xaa is A or G
  MOD_RES (19)..(20)..(21)..(22): Xaa is A or G or is absent

SEQ ID NO: 66507 - protein, 38 aa, Artificial Sequence; identical to SEQ ID NO: 57790
  GFR-binding peptide
  MOD_RES (2)..(3)..(36)..(38): Xaa is C or S
  MOD_RES (17)..(18)..(19)..(20)..(21): Xaa is A or G
  MOD_RES (22)..(23)..(24)..(25): Xaa is A or G or is absent

SEQ ID NO: 66508 - protein, 35 aa, Artificial Sequence; identical to SEQ ID NO: 7573
  GFR-binding peptide
  MOD_RES (1)..(33)..(35): Xaa is C or S

SEQ ID NO: 66509 - protein, 40 aa, Artificial Sequence; identical to SEQ ID NO: 14884
  GFR-binding peptide
  MOD_RES (5)..(6)..(40): Xaa is C or S
  MOD_RES (20)..(21)..(22)..(23)..(24): Xaa is A or G
  MOD_RES (25)..(26)..(27)..(28): Xaa is A or G or is absent

SEQ ID NO: 66510 - protein, 41 aa, Artificial Sequence; identical to SEQ ID NO: 32874
  GFR-binding peptide
  MOD_RES (6)..(38)..(40): Xaa is C or S

SEQ ID NO: 66511 - protein, 33 aa, Artificial Sequence; identical to SEQ ID NO: 28815
  GFR-binding peptide
  MOD_RES (1)..(1): Xaa is C or S
  MOD_RES (15)..(16)..(17)..(18)..(19): Xaa is A or G
  MOD_RES (20)..(21)..(22)..(23): Xaa is A or G or is absent

SEQ ID NO: 66512 - protein, 33 aa, Artificial Sequence
  GFR-binding peptide
  MOD_RES (1)..(1): Xaa is C or S
  MOD_RES (15)..(16)..(17)..(18)..(19): Xaa is A or G
  MOD_RES (20)..(21)..(22)..(23): Xaa is A or G or is absent
XVPEKMNAISILYFXXXXXXXXXLKKYRNMTVE

SEQ ID NO: 66513 - protein, 37 aa, Artificial Sequence; identical to SEQ ID NO: 7576
  GFR-binding peptide
  MOD_RES (2)..(3)..(35)..(37): Xaa is C or S

SEQ ID NO: 66514 - protein, 33 aa, Artificial Sequence
  GFR-binding peptide
  MOD_RES (1)..(2): Xaa is C or S
XXTPTKMSPISMLYKNDKQQIILKYHYGMVVDR

SEQ ID NO: 66515 - protein, 38 aa, Artificial Sequence; identical to SEQ ID NO: 7578
  GFR-binding peptide
  MOD_RES (5)..(6): Xaa is C or S
  MOD_RES (20)..(21)..(22)..(23)..(24): Xaa is A or G
  MOD_RES (25)..(26)..(27)..(28): Xaa is A or G or is absent

SEQ ID NO: 66516 - protein, 37 aa, Artificial Sequence; identical to SEQ ID NO: 28818
  GFR-binding peptide
  MOD_RES (2)..(3)..(35)..(37): Xaa is C or S

SEQ ID NO: 66517 - protein, 38 aa, Artificial Sequence
  GFR-binding peptide
  MOD_RES (1)..(35)..(37): Xaa is C or S
  MOD_RES (15)..(16)..(17)..(18)..(19): Xaa is A or G
  MOD_RES (20)..(21)..(22)..(23): Xaa is A or G or is absent
XVPTRLEPISILYLXXXXXXXXXKFKYEDMVVESXGXR

SEQ ID NO: 66518 - protein, 43 aa, Artificial Sequence; identical to SEQ ID NO: 7581
  GFR-binding peptide
  MOD_RES (6)..(7)..(41)..(43): Xaa is C or S
  MOD_RES (21)..(22)..(23)..(24)..(25): Xaa is A or G
  MOD_RES (26)..(27)..(28)..(29): Xaa is A or G or is absent

SEQ ID NO: 66519 - protein, 32 aa, Artificial Sequence; identical to SEQ ID NO: 32881
  GFR-binding peptide
  MOD_RES (32)..(32): Xaa is C or S
